United States Patent Application Publication US 2012/0159664 A1 - sequence listing, part 2

SEQ ID NO: 5022 - protein, 481 aa, Nostoc punctiforme PCC 73102
MSDLILFWHRRDLRISDNTGLAAAKRRSPKVVGVFCLDPHILERDDVAPVRVTYMIGCLQKLQERYAQVGSQLLILHADPVQAIPALAEAINAKAVFWNWDVEPYSQERDRTIINALKEKGIEFLNQNWDQILNSPDEIRTGGNSPYTVYTPFWKNWITKPKANPVETLQNVEGLTEAEQEIAKLSGSLTLPSAKDLGFIWDEQLIISPGEAAAQERLEEFTNKAITEYQEQRNFPAVDGTSQLSAALKFGVIGIRTVWQATIEALENSRSEETAVNIRTWQQELAWREFYQHAMYNFPELADGAFRDTFKNFPWETNEEHFQAWCEGRTGYPIVDAAMRQMNESGWMHNRCRMIVASFLTKDLLINPQLGEKYFMKHLIDGDLSANNGGWQWSASSGMDPKPVRIFNPASQTQKFDPEGEYIRQWVSELRSVDTEYLVTGKIPPLERHAVGYPDPIVDHKIQQNQFKLRYQQQKNTSGGE

SEQ ID NO: 5023 - protein, 404 aa, Magnaporthe grisea 70-15
MVLNKVDLLPTSVVASWIRVLSKEYPTAAFRSSITNPFGKGSLLGLLRQFSGLLSNRKQVSVGIIGYPNTGKSSLINALRGKKVATVAPIPGETKVWQYITLTKRMYLIDCPGIVPPSNDASPQDLLLRGAVRTEKVENPEQYIPAVLAKTKLRHMERTYDLSGWKDHIHFLELLARKGGRLLKAGEPDVDGVARMVLNDFLRGKIPWFTPPPALEGDAEGVDGREGRLGEMPLKRKRDDAESVADTSMGAPSPTSDDSEDDEVSGDDEFEGFGSDSAPDATPSESEKASVAEQYIQLEASSEDDSDDDAAEDGGVAITGVGGGDDDAEPPKSLSSRNSKPSRQQRKGLHKLVKARVVSTVTFAVPLSDEGMFWPSNPMENPSSGSAIIIHSCGSLLNNAEKGT

SEQ ID NO: 5024 - protein, 359 aa, Fragaria x ananassa
MAIEQEHRKKASGWAARDSSGVLSPFNFYRRETGEKDVTFKVLYCGICHSDLHMVKNEWGFSTYPLVPGHEIVGEVTEVGSKVQKFKVGDRVGVGCIVGSCRSCENCTDHLENYCPKQILTYGAKYYDGSTTYGGYSDIMVADEHFIVRIPDNLPLDGAAPLLCAGITTYSPLRYFGLDKPGMHVGVVGLGGLGHVAVKFAKAMGVKVTVISTSPKKEEEALKHLGADSFLVSRDQDQMQAAIGTMDGIIDTVSAQHPLLPLIGLLNSHGKLVMVGAPEKPLELPVFPLLMGRKMVAGSGIGGMKETQEMIDFAARHNITADIEVIPIDYLNTAMERLVKADVRYRFVIDIGNTLKVRS

SEQ ID NO: 5025 - protein, 327 aa, Chlamydomonas reinhardtii
MQSARVSRTARHTRPSCRPQRAVAVRVSAKVNVEQLKALKAELYNYINSRGCNPISVRLGWHDSGTYDKNIAEFPARGGANGSIRFKPEIDHGANKGLAIALAILNPIKKKYPDVSYADLFQMASATAIEASGGPKIPMRYGRKDAKGPEECSPDGRLPGAAHPFADGSGSPAEHLRRVFYRMGLNDQDIVVLSGGHTLGRARPERSGFGAEKTKYTDVGPGTSTASPSGATDRPVTPKPVGQQGTSWTVNWLEFDNSYFKEIKAKRDSDLLVLPTDACIFEDDQFRPYAEKYAADQAAFFADYCVSHQKLSELGVEWEEGAPVTLD

SEQ ID NO: 5026 - protein, 109 aa, Zea mays
YVTTGVEGSIPVLIKSVSSPMVASARHFQGNWIDTAEEIDDLFLGDAEVWRRPSFGTAGPLGGDHPLVTKEGHHVLDVIFTTPIQDLGQVAEKLDKVDGVVDHGIICSN

SEQ ID NO: 5027 - protein, 581 aa, Glycine max
MCGILAVLGCSDDSRAKRVRVLELSRRLKHRGPDWSGLHQHGDCFLAHQRLAIVDPASGDQPLFNEDKSVIVTVNGEIYNHEELRKQLPNHNFRTGSDCDVIAHLYEEHGEDFVDMLDGIFSFVLLDTRDNSFIVARDAIGVTSLYIGWGLDGSVWISSEMKGLNDDCEHFECFPPGHLYSSKERGFRRWYNPPWFSEAIPSAPYDPLVLRHAFEQAVIKRLMTDVPFGVLLSGGLDSSLVASITSRYLANTKAAEQWGSKLHSFCVGLEGSPDLKAAKEVADYLGTVHHEFTFTVQDGIDAIEDVIYHIETYDVTTIRASTPMFLMSRKIKSLGVKWVISGEGSDEIFGGYLYFHKAPNKEEFHRETCRKIKALHQYDCLRANKSTFAWGLEARVPFLDKAFINAAMSIDPEWKMIKRDEGRIEKWILRRAFDDEEHPYLPKHILYRQKEQFSDGVGYSWIDGLKAHAAKHVTEKMMLNAGNIYPHNTPKTKEAYYYRMIFERFFPQNSARLTVPGGASVACSTAKAVEWDAAWSNNLDPSGRAALGVHISAYENQNNKGVEIEKIIPMDAAPLGVAIQG

SEQ ID NO: 5028 - protein, 323 aa, Pirellula sp. 1
MTLHPQAQTFVALLRELQPPRWEDLGVAKARRGFSALVDNFGAGPAMASVEDQVVEEQNCDGQVSRIPVRIYRPDDVSELAPVVMFFHGGGWVLGDVESHDTTCRRLAAASRAAVVSVEYRRSPESPFPGPVHDCFVATKAVAKNGISWGLDASRLAVMGDSAGGNLAAAVALLAKDDPDVAVKYAVLVYPVVSPAFDSESYREFESGFGLTKRTMQWFWGNYFGRAGEDFFGVDRVSDADPLADLMKADFSDFPPAHVLVAGYDVLRDEGLALADKIEASGGDVTRENASDMLHGFIHFAGQFETGVTAMQSLGNRIANQLS

SEQ ID NO: 5029 - protein, 110 aa, Zea mays
AVDKAQPNPRLCFLLRAALHLHWLLLVTSKNNKALQMSVQDANMSSDTDMSKVFEDRTFVSSILNSFPGVDPNDPSVKDLLASLHSQKEEEKKEDKSDKTEDEKNCFKLE

SEQ ID NO: 5030 - protein, 145 aa, Glycine max
VAEKYPEITYEEVIIDNCCMTLVKNPGTFDVLVMPNLYGDIISDLCAGLIGGLGLTPSCNIGEGGICLAEAVHGSAPDISGKNLANPTALMLSAVMMLRHLQFNDQADRIHNAILQTIAEGKYRTADLGGKSSTSDYTKAVCDHI

SEQ ID NO: 5031 - protein, 176 aa, Triticum aestivum
  unsure (1)..(176): unsure at all Xaa locations
MAPTVMASSATSVVPYQGLKSTAGLPVSRRSNGASLGSVSNGGRIRCMQVWPIEGIKKLETLSYLPPLSTEALLKQVEYLIRSKWVPCLEFSKVGFIFREHNTSPGYYDGRYWTMWKLPMYGCTDSTQVINEVEEVMKEYPDAYVRIIGFDNMRQVQCVSFIAXFKPPGCEESGKA

SEQ ID NO: 5032 - protein, 213 aa, Escherichia coli
YICLRPVRYYQGTPSPVKHPELTDMVIFRENSEDIYAGIEWKADSADAEKVIKFLREEMGVKKIRFPEHCGIGIKPCSEEGTKRLVRAAIEYAIANDRDSVTLVHKGNIMKFTEGAFKYWGYQLAREEFGGELIDGGPWLKVKKPNTGKEIVIKDVIADAFLQQILLRPAEYDVIACMNLNGDYISDALAAQVGGIGIAPGANIGDECALFEA

SEQ ID NO: 5033 - protein, 493 aa, Streptococcus pyogenes
MNNKMFLNKEAGFLAHTKRKRRFAVTLVGVFFMLLVCAGAIGFGQVAYAADEKTVPNRINSNPEFPWYGYDSYSGRLLRYHNLKVNLNGSKEYQAYCFNLKRFEPKKEESSSPNWYKKLDGSTETFKKYAENPRFSGEELRRHILKVLYNGYPNSNEIMKGIDPLNAILVTQNAIWYYSDSAPINDINNFFTSEANDLNIPPQQLTLMREALRKLISSDENLVKQVPSNFKLSIFESSDKSYQNLLSAEYVPDDPPKPGDTSEHNPKTPELDGTPIPEDPKRPDESSEPALPPLMPELDGEEVPEVPSESLEPALPPLMPELDGEEVPEVPSESLEPALPPLMPELDGEEVPEVPNESLEPALPPLMPELDGQEVPEVPSESLEPALPPLMPELDGEEIPEVPSESLEPALPPLMPELDGQEVPEKPSVDLPIEVPRYEFNNKDQSPLAGESGETEYITEVYGNQQNPVDIDKKLPNETGFSGNMVETEDTKE

SEQ ID NO: 5034 - protein, 207 aa, Escherichia coli
DLYICLRPVRYYQGTPSPVKHPELTDMVIFRENSEDIYAGIEWKADSADAEKVIKFLREEMGVKKIRFPEHCGIGIKPCSEEGTKRLVRAAIEYAIANDRDSVTLVHKGNIMKFTEGAFKDWGYQLAREEFGGELIDGGPWLKVKNPNTGKEIVIKDVIADAFLQQILLRPAEYDVIACMNLNGDYISDALAAQVGGIGIAPGANIG

SEQ ID NO: 5035 - protein, 390 aa, Streptococcus pyogenes
YAADEKTVPNRINSNPEFPWYGYDSYSGRLLRYHNLKVNLNGSKEYQAYCFNLKRFEPKKEESSSPNWYKKLDGSTETFKKYAENPRFSGEELRRHILKVLYNGYPNSNEIMKGIDPLNAILVTQNAIWYYSDSAPINDINNFFTSEANDLNIPPQQLTLMREALRKLISSDENLVKQVPSNFKLSIFESSDKSYQNLLSAEYVPDDPPKPGDTSEHNPKTPELDGTPIPEDPKRPDESSEPALPPLMPELDGEEVPEVPSESLEPALPPLMPELDGEEVPEVPSESLEPALPPLMPELDGEEVPEVPNESLEPALPPLMPELDGQEVPEVPSESLEPALPPLMPELDGEEIPEVPSESLEPALPPLMPELDGQEVPEKPSVDLPIEVPR

SEQ ID NO: 5036 - protein, 319 aa, Candida albicans SC5314
MSNLTSSIQLTRQSTYKLNNGSHIPVIGFGTYLLDASQAADLTYQALKDGYRHIDTALAYHNEKEVSQGIKRFLKDHPEVQRSDIWFTTKIDTQSLGYEETKKAVERIKNDVKDNIEYVDLILIHSPLASKARRLGTYQYLQELVLNPNDAPLIVKSIGVSNYGVDHLEELFNWEGYLIKPVLNQLELHPWLPRLELREYLYKHEILAEAYSPLTQGYKLDDPELLAISKESGLTPAEILLKWSFLQGFIVLVKSDKPTRIQQNLDILPQGKKDDDELQEGVNLGVVSLNPDIIEKLNKPESHVVLTWGGKDPTLFKDA

SEQ ID NO: 5037 - protein, 144 aa, Triticum aestivum
  unsure (1)..(144): unsure at all Xaa locations
MAPTVMASSATSVAPFQGLKSTAGLPVSRRSNGASLGSVSNGGRIRCMQVWPIEGIKKFETLSYLPPLSTEALLKQVDYLIRSKWVPCLXVQQVGFIFREHNASPGYYEGRYWXMWKLPKFGVTDAXQVINKVEEARRIPDRFR

SEQ ID NO: 5038 - protein, 201 aa, Glycine max
  unsure (1)..(201): unsure at all Xaa locations
ILEANKKCDVTVYTKIFLKFPYQFWPSDPGNEFFIYAHDQRGYYTFWQXMENAYPGSDILVVTLTNGESKRVEAQSDEDTLREAMEVLKDMFGPNIPDATDILVPRWWNNRFQRGSYSNYPVISNLQVVRDVKAPVGRIFFTGEHTSERFSGYVHGAYLAGINSSKELLEEMRKDNKRKNKSQSRVLEPLSALTECNIPRQ

SEQ ID NO: 5039 - protein, 458 aa, Pseudomonas fluorescens
MTTTSSSLADKDMRHQLHPYTNARAHEELGPLVIDRGDGVFVIDENGKPYIEAMAGLWSAALGFSNKRLVAAAEKQMSTLPFYHLFGHKAHAPSIELAEKLINMAPVPMSKVFFTNSGSEANDTVIKLVWYLNNAQGKPARKKIISRIGGYHGITLASASLTGLLANQRGFDVPLPGFLHVGCPHHYRHALPHETEEQFADRLAAELDALIVKEGPETIAAFVGEPLMGPGGVIVPPRTYWEKIQRVCRKHDILVVADEVICGFGRTGKDVRQPDFGIEPDIMILSKQLSSSYQPISAILINDRVYQGIADQTKSFGALGHGFTGGGHPVAAAVRLENLKIIDEENLVVHAAHMGELLRRGLQGFSDHPLVGEVRGAGLIAAVELVADRATKAPLDAPGTLGRFLAGRAQEHGMITRNLGDAIAFCPPLIINEDEDEVQSIVDRFGMALDDTSKWVNG

SEQ ID NO: 5040 - protein, 218 aa, Escherichia coli
ELDLYICLRPVRYYQGTPSPVKHPELTDMVIFRENSEDIYAGIEWKADSADAEKVIKFLREEMGVKKIRFPEHCGIGIKPCSEEGTKRLVRAAIEYAIANDRDSVTLVHKGNIMKFTEGAFKDWGYQLAREEFGGELIDGGPWLKVKNPNTGKEIVIKDVIADAFLQQILLRPAEYDVIACMNLNGDYISDALAAQVGGIGIAPGANIGDECALFEAT

SEQ ID NO: 5041 - protein, 135 aa, Brassica napus
  unsure (1)..(135): unsure at all Xaa locations
NIIAGSLTYYTRKHLPGLKRRRGGPEASGRFSSSGNVLSEEEQKHLLEEIQDLLSMQKGLVPTKVFVDMLRVAKILKASPTCIANLEKRIGMQLDQAGVEDLVMPSFTHTMETLYDVDSVQRIFDHXLGTDQIMT

SEQ ID NO: 5042 - protein, 332 aa, GIBBERELLA ZEAE PH-1
MSNQPPYPLHESVVGRIDPEYAAFYNKHIIDKQQVHLQPIEASRASGVLIPGSGPLQPVASTVDYKVERRESQGPDVSVRCFTPNGEKPEAGWPVCIYYHGGGWVLGTIETENVIASHLCARGKCVVVSVDYRLAPENPFPAAVHDSWEAVLWVIGEGKDILGLDTSKLATGGSSAGANLAAVMCQRAADLGSPQFSLQLLSVPVMDNTADISNNESWKENQNSPALPAPKMLWYRNHYLPNKEDWSHPEASPLFWKGDFSKLPPACFVVGELDVLRTEGEQFAKKLVDAGVKAEVNMMKGQPHPFIAMDAVLEAGSRAITLFCDALYKTIK

SEQ ID NO: 5043 - protein, 297 aa, Candida albicans SC5314
MAQELTHPAIKDGWFAEISDTMWPGQAMSLKVEKVLHVEKSKYQDVLVFKSTTYGNVLVLDNCIQVTERDEFSYQEMITHLALNSHPNPKKALVIGGGDGGVLREILKHESIEEAWLCDIDETVIEVSKKYLPNMAKSYDDPRTRVHIGDGFKFLEEYKNQFDVIITDSSDPEGPAESLFQKPYFQLLKDALTEKGVITTQAENMWIHMDIISKLKKDCNEIFPVAEYAYTMIPTYPSGSIGFMVCSKDPNANVSKPIRFDWSDEFVAKNLKYYNKKIHEAAFVLPTWADQVLNKKD

SEQ ID NO: 5044 - protein, 324 aa, Glycine max
TRLIDCVSFCHNKGVFHRDLKLENVLVDAKGNIKITDFNLSALPQHFREDGLLHTTCGSPNYVAPEILANKGYDGATSDIWSCGVILYVILTGYLPFDDRNLAVLYQKIFKGEVQIPRWLSPGSQNIIKRMLDANPKTRITMAMIKEFGSSKEGYTPANPEDEEESVYIDDEDFSIHDVSHEADQGCPRSPTLINAFQLISMSSSLDLSGLFEQEDVSERKIRFTSIHSPKDLVERIEDIVTEMGFRVQKKNGMLKVIQEIKVQKCPGSFSVEAEVFEISPSLYVVELSKSCGDASLYRQLCKKLSNDLGVHTRQQLGSSEVMA

SEQ ID NO: 5045 - protein, 413 aa, Dechloromonas aromatica RCB
MTSHIKVPQGGSKIVPGQAIPDNPIIPFIEGDGIGIDITPVMIKVIDAAVEKAYGGKKKIHWMEVYAGEKSTRLYGSDEWLPKETFDALKEYSVSIKGPMTTPVGGGIRSLNVALRQELDLYQCVRPVRYFKGVPSPLKHPELTNMVIFRENTEDIYAGIEWACGSEGVKKVVKFLQEEMGVKKIRFPETSGIGIKPISIEGTSRLVRAAIKYAIDNDRKSVTIVHKGNIMKFTEGLFRDACYKLAQDEFGAELIDGGPWCRIKNPKNGREIIIKDSIADAFLQQILLRPAEYDVIATTNLNGDYISDALAAQVGGIGIAPGANISDRYACFEATHGTAPKYAGLDKVNPGSLILSAEMMLRHLGWGDAANLVLKAMEAAIGDKQVTYDFARQMEGANELSCSEFGDAMIARM

SEQ ID NO: 5046 - protein, 387 aa, Ustilago maydis 521
MPGKVAPNNSLATEPAERNVSFVLQEIEKVSFEERPIVAPKPGQVQVNIRQTGLCASDCHYLHHGRIGDFVVRKPMVLGHESSGIVTAVGEGVTTHKVGDRVALEPGVPCRSCQVCLNGMYNQCAHLEFAATPPYDGTLCTYYNIQSSFAHHVPDHMSLEEASLMEPLSVAVYSAGMRGQVKAMENVLVFGAGPIGLLNAAVCKAYSAKRVVVVDVVESKLEFAKEWCATSTFKPSLPQEGETKAETAARNAQHLISSLGDDVAAREGFDLVLECTGAEPCINMGIQALRPQGRFVQVGMGRSEVEFPITRVCVKEINVTGSFRYGAGTYKTSINLVSTGAIDVTKMVTHRFLFKDAVKAFETTTKGVGEDGKTAIKVQISQGEGKQ

SEQ ID NO: 5047 - protein, 165 aa, Pseudomonas putida KT2440
MAPGQAPCRFRQIGRLSANRQFSIRPRACFSLESWRRVTALCLHGSQQFVTWASSRDLLQPVRRLLLPATQPSNLSLTKKCESNCHQNLSFIGNKTMAERQKGTVKWFNDEKGYGFITPESGPDLFVHFRAIEGNGFKSLKEGQQVTFEAVQGQKGMQADKVQPV

SEQ ID NO: 5048 - protein, 343 aa, Triticum aestivum
  unsure (1)..(343): unsure at all Xaa locations
MASGIASMSSSLAVLLLGVLLLSRGGVGNAARHLAEAEYPPVPPNVPAPLPKPDVPPPLPAPEVLPKPGLPVLPPPLAKPNVTTYPAAAEVLPKPGLPPLPTPEEQPKPELAPLPAPDVLPAPPLPAPDVLPKPELPTPDEXPRPELPPLPKPERXPPTVPEVPKPDVEPKSGXPPVPKGELPPKTVPPPLPTGEIPPKPVPPPFPTGELPPKPEPELLPKTDEPPKPELPPLPTDDLPSRPDVELPPKPELPPLPTDDLPSKPAQPPRRXPPKPNHPPPPPPTPPRKGDYPLEPYVQLSEPPCMPNIRASFPAPPLAGVPGPSMARVPASPRIRDLFVLRTC

SEQ ID NO: 5049 - protein, 128 aa, Triticum aestivum
MGARGHWTWTEGVEKRICALQTHRPKVGRIEAMASRLLAAASSSSSSSSPLARLISSRRMAGAADHHGSTKVNMWQEPLNPGNWKEEHFVLTSLAMWGAIIYGGLKVFGGKKEVKTEAGSAPAAAPAH

SEQ ID NO: 5050 - protein, 473 aa, Zea mays
  unsure (1)..(473): unsure at all Xaa locations
MDERRTILMDRYEIGRQLGQGNFAKVYFARNLTDGQSVAIKMIDKDKITRVGLIVQIKREISIMRLVKHPNVLQLFEVMASKSKIYFVLEYAKGGELFNKVSKAKLSEDAARRYFHQLVNAVDYCHSRGVYHRDLKPENLLLDENENLRVSDFGLSALSESRRHDGLLHTTCGTPAYVAPEVLGRRGYDGTKADIWSCGVILFVLVAGYLPFHDPNLIEMYRKISRAEYRCPRSFSGELKDLLFRMLDPDPSTRISISRIKRSTWYRKPIEANAAKIKHGTARDTTVRDGEAATASSSIECSNRAEEDQGSSSLPNLNAFDIISLSTGFDLSNLFEERHGRREERFTTRQPVGAVFGRLKELAEAVEAEKFQKEREAGSLNLACAEGKGLKGVPWKLDAEVFELAPSFLLVELKKASRDTIEYQRLXVREEVRPALKDMVWAWQSDRHQQQQQREQSVQGEQQQPLSSLPPQQ

SEQ ID NO: 5051 - protein, 313 aa, Brassica napus
  unsure (1)..(313): unsure at all Xaa locations
GVLPYTTKNVEDDYFLGQILGQGQFGTTFLCTHKKTAQKLACKSIPKRKLLCQEDYDDVLREIQIMHHLSEFPNVVRIRTRXEDTSSVHIVMELCEGGELFDRIVKRGHYSEREAAKLIKTIVGVVEACHSLGVMHRDLKPENFLFASCDEDASLKSTDFGLSVFCKPGATFSELVGSAYYVAPEVLHKHYSRECDVWSAGVILYILLCGFPPFWDESEFGIFRKILQGKIDFETRPWPSISESAKDLIVKMLEKDPKKRLTAHQVLCHPWIGDDKGAPDKPLDCAVLSRLKNFSAMDKLKKMAFRVIAERLS

SEQ ID NO: 5052 - protein, 2100 aa, Zea mays
  unsure (1)..(2100): unsure at all Xaa locations
MTRVIHDSGDDMQKEALDLVSSDVNFPKGHFPDYRIGPNNQIIDPEETHEAVPLKEIVAKETAQLLEQHKRLSVRDLKEKFEKGLSGASKLSEEAKRREAASLDRQVLLKKLRDVLDTLKGRVAGRNRDDAEEAISLVEALAVQLTQREGELIYEKAEVKKLANFLKQATEDARKVAEEERALALAEIEKARAAIEKVEKAWRVHDFASSSREKAEIEELRKEVREARRIKMLHQPSKVMDMEFELQALRTLISEKTQLCNQLKKELAMIKRLEDDSSGLFELEGSNTLGSQLCIIPRVDGASNITNCPIQWYRVISGGTRELISGATKFMYAPEPFDVGRLLQAEIVLNADKIIVQTDGPVDNVLSEPTLAVSRAVMWGRTYMRARDARRAEARAFKVGANSNSPKEGSSKESGNSSTKEAMGDSNDFKAFAEALKSLQACVVANAQAIASLTADRTSASGHKIGYDEHHGDRPPRFQKLDFPRYDGKTDPLIFINRCESYFHQQRIMEEEKVWMASYNLEHGAHMWYIQVQTDEGTPSWRRFKELLNLRYDPPLRAAPLFELADCRRTGSVADYRDLFQALLPRAGPLDEAQWVQLFTGGLRPPLSLDVQRYTRGHNRVCTRIFYINDVELDTADESATGDDHDTETPMFSLDAVAGVFVGNTVQLQVVVGAATFVALIDTGSTHIFIGEAAARRSGLTIEPRPRLTTTVANGERVACPGVLRQAPVDMGSMVFGVDLFVMPLAGSRTGRGASASTPRALNALTVKDAFPIPIVDELLDELHGARLFTKLDLRSGYHQVQMRQEDVHKTAFCTHDGLYEFLVMPFGLCNAPATFQALMNDVLRTYLRRFVLVFFDDILIYNTSWADHLRHLRVVLNTLRQHRLFVKRSKCSFGVDFVAYLGHVISAAGVAMDPAKVQAIHDWPQPRSARAVRGFLGLAGYYRKFVHNYGAIAAPLTTLLKKEGFVWPDEATAAFSALKGAVTTTPVLTLPDFTKSFVVECDASTYGFRVVLIQEAHPIAFFNRPVAPRHRSLAAYERELIGLVLAVRHWWSYLWGRRFIVKTDHYNLKYLLDQRLATISQHHWVGKLLGFDFSVEYKSGATNTDFVRACPTCQRYKSEHLHPAGLLTPLPIPTVVWADIGLNFIEALPRVNVKSVILSVVDRFSKYCHFIALGHPYTAESSDGQTEAANRVIIMYLRCFTGDRTRQWLRWLPWAEYVYNTAYQSSLRETPFRVVYGRDPPSIRSYEPGETRVDAVARDMEEREAFLADVRHRPEQAHAVQKRHYDKQHRPVTYAVGDWALLRLRQRAPSSLPQQTMGKLKPRFLGPYRVIELINNVVVRLELPPHARIHDVFHVGTLKFVLVQWRGEPTTSATWEDLDKFRATYPDFQLEDELDLEGGRDVMWGRTYMRARNARRAEARAFKVGANSSSPKEGSSKESGSSSTKEVSSKEESGSSSTKEAAGLERYVDSLMKRTDIEFNVVVTQMNGKDYSSNSVHVFHIGKLRIKLRKGWSTKARESYSTTMKLCGSRGGGNAAARAVFWHPRKGSSYTLAFETDRDRNAAIMIARKFASNCNHFDSLCHFDTPNGWDLHKDMVVKYKRGCFGSGSAVAAHAGGEEESRAARLQSFFASVLSGLFGQAEAEDEDEDEEMPTRNHNAAAAAAPQHHHHNRGGAPALGKSKAVPGRADAMNRRAPLGDIGNLVSVRPAEGXLSCRSRSIXPITRSFGAQLVKNVQANAAIKNAAILPARHAPRQERKAPAKQPPPEDVIVLSSDSEQSRTQLESSASSVRSRKKVINTLSSVLSARSKAACGITDKRRQVAVIEDIDKLDVNNELAVVEYIEDIYTFYKIAQHDRRPCDYIDTQVEINPKMRAILAGWIIEVHHKFELMPETLYLTMYIIDQYLSLQPVLRRELQLVGVSAMLIACKYEEIWAPEVNDFILISDSAYSREQILSMEKGILNSLEWNLTVPTVYMFLVRFLKAAALGNKVEKEMENMVFFFAELALMQYGLVTRLPSLVAASVVYAARLTLKRAPLWTDTLKHHTGFRESETELIECTXCWSAHTRPXADSKLRSVYKKYSSEQFGGVALRPPAAAVEIK

SEQ ID NO: 5053 - protein, 388 aa, Burkholderia sacchari
MSETDNTTQAAGAIKPKKSVALSGVCAGNTALCTVGRTGNDLHYRGYDILDLATACEFEEVAYLLVHGKLPNIAELAAYKTKLKALRGLPANVKAALEWVPASAHPMDVMRTGVSVLGTVLPEKDDHNLPGARDIADRLMASLGSMLLYWYHNSHNGKRIEVETDDDSIGGHFLHLLHGREPSKSWVDAMHVSLNLYAEHEFNASTFTGRVIAGTGSDMYSAITGAIGALRGPKHGGANEVAFEIQSRYDTPDQAESDIRRRVEAKAVVIGFGHPVYTISDPRNKVIKEVAKKLSKEQSNLKLFDIAERLESTMWEIKKMFPNLDWFSAVSYHMMGVPTAMFTPLFVISRTAGWSAHIIEQRIDNKIIRPSANYTGPENLKFTLIGKR

SEQ ID NO: 5054 - protein, 483 aa, Rickettsia prowazekii str. Madrid E
MAAFTPITIAYGDGIGPEIMEAVLYILRKAEARISLETIEVGEKLYKKHYTSGISEESWDVIQRTGIILKAPITTPQSGGYKSLNVTIRKTLQLFANIRPVVSFYPFTRTLHPNLNLTIIRENEEDLYSGVEYRQTHNMYESMKLISHTGCKKIIRYAFEYAIKNNRKKVTCLTKDNIMKFSDGIFHRVFNEIAKEYPQINNEHYIIDIGTAKLATKPEIFDIIVTSNLYGDIISDVAAEISGSVGLAGSANIGQHYAMFEAVHGSAPDIAGKGIANPSGLLNAAIMMLVHIGQGDIASLIENAWKKTIEDGVHTFDIYNEHSSSKKVCTKEFAVEVIKRLGQLPITLPKAAYPLIVKKQESNIDYKIDTREVKKLVGTDIFINMHVFSAHDIADKINKLDIGNFELKTISSKGLKLWPHDSRFEIISDHWCCRFMNKDGTEIKHLDITMLLQSLSKANIDFIKVENLFEFDGVAWYSLAQGE

SEQ ID NO: 5055 - protein, 176 aa, Zea mays
MAAASSATSVHDFTVKDSSGKDVDLSVYRGKVLLIVNVASQCGLTNSNYTQQAQLYEKYKNQGLFLIHCSCFEILAFPCNQFGGQEPGTNEEIAQFACTRFKADYPIFDKVDVNGNNAAPIYKFLKSSKGGLFGDSIKWNFSKFLVDKEGRVVDRYAPTTSPLSIEKDIKKLLGSS

SEQ ID NO: 5056 - protein, 225 aa, Brassica napus var. napus
QHQLIALLSNHHPVQKPPTPTYSPPIKPPPVQKPPTPTYSPPVKPPPVKPPTPIYSPPVMPPPVQQPPTPSYSPPVKPPPVQKPPTPTYSPPVKPPPVQKPPTPTYSPPIKPPPVQKPPTPTYSPPIKPPPVQKPPTPTYSPPVKPPPVQKPPTPTYSPPIKPPPVKPPTPIYSPPVKPPPVQKPPTPTYSPPIKPPPVKPPTPTYSPPVKPPPVQKPPTPTYSP

SEQ ID NO: 5057 - protein, 305 aa, Corynebacterium glutamicum ATCC 13032
MSVVGTGLFFGSPEEERDKLMQSLMDQKNKLSKSEGIPLVTLNDGKTIPQLGFGVFKVDPDEAERVVTEALEVGYRHIDTAAIYGNEEGVGRAIAKSGIPREELFITTKLWNDRHLDVEAAFEESLQKLGLDYVDLYLVHWPAPKNDNYVAAWKGLEKLGDRARSIGVCNFLPEHLEKLLAEATTVPAINQIELHPALQQRDAVEASLAAGITVESWGPLGQGRFDLGAEEPIAAAAKNHGKTPAQVVIRWHLQNGFVVFPKTVTKSRMVENIDVFDFELSDEEMAAITALERNDRGGSHPNDLN

SEQ ID NO: 5058 - protein, 400 aa, Streptococcus pyogenes
VFFMLLVCAGAIGFGQVAYAADEKTVPNRINSNPEFPWYGYDSYSGRLLRYHNLKVNLNGSKEYQAYCFNLKRFEPKKEESSSPNWYKKLDGSTETFKKYAENPRFSGEELRRHILKVLYNGYPNSNEIMKGIDPLNAILVTQNAIWYYSDSAPINDINNFFTSEANDLNIPPQQLTLMREALRKLISSDENLVKQVPSNFKLSIFESSDKSYQNLLSAEYVPDDPPKPGDTSEHNPKTPELDGTPIPEDPKRPDESSEPALPPLMPELDGEEVPEVPSESLEPALPPLMPELDGEEVPEVPSESLEPALPPLMPELDGEEVPEVPNESLEPALPPLMPELDGQEVPEVPSESLEPALPPLMPELDGEEIPEVPSESLEPALPPLMPELDGQEVPEKPSV

SEQ ID NO: 5059 - protein, 192 aa, Glycine max
AISDIGVGIENKIILHFKNVFWPNVEFLGVVAETSYGCSYFLNLHKATGRPVLVYMPAGQLAKDIEKMSDEAAASFAFMQLKKILPDTSSPIQYLVSRWGTDINTLGSYSYDAVGKPHDLYERLRVPVDNLFFAGEATSMLYTGSVHGAYSTGMMAAEDCRMRVLERYGELDLVPPVMGEDASVIPLQISRL

SEQ ID NO: 5060 - protein, 218 aa, Escherichia coli
QELDLYICLRPVRYYQGTPSPVKHPELTDMVIFRENSEDIYAGIEWKADSADAEKVIKFLREEMGVKKIRFPEHCGIGIKPCSEEGTKRLVRAAIEYAIANDRDSVTLVHKGNIMKFTEGAFKDWGYQLAREEFGGEPIDGGPWLKVKNPNTGKEIVIKDVIADAFLQQILLRPAEYDVIACMNLNGDYISDALAAQVGGIGIAPGANIGDECALFEA

SEQ ID NO: 5061 - protein, 404 aa, Blastocladiella emersonii
APAPASPSSPSTAAGAGSASSTASSTTTAAASGNLSIPSPLVAGSTTSSSISHAQKMATAAHTNSDYSPSPAATPSAPLDAVAERRRRKTTLADLELRQTLGTGSFGRVHLVRLRSTGKYYAMKVLKKAEVVKHKQVEHTLNEKGILEQIDHPFLVALHSSFQDSANLYMVMEYVTGGELFTYLRRSQRFSNNVAKFYAAEVVLAFEYLHSKDIIYRDLKPENLLLDAQGHVKITDFGFAKHVPDITWTLCGTPDYLAPEIIQSRGYGRAVDWYALGVLIFEMLAGYPPFYDEDHVRMYEKILQGKVKWPSHFDPAAKDLLKRLLTTDLTKRYGNLKGGSKDIKMHKWFAGLDWTKLFNKQIPPPYTPPNRGDGDTSNFDAYPEETEPYGKVQPDPYAQLFKDF

SEQ ID NO: 5062 - protein, 217 aa, Escherichia coli
DLYICLRPVRYYQGTPSPVKHPELTDMVIFRENSEDIYAGIEWKADSADAEKVIKFLREEMGVKKIRFPEHCGIGIKPCSEEGTKRLVRAAIEYAIANDRDSVTLVHKGNIMKFTEGAFKDWGYQLAREEFGGELIDGGPWLKVKNPNTGKEIVIKDVIADAFLQQILLRPAEYDVIACMNLNGDYISDALAAQVGGIGIAPGANIGDECALFEATH

SEQ ID NO: 5063 - protein, 335 aa, Schizosaccharomyces pombe
MQQTYKPNTSALKDGAPKATVDQKQLLPCKYRVGRVLGGGTYATVREAVHIETNKMYAAKIMNKKMMEKKQDFVKNEIAILKRVSYEHPNILHLVDFFETVNNLYLITELATGGELFDRICAKGSFYEADAAALMRTTTSAVKYLHDNGIVHRDLKPENLLYRSKDPNSDLLIADFGLSHFYEDSQYYMLMTACGTPEYMAPEVFRRTGYGKPVDMWAIGVITYFLLSGYTPFARPSQVEVIEAILANEYTFNDPCWSGISETAKDFIKKCLENDPSKRLTAADALKHPFLSEKRPATSNLLPNVRENFNARKTFRTAYNAVRAFNTWKKLENKH

SEQ ID NO: 5064 - protein, 364 aa, Mycobacterium avium subsp. paratuberculosis str. k10
MTEADSAQALDEPLGDHVLELQIAEVIAETDDARSLVFAVPDDDGDPDIPPERLRYAPGQFLTLRVPSERTGSVARCYSLCSSPFTDDALTVTVKRTADGYASNWLCDNARPGMRIHVLAPSGNFVPKTLGDDFLLMAAGSGITPIMSIAKSALSEGSGQVTLLYANRDERSVIFADALRELSAKYPDRLTVLHWLESLQGLPSVTALAQLAAPYTDRPVYICGPGAFMDSAREALETLKVPAAQIHIEVFKSLDSDPFAAVKIEDTAEGDEPPATAVVELDGETHTVSWPRNAKLLDVLLAKGLDAPFSCREGHCGACACTLRKGQVSMEVNDVLEQQDLDEGLILACQSHPESDSVEVTYDE

SEQ ID NO: 5065 - protein, 447 aa, ASPERGILLUS NIDULANS FGSC A4
MPHSVLYTKIDTRPPEVIHSRGNYLHTSDGRTIFDASGGAAVACLGHNEPQVKQAIMAQLDKVAYIYSPFFTVPAAEEIATFLTESTGGAMSKVFIVSSGTEAIEAALKMTRQYFTELSKPQLQRTKFIARRQSYHGNTLGSLAAGGHKARRAIFEPILAASTSHVSPCYPYREMKKGESNEEYVSRLAEELENEFQRVGPDTVCAFIAETMSGTTLGCIPAVPGYLKAMKQVCDRHGALFVLDEVMSGMGRTGTLHAWQQEGVVPDLQTVAKGLGAGYAPVGALLVGNRVADVLSKGTGSFTHSQTYQGHPIACAAACAVQKIIQKENLLDNVRRQGEYLGRLLNERLGGHRNVGDVRGRGLFWALEFVRDKETKEPFPAEAGIAQKVHLTGLQKEHSISVIPGAGVADGRNGDIIQIAPAYNVSKEDIELIVERVEGVVHAAFGA

SEQ ID NO: 5066 - protein, 214 aa, Escherichia coli
LYICLRPVRYYQGTPSPVKHPELTDMVIFRENSEDIYAGIEWKADSADAEKVIKFLREEMGVKKIRFPEHCGIGIKPCSEEGTKRLVRAAIEYAIANDRDSVTLVHKGNIMKFTEGAFKDWGYQLAREEFGGEPIDGGPWLKVKNPNTGKEIVIKDVIADAFLQQILLRPAEYDVIACMNLNGDYISDALAAQVGGIGIAPGANIGDECALFEA

SEQ ID NO: 5067 - protein, 313 aa, Shewanella oneidensis MR-1
MAIQWYPGHMHKARKEIEEAMPQVDLVIEVLDARIPYSSENPMVSKLRGDKPCIKLLNKSDLADPEVTAQWIEYLEREQGVKATAITTLQPGMLKMLPDLCRKLVPSRDKTEKDIRTMIMGIPNVGKSTIINTLAGRVIAKTGNEPAVTKTQQRINLRNGIVLSDTPGILWPKVDNEASSYRLAVTGAIKDTAMEYEDVALFAAGYFLKAYPKEICERYNISELPKDDMALLEEIGRKRGALRPGGRIDLHKASELLLHEYRSGKIGLLSLETPAMAEIEKAEVERILAEKAAEKAAKLEAEKLKRSGKRHND

SEQ ID NO: 5068 - protein, 158 aa, Brassica napus
  unsure (1)..(158): unsure at all Xaa locations
MVSSMLSSAAVXTXXXQDXMXXPFTXLKSSAXFPXTRKANNDITSIASPXGRVXXMXVGXXXGKXKFETLSYLPDLTEVELYKEVDYLLRNXWXPCDEFXLQNGXVYREHGSTXXYYXGRXYWTMXKLPLVACADSXXXXNESXECKTXYPNAFIKII

SEQ ID NO: 5069 - protein, 207 aa, Escherichia coli
RYYQGTPSPVKHPELTDMVIFRENSEDIYAGIEWKADSADAEKVIKFLREEMGVKKIRFPEHCGIGIKPCSEEGTKRLVRAAIEYAIANDRDSVTLVHKGNIMKFTEGAFKDWGYQLAREEFGGELIDGGPWLKVKNPNTGKEIVIKDVIADAFLQQILLRPAEYDVIACMNLNGDYISDALAAQVGGIGIAPGANIGDECALFEAT

SEQ ID NO: 5070 - protein, 244 aa, Eucalyptus globulus
MGRGRLQLKRIENKINRQITFSKRRAGLLKKAHEISVLCDAEVALIVFSAKGKLFEYSTDSCMERILERYERYSYAEHQVLASETESIGSWTLEHAKLKARLEVLHRNYRHFMGEDLDSLSLKDLQNLEQQLESALKHIRSRKNQLMHESISVLQKKDRALQEQNNLLTKKIKEKERALAQQAQWEQQDHALDSPVVLPHYLPSLDINGSYQARHNGHDDGENLTQPRAGTLLPPWISASQLRL

SEQ ID NO: 5071 - protein, 499 aa, Leuconostoc mesenteroides subsp. mesenteroides ATCC 8293
  unsure (1)..(499): unsure at all Xaa locations
MKAAVWHGVKDVRVEDVELKPTKSNEVVVRVAYAGICGSDLHEYLEGPVFIPVDQPDELTGGQAPLTMGHEFSGVIEKVGPDVANFKVGDHVSINPTVTKGISSDDLDVYDGYSFIGLSTDGGFTSYVNVPEDNLYHLPEEFSLKLAATIEPTAVAVQAIKEADLRFGEKVVIFGAGPIGVLVAAAAKAAGATKIVAVDLSEIRLRKALEMGATDVINPSQVPDTVAAIKNIIPGGADASFEVAGVQPTFEQAIDATRPRGSVVIVSIFAKPISFNPMQLMNAGVKLTTTIAYSKETFQQTVALVSSGQINVEPVITDTISLDSIVSDGFESLTSDKSQAKXXXXXXXXXXXXXXXXXXXXXXXXXXXXXXXXXXXXXXXXXXXXXXXXXXXXXXXXXXXXXXXXXXXXXXXXXXXXXXXXXXXXXXXXXXXXXXXXXXXXXXXXXXXXXXXXXXXXXXXXXXXXXXXXXXXXXXLEHKAIISWHNGFYRCFITDCFCW

SEQ ID NO: 5072 - protein, 502 aa, Ustilago maydis 521
MRNLFVALPFLSGLAVAVAFLFNWSAALDRRAPVYLQRRFVNSTELDACKAIAAAKVKVVYPLDLTYYSLIEHYMTTSTQTSTCVAVPASPAEISSTIKVIGSRRIRYAVRGAGHASNQGFSSTSGVHISMNNFKQVILSDDKNTVDVGPANVWDDVYKGLEGTGVAVVGGRVSGVGVGGFITGGGGYSYKTNQYGLTGDTLVSADLVLPDGTITSASESQNADLFWAIRGGGNKFGIIHNFKLKTVPQGQVWGGLRTYTADQVDAVVNATLDFSENSKDPKASLLPTFNFLLGQPGVIALALYDAPTPPADAFRQFTAEDAPRTFTNDWKTRSILDLVKSAPSDLNSGQRGAFHTVSLQKYSKSLLDLIVSESKFYGTQGILHSATLISYDVEPFLPYSQYAKDGAWPHSTNALPLNLYFAWTNPAEDNFWRNAIKASAAKISAQARSEGQNLDDLYLYPNYAIAETPSSELYGPNLGRLSTLKKKYDPQGVTDLTTYFSF

SEQ ID NO: 5073 - protein, 122 aa, Oenothera elata subsp. hookeri
MIQPQTRLNVADNSGARELMCIRIIGASNRRYAHIGDIIVAVIKEALPSTSLERSEVVRAVIVRTCKELKCDDGIIIRYDDNAAVVIDQEGNPKGTRVFGAIAHELRELSFTKIVSLAPEVL

SEQ ID NO: 5074 - protein, 364 aa, Zea mays
MGSTAGDVAAVVDEEACMYAMQLASSSILPMTLKNAIELGLLEVLQKEAGGGKAALAPEEVVARMPAAPGDPAAAAAMVDRMLRLLASYDVVRCQMEDRDGRYERRYSAAPVCKWLTPNEDGVSMAALALMNQDKVLMESWYYLKDAVLDGGIPFNKAYGMTAFEYHGTDARFNRVFNEGMKNHSVIITKKLLDFYTGFEGVSTLVDVGGGVGATLHAITSRHPHISGVNFDLPHVISEAPPFPGVRHVGGDMFASVPAGDAILMKWILHDWSDAHCATLLKNCYDALPENGKVIVVECVLPVNTEATPKAQGVFHVDMIMLAHNPGGKERYEREFRELAKGAGFSGFKATYIYANAWAIEFIK

SEQ ID NO: 5075 - protein, 332 aa, Neurospora crassa
MSGIGASSYAPRSPDLSSLYSSAGPTHQHLQTHAEVLQYLPPRSQPDNSFSTNHYSQPQQSERPHRIPFTNNHATGVWNAQQQASQRDLHHLQNQHQYKYNQQQPQQPLQQQAYPQLFSHTQPQEHQQQQRLTRSQAQRPLQPLPSHTSNPNPPPAPEQSNIQAASSVAAQTTNTMPPKRAVAQAAQQPQPSPIQPSLVKTKFPTARIKRIMQADEEVGKVAQQTPIAVGKALELFMVQLVTKSADIARERNSKRVSAQMLKQVVESDDQWDFLREITSKIENDDKEKPAASASGRGRTKAESESEEEAQPEKKGRGGAGRGGGRGRKKSTA

SEQ ID NO: 5076 - protein, 295 aa, Zea mays
MAGLSLEHPWAFTFGLLGNVISFMTFLAPIPTFYRIYKSKSTEGFQSVPYVVALFSAMLWIFYALIKSNETFLITINAAGCVIETVYVVMYFVYATKKGRMFTAKIMLLLNVGAFGSILLLTLLLFKGDKRVVMLGWICVGFSVSVFVAPLSIMRRVIQTKSVEYMPFSLSLSLTLSAVVWFLYGLLIKDKYVALPNILGFTFGVVQMVLYVVYMNKTPLPVADGKAAGKLPSAADEHVVVNVTKLSPGRLPPVTQMAAVPTKSCATEAAAPATLPSRDVVDVLVNRHSPAVHVA

SEQ ID NO: 5077 - protein, 390 aa, Methanosarcina acetivorans C2A
MHRRLGGVLEVESKVRLRTIHDLSVAYTPGVAEPCRKIKENPSLVYLYTIKKNTVAVVTDGSAVLGLGNIGPCAALPVMEGKAIIFKEFAGIDAFPICLNTQDTEEVIKAVKYLAPAFGGINLEDISAPRCFEIESRLREELDIPVIHDDQHGAAIVVFAGLLNALKIVKKELGELKILITGLGAAGVAIFRFLVRAGADPAKILTCDSQGIVYEGREKDMNPIKAEIATLTNPGKLKGGLKEAFPGTDLFIGVSVGGIVTEEMISSMANDAIVMAMANPTPEIMPDAAKRAGARIVATGRSDFPNQLNNCLSFPGVFKGALGTCARKITPEMEMAAAHALANVVSVGELSEDYIIPEPLDKHVVPAVAKAVANASLESCAARRSLEDEL

SEQ ID NO: 5078 - protein, 503 aa, Tropaeolum majus
MSGTKATSVSVPLPDFKQSVNLKYVKLGYHYSITHAMYLFLTPLLLIMSAQISTFSIQDFHHLYNHLILHNLSSLILCIALLLFVLTLYFLTRPTPVYLLNFSCYKPDAIHKCDRRRFMDTIRGMGTYTEENIEFQRKVLERSGIGESSYLPPTVFKIPPRVYDAEERAEAEMLMFGAVDGLFEKISVKPNQIGVLVVNCGLFNPIPSLSSMIVNRYKMRGNVFSYNLGGMGCSAGVISIDLAKDLLQVRPNSYALVVSLECISKNLYLGEQRSMLVSNCLFRMGGAAILLSNKMSDRWRSKYRLVHTVRTHKGTEDNCFSCVTRKEDSDGKIGISLSKNLMAVAGDALKTNITTLGPLVLPMSEQLLFFATLVGKKVFKMKLQPYIPDFKLAFEHFCIHAGGRAVLDELEKNLKLSSWHMEPSRMSLYRFGNTSSSSLWYELAYSEAKGRIKKGDRVWQIAFGSGFKCNSAVWKALRNVNPAEEKNPWMDEIHLFPVEVPLN

SEQ ID NO: 5079 - protein, 396 aa, Oceanobacillus iheyensis HTE831
MVYKNLKDEAIELHYKHKGKLEITGKMEINTEDDLSLVYTPGVADVCKQIADDPNKINTLTSRGNMVGIVTDGTAVLGLGNIGPKAAMPVMEGKALLFKKFANIDGFPICLDTTDVDEIVNIVKAMGPTFAGINLEDIAAPRCFEIEKRLKEELDIPVFHDDQHGTAIVVLAALTNALKVVNKQNRPIKIVINGAGAAGIAIAKLLYHAGLTNITLVSLEGVVAKGEDWLNPMQVEMAEVTNKDNVRGTLKDAITEADVFIGVSGPGALKKEHIQTMAKDPIIFALANPIPEIYPEEALEAGAAVVATGRSDYPNQVNNLLAFPGIFRGAIDAGARDITTEMKVAAAYGIADVLSDEEISKDKVIPNALDERAGERVAQAVMSSAIQQKKETSSVS

SEQ ID NO: 5080 - protein, 145 aa, Magnetococcus sp. MC-1
MSTLMSYDPFHRVRTLQNELNRLFDPGWDDGNSQMAKLSMGVDIREDENQIVIKADLPGMSQEAIQVNVEHNTLTISGERTFGDEVNRDRYHRVERAYGRFSRSFQLPNTTDTANIKASYVNGVLEVALPKREESKPRAIQIEVQ

SEQ ID NO: 5081 - protein, 467 aa, Listeria monocytogenes EGD-e
MLYSEDDKRKQESYRIPLFGSEEESTSIPKYVLKKEPMEPRIAYQLVKDQLMDEGNARQNLATFCQTYMEKEAEILMAETLEKNAIDKSEYPQTAELENRCVNILADLWNAPKDMSYLGTSTVGSSEACMLGGLAMKFRWRNNAEKRGLDIQAKRPNLIISSGYQVCWEKFCVYWDVDMRVVPMDKNHLSLDVDKVFDLVDEYTIGVVGILGITYTGKFDDIQLLDEKVEAYNETNEHQLVIHIDGASGAMFTPFVNPELPWDFRLKNVVSINTSGHKYGLVYPGVGWILWKDKEYLPKELIFEVSYLGGSMPTMAINFSRSASQIIGQYYNFLRYGFEGYREIHEKTKKTAIYLAKTVEKSGYFEIINDGANLPIVCYKMKEGLDVEWTLYDLADQLLMKGWQVPAYPLPADLSDTIIQRFVCRADLGYNVAEEFAADFADAIHNLEHARVLYHDKERNDSYGFTH

SEQ ID NO: 5082 - protein, 395 aa, Zea mays
LGPSRPASSSLPAKRGGLLLGRYELGRLLGHGTFAKVYHARHADDTGETVAIKVLDKEKALRNGLVPHIKREIAILRRVRHPNIVRLFEVMATRPKIYFVMEFVRGGELFARVAKGRLKEDTARRYFQQLISAVGFCHARGVFHRDLKPENLLVDERGDLKVSDFGLSAVADQFHPDGLLHTFCGTPSYVAPEVLARRGYDGAKADIWSCGVILFVLMAGYLPFHDQNLMAMYRKIYRGEFRCPRWFSRDLSCLMNQLLDTNPETRITVAQIIESRWFKKGFRPVRFYVEDDQVHSLADSEAEALEELGPSDSEPSPPPPPPPPPPPPQKEDDGDDSGWESDSSVASCPATLSSEERRRPVGSLPRPVSLNAFDIISFSRGFNLSGLFEERGNEV

SEQ ID NO: 5083 - protein, 358 aa, Mycobacterium tuberculosis H37Rv
MTEAIGDEPLGDHVLELQIAEVVDETDEARSLVFAVPDGSDDPEIPPRRLRYAPGQFLTLRVPSERTGSVARCYSLCSSPYTDDALAVTVKRTADGYASNWLCDHAQVGMRIHVLAPSGNFVPTTLDADFLLLAAGSGITPIMSICKSALAEGGGQVTLLYANRDDRSVIFGDALRELAAKYPDRLTVLHWLESLQGLPSASALAKLVAPYTDRPVFICGPGPFMQAARDALAALKVPAQQVHIEVFKSLESDPFAAVKVDDSGDEAPATAVVELDGQTHTVSWPRTAKLLDVLLAAGLDAPFSCREGHCGACACTLRAGKVNMGVNDVLEQQDLDEGLILACQSRPESDSVEVTYDE

SEQ ID NO: 5084 - protein, 506 aa, Pseudomonas aeruginosa UCBPP-PA14
MRYAHPGSEGAIVSFKARYGNYIGGEFVPPVKGQYFTNTSPVNGQPIAEFPRSTAEDIDKALDAAHAAADAWGRTSVQERSNILLKIADRIEQNLELLAVTETWDNGKAVRETLNADIPLAADHFRYFAGCIRAQEGSAAEINDSTVAYHIHEPLGVVGQIIPWNFPLLMAAWKLAPALAAGNCVVLKPAEQTPLGICVLLELIGDLLPPGVLNVVQGFGREAGEALATSKRIAKIAFTGSTPVGSHILKCAAENIIPSTVELGGKSPNIYFEDIMQAEPAFIEKAAEGLVLAFFNQGEVCTCPSRALVQESIYPAFMEEVLKKVRAIKRGDPLDTETMVGAQASQQQYEKILSYLDIAQQEGAEVLTGGSVEKLEGNLASGYYIQPTLLKGHNKMRVFQEEIFGPVVGVTTFKDEAEALAIANDTEYGLGAGLWTRDINRAYRMGRGIKAGRVWTNCYHLYPAHAAFGGYKKSGVGRETHKMMLDHYQQTKNLLVSYDINPLGFF

SEQ ID NO: 5085 - protein, 1124 aa, GIBBERELLA ZEAE PH-1
MVAPSAMLSGAEAMQMQMQAAPPRQRAQRQTSSCLECRRRKQKCSQGQPCTNCYRRFPTPECVYEVKSSRRASPLFPRPQLPTIADIQDGPYSHLNPAIIQSALYSIEGQSTSSASSPSGSYSPTASSSTSLSTQSTRSLWRPYQTLASPDGDTDKTIARSLQIIKKESIKSFKRSYLDEGMNKIESDDPMELGYSIAGSMTQLNYLPMRPTKLNKDLVRIHGQPDPTNEFMSVWVPCTMQDPLLLHIVLFTSACFLTETGDMPKKLRQIYQSHVYWMLNKQIGDANGWKNDTLMLAVVQMIADSWYWGETDHLMAHLKGLKRMVRMRGGLNQLGLRGYLAKMILIHDIAMALAHEIKPSMYGHPEFPFFDSRRTPIKTVYNTPLLCHWQSFRESSNSLQLHPSTAEILDTVRSLFSAVISLPRDASPDQTQIVRITATGFYDKIDGFPEQIPSFRGFRNSSRSSSVESPDQSPRSSRTDKSSSPLNLPDIMYIVVRKIALVYCKAISTRSPISTACSEQDIMLIWRAIWESGLPTWKSVLGIFAWVMIPLCTNCHKIKFGRLIKTLTVSTMMSLGMDDWHLFLDISKTAFRIQRWLTEGDDASGTKQLMGGQAVVDQYDGFAMDNACPRYELPEYDEPFHKDEFNYLFGTMCNFDRLREDIAHGAVLLPEDEGYEETLQRWSSACMKRANTETLQAAVVMPSNSKEVSLAVKFAVSNQIPMTVCGGGHSSSGASSSEGMVIDLRKMRKVKVDTEAMTVEFEGGCLWEDVDNALERHGLATVGGVVNHTGVGGLTLGGGHGYLTPRHGLTIDNLLEADVVLADGTIVEASEDKDANLFWAIRGAGAQFGVVTRFLSRAHQQVKVWSGTLAYLPDKLPDLLRFANELHERPNTEGHCLALGIGFGPNGTTRIVSAIPLFHGPESDAKRYFAGLLQLESVADNTEMITTAKTNTLLNLAMDHGIRRLTGSGNVVMPLNIEAMLQTAQIFWEFCDVHGGMGKSVMAIEFFPTDKIREIAQDATAYANRGDYYDVLTLFGWEDPDHDGEVREFNRSICRKVRETNGYQADSGGHWSKGPVGVYINVEAGGISPNDAWGANLPRLRELKKKYDPQNVFNKWHSIAEDAS

SEQ ID NO: 5086 - protein, 147 aa, Brassica napus
DVQERAFARAEIESARAAVHRVGEALREHEQMSRASGKQDMEDLLKEVQEATRIKVLHQPSKVMAMEYELRARRKQLAETSRHFRQLRQKLAMCRESEECISLLDDIDGNEALSSCLRVRPCSDEAPESLKCTIQWYRSSSDDSKNE

SEQ ID NO: 5087 - protein, 92 aa, Glycine max
MERRRVMEHLKTYPAFPGWYADVSWPGEAHIYKMEKILFHGKSEFQELLVFESDTSRHGKIAIPDGYIQLTENDEFAYQEMLIHLALCSIPN

SEQ ID NO: 5088 - protein, 195 aa, Amylomyces rouxii
MAEIRRKLVIVGDGACGKTCLLIVFSKGTFPEFYVPTVFENYVADVEVDGKHVELALWDTAGQEDYDRLRPLSYPDSHVILICFAVDSPDSLENVQEKWISEVLHFCQGLPIVLVGCKKDLRNDPGTIEELRRNSQKPVSSEEGASIAQRISAYKYLECSAKTGEGVREVFEHATRAALMVSKKKKSKSGVCNLL

SEQ ID NO: 5089 - protein, 506 aa, Haloarcula marismortui ATCC 43049
MTSHSEIDTLRIKARHAELAESLLPSGPLKHFVDGEWITGRGDDTFQSIDPTTGESLVGVYEGTKEEVNRAVDAAWEAYEQRWSETTPAERQQLLLTMADRLEARAEDFALIEVLDNGKPITEAREDIELAVDHFRYFAGAARNIEGKTVPHKELHIQTRREPYGVVGQVVPWNFPLLLATWKLAPALAAGNTVVLKPAEQTPISLLTYMREIADVLPDGVVNVVTGFGPETGAPLVSHERVPKVAFTGSTEVGQGVMKAAANTISDITLELGGKSPLIVAPDADPAEAADIAVDAMFFNGGECCSAGTRLFIHESIADEFVDAFLDAVGKLQMGDPLEESTDIGPQVSRAEVEKTLHYIGLARDSDASILRGGGTVEEGILAEGCFVEPTVIADVGADSTVATQEIFGPVEIMLEWDGYDEMVARANNVDYGLAAGVVTDDLSFAHRIAEDIMAGNIWVNTFNRLPAGQPFGGYKQSGIGREGAMETLREYTQTKSITMNLGDGQ

SEQ ID NO: 5090 - protein, 310 aa, Brassica rapa subsp. pekinensis
MMKRLSSSDSVGGLISLCPTTSTDQPSPRRYGREFQSMLEGYEEEEEEAVTEERGQTGLAEKKRRLSINQVKALEKNFELENKLEPERKVKLALELGLQPRQVAVWFQNRRARWKTKQLEKDYGVLKTQYDSLRHNFDSLRRDNESLLQEIGKLKAKLNGEEEVEKMMKMENNAVTMECDVSVKEEEVSLPEELTDPPSSPPQALEHSDSFNYRSFTDLRDLLSLKAAASSVAAAGSSDSSDSRAVLNEESSSNVTAGPVTVPQGGFLQFVKMEQTEDHDDFLSGEEACGFFSEEQPPSLHWYSTVDQWN

SEQ ID NO: 5091 - protein, 473 aa, Anabaena variabilis ATCC 29413
MYNKITPPTTGEKITFKNGEPVVPDNPIIPFIRGDGTGIDIWPATEKVLDAAVAKAYQGKRKISWFKIYAGDEACDLYGTYQYLPEDTLTAIREYGVAIKGPLTTPVGGGIRSLNVALRQIFDLYACVRPCRYYAGTPSPHKNPEKLDVIVYRENTEDIYLGIEWKQGSEIGDRLISILNKELIPATPEHGKKQIPLDAGIGIKPISKTGSQRLVRRAIKHALTLPKHKQQVTLVHKGNIMKYTEGAFRDWGYELATSEFRQETVTERESWILSNKEKNPNISLEDNARQIDPGFDALTPEKKAQIVKEVETVLNSIWETHGNGKWKEKVLVNDRIADSIFQQIQTRPDEYSILATMNLNGDYLSDAAAAIVGGLGMGPGANIGDSCAVFEATHGTAPKHAGLDRINPGSVILSGVMMLEYLGWQEAADLIKKGLSDAIANSQVTYDLARLLEPPVEPLKCSEFADAIIKHFG

SEQ ID NO: 5092 - protein, 204 aa, Escherichia coli
CLRPVRYYQGTPSPVKHPELTDMVIFRENSEDIYAGIEWKADSADAEKVIKFLREEMGVKKIRFPEHCGIGIKPCSEEGTKRLVRAAIEYAIANDRDSVTLVHKGNIMKFTEGAFKDWGYQLAREEFGGELIDGGPWLKVKNPNTGKEIVIKDVIADAFLQQILLRPAEYDVIACMNLNGDYISDALAAQVGGIGIAPGANIGD

SEQ ID NO: 5093 - protein, 221 aa, Shigella flexneri
RQELDLYICLRPVRYYQGTPSPVKHPELTDMVIFRENSEDIYAGIEWKADSADAEKVIKFLREEMGVKKIRFPEHCGIGIKPCSEEGTKRLVRAAIEYAIANDRDSVTLVHKGNIMKFTEGAFKDWGYQLAREEFGGELIDGGPWLKVKNPNTGKEIVIKDVIADAFLQQILLRPAEYDVIACMNLNGDYISDALAAQVGGIGIAPGANIGDECALFEATH

SEQ ID NO: 5094 - protein, 160 aa, Brassica napus
MEEDRVLSSVHSTVFKESESLEGKCDKIEGYDFNQGVNYPKLLRSMLTTGFQASNLGEAIDVVNQMLEWRLSDETIAPEDCSEEEKDPAYRESVKCKIFLGFTSNLVSSGVRDTIRYLVQHHMVDVIVTTTGGVEEDLIKCLAPTFTGDFSLPGAYLRSR

SEQ ID NO: 5095 - protein, 316 aa, Helicobacter hepaticus ATCC 51449
MAGGAAIDECGECLPMKSLQICKQSDSVLLGAVGGPKWDNEPSHNRPEKALLTLRKELGLFANIRPATLLPQLSKASPLKDEILNRGIDFIIVRELIGGVYFGEHKLEEINGEKVASDAMTYSASQIESIAKVAFNIARNRKKEIVCVDKANVLSSSRLWREVVDKVAQNYKDVHLSYMYVDNAAMQICRAPSQFDVILTENMFGDILSDEASIITGTIGVIPSASLSNGTLGMYEPIHGSAPDIAGQDKANPIGTILSAAMMLELSFGLTKESEVIQKAVQNALDKGYRTGDMMSEGMQLVGCEQMGDVILESVI

SEQ ID NO: 5096 - protein, 220 aa, Shigella flexneri
RQELDLYICLRPVRYYQGTPSPVKHPELTDMVIFRENSEDIYAGIEWKADSADAEKVIKFLREEMGVKKIRFPEHCGIGIKPCSEEGTKRLVRAAIEYAIANDRDSVTLVHKGNIMKFTEGAFKDWGYQLAREEFGGELIDGGPWLKVKNPNTGKEIVIKDVIADAFLQQILLRPAEYDVIACMNLNGDYISDALAAQVGGIGIAPGANIGDECALFEAT

SEQ ID NO: 5097 - protein, 482 aa, Pseudomonas fluorescens
MLDVPLLIGGQSRPARDGRTLERRNPVTGAVVSRVAAATLDDADAAVAAAQAAFPAWAALAPNERRSRLLKAAEQLQARSGEFIAAAGETGAMANWYGFNVRLAANMLREAASMTTQINGEVIPSDVPGSFAMALRQPCGVVLGIAPWNAPVILATRAIAMPLACGNTVVLKASELSPAVHRLIGQVLQDAGLGDGVVNVISNAPVDAAAIVERLIANPAVRRVNFTGSTHVGRIVGELAARHLKPALLELGGKAPLLVLDDADLDAAVAAAAFGAYFNQGQICMSTERLIVDAKVADAFVAKLAAKVATLRAGDPSAADSVLGSLVDVSAGTRIKALIDDALSKGARLVVGGQLDGSILQPTLLDGVTESMRLYREESFGPVAVLLRGSGDEELLRLANDSEFGLSAAIFSRDTGRALALAQRVESGICHINGPTVHDEAQMPFGGVKSSGYGSFGGKASIEHFTQLRWVTLQHGPRHYPI

SEQ ID NO: 5098 - protein, 220 aa, Shigella flexneri
QELDLYICLRPVRYYQGTPSPVKHPELTDMVIFRENSEDIYAGIEWKADSADAEKVIKFLREEMGVKKIRFPEHCGIGIKPCSEEGTKRLVRAAIEYAIANDRDSVTLVHKGNIMKFTEGAFKDWGYQLAREEFGGELIDGGPWLKVKNPNTGKEIVIKDVIADAFLQQILLRPAEYDVIACMNLNGDYISDALAAQVGGIGIAPGANIGDECALFEATH

SEQ ID NO: 5099 - protein, 189 aa, Leptospira interrogans serovar lai str. 56601
MKEGASFMYSKYFIWFMTLGIFLPLAGIFAKGSFYDFKVKDIKGNEVSLSKYKGKVVMVVNVASKCGYTYQYEHLEKVYKKYKDQGFAVVGFPANNFGGQEPGTDQEIETFCRIQKGASFDMMSKISVKGKDIHPLYSYLIQNSPNPGEVEWNFEKILISKNGTIEARYRSSVEPDSSAVTQKIETLLK

SEQ ID NO: 5100 - protein, 564 aa, Triticum aestivum
  unsure (1)..(564): unsure at all Xaa locations
MASFARQEHQFLAELGLAPRNPGSFACGAWGGSGPVVTTTNPSNNEVIAEVVEASMDDYEKGMSACFDAAKTWMAVPAPKRGEIVRQIGDALRAKLHHLGRXLSLEMGKILPEGIGEVQEIIDMCDYAVGLSRQLNGSIIPSERPNHMMMEVWNPLGVVGVITAFNFPCAVLGWNACIALVCGNCVVWKGAPTTPLITIAMTKIVASVFEKNNLPSAIFTAFCGGAEIGQAIALDTRIPLVSFTGSTKVGQMVPPSXPHSPPSTIPSLRTAKQPEPEPAFQNQPARHGELREAGAPVPRRARPRAAQPGLLRLRRLGRLRPRRHHHKAIILLGHADGRRGVRSLLFAAVGTAGQRCTTWGSRPLHESMXQTFLDQLVEVYKQACIGHPMEKGTLLGPLHTTASKESFLKGIQNIRSQGGKILLGGSAIESEGNFVQPTIVEISPAAPVVREELFGPVLYAMKFQTLKEAIEINNSVPQGLSSSIFTRKPDAIFKWIGPHGSDCGIVNVNIPTNGAEIGGAFGGEKATGGGREAGSDSWKQYMRRATCTINYGSELPLAQGINFG

SEQ ID NO: 5101 - protein, 1661 aa, Bacillus halodurans C-125
MKTLKHISYKLRIFALIALLISQTLLTSLSLPFQAVANSEKSGLTNVEITDANGQTIDADQFPDRFVSIDSILQIILSWSVDESVAQGAEYSLNIPSALVVSSHGGVLTTTDSQEVGTYEVKDNGEVTLQVNEKGNGTLIVEAAFNKDEVHGKSEVPLTFHLDDETRTITVPFTVEEKTEEAVEPASESETEATIEQHKEDEEEEMVALTTQSTEASGSEITENILTSVQLKDEEGNLIHANENPDLRPALGSAVEVIYNWKLRNNHGYTAGSTFTFQLPDAFRFYNNIENEPLVFTQANTTVGSFNVTTDGTVTMTFNESIEQLSNIRGNLHLWTEFREDLQGDRLQVIHFEAKDEVIASIPVEFENATGHSIDKRGVVDQTFNATEIKWTVDFNKQLQPIEQAILKDPIQTGQALRAGSIKVYELNVQLDGSVVQGAEVDPSSYTIEQVDGNDFQIVFGSIDSAYRVEFITDITNRNATYYMNRATLTGENIDDLSADAGVWTHRGTPLSKASTGYDPATQTITWEIKYNYDGKLIRQADAVLTDLFTNSHILLDDSMKVYRVTINEHGNEVSTEEVSNYSVNGTSDEDHNGFVLQFTEDVQDSYKIIYQTTAAERGFEDATIENTVTTGDHEAKTSRTVHQQTFNKWRGQIDYAKKTVAWEYFFNEERQELTNVIISDVFANGGLTLIEDSFTITSFPSTDEEVTLENGNDYRVVTNETGFTIEFMAPITEPHHVRYETTFDFDARDDKNKAFLENGATLQWQTSSGNTMKKEGKSEFHPDTFTRNNGFKNGLYNATSKEITWNIGVNYNLHTLEHAIVEDFVREGQRLLMDSIEVYEMGLLGWWDGVSQGSKLEEGTDYVIEAVEDGEGHPGFQVRFLNTIDSAYWITFKTSLEDTLIKSNYPNRATLKSDNAEDFNVDASVSVRHGGEFVTKSGAQNGRLIDWSLNINFSQSSISNAKIVDEPSVNQILLEDTFRLYATNVQPNGTMTKGDELERDKDYTLDIRTDGEGNQHFELQFTEDIDTGYILEYQSFINARNGDVVTNNVKLEGDQLTTEEVTESSGAVSVRLSGGAGTGSGETGSLEVTKVDADTGEVLQGATFTLYDSEGEFAIRTLETGEDGKATFVNLLYGDYLLKEDSAPEGYLVGINDTQRVTIDTVLHEVTVENEKSDINRVSAVGAVQLQKVDEETGESLQGALFALQQKVDDEFVTIAEMETDEEGIVFAGSLEPGDYQFVELNAPVGYKLDETPVVFTVEEDRTETIELQKENHLIPGSVQLVKVDADDAANTLEGAEFTLLDGEGNVVQEGLTTDENGQVVVTDLKPGEYQFVETKAPAGYELEATPIGFTIERNQQEVATVAVENHLIPGSVQLVKVDADDAAITLEGAEFSLLDGEGNVVQEGLTTDATGQVVVTDLKPGEYQFVETKAPAGYELDATPIGFTIERNQQEVATVAVENHLIPGSVQLIKVDREDSAVTLEGAEFSLLDEEGNVLREGIRTGENGQLMVIDLKPGDYQFIETKAPTGYELDDTPIAFTIEKGTDEVLTLVFENKLTPEVPESPENPENPENPENPEIPEDLETPESPENPETPESPKHSEDSEVPNSDKNPEKSSDSNNRIDRLPQTGEEFLTFLLILGLLLMTAGGVLLLKRRNVAEC

SEQ ID NO: 5102 - protein, 366 aa, Glycine max
  unsure (1)..(366): unsure at all Xaa locations
HAFGIPGSASVSRSNRKPLPSSSSSSSVATEAEQKEILEXLVSNLPLEKSSKAATATRFLFGLLRTTNILNASEACRDALEKKIGLQLEEATLDDLLVPSYSYLNETLYDVDCVERILSQFLEGLEARTAAETTEDAAATRSPALMLVGKLIDGYLSEIASDANLKPEKFYNFAISLPDEARLFDDGLYRAVDVYLKAHPWVSEEEREKICGLLDCQKLTLEACSHAAQNERLPLRAVVRVLFFEQLQLRRAIAEKLGAAEEPSRHSAAMAEEEEVEDDNNTWQVTVRENQVLRLDMDSMRTRVHELERECSSMKRAIEKMDKMGPRGGGPWRASLALGRKFGCKFKTQVCDSHEPATREGRPPRR

SEQ ID NO: 5103 - protein, 507 aa, Bordetella bronchiseptica RB50
MPGRGCVPRFFSSDSIDMTISPLQLLNDPSLLRTDALVDGRWIAASRRFAVHDPATGRKLADVANLDAAHAREAIAAAQAAWPAWRARTVKERSAILRKWFDLLLANQDDLARLLTAEQGKPFGEARGEIAYAASFVEWFAEEAKRINGETLPAFDNNRRLLVLRESIGVCAAITPWNFPLAMITRKVAPALAAGCPVIVKPAEHTPLTALAAAQLAVRAGVPAGVLGVLPADGANSIAIGKELCANDAVRHLSFTGSTEVGRILMAQSAATVKKLSLELGGNAPFIVFDDADLDSAVEGAMQSKYRNAGQTCVCANRIYVQDGVYDAFVEKLADAVRALKVGPGFDEGVTQGPLIEPEAVDKIERHIEDAVSKGGRVVAGGRRLGGLFFEPTVLVDATSQMLCAREETFGPLAPVFRFHADEDAIAAANATEFGLASYLYSRDVGRIFRAAEALESGMVGVNVGILATEHVPFGGVKQSGLGREGGRHGIDDYVEIKYMCVGDILK

SEQ ID NO: 5104 - protein, 294 aa, Helianthus tuberosus
MEQYEKVEKIGEGTYGVVYKARDKVTNETIALKKIRLEQEDEGVPSTAIREISLLKEMQHGNIVRLQDVVHSDKRLYLVFEYLDLDLKKHMDSCPEFSKDPRLVKTFLYQILRGIAYCHSHRVLHRDLKPQNLLIDRRTNALKLADFGLARAFGIPVRTFTHEVVTLWYRAPEILLGSRHYSTPVDVWSVGCIFAEMVNQRPLFPGDSEIDELFKIFRIMGTPNEETWPGVTSLPDFKSAFPKWSSKDLATVVPNLEKAGLDLLCKMLWLDPSKRITARTALEHEYFKDIGFVP

SEQ ID NO: 5105 - protein, 315 aa, Glycine max
MAATTLVSEVTLPSSSGQRKMPLMGLGTAPEATSAVTTKDAVLEAIKQGYRHFDAASAYGVEQSVGEAIAEALKQGLIASRDQLFITTKLWVTDNHAHTILPALQKSLRTLQLEYIDLFLIHWPIATKPGKVVYPIEVSEIVEFDMKGVWGSMEECQRLGLTKAIGVSNFSIKKLEKLLSFATIPPAVNQVEVNLGWQQQKLRDFCKEKGITVTAFSPLRKGASRGANFVLDNDVIKELADAHGKTAAQICLRWLYEQGLTFVVKSYDKERMKQNLGIFDWSLTEDDYKKISEIHQERLIKGPTKPLLDDLWDEE

SEQ ID NO: 5106 - protein, 284 aa, Glycine max
MKGEYLEQQQQHPKSETTPPSMFSKLQPQHHPFPHHPFQLSAEEENRVGAATTPSTVQKANSSGGDGATIEVVRRPRGRPPGSKNKPKPPVIITRDPEPAMSPYILEVSGGNDVVEAIAQFSRRKNMGICVLTGSGTVANVTLRQPSTTPGSTVTFHGRFDILSVSATFLPQQSGASPAVPNGFAISLAGPQGQIVGGLVAGGLMAAGTVFVIAASFNNPAYHRLPPEEEGASAGDGHSPQVSGGGDSGHGQAESCGMSMYSCHLPSDVIWAPTARPQPPPPPY

SEQ ID NO: 5107 - protein, 317 aa, Magnetospirillum magnetotacticum MS-1
  unsure (1)..(317): unsure at all Xaa locations
MLETGFFSLGTPGRLDADLEFILAKVAELKLPKLYELGPVGARTEFALRLSRSNPPAPHGVEAEDITIAGIPARRYQPQGGPKAKAMLLYFHGGGFVVGDLETHDPHCRALAAESGSVVVALHYRLGPEHPYPAAIQDGIAALKWAAAEYAGWTLGVAGDSAGGTLSAVVALHARDLNIPLALQMLIYPAVDQKGDFPSRTRLADGYLLTQGDIEWFTQQYFVGHEGPVLEPDASPLRAASHGGLAPALVLTCGFDPLVDEGDAYAQALIGAGVPVRHVRLEGSIHGCLGXWPGLXVALGQASLGGGLRGLAVRSSP

SEQ ID NO: 5108 - protein, 268 aa, Chromobacterium violaceum ATCC 12472
MVSPGPAIAWVNDDLVHGGGYPVPVRIYHPEPGAALPVLVFLHGGGHMAGGVSVYDGIHRRLAAASRHIVVAAEYRLSPENPYPAGLDDALCVARHVWDTLDGRGLAYRRRLSLAGDSAGGALCASVSGLAGRDPSLDIARQALIYPCVDYTLDQPSVAENGEGFFLTRARTDWYFDNYFQHGEDRRQASPLHWEAHGQMPATLLITAGHDILRDQGQQYARKLQAAGAEVALLHLEDQVHAFLNMEALVPEVCELAYRRIGAFLNAG

SEQ ID NO: 5109 - protein, 456 aa, Pseudomonas aeruginosa PAO1
MNSQITNAKTREWQALSRDHHLPPFTDYKQLNEKGARIITKAEGVYIWDSEGNKILDAMAGLWCVNVGYGREELVQAATRQMRELPFYNLFFQTAHPPVVELAKAIADVAPEGMNHVFFTGSGSEANDTVLRMVRHYWATKGQPQKKVVIGRWNGYHGSTVAGVSLGGMKALHEQGDFPIPGIVHIAQPYWYGEGGDMSPDEFGVWAAEQLEKKILEVGEENVAAFIAEPIQGAGGVIVPPDTYWPKIREILAKYDILFIADEVICGFGRTGEWFGSQYYGNAPDLMPIAKGLTSGYIPMGGVVVRDEIVEVLNQGGEFYHGFTYSGHPVAAAVALENIRILREEKIIEKVKAETAPYLQKRWQELADHPLVGEARGVGMVAALELVKNKKTRERFTDKGVGMLCREHCFRNGLIMRAVGDTMIISPPLVIDPSQIDELITLARKCLDQTAAAVLA

SEQ ID NO: 5110 - protein, 333 aa, Saccharomyces cerevisiae
MSEPSEKKQKVATSSLEQLKKAGTHVVADSGDFEAISKYEPQDSTTNPSLILAASKLEKYARFIDAAVEYGRKHGKTDHEKIENAMDKILVEFGTQILKVVPGRVSTEVDARLSFDKKATVKKALHIIKLYKDAGVPKERVLIKIASTWEGIQAARELEVKHGIHCNMTLLFSFTQAVACAEANVTLISPFVGRIMDFYKALSGKDYTAETDPGVLSVKKIYSYYKRHGYATEVMAASFRNLDELKALAGIDNMTLPLNLLEQLYESTDPIENKLNSESAKEEGVEKVSSINDEPHFRYVLNEDQMATEKLSDGIRKFSADIEALYKLVEEKM

SEQ ID NO: 5111 - protein, 381 aa, GIBBERELLA ZEAE PH-1
MLAIRALRTPASRQALRTAAPRAAIFYNRCYSTSGDRVAKYNGTKDAKGNFLVSLIEGDGIGPEIAQSVKDIFAAAKTPIAWEPVDVTPIIKDGKTAIPDAAIDNIKKNKIALKGPLATPIGKGHVSLNLTLRRTFNLFANLRPCRSVAGYETPYDNVNTVLIRENTEGEYSGIEHVVVDGVVQSIKLITREASERVLRFAFQHAESIGRKKVRVVHKATIMKLSDGLFLKVAQEVAKDFPGIEFDAELLDNSCLKMVTDPTPYNDKVLVMPNLYGDILSDMCAGLIGGLGLTPSGNIGDECSIFEAVHGSAPDIAGKNLANPTALLLSSIMMLRHMGLNEHATRIEKAIFDTLAEGKALTGDLGGKAKTNEYAAAIISRL

SEQ ID NO: 5112 - protein, 91 aa, Brassica napus
MYYQLTKSSYMDSLKILEADIEHANGLAAEIPMGKSGVRLQMKLVCSNLAPFFIFLLQWMDFSCLLPRYFDFFHILIYKVRSDGRRNLSRY

SEQ ID NO: 5113 - protein, 502 aa, Rhizobium sp. NGR234
MDESVRNYLDQYGVSDATRRFLAKPQKMFIDGAWSDSSNGATFDIFEPSTGGLITRAPSGTPEDLDRAVRAARRQFDGGAWRRLKPLERERLLHSLADLIEAHSDELAEIEAIDMGKSVTFAREIDIRGTVDTFRYFAGWASKLHGRTVEPSLPGNYLAYTRKEPLGVVAAIVPWNFPLQTLAWKLAAALAVGCTAIVKPAELTSLSTLRFAELVQEAGIPDGVVNIVTGKGSIIGAAMSTHPGINKVTFTGSTPVGQEVGRTAVGNLKHVTLELGGKSPVLVLDDADLQSAAVAVANGVFFNSGQVCDAGTRVYVQGSVHDAFLDELVSVTSALKIAPGLDRDCYIGPLVSAQQKKVVSGYIEAGRREGAELIHGGASLHRQGHFIEPAIFSHCKPQMSIVREEIFGPVLVTSPFDDLDDAVSLANDTPFGLAAAIYSNDLSRVHTLIPRLHAGSIYVNAHSTIDPAMPFGGFKASGFGKDLGPEQLDYLMETKAVWITLP

SEQ ID NO: 5114 - protein, 175 aa, Triticum aestivum
MGPTLMASSATSVAPFQGLKSTAGLPVSRRSNGASLGSVSNGGRIRCMQVWPIEGMGGWGSLSYLPPLTHKTLLKQVDYLIRSKWVPCLEFSKVGFIFREHNAFPGYYDGRYWTMWKLPMFGCPDPTQVINEVEEVKKEYPDAYVRIIGFDNMRQVQCVSFIAFKPPGCEESGKA

SEQ ID NO: 5115 - protein, 274 aa, Lactobacillus johnsonii NCC 533
MEYFNLNDGNRIPKIGFGTYKLNGSRGVFAIQAALKNGYRLLDSAVNYENEGAVGRAIKNSGINRDDIFITSKLPGRHHKYQEAIEQIQESLYAANLDYYDLYLIHWPNPKENHYLEAWQAMLDAQRFGLIRSVGVSNFEPSHIEHLYRETGVMPAINQVELHPYWSSKTIREYDNKHNIITEAWSPLQRAGEAFQEKEIIDLAQKYHKSPAQIILRWETQLNVVPIPKASSYEHQISNLDIFDFKLTPEEVQKLINLDKISARRFDPNEHEEF

SEQ ID NO: 5116 - protein, 346 aa, Magnaporthe grisea
MSSTTEERQVWQPLHPQVRPRLDPQYVEVHDKLLQYAPPTHTQPWSAAMRQPSQASVKTGLDVVPVLTEEVQLERFTILVLTPVTNADDEPRPESGWPVFVWFHGGGFVLGDHSSELDLLTRICATARCVVCSVGYRLAPEHPYPAAIEDGTDGVRWILSDAQDGGATRFSIDRNRWAIGGVSAGALLSTVTLISLGEAGDLDSGEMARPLRQVLVVPVVDNTAMPGSGFWSINPHAISPSAERMLWYRRLWLGDADPRVWSVSVNHASDKQLAYMPPTFTAIGGEDLLAPEGLAFVDQLRGAGVDVETMMLPGCPHAILAFAGCVDKAKDLFDMCVDRISKSFGN

SEQ ID NO: 5117 - protein, 494 aa, Arabidopsis thaliana
MVLTKTATNDESVCTMFGSRYVRTTLPKYEIGENSIPKDAAYQIIKDELMLDGNPRLNLASFVTTWMEPECDKLIMDSINKNYVDMDEYPVTTELQNRCVNIIARLFNAPLEESETAVGVGTVGSSEAIMLAGLAFKRKWQNKRKAEGKPYDKPNIVTGANVQVCWEKFARYFEVELKEVNLSEGYYVMDPDKAAEMVDENTICVAAILGSTLNGEFEDVKRLNDLLVKKNEETGWNTPIHVDAASGGFIAPFIYPELEWDFRLPLVKSINVSGHKYGLVYAGIGWVVWRAAEDLPEELIFHINYLGADQPTFTLNFSKGSSQIIAQYYQLIRLGFEGYKNVMENCIENMVVLKEGIEKTERFNIVSKDQGVPVVAFSLKDHSFHNEFEISEMLRRFGWIVPAYTMPADVQHITVLRVVIREDFSRTLAERLVADISKVLHELDTLPSKISKKMGIEGIAENVKEKKMEKEILMEVIVGWRKFVKERKKMNGVC

SEQ ID NO: 5118 - protein, 664 aa, Zea mays
MSPSNPLPPPGETRVGCSLPSPVTPQAMGGGPARHVAMRALRARFLSRQREGGPAAASTWWWCASGSAKGDMESTLKGIRGSDAPCVLDLDDAATVAGGVEDTYGEDRATEEQLVTPWTVSVASGYNLLRDPRYNKGLAFTERERETHYLRGLLPPAIVSQELQERKIMNNIRQYQLPLQRYMALMDLQEGNERLFYKLLIDNVEELLPIVYTPTVGEACQKYGSIFSRPQGLYISLKEKGKILEVLKNWPERSIQVIVVTDGERILGLGDLGCQGMGIPVGKLSLYTALGGVRPSACLPITLDVGTNNEELLNDEFYIGLRQRRATGQEYTDFLQEFMSAVKQNYGEKVLIQFEDFANHNAFDLLARYGTTHLVFNDDIQGTASVVLAGLIAAQTLLGGSLADHTYLFLGAGEAGTGIAELIALEISRQTKAPIEECRKKIWLVDSKGLIVSTRKESLQHFKKPWAHEHKPLSNLLDAVNAIKPTVLIGTSGKGQTFTKDVVEAISSFNERPIILALSNPTSQSECTAEQAYTWSKGQAVFATGSPFDPVEYNGKIHVPGQANNAYIFPGFGLGVVMSGAIRVHDDMLLAASEALAQQVTEENFEKGLIYPPFSNIRKISAHIAASVAAKAYELGLASRRPRPKDLVKYAESCMYSPIYRNYR

SEQ ID NO: 5119 - protein, 568 aa, Zea mays
GRDLTKFACDDLTIGFFFPPPPPPPPSSGYTLLRDPRHNKGLAFSEAERDAHYLRGLLPPALASQELQEKKLMHNLRQYERPLHRYIAMMDLQERNERLFYKLLIDNVEELLPVVYTPTVGEACQKYGSIYRRPQGLYISLKDKGKILEVLKNWPERSIQVIVVTDGERILGLGDLGCQGMGIPVGKLSLYTALGGVRPSACLPITIDVGTNNEALLNDDFYIGLRQRRATGEEYHELVEEFMAAVKQNYGEKVLTQFEDFANHNAFDLLEKYRESHLVFNDDIQGTASVVLAGLLAALKVVGGTLADHTYLFLGAGEAGTGIAELIALEMSKHTGSPIEECRPKIWLMDSRGLIVASRKESLQAFKKPWAHEHGAVETLLEAVRSLKPTVLIGTSGKGGTFTKDVVEAMASQNERPVVFALSNPTSHSECTAEQAYTWTEGRAVFASGSPFPAVELDGRALVPGQSNNAYIFPGFGLGVVISGAIRVRDDMLLAASEALAEQVTEAHYAKGLIFPPFTNIRAISARIAAKVAAKAYELGLASRLPRPDDLVKYAESCMYTPTYRSYR

SEQ ID NO: 5120 - protein, 174 aa, Candida albicans SC5314
MSAIIRQAIRPALRSVSSKRIAVTALRYNSTAAEPAKAPVDAKITTIVDQISTLTLLETSQLINELKERLNISDISLPVGGAQAAPVAQAAPAEEEVKEEVEEKTIFSIKLESFDAKSKPKIIKEVKGMLGLSLVESKKFVESAPKVLKENVAKEDAEKIKATLEGLGAKVSLE

SEQ ID NO: 5121 - protein, 119 aa, Brassica rapa
MTFASKIITCLLVLTIYIAAPTESHITCGTVTSTMTQCISYLTNGGPLPSSCCVAVKSLNQMAQTTPDRRQVCECLKSAGKEIKGLNIDLVAALPTTCGVSLSYPIGFNTNCDSISIAV

SEQ ID NO: 5122 - protein, 444 aa, Candida albicans SC5314
MVNLLKKLHITKSHQSNQSNSDSNSLNSNTSMDNHQQQQQLQHQQYQQQFQQPQQQLYPGEQIVHPAAAQTGQNTTNVTAVSSSNITQSATSSLHSQQLQHVDVSKSAAEEAIRRSLLPERSTVSKGKYSLTDFSIMRTLGTGSFGRVHLVRSVHNGRYYAIKVLKKHQVVKMKQVEHTNDERRMLKLVEHPFLIRMWGTFQDSKNLFMVMDYIEGGELFSLLRKSQRFPNPVAKFYAAEVTLALEYLHSHDIIYRDLKPENILLDRNGHIKITDFGFAKEVSTVTWTLCGTPDYIAPEVITTKPYNKSVDWWSLGVLIFEMLAGYTPFYDSTPMKTYEKILAGKIHYPSFFQPDVIDLLTKLITADLTRRLGNLINGPADIRNHPWFSEVVWEKLLAKDIETPYEPPITAGVGDSSLFDHYPEEQLDYGSQGEDPYASYFLDF

SEQ ID NO: 5123 - protein, 497 aa, Emericella nidulans
MSDLFTTIETPVIKYEQPLGLFINNEFVKGVEGKTFQVINPSNEKVITSVHEATEKDVDVAVAAARAAFEGPWRQVTPSERGILINKLADLMERDIDTLAAIESLDNGKAFTMAKVDLANSIGCLRYYAGWADKIHGQTIDTNPETLTYTRHEPVGVCGQIIPWNFPLLMWSWKIGPAVAAGNTVVLKTAQQTPLSALYAAKLIKEAPFPAGVINVISGFGRTAGAAISSHMDIDKVAFTGSTLVGPTILQAAAKSNLKKVTLELGGKSPNIVFDDADIDNAISWANFGIFFNHGQCCCAGSRILVQEGIYDKFVARFKERAQKNKVGNPFEQDTFQGPQVSQLQFDRIMEYINHGKKAGATVATGGDRHGNEGYFIQPTVFTDVTSDMKIAQEEIFGPVVTIQKFKDVAEAIKIGNSTDYGLAAAVHTKNVNTAIRVSNALKAGTVWINNYNMISYQAPFGGFKQSGLGRELGSYALENYTQIKTVHYRLGDALFA

SEQ ID NO: 5124 - protein, 297 aa, Zea mays
  unsure (1)..(297): unsure at all Xaa locations
MPVPPEPLPKPELPVPPQPMPPPVRPVPPQPLPRPPPCPLLPWPSRCCSXSGDIGGAARQLQELPKPDLPPLPKPVXPPRPDLPPLPKPEEQPPLPKPELPVPPQPLPIPPQPLPKPELPVPPXPSPVPPQPELPVPPQPMPKPELPVPPQPLPKPDMPVPPESLPKPELPVPPQPLPKPELPVPPEPLPKPELPVPPQPLLKPELPVPPEPLAKPELPMPPQPLPKPELPVPPEPLPKPELPVPPEPLPKPELPVPPEPLPKPELPPPVLPGELPPKPELVPLPPKAEIMPPLPKP

SEQ ID NO: 5125 - protein, 429 aa, Aeropyrum pernix K1
MHCSLAGWTVCVDFLYTGDKMLEDACAVISGERVERVHTGGFRGQPDLDLRGRSSLALPGVIDMHVHLRGLKLSYKEDEVSGTAAAASGCVTLVADMPNTQPPLRTPEALREKLASLEAGAKVDYTVYAGVPRSYGEAVEMASMGIAGFKIYPEDLVNLDSIKNVLEAAEEAGILVVLHPESHDMFAGPDYGWLRRVARPCHAEAASVELLHDAARECGCKPRVHITHASCPATVVESKKRGFTVDVTPHHLFLSEEEVAGPTHSWGKVNPPLRGVGERSLLTQLTIEGLVDAIASDHAPHSTWEKWMHPAIAPPGFPWLEWWPGFTAARLMRAVGLERFYSMVSQTPSTILGVGDRCLWDGCPATISVLQLERTRVYHKGYTKALYTPVLGMESFDCAATVIRGKIAYTAWEGVRGGATGVLATRVVH

SEQ ID NO: 5126 - protein, 116 aa, Ricinus communis
MKNIFFSVFFLLSFLLCLANVSEAAVPCSTVDMKAAACVGFATGKDSKPSSACCTGLQQLAQTVKSVDDKKAICRCLKASSKSLGIKDQFLSKIPAACNIKVGFPVSTATNCETIH

SEQ ID NO: 5127 - protein, 116 aa, Ricinus communis
MKNAVFSVLLLLSFLFCLANTNEAAVPCSTVDMKAAACVGFATGKDSKPSQACCTGLQQLAQTVKTVDDKKAICRCLKASSKSLGIKDQFLSKIPAACNIKVGFPVSTNTNCETIH

SEQ ID NO: 5128 - protein, 424 aa, Zea mays
MERYKLIRKIGDGTCGNVFMASNVETNEIVAVKKMKRKFCHWEECISLREVKALQKLFHPNIVKLKEVTMENHELFFIFEHMECNLYDVIRERQVAFPERDIRNFMVQILQGLAYMHNNGYFHRDLKPENLLVTNGIIKIADFGLAREISSNPPYTDYVSTRWYRAPEVLLQSSVYTPAIDMWAVGAILAELFTLSPLFPGESETDQLYKICTVLGTPDCTIWPEGMNLPRSCSFKFFQNPPRNLWELIPNASSEAIDLIQQLCSWDPRRRPTAEQALQHPFFNVCNWVPRPVHDAYHTKTNGPKAEPRLELNLWDFSTEPDDCVLDLTLSLKPSFSGTDLGKHVPRRTEEEILLYPGFENTPVKSGFWPLVPSDRPVGDVPAIPSWQQAYMVDSQGAFSGSPFLQSNLLENRSLAPIRQVNFF

SEQ ID NO: 5129 - protein, 316 aa, Streptomyces coelicolor A3(2)
MSDIVLEPAAQDFADATAKPPLLYELGVEGARKLLDDVQSGPVEKPDVDEKWITVPVEVGDVRVRIVKPAGTTGVLPVVLYVHGGGWILGNAGTHDRLVRELAVGAEAAVVFVEYDRSPEAKYPVAIEQAYATAQWVTTKGAEEGLDGSRMVVAGDSVGGNMSAALTHMAKRRGDVTFLHQSLYYPVTDAGQDTESYRLFAHGPHLTAKAMEWFWNAYAPDPAERDQITASPLRATPEDLQGLPPAFVVVDENDVLRDEGEAYARKLIQAGVPTTSVRYNASLHDFMMLNPVRGTQASTAAIEQAIHVLRSALGTD

SEQ ID NO: 5130 - protein, 326 aa, Oceanobacillus iheyensis HTE831
MNGLYLSSPGVIEFRELASRSKLSDDEVRIRLIYGGICGSDISVFKGKLPHANYPVVPGHELIGTVIETGKSAADFAGKRVAIMPNSFCGKCEYCKVGKTNICTEKQSLGINRDGGFAEEFVISAKYVLSLPDQLTNEKAVLIEPLAVIVHAMKKVVITEETKVAIIGCGNEGMLAIAVAEYLGAQVTAIDVKQNKLNKVSHSYHNVSTCQSADAEELFDVVIEAAGTSESFEQGIQLLKPGGAFVAIGMPPHANLPVVEIVRKEVTIYGSIIYNFPEDFNTSIEFLLQEDFQVEPVISKILSVNEYEKAYTYAVSGDYGKIILKF

SEQ ID NO: 5131 - protein, 322 aa, Xanthomonas campestris pv. phaseoli
MTASPSKLAQLRELSVVVADTGDYDAIKRLQPVDCTTNPTLVKKALDLPVYADLIERELAWGREHGGDDRTATVNEVADRLTIGVGVKLAGLVPGRVSTEVDADLAHDTQATIAKARKFIAMYAERGVSKDKILIKIAATWEGIEAARQLQKEGIDCNLTLIFNRSQALACAEAGVFLISPFVGRILDYYVGKGQTPASIDEDPGVVFVRTVYNEFKQRGYSTVVMGASFRSTAQIEALASCDRLTISPDLLEKLDAEHGELPRKLSPAKADNAQFTPIDSDSFASGLAADPMATEKLAGGIDTFAKDLHALRKTIADKLAG

SEQ ID NO: 5132 - protein, 297 aa, Triticum aestivum
  unsure (1)..(297): unsure at all Xaa locations
MKTLLILTILAMATTIATANMQVDPSSRVQWPQEQPSPQSQQPFSQQPQQIFPQPQQTFPHQPQQAFPQPQQTFPHRPQQQFPQPQQPQQPFPQPQQPQLPFPQQPQQPFPQPQQPQQPFPQSQQPQQAFPQPQQQFPQPQQPQQSFPQQQQXMIQSFLQQQMNPCKNFLLQQCNPVSLVSSLVSIILPRSDCQLMQQQCCQQLAQIPQQLQCAAIHNVAHSIIMQQEQQRGVQILRPLFQLAQGLGIIQPQQPAQLEGIRSLVLKTLPTMCNVYVPPDCSTINVPYASIDAVIGGQ

SEQ ID NO: 5133 - protein, 270 aa, Pyrus caucasica
AHYKSEADVGEAFAEAFKTGLIKREELFITTKIWNSDHGHVVEACKNSLEKLQLDYLDLYLVHYPMPTRHNAIGKTASLLGEDKVLDIDVTISLQQTWEGMEKTVTLGLVRSIGLSNYDLFLTRDCLAYSKIKPAVSQFETHPYFQRDSLVKFCIKHGVLPTAHTPLGGAAANKDMFGSVSPLDDPILNDVAKKYGKSVAQICLRWGIQRKTAVIPKSSKIQRLKENLVVLEFQLSDEDMQLIYSIDRKYRTSLPSKTWGLRRVCKGEFV

SEQ ID NO: 5134 - protein, 324 aa, Magnaporthe grisea
MSNSLDQLKSSGTTVVCDSGDFATIGKYKPQDATTNPSLILAASKKAEYAKLIDDAIAYAKKQGGSVDDQVDASLDRLLVEFGKEILKIIPGKVSTEVDARFSFDTKASVDKALHIIKLYEAEGISKDRVLIKIASTWEGIKAAEILQRDHGINCNLTLMFSLVQAIAAAEADAFLISPFVGRILDWYKAAHKKEYKKEEDPGVESVKNIFNYYKKFGYKTIVMGASFRNTGEITELAGCDYLTISPNLLEELLNSSEAVPKKLDAQGAAALDIQKKTYISDEPLFRFDFNEDQMAVEKLREGISKFAADADTLKGILKEKIQA

SEQ ID NO: 5135 - protein, 213 aa, Triticum aestivum
  unsure (1)..(213): unsure at all Xaa locations
YPVKCNQDRYVVEDIVEFGAPFGFGLEAGSKPELLLTMSCLVARGSPDALLVCNGYKDLEYVSLALIARTMGLNTVIVLEQEEELDIVVEASRRLNIRPVVGMRAKLRTKHAGHFGATSGEKGKFGLNAAQILSVVSKLKALAMLDCLQLLHFHIGSQIPTTALLADGVGEAAQIYCELARLGAAMRVIDVGGGLGIDYDGTXSAQTDMSVAY

SEQ ID NO: 5136 - protein, 462 aa, Zea mays
  unsure (1)..(462): unsure at all Xaa locations
MARSRQEGEAGGEERKLVLGKYELGRLLGQGTFAKVYYARDLSAAAGTGSTSVAIKVIDKARLRRMEGMVEQLRREISIMRMVRHPNVVGIREVLASRSRVFVVMEYARGGELFAKVARGRLTEDHARRYFQQLVXAVGFCHRRGVAHRDLKPENLLLDEDGRLKVTDFGLAALPEQLRHDGLLXHTQCGTPAYVAPEVLRKRGYDGARADLWSCGVVLYVLLCGFLPFQHDNCAKMYQRIFKAEYQVPPWVSGDARRLIARLLVVDPAKRASIPEVMCTPWFRKGFVPPVLSVSPPMTPKKRLDGDDGGGGALFDSSSNSGATSPRSCNAFQLISSMSSGLDLSGLFENEHKAATVFTARAPAATVVEKLESAARALGFETTRGKGWKVRMEAKAGGTNGRLAVTAEVLEVAVDVAVVEFAHDAGDALDFNKFCAVDVRPGLAEIVWAWQGDSPAAVVGTA

SEQ ID NO: 5137 - protein, 203 aa, Pichia angusta
MNNEYDYLFKLLLIGDSGVGKSCLLLRFAEDTYTQDYISTIGVDFKIRTIELDGKTIKLQIWDTAGQERFRTITSSYYRGAHGIIIVYDVTDQESFNNVNQWLQEIDRYATSGVMKLLVGNKCDLTDKKVVDYAVAKEFADSRGIKFLETSASQSTNVEQAFIVMSKQIKSQMANSQPASNTAGKPSVNLSGTSVINQQGGCC

SEQ ID NO: 5138 - protein, 1563 aa, Lactobacillus johnsonii NCC 533
MTVPTNQTNNLNEETNQNESTVSITGAKTNDSLIAGVTQGAINVHINNHATTPLTINHGEQVNVSINDKNNLLSFNVNPTKTSEFDMNRTDTAANKEFTFTYTGSDDGILSGFDATFPFNADTTATTQYYEKYGTYPDLTLPVTVTLPNKQSFTQNLPIKINPYEDKVINEEILHGFIIGPKVIWTPGEDGNPGANGVYTEYGANYTGPEPSAKADIPVAQQKDARLMQYAIDWNYGSSTNPSLKPLLNVLAHIKFSSGQRILPSTIKVFKIPSNIKVVASDGQRISINDYYSKISTLSEDTNFENFLRNSISNDGREIVIDQKGNFTVNGEDYSKNGPYFIQLDTQLDINKIPDWINTPSSGPSISTPTTNENDWNPSGSGSTANTFTQTYTNFKLDPTVDRIIKIRFIDENTNQEIPNSAKNIITATNSSVPNPTMDIIKDLEERHYVLDQEATEGKNGSHSENLTNYNIATQNFKLDSLNNSYNSEEINVKNTSPKYYVYLYHETKPQSQTSSVTETINYVCANGTKKGELAALPYTHTVTYTRNGIEDLVTNYIDWNSWMPDSTFNAVNSPIASDSAYSLIDPLVVPAIETNISENGEITTQNSIPLSYTVNYYAPEKATLHFYDDTDKQDLTAYLLQNNQTAVINDIYDKADNNSTKQAISFAGVDKVIDFLNSKHYVFSGVSGIGSTSSSDYSKISYGNFDDDETQDQNFVLHFKHETEPISDTKEVTETIHYLYEDNSQAANDVKHSVTFTKTGTKDLVTGKENSKWSAVQTFPEVVSPVISGYTPTQSKIAPISVDHTSNDIDKTVIYTANKQQATLRFYDDSSKKFIDFAKDLIVTGSSSSPILFTIPKSYDFSNYNFVAVNKGDNPTQTTDSLSGTTLNDVTYGKFDTDNTTNQYFIAHFTHKISPVNENKSISEKAILYAENGPRKDNIFKTLNLGNINFIRTGQKDLVNQQITWDAWNVENKAQNISISEIIFNVYKLNSQNISQPSSTLKKFELNGHEISPIEFDKKQDQALIITLPNNFEFLIKVPYVLTENITVIYKDDTTNEILERQVLSGQPDTSSQYSTKNTITKYLAKNYLLVSDPTNQQTLSFDNTEDPDDQTYVVHFKHQFEEINNSKSIKETINYIYDNGTEAAPSYTNSIQFVQSGEVDLVTNIRKIKDWTPSISSFSAVKSPIINGYTTDHKQIDQQFITPNSKDLVFNVVYTAEPVKPTKPVQPIKPMQPTKPVQPTKPVQPTKPVEPTKPVQPTKPVQPTKPVEPTKPVQPTKPVEPTKPVQPTKPVQPTKPIEPTKPVKPTKPVEPTKPVKPTKPVKPTKPVEPIKPVKPTKPVQPTKPVEPIKPVKPTKPVQPTKPVEPIKPVKPTKPVQPTKPVKPTKPVEPTKPVQPIKPVQPTKPVQPTKPVEPTKPVEPTKPVRPTKPVEPTKPVKPTKPVEPTKPVQPTKPIEPTKPVEPTKPVQTTKPVEPTKPVQPTKLTISTSLHKSSDKLTQLTHQSYQNSKVSRQNTNNISVQKKKILPQTGTKTTDIGILGLALATAASLLGLISDKVNRKKHN

SEQ ID NO: 5139 - protein, 475 aa, Prochloron didemni
MSKLILFWHRRDLRISDNMGLAAARKQSSKIVGLFCLDPNILNSNEVAPARVTYMLGCLQELKESYSKIGSQLLIVRGEPIEAIPQLAVALQVTGVFWHKDGEPYARERDGKVEQELLKQGIAVTNYWDQLLHPPEDILTQSGKPYTVYTPFWKNWSQKPKLEVAEKLDRIQGLTAEEIKIAQETGVVSLPTGKDLGYYWDGELILTPGETAAREQLEEFSERAIAQYQEQRNFPAVEGTSLLSPALRFGVIGIRTVWQATLEATKNSYSEEVRANIETWQKELAWREFYQHALYHFPQLTVEPYRQQFKDFPWDNNPEHFQAWCEGKTGYPMVDAAMRQLNETGWMHNRCRMIVASFLTKDLIINWQWGEQYFMQKLCDGDLASNNGGWQWSASCGMDPKPLRIFNPASQAKKFDPEGEYIRQWLPELSSIDTEYLVRGKIPDDERERCDYPQPIVDHNLRQREFKRRYKELSP

SEQ ID NO: 5140 - protein, 495 aa, Neurospora crassa
MEVELTAPNGKKWMQPLGLFINNEFVKSANEQKLISINPTTEEEICSVYAATAEDVDAAVSAARKAFRHESWKSLSGTERGALMRKLADLVAENAEILATIECLDNGKPYQTALNENVPEVINVLRYYAGYADKNFGQVIDVGPAKFAYTVKEPLGVCGQIIPWNYPLDMAAWKLGPALCCGNTVVLKLAEQTPLSVLYLAKLIKEAGFPPGVINIINGHGREAGAALVQHPQVDKIAFTGSTTTGKEIMKMASYTMKNITLETGGKSPLIVFEDADLELAATWSHIGIMSNQGQICTATSRILVHEKIYDEFVEKFKAKVQEVSVLGDPFEESTFHGPQVTKAQYERVLGYINVGKEEGATVMMGGEPAPQNGKGFFVAPTVFTNVKPTMKIFREEIFGPCVAITTFKTEEEALTLANDSMYGLGAALFTKDLTRAHRVAREIEAGMVWVNSSNDSDFRIPFGGVKQSGIGRELGEAGLAPYCNVKSIHVNLAA

SEQ ID NO: 5141 - protein, 267 aa, Bordetella pertussis Tohama I
MTIPSFGVGTFRLTGQTVIDSVRNAIDLGYRAVDTAQIYGNETEVGQTIAESGVARSELFVTTKIWTDNYARAKLLPSLRASLEKLRTDYVDLTLIHWPAPGNGVALPEHMEALAEAKALGLTRRIGISNFNIALTRQAIAAVGQGEIATNQIELSPYLQSARLTAFLREQGIAVTSYMTLAYGKVLKDPVLARIADKHRSTVAQVALAWALQQGYAVIPSSTKRENLASNLLARGLALDADDMARIAALERNGREVDPEGLAPAWD

SEQ ID NO: 5142 - protein, 324 aa, Magnaporthe grisea 70-15
MASPTMKLNNGLDMPQVGFGLWKVENSVCADVVYNAIKAGYRLFDGACDYGNEVECGQGVKRAIDEGLVKREELFIVSKLWNTFHDGERVEPIVKKQLADWGIEYFDLYLIHFPVALEYVDPSVRYPPGWHYDDAGTEIRPSKASIQETWTAMEKLVDAGLSKAIGVSNFQAQLLYDMLRYARIRPATLQIEHHPYLVQQRLIEACKTEGIVVTAYSSFGPASFKEFNMEHAEALTPLLEEPTIVKLAEKYGKDPGQVLLRWATQRGLAVIPKSSREKTMKSNFEAVGWDMEDSDIKTISALDKGIRFNQPANYFSTDKLWIFG

SEQ ID NO: 5143 - protein, 322 aa, Schizosaccharomyces pombe
MSSLEQLKATGTVVVSDTGDFESIAKYKPQDATTNPSLILAASKKPQYAALVDAAVDYAKAKGGSINSQIEIAFDRLLIEFGTKILAIVPGRVSTEVDARYSFDTQTTIEKARHLIKLYEAEGIGRERVLIKIASTYEGIQAAKQLEEEGIHCNLTLLFSFVQAVACAEANVTLISPFVGRILDFYKAKNNRDYTAQEDPGVVSVSNIFNYYKKFGYKTIVMGASFRNVGEIKELAGVDFLTISPALLEQLNNSTDAVPKKLDASKASSLNLEKVSYLTDEPKFRFDFNNDEMAVVKLSTGIAAFAKDADTLRTILKAKLEA

SEQ ID NO: 5144 - protein, 430 aa, Bifidobacterium longum NCC2705
MATAQLDVDSNKFNLPVVKASAGPDGIVVSKLRNDGWVTLDPGFLTTAQCESKITYIDGKHSILRYCGYPIEQLCENSDFLEVAWLLRHGELPSRAEYEQFCADINHKTMVGEDFRTFMGSFPRSAHPMSVLASAINALATFYPDTTDISDNDQLDEAAKIIMAKARTIVSYIFRRRRDEPMLYPDYARGYVDDFLRMCFAVPYEPFESDPLYVHALGRLLIIHADHEQNCSTSVVRIAGSAHANLYSAVAAGVNALSGPLHGGANEAVLRQLKAIRDSGKSVAEFVRDAKENGQKISGLGHRVYKSYDPRAAIARKYLEKIMEREDTQKLPSDERALFAVATELEDIALNDEYFVSRNLYPNVDFYTGLIYRAIGFDPAMFTTLFALGRIPGWIAQYREMLADPNTKIGRPRQVYTGPVERDFVPMDER

SEQ ID NO: 5145 - protein, 246 aa, Zea mays
  unsure (1)..(246): unsure at all Xaa locations
MGLGQPWPLLNSSHEKVLRHKHAGMHVGSKTNVYIVLEYVTGGELFDTIANHGRMREGEARSYFQQLINAVDYCHSRGVYHRDLKPENLLLDSYGNLKVSDFGLSALSQQIKDDGLLHTTCGTPNYVAPEVLEDQGYDGAMADLWSCGVILFVLLAGYLPFEDSNLMTLYKKISNAEYTFPPWKLSLPRGVLTRILDPNPMTENSCDFRITIPEILEDEWVKKGYKRPEFVEEYDTPXDDVDAVFN

SEQ ID NO: 5146 - protein, 136 aa, Vibrio parahaemolyticus RIMD 2210633
MALFKYIFITVFALALYSPASNGSEIKQNVDLFEFQSVEVQQRATSLAKTLRCPQCQNQNLIESNAPAAKDLRLKVYTMVNEGSSDQQVKDYLVERYGNIVLYQPPFNYSTALLWIFPIIFLIFFALFSIRLIKRN

SEQ ID NO: 5147 - protein, 698 aa, Glycine max
  unsure (1)..(698): unsure at all Xaa locations
MPVLACCVDAAAPPGYAFAGDISFPAPIAFTGVPPATADDTNNSNNHWSPSLSAALYNVDGWGGPYFAVNTAGNISVRPHGSDTLSHQEIDLLKIVKKASDPKSLGGLGLQLPLIVRFPDVLKNRLDSLQSAFDYAIQSGGYESHYQGVYPVKCNQDRFVVEDIVKFGSSFRFGLEAGSKPELLLAMSCLCKGNPDALLICNGFKDAEYISLALVANKLALNTVIVLEQEEEVDLIVELSKKLCIKPVIGXRAKLRTKHSGHFGGTSGEKGKFGLTTAQILRVVKKLAHAGMLDCLQLLHFHIGSQIPSTALLADGVGEAAQIYCELVRLGANMRVIDIGGGLGIDYDGSKSCDSDISVEYGLEEYAAAVVHAVQCVCDRRSVKHPVICSESGRAIVSHHSVLIFEAVGTSSTNGGGAPPALSAHYLAEELSEDYGYLSELAFRGDYETCLVYTEEMKERCVEQFKQGTVCMEQLAAVEGLCELVRKAVGAAESVRRYHVNLSIFTSVPDAWGIDQVFPIIPIHRLEEKPSVRGILSDLTCDSDGKIDKFINGESSLALHEMEGGSYYLGMFLGGAYEEALGGVHNLFGGPSVIRVSQSDGPHSFAVTRAVPGPSCGDVLRVMQHXPELMFETLKXHRAQEYVSHDNXAAVLAAGLARTFDRMPYLLPLSSFVADDVAAAAAVPAGEDDEEQWSYICA

SEQ ID NO: 5148 - protein, 416 aa, Escherichia coli
MESKVVVPAQGKKITLQNGKLNVPENPIIPYIEGDGIGVDVTPAMLKVVDAAVEKAYKGERKISWMEIYTGEKSTQVYGQDVWLPAETLDLIREYRVAIKGPLTTPVGGGIRSLNVALRQELDLYICLRPVRYYQGTPSPVKHPELTDMVIFRENSEDIYAGIEWKADSADAEKVIKFLREEMGVKKIRFPEHCGIGIKPCSEEGTKRLVRAAIEYAIANDRDSVTLVHKGNIMKFTEGAFKDWGYQLAREEFGGELIDGGPWLKVKNPNTGKEIVIKDVIADAFLQQILLRPAEYDVIACMNLNGDYISDALAAQVGGIGIAPGANIGDECALFEATHGTAPAYAGQDKVNPGSIILSAEMMLRHMGWTEAADLIVKGMEGAINAKTVTYDFERLMDGAKLLKCSEFGDAIIENM

SEQ ID NO: 5149 - protein, 165 aa, Zea mays
  unsure (1)..(165): unsure at all Xaa locations
MDGRMFGLETPLMVALQHLLDVPDGDAGAGGDKASGAAAGGGPTRTYVRDARAMAATPADVKELPGAYAFVVDMPGLGTGDIKVQVEDERVLVISGERRRXEREDAKYLRMERRMGKFMRKFVLPDNADMDKISAVCRDGVLTVTVEKLPPPEPKKPKTIEVKVA

SEQ ID NO: 5150 - protein, 498 aa, Acinetobacter sp. SE19
MGGIPHIPFCLTSVICQGCLIMNYPNIPLYINGEFLDHTNRDVKEVFNPVNHECIGLMACASQADLDYALESSQQAFLRWKKTSPITRSEILRTFAKLAREKAAEIGRNITLDQGKPLKEAIAEVTVCAEHAEWHAEECRRIYGRVIPPRNPNVQQLVVREPLGVCLAFSPWNFPFNQAIRKISAAIAAGCTIIVKGSGDTPSAVYAIAQLFHEAGLPNGVLNVIWGDSNFISDYMIKSPIIQKISFTGSTPVGKKLASQASLYMKPCTMELGGHAPVIVCDDADIDAAVEHLVGYKFRNAGQVCVSPTRFYVQEGIYKEFSEKVVLRAKQIKVGCGLDASSDMGPLAQARRMHAMQQIVEDAVHKGSKLLLGGNKISDKGNFFEPTVLGDLCNDTQFMNDEPFGPIIGLIPFDTIDHVLEEANRLPFGLASYAFTTSSKNAHQISYGLEAGMVSINHMGLALAETPFGGIKDSGFGSEGGIETFDGYLRTKFITQLN

SEQ ID NO: 5151 - protein, 506 aa, Oryza sativa (japonica cultivar-group)
MVALASLSSLSPCGLARRRSASSAASISCCAAPPPPSAKGSQESRTPRRRVRKTEGATKSLEDSVKRKMEQFYEGLDGPPLRVLPIGGLGEIGMNCMLVGNYDRYILIDAGVMFPDFDEFGVQKIIPDTTFIKKWSHKIEAVIITHGHEDHIGALPWVIPALDSSTPIFASSFTMELIKRRLKEFGIFLSSRLKVFRVRKRFQAGPFEVEPLRVTHSIPDCCGLVLRCADGIIFHTGDWKIDESPVDGKIFDRQALEELSKEGVTLMMSDSTNVLSPGRSISESVVAGSLLRHISEAKGRVITTQFASNIHRIGSIKAAADLTGRKLVFVGMSLRTYLDAAFRDGKSPIDPSTLVHLIESRFLLKVKVEDMDAYAPNDLLVVTTGSQAEPRAALNLASFGGSHALKLSKEDVLLYSAKVIPGNESRVMKMLNRLTELGPKIVMGKDAGLHTSGHAYHDELEEVLQIVKPQHFLPVHGELLFLKEHELLGRSTGIRHTTVSTLLAMV

SEQ ID NO: 5152 - protein, 232 aa, Zea mays
  unsure (1)..(232): unsure at all Xaa locations
MNSLYDVSCFAAGLAGNVFALALFLSPVPTFKRVLKAKSTEQFDGLPYLLSLLNCCICLWYGLPWVSDGGRALVATVNCTGALFQLAYISLFIFYADSRTTRLKVAGLLVLVVFAFALIAHASIAFFDQPLRQLFVGSVSMASLVSMFASPLAVMGXVVVRTECVEFMPFYLSLSTFLMSASFAVYGLLLRDFFIXSRMGSESSWEXCSWCCTRTTAGDGKQRLVSTVACLI

SEQ ID NO: 5153 - protein, 501 aa, Azoarcus sp. EbN1
MDVTPLLARLGVAMDELECGELPVRSPIDAAVIARLAPHSCAHAGVALDRAQQAFFAWRDVPPPRRGDMVRQYGNLLRRHKADLGELVSIEAGKIRQEGLGEVQEMIDICDFAVGLSRQLHGLTIASERPGHRMMEQWHPAGVVGVVSAFNFPVAVWAWNAALAWVCGDSVVWKPSPRTPLTALACAALFDSLRSEFDELPPGLLEVLVGGNELASLLADDRRVAVLSATGSTAMGKALAPRVAARLGRSILELGGNNAAIICPTADLALAERAILFAAAGTAGQRCTSLRRLIVHESIADALLERLRAAWGRITVGNPLDPATLVGPLIEAAAGAKMDRALAEARAAGGTVWGGEAIRVPGCEGACYRRPALVEMPGQTALVKEETFAPILYVLRYRTLDEAIALHNDVPQGLASSIFTRDLTESERFLSATGSDCGIANVNIGPSGAEIGGAFGGEKDTGGGRESGSDAWKAYMRRATCTINYSGALPLAQGIHFGLDA

SEQ ID NO: 5154 - protein, 382 aa, Phanerochaete chrysosporium
MAFASSLLALVALAAVTSAAPATTQATCPDGTKVNNAACCAFIPLAQDLQETIFQNDCGEDAHEVIRLTFHDAIAISQSKGPSAGGGADGSMLLFPTIEPNFSANNGIDDSVNNLIPFMQKHDTISAGDIVQFAGAVALTNCPGAPQLEFLAGRPNKTIPAIDGLIPEPQDSVTSILERFKDAGNFSPFEVVSLLASHSVARADKVDETIDAAPFDTTPFVFDTQIFLEVLLKGVGFPGTANNTGEVASPLPLTSGSDTGELRLQSDFALARDERTACIWQGFVNEQALMAASFKAAMAKLAVLGHDRNTLVDCSDVVPAPKPAVNKPASFPATTGPQDLELSCNTKPFPSLSVDAGAQQTLIPHCSDGDMTCQSVQFNGPA

SEQ ID NO: 5155 - protein, 360 aa, Pseudomonas aeruginosa
MSKQILVLPGDGIGPEIMAEAVKVLELANDRFQLGFELAEDVIGGAAIDKHGVPLADQTLQRARQADAVLLGAVGGPKWDRIERDIRPERGLLKFRSQLGLFANLRPAILYPQLAAASSLKPEVVAGLDILIVRELTGGIYFGQPREQRVLENGERQAYDTLPYSESEIRRIARVGFDMARVRNNRLCSVDKANVLASSQLWREVVEEVAKDYPDVELSHMYVDNAAMQLVRAPKQFDVMVTDNMFGDILSDEASMLTGSIGMLPSASLDANNKGMYEPCHGSAPDIAGQGIANPLATILSVSMMLRYSFSQATAADAIEQAVSKVLDQGLRTGDIWSEGCRKVGTREMGDAVVAALKNL

SEQ ID NO: 5156 - protein, 112 aa, Bartonella sp. Rf1570yn
ANEACLKMLQEIGSIKRIPEFIARAKDKNDPFRLMGFGHRVYKNYDPRAKIMQKTCHEVLKELNIQDDPLLDIAIELEKIALNDEYFIEKKLYPNVDFYSGITLKALGFPTE

SEQ ID NO: 5157 - protein, 329 aa, Zea mays
  unsure (1)..(329): unsure at all Xaa locations
QDGRGGRQLRGDGLLHTACGTPAYVAPEVLLKTGYDGAKADIWSCGVILFVLLAGYLPFNDTNLILVYRKITQSNYKCPPWFSVEARKLLARLLDPNPRTRITISKVTANPWFQKGLCPLTTDKPLDLWETSEVLGKEKACRCRHHQRDDADADADADDEENTRKRKRSKVTVSSPPTVAVRPSSMNAFDIISRSSGLDLSKMFDEEHRSEARFSSRESTPXVRPRVRPRVRTRNLDIKLNKRGRVEMEGGQYCRRGTLVIEAEIFEVAPSVRVVEMRKIGGDSPEFREFYRQELKPSLGDIVWSWQGSDSPPTPLLPPAPRQATNQRP

SEQ ID NO: 5158 - protein, 509 aa, Glycine max
MASNDSDSQMKIVHGDAGYILEDVPHFADYIPNLPTYPNPLRSNPAYSVVKQYFVHMDDTVPQKVVVHKDSPRGVHFRRAGPRQKVYFKSDEVHACIVTCGGLCPGLNTVIREIVCGLSYMYGVNKVLGIDGGYRGFYSKNTITLTPKVVNDIHKRGGTILGTSRGGHDTGKIVDSIQDRGINQVYIIGGDGTQRGATVIYEEVRRRGLKVAIAGIPKTIDNDIPVIDKSFGFDTAVEEAQRAINAAHVEAESIENGIGVVKLMGRYSGFIAMYATLASRDVDCCLIPESPFYLEGKGGLFEFIQKRLKENGHMVIVIAEGAGQDLLTESMQAMDQKDASGNKLLQDVGLWISHKIKDHFARKDKIPINLKYIDPTYMIRAIQSNASDNVYCTLLAQSAVHGAMAGYTGFTVGLVNGRHTYIPFNRINERQNKVVITDRMWARLLSSTNQPSFLSPKDLEEAKKAEQPPTELLEGNNCNDVGDAGKEEQPPKDEQESGNHADNGIKTEN

SEQ ID NO: 5159 - protein, 58 aa, Glycine max
MAGDGAATCIDILLAIILPPLGVFLKYGCQSVEFWICLVLTLFGYIPGIIYAVYAITK

SEQ ID NO: 5160 - protein, 506 aa, Pseudomonas syringae pv. tomato str. DC3000
MRYAHPGTEGAIVNFKERYGNYIGGEFVAPVKGQYFTNTSPVNGKPIAEFPRSTAEDIDKALDAAHAAAAAWGSTSVQARSLVLLKIADRIEANLEVLAITETWDNGKAIRETLNADIPLAADHFRYFAGVLRAQEGSAAEIDGNTVAYHIHEPLGVVGQIIPWNFPILMAAWKLAPALAAGNCIVLKPAEQTPLGISVLIELIGDLLPAGVLNIVQGYGREAGEALASSKRIAKIAFTGSTPVGSHIMKLAADNIIPSTVELGGKSPNIFFEDIMSAEPEFIDKAAEGLVLAFFNQGEVCTCPSRALVQESIYPQFMEAVLRKVEKIKRGDPLDTDTMVGAQASEQQFDKILSYLEIAKGEGAELLTGGKVEKLEGDLSTGYYIQPTLLKGNNKMRVFQEEIFGPVVSVTTFKDEAQAVAIANDTEFGLGAGLWTRDINRAYRVGRAIKAGRVWTNCYHLYPAHAAFGGYKKSGVGRETHKIALEHYQQTKNLLVSYDTNPLGFF

SEQ ID NO: 5161 - protein, 304 aa, Azoarcus sp. EbN1
MSIQWFPGHMTSARKKAAETMALTDVVIEVLDARIPEASSNPMIHELRRHRQRVCLKVLNKADLADPVATRAWLDFFNSQEGVKAVALSCKKPGDVARVPGLCQGLAPHRNDGTKLLRIMIMGIPNVGKSTLMNALLKRRVAKVGDEPAVTKSQQTFDLGSHMTITDTPGLMWPKIAHDSDGFMLAASHAIGRNAVIDEEVATFLGDLLLERYPALLAARYGIAPERLEALDGVGVIETIAARRGCRLKGGAPDLEKASQIFLNDYRSGVLGRISLETPESRRKMLSAATSAASRAAEAIGPDA

SEQ ID NO: 5162 - protein, 279 aa, Candida albicans SC5314
MVLEATMIAIDNSEYMRNGDFLTSRYEAQLTATEFIFQNKINSNPENTVGLLAYGGSGPQVLSTLTTDFGKILAGVHETKIQGENNFSSGIQVAALALKHRQNKVQQQRIIIFVGSPIKESEKELEKLAKKMKKNNVAVDIINFGEEGVNTAKLERFQSTINNHDNSHLVTISPGPRLLYEVVASSPILVEDGGFGAGVSGGDMDFFGGAGGAGDIIDPNMDPDLAMALRLSLEEEKARQEREAADRAKAEASTDLEKIDESKEDNNDKDKDVNMEDAK

SEQ ID NO: 5163 - protein, 322 aa, Glycine max
MAGKKIPDVLLNSGHKMPVIGMGTSVENRPSNETLASIYVEAIEVGYRHFDTAAVYGTEEAIGLAVAKAIDKGLIKSRDEVFITSKPWNTDAHRDLIVPALKTTLKKLGTEYVDLYLIHWPVRLRHDLENPTVFTKEDVLPFDIEGTWKAMEECYKLGIAKSIGICNYGIKKLTKLLEIATIPPAVNQVEMNPSWQQGKLREFCKQKGIHVSAWSALGAYKIFWGSGAVMENPILQDIAKAKGKTIAQVALRWVYQQGSSAMAKSTNSERMKQNLDIFDFVLSEEDLERISQVPQRRQYTGDIWLSENGSCKTLEELWDGDV

SEQ ID NO: 5164 - protein, 338 aa, Leavenworthia uniflora
  unsure (1)..(338): unsure at all Xaa locations
TGQIIRSKAAVAWEAGKPLVMEEVEVAPPQKHEVRIKILFTSLSHTDVYFWEAKGQTPLFPRIFGHEAGGIVESVGEEVTDLQPGDHVLPIFTGECGDCPHCHSEESNMCDLLRINTERVGMIHDGESRFSINGKPIHHFLGTSTFSEYTVVHSGQVAKINPEAPLDKVXIVSCGLSTGLGATLNVAKPKKGQSVAVFGLGPVGLGAAEGARIAGASRIIGVDLNSNRFEQAKKFGVTEFVNPKEHDKPVQQVIAEMTNGGVDRSVECTGSVQAMIQAFECVHDGWGVAVLVGVPSKDDAFKTHPMNFLNERTLKGTFFGNYKPKTDIPGVVEKYMNK

SEQ ID NO: 5165 - protein, 171 aa, Oryza sativa (indica cultivar-group)
MEHKETGCQQPKGPILCINNCGFFGSAATMNMCSKCHKEMIMKQEQAKLAASSIDSIVNGGDSGKEPIIAGHAEVAVAQVEVKTLVAQPAEIAGPSEGVTVNPKGREGPNRCSTCRKRVGLTGFNCRCGNLYCAMHRYSDKHDCQFDYRTAARDAIAKANPVVKAEKLDKI

SEQ ID NO: 5166 - protein, 389 aa, Escherichia coli
TLQNGKLNVPENPIIPYIEGDGIGVDVTPAMLKVVDAAVEKAYKGERKISWMEIYTGEKSTQVYGQDVWLPAETLDLIREYRVAIKGPLTTPVGGGIRSLNVALRQELDLYICLRPVRYYQGTPSPVKHPELTDMVIFRGNSEDIYAGIEWKADSADAEKVIKFCREEMGVKKIRFPEHCGIGIKPCSEEGTKRLVRATIEYAIANDRDSVTLVHKGNIMKFTEGAFKDWGYQLAREEFGGELIDGGPWLKVKNPNTGKEIVIKDVIADAFLQQILLRPAEYDVIACMNLNGDYISDALAAQVGGIGIAPGANIGDECALFEATHGTAPKYAGQDKVNPGSIILSAEMMLRHMGWTEAADLIVKGMEGAINAKTVTYDFERLMEGAKLL

SEQ ID NO: 5167 - protein, 316 aa, Brassica napus
  unsure (1)..(316): unsure at all Xaa locations
IGEGGFGQVFKGWLDXKTLXXSXPVVGIPVXVKKSNPDSAQGLHEWQCEVKFXGKFXHPNLVKLLGYCWEENQFLLVYEYLPKGSLENHLFSKGEALTWDTRLKIAIEAAQGLNFLHNSEKSVIYRDFKASNILLDSNFNAKLSDFGLAKLGPINGFSHVTTRVMGTQGYAAPEYMATGHLYVRSDVYGFGVVLLEILTGLRALDPNRPPLQLNLVEWAKPGLTQKKKIQKMMDPRLEHKYPISAVIRTAALILRCVEEDPKNRPPMDEVLRELEIVRTMRDEPKEEKRKRSGGGPDNNRINRYGSPHVRGTGRTR

SEQ ID NO: 5168 - protein, 218 aa, Brassica napus
NDGSHIVHVPSGANALSDVLLSTPVFTGDEGASGYVSAAAAAAAAGGDFDFGVDPNIDPELALALRVSMEEERARQEAAAKKAADEAGQKDKDGDTASASQETVARTTEKNAEPMDEDNALLDQAIAMSVGDVNMSEAADEDQDLALALQMSMSGEESGEATGAGNLLGDQAFISSVLSSLPGVDPNDPAVQALLGSLPDESKRNEEESNSKGEDEKK

SEQ ID NO: 5169 - protein, 388 aa, Escherichia coli
TLQNGKLNVPENPIIPYIEGDGIGVDVTPAMLKVVDAAVEKAYKGERKISWMEIYTGEKSTQVYGQDVWLPAETLDLIREYRVAIKGPLTTPVGGGIRSLNVALRQELDLYICLRPVRYYQGTPSPVKHPELTDMVIFRGNSEDIYAGIEWKADSADAKKVIKFLREEMGVKKIRFPEHCGIGIKPCSEEGTKRLVRAAIEYAIANDRDSVTLVHKGNIMKFTEGAFKDWGYQLAREEFGGELIDGGRWLKVKNPNTGKEIVIKDVIADAFLQQILLRPAEYDVIACMNLNGDYISDALAAQVGGIGIAPGANIGDECALFEATHGTAPKYAGQDKVNPGSIILSAEMMLRHMGWTEAADLIVKGMEGAINAKTVTYDFERLMEGAKL

SEQ ID NO: 5170 - protein, 509 aa, Bordetella bronchiseptica RB50
MDLSDLKKLGLDVAYPFKEQYENYIGGQWVPPVGAEYFDNLSPITGQPFCRVPRSGAADIELALDAAHRARAAWARTSPAERANILLRIADRIEGQLPMLAVAESIDNGKPLRETTAADLPLAIDHFRYFAGCIRAQEGAISEIDANTVAYHFHEPIGVVGQIIPWNFPLLMAAWKLAPALAAGCVVVLKPAEQTPASILVLAELIGDLLPPGVLNVVNGYGKEAGQALATSKRIAKIAFTGSTPVGKHILHAAADNLIPATVELGGKSPNIFFDDVMDHDDEFLDKALEGLAMFALNQGEVCTCPSRILIQESIYERFIEKAIARVQSIKTGHPLDAGTMVGAQVSQVQMDKILSYIDIGRQEGAQCLTGGARNDMLPGGLDQGFYVQPTMLLGKNSMRIFQEEIFGPVAAVATFKDEEEAIAMANDTFYGLGAGVWSRDGARAYRVGRGIEAGRVWTNCYHLYPAHAAFGGYKQSGIGRETHKAALSNYQQTKCLLVSYSAKALGFF

SEQ ID NO: 5171 - protein, 162 aa, Crocosphaera watsonii WH 8501
MSHNNSIGNYLIQRLLELGVNHVFGVPGDFVLGFNKLLENSDLEFINTCDEQGAGFAADAYARLRGLGVVCVTYCVGGLKIANTTAQCFAEKSPVVVISGSPGINERIKNPLLHHKVKEFDTQYKGFQEITVAATVLDNPDTAQVNRTIIHDYTSSFPQFGD

SEQ ID NO: 5172 - protein, 304 aa, Escherichia coli
TLQNGKLNVPENPIIPYIEGDGIGVDVTPAMLKVVDAAVEKAYKGERKISWMEIYTGEKSTQVYGQDVWLPAETLDLIREYRVAIKGPLTTPVGGGIRSLNVALRQELDLYICLRPVRYYQGTPSPVKHPELTDMVIFRENSEDIYAGIEWKADSADAEKVIKFLREEMGVKKIRFPEHCGIGIKPCSEEGTKRLVRAAIGYPIANDRDSVHLVHKGNIMKFTEGAFKDWGYQLAPEEFGGELIDGGPWLKVKNPNTGKKIVIKNVIADAFLQQILVRPAELNVIACLNLNGDFISDPLATQVG

SEQ ID NO: 5173 - protein, 389 aa, Escherichia coli
TLQNGKLNVPENPIIPYIEGDGIGVDVTPAMLKVVDAAVEKAYKGERKISWMEIYTGEKSTQVYGQDVWLPAETLDLIREYRVAIKGPLTTPVGGGIRSLNVALRQELDLYICLRPVRYYQGTPSPVKHPGLTDMVIFRGNSEDIYAGIEWKADSADAEKVIKFLREKMGVKKIRFPEHCGIGIKPCSKEGTKRLVRAAIEYAIANDRDSVTLVHKGNIMKFTEGAFKDWGYQLAREEFGGEPIDGGPWLKVKNPNTGKEIVIKDVIADAFLQQILLRPAEYDVIACMNLNGDYISDALAAQVGGIGIAPGANIGDECALFEATHGTAPKYAGQDKVNPGSIILSAEMMLRHMGWTEAADLIVKGMEGAINAKTVTYDFERLMEGAKLL

SEQ ID NO: 5174 - protein, 247 aa, Gloeobacter violaceus PCC 7421
MTLITPDTSLTVEEAVEQLRGEDLSQRYYAAWYLGYLEDPRAVEALVAALADESDRTEMGGYPLRRKAAESLGRIGEARAVPSLVEILGCEDYYVREAAAWSLARIGDALAVEPLVALLGQGGSQPYEAIIEALGDLRVHRAVPLIQPFLQERSERIRYAAARSLFQLTGEVALIDILLGGLASADSHIRRAALFDLADTGYLPAAVKIVHADVTATLKLLALKQLADVQTTDAAAADVLPFIDSIL

SEQ ID NO: 5175 - protein, 175 aa, Bradyrhizobium japonicum USDA 110
MANETKLPVTKKTNEPAFGGETWRPFEALRKEVDRLFEDFGTDDFWRRPFRSLAGFERNLAQKLVSTPAVDVTESDKAYEITAELPGMDEKDIEVNVANDGLTIKGEKKFEREEKQKDYYVSERRYGSFERHFGLPKDVEADKIEASFRNGVLKVTLPKTAEAQKPAKKIEVKAA

SEQ ID NO: 5176 - protein, 361 aa, Bacillus megaterium
MTIQWFPGHMAKARRQVTEKLKLIDIVYELVDARIPQSSRNPMIDEIIVNKPRIVLLNKVDKADPRVTQQWLDYYKEQGIYALAIDAQAGKGMKQIVSSSKELLQEKFDRMRAKGVKKPRAIRAMIVGIPNVGKSTLINRLASKKIAKTGDRPGVTQAQQWIKVGNELELLDTPGILWPKFEDETVGYKLATTGAIKDTILNMQDVAVYALRFLTSHYPEQLKQRYNLNEIPEDIVELFDAIGSRRGCLMGGGMVDYDKTAELVLREIRTDKIGTFTFDDQLFRFIYELANRENMYIEPSAAAGLQGPLHLMETGSSYIQAQALENDMSKATHLVWSTGGSMVPAEVMNSYYKQGKNLMNG

SEQ ID NO: 5177 - protein, 462 aa, Zea mays
  unsure (1)..(462): unsure at all Xaa locations
MDGRRTILMGRYEIGKQLGQGTFAKVFYARNLTTGLAVAIKMINKDKVMKVGLMEQIKREISIMRLVKHPNILQLYEVMASKSKIYFVLEYAKGGELFNKIAKGGKLSEDAARKYFQQLVSAVDFCHSRGVYHRDLKPENLLLDENENLKVSDFGLSALAESKRQDGLLHTTCGTPAYVAPEVLSRKGYDGAKSDVWSCGVILFVLVAGYLPFHDTNLIEMYRKISRAEFRCPRFFSTELKDLLHKILVPDPSTRISISRIKRSAWYRKPVEAHAKKNEAETSENTCTGEGTXSVSTECSTSEGNQGPLSLPNLNAFDIICLSTGFNLSGFFEDKYGRREERFTTRQPVTTVFTKLKELAKRLKLRVKKKENGTLKLAAPKEGKKGMLELDAEIFXELLVLCSLVELKKTNGDTLEYQKLVKEEIRPALKDIVWVWQDDQHQEQAEQLPQPEQLQTPIAPEE

SEQ ID NO: 5178 - protein, 487 aa, Brucella melitensis 16M
MLALKDPSLLKSQCLVNGRWIDAADGTTIKVTNPADGSVIGTVPSLSVATIKEAIDASAKALSGWAAKTAKERAGILRKWFDLIIANADDIALIMTSEQGKPLAEARGEVLYAASFIEWFAEEAKRVYGDTIPAPQNGQRLTVIRQPVGVTAAITPWNFPAAMITRKAAPALAAGCTMIVRPADLTPLTALALGILAEKAGIPAGVLQIVTGKAREIGAELTSNDTVRKLSFTGSTEVGRLLMAQCAPTIKRISLELGGNAPFIVFDDADLDAAVDGAMVSKYRNAGQTCVCANRIYVQRGVYDKFAEKLAAKVKELKVGNGTEPGVVIGPMIEEKAITKVKAHIEDAVSKGAKLITGGKELGGLFFEPGILTGVTSDMLVAKEETFGPLAPLFAFDTEEEVIAQANDTIFGLAAYFYTENFSRAIRVSEALEYGMVGHNTGLISNEVAPFGGVKQSGLGREGSKYGIEEYLETKYICSAYKRGAKK

SEQ ID NO: 5179 - protein, 535 aa, Zea mays
MAVVYYLLLAGLIACSHALAAGTLALGEDRGRPWPAFLAALALDGKLRTDSNATAAASTDFGNITSALPAAVLYPSSTGDLVALLSAANSTPGWPYTIAFRGRGHSLMGQAFAPGGVVVNMASLGDAAAAAPPRVNVSADGRYVDAGGEQVWIDVLRASLARGVAPRSWTDYLYLTVGGTLSNAGISGQAFRHGPQISNVLEMDVITGHGEMVTCSKQLNADLFDAVLGGLGQFGVITRARIAVEPAPARARWVRLVYTDFAAFSADQERLTAPRPGGGGASFGPMSYVEGSVFVNQSLATDLANTGFFTDADVARIVALAGERNATTVYSIEATLNYDNATAAAAVDQELASVLGTLSYVEGFAFQRDVSYTAFLDRVHGEEVALNKLGLWRVPHPWLNMFVPRSRIADFDRGVFKGILQGTDIVGPLIVYPLNKSMWDDGMSAATPSEDVFYAVSLLFSSVAPNDLARLQEQNRRILRFCDLAGIQYKTYLARHTDRSDWVRHFGAAEWNRFVEMKNKYDPKRLLSPGQDIFN

SEQ ID NO: 5180 - protein, 322 aa, Malus x domestica
ILPFKLPAIGPNDVRIRIKAVGICGSDIHYLKTMKCGDFQVKDPMVIGHECAGIVDKVGSEVKHLVPGDRVAVEPGISCAHCQQCKGGRYNLCPDMKFFATPPVHGSLANQIVHPADLCFKLPENVSLEEGAMCEPLSVGVHACRRANVGPETTVLIVGAGPIGLVSVLAARAFGAPRIVIVDMDDRRLAMAKSLGADGTVKVSTKMEDLDDEVAKIKEAMGSEVDVTFDCVGFNKTMSTGLNATRPGGKVCLVGMGHGVMTVPLTPAAAREVDVVGVFRYKNTWPLCLEFLRSGKIDVKPLITHRFGFTEKEVEEALEPVL

SEQ ID NO: 5181 - protein, 364 aa, Mycoplasma penetrans HF-2
MKSINLPTSMKALVFVEKNKIQIVNKPIPTVGPNDALIKVTTTTICGTDIHIVKGEYPVKPGLTIGHEAVGILAAVGDEVTGFELGERVLAGAITPSGYTAACQSGQSSQDGIGTKYGYKPTAGWKFGNIMDGCQAEYVLVKNAMANLARVPNALTDEQVLMCPDIMSTGFSGPENANIKLGDYVGVIAQGPIGLCATTGAKLMGASIIIAIDGNDRRLEIAKELGATHTINFRNVDVVQEVNRITDGRMLDSAIECLGSQSTFEQGFRLLRAGGTLSSLGVYSSDIKLPLDALAAGLGDHKISFALCPGGSERMRRLMSLIENKRVDLRSLVTHTLPFDRIAEGYNIFANQKDGVLKVAIKVS

SEQ ID NO: 5182 - protein, 100 aa, Triticum aestivum
  unsure (1)..(100): unsure at all Xaa locations
MAPTVMASSATSVAPFQGLKSTAGLPISRRSSSAGLSSVSNGGRIRCMQVWPIEGIKKFETLSYLPPLSTEALLKQVDYLIRSKWVPCLEXFTRLGFVFR

SEQ ID NO: 5183 - protein, 362 aa, Geobacter sulfurreducens PCA
MAQVFKVAVLPGDGIGPEVMAEALRVLDAVEAKYDVKFERTHANVGGAGIDIEGKALPETTVNICKAADAILFGSVGGPKWESLPPDEQPERGALLPLRKIFGLYANLRPAIIFPSLTGASSLKEEVIAGGFNVLVIRELTGGIYFAQPKGIEGEGRDRVGFDTMRYSVPEIERITHVAFQAARKRGKKVCSIDKANVLSSSVLWREVVTGIAKEYPDVELSHMYVDNAAMQLVRWPKQFDVILCENMFGDILSDEAAMLTGSLGMLPSASLAEGTFGMYEPSGGSAPDIAGQGIANPIAQILSMGMMLKFSFGMVDAADAIDNAVATVLDQGFRTRDIYQQKDGEKLVNTKEMGDAIIAAL

SEQ ID NO: 5184 - protein, 286 aa, Salmonella enterica subsp. enterica serovar Typhi Ty2
MAENTMWHETLHDQFGQYFAVDNVLYHEKTDHQDLIIFENAAFGRVMALDGVVQTTERDEFIYHEMMTHVPLLAHGHAKHVLIIGGGDGAMLREVTRHKNVETITMVEIDAGVVSFCRQYLPNHNAGSYDDPRFTLVIDDGVNFVNQTHQTFDVIISDCTDPIGPGESLFTSAFYEGCKRCLNPGGIFVAQNGVCFLQQDEALDSHRKLSHYFSDVGFYQAAIPTYYGGIMTFAWATDNDALRHLSSEIIQARFHAAGLKCRYYNSAIHAAAFALPQYLHDALSAQ

SEQ ID NO: 5185 - protein, 490 aa, Escherichia coli
MDDQLKQSALDFHEFPVPGKIQVSPTKPLATQRDLALAYSPGVAAPCLEIEKDPLKAYKYTARGNLVAVISNGTAVLGLGNIGALAGKPVMEGKGVLFKKFAGIDVFDIEVDELDPDKFIEVVAALEPTFGGINLEDIKAPECFYIEQKLRERMNIPVFHDDQHGTAIISTAAILNGLRVVEKNISDVRMVVSGAGAAAIACMNLLVALGLQKHNIVVCDSKGVIYQGREPNMAETKAAYAVVDDGKRTLDDVIEGADIFLGCSGPKVLTQEMVKKMARAPMILALANPEPEILPPLAKEVRPDAIICTGRSDYPNQVNNVLCFPFIFRGALDVGATAINEEMKLAAVRAIAELAHAEQSEVVASAYGDQDLSFGPEYIIPKPFDPRLIVKIAPAVAKAAMESGVATRPIADFDVYIDKLTEFVYKTNLFMKPIFSQARKAPKRVVLPEGEEARVLHATQELVTLGLAKPILIGRPNVIEMRIQKLGLQI

SEQ ID NO: 5186 - protein, 170 aa, Zea mays
MAPTVMMASSATAVAPFQGLKSAASLPVARRSTRSLGNVSNGGRIRCMQVWPAYGNKKFETLSYLPPLSTDDLLKQVDYLLRNGWIPCLEFSKLGFVYRENSTSPCYYDGRYWTMWKLPMFGCNDATQVYKELQEAIKSYPDAFHRVIGFDNIKQTQCVSFIAYKPPGSD

SEQ ID NO: 5187 - protein, 487 aa, Agrobacterium tumefaciens str. C58
MTLSFDPDSLTLPIGHFIGGRLIPAQNGIDMHRPSDGVEYAGCPRANAALVDEAVQTAKAALKSSNWGGVRPRERTKILQRWADLIEQEAETLAKIEALSSTRPVGQLIAGDIAVTAEQIRFFAEFADKEGGDLVPTDDASLGMIMTEPYGVVGAITPWNFPVSMAGWKLGPALAAGNAVVLKPSEMTPFSSIFMAELAIKAGLPAGLINVVLGDGPVTGNAITGHPEISKVSFTGSTAAGAAIMANVARTGIKPMTLELGGKSPQLVFADADIEKAAAAIAGNILSNAGQACVAGSRIIVEESAADALSAAIIARMKTVKPGPTWDEATQYSPIISEVQRQRIDGIVQAAVAHGGECLTGGAIMDGPGYFYQPTLIANVDQTSPAVTEEIFGPVLTLQTFRTEEEALALADHPTYGLAAGLFSRDVSRVLRLSRAIQAGTIWVNRYGRSRDHILPTGGYKRSGIGKDLGRDAYLANRKSKSVLIGL

SEQ ID NO: 5188 - protein, 171 aa, Zea mays
  unsure (1)..(171): unsure at all Xaa locations
MAGIGRNMVAPLLVLNLIMYIIVIGFASWNLNHFINGQTNYPGVAGNGATFYFLVFAILAGVVGAASKLAGVHHVRAWRHDSLATNAASSLIAWAITALAFGLACKEIHIGGHRGWRLRVLEAFVIILAFTQLLYVLMLHTGLFGGSGGYRDHDYGVGXGAAGEPKGVTRV

SEQ ID NO: 5189 - protein, 431 aa, Bifidobacterium longum NCC2705
MATEHEEKLGTEDSKWLGEYSQVHMNVFGTPLRVMDHGQGAHIWDVDGNEYLDFLAGIAVNSLGYAHPKWVKAVADQAAKVAHISNYFASEPQIELASKLVKLAGAPEGSKVYFGNSGAEGNEAALKLAKLYGRTLPGALPSIGGKPARILAMTHGFHGRTMGALSATWKPGIRKPYDPLVPNIEFVRAGDKVALHDAFAQTGLGRYGKGPVAAVILELIQGEAGVQPLGADYVKFVRELCDINHALLIIDEVQTGIGRTGKWFAFQRDDLSGGVTPDMVTFAKGVAGGFPMGGMIAFGEKLAALFTPGSHGSTFAGNPLGAAAGLATLDVIEDENLVANAEARGEQLRDGIMATGNPLFVSVRGRGLLDAVELKHPCSHAVMNYCLEHGLIVNAVAPNALRFAPPLIVTAQDVDQALAILKDVPTDLPDD

SEQ ID NO: 5190 - protein, 208 aa, Brassica napus
  unsure (1)..(208): unsure at all Xaa locations
MIDSMEKMIRSSCVSLLFCLVFLLFSSLYGSLHLVEAGKIEITDDLDDVEDNEEDDSWKQWGSKAATPEFDPPPDFSDMGFDQIQEEMAKRTFAPVVGFVKLRLGVHRTKDMVVEIAMRWMKVLRTGGLGVRFMAVDRSTVMFNMQNGMEVTELREFVXSQEEAYEVKIGKQEFXRPGDPPLDDVFEKLQANDDDGDTSKNDVTKDEL

SEQ ID NO: 5191 - protein, 479 aa, Mesorhizobium sp. BNC1
MTTLHQNLIDGAWVGGEGKENINPSNIKDVVGIYAQASAEETKQAIAAAKAAFPAWSRSGILERHAILRKTADEILARKDELGELLSREEGKTLPEGIGEVTRAGQIFDFFAGAVLRLAGEVLPSVRPGIGVEITREPIGVIGIITPWNFPIAIPSWKIAPALAYGNTVVVKPADLVPGSTWAIVDILVRAGLPKGVLNLVMGKGSVVGQTMLESRDVTAITFTGSVGTGKRVAAASVELGRKFQLEMGGKNPTVVLDDADLKVAVESVTQSAFFSTGQRCTASSRVIVTEGIHDRFVEALAERIRGLKVGNALEPGIDIGPVVDANQLKQDTDYIEIGKQEGAKLVAGGERVQKETEGYFLQPALFTEATNSMRISREEIFGPVASVIRVKDYEEALATSNDTEFGLSAGIVTTSLKYATHFKRNAEAGMVMVNVPTAGVDFHVPFGGRKGSSYGPREQGTYAAEFFTVVKTAYTAAG

SEQ ID NO: 5192 - protein, 394 aa, Vibrio vulnificus YJ016
MLSENTINIVKSTAPLLAETGPKLTAHFYQRMFEHNPELKDIFNMSNQRNGDQREALFNAICAYASNIDNLPALLGAVEKIAHKHSSFLITADQYQIVGSHLLATIDELFSPGQAVLDAWAEAYGVLANVFIQREEQIYQANQSQTGGWRGLREFELVEKQYESAHICSFVFKPVDGGSVVSFKPGQYLGIYINDEQFENQEIRQYSLSSSVRPDCYRISVKREEGGRVSNYLHDHLDVGSKVKLAAPAGDFFLDAAPTAPVVLISAGVGLTPTLSMLESLTEHQAPVTWIHATENGQQHAFKQHVKQLVETHPHFNSLVWYNQPNSDDKIGDDFQFSGWVNLHEIETVLKQADVQVYFCGPVGFMQFIAKQLLEMGVPEQQFHYECFGPHKVV

SEQ ID NO: 5193 - protein, 389 aa, Escherichia coli
TLQNGKLNVPENPIIPYIEGDGIGVDVTPAMLKVVDAAVEKAYKGERKISWMEIYTGEKSTQVYGQDVWLPAETLDLIREYRVAIKGPLTTPVGGGIRSLNVALRQELDLYICLRPVRYYQGTPSPVKHPGLTDMVIFRENSEDIYAGIEWEADSADAEKVIKFLREKMGVKKIRFPEHCGIGIKPCSKEGTKRLVRAAIEYAIANDRDSVTLVHKGNIMKFTEGAFKDWGYQLAREEFGGELIDGGPWLKVKNPNTGKEIVIKDVIADAFLQQILLRPAEYDVIACMNLNGDYISDALAAQVGGIGIAPGANIGDECALFEATHGTAPKYAGQDKVNPGSIILSAEMMLRHMGWTEAADLIVKGMEGAINAKTVTYDFERLMEGAKLV

SEQ ID NO: 5194 - protein, 290 aa, Triticum aestivum
  unsure (1)..(290): unsure at all Xaa locations
MKTLLIVTILAMATTIATANMQVDPGYQVQWPQQQPFPQPQQPFCQQPQQTIPQPHQTFHHQPQQTYPHQPQQQFPQTQQPQQPFPQPQQTFPQQPQLPFPQQPQQPFPQPQQPQQQFPQSQQPQQPFPQPQQQFLQPQQPQQSFPQQQQPLIQLSLQQQMNPCKNFLLQQCNPVSLVSSLISMILPRSDCQVMQQQCCQQLAQIPQQLQCAAIHSVVHSIIMQQEQRQGVQIRRXLVQLVQGQGIIQPQQPAQLGGDQGHWYLRTXSTMCNVYVLPMVTINAPFASWCQ

SEQ ID NO: 5195 - protein, 322 aa, Exiguobacterium sp. 255-15
MSLKRIAILTSGGDAPGMNAAVRAVTRKAIFHGLEVFGVYNGYQGLINGDLVQLNLGSVGDIIQRGGTFLRSARCPEFRTEEGRAKAVVNLKKFEIDALVVVGGDGSYRGAQKLTGLGFPTIGLPGTIDNDIPGTDYTIGFDTALNTALEAIDKIRDTASSHERTYVIEVMGRDAGDIALYAGLAGGAESILVPERPEDLKEVLNRIQSGVNRGKKHSIVIVAEGAGRAQDVGDEIAKETGLDTRVTVLGHVQRGGAPTAADRVLASRMGAYAIDILLEGKQGRVVGVRGGKMVDLDIDEALDENKHELDLEILELSKQLSI

SEQ ID NO: 5196 - protein, 179 aa, Zea mays
  unsure (1)..(179): unsure at all Xaa locations
TPSVXYDPLALRKAFEKAVVKRLMTDVPFGVLLSGGLDSSLVATVAVRHLARTEAARRWGTKLHSFCVGLEGSPDLKAAREVAEYLGTLHHEFHFTVQDGIDAIEDVIYHTETYDVTTIRASTPMFLMSRKIKSLGVKMVISGEGSDELFGGYLYFHKAPNKEELHRETCRKVCVSFFH

SEQ ID NO: 5197 - protein, 498 aa, Nostoc sp. PCC 7120
MKTPLNCQNYINGQWLNAATETTLNSHNPADKSEIVATFPRSQADDVDRAVAAARQAYGSWRKVPAPARAEYIFRVGELLLQHKEELAQLISREMGKPLTEARGDVQEGVDCAFYSAGEGRRLFGQTTPSEMPNKFAMTMRMPIGVCALITPWNFPVAIPCWKAMPALVCGNTVILKPAEDTPACATKLIEIFAAAGLPPGVINLVHGVGEEVGKALVEHPNIDLVSFTGSSATGAYVGETCGRTHKRVCLEMGGKNAQVVMEDADLELALDGALWGAFGTTGQRCTATSRLILHRDIKEKFTTMLRERTSQLRLGAGTEPETDIGPIINNRQLQRVHEYMNIAREEGAKILIGGEIATEGQLQQGYFFQPTILDNVTPQMRVAREEIFGPVVALIEVSTFEEAIAILNDTKYGLSSSVYTRDINRAFVAMRDIEAGITYINGPTIGAEVHLPFGGVKQTGNGHREAGTTALDVFTEWKSVYVDFSGSLQRAQIDNRS

SEQ ID NO: 5198 - protein, 387 aa, Propionibacterium freudenreichii subsp. shermanii
MPPTTTSSSSWPSRRSSPAPSPWCCSGTSRSTRPTNPLTRQSPTPASWRHEAGMAEKLNVPGLWSAEMGQVIAKQNELAGDAFATDVTPAQMRENYDTERAFWNEGGPQMARTTDREVATAYGAVSVRQYRPAGPAPQDTLPVIVFIHGGGWVVGNPTTHDRITRILADSTKACVVSVDYTLSPEAKYPQALNECVAVVRALVDAPDEWGIDADDISLAGDSGGASLAFGVALHLRDEEKLADRLRCMLLYYGIYGLTDSASRRLGGPWDGLGDDDLQYYYNAYFGSPEDVSSPWFNVVGADLGHGVPPCYMAAAALDPLRDDSRTLAAQLGLAGVTNQYEEFAGVIHGFAHHTRMLSAARRLLAHSAQFFTDQGPDQRPDADPARP

SEQ ID NO: 5199 - protein, 457 aa, uncultured marine proteobacterium ANT8C10
MEFNSHEELVAASTKAAQKWRLVPAPQRGEFIRQFGNELRNQKTELAKVITKEARKIVSEAEGEVQEAIDMCDFATGLSRQLYGLTMPSERPDHRLQELWQPIGVVGCITAFNFPMAVFAWNFCLASVCGNSIIWKPSPHSNGCSDALKKAWDEVAGEHKDLVLLLKGGNEEASALCKDTNIPLISATGSTQMGKELAPIVSARLGRTLLELGGNNAAIICPTADLDLTVKGITFSACGTTGQRCTSLRRAFVHEDIYEEFMQKLHAYYATLKIGNPSDSSNQIGPLISERSYNDMQRVLESISNKDVTVHGGQRLEVGDPEEFYVMPAIVEVSQIEDEMLNETFAPILYVKKFTDLTNAIEMQNNVKQGLSSSIFTNDMRESELFLSSEGSDCGIANVNIGTSGAEIGGAFGGEKDTGGGRESGSDAWKAYMRRVTATINYGEDLPLAQGVEFDES

SEQ ID NO: 5200 - protein, 203 aa, Thalictrum thalictroides
KRRNGLLKKAYELSVLCEAEVALIVFSSRGRLYEYSNNSVKKTIERYKKASTDSPNSGSVSEANVQFYQQEASKLRNQIASLQNHNRNLLGESLSNLNIRELKQIEKKIEGGISKIRAKKNELLFAEIEYMQKREIDLQTDNKYLRAMIAANERAPEHMNLMPANEYHVMSSAPFDSRNFMPANLLDHNNNYCRSDQTTLQLG

SEQ ID NO: 5201 - protein, 347 aa, Streptococcus agalactiae NEM316
MFVKKGLFVFLLLCILSMWLMIFGVAFYYFGSLHQSLTSRIIYQFVLTVLLTTTAWFMGAYFLAFEGHFKTVFQFQEADGKQIVNCLFQLCFALYAVVMLIGSIIDRVQTKRLLLAVVSWLFLVYTPLAYLIWNSEGVFAKMGVLDFSGGMVVHLSAGLSSYILAHVIGKSEHQHNKVKNDSLFLGMILITFGWFGFNMGPVGEWNSQAIMILLNTIFAIIGGGLAWTLAAKWNGEEEKTGSLLNGIIVGLVTSTAGVGYLLTWQLLAVTFFASLFTYFVTDYVAKAFAIDDVVSSFGMNGIGGLLGSLGVGLFKLSHMPVQLLALATTILLSIIMTYIISKAIFRK

SEQ ID NO: 5202 - protein, 104 aa, Shigella dysenteriae
TLQNGKLNVPENPIIPYIEGDGIGVDVTPAMLKVVDAAVEKAYKGERKISWMEIYTGEKSTQVYGQDVWLPAETLDLIREYRVAIKGPLTTPVGGGIRSLNVAL

SEQ ID NO: 5203 - protein, 248 aa, Zea mays
  unsure (1)..(248): unsure at all Xaa locations
MGSMAAEMTAVEEEACIYAMQLSSTAVLPLTLKNAIELGMLEVLMGAGGKMLSPSEVAARLPPTTTNPDAPAMVDRMLHLLASYKVVSCEVEEGTHARRYGPTPVCKWFTPNQDGISMAPLLLLTNDKVPMESLYHLKDAVLDGGLPFHKAHGMTMYEYTKTDARLNHVFNEAMKSYTTIVTGKLVELYTGFHDVATLVXDVGGGVGATIRAVTSKYPHIKGINFDLPHVIAEAPQSPGVEHVAGDMF

SEQ ID NO: 5204 - protein, 188 aa, Triticum aestivum
  unsure (1)..(188): unsure at all Xaa locations
RIRGRVDLGTVHHELHFTVQEGIDALEEVIYHIETYDVTTIRASTPMFLMSRKIKSLGVKMVLSGEGSDEIFGGYLYFHKAPNKKEFHEETCRKIKALHLYDCLRANKATSAWGXEARVPFLXDKNFIKCSNGTWVPEXKMIRRDLGRFEKWALPNAFDDDEKPXLPKHSFTGKKTFNHGVGYXWVDG

SEQ ID NO: 5205 - protein, 319 aa, Glycine max
MSRALEHDYIGLAENPSMDGSSDKLSSEDGKTSSLNLKETELRLGLPGCESPERKSGSALCLFGKELQNNNNVCSVVSPLKAGAKRGFSDVTEGSQGAALFSPRGANVGKPIIGLDTQTNTQQQANTTIKEVGAVLPQSTKPVQEKNDQVAATNGHASAPAAKAQVVGWPPIRSFRKNTMASNLTKNNDDDEGKSGFGCLYVKVSMDGAPYLRKVDLKTYNNYMELSSALEKMFSCFTIGQCNSPGLPGKDGLSESSLRDLLHGSEYVLTYEDKDGDWMLVGDVPWEMFTDSCRRLRIMKGSEAIGLAPRAMEKSRSQN

SEQ ID NO: 5206 - protein, 74 aa, Triticum aestivum
MAFVPICVQCGTRSNPCRCKVVGPTLGFVALVVAGVVEWPLGAAVYLFRHRKGRRIMGHPARVVYPRVTGAIPI

SEQ ID NO: 5207 - protein, 149 aa, Triticum aestivum
  unsure (1)..(149): unsure at all Xaa locations
SRRGYYGVCQELEAQYPDAQVLLVTVTNEESXRIEQQSDNQTKAEIMEVXRSMFPDEDAPDATDILVPRWWSDRFYMGTFSNWPIGVNRYEYDQLRAPVGRVYFTGEHTNEHYNGHVHGAYLSGIDSADILINCAQKSMCKYHVQGKYD

SEQ ID NO: 5208 - protein, 347 aa, Agrobacterium tumefaciens str. C58
MKTHRIALIPGDGIGQSVTDAAWQVLNAVAKTSGFVLEGTEFPWSCAFYKETGAMMPKDGIETLRGFDAIMLGAVGWPAEVPDSVSLHGLLLPIRKAFVQYANIRPHRLLSGVQGPLKADGFDILCIRENTEGEYSGAGGRVHQGTEDEVAVETSIFTRKGVERILRFGFEQAQKRRGKLASITKSNAQKYSMVFWDEVTHKLAAEYPDVEVSSYHIDAMAARMVMAPESLDVVVASNLFGDILTDLGAAIQGGLGFAASANINPDRSAPSMFEPVHGSAPDIAHLGIANPIAAIWSGAMMFEHLGEKDAAAKIMAALETATGRGIGTVPGKDKTDTITAAVLAALA

SEQ ID NO: 5209 - protein, 299 aa, Mycoplasma penetrans HF-2
MITTVWNFRRINMNKNNNTNISKFNLSSGTNHNPPLLTLNDGYQIPIIGLGTTSLHNQTCKNAIKAALEIGIRLFDTASLYGNEKEVGETIRESNINRNEIFVITKLYPGAQFANPEKAIEEALNKLNTDYIDMMLLHHPGENDVKAYKAIEKYIEKGKIKSVGLSNWYIKEINSFLPQINIKPSLIQNEIHIYYQEKEVVPYMHNLNIAMQAWYPFGGRGHTFSVLNNPTIVSIAKDHNKTSAQIISRWLLQRGIITIVGSSNPIHIKENISVFDFELSNQEMELIASLDKNEKHDWY

SEQ ID NO: 5210 - protein, 486 aa, Agrobacterium tumefaciens str. C58
MMQGLKDKELFRQTGLIGGAWKAAASGKVVDVIDPATQAVIGTVPDMGGAETRAAIEAANAAFGPWKKKTHAERAALLEKWFALMIENIDDLRLILTIEQGKPLDEAKGEIRYGASFVKWFAEEARRIGGGTIPSPTPDRRIVVLKEPVGVCGIITPWNFPNAMITRKVAPALATGCTVVIKPSEFTPYSALALGVLAERAGIPAGVINIVTGMPTEIGNEIMANETVRKISFTGSTRVGSLLMRGAADSVKRLSLELGGNAPFIVFDDADLDLAIEGAIVSKFRNGGQTCVCANRILVQSSVYDAFAKKLADRVDAMRVGPGTEAGVSIGPMINKPAIAKIRAHIDDAVAKGATIITRPRDLPEGPQYTAPVVLTGATTAMQLASEETFGPVAPLFRFETEEEALAIANGTPFGLAAYFYTESLKRAWRVGEALEFGMVGLNTGAISTEVAPFGGVKQSGLGREGAQVGIEEYLETKTFHIGGLA

SEQ ID NO: 5211 - protein, 321 aa, Malus x domestica
ILPFKLPAIGLNDVQIRIKAVGICGSDVHYLKNMKLADFEVKEPMVIGHECAGIVEKVGSDVKHLVSGDRVAVEPGISCSRCQQCKGGRYNLCPDMKFFATPPVHGSLANQIVHPADLCFKLPENVSLEEGAMCEPLSVGVHACRRANVGPETTVLIVGAGPIGLVSVLAARAFGAPRIVIVDMDDKRLAVAKSLGADGTVKVSAKMEDLDDEVAKIKETMGAEVDVTFDCVGFNKTMSTGLNATRPGGKVCLVGMGHSMMTVPLTPAAAREVDVVGVFRYKNTWPLCLEFLRSGKIDVKPLITHRFGFTEKEVEEASLEF

SEQ ID NO: 5212 - protein, 317 aa, Ralstonia solanacearum GMI1000
MQVILRDKADAAQDIATFELAAPDGGALPPFTAGAHIDVRVAGFVRQYSLCNSPAETHRYRIGVLRDAQSRGGSVAMHALAVGATLEISAPKNHFALVPGARHSILLAGGIGVTPLLAMAEQLAADGASFALHYAARAPERMAFRDRLAAAHLAPHARCYFDNAPAAERLDLAAVLSRPDEGTHLYACGPAGFIEAALAQAHALGWPEANLHREYFGAAPQTPAAGETGDAGAFRIRLAQRGETVEVGAGETAILALRRCGVDWPTSCEQGVCGTCLTRVLEGEPVHQDQYLTDEERASGCFLPCVSRAKGLLVLDM

SEQ ID NO: 5213 - protein, 310 aa, Thermoplasma acidophilum
MDRKELLSRPVRDLSITADTRLGDLMDQFSSIGGFTAAKIHEAYEIIKDMFSEDNTTFLSFPADIISTGLRGLINEVVKRKLVDVIITTSGTLDHDIARTYRNYYCGSFSYSDIELRDLGINRLGNVLVPDESYGEIIEEKVMESLEKLYAKKKEWATVDLIHEVGLDINSESSIIYNAAKNNIPVFVPGITDGSFGSQLWSFYEQHHDFKINLLEDEHRLSDIIFDAKKTGAIMIGGGISKHHTIWWNQFRDGLDYAVYVTTAQEYDGSLSGAKLEEAISWKKVRPDARYVNVYGDATVIMPVLLAPFL

SEQ ID NO: 5214 - protein, 457 aa, Agrobacterium tumefaciens str. C58
MLSNSLIELDRAHLVHPVSSFRGHEKLGVRVLKSASGATVTDMTGHQLIDGFAGLWCVNAGYGHDSIVEAAAKQMRELPYATAYFDIGSEPAIRLASELADRAPGDLNHVYFTLGGSDAVDSTIRFIRYYWHAKGQPQRDQFISIEQGYHGSTTAGSGLTALPAFHAGFGVPYDWQHKIPSHYAYRNPAGSDPAAIIASSLQILKDKIEAIGPDRVAAFYAEPIQGSGGVLVPPPGWIKAMRELCSSYGILFVADEVITGFGRTGPLFACADEDIVPDFITAAKGLTSGYVPMGAVFMADHVYDTIADFAGEAAIGHGYTYSAHPVSAAVGLEVLKLYEGGLLENGRRAGQRLMAGLEGLRNHPLVGDVRGRGMLAAIELVTDKDKKTPLPAAAAPARKVFDRAWENGLIVRAFANGILGYAPPLCCTDGEIDAIVERTLKTLDQTLEDPAVRAAMA

SEQ ID NO: 5215 - protein, 474 aa, Escherichia coli O157:H7 EDL933
MQHKLLINGELVSGEGEKQPVYNPATGDVLLEIAEASAEQVDAAVRAADAAFAEWGQTTPKVRAECLLKLADVIEENGQVFAELESRNCGKPLHSAFNDEIPAIVDVFRFFAGAARCLNGLAAGEYLEGHTSMIRRDPLGVVASIAPWNYPLMMAAWKLAPALAAGNCVVLKPSEITPLTALKLAELAKDIFPAGVINVLFGRGKTVGDPLTGHPKVRMVSLTGSIATGEHIISHTAPSIKRTHMELGGKAPVIVFDDADIEAVVEGVRTFGYYNAGQDCTVACRIYAQKGIYDTLVEKLGAAVATLKSGAPDDESTELGPLSSLAHLERVSKAVEEAKATGHIKVITGGEKRKGNGYYYAPTLLAGALQDDAIVQKEVFGPVVSVTLFDNEEQVVNWANDSQYGLASSVWTKDVGRAHRVSARLQYGCTWVNTHFMLVSEMPHGGQKLSGYGKDMSLYGLEDYTVVRHVMVKH

SEQ ID NO: 5216 - protein, 484 aa, Ralstonia solanacearum GMI1000
MFESQLLIGGKQRAAAGGATCERPNPATGDVASRAAAASLADADAAVQAAHAAFPAWAAMLPGERRRLLLKAADVMERRADDFIARGVAEAGGVPGWYGFNAALAAGMLREAAAMTTQVGGEVIPSDVPGSLAMGLRQPCGVVLGIAPWNAPLILGTRAIAMPLACGNTVVLKASEICPALHSLIGAVFEEAGFPAGVVNVITNAPADAPAIVERLIAHPAVRRVNFTGSTRVGRLIAEQAARHLKPVLLELGGKNPLVILDDADLDAAVQAAAFGAFFNQGQICMSTERIIVDRAIADRFVERLTDKAGALRAGRPGQDGAVLGGMVDASAAQRIRHLVDDAVGKGARLRTGALRIDGNIVQPAVVDGVTPAMALYGEESFGPVVAVLRAADDEDAIRLANDSEYGLSAAVFSRDIARAMQVARRIESGICHINGPTVHDEAQMPFGGVKASGYGRFGGKAAIDAFTELRWITVQAGARHYPI

SEQ ID NO: 5217 - protein, 398 aa, Puccinia triticina
MCGTSSAMDPVFQSINPSLYDPQRVLDSEEFEILTDMNKVKAYSDDNKNIACCYNDKQQLNMVKKPMPEVHPGQVLVRVRATGICGSDIHFWKHSRVGEKMVVKHECGAGHESAGEVIALGEGVTDLEVGDRVAIETGIPCSKPTCEMCRTGQYNACPEIMFWFTSPYHGLMTRYHAHPSCWLHKLPPNVSYEEGSLLEPLAVALAGIERAGVRLGDPVLICGAGPIGLVTLLACHAAGACPIAITDLSEGRLDCAKRLVPSVSTFKISLGESETDVAGQIQAAMGCKPRVAMECTGFESSIATAIFSVKFGGKVFVIGVGKDKQTLPFMHMAENEIDLQFQFRYANQYPKAIRLVSTGLIDVKPLITHRFVLEKAIEAFNTAADPKSGSMKVQVVDY

SEQ ID NO: 5218 - protein, 416 aa, Candidatus Rickettsia principis
DSEFAELKIRGKIFKLPILKASIGEDVIDISRVSVEADCFTYDPGFMSTASCQSTITYIGGDKGILRHRGYDIKDLAEKSDFLEVAYLLIYGELPSSEQYNNFTKQVAHHSLVHERLHYLFQTFCNSSHPMAMMLAAVGSLSAFYPDLLNFKDADYELTAIRMIAKIPTIATMSYKYSIGQPFIYPDNSLDFTENFLHMMFAMPCTKFKVNPIIKNALNKIFILHADHEQNASTSTVRIAGSSGANPFACISTGIASLWGPAHGGANEAVINMLKEIGSSEYIPKYIAKAKDKNDPFRLMGFGHRVYKNYDPRAAVLKETCKEVLKELGQLDNNPLLQIAIELEAIALKDEYFIERKLYPNVDFYSGIIYNAMGIPTQMFTVLFAIARTVGWMAQWKEMHEDPEQKISRPRQLYTG

SEQ ID NO: 5219 - protein, 1533 aa, ASPERGILLUS NIDULANS FGSC A4
MDGQRQQPYVPAPPPSASQPSQAHIMPLPPPPPRYPPAQPQNVMPPPPPGPPPGSAYGTSKLTNPQLQSQSTLGWSNWGGRGIPQYLPPPPPPPMTHANQSSFARPSAVQNNNATSATYVPQPGTFGPGVGIPPFDVPSHSYDAPNTMVASERPRPPPNAPYGHGTSNASAYQLDGTIPSTPLTHTAPFSHETSHDVPSSAVPTGSPFKSVPQSASQANDLTKSSSHRHNNSNTTVGGMSASEAAVQWPLDRVLLWLAKNGFSHEWQETFKTLEIEGADFLELGHGQNGRPNLGKMHTVVYPQLAKECEANGTAFDLTRERDEGKRMRKLIRLIHDDAGPDNGGTFNKQHDFDDGHGSVPDEGPEFSPNINNVAQAPGSPSLNATNVSNSPNLKAPKYSHKPRSFTTPGSISHDSTTAELAMTEGSSTMLPRSDFSRNVLGTIGIDHQRKSPSMSSDNGVFAIPPHRPHEGSPKSGSPAAQHATLYAAPVSSATDLNAKYDARFGHNRVNSGERRYYETLKHDGSRPSPQTTQTAGDNASSYPKDHRMGFLNFFKKKSARNSDPNNPSPDDNTPDSPIYSKYHFNSSDVSVNERPLSASLSDYERMMMVRTKPAHRGKRFIFATMDGWNYRLIDTTDIDSVEKLRASICQNLGIYDWPDAQIFLTEPGQLEHDEPLNDTFLTLCQRSKSDSIGSLKLFVKTPHNVAGLGVSMPDRSAVSPTSAIPRKPLDGEAASRLSPLKPSSPQQLKPPASRLPLRDIQNSAAGTSPVDGEPDGSLQDQERKPQKSYRPTPAPLPRPDAYSETGYRRKEVINFDKPRISPYEDKKSEVLVPFRKPPSAPQESNTLSKVNSLRKKDGDRPRPHRSNQPPGIKEMMADMGMMSSLIGKPSSPNSGNTTATEDAHSSIDSAVDKSSQSTPPLTNTSYSPTTTATTTTTTTTASSSLSRSASQKRKSVGPEFDFEETQVSFQRSPALEEDSDDDSDDGLFAIPLANTKNSVKPGSPDTQARPRKPSLTVDTEAKPRTGLSVSFKSPSATRETFASSGGDASNSTAPYFIASNSPEEEKTPIRRNSLRNSFATGDVWASRPPVEGVIDQLDDFFPDIDLDAPYLDEQGTSPPSSPASKVAIDNELNRKDKQENSHHGMQPPPAPEDNTLGSSEPTMTSHGQGIVARRNVSRSGGGLTRMKSIREVAKGANQATRQRSVAASSGNKRSGDVHRRKSTKMFGAKIMQISPRRGSQLSQLDPIPQNSISSSSKPQRQPTFRIIRGQLIGKGTYGRVYLGMNADNGEVLAVKQVEINPRLAGQDTDKIKEMVAALDQEIDTMQHLEHPNIVQYLGCERGELSISIYLEYISGGSIGSCLRKHGKFEESVVKSLTRQTLEGLSYLHNQGILHRDLKADNILLDLDGTCKISDFGISKKSNDIYGNDSSNSMQGSVFWMAPEVIQSQGQGYSAKVDIWSLGCVVLEMFAGRRPWSKEEAIGAIFKLGSLSQAPPIPDDVSMNVTPAALAFMWDCFTVSNPSYSSFLRARSEV

SEQ ID NO: 5220 - protein, 416 aa, Candidatus Rickettsia principis
DSEFAELKIRGKIFKLPILKASIGEDVIDISRVSVEADCFTYDPGFMSTASCQSTITYIGGDKGILRHRGYDIKDLAEKSDFLEVAYLLIYGELPSSEQYNNFTKQVAHHSLVHERLHYLFQTFCNSSHPMAMMLAAVGSLSAFYPDLLNFKDADYELTAIRMIAKIPTIATMSYKYSIGQPFIYPDNSLDFTENFLHMMFAMPCTKYKVNPIIKNALNKIFILHADHEQNASTSTVRIAGSSGANPFACISTGIASLWGPAHGGANEAVINMLKEIGSSEYIPKYIAKAKDKNDPFRLMGFGHRVYKNYDPRAAVLKETCKEVLKELGQLDNNPLLQIAIELEAIALKDEYFIERKLYPNVDFYSGIIYNAMGIPTQMFTVLFAIARTVGWMAQWKEMHEDPEQKISRPRQLYTG

SEQ ID NO: 5221 - protein, 817 aa, Zea mays
  unsure (1)..(817): unsure at all Xaa locations
MAQILLHGTLHATIFEAESLSNPHRATGGAPKFIRKLVEGIEDTVGVGKGATKIYATVDLEKARVGRTRMISNEPVNPRWYESFHIYCAHMAADVIFTVKIDNPIGASLIGRAYLPVQDLLGGEEIDKWLEICDEKREPVGDSKIHVKLQYFDVGKDRNWARGVRSTKYPGVPYTFFSQRQGCKVTLYQDAHVPDNFVPRIQLADGINYEPHRXCWEXIFDAISKAQHLIYFTGWSVYTEFSLVRDTNRPKPGGDVTLGELLKRKASEGVRVLMLVWDDRTSVGLLKKDGLMATHDEETANYFHGTDVNCVLCPRNPDDSGSFVQDLQISTMFTHHQKIVVVDHEMPNQGSQQRRIVSFIGGIDLCDGRYDTQYHSLFRTLDTVHHDDFHQPNFEGGSIKKGGPREPWHDIHSRLEGPIAWDVLYNFEQRWRKQGGKDLLVRLRDLSDIIIPPSPVMFPEDRETWNVQLFRSIDGGAAFGFPETPEEAARAGLVSGKDQIIDRSIQDAYVNAIRRAKNFIYIENQYFLGSSYGWKPEGIKPEEIGALHLIPKELSLKIVSKIEAGXRFTVYVVVPMWPEGVPESASVQAILDWRRRKIEMMYNDLAQALRASGMEAQAVPYLTFFCLRGREPKHPEESVPQAPAKADRDFTRAQXEARWFMIDVHTXKMMIVDDEXYIITGSGNIEPRPPWTVPGTPEIAMGAYQPYHLATRQPARGQIHGFRMPLWYEPLGMLEDVFQGPESVECVQKVNEVAEKYWDLYSSDDLEQDLPGHLLSYPIGVTADGSVTELPGMENFPDTRARVLGNKSDYLPPILTT

SEQ ID NO: 5222 - protein, 489 aa, Saccharomyces cerevisiae
MELLKLLCLILFLTLSYVAFAIIVPPLNFPKNIPTIPFYVVFLPVIFPIDQTELYDLYIRESMEKYGAVKFFFGSRWNILVSRSEYLAQIFKDEDTFAKSGNQKKIPYSALAAYTGDNVISAYGAVWRNYRNAVTNGLQHFDDAPIFKNAKILCTLIKNRLLEGQTSIPMGPLSQRMALDNISQVALGFDFGALTHEKNAFHEHLIRIKKQIFHPFFLTFPFLDVLPIPSRKKAFKDVVSFRELLVKRVQDELVNNYKFEQTTFAASDLIRAHNNEIIDYKQLTDNIVIILVAGHENPQLLFNSSLYLLAKYSNEWQEKLRKEVNGITDPKGLADLPLLNAFLFEVVRMYPPLSTIINRCTTKTCKLGAEIVIPKGVYVGYNNFGTSHDPKTWGTTADDFKPERWGSDIETIRKNWRMAKNRCAVTGFHGGRRACLGEKLALTEMRISLAEMLKQFRWSLDPEWEEKLTPAGPLCPLNLKLKFNENIME

SEQ ID NO: 5223 - protein, 232 aa, ASPERGILLUS NIDULANS FGSC A4
MSSSEYDQELDSLLVGPIPVGVNKFIFEADPPDLRRIPTSEILGVTVILLTCSYDGREFVRVGYYVNNEYDSEELTADPPAKPIIERIRRNILAEKPRVTRFAIKWDTEESAPAEYPPDQPEADGLDDDGAAYGQEEAELEAALLKELQEAEKNESTKGEDHDMEGADNGEEDISDAESEDIEDESDDDEDEVDEEEGNDADEDVEMGDDSEPKDDNANPAAHHSQQEVMVH

SEQ ID NO: 5224 - protein, 163 aa, Candida albicans SC5314
MSDFYEFAPNDIKGTPYSFKKLQGKVVLIVNVASKCGFTPQYKGLQDLKQKFADQPVEILGFPCNQFGHQEPGTNEEIEKYCREYFGVTFPVLSKVETNGKNAEPVYKFLKSQKPGLLGLHRIMWNFEKFLIDQDGNVVARFSSFTKPETIGLRIEEMLKHQA

SEQ ID NO: 5225 - protein, 259 aa, Zea mays
  unsure (1)..(259): unsure at all Xaa locations
GTPVTLRTSTGYQYNCNTGLEIGGEANLTAAIQVAQFALKNRQNKQLRQRIIVFVGSPVIDEKNWLEVIGKNLKKXNVALDVVNFGESDNEKPEKLEALVAAVNSGGNSHIIHIPAGRDLSDALFSSPIILSEDRGSDSAAAARGASGFEFDVDPNVDPELALVLLISMEEERLRQEAAAKKAREESSKTENEGQSSTSNGDIVMADAEPEPNSYTEDKGLHCKVCFIAIQLMQSVSFVLDVQQLLEITHKKGLLRPPQ

SEQ ID NO: 5226 - protein, 203 aa, Thalictrum thalictroides
KRRNGLLKKAYELSVLCEAEVALVVFSNRGRLYEYANNSVRKTIDRYKKTCGEGSSTLTVSEANLLFYQQESSKMKQQIEILQNSNRHLMGEALSRLSIKELKQLESRLEKGLSRIRSKKNETLLAEIEYMQKREIELHNDNIYLREQITANERAQQHMNSLPGNVYEAITSAPHSSRDFFQVNLRDSKPNQYCSDATVLQLC

SEQ ID NO: 5227 - protein, 389 aa, Shigella sonnei
  unsure (1)..(389): unsure at all Xaa locations
TLQNGKLNVPENPIIPYIEGDGIGVDVTPAMLKVVDAAVEKAYKGERKISWMEIYTGEKSTQVYGQDVWLPAETLDLIREYRVAIKGPLTTPVGGGIRSLNVALRQELDLYICLRPVRYYQGTPSPVKHPELTDMVIFRENSEDIYAGIEWKADSADAEKAIKFLREEMGVKKIRFPEHXXXXXXXXXXXXXXXXXXXXXXXXXXXXXXXXXXXXXXXXXXXXXXXXXXXXXXXXXXXXXXXXXDGGPWMKVKNPITGKEMVIKDVIADAFLQQILLRPAEYDVIACMNLNGDYISDALAAQVGGIGIAPGANIGDECALFEATHGTAPKYAGQDKVNPGSIILSAEMMLRHMGWTEAADLIVKGMEGAINAKTVTYDFERLMEGAKLR

SEQ ID NO: 5228 - protein, 415 aa, Fusarium oxysporum
MALTAAQVAIVKSTAPILKEHGKTITTTFYRNMLGAHPELKNYFSLRNQQTGAQQAALANSVLAYATYIDDLGKLSHAVERIAHKHVSLFIKPEHYPIVGTHLIGAIGEVLGSALTTEIKDAWVAAYGQLADIFIQREGQMYEAAGEWNSWRKFKIVKKEAENDSVTSFYLEPTDGKPLPKFLPGQYVSVQIPIPELDGLLQSRQFSLSEAPGTNHYRISVKLQGPTEEPAVEDLAAGKIAGLLSTRLHNRYNVGDEVELSPPAGEFSLDPADTSAAKKPLVLLSAGVGATPLVSILDSVLQSPTASRPITWIHGARYSGSTCFVPHVLDSAKKHENITAKIFLEDVKEGDQYDFKGEIDLAKLQKEQLLQLDNADAEYYICGPEDWMVNVRAFLEENGVPRERQHLELFKTGDI

SEQ ID NO: 5229 - protein, 349 aa, Glycine max
VSYGVEFEGAGASKESKVNGDGGRDVNLGDSNYSFGEAEALSDEMEEESRYVAEILRIRDVLLNPEDESEAVLFDSLRRLQMMELTEDCLKATEIGKAVNPLRKHGSKDIRQLPIILFCGWKEMVDEWVKATTTKSITGSEEGTPDSVNPSVVDDDEEEGLPSPPLDEGAFFVTQAGSMELSQFFDGMDDDGNPRPTGPFSKNHENGRKPAFDSHSQQQAKENKAAVMPVRPNKPVTADSGPGRPPKSNVQRKSNMEPKMQQKMENNSITRRPPTAQLDKSKRSDDDAVQVKLEATKRKLQESYQQAEKAKRQRTIQVMEINDLPKQGLHRNTHFKPGYHSRHWANGRR

SEQ ID NO: 5230 - protein, 426 aa, Listeria monocytogenes EGD-e
MYVLKNGQVLNASGKLESKDVLIQNGKVNLIADSIEVTSGEEFDATGKLITPGFIDVHVHLREPGGEHKETILTGTKAAARGGYTTICSMPNTKPVPDSKEVMESIQAKIKETAKVRVLPYASITTSLGTDELVDFEALKEAGAFAFTDDGVGVQLAGTMYEAMKRAAALDMAIVAHCEDNSLIYGGVVHDGIFAEKEGLKGIPNIAESVQIARDVLLAEAAGCHYHVCHISTKESVRVVRDAKRAGIRVTAEVSPHHLILDEEAIPGNDGNWKMNPPLRSKEDRAALLEGLLDGTIDFIATDHAPHAAEEKNVPMEQAAFGIVGLETAFPLLYTHFVKTNEWTLKQLIDWMTVKPAECFKLPYGKLEEGSVADIVVLDLEKEANIDPDTFYSKGKNTPFVGETCIGWPVATFAEGTLVYNEGEIK

SEQ ID NO: 5231 - protein, 312 aa, Medicago sativa
MGSVEIPTKVLTNTSSQLKMPVVGMGSAPDFTCKKDTKDAIIEAIKQGYRHFDTAAAYGSEQALGEALKEAIELGLVTRDDLFVTSKLWVTENHPHLVIPALQKSLKTLQLDYLDLYLIHWPLSSQPGKFSFPIDVADLLPFDVKGVWESMEESLKLGLTKAIGVSNFSVKKLENLLSVATVLPAVNQVEMNLAWQQKKLREFCNAHGIVLTAFSPVRKGASRGPNEVMENDMLKEIADAHGKSVAQISLRWLYEQGVTFVPKSYDKERMNQNLRIFDWSLTKEDHEKIAQIKQNRLIPGPTKPGLNDLYDD

SEQ ID NO: 5232 - protein, 312 aa, Medicago sativa
MGSVEIPTKVLTNTSSQLKMPVVGMGSAPDFTCKKDTKDAIIEAIKQGYRHFDTAAAYGSEQALGEALKEAIELGLVTREELFVTSKLWVTENHPHLVIPALQKSLKTLQLDYLDLYLIHWPLSSQPGKFSFPIDVADLLPFDVKGVWESMEESLKLGLTKAIGVSNFSVKKLENLLSVATVLPAVNQVEMNLAWQQKKLREFCNANGIVLTAFSPLRKGASRGPNEVMENDMLKEIADAHGKSVAQISLRWLYEQGVTFVPKSYDKERMNQNLCIFDWSLTKEDHEKIDQIKQNRLIPGPTKPGLNDLYDD

SEQ ID NO: 5233 - protein, 492 aa, Ralstonia solanacearum GMI1000
MNAPQAMRFLDDAQWDGLLFQGRWVPPLRRRTADVMEPATGRKLTRVGLADAQDVDAAVEAAAAAQPAWVAMPPRERANVFRRAAMLFEQHFDELALAIARETGAALFKGEHEVREAITLCHVAAGMPLEAQGQVLASPAGRLSYARRAPFGVVGVISPFNFPLFLTLRSVAPALAAGNAVVIKPDLRTPVSGGYVIARVFAEAGLPAGLLHVLPGGAEAGEALVVHPRVPMIAFTGSPGVGRRIGELAGRHLKKVSLELGGANALIILDDADLDLAVSNAAWGAWLHQGQICMAANRILVHASLADALTARLVEKAEHLPVGDGASGQVALGPLIDQKQLQRVHAIVQDSVAAGARLLAGGSYEQLFYRPTVLAGVRPGMRVFDEEVFGPVANIIVFRDDDEAVALANDSQGGLAAGVISASVGRAMALGQRLRVGMVHINDQTVNDDCVNPFGGPGIAGNGTSMGGPADWEEYTQWRWVTVKESAPRYPF

SEQ ID NO: 5234 - protein, 289 aa, Mycoplasma penetrans HF-2
MKTSNVKLITLNNGNKIPSIGFGVFQIPKEETADCVKKAISIGYRLIDTAQAYHNEKETGLGIKLSGVKREEIFLTTKVWVSNYERCYESVIESLKRLDTSYLDLILLHQPFGNYYKAYQDLERLYKENKVRNIGVSNFWDNRIIDLCFFNQIKPMVNQIEINPFHQRIEDRFYNDKYKVVSQAWAPFAEGKNGLFTNPTLVEIGKKYNKTPAQVILRWLVQSNVVALCKTVNESRMKENFDIFDFELSKQDLDKIVALNKQHSEFRYHHSAEGAEFYGEISNQIKIGD

SEQ ID NO: 5235 - protein, 386 aa, Tetragenococcus halophilus
MATKRDYYEVLGVDKGASDDEIKKAYRKLSKKYHPDVNQEADAEEKFKKFQKPMNTLSDPQKRAAYDQYGHAGADANFGGGGAGGFGGFGGGFSDAGGFGGFEDIFESFFGGGRSADPNAPRQGDDLQYSINLTFEEAVFGKDTEVSYKRNEVCHTCGGNGAKPGTQPETCHKCKGSGTINAERQTPLGRVMTRQTCDVCHGTGKEIKEVCETCHGTGHEKKTHSVNVSVPAGVEDGQQMRLANQGEAGTNGGPYGDLYVVLYCSHETCNIFDRDGSEIYYELPINFVQAALGDEVDVPTVHGNVKLKIPAGTQTSTKFRLRGKGAPRLRGNSTGDQQVTVKIITPKNLNEEQREALRNFAELTGQSTEEQQSEGFFDKMKDAFKK

SEQ ID NO: 5236 - protein, 492 aa, Corynebacterium efficiens YS-314
MGAAGVPARFILDSVSMSLSTASPTIVWFRDDLRIRDNAALAWAADRGPVIGLFIDEDQPRALGGAARWWRDRSLTLLVDALATHGVPLLRRSGDPVVLLTEVVRETGAAAVTWNRRYHGPLRERDAEIKTQLREQGLEVHSHAGFLLTEPWEVTSGAGTGYKVYTPFSKAAFPLADESAARLGDPMPAQLTGPDTPVADTGGIDAPDPFWAAEMATHCRPGEQAALDRLGDFLDRMRERGGYADGRDEMARAVTSGLSPHLRFGEISVHRVWEEITAAADAGDIDATDAQVFRKELLWRDFAWHRLYALPDMATTNVREQFNRFGWAWDEHEAARLVDGRHPLSPTSSDEFHVALAAWRAGRTGIPLVDAGMRELWATGSMHNRSRMVVASFLTKNLQIHWRHGEEWFWETLVDADPASNAFNWQWAAGSGDDASPYFRIFNPETQARKFDPDETYIRRWIPEYGTPEYPAPIVDLKESRREALDAYEAVK

SEQ ID NO: 5237 - protein, 126 aa, Desulfitobacterium hafniense DCB-2
MPLHSAVHRAEKLERDYQARGFEVLGFPCDQFGHQEPGDEAEIKEFCSLTYDVTFPMYAKVDVNGDKAHPLWKWLKDEKGGFLGIDAIKWNFTKFLIGRDGRVLKRYAPTDKPESIAADIEKALAA

SEQ ID NO: 5238 - protein, 487 aa, Pisum sativum
MLAQKQAEEAIVSSSFNETDQQESVLGKEEEQEQDHSFSVKNFLWHGGSVWDAWFSCASNQVAQVLLTLPYSFSQLGMLSGILLQIFYGILGSWTAYLISVLYVEYRTRKEKENVNFKNHVIQWFEVLDGLLGPFWKALGLAFNCTFLLFGSVIQLIACASNIYYINDNLDKRTWTYIFGACCATTVFIPSFHNYRIWSFLGLGMTTYTAWYLTIAAIVHGQAENVTHSGPKKLVLYFTGATNILYTFGGHAVTVEIMHAMWKPQKFKYIYLLATLYVFTLTIPSASAVYWAFGDELLNHSNAFSLLPKNGFRDGAVVLMLIHQFITFGFACTPLYFVWEKVIGMHDTRSICLRALARLPVVIPIWFLAIIFPFFGPINSAVGALLVSFTVYIIPSAAHMLTYRKASARQNAAEKPPFFMPSWTAMYILNAFIVVWVFVVGFGFGGWASMTNFIRQIDTFGLFAKCYQCKPPPPLMVAAPPPHALHH

SEQ ID NO: 5239 - protein, 293 aa, Triticum aestivum
DDIAALETWDNGKPYEQAAHIEVPMLARLMRYYAGWTDKIHGLIVPADGPHHVQVLHEPIGVVGQIIPWNFPLLMYGWKVGPALACGNTIVLKTAEQTPLSALYVSKLLHEAGLPEGVLNIVSGFGPTAGAALASHMDVDKIAFTGSTDTAKVILELSARSNLKPVTLELGGKSPFIVMDDADIDQAVELAHFALFFNQGQCCCAGSRTFVHERVYDEFVEKSKARALKRVVGDPFRKGVEQGPQIDDEQFKKILRYIKSGVDSGATLVTGGDKLGDKGYYIQPTIFSDVQVS

SEQ ID NO: 5240 - protein, 310 aa, Ralstonia solanacearum GMI1000
MLDIQMQSLLQGMQQAGVPDMADLPPPAARQVYSRIMAAAAEPVRAVSIAERTIAGPGGDLALRIYAPQRPDPRRGVALYLHGGGFVVGTPRDYDSVASALCERSGCVVVQVDYRLAPEHPFPAAVEDAWAAACWVAAHARELGAQPRIAVVGDSAGGNLAAVLARLARDCEGPAIVQQTLIYPMVAARPETTASYLRYGTGYTLTTRLTHYFHDLYLNGRPAEGDPRLVPLSAPDASGLPPALVMVAGYDVLRDEGIQYAHRLAQAGTPVTLVEYSGMVHGFIGMAGALEAARQALAQVADAVGRALAG

SEQ ID NO: 5241 - protein, 448 aa, Chromobacterium violaceum ATCC 12472
MSNQAWLERSFAAVWHPCTQMKRHERLPIVPIASADGVWLTDFDGKRYLDGVSSWWVNLFGHGHPRIKQAVRKQLDSLEHVMLAGFTHRPVVELSERLAALSGLGHAFYGSDGASATEIALKMSFHYWKNVGRPQKTRFVSLENSYHGETVGALAVTDVPLFSSTYAELLKPGLRAPSPDARQAVPGERAADVALRAARSLENLLAKHGGEIAAVIVEPLVQGAAGMAMHDPIYLTELRRLCDQYQVHLIADEIAVGFGRTGSFFAYQQAGITPDFLCLSKGITGGFLPLSCVLTRDEIYQAFYHDDVARGFLHSHSYTGNALACAAALAVLDIFDDEDVLEANRVKAEGFTRQMRPLAERPEIRHFRQRGMIWAFDVDTARSDFALAYFSAMLNRGCLLRPIGKSVYFMPPYTLKSEEMDWLASASVDALDEVLAGESVGGDPTALP

SEQ ID NO: 5242 - protein, 180 aa, Triticum aestivum
  unsure (1)..(180): unsure at all Xaa locations
MAPTVMASSATSVAPFQGLKSTAGLPVSRRSNGASLGSVSNGGRIRCMQVWPIEGIKKFETLSYLPPLSTEALLKQVDYLIRSKWVPCLEFSKVGFIFREHNASPGYYDGRYWTMWKLPMFGCTDATQVINKWRSQEGVPDXYVRIIGFTTSPSECVSSCLKQRAARSARLNTHTAHIMH

SEQ ID NO: 5243 - protein, 161 aa, Candida albicans SC5314
MSQFYELAPKDAKGEPYPFEQLKGKVVLIVNVASKCGFTPQYKGLEELNKKFADQPVQILGFPCNQFGHQEPGSNEEIGSFCSLNYGVTFPVLDKIEVNGDNTDPVYKYLKSQKSGVLGLTRIKWNFEKFLIDQNGKVIERFSSLTSPESIGTKIEELLKK

SEQ ID NO: 5244 - protein, 229 aa, Candida albicans SC5314
MVKSNVESAWETMEDTFSEIQNKFHQIYKPIDTGKPDEDDETTKKESLDITDDSTLSVSPITQLLYLARSKFYDLTPLDNSKSPFPFKNLRGKVVLIVNVASRCGFSFQYNGLEQLNKRFANDDFVLLGVPCNQFLWQEPGTNDQIVTKCKKKYDVSFQILDKINVNGEQADPVYKFLKAQKEGLWGTNRVKWNFEKFLIDKNGRVVERYSTFTRPVAITPRIEQLLES

SEQ ID NO: 5245 - protein, 228 aa, Zea mays
  unsure (1)..(228): unsure at all Xaa locations
MVEVVPIYTAGSKYPSSTCSPEDNSDLFYAALGGLGQFGIITRARIALEXDFESFTEDQEMLIMAENSFDYIEGFVIINRTGILNNWRASFKPQDPVQASHFQSDGRVLYCLELTKNFNSXTLEFLDRVHTSELKLRAQSLWEVPHPWLNLLIPRSSIRRFATEVFGRILVGFLSSAPSLSGHGSIAHAMSFGARWETFERRKHRYDPLAILAPGQRIFPKASLPLSL

SEQ ID NO: 5246 - protein, 133 aa, Zea mays
  unsure (1)..(133): unsure at all Xaa locations
APSRARRHGRRPMKIMGQVKEDVSLAESSMTNIVKEMLPTDXEDXKDSTDLLGECCVEVINLLWSESNXDVCSRDDKKTIAPEHVIRALQDLGFKEYGEEVYAAYKQHKLETLGSPKXTKFTGIEMTEEKAVA

SEQ ID NO: 5247 - protein, 1306 aa, Schizosaccharomyces pombe
MSYTNHSPANLTRNSSFNHQHYSTTLRSPPSMRGRGIDVNSSHYPHISRPRTSSDSQKMYTRAPVDYYYIQENPYFNNIDQDSISDKSLPSTNQSLHHSEEDTESDNDFSESIHPEFDIDVFYKVSNILYDESDLQDPEKRERLEWHSMLSSVLKGDVMQTEKRRLRLTEPDGHSGTYISEVWLGLQAWLHGRLNADQAEVIRKSREGVEPVLREVIDFQIQDEETTKPPLEQVTEILEKVEQCKQFYISSREMEENVPLSASKEFNYKLNALISWSNVMESIQVETLVLQKWVGNDEFDLTMRTPQFNYDGVENTSSFVERIFRQSGLQRTFEQRTLTTLNRIIHQAKQTISENAQAFEEMKLPTYEDKLLPLVRFPIKLLEEALRLSPAYAKKIKGPNFLIVDSMLDDFKIALSVAVRIKREYIKIASPSPGWSLPTNVDEDYDNVLLDSLKFYFKLLTLKLSSGNKNLYFKEIDFLENEWAFLNEHIYWINGGDIHMAGQFSYLSNSLLLNVHRYVESHLNGPTERTAASLTNWYSTLLKNTQIRFRKILRFSETLNSRFENASDFVISEGHLPDLVNRLSTTGHFLAYTANLERDGVFVIADHTLSENPEALKALLFSKDISNLETIQQNCSYVLILCPVHPIVWKGRIEKVDVPDFSVDLKTNRVRIIASNKREHLQAAKSVFQSISGDLVTLAVECRSSITRVYKEFIRLSKLCMRISSTVVDCVSAVREACSGVNCHDLIYHVFSFAAEFGQRILRFLSFDSYWQTKLKRKITSLAVEWISFICDECDLMDRKTFRWGVGALEFLMLMIRGNNILLIDDAMFLKIREKVGKSMAFLLTHFDVLGAKSKVAAKLQRESTEVSSSPRLTSFGDVEEEALSIQLLQKETMLRIDELEIERNNTLLERLAIGHVLDDSVFRNRDFIKLASSFSNITIRWQQGHFVRSGMFGDVYTGVNMETGDLLAVKEIKLQDSRTFRSTVDQIHNEMTVLERLNHPNVVTYYGVEVHREKVYIFMEFCQGGSLADLLAHGRIEDENVLKVYVVQLLEGLAYIHSQHILHRDIKPANILLDHRGMIKYSDFGSALYVSPPTDPEVRYEDIQPELQHLAGTPMYMAPEIILGTKKGDFGAMDIWSLGCVILEMMTGSTPWSEMDNEWAIMYHVAAMHTPSIPQNEKISSLARDFIEQCFERDPEQRPRAVDLLTHPWITDFRKKTIITMPPATITKKTSLSHTITEEKTAQLLAGRHDDSKAETDSLAASYKEESALPVASNVGLRQPNELRIDSINLPPAIVTPDTINYSVD

SEQ ID NO: 5248 - protein, 388 aa, Synechococcus sp. WH 8103
TTAFHSPTSRRRKTLQEANLLEGPLMLIKSIRGFSSNRAMTWLACAPLALMGLGIFTLSAKAEELPDLNAAFLANNLWLLVATILVIFMNAGFAMVEAGMCRQKNAVNILAKNLFVFALAVTAYWFVGYSFMYGDAAIDGWLYFGGLFFDPTVTAETISDAGLVPTVDFLFQAAFAGTAATIVSGLVAERIKFGEFVVFALILTAFIYPVAGSWEWNGGWLNSVGNAEFIDFAGSSIVHSVGAWAGLVGAALLGPRIGKYVGGKVQAIPGHNMSIATLGALILWIGWYGFNPGSQLAMDQWVPYVAVTTTLGAAGGAIGATVISTITSKKPDLTMIINGILAGLVSVTAGCGNLTLTGSWVAGLVGGIIVVFSVSALDSAGIDDPVGA

SEQ ID NO: 5249 - protein, 241 aa, Glycine max
MATYSWSTEIFSFLVLTLLSTSSHTMVAGARNLLESTLSKPEVPTLPKPHELPPLPEIPELPKFESPKIPALPKPELPKVPVGPRLEKPKVPELPKVSEIPKVPKLPKAPEMFKVSELPKLELPKVAEISKILELSKPELPKIPKLPKIHELSKVPELSNPELSKVSDSSRIGSRPKVPELSKPELPKVPELPKVRELPKPEFSKVPELPKVHELPKPEIPKILEFPKVPQFPKAFSTSNP

SEQ ID NO: 5250 - protein, 164 aa, Thermococcus kodakaraensis
MRKMVWRRDRYWDPFDIMREIQEEIDAIFRDFMRGPRLWSYREPGERIEVSETWREPFADIFDRGDRFVITVELPGVRKEDIKLRVTEDTVYIEAQMRREKELEQEGAIRIERYYSGYRRVIRLPEEVIPEKAKARYNNGVLEIEIPKKKPTKPEKEGVEVKIE

SEQ ID NO: 5251 - protein, 416 aa, Arabidopsis thaliana
MGLFGTKKIGKYEIGRTIGEGNFAKVKLGYDTTNGTYVAVKIIDKALVIQKGLESQVKREIRTMKLLNHPNIVQIHEVIGTKTKICIVMEYVSGGQLSDRLGRQKMKESDARKLFQQLIDAVDYCHNRGVYHRDLKPQNLLLDSKGNLKVSDFGLSAVPKSGDMLSTACGSPCYIAPELIMNKGYSGAAVDVWSCGVILFELLAGYPPFDDHTLPVLYKKILRADYTFPPGFTGEQKRLIFNILDPNPLSRITLAEIIIKDSWFKIGYTPVYHQLSDSIKDNVAEINAATASSNFINAFQIIAMSSDLDLSGLFEENDDKRYKTRIGSKNTAQETIKKIEAAATYVSLSVERIKHFKVKIQPKEIRSRSSYDLLSAEVIEVTPTNCVIEISKSAGELRLYMEFCQSLSSLLTAEVS

SEQ ID NO: 5252 - protein, 148 aa, Brassica napus
  unsure (1)..(148): unsure at all Xaa locations
MSAGVSHGEEAIVSSGNDNEGEQITGNHTGKTDEYDPSSGSALSNFLWHGGSVWDAWFSCASNQVAQVLLTLPYSFSQLGMLSGIVLQIFYGLLGSXDCYLISVLYVEYRARKEKEGKSFKNHVIQWFEXVLDGLLGSYWKAIGLAFN

SEQ ID NO: 5253 - protein, 467 aa, Methylococcus capsulatus str. Bath
MAVSEEFLRELEKLFPPGSRHTDPAECWAYGYDNSKRQALPDAVVFPRSHEDVVALVRLCNRHRIPLTARGRGTGTTGATVPVAGGVVASLERMSRIIEISPDNRFAVVEPGVTNQALQDAVRPDGFFWPPDPTSAEFCSIGGNLAYNSAGPRAVKYGTPRENTLGLRAVTGAGEELRCGVYTTKGVVGYDLTRLIIGSEGTLAIITEATLKLTPLPSAKRTLRAIYVDVASAARAIARIMAQPVIPCALEFIDGNAIALVRRYAAVDLPEDAAALLMIEVDGSPESLDAAVESLRAAATLEGLVEFRAARTAGEVEALWSIRKALSPSLRKVAPKKLNEDVVVPVTELPALIAGLDELSRRHAIPIVNFGHAGNGNIHVNLLFDPDRADENERAHACLHEMFTLVLKLRGTLSGEHGVGIEKRDYVGEELDRTSLALMHAIKRQFDPNGILNPGKSIPAEDPSPPA

SEQ ID NO: 5254 - protein, 346 aa, Klebsiella oxytoca
MQSVVIHAEGTVRVEERPIPTLQTENDVLVKVVSSGLCGSDIPRTFAKGAHYYPITLGHEFSGYVESYGSAVTDLQPGDGVACVPLLPCLICPDWLKGFYSQWAKYEFVGSRGDGAFTEYIVVNRKNVFVCADRMPIDDGALIEPMTVGLHAFHLAQAAKENVIIIGAGTMGLLALQCARELGAKSITAIDINPQRLALAKTLGATYVFNSKEMSSKEIQTALEEIQFDQLVLETAGTPQTVALGIEVAGPRAQLALVGTLHHDLTLLSATFGQILRKELTIVGSWMNYSGPWPGEEWQTAVRLLTEKRIQLVPLIAHIGNAESFAREVQALNGAPMQGKILLKLS

SEQ ID NO: 5255 - protein, 352 aa, Neurospora crassa
MSSAQRGGARKISFNVSEQYDIQDVVGEGAYGVVCSAVHKPSGQKVAIKKITPFDHSMFCLRTLREMKLLRYFNHENIISILDIQKPRSYETFNEVYLIQELMETDMHRVIRTQELSDDHCQYFIYQTLRALKAMHSANVLHRDLKPSNLLLNANCDLKVCDFGLARSAASQEDNSGFMTEYVATRWYRAPEIMLTFKEYTKAIDVWSVGCILAEMLSGKPLFPGKDYHHQLTLILDVLGTPTMEDYYGIKSRRAREYIRSLPFKKKVPFRTLFPNTSELALDLLEKLLAFNPVKRITVEEALKHPYLEPYHDPDDEPTAPPIPEEFFDFDKHKDNLSKEQLKQLIYQEIMR

SEQ ID NO: 5256 - protein, 428 aa, Oceanobacillus iheyensis HTE831
MKNERVENLTKEWQDDIRWVGIERPYKAEDVIRLRGSIDITHTLATRGASKLWKLINEEDYVNALGALTGNQAVQQVKAGLKAIYLSGWQVAADANMAGEMYPDQSLYPANSVPQVVRRINQALQRSDQIHFSEGENDIDWFAPIVADAEAGFGGQLNVFELMKSMIEAGAAAVHFEDQLSSEKKCGHLGGKVLLPTQNAVRNLIAARFAADVMGTPTIIIARTDANAADMITSDVDEYDHLFITGERTVEGFYKTKAGIDQAIARGLAYAPYADLIWCETSEPNLEEARIFAEAIHEKFPNKLLAYNCSPSFNWKKKLSDQEIAEFQKELGKLGYKFQFVTLAGFHALNHSMFDLAKKYKSHGMAAYSELQQAEFSSEKDGYTATRHQREVGTGYFDEVAQVISGGKASTAALIGSTETEQFTSFYK

SEQ ID NO: 5257 - protein, 261 aa, Emericella nidulans
MGHEDAVYLAKLAEQAERYEEMVENMKVVAASDVELTVEERNLLSVAYKNVIGARRASWRIVTSIEQKEESKGNKSQVALIKEYRQKIEGELAKICQDILDVLDQHLIKSAQSGESKVFYHKMKGDYHRYLAEFAVGDNRKAAADASLEAYKSATEVAQTDLAPTHPIRLGLALNFSVFYYEILNSPDQACHLAKLAFDDAIAELDTLSEESYKDSTLIMQLLRDNLTLWTSSEAEPAAENAPAEKKEEAPAAEGEEKPAE

SEQ ID NO: 5258 - protein, 149 aa, Triticum aestivum
  unsure (1)..(149): unsure at all Xaa locations
MAPTVMASSATSVAPFQGLKSTAGLPVSRRSNGASLGSVSNGGRIRCMQVWPIEGIKKFETLSYLPPLSTEALLKQVDYLIRSXKWVPLPRSSSKVGVHLPVEHNAIPPGVLRIGPGTGTMWESCLCFGMQPDAQRQVINKWREGQRKE

SEQ ID NO: 5259 - protein, 193 aa, Zea mays
MSAVNITNVAVLDNPTAFINPFQFEISYECLVPLDDDLEWKLIYVGSAEDENYDQQLESVLVGPVNVGTYRFVLQADPPDPSKIREEDIIGVTVLLLTCSYMGQEFMRVGYYVNNDYGDEQLREEPPAKVLIDRVQRNILADKPRVTKFPINFHPEPSTGTGRQQQQQEPQTASPEKHAGSGEGNGSKPEADQ

SEQ ID NO: 5260 - protein, 348 aa, Pseudomonas putida
MLAIRKTKAGPGGLSVDDVAAPKEAHSTDVLVKVEAAGICGTDLLIYKWGEFAKRMKLPTILGHEVSGVIEQVGSDVKGLRPGMRVSLESHLPCGTCYTCRRGWAHVCPKTRYPGVDFDGGFASFVVVPESVCWPVPCGIPPLQAAMMEPFGLAVHASLEGSGVSGLNVLVSGCGPIGLMNIAAAKALGASKVIAPDIHPLRLTAAAKMGADECINATEESVYKTVRSLLGERGVDVAIDYSGQAAALKELIQSITHGGELRLMGVPSHDILLNLEEWLFKGLIVRGLHGRRLYERWERSTSLLVTGRVDLSSLVSHRLPLSAAEDAFEMALNGQSLKILFEPNGSCI

SEQ ID NO: 5261 - protein, 355 aa, Sulfolobus acidocaldarius
MTFTNEELILPASVDLHVHVRGAQLSYKETVATATSEAVYGGVGVIVDMPNTVPYINTPERIKERLREFQLYSRTDYGIYSGVSKEVEEIDKLPIAGYKIYPEDLEKEETRYVLEKSKKLKILHPEMPFVSKIERSLRRSYWMETAAINLVKGNMHITHITNFETLQLAKSMGFTTDITAHHLVVDGERDCISKVNPPIRDYVTRLKLFLKGLFEVDCIASDHAPHSKEEKRMNFDLCPPGIAGVSFSTPYIYSLMFKGLISIDRAVSLLSGNPSRILNIPTGKIKEGYRANFTVIKRENWRYTTKFSKVTETPMDGFSLDAKVTNVIVEGKLAFDGENVYPIRGVNIFDSSSRS

SEQ ID NO: 5262 - protein, 161 aa, Triticum aestivum
  unsure (1)..(161): unsure at all Xaa locations
MAPTVMASSATSVAPFQGLKSTAGLPVSRRSNGASLGSVSNGGRIRCMQVWPIEGIKKFETLSYLPPLSTEALLKQVDYLIRSKWVPCLEFSKVGFIFREHNASXPGYYDGRYWTMWKLPMFXGCTDATQVINEVEEVKKGVPLXRTFRLLXSKTCARVQC

SEQ ID NO: 5263 - protein, 197 aa, Triticum aestivum
  unsure (1)..(197): unsure at all Xaa locations
MAPTVMASSATSVAPFQGLKSTAGLPVSRRSNGASLGSVSNGGRIRCMQVWPIEGIKKFETLSYLPPLSTEALLKQVDYLIRSKWVPCLEFXSKVGFIFREHNASPGXYYDGRXYWDNVELPMFGCTDATQVINEVEESRRIPDAYVRISDRQHAQVQCVTHRQRARIRKAKHSHGQYKCNAVCTRALVLSLLLLSR

SEQ ID NO: 5264 - protein, 346 aa, Corynebacterium glutamicum ATCC 13032
MEDMRIATLTSGGDCPGLNAVIRGIVRTASNEFGSTVVGYQDGWEGLLGDRRVQLYDDEDIDRILLRGGTILGTGRLHPDKFKAGIDQIKANLEDAGIDALIPIGGEGTLKGAKWLSDNGIPVVGVPKTIDNDVNGTDFTFGFDTAVAVATDAVDRLHTTAESHNRVMIVEVMGRHVGWIALHAGMAGGAHYTVIPEVPFDIAEICKAMERRFQMGEKYGIIVVAEGALPREGTMELREGHIDQFGHKTFTGIGQQIADEIHVRLGHDVRTTVLGHIQRGGTPTAFDRVLATRYGVRAARACHEGSFDKVVALKGESIEMITFEEAVGTLKEVPFERWVTAQAMFG

SEQ ID NO: 5265 - protein, 211 aa, Dimocarpus longan
AWHSAGTFDLHSKTGGPFGTIRHPDELAHEANNGLDIAVRLLEPIKEQFPILSYADFYQLAGVVAVEITGGPEIPFHPGRPDKSDPPPEGRLPAATEGSDHLRDVFGHMGLSDKDIVALSGGHTLGRCHEERSGFEGPWTSNPLIFDNSYFKELLSGEKEGLIQLPSDKALLEDSVFRPLVERYAADEDAFFADYAESHLKLSELGFADAD

SEQ ID NO: 5266 - protein, 131 aa, Brassica napus
MASVSPLAKYKLVFLGDQSVGKTSIITRFMYDKFDTTYQATIGIDFLSKTMYLEDRTVRLQLWDTAGQERFRSLIPSYIRDSSVAVVVYDVSNRLSFLNTSKWIEEVRTERAGDVIIVLVGNKTDLVDKRQ

SEQ ID NO: 5267 - protein, 312 aa, Chlamydomonas reinhardtii
MADLAVLRTAKQALDEGLLNPEDYDFIKKAFLRAQQIKAGLDAGFIKEEDFVQARDSFLHSLDFALVGGSSQPAYVQTPSIPDAPAMPPPAPVALRAAAAAPQRNSTPSRDTAPAAPVPVAAAAAAAPAAAAVPRISPAPPGAGTVPIPTDLPTSARGARSSSVVSNKTSMSGISVSDQCVAIFNHIKTKSAYKWVTFKVNDAGNEVVVDQLGAADSSYEQFINILPENNCRHGVYDYAYLNADTNQTVNKLVFVHWASDTATTKNKMMYASTKDFLKSYLDGLGAELQATDTKELAESEMRERVHQAITRK

SEQ ID NO: 5268 - protein, 401 aa, Arabidopsis thaliana
MASNKRCFSDESLSKRWRFLWTLVPRLNYDLRLHDNTCPRFSQFVDRSLLLHKAPTLESLNIKIGSICFTAEKDVGVWVRIGVDRFVRELSVSYCSGEEPIRLPKCLFTCSTLAVLKLENITLEDASCYVCFQSLKTLHLLDVKYLDDQSLPRIISSCSSLEDLVVQRCPGDNVKVVTVTAPSLKTLSLHKSSQAFEGDDDGFLIDTPKLKRVDIEDYWGGFCYIENMPEVVEANVDVIYKNTEKLLGSITSVKRLALCLITSDAAYPAGTIFSQLVHLELCTCAPRWWDLLTRLIEDSPKLRVLKLRQKHIRRAPSPRASWKQPALPKCLLFHLETFKWELYEGSQKQKEVATFILKHAIRLKTAIISPKPTSTLLEKHEMLKDLSSSPRGSSTCELLFD

SEQ ID NO: 5269 - protein, 188 aa, Triticum aestivum
  unsure (1)..(188): unsure at all Xaa locations
MEMYRRIXRGDVKYPQWFSSDLRRFMSKLLDPNPNTRITIEKLVEHPWFKKGYKPAVMLAQPHGSNSLKDVQVAFSTADNEGGSKVEQPAGSSVKPSSLNAFDIISHSKGFDLSGLFAVDQEQKASNSRFMTQKPASAIVSKLEQIAETESFMVKKQDGLVKLQGSKEGRKGQLAIDAEIFEVTPAFY

SEQ ID NO: 5270 - protein, 77 aa, Glycine max
MGFWTLLEGFLLFANALAILNEDRFLARRGWTLAEMTGPQRNSLKGQVIGLIYACQFLRLPLILFNVITIIVKLFSG

SEQ ID NO: 5271 - protein, 142 aa, Bradyrhizobium japonicum USDA 110
MTPEQITLIQQSFAKVAPISETAAVLFYDRLFEVAPSVRAMFPEDMTEQRKKLMGMLAAVVGGLSNLDSILPAASALAKRHVAYGAKAEHYPVVGATLLWTLEKGLGEAWTPELATAWTDAYGVLSGYMISEAYGAQAQAAE

SEQ ID NO: 5272 - protein, 215 aa, Triticum aestivum
  unsure (1)..(215): unsure at all Xaa locations
MKTLLILTILAMAITIGTANIQVDPSGQVQWLQQQLVPQLQQPLSQQPQQTFPQPQQTFPQPQQTFPHQPQQQVPQPQQPQQPFLQPQQPFPQQPQQPFPQTQQPQQPFPQQPQQPFPQXTQQPQQPFSQQPQQPFPQTQQPQQPFSQLQQPQQPFSQPNNNWRQPNNATIIPQQQRXIIQPSXHKQLNHARNSXAQCKPCVIXVSLGNIWHKAM

SEQ ID NO: 5273 - protein, 475 aa, Mesorhizobium sp. BNC1
MSYALTINGKAVQTSTTFDVINPATGEVAAACPEGTVAELNAAVAAAKSAFPAWSSRPDSNRREALGKIADLIEAHREELAALITAEQGKPQVGPGAPFEVSGCVAWTRVTQALDFEPQILIDNDHERVELIREPVGVVASITPWNWPLMIAIWHIMPALRVGCTVVIKPSPYTPLSTLRLVELINEAGILPAGVLNAVTGDKEVGDRISEHPDIDKIAFTGSTATGRRIMERAGPTLKRLTLELGGNDAGIILPGTDMSPRMEDLFWGSFINAGQTCSCLKRLYVHESDYESVCAALSGFVGGIKVGNGAEPDTLIGPLSNKMQFDKIVAMVEDARAKGARILAGGEKPSGRGYNYPLTIIADATMDMRVVAEEQFGPVLPVIRYRDVEEAVAEANSLELGLGASVWGDDPEEAAKVARKLIAGTRWVNRHGVLNPTVPMGGVKQSGIGVEFGIEGLQEFTTVQVLSIAKRVAG

SEQ ID NO: 5274 - protein, 507 aa, Synechocystis sp. PCC 6803
MSNSILSKLNVGERSPVNRTHSSRTEAEKSSLFRFVRRKINSPWLACVPLTALIVAIWNAAAIAQDTEIVNITVETVNENVATLQGTLNAIWILIAAILVIFMNAGFGMLETGLCRQKNAVNILTKNLIVFALATIAYWAIGFSLMFGSSGNPFVGFGGFFLSGDHTNYGLSPFPEGLPVAVFFLFQVAFSATAATIVSGAVAERIKFNEFLIFSVLLVGIAYPITGHWVWDAGGWLYTMGFMDFAGSTVVHSVGGWAALAGAFLLGPRLGKFVDGRPGAIPGHNMGFAMLGCLILWIGWFGFNPGSQLAADQACAYIAVTTNLAASAGGLTATFTSWLKDGKPDLTMVINGVLAGLVGITAGCAGVSYWGSVIIGGIAGILVVYSVAFFDKIKIDDPVGAISVHLVNGVWGTLAVGFFNMEKGLFYGGGINQLIIQIVGILAIGAFTAIFSFVVWAILKQTMGIRVSGEEEMIGLDIGEHGMEAYTGFVKETDSFGSAVSGATVPE

SEQ ID NO: 5275 - protein, 126 aa, Brassica napus
FVMEYCKGGELFKKVAKGNLRNKVAWKYFHQLINAVDFCHSRQVYHRDIKPENLLLDDNENLKVSDFGLSALADCKRQDGLLHTTCGTPAYVAPEVINRKGYDGTKADIWSCGVVLFVPLAGYLPF

SEQ ID NO: 5276 - protein, 177 aa, Oryza sativa (japonica cultivar-group)
MEFGGTQMLGVSILRLFSMCQHFVITVTRTKYKEPTKALIYWPNLSNPGGNPAWMMLLLLMENILFDMIVLAGMGLWTLLEGFLLLANALAILNEDRFLGPRGWSMSEVSGNGQTKSLKGQIVGLIYATQFLRMPLIALNVLIIVVKLGLSDIQIFSLQVPFLMEILPTMVMPYVRP

SEQ ID NO: 5277 - protein, 162 aa, Saccharomyces cerevisiae
MTTSFYDLECKDKKGESFKFDQLKGKVVLIVNVASKCGFTPQYKELEELYKKYQDKGFVILGFPCNQFGKQEPGSDEQITEFCQLNYGVTFPIMKKIDVNGSNADSVYNYLKSQKAGLLGFKGIKWNFEKFLVDSNGKVVQRFSSLTKPSSLDQEIQSLLSK

SEQ ID NO: 5278 - protein, 402 aa, Bacillus cereus G9241
MLSAKTIEIVKSTVPLLQEKGVEITTRFYEILFSEHPELLNIFNHTNQKKGRQQQALANAVYAAATYIDNLEAIIPVVKQIGHKHRSLGIKAEHYPIVGTCLLRAIKEVAGAPDEVLNAWGEAYGVIADAFISIEAEMYEEAAHKEGGWKDFRNFVVVKKVKESDVITSFYLKPEDGGKVSSFIPGQYVTVQINIEGETYTHNRQYSLSDAPGKEYYRISVKKEKGVDTPDGKVSNYLHDHVKEGDTLPVSAPAGDFVLNMDSTLPVVLISGGVGITPMMSMLNTLIEQNSKRNVCFVHAAINSNTHAMKEHVEAVDNEYEQVKSYTCYSAPTEKDLEMKNFDKEGFVEREWLQTIIPTTEAEFYFCGPVAFMKQINAAITDLGVKQEHIHYEFFGPAASLQ

SEQ ID NO: 5279 - protein, 379 aa, Haloferax volcanii
MSGELKRGLEGVLVAESKLSFIDGDAGQLVYCGYDIEDLARDASYEEVLYLLWHGALPTGEELDAFSDELAAHRDLDDGVLDVARELAEQDESPMAALRTLVSAMSAYDESADFEDVTDREVNLEKAKRITAKMPSVLAAYARFRRGDDYVEPDESLNHAANFLYMLNGEEPNEVLAETFDMALVLHADHGLNASTFSAMVTSSTLSDLYSAVTSAIGTLSGSLHGGANANVMRMLKDVDDSDMDPTEWVKDALDRGERVAGFVHRVYNVKDPRAKILGAKSEALGEAAGDMKWYEMSVAIEEYIGEEKGLAPNVDFYSASTYYQMGIPIDLYTPIFAVSRAGGWIAHVLEQYEDNRLIRPRARYTGEKDLDFTPVDER

SEQ ID NO: 5280 - protein, 457 aa, uncultured marine proteobacterium ANT32C12
MEFNSHEELVAASTKAAQKWRLVPAPQRGEFIRQFGNELRNQKTELAKVITKEARKIVSEAEGEVQEAIDMCDFATGLSRQLYGLTMPSERPDHRLQELWQPIGVVGCITAFNFPMAVFAWNFCLASVCGNSIIWKPSPHSNGCADALKKAWDEVAGEHKDLVLLLKGGNEEASALCKDTNIPLISATGSTQMGKELAPIVSARLGRTLLELGGNNAAIICPTADLDLTVKGITFSACGTTGQRCTSLRRAFVHEDIYEEFMQKLHAYYATLKIGNPSDSSNQIGPLISERSYNDMQRVLESISNKDVTVHGGQRLEVGDPEEFYVMPAIVEVSQIEDEMLNETFAPILYVKKFTDLTNAIEMQNNVKQGLSSSIFTNDMRESELFLSSEGSDCGIANVNIGTSGAEIGGAFGGEKDTGGGRESGSDAWKAYMRRVTATINYGEDLPLAQGVEFDES

SEQ ID NO: 5281 - protein, 92 aa, Zea mays
MHPRSAATVRLCLVCLALLLLTRDVRSRNLVGAVVQKERHKQSHGGHGGATPEPPVEEGSDAGAKRGQLQRDLTRWEEIHTDYIYTQDVKHP

SEQ ID NO: 5282 - protein, 352 aa, Hordeum vulgare
MANEEALMFALQLASSVVLPMTLRTCIELGLLETLVGAGGKTLTPEEVAAKLPSKAESNPDAASMVDRLLRVLATYKVVSRLVDECADGSLSRRYGAEPVCKWLTPNEDGVSMAPFCLLAQNKLFMEAWCHMKDAVLEGGSAFTKAFRASWFDYAGTDDHFNHLFNEAMKDHSVIITKKPLELYTGFDGIDTLVDLAGGVGAVIHAITKKYPSIKGINFDLPHVISDAQPYPGVEHVGGDMFEMVPSGDAIPMKWILPCFSDDECAVLLKNCYDALPAHGKVINVECILPVNPDATNNAQGLICVDASLLAYSPGGKERNLRDFEKLAKAAGFTGVKASYIFANFWAMEYTK

SEQ ID NO: 5283 - protein, 383 aa, Corynebacterium efficiens YS-314
MTTPTISKQKAKFNALTVSEVRRLTDDAVEISFEVPEELQADYDYIPGQYVALRTQLDGAEVRRSYSICDIPRPGTIRVAVKKNLGGLFSTWANEELKAGDTLEVMNPQGGFTSKTHVTSLNDAETIAQEAGNNHLVAVAAGSGITPIMAIAQTVLAENPKATFEIVYANKGGADVMFAEEIGDLKDKYPQRFAVHHVLSREQRVNPLFSGRIDDEKLNLLLDQVLRTDEVKEWFLCGPFELVQLCRDELEGRGVDSANVRFELFTTGKPGDGPGQGNTGRPVIADPEGDNITISFTLDGLSGTIESPSSARESVLNAALRARPDVPFACAGGVCGTCRAKVIEGEYEMEENYALEPDEVEAGYVLTCQTRPKGDTLVVDYDA

SEQ ID NO: 5284 - protein, 501 aa, Arabidopsis thaliana
MENGKCNGATTVKLPEIKFTKLFINGQFIDAASGKTFETIDPRNGEVIATIAEGDKEDVDLAVNAARYAFDHGPWPRMTGFERAKLINKFADLIEENIEELAKLDAVDGGKLFQLGKYADIPATAGHFRYNAGAADKIHGETLKMTRQSLFGYTLKEPIGVVGNIIPWNFPSIMFATKVAPAMAAGCTMVVKPAEQTSLSALFYAHLSKEAGIPDGVLNIVTGFGSTAGAAIASHMDVDKVSFTGSTDVGRKIMQAAAASNLKKVSLELGGKSPLLIFNDADIDKAADLALLGCFYNKGEICVASSRVFVQEGIYDKVVEKLVEKAKDWTVGDPFDSTARQGPQVDKRQFEKILSYIEHGKNEGATLLTGGKAIGDKGYFIQPTIFADVTEDMKIYQDEIFGPVMSLMKFKTVEEGIKCANNTKYGLAAGILSQDIDLINTVSRSIKAGIIWVNCYFGFDLDCPYGGYKMSGNCRESGMDALDNYLQTKSVVMPLHNSPWM

SEQ ID NO: 5285 - protein, 180 aa, Nicotiana tabacum
MASSVLSSAAVATRTNVAQANMVAPFTGLKSAASFPVSRKQNLDITSIASNGGRVQCMQVWPPYGKKKYETLSYLPDLSEEQLLSEIEYLLKNGWVPCLEFETERGFVYRENNKSPGYYDGRYWTMWKLPMFGCTDATQVLAEVGEAKKAYPEAWIRIIGFDNVRQVQCISFIAYKPEGY

SEQ ID NO: 5286 - protein, 160 aa, Xylella fastidiosa 9a5c
MNVVRYTPWPGQAALQNEIKQVFDRFFEHNGDTDESAVVTAQWVPRVDIKEEPNQFVLYADLPGIDPADIEVQMDKGILSIKGERKTESSSQTEHFSRIERRYGSFHRRFALPDSADADGITASGSHGVLSIFIPKRAATTPRRIQVGNAVSNDVALQSM

SEQ ID NO: 5287 - protein, 123 aa, Brassica napus
VCVWCFVISGDVLSGNDNGGSVHLGVLQEWFGSHWWNTRIFSLLFIYAFVLLPLVLCRRVERLAFSSAISFLLAVLFVVISSVLAISALMEGQTKNPRLFPDLTNGGSFWNLFTASPVIVTAF

SEQ ID NO: 5288 - protein, 168 aa, Brassica napus
MATVNFISHLASPASVYLLFLLSTTAAAINVTTVLSSFPNLSSFSNLLVSSGIASELSGRNSLTLLAVPNSHFSSASVDFTRRLSPPKLADLLRFNVLLQFLSDSDLRRISPSGSAVTTLYEASGHVFAGSGSVNVTRDPASGSVTIGSPSSSKSVTVLKLLETKPPT

SEQ ID NO: 5289 - protein, 307 aa, Schizosaccharomyces pombe
MIDLDNIIERLYEKQLIAESVIAYLCSLAKEVLMQESNVVRLSTPITVVGDIHGQFDDLLEIFRIGGPCPYTNYLFLGDYVDRGYYSIETITLLICLKLRYPKRITLLRGNHESRGITQTYGFYSECLRKYGNANVWKYFTDIFDFLTLSATIDDTIFCVHGGLSPSIQHIDQILVLDRFREFPHEGPMADLVWSDPDPSVQEFSLSPRGAGFSFGEVIVTKFLEYNNMKHILRAHQLCSEGYQILFEKKLSTVWSAPNYCYRCANLASILQIDTDQSRFFNVFDAAPNQETPFVEPAAKVTAEYFL

SEQ ID NO: 5290 - protein, 410 aa, Blumeria graminis
MSDMQGRKVFKVFNQDFVVDERYNVTKELGQGAYGIVCAATNISTQEGVAIKKVTNVFSKKILAKRALREIKLLQHFRGHRNITCLYDMDIPRPENFNETYLYEELMECDLAAIIRSGQPLTDAHFQSFIYQILCGLKYVHSANVLHRDLKPGNLLVNADCELKICDFGLARGFSVDPEENAGYMTEYVATRWYRAPEIMLSFQSYTKAIDVWSVGCILAELLGGRPFFKGRDYVDQLNQILHVLGTPNEETLARIGSPRAQEYVRNLPFMAKRPFAQIFPNANPDALDLLNRMLAFDPASRISVEEALEHPFLQIWHDVSDEPCCPTTFNFDFEVTDDVGEMRKMILDEVARFRHHVRVQPGMQSPSNDPSVPTLQTSVAWGSEDPRPQENNDQEITGLERDLTVGLDR

SEQ ID NO: 5291 - protein, 161 aa, Triticum aestivum
  unsure (1)..(161): unsure at all Xaa locations
MSDTDEHHFESKADSGASKTYPQQAGAIRKGGHIVIKARPCKVVEVSTSKTGKHGHAKCHFVAIDIFNGKKLEDIVPSSHNCDVPHVDRQDYQLIDITDDGYVSLLTESGHTKDDLKLPTDDXLLGQIXTGFADGKDLILSVMSRMGEEQICAVKEIGGGK

SEQ ID NO: 5292 - protein, 310 aa, Zygosaccharomyces rouxii
MVTLQNSTSTLKLNTGQTIPQVGLGTWRSKENEGYKAVIEALKAGYRHIDGAAVYGNEGEVGKAIQDSGVPRNEIFLTTKLWCTQQRNPQEALDQSLQRLGLDYVDLYLIHWPVPLRTENIKDGNLFQFAEKPDGSKDVDLEWNFIKTWELMQKLLESGKTKAIGVSNFSVNNLKDLLAAPTTKVTPAVNQVELHPLLPQEDLIKFGKENGIVIEAYSPLGGENAPILSDPTVQEIAKANGVEAGHVVISWAVQKGLVTLPKSVTPSRIVGNLKVLTLSDSDVAKVDGLLKAKGERRTCYQDFSPFPIFQ

SEQ ID NO: 5293 - protein, 149 aa, Glycine max
REQAQEFTDIKFREAYLDTVCLNMVQDPGHYDVLVMPNLYGDILSDLCAGLIGGLGVTPSGNIGEGAAVFESVHGTAPDIAGQDKANPTALLLSGVMMLRYMGLESYANKIEKACFDAISHGDHKTRDLGGTGTCSSFTADICARIKSM

SEQ ID NO: 5294 - protein, 311 aa, Zea mays
IRLELKISDFGLSALPEQLRYDGLLHTQCGTPAYVAPEVLRKKGYDGSKADIWSCGVVLYVLLAGFLPFQHENLMTMYNKVLRAEFEFPPWFSPDSKRLISKILVADPSKRTAISAIARVSWFRKGFSSLSAPDLCQLEKQEDAVTVTVTEEENNSKVPKFFNAFEFISSMSSGFDLSGLFESKRKTATVFTSKCSAAAIVAKIAAAARGLSFRVAEVKDFKIRLQGAAEGRKGRLAVTAEVFEVAPEVAVVEFSKSAGDTLEYAKFCEEDVRPALKDIVWTWQGDATCAANVPACHGEECHKQVVVVSTI

SEQ ID NO: 5295 - protein, 503 aa, Bradyrhizobium japonicum USDA 110
MAGSIAGAFVQGCLPKRPHHAPKKRLTMVNRMQFYIDGAWVDPAVKKSTAVVNPATEEAMYEVALGSKADVDKAVAAAKRAFATFSQTSREERVALLTKIIEIYKGRLKEIGAAVSDEMGAPLPMAEKLQAGAGLGHLMTTLDVLKNYHFEEPVGTAMVLREPIGVVGMITPWNWPLNQIACKVAPALAAGCTMILKPSEFTPTSALIFAEILHEAGVPKGVFNLVNGLGPEVGAAMSEHPDIDMISFTGSTRAGIDVAKRAAPTVKRVSQELGGKSPNVILEGADLTKAVTGGVMHMFNNSGQSCNAPSRMIVPLSKMKEVAAIAKAVADKTKAGDPRAEGTTIGPVVNRGQWDKIQGLIKKGIDEGATLVAGGPGLPEGVNKGFYVRPTIFADVTPDMTIAREEIFGPVLTIIGAKNEADAVQIANDTPYGLAGYVSADTVESAKRVARQIRAGNVNLQGVPNDRTAPFGGYKQSGNGREWGKYGLEDFLEVKAVAGFNAA

SEQ ID NO: 5296 - protein, 92 aa, Triticum aestivum
MGLCSCCCRCLEIMCAILLPPLGVCLRHGCCSMEFWISVLLTILGYLPGVLYAAYVICSVDPDRVRRRGAYVICSVDPDRVRRHDDDYIYVA

SEQ ID NO: 5297 - protein, 433 aa, Leptospira interrogans serovar Copenhageni str. Fiocruz L1-130
MIWYPFTLQFEPDSPLKIERAKGEFLYDELGNSYIDGISSWWVSIHGHNHPKIVQAVKNQLEKLDHVLLAGFTHDPAEKLAAELLKITDGLFQKVLYSDNGSTAVEIMIKLAYQYFQNIGEVDRKIFIKWNSSYHGDTIGTMSVGGNSVFNRVFQGLMFPTKEFQTPNCNFCPMGKKPESCKVECIDPIEEFFQKSPKAVAGIVIEPLILGSGGMIFYKEEVLQRLETISKKYGSLLLLDEVFTGFGRTGSVFAYQRAKIRPDFIALAKGLSAGVSAVAVTLTTDRIHSAFVTADPEKGFYHGHTMTGNPIACSAALASLKIFFEENRLEQILRLESKLNVGLKKIAKEFPKAVKNCRVLGAVGVLELEVGKASGYHYPGNKILKKKFLEKGVLLRPLGNVIYLTPPYNIENSSLEKIFSAIRETLSEISFGN

SEQ ID NO: 5298 - protein, 112 aa, Brassica napus
MKPPQSASLDRRRDDFRRGGSDIFEIIDHAIMVAATDCPIKFKSRRDKIAELLFSCRVTLCTGCHRELSLPGEDEAVDGGEDDVGGVGSKESKANSSRGDNNQIVGSYSYDD

SEQ ID NO: 5299 - protein, 352 aa, Glycine max
MARRSLPLLKHLLSRRIPARSGDHVTLIPGDGIGPMVTGAVEQVMEAMHAPVYFEKFEVHGNMKAVPPEVLDSIRKNKVCLKGGLVTPMGGGVSSLNVQLRKELDLYASLVNCFNLPGLPTRHDNVDIVVIRENTEGEYSGLEHEVVPGVVESLKVITKFCSERIAKYAFEYAYLNNRKKVTAVHKANIMKLADGLFLESCREVATKYPGIKYNEIIVDNCCMQLVSKPEQFDVMVTPNLYGNLVANTAAGIAGGTGVMPGGNVGAEHAVFEQGASAGNVGSDKIREQKKANPVALLLSSAMMLRHLQFPAFADRLETAVEKVILEGKCRTKDLGGTSTTQEVVDAVIDALD

SEQ ID NO: 5300 - protein, 124 aa, Cucumis sativus
GRGQFGTTFLCTDKPTGFNYACKTIPKRKLLCKEEYEDVWREIQIMHHLSEHPNIVRIKGTYEDPGLCYLVMELCEGGELFDRIVQKGQYSEREAAKLIGVIVSVLESCHSLGVMHRDLKPENF

SEQ ID NO: 5301 - protein, 280 aa, Streptococcus agalactiae NEM316
METYTLSNTLNIPKIGFGTWQLTEGEEAYKAVTHALKVGYTHIDTAQIYGNEHSVGRAIRDSGLARESIFLTTKIWNDKHDYHLAKASIDESLQKLGVDYIDLLLIHWPNPKALRENDAWKAGNAGTWKAMEEAYKEGKVKAIGVSNFMKHHLEALFETAEIKPMVNQIILAPGCAQEDLVRFCKGNDILLEAYSPFGTGAIFENESIKAIAEKYGKSVAQVALRWSLDNGFLPLPKSATPKNIEANLDIFDFQLNEDDITTLIQLDSGIKPKDPDNVSF

SEQ ID NO: 5302 - protein, 606 aa, Zea mays
MCGILAVLGCADEAKGSSKRSRVLELSRRLKHRGPDWSGLRQVGDCYLSHQRLAIIDPASGDQPLYNEDQSVVVAVNGEIYNHLDLRSRLAGAGHSFRTGSDCEVIAHLYEEHGEEFVDMLDGVFSFVLLDTRHGDRAGSSFFMAARDAIGVTPLYIGWGVDGSVWISSEMKALHDECEHFEIFPPGHLYSSNTGGFSRWYNPPWYDDDDDEEAVVTPSVPYDPLALRKAFEKAVVKRLMTDVPFGVLLSGGLDSSLVATVAVRHLARTEAARRWGTKLHSFCVGLEGSPDLKAAREVAEYLGTLHHEFHFTVQDGIDAIEDVIYHTETYDVTTIRASTPMFLMSRKIKSLGVKMVISGEGSDELFGGYLYFHKAPNKEELHRETCRKVKALHQYDCLRANKATSAWGLEARVPFLDKEFINAAMSIDPEWKMVQPDLGRIEKWVLRKAFDDEEQPFLPKHILYRQKEQFSDGVGYSWIDGLKAHATSNVTDKMLSNAKFIFPHNTPTTKEAYYYRMVFERFFPQKSAILTVPGGPSVACSTAKAIEWDAQWSGNLDPSGRAALGVHLAAYEHQHDPEHVPAAIAAGSGKKPRTIRVAPPGVAIEG

SEQ ID NO: 5303 - protein, 425 aa, Serratia marcescens
MSVTASDLAFDQRHIWHPYTSMSRPLPCYPIESASGVELQLADGRSLVDGMSSWWAAIHGYNHPRLNQAASQQLEKMSHVMFGGITHPAAISLCRRLVEMTPEALQCVFLADSGSVAVEVSLKMALQYWQARGERRQRILTLRHGYHGDTFGAMSVCDPDNSMHSLYQGYLAPHLFATAPQCRFDEEWREEDIAPFAALLEQHAGEVAAVILEPVVQGAGGMRIYHPTYLKRVRDVVRVAIKLLLIADEIATGFGRTGKLFACEHAQVVPDILCLGKALTGGYMTLSATLTTRHVAETISNGAAGCFMHGPTFMGNPLACAVADASLALLAENRWQAQVSAIETQLKRELLPLGRCRRWPHVRVLGAIGVVEMREPVDVAELQRGFVERGVWIRPFGKLIYLMPPYIIEAEQLSRLTAAVADAAR

SEQ ID NO: 5304 - protein, 405 aa, Geobacter metallireducens GS-15
MLDILVENGAVKELGKGVKAPSGTETIDASGLIVTPGLIDMHVHLRDPGHEYKEDIVSGTKAAAAGGFTSVACMPNTKPVNDNKAVTSYIIAKAKAEGSVNVFPVGSITQGSKGELLSEMGELKESGCVAVSDDGHPVTNSELMRRALEYAKGMGIMVISHAEDLSLVGAGVMNEGFVSTELGLKGIPWAAEDAATARDVYLAEFTDSPLHIAHVSTKGSLRIIRNAKARGVKVTCETAPHYFSLTDDAVRGYDTNAKMNPPLRTADDVTAVKEALKDGTIDAIATDHAPHHIDEKDLEFNEALNGIVGLETSLTLSLRLVEEGVLTLPVLVDKMACNPAKILGIDRGTLKPGSVADITVIDPKATWTVDADKLASKSKNSPFLGWEVKGAAAFTIVGGKVVYKR

SEQ ID NO: 5305 - protein, 422 aa, Pseudomonas aeruginosa PAO1
MSDLKTAALEYHAQPRPGKLSVELTKPTATARDLSLAYSPGVAEPVREIARDAELAYQYTGKGNLVAVISDGTAILGLGNLGPLASKPVMEGKGVLFKRFAGIDVFDIEVDAESPQAFIDTVKRISITFGGINLEDIKAPECFEIERALIEQCDIPVFHDDQHGTAIVTAAGMLNALELAGKKLEEAKIVCLGAGAAAISCMKLLVSMGAKVENIYMIDRKGVIHAGRDDLNQYKSVFATETDKRTLADALEGADVFVGLSGANLLEPEDLKRMAPNPIVFACSNPDPEIKPELAHATRNDVIMATGRSDYPNQVNNVLGFPFIFRGALDVRATRINEEMKIAAALALRDLAKQPVPEDVCAAYGVDKLEFGREYIIPKPMDKRLITVVSDAVAKAAIETGVATLPYPKNYPLKSVDDVFNG

SEQ ID NO: 5306 - protein, 453 aa, Glycine max
MEHFNNDDLEYVVDEYYDVPDFAVEDTSSDIVPELTSDVDSDFEDEFPTSNAKTDTTASEARNGKDIQGIPWERLNYSRDKYRETRLKQYKNYQNFSRSRHDLRKECLEVQKGETFYDFFFNTRLVKSTIVHFQLRPNIMLRNLLWATSKHDVYFMQNYSVMHWSALLRRGKEVLNVAKPIIPTLKRPGFLAQPVSRVQISTMTVKENLMVAGGFQGELICKNLKHPGVLFCGKITTDDNAITNAVDVYSNPAGSLRVITANNDFQVRVFDAENFASLGCFKYDWSVNNTSVSPDGKLLAVLGDSTECLIADANTGKITGSLKGHLDYSFSSAWHPDGQILATGNQDKTCRLWDIRNLSQSMAVLKGRMGAIRALRFTSDGRFLAMAEPADFVHIFDSHSGYEQGQEIDLFGEIAGISFSPDTEALFVGIADRTYGSLLEFNRKRHYNYLDSF

SEQ ID NO: 5307 - protein, 444 aa, Zea mays
  unsure (1)..(444): unsure at all Xaa locations
MSTTKVKRRVGKYELGRTIGEGTFAKVRFARDTVTGEAVAIKILDKEKVLKHKMVEQIKREISTMKLIKHPNVVRIYEVMGSKTKIYIVLEFATGGELFDTIVNHGRMREDEARRYFQQLINAVDYCHSRGCVXTRDLKPENLLLDSYGNLKVSDFGLSALSQQIKDDGLLHTTCGTPNYVAPAXSLEDQGYDGAMADLWSCGVILFVLLAGYLXPFEESNLMTLYKKISNAEFTFPPWTSFPAKRLLTRILDPNPMTRITIPEILEDEWFKKGYKRPXFDEQYDTTLDDVDAVFNDSEEHHVTEKKEEEPVALNAFELISMSAGLNLGNLFDSEQEFKRETRFTSKXPPKKFVRKIEEAAKPLGFDVQKKNYKLRLEKVKAGRKGNLNVATEILQVAPSLHMVEVRKAKGDXTLEFHKFYKNLSKTLKDVVWKSDDLQTQHAS

SEQ ID NO: 5308 - protein, 164 aa, Mycoplasma penetrans HF-2
MFKMSDFYKFKVNKINGKEIELSEYKNKVVLVVNVASKCGFVKQYENLENMYQKYKDQGLVILGFPCNQFFFQEPKTNQEILSFCTTKYNVTFDMFEKINVNGKEANPLYTWLKEQMPWTARAKNVKWNFEKFLLDKNGNVKYRFESKKIPEEFEQEVVNLINE

SEQ ID NO: 5309 - protein, 479 aa, Escherichia coli O157:H7 EDL933
MSVPVQHPMYIDGQFVTWRGDAWIDVVNPATEAVISRIPDGQAEDARKAIDAAERAQPEWEALPAIERASWLRKISAGIRERASEISALIVEEGGKIQQLAEVEVAFTADYIDYMAEWARRYEGEIIQSDRPGENILLFKRALGVTTGILPWNFPFFLIARKMAPALLTGNTIVIKPSEFTPNNAIAFAKIVDEIGLPRGVFNLVLGRGETVGQELAGNPKVAMVSMTGSVSAGEKIMATAAKNITKVCLELGGKAPAIVMDDADLELAVKAIVDSRVINSGQVCNCAERVYVQKGIYDQFVNRLGEAMQAVQFGNPAERNDIAMGPLINAAALERVEQKVARAVEEGARVALGGKAVEGKGYYYPPTLLLDVRQEMSIMHEETFGPVLPVVAFDTLEDAISMANDSDYGLTSSIYTQNLNVAMKAIKGLKFGETYINRENFEAMQGFHAGWRKSGIGGADGKHGLHEYLQTQVVYLQS

SEQ ID NO: 5310 - protein, 508 aa, Zea mays
  unsure (1)..(508): unsure at all Xaa locations
MASNGCNGNGNGKAAPAGVVVPEIKFTKLFINGEFVDAASGKTFDTRDPRTGDVLAHVAEADKADVDLAVKSARDAFEHGKWPRMSGYERGRIMSKLADLVEQHTEELAALDGADAGKLLLLGKIIDIPAATQMLRYYAGAADKIHGDVLRVSGRYQGYTLKEPIGVVGVIIPWNFPTMMFFLKVSPALAAGCTVVVKPAEQTPLSALYYAHLAKMAGVPDGVINVVPGFGPTAGAALASHMDVDSVAFTGSTEVGRLIMESAARSNLKTVSLELGGKSPLIIFDDADVDMAVNLSRLAVFFNKGEVCVAGSRVYVQEGIYDEFVKKAVQAARSWKVGDPFDVTSNMGPQVDKDQFERVLKYIEHGKSEGATLLTXGGKPAADKGYYIEPTIFVDVTEDMKIAQEEIFGPVMSLMKFKTVDEVIEKANCTRYGLAAGIVTKSLDVANRVSRSVRAGTVWVNCYFAFDPDAPFGGYKMSGFGRDQGLAAMDKYLQVKSVITALPDSPWY

SEQ ID NO: 5311 - protein, 455 aa, Oryza sativa (japonica cultivar-group)
MLAVSPAMCPDIEDRAAVAGDAGMEVVGMSSDDMDQFDFSVDDIDFGDFFLRLEDGDVLPDLEVDPAEIFTDFEAIATSGGEGVQDQEVPTVELLAPADDVGVLDPCGDVVVGEENAAFAGAGEEKGGCNQDDDAGEANVDDGAAAVEAKSSSPSSTTSSSQEAESRHKSSSKSSHGKKKAKVDWTPELHRRFVQAVEQLGIDKAVPSRILEIMGIDSLTRHNIASHLQKYRSHRKHMIAREAEAASWTQRRQIYAAGGGAVAKRPESNAWTVPTIGFPPPPPPPPSPAPIQHFARPLHVWGHPTMDPSRVPVWPPRHLVPRGPAPPWVPPPPPSDPAFWHHPYMRGPAHVPTQGTPCMAMPMPAARFPAPPVPGVVPCPMYRPLTPPALASKNQQDAQLQLQVQPSSESIDAAIGDVLSKPWLPLPLGLKPPSVDSVMGELQRQGVANVPPACG

SEQ ID NO: 5312 - protein, 413 aa, Nicotiana tabacum
MPEKPLFGKYELGKLLGCGASAKVYHAREINNGQSVAIKMINKNNKDNIPNENIEREISILRQLRHPYIVKLYEVLATKSKIYFVMEYVKGGELFTKIADHGRFSEDLSRKYFQQLISALNYCHSRGIYHRDLKPENILIDENGDLKISDFGLSATTDQIQKFDGLLHTVCGSPAYVAPEILTIKGYDGAKTDIWSCGIILYVMIAGYLPFYDQNLMLMYKKIYKGEFKCPKWMSPDVIRILSRLLDTNPATRITIDEIIKDPWFRKGLKFIKFAGEEEDKYSLSSNCLNAFDLISFSQGLDISGLFKSNNPANDLERTVVEQSPESVIERVEEMAKKENFRLRKKKEWGIEMKVQNGKLTMSVDIYRLTERFVIVEVKREAGNGDLYTDLWRNKLKAVILGQQIAEIQDSGS

SEQ ID NO: 5313 - protein, 326 aa, Bacteroides thetaiotaomicron VPI-5482
MGTVKCIGILTSGGDAPGMNAAIRAVTRAAIYNGLQVKGIYRGYKGLVTGEIKEFKSQNVSNIIQLGGTILKTARCKEFTTPEGRQLAYDNMKREGIDALVIIGGDGSLTGARIFAQEFDVPCIGLPGTIDNDLYGTDTTIGYDTALNTILDAVDKIRDTATSHERLFFVEVMGRDAGFLALNGAIASGAEAAIIPEFSTEVDQLEEFIKNGFRKSKNSSIVLVAESELTGGAMHYAERVKNEYPQYDVRVTILGHLQRGGSPTAHDRILASRLGAAAIDAIMEDQRNVMIGIEHDEIVYVPFSKAIKNDKPVKRDLVNVLKELSI

SEQ ID NO: 5314 - protein, 422 aa, Oryza sativa (japonica cultivar-group)
MLAVSPAMCPDIEDRAAVAGDAGMEVVGMSSDDMDQFDFSVDDIDFGDFFLRLEDGDVLPDLEVDPAEIFTDFEAIATSGGEGVQDQEVPTVELLAPADDVGVLDPCGDGAAAVEAKSSSPSSTTSSSQEAESRHKSSSKSSHGKKKAKVDWTPELHRRFVQAVEQLGIDKAVPSRILEIMGIDSLTRHNIASHLQKYRSHRKHMIAREAEAASWTQRRQIYAAGGGAVAKRPESNAWTVPTIGFPPPPPPPPSPAPIQHFARPLHVWGHPTMDPSRVPVWPPRHLVPRGPAPPWVPPPPPSDPAFWHHPYMRGPAHVPTQGTPCMAMPMPAARFPAPPVPGVVPCPMYRPLTPPALASKNQQDAQLQLQVQPSSESIDAAIGDVLSKPWLPLPLGLKPPSVDSVMGELQRQGVANVPPACG

SEQ ID NO: 5315 - protein, 324 aa, Candida tropicalis
MSTTPTIPTIKLNSGYEMPLVGFGCWKVTNATAADQIYNAIKTGYRLFDGAEDYGNEKEVGEGINRAIKEGLVKREELFITSKLWNNFHDPKNVETALNKTLSDLNLDYVDLFLIHFPIAFKFVPIEEKYPPGFYCGDGDNFHYEDVPLLDTWKALEKLVEAGKIKSIGISNFTGALIYDLIRGATIKPAVLQIEHHPYLQQPKLIEYVQKAGIAITGYSSFGPQSFLELESKRALNTPTLFEHETIKLIADKHGKSPAQVLLRWATQRNIAVIPKSNNPERLAQNLSVVDFDLTKDDLDNIAKLDIGLRFNDPWDWDNIPIFV

SEQ ID NO: 5316 - protein, 214 aa, Zea mays
MAAVEVCVKAAAGKPDTLGDCPFSQRVLLTLEEKKVPYEVKLVDLGNKPEWFLEINPEGKVPVLKGDDGKCIADSDVITQVIEEKFPTPSLVTPPEYASVGSKIFPAFVKFLKSKDASDGSEKALLDELQALDEHLKAHGPYINGDNVSAADLSLAPKLFHLQVALEHFKGWKIPENLTNVHAYTKALFTRESFVKTKPSEEHVIAGWAPKVNA

SEQ ID NO: 5317 - protein, 147 aa, Lactococcus lactis subsp. lactis Il1403
MNGETVSMSDFKGKVVIVVNTASKCGFTPQFEGLEKLYENYKDQGLEILGFPCNQFVNQDAGENSEINEFCQLNYGVTFPMFQKIKVNGKEAHPLYQFLKKEAKGALSGTIKWNFTKFLIDREGNVIERFAPKTEPKEMEEEIQKLL

SEQ ID NO: 5318 - protein, 296 aa, Zea mays
MAVATESRGSEDRASAHANQEKRWVLSDFEVGKPLGRGKFGHVYLAREKRSSEIVALKVLFKSQLKQSQVEHQLRREVEIQSHLRHPNILRLYGYFYDQTRVYLILEYAAKGELYKELTRCKHFSERRTATYVASLARALIYLHGKHVIHRDIKPENLLVGVQGEIKIADFGWSVHTFNRRRTMCGTLDYLPPEMVEKAEHDYHVDIWSLGVLCYEFLYGVPPFEAKEHSETYRRIVKVDLKFPLKPFVSPAAKDLISQMLVKSSAQRLPLHKVLEHPWIVQNADPSGVYREGRSV

SEQ ID NO: 5319 - protein, 219 aa, Zea mays
  unsure (1)..(219): unsure at all Xaa locations
APAFCELSLPLTKEKAAFSPSDPAMQRHVASGRPSGTDGSDFSYRMVVESRNQSTAHTAKATLPTPLSXPRNFAGYQRVAEGRSRLARLILVQALHLVAGGLLLLLSLSKGAAVNKFAVLSMAAGFLAIVVGELGRMRTMSVLLRLYTSLSSIAVAFSVTCIIRSELFLKVMKQNTEAITSYEMLDAVRVALGILLQMVVIXATTTRLLQNMSPPKRAS

SEQ ID NO: 5320 - protein, 171 aa, Brassica napus
STHASGWNRSRYGRKATIREFYGVILPSLERLHINFSDSPGDNTLWYPNPKAITYDIEGNRFITNSVDSEREEECGICLEPCTKMVLPNCCHAMCIKCYRNWNMKSESCPFCRGNIKRVNSEDLWVLTCDEDVVDPETVTKEDLFRFYLHINSLPKDYPEAVFLGYNEYLI

SEQ ID NO: 5321 - protein, 322 aa, Vibrio vulnificus YJ016
MSMIKKIGVLTSGGDAPGMNAAIRGVVRTALGAGLEVYGIYDGYLGLYEGRIKQLDRSSVSDVINRGGTFLGSARFPEFKEVAVREKAIENLKAHGIDALVVIGGDGSYMGAKKLTEMGYPCIGLPGTIDNDIAGTDYTIGYLTALNTVIESIDRLRDTSSSHQRISIVEIMGRHCGDLTLMSAIAGGCEYIITPETGLDKEKLIGNIQDGISKGKKHAIIALTELMMDANELAKEIEAGTGRETRATVLGHIQRGGRPTAFDRVLASRMGNYAVHLLMEGHGGRCVGIVKEQLVHHDIIDAIENMKRPVRNDLFKVAEELF

SEQ ID NO: 5322 - protein, 1533 aa, Magnaporthe grisea 70-15
MYPGSSQSRPYQVPPPPPMSPPLSQMHQQMSFVPPPPPPLNRYQTTPNLGASAPPPPPPGPPPASALNPQAPWNGAWGGVPAPRQAYDNRSGMYAQAPIQQYNPQAHAATAPGLNIPPPPLQTDAPMSDTYNPGQDPMFDGFMPDLSFDLEQETMGSSQTWQTTSSSSTNTASVNDNVQSNAPTEERTRRNNSASITGTQSSSNVPGIPSDITASWSLDKVIAWLQMNSFSRDWQETFKSLNIHGAQFLELGSGHFGRGNFGMMHQQVYPKLAKVCTASGTGWDQPREREEGKRMRRLIRGLVHARAVPDSARVPSSHGRQGSINSRGNDKGTHDGSDSPNTPIMKTPSSQSRSTTIPTFPDGSSFSNHRGVLKNIDIDRHSSPKLNGDSPAASPNPVMASSTPKSSTLSVSPHSSRFGNNVRNSTDSVKAIYGSGIPADAQKMMSNSNLDELINGRGARQSPSDLGDNSAGTDSPVSARDTKLPFRQRMQAKDIDGNLSSPNGEGSLSPQMYRNGLGLDDYLRFKKPGGSIYLMATADGWNYRVVDVTDVETVLDLRSEISRGLGIPDEDGVEFYLTELGKSDHSQPLDDNQLMNHNKSRADAEGTLKLFVKPPPMSQQSTWSAGDTGQRHRFGTSSSMSRQQNTLKDDQSEEARLRAQREYKAEIDRKGREYLAIRKAKLESNNNGLSSSTEGIGIVGKPVDFDTPRHSPYEDKNTDRMFPTRNAPAPPVAPSATLNRVNSLMTGQRRVQGSMDGYPSQRVPPGVGTTTSPKEMSEDRRRQPMSGSQPMGGITSALVDMGRNLGGVALPNRGVSANNVPSKPSPPYRVATAPVSGRDFVSPDNRAAFPRSQTAGDLSPISQMPANFAAYQEPNPSPRGFGAAPVSSAAHKRAPSGPDIDFTEPEVSFDRPAPSTAQNEAQSDDDSGDDSDDGLFVIPIAARKASMKKAKSRASVTFDASDSGDGKRPALTVNTARDRKSVSFNSPQSARTGDDDDDSGRQRRTPKSDMWDSEDGKLGRRKSFKMDVWANRPPAEALINNLEDFFPGMDVDQPVLEEGDQEQNIDGSPVAPSPIAEVDETQSPGHLQINATPLNSLPPSRVQSMYNESDTLGSDESTLKALERPPSFQSLAQRSVRRSGGLGRMKSIREKARGAHEAHKRYTQTSMAAPQGLSRSGGTPATETQPTQNNSSALLRRKSTKMFNANIVQIRPNRDSMLVPDIPQDSISSSSRGAPKHPTTFRWFKGQLIGKGTYGRVYLGMNATTGEFLAVKEVEVNPRAAAGDKKRMKELVAALDQEIETMQHLDHVNIVQYLGCERKETSISIFLEYISGGSIGSCLRKNGKFEESVVQSLTRQTLSGLAYLHREGILHRDLKADNILLDVDGTAKISDFGISKKTDNIYGNDKSNSMQGSVFWMAPEVIRSQGEGYSAKVDIWSLGCVVLEMFAGRRPWAKEEAVGAIYKIANGEIPPIPEDVQDTISPIAVAFMMDCFTVDSHDRPTANKLLSQHPFCELDPNYNFLDSELYAKIRGTY

SEQ ID NO: 5323 - protein, 133 aa, Kandelia candel
DPLDGFFSSAVANVPFNSANEAAAFANARFDWKETPEAHVFKADLPGLKKEEVKVEVEEGRILQISGERRKEQEEKNDKWHRLERSSGKFLRRFRLPENAKMYQVKASMENGVLTITVPKEEEKKPEVEAIEI

SEQ ID NO: 5324 - protein, 334 aa, Saccharomyces kluyveri
MAPHVNKKQKLSNSLEQLKATGTVVVSDTGDFESIAKYTPQDATTNPSLILAAAKKENYAKLIDTAVEYGKKQGKTLEDKVDQAVDMLLVEFGKAILNIVPGRVSTEVDARLSFDKDATVAKALHIIKLYEDAGISRERVLIKIASTWEGIQAAKELEEKHGIHVNLTLLFSFSQAVAAAEAKVTLISPFVGRILDWYKASTGKDYTAETDPGVKSVRKIFNYYKKYGYDTIVMGASFRNVGEIKALAGVDFLTISPGLLDELMSSEDPVPQVLDAEAAKSEDLAKVSFISDEAKFRFELNEDAMATEKLSEGIRKFSADIVTLFELIEKKIKA

SEQ ID NO: 5325 - protein, 336 aa, Candida parapsilosis
MSIPSSQYGFVFNKQSGLNLRNDLPVHKPKAGQLLLKVDAVGLCHSDLHVIYEGLDCGDNYVMGHEIAGTVAAVGDDVINYKVGDRVACVGPNGCGGCKYCRGAIDNVCKNAFGDWFGLGYDGGYQQYLLVTRPRNLSRIPDNVSADVAAASTDAVLTPYHAIKMAQVSPTSNILLIGAGGLGGNAIQVAKAFGAKVTVLDKKKEARDQAKKLGADAVYETLPESISPGSFSACFDFVSVQATFDVCQKYVEPKGVIMPVGLGAPNLSFNLGDLALREIRILGSFWGTTNDLDDVLKLVSEGKVKPVVRSAKLKELPEYIEKLRNNAYEGRVVFNP

SEQ ID NO: 5326 - protein, 163 aa, Chlamydomonas sp. W80
MASPFYALAATDIAGKEFPFAQLQGKVVLVVNVASQCGFTPQYKGLQELYDKYKDEGLVIIGFPCDQFGHQEPGQESEIASFCQKNFGVTFPMMAKIEVNGDNTHPVYQFLKSEKKQLFMERIKWNFEKFLINKQGEVVERFSSAGDPMRNIAPAVAKLLAEA

SEQ ID NO: 5327 - protein, 248 aa, Rosa hybrid cultivar
MAYENKPNTVLDADAQRRLGRGKIEIKRIENTTNRQVTFCKRRNGLLKKAYELSVLCDAEVALIVFSNRGRLYEYSNNSVRETIERYKKACADSSNNGSVSEATTQYYQQEAAKLRAQITTLQNSNRGYMAEGLSNMSIKELKGVETKLEKAISRIRSKKNELLFAEIEYMQKRELDLHNNNQLLRAKIADNERHQQSINAIAGGHGSYEIMQPTQPFHEARNYFQVNALEPNIHQYSRHDQISLQLV

SEQ ID NO: 5328 - protein, 445 aa, Glycine max
EKATGQEYACKYIAKRKLVTDDDVEDVRREIQIMHHLAGHPNVISIKGAYEDAMAVHVVMELCAGGELFDRIIQRGHYTERQAAELTRTIVGVVEACHSLGVMHRDLKPENFLFINQHEDSLLKTIDFGLSVFFKPGDIFNDVVGSPYYVAPEVLRKRYGPEADVWSAGVILYILLSGVPPFWAENEQGIFEQVLRGDLDFSSDPWPSISESAKDLVRKMLVRDPRRRLTAHQVLCHPWIQVDGVAPDKPLDSAVLSRLKQFSAMNKLKKMALIIIAESLSEEEIAGLKEMFKMIDADNSGQITFEELKAGLKRVGANLKESEIYDLMQAADVDNSGTIDYGEFLAATLHRNKIEREDNLFAAFSYFDKDGSGYITQEELQQACDEFGIKDVRLEEIIKEIDEDNDGRIDYNEFVAMMQKGNLPAVGKKGLENSFSIKFREALKL

SEQ ID NO: 5329 - protein, 283 aa, Clostridium acetobutylicum ATCC 824
MMIESINWFPGHMAKTTREIRENLKLVDAVIEIRDARIVYSSSNPDINSICKDKPRIILLNKFDLAEKSITDNWVKALSSESIRAIPVNALEGRGLNSIKPALNELLKPKLDNMAAKGIQNYIIRVMVVGIPNVGKSSFINKMAKNKVAKVGNKPGVTKSKQWIKTNIGIELMDTPGVLWPKFQDQKVGLNLAFTGAIKDEIMDIEELALKLVQFLQKNYPEKLMERYKLEDINEDPLINMNNIAAKRGALLKGGEIDYNRVSIIIVDEFRSGKIGKISLERP

SEQ ID NO: 5330 - protein, 120 aa, Glycine max
  unsure (1)..(120): unsure at all Xaa locations
AISMIFTPAATTVNRAGAGMVAPFTGLKSMDGFPTKXTNNDITSIASNGGRVQCVHVWPSVGXKKSETLYYLPYLDDAQLAKEVEYLLTKGWIPCLXLQWEHGYLYRDHNRSPRYYRWTL

SEQ ID NO: 5331 - protein, 176 aa, Glycine max
MAIKSETYKSLELGAPSKSHASGTPLVLLNLSSNWERSILKNEKLLLTTRKKNDPVTIFHGSKAPNLSVTHYMERILKYSHCSPSCFVIAQIYMDRFFQKKGGYLTSFNAHRLLITSVMVAVKFLDDKYYSNAYYAKVGGVSTEEMNRMELEFLFNLEFRLFVTTELFLKYCEKLG

SEQ ID NO: 5332 - protein, 150 aa, Brassica napus
  unsure (1)..(150): unsure at all Xaa locations
DLSLIPGAASKSAKKQNRDNTNTELWFEDLAQLSLPIFRTVILSMRSEDLSSDVIESCLISYAKXHIPGILRSNRKPSSSSSTAASENEQREILETITSNLPLDKSSISATTRFLFGLLRTAIILNASETCRDLLERKIGSQLERASLDD

SEQ ID NO: 5333 - protein, 259 aa, Echinochloa crus-galli var. formosensis
AGPIFNDYSSVGYSFLLKKDKAIIVQPERVIVGNGPAFGCVMMKEFLSELAKRLKKNTTAYENYKRIFVPEGSPLESEPNEPLRVNVLFKHIQKMLTGDSAVIAETGDSWFNCQKLKLPEGCGYEFQMQYGSIGWSVGALLGYAQGANDKRVIACIGDGSFQVTAQDVSTMLRCAQNSIIFLINNGGYTIEVEIHDGPYNVIKNWNYTGLVDAIHNGEGKCWTSKVKCEEELTAAIETALGEKKDCLCFIEVIVHKDDT

SEQ ID NO: 5334 - protein, 208 aa, Oryza sativa (japonica cultivar-group)
MSSSVLLFLVALLLSCSTMGNAARRLEVEYPAAHPAVPELPKPELPPHPVVPELPKHEEPPPHPHPAVPELPKPELPPPHPAVPELPKHEEPPHPVVPELPKPEVPHPAVPELPKHEEPPHPVVPELPKHEEPPHPVVPELPKPEVPHPAVPELPKHEEPPHPVVPELPKPEVPHPVVPELPKPEVPHPTVPEHEQPPKPESHYPEKP

SEQ ID NO: 5335 - protein, 294 aa, Fremyella diplosiphon
MYRHLSEGIEDHREQEQKVENAANIQDDNQLTVEQAIANLQGEDLGLRVYAAWWLGRFRVDAPEAIDVLIQALEDEDDRTNVGGYPLRRNAARALGKLGEKRAVPALIKALECSDFYVREAAAQSLEMLGDSSSIPRLIELLNDQVPGTLPAPEPPQLTQPFDAIIEALGTLGASDAIPIIQEFLEHTVPRIQYAAARAMYQLTSESTAGYNQYGDRLVQALAQDDLQLRRAVLSDLGAIGYLPAAEAIADTLAENSLKLISLKGLLEKQFQPTKPEDLSPGAIKVMQLMDALL

SEQ ID NO: 5336 - protein, 316 aa, Vibrio vulnificus YJ016
MSNKLEQLRKLTTVVADTGEIDAIKKYQPEDATTNPSLILKAAQIAEYAPLIDASIEYAKTQSDDKAQQIQDTCDMLAVNIGKEILKTIPGRISTEVDARLSYDMEGSVAKARQLVKMYNDAGITNDRILIKLASTWEGIRAAEILEKEGINCNLTLLFSFAQARACAEAGVFLISPFVGRIMDWYKAKEGRDFEAQEDPGVLSVTKIYNYYKEYGYKTVVMGASFRNIGEILELAGCDRLTIAPALLAELEAAEGEVVEKLVDSKGAAERPAPMTHAEFLWEHNQDPMAVEKLAEGIRNFAVDQGKLEAMIAAKL

SEQ ID NO: 5337 - protein, 600 aa, Glycine max
MWKVVRFAAARSRRFSTAIPGPCKVHKRGTDILHDPWFNKDTGFPLTERDRLGLRGLLPPRVISFEHQYDRFMNSHSALEKNTQGQSDRFVSLSKWRILNRLHDRNETLYYRVLIDNIKEFAPIIYTPTVGLVCQNYSGLFRRPRGMYFSAKDKGEMMSMIYNWPAHEVDMIVLTDGSRILGLGDLGVQGIGIPIGKLDVYVAAAGINPQRILPVMLDVGTNNQKLLEDRLYLGLRQPRLEGEEYLSIVDEFMEAVHARWPKAIVQFEDFQMKWAFETLKRYQKKFCMFNDDIQGTAGVALAGLLGTVRAQGRPLTDFVKQKIVVVGAGSAGLGVLSMAVQAVARMSGCSELAAKSQFYLIDKDGLVTTERNSLDPAAAPFAKNPRDLEGLSEGASIIEVVKKVKPHVLLGLSGVGGVFNAEVLKAMRESVSTKPAIFAMSNPTMNAECTAIEAFSHAGENIVFASGSPFENVDLGNGEVGHVNQANNMYLFPGIGLGTLLSGARHITDGMLRAAAECLASYMTEDDVRKGILYPSIDCIRDVTAEVGAAVVCAAVAEKQAEGHGDVGFKELENMSKEETVEYVRGNMWYPEYCPLVHEK

SEQ ID NO: 5338 - protein, 155 aa, Glycine max
  unsure (1)..(155): unsure at all Xaa locations
FTSPFHISYVECATLLDRIFSYSVSVPSXSVAATTHVPHLIHHAEITLTSLNVHRLXIPSIMLAAKFIDDAFYNNAYYAKVGGVSTSELNRFEMSFLFGIDFRLQVGVDTFGGYCRQLEKEAAEVVQIERPMQACRIKESWSNKDDPTCASTIAR

SEQ ID NO: 5339 - protein, 505 aa, Zea mays
MASPAMVPLRQLFVDGEWRPPAQGRRLPVVNPTTEAHIGEIPAGTAEDVDAAVAAARAALKRNRGRDWARAPGAVRAKYLRAIAAKVIERKPELAKLEALDCGKPYDEAAWDMDDVAGCFEYFADQAEALDKRQNSPVSLPMETFKCHLRREPIGVVGLITPWNYPLLMATWKIAPALAAGCTAVLKPSELASVTCLELADICKEVGLPSGVLNIVTGLGPDAGAPLSAHPDVDKVAFTGSFETGKKIMASAAPMVKPVTLELGGKSPIVVFDDVDIDKAVEWTLFGCFWTNGQICSATSRLLIHTKIAKKFNERMVAWAKNIKVSDPLEEGCRLGPVVSEGQYEKIKKFISNAKSQGATILTGGVRPAHLEKGFFIEPTIITDITTSMEIWREEVFGPVLCVKEFSTEDEAIELANDTQYGLAGAVISGDRERCQRLSEEIDAGCIWVNCSQPCFCQAPWGGNKRSGFGRELGEGGIDNYLSVKQVTEYISDEPWGWYQSPSKL

SEQ ID NO: 5340 - protein, 447 aa, Bacteroides thetaiotaomicron VPI-5482
MKKEYLIYKLSEEMKEATRIDNELFPKFDVKRGLRNEDGTGVLVGLTKIGNVVGYERIPGGGLKPIPGKLFYRGYDVEDISHAIIKEKRFGFEEVAYLLLSGRLPDKEELASFRELINDNMALEQKTKMNIIELEGNNIMNILSRSVLEMYRFDPDADDTSRDNLMRQSIDLISKFPTIIAYAYNMLRHATFGRSLHIRHPQEKLSIAENFLYMLKKDYTELDARTLDLLLILQAEHGGGNNSTFTVRVTSSTGTDTYSAIAAGIGSLKGPLHGGANIQVADMFHHLQENIKDWKSVDEIDTYFTRMLNKEVYNKTGLIYGIGHAVYTISDPRALLLKELARDLAREKGKEEEFAFLELLEERAIATFGRVKNNGKTVSSNIDFYSGFVYEMIGLPQEIFTPLFAMARIVGWCAHRNEELNFEGKRIIRPAYKNVLDDLAYIPIKKR

SEQ ID NO: 5341 - protein, 396 aa, Bacteroides thetaiotaomicron VPI-5482
MNKITMQKDGTLSVPDVPVVPYITGDGVGAEVTPSMQSVVNAAVQKAYGGKRRIEWKEVLAGERAFNETGSWLPDETMKAFQEYLIGIKGPLTTPVGGGIRSLNVALRQTLDLYVCLRPVRWYQGVHSPVKAPEKVNMCVFRENTEDIYAGIEWEAGTPEAEKFYQFLKNEMGVTKVRFPETSSFGVKPVSREGTERLVRAACQYALDHHLPSVTLVHKGNIMKFTEGGFKKWGYELAQREFGDALADGRLVIKDCIADAFLQNTLLIPEEYSVIATLNLNGDYVSDQLAAMVGGIGIAPGANINYKTGHAIFEATHGTAPNIAGKDVVNPCSIILSAVMMLEYLGWKEAAALIEKALEQSFLDARATHDLARFMPGGTSLSTTAFTREIVERIEK

SEQ ID NO: 5342 - protein, 488 aa, Zea mays
  unsure (1)..(488): unsure at all Xaa locations
MAPPQTIPRRGLFIGGAWREPCLGRRLPVVNPATEATIGDIPAGTAXRHWSRAPGAVRANFLRAIAAKIKDRKSELALLETLDSGKPLDEASGDMDDVAACFEYYADLAEALDGKQQSPISLPMENFKSYVLKEPIGVVGLITPWNYPLLMATWKVAPALAAGCTTILKPSELASVSCLELGAICMEIGLPPGVLNIITGLGPEAGAPLSSHSHVDKVAFTGSTETGKRIMISAAQMVKPVSLELGGKSPLIVFDDIGDIDKAVEWTMFGIFANAGQVCSATSRLLLHEKIAKKFLDRLVAWAKNIKVSDPLEEGCRLGSVISEGQYEKIKKFISTARSEGATILYGGGRPQHLRRGFFLEPTIITDVSTSMQIWQEEVFGPVICVKEFRTESEAVELANDTHYGLAGAVISNDQERCERISKALHSGIIWINCSQPCFVQAPWGGNKRSGFGRELGEWGLDNYLTVKQVTKYCSDEPWGWYQPPSKL

SEQ ID NO: 5343 - protein, 368 aa, Triticum aestivum
MALASPVDYAGIITSSQRQLSSVMPRCNGLQCTIGYGNKSRATGHLVVRAMSMDRPKLDFSNPNWKNQFQEDFDRRFSLPHLTDIIDVESRPAPFSLKSRTPLENVDGSLEESWNGYVNDDDRALLKVIKFASPTSAGAECIDPDCSWVEQWVHRAGPRKQIYFEPQCVKAGIVTCGGLCPGLNDVIRQIVLTLEKYGVKNIVGIQHGFRGFFEDHLAEVPLNRHVVQNINLAGGGASISDIVDSIQARRLDMLFVLGGNGTHAGADAIHGECRKRKLKVSIIGVPKTIDNDILLMDKTFGFDTAVEAAQRAINSAYIEAHSAFHGIGLVKLMGRSSGFITMHASLSSGQVDICLIPEVPFTLDGPNG

SEQ ID NO: 5344 - protein, 159 aa, Zea mays
LANAAAFPMVLKAALELGVFDTLYAEASRSDSFLSPSEIASKLPTTPRNPEAPVLLDRMLRLLASYSVVKCGKVSEGKGERVYRAEPICRFFLKDNIQDIGSLASQVIVNFDSVFLNTWAQLKDVVLEGGDAFGRAHGGMKLFDYMGTDERFSKLFNQT

SEQ ID NO: 5345 - protein, 156 aa, Neurospora crassa
MGKITKFGDEGEEVTMKETPTSHQPEAQDDVSMADAGEEGEEGDEEYEEGEGTKVRLLPGSTPTAASFEFLDENHTLGNALRYVIMKNPDVEFCAYAIPHPSEAKMNVRIQTYEGTTAVEALRKGLRDIQDLCDVVSDKFLEARKDFTDKKAAASA

SEQ ID NO: 5346 - protein, 54 aa, Brassica napus
FGAQATMICIDNSEWMRNGDYSPSRLQAQTEAVNLLCVAKTQSNPENTVGILTM

SEQ ID NO: 5347 - protein, 340 aa, Bacillus cereus ATCC 10987
MKAAVWYGERDIRIEERETKELQPNDVKVKVAWAGICGSDLHAYLHPGSVPINMNTVMGHEFSGEIAEVGSHVTKFKKGDRVCIYPMMLKDPSNAEIERFITLDAVGAQIDGGFAEYVILPQKTIFKIPDHLPLELAAMVEPAAVSFQSIKDSNVREGDTVVVYGAGPIGLFAVLGAKAAGASNIIVIDLFDSRLDKATEMGATHVFNAKEVNPVEEIRKLFPGGADVAIEAAGVESTFNQAIQSTKVRGTMMVISFHTQDIQFNVPASLIFSGAKLMGSVGYSNETYNEVIELFANGRLPAQSIITSKIDIDNIAEQGFEALIHDKSQAKILVKLSGAH

SEQ ID NO: 5348 - protein, 179 aa, Fritillaria agrestis
MASSATMLSSVATAACVAPAQASMVAPFVGLKSASAFPVTQKTVTGLSTLPSNGGRVQCMKVWPIVGLKKFETLSYLPTLSVESLLKQIEYLIRNGWVPCLEFSLEGFVSRDNNKSPGYYDGRYWTMWKLPMFGCTDAAQVVKEAAECKKEYPAAFIRVIGFDNVRQVQCVSFIVEKPE

SEQ ID NO: 5349 - protein, 444 aa, Triticum aestivum
  unsure (1)..(444): unsure at all Xaa locations
VLESRDRIGGRVHTDYSFGCPIDMGASWLHGVSNENSLAPLISHLGLRLYHTSGDNSVLYDHDLESCSLFDKNGLAVPMETAAKVGVIFEKILKETVKLRDEQEHDMPLEQAISMVLERHPDLKLEGLDDRILQWCVCRLEAWFAADADEISLKNWDQEHVLTGGHGLMVDGYFPVIQALAQGLDIRLNQRVKKIARQQKGVTVTIEDGTQYSADACIITVPLGVLKANIIKFEPELPSWKSSAIADLGVGIENKVAMHFDKAFWPNVQVLGMVGPTPKTCGYFLNLHKATGHPVLVFMAASPARRFXAQDVEKLSDKEAVELVMCHLRKMIPDATEPSQYLVSRWGSDPNSLGSYSCDLVGKPSDVCERFSAPVESVLYFAGEAASAEHSGAVHGAYSSGMDAAEECRRRLLMRKGVPDLVQVGAAACEEMADVVAPLQICRT

SEQ ID NO: 5350 - protein, 297 aa, Thermoanaerobacter tengcongensis MB4
MILKLEVGVGLKNLNGKWGLDSSKEFYWEPDVEGGYRVYKVKSVIIEHQSLYQKIDIVELETWGKSLFLDGSLQSTESDEFIYHELLVHPAMRVHPSPKRVLICGVGEGKSVREVLKYPTVKEVIGVDIDKEVVALCQKHLGKTPIDDKRVRLVYQDVAEFIKNYRGEPFDVAIVDVTDDLDGPARSVHQLDFYKRLYEILGEKATVVVQGTSAFSKVKNVGFCHIYEILKEVFPFVIPYADYIPSFSDLWTFFVALKGIKDLTPRHEIPRDLKYYDEYTNERIFTLAKPLREKLGV

SEQ ID NO: 5351 - protein, 292 aa, Saccharomyces cerevisiae
TLVHVASVEKGRSYEDFQKVYNAIALKLREDDEYDNYIGYGPVLVRLAWHISGTWDKHDNTGGSYGGTYRFKKQFNDPSNAGLQNGFKFLEPIHKEFPWISSGDLFSLGGVTAVQEMQGPKIPWRCGRVDTPEDTTPDNGRLPDADKDAGYVRTFFQRLNMNDREVVALMGAGALGKTHLKNSGYEGPWGAANNVFTNEFYLNLLNEDWKLEKNDANNEQWDSKSGYMMLPTDYSLIQDPKYLSIVKEYANDQDKFFKDFSKAFEKLLENGITFPKDAPSPFIFKTLEEQGL

SEQ ID NO: 5352 - protein, 316 aa, Bacillus cereus ATCC 10987
MKNRVNPVLLPGLEMYPDQDLRPECLPTMREEASKVFPPTIIDETLSVTNEVIEGPDANPLRLKIYRPKSNNESLPALLWIHGGGYILGSINDNDDLAVKIAKEANCMVVSVDYRLAPEHPYPAPIEDCYAALKWIADNAETLNIDSNRIGVAGVSAGGGLTAALTLLARDRQYPSICFQMPLYPMIDDRNNTPSANEIKKGFVWNQKSNEAGWKMYLGKLHGTDHIPAYAAAARAEDYRNLPRTYTCVGQLDPFRSETLTYVTKLAEAGVDVEFHLYPGAYHGFEMMHPDADISVHAWNDYVRAVKTGFAKKELR

SEQ ID NO: 5353 - protein, 211 aa, Zea mays
RRGKGRLQAALSEMWQLEAASRATMNNGTEEGLGDSSEVLFPQELQMEVDRQPAPANVPPARRRGDQMVPTMTTSSLNRAGTEVSADLVVANSEEEDTRAQVPFHAHLHLHPRAEAPPAARRTNNGARQHDAFQQPRNHRRDALLAPSASEASSSWTGREGAVVPVWSPPAASGHSDAFAADEADVSSRSYLGRHPQSHRLMNWSQLSQSS

SEQ ID NO: 5354 - protein, 128 aa, Methylobacillus flagellatus KT
MALSKAEILDAIASLTVLELSELIKDLEEKFGVSAAAAAVAVAAPAAGGGDAGAAAAEKTEFDVILASAGDNKVNVIKAVRELTSLGLKEAKDLVDAAPKAIKEGVSKADAEAAAKKLEEAGAKAEIK

SEQ ID NO: 5355 - protein, 292 aa, Saccharomyces cerevisiae
TLVHVASVEKGRSYEDFQKVYNAIALKLREDDEYDNYIGYGPVLVRLAWHISGTWDKHDNTGGSYGGTYRFKKEFNDPSNAGLQNGFKFLEPIHKEFPWISSGDLFSLGGVTAVQEMQGPKIPWRCGRVDTPEDTTPDNGRLPDADKDAGYVRTFFQRLNMNDREVVALMGAGALGKTHLKNSGYEGPWGAANNVFTNEFYLNLLNEDWKLEKNDANNEQWDSKSGYMMLPTDYSLIQDPKYLSIVKEYANDQDKFFKDFSKAFEKLLENGITFPKDAPSPFIFKTLEEQGL

SEQ ID NO: 5356 - protein, 256 aa, Arabidopsis thaliana
MEGITHPIPRTVEEVFSDFRGRRAGLIKALTNDMVKFYQTCDPEKENLCLYGLPNETWEVNLPVEEVPPELPEPALGINFARDGMQEKDWVSLVAVHSDSWLLSVAFYFGARFGFGKNERKRLFQMINELPTIFEVVSGNAKQSKDLSVNNNNSKSKPSGVKSRQSESLSKVAKMSSPPPKEEEEEEDESEDESEDDEQGAVCGACGDNYGTDEFWICCDACEKWFHGKCVKITPAKAEHIKHYKCPTCSNKRARP

SEQ ID NO: 5357 - protein, 331 aa, Arabidopsis thaliana
MSNVIGDRTEDGLSTAAASGSTAVQSSPPTDRPVRVYADGIYDLFHFGHARSLEQAKLAFPNNTYLLVGCCNDETTHKYKGRTVMTAEERYESLRHCKWVDEVIPDAPWVVNQEFLDKHQIDYVAHDSLPYAHSSGRGKDVYEFVKKVGRFKETQRTEGISTSDIIMRIVKDYNQYVMRNLDRGYSREDLGVSFVKEKRLRVNMRLKKLQERVKEQQERVGEKIQTVKMLRNEWVENADRWVPGFLEIFEEGSHKMGTAIVDQYPRKVNEAKSAERLENGQDDDTDDQFYEEYFDHDMGSDDDEGEKFYDEEEVKEEETEKTVMTDAKDNK

SEQ ID NO: 5358 - protein, 296 aa, Saccharomyces cerevisiae
MITTPLVHVASVEKGRSYEDFQKVYNAIALKLREDDEYDNYIGYGPVLVRLAWHISGTWDKHDNTGGSYGGTYRFKKEFNDPSNAGLQNGFKFLEPIHKEFPWISSGDLFSLGGVTAVQEMQGPKIPWRCGRVDTPEDTTPDNGRLPDADKDAGYVRTFFQRLNMNDREVVALMGAHALGKTHLKNSGYEGPWGAANNVFTNEFYLNLLNEDWKLEKNDANNEQWDSKSGYIMLPTDYSLIQDPKYLSIVKEYANDQDKFFKDFSKAFEKLLENGITFPKDAPSPFIFKTLEEQGL

SEQ ID NO: 5359 - protein, 449 aa, Xanthomonas campestris pv. campestris str. ATCC 33913
MSRTVIVNARLVNEGKEFDADLLIEGGRIARIDSHIAPAAGDTVVDAAGRWLLPGMIDDQVHFREPGLTHKGDIATESGAAVAGGLTSFMDMPNTNPPTLNADALQAKYDAAAGRAWANYGFYMGASNDNLAHIQSLDPKTAPGIKVFMGASTGNMLVDNPETLDAIFRDAPTPIITHCEDTPTIDATMAAYKEKYGDALTAEMHPDIRSREACLKSSQLAVSLARKHNTRLHVLHISTADELMLFEAGPLVDADGKVRKRITAETCIHFLRFDRSDYARLGNLIKCNPAIKDPEDRLALIEALAEDVIDVLATDHAPHTWDEKQKPYAQAPSGLPLVQYALVAALELVHEGKLPITRVVQKFAHAPAQLFDVEQRGFLREGYFADLVLIDNRPFTVKREQVLSKCGWSPFEGTTFRSRIAATWVNGQQVWDGEQLVGSAAGQRLTFDR

SEQ ID NO: 5360 - protein, 251 aa, Neurospora crassa
MTEGPAYSKKVVVVGDGGCGKTCLLISYSQGYFPEKYVPTVFENYITYPTHPPTGKTVELALWDTAGQEEYDRLRPLSYPETDLIFVCFAIDCPNSLENVMDKWYPEVLHFCPYTPLILVGLKSDLRNKKTCIDMLKTQGLTPVTTEQGLAVAKKMGAQYMECSSKEMKGVEEIFEQAILTVVANDRKTLEQEAANGMLGVGAGSGSGKGSGISFSSGDKAGSGIGPVKAAGVGGTIVPKTRKKKRKCGMM

SEQ ID NO: 5361 - protein, 124 aa, Cucumis sativus
GRGQFGTTFLCLEKSTGKEYACKSIAKRKLATMEDVEDVRREIQIMHHLVGIPSIVSIKGAYEDAVAVHVVMELCEGGELFDRIVKLGHYTERQAAELARTVIGVIEACNSLGVMHSDLKPENF

SEQ ID NO: 5362 - protein, 208 aa, Triticum aestivum
HELGLTFSNEAGTLPPCGTGGQCCIWQFNFRGFNPHTDPYSPDSIDLLRRSGIDFDLFAVEGVDSTRFAELMMSSGIVLNDDVQWVTFHGSHDFGYLLRLLTGREMPNTLDEFLKLTKIFFPVMYDVKHLMKFCGPGLYGGLSRLGKLLKVERVGTGHQAGSDCLLTLQCFMKLKQLYLKESVKLYDGLLFGLIPGEVEIKTAPPPIG

SEQ ID NO: 5363 - protein, 199 aa, Methylobacillus flagellatus KT
MMTLYSGTTCPYSHRCRIVLFEKGMDFQVIDVDMANKPEDLAVINPHNTVPVLVERDLVLEQANIINEYIDERFPHPQLMPADPVMRARARLFLHNFEEQLFNHVADIETGSAKAADKARATIRDNLTQIVPLFSRQEYILGDEFSMLDVAIAPLLWRLGHYGIELPKQAAPLLKYAERIFSRPAYIEAMTPSEKAMRK

SEQ ID NO: 5364 - protein, 212 aa, Saccharum officinarum
HEGQPLESEPNEPLRVNVLFKHVQKMLTGDSAVIAETGDSWFNCQKLKLPEGCGYEFQMQYGSIGWSVGALLGYAQGANNKRVIACIGDGSFQVTAQDVSTMLRCEQNSIIFLINNGGYTIEVEIHDGPYNVIKNWNYTGLVDAIHNGEGKCWTSKVKCEEELTAAIETALGEKKDCLCFIEVIAHKDDTSKELLEWGSRVSAANSRPPNPQ

SEQ ID NO: 5365 - protein, 440 aa, Glycine max
MGVCGSRPKVNEEDLSSKKKNNNNNNHRRRRRRILRRRVSSRKIEANNVSHSNSALQASNRASDAAWFDSTSALDSECDDEFYSVYDGEVSTGHADEIGEDRKLSLDHCGILPNNCLPCLTSNAIAVEKRRPMSPDTPSSRRKSLSKLSFKWREGSSDMTLLSPKAFKQKHLAGSSVPFCPLEKQTPGSWSQIEPSSFRVRGKNYLRDKKKEFASSSAAFYPLGADLFLSSRKIDHIARFIQIPSINIPGDAPSILIVNIQIPLYPAAIFQSENDGEGMNVVLYFKLSEKYSKDLPDQFRESISKLINDEVERVKGFPLDTIAPFRERLKILGRVANLENLSLSTTEKKLMNAYNEKPVLSRPQHEFFLGENYLEIDLDVHRFSYIARKGFEGFIERLKLCNLDFGLTIQGNKAEDLPEHLLCAIRLNKLDYSNFNQFGF

SEQ ID NO: 5366 - protein, 415 aa, GIBBERELLA ZEAE PH-1
MALTAAQVAIVKSTAPILKEHGKTITTTFYRNMLGAHPELKNYFSLRNQQTGAQQAALANSVLAYATYIDDLGKLSHAVERIAQKHVSLFIKAEHYPIVGTHLIGAIGEVLGSALTTEIKDAWVAAYGQLADIFIQREGQLYDAAGEWNSWRKFKIAKKEAENDSVTSFYLEPLDDKPLPKFLPGQYVSLQIPIPELDGLLQSRQFSLSEAPGSNHYRISVKLQGPEEEPSLEDLSAGKIPGLVCTRLHKRYNVGDEVELSPPAGEFFLNPADTSAAKKPLVLLSAGVGATPLVSILDSVLESETASRPITWIHGARYSGSTCFVPHVLDSAKKHDNITAKIFLEDVKEGDQYDFKGEIDLDQLQKDKLLQLDSSDAEYFICGPEDWMVKVRAFLEENGVPRERQHLELFKTGDV

SEQ ID NO: 5367 - protein, 462 aa, Listeria monocytogenes
MFKTNVEQNNVPVFGSFESGQDLPEKRMNKESVDPRIAYQLVKDQLIDEGSARQNLATFCQTYMEPEAEQIMAETMEKNAIDKSEYPQTAKLESSCVNMLADLWNVDESEHYMGTSTVGSSEACMLGGMAMKFRWRSAALKNGLDIHAKKPNLVISSGYQVCWEKFCVYWDIELREVPMSEEHLSINTDIIMDYVDEYTIGIVGILGITYTGKFDDIMTLNDLVEDYNNTHDNEVVIHVDGASGAMFTPFVEPGLEWDFRLPNVVSINTSGHKYGLVYPGVGWILWRDKEYLPEELVFDVSYLGGHMPTMAINFSRSASQIIGQYYNFLRFGYEGYRQIHMRTRDGALQLSQAVAETGLFEIYNDGANLPIVCYKLKDDANVAWTLYDLADRLQMKGWQVPAYPLPKEMGNTIIQRYVCRGDLGQNMVTAFKNDLSESIEELNNAHILYHDVNTSKTHGFTH

SEQ ID NO: 5368 - protein, 657 aa, Zea mays
  unsure (1)..(657): unsure at all Xaa locations
MASVSVVLLQRSSSRVRGYIRLQRIASSSVTLVLEGEGHWWWSNSRGRDERFGARTVHHMAGSVEGENGGVPAGGQVAMAPGVVTGGVEDAYGEDRATEDQTVTPWAVCIASGHSLLRDPRHNKGLSFTEKERDTHYLRGLLPPVVLSQDLQEKRMLQNVRQFQVPLQRYTALMDLQERNERLFYKLLIDNVEELLPVVYTPTVGEACQKYGSIFRRPQGLYISLKEKGRILEVLRNWTEKSIQVIVVTDGERILGLGDLGCQGMGIPVGKLALYTALGGVRPSAVSFNXCLPITIDVGTNNEDLLKDEFYIGLKQRRATGQEYSEFLDEFMAAVRQNYGQKVLVQFEDFANHNAFTLLEKYRTNHLVFNDDIQGTAAVVLAGIIAALKSVGGTLADHTFLFFGAGEAGTGIAELVALEISRQANVSVEEARKKIWLVDSKGLIVASREETLQPFKKRYAHEHEPVKDLLGAVKAIRPTALIGSAGVGQSFTKEVIEVMSSINERPIVLALSNPTSQSECTAEQAYTWSQGRAIFGSGSPFDPVKYNDKLFVPAQANNAYIFPGFGLGVVISGAVRVSDDMVLAAAEALAEQVTPEHIEKGLIYPPFSIIRKISANIAAHVAAKAYDLGMATQLPRPKDLVKYAESCMYSPVYRSYR

SEQ ID NO: 5369 - protein, 581 aa, Triticum aestivum
MCGILAVLGCGDESQGKRVHVLELSRRLKHRGPDWSGLHQVADNYLCHQRLAIIDPASGDQPLYNEDKSIAVAVNGEVYNHEELRARLSGHRFRTGSDCEVIAHLYEEYGESFIDMLDGVFSFVLLDARDNSFIAARDAIGVTPLYIGWGIDGSVWISSEMKGLNDDCEHFEIFPPGNLYSSKEKSFKRWYNPPWFSEVIPSVPYDPLRLRSAFEKAVIKRLMTDVPFGVLLSGGLDSSLVAAVAARHFAGTKAAKRWGTRLHSFCVGLEGSPDLKAAKEVADHLGTVHHEFNFTVQDGIDAIEDVIYHIETYDVTTIRASTLMFQMSRKIKALGVKMVISGEGADEIFGGYLYFHKAPNKEEFHQETCRKIKALHQYDCLRANKATSAWGLEVRVPFLDKEFINEAMSIDPEWKMIRPDLGRIEKWILRKAFDDEERPFLPKHILYRQKEQFSDGVGYSWIDGLKDHAASNVSDKMMSNAKFIYPHNTPTTKEAYYYRMIFERYFPQSSAILTVPGGPSVACSTAKAIEWDAQWSGNLDPSGRAALGVHLSAYEQDTVAVGGSNKPGVMNTVVPGVAIET

SEQ ID NO: 5370 - protein, 268 aa, Kineococcus radiotolerans SRS30216
MTLHDGVGIPQLGFGVWQVPPEQTAEVVLRALQAGYRHIDTAAGYGNEAGVGDALRASQIPREDVFITTKLANSEHGRDKTLAAFDASMAKLGLDYLDLYLIHWPLQADDYVETWKAFEEIKASGRVRTIGVSNFQKTHLRKLLDETGTVPTVNQVEVHPYLVQEDLRSFHAEHGIATEAWSPLAQRAGLVEDPVVTGIAEQLGRTPAQVVIRWHLQQGNVVIPKSVTPERIVSNIDVFGFELPPEQVDALTGLDRAERTGPDPDVLG

SEQ ID NO: 5371 - protein, 464 aa, Listeria monocytogenes
MLYSKENKESYLEPVFGSSAEDRDIPKYTLGKEPLEPRIAYRLVKDELLDEGSARQNLATFCQTYMEDEATKLMSETLEKNAIDKSEYPRTPELENRCVNIIADLWHAPKDQKFMGTSTIGSSDACMLGGMAMKFAWRKRAEKLGLDIYAKKPNLVISSGYQVCWEKFCVYWDIDMRVVPMDKEHMQLNTDQVLDYVDEYTIGVVGILGITYTGRYDDIYALNEKLEEYNSKTDYKVYIHVDAASGGFFTPFVEPDIIWDFRLKNVISINTSGHKYGLVYPGIGWVLWKDESYLPEELIFKVSYLGGEMPTMQINFSRSASHIIGQYYNFLRYGFEGYRTIHQKTSDVAQYLAHAVEQTGYFDIFNDGSHLPIVCYKLKTTANVNWTLYDLADRLQMRGWQVPAYPLPKSLENIIIQRYVCRADLGFNMAEEFIQDFQASIQELNNAHILFHDTQQSGVHGFTH

SEQ ID NO: 5372 - protein, 179 aa, Fritillaria agrestis
MASSATMLSSVATAARAAPAQASMVAPFVGLKSASAFPVTQKPATGLSTLPSNGGRVQCMKVWPIVGLKKFETLSYLPTLSVESLLKQIEYLIRNGWVPCLEFSLEGFVSRDNNKSPGYYDGRYWTMWKLPMFGCTDAAQVVKEAAECKKEYPAAFIRVIGFDNVRQVQCVSFIVEKPE

SEQ ID NO: 5373 - protein, 228 aa, Arabidopsis thaliana
MGRGKIVIQRIDDSTSRQVTFSKRRKGLIKKAKELAILCDAEVGLIIFSSTGKLYDFASSSMKSVIDRYNKSKIEQQQLLNPASEVKFWQREAAVLRQELHALQENHRQMMGEQLNGLSVNELNSLENQIEISLRGIRMRKEQLLTQEIQELSQKRNLIHQENLDLSRKVQRIHQENVELYKKAYMANTNGFTHREVAVADDESHTQIRLQLSQPEHSDYDTPPRANE

SEQ ID NO: 5374 - protein, 247 aa, Galdieria partita
MVASKTDLEQKVRSRLVKLFEQTPCMPIMVRLAWHDAGTYDAQTGTGGVNGSIRFDPELRHGANNGLKIALDLLEPIKKEYPDIGYADLFQLASVTAIEFAKGPKIPFRMGRKDATGPDACPEEGRLPNAEDHMSQLRRTFHRMGLSDKDITVLSGAHTLGRCHKERSGYEGPWTHQPLEFDNSYFVEILKPNPDPGLIRLASDLSLLDDSYTRSLVETYAENKDIFFKDYTESHHKLSELGAVWEY

SEQ ID NO: 5375 - protein, 137 aa, Triticum aestivum
  unsure (1)..(137): unsure at all Xaa locations
MAHPDRHHFQTKGESGGTNIYPEDGCGILQGELIFIQSRHCQADDDSTSYTGKLGHXRVTFAGLDIFTGKKLEDIVPSSHYCDVPHVDRPDYQLTDILDDGYASLLTDSGNTNDDLKLXNDDALLDQIKSGLADGKD

SEQ ID NO: 5376 - protein, 65 aa, Triticum aestivum
ARLISRRGLAGAADGHGSAKVPLWKDPLSPSKWKEEHFVLASLSMWGVIFYGGYKLFKWKEGSQD

SEQ ID NO: 5377 - protein, 505 aa, Triticum aestivum
  unsure (1)..(505): unsure at all Xaa locations
MSTCAASLAPLLGTAAANATDYLCNQFADTTTAIDSTYLLFSAYLVFAMQLGFAMLCAGSVRAKNTMNIMLTNVLDAAAGALFYYLFGFAFAFGTPSNGFIGKHFFGLRDVPQVGFDYSFFLFQWAFAIAAAGITSGSIAERTQFVAYLIYSAFLTGFVYPVVSHWIWSADGWASASRTSGPLLFNSGVIDFAGSGVVHMVGGXGRALGRAHRGPPHWXRFDHAGRAVALRGHSASLVVLGTFLLWFGWYGFNPGSFLTILKSYGPPGSIHGQWSAVGRAAVTTTLAGSTAALTTLFGKRLQTGHWNVLDVCNGLLGGFAAVTAGCSVVDPWAAIICGFVSAWVLIGLNKLAARFKFDDPLEAAQLHGGCGAWGVIFTXALFARREYVEQIYGAPGRPYGLFMGGGGRLLGAHVVLILVIAAWVSCTMGPLFLALNKLGLLRISAEDQMAGMDQTRHGGFAYAYTDEDSSSRPGRGAGGSVGGFMLKSAQTSQVAADATSPSSSV

SEQ ID NO: 5378 - protein, 99 aa, Zea mays
  unsure (1)..(99): unsure at all Xaa locations
FIRHECAAAGDYCSAGVTHQSVGDRVKLEPVISCWRCRHCKGGRYNLCEDMKFFVTPPVHRSLANQEVHPADLCFKLPYRVSLQEGAMCXPLSVGFHAC

SEQ ID NO: 5379 - protein, 221 aa, Saccharomyces cerevisiae
MRANVDFLNPIQLGLSLSDANGNKPDNGPSTWQFNFEFDPKKEIMSTESLELLRKSGINFEKHENLGIDVFEFSQLLMDSGLMMDDSVTWITYHAAYDLGFLINILMNDSMPNNKEDFEWWVHQYMPNFYDLNLVYKIIQEFKNPQLQQSSQQQQQQQYSLTTLADELGLPRFSIFTTTGGQSLLMLLSFCQLSKLSMHKFPNGTDFAKYQGVIYGIDGDQ

SEQ ID NO: 5380 - protein, 364 aa, Populus tremuloides
MGSTGETQMSPAQILDEEANFALQLISSSVLPMVLKTAIELDLLEIMAKAGPGALLPPSDIASHLPTKNPNAPVMLDRILRLLASYSILICSLRDLPDGKVERLYGLASVCKFLTRNEDGVSVSPLCLMNQDKVLMESWYHLKDAILEGGIPFNKAYGMTAFEYHGTDPRFNKVFNKGMSVHSKMAMKKILETYKGFEGLASLVDVGGGTGAVVSTIVSKYPSIKGINFDLPHVIADAPAFPGVENVGGDMFVSVPKADAVFMKWICHDWSDEHCLTFLKNCYDALPENGKVILVECILPVAPDTSLATKGVMHVDVIMLAHNPGGKERTDREFESLARGAGFKGFEVMCCAFNTHVIEFRKKA

SEQ ID NO: 5381 - protein, 182 aa, Thermococcus kodakaraensis
MKRPLPLLLALLVATAGCMSEGGVKMEKTLEVGSVFHDGEFIPKEYTCEGDDTNPPIYIGNIPAEAKSLVIIVDDPDAPAGTFTHWIAWNIPPVGEIPSWVPRKPETDEPFHIVQGKNDFGRIGYNGPCPPRGHGVHHYHFKVYALDTELKLEPGSSRKELEKAMEGHVIAWGEVVGLYERK

SEQ ID NO: 5382 - protein, 501 aa, Oryza sativa (japonica cultivar-group)
MGNCCPGSGDAEPASSDASTGNGSSSFKAGASPSSAPAQNKPPAPIGPVLGRPMEDVRSIYTIGKELGRGQFGVTSLCTHKATGQKFACKTIAKRKLSTKEDVEDVRREVQIMYHLAGQPNVVELKGAYEDKQSVHLVMELCAGGELFDRIIAKGHYTERAAASLLRTIVEIIHTCHSLGVIHRDLKPENFLLLSKDEDAPLKATDFGLSVFKDIVGSAYYIAPEVLKRSYGPEADIWSVGVILYILLCESEHGIFNSILRGQVDFTSDPWPRISASAKDLVRKMLNSDPKKRISAYEVLNHPWIKEDGEAPDTPLDNAVMNRLKQFRAMNQFKKAALRVIAGCLSEEEIRGLKEMFKSMDSDNSGTITVDELRKGLSKQGTKLTEAEVQQLMEAADADGNGTIDYDEFITATMHMNRMDREEHLYTAFQYFDKDNSGCISKEELEQALREKGLLDGRDIKDIISEVDADNDGRIDYSEFAAMMRKGNPEANPKKRRDVVI

SEQ ID NO: 5383 - protein, 133 aa, Zea mays
  unsure (1)..(133): unsure at all Xaa locations
MAGIDKNMLWPLLALNLIMYIIDIAXTSWNLNHFINGQTNYPGVAANGATFYFLKFSILHGRLSATSXLAIVHHVRAWRHHSLFTNNASSLICCAITALAFCLTCKEIHIGEHRGCLLYVLQDFVIILGFLRS

SEQ ID NO: 5384 - protein, 124 aa, Cucumis sativus
GRGQFGTTYLCTYRPTGDLYACKSIPKRKLLCKEDYEDVWREIQIMHHLSEHPNVVQIKGTYEDSVFVHLVMELCAGGELFDRILLKGHYSEREAAQLIKTIVGVVETCHSLGVMHRDLKPENF

SEQ ID NO: 5385 - protein, 185 aa, Glycine max
SRKIKALGVKMVLSGEGSDEIFGGYLYFHKAPNKKEFHEETCRKIKALHLYDCLRANKSTAAWGVEARVPFLDKEFINVAMSIDPEWKMIRPDLGRIEKWVLRNAFDDDKNPYLPKHILYRQKEQFSDGVGYSWIDGLKDHANKQVTDATMMAANFIYPENTPTTKEGYLYRTIFEKFFPKVDFI

SEQ ID NO: 5386 - protein, 296 aa, Glycine max
  unsure (1)..(296): unsure at all Xaa locations
MVLIRLWFVLLGFFGGFGSAAEQRRWTLNDFDIEKPLGRGKFGHVYLAREKXDNHIVALKVLFKXQLQQSXVVHQLRREVEIQSHLRHPHILRLDGYFYDQSXGPKGDLYKELQKCKYFSERRVTTYVASLARAFIYCHGKHVIHRDIKPENLLIGKIQLFCSENNESKFXVLCFGWSVHTFNRRRTMCGTLDYLPPEMVESVEHDASVDIWSLGVLCYEFLYGVPPFEAKEHSDTYRRIIQVDLKFPPKPIVSSAAKDLISQMLVKDSSQRLPLHKLLEHPWIVQNAEPSGVYRS

SEQ ID NO: 5387 - protein, 124 aa, Cucumis sativus
GRGQFGTTYLCTEITTGIEYACKSISKRKLIAKEDVEDVRREIQIMHHLAGHKNIVTIKGAYEDSLYVHIVMELCSGGELFDRIIQRGHYSERKAAELTRIIVGVVETCHSLGVMHRDLKPENF

SEQ ID NO: 5388 - protein, 356 aa, Hypocrea virens
MSRSNPPNNASASRKISFNVSEQYDIQDVVGEGAYGVVCSAIHKPSGQKVAIKKITPFDHSMFCLRTLREMKLLRYFNHENIISILDIQKPRSYDSFNEVYLIQELMETDMHRVIRTQDLSDDHCQYFIYQTLRALKAMHSANVLHRDLKPSNLLLNANCDLKVCDFGLARSAASQEDNSGFMTEYVATRWYRAPEIMLTFKEYTKAIDVWSVGCILAEMLSGKPLFPGKDYHHQLTLILDVLGTPTMEDYYGIKSRRAREYIRSLPFKKKVPFRTLFPKTSDLALDLLEKLLAFNPVKRITVEDALKHPYLEPYHDPDDEPTAPPIPEEFFDFDKHKDTLSKEQLKQLIYQEIMR

SEQ ID NO: 5389 - protein, 494 aa, Neurospora crassa
MSSNVFVELKTPVTGTYKQPTGLFINNEFVEGVDKKTFEVINPATEEVICSVHEATEKDVDIAVAAARKAFEGVWRDVTPQQRGIYLLKLADLLEKNLDLLAAVESLDNGKSITMARGDVGAVVGTIRYYGGWADKIEGKTIDISPDSFHYTRQEPLGVCGQIIPWNFPLLMLAWKVGPALATGNTIVMKTAEQTPLSALVFAQFVKEAGFPPGVLNIISGFGRIAGAAMASHMDIDKVAFTGSTMVGRQIMKAAAESNLKKVTLELGGKSPNIIFNDADIDQAIDWVNFGIYFNHGQTCCAGSRVYVQEGIYDKFVAAFKQRAQQNKVGDPFHDETFQGPQVSQLQYDRIMGYIKAGKEEGATVETGGERHGDKGYFIQPTIFTNVRHDMKIMKEEIFGPVCAVAKFSTEEEVIKLGNDSNYGLAAAVHTKDLNTAIRVSNHLRAGTVWVNTYNALHHQLPFGGYKESGIGRELGEAALANYTQCKSVAIKLN

SEQ ID NO: 5390 - protein, 1146 aa, Neurospora crassa
MADLNFSAAIEANLLAALSKHTEEAKSPASTPTPAPAPGPAPVPTPTPPSIPTQGASAPPPQPVQQQPQQAQQPPLNHSLQSSQGPPSQTAQPPQQQLSQASSLSHALQQALQSSNPPSYQTPSTPQPQPSSTTTAAPISQPLVQVPLPQPSPHAVSNVPPQASPALTEPPKRSHSPDPQDSNGKRPKLEHVDEMDQDIPFDIKAALATALGDFEKQHSQIGNDSSLENPSGPSSAPPPALAVSLSATATPMPEKCGDKLMKASSNSTYMIRSMSLPVLGNLAVQILLRLSQQPRNETLSLLSETDAEFRKHYDLLTESFKLARKGFSDSPVLLPDELEINDSEDRETVRVANLATTAISVFGANDVACKDLDDSFFSIFVPEDGEFKDTLADLLLSLKTQAFLDSLDEQATPQQVTEQLDKFFPDNFEDWLKQRNLDVVTDTDADQLAVKIKDRRELLSTLANSEQPKKSKYPPDTFPETLCAFLQSHIGVVVEYAEEYGVKIPISEEPIAPESIVSDPIQNGNNVQDEHADLAALLQSKIVENGELKDFHAGNLHNEASVSADDNFDLSKLIEQSLPDHINGLKDGLLEQNGQGESSGLFDTKDLASLIAEKLNDNLGTPVDGLSNVPQNYEDTMRENHGQVHPQYHNINQLQTPTYQQYPPASSSNIGMGTTGETLPPNQSCPTSVLYEKARQAAVAKSSSTTRREGLHSTRRPWTPDEEKALMMGLDMVKGPHWSQILSLFGAHGSVSDILKDRTQVQLKDKARNLKLFFLKTNSEMPYYLQSVTGELKTRAPGQAARKEAEEKARLNAEDEQARLAGIMTLGGLHNNHHPVAGSPIAPSPARAHTATPGPGTGHLNGTPTPTPTQGPTNQPAALAPVPISPMVKTEPVDHSAHQVGNLPQIQPAPAPQSLQPALKPQSQPQPLHQQQSQPHLQQHPQANAQQHSQQHLQQHSQPLQPLRPQQQPQQLAQSQMRSQTPQALAPAPPQQYHHQQQHHQPQGQQQHQQLHQQQQLHPGSQQHEQTQPQPQPQVQAQPPPPQQQQQHHVAPAPASTSTTTTATPAIAAAQPHVHVAAAEPAAASSTLSNQATPSFGLPPIPPNHHSTPDQAQDVKLFETLQAAIGATSPAHESHQAATVPETSAG

SEQ ID NO: 5391 - protein, 485 aa, Nocardioides sp. KP7
MTTPRKFDEYRWNVLVDGVPLNVESRYPISDPSTGRYLTQVPDCAEADVDRAVQASRQAQAEWGALPPRARAAKLRELITLLREHREEFAMLDAIDGGFPISMMRNDVDAALELMDIFADMALDLGGKTIPVSTNLHFTTHEPFGVVARIGAFNHPFFFAASKVAAPLMAGNSVILKAPDQTPLSSLRLAEVAAEVLPQNLLITISGRGRVAGRAIVRHPQIKRIGFIGSTDTGRSIQRDAAEVAVKHISLELGGKNAQIVFADADLEQAALGAVNGMNFTWTAGQSCGSTSRLLVHESVADQVIARVVELVSAIAVGPPLDENAQMGPLVSQAQYDKSVHAIGEGIREGAKVVAGGGRPEGVGEGGWYLAPTVLADVRPGSFIEQNEIFGPVLSVIIFATDDEAVAIANGVEYGLTASVWTSDITRAHLIARRVEAGYVLVNGGSRHYWGLPFGGVKSSGVGSEESMEELISYTETKTTTVVLG

SEQ ID NO: 5392 - protein, 456 aa, Magnetospirillum magnetotacticum MS-1
GHCAGEAGYGRPRGNGASSSRKGTMNTTQQAKVRLLVDDQAQDLPVVAATEGNDGIVVSSLLKSTGLVTVDPGFMNTASCESSITYIDGEAGILRYRGYPIEQLAERSSFLEVAYLLIHGELPDAATLDAFVERVNRHTLVHEDFRTFMGTFPRNAHPMAVLSSAINALSTFYPESLDPFDDETVELATVLLLAKSRTITSYLHRRRVGEPLLYPDYSRGYVDDFLRMTFATPYQQYEADPVVVDALDKLLILHADHEQNCSTSTVRVVGSSHANLYASVAAGVNALSGPLHGGANESVLTMLDKIAGAEYDVDTFMKKVKNKEDGVRLMGFGHRVYKNYDPRAAIVKKSADAVLSTLGKKDQLLDIAMGLEEIALNDDYFIERKLYPNVDFYTGLIYKAMGFSPAMFTPLFALGRMPGWIAQWREMMKDPQTKIGRPRQVYVGETERDYVAVSDR

SEQ ID NO: 5393 - protein, 420 aa, Solanum demissum
MGNCVGSSARVEATLSSTTPSAYEASRFPDRKSNSSVPSSLSIPSYGRKSSSESLPTPRSESEILFSPNVKSFSFNELKNATRNFRPDSLLGEGGFGCVFKGWIDAQTLTASKPGSGIVIAVKKLKPEGFQGHKEWLTEVNYLGQLRHPNLVKLIGYCIDGDNHLLVYEFMPKGSLENHLFRRGPQPLNWATRIKVAIGAARGLAFLHDAKEQVIYRDFKASNILLDAEFNSKLSDFGLAKAGPTGDRTHVSTQVMGTQGYAAPEYVATGRLTAKSDVYSFGVVLLELLSGRRAVDNAKVGIEQNLVDWAKPYLGDKRKLFRIMDTKLEGQYPQKGAYTAANLAWQCLSNEPKLRPKMSEVLTALEELQSPKGVSKLSHTEHRAIPSPVAVSPMRHHRSPLHMTPSASPLQAYQKSPRGR

SEQ ID NO: 5394 - protein, 489 aa, Arabidopsis thaliana
MSTVESSKPKIINGSCGYVLEDVPHLSDYLPGLPTYPNPLQDNPAYSVVKQYFVDADDSVPQKIVVHKDGPRGIHFRRAGPRQKVYFESDEVHACIVTCGGLCPGLNTVIREIVSSLSYMYGVKRILGIDGGYRGFYAKNTVSLDSKVVNDIHKRGGTILGTSRGGHDTTKIVDSIQDRGINQVYIIGGDGTQRGASVIFEEIRRRGLKVAVIGIPKTIDNDIPVIDKSFGFDTAVEEAQRAINAAHVEAESIENGIGVVKLMGRYSGFIAMYATLASRDVDCCLIPESPFYLEGEGGLFEYIEKRLKESGHMVLVIAEGAGQDLMSKSMESMTLKDASGNKLLKDVGLWLSQSIKDHFNQKKMVMNLKYIDPTYMIRAVPSNASDNVYCTLLAQSAVHGAMAGYTGYISGLVNGRQTYIPFYRITEKQNHVVITDRMWARLLSSTNQPSFLGPKDVFDNKEKPMSALLDDGNCNGVVDVPPVTKEITK

SEQ ID NO: 5395 - protein, 256 aa, Hordeum vulgare subsp. vulgare
MAAKCYPTVSDEYLAAVAKARRKLRGLIAEKNCAPLMLRLAWHSAGTFDVATKTGGPFGTMKCPAELAHGANAGLDIAVRLLEPIKEQFPILSYADFYQLAGVVAVEVTGGPEVPFHPGRQDKPEPPPEGRLPDATQGSDHLRQVFSTQMGLSDQDIVALSGGHTLGRCHKERSGFEGAWTANPLIFDNSYFTELLSGEKEGLLQLPTDKVLLTDPAFRPLVDKYAADEDAFFADYAEAHLKLSELGFGEASEGCC

SEQ ID NO: 5396 - protein, 322 aa, Neurospora crassa
MADNKFDPEYFQAVQPLLAAKASLPPPAPLTDVDSLRTNYNDFALVLANIPDSPDITETTYQIPSKDGTLITLYRFTPAAAAATPGPRAAVLHHHGGGFVNNNVDQFRKDIKRYAHASGLTFYAADYRLAPEHPFPTPFDDCYAALEWLHANAASEQIDPTRIALFGVSAGAGLATGVALKARDDKITPPVKKLVLAYPMLDDRTYWPEDHPLSPYLMWNGAANRIAWGAYAGADGVKEISPYAAPARAKDLSGLPPTFIDCGELDLFRDEDVEFSARLLKAGVSVELHVYPGVPHGFEMVAVNVRVSKIAVENRVRALENL

SEQ ID NO: 5397 - protein, 212 aa, Triticum aestivum
MPESDNDSGGPSNTGGEGELSSPREQDRFLPIANVSRIMKKALPANAKISKDAKETVQECVSEFISFITGEASDKCQREKRKTINGDDLLWAMTTLGFEDYVDPLKHYLHKFREIEGERAAATSTSTAPQHLPDNNATGYADYGGAAVPAPAPGGMMMMGQPMYGSPPPQQHQQQQHQHQVAMGGRAGFPYHGGSSGGGGSSSSSGFGRKEG

SEQ ID NO: 5398 - protein, 1116 aa, Schizosaccharomyces pombe
MAADIGSQSSGSLEERFEQSLHLQNVDKQDWSLNSVLQFLKLYKFNKEWEDVFIKSRIEMDLFINLADQSKAEEFAFKNKLSKESAIQLSSCIRKTLLAPSSTRVPSKNSSYETLTYSAKDSSDDVFTETNSGFRSSNQNSSLKSFQSVPDSNVNVFGGFGGSVVDNNELLSTGKNSHQTTSLNLEGSPINLHAYKGTVTSIINDDSRNINKKTLSKQPVSEHKEKQTSFLRRFRVPGFSRDKDKTKDCPSSNSNPFHLASSNVKTLDASLDQGEWVPRIHRLESQIGLISKKKSFVLATMDDMKFTVVDITNVQNATQLRKLIAKSMYLDISIDQFDLFLTEVGGAQYIEILDDRKLDIARLYSDEFGTIKFFVKPSQNEESGMDSDTYLSFGTKSSSTYKADDDSIYHRKEDFKKQPSYPVLTSDFEITDAGPNLSLSGHQPDNKYYKGFSSAPNLAVVPELPSRRFRGFEKIRGAKGEMATKILDATEAQSEKNKFTVCRPHKKVTLKMPLNSGSSAPQSPSSNTSASVLTRNFVAHRDPPPPPTETSSLRRKNTLTRRPSIRHARSSPYIDTGHNEASKFSHTSFDPKASSKSSNSLKESVEALSEIPFEDAPALDESDLSGDPFWAIQPKQSSSQVPKENHHNIQSKLSINTEAATDLKANELSSPKTPEYCRGDDRSISLSPLSYRLRKSKHIRESPPSSKVINSGNWEVRPSADDLYEDVDRFFPRYDLDKVLVVDQSRMVSSPSKVSIRPKMKSVRLLAREASEARKEIRHNARRNKSGNLLRRSSTKLWGSRIVELKPDTTITSGSVVSQNATFKWMKGELIGNGTYGKVFLAMNINTGELIAVKQVEIPQTINGRHDQLRKDIVDSINAEISMIADLDHLNIVQYLGFEKTETDISIFLEYVSGGSIGRCLRNYGPFEEQLVRFVSRQVLYGLSYLHSKGIIHRDLKADNLLIDFDGVCKISDFGISKHSDNVYDNDANLSMQGSIFWMAPEVIHNDHQGYSAKVDVWSLGCVVLEMLAGRRPWSTDEAIQAMFKLGTEKKAPPIPSELVSQVSPEAIQFLNACFTVNADVRPTAEELLNHPFMKCDEEFNFKDTNLYDMLCKRKS

SEQ ID NO: 5399 - protein, 420 aa, Burkholderia fungorum LB400
MRRLADLISRDWERLAEIEIRDNGKVISEVGPQIRYLAQYFHYYAGLADKIEGAVIPVDRPGMLNYTRHEPVGVVVAITPWNSPLMLASWKIAPALAAGCTVILKPSEHTSVSSLVFSDLFDEAGFPPGVVNVVTGFGAEIGNALVSHPDVAKVAFTGGDVAGQAVYERAAAGLKRVTLELGGKSPHIVFDDADLDGALAAAMDGVFSSSGQMCVAGSRLMLHDRIHDEFVARLLDRVRTLKLGAPMNPATSIGPVTTQAQFERILSYIDVAKQEGARCLVGGVASPEAEGGSGWFVAPTVFGDVKNDMRIAREEVFGPVLSIIRFSTDDEAVHLANDSRYGLASGIWTRDVGRAISVADRIQAGTVWVNTYRAVSAASPFGGMKRSGIGRENGQEAIMGFLQTKSIWISTTSRPVAAWS

SEQ ID NO: 5400 - protein, 329 aa, Oryza sativa (japonica cultivar-group)
MIQLKDMVMKLSGTSRHHGQQRRGGSPPPRGRTTSVYRSGYYRPGMVQDDMAVPPATYLGGGGTSMSSASSTPAWDFARPAEGEAREWVAQVEPGVQITFVSLAGGGGNDLKRIRFSREMYDKWQAQKWWGENNERIMELYNVRRFSRQVLPTPPRSDDGERESFYSQVGSTRGSPAATPSPAPLTPDRVTSWSAFVRPPSASRQQQQHSFRPLSPPPPSSSNPSERAWQQQQQPQRAGKSPAAASDAMDAARTTSCSSRDEVSISNASELEVTEWVIQDEPGVYITVRELADGTRELRRVRFSRERFAELNAKLWWEENKERIQAQYL

SEQ ID NO: 5401 - protein, 325 aa, Shewanella oneidensis MR-1
MKFDYKPGQFITFVLEINGEQACRSYTLSSTPSRPYSLMVTIKRVDGGLVSNYLIDHLQPGQTVRVLPPTGQFNLFDIPANKYLFLSAGCGITPMYSMSRYLTDTQINADIAVVHSARTQADIIFKNTLETMAARHASFKLCYLVEGVTTDTVWHTEEAFHYVGRLSAQNLLSLVPDFAERIVFLCGPELYMQAVKTILTELNFDMNKLYHESFATAVKEAQSHVKQAEIQSETPTTSSTGFMLSIGDKKHLLTAEQTLLDGIEAEGLPIIAACRSGVCGACKCKVLQGETESTSYMTLTPTDIEAGYVLACSTRLKSDVTLSLI

SEQ ID NO: 5402 - protein, 320 aa, Triticum aestivum
MEKGMDPALLDNIIARLLEVKSLKPGKNAQLSESEIKQLCAASKEIFLAQPNLLELEAPIKICGDVHGQYSDLLRLFEYGGYPPQSNYLFLGDYVDRGKQSLETICLLLAYKVKYPENFFLLRGNHECASVNRIYGFYDECKRRFSVKLWKTFTDCFNCLPVSALIDEKILCMHGGLSPELNKLDQILNLNRPTDVPDTGLLCDLLWSDPSNEAQGWAMNDRGVSYTFGPDKVAEFLEKHDLDLICRAHQVVEDGYEFFADRQLVTIFSAPNYCGEFDNAGAMMSVDETLMCSFQILKPARKMLPGSTNNKSGFKSMRGW

SEQ ID NO: 5403 - protein, 114 aa, Zea mays
MVITANDLSKWENFPKGLKVLLLLNGCDSDGDGSSAAETRSELESMDYIVTTFTDETEALSAVVKNPESFHIAIVEVNMSAESESFKFLEAAKDVLPTIMISTDHCRFLYFFLF

SEQ ID NO: 5404 - protein, 312 aa, Glycine max
MISPQTKQSFGSLFLLFLVLLQKRFEMGVIVENPNSSKPIVIREVWASNLESEFEVIREVIDDYPFISMDTEFPGVVFRPHVVDPTKPYLFRLRPSDHYRFLKFNVDALNLIQVGITLSDADGNLPHLETGNRFIWEFNFRDFDIDRDDYASDSIDLLRRQGIDFRRNTAEGIDSNLFAELVMSSGLVCNDSVSWVTFHSAYDFGYLVKILTRRNLPNGLEEFLKMLRAFFGNNVYDIKHMMQFCDTLYGGLDRLARTLNVDRAVGKCHQAGSDSLLTWHVFQKMRDIYFVKDGPHKHVGVLFGLELTCSAP

SEQ ID NO: 5405 - protein, 1164 aa, Streptococcus agalactiae
MFKSNYERKMRYSIRKFSVGVASVAVASLFMGSVAHASELVKDDSVKTTEVAAKPYPSMAQTDQGNNSSSSELETTKMEIPTTDIKKAVEPVEKTAGETSATDTGKREKQLQQWKNNLKNDVDNTILSHEQKNEFKTKIDETNDSDALLELENQFNETNRLLHIKQHEEVEKDKKAKQQKTLKQSDTKVDLSNIDKELNHQKSQVEKMAEQKGITNEDKDSMLKKIEDIRKQAQQADKKEDAEVKVREELGKLFSSTKAGLDQEIQEHVKKETSSEENTQKVDEHYANSLQNLAQKSLEELDKATTNEQATQVKNQFLENAQKLKEIQPLIKETNVKLYKAMSESLEQVEKELKHNSEANLEDLVAKSKEIVREYEGKLNQSKNLPELKQLEEEAHSKLKQVVEDFRKKFKTSEQVTPKKRVKRDLAANENNQQKIELTVSPENITVYEGEDVKFTVTAKSDSKTTLDFSDLLTKYNPSVSDRISTNYKTNTDNHKIAEITIKNLKLNESQTVTLKAKDDSGNVVEKTFTITVQKKEEKQVPKTPEQKDSKTEEKVPQEPKSNDKNQLQELIKSAQQELEKLEKAIKELMEQPEIPSNPEYGIQKSIWESQKEPIQEAITSFKKIIGDSSSKYYTEHYFNKYKSDFMNYQLHAQMEMLTRKVVQYMNKYPDNAEIKKIFESDMKRTKEDNYGSLENDALKGYFEKYFLTPFNKIKQIVDDLDKKVEQDQPAPIPENSEMDQAKEKAKIAVSKYMSKVLDGVHQHLQKKNNSKIVDLFKELEAIKQQTIFDIDNAKTEVEIDNLVHDAFSKMNATVAKFQKGLETNTPETPDTPKIPELPQAPDTPQAPDTPHVPESPKAPEAPRVPESPKTPEAPHVPESPKAPEAPRVPESPKTPEAPHVPESPKTPEAPKIPKPPKTPDVPKLPDVPKLPDVPKLPDAPKLPDGLNKVGQAVFTSTDGNTKVTVVFDKPTDADKLHLKEVTTKELADKIAHKTGGGTVRVFDLSLSKGGKETHVNGERTVRLALGQTGSDVHVYHVKENGDLERIPSKVENGQVVFKTNHFSLFAIKTLSKDQNVTPPKQTKPSTQGSQVEIAESQTGKFQSKAANHKALATGNETVAKGNPTSTTEKKLPYTGVASNLVLEIMGLLGLIGTSFIAMKRRKS

SEQ ID NO: 5406 - protein, 426 aa, Mesorhizobium sp. BNC1
MPFTANRQFKQAPRMLVSAKDMHYTTDDGRKLLDGTAGLWCVNAGHCRPKITEAIRHQAGELDYAPAFQMGHPIVFEFASRLVDIAPEGMDHVFFTNSGSESVETALKIALAYHRAKGDGSRTRLIGRERGYHGVNFGGISVGGIVNNRKMFGTLLAGVDHLPHTYLPGKNAFSRGVPEHGVELADELERIVALHDASTIAAVIVEPVAGSAGVILPPKGYLKRLREICDKHGILLIFDEVITGFGRLGTPFAADYFGVVPDIMTTAKGITNGVIPMGAVFVKKEIHDAFMNGPEHMIEFFHGYTYSGNPIACAAGLATLETYREEGLLTRGEELGQHWEDALHSLKGEPHVIDIRNIGLVGAIEMEPIQGQPTKRAFSAFLKGFEKGLLIRTTGDIIALSPPLIITKGQIDEIVDHVREILRSID

SEQ ID NO: 5407 - protein, 250 aa, Zea mays
  unsure (1)..(250): unsure at all Xaa locations
SESEAASRRQGEMGKGAQGSDAAAAGGEVEENMAAWLAAKNTLKIMPFKRPPVGPYDVRVRMKAVGICGSDVHYLRVRDPIRCLCNSTARELLHGXRKKKKRPLFRLFTHHRFSQEMRIAHFVVKEPMVIGHECAGVVEEVGAGVTHLSVGDRVALEPGVSCWRCRHCKGGRYNLCEDMKFFATPPVHGSLANQVVHPADLCFKLPDGVSLEEGAMCEPLSVGVHACRRVGVGPETGVLVVGAGPIGLVS

SEQ ID NO: 5408 - protein, 112 aa, Zea mays
  unsure (1)..(112): unsure at all Xaa locations
TLLEVWADLLYTEICVIPHVDDDYPYVAMDTEFAVYVRPXSGLTSARDEVNYASLRANVRMLILIPLRFTLSLKCGALPQLGPHLPPCDLKDICRGSAAHTDAGVADSIYLL

SEQ ID NO: 5409 - protein, 133 aa, Ustilago maydis 521
MVKRSAQCKFPVARIKKIMQADEDVGKVAQATPVLISIWNLGLTAKALELFMASIVEETVKETRSRGAKKMTPYHVKRTVHTNETFDFLKDIVAKVPDPVETDSSAAATATAAAGDNRGGKRRKTAKNADESD

SEQ ID NO: 5410 - protein, 323 aa, Triticum aestivum
  unsure (1)..(323): unsure at all Xaa locations
MEAETAAKRARENEGAAAADGAGEQAGISAVIPGWFSEISPMWPGEAHSLKVEKVLFQGNSCYQDVPVYLXTTVPEGVLLDGXIQGPGGRVPYQEMITHLPLXQAKNPKKVLVIGGGDGGVLREVSRHSSVEQIDICEIDKMVVDVSKQFFPHLALGFEDPRVSLHIGDGVAFLKNAPEGTYDAVIVDSSDPVGPAQELFEKPFFESVSRALRPGGVVCTQAESIWLHMHIIEDIVTNCRQVFKGSVNYAWTTVPTYPSGVIGFMLCSTEGPSVDFQHPVFSIEEDEYSTKSKGPLKFYNSEFHTASFCLPSFARRVIEAKAN

SEQ ID NO: 5411 - protein, 489 aa, Bordetella bronchiseptica RB50
MTQLTQPLSRAELLRDACYIDGKWVGAGNGPSIPVDNPSTGKTIISVPKLGRKEAEQAIDAAEAALPAWSARTGKERAAILLKWAQLMMENQQDLAVIMTSEQGKPVAEAAGEIAYAASFLEWFAEEAKRIDGDILQSPKGGQRLMVLKQPIGVTAAITPWNFPAAMITRKVGPALAAGCTMVVKPAQQTPLTALALAVLAEQAGVPAGVFQVVTGSSREIGAALCESEVVRKLSFTGSTEVGRTLMEQCAPTIKKLSLELGGNAPFIVFDDADLDRAIDGILASKYRNAGQTCVCANRIYVQAGVYEEVAKRLVEKVNAMKVGDGFEQGVTQGPLIDTAAVAKVQEHIADATAHGAKVIAGGQPHALGGSFFQPTVVRDVTQSMRFAVEETFGPVAPLFKFESEDEVIGMANNTIFGLAAYFYTRDYARIWRVSEALEYGIVGINTGIISNEVGPFGGVKQSGLGREGSKYGIEDYLELKYLCVDLGA

SEQ ID NO: 5412 - protein, 162 aa, Triticum aestivum
  unsure (1)..(162): unsure at all Xaa locations
MAPTVMASSATSVAPFQGLKSTAGLPISRRSSSAGLSSVSNGGRIRCMQVWPIEGIKXFETLSYLPPLSTGGLLKQVXDYXIRSKWVPCLRFSXVGFVLXXEHNTPPGYYDVHTGKCWELPMFXGCTDAHKCQQVXXVKKXYLTLFPLIFTAPSACLRLHRF

SEQ ID NO: 5413 - protein, 570 aa, Triticum aestivum
MAGGGVEDVYGEDRATEEQLITPWSFSVASGHQLLRDPRHNKGLAFTEAERDAHYIRGLLPPAIVSQEHQEKKIMHNLRSYTVPLHRYVAMMDLQERNERLFYKLLIDNVEELLPVVYTPVVGEACQKYGSIYRRPQGLYISLKDKGKVLEVLKNWPERSIQVIVVTDGERILGLGDLGCQGMGIPVGKLSLYTALGGVRPSACLPITIDVGTNNETLLNDEYYIGLRQRRATGEEYHELLQEFMNAVKQNYGEKVLVQFEDFANHNAFDLLAKYSKSHLVFNDDIQGTASVVLAGLLAALKMIGGGLVDQTYLFLGAGEAGTGIAELIALEMSKHTELPVDDCRKKIWLVDSKGLLVESRKESLQHFKKPFAHEHEELKTLLEAVQSIKPTVLIGTSGVGKTFTQEVIEAMASFNEKPVIFSLSNPTSHSECTAEEAYTWSKGTAVFASGSPFDPVEYEGKTYVPGQSNNAYVFPGFGLGVVISGAIRVHDDMLLAASEALAEEATQENFDKGLIFPPFTNIRKISASIAAKVAAKAYDLGLASRLPRPDDLFKYAESCMYTPLYRSYR

SEQ ID NO: 5414 - protein, 487 aa, Yersinia pestis KIM
MSTHLVWFRNDLRVTDNLALHAACQDPQASVIAVFIATPVQWAAHGMAPRQAAFLRQNLQHLQAALAARGIPLHYHQCDDFQASNTWLVDFCQQQQVDSLFYSQQYELNERLRDDALAVQLSERAITCQSFHDSVLLAPGTVLTGNNEMYKVFTPFRRAFIQRLLMSDNHCVPAPKARHAPPVLLSPLPFDYPQQSVDSQLFPAGEDAALQRLRRFCREQVQDYRQYRDLPAVPGTSCLSPYLVLGVLSPRQCFNRLWAESPEMLENADSGAFTWLNELIWREFYRHLLVAYPRLCQHHPFIGWTDGLVWNRSESQLKAWQQGQTGYPIVDAAMRQMNETGWMHNRLRMISASFLVKDLLIDWRQGERYFMSQLVDGDLAANNGGWQWAASTGTDAAPYFRIFNPTTQGERFDKDGVFIRRWLPELAAVPDSDIHQPWRWAERQQQHLDYPVPLVDHKQARLATLAAFEAAKRDSTRIPNRKEPSCY

SEQ ID NO: 5415 - protein, 358 aa, GIBBERELLA ZEAE PH-1
MASNSDAPPAAATEAVLVKSEEMPKDAQKVEELDFNKLKSPITAEDLFEGMRHMGFQASSMCEAVRIINDMRAWKDPETGDKTTIFLGYTSNLISSGLRGVLRWLVEHNHVSCIVTTAGGVEEDFIKCLADTYVGSFSTPGADLRRKGLNRIGNLVVPNANYCAFEDWVVPILDKMLEEQEASKGTEEEINWTPSKVIHRLGKEINDERSVYYWAYKNNIPVFCPAITDGSLGDMLYFHTFKSSPQQLKIDLVEDIRRINTIAVRAKRAGMIILGGGIVKHHIANACLMRNGAESAVYINTAQEFDGSDAGARPDEAVSWGKIKIGADNVKVYMEATACFPFIVANTFAKDIGKEDQK

SEQ ID NO: 5416 - protein, 402 aa, Bradyrhizobium japonicum USDA 110
MPIREVDMARKRIGILTGGGDVAGLNAVIKSVTYRGSEDDIEVVGLRRGWEALTHLNLDDPNSRSHYVIPLNRENTRTIDRRGGTVLHSSRVNPSKIQKLPGHLVGNEVPVSLSTNGGIATKTWDLTSRVLANLSGLGIEHLIAIGGDDTLSYAAKLNELGVKIIAIPKTMDNDVRNTEYCIGFSTAITRASDAIQRQRTTVGSHERIGIFRVFGRDAGFTALYTAYATSIRCLIPEHKVDLDKLIQLLIEDKRANPSNYALIVLSEGAQWEGYKLREYGEPDAYGHRKKANVAESLADEIKQRTGEETITSDLTYDLRSGDPDFIDKLVALTFGNMAYDAMLESKTGLMSALVEGRYDLVPIPDAKLGPRKLDVASSYNTERYRPIYANKQGLPIFLNRAS

SEQ ID NO: 5417 - protein, 372 aa, Medicago sativa
  unsure (1)..(372): unsure at all Xaa locations
XGNSYITKEDNQISATSEQTEDSACLSAXVLTTNLVYPAVLNAAIDLNLFEIIAKATPPGAFXSPSEIASKLPASTQHSDLPNRLDRXLRLLASYSVLTSTTRTIEDGGAERVYGLSXVGKYLVPDESRGYLASFTTFLCYPALLQVWXNFKEAVVDEDIDLFKNVHGVTKYEFXGKDKKXNQIFNKSXVDVCATEXKRXLEIYTGFEGISTLVDVGGGSGRNLELIISKYPLIKGINFDLPQVIENAPPLSGIEHVGGDXFASVPQGDAXILKAVCHNWSDEKCIEFLSNCHKALSPNGKVIIVEFILPEEPNTSEESKLVSTLDNLXFITVGGRERTEKQYEKLSKLSGFSKFQVACRAFNSLGVXEFYK

SEQ ID NO: 5418 - protein, 269 aa, Burkholderia cepacia R18194
MMSKIPAFGLGTFRLKGQVVIDSVRNGLEVGYRAIDTAQIYGNEAEVGEAIAASGVAREDLFLTTKIWVDNYAPDKLVPSLEESLRKLRTDHVDLTLIHWPAPDNGVALDTFMTALADAKAQGLTRRIGISNFNIALTKQAIAAVGKDAIATNQIELSPYLQNRKLVEFLNAEGIHVTSYMTLAYGKVLGDPVIGAIAQRHDATPAQVALAWALQLGYSVIPSSTKRENLASNLLAQSLRLTDEDMAQIAALERNGREVDPAGLAPKWD

SEQ ID NO: 5419 - protein, 179 aa, Glycine max
MASSKIIFIFLLFLAHLHQHTFVKGDSSLIKRTCKNTKYYNLCFSSLKSDPSSPNADPKGLAVIMIGIGMTNATSTSSYLSSKLLSPSNNTTLKRVLKECADKYSYAGDALQDSVQDLANEAYDYAYMHITAAKDYPNACHNAFKRYPGLAYPRDLASREDGLKHICDVAMGIIDNLDW

SEQ ID NO: 5420 - protein, 482 aa, Triticum aestivum
  unsure (1)..(482): unsure at all Xaa locations
PPHCAALAAAPGPRVIIVGAGMSGISPGKRLSQAGVTDLVILEATDRLGGGIPRAEAARATVHRGDRAAGGGHGERVEPGSSSGPTTGARRMRLALLKKMFPKEDVPDATEILVPRWWSNRFXRAPSPTGPSASTATDMTSSGVPMACFSLPATTPAQPTTVWSAGPTLQVVLLLPXDQLFPEQDVQICCQGTESLLSRLIAESPAKTAGSNGLKPSQCTALFRCSSVSGHCSMAFWAIHILSLCDMREVCLCPGGVSFHYLVIKLHRADYVVVSASLGVLQTDLIRFKPQLPSWKIVSIYQFDMAVYTKIFLRFPKRFWPEGSGKEFFLYASXRRGYFPVWQQFEQQYPGSNVLLVTVTDDESRRIEQQSDNQTMAEAVAVLRKMFPGXNVPDATEILVPRWWSNRFFKGSFSNWPIGVNRYEYDLIRAPVGRVYFTGEHTSEKYNGYVHGAYLAGIDSADILINCAKKKMCKYNVKGKHD

SEQ ID NO: 5421 - protein, 382 aa, Metarhizium anisopliae
MSFAGMLNRLHGQPESYDKKSKYKFGRTLGAGTYGVVREADGPSGKVAIKIILKKNVKGNEKMVYAELDMLQRLTHPHIVKFVDWFESRDKFYIVTQLATGGELFDRICDQGKFTEVDASQTIRQIMTAVDYLHDNDVVHRDLKPENLLYVTRDPDSDLVLADFGITKTLDIKEETLTTMAGSFGYAAPEVMEQKGHGKPVDMWSMGVITYTLLCGYSPFRSENLRDLLRECTAAPVPFHERYWKDVSQDAKDFILVLLVPEPEKRWTSKEALGHIWLSGKNATDHNLLPELEAYRRRARLRRVIEIVKLQNRIAKLKEHEEDPSESDMGDAQGASDNHKGDGSRLHALGLFAVREAKQKQESLQVEEELEKESRRRSFSNA

SEQ ID NO: 5422 - protein, 158 aa, Bradyrhizobium japonicum USDA 110
MSAIYDFKANSLLGEEVPMRRFEGQVLLIVNTASKCGFTPQYRGLEDLYRDLSPRGFAVLGFPCNQFGAQEPGQASEIQEFCSTNYDVTFPLFEKIDVNGANAHPLYEYLKRQQSGLLGASIKWNFTKFLVDRAGRVIARYAPTARPEGLRQQIETLL

SEQ ID NO: 5423 - protein, 313 aa, Streptomyces rochei
MPVPAVDPEIRTLLETADTGIFPVYGLDAVLADPQPYALLRAYPDTPADDQVTVLDLHIPGPAGGDLRVRVYRPDTTEVLPVILYITRRRLHYGSPEAEEGRSLRYARDARAVVVSVDYRLAPEHPYPAAADDAYAALIWIAANPAELGGDRARIAVAGGSAGGNIAASTVLRARDQAGPHILFQLLTYPGVDGSLTSASVREFTDTPVLNRGAMELAWQYYAKDTHPHPYASPIRATDLGALPPTYIAVAEIDPLRDEGRDYAARLSAAGVTTELVQVPGAVHGFDILFPSARISERSLADQVRALHDALHP

SEQ ID NO: 5424 - protein, 509 aa, Bacillus sp. KSM-K16
MRIHIVQKGDTLWKLAEKYEVDYEHLKEANPNLTNPEMLMPGMKVKVPAGSVAVRKEQKKTTPKAKEVDKKPQKAKEQSVKPPKKPELKASEKTQAANVAPAPPYYGQTQQGVAKPPEYPPLPPKPPCTPCQGNAFQEFAPQANMYQQSYAPNQQLYSQQMNQPPSYQPQANQPQSYQPQSYQPQANQPQSYQPQSYQPQANQPQSYQPQSYQPQANQPQSYQPQSYQPQANQPQSYQPQIFQPQAYGENAQLQAQSHGPKQQESAGKHQPLPQDKKDNEAGEWNGVQPQAHKGSSKSGIHGQQSPWGSNAPFVQQSGGPNQQSYPIQENQNKGFQGQQNTNFTPWPQQENKGWNQEQAYAHQVEMNWGQSNGAQPFSQQMDINWGQYRYSPYQGEIGDAAPFQSYPGWQPAALPQMPVANSYPPPQTPFFAPGTLNQQAGPYRQPPVGQLDDQSYQQPHYMNQAPSFLTGPYAAQPQQWAHPQSPYLQEQEYEPEEQINAYEEEDQQD

SEQ ID NO: 5425 - protein, 342 aa, Burkholderia cepacia R1808
MGVVGVICPWNLPLLLMTWKVGPALACGNTVVVKPSEETPQTAALLGEVMNTAGVPPGVYNVVHGFGPNSTGEFLTTHRGINAITFTGETRTGAAIMKAAADGARPVSLEMGGKNAAIVFADCDLDAAIEGTLRSCFANCGQVCLGTERVYVERPIFDRFVSALKKGAEGMQLGRPEDLATGMGPLISQEHRDKVLSYYKKAVEAGATVVTGGGVPDMPEALKGGAWVQPTIWTGLGDDSVIAREEIFGPCALVMPFDSEEEVIRRANDNDYGLATAIWTTNLSRAHRVAGAIEVGIAWVNSWFLRDLRTPFGGAKQSGIGREGGAHSLEFYTELKNVCIKL

SEQ ID NO: 5426 - protein, 503 aa, Triticum aestivum
MVATAKIPQRQLFIDGDWRAPALGRRLPVINPTTEASIGEIPAGTSEDVDAAVAAARAALRRNRGRDWARAPGAVRAKYLRAIAAKMIERKSDLARLEALDCGKPLDEAAWDMDDVAGCFEFFAGHAEALDKRQNAAVALPENFKCHLKKEPIGVVALITPWNYPLLMAVWKVAPALAAGCTAVLKPSELASVTCLELGDVCKEIGLPSGVLNIVTGLGHEAGAPLSSHPDVDKVAFTGSYATGQKIMVAAAPTVKPVTLELGGKSPIVVFDDVDIDKAVEWTLFGCFWTNGQICSATSRLLIHKNIAKEFVDRMVAWSKNIKVSDPLEEGCRLGPVVSEGQYEKIKKFVANAKSEGATILTGGVRPKHLEKGFFIEPTIITDINTSMEIWREEVFGPVLCVKEFSTEEEAIELANDTHYGLAGAVISGDRDRCQRLAEEIDAGCIWVNCSQPCFCQAPWGGNKRSGFGRELGEGGIDNYLSIKQVTEYTSDAPWGWYKAPAN

SEQ ID NO: 5427 - protein, 477 aa, Thermoproteus tenax
MILWPMPDVVVVNPATEEVLAVLPSASREEVRRAIDEAEDAFYRWSELPLRERAKLLRRAADLIEADDTLINTLVAESGKPIRDARAELRRAIEIFRASAEEAKYILEGKIPRVDAYDYPLANENRIAMEVREPMGVVAGALSYNNPASTFAHKIAPVIAAGNTVIAKPSSHTPLTALKMAQILQKAGVPQGVVQVVVGSGEEIFNEFVDNPKVVGISFTGSTAVGLQVAAKAAGRGKKFMIAPGGSDPAIVFADADLEAAASIIARARFENAGQNCNATKRVFVERKVYDKFLDILRRKIAAIKVGDPMDESTEMGPVISDKMVKAMEGIVADAVEKGGKLLYGGRRMQRKGYFFEPTLVAFDGRPPEAKAFREEVFGPVLPVAPFEDEREAVELANWTQYGLQSAVFTSDYKRAFRVARAIKAGAVMINDSTRVRFDALPYGGVKMSGLSAGWREGVRSTMLLFTEIKYYVLNIA

SEQ ID NO: 5428 - protein, 451 aa, Oryza sativa (japonica cultivar-group)
MMAAAAEEGEGKKGGGTVLQGRYEMGRVLGHGNFGRVHVARDLRTGRSVAVKVVAKEKVVRAGMMEQIKREIAVMKRVSHPNIVELHEVMATRSKIYLALELVRGGELFGRIVRLGRVREDAARHYFRQLVSAVDFCHSRGVYHRDLKPENLLLDEAGNLKVVDFGLSALADHARADGLLHTLCGTPGYAAPEVLRDKGYDGAKADLWSCGVILYVLLAGSLPFPDDNIVTLYRKAQRGDYRCPAWLSTDARRLIPRLLDPNPTTRISVAQLVETPWFKKTSISRPVSIELPPAFADPAPAKEEAEKDEPETLNAFHLISLSEGFDLSPLFEGDSAKGRRDGGMLFATREPASGVISRLEGVAARGGGRMRVTKSGARGVRLEGAERGGAKGRLAVAADIFSVAPSVLVVDVKKDGGDTLEYRSFCSEELRPALQDIVWGAAADPTPTAAV

SEQ ID NO: 5429 - protein, 481 aa, Papaver somniferum
SLVAVVITTFLYLIFRDSSPKGLPPGPKPWPIVGNLLQLGEKPHSQFAQLAETYGDLFSLKLGSETVVVASTPLAASEILKTHDRVLSGRYVFQSFRVKEHVENSIVWSECNETWKKLRKVCRTDLFTQKMIESQAEVRESKAMEMVEYLKKNVGNEVKIAEVVFGTLVNIFGNLIFSQNIFKLGDESSGSVEMKEHLWRMLELGNSTNPADYFPFLGKFDLFGQSKDVADCLQGIYSVWGAMLKESKIAKQHNNSKKNDFVEILLDSGLDDQQINALLMEIFGAGTETSASTIEWALSELTKNPQVTANMRLELLSVVGKRPVKESDIPNMPYLQAFVKETLRLHPATPLLLPRRALETCKVLNYTIPKECQIMVNAWGIGRDPKRWTDPLKFSPERFLNSSIDFKGNDFELIPFGAGRRICPGVPLATQFISLIVSSLVQNFDWGLPKGMDPSQLIMEEKFGLTLQKEPPLYIVPKTRD

SEQ ID NO: 5430 - protein, 239 aa, Oryza sativa (japonica cultivar-group)
MRKSSGGGGGWSTSDVRGQTAWVGSGTMLGEVYYAIANKTSRLGFPGSVGPTVGIGGYLSGGGFDLMLRKHGLASDHVLDATMVDAKGRLLDRAAMKADLFWAIRGGGSGNFGIVLSCKLRLVPIPATVTVFTVHRSRNQSTTNLLIKWQRVAPSLPSDAFLHVVVPLYLDTRAGLIAIMADTFPELNVTASDCTEMMWIQSVLDFAFYSTGKPSEMLLDRGNGIGDPSGSWMRLARSS

SEQ ID NO: 5431 - protein, 117 aa, Glycine max
  unsure (1)..(117): unsure at all Xaa locations
HWREGERELVGKGGMSIDEHGEGKEENMAAWLVGMNSLKIQPFKLPTLGPHDVRARMKAVGICGSDVHYLKTLRCXKEPMVIGHECAGIIEEVGSQVKSLVPGDRVAIEPGISCWHC

SEQ ID NO: 5432 - protein, 179 aa, Glycine max
MVSSKIFFLFLLFLAHLHQHASVEGDSSLIKRTCKNTKYYNLCFSSLKSDPSSPNADPKGLAVIMIGIGMTNATSTSSYLSSKLPTPSNNTTWKRVLKECADKYSYAGDALQDSVQDLANEAYDYAYMHITAAKDYPNACHNAFKRYPGLVYPRDLARREDGLKHICDVAMGIIDNLDW

SEQ ID NO: 5433 - protein, 363 aa, Thermoproteus tenax
MEAAILEKYNSELVIEEVDVEPPKSGEVALRVKAAGVCHSDLYVLEGATPVPPPLVPGHEAVAEVIEVGPDVQGLSRGDLVVTSFIWPCGRCRNCARGHENLCERFSEVRLKGVLLDGTTRLRRRKSGEPLRIFLGGLWAQEAVVPASAVAKLPPRLANRPELAMLGCAFLTAYGAVVNSGSVQPGDTVAVIGTGGVGLAIVQVARAVGARVIAVGRNPEKLKLAAEMGAEVVNARDGDAVAEVRKLTDGRGADVVVEAVGSEQTVEQAIDMASTGGRVVLVGLMGLGKKAPLHVARVVRGGISVIGSYGARPRVDLPKVIGMVERGLLRPELMARDFYKLEQINEAVEALRSGRSIRPIVLP

SEQ ID NO: 5434 - protein, 197 aa, Medicago truncatula
MSGSRFIKCVTVGDGAVGKTCLLISYTSNTFPTDYVPTVFDNFSANVVVDGSTINLGLWDTAGQEDYNRLRPLSYRGADVFLLAFSLISKASYENIAKKWIPELRHYAPGVPIILVGTKLDLRDDSQFFQDHPGAAPITTAQGEELRKLIGAPVYIECSSKTQKNVKAVFDSAIKVVLQPPKQKKTKRKGQKACSIL

SEQ ID NO: 5435 - protein, 375 aa, Arabidopsis thaliana
MPLSLQSPPCATLSASIRKGRWKTLAAGFSVTPLPAVNFSLRRSIPRILASASSSSSPASSSLEAGENNELNAVSAFSEIVPDTVVFDDFERFPPTAATVSSALLLGICGLPDTIFRNAVDMALADSSCAGLETTESRLSCFFNKAIVNVGGDLVKLVPGRVSTEVDARLAYDTNGIIRKVHDLLRLYNEIDVPHDRLLFKIPATWQGIEAARLLESEGIQTHMTFVYSFAQAAAASQAGASVIQIFVGRLRDWARNHSGDTEIESAIKSGEDPGLALVKRSYNYIHKYGYKSKLMAAAVRNKQDLFSLLGVDYVIAPLKVLQSLKDSPAIPDDEKYSFVRKLTPETATHYHFTNKELVKWDQLSLASSMGPASV

SEQ ID NO: 5436 - protein, 197 aa, Medicago truncatula
MSASRFIKCVTVGDGAVGKTCLLISYTSNTFPTDYVPTVFDNFSANVVVNGSTVNLGLWDTAGQEDYNRLRPLSYRGADVFILAFSLISKASYENVSKKWIPELKHYAPGVPIILVGTKLDLRDDKQFFVDHPGAVPITTAQGEELRKLINAPAYIECSSKSQQNVKAVFDAAIRVVLQPPKQKKKKSKAPKACSIL

SEQ ID NO: 5437 - protein, 375 aa, Arabidopsis thaliana
MPLSLQSPPCATLSASIRKGRWKTLAAGFSVTPLPAVNFSLRRSIPRILASASSSSSPASSSLEAGENNELNAVSAFSEIVPDTVVFDDFERFPPTAATVSSALLLGICGLPDTIFRNAVDMALADSSCAGLETTESRLSCFFNKAIVNVGGDLVKLVPGRVSTEVDARLAYDTNGIIRKVHDLLRLYNEIDVPHDRLLFKIPATWQGIEAARLLESEGIQTHMTFVYSFAQAAAASQAGASVIQIFVGRLRDWARNHSGDTEIESAIKSGEDPGLALVKRSYNYIHKYGYKSKLMAAAVRNKQDLFSLLGVDYVIAPLKVLQSLKDSPAIPDDEKYSFVRKLTPETATYYHFTNKELVKWDQLSLASSMGPASV

SEQ ID NO: 5438 - protein, 197 aa, Medicago truncatula
MSASRFIKCVTVGDGAVGKTCLLISYTSNTFPTDYVPTVFDNFSANVVVNGSIVNLGLWDTAGQEDYNRLRPLSYRGADVFILAFSLISKASYENVSKKWIPELKHYAPGVPIILVGTKLDLRDDKQFCIDHPGAVPITTAQGEELRKLINAPAYIECSSKSQENVKAVFDAAIRVVLQPPKQKKKKNKAQKACSIL

SEQ ID NO: 5439 - protein, 382 aa, Corynebacterium efficiens YS-314
MNDKNVEVRRGLYGVVSDYTAISKVMPETNSLTYRGYPVQDLVEHCSFEEVIYLLWNGELPTAEQLREFNTRGRSYRVLDAGLIALIHSLPMGCHPMDVLRTAVSYMGTKDPEPFTTGADHVLRIGHNLLAQLPMVVAMDIRRRSGADIIAPDPDKGIAENFLSMVFGTASASVATNPEDVRDFEKSLILYAEHSFNASTFTSRVITSTRSDAYSAIAGAIGALKGPLHGGANEFVMHTMLDIDDPDNAAAWVHRALDNKDLIMGFGHRVYKSGDSRVPSMEKSMRALAQRHDAEKWVRMYEQMQQVMEDRTGIKPNLDFPAGPAYHILGFPVDFFTPLFVLARLAGWTAHIVEQYENNSLIRPLAAYNGVEQREVVPIDQR

SEQ ID NO: 5440 - protein, 327 aa, Spiroplasma citri
MLKKIGILTSGGDSQGMNAAIAGVIKTAHAKGLETYIIRDGYLGLINNWIEVVDNNFADSIMLLGGTVIGSARLPEFKDPEVQKKAVDILKKQEIAALVVIGGDGSYQGAQRLTELGINCIALPGTIDNDITSSDYTIGFDTAINIVVEAIDRLRDTMQSHNRCSIVEVMGHACGDIALYAGIAGGADIISINEAALSETEIADRVAMLHQAQKRSVIVVVSEMIYPDVHKLAKLVESKSGYITRATVLGHTQRGGNPTAMDRYRAFQMAQFAVEQIIAGVGGLAIGNQGDQIIARPIMEALSIPRSSRKEIWAKFDQLNQNIYQKS

SEQ ID NO: 5441 - protein, 345 aa, Candida albicans
MSTDHHSHPVEGHQFKKIFNRLSGQPESYSRKQNYTFGKTLGAGSFGIVRYARDNSTDEEVAVKIILKKALKGNESMIIDEMQLLEQLNNPHIVGFRDWFESKDKFYLVTQLATGGELFDRIVQKGRFTEHDASLVVLQMLEALEYLHNKDIVHRDIKPENILYLTSKDDSPIVLADFGIAKRLQNPNEKLTSSAGSFGYAAPEVILGTGHGKPCDIWSLGVVTYTLLCGYSPFRSENVQDFINEVKHNNAVIFHADYWKDVSKDARRFIIKALQFNPDNRPTATELLNDPWLVSIAKEYKETDLLPNFKQGFDAKKKFRQAIELVKLNNRIKKLKEWQTDEDDD

SEQ ID NO: 5442 - protein, 314 aa, Streptococcus dysgalactiae subsp. equisimilis
YAADEKTVPNFKSPDPDYPWYGYDAYRGWESRYHDLKVNLEGSKEYQVYCFNLHRHFPSKSTSIVKNWYQKIEGTEDSFKKNARTPRIGNGDLKRNISNVIYNGYKSNANGFMNGIEDLNAILVTQNAIWYYSDSASLDVSKMWEKEAKSNEISQEQVKLMREALKKLIDPKLGETVEKKLPTNYKLNIFVSKDNSIQNLLSAEYVPDSPPMPGEVPKEENPKEEDPKVPGLDGEEVPEVPSESLEPALPPLMPELDGQEVPEVPSESLEPALPPLMPELDGQEVPEVPSESLEPALPPLMPELDGQEVPEKPS

SEQ ID NO: 5443 - protein, 168 aa, Zea mays
MAASSTATSVHDFIVKDASGKDVDLSTYKGKVLLIVNVASQCGLTNSNYTELAQLYEKYKDQGFEILAFPCNQFGGQEPGTNEEIVQFACTRFKAEYPIFDKVDVNGSNAAPIYKFLKSSKGGLFGDSIKWNFSKFLVDKEGRVVDRYAPTTSPLSIEKDIKKLLGSS

SEQ ID NO: 5444 - protein, 297 aa, Neurospora crassa
MSKLGINDKIKLNSGYEIPQLGFGVYQTPADQVDKIVQEAFKVGYRHVDSASAYRNEAGCGAAILRSTIPRSEIFFTSKVGPKHISYNAAKRIISESLAKTGLGYIDLMLLHAPYGGSVHRKGAWLALVEAVEEGKIRSIGVSNYGVHHLDELEQHIKELEQERGGSGKGGVLSVGQWEVHPWCPRQDIVEWCRKRNVVVEAYAPIVRGERFGEPRLKSLAEKYGKTEAQVLVRWSLQKGYVPLPKSVKAERIKENADVYDFDLSEEEVKALETDEYSPVCWDPTTSELDNYSGQEV

SEQ ID NO: 5445 - protein, 210 aa, Candida albicans
MSGKGTSSRAYDMIMKLLLVGDSGVGKSCLLLRFVEDKFNPSFITTIGIDFKIRTIESKGKRIKLQVWDTAGQERFRTITTAYYRGAMGIVLIYDVTDSRSFENVENWFQTVTQHANEDAQIFLVGNKCDDEVNRQVSKEQGQELAAKLNVPFLEASAKSNENVDSIFYELASIIQEKHVEENIGGVGGASGAGGIDVSQNNSGAKNNCC

SEQ ID NO: 5446 - protein, 254 aa, Zea mays
MRKKLGTRFPAARIKKIMQADEDVGKIALAVPVLVSRALELFLQDLIDRTYEITLQSGAKTLNSFHLKQCVKRYSSFDFLTEVVSKVPDLGGADSCGDERGLPRRRKSNGSDPENDESRSSKMAIRNANISPRGRGRGRGRGRGRPPTKRKEVGYVQFEDESSMFAEQGEPLPGEETVQEINGNETMPQSTQPPVEAPPTALAQATTSSKAEEANSDHQSDWPMPDAIGSIGVVPSGFGHLTVQVEDEDYDNED

SEQ ID NO: 5447 - protein, 255 aa, Medicago truncatula
MAMTRESWAFVFGIIGNIISFAVFLSPLPTFYVIFKKKSAEGFQALPYVVALFSAMLWIYYAFVKRESALLLITINTFGIVVESAYIIMFLIYAPKKQRLSTIKLLLLLNVFGFGAMLLSTLYLSKGAKRLAIIGWICLVFNISVFAAPLFVISKVIRSRSVEYMPFFLSFFLTINAVMWFFYGLLLRDYYVALPNTLGFVFGIIQMVVYLIYRNATPVVEAPMKGQELSGGHIIDVVKIGTDSNRAGGGAGSKV

SEQ ID NO: 5448 - protein, 355 aa, Schizosaccharomyces pombe
MSDSKLADSLNCLSVSTPSTTANPGRQQLLRLAVSNQRQVNNVSLANGKENKRTSNSKFNSSLRKIEEPIAGVPSSAGPQWREFHIGMFEIGKPLGKGKFGRVYLAKEKKTGFIVALKTLHKSELVQSKIEKQVRREIEIQSNLRHKNILRLYGHFHDEKRIYLILEFAGRGELYQHLRRAKRFSEEVASKYIFQMANALSYLHKKHVIHRDIKPENILLGIDGEIKLSDFGWSVHAPSNRRTTLCGTLDYLPPEMVEGKEHTEKVDLWSLGVLTYEFLVGAPPFEDMSGHSATYKRIAKVDLKIPSFVPPDARDLISRLLQHNPEKRMSLEQVMRHPWIVKYKDSWTRKSSESS

SEQ ID NO: 5449 - protein, 276 aa, Schizosaccharomyces pombe
  unsure (1)..(276): unsure at all Xaa locations
MKPFSPSQTNFEKEQLCFGVYQLKDCYQQVIEALSLGIRVIDSAITYRNEKECEQAIQDFCHQNVNIKREDITLITKIPDSLQGFERTWKAVXQSLRRTGRPKLDVVLIHSPKWPVRRIESWRALLQHQKEGRINKIGVSNYNIHHLEEIISLGLPLPAINQVEFSAFNNRPTFLSYCFNHGILVQAFSPLTRGYRLSDIRLLDLSLKYNKTPANILLRYCLQKGVSPISKASSFVHIHENVKAEQFMLDPSDMDVMDTWDEEFVSKPTWNPIILP

SEQ ID NO: 5450 - protein, 137 aa, Glycine max
  unsure (1)..(137): unsure at all Xaa locations
GSRIKPSISMFLTSCNIKSTGHKMGISXKGSDQILERYLYLHNVPNNEDFDPDTRLKNHALHKYDSVPAIQLTFASGTHTRVLYLDKTTVTTSMNIDPDCXKRSRSDTGXILKCTPRRASXDEQHSYLPQPILYSQK

SEQ ID NO: 5451 - protein, 162 aa, Zea mays
MVAFSLKIFYWPEGNPTTASMQEILYWQGHTMSMMYKIVADALRKEGLHERHPQEYLNFYCLGKREVSNEVPTTGNSNENSAVRLSQKFKRFMIYVHSKGMIVDDEYVLIGSANINQRSMDGSRDTEIAMGAYQPHYSWAGSGRPPRGQARLSSVWGSSHHI

SEQ ID NO: 5452 - protein, 405 aa, Bradyrhizobium japonicum USDA 110
MKNSDELYLSAREAAAELAISPATLYAYVSRGLIRSEPTPDSRKNRYRAEDVRALKERRVPSPEPRGLRSFDADLPVMDTEISTITEEGAIYRGVNCVDLAENDTLEHTATLLWDVSGVDPFAPDNQPEISEEMRTIAGAARRAAPIDRAIAVLALAASADPRAFTRAPDGRAMVGARIVRLLVATMLNAEASAEPLHQQVARVWAADNKHAPDLIRRALVLLADHELNASTFTARCAASTGLNLYDAVIAGLAALKGPKHGGAGVLASQLVKTLVDRDVAPVVRERVALGERFAGFGHGVYKRGDPRAQSLLNALSRAGAPRKFTREVPERIAEATGEFVNIDYALAVLVHALRLPAGSELALFAMARSVGWIAHASEQLQFGKLIRPRARYVGPAPGRRTGGS

SEQ ID NO: 5453 - protein, 364 aa, Bradyrhizobium japonicum USDA 110
MNIHLTKSQIGLDGVPAAETVLSHVDGERGELIIAGEHVGRLAAKSSFEGVTARLWNGASKTSLSEANVRASLGAARERAFARLAELLPATHGMGIVDGFRAAVAGLRAEHGLEHEATIVGAFPVISGALVRRAKGLDPVAPDPSASHAADTLRMLHGRAPATREVTALDAYLVTVCDHGMNASTFTTRVVASTQADLFAAVTAGYCALTGPLHGGAPEPVLEMLDAIGSRERIQPWVDAALARGERMMGFGHRVYRVRDPRADVLKTAIEALASNGADLPFAGEVEAYIRAALRKKNPDRPLETNVEFFTAILLDALAIPRQAFTPIFAVARAAGWTAHAREQQRTGRLIRPSSSYVGAVPEA

SEQ ID NO: 5454 - protein, 317 aa, Photorhabdus luminescens subsp. laumondii TTO1
MLAELITSYRKSAAIYAFVDTGLSIHFRNGAYVDIDELSRQCGIDYSRLDRLCDFLIEIGILVNHGHKVTLSEECSALADPESMESLIVKWELSPDCWNAWSMYPRSLLENDGKPAFEITHGKSFFEHLASNKLLKSNFDSSMSKGSDKIIEKLLDIYDFGQYNRILDIGGGEGSLLVKMSEKVKGKHYAVLDRYDEIPVLENIDFINGDFLKVIPSGYDLYILKDVIHDWSDNNAILILENCRKAMDNGSAVLLISYMKKPQSKMVIYLDILMDVLFSGKERYLTEFERLANQAGLVIQDVKDIDESSSIIQLGIK

SEQ ID NO: 5455 - protein, 317 aa, Photorhabdus luminescens subsp. laumondii TTO1
MLIDLITSYRKTAAIYTFVDAGLSIHFKNGDYVDINKLASQYGIDYSRLNRLCDFLIEIGVLVSSDHGVALSEECSALADPNSVEFLTVKYEINSEHWDSWLMYPKSLLENNGKSAFEMVHGKSFFEHLDSNKGLKSDFDALMSKYTNKIIKELLVIYDFDKHNRILDLGGGDGELLIRISEQVKGKDYTVLDRYNEVPISEGINFIKGDFFKPIPTGYDLYILKNVLHNWPDNDAISILKNCREAMDNNATLLIITLMKKPQSLVVKSVDILMDMLFSAKQRYLSEFEDIANQAGLVIRHYKDLDEIFSLIELKVK

SEQ ID NO: 5456 - protein, 118 aa, Triticum aestivum
  unsure (1)..(118): unsure at all Xaa locations
ATSVAPFQGLKSTAGLPVSRRSNGASLGSVSNGGRIRCMQVWPIEGIKKFETLSYLPPLSTEALLKQVDYLIRSKWVPCLRXSKLXHLPVEHNALLGTTMARVLACGTAYFGCTDPHR

SEQ ID NO: 5457 - protein, 375 aa, Arabidopsis thaliana
MPLSLQPPPCATLSASIRKGRWKTLAAGFSVTPLPAVNFSLRRSIPRILASASSSSSPASSSLEAGENNELNAVSAFSEIVPDTVVFDDFERFPPTAATVSSALLLGICGLPDTIFRNAVDMALADSSCAGLETTESRLSCFFNKAIVNVGGDLVKLVPGRVSTEVDARLAYDTNGIIRKVHDLLRLYNEIDVPHDRLLFKIPATWQGIEAARLLESEGIQTHMTFVYSFAQAAAASQAGASVIQIFVGRLRDWARNHSGDTEIESAIKSGEDPGLALVKRSYNYIHKYGYKSKLMAAAVRNKQDLFSLLGVDYVIAPLKVLQSLKDSPAIPDDEKYSFVRKLTPETATHYHFTNKELVKWDQLSLASSMGPASV

SEQ ID NO: 5458 - protein, 435 aa, Anabaena variabilis ATCC 29413
MTTELLQQVRVIDPVSGIDNITDVLIADGVIQAIAPNIPNTSPDTQIRDCRGLVLGPGLVDLYSHSGEPGFEERETLASFLQAAAAGGFTKVSILPDTSPAIDNPGLVAQLQKRGLGIGDWGLGSNSSPLHPCTPAPLLHLWGAITLDVAGKQMTELADLAAAGVVGFTDGLPLDNLSLVRRLLEYVQPLGKPVAFWPCDRQLSANGVMREGADALRFGLPPIPPSAETTAIAALLELVAATGNTQVHIMRVSTARSVELIAAAKAKGLPITASTTWLHLLLDTKAVKSYDTSLHLDPPLGNASDVKALRAGVRTGVIDAIAIDHAPYTYEEKVQAFAEAPPGAIGFELALPLLWQNLVETGEFTALELWQALSTRPAQCIQQKVSAFAPHHKAELTLFDPQKIWKVEKKNLCTLSSNTSWLGQELQGRVIQIWL

SEQ ID NO: 5459 - protein, 84 aa, Brassica napus
AMGFPPEFFPVLFAVPRMAGYLSHWRESLDDPDTKIMRPQQAYVDPRVRHYEPVRQRTLSSDSDKMGQVSISNASRRRLSGSAL

SEQ ID NO: 5460 - protein, 110 aa, Triticum aestivum
MGGHAAGPTSYGSSGRRSFPAPAATAKQRRAPAPAGNGGKSDGGGYFGAEAAVVLALMTAALLVLPLLLPPRPPPPPLSLFVPVAILAGLLLLVLLPSDARGLRVAPSYL

SEQ ID NO: 5461 - protein, 435 aa, Thermus thermophilus HB27
MEGLTPEMQREAEALRREWETNPRWKGVRRDYRPEDVVRLRPSVMVEYTLAKRGAEKLWKLLHERPYVHTFGAYTGAMAVEMVRAGLEAIYLSGWQVAADANLAWQTYPDQSLYPYNSVPQIVKRINNALMRADQVERIEGRVTRDWYVPIVADAEAGFGGALNVFELTKAMIEAGAAGIHYEDQLASEKKCGHLGGKVLVPTGQHIRTLQAARLAADVMGVPTVIIARTDAEAATLITSDIDERDKPFILPDERTPEGFYRFKNGIEAGIARALAYAPYADVIWMETSKPDLEEARKFAEAVKKEFPDKLLAYNLSPSFNWKKFLDDETIAKFNRELGEMGYKFQFITLAGWHALNYYIWELAKGYKERGMPAFVELQQKEFAAQKEGFTAVKHQREVGAGYFDEVVLALTQGQASTLALKGSTEEAQFNEPVH

SEQ ID NO: 5462 - protein, 254 aa, Brassica rapa subsp. pekinensis
MGRGRVEMKRIENKINRQVTFSKRRAGLLKKAHEISILCDAEVSLIVFSHKGKLFEYSSESCMEKVLERYERYSYAEKQLKAPDSHVNAQTNWSMEYSRLKAKIELLERNQRHYLGEDLESISIKELQNLEQQLDTSLKHIRSRKNQLMHESLNHLQRKEKEILEENSMLTKQIKERESILRTHQNQSEQQNRSHHVAPQPQPQLNPYMISHQASPFLSMGGMYQGEDPTAVRRNRLDLTLEPIYNCNLGYFAA

SEQ ID NO: 5463 - protein, 509 aa, Arabidopsis thaliana
MGLDSGAFSVSFVFVFLCLLFKSLDRQIRDSILAKRKRKVFNSLMRLWLNESLRIRVVMGKDRISELPDALLIKILSFLPTKIVVATSVFSKQWRPLWKLVPNLEFDSEDYDDKEQYTFSEIVCKSFLSHKAPVLESFRLEFESEKVDPVDIGLWVGIAFSRHLRELVLVAADTGTGTAFKFPSSLCTCNTLETLRLVLLILVDISSPVVMKSLRTLHLELVSYKDESSIRNLLSGCPILEELLVIRGEDSDIEVFTIDEVPSLKRLTINDDHDGQEFWGYVINAPSLKYLLIEDLRCPGFCLNAPELMEANIFDGTSITNDNFLGYLTSVKRLLLNLSPWKITYPTGSIFYQLVSLEMYTREIDWWDLLTLMLEHSPKLQVLKLTDVRHFIISQLCIFNCVKFHKNGLPGGKWNEPKYVPECLLSHLETFVWRRFDWGREEEKEIATYILKNARRLNKATFSTNPVNSEELDKLKERRKVHNELDGVVRASNSCQVLGSGASRWELKT

SEQ ID NO: 5464 - protein, 375 aa, Arabidopsis thaliana
MPLSLQSPPCATLSASIQKGRWKTLAAGFSVTPLPAVNFSLRRSIPRILASASSSSSPASSSLEAGENNELNAVSAFSEIVPDTVVFDDFERFPPTAATVSSALLLGICGLPDTIFRNAVDMALADSSCAGLETTESRLSCFFNKAIVNVGGDLVKLVPGRVSTEVDARLAYDTNGIIRKVHDLLRLYNEIDVPHERLLFKIPATWQGIEAARLLESEGIQTHITFVYSFAQAAAAAQAGASVIQIFVGRLRDWARNHSGDNEIESAIKSGEDPGLALVKRSYNYIHKYGYKSKLMAAAVRNKQDLFSLLGVDYVIAPLKVLQSLKDSPAIPEDEKYSFVRKLTPETATHYHFTNKELVKWDQLSLASSMGPASV

SEQ ID NO: 5465 - protein, 250 aa, Zea mays
  unsure (1)..(250): unsure at all Xaa locations
MAAAARQRGTVKWFNDTKGFGFISPEDGSEDLFVHQSSIKSEGFRSLAEGEEVEFSVSEGDDGRTKAVDVTGPDGSFVRGGGGGGGGGGGYGSRGGGGSGGGGXAYGGSWGGGRRSGGGGGPGACYKCGEPGHMARDCPSADGGGGYGGGGYGGGGYGGGGGGGGGCFKCGEPGHMARDCSSGGGGYRGGGGGGGGGGGCYNCGQAGHMARDCPSGGGGGGGRFGGGGGGGDRSCYNCGEAGHIARDCPT

SEQ ID NO: 5466 - protein, 108 aa, Glycine max
MEHGSVADSSASTFSIMEEDHTLANSVRFVLNQDPRVAFCGYSIPHPADNKVNIRVQTTGDPAKDVMKDALQDLMVMGQHVRGTFDKAVADFKSKMPAEQMDVDLNQQ

SEQ ID NO: 5467 - protein, 420 aa, Solanum demissum
MGNCVGSSARVEATLSSTTPSAYEASRFPDRKSNSSVPSSLSIPSYGRKSSSESLPTPRSESEILFSPNVKSFSFNELKNATRNFRPDSLLGEGGFGCVFKGWIDAQTLTASKPGSGIVIAVKKLKPEGFQGHKEWLTEVNYLGQLRHPNLVKLIGYCIDGDNHLLVYEFMPKGSLENHLFRRGPQPLNWATRIKVAIGAARGLAFLHDAKEQVIYRDFKASNILLDAEFNSKLSDFGLAKAGPTGDRTHVSTQVMGTQGYAAPEYVATGRLTAKSDVYSFGVVLLELLSGRRAVDNTKVGIEQNLVDWAKPYLGDKRKLFRIMDTKLEGQYPQKGAYTAANLAWQCLSNEPKLRPKMSEVLTALEELQSPKGVSKLSHTEHRAIPSPVAVSPMRHHRSPLHMTPSASPFQAYQKSPRGR

SEQ ID NO: 5468 - protein, 212 aa, Secale cereale
MDAADAGSPRFGHRTVCSEPPKRPAGRTKFKETRHPLYRGVRRRGRLGQWVCEVRVRGAQGYRLWLGTFTTAEMAARAHDSAVLALLDRAACLNFADSAWRMLPVLAAGSSRFSSAREIKDAVAVAVVEFQRQRPFVSTSETADGEKDVQGSPRPSELSTSSDLLDEHWFSGMDAGSYYASLAQGMLMEPPAARAWSEDGGEYSGVHTPLWN

SEQ ID NO: 5469 - protein, 227 aa, Glycine max
  unsure (1)..(227): unsure at all Xaa locations
MDQFLWRVLPLLTILVSFGVFFYLQDSYTAQLFPLIKLPRDKCSLLPHRHFWISSKRIVTPQGIISGSVEINDGKIISVVEGHAIQGKPKQEEVIDYGDAVIMPGLIDVHVHLNEPGRTEWEGFDTGTRAAAAGGVTTVVDMPLNCYPTTVSKEKLKLKLDAAEDKIYVDVGMTNNLCLSIQLTELLRYFLXSYTGFWGGLIPENALNTSILDGLLSAGVLGVKVYI

SEQ ID NO: 5470 - protein, 268 aa, Secale cereale
MDVADIASRSGQQQQGHRTVSSEPPKRPAGRTKFHETRHPLYRGVRRRGRVGQWVCEVRVPGIKGSRLWLGTFNTAEMAARAHDAAVLALSGRAACLNFADSAWRMLPVLAAGSFGFDSAREVKAAVAVAVVAFQRKQIIPVAVAVVALQKQQVPVAVAVVALQQRQVPVTVAVVALQKLQVPVAVAVVALQKKQIILPAACLAPEFYMSSGDLLELDEEQWFGGMDAGSYYASLAQGMLVAPPDDRARPENGEQSGVQTPLWSCLFD

SEQ ID NO: 5471 - protein, 143 aa, Zea mays
  unsure (1)..(143): unsure at all Xaa locations
MAMAFKMATTGMWVTDECKNSFMEMKWKKVHRYIVFKIDERSRLVTVDKVGGPGESYDDLAASLPNDDCRYAVFDFDFVTVDNCRKSKIFFIAWAPTASRIRAKMLYATSKDGLRRALDGISYEVQATDXXEMGFDIIKDRAK

SEQ ID NO: 5472 - protein, 174 aa, Glycine max
  unsure (1)..(174): unsure at all Xaa locations
MICSLAVTTANRAGAGMVAPFTGLNSMAGLPTTKTNTDITFIACIGGIEQCMQVWPPLGKKKLETLSYLPYLDDAQLAKEVKYLLRKGWIPCLEFNLDHSSVYREHNTSPRYYDRRYCTMSNLTMLGCTDASHVLNELHXAKTAYPNGSVRIIXFDNATQVQCITFIVYNTPAY

SEQ ID NO: 5473 - protein, 158 aa, Petroselinum crispum
MDFRLMGFNHPLLNTLSPHCDEDNQDSSNKNKSEQARSYVRDAKAMATTPADVKEYPNSYVFVVDMPGLKSGDIKVQVEEDNVLVVSGERKREEEKEGVKYVRMERKVGKFMRKFVLPENADLENINAVCQDGVLSVTVQKLPPPEPKKPKTIEVKIA

SEQ ID NO: 5474 - protein, 497 aa, Mesorhizobium loti
MKGDDGLTVTQSLTRRLKNPELFDDLAGVPGRKAEQSTRRFSVFNPSTGELLAELPDMDVRDVSKAIDKAEAAQEHWAALTARERSDILWEWHQLILDHSEDLAAILTAEMGKPLAEAKSEIAHAAAYLQWYAEEANRIYGETISPPSNDRRMLVIKQPIGVVGAITPWNFPASMVARKISPALAAGCAIVLKPAEQTPLVAGAMFTLARMAGFPDGVLNLIYASEGDAVGRELCSNPKVRKISFTGSTEVGRLLMRECSDQIKRTSFELGGNAPFIVFDDADVDAAVDGALQAKFRNAGQTCVSANRLYVQSSVYNEFCDKFTKRVSALRVGDGFEPEVAIGPLIDKCALAKIEDHIRDAVRQGGKIRCGGNRIGESGTFFEPTVITDVERTMRVAQEETFGPLAPIIRFNDPDQVVREANDTIYGLAAYFYASNLKRVWRVAETLEYGMVGINTGRMSSEAAPFGGMKQSGIGREGSRHGLEDYLEMKYLCMGGL

SEQ ID NO: 5475 - protein, 336 aa, Klebsiella pneumoniae
MAADPSVHIQGVIMSFDLIIKNGTVILENESRVVDIAVNDGKIAAIGEHLGEAKQVMDATGLIVSPGMVDAHTHISEPGRTHWEGYETGTRAAAKGGITTMIEMPLNQLPATVDRQTIELKFDAAKGKLTIDAAQLGGLVSYNLDRLHELDEVGVVGFKCFVATCGDRGIDNDFRDVNDWQFFKGIQKLAEMKQTVLVHCENALICDELGEEAKREGRVTAHDYVASRPVFTEVEAIRRVLYLAKVAGCRLHVCHVSSPEGVAEVTRARQEGQDVTCESCPHYFVLDTDQFAEIGTFGEVLSADPRCGKTRKACGKSCSTEKSTAWSPTIRRAHRK

SEQ ID NO: 5476 - protein, 430 aa, Rubrobacter xylanophilus DSM 9941
MDAAVDRAKRAFPGWRDVPPAERARLLGRLAEALDAEREDLARTESLNVGKPLSAARAEMKMVVDTFAYYAGAPERLLGETIPVAGGVDMTFREPLGVVGLIVPWNFPLQITSWKVAPALAAGNTVVLKPAELTPLTALKLERIAGEAGIPEGVLNVVVGPGEIVGKRLVEHPEVAKIAFTGSTEVGRKIMAGAAGTVKRVTLELGGKSASIVFADADLEKAAAAAPLAVFDNAGQDCCARSRILVERGAFERFMSLLEPAVKELRVGDPQDETTQMGPLISASHREKVASYVTEEAPVAIRGEAPDGKGFWYPPTVLAPVSNKDRVAREEIFGPVAAVIPFEDEEEAVRLANDTIYGLSGSVWTRDVARALRVARRVETGTLSINSNTSVRVSTPFGGFKQSGVGRELGPHALEHYTEVKNVFVATEEG

SEQ ID NO: 5477 - protein, 536 aa, Glycine max
MASSLRISRLISRSFSSTSFFSRGGNGFLGSRHCKYSTSSAIEEEPVKPSVQVEHTQLLIDGKFVDAASGKTFPTLDPRTGEVIAHVAEGHSEDVDRAVAAARKAFDHGPWPKMTAYERQRILLRAADLLEKHNDELAALETWDNGKPYEQAAKIEVPMLVRLIRYYAGWADKIHGLTVPADGPYHVQTLHEPIGVAGQIIPWNFPLLMFAWKVGPALACGNTIVLKTAEQTPLSALYAAKLFHEAGLPAGVLNVVSGFGPTAGAALASHMEVDKLAFTGSTDTGKVVLELAAKSNLKPVTLELGGKSPFIVCEDADVDQAVELAHFALFFNQGQCCCAGSRTFVHESVYDEFVEKAKARALKRVVGDPFKGGIEQGPQIDSDQFEKILRYIRSGVESGATLETGGDKLGNKGFYIQPTVFSNVKDGMLIARDEIFGPVQSILKFKDLGEVVQRANNTRYGLAAGVFTTNMDTAYTLTRALRVGTVWINCFDTFDAAIPFGGYKMSGQGREKGEYSLKNYLQVKAVVNPLKNPAWL

SEQ ID NO: 5478 - protein, 298 aa, Glycine max
MVFSANDLQEWKDFPKGLKVLLLERDNISAAEIRAKLEAMDYNVSTFCEENEALSAISSGLESFHIAIVEVSSSSGQGGFKFLENAKDLPTIMTSNNHCLNTMMKCIALGAVEFLRKPLSEDKLRNIWQHVVHKAFNARASILSESLKPVKESVVSMLQLQTDDEQHESRVSRDIEKVSRFVDNDHELSSGNDKYPAPSTPQLRQGTRLLDDGDCQEQTNCSTGKESGEHEGESKSVETTCGNLNAESTPQQRKSEITLVREEVESTPQQRKSEITLVKEEVDIVDASKGESVASPHT

SEQ ID NO: 5479 - protein, 275 aa, Bacillus cereus ATCC 14579
MHIPTTTLHNGVKMPMIGLGVYKAKEGDEVKQAVKTALEVGYRSIDTATVYENESGVGEAIRESGIPREDIFITTKVWNDDQGYEETLEAFEKSLKKLQMDYVDLYLIHWPVRGKYVDTYRALEKLYEEGKVRAIGVSNFHKHHLELLLPNCKVKPMVNQVELHPMLTQFELRNYCQDEQIQMEAWSPLMRGGEVFQHPIIQAIANKYEKTPAQVILRWDIQSGIVTIPKSVTPSRIKENFTIFDFALTEEEIRQINTLNRDLHVGTNPDKYDTL

SEQ ID NO: 5480 - protein, 340 aa, Streptococcus agalactiae NEM316
MKRIAVLTSGGDAPGMNAAIRAVVRKAISEGMEVYGINQGYYGMVTGDIFPLDANSVGDTINRGGTFLRSARYPEFAELEGQLKGIEQLKKHGIEGVVVIGGDGSYHGAMRLTEHGFPAVGLPGTIDNDIVGTDYTIGFDTAVATAVENLDRLRDTSASHNRTFVVEVMGRNAGDIALWSGIAAGADQIIVPEEEFNIDEVVSNVRAGYAAGKHHQIIVLAEGVMSGDEFAKTMKAAGDDSDLRVTNLGHLLRGGSPTARDRVLASRMGAYAVQLLKEGRGGLAVGVHNEEMVESPILGLAEEGALFSLTDEGKIVVNNPHKADLRLAALNRDLANQSSK

SEQ ID NO: 5481 - protein, 511 aa, Liquidambar styraciflua
MDSSLHEALQPLPMTLFFIIPLLLLLGLVSRLRQRLPYPPGPKGLPVIGNMLMMDQLTHRGLAKLAKQYGGLFHLKMGFLHMVAVSTPDMARQVLQVQDNIFSNRPATIAISYLTYDRADMAFAHYGPFWRQMRKLCVMKLFSRKRAESWESVRDEVDSAVRVVASNIGSTVNIGELVFALTKNITYRAAFGTISHEDQDEFVAILQEFSQLFGAFNIADFIPWLKWVPQGINVRLNKARGALDGFIDKIIDDHIQKGSKNSEEVDTDMVDDLLAFYGEEAKVSESDDLQNSIKLTKDNIKAIMDVMFGGTETVASAIEWAMTELMKSPEDLKKVQQELAVVVGLDRRVEEKDFEKLTYLKCVLKEVLRLHPPIPLLLHETAEDAEVGGYYIPAKSRVMINACAIGRDKNSWADPDTFRPSRFLKDGVPDFKGNNFEFIPFGSGRRSCPGMQLGLYALETTVAHLLHCFTWELPDGMKPSELEMNDVFGLTAPRAIRLTAVPSPRLLCPLY

SEQ ID NO: 5482 - protein, 195 aa, Zea mays
  unsure (1)..(195): unsure at all Xaa locations
MSSTYMKRMLQGIGSDQVIGKAAMDDEEHEVYGQEIPEDGDMDGADVDMAAAGDDAANVQELDEMKRKXEEMQGCDPSISTAEAKEQVDARSVYVGNVDYACTPEEVQQHFQACGTVNRVTILTDKFGQPKGFAYVEFLEQEAVQEALNLNESELHGRQIKVAPKRTNVPGMKQRPPRGYNPYHGYPYRSYGAPY

SEQ ID NO: 5483 - protein, 327 aa, Triticum aestivum
  unsure (1)..(327): unsure at all Xaa locations
MASRTAAVPEVALRSGDARPMPAIGMGTAQSPVVPDTTVKAVLEAVEVGYRHFDTASMYATERPLGEALAEAVRRGLLASREEVFVTSKLWCTQCHPHLVLPSLQESLQNLQMEYVDLYLIHWPISLKPGPVVFPVKREDAVPFDLEGVWRAMEECHRLGLAKAIGVSNFTTRHLDKLLPAATVPPAVNQVEMNPVWQQRKLREYCAEKGIHVAAYSPLGGQNWSGDGNAVLDSEVLAEIAKARGKSVAQVALRWIYEQGVTPIVKSFSKERLKENLGIFDWGLTDDDLRKIGQIPXKKIVKAETVLFSAEGEFTSADLADMEIVED

SEQ ID NO: 5484 - protein, 427 aa, Glycine max
  unsure (1)..(427): unsure at all Xaa locations
MNSERQSTTTTLLHGKYELGRVLGHGSFAKVYHARNLKTGQHVAMKVVGKEKVIKVGMMEQVKREISVMKMVKHPNIVELHEVMASKSKIYISIELVRGGELFNKVSKGRLKEDLARLYLQQLISTIDFYHKPHIYHHNPPPENLLLDERRNLKVSDFGLTAFSEHLKEDGLLHTXTCGTPAYVSPEVIAKKGYDGAKADIWSCGVILYVLLAGFLPFQDDNLVAMYKKIYRGDFKCPPWFSLDARKLVTKLLDPNPNTRTGVGSRMESSWFKKPVPRKLAAEKVDLEEEKIESQLETINAFHIISLSEGFNLSPLFEDKRREEMRFATAGTPSTVISRLEEVAKAGKFDVRSSETKVRLQGQERGRKGKLAIAADIYAVTPSFMVVEVKKDNGDTLEYNQFCSKQLRPALKDIFWNSSQNSAPASA

SEQ ID NO: 5485 - protein, 340 aa, Xanthomonas axonopodis pv. citri str. 306
MKALVKREANKGIWLEQVPVPTPGPNEVLIKLEKTAICGTDLHIYLWDEWSQRTIEPGLTIGHEFVGRVAELGSAVTGYQIGQRVSAEGHIVCGHCRNCRGGRPHLCPNTVGIGVNVNGAFAEYMVMPASNLWPIPDQIPSELAAFFDPYGNAAHCALEFDVIGEDVLITGAGPIGIIAAGICKHIGARNVVVTDVNDFRLKLAADMGATRVVNVSKTSLKDVMADLHMEGFDVGLEMSGNSRAFNDMLDCMYHGGKIAMLGIMPRGAGCDWDKIIFKGLTVQGIYGRKMYETWYKMTQLVLSGFPLHKVLTHQLPIDDFQKGFDLMEEGKAGKVVLSWN

SEQ ID NO: 5486 - protein, 511 aa, Thermobifida fusca
MDDALVQRLTRHVVSSTGRTVVTTAPFTGEPLATLPQSSASDVTEAFRRARAAQREWAQRSPRQRIAPFLRFSDLLLDRQTEILDILQWETGKARKNAFEEVCDAALGTLHYARHAPRLLRRRRAPGAIPLATRTRVNYQPKGVVSVITPWNYPLTLPVADAVPALLAGNAVVAKPDTQTALSALWAIDLLVEAGLPRDLWLVVLGEPAEIGDPLVDEADYVAFTGSSATGARIAQRAASRLIGCSAELGGKNPMIVCADADLDRTVHGAVAACFSNSGQLCISMERLYVHDSIYDAFVEKFVAETKNLRLGADLDYSADLGSLTSQRQFDRVVAHVEDARSKGATVLAGGRPRPDVGPLFYEPTVLTGVDESMTLCAEETFGPVVSLYRFTTEDEAIERANHTPYGLNASVWTRDVARGRRIAERLKAGTVNINEGYGAAFASYGAPMGGMKRSGLGRRHGVEGILRYTEAQTVSSQHVVGLSGPPGMSAETLSRVMTTGIRLMRALRIR

SEQ ID NO: 5487 - protein, 189 aa, Glycine max
MISGHWNVTDVCNALLGGFAAITAGCSVVEPWTAIVCGFVASVVLIACNKLAEKVKFDDPLEAAQLHGGCGAWGVIFTALFAKKEYVSQVYGEGRAHGLFMRGGGKLLAAHVIQILVIVGWVSATMGPLFWGLNKLKLLRISSEDELAGMDLTRHGGFAYAYEDDESHKHGIQLRKVGPNASSTPTTDE

SEQ ID NO: 5488 - protein, 227 aa, Thermus thermophilus
  unsure (1)..(227): unsure at all Xaa locations
MERPLESYKKEAAHAAIAYVQDGXVVGLGTGSTARYAVLELARRLREGELKGVVGVPTSRATEELAKREGIPLVDLPPEGVDLAIDGADEIAPGLALIKGXGGALLREKIVERVAKEFIVIADHTKKVPVLGRGPVPVEIVPFGYRATLKAIADLGGEPELRXDGDEFYFTDGGHLIADCRFGPIGDPLGLHRALLEIPGVVETGLFVGXATRALVAGPFGVEELLP

SEQ ID NO: 5489 - protein, 309 aa, Mesorhizobium loti MAFF303099
MRDPYEVLGVAKNASAKDIKSAYRKLAKKHHPDQNPNDPKAKDRFAAANQAYEIVGDEKNRAAFDRGEIDADGKPRFQGFEGAAGGGDPFAGFRRQQGAGGSRFEFRSGRPGGDPFDGNSDIFSQIFGDAFSGARGAGMGDRRQPATAADLNVTLDVTIEEAATAEKVTAMFPDGRKVAVKLPAFVEDGQTIRLKGQGEQGPGQPGDALVKIHIRRHPRYRIEGRDLHADVPVSLADAVLGAKVPVETPTGRLAVNVPAWSSSDKVLRLKGRGLPEKAGGHGDLYAHVRIMLPEGGDSALEALLRGQKG

SEQ ID NO: 5490 - protein, 270 aa, Secale cereale
MDVADIASPSGQQEQGHRTVSSEPPKRPAGRTKFHETRHPLYRGVRRRGRVGQWVCEVRVPGIKGSRLWLGTFNTAEMAARAHDAAVLALSCRAACLNFADSAWRMLPVLAAGSFGFGSPREIKAAVAVAVIAFQRKQIIPVAVAVVALQQQQVPVAVAVVALKQKQVPVAVAVVALQQLHVPVAVAVVALQQQQIILPVACLAPEFYMSSGDLLELDEEHWFGGMDAGSYYASLAQGMLVAPPDERARPENGEQERRPDAAMELFVRLI

SEQ ID NO: 5491 - protein, 375 aa, Arabidopsis thaliana
MPLSLQSPPCATLSASIQKGRWKTLAAGFSVTPLPAVNFSLRRSIPRILASASSSSSPSSSSLEAGENNELNAVSAFSEIVPDTVVFDDFERFPPTAATVSSALLLGICGLPDTIFRNAVDMALADSSCAGLETTESRLSCFFNKAIVNVGGDLVKLVPGRVSTEVDARLAYDTNGIIRKVHDLLRLYNEIDVPHERLLFKIPATWQGIEAARLLESEGIQTHITFVYSFAQAAAAAQAGASVIQIFVGRLRDWARNHSGDNEIESAIKSGEDPGLALVKRSYNYIHKYGYKSKLMAAAVRNKQDLFSLLGVDYVIAPLKVLQSLKDSPAIPEDEKYSFVRKLTPETATHYHFTNKELVKWDQLSLASSMGPASV

SEQ ID NO: 5492 - protein, 499 aa, Corynebacterium efficiens YS-314
MRLWGAGGLAEAMSTENFVSNQIFINGWVDGTSERSTTTLNPFNGEEVATIRNASQEDVDKAYATAAEVQKEWAAVPPVKKARILNKAAQVIEDNRDAIVELIRRESGSTALKANIEAGLAMASLREAATFPARITGQILPSNTPGKSNYVFREPLGVVGVISPWNFPFALSMRSVAPALACGNGVVLKPASDTPIVGGTLLAHIFEAAGLPTGLFNVVVGAGSEIGDYFVEHRIPRLISFTGSTPVGKQVGATATGGKYIKKVALELGGNAPMVVLSDADINKAVAAASMGSFLHQGQICMAVNRIIVEAPVYDQFLEGFAARVSKVAYGDQLDDATMVGPIVNDSQVESVSGKIDLAREQGARAVVSGPIEGRVIAPHVFADVTPDMELFREEIFGPVVGVVKADNEEHALELANDTEFGLSSAVFTEDLQRGINFARRVEAGMTHINDITVNDEAHVMFGGEKNSGLGRFNGEWAIDEFTTDHWVSVTTGTDAYPI

SEQ ID NO: 5493 - protein, 238 aa, Glycine max
MGRGKIPIRRIENSTNRQVTFCKRRNGLLKKTRELSILCDAEVGVIVFSSTGKLYEYSNTSMETIIERFNKQNNNHHRLMDATSAIKGEAASLRQQLQHLQENHRQLMGEELSGLGINQLKHLENQLQMSLNNVRNKKDHIFSDEIKELQQKGSLIRRQNEELHKKIDLIHNENAELKKVIEARHKEEERAALKPPCAIKNRYDTLDPNSLQQRQSQPQPSEPSAEVMIMGYSLKLKM

SEQ ID NO: 5494 - protein, 243 aa, Rhodobacter sphaeroides 2.4.1
MDLVQDGMKLGLGTGSTAAWMVRCLAERVREEGLRVQGVPTSTRTAELARALGIQVVTLDEAKWLDLTIDGADEFDADFNLIKGGGAALLQEKIVATASDRMVVIADAAKEVAHLGAFPLPVEVIPFGWQSTKMLIEETLEGMDVLGREVTLRLSGDAPLLTDEKNYILDLHLKRIGEPRPLALALNQIAGVVENGLFIDICDTVVVGHGDGRVSLRDLQSGQAEEGSIDMDRARNIFADLGD

SEQ ID NO: 5495 - protein, 375 aa, Arabidopsis thaliana
MPLSLQSPPCATLSASIQKGRWKTLAAGFSVTPLPAVNFSLRRSIPRILASASSSSSPASSSLEAGENNELNAVSAFSEIVPDTVVFDDFERFPPTAATVSSALLLGICGLPDTIFRNAVDMALADSSCAGLETTESRLSCFFNKAIVNVGGDLVKLVPGRVSTEVDARLAYDTNGIIRKVHDLLRLYNEIDVPHDRLLFKIPATWQGIEAARLLESEGIQTHMTFVYSFAQAAAASQAGASVIQIFVGRLRDWARNHSGDTEIESAIKSGEDPGLALVKRSYNYIHKYGYKSKLMAAAVRNKQDLFSLLGVDYVIAPLKVLQSLKDSPAIPDDEKYSFVRKLTPETATHYHFTNKELVKWDQLSLASSMGPASV

SEQ ID NO: 5496 - protein, 82 aa, Brassica napus
  unsure (1)..(82): unsure at all Xaa locations
MRKKLDTRFPAARXKKIMQADEDVGKXALAVPVLVSKALELXLQDLCDRTYEITLQRGAKTVSSLHLKNCVETYNXFDFLRE

SEQ ID NO: 5497 - protein, 161 aa, Triticum aestivum
MSDSEEHHFESKADAGASKTYPQQAGTIRKNGHIVIKNRPCKVVEVSTSKTGKHGHAKCHFVAIDIFNGKKLEDIVPSSHNCDVPHVNRTDYQLIDISEDGFVSLLTESGGTNDDLRLPSDEALLTQIKDGFAEGKDLIVTVMSAMGEEQICALKDIGPKN

SEQ ID NO: 5498 - protein, 237 aa, Hordeum vulgare subsp. vulgare
MPSRPAPFIHRLRLLRSAVVSPSSAPLPCSRPRLAVPFAQPPIRAPAFAAAGSPLLRPVGARFSLSSNMAAAASSASSVHDFTVEDASGKDVDLSTYKGKVLLIVNVASQCGLTNSNYTELAQLYEKYKDQGFEILAFPCNQFGGQEPGTNEEIVQFACTRFKAEYPIFDKVDVNGDNVAPVYKFLKSSKGSLFGDNIKWNFSKFLVDKDGNVVDRYAPTTSPLSIEKDIKKLLASS

SEQ ID NO: 5499 - protein, 131 aa, Candida albicans SC5314
MSAEDIQMEDASNNSEQEQIQEQEYDINKIKILPGSSEDGTSASFQIIDEDHTLGNALRYIIMKNPEVEFCGYSIPHPSENKLNIRIQTYGNISAVEALHQGLDNLSELCGAIEDKFDDAIKAGGYSTKEP

SEQ ID NO: 5500 - protein, 171 aa, Hordeum vulgare subsp. vulgare
MGAAESSSKLGGSVHDFVVKDVRGNDVELSRYKGKVLLIVNVASRCGLANSNYTEMGQLYEKYREKGLEILAFPCNQFAGQEPDSDEKIVEFACDRFQAQFPIFRKVDVNGNNAAPLYKFLKSERGGLFGERIKWNFTKFLVDKEGHVMNRYAPTWSPLGIENDIKKLLEV

SEQ ID NO: 5501 - protein, 165 aa, Hordeum vulgare subsp. vulgare
MAAASSATSVHDFTVKDASGKDVDLSVYKGKVLLIVNVASQCGLTNSNYTELSQLYPKYKDQGFEILAFPCNQFGGQEPGTNDEIVQFACTRFKAEYPIFDKVDVNGNNVSPLYKFLKSSKGGFFGDSIKWNFSKFLVDKEGHVVDRYAPTTSPMSIEKDIKKLL

SEQ ID NO: 5502 - protein, 115 aa, Zea mays
SAAGRPGNQARDNRCVNESIAMASRLVAAAASSSSSLSSASPLARLISRRGLAGAADGHGSAKVPLWKDPLSPSKWKEEHFVLASLSMWGVIFYGGYKLFSGKKEAKTEAASPQA

SEQ ID NO: 5503 - protein, 505 aa, Mesorhizobium loti MAFF303099
MNKVEFSRPVKAPFDKRYGNFIGGKWTEPRSGRYFENHSPVNGQLLCEVARSDADDIEAALDAAHAAKDAWGRTSVAERSLILNRIADRMEENLDLLACAETWDNGKPIRETTVADLPLAIDHFRYFASAVRGQEGSLSQIDDDTVAYHFHEPLGVVGQIIPWNFPLLMACWKLAPALAAGNCVVLKPAEQTPAAILLWADLIGDLLPPGVLNIVNGFGLEAGKPLASSPRIAKIAFTGETTTGRLIMQYASQNLIPVTLELGGKSPNIFFKDVVAEDDDFFDKAIEGFVMFALNQGEVCTCPSRALIHESIYDRFMERALKRVEAIVQGDPLDPATMIGAQASSEQLEKILSYIDIGRQEGAEVLTGGARNVLPGDLAGGYYVKPTVFRGHNKMRIFQEEIFGPVVSVTTFKDDDEALSIANDTLYGLGAGVWTRDGNRAYRFGRAIQAGRVWTNCYHAYPAHAAFGGYKQSGIGRETHKMMLDHYQQTKNMLVSYSPKKLGFF

SEQ ID NO: 5504 - protein, 292 aa, ASPERGILLUS NIDULANS FGSC A4
MSEITHPTIKDGWFSEQSEMWPGQAMNLRVNQILHHEKSKYQDVLVFESSDYGTVLVLDNVIQCTERDEFSYQEMITHLAMNSHPNPKKVLVIGGGDGGVLREVVKHETVEEAILCDIDEAVIRVSKKYLPGMSIGFQHPNVKVHVGDGFEFLKQRQNEFDVIITDSSDPEGPAESLFQKPYFELLRDALRDGGVITTQAENQWLHLPLIADLKKACNEVFPVAEYAYTTIPTYPSGQIGFMVCCKDANRNVKEPVRTWSREEEERLCRYYNQDIHRASFVLPNFARKALGN

SEQ ID NO: 5505 - protein, 479 aa, Pyrococcus abyssi GE5
MCLIAGGFNVSREDAIKIINLGKHRGPDSFGFWSERQMLKSDNFSDVSEIEGGEIALIQCRLAMTGSKSYTQPFYNEIILVHNGEIYNHESLRKYLIERGVAFETDVDSEVILRLLEYLVFDRKLKVEEAIKLSMKMLRGDYAVAFFFNGKFYLFRDPLGVRPLYYSSRGHFASEKKVLWGLGEDAEPVLPGEIVSISKHGITRVRGFNVFSIRTQGKDYFNGLQNLLIDSVKVRASKKVGVLFSGGVDSSLIALIASRYSDVILYTSGTEDSKDVEWARRVAEELGLKLRESLFSREDIENEIERIMFAIEEPNPMNLAIAIPLYFSTKRAREDGVKVLLSGQGADELFGGYAKYLQNPGLMLKDVEELGERNLARDDKVAMLNGVETRYPYLDLPFAILALNVPLELKIRDGKRKFILREIAKSLGLPEWVAEREKKAAQYGSNAQKILEKIAKSRGVKLKGLADILFSKVFHGIQN

SEQ ID NO: 5506 - protein, 306 aa, Glycine max
HGKKPTTKLSFKWKEGHGNATLFSSKMLLQRPIAGSQVPFCPIEKKMLDCWSQIDASTFKVRGVNYFKDKKKDFAPNYPAYYPFGVDVFLSPRKVDHIARFVELPVMSSSAKFPPILVVNVQVPLYPATLFQGETDGEGMSIVLYFKLSESYSKELPQTFQESIRRLMDDEVEKVKGFPVDTIAPFRERLKILGRVINLEDLHLSAAERKLMQAYNEKPVLSRPQHEFYMGENYFEIDLDMHRFSYISRKGFEAFLDRLKVCTLDVGLTIQGNKQEELPEHVLCCIRLNGIDYMNYQQLGLTQDPL

SEQ ID NO: 5507 - protein, 113 aa, Rickettsia sp. 'midichlorii'
ANEAVINMLKEIGSSENIPKYIAKAKDKNDPFRLMGFGHRVYKNYDPRAAVLKETCKEVLKELGQLENNPLLQIAIELEAIALKDEYFIERKLYPNVDFYSGIIYKAMGIPSQ

SEQ ID NO: 5508 - protein, 480 aa, Glycine max
  unsure (1)..(480): unsure at all Xaa locations
MSIPIPHRQLFIDGDWKVPVLKNRIPIINPSTQHIIGDIPAATKEDVDLAVAAAKAALSRNKGADWASASGSVRARYLRAIAAKITEKKPELAKLEAIDCGKPLDEAAWDIDDVAGCFEFYADLAEKLDAQQKAHVSLPMDTFKSYVLKEPIGVVALITPWNYPLPMATWKVAPALAAGCAAILKPSELASVTCLELAEICKEVGLPPGVLNILTGLGPEAGAPLAAHPXDVDKIAFTGSSATGSKIMTAAAQLIKPVSLELGGKSPIIVFEDVDLDKAAEWTIFGCFWTNGQICSATSRLIVHASFESIATEFLNRIVKWVKNIKISDPLEEGCRLGPIVSEGQYEKILKFISNAKSEGATILTGGSRPEHLKKGFFVEPTVITDVTTSMQIWREEVFGPVLCVKTFSTEEEAIDLANDTVYGXCSAVISNDLERCERITKAFNAGIGGIRYSEPCVTQSPWGGIITSGDVRRLEECGG

SEQ ID NO: 5509 - protein, 491 aa, Musa acuminata
GTRRDRERERERERERERERERERERERERERERERVHLLGSSSLHRSLWELSKKHGPLMHLKFGRVPVVVVSSPEMAKEVLKTHDLECCSRPSLLSFSKFSYGLSDVAFIPYGERWRQLRKLCTVELLSTRKINSFRDIRKEEMERVTKLICSHVRASSMVNLSELLLSLSCNMTCRSAFGSGFDDGGDIQLHDMLREAQEELSGLFLSDYLPLLGWVDRLSGMRSRLERAFLKLDSIYQRRIDYHQDRLRQQGKEDGDVLDALLRMQKDEEGLTEDHIKGVLMDIFIAGTDTSSATVEWAMAELIRQPELMKRAQDEVRRCVGSKGEVEESDLHQLHFFKCVIKETMRLHPPAPLLLPRETMQHFKLNGYDILPKTWMYVNAWAIGRDPNSWGRPHVFDPERFMHDSTEASGQDFKLIPFGEGRRICPGKNLGMLMVELVLANLLYSFDWHLPPGMVKEDISMEEAPGVPVHREYALCLMATKYDATTA

SEQ ID NO: 5510 - protein, 507 aa, Musa acuminata
MALPPLLLSPLPSLLVVLALLSSLLLAGRKARGGSATWKLPPGPPKLPVIGHLHLLGSSLLHRSLWELSKKHGPLMHLKFGRVPVVVVSSPEMAKEVLKTHDLECCSRPSLLSFSKFSYGLSDVAFIPYGERWRQLRKLCTVELLSTRKINSFRDIRKEEMERVTKLICSHVRASSMVNLSELLLSLSCNMTCRSAFGSGFDDGGDIQLHDMLREAQEELSGLFLSDYLPLLGWVDRLSGMRSRLERAFLKLDSIYQRRIDYHQDRLRQQGKEDGDVLDALLRMQKDEEGLTEDHIKGVLMDIFIAGTDTSSATVEWAMAELIRQPELMKRAQDEVRRCVGSKGEVEESDLHQLHFFKCVIKETMRLHPPAPLLLPRETMQHFKLNGYDILPKTWMYVNAWAIGRDPNSWGRPHVFDPERFMHDSTEASGQDFKLIPFGEGRRICPGKNLGMLMVELVLANLLYSFDWHLPPGMVKEDISMEEAPGVTVHREYALCLMATKYDATTA

SEQ ID NO: 5511 - protein, 242 aa, Capsicum chinense
MWNQPYRKYDVEAGTAPLYPEMLESPELRWSFTRKVYSIITIQLLLTIAVASVVVTVHPISHFFATTSAGIGVYIVLVITPFITLCPLYYYHQKHPVNYLLLGLFTVSLAFTVGLTCAFTSGKVILEAVILTTAVVISLTAYTFWAAKRGQDFNFLGPFLFGALVVLLLFSLIQIFFPLGKISVMIYGGLASIIFCGYIVYDTDNLIKRYTYDEYIWAAISLYLDVINLFLSLLTIFRAADN

SEQ ID NO: 5512 - protein, 93 aa, Zea mays
MPGSHGRPLAIDGLGRPPPVDPFQGLKCTASLPDSARSFISLGNVSNGGRILCMQVWPDYGTKKFQTLSYLPQLTTEDLLKQMDSLLCNRWIP

SEQ ID NO: 5513 - protein, 275 aa, Musa acuminata
HEVDWLRGMRSRLERAYVKLDSIYQRLIDYHQDRFRLQGKEDEDILDALLRMQKDEEGVTEDHIKGVLMNIIIAGTDTSTATVLWTMAELIRQPELMKRAQDEVRGCVRSKGEVEESDLDQLHFLKCVIKETMRLHPPVPLLLPRETMQHFKLNGYDILPKTWMYVNAWAIGRDPNSWARPHVFDPERFMHDSTEASGQDFKLIPFGEGRRICPGKNLGMLMVELVLANLIYSFDWHLPPGMVKEDISMEEAAGFTMNREYALCLMATKYDSPTA

SEQ ID NO: 5514 - protein, 375 aa, Arabidopsis thaliana
MPLSLQSPPCATLSASIQKGRWKTLAAGFSVTPLPAVNFSLRRSIPRILASASSSSSPSSSSLEAGENNELNAVSAFSEIVPDTVVFDDFERFPPTAATVSSALLLGICGLPDTIFRNAVDMALADSSCAGLETTESRLSCFFNKAIVNVGGDLVKLVPGRVSTEVDARLAYDTNGIIRKVHDLLRLYNEIDVPHERLLFKIPATWQGIEAARLLESEGIQTHITFVYSFAQAAAAAQAGASVIQIFVGRLRDWARNHSGDNEIESAIKSGEDPGLALVKRSYNYIHKYGYKSKLMAAAVRNKQDLFSLLGVDYVIAPLKVLQSLKDSPAIPEDEKYSFVRKLTPETATHYHFTNKELVKWNQLSLASSMGPASV

SEQ ID NO: 5515 - protein, 197 aa, Azotobacter vinelandii
MSTNLMSQALAVDAARRARAKGQKPVALWLTGLSGAGKSTIANALELALVERGRHTYLLDGDNVRMGLCRDLGFSDADREENIRRVAEVAHLFVDAGLIVISAFISPFRRDRAIAREVIGNGAFIEIFVDTPLAECERRDPKGLYGKARQGLIKNFTGIDSAYEPPVDPHIRIDTLKDDLPTAVARILDYLDKWERA

SEQ ID NO: 5516 - protein, 445 aa, Streptomyces turgidiscabies
MSGIRRMRDRWRTDEAGLTSAAEDFGHCVHAKPAAVLAPRSPAEVQEAVSYAAGQGRPLAARGAGHSTYGQGQAADGIVLDMTELDTVHEVGPDHIVVDAGARWSDVVAATLPGLRTPPVLTDFLGTTVGGTLSVGGFGGASHRHGAQTDNVVDLDVVTGTGALVRCSPLGNRDLFDCVRGGLGQFGVIVRATLRLVPAFDKTHWYKFLYNDLTVFLAEQTRLAHEGMFDHVEGRVLPLGSGPWRYRLDLAKHCLTGDPPDERSVLRSLHPECRAEPVEVLPHAEFLDRMAAGEQELRRTGEWFHPHPWLNMLLPAPTAEGFVRQALDGLTQESTGRSGLVIVYPLPTAKLATPFVRKPTDATAFMVALLRTALPGEQGPMIASNRQIYEQALAAGGVAYPVNALPMSPEDWRRHFGPLWNDFARAKRRFDPNIILTPGHGIRLI

SEQ ID NO: 5517 - protein, 309 aa, Triticum aestivum
HASATTAVPEVALRSGDARPMPAIGMGTAKLPVVPETTVKAVLEAVVVGYRHFDTASMYATERPLGEALAEAVRRGLLASREEVFVTSKLWNLQMEYVDLYLIHWPISLKPGPAVFPVKREDAVPFDFAGVWRAMEECHRLGLAKAIGVSNFTTSHLHKLLAAATVPPAVNQVEMNPVWQQRKLREYCAEKGIHVAAYSPLGGQNWSGDGNAVLDSEVLAEIAKARGKTVAQVALRWIYEQGATPIVKSFSKERLKENLGIFDWGLTDDDLRKIGQIPQKKIVRAETVLFSAEGEFTSADLAEMEIVEE

SEQ ID NO: 5518 - protein, 363 aa, Crucihimalaya himalaica
  unsure (1)..(363): unsure at all Xaa locations
IRCKAAVAWEAGKPLVXEEVEVAPPQKHEVRIKILFTSLCHTDVYFWEAKGQTPLFPRIFGHEAGGIVESVGEGVTDLQPGDHVLPIFTGECGDCRHCHSEESNMCDLLRINTERGGMIHDGESRFSIKGKPIHHFLGTSTFSEYTVVHSGQVAKINPDAPLDKVCIVSCGLSTGLGAVLNVAKPKKGQSVAVFGLGAVGLAAAEGARIAGASRIIGVDLNSKRFDEAKKFGVTEFVNPRDHDKPVQQVIAEXTDGGVDRSVECTGSVQAMIQAFECVHDGWGVAVLVGVPSKDDAFKSHPMNFLNERTLKGTFFGNYKPKTDIPGVVEKYMNKELELEKFITHTVPFSXINKAFDYMLKGES

SEQ ID NO: 5519 - protein, 337 aa, Sulfolobus tokodaii
MGFTVALIQGDGIGPEIVSKSKRILAKINELYSLPIEYIEVEAGDRALARYGEALPKDSLKIIDKADIILKGPVGESAADVVVKLRQIYDMYANIRPAKSIPGIDTKYGNVDILIVRENTEDLYKGFEHIVSDGVAVGMKIITRFASERIAKVGLNFALRRRKKVTCVHKANVMRITDGLFAEACRSVLKGKVEYSEMYVDAAAANLVRNPQMFDVIVTENVYGDILSDEASQIAGSLGIAPSANIGDKKALFEPVHGAAFDIAGKNIGNPTAFLLSVSMMYERMYELSNDDRYIKASRALENAIYLVYKERKALTPDVGGNATTDDLINEIYNKLG

SEQ ID NO: 5520 - protein, 116 aa, Zea mays
  unsure (1)..(116): unsure at all Xaa locations
PQPQRTVRRAQRYGEGQRNRRVLVARFDDVSLPPEGHPQGGGGGGXEEPSSSRGGGSLCSGYLSLPALLLVGVTASLVILPLVLPPLPPPPSMLMLVPVAMLLLLLVLAFMPTSST

SEQ ID NO: 5521 - protein, 430 aa, Mycobacterium bovis AF2122/97
MSVLIRGVRPYGEGERVDVLVDDGQIAQIGPDLAIPDTADVIDATGHVLLPGFVDLHTHLREPGREYAEDIETGSAAAALGGYTAVFAMANTNPVADSPVVTDHVWHRGQQVGLVDVHPVGAVTVGLAGAELTEMGMMNAGAAQVRMFSDDGVCVHDPLIMRRALEYATGLGVLIAQHAEEPRLTVGAFAHEGPMAARLGLAGWPRAAEESIVARDALLARDAGARVHICHASAAGTVEILKWAKDQGISITAEVTPHHLLLDDARLASYDGVNRVNPPLREASDAVALRQALADGIIDCVATDHAPHAEHEKCVEFAAARPGMLGLQTALSVVVQTMVAPGLLSWRDIARVMSENPACIARLPDQGRPLEVGEPANLTVVDPDATWTVTGADLASRSANTPFESMSLPATVTATLLRGKVTARDGKIRA

SEQ ID NO: 5522 - protein, 151 aa, Glycine max
  unsure (1)..(151): unsure at all Xaa locations
LKSMAGFPTTKTNNDITCIVSNRGKLQCMHVWPPLGKKKAETLCYLTDLDDAQLANEVQYLLRKGWIPCWELESEHGCMYREHNMSPGYYYGLYXTMWKLTMLGCTDAYHVLNELQEANTAYPSGYIRIIGFDSVRQLLCISYIIYKRSRF

SEQ ID NO: 5523 - protein, 345 aa, Ralstonia solanacearum
MKALVYEGPGKISLENKPKPELQAPGDAVVRVTLTTICGTDLHIIKGDVPTCEPGRTLGHEGVGVIESVGAAVTSLKPGDHVLISCISSCGKCANCRRGMYSHCETGGWILGHRIDGVQAEYVRVPHAETSLYKVPPGVDEEALVMLSDIFPTGFECGVLNGRVQPGSTVAIVGAGPIGLASLLTAQFYSPARIIMIDTNVARLEVASGLGASDCINVTRENAAAAVKRLTDGMGVDCAIEAVGVPATFELCQELVAPGGVIANIGVHGVKADLHLETLWSQNIAITTRLVDTVSTPMLLKTVRAGKLLPGQLITHRFKLDDILAAYDTFRNAGETHALKVIIAT

SEQ ID NO: 5524 - protein, 107 aa, Lilium longiflorum
RAAPAQASMVAPFVGLKSSSAFPVTQKPATGLPTLPSNGGRVQCMKVWPIVGKKKFETLSYLPTLPVEALLKQIEYLIRSGWVPCLEFSLVGFVSRDYHQSPGYYDG

SEQ ID NO: 5525 - protein, 263 aa, Glycine max
MATFSKERENFVYVAKLAEQAERYDEMVEAMKKVAKLDVELSVEERNLFSVGYKNVVGSRRASWRILSSIEQKEDSKGNELHVKHIRDYRNKVELELSNICSDIMIILDEHLIPSTNIAESTVFYYKMKGDYYRYLAEFKAGNEKKEVADQSLKAYQTASTTAESELQPTHPIRLGLALNFSVFYYEILNSPERACHLAKQAFDDAVSELDTLNEDSYKDSTLIMQLLRDNLTLWTSDIPEEGEDLKMESAARVDQGEDELGR

SEQ ID NO: 5526 - protein, 489 aa, Burkholderia cepacia R18194
MSTVQETLALKDPSLFRQQAYVNGEWQGATNGETFEVRNPATGGLLGTVPAMGTAETRHAIEAANAAWPAWRKKTAKERAVVLRKWHDLMMEHADDLALILTTEQGKSLAEAKGEIGYAASFLEWFAEEGKRVYGDTIPTPASDKRIVVTKEAIGVCAAITPWNFPAAMITRKVGPALAAGCPIVVKPAEATPFSALAMAVLAERAGVPAGVFSVVTGDPKAIGGEMTSNPIVRKLSFTGSTPVGRLLMSQCAATVKKVSLELGGNAPFIVFDDADLDAAVQGAIASKYRNSGQTCVCTNRFYVHEAVYDQFAQKLAAAVGQLKVGRGTEPGVTQGPLINEAAVLKVEAHIEDALAKGATVVTGGKRHALGHGFFEPTVLTGVTPAMKVAKEETFGPLAPLFKFGSDDEVIRLANDTEFGLAAYFYSRDIGRVWKVAEALEYGMVGVNTGLISNEVAPFGGVKQSGLGREGSHYGIDDYVVIKYLCLAV

SEQ ID NO: 5527 - protein, 140 aa, Ralstonia solanacearum
MSQLRRYDPFAIEPAGDIFQGLLRSFRGGMDSALPFKVDVTESDTAYSVVAEIPGAKKEDIDVTVDRGTVMISAKVERQSEKKEGERVIRSERYSGSMQRMFTLEAGVDENKVEATYESGLLRVTLPKKEVSPQQRITIR

SEQ ID NO: 5528 - protein, 283 aa, Listeria monocytogenes str. 1/2a F6854
MKTVKLNNGVEVPILGFGTYQITDAAEAEQAVKDAIKTGYRHIDTAQSYMNEEAVGRGIAASGVDRKELFITTKIWVENVSYKGVMSSFDRSLKRLGLDYVDLLLIHQPFNDVYGAWIAMEELQASGKIRAIGVSNFSPDRVIDLAAFNEVTPQVNQIEVNPFQQQTANLAILRKEGVAIEAWAPFAEGKNDVFNNPVLTKIGAKYGKSAAQVILRWLVEQDIIVLAKSVKPERMAQNLAIFDFELTEADKEEIAGLNQGESQFFSHADPEMVKWMASRKLNV

SEQ ID NO: 5529 - protein, 315 aa, Haemophilus ducreyi 35000HP
MNQLDALREMTVVVADTGDIEAIRQYQPQDATTNPSLILSASALSQYAPLIDDAIRYAKSKSGNKAQQLVDAEDKLAVNIGLEILKIVPGRISTEVDARFSYDTEKTIAKARKLIGLYNEAGVANNRILIKIAATWQGIRAAEILEKEGINCNLTLLFSQAQARACAEAGVYLISPFVGRILDWYKANEKKEYAAAEDPGVISVTAIYNYYKQYNYKTIVMGASFRNVGEITEIAGCDRLTIAPPLLKALAESNETLVRKLDYQGEILDRPAPLSEAEFYWQHNQDPMAVDKLAEGIRKFAIDQEKLEEMLSAKL

SEQ ID NO: 5530 - protein, 140 aa, Bordetella parapertussis 12822
MRRAALLLGLWLLLGAPAAADIAQRELRLAHSLRCLVCQNQTLAESNAPLAHDMRALIRQQLADGRSDEEVMQFFEDRYGDFVRYEPPFKPATWLLWLGPFALLLAGFVVLWRALARRPGAAPLTDAQRARAERFLDEES

SEQ ID NO: 5531 - protein, 462 aa, Bacillus cereus ATCC 14579
MTINSKTIEKSSYTYEELAEKNKAYVWHPFTQMKDYLEEDPVIIERGEGRKLYDVNGNEYWDGVSSIWLNVHGHQVPELDEAIREQLNKIAHSTMLGLANVPSILLAEKISEVVPDGLKKVFYSDSGSTAVEIAIKMAFQYWQHKGKPKKQRFVTLKEAYHGDTIGAVSVGAIDLFHQVYSSLLFDAIKMPYPYTYRSPYGNNKEEIVKSHLEEMEELLKEKHEEVAAIIVEPLMQGAGGMITMPKGYLKGLRDLCTKYNVLFITDEVATGFGRTGKMFACEHENVTPDILTAGKGLTGGYLPIAVTVTTDEIYNAFLGEYEEQKTFFHGHSYTGNPLGCAVAIANLELYEKTNLIEEVARKTDYVAAQLEKLFAYKHVGDIRQCGLMVGIELVKNKETKEAFDWTERVGVQVCKRSRELGMILRPLGNTIVFMPPLASTFEEIDDMLRILYKAISDVTEGE

SEQ ID NO: 5532 - protein, 437 aa, Methylobacillus flagellatus KT
MTTSNASLLQRSLAAVWHPCTQMKQHEALPLVPVKRGEGVWLEDFDGKRYLDGVSSWWVNLFGHNHPHIKQAIKAQLDQLEHVILAGFTHEPVVRLSEQLSLLTGLGHSFYASDGASATEIALKMSFHYWRNHGETAKTRFLSLQNGYHGETLGSLSVTDIALFKDTYAPLLREESIALPSPDWRRAEPGESAEQYALRCAGQAEAYIAQHHAGIAAVIVEPLVQCATGMAMYHPVYLQRLRALCDRYQVHLIADEIAVGFGRTGTMFAIEQAGIKPDFICLSKGITGGYLPLSVVQTTQDIYAAFYDDSVTRGFLHSHSYTGNALACSAALATLDIFAQHDVLNSNRRKAGYLNRRLAAWRDLPIRHLRNTGMIWAFDVTPSRPGFQQRFYQAALQRGLLLRPVGNTVYFMPPYIISEEEMDWMLEQARGALEESL

SEQ ID NO: 5533 - protein, 496 aa, Burkholderia cepacia R1808
MRAQNKFKTGLDIAKYTAKIMRADMAAYDADPSKYTQSLGCWHGFIGQQKMISIKKHFNSTERRYLYLSGWMVAALRSEFGPLPDQSMHEKTSVSALIRELYTFLRQADARELGGLFRELDAAKDAAAKAAIQQKIDNHVTHVVPIIADIDAGFGNAEATYLLAKQFIEAGACCIQIENQVSDEKQCGHQDGKVTVPHEDFLAKIRAIRYAFLELGVDDGIIVARTDSLGAGLTKQIAVTNAPGDLGDQYNSFLDCEELSGDQLGNGDVVIKRDGKLLRPKRLPSNLFQFRAGTGEARCVLDCITSLQNGADLLWIETEKPHIAQIAGMVNEIRKVIPNAKLVYNNSPSFNWTLNFRQQVYDALKAEGKDVSAYDRAQLMSVEYDDTELAKLADDKIRTFQADASREAGIFHHLITLPTYHTAALSTDNLAKEYFGEQGMLGYVAGVQRKEIRQGIACVKHQNMSGSDIGDDHKEYFSGEAALKAAGKDNTMNQFS

SEQ ID NO: 5534 - protein, 444 aa, Oryza sativa (japonica cultivar-group)
MRMGKYEMGRALGEGHFGKVKLARHADTGAAFAIKILDRQRILAMKIDEQIKREIATLKLLKHPNVVRLHEVSASKTKIYMVLEYVNGGELFDKIALKGKLSEKEGRKLFQQLMDAVSYCHEKGVYHRDLKPENVLVDAKGNIKVSDFGLSALPQNQRKDGLLHTTCGSPNYIAPEVLLNRGYDGSLSDIWSCGVILYVMLTGNLPFDDQNTVVLYQKILKGDARIPKWLSPGAQDILRKILDPNPITRLDITGIRAHEWFRQDYTPAMPFDDDDDNNISDGNLHMTENQDIETSPAISQINAFQLIGMSSCLDLSGFFEKEDVSERKIRFVSNYSPTSLFEKIESTVTEKGFQVQKNSGKLKVIQVCKEPANPRGHGNLLISAEVFEINESLYVVELKRSSGDCSLYRQLCASLSEDLGICKRQQLLKKDSMRQDLCRYNSSF

SEQ ID NO: 5535 - protein, 282 aa, Zea mays
MATANGSSKGPFEVPKVEVRFTKLFIDGKFVDAVSGKTFETRDPRTGEVIASIAEGGKADVDLAVKAAREAFDNGPWPRMTGYERGRILHRFADLIDEHVEELAALDTVDAGKLFAVGKARDIPGAAHLLRYYAGAADKVHGATLKMAQRMHGYTLKEPVGVVGHIVPWNYPTTMFFFKVGPALAAGCAVVVKPAEQTPLSALFYAHLAREAGVPAGVLNVVPGFGPTAGAAVAAHMDVDKVSFTGSTEVGRLVMRAAAESNLKPVLLELGSYGGGGGGWRD

SEQ ID NO: 5536 - protein, 335 aa, Xanthomonas axonopodis pv. citri str. 306
MTQTITVIRGDGIGPEIMDATLFVLDALQAGLTYEYADAGLVALEKHGDLLPESTLASITKNKVALKSPLTTPVGEGFSSINVAMRRKFDLYANVRPAKSFPNTKSRFADGVDLITVRENTEGAYLSEGQTVSEDGETAFSGTRITRKGSERIVRYAFELAKSTGRKKVTAVHKANIIKSTSGLFLKVARDVAAQYPEIEFQEMIVDNTCMQLVMRPEQFDIIVTTNLFGDIISDLCAGLVGGLGLAPGANIGLDAAIFEAVHGSAPDIAGQGKANPCALLLGAAQMLDHIGQPQNAERLREAIVATLEAKDSLTPDLGGTGNTMGFAKAIASRL

SEQ ID NO: 5537 - protein, 474 aa, Aspergillus niger
MASTLRLGTSALRSTSIAAKPVVQSAAFNGLRCYSTGKAKSLKETFAEKLPAEIEKVKKLRKEHGSKVIGEVTLDQAYGGARGVKCLVWEGSVLDSEEGIRFRGRTIPECQELLPKAPGGQEPLPEGLFWLLLTGEIPTEQQVRDLSAEWAARSDLPKFIEELIDRCPSTLHPMSQFSLAVTALEHESAFAKAYAKGINKKDYWNYTFEDSMDLIAKLPTIAAKIYRNVFKDGKVAPIQKDKDYSYNLANQLGYGDNNDFVELMRLYLTIHSDHEGGNVSAHTTHLVGSALSSPMLSLAAGLNGLAGPLHGLANQEVLNWLTKMKAAIGNDLSDEAIKNYLWSTLNAGQVVPGYGHAVLRKTDPRYVSQREFALRKLPDDPMFKLVSQVYKIAPGVLTEHGKTKNPYPNVDAHSGVLLQYYGLTEANYYTVLFGVSRALGVLPQLIIDRALGAPIERPKSYSTEAFAKLVGAKL

SEQ ID NO: 5538 - protein, 397 aa, CANDIDATUS RICKETTSIA TARASEVICHIAE
PILKASIGEDVIDISRVSSEADCFTYDPGFMSTASCRSTITYIDGDKGILRHRGYDIKDLAEKSDFLEVAYLLIYGELPSSEQYNNFTKKVAVHSLMNERLHYLFQTFCNSSHPMAIMLAAVGSLSAFYPDLLKFKEADYELTAIRMIAKIPTIAAMSYKYSIGQPFIYPDNSLDFTENFLRMMFATPCTKYEVNPVIKNALNKIFILHADHEQNASTSTVRIAGSSGANPFACISTGIASLWGPAHGGANEAVINMLKEIGSSENIPKYIAKAKDKDDPFRLMGFGHRVYKNYDPRAAVLKETCKEVLKELGQLENNPLLQIAIELEASALKDEYFIERKLYPNVDFYSGIIYKAMGIPSQMFTVLFAIARTVGWMAQWKEMHEDPEQKISRPRQL

SEQ ID NO: 5539 - protein, 197 aa, Brassica napus
MSASRFIKCVTVGDGAVGKTCLLISYTSNTFPTDYVPTVFDNFSANVVVNGATVNLGLWDTAGQEDYNRLRPLSYRGADVFILAFSLISKASYENVSKKWIPELKHYAPGVPVILVGSKLDLRDDKQFFVDHPGAVPITTAQGEELRKLIDAPTYIECSSKSQENVKAVFDAAIRVVLQPPKQKKKKSKAQKACSIQ

SEQ ID NO: 5540 - protein, 265 aa, Sulfolobus tokodaii str. 7
MIREVLRFINKSDLVIEVIDAREPDLTRSKKLEEYALNRERKILIVLNKADLIPREILEGWKKIFENEGKNAIYISATMHLGTKILRDKIKELLRGKEGTVIFVGYPKTGKSSIINALKGKHSASTSKIPMAYGYTKTIQKFKIDSKIYAWDSPGIIPPDGNELEKVIRGISVEKLEDPVKAGEMLLLRIIKYNPNAIKETYNITFNSPYEFFEKLALKRGWLYKSTKEPNIEEAAKAFIRDYHKGKIIYYVPPLSMNDDKDSSV

SEQ ID NO: 5541 - protein, 297 aa, Zea mays
MAAAAVTSNGGAVAANGPAPGRLASVYSEVQTSRLLHTLPLPSVLRSNFSVVDGPASSAAGNPDEIAKLLPNLVGQPSASLVPTAEPAATRPLKIGVVLSGGQAPGGHNVICGIFDYLQERAKGSTLYGFKGGPAGIMKCKYVELTSDFVYPYRNQGGFDMICSGRDKIETPEQFKQAEDTANKLDLDGLVVIGGDDSNTNACLLGEYFRSRNMKTRVIGCPKTIDGDLKCKGVPTSFGFDTACKIYSEMIGNVMTDARSTGKYYHFVRLMGRAASHITLECALQTHPNAALIGEEV

SEQ ID NO: 5542 - protein, 445 aa, Rubrobacter xylanophilus DSM 9941
MTQEPQGRSDGAASTVQKDGSLSVTDNRTGRSYEIEIKDGTVRSMDFRQIKVDEDDFGLMTYDPGYTNTASCRSAITYIDGERGILQHRGIPIEELCEHSTYLEVAYLLIHGHLPTEEELSQWVYDITHHTYVHENIKSFMDGFRHDAHPMGILLASVGALSTFYPEASDIDDEEQRNMAAIRLIAKMPTIAAFAYRHSLGLPYVYPDNDLSYTGNFLSMLFKMAEPKYEPDPRLEKALDVLFILHADHEQNASTSAVRTVGSTRADPYTAVAAGVAALYGPLHGGANVAVLKMLQRIGSVKNIPDFLETVKQGKERLMGFGHRVYKNYDPRARIIKSHVDEVLEATGKESPWLDIAVELEKRALDDEYFTSRKLYPNVDFYSGLIYEALGIPTEAFTVMFAIPRTSGWIAQWMEMLRDPELKIARPRQIYTGPRDQHYVPMSER

SEQ ID NO: 5543 - protein, 461 aa, Mycobacterium bovis AF2122/97
MATATTQRPLKGPAKRMSTWTMTREAITIGFDAGDGFLGRLRGSDITRFRCAGRRFVSISHPDYVDHVLHEARLKYVKSDEYGPIRATAGLNLLTDEGDSWARHRGALNSTFARRHLRGLVGLMIDPIADVTAALVPGAQFDMHQSMVETTLRVVANALFSQDFGPLVQSMHDLATRGLRRAEKLERLGLWGLMPRTVYDTLIWCIYSGVHLPPPLREMQEITLTLDRAINSVIDRRLAEPTNSADLLNVLLSADGGIWPRQRVRDEALTFMLAGHETTANAMSWFWYLMALNPQARDHMLTELDDVLGMRRPTADDLGKLAWTTACLQESQRYFSSVWIIAREAVDDDIIDGHRIRRGTTVVIPIHHIHHDPRWWPDPDRFDPGRFLRCPTDRPRCAYLPFGGGRRICIGQSFALMEMVLMAAIMSQHFTFDLAPGYHVELEATLTLRPKHGVHVIGRRR

SEQ ID NO: 5544 - protein, 141 aa, Triticum aestivum
  unsure (1)..(141): unsure at all Xaa locations
MAPAVMASSATTVAPFQGLKSTAGLPVGRRSSGSLSSVSNGGRIRCMQVWPIEGIKXFETLSYLPPLSTGGLLKQVDYLDSLKVXXCXRXNKVGSSPVEHNXXPGYXDGRYWDKLELXXFRVEXXTQGAEQXEEXKKDTLP

SEQ ID NO: 5545 - protein, 494 aa, Brassica napus
MGSASKEYEFLSEIGLSSSHNLGNYVGGKWLGNGPLVSTLNPANNQVLPIAQVVEASLEDYEIGLKACEEAAKTWMQVPAPKRGDIVRQIGDALRSKLDYLGRLLSLEMGKILAEGIGEVQEVIDMCDFAVGLSRQLNGSVIPSERPNHMMLEMWNPLGIVGVITAFNFPCAVLGWNACIALVCGNCVVWKGAPTTPLITIAMTKLVAEVLEKNHLPGAIFTAMCGGAEIGEAIAKDTRIPLVSFTGSSKVGLTVQQTVSARSGKTLLELSGNNAIIVMDDADIQLAARSVLFAAVGTAGQRCTTCRRLLLHESVYDKVLEQLLTSYKQVKIGDPLEKGTLLGPLHTPESKKNFEKGIEVIKSQGGKVLTGGKAVEGEGNFVEPTIIEISSDAAVVKEELFAPVLYALKFKTFEEAVAINNSVPQGLSSSIFTRSPDNIFKWIGPMGSDCGIVNVNIPTNGAEIGGAFGGEKATGGGREAGSDSWKQYMRRSTW

SEQ ID NO: 5546 - protein, 443 aa, Arabidopsis thaliana
MEQQLKTDGLNLSIRDAVKEDRISELPEDLLLQILSDIPTENVIATSVLSKRWRSLWKMVPNLTFDFTFDPKYHQTFSENLYRSLTSHEASVLESLQLNFTRGIDGLNIGMWIATAYVRHVRKLVLVSFGDVRDKRARFRSALFNFNDTLDILEIQDYILLDLPSPVCLKSLRELRLYEVHFKDEASVCNLLCGCPSLEVLSVHRERNVDVETFTIVVPSLQRLTIYDFCIGGGKGGYVINAPSLKYLNIVGFEGLDFCLIENAPELVEAEISDVSHIANENILESLTSVKRLSLESPIKIKFPTGKVFDQLVYLDVLTKEREWWNLLSRMLESSPKLQILKLTGLSCIEKGLDGQNWNPPKCVPECLLFHLEKFLWTGYEWQRGDEKEVATYILENARLLKKATFSTKRIDLENLEKRREMLNELASVARASDSCHLVFHSI

SEQ ID NO: 5547 - protein, 186 aa, Pyrococcus abyssi GE5
MFLGEFSIMRYLVPLLVFMVLGMGCLGGGGEEMVKVSSVFGNDEFIPAKYTCEGIDVNPPLRIEGISENAKSLVIIVDDPDAPLGTFTHWIAWNIPPVEEIPEGIPKQGEVEKPIHMIQGRNDFGRIGYNGPCPPRGHGVHHYHFKVYVLDTTLNLRPGATREELEKAMEGHIIQFGELVGLYERK

SEQ ID NO: 5548 - protein, 235 aa, Streptochaeta angustifolia
EMRRIENKISRQVTFAERRNGLPKKAYELSLLCDAEVALIIFSSGRLFEFSSASCMYRTLERYRTCNYRSHEAAAPIETESNYQEYLKLKTRVEFLQTTQRNLPGEDLGPLNMKELEQLENQIESSLKNIRSTKNQTLLDQLFDLRHKQQQLQDLNKDLRRKLQEVGGHDNALQVWEDGGPSGSAGHEHLQGLLQPSEIDPSLQIGYHQAYLDQLNNGQIAQYPNGHLPSSAPWI

SEQ ID NO: 5549 - protein, 447 aa, Arabidopsis thaliana
MEQKCKIGGEGLRNRGLVNEEDRISELPEALLLLILSSLPTETVIATSVLSKQWKSLWKLVPNLKFDSKYHYHYTFSDNVFRSLISHKAPVLDSLHLKVEDKDDALDVGILIGIAFSRHMRKFVLKITLLEESFVRFPSAWCSCNDTLEILELKYCILLDFPSLVCLKSLRKLYLYHVRFNDEESVCNLLCGCPSLEDLVVHRHSTTDVESYTIAVPSLQRLTIYDDYYGEGVGGYVINAPSLKYLNIDGFNGLEFCLIEKAPELVEAKISAVFEIANENIMDSLTSAKCLSLHLAPFKIKYPTGKIFYQLLSLELRAYSYEWWNLLWFMLDSSPKLQILKLVDPYQFPKEDCSVGWEWSRPKCVPECLLFHLETFVWTRYEWQREDEKAVATYILKNARCLKKATLSTKPIGSEELEKLGKRREMLNELATQASPSNSCNLVFESE

SEQ ID NO: 5550 - protein, 286 aa, Burkholderia cepacia R18194
MDASEFSKFLKAALPPQATAGAALTVTEVEIPGYAQDIVLRLYRRPDKTGLPVVLYFHGGGFVRGSLEDADFAARFLAERLPALVVSVDYSLAPAFPFPAAPEDAYRAAVWAATRARAFGGNPKKIGVAGHDAGGQLANCLAFIARDRGEVQIVAQALFGPMLDPSMTRIGDADRLASDITPRECAACYRAYLPQAAQRMHPYAAPLESVRLAGLPPTLVVTAQNDVLHVEAEKYASCLISSGVLTQVIRYPDITHAALATHEAAFEEAVRFFQCRFQARQPNRSE

SEQ ID NO: 5551 - protein, 271 aa, Neurospora crassa
MSVVSLLGVNVMNNPAKFTDKYLFEITFECLEHLEKDLEWKLTYVGSATSDNYDQELDSLLVGPIPVGVNKFIFEAEPPDTKRIPIDELLGVTVILLTCAYDGREFVRVGYYVNNEYESEELINDPPPKPVIEKIRRNVLAEKPRVTRFAIKWDSEASAPPEFPPEQPEADEVADEEEYGADELAEQSSIADPAVNGGMEVEGQPNGAIVIEEDEMSEDGSVDLENESEDELDGEGDAEGELEQGQDEDIEMGDEMEIDDHPKQQGMAMAQ

SEQ ID NO: 5552 - protein, 222 aa, Chasmanthium latifolium
ELRRIENKISRQETFAKRRNGLLKKAYELSVLCDAEVAHIIFSSRGRLYEFSTSSCIYKTLERYRSCSYASEASAPMEAELSNYQGYLKLKTRVEFLLTTQRNLLGEDLGPLSAKELEQFENQVEISLKHIRSTKSRQLLDQLFELKRKEQQLQDANKDLRRKIQDTSGENMLRMTCKDIGSSGSSSGHARDAKHQELPHSGVCDPSLRIGYQAYMDQLNNE

SEQ ID NO: 5553 - protein, 221 aa, Pennisetum glaucum
  unsure (1)..(221): unsure at all Xaa locations
EMRRLENKISRXVTSAKRRNGLLKKAYEVAVLCDAEVALIIFSSRGRLFEFSTSSCMYETLEQYRSCNFTSEASSAPIEAELSNYEEYLKLKTRIEFLQTTQRNLLGEDLGPLSTKELEQLENQIEISLKHIRSSKNQQMLDQLFELKRKEQQLQDSNKDLRKKIQETSEENVLRPTFQDLGACGSSGHPRDANQEYLRQLXCDPTLRIGYQSYIDHLSNE

SEQ ID NO: 5554 - protein, 203 aa, Solanum demissum
MDILGNLYIDPLPLVIPTTTSSTTFDNNSNEKVMLLLASKIPKRRGDRKKFHETRHPVYRGVRWKNFEKWVSEVRVPAKKSRIWLGTFPNAEMAAKAHDVAVMALKGRSACLNFADSTWRLPVPASAAVKDIQKAAAEAAEAFRVSESLERENSEEVVINNDDHYVVDSGWRLVIPASAVARDIQKAVAEAFCPSESSKGEYF

SEQ ID NO: 5555 - protein, 354 aa, Bacillus cereus ATCC 14579
MEKRIVCLAGDGVGPEVMESAKEVLHMVERLYGHHFHLQDEYFGGVAIDLTGQPLPQRTLAACLASDAVLLGAVGGPRWDSAKERPEKGLLALRKGLGVFANVRPVTVESATAHLSPLKNADEIDFVVVRELTGGIYFSYPKERTEEVATDTLTYHRHEIERIVSYAFQLANKRKKKVTSIDKANVLESSKLWRTVTEEVALRYPNVEVEHILVDAAAMELIRNPGRFDVIVTENLFGDILSDEASVLAGSLGMLPSASHAEKGPSLYEPIHGSAPDIAGKNKANPIAMMRSVAMMLGQSFGLTREGYAIEEAVSAVLKSGKCTADIGGTETTTSFTKAVIQEMEEQALVGRGR

SEQ ID NO: 5556 - protein, 182 aa, Zea mays
  unsure (1)..(182): unsure at all Xaa locations
PDDGAARAGPSRRTGYVDFLSRVNRVEGPATQXDAPHPWLNPSSPRATSPLERRHQGHARDGIDGPMLVYPMLKSKWDPNTSVALPEGEVFYLVALLRFCRSGGPAVDELVAQNGAILRACRANGYDYKAYFPSYRGEADWARHFGAARWRRFVDRKARYDPLAILAPGQKIFPRVPASVAV

SEQ ID NO: 5557 - protein, 399 aa, Halobacterium sp. NRC-1
MHSLDLIDMGAIPDDRVMSDLEGDVKAIVPTHGHLDHIGAISKLAHRYDAPIVGSPFTIELVKGEIESEQKFGVENDLVKMEAGGTMEIGDRCELEFVHVTHSIIDAINPVLHTPEGAVVYGLDKRMDHDPVLEDPIDMERFREIGREGEGVLCYIEDCTNAGKKGRTPSESTARRHLKDVLTSVADYDGGIVATTFSSHISRVSSLVEFAKEIGREPILLGRSMERYSGTAERMGRVNFPDDLGMFGHRKSVDRAFKRVMNEGKENFLPIVTGHQGEPQAMLTRMGRGETPYDIEDGDKIIFSASVIPEPTNKGQRYQSEQLLRMQGARIYDDIHVSGHLREEGHYQMLDALQPQHLIPAHQDMKGMAPYAKLAKSQGYKIGRDLHMTENGNTIQLVE

SEQ ID NO: 5558 - protein, 317 aa, Glycine max
MAGLVVSSQCFLKLLLVVSVFHVSFAARRLNELVQDQSQLLHYHNGPLLYGKIAVNLIWYGNFKPSQKAIITDFVTSLSSPASQSSQPSVATWWKTTEKYYHLSPRKASLSLSLGDQILDETYSLGKSLTGKNLVQLASKGGQRNSINVVLTSADVAVEGFCMSRCGTHGSSASHLKKNSKSYKFAYIWVGNSETQCPGQCAWPFHQPIYGPQSPPLVAPNNDVGLDGMVINLASLLAGTATNPFGNGYFQGPAEAPLEAASACPGVYGKGAYPGYAGDLLVDSTTGASYNVKGANGRKYLVPALYDPSTSSCSTPV

SEQ ID NO: 5559 - protein, 394 aa, Corynebacterium glutamicum ATCC 13032
MTSTFSPTEKEKTMSDSQVRKGLNGVISDYTSISKVMPESNSLTYRGYAVEDLVENCSFEEVIYLLWFGELPTTEQLRTFNTTGRSYRSLDAGLISLIHSLPNTCHPMDVLRTAVSYMGTFDPDPFTRDADHIRSIGHNLLAQLPMVVAMDIRRRSGEEIIAPDHNKGIASNFLSMVFGNDDGSVANSADDIRDFERSLILYAEHSFNASTFSARVISSTRSDTYSAITGAIGALKGPLHGGANEFVMHTMLDIDDPNNAADWMGKALDRKERIMGFGHRVYKNGDSRVPSMEKSMRSLAARHRGQKWVHMYESMQEVMEARTGIKPNLDFPAGPAYYMLGFPVDFFTPLFVLARVSGWTAHIVEQFENNALIRPLSAYNGVEEREVVPISERT

SEQ ID NO: 5560 - protein, 416 aa, Salmonella typhimurium LT2
MESKVVVPVEGKKITLQNGKLNVPENPIIPFIEGDGIGVDVTPAMLKVVDAAVEKAYKGERKISWMEIYTGEKSTQVYGQDVWLPAETLDLIRDYRVAIKGPLTTPVGGGIRSLNVALRQELDLYVCLRPVRYYQGTPSPVKHPELTDMVIFRENSEDIYAGIEWKADSADAEKVIKFLREEMGVKKIRFPEHCGIGIKPCSEEGTKRLVRAAIEYAITNDRDSVTLVHKGNIMKFTEGAFKDWGYQLARDEFGGELIDGGPWLKIKNPNTGKEIVVKDVIADAFLQQILLRPAEYDVIACMNLNGDYISDALAAQVGGIGIAPGANIGDECALFEATHGTAPKYAGQDKVNPGSIILSAEMMLRHMQWFEAADLIVKGMEGAIAAKTVTYDFERLMEGAKLLKCSEFGDAIIANM

SEQ ID NO: 5561 - protein, 146 aa, Triticum aestivum
  unsure (1)..(146): unsure at all Xaa locations
MAPTVMASSATSVAPFQGLKSTAGLPVSRRSNGASLGSVSNGGRIRCMQVWPIEGIKKFETLSYLPPLSTEALLKQVDYLIRSKWVPCLEFSKVGFIFREHNASPGYYDGRYWTMWKLPMFGCTDATQVINEVEEVKKXNXDXMSE

SEQ ID NO: 5562 - protein, 295 aa, Triticum aestivum subsp. spelta
MKTLLILTILAMAITIGTANMQVDPSSQVQWPQQQPVPQPHQPFSQQPQQTFPQPQQTFPHQPQQQFPQPQQPQQQFLQPQQPFPQQPQQPYPQQPQQPFPQTQQPQQLFPQSQQPQQQFSQPQQQFPQPQQPQQSFPQQQPPFIQPSLQQQVNPCKNFLLQQCKPVSLVSSLWSMIWPQSDCQVMRQQCCQQLAQIPQQLQCAAIHTVIHSIIMQQEQQQGMHILLPLYQQQQVGQGTLVQGQGIIQPQQPAQLEAIRSLVLQTLPTMCNVYVPPECSIIKAPFSSVVAGIGGQ

SEQ ID NO: 5563 - protein, 387 aa, Oryza sativa (japonica cultivar-group)
MEGGGAKDGSAAAAQTRGSGDDGSHKPLPPCCLKAKAAAAESEAKCHATVVSGWFTEPRSHSGKTSKVQYFNNPMWPGEAHSLKVENILYQGKSPYQEILVFESSTYGNVLVLDGIVQLTEKDECAYQEMVTHLPLCSIPSPKSVLVVGGGDGGVLREIARHASVENIDICEIDQLVIDVCKDFFPQLSVGFKDPRVQLHVGDAVDFLRNAPEGKYDAIIVDSSDPIGPAQELVEKPFFQTIARALKPGGVLCNQAESMWLHTHLIQDMLSICRETFKGAVHYAWTSVPTYPSGVIGFLLCAKEGPAVNFLSPVNPIEKLEGAMEAGREIRFYNSEVHRAAFVLPTFVRRELESHNTCAEKDKSETKPVAKPKKMKIMPNSAIPTAS

SEQ ID NO: 5564 - protein, 107 aa, Glycine max
  unsure (1)..(107): unsure at all Xaa locations
MDSPSRPSVIIVGAGISGIAAAKVLAENGIEDLVILEASDRVGGRIRKESFGGVSVELGAGWIAXVGGPQPNPVWELGVQFGLRTCFFDYSNARYNIYDRSGNIIPS

SEQ ID NO: 5565 - protein, 507 aa, Lolium rigidum
MNLEVAFLHEYASPRALVVAVVLVLVAVHLARSTSRAERLRRKLPCPRFTLPVIGHLHLIGSLPHVGLRDLARKHGPDVMLLRLGAVPTLIVSSPSAARAVLRTHDHVFASRPDTVVGDILFVGSTNVGHSPYGEYWRQVRKIITTHVLTAKKIRANLPYREQEARLALASVREAAAAGTAVDLTHLFSHFAHDMVSQAVAGRIHREDRWGKLFHDLFVGNGQLLGGFNLDDCFPSLARLGIGSANIAKQRKRWDDLLDEVIDRHTSTPMEKGDEPDFIDVMLSVQDEYKLTRNNIKSILMDMFQAGTDTTFIWLDYAMAELARAPQVMAKLQAEVRRCSTTNQLLTQEDLSSMSYLKAVMKETMRLHPPGPLLLPHASIADCEVEGYVVPAGTRVIINVWAIGRHASSWERAEEFVPERFLEGSVDANSDFYGNDFRLLPFGSGRRMCPGINFATLTFEIILANLIYHFDWELPEGSPGVDMTEAFGMDVHRKENLLLVPRVAKIV

SEQ ID NO: 5566 - protein, 500 aa, Mesorhizobium sp. BNC1
MELQDYAQHIGGEAVAAADGETYITHNPANGRPWGRFPAGKSADVARAVAAAMEALRGSWGSMAPTRRGRLLIEWARAISVNAEKIARLETAQNGKIFRDCLNQARDLENWLYYYGGQADKIEGTVVPLLRQSILNYTLREPLGVIGIITPWNSPASLTMSSAAPALAAGNAIVIKPSEVTPASILEIARLAEEAGIPKGVINVVTGGRNAGEALVDHPDIAKIAFTGSVEAGRAIAERAGKRLIGCTLELGGKSPNIVFPDADLARAEAGVLGGIFASTGQTCVAGSRAYVHESLFDSFVERLATRARQIVLGDPMDPRTQMGPVSTELQLQKDERLVAEALSEGAVKIAGGERVSPPGCEDGYFYAPTVLTKLNPAASILKTEVFGPVLSVLPFKSEDDVVAMANDSPFGLAAGFWTRDFARAHRLARRLEAGTVWINMYRAFAFNSPMNGHKQSGIGWQNGSEAIFQYLKTKSVWCETDEDYGDMFARAQPASTGRE

SEQ ID NO: 5567 - protein, 564 aa, Zea mays
  unsure (1)..(564): unsure at all Xaa locations
MASSHIILPKEEEEEAAAAVAEAGLGAAVEADHDHRRYQEQAPGKAALPFSATCVRISRDSYPNLRALRNASTMSLHDDDAAFVKLEEGDYGYVLDDVPHLTDYLPDLPTFPNPLQDHPAYSTVKQYFVNADDTVPEKVVVQKNSPRGVHFRRAGPRQRVYFESEEAKACIVTCGGLCPGLNTVIRELVCGLSHMYNVSNVFGIQNGYKGFYSSNYLPMTPKSVNDIHKRGGTVLGTSRGGHDTKKIVDNIQDRGINQVFIIGGDGTQKGAYEIYKEIRRRGLQVAVAGIPKTIDNDIAVIDKSFGFDSAVEEAQRAINAAHVEASSAENGIGLVKLMGRYSGFIAMYATLASRDVDCCLIPESPFYLEGEGGLFEYIDRRLKENNHMVIVVAEGAGQDLIAQSIPAADQQDASGNKLLLDVGLWLTHKIKDYCKSKKMEMTIKYIDPTYMIRAIPSNASDNVYCTLLAHSAIHGAMAGYSFTVGMVNGRHAYIPFHRVTSTRNKVRITDRMWAXLLSSTNQPSFLSQKDIDAAREADKAANRMKSREDVSKKQSTPVLANGEK

SEQ ID NO: 5568 - protein, 246 aa, Brassica napus
MNIAHTIFGVFGNATALFLFLAPSITFKRIIKNKSTEQFSGIPYPMTLLNCLLSAWYGLPFVSKDNTLVSTINGTGALIERVYVLIFLFYAPKKEKAKIFGVFTAVLAVFATVALVSLFALHGNARKLFCGIAATVFSIIMYASPLSIMRLVIKTKSVEYMPFFLSLFVFLCGTSWFIYGLIGRDPFVAIPNGFGCALGTLQLILSIIYCGNKGEKSAEKDAKSLEMKGEEKKQNVVNGKQQEQQV

SEQ ID NO: 5569 - protein, 453 aa, Escherichia coli CFT073
MSFDLIIKNGTVILENEARVVDIAVKDGKIAAIGQDLGDAKDVMDASGLVVSPGMVDAHTHISEPGRSHWEGYETGTRAAAKGGITTMIEMPLNQLPATVDRASIELKFDAAKGKLTIDAAQLGGLVSYNIDRLHELDEVGVVGFKCFVATCGDRGIDNDFRDVNDWQFFKGAQKLGELGQPVLVHCENALICDALGEEAKREGRVTAHDYVASRPVFTEVEAIRRVLYLAKVAGCRLHVCHVSSPEGVEEVTRARQEGQDVTCESCPHYFVLDTDQFEEIGTLAKCSPPIRDLENQKGMWEKLFNGEIDCLVSDHSPCPPEMKAGNIMKAWGGIAGLQSCMDVMFDEAVQKRGMSLPMFGKLMATNAADIFGLQQKGRIAPGKDADFVFIQPNSSYVLTNDDLEYRHKVSPYVGRTIGARITKTILRGDVIYDIEQGFPVAPKGQFILKHQQ

SEQ ID NO: 5570 - protein, 430 aa, Mycobacterium avium subsp. paratuberculosis str. k10
MSVLLRGVRLYGEGDRVDVLVDDGQIADIGAGLDIPDTADVIDATGQVLLPGFVDLHTHLREPGREYAEDIETGSAAAALGGYTAVFAMANTNPVADSPVVTDHVWHRGQQVGLVDVHPVGAVTMGLAGKELTEMGMMAAGAAQVRMFSDDGVCVHDPLVMRRALEYATGLGVLIAQHAEEPRLTVGAVAHEGPTAARLGLAGWPRAAEESIVARDALLARDAGARVHICHASTAGTVEIVKWAKQQGISITAEVTPHHLMLDDSRLASYDGRNRVNPPLREAADAAALRRALADGVIDCVATDHAPHAEHEKCVEFSAARPGMLGLQTALSIVVHTMVRPGLLTWRDIAKVMSENPARIANLPDHGRPLEVGEPANLTVVDPDASWTVAGSDLASRSANTPYEAMTLPATVTATLLRGKVTARDGKCPA

SEQ ID NO: 5571 - protein, 162 aa, Zea mays
  unsure (1)..(162): unsure at all Xaa locations
QVIVVTXGERILGLGDLGCQGMGIPVGKLALYTALGGVRPSACLPITIDVGTNNEDLLKDEFYIGLKQRRATGQEYSEFLDEFMAAVRQNYGQKVLVQFEDFANHNAFTLLEKYRTNHLVFNDDIQGTAAVVLAGIIAALKSVGGTLADHTFLFFSASYTIK

SEQ ID NO: 5572 - protein, 510 aa, Glycine max
  unsure (1)..(510): unsure at all Xaa locations
MPSFMAFLSHPYFFAALSASLTLLVVQLLFRKLNKRHSRKKYHPVAGTIFNQMLNFNRLHHYMTDLAAKHRTYRLLNPFRYEVYTTEPTNVEYILKTNFENYGKGLYNYHNLKDLLGDGIFTVDGEKWREQRKISSHEFSTKMLRDFSISIFRKNVVKLVNIVSEAATSNSTLEIQDLLMKSTLDSIFQVAFGTELDSMCGSSQEGKIFADAFDTSSALTLYRYVDVFWKIKKFLNIGSEAKLRKTTEILNEFVFKLINTRILQMQISKGDSGSKRGDILSRFLQVKEYDPTYLRDIILNFVIAGKDTTAATLSWFMYMPCKCPALPEMAAGVVGQAPYTTCLSSYNEFVYSVTDEALERMNYLHAAXTETLRLYPAVPVDAKICFSDDTLPDGYSVNKGDMVSYQPYAMGRMKFIWGDDAEDFRPERWLDENGIFKPESPFKFTAFQAGPRICLGKEFAYRQMKIFAAVLLGCFRFKLKDEKKNVTYKTMINLHIDEGLEIKAFNRYRD

SEQ ID NO: 5573 - protein, 248 aa, Triticum vavilovii
QQQPVPQPHQPFSQQPQQTFPQPQQTFPHQPQQQFPQPQQPQQQFLQPQQPFPQQPQQPYPQQPQQPFPQTQQPQQLFPQSQQPQQQFSQPQQQFPQPQQPQQSFPQQQPPFIQPSLQQQVNPCKNFLLQQCKPVSLVSSLWSMIWPQSDCQVMRQQCCQQLAQIPQQLQCAAIHTVIHSIIMQQEQQQGMHILLPLYQQQQVGQGTLVQGQGIIQPQQPAQLEAIRSLVLQTLPTMCNVYVPPECSI

SEQ ID NO: 5574 - protein, 274 aa, Triticum aestivum
SINRKGYDGAKADIWSCGVILFVLLAGYLPFQDKNLMNMYKKIGKAEFKCPSWFSSDIRRLLLRILDPNPSTRISIERIMEHPWFRKGLDAKLLRYNLQAKDAVPAADMTATSDSLSCSNSATEGKDQEAKKLANLNAFDIISLSTGLDLSGMFEDNDKKRESKFTSTNSASTIVSKIEDIAKCMRLKLVKKDGGMMRMESFKPGRKGVMSIDAEIFEVTPDFHLVELKKTNGDTIEYQKVLNQEMRPALKDIVWAWQGEQQPQPQPQPQQQPC

SEQ ID NO: 5575 - protein, 254 aa, Triticum vavilovii
QWPQQQPVPQPHQPFSQQPQQTFPQPQQTFPHQPQQQFPQPQQPQQQFLQPQQPFPQQPQQPYPQQPQQPFPQTQQPQQLFPQSQQPQQQFSQPQQQFPQPQQPQQSFPQQQPPFIQPSLQQQVNPCKNFLLQQCKPVSLVSSLWSMIWPQSDCQVMRQQCCQQLAQIPQQLQCAAIHTIIHSIIMQQEQQEQQQGMHILLPLYQQQQVGQGTLVQGQGIIQPQQPAQLEAIRSLVLQTLPTMCNVYVPPECSI

SEQ ID NO: 5576 - protein, 238 aa, Zea mays
PAVSRYQKKEFHDETCRKIKALHLYDCLRANKATSAWGVEARVPFLDKSFISVAMDIDPEWKMIKRDLGRIEKWVIRNAFDDEERPYLPKHILYRQKEQFSDGVGYSWIDGLKDHASQHVSDSMMMNAGFVYPENTPTTKEGYYYRMIFEKFFPKPAARSTVPGGPSVACSTAKAVEWDASWSKNLDPSGRAALGVHDAAYEDTAGETPASADPVSDKGLRPAIGESLGTPVASATAV

SEQ ID NO: 5577 - protein, 876 aa, Zea mays
MDLLSTLLRRLCLCPPLAGITPARRRSLSDDDDDSAHAHAHTHPHHHHLRGRLHRRPRRRHEPQPHGHLLLPTSDPYAAVVVAGPHETTVARTYVFRNSEAPRWEASFLLPLAHAATGLEFHVKDADPFGSDLIGVAWLPAAAVLASAAAPIESQWLDLARPDARGPPAPGGGSAIRVSAAFVPAAASRGRSGVGVPAYFPLRRGCDVRLYQDAHVAAGELEGVGVVPGFLPGRCWEDLCMAVLGAQRLVYVAGWSVHTTVRLTREAMSPEMAAKVAELEELGGEPVEHMSLGELLKYKSQEGVRVLLLVWDDRTSHNNFFVKMLFGRSIVLQLCMAWVEKLSATSAAAAVQVVGTLYTHHQKCVLVDTPASESTRRITAFLGGLDLCAGRYDTPSHRLFRDLQTVFHGDVYNPTFGGDVNGPRQPWHDLHCRLDGPAAYDILKNFEQRWRKATKLREMFGGKAAHRKDDALLKLERIPWILSPTKPKQQPPSAAADTGAADHDDDERDQPALHVLPDGDPERWHAQVFRSVDAGSVKRFPRPWERAEMARRHLVGDKNLAVERSIHAAYVAAIRSAERFVYVENQYFIGGSYAWPSYRNGGACNLVPMEIALKVASKVRAGEPFAAYVVLPMWPEGNPGSGPAQEILFWQNQTMEMMYSVVAAALEGKGGHPQEHLNFYCLGNREPAEDAGDGNKWAPADPLDDATTSSAAAHARRHRRFMVYVHSKGMIVDDEYVIIGSANINQRSLAGSRDTEIAVGAYQPDHTGACPRGKVHGYRMSLWEEHLGKEAVRRPEVLRPESPRCVKLVNRIARDNWRRYAADDDKLGPLQGHLLRYPVHVRADGRVEPLPGNELFPDVGGRVVGAPNNLPDYLTM

SEQ ID NO: 5578 - protein, 470 aa, Zea mays
  unsure (1)..(470): unsure at all Xaa locations
MARSGREAEPGEEERKLVLGKYELGRLLGQGTFAKVYYARDLSAGAGTGHSCSVAIKVIDKARLRRTEGMVEQLRREISIMRMVRHPNVVGIREVLASRSRVFVVMEYARGGELFAKVARGRLDEDHARRYFQQLGSPAVGFCHXRGVAHRDLKPENLLLXDRRGRLKVTDLPGLGRACPSSCATTAWLHTQCGNPRVRRRPRCSGSAGYDGARADLWSCGVVLYVLLCGFLPFQHDNYVKLYQKIFKADYQVPPWVSGDARRLIARXLLVVDPAKRASIAEIMCTPWFRKGFVPPVLSPPVTPKKQQLDEGAALFDNDDDDNSNSNHSGATSPRSCNAFQLISSMSSGFDLSGLFESEQKTATVFTARAPAATVVEKLESVARRXGFEVTRGKGWKVRMEAKAEGTNGRLAATAEVLEVAVDVTVVEFVHDAGDALDFNKFCAVDVRPGLTEIVWAWQGDSPAAAVGTA

SEQ ID NO: 5579 - protein, 229 aa, Brassica napus
MLRSSFRLLYITRTNLLVRASPSSLSRLPSKFTSAKPLVCSHHQIPLSTTGAIHSSFEHSMAASSEPKSIYDFTVKDAKGNDVDLSIYKGKVLLIVNVASQCGLTNSNYTELAQLYQKYKDHGFEILAFPCNQFGNQEPGSNEEIVQFACTRFKAEYPIFDKVDVNGDKAAPIYKFLKSSKGGLFGDGIKWNFAKFLVDKDGNVVDRYAPTTSPLSIEKDLKKLLGVTA

SEQ ID NO: 5580 - protein, 57 aa, Zea mays
MAFTASDICKIIFAVLLPPLGVFLERGCGGDLCINILLTILGYIPGIIHALYIILKY

SEQ ID NO: 5581 - protein, 429 aa, Xylella fastidiosa Temecula1
MSDLDKVTLNAGETSLVLPVLKPTLGNGCVDIAKLTKETGLFTYDSGFTATASCKSAITYIDGEKGVLLYRGYPIEQLAEHSSFLEVAYLLMNGELPRKDEFAKFDDEITHHTMMHESLKNFLGGFHYDAHPMAMLAASVASLSAFYHDTLDLNDLEQRRLAAIRLIAKVPTLAAAAHRYSIGWPIRYPRNNLGYVERFLHMMFEVPSEPLQLNPVVIKALDLLFILHADHEQNASTSTVRLVGSTGANPYASVAAGITALWGPAHGGANEAVLKMLEEIGDAKNVDLVIAKAKTKDKNSPFRLMGFGHRVYKHFDPRAKIIREMAHTVLGELGVNDPLLEVALKLEEAALKDDYFVQRKLYPNVDFYSGIIYKAINIPLEMFTVMFAIARTAGWVSHWLEQQVDPEMKISRPRQIYTGHRERDYKDAR

SEQ ID NO: 5582 - protein, 495 aa, Staphylococcus aureus subsp. aureus Mu50
MAVNVRDYIAENYGLFINGEFVKGSSDETIEVTNPATGETLSHITRAKDKDVDHAVKVAQEAFESWSLTSKSERAQMLRDIGDKLMAQKDKIAMIETLNNGKPIRETTAIDIPFAARHFHYFASVIETEEGTVNDIDKDTMSIVRHEPIGVVGAVVAWNFPMLLAAWKIAPAIAAGNTIVIQPSSSTPLSLLEVAKIFQEVLPKGVVNILTGKGSESGNAIFNHDGVDKLSFTGSTDVGYQVAEAAAKHLVPATLELGGKSANIILDDANLDLAVEGIQLGILFNQGEVCSAGSRLLVHEKIYDQLVPRLQEAFSNIKVGDPQDEATQMGSQTGKDQLDKIQSYIDAAKESDAQILAGGHRLTENGLDKGFFFEPTLIAVPDNHHKLAQEEIFGPVLTVIKVKDDQEAIDIANDSEYGLAGGVFSQNITRALNIAKAVRTGRIWINTYNQVPEGAPFGGYKKSGIGRETYKGALSNYQQVKNIYIDTSNALKGLY

SEQ ID NO: 5583 - protein, 157 aa, Triticum aestivum
  unsure (1)..(157): unsure at all Xaa locations
AKKAAEEXSNTENNNASSSNSDSVMAEAEPASNAAAGDKKEQPKDDDDLLQQALAMSMEGGASGSAAVTDSAMAEAGAVDPDLALALQMSVQDANMSSDTDMSKVFEDRTFVSSILNSLPGVDPNDPSVKDLLASLHSQGEQEKKEDKSDKTEDEKN

SEQ ID NO: 5584 - protein, 447 aa, Arabidopsis thaliana
MSGSRRKATPASRTRVGNYEMGRTLGEGSFAKVKYAKNTVTGDQAAIKILDREKVFRHKMVEQLKREISTMKLIKHPNVVEIIEVMASKTKIYIVLELVNGGELFDKIAQQGRLKEDEARRYFQQLINAVDYCHSRGVYHRDLKPENLILDANGVLKVSDFGLSAFSRQVREDGLLHTACGTPNYVAPEVLSDKGYDGAAADVWSCGVILFVLMAGYLPFDEPNLMTLYKRICKAEFSCPPWFSQGAKRVIKRILEPNPITRISIAELLEDEWFKKGYKPPSFDQDDEDITIDDVDAAFSNSKECLVTEKKEKPVSMNAFELISSSSEFSLENLFEKQAQLVKKETRFTSQRSASEIMSKMEETAKPLGFNVRKDNYKIKMKGDKSGRKGQLSVATEVFEVAPSLHVVELRKTGGDTLEFHKFYKNFSSGLKDVVWNTDAAAEEQKQ

SEQ ID NO: 5585 - protein, 312 aa, Triticum aestivum
  unsure (1)..(312): unsure at all Xaa locations
MERDKVIREIGDASCGLAFWAHMIVSLVIGAGEKMKRKFYHXXECISLREVKALQKLNHPNIVQLKEVTMENHELFFIFEHMDCNLYDVIRERSAPFSEEEIRTFMLQILQGLVYMHNNGYFHRDLKPENLLVTNGIVKIADFGLAREVCSSPPYTDYVSTRWYRAPEVLLQASAYTPSIDMWAIGAILAELFTLSPLFPGETETDQLYKICAVLGTPDHSLWPEGMNLPRSSSFQFFQIPPRNLWELIPNASLEALDLIKQLCSWDPRRRPTAEQALQHPFFNVRKWVPRPLQDASYPKMNEPRATPRLEL

SEQ ID NO: 5586 - protein, 338 aa, Arabidopsis thaliana
MVLKAAFELGVIDTIAAAGNDTWLSPCEIACSLPTKPTNPEAPVLLDRMLSLLVSHSILKCRMIETGENGRTGKIERVYAAEPVCKYFLRDSDGTGSLVPLFMLLHTQVFFKTWTNLKDVILEGRDAFNSAHGMKIFEYINSDQPFAELFNRAMSEPSTMIMKKVLDVYRGFEDVNTLVDVGGGNGTVLGLVTSKYPHIKGVNFDLAQVLTQAPFYPGVEHVSGDMFVEVPKGDAVFMKWILHDWGDEDCIKILKNCWKSLPEKGKIIIVEFVTPKEPKGGDLSSNTVFAMDLLMLTQCSGGKERSLSQFENLAFASGFLRCEIICLAYSYSVIEFHK

SEQ ID NO: 5587 - protein, 72 aa, Glycine max
  unsure (1)..(72): unsure at all Xaa locations
MASSMISSPAGTTVNPAGAGMDAAWAGLNFMAAXHSKKTNSDIPSIASSGSRVHRMQVWPTTGMRKFETLYY

SEQ ID NO: 5588 - protein, 506 aa, Ruta graveolens
MDLLLLEKALLGLFAAAVVAIAVSKLRGKRFKLPPGPFGFPVFGNWLQVGDDLNQRKLANLSKKFGDVYLLRMGQRNLVVVSSPEMAKEVLHTQGVEFGSRTRNVVFDIFTGKGQDMVFTVYSEHWRKMRRIMTVPFFTNKVVQQQRFNWEDEAARVVEDVKKDPQAATTGIVLRRRLQLLMYNNMYRIMFDRRFESVDDPLFNKLKALNGERSRLAQSFEYNYGDFIPILRPFLRGYLKLVKEVKERRLKLFKDYFVEERKKLTSTKSMTEENFKCAIDHVLDAQQKGEINEDNVLYIVENINVAAIETTLWSIEWGIAELVNHPDIQKKLRAEIDRVLGPDHQITEPDTHKLPYLQAVIKETLRLRMAIPLLVPHMNLNDAKLAGYDIPAESKILVNAWWLANNPAHWKDPQVFRPERFLEEESGVEANGNDFRYIPFGVGRRSCPGIILALPILGITIGRMVQNFELLPPPGQSKIDTSEKGGQFSLFILNHSTIVLKPRSSV

SEQ ID NO: 5589 - protein, 754 aa, Zea mays
  unsure (1)..(754): unsure at all Xaa locations
FGHQLQTSEKRRVGGKLLLYDSCAHSSTVLGNLGGEEEESSGSQRTTHYSWLHGFLTSLCGGDPAMRIVVWFRRDLRVEDNPALAAAARAGGEVVPAYVWSPEEEGPYYPGRVSRWXWISQSLNHLDASLRRLGAGKLVTRRSADAAVALLQLVRDTGATHVYFNHLYDPISLVRDRRLKEMLAAEGIVVQSFNSDLLYEPWEVVDDEGQPFTMFDPFWNRCLSMPYDPPAPLLPPKRINSGDLSMCPSEDLIFEDESERGSNALLARAWTPGWQNADKALTAFLNGPLADYSVNRKKADSASTSLLSPHLHFGELSVRKVFHLVRMKQLVWSNEGNHAAEESCTLFLRSIGLREYSRYLSFNHPSSHERPLLAHLRFFPWVVDESYFKIWRQGRTGYPLVDAGMRELWATGWLHDRIRVVVASFFVKVLQLPWRWGMKYFWDTLLDADLESDALGWQYITGSLPDGRELDRIDNPQFEGYKFDPHGEYVRRWIPELARLPTEWIHHPWDAPVSVLQAAGIELGSNYPLPIVELDAAKGRLQAALSEMWQLEAASRATMNNGTEEGLGDSSEVLFPQELQMEVDRQPAPAEAAANVHVHVPMPARRRGDQMVPTMTTSSLNRAGTEVSADLVVANSEEEDTRAQVPFHAHLHLHPRAEAPPAARRTNNGARQHDVFQQRRNHRRDALLAPSASEASSSWTGREGAVVPVWSPPAASGHSDAFAADEADVSSRSYLGRHPQSHRLMNWSQLSQSS

SEQ ID NO: 5590 - protein, 308 aa, Arabidopsis thaliana
MAPGGSALKEVMESNSTGMDYEVKTAKVEVNNNKPTKPGSAGIGKYGIHSNNGVYELLECPVCTNLMYPPIHQCPNGHTLCSNCKLRVQNTCPTCRYELGNIRCLALEKVAESLEVPCRYQNLGCHDIFPYYSKLKHEQHCRFRPYTCPYAGSECSVTGDIPTLVVHLKDDHKVDMHDGCTFNHRYVKSNPHEVENATWMLTVFNCFGRQFCLHFEAFQLGMAPVYMAFLRFMGDENEAKKFSYSLEVGAHGRKLTWQGIPRSIRDSHRKVRDSQDGLIIPRNLALYFSGGDRQELKLRVTGRIWKEE

SEQ ID NO: 5591 - protein, 513 aa, Lolium rigidum
MVMEMEPSSATLFFLSVVTLVILVSLVSRKPSSKLRRPPGPRDLPFVGSLHHLLTSQPHVALRNLAKTHGPVMRLRLGQVEAVVVSSSAAAQEVLRDNDLSFASRPNLLATEIMCYGNLDVAFAPYGAYWRALKKLCVLELLSSRKVRQFKPVRDSETMSLIKEICAAGKGGKPVKLRSLLVKCTSSVTGKATFGERCDIDLREQFMAAMEVAQIHSSGFCVGDLFPSLGFLDVATGMRYQLWRARQQLDNVVDKIISDCEARREEKKSTPTGDEDLLSLMLRIRDEGGSDFPIETINIKAIIVDLFTAGTETTSSTAEFVMSELMRNPKVMKKAQEEVWRMMENKSPQDHENHMDELPYLRMVIKETMRLHPVVPLLLPRLCRESCHVGGFEITKGTRVIINAWALATSPENWNEPEEFRPERFEDSVVVNDKGTQFKLMPFGGGRRMCPGDGFALATLELMVARLLYYFEWSLPDGMRPDELDMDVKVGTTSRRRNELRVVASPCRIPIEI

SEQ ID NO: 5592 - protein, 556 aa, Zea mays
  unsure (1)..(556): unsure at all Xaa locations
MARRAASSLVSRCLLARAPAGAPPAAPSALRRTVPADGMHRLLPGVLQRFSTAAAVEEPITPSVQVNYTKLLINGNFVDSASGKTFPTLDPRTXGEVIAHVAEGDAEDINRAVAAARKXAFDEGPWXPKMTAYERSRILLXRFADLIEKHNDELAALETWDNGKPYEQAAQIEVPMXVARLMRYYAXGWADKIHGLIVPADGPHHVQILHEPIGVAGQIIXPWELPLLMFAWKVGPALACGNTLVLKTAEQTPLSALYISKLLHEAGLPEGVVNVVSGFGPTAGAALASHMDVDKIAFTGSTDTGKIILELAAKSNLKTVTLELGGKSPFIIMDDADVDHAVELAHFALFFNQGQCCCAGSRTFVHERVYDEFVEKAKARALKRVVGDPFRKGVEQGPQIDDEQFKKILRYIRYGVDGGATLVTGGDRLGDKGFYIQPTIFSDVQDGMKIAQEEIFGPVQSILKFKDLNEVIKRANASQYGLAAGVFTNSLDTANTLTRALRAGTVWVNCFDVFDAAIPFGGYKMSGIGREKGVDSLKNYLQVKAVVTPIKNAAWL

SEQ ID NO: 5593 - protein, 252 aa, Pinus taeda
MSCSVVGSMGMALEKSGGNAQHEKRDSLDFAETELKLGLPGVAADESRAHQKSCGKRSFSEAMESRSYTITDVDITRTGTPEDADKFHGPIVKEKQMALPANDPATTGSRPPPKAQIVGWPPVKDFRKVRTISTCDSLYVKVSMDGAPYLRKVNLKIYSTYHDLSSALENMFSCLLTMGKSRSHGLNESSLMDMPNGSGYVPTYEDKDGDWMLVGDVPWQMFVDSCQRMRIMKASEAIGLAPRTMEKCKKRN

SEQ ID NO: 5594 - protein, 376 aa, Uncultured archaeon
MEERGISKHELKLFLKEQKQRDLTYRKVLSSMCTYPHEIAVYAHNLFLDSNLGDSGLFPGTKEIEDELIRMIGALLGNENAHGYISAGGTESNIQAIRAIRNRKRKEGLQQMNIIVPKTAHFSFDKIEDLLSLEVKKAGLDDELRVDVNLVEDLIDDNTISIVGIAGTTEFGQIDPIKELADLAHNSDIFLHVDAAFGGFVIPFLDAEYLFDFSLDAVSSISIDPHKMGLSTIPAGCILFRDVSYLADLAVNTPYLTTNEQCSLIGTRSGAPVAATYAVLKYLGRNGLRAIVDECMQLTRMLVHGAKEMGIYPVIEPVMNVVTLRFPDVERVAKALEARGWQVSTTRAPKALRLVIMPHVTEDTIEMFLNDLENAK

SEQ ID NO: 5595 - protein, 320 aa, Mycobacterium avium subsp. paratuberculosis str. k10
MPRLDNPADEKPGIDPILQKVLDAVPFRLSTEDGIDAARQRFRDLPRRPLHPELRVEDRTIPGPQGAIAVRIYWPPSHSESCPAPVVLYFHGGGFVIGDLDTHDGTARQHAVGAGAIVVSVDYRLAPEHPYPAAVEDAWAATLWAAENAAGLHGDPGRIAVAGDSAGGTLAAVTAQRARDRGGPPVRFQLLWYPSTMWDASLPSFAENATAPILDVKAVAEFSRWYAGDVDLSDPPADMAPGRATDLSNLPPAYIGVAGYDPLRDDGIRYGEPLAAAGVAAQVHNAETLVHGYLGYAGVVPAATAAMERGLAALRTALQG

SEQ ID NO: 5596 - protein, 192 aa, Triticum urartu
PQPQPFSQQPRQAFPQPQQTFPLQPQQVFPQPQQPQQQFPQPQQPQQPFPQPQQPQLPFPQQPFPQPQQPQQPFPQSQQPQQPFPQPQQQFPQPQQPQQSFPQQQQPLIQPYLQQQMNPCKNYLLQQCNPVSLVSSLVSMILPRSDCQVMQQQCCQQLAQIPRQLQCTAIHSVVHAIIMQQEQQGIQILRPL

SEQ ID NO: 5597 - protein, 174 aa, Pyrococcus abyssi GE5
MEGFTIWLTGPSGAGKTTLAVKLAKKLREMGYKVEILDGDTIRKTLYPNLGFSKEAREMHNRIVIYMAKLLTRNGVIAIVSLISPYKRIREYARKEIGRFMEVYVYAPLEVRIKRDPKGLYAKAIRGEIRGLTGYDGVYEEPENPEVKVDSSRMTPDEEAELVIRKAKELGYLP

SEQ ID NO: 5598 - protein, 480 aa, Listeria monocytogenes str. 1/2a F6854
MQIKNKAMLITYSDSLGENMEELSKVMETYFEDAIGGIHLLPFFPSTGDRGFAPSDYTTVDSDLGSWEMIEKLGEKYYLMFDFMINHISRESLFFQDFKKEHLNSKYKDMFIRINDFFPPGRPNEKDLDLIYKRKDKAPFQEVEFADGETELVWNTFGEEQIDLDVTAEVTKEFIRQTIKNMAAHGCSILRLDAFAYAIKKLDTNDFFVEPEIWDLLDEVKAEAAKYDMELLPEIHEHYSIQMKIANHDYYIYDFALPMVMLYSLYSGRVEHLAKWLEMSPMKQFTTLDTHDGIGVVDARDLLTDEELDYTSAELYKIGANVKKIYSSEKYNNLDIYQINSTYYSALGDDDKSYLLARVIQCFAPGIPQIYYVGLLAGKNDIDLLEETKEGRNINRHYYTIDEIKNEVKRPVVKALCNLLRFRNTSEAFDLEGSIEIETPSSNEIVIIRKNKTNKITATLKADLSTKTFQISENERNILI

SEQ ID NO: 5599 - protein, 296 aa, Zea mays
  unsure (1)..(296): unsure at all Xaa locations
MDRADPARGRLAVLSSHLRGAGAEEAAGLERSPVSAPAPGPRAGALAVVDGRTGKRHEVKVSEDGTVRATDFKKITTGKDDKGLKIYDPGYLNTAPVRSSICYIDGDEGILRYRGYPIEELAESSSFVEVAYLLMYGNLPTQSQLAGWEFAISQHSAVPQGLLDIIQSMPHDAHPMGVLASAMSTLSVFHPDANPALQGQDLYKSKQVRDKQIVRVLGKAPTIAAAAYLRLAGRPPVLPLNTLSYSENFLYMLDSLGDRTYKPNPRLARALDILFILHAEHEMNCSTAAXRHLASR

SEQ ID NO: 5600 - protein, 192 aa, Triticum urartu
PQPQPFSQQPQQVFPQPQQTFPLQPQQVFPQPQQPQQQFPQPQQPQQPFPQPQQPQLPFPQQPFPQPQQPQQPFPQSQQPQQPFPQPQQQFPQPQQPQQSFPQQQQPLIQPYLQQQMNPCKNYLLQQCNPVSLVSSLVSMILPRSDCQVMQQQCCQQLAQIPRQLQCTAIHSVVHAIIMQQEQQGIQILRPL

SEQ ID NO: 5601 - protein, 429 aa, Sinorhizobium meliloti
MSEKSATVTFGGKSADLPVRSGSIGPDVVDIGSLYKQTTMFTYDPGFTSTASCESKITYIDGDEGVLLHRGFPIEQLAEHGDFLEVCYLLLYGELPTKAQKADFDYRVTHHTMVHEQMSRFFTGFRRDAHPMAVMCGCVGALSAFYHDSTDITDPHQRMVASLRMIAKMPTIAAMAYKYHIGQPFVYPKNDLDYASNFLRMCFAVPCEEYVVNPVLARAMDRIFILHADHEQNASTSTVRLAGSSGANPFACIAAGIACLWGPAHGGANEAALNMLAEIGTVDRIPEYITKAKDKNDPFRLMGFGHRVYKNYDPRAKIMQKTTHEVLAELGHKDDPLLEVAMELERIALTDEYFIEKKLYPNIDFYSGITLKALGFPTTMFTVLFALARTVGWIAQWNEMIEDPEQRIGRPRQLYVGAPLRDYVPISKR

SEQ ID NO: 5602 - protein, 181 aa, Brassica napus
  unsure (1)..(181): unsure at all Xaa locations
MAKATSPIFLLLLLVILSSTLLSVKPNTTTIETTCKTTNYYRLCVSALKSDPRSPTADTKGLATIMVGFGMKSATATATYIAGNHTAAAANDTVLRKVLKDCSDKYALAADSLRLTVQDLDDEAYDYAYMHVLAAQDYPNVCRNIFRRAKGLVYPTEIRRREVSLXRICGVVSGILDRLAE

SEQ ID NO: 5603 - protein, 364 aa, Ganoderma applanatum
MFSKVFLSLVVLASSVAAAVPTVGRRATCANGKTTANDACCVWFDVLDDIQENLFHGGQCGEDAHESLRLTFHDAIAFSPALTAAGQFGGGGADGSIIAHSDVELTYPVNDGLDEIVEASRPFAIKHNVSFGDFIQFAGAVGVANCNGGPQLSFFAGRSNDSQPSPPNLVPLPSDTADTILSRFSDAGFDAVEVVWLLVSHTVGSQNTVDSSIPGAPFDSTPSDFDAQFFVETMLNGTLVPGNGLQDGEVLSPYPGEFRLQSDFALSRDSRTTCEWQKMIADRANMLEKFEITMLKMSLLGFDQSALTDCSDVIPTATGTVQDPFIPAGLTVDDLQPACSSSAFPTVTTVAGAVTSIPAVPLNS

SEQ ID NO: 5604 - protein, 254 aa, Hyacinthus orientalis
MGEEADRSGYDRLASDGDGDGSGGDGDDGRVLEWEIGLPSADDLTPLSQPLVPPELASAFSITPDPARTILDVHRASHSTMSSLRRHNLASSSSAMKSFSPFPSGDPTVLESDDQKDESRVRRSEAENSEDDQSARSLKRPRLVWTPQLHTRLLTWVAHLGIKTAVPKTIMQLRMSRGLTRENVASHLQKYRLYFEEDAGRCRTNGHRPAIRCSHRRRCLIVCTKICCQLLLRRWPMPYAVPTMIPRARVWECR

SEQ ID NO: 5605 - protein, 122 aa, Amborella trichopoda
MIQAQTYLNVADNSGARELMCIRIVGASNPRYAHIGDVIVAVIKEAVPNMPLERSEVIRAVIVRTCKELKRDNGIIIRYDDNAAVVIDPEGNPKGTRVFGSIAGELRHLNFTKIVSLAPEVF

SEQ ID NO: 5606 - protein, 332 aa, Glycine max
IRLEARGRLREETARLYFQQLISAVDFCHSRGVFHRDLKPENLLLDDDGNLKVTDFGLSTFSEHLRHDGLLHTTCGTPAYVAPEVIGKRGYDGAKADIWSCGVILYVLLAGFLPFQDENLVALYKKIYRGDFKCPPWFSSEARRLITKLLDPNPNTRITISKIMDSSWFKKPVPKNLVGKKREELNLEEKIKHQEQEVSTTMNAFHIISLSEGFDLSPLFEEKKREEKELRFATTRPASSVISRLEDLAKAVKFDVKKSETKVRLQGQENGRKGKLAIAADLYAVTPSFLVVEVKKDNGDTLEYNQFCSKELRPALKDIVWRTSPAENPTLA

SEQ ID NO: 5607 - protein, 212 aa, Schizosaccharomyces pombe
KARHLIKLYEAEGIGRERVLIKIASTYEGIQAAKQLEEEGIHCNLTLLFSFVQAVACAEANVTLISPFVGRILDFYKAKNNRDYTAQEDPGVVSVSNIFNYYKKFGYKTIVMGASFRNVGEIKELAGVDFLTISPALLEQLNNSTDAVPKKLDASKASSLNLEKVSYLTDEPKFRFDFNNDEMAVVKLSTGIAAFAKDADTLRTILKAKLEA

SEQ ID NO: 5608 - protein, 140 aa, Triticum aestivum
  unsure (1)..(140): unsure at all Xaa locations
MAPTVMASSATSVAPFQGLKSTAGLPVSRRSNGASLGSVSNGGRIRCMQVWPIEGIKNSETLSYLPPLXSTEASSKQVDYLXIRSKWVPCLXFSKLXHLPVSTTTPGYYDGRSGTMWXLPISGCTDXTMXNEVEESRRIP

SEQ ID NO: 5609 - protein, 107 aa, Bartonella capreoli
GGANEACLKMLQEIGSIEKIPEFIARAKDKNDPFRLMGFGHRVYKNYDPRAKLMQKTCHEVLKELNIKDDPLLDIAMELEKIALSDEYFIEKKLYPNVDFYSGITLK

SEQ ID NO: 5610 - protein, 167 aa, Streptococcus pyogenes MGAS8232
MPNLYDFTVKAQNGNDLSLAAYKEKVVLIVNTATKCGLTPQYQALQALYDTYHDKGFEVLDFPCNQFLNQAPGDAEEINHFCSLTYHTTFPRFAKIKVNGKDADPLFTWLKEEKSGPLGKRIEWNFTKFLIDQNGQVIKRYSSKTDPKLIEEDLKALLDKIQCYHHL

SEQ ID NO: 5611 - protein, 211 aa, Brassica napus
KDVTQATRAQGLEEDPRNYLTFFCLGNREVKKEGEYEPAERPDPDTDYMRAQEARRFMIYVHSKMMIVDDEYIIVGSANINQRSMDGARDSEIAMGGYQPHHLSHRQPARGQVHGFRMSLWYEHLGMLDETFLDPSSLECIEKVNRIADKYWNFYSSESLEHDLPGHLLRYPISVDNEGNISELPGFEFFPDTKARILGNKVDYLPPILTT

SEQ ID NO: 5612 - protein, 109 aa, Bartonella bovis
ANEACLKMLQEIGSTEKIPEFIERAKDKNDPFRLMGFGHRVYKNYDPRAKLMQKTCHEVLKELNIQDDPLLDIAMELEKIALNDEYFIEKKLYPNVDFYSGITLKALGF

SEQ ID NO: 5613 - protein, 133 aa, Glycine max
MEPMDIVGKAKEDASLPKATMTKIIKEMLPPDVRVARDAQDLLIECCVEFINLVSSESNEVCNKEERRTIAPEHVLKALGQDSLKGAKWSNRAEMTEEEALAEQQRMFAEARARMNGGAIQSKEPEADQSLES

SEQ ID NO: 5614 - protein, 499 aa, Mesorhizobium sp. BNC1
MNRFELPSSKLYIGGRWEEGSGAEIVSIFSGDGSVNRVIKGASRADGERAIERALKAQSDPAWRNLKPHERARFLHRIADGIETNAARIAFIQTRDTGKTLRETTALVASAAGTFRYFAGALESLDDTLTAPRGDYLSMSVHEPLGLVSAITPWNSPIASDAQKVAPALAAGNAVLLKPASWSPLVSLELARIVEAAGLPQGLFSVLPGAGREIGNLLVEHPAISRVSFTGGTATGRMLARQAAEKLMPISLELGGKSPTIVFADADIDLAIAGILFGVFSSSGQSCIAGSRLFVERSIYESFVDRLVAATKKLVVGDPFDERTQVAPLVHFDHRDAVAAQVAAAVEAGAEVLCGAAIPTGADYDRGAYYLPTILAGLENDDPICREEVFGPVLCVLPFDDEADVIAQSNANDYGLACGIWTRDFPKAWRTARAITTGTVWINTYKQFSISTPFGGEKDSGMDREKGREGIRAYMAQKSVYVDLTGKPHPWARWPEAGA

SEQ ID NO: 5615 - protein, 161 aa, Rubrobacter xylanophilus DSM 9941
MGARRWCEMLSPFRGFWDVRSELDRMFDDVVRDAFRLWRGEGRAARTAEWAPAIDVYSKDGDLVIKAELPGMKPEDVDITLQEGVLTISGERKAEEEREGAGYFVRERRYGSFRRSMRLPEGVDESKIHARFEDGVLEVVVEGAGAVTEPRRIQIEAPKGS

SEQ ID NO: 5616 - protein, 489 aa, Bacillus cereus ATCC 10987
MPQDRKAEVQKHAYERKEIMPDNSQSLPRHMQKELPHEFSVNPLFAREGESVVPRFHISDEGMLPETAYQIVHDEITLDGNARLNLATFVSTWMEPAAEQLYAKSFDKNMIDKDEYPQTAEIEERCVRILANLWHSPSPLTTMGVSTTGSSEACMLGGLALKRRWQNARKSEGKPLDRPNIVFSSAVQVVWEKFANYWEVEPRYVKVSPEHPQLDPQGVLAAVDENTIGVVPILGETYTGLYEPVAEIAKALDDLQARTGLDIPMHVDAASGGFIAPFLQPDLVWDFQLPRVKSINVSGHKYGLVYPGLGWIIWREAEDLPEDLIFRVSYLGGNMPTFALNFSRPGAQVLLQYYNYLRLGKSGYYDIQRASQKVALFLSKAIQKMEPFELLSDGSDIPVFAWRLKEGYTSNWNLYDLSRQLRVFGWQVPAYPLPPDMESVTIMRVVVRNGFSMDLAHLFLRNLKQTVAFLDSLDGPMPHDTKCNNGFHH

SEQ ID NO: 5617 - protein, 390 aa, ASPERGILLUS NIDULANS FGSC A4
MATKTLEARFEHLSVKDDSGNGNKGTSYPKHKSSLSTAVSLSGLGVAGQLTSGANRSNLLKLALQNTNDNKVNAMNANASQSPGKGTQNPASLRNLDENGEYEQPAPRKLHLGMFEIGKPLGKGKFGRVYLAKERSSGFVCALKVLHKSELQQGGVQKQVRREIEIQSNLRHPNVLRLFGHFQDSKRIFLILEFAGRGELYKHLRKEHRFPEWKAAHYIAQMASALKYLHKKHVMHRDIKPENILVGIHGEIKISDFGWSVHAPNNRRQTMCGTLDYLPPEMLTSNPQGNFYNEKVDLWSLGVLTYEFLVGEAPFEDTPVMTQRRIQRGDMQVPSFVSPEAKDLIKRLLVLDPEKRISLDEIQRHPWILKHCVKDDRTIKRGSAPHAANE

SEQ ID NO: 5618 - protein, 167 aa, Synechococcus elongatus PCC 6301
MKIRNVSMAPQVTDIAVTTIDGAAKSLSDYAGQVLLIVNVASYCGYTSQYSGLEALYRQYRDRGLQVLAFPCNDFGAQEPGSNEEIKTFCSTRFDVSFELFDKVHAKGADQHPLYAALTQTDPAGDVAWNFEKFLVGKDGTVLARFKSGVAPNDASLIQAIEAALAA

SEQ ID NO: 5619 - protein, 458 aa, Burkholderia cepacia R18194
MDEPIRSEGGASDAPKRRHADLLVHGGMVMTPNGAERIDVACVNGRVVALGALHGNWSADVVLDAGGLHVLPGVVDSQVHFREPGLTHKETLEAGTRGAVLGGVTTIFEMPNTHPLTLTAQDLQAKLDLAHGRAWCDYAFYIGGSAANAERLPELENLPGCAGVKVFMGSSFGDLLADDEAVLRRIVRNGRRRMAVHAEDEARLRERRALVEASGDVRDHHRWRDEESALAATRRIVGLATETGRRLHVLHVSTAEEMAFLARHRQRVTVEVTPHHLSLYAPDCYERLGTFAQMNPPVRERHHQDALWQAVRDGVVDVIGSDHAPHTRDEKRRPYPQSPSGMTGVQTLLPLMLDHVHAGRLSLARLVDLTSAGPARIFGIAGKGRIAAGYDADFSIVDLRARRIIRDEWIASVSGWTPYDGCAVTGWPVHTVVRGRVVVRDGALNGEPEGQAVTFLDA

SEQ ID NO: 5620 - protein, 426 aa, Helicobacter hepaticus ATCC 51449
MLFQNATLCDYQGIKKADLRAQNGLITDIGSLQPLKDEDIYDAKDRILFPAMIDLNVAPKSLSLSRKNLLSLAQKALKGGAGSILLYPHTTPSCSENGSIELIKSLNKESPIHLIPAISPLDSQGKLSDISTLHTNGAKAIFAPSDIDAHSLMSIAQYAQMLDIPLMCFCQDSSVADGVMNEGILSASLGLPSIPAYSQTKEVAKIAEMFKNMPIKLIFDTLVYPRSFEILQSFRAIHNKTSQKNKDSMQFGETPQFFTQTSIHHLILDESLCDNYNTAAKLNPPLVEKNAQSKLIEMLQNGYIDTLTSLQCADFNSKKDQVFELASFGVDALEIYFPLLYTYLHKAYNIPLPLISQFTSYTPAQILNLNKGALQEGKIAQLFVFNPHTRFKVNDMFSPYHQHNLYGNIEAFLSNEILYTPHTKEL

SEQ ID NO: 5621 - protein, 481 aa, Burkholderia cepacia R1808
MANVTYTDTQLLIDGEWVDAASGKTIDVVNPATGKAIGKVAHAGIADLDRALAAAQRGFEAWRKVPAHERAATMRKAAALVRERADAIAQLMTQEQGKPLTEARIEVLSAADIIEWFADEGRRVYGRIVPPRNLGAQQMVVKEPVGPVAAFTPWNFPVNQVVRKLCAALATGCSFLVKAPEETPASPAALLRAFVDAGVPAGVVGLVYGDPAEISSYLIPHPVIRKVTFTGSTPVGKQLAALAGQHMKRATMELGGHAPVIVAEDADVALAVKAAGGAKFRNAGQVCISPTRFLVHNSIRDEFTRALVAHAQGLKIGNGLDEGTTLGALANPRRLTAMASVVENARKVGASIETGGERIGSEGNFFAPTVIANVPLEADVFNNEPFGPVAAIRGFDKLEDAISEANRLPFGLAGYAFTRSFANVHLLTQRLEVGMLWINQPATPWPEMPFGGVKDSGYGSEGGPEALEPYLVTKSVTVMAV

SEQ ID NO: 5622 - protein, 484 aa, Rhodococcus erythropolis
MQALTSSVPLVIGDQLTPSSTGATFDSINPADGSHLASVAEATAADVARAVEAAKAAARTWQRMRPAQRTRLMFRYAALIEEHKTELAQLQSRDMGKPIRESLGIDLPIMIETLEYFAGLVTKIEGRTTPAPGRFLNYTLREPIGVVGAITPWNFPAVQAVWKIAPALAMGNAIVLKPAQLAPLVPVALGELALEAGLPPGLVNVLPGRGSVAGNALVQHPSVGKVTFTGSTEVGQQIGRMAADRLITASLELGGKSALVAFGDSSPKAVAAVVFQAMYSNQGETCTAPSRLLVERPIYDEVVELVQARVEAARVGDPLDPDTEIGPLISAEQRESVHSYVVSGTEEGATLISGGDQSPTGAPEQGFYYRPTLFSGVTADMRIAREEIFGPVLSVLPFEGEEEAITLANDTVFGLAAGVFTRDVGRALRFAQTLDAGNVWINSWGVLNPASPYRGFGQSGYGSDLGQAAIESFTKEKSIWARLD

SEQ ID NO: 5623 - protein, 377 aa, Sulfolobus solfataricus
MSVVSKGLENVIIKVTNLTFIDGEKGILRYRGYNIEDLVNYGSYEETIYLMLYGKLRTKKELNDLKAKLNEEYEVPQEVLDTIYLMPKEADAIGLLEVGTAALASIDKNFKWKENDKEKAISIIAKMATLVANVYRRKEGNKPRIPEPSDSFAKSFLLASFAREPTTDEINAMDKALILYTDHEVPASTTAALVAASTLSDMYSSLTAALAALKGPLHGGAAEEAFKQFIEIGDPNRVQNWFNDKVVNQKNRLMGFGHRVYKTYDPRAKIFKKLALTLIERNADARRYFEIAQKLEELGIKQFSSKGIYPNTDFYSGIVFYALGFPVYMFTALFALSRTLGWLAHIIEYVEEQHRLIRPRALYVGPEYQEYVSIDKR

SEQ ID NO: 5624 - protein, 1184 aa, Cryptococcus neoformans var. neoformans
MFVTRPPFSPLDHRGSPLEDDHTNTSGSSRDDVPSSHSTNTAFHEFKSSTPFPPHYLNVPSGLAFKTYLEKWGPEQIMGFLAIHGCEHHSGIFIKNSIDGKLLLDLDMSVLTSLGITKVGERVRLMAGIKCLRQRIAHEAEKDNVRSAHLCNGSLGMDRVKVMIHPKMSASLYVCRQGPFDSDPSTARRSRLTPSSSADRERNPSPMQRSQEVMKHSFITRSSGGQVIPPLWSGQIHNHGIDNSPTPGLYQPPMQRSVPLRSSVSYSDIAAKGMPLLVTQSINSAADHTFAVTDSHDTTSSLGGHLPRPDYFHSTNDAFQTCTKGEDNTISELPQRNQESSPSKWKKSGVICEDEAMLDSSPFAPTSPKHPFAINVTGNNVMEYPPNLPIKNCLSLRSFQSPDKSAGEDRLNMNPRAPSLDDLRRKLVKFVNAEDGTTRTVNVMKATSGAEVLERALRKFGKTGTGSAPFLDEENHNGGKYEGSLCIDGWGVFAEDLLGEEIGPMTEGDLFDICASLQNGAAIQRDALILRQTSESQKRKDMRFYLGNMPVLPTPVNLPISFYSPHSGQFERNSALQHTAQHQPLLSKNRSRASMMSIMSGLGVSHPDIKQPTHDSVQSPTSVTRSSSKKKSMYNFFGHRPPSELISSHLADYFPSAKKRDVAKVRGSMLRLNIAHTAEHDPRSVKSLGMIETDDMPFSSTEQSLTEQGGHYFDPSTCQPADTSSRGHVDHIITDHAGNSKGYYRLPCDEKASPTVKTQELHSANSANSILRACPPNLPPTYQSARLTDLHSDSTFSQLQLLRHSSSLSFKQPSSSHRRTVDEITAEMQHRQTSLSSNRPTSTIDSDISGPPCDSETSPDHTSDVSDVSESSSEYWDDQSSVSSKDSDHNTVEHTRAFTSNGSKRNIKWIKGALIGAGSFGSVFLGMDAQSGLLMAVKQVELPRGIAKMEARRRDMLSALEREIELLKDLQHENIVQYLDSSADANHLNIFLEYVPGGSVAALLNSYGAFEEALVGNFVRQILTGLNYLHERDIVHRDIKGANILVDNKGGIKISDFGISKKVENSLLNGLHPNRPSLQGSVFWMAPEVVKQTSYTSKADIWSVGCLVVEMLTGTHPWARLTQMQAIFQIGSMGQPDIPSDISAHAADFLSRAFALDYRMRPSATSLLQHAFIIHDGSGGNDEV

SEQ ID NO: 5625 - protein, 691 aa, Zea mays
MPALACCVDAAAPPGYAFAGDISFPAPVALTGVPPATTDDSNNNRWSPSLSAALYNVDGWGGPYFAVNTAGNISVRPHGSDTLSHQEIDLLKIVKKASDPKSLGGLSLQLPLIARFPDVLKNRLESLQSAFDYAIQSGGYESHYQGVYPVKCNQDRFVVEDIVKFGSPFRFGLEAGSKPELLLAMSCLCKGNPDALLICNGFKDAEYISLALVANKLALNTVIVVEQEEEVDLIVELSKKLCIKPVIGLRAKLRTKHSGHFGGTSGEKGKFGLTTAQILRVVKNLDLAGMLDCLQLLHFHIGSQIPSTALLADGVGEAAQIYCELVRLGANMRVIDIGGGLGIDYDGSKSCDSDISVEYSLEDYAVAVVHAVQCVCDRRSVKHPVICSESGRAIVSHHSVLIFEAVGTSSTTGGGASPALSAQYLAEELSEDYRNLSELAFRGEYETCLVYTEEMKERCVEQFKQGTVCMEQLAAVEGLCELARKAVGAGESVRRYHVNLSVFTSVPDAWGIEQVFPIIPIHRLDEKPSVRGILSDLTCDSDGKIDKFINGESSLPLHEMEGGRTYYLGMFLGGAYEEALGGVHNLFGGPSVVRVSQSDGPHSFAVTRAVPGPSCGDVLRVMQHQPELMFETLKHRAQEYVSHDNAAALLAAGLARTFDRMPYLLSLSSFVADDVAAAVPAAQDLGEQWSY

SEQ ID NO: 5626 - protein, 272 aa, Glycine max
MESFPEIIKAVDPRASANLDGNHLDDDDRMEINSDIEPAETEALPHEFNMAPIADLFDNLQDKAHQETVIDSEDSPESVDSESSSDKEVSDQHMKITFPGKKMQTIAERFEEALGTSSVITEGTHVGAPNSLRPGIFGKLQHMMLKVKETDMEFWKKLQPEARPDGELGCIDVKIISRYRDGKLTVCHCSFGKYTENFLLQDNSKGMRFGGSECSQSTIIFSPRVCNNVDLEVGSLIRIHPPWFWFLDRKEVQAGNDNVILCTYFSEILFPV

SEQ ID NO: 5627 - protein, 304 aa, Zea mays
MCSSRALWPVHCCRFKAEGSLSSLEAGRGLGAFLYRPDPSFIRVVTVRPRSPRRSPKSQPRFLWSARASMASPSPAVSSLETEAPQATVTRERRLNPDLQEHLPKPYLARAMVAVDPDHPTGTEGRDPRGMSVLQQHVAFFDRNGDGVVYPWETFKGMRAIGCGFFTSLVLSFLINLVMSYPTQPGWLPSLLLSVHVKNIHKAKHGSDSETYDTEGRFDPSKFDAIFSKYGRTHPDALTKDEMNSMLKANRNIYDFLGWIAAIGEWHLLYSVAKDKDGLLQRETVRGLFDASLFERLQDSKKSS

SEQ ID NO: 5628 - protein, 372 aa, Arabidopsis thaliana
MFAQLAPSPSPSPANVSHFVHHRTFRQCTYAVSASLPTANSSRPPPIQIVGGKDLNLDVTRKDDSIGFKLEANEDEIDWMNLESDIRLWTRALRPVQWYPGHIMKTEKELREQLKLMDVVIEVRDARIPLSTTHPKMDAWLGNRKRILVLNREDMISNDDRNDWARYFAKQGIKVIFTNGKLGMGAMKLGRLAKSLAGDVNGKRREKGLLPRSVRAGIIGYPNVGKSSLINRLLKRKICAAAPRPGVTREMKWVKLGKDLDLLDSPGMLPMRIDDQAAAIKLAICDDIGEKAYDFTDVAGILVQMLARIPEVGAKALYNRYKIQLEGNCGKKFVKTLGLNLFGGDSHQAAFRILTDFRKGKFGYVSLERPPL

SEQ ID NO: 5629 - protein, 67 aa, Brassica napus
  unsure (1)..(67): unsure at all Xaa locations
MVFTSNDISKWENFLKGLRVLLLDCGDGXSAAETRSKLESMDYIVTTFTDGTEALSAVFKSLESFHI

SEQ ID NO: 5630 - protein, 291 aa, Glycine max
IRLERLEQRLTKCQPAEAPEPNQLIWPNLKIKYFQRELRQYLVYFIVALTIFFYMIPITFISAFTTLDNLVKYLPFIKPIVNIKALKTVLEAYLPQLALIIFLALLPKLLLFLSKFEGIPTESHAVRAASGKYFYFTVLNVFIGVTIGGTLFKAFKRIREHPTLDEISSLLAESLPGNATFFLTYVALKFFIGYGLELSRIVPLIIYHLKRKYLCKTEAELKEAWRPGDLGYGTRVPGDMLIVTIVFCYSVIAPVIIPFGALYFGLGWLVLRNQVKFLEFCLMNPVLCFMW

SEQ ID NO: 5631 - protein, 245 aa, Schizosaccharomyces pombe
KSFIKVSSLEQLKATGTVVVSDTGDFESIAKYKPQDATTNPSLILAASKKPQYAALVDAAVDYAKAKGGSINSQIEIAFDRLLIEFGTKILAIVPGRVSTEVDARYSFDTQTTIEKARHLIKLYEAEGIGRERVLIKIASTYEGIQAAKQLEEEGIHCNLTLLFSFVQAVACAEANVTLISPFVGRILDFYKAKNNRDYTAQEDPGVVSVSNIFNYYKNSVTRPLSWVLLSVTSVRSRNSLVLTF

SEQ ID NO: 5632 - protein, 182 aa, Triticum aestivum
YTYIVQSLVPTVMASLATSVAPFQGLKSTAGLPVSRRSNGASLGSVRNGGRIRCMQVWPIEGIKRFETLSYLPPFSTEALLKQVDYLIRSKWVPCLEFSKVGFIFREHNASPGYYNGRYWTLWKLPMFGCTDASQVINEVEEVKKEYPDAYVRIIGFDNMRQVQCVSFIAFKPPGCEESGKA

SEQ ID NO: 5633 - protein, 435 aa, Yersinia pestis KIM
MTISRTQQIQQLEQEWTSPRWKNITRPYSAEDVIKLRGSVNPECTFAQNGAKKLWELLHGGSRKGYINCLGALTGGQALQQAKAGVEAIYMSGWQVAADANTASSMYPDQSLYPVDSVPAVVKRINNSFRRADQIQWSNNIEPGSKGYTDYFLPIVADAEAGFGGVLNAFELMKAMIEAGAAGVHFEDQLAAVKKCGHMGGKVLVPTQEAIQKLVAARLAADVLGVPTLLIARTDADAADLLTSDCDPYDREFITGDRTAEGFFRTRAGIEQAISRGLAYAPYADLVWCETSTPDLALAKRFADAVHAQFPGKLLAYNCSPSFNWKKNLTDQQIASFQDELSAMGYKYQFITLAGIHSMWFNMFDLAHAYAQGEGMKHYVEKVQQPEFASVDRGYTFASHQQEVGTGYFDKVTNIIQGGASSVTALTGSTEEQQF

SEQ ID NO: 5634 - protein, 425 aa, Vibrio cholerae O1 biovar eltor str. N16961
MSDDNRLNPTPEEQFRQRALDYHAYPTAGKIGIALTKPADSAADLALAYSPGVAEPVREIAQNVDNVYKYTAKGNTVAVISNGTAILGLGNLGPMASKPVMEGKALLFKRFAGLDSIDIEVKHRTIDEFIDTVANIADTFGGINLEDIKAPDCFEIERRLIERCDVPVFHDDQHGTAIVTAAGMLNALELQGKQLKDCIIVCLGAGAAAVACMELLIKCGAMREKIYMLDRKGVIHTRRDDLNEYKALFANNTDKRTLEDVIAGADLFLGVSGPNLLPADALKLMADKPVVFACSNPDPEIKPEIAHQVRNDMIMGTGRSDYPNQVNNVLCFPFIFRGALDVRASEINDQMKLAAVEAIRQLAKEPVPAEVLAAAGVDKLSFGIDYIIPKPMDPRLLPRVARAVAEAAVESGVARIPMPENYMQA

SEQ ID NO: 5635 - protein, 469 aa, Triticum aestivum
  unsure (1)..(469): unsure at all Xaa locations
MDPTVPNSGDHAASTPTNTTVTLPPLTLRDAPRLPALPSGATTIPNPISSHPYFHPPPTFYISPGDVSLRHAFFDLSSGSPNPLVAYRRAGPRESLAVDPARARAALVTCGGLCPGLNTVLRELVVGLHELYGVLDVFGVAAGYRGFYGADDDHVRLDPASVDDWHKKGGTALKTTRGGFDLNKIVDGIVARGYTQVYAIGGDGTMRGAVAIFEEFKRRGLRISITGIPKTVDNDIGIIDRSFGFQTAWEIAQQAXXAAHVEAVSAVNGIGLVKLMGRSTGHIALHATLSSRDVDCCLIPEIDFHVEGKGGLFEFLYERIKKKGHAVVVVAEGAGQEVIPRTDDQKREQDESGNMLFLDVGPWLKSELGRWWKREHPTELFTVKYIDPTYMIRAVPANATDNLYCTLLAHSAIHGIMAGFTGFVPGPINGNYSYIPLEDIAVAKNPVDVNDHKWAWVRSVTDQPDFLKP

SEQ ID NO: 5636 - protein, 497 aa, Staphylococcus xylosus
MELVKNLSRRQFIDGEWVESSNKETRKIINPFNQEVIFEVAEGTADDSERAILAARRAFEDGEWANETSENRGKKVRAISDLIVKHREELAKLETLDTGKTLEESYADMDDIANVFNFFAGLADKDGGEIIDSPIPNTESKVIKEPIGVVTQITPWNYPLLQASWKIAPALASGCSLVMKPSEITPLTTIRVFELMEEVGFPQGVINLVLGKGSEVGEPLSAHKEVDLVSFTGGIQTGKHIMKNAADHVTNIALELGGKNPNIIFDDADFDLAVDQALNGGFFHAGQVCSAGARIIVHNDIKEKFEAALIERIKNIKLGNGFDEDTEMGPVISAEHREKIENYMEVAKSENATIAIGGKRPEREDLQDGFFFEPTVITDCDTSMRIVQEEVFGPVVTIESFTTEAEAIKLANDSIYGLAGGVFTNDVGKAQRIANKLKMGTVWINDFHPYFAQAPWGGYKQSGIGRELGKAGLAEYQEEKHILRNTNPEPVNWFGKA

SEQ ID NO: 5637 - protein, 244 aa, Zea mays
HASELLEDLQGRSGSYVETASLSHQHTRAKHWKPKFLSSEKKTIAILGDRSIDSEDPLEHVIDGTSSEEEDATQNHLSLVNKDENQQTMADLFQEVFNPTNMDGAMKSMRSTGAGNYGRMQQIMQMEKDWHVEFLRQYSREHSYSGDLKGTTVQILSRSLEGKLTVCSCMFQEKGNDATISNASADGTMDESRTRRTIIFSPKICNNVDLLVGNIIHIFPPWKEVKIQEEHVIICTYFSHHHRT

SEQ ID NO: 5638 - protein, 332 aa, Anabaena variabilis ATCC 29413
MTKNLLEQLREMTVVVADTGDIQAIEKFTPRDATTNPSLITAAAKMPEYQEIVDQTLLQAKKDAGAGASKGQIVSLAFDRLAVSFGLKILQIIPGRVSTEVDARLSYDTEATITKARELIAQYKAAGIGPERVLIKIASTWEGIKAAEILEKEGIHCNLTLLFGLHQAIACAEAGITLISPFVGRILDWYKKETGRDSYPSAEDPGVISVTTIYNYYKKFGYTTEVMGASFRNIGEITELAGSDLLTISPGLLGELQATIGELPRKLDPAKAATLDIEKISIDKATFDKMHAADRMAYDKLDEGIKGFTKALEELETLLAERLARLEVVASH

SEQ ID NO: 5639 - protein, 294 aa, Triticum aestivum
HSITSLYKKAGWYRSGIPLDTRIPLVSFTGSTKVGQMVQQQVSARFGKCLLELSGNNAIIVMDDADIPLAVRSVLFAAVGTAGQRCTTCRRLLLHESIYQTFLDQLVEVYKQVRIGDPMEKGTLLGPLHTTTSKESFLKGIQTIKSQGGKILLGGSAIESEGNFVQPTIVEISPDAPVVREELFGPVLYAMKFLTLKEAIEINNSVPQGLSSSIFTRKPDAIFKWIGPHGSDCGIVNVNIPTNGAEIGGAFGGEKATGGGREAGSDSWKQYMRRATCTINYGSELPLAQGINFG

SEQ ID NO: 5640 - protein, 587 aa, Glycine max
  unsure (1)..(587): unsure at all Xaa locations
VITTQFASNLHRLGSVKAAADLTGRKLVFVGMSLRTYLDAAWKDGKAPIDPSTLVKAEDIDAYAPKDLLIVTTGSQAEPRAALNLASYGSSHAFKLAKEDVVLYSAKVIPGNESRVMKMLNRIXEIGSTIVMGKNEGLHTSGHAYRGELEEILRIVKPQHFLPIHGELLFLKEHELLGKSTGIRHTAVIKNGEMLGVSHLRNRRVLSNGFISLGKENLQLKYSDGDRAFGTSSDLFIDERLRIALDGIIVISMEIFRPKILDGSAENTLKGKIRITTRCLWLDKGKLMDALYKAARAALSSCPVKSPLAHIERIVSEVLRKMVRKYSGKRPEVIAIAIEKPAAILADEINTKLSGKSHVGLGMSTLSKAVDGHGKGNQSTALQVKDDSIDNASGAEGDLSEEDNTASGPEGYLSEEDNTASGAEGDLSESEDSDEFWKPFITSLPVEKSINADNGYVSPKEQKSNLKKDESEDIDEAKSEETSNSEAKSSKSVKRNKWKTEEVKKLIGMREELSERFQVVKGRMALWEEISQKLLADGICRSPGQCKSLWTSLVVKYEGIKNEDRKKSWPYIEDMERIMSDKEAPAK

SEQ ID NO: 5641 - protein, 257 aa, Bradyrhizobium japonicum
VYLSGWTIAALRSEFGPLPDQSMHEKTSVPVLIEELYTFLRQADSRELNDIFRSLDKARKEGDKTREKELIEKIDGFQTHVVPVIADIDAGFGNAEATYLLAKKMIEAGACALQIENQVSDEKQCGHQDGKVTVPHDVFLAKIRACRHAFLELGVEDGVVVTRTDSLGAGLTQQIAVSHKPGDIGDQYNSFLDCEEITAENARNRDVIINRNGKMMRPKRLPSNLYQFRPGTGEDRCVLDCITSLQNGATDLDRDQS

SEQ ID NO: 5642 - protein, 231 aa, Triticum aestivum
MPESDNDSGGPSNTGGEGELSSPREQDRFLPIANVSRIMKKALPANAKISKDAKETVQECVSEFISFITGEASDKCQREKRKTINGDDLLWAMTTLGFEDYVDPLKHYLHKFREIEGERAAATSTSTSTTPDMPRNNNNNARRLPRRPGRHDDDGAAHVPARPHHKEPNKIAMGRGEAGFYFGGGGSSVLTEKGLFLFLFFSFWLTRGGFQTVSFWVKTLLKFFPGGFFPV

SEQ ID NO: 5643 - protein, 478 aa, Ralstonia eutropha JMP134
MHAQHFVANRLIAPDNGLRIKVFDPSNGEPFAEIARGNATDINVAVHAARQAADGAWGAMAPAERVRLLNRVALTLVAHEEELTALETRDTGKPVRQARADARAVARYFEFYAGAVDKLHGQTIPYNPGYTVFTLREPHGVTGHIIPWNYPLQIFGRSVGAALAAGNACVVKPAEDACLSLLRVAELAAEAGLPEGALNIVTGYGHEAGAALARHPGINHISFTGSPQTGKLVSQLAAENHVPVTLELGGKSPQIVFADADVDALVPVIVNGIVQNAGQTCSAGSRVLVERPLYNALLDRIASVFESLRVGPSELDLECGPLISRKQQQRVWDFVSDAQHAGISVMAQGQIVAEAPESGYYQVPMLFRDVPPAHRLAQEEVFGPLLAAMPFDSEAEAVALANGTPYGLVAGLWTRDGGRQLRLARKLRAGQVFINNYGAGGGVELPFGGTGQSGYGREKGFEALYGFTTLKTIAIQHG

SEQ ID NO: 5644 - protein, 178 aa, Triticum aestivum
  unsure (1)..(178): unsure at all Xaa locations
MAPTVMASSATSVAPFQGLKSTAGLPVSRRSNGASLGSVSNGGRIRCMQVWPIEGIKKFETLSYLPPLSTEALLKQVDYLIRSKWVPCLEFSKVGFIFREXHNASPGYYDGRYWDNVGSCLCSGGTDATKGVQRRWRXAKKGLPDAFVRIIGFQKHXQVQXVRFIASXQPGWKESRKG

SEQ ID NO: 5645 - protein, 354 aa, Burkholderia cepacia R18194
MKAAVWHGRHDIRVEQVPVPERPPAGWVTIRVHWCGICGSDLHEYVAGPVFIPVDAPHPLTGLKGQCILGHEFSGEIAELGAGVTGFAVGDRVTADACQHCGTCWYCKHGLYNICENLAFTGLMNNGAFAEYVNVPAELLYKLPDDFPTEAGALIEPLAVGLHAVKKAGNIVGQTVVVVGAGTIGLCTIMCAKAAGAGRVIALEMSAARKQKALEVGASVVIDPKTSDAIAEVKALTGGYGADVSFECIGHTTTAKLAIDVIRKAGKSVMVGIFEEPAPFNFFDIVSTEKEVIGSLAYNGEFADVIRFIADGRIDVQPLITGRIALGDIVSHGFEELVNHKERNVKIIVQPALA

SEQ ID NO: 5646 - protein, 360 aa, Triticum aestivum
MGSTATDMAASAHEEACMFALQLGSSSILPMTLKNSIELGLLDTLVAADGKLLSPAELAAKLPSTANPAAPDMVDRMLRLLASYKVVSCTLEEDKDGRLSRRYGAEPVCKFLTPNEEGVSMAPLALMNQDKVLMESWYYLKDAVLDGGIPFNKAHGMSAFEYHGTDPRFNRVFNEGMKNHSIIITKKLLELYKGFNGLDTLVDVGGGIGATVGAITAHYPTVKGINFDLPHVISEAPPFSGVTHVGGDMFQKIPSGDTILMKWILHDWSDEHCATLLKNCYDALPAHGKVVLVECILPVNPEATPEAQGGFHLDMIMLAHNPGGRERYEREFEALAKGAGFGAIKTTYIYANIWVIEFTK

SEQ ID NO: 5647 - protein, 468 aa, Bacillus halodurans C-125
MDLYINGEWMRSGKTLDVTNPATGEVIDTVPFAGKKEAELAVSAAYEAFPQWSSQTASERSRYLMRWFQLIDEQQDEIGEIMTKEQGKPLREAIGEVQYANSFIQWYAEEAKRIYGDTIPASAINKRILVQKQPVGVIAAITPWNFPAAMITRKVAPALAAGCTAIVKPAEQTPLTALKLAQLAEEAGIPAGVLNVITGNAQDIGEAWLEDSRVRKITFTGSTEVGKLLMRGAAQTVKKISLELGGHAPFIIMDDANLEEAVDQVIASKFRNAGQTCVCANRIYVAREIAEAFTEKFAAKVNELKVGNGLEEGVTIGPLIDKAAVEKVEAHIHDALKKGGQVTVGGRWTNHFFEPTIITGATDEMLCMNEETFGPLAPVATFDTEEEVIERANHTPYGLAAYVFTENIGRAIRLSEKLEYGIVGVNDGMPSVAQAPFGGWKESGLGREGGKYGIEEYLEVKYVSVAFK

SEQ ID NO: 5648 - protein, 486 aa, Saccharomyces cerevisiae
MGTGKKEKSRRIREGDTKDGNLRVKGENFYRDSKRVKFLNMYTSGKEIRNKKGNLIRAASFQDSTIPDARVQPDRRWFGNTRVISQDALQHFRSALGETQKDTYQVLLRRNKLPMSLLEEKDADESPKARILDTESYADAFGPKAQRKRPRLAASNLEDLVKATNEDITKYEEKQVLDATLGLMGNQEDKENGWTSAAKEAIFSKGQSKRIWNELYKVIDSSDVVIHVLDARDPLGTRCKSVEEYMKKETPHKHLIYVLNKCDLVPTWVAAAWVKHLSKERPTLAFHASITNSFGKGSLIQLLRQFSQLHTDRKQISVGFIGYPNTGKSSIINTLRKKKVCQVAPIPGETKVWQYITLMKRIFLIDCPGIVPPSSKDSEEDILFRGVVRVEHVTHPEQYIPGVLKRCQVKHLERTYEISGWKDATEFIEILARKQGRLLKGGEPDESGVSKQILNDFNRGKIPWFVLPPEKEGEEKPKKKEVEKTA

SEQ ID NO: 5649 - protein, 496 aa, Pseudomonas putida KT2440
MVAGLLERLGVAAEAYTQGDYPVHTPIDGSQIASVKLLGKAETIARIDQAQSAFEAWRSVPAPRRGELVRLFGEVLREHKADLGELVSIEAGKITQEGLGEVQEMIDICDFAVGLSRQLYGLTIASERPGHHMRETWHPLGVVGVISAFNFPVAVWAWNTALALVAGNSVVWKPSEKTPLTALACQALFEKALKAFGDAPAGLAQLVIGGREAGEAMVDDPRVPLVSATGSTRMGREVGPRVAARFGRSILELGGNNAMILAPSADLDLAVRGILFSAVGTAGQRCTTLRRLIVHRSIKDEVVARVKAAYGKVRIGDPRKDNLVGPLIDKQSFDAMQGALAKARDEGGQVFGGERQLADQYPNAYYVSPAIAEMPAQSDVVRHETFAPILYVLAYDDFEEALRLNNEVPQGLSSCIFTTDIREAERFQSASGSDCGIANVNIGTSGAEIGGAFGGEKETGGGRESGSDAWKGYMRRQTNTVNYSRELPLAQGIVFD

SEQ ID NO: 5650 - protein, 187 aa, ASPERGILLUS NIDULANS FGSC A4
MTTEEAEIKDERLETPHEEGGDDEEEIEAMKRRVAEMESEAAKLREMQATLDQQSESLKEDKEDIDARSIFVGNVDYGASPEEIQAHFQSCGSINRVTILLDKFTGQPKGYAYVEFAEPSLVAQALVLNESVFRGRNLKVVPKRTNLPGMSSRGRGRGRGRGYGRGGFPRGGYRGGYRGRGRGYAPY

SEQ ID NO: 5651 - protein, 313 aa, Glycine max
KLLNQQVSFFFSFFLLNYSSFYKLLLYHSSGVYLQEVLLPGGHGLMVRGYLPVVNSLAKGLDIRLGHRVTKVVRRYNGVKVTVENGKTFFADAAVIAVPLGVLKAKKILFEPKLPDWKEAAIADLGIGLENKIILHFENVFWPNVEFLGVVADTPYECSYFLNLHKATGRAVLVYMPSGQLAKDVEKMPDEAAVNFAFMQLKKIFPDASSPIQYLVSRWGSDINSLGSYSYDAVGKPHELYERLRVPVDNLFFAGEATSMSYPGSVHGAYSTGTMAAEDCRMRVLERYGEVDLFQPVMGEEGSMSIPLQISRL

SEQ ID NO: 5652 - protein, 144 aa, Glycine max
  unsure (1)..(144): unsure at all Xaa locations
FAFLISYDNPGILAGLGCSASSQAKRGRGLELSRIQAHRGPDWSQLHQYGDHYLAHHRLAIXDPAHGEHPLFNADYTESVPVNGEIYNHEELMXQLPNDTFQTGCDXDVIAHLHEEHGDYYMDMLDGIFSAALLDSRDSMHIVA

SEQ ID NO: 5653 - protein, 442 aa, Mesorhizobium loti MAFF303099
MSNRLKVTPNDLSAFWMPFTANRQFKQAPRMFVSAKDMHYTTSDGRKVLDGTAGLWCVNAGHCRPKITEAIQHQAAELDYAPAFQMGHPIVFELANRLVDIAPKGMDHVFFTNSGSESVETALKMAIAYHRMKGEGARTRLIGRERGYHGVNFGGISVGGIVSNRKMFGTLLGGVDHMPHTHLPEKNAFSKGVPEYGAELANELERIVALHDASTIAAVIVEPVAGSTGVILPPKGYLQKLREICTKHGILLIFDEVITGFGRLGAPFAADYFGVVPDIMTTAKGVSNGVIPMGAVFVKKEIHDAFMTGPEHMIEFFHGYTYSGNPIACAAALGTLDTYKEEGLLTRGEELAPYWEDALHSLKGEPHVIDIRNIGLIGAIELAPIAGSPTKRAFSAFVKAFERGALIRTTGDIIALSPPLIITKGQINELIDHVREVLRSID

SEQ ID NO: 5654 - protein, 327 aa, Triticum aestivum
MKTLLILTILAMAITIGTANIQVDPSGQVQWLQQQLVPQLQQPLSQQPQQTFPQPQQTFPHQPQQQVPQPQQPQQPFLQPQQPFPQQPQQPFPQTQQPQQPFPQQPQQPFPQTQQPQQPFPQQPQQPFPQTQQPQQPFPQLQQPQQPFPQPQQQLPQPQQPQQSFPQQQRPFIQPSLQQQLNPCKNILLQQCKPASLVSSLWSIIWPQSDCQVMRQQCCQQLAQIPQQLQCAAIHSVVHSIIMQQQQQQQQQQGMHIFLPLSQQQQVGQGSLVQGQGIIQPQQPAQLEAIRSLVLQTLPSMCNVYVPPECSIMRAPFASIVAGIGGQ

SEQ ID NO: 5655 - protein, 505 aa, Glycine max
MSSLSNNSSSSHGNSFLQMPPIKFTKLFINGDFVDSLSGRTFETIDPRTEEVIARVSEGDKEDIDIAVKAARQAFDSGPWPRLPASERAKIMMKWADLIDENIEELAALDTVDAGKLNYINKVVEIPSATNALRYYAGAADKIHGEVLKMNGDFHAYTLLEPIGVVGHIIPWNAPSLSFFIKVSPSLAAGCTMVLKPAEQTPLSALFYAHLAKLAGIPDGVLNIVPGFGPTAGAAISSHMDIDVVSFTGSIEVGREVMQAAARSNLKPVSLELGGKSPLIIFNDADIDKAAQLALFGIMSNKGEICVASSRVFVQEEIYDEFEKKLVEKAKSWVVGDPFDPKSLQGPQADRNQLEKILSYIEHGKREGATLLTGGNTVGNKGYYIEPTIFCNVKEDMLIARDEIFGPVLALMKFKTMEEAIKSANNTKYGLAAGIVTKNLDTANTMSRSIRAGIVWINCYLTVGSDVPFGGYKMSGFGRDLGLQALHKYLQVKSVVTPIHNSPWL

SEQ ID NO: 5656 - protein, 408 aa, Glycine max
FGSRLGRVLGHGSFAKVYHARNLKTGQHVAMKVVGKEKVIKVGMMEQVKREISVMKMVKHPNIVELHEVMASKSKIYISIELVRGGELFNKVSKGRLKEDLARLYFQQLISAVDFCHSRGVYHRDLKPENLLLDEHGNLKVSDFGLTAFSDHLKEDGLLHTTCGTPAYVSPEVIAKKGYDGAKADIWSCGVILYVLLAGFLPFQDDNLVAMYKKIHRGDFKCPPWFSLDARKLVTKLLDPNPNTRICISKVMESSWFKKQVPRKVEEVVEKVDLEEKIENQETMNAFHIISLSEGFNLSPLFEEKRKEEMRFATAGTPSSVISRLEEVAKAGKFDVKSSETKVRLQGQERGRKGKLAIAADIYAVTPSFMVVEVKKDNGDTLEYNQFCSKQLRPALKDIFWNSAPASA

SEQ ID NO: 5657 - protein, 90 aa, Triticum aestivum
  unsure (1)..(90): unsure at all Xaa locations
MALRGVHTVAPFQGLKCTAGMPVARRXGNSSFGNVSXGGRIRCMXVWPIEGIKKFETLYYLTPITVEDLLKQIENLLRSRGCLLEGPVPP

SEQ ID NO: 5658 - protein, 432 aa, Sulfolobus tokodaii str. 7
MDCIFIFRRDLRLEDNTGLNYALSECDRVIPVFIADPRQLINNPYKSEFAVSFMINSLLELDDELRKKGSRLNVFFGEAEKVVSRFFNKVDAIYVNEDYTPFSISRDEKIRKVCEENGIEFKAYEDYLLTPKSLFHHRNFTSFYNEVSKVKVREPETMEGSFDVTDSSMNVDFLLTFKKIESPLFRGGRREGLYLLHRNVDFRRRDYPAENNNYRLSPHLKFGTISMREAYYTQKGKEEFVRELYWRDFFTLLAYYNPHVFGHCYRREYDNISWENNESYFEAWKEGRTGYPIIDAGMRMLNSTGYINGRVRMLVAFFLVKVLFVDWRWGERYFATKLVDYDPAINNGNWQWIASTGVDYMFRVFNPWKQQEKFDPEAKFIKEWVEELKDVPPSIIHSIYKTKVPGYPSPIVNWLERVNYVKSEYKNVKAVL

SEQ ID NO: 5659 - protein, 193 aa, Zea mays
  unsure (1)..(193): unsure at all Xaa locations
GSNKIKIFHQRNTEAVLKMLSEIGSVDNIPEFIEGVKNRKRKMSGFGHRVYKNYDPRAKVIKKLADEVFSIXVGRDPLIEVAVALEKAALSDDYFVKRKLYPNVDFYSGLIYRAMGFPPEFFTXVLFAIPRMGWILXSHWKESGGMILDTKDHAHNRGTPPGRCGLRHLHTSLKGRGMEAKGGQNRVGVQVST

SEQ ID NO: 5660 - protein, 339 aa, Zea mays
  unsure (1)..(339): unsure at all Xaa locations
MTMVDDPTTNAVVSWSAANNSFVVWDPHIFGTVLLPRYFKHNNFSSFVRQLNTYVAVLPCLFLRLWNHARRDDAAVXKGFRKVDPDRWEFANEEFLRGQRHLLKNIRRRKPPHSSPNQQSLGSYLEVGHFGYEEEIDQLKRDKQLLMAEVVKLRQEHQNTRSDLQAMEEKLQDTEQKQQQMMAFMARVMQNPDFMRQLISQREMRKELEDAISKKRRRRIDQGHEAGSMGTGSSLEQGPQGVFEPQEPVESLANGVPSDLESSSVEAKGLEVRQGVSSGGSEHLNGRPSGELNDDFWEDLLHEGGLGADAGNAVGQDDMNMDMDPDVSLPQLKQHGPRH

SEQ ID NO: 5661 - protein, 1172 aa, Oryza sativa (japonica cultivar-group)
MVCGNVSTVVPMLQHTSMAREQKLVLDADADDDGLHHTGAGGKQQKLVLDAAADGLHLTGVGGKQHNLVLDAGAGGKQQKLVLDAADDGLHLAGVGGKQHNLVLDAGTGRKQQKLVLDADDDGLHLAGVGGKQHNLVLDAADDGLHLPGVGGKQHNLVVDAGAGGKQQKLVLDDADDGLHLAGVGGKQHNLVVDAGASGKQQKLVLDAADDGLHLAGVGEKQHNLVLDAVTDGLHLAGVGGKQHNLVLDAGTGRKQQKLVLDADDDGLHHTGAGGKQQKLVLNAADDGTTWCSMPPTTGFTSPAWDAADDGLHLAGVGGKKHNLVLDAAPDGLHLAGVGGKQHNLVLDAGTGRKQQKLVLEDDGLHHTGAGRKQQKLVLDAANDGLHLAGVGGKQHNLVLDAADDGLHLAGVGGKQHNLVVDAGAGAKQQKLVLDAADDGLHLAGVGGKQHNLVLDAGAGGKQQKLVLDAADDGLHLAGVGWKQHNLVLDAGAGGKQQKLVLDTAVDVSQHTVGGAEQNLLLDSTDDGLHHTGAGGEQNLVIDDDIDGSNHTVGGAEQDDGLHTTGAGWEQNLVLCTDVDGLLHTGAGGEQNMVCDNVGTIVSGLHDTIARWERNLVFDDVGTAVPWLRHTGVDGKQNLVYHLATATVQSVWRENCMEQFKLVLEALHQPHRHLYIAVDMEFAADAATNVSHRPVTSISCYQHMRRYVNGGGIFQMGLTFAFVGEGEQAPSPLIALEINFDFNVNSPKYHGKSIDFLSSQGHDLTQHSKRGVAPEFVYEGLLRHLPFGDGSVTWVAFHGDYDLAFLLRLLQGGDHGGNCLLPPKLATFLQKVREKFPVVYDVRVLGKLVKDGFNGSLTALAEYLGIPRNGDEHHAGSDALLTLSCFFKIVSLSGHQMHRMDARRGLLAGLEEWNMAIKCARHIDNHTGSIYVVKMLPHKLDEEARRIEELVASNFNIVGVEVIHAQLGKRSYAVEAQQNYELIKTFLKDSDLYEIIVTFMNAEGMLAYSRAWKFCISSRADNACVHPQQFAKFMASCGALGDPNISWVTFHGAHGIARMIRSFLSPQDLPSQWCSYIGHRRAFFPAIYDVALLVRRSFDIITIPWIECKGGLLDVAQALNLKEIEADMEAARVLLTLRCYMRLAERPDFPGTKMAVQGLLKESCCWKCPANC

SEQ ID NO: 5662 - protein, 75 aa, Zea mays
GPVGVNPGEYPPLKAPGGKVFFPGEPTIQHNKGFVPGDYFSVFGGEEIFNDCAQKKMCKYKVQGKYVLEGHGDGN

SEQ ID NO: 5663 - protein, 360 aa, Glycine max
MGESNVMTKTEDGACLSAMLLSTNLVYPAVLNAAIELNLFEIIAKATPAGSFMSSHEIASKLPTQHPDLPNRLDRMLRLLASYSVLTTSTRTTHHGATETVYGLSQVGQYFVPDGTRGYLASFTAFVCYPPLLQVWLNFKEAVVDADIDLFKKILGVTMYQYMENDPKMNQIFNKSMANLCATEMSRILEIYTGFEGISTLVDVGGGNGQNLKMIISKYPLIKGINFDLPQVIENAPPLPGIEHVGGDMFAKVPQGDTIILKAVCHNWSDEKCIEFLRNCHKALSPNGKVIVVEFILPEEPEPTEESQLVSTLDNLMFITVGGRERTQKQYETLCKLSGFSNFQVACRAFSSLGVMEFYK

SEQ ID NO: 5664 - protein, 331 aa, Vibrio cholerae O1 biovar eltor str. N16961
MIFDSQSSRVSMIKKIGVLTSGGDAPGMNAAIRGVVRTALGAGLEVFGIYDGYQGLYEDRIKQLDRSSVSDVINRGGTFLGSARFPQFREVEVREKAIENLKKHGIEALVVIGGDGSYMGAKKLTEMGFPCIGLPGTIDNDIAGTDYTIGYLTALNTVIEAIDRLRDTSSSHQRISIVEIMGRHCGDLTLTSAIAGGCEYIITPETGLNMEQLISNIKDGIAKGKKHAIIALTELMMDANKLAKEIESATGRETRATVLGHIQRGGKPTAFDRVLASRMGNYAVHLLMEGHGGRCVGIQKEQLVHHDIIDAIENMKRPVRTDLYKVAEELF

SEQ ID NO: 5665 - protein, 69 aa, Glycine max
  unsure (1)..(69): unsure at all Xaa locations
CRNATSAVPAGASMVAPFTGLKYIAVLPTRNTILDFAYIASNGXRAQCMHVWPPIGKKKVETLSYLPDL

SEQ ID NO: 5666 - protein, 462 aa, Oryza sativa (japonica cultivar-group)
MENNMQAARTATTRERAPPRATAISRYIFLALARIPVNKCVAWRSAGALLLLVTDMAAMASAAAEVPSYFVCPISLQLMRDPVTLPTGISYDRAAIARWLAAPGARRTCPVTRQPLEHGLELTPNHTLRRLIQSWAASVSPGSAVDEEVAALRPVSSDEVASLLSDAAAAQVGALRRLRELAAECEDSRAMLESQGGVFDVLSRVVTSGSACSTAREEAVGVLASLRIPEQELIGVSTRHGNLAESLTAVLRSSNLQSRAHAVQLVRTLADAVVPAWVIGLNAELLAEVVGVVRDRVSARATKASLHALAALCPYGRHRVKIVGAGAVAALVELLLDEPERRVCELALAVLDRLCTCAEGRAELVAHAAGVAVVGKKVLRVSEAASERAVRVLRSVARHAATPAVLQEMAQCGVVGKLCLALRSEQCGVKTKEKAHEVLKLHSRVWRASPCLSPSFLALYPS

SEQ ID NO: 5667 - protein, 491 aa, Bacillus sp. KSM-K16
MIRGKMFINGEWTDAKNGRVREIINPFNQEVIATVPEGSAEDSHAAIAAARAAFDEGVWSAASASERGERVRLIGQKIANQNEEFARLESLDTGKTLEESRTDMEDIANVFFYFAGLADKNGGEVIRSPLPNSTSIVVREPVGVCGLITPWNYPLLQAAWKLAPALVAGNTLILKPSELTPLTTMKLFELFEEVGLPTGVANLVLGTGKEVGAPLAESTDVDLISFTGGIETGKTIMQAASSNVKKMALELGGKNPNIVFADADFETAIDQALNAVFFHAGQVCSAGSRLLVEEAIHDDFVEELVKRTKRIKLGNGFDEKTESGPLISAAHRAKVESYIQIGLDEGATLACGGKRPDAAELQNGFFLEPTIFTNCRSSMRIVQEEVFGPVLTVETFRTTEEAIAKANDTIYGLAGAIFSNDIGKAERIASKLRLGTVWINDFHPYFVQAPWGGYKQSGFGRELGKIGLEEYTETKHIFRNKQPQPIGWFRG

SEQ ID NO: 5668 - protein, 478 aa, Burkholderia cepacia R1808
MDITYDALHLFIDGEWIGASERETAPVINPATQIQIGRVPLATAADLDRALQAAVPAFDVWRNTVPAERARILKRAAELMRERAEHIATVMTLEEGKPLAESRDEVLRAADYFEWFAEEARRIDGRVVPSNRPGVQQLVKKQAIGPVAAFTPWNFPAITPARKLSAALAAGCSVIIKPGEESPATALALARALDDAGLPKGVLQVVFGVPDQVSTQLIASPVIRKVTFTGSVPIGRLLSARAAEGVKPITLELGGHGPVLVFNDADVEKAAVEGAANRFRGTGQVCISSTRFLIQREVYDEFVGHFVRATSALKVGNGMDAGTQVGPLANPRQLAKMEELIADAVERGATILAGGKRIEGEGYFFEPTVLADVPKDARVMHEEPFGPIAVLMRFDALADGLAEANRLPYGLSAYAFTSSARTAIDVADGLEAGMIGINQYRIVSTELPFGGMKESGHGSEGGTEGIEYYLTHKFISQA

SEQ ID NO: 5669 - protein, 373 aa, Zea mays
PLWVDVLRATLRHGLAPRVWTDYLRLTVGGTLSNAGIGGQAFRHGPQIANVHELDVVTGTGEMVTCSMDVNSDLFMAALGGVRWVPLAYTDVATFTKDQEFLISNRASQVGFDYVEGQVQLSRSLVEGPKSTPFFSGADVARLAGLASRTGPAAIYYIEGAMYYTKDTAISVDKKMKALLDQLSFEPGFAFTKDVTFVQFLDRVREEERVLRSAGAWEVPHPWLNLFVPRSRILDFDDGVFKALLKDSNPAGIILMYPMNKDRWDDRMTAMTPATNDDDVFYAVSFLWSALSADDVPQLERWNKAVLDFCDRSGIECKQYLPHYTSQDGWRRHFGAKWSRIAELKARYDPRALLSPGQRIFPVPVEASGIASA

SEQ ID NO: 5670 - protein, 467 aa, Caulobacter crescentus CB15
MNAPIRNHDVAELKRLDLAHHLPAQADHKVIAELGGSRIVTRADGCYITDGDGHRILDGMAGLWCVNVGYGRKELADAAYEQMLELPYYNTFFKTATPPTVKLAAKIAEKMGGHLTHVFFNSSGSEANDTVFRLVRHYWKLKGQPNRTVFISRWNAYHGSTVAGVSLGGMKHMHVQGDLPIPGVEHVMQPYPFGEGFGEDPAAFRDRAVKEIEDKILEVGPENVAAFIGEPVQGAGGVIIPPDGYWPAVEAVCRKYGILLVCDEVICGFGRLGQWFGHQHYGIKPDLIAMAKGLSSGYLPISAVGVADHIVAELREKGGDFIHGFTYSGHPTCAAVALKNIEIIEREDLITRTREDTGPYLAKALARLNDHPLVGETRSLGLIGAVEIVREKGTNHRFLDKEGEAGPIVRDICIRNGLMVRAIRDSIVCCPPLIVSHAEIDELVGIIEKSLTEAEPILRALKPEAVS

SEQ ID NO: 5671 - protein, 354 aa, Vitis aestivalis
MRRGPLNPSNLKLTLPPDEDSLTKFLTQSGTFMDGDLLVNRDGVRIVSKSEAEVPPLIKPSDNQLSLADIDTIKVIGKGAGGTVQLVQHKWTGQFFALKVIQMNIQEAALKHIAQELKINQSSQCPYVVVCYKSFYDNGAFSIILEYMDGGSLLDFLKKVKSIPEPYLAAICNQVLKGLSYLHHERHIIHRDLKPSNLLINHRGEVKITDFGVSAILTSTSGQANTFVGTYNYMSPERISGGKYGSKSDIWSLGLVLLECATGQFPYSPPEQGEGWTSFYELMEAIVDQPPPCASTNQFSAEFCSFISACIQKDPNDRKSAHELMAHPFISMYRDLNVDLATYFTNAGSPLATF

SEQ ID NO: 5672 - protein, 244 aa, Haematococcus pluvialis
MATERELALYSAKLSEQAERYPDMVSEMKKIAAGAQDQELSVEERNLLSVAYKNLVGARRASWRILQSVEQSELAKGNEKRVKLIQKYRTVVEKELDEVCGEILSLLDTYLVPSASSVEASVFYLKMKADYHRYLAEFKVDEDRRSAAEKTLEAYKAAQNKATSELPSTNPIRLGLALNFSVFYYEVLNQPDQACSLAKQAFDEAISDLDTLGEDSYKDSALIMQLLRDNLTLWTSEMQDSKPE

SEQ ID NO: 5673 - protein, 119 aa, Vitis aestivalis
MGSSGAVKLACVMVICMVMAAPAAVEAAITCGQVASALSPCISYLQKGGAVPPACCSGIKSLNSSAKTTADRQAACKCLKNFSSTVSGINLSLASGLPGKCGVSVPYKISPSTDCTKVT

SEQ ID NO: 5674 - protein, 147 aa, Glycine max
  unsure (1)..(147): unsure at all Xaa locations
DSGALLKLFTSQHLPHTQVGLFNFINMYFPTVSPIKHLIKFCSSLHGGLSKLSEMLEVSRVGIYHQAGSYSXLPSCAFRKLKAHFSSGSLDKYPGVLYGLGVHNAQGSPLQEKKGPINNAIRTKTNQASVDLSLFELLHIWRNTHFY

SEQ ID NO: 5675 - protein, 224 aa, Zea mays
VFRTTLASSTWQRHMRRDLCTSVSPADLARAMVAVDPDHPTGTEGRDPRGMSVLQQHVAFFDRDGDGVVYPWETFKGMRAIGCGFFTSLVLSFLINLVMSYPTQPGWLPSLLLSVHVKNIHKAKHGSDSETYDTEGRFDPSKFDAIFSKYGRTHPDALTKDEMNSMLKANRNIYDFLGWIAAIGEWHLLYSVAKDKDGLLQRETVRGLFDASLFERLQDSKKSS

SEQ ID NO: 5676 - protein, 316 aa, Glycyrrhiza glabra
MAAAAIEIPTKVLPNSTCELRVPVIGMGSAPDFTCKKDTKEAIIEAIKQGYRHFDTAAAYGSETALGEALKEARDLGLVTREDLFVTSKLWVTENHPHLVVPALRKSLETLQLEYLDLYLIHWPLSSQPGKFSFPIQAEDLLPFDVKGVWESMEESLKLGLTKAIGVSNFSVKKLQNLLSVATIRPAVNQVEMNLAWQQKKLREFCNANGIVLTAFSPLRKGASRGPNEVMENDMLKGIAEAHGKSIAQVSLRWLYEQGVTFVAKSYDKERMNQNLQIFDWELTTEDHQKIDQIKQNRLIPGPTKPQLNDLWDDEI

SEQ ID NO: 5677 - protein, 170 aa, Triticum aestivum
VASSATSVAPFQGLKSTAGLPVSRRSNGASLGSVINGGRIRCMQVWPIEGIKKFETLSYLPPLSTEALLKQVDYLIRSKWVPCLEFSKVGFIFREHNASPGYYDGRYWTMWKLPMFGCTDATQVINEVEEVKKEYPDAYVRIIGFDNMRQVQCVSFIAFKPPGCEESGKA

SEQ ID NO: 5678 - protein, 161 aa, Zea mays
  unsure (1)..(161): unsure at all Xaa locations
MDARMFGLENPLVAALHHLLDVPDGDAGAGGDKAGGGATRTYVRDARAMAATPADVKELAGAYAFVVDMPGLSTGDIRVQVEDERVLMISGERXRREEREDAKYLRMERRMGKFMRKFVLPDNADVDKVAAVCRDGVLTATVEKLPPPEPKKPKTIEIKVA

SEQ ID NO: 5679 - protein, 317 aa, Zea mays
GRAITCLAARRGGFPPLTQLSSPPSAASSSSQSIADYTADAEWLVTRPPDAAFDYVEGFAFVNSDDPVNGWPSVPIPGGARFDPSLLPAGAGPVLYCLEVALYQYAHRPDDVDDDDEEDQAAVTVSRMMAPLKHVRGLEFAADVGYVDFLSRVNRVEEEARRNGSWDAPHPWLNLFVSARDIADFDRAVIKGMLADGIDGPMLVYPMLKSKWDPNTSVALPEGEVFYLVALLRFCRSGGPAVDELVAQNGAILRACRANGYDYKAYFPSYRGEADWARHFGAARWRRFVDRKARYDPLAILAPGQKIFPRVPASVAV

SEQ ID NO: 5680 - protein, 447 aa, Zea mays
IRLEWGLDGSVWFSSEMKALSDDCERFITFPPGHLYSSKTGGLRRWYNPPWFSETVPSTPYNALFLREMFEKAVIKRLMTDVPFGVLLSGGLDSSLVASVASRHLNETKVDRQWGNKLHTFCIGLKGSPDLKAAREVADYLSTVHHEFHFTVQEGIDALEEVIYHIETYDVTTIRASTPMFLMSRKIKSLGVKMVISGEGSDEIFGGYLYFHKAPNKKEFHEETCRKIKALHLYDCLRANKATSAWGVEARVPFLDKSFISVAMDIDPEWKMIKRDLGRIEKWVIRNAFDDDERPYLPKHILYRQKEQFSDGVGYSWIDGLKDHASQHVSDSMMMNAGFVYPENTPTTKEGYYYRMIFEKFFPKPAARSTVPGGPSVACSTAKAVEWDASWSKNLDPSGRAALGVHDAAYEDTAGKTPASADPVSDKGLRPAIGESLGTPVASATAV

SEQ ID NO: 5681 - protein, 324 aa, Candida tropicalis
MSTTPTIPTIKLNSGYEMPLVGFGCWKVNNETAADQIYNAIKTGYRLFDGAEDYGNEKEVGEGINRAIKEGLVKREELFITSKLWNNFHDPKNVETALNKTLSDLNLDYVDLFLIHFPIAFKFVPIEEKYPPGFYCGDGDNFHYEDVPLLDTWKALEKLVEAGKIKSIGISNFTGALIYDLIRGATIKPAVLQIEHHPYLQQPKLIEYVQKAGIAITGYSSFGPQSFLELESKRALNTPTLFEHETIKSIADKHGKSPAQVLLRWATQRNIAVIPKSNNPERLAQNLSVVDFDLTKDDLDNIAKLDIGLRFNDPWDWDNIPIFV

SEQ ID NO: 5682 - protein, 211 aa, Glycine max
MHVNVTILPRVRPRVRPRVRGRVGGPRVRPRVRKKLGFVTLSFACESESNNNQSIIMSSAKKITLKSSDGEAFEVDEAVALESQTIKHMIEDDCADSGIPLPNVTSKILAKVIEYCKKHVEAANPEDKPSEDDLKAWDADFVKVDQATLFDLILAANYLNIKSLLDLTCQTVADMIKGKTPEEIRKTFNIKNDFTPEEEEEVRRENQWAFE

SEQ ID NO: 5683 - protein, 336 aa, Glycine max
  unsure (1)..(336): unsure at all Xaa locations
AEFTLYTTCKLLRKGTPSCGKSRSGNPNNNNLFDGRQGESDHWSELDTDLYNWTKALRPVQWFPGHIAKAEKELKEQLKLMDVVIEVRDGRIPMSTSHPQMDLWLGNRKRILVLNREDMISTADRNAWADYFTRNGTKVVFSNGQLGMGTMKLGRLAKELAADVNVKRRSKGLLPRAVRAGIVGYPNVGKSSLINRLLKRRMCPAAPRPGVTRELRWVRFGKDLELLDSPGILPMRISDQSAAIKLAICDDIGERSYDVADVAAILVQMLSKLPTVGRDALCKRYKIDVDCRDGRIFIEKLAVXVFNGDVHQAAFRVLADFRKGKFGWTALERPPK

SEQ ID NO: 5684 - protein, 502 aa, Streptomyces avermitilis MA-4680
MRPGRQSAMTELVEHGQLFIGGVLADPLGKDVIEVISPHTEEVIGRVPHASTADVDRAVAVARKAFDEGPWPRATLDERIEVVTRIKDAIAVRHEEIARVISSENGSPYSWSVLAQALGAMMVWDAAITVARNFTYEETRDGVLGKIVVRREPVGVVAAVVPWNVPQFVAAAKLAPALLTGCTVVLKPSPESPLDAYLLGEIAREAGLPEGVLSILPADREVSEYLVGHPGIDKVSFTGSVAAGRRVMEVASRNLTRVTLELGGKSAAVVLPDADITTSVPGIVSAAWMNNGQACVAQTRILVPRSRYDEFADAFAAAASALVVGDPLDPATQVGPLVARRQQRRNLDYIRIGQEEGAKILTGGGRPPGLDRGWYVEPTLFGDVDNSMRIAREEIFGPVICLLPYGDETEAVKIANDSDYGLSGSVWTADVEHGIDVARRVRTGTYSVNTFSLDMLGPFGGYKNSGLGREFGPEGYGEFLEHKMIHLPAGYEAPTGVEGAGA

SEQ ID NO: 5685 - protein, 120 aa, Triticum aestivum
MRDAVLLRCDASMAAGSTSYGSSSGRRSFLAQAATAKQRRAPAPAGNGGKSDGGGYFGPEAAVVLALMTAALLVLPLLLPPLPPPPPLFLFVPVAILAVLLLLVLLPSDARGLRVAPSYL

SEQ ID NO: 5686 - protein, 374 aa, Petroselinum crispum
MESSSAATADHTHIKGVPTHGGRYVQYNVYGNLFEVSRKYVPPIRPVGRGAYGIVCAAMNSDTREEVAIKKIGNAFDNRIDAKRTLREIKLLRHMNHENVIAIKDIIRPPQIESFNDVYIVYELMDTDLHQIIRSNQQLTDDHCRYFLYQLLRGLKYVHSANVLHRDLKPSNLLLNANCDLKIGDFGLARTTSETDFMTEYVVTRWYRAPELLLNCSEYTAAIDIWSVGCILGEVMTRQPLFPGKDYVHQLRLITELIGSPDDASLGFLRSDNARRYVRQLPQYPKQQFSARFLNKSPGALDLLEKMLIFDPNRRITVDEALCHPYLAALHDINEEPVCPRPFSFDFEQPTCTEENIKELIWKESVKFNPDPIL

SEQ ID NO: 5687 - protein, 216 aa, Glycine max
FSRPGEYSGLEHQVVRGVVESLKIITRQASLRVAEYAFHYAKAHGRERVSAIHKANIMQKTDGLFLKCCREVAEKYPEITYEEVVIDNCCMMLVKNPALFDVLVMPNLYGDIISDLCAGLVGGLGLTPSCNIGEGGIALAEAVHGSAPDIAGKNLANPTALLLSGVTMLRHLNLHDKAEQIQKAILNTIAEGKYRTADLGGSSKTTEFTKAIIDHL

SEQ ID NO: 5688 - protein, 375 aa, Rhodococcus equi
GVTRNYTAEQVVKLQGTVVEEATLARRGSEILWDLVNNEDYINSLGALTGNQAVQQVRAGLKAIYLSGWQVAGDANLSGHTYPDQSLYPANSVPQVVRRINNALLRADEIAKVEGDTSVDNWLAPIVADGEAGFGGALNVYELQKAMIAAGVAGSHWEDQLASEKKCGHLGGKVLIPTQQHIRTLTSARLAADVADVPTVVIARTDAEAATLLTSDVDERDREFLDGTRTAEGFYGVKNGIEPCIARAKAYAPYSDLIWMETGVPDLEVAKKFAEAVRSEFPDQLLAYNCSPSFNWKAHLDDATIAKFQKELGAMGFKFQFITLAGFHSLNYGMFDLAHGYAREGMTAFVDLQEREFKAAEERGFTAIKHQREVG

SEQ ID NO: 5689 - protein, 472 aa, ASPERGILLUS NIDULANS FGSC A4
MSSPLSNSKRKRADSQHLSTADIAKSSTTDLLQPSSRDASGEEGDESTGPIISPVKASNNPPPKRARKASVSEGQSGDAGKDTSISKEDPGEPSETTPASSDIETHTKTRPGLHLNTKPDEELMKPPVLGKLQDPAGGYKTNPPPVGRPVRVYADGVFDLFHVGHMRQLEQAKKAFPDVYLIVGVTGDKETHERKGLTVLSGAERAESVRHCKWVDEVFPNCPWIVTPEFMEEHKIDYVAHDDLPYGAAEGDDIYAPIKAQGKFLVTQRTEGVSTTGVITRIVRDYDRYISRQFKRGASRQELNVSWLKKNELEIKRHVSELRDSIMTNWTNTGQELSRELRQLWNSRPNSPAPSTRTSMDWGSSRGVVSPTAGGKSHVSRVEALGRTESITGREPDFATGYSLGLIGGVRAWKAEASHQPVKKNTSLNWNAATVRDPPNLSGKLAVHRMCRTGEVTFMIFIFEAILGHIGT

SEQ ID NO: 5690 - protein, 376 aa, Vitis aestivalis
MGCFPCAGKSNKKGKKNQEKNSKDQIPSTSERLKVNSSVDGRKDASKDGGSDHIAAHTFTFRELAAATKNFRAECLLGEGGFGRVYKGRLESTNKIVAIKQLDRNGLQGNREFLVEVLMLSLLHHPNLVNLIGYCADGDQRLLVYEYMALGSLEDHLHDLPPDKKRLDWNTRMKIAAGAAKGLEYLHDKASPPVIYRDLKCSNILLGEGYHPKLSDFGLAKLGPVGDKTHVSTRVMGTYGYCAPEYAMTGQLTLKSDVYSFGVVLLEIITGRKAIDNSKAAGEHNLVAWARPLFKDRRKFSQMADPMLHGQYPLRGLYQALAVAAMCVQEQPNMRPLIADVVTALTYLASQKYDPETQPVQSSRMGSSTPRSRREL

SEQ ID NO: 5691 - protein, 482 aa, Caulobacter crescentus CB15
MTALNLVETAALIDGQWVRGEASFDVLNPADGTLIAAVADLGAAETTLAIDAAHRALPAWAARTAKERGAILRRWSDLILAHADDLARLMTDEQGKPLAEAKGEVVYGASFIDWFAEEAKRAYGHTIPTPMPGKRLASIKQPVGVCAAIAPWNFPIAMITRKVGPALAAGCTVVVKPAAETPLSALAIARLATEAGVPAGVLNIVTTTRSSEVGKVLCDDSRVRKLSFTGSTPIGKVLYQQCAGTMKKLSLELGGNAPFIVFDDADLEAAVDGAIASKYRNAGQTCVCANRLIVQSGIHDAFAARLAEKVAALKVGPGTGEGVQIGPLINEKALTKVVGLVSGAVQAGAEVLTGGDVHGLGGHFYQPTVLVGATPEMRIFQEEIFGPVAPIVKFETEAEAVELANATPFGLAAYFYSRDVGRCWRVAEQIEAGMVGINEGLISTEVAPFGGVKESGLGREGASEGLDEYLETKYLCFGGVAG

SEQ ID NO: 5692 - protein, 121 aa, Triticum aestivum
MAGCCVFLRRPSTSSAHRLGYHSLDGDHEAGPPPAATVTVVVGKERRVFAVDQLVLDTYPFRVLLETAARKEERRGKALFVDVDAILFEHILWLAGCHDRSAVSLLQPDLQDIIDFYSQDA

SEQ ID NO: 5693 - protein, 411 aa, Candida albicans
  unsure (1)..(411): unsure at all Xaa locations
MDNHQQQQQLQQYQQQFQQPQQQLYPGEQIVHPAAAQTGQNTTNVTAVSSSNITQSATSSLHSQQLQHVDVSKSAAEEAIRRSLLPERSTVSKGKYSLTDFSIMRTLGTGSFGRVHLVRSVHNGRYYAIKVLKKHQVVKMKQVEHTNDERRMLKLVEHPFLIRMWGTFQDSKNLFMVMDYIEGGELFSLLRKSQRFPNPVAKFYAAXVTLALEYLHSHDIIYRDLKPENILLDRNGHIKITDFGFAKEVSTVTWTLCGTPDYIAPEVITTKPYNKSVDWWSLGVLIFEMLAGYTPFYDSTPMKTYEKILAGKIHYPSFFQPDVIDLLTKLITADLTRRLGNLINGPADIRNHPWFSEVVWEKLLAKDIETPYEPPITAGVGDSSLFDHYPEEQLDYGSQGEDPYASYFLDF

SEQ ID NO: 5694 - protein, 496 aa, Caulobacter crescentus CB15
MTLPADMTERLAKLAPPSQAVIDGDLVEAASGATFHNVSPRDGQVLNLVTACQADDVERAVAGARAAFEDGRWRDQGPRQKKAVLFRLAELMERDADELALLESLDVGKPISDARNVDIPLAINTCRWYAEALDKVYGEVGTSPADRLSYAVHEPLGVIGAIVPWNFPLHMAMWKVAPALAMGNSVVLKPAEQSPLTALKLGALALEAGLPPGVLNVIPGLGGVAGEALALSMDVDMIAFTGSGPVGRRLMEYSARSNLKRVSLELGGKSPQIVFADCPDLEAAAQAAAWGVFYNQGEVCTAASRLLVEAPIKDAFLARVIEVAKGMKVGDPLDPSTQFGAMVSERQMNTALDYIATADSQGARRVLGGQRVRQEAGGFYVEPTIFDQVRPDQTLAREEVFGPVLGVMTFSSEDEAMRLANDTVYGLAAGLWTADVSKALRGARRLKAGLVWVNGWDACDITMPFGGFKQSGFGRDRSLHALHKYADLKSVSVTLR

SEQ ID NO: 5695 - protein, 173 aa, Flaveria pringlei
MASIPATVATVAQANMVAPFTGLKANAAFPVTKKVNDFSTLPSNGGRVQCMKVWPPLGKKKYETLSYLPDLTEVQLAKEVDYLLRNKWVPCLEFELEHGFVYRENARSPGYYDGRYWTMWKLPMFGCTDSAQVMKELQECKKEYPQAWIRIIGFDNVRQVQCISFIASKPGGF

SEQ ID NO: 5696 - protein, 110 aa, Arabidopsis thaliana
MSGVWVFKNGVIRLVENPNQSGSDTQNRRKVMVYLPTGEVVSSYSTLEQILQSLGWERYFGGGDTDLLQFHKRSSIDLISLPRDFTKFNSVYMYDIVVKNPNYFHVRDSH

SEQ ID NO: 5697 - protein, 439 aa, Caulobacter crescentus CB15
MPDFGANDLDAFWMPFTPNRRFKRHPRMLSSASGMWYRTPESREVLDATSGLWCVNAGHDRPKIREAIQKQAAEMDYAPCFNMGHPLAFQFASRLAQITPKGLDRIFFTNSGSESVDTALKIALAYHRARGKGTKTRLIGRERGYHGVGFGGISVGGIPKNRMYFGSLLTGVDHLPHTHGLPGNTCAKGQPENGAHLADDLERIVALHDASNIAAVIVEPVAGSTGVLIPPKGYLERLRAICDKHDILLIFDEVITGFGRVGAPFAAERFGVTPDLICMAKGLTNAAVPCGAVAASGKIYDAMMDGADAPIELFHGYTYSAHPLACAAGLATLETYREDDLFARAAGLEGYWQDAMHSLADARHVVDVRNLGLVAGIELEPRPGAPTARAMEVFETCFDEGLLIRVTGDIIALSPPLILEKDHIDRMVETIRRVLGQVD

SEQ ID NO: 5698 - protein, 315 aa, Glycyrrhiza glabra
MAAAIEIPTKVLPNSTCELRVPVIGMGSAPDFTCKKDTKEAIIEAIKQGYRHFDTAAAYGSETALGEALKEARDLGLVTREDLFVTSKLWVTENHPHLVVPALRKSLETLQLEYLDLYLIHWPLSSQPGKFSFPIQAEDLLPFDVKGVWESMEESLKLGLTKAIGVSNFSVKKLQNLLSVATIRPAVNQVEMNLAWQQKKLREFCNANGIVLTAFSPLRKGASRGPNEVMENDMLKGIAEAHGKSIAQVSLRWLYEQGVTFVAKSYDKERMNQNLQIFDWELTTEDHQKIDQIKQNRLIPGPTKPQLNDLWDDEI

SEQ ID NO: 5699 - protein, 497 aa, Pseudomonas putida KT2440
MTTLTRADWEQRAQQLKIEGRAFINGEYTDAVSGETFECLSPVDGRFLAKVASCDLADANRAVENARATFNSGVWSQLAPAKRKAKLIRFADLLRKNVEELALLETLDMGKPIGDSSSIDIPGAAQAIHWTAEAIDKVYDEVAPTPHDQLGLVTREPVGVVGAIVPWNFPLLMACWKLGPALATGNSVVLKPSEKSPLTAIRIAQLAIEAGIPAGVLNVLPGYGHTVGKALALHMDVDTLVFTGSTKIAKQLMVYAGESNMKRIWLEAGGKSPNIVFADAPDLQAAAEAAASAIAFNQGEVCTAGSRLLVERSIKDKFLPMVVEALKGWKPGNPLDPQTTVGALVDTQQMNTVLSYIEAGHKDGAKLLAGGKRTLEETGGTYVEPTIFDGVTNAMRIAQEEIFGPVLSVIAFDTAEEAVAIANDTPYGLAAGIWTSDISKAHKTARAVRAGSVWVNQYDGGDMTAPFGGFKQSGNGRDKSLHALEKYTELKATWIKL

SEQ ID NO: 5700 - protein, 309 aa, Bartonella vinsonii subsp. berkhoffii
ITYIDGNKGVLLYRGYPIEQLAEKGDFLESCYLLLYGELPTQQEKSDFDRCIMQHTMVHEQFARFFHGFRRDSHPMAVMVACLGAMSAFYHDSIDIIDPQQRMIASVRLISKVPTLAAMAYKYSIGQAFVYPRNDLSYAANFLRMCFSVPCEEYKTNPVLTRAMDRIFILHADHEQNASTSTVRLAGSSGANPFACIAAGVACLWGPAHGGANEACLKMLLEIGSVKRIPEFIARAKDKNDPFRLMGFGHRVYKNYDPRAKIMQKTCHEVLKELNIQNDPLLDIAIELEKIALNDEYFVEKKLYPSVDF

SEQ ID NO: 5701 - protein, 305 aa, Saccharomyces cerevisiae
MSSSSQFKQLEKLGNGTYATVYKGLNKTTGVYVALKEVKLDSEEGTPSTAIREISLMKELKHENIVRLYDVIHTENKLTLVFEFMDNDLKKYMDSRTVGNTPRGLELNLVKYFQWQLLQGLAFCHENKILHRDLKPQNLLINKRGQLKLGDFGLARAFGIPVNTFSSEVVTLWYRAPDVLMGSRTYSTSIDIWSCGCILAEMITGKPLFPGTNDEEQLKLIFDIMGTPNESLWPSVTKLPKYNPNIQQRPPRDLRQVLQPHTKEPLDGNLMDFLHGLLQLNPDMRLSAKQALHHPWFAEYYHHAS

SEQ ID NO: 5702 - protein, 104 aa, Triticum aestivum
  unsure (1)..(104): unsure at all Xaa locations
MAPTVMAWSDTSVAPFQGLKSTAGLPVSRRSNGASLGSVSNGGRIRCMQVWPIEGIKXIRDLSYLPTLNKEASSSKSTNXFAPNWVPCXSSTKVGSTSVNGMPV

SEQ ID NO: 5703 - protein, 425 aa, Triticum aestivum
  unsure (1)..(425): unsure at all Xaa locations
SKSRTQPETSKQPLPSLLLLCSSSLQSTLLASHRPIRWTAPXPARGRLAVLSSHLLAAGADPAAALERSPASAAAPGTRAGVLAVVDSRTGKRYEVKVSEDGTVRATDFKKITAGKDDKGLKTYDPGYLNTAPVRSSICYIDGDEGILRYRGYPIEEVAESSSFVEVAYLLMYGNLPSQSQLAAWEFAISQHSAVPQGLLDIIQSMPHDAHPMGVLASAMSTLSVFHPDANPALRGQDLXPSQTTRRALRALHNRGKMAAGDYQGLLVSSFVXLPSITIAFLVNFVYMLDDMXDINYQLNRLLESLLDLLVEHEANRETTCARALVRHLVSGGXVDVFTALXLAVGALFGALQRGSIECLMRLELVGVRVYTNYVHGVKVRRQKMSDVGHRVCRDSLTGATVIRKLAEEVVSIVRRDPLNEDAVS

SEQ ID NO: 5704 - protein, 431 aa, Vibrio cholerae O1 biovar eltor str. N16961
MVMADKKATLHIEGKAPIELPIMDGSLGPQVIDVRTLGSNGYFTFDPGFLATASCESQITYIDGAKGILLHRGYPIDQLANNADYLEVCYILLYGEAPNRKQYEEFKKIVTRHTMVHEQIASFFHGFRRDAHPMAVMCGVVGALAAFYHDSLDINNDTHREIAAYRLLSKMPTLAAMCYKYSVGQPFIYPRNDLSYAENFLHMMFATPCEEYEVNPIVARAMDKIFTLHADHEQNASTSTVRLAGSSGANPFACIAAGIASLWGPAHGGANEACLRMLEEIGSVDKIPEYVRRAKDKDDPFRLMGFGHRVYKNYDPRATVMREACHEVLKELSIQDPLLDVAMELERIALSDEYFIEKKLYPNVDFYSGIILKAIGIPVSMFTVIFAMSRTIGWIAHWNEMHSDPDNRIGRPRQLYTGQKLRDFTPLHERS

SEQ ID NO: 5705 - protein, 511 aa, Glycine max
  unsure (1)..(511): unsure at all Xaa locations
MEPNQLFSTHFRDGTIASCIEGQHRGAIPSVIVIGAGISGLAAARSLHDASFKVTVLESRDRLGGRIHTDFSFGCPVDMGASWLHGVCNENPLAPLIRGLGLSLYRTSGDNSVLYDHDLESYMLFNIDGKQVPQQMVIEVGDIFKKILEETGKVRDEHTEDISVSQAISIVLDRHPELRQQGLAHEVLQWFICRMEAWFAADADMISLKTWDQEHVLSGGHGLMVQGYDPIIKVLAKDIDICLNQRVKMISSGYNKVMVTVEDGRNFVADAAIITVPIGILKANLIQFEPKLPDWKVSAISDLGVGNENKIALRFDKVFWPNVELLGTVAPTSYTCGYFLNLHKATGHPVLVYMVAGRFAYDIEKLSDEAAANFVMQQLKKMFPNSSKPVMSASYLRTLTSLFVGLXVQYLVSRWGTDPNSLGCYSYDLVGKPLDVYDKLRAPLGNLFFGGEAVSLDNQGSVHGAYSAGVMAAENCESYLLEKLGHVEKLSLASVRHEMLETLIPLQISRM

SEQ ID NO: 5706 - protein, 140 aa, Ralstonia eutropha JMP134
MTNLRHFDPFSVEPISDMLQGMLRSFRGTADNGLAFKVDVSESESAYTLAAELPGVKKEDIDVSVDRGTVMISAKVEKSSEQKEGERVIRRERYSGSMQRAFTLDASIDEGKVEASYDNGVLRVVLPKKETSPQQRITVK

SEQ ID NO: 5707 - protein, 345 aa, Glycine max
MLLLERQRILLRAADLLEKHNDELAALETWDNGKPYEQAAKIEVPMLVRLIRYYAGWADKIHGLTVPADGPYHVQTLHEPIGVAGQIIPWNFPGKVVLELAAKSNLKPVTLELGGKSPFIVCEDADVDQAVELAHFALFFNQGQCCCAGSRTFVHESVYDEFVEKAKARALKRVVGDPFKGGIEQGPQIDSDQFEKILRYIRSGVESGATLETGGDKLGNKGFYIQPTVFSNVKDGMLIARDEIFGPVQSILKFKDLGEVVQRANNTRYGLAAGVFTTNMDTAYTLTRALRVGTVWINCFDTFDAAIPFGGYKMSGQGREKGEYSLKNYLQVKAVVNPLKNPAWL

SEQ ID NO: 5708 - protein, 339 aa, Arabidopsis thaliana
MGEAVEVMFGNGFPEIHKATSPTQTLHSNQQDCHWYEETIDDDLKWSFALNSVLHQGTSEYQDIALLDTKRFGKVLVIDGKMQSAERDEFIYHECLIHPALLFHPNPKTVFIMGGGEGSAAREILKHTTIEKVVMCDIDQEVVDFCRRFLTVNSDAFCNKKLELVIKDAKAELEKREEKFDIIVGDLADPVEGGPCYQLYTKSFYQNILKPKLSPNGIFVTQAGPAGIFTHKEVFTSIYNTMKQVFKYVKAYTAHVPSFADTWGWVMASDHEFDVEVDEMDRRIEERVNGELMYLNAPSFVSAATLNKTISLALEKETEVYSEENARFIHGHGVAYRHI

SEQ ID NO: 5709 - protein, 213 aa, Brassica napus
RPTRPGTLQSPGGSILWNGINTGARMRSSGSDWWYEDVSYLSVDLFRRLIKTMETKGIRAESLVGAMVYYARKYLPGLGRWQSRTSGSNNNKSRTSVVSFSLAAASSSSSSMSPVDQIALLETILSLLPEKRGRSFCKFLLCLLRVAFILGVDGSCVKQLERRIGMQLELATLENLLILNYSDSDTLYNVDCVERMIRHFVSSSSSSELSDFS

SEQ ID NO: 5710 - protein, 124 aa, Desulfitobacterium hafniense DCB-2
MSKTAEILEAVKGLTVLELAELVKAFEEEFGVSAAAPVAVAAAPGAAAAPVAEEQTEFDVVLMNAGAGKINVIKVVREITGLGLKEAKELVDGAPKPVKEKVSKDDAEAIKAKLVEAGATVEVK

SEQ ID NO: 5711 - protein, 272 aa, Zea mays
MTSASELFTARRAARGARISDLDLDPHADALRDQHGLGARHRRRGCRPRRQLDAAGDVRQHLHTGAPPPRRRGSYTDQILSYIDNNNLGVGDSAARRNRLDRLMFRTNERLPGAVLQAQARVLERLRGISLGSSASRPSISLDEFSASDVFRIIDFRNREARHEANRHHSSWFHPSSESDEERPTVSSTHSNRSTGLTKAAFLRLQVEIFEASKDDSREASPECSICLDGFYDGDELIRLRCGHRFHSTCLEPWARKCADCPYCRTNIRSRS

SEQ ID NO: 5712 - protein, 183 aa, Glycine max
  unsure (1)..(183): unsure at all Xaa locations
MEECHTVFGKYEMGRLLGKGTFAKVYYGKQISTGENVAIKVINKEQVRKEGMMEQIKREISVMRLVRHPNVVEIKEVMATKTKIFFVMEYVRGGELFAKISKGKLKEDLARKYFQQLISAVDYCHSRGVSHRDLKPENLLLDEDENLKISDFXGLSALPEQLRYDGLLHTQCGTPAYVAPGVL

SEQ ID NO: 5713 - protein, 122 aa, Vigna angularis
MIQPQTHLNVADNSGARELMCIRILGASNRRYAYIGDIVVAVIKQAVPNTNLERSEVIRAVIVRTCKQLKRSNGIIIQYDDNAAVIIDQEGNPKGTRIFCAIARELRQLNFTKIVSLAPEVL

SEQ ID NO: 5714 - protein, 451 aa, Staphylococcus epidermidis ATCC 12228
MANTRELNHKDAQYVWHPFTQMGVYAKNDNIIIEKGRGSYLYDTEGNKYLDGYASLWVNVHGHQHKKLNKAIHKQLDKIAHSTLLGSSNIPSIELAEQLVKLTPDRLQKVFYSDTGSASVEIAIKMAYQYWKNIDAKQYAKKNKFLTLHHGYHGDTIGSVSVGGIDSFHKIFKDLIFENIQIETPCLYKSKYRNEAEMLNSILNQIENILSERNDEIVGFILEPLIQGATGLFVHPHGFLKAVEQLCRKYDVLLICDEVAVGFGRTGEMFACNHEDVQPDIMCLGKAITGGYLPLAATLTSQKIYDAFLSQSHGKNTFFHGHTYTGNQLVCSVALENINLFKKKHLIGHIQKTSQTLKQRLEALQPHKNIGDIRGRGLMYGVELVENKSTQTPLDIPTVELIIRRCKENGLMIRNLENVITFVPILSMSNKEIKKMVKIFNKALHQTLGKK

SEQ ID NO: 5715 - protein, 169 aa, Triticum aestivum
  unsure (1)..(169): unsure at all Xaa locations
MAPTVMASSATSVAPFQGLKSTAGLPVSRRSNGASLGSVSNGGRIRCMQVWPIEGIKKFETLSYLPPLSTEALLKQVDYLIRSKWVPCLEFXSKVGFIFXREHNASXPGYYDGRLLGQCWKLPMFXGATDATQVINEVEEVKEGVPDAYVRIIXGFDNMRQVQCVSSSP

SEQ ID NO: 5716 - protein, 254 aa, Methanococcoides burtonii DSM 6242
MASYKLMVKDVIKQADILLEVVDARFPDETRNLEVERDVKRSGKPLIIVLSKCDLVSKETLQKAKSRLSKVAPTVFVSSKERYGTTMLRHKILEIADIQGRNILIGSLGYPNTGKSSVINGVAGKNKAGTSSISGHTKGVQIVKAGSRIVFIDTPGVIPFGDNDEYRQGLLGVKDATHLNDPIGVAMKIIAHICDNNKSVLEEFYNIEIKENNPEKVLELIGLKGNCLKKGGEVDEMRIAIKIINDWQRGKMLI

SEQ ID NO: 5717 - protein, 202 aa, Escherichia coli
LRPVRYYQGTPSPVKHPELTDMVIFRENSEDIYAGIEWKADSADAEKVIKFLREEMGVKKIRFPEHCGIGIKPCSEEGTKRLVRAAIEYAIANDRDSVTLVHKGNIMKFTEGAFKDWGYQLAREEFGGELIDGGPWLKVKNPNTGKEIVIKDVIADAFLQQILLRPAEYDVIACMNLNGDYISDALAAQVGGIGIAPGANIG

SEQ ID NO: 5718 - protein, 113 aa, Rickettsia sp. ATT
VNEAVINMLKEIGSSEYIPKYIAKAKDKNDPFRLMGFGHRVYKNYDPRAAVPKETCKEVLKELGQLDNNPLLQIAIELEAIALKDEYFIERKLYPNVDFYSGIIYKAMGIPSQ

SEQ ID NO: 5719 - protein, 178 aa, Flaveria pringlei
MASISSTVATVSRAAPAQANMVAPFTGLKSNVAFPATKKANDFSTLPSNGGRVQCMKVWPPLGKKRYETLSYLPNLTEAQLAKEVDYLLRNKWVPCLEFELEHGFVYRENARSPGYYDGRYWTMWKLPMFGCTDSAQVMKELQECKKEYPQAWIRIIGFDNVRQVQCISFIASKPEGF

SEQ ID NO: 5720 - protein, 173 aa, Flaveria pringlei
MASIPATVATVAQANMVAPFTGLKSNAAFPVTKKVNDFSTLPSNGGRVQCMKVWPPLGKKRYETLSYLPNLTESQLAKEVDYLLRNKWVPCLEFELEHGFVYRENARSPGYYDGRYWTMWKLPMFGCTDSAQVMKELQECKKEYPQAWIRIIGFDNVRQVQCISFIASKPDGF

SEQ ID NO: 5721 - protein, 286 aa, Pseudomonas syringae pv. tomato str. DC3000
MSDYQETLYEGYGQRFRMEKMLHEVRTEHQHLVIFQNPRMGRVMALDGVIQTTEADEFIYHEMLTHVPILAHGAAKRVLIIGGGDGGMLREVAKHLTVEHITMVEIDATVVEMCKEFLPNHSSGAFDDSRLNLVIDDGMRFVATTEEKFDVIISDSTDPIGPGEVLFSENFYQACHRCLNEGGILVTQNGTPFMQLSGVQTTAGRMNGLFADWHFYQAAIPTYIGGAMTFAWGATDKSYRKLPLETLRQRFSGSGIVTRYYNPEVHIGAFALPQYVLHAVNKASND

SEQ ID NO: 5722 - protein, 178 aa, Flaveria pringlei
MASISSTVATVSRAAPAQANMVAPFTGLKSNAAFPATKKANDFSTLPSNGGRVQCMKVWPPLGKKKYETLSYLPNLTEAQLAKEVDYLLRNKWVPCLEFELEHGFVYRENARSPGYYDGRYWTMWKLPMFGCTDSAQVMKELQECKKEYPQAWIRIIGFDNVRQVQCISFIASKPDGF

SEQ ID NO: 5723 - protein, 432 aa, Amycolatopsis mediterranei
MTMTVQKAPSQLLAAKLQIPPIPYSHAAGSWVYASDGTRYLDGASGIVNVNIGHAHPTVVAALRDQVGICTYASPGTFAPDLMEQLAAAAARAVHRPDDRVMFTPTGTHATESAIALARLVQRARGEEGRHKILTSTLGYHGNSAFVLALSGHRSRRPHEDDSFGLAPAFNPPYPGQHLGCPFDACRVECVRAVRDAIVAAGPESVAAVLMEPVNGTTGGGYVPPAGYLRALREVCDEFGVLVIHDEVLTGLGRCGLPLASHHTPGSAADIVTLSKGLGAGYVPLAATMLSPDLAEDIMTSGKWLPLMGTMSATPLQGRAGLAVLSVLEELGALDRDEVRGAALGRLVADAVRGRQVVTDVRGLGYFYGIELAPGTLGDVMRITRSRGLLLYPYVGFRPDRTGEGLLVAPRSTRPTAISASSARRWARHWTS

SEQ ID NO: 5724 - protein, 201 aa, Triticum aestivum
LMNQDKVLMESWYYLKDAVLDGGIPFNKAYGMSAFEYHGTDPRFNRVFNEGMKNHSIIITKKLLELYKGFNGVGTLVDVGGGIGATVGAITAHYPTIKGINFDLSHVISEAPPFPGVTHVGGDMFQKIPSGDTILMKWILHDWSDEHCATLLKNCYDALPTHGKVMLVECILPVNPEATPKAQGGFHLDMIMLAHNPGGKE

SEQ ID NO: 5725 - protein, 113 aa, Rickettsia sp. HOT1
ANEAVINMLKEIGSSEYIPKYIAKAKDKNDPVRLMGFGHRVYKNYDPRAAILKETCKEVLKELRQLDNNPLLQIAIELEAIALKDEYFIERKLYPNVDFYSGIIYKAMGIPSQ

SEQ ID NO: 5726 - protein, 338 aa, Escherichia coli CFT073
MISSGQTGYIPLTSCLKRNTIMTDKLTSLRQYTTVVADTGDIAAMKLYQPQDATTNPSLILNAAQIPEYRKLIDDAVAWAKQQSNDRAQQIVDATDKLAVNIGLEILKLVPGRISTEVDARLSYDTEASIAKAKRLIKLYNDAGISNDRILIKLASTWQGIRAAEQLEKEGINCNLTLLFSFAQARACAEAGVFLISPFVGRILDWYKANTDKKEYAPAEDPGVVSVSEIYQYYKEHGYETVVMGASFRNIGEILELAGCDRLTIAPALLKELAESEGAIERKLSYTGEVKARPARITESEFLWQHNQDPMAVDKLAEGIRKFAVDQEKLEKMIGDLL

SEQ ID NO: 5727 - protein, 173 aa, Flaveria pringlei
MASIPATVATVAQANMVAPFTGLKSNAAFPVTKKVNDFSTLPSNGGRVQCMKVWPPLGKKRYETLSYLPNLTEVQLAKEVDYLLRNKWVPCLEFELEHGFVYRENARSPGYYDGRYWTMWKLPMFGCTDSAQVMKELQECKKEYPQAWIRIIGFDNVRQVQCISFIASKPDGF

SEQ ID NO: 5728 - protein, 270 aa, Schizosaccharomyces pombe
MSTTSREDAVYLAKLAEQAERYEGMVENMKSVASTDQELTVEERNLLSVAYKNVIGARRASWRIVSSIEQKEESKGNTAQVELIKEYRQKIEQELDTICQDILTVLEKHLIPNAASAESKVFYYKMKGDYYRYLAEFAVGEKRQHSADQSLEGYKAASEIATAELAPTHPIRLGLALNFSVFYYEILNSPDRACYLAKQAFDEAISELDSLSEESYKDFTLIMQLLRDNLTLWTSDAEYSAAAAGGNTEGAQENAPSNAPEGEAEPKADA

SEQ ID NO: 5729 - protein, 74 aa, Triticum aestivum
LFFRLALILIQRRHIEQVKVVLPAILRVMHANLSECDGEHGMSAVDLFSAALRIGNAIQEMCKTMVNHRKEELC

SEQ ID NO: 5730 - protein, 187 aa, Pisum sativum
MEFKATELRLGLPGITEEEEKKIIHGSSVVKNNNKRQLPQTSEESVSISKVTNDEHIVESSSAAPPAKAKIVGWPPIRSYRKNSLHEADVGGIFVKVSMDGAPYLRKIDLRVYGGYSELLKALETMFKLTIGEYSEREGYKGSEYAPTYEDKDGDWMLVGDVPWDVTSCKRLRIMKGTEAKGLGCGV

SEQ ID NO: 5731 - protein, 173 aa, Flaveria pringlei
  unsure (1)..(173): unsure at all Xaa locations
MASIPATVAAVAQANMVAPFTGLKANAAFPVTKKVNDFSTLPSNGGRVQCMKVWPPLGKKKYXTLSYLPNLTEAQLAKEVDYLLRNKWVPCLEFELEHGFVYRENARSPGYYDGRYWTMWKLPMFGCTDSVQVMKELQECKKEYPQAWIRIIGFDNVRQVQCISFIASKPDXF

SEQ ID NO: 5732 - protein, 143 aa, Chloroflexus aurantiacus
MTNLTRWDPFREMTQLLDDTFFTGFTGVLPRNGSLVPALDLSETADAYHIEMAVPGMTADQLNITFENNVLTISGEITQSSDRKERQYHVTERRFGRFSRSIRLPNQIHPDRIEARLENGVLTVTVPKAEEIKPRKIAVNVAQ

SEQ ID NO: 5733 - protein, 501 aa, Cytophaga sp. KUC-1
MSNTIQRPEFKAKYDNYINGKFTAPVKGEYFDVLSPIDGKVFTKAAHSGKEDLELAVDAAYEAFKTWGKTSVTERSILLNKIAQKIEDNLEYIATVETIDNGKPIRETLAADIPLAIDHFRYFAGVIRAEESSIAELDSQTVSIALSEPLGVVAQIIPWNFPILMAVWKIAPALAAGNTIVLKPAESTPISILVLMELIGDILPPGVLNIVNGFGAELGRPLVTNKKVAKAAFTGSTTTGRLVMQYATENIIPVTLELGGKSPNIFFPSVADHDDDFFDKAIEGAVLFALNQGEICTCPSRLLIHEDIYEKFIARVIERTEAIIAGNPLDKSTMIGAQTSLVQKEKIMSYIKLGKEEGAELLTGGDENHLGGDLEGGYYIKPTLFKGHNKMRIFQEEIFGPVLAVTTFKTTEEAIEIANDTMYGLGAGVWTRDAHEIYQVPRAIQSGRVWINQYHSYPAGAPFGGYKQSGIGRENHKMMLGQYRQTKNMLISYDKKKLGFF

SEQ ID NO: 5734 - protein, 205 aa, Eucalyptus globulus
MGRGRVQLKRIENKINRQVTFSKRRCGLLKKAHEISVLCDADVALIVFSTKGKLFEYATDCCMERILERYERYSYAESQVLTNNAETNGNWTLEHAKLKARMEILQKNQKNLMGEELDSLSLKELQNLEHQLDTALKNIRSRKIQLMCESISELQRKDKALQEQNNMLAKKVKEKEKALAQQTQWDNPQDDGLTSSSGSLPSEWN

SEQ ID NO: 5735 - protein, 250 aa, Glycine max
MTKNYPTVSADYQKAVEKAKKKLRGFIAEKRCAPLMLRLAWHSAGTYDVSSKTGGPFGTIKHPSELAHGANNILDIAVRLLEPLKAEFPILSYADFYQLAGVVAVEVTGGPEVPFHPGREDKPEPPPEGRLPDATKGSDHLRDVFGKAMGLSDRDIVALSGGHTIGAAHKERSGFEGPWTSNPLIFDNSYFKELLSGEKEGLLQLPSDKALLSDPVFRPLVEKYASDEDAFFADYAEAHQKLSELGFADA

SEQ ID NO: 5736 - protein, 300 aa, Aegilops bicornis
GTANMQVDPSGQVQWTQQQPVPLPQQPFSQQPQQTFPQPQQTFPHQPQQQIPQPQQPQQQFLQPQQPFPQQPQQPYPQQPQQPFPQTQQPQQLFPQSQQPQQPYPQQPQQPFPQTQQPQQQFPQSQQPQQPFPQPQQPQQSFPQQQPPFIQPSLQQQLNPCKNLLLQQCRPVSLVSSLWSMIWPQSDCQVMRQQCCQQLAQIPQQLQCAAIHSVVHSIIMQQEQQQQQQQQQQQQQGLRIPLPLYQQQQVGQGTLVQGQGIIQPQQPAQLEAIRSLVLQTLPTMCNVYVPPECSIIKAPL

SEQ ID NO: 5737 - protein, 101 aa, Brassica napus
  unsure (1)..(101): unsure at all Xaa locations
EKEEVXAYSMXSSATVVTSPXQATMVVPFTGLKSSSAFPVTRKANNDITSXVSNGGRXNCMXAWPPIGKKKFETXSYLPDLTEAELPXXVDXLXRXKXXPC

SEQ ID NO: 5738 - protein, 321 aa, Oryza sativa
MGRKPCCSKEGLNRGAWTAMEDDILVSYIAKHGEGKWGALPKRAGLKRCGKSCRLRWLNYLRPGIKRGNISGDEEELILRLHTLLGNRWSLIAGRLPGRTDNEIKNYWNSTLSKRVAMQRTAAATSMPAAATTSSNADAAGAAARRRRSPEPRTVVVSPIRTKALRCNNNSSSGIVVVQQAGACSHGGRPPESGAPGDAAADKVATPQAVQQQQQQELAGAEDDDDLPVPAVCIDLDLDDIELGGLDGFLISPWRGGGHDDGNAAAGAVPNLPMPIGYKLGGAGGGGEAGAVDLEALLGQLEAEEDDDGDHHHHHHHHHHQ

SEQ ID NO: 5739 - protein, 105 aa, Brassica napus
  unsure (1)..(105): unsure at all Xaa locations
GIICIASLIXPYRXDRDICRTLLPEGDFVXVYMDVSLEVCEARDPKGLYKLXXAGKIKGFXGIDDPYEXXLNCEIXXGQEGTGTXPXEMAETVVAYLEHKGYLNA

SEQ ID NO: 5740 - protein, 175 aa, Triticum aestivum
MAPTVMGWSGTCAGPLQGLKSTVGLPVSRRYNGASLGSVSNGGRIRCMQVWPIEGIKKCETLSYLPPVSAEALLKQVDYLIRSKWVPWLEFSKVGFIFREHNASPGYYDGRYWTMGKLPMFGCTDATQVINEVEEVKKEYPDAYVRIIGFDNMRQVQCVSFIAFKPPGCEESGKA

SEQ ID NO: 5741 - protein, 268 aa, Photorhabdus luminescens subsp. laumondii TTO1
MSVPAFGLGTFRLKDDVVITSVKNALELGYRAIDTAQIYENEAAVGQAIEESGVAREDIYITTKIWTENLSKEKLIPSLKESIAKLRTDYVDLTLIHWPSPHNVVSVDETMNALLDAKNMGLTREIGVSNFTIDLMQQAIDAVGAEHITTNQIELSPYLQNCHVTAWAKDHGIHITSYMTLAYSKALQDEVIRRIATKHQATPAQVILSWAMALGYSVIPSSTKRENLQSNLRASVLKLDADDMAAIATLDHNERLVNPEGLAPQWDN

SEQ ID NO: 5742 - protein, 491 aa, GIBBERELLA ZEAE PH-1
MASSTPKPTNSLLYKNFQKHPAALIESTEGIFLNTSDGRRILDATSGAAVACLGYNNKDVQQAVVEQLVNVPYCHPGFYKTKAAEDLADFLVESTNGLMSKAVLCGSGSEAVEVALKLAKTHFSHLAIPQPERSHFIARVGAWHGATLGALTLGDFKVRKDPFVQLISQNSSQVSACSEYRGRKEGEDDEAYVQRLAQELDDEFQRIGPEKVCAFVAETVGGSASGCAMPIKGYFPAMKAVCEKYNALLILDEVMCGMGRTGTLHAWEQEDVVPDILVVGKGLGAGYAPVSAVMLNAKLVESFQKSGKGFAHGQTYMAHPQAAAAGLKVQQIIRDENLLAHVQTMGEYLGSRLKERFLPMPFVGDIRGRGLFWAIEFVTDKKTKMPFPYSLGLNSTLHSRGMSAGYEIALFNANGGYDGYSGDHFLICPPFIVTKADVDDIVERTARVVEDTFAELVNSAVWEKVTLQMGIDNKCEVNAVNAPPAVGVAAQ

SEQ ID NO: 5743 - protein, 479 aa, Agrobacterium tumefaciens str. C58
MRRKEQPWFSTGAAGGGINTATPMRIETIIFDCFRQAAEKPQEISIFRHKFTLHLHAAVASICQTCLWVYAKRRAMMAKQKVAMLTAGGLAPCLSSAVGGLIERYSDIAPEIDIIAYRSGYQGVLLGERIEITKDMREKAHLLHRYGGSPIGNSRVKLTNAADCAKRGLVKEGDNPLRVAAERLAADGITILHTIGGDDTNTTAADLAAYLGANGYDLTVVGLPKTVDNDVVPIKQSLGAWTAAEVGAAFFDNVSNEQSAAPKTFVIHEVMGRHCGWLTAATARAYIQKTRGNDYVEGLMMNTQMKNIDGIYLPEMAFDIEAEAERLKEVMDKHGYVTLFVSEGAGLDAIVAEREAAGEAVKRDAFGHVKIDTINVGGWFQKQFAGLIGAERSMVQKSGYFARSAPANGDDLRLIQGMVDLAVESALNKVSGVTGHDEDQNGKLRTIEFPRIKGGKHFDLSAKWFTEVMEHVGQPFTAA

SEQ ID NO: 5744 - protein, 511 aa, Manihot esculenta
MSVAILTSLPPQWLSILAVFLLPILTLLLFRGKDDNQKKGLKLPPGPRQLPLIGNLHQLGGQPYVDFWKMAKKYGPVMYLQLGRCPTVVLSSTETSKELMKDRDVECCSRPLSVGPGQLSYNFLDVAFSPYSDYWREMRKLFIFELLSMRRVQTFWYAREEQMDKMIEILDGAYPNPVNLTEKVFNMMDGIIGTIAFGRTTYAQQEFRDGFVKVLAATMDMLDNFHAENFFPVVGRFIDSLTGALAKRQRTFTDVDRYFEKVIEQHLDPNRPKPETEDIVDVLIGLMKDESTSFKITKDHVKAILMNVFVGGIDTSAVTITWAFSELLKNPKLMKKAQEEVRRAVGPNKRRVEGKEVEKIKYIDCIVKETFRKHPPVPLLVPHFSMKHCKIGGYDILPGTTIYVNAWAMGKDPTIWENPEEYNPDRFMNSEVDFRGSDFELVPFGAGRRICPGLAMGTTAVKYILSNLLYGWDYEMPRGKKFEDFPLIEEGGLTVHNKQDIMVIPKKHKWD

SEQ ID NO: 5745 - protein, 293 aa, Burkholderia fungorum LB400
MSAPLLFRPSLDAVYGFPHAKRVTQVVSPYQRIEVWDTPQLGRLFTLDGRPMTSTGDEFIYHECMVHPAALAHPSPQAALVLGGGDGGAARQLLRHAGIERIVVAELDAEVVRLTREHLPEVHGGAFDDPRVELVIGDAAHYVAHAAPARFDLVVFDLTPPDSPAAGLYTPTFYQQLKRVMRPIAAVSVHLGSPYFHAARIARLLDDLRAAFAVVRTMNTFIPLYGSLWIMATASDTLDPAALAADTLIERLAARRIGPLMHYDAGTHAALFSASRSVRDKLRRCCEIKFWVC

SEQ ID NO: 5746 - protein, 113 aa, Rickettsia sp. HOT2
ANEAVINMLKEIGSSEYIPKYIAKAKDKNDPFRLMGFGHRVYKNYDPRAAVLKETCKEVLKELRQLDNNPLLQIAIELEAIALKDEYFIERKLYPNVDFYSGIIYKAMGIPSQ

SEQ ID NO: 5747 - protein, 486 aa, Pseudomonas fluorescens PfO-1
MNPALYQNGKVPVHSPIDGSRIGAVNWEGPAEVEQHISRADHAFEQWRKVPAPRRGELVRQFGEVLREYKTELGELVSWEAGKITQEGLGEVQEMIDICDFAVGLSRQLYGLTIASERPGHHMRETWHPLGVVGVISAFNFPVAVWAWNTTLALVCGNPVVWKPSEKTPLTALACQALFERVLKNFSDAPAHLSQVIIGGRDAGEALVDDPRVALISATGSTRMGREVAPKVAARFARSILELGGNNAMILGPSADLDMAVRAILFSAVGTAGQRCTTLRRLIAHESVKEEIVTRLKAAYSKVRIGHPLEGNLIGPLIDKHSFENMQDALEQALSEGGRVFGGKRQLEDQFPNAYYVSPAIVEMPEQSDVVCSETFAPILYVVGYSDFEEALRLNNAVPQGLSSCIFTTDVREAEKFMSAVGSDCGIANVNIGPSGAEIGGAFGGEKETGGGRESGSDAWRAYMRRQTNTVNYSLELPLAQGITFD

SEQ ID NO: 5748 - protein, 389 aa, Escherichia coli
TLQNGKLNVPENPIIPYIEGDGIGVDVTPAMLKVVDAAVEKAYKGERKISWMEIYTGEKSTQVYGQDVWLPAETLDLIREYRVAIKGPLTTPVGGGIRSLNVALRQELDLYICLRPVRYYQGTPSPVKHPELTDMVIFRENSEDIYAGIEWKADSADAEKVIKFLREEMGVKKIRFPEHCGIGIKPCSEEGTKRLVRAAIEYAIANDRDSVTLVHKGNIMKFTEGAFKDWGYQLAREEFGGELIDGAPWLKVKNPNTGKEIVIKDVIADAFLQQILLRPAEYDVIACMNLNGDYISYALAAQVGGIGIAPGANIGYECALFEATHGTAPKYAGQDKVNPGSIILAAEMMVRHMGWTEAADLIVKGMEGAINAKPVTYDFERLMEGAKLL

SEQ ID NO: 5749 - protein, 291 aa, Triticum aestivum
MGGGSMGIRAAARAAFIGGYRSASNARRSALPSSSAAAADTRPVSTATTFDDWYIPDREVFGPVPSHEEAMAATLDLRDAFEIAKIDSHGGRLDISKTHISHDGLDDPTKVAQETFQDHLHSEASKHEEKHDSLSVASGSSARVIEAFTMLHESPEAQDVVASLASDKNVWEAVMKNKKLVEFYKTNLSESSSVTDEAEQSDAESSQSSNGVVSPADAFSDYIQMMKAFVSEMVTNLSSIMQDLVATSDEGQSKGRLKTLIINSKKDFTNGPSSFVLLAIASILVVLLKRA

SEQ ID NO: 5750 - protein, 1166 aa, Ustilago maydis
MQAVTASRPNADSASASHRIPSQPNASNPPSASLRPPDQQLPTTAASLMREGPRDFTVIKDVGDGSFGTVCLADWKSPLPSGTMLSPMQHPTTRPEYIGKRLVAIKKMKKPFPSWQECMKLKELKSLLTIPPHPNIIPLYDAFLMPTTKELHFVFECMEGNLYQLTKSRKGRPLAAGLVASIYEQIVLGLDHIHQHGYFHRDMKPENLLITTTGLADYPNLQPALAAERDVLVIVKLADFGLARETLSKPPYTEYVSTRWYRAPEVLLRSRDYSNPVDMWALGTILAELVNLKPLFPGHSEVDQVLQICDILGDPSHSYGHDSRNRRNGGGPWDRGIRMARAVGFTFPIRKPAKFSRFFSDRVPQNLIDCIEDLLRYDPQARLTSKDCLQHDYMRLDAPRLRPPQAKPLVSATAPLRPQQNASRPLPSSHSTLLSSNHARPPFGAADSNLKPLAVLRQPDGSPIVRVNAAATSDPSLANGTTPASPMQEDATEVHWAPPVVSSSRDVSLSGYPAFPDSASLYAASSSTHPDGPPSGAPSSDATMVMSDAQLTDSTLKHTDPRHAQALQAHQYEQYQRQYRHDAGQSQSPGYDAHAAAAYDRDAALRGAAFVPFVASYPGSAATGQLAAATSSGELSQKNDSNASNETISSRDKERRRSKVWGLNISSKFGGSGSSGTLAGSSSGGAANATGTHLYAVGNAAAGRLPPNGPMQESRVSLEPTPAQRIAAEHSNATLATLPNGAPAKTADSKKARKEAEKAAREAEKAKREAQQKAARDRARAVMQKRNQLLASSNSKDPVEWLAGAIQSDEPYRSSPSEKARGKQPAIPGSQLSPSMPSFASGEFPRSPLQQPIHGLSPDYGMNANPAVMGSMAWRGVGAARYSRSNKARRREHDDDHSMSSFEDAVDPRRASMQSYQTGDSDPGPGTGQQVAQGHYVQRASSSSSLASAPSLVDQRRFAPSLESHRSSADTRSISSLDHQLITNMERMTAVEARARTPGNVSPGPAHVVGARQSLSRQSRTNSRASSTSAHRQGSASPLHHASGIPRFHPYSHGGPVTPSTGYHANYQLPPLHQSLAHPSGAQRSDTAGDRSVSPAFYSNASQPQQHVHQHHINPIFHVPAGNSGHGTTLPPFSSIAASIDVPAIDEKATQMLYAQARSPGPLPQS

SEQ ID NO: 5751 - protein, 212 aa, Shigella flexneri
ICLRPVRYYQGTPSPVKHPELTDMVIFRENSEDIYAGIEWKADSADAEKVIKFLREEMGVKKIRFPEHCGIGIKPCSEEGTKRLVRAAIEYAIANDRDSVTLVHKGNIMKFTEGAFKDWGYQLAREEFGGELIDGGPWLKVKNPNTGKEIVIKDVIADAFLQQILLRPAEYDVIACMNLNGDYISDALAAQVGGIGIAPGANIGDECALFEA

SEQ ID NO: 5752 - protein, 389 aa, Escherichia coli
TLQNGKLNVPENPITPYIEGDGIGVDVTPAMLKVVDAAGEKAYKGERKISWMEIYTGEKSTQVYGQDVWLPAETLDLIREYRVAIKGRMTTPDGGGIRSLNVALRQELDLYICLRPVRYYQGTPSPVKHPELTDMVIFRENSEDIYAGIEWKADSADAEKVIKFLREEMGVKKIRFPEHCGIGIKPCSEEGTKRLVRAAIEYAIANDRDSVTLVHKGNIMKFTEGAFKDWGYQLAREEFGGELIDGGPWLKVKNPNTGKEIVIKDVIADAFLQQILLRPAEYDVIACMNLNGDYISDALAAQVGGIGIAPGANIGDECALFEATHGTAPKYAGQDKVNPGSIILSAEMMLRHMGWTEAADLIVKGMEGAINAKTVTYDFERLMEGAKLL

SEQ ID NO: 5753 - protein, 173 aa, Flaveria pringlei
MASIPATVATVAQANMVAPFTGLKSNAAFPVTKKVNDFSTLASNGGRVQCMKVWPPLGKKRYETLSYLPNLTEVQLAKEVDYLLRNKWVPCLEFELEHGFVYRENARSPGYYDGRYWTMWKLPMFGCTDSAQVMKELQECKKEYPQAWIRIIGFDNVRQVQCISFIASKPDGF

SEQ ID NO: 5754 - protein, 208 aa, Kluyveromyces lactis
MSQAVGNVASIRRKLVIVGDGACGKTCLLIVFAKGKFPQVYVPTVFDNYVADVEVDGRRVELALWDTAGQEDYDRLRPLSYPDSNVVLICYSIDLPDSLENVMEKWISEVLHFCQGVPIILVGCKADLRNDPQVVEELRAQGLQPVSQAQAQEVADQIGAVDYIECSAKTGYGVREVFEAATRASLVGKQGKSKPKTKSSKKKKCVVL

SEQ ID NO: 5755 - protein, 332 aa, Bdellovibrio bacteriovorus HD100
MFAARYVPGKKELSLVEVPKPTPGPLDVILKIRAAGICHSDLHVLHGEVPYKESFTMGHEACGEVVEKGSEVFGTFNPGDLYAVHGPNPCGHCNYCRTGHDNLCNDPSRTFIGLGQDGAYAEYLKVPARNIVKVPKGISPEVAAVATDAVLTPYHAIKTKGGVGLGSKVLAIGLGGLGMNGVQIALALGAEVTAVDLKDANLETAKSFGVQKVLNSKQISSLTPLSFDVVVDFVGLESTFKDAQNFVKPGGTILLIGLGSAQVPLTTATAITFETKVQASFWGTHVEMQELYELIAEGKIKPQVETAPMKEVNHWLHELEAGRVKSRMALIP

SEQ ID NO: 5756 - protein, 389 aa, Escherichia coli
TLQNGKLNVPENPIIPYIEGDGIGVDVTPAMLKVVDAAVEKAYKGERKISWMEIYTGEKSTQVYGQDVWLPAETLDLIREYRVAIKGPLTTPVGGGIRSLNVALRQELDLYICLRPVRYYQGTPSPVKHPELTDMVIFRENSEDIYAGIEWKADSADAEKVIKFLREEMGVKKIRFPEHCGIGIKPCSEEGTKRLVRAAIEYAIANDRDSVTLVHKGNIMKFTEGAFKDWGYQLAREEFGGELIDGGPWLKVKNPNTGKEIVIKDVIADAFLQQILLRPAEYDVIACMNLNGDYISDALAAQVGGIGIAPGANIGDECALFEATHGTAPKYAGQDKVNPGSIILSAEMMLRHMGWTEAADLIVKGMEGAINAKTVTYDFERLMEGDKLV

SEQ ID NO: 5757 - protein, 219 aa, Brassica napus
LNRLHDRNETMYYKVLIANIEEYAPIVYTPTVGLVCQNYSGLFRRPRGMYFSSEDRGEMMSMVYNWPAEQVDMIVVTDGSRILGLGDLGIHGIGISVGKLDLYVAAAGINPQRVLPVMIDVGTNNEKLLKDPLYLGLQQHRLENDEYIEVIDEFMEAVFTRWPHVIVQFEDFQSKWAFKLLQRYRSRYRMFNDDVQGTAGVAIAGLLGAVRAQGRPMLD

SEQ ID NO: 5758 - protein, 453 aa, Arabidopsis thaliana
MEQGESLRIRVVMGKDRISELPDALLIKILSFLPTKIVVATSVFSKQWRPLWKLVPNLEFDSEDYDDKEQYTFSEIVCKSFLSHKAPVLESFRLEFESEKVDPVDIGLWVGIAFSRHLRELVLVAADTGTGTAFKFPSSLCTCNTLETLRLVLLILVDISSPVVMKSLRTLHLELVSYKDESSIRNLLSGCPILEELLVIRGEDSDIEVFTIDEVPSLKRLTINDDHDGQEFWGYVINAPSLKYLLIEDLRCPGFCLNAPELMEANIFDGTSITNDNFLGYLTSVKRLLLNLSPWKITYPTGSIFYQLVSLEMYTREIDWWDLLTLMLEHSPKLQVLKLTDNCVKFHKNGLPGGKWNEPKYVPECLLSHLETFVWRRFDWGREEEKEIATYILKNARRLNKATFSTNPVNSEELDKLKERRKVHNELDGVVRASNSCQFVFKFDTSYHVSDSS

SEQ ID NO: 5759 - protein, 488 aa, Listeria monocytogenes str. 1/2a F6854
MADVRKLKNYINGEWVESKTDKYEDVINPATGEVLCQVPISTRAELDQAAVIAEQAFEKWSQVAVPRRARVLFGFQQLLIQHKEELARLITLENGKNLSEARGEVQRGIENVEFAAGAPTLMMGDSLASIATDVEAANYRYPVGVVGGIAPFNFPMMVPCWMFPMAIALGNSFILKPSERTPLLMEKLVELFSEAGLPKGVFNVVYGAHDVVNGILENEIIKAVSFVGSKPVGEYVYKTGSANLKRVQALTGAKNHTIVLNDADLEDTVTNVISAAFGSAGERCMACAVVTVEEGIADEFLEALRTAAQNVKIGNGLDDGVFLGPVIREENQKRTIAYIEKGIEEGAKLTVDGRETGLSEGHFVGPTILEDVTTDMTIWKDEIFAPVLSVIRVKNLQEAVRVANQSEFANGACIFTNNAKAIRYFREKIDAGMLGVNLGVPAPMAFFPFSGWKSSFYGTLHANGKDSVDFYTHKKVVTARYSLKGYEE

SEQ ID NO: 5760 - protein, 369 aa, Oryza sativa (japonica cultivar-group)
MCMTLIMPGAPDVGSYYGEQWAPLAMSSLSSLFSYSPPGTAKYAAALASPSQQVSTTMPELETEGELKTLPAPMTIETTAAAAAAARSPEIVKVRSVWAHNLDEEANLIESLFPSFRLAAVDTEFPGTVHRPSAPAYTLTRKQKYALLKKNVDELHLVQLGLTLFDAGGRLPDLGTGGAARYVWEFNFREFDLRRHAHAPESIALLRSKGVDFDRTRRGGVDAAAFGPRLRRWLRAGLGRAGLVTFSGAYDLAYMLKMLYGGGGGGYRLPGDAATFEFVVRAVIGRTLYDVGKMARHCPGDMRGGLERVAGKLGVRRAVGEAHQAGSDSLLTSQMFMRMRERYFDDQDALTAVAGINFGYLNFTSCEYT

SEQ ID NO: 5761 - protein, 389 aa, Escherichia coli
TLQNGKLNVPENPIIPYIEGDGIGVDVTPAMLKVVDAAVEKAYKGERKISWMEIYTGEKSTQVYGQDVWLPAETLDLIREYRVAIKGPLTTPVGGGIRSLNVALRQELDLYICLRPVRYYQGTPSPVKHPELTDMVIFRENSEDIYAGIEWKADSADAEKVIKFLREEMGVKKIRFPEHCGIGIKPCSEEGTKRLVRAAIEYAIANDRDSVTLVHKGNIMKFTEGAFKDWGYQLAREEFGGELIDGGPWLKVKNPNTGKEIVIKDVIADAFLQQILLRPAEYDVIACMNLNGDYISDALASTVGGIGIAPGQTLGDECALFEATHGTAPKYAGQDKVNPGSIILSAKMMLRHMGWTETADLIVKGMEGAINAKTVTYDFERLMEGAKLL

SEQ ID NO: 5762 - protein, 436 aa, Bordetella pertussis Tohama I
MNLSDKKATLSFSDGSAPIEFPVYKGTVGPDVIDIRKLYGQTGMFTFDPGFMSTAACASGITYIDGDKGELLYRGYPIEQLAVNCDFLDICYLILNGELPNGGQKQDFDSQVTHHTMVNEQLHFFLRGFRRDAHPMAVLTGLVGALSAFYHDSTDITNPHHRHVSAIRLIAKMPTLVAMAYKYSQGQPFIYPQNDLSYTGNFLRMMCATPCEEYKVNDVVERALDRIFILHADHEQNASTSTVRLCGSSGTNPFAAIAAGVACLWGPAHGGANEACLQMLEELQANGGVAKVGEFMEKVKDKNSGVRLMGFGHRVYKNYDPRAKLMQETCKEVLVALGLENDPLFKLAMELERIALEDDYFVQRKLYPNVDFYSGIVQRAIGIPTSLFTAIFALARTVGWIAQWNEMLSDPDYKIGRPRQLFTGSVTRDVPGMDKR

SEQ ID NO: 5763 - protein, 500 aa, Burkholderia cepacia R18194
MTDLLSAPEYAALAAALRFPSGPFIDGAFRTASSGDTFATVNPATDAVLAQIGACNAADVDIAVANARQAFEDGRWRKLAPSHRKAVLLKFADLLEQHAHELATMESLDSGKPIRECQTIDVPETIHTIRWHAELIDKIYDNTAPVGGNALALVVREPIGVVGLVLPWNFPLLMLAWKIGPSLAAGCSIVVKPAKETTLTALRVAELAHEAGVPAGVFNVLPGGGREVGEPLGRHADVDMVSFTGSTDTGRKFLKYAAESNLKRIVLECGGKNPAVVLPDAPDLDAVAQHIVNGAFWNMGENCSASSRLIVHADIKDDLLQRIGTQMREWKMGNPLDPAHRIGAMVSKAHFEKVRSYLEQAGAEHLHVAFGGQTDGGIFVEPTVVDGVSPHSRLFREEIFGPVLSVTTFTDIAEAIALANDSVYGLAASVYTGSLNLAIRLSREIRAGVVTVNCFGEGDVTTPFGGYKESGFGGRDKSVWAHDQYTEIKTIWIDVPVDPA

SEQ ID NO: 5764 - protein, 434 aa, Bacillus halodurans C-125
MKKNDETSRNLIGLDQQHFIHPTSSMQQQQQHGPAHIFVRGKGVYLYDHDGKAYLDGMSSLWNVNVGHGRRELGEVAKKQMDTLAFSSCFATFSNKPAIELAAKLARVSPPSLRATFFTSGGSEANDTAFKLARHYWKVKDQPKKRKIIARMKSYHGVAMGATSATGLKPFRDFAPSLAPDFLHVDHMSIEALRALIDREGPETIAAFVCEPIQGAGGVHVAPDSYLCDIRSICDEYELLFIADEVITGFGRTGAYFGCDHANISPDMMCIAKGITSGYAPLGGVMLSKSLHEQLTAHSHGTLLHGYTYSGHPTSCAVALKNIQIIEEENLIDHAATMGEKLLLGFRTIQEQYSEIHDARGRGLMAALAFSHNGKNEPLAPKVVQAADQRGLILRAVTFDQQDVLVCAPPLIINEEELNQLLSILESSVQAVVS

SEQ ID NO: 5765 - protein, 464 aa, Listeria monocytogenes str. 4b F2365
MLYSKENKESYLEPVFGSSAEDRDIPKYTLGKEPLEPRIAYRLVKDELLDEGSARQNLATFCQTYMEDEATKLMSETLEKNAIDKSEYPRTAELENRCVNIIADLWHAPKNQKFMGTSTIGSSEACMLGGMAMKFAWRKRAEKLGLDIYAQKPNLVISSGYQVCWEKFCVYWDIDMRVVPMDKDHMQLNTDQVLDYVDEYTIGVVGILGITYTGRYDDIYALNEKLEEYNSKTDYKVYIHVDAASGGFFTPFVEPDIIWDFRLKNVISINTSGHKYGLVYPGIGWVLWKDESYLPEELIFKVSYLGGEMPTMQINFSRSASHIIGQYYNFLRYGFEGYRTIHQKTSDVAQYLAHAVEQTGYFDIYNDGSHLPIVCYKLKDDANVKWTLYDLADRLQMRGWQVPAYPLPKNLENIIIQRYVCRADLGFNMAEEFIQDFQASIQELNNAHILFHDTQQSGVHGFTH

SEQ ID NO: 5766 - protein, 519 aa, Zea mays
  unsure (1)..(519): unsure at all Xaa locations
LFLSSQSPITPAAQRAETGDALPSPHPPLVSWRRLGGCRCRCRPTSGGQVVLGHFAGDEYHKAVDTFSGIRGSMSNYYDDYDDIDEMEDDYDMDDPIDDMVDEQQGIRDSDAEDNDYGQPNDKIPDTSSADARKGRDIQGIPWXQINITRKKYRQSRLEQYKNYENVPNSGEEAMKDCKPTEKGGIYYEFRRNTRSVKSTILHFQLRNLVWATSKHDIYLVSHYSIRHWSALSGVDTELINVQGHVAPREKHAGSLLEGFYQTQVSTLTVKDNLLVAGGFQGELICKHLDQEGISFCCRTTYDDNAITNAVEIFNTSSGAVHFMASNNDSGVRYYDMERFQLFKHFQFEWPVNHASLSPDRKVVVIVGDDPDGLLIDANSGKTVHSIKGHRDYSFASAWSPDGRTFATGNQDKTCRIWDVRNLSKSVHVLRGNLGAIRSIRFTSDGQFMSMAEPADFVHIYDVKSDYNKRQELDFFGEISGTSFSPDTDTLFVGVWDRMYGSLLQFGRLYNYSYLDSLF

SEQ ID NO: 5767 - protein, 162 aa, Triticum aestivum
  unsure (1)..(162): unsure at all Xaa locations
MAPAVMASSATTVAPFQGLKSTAGLPVSRRSSGSLGRVSNGGRIRCMQVWPIEGIKNSETLSYLPPLSTEASLKQVDYLIXRSKWVPCLXFNKVGFSFRXAXSPPGYNDXPYWTMLELAIFXXTDPASLNKVEESKRIPDPIPLIGXTQFILNSIKHGSREG

SEQ ID NO: 5768 - protein, 186 aa, Aeropyrum pernix K1
MQALTTYKCIEKGIVVWLTGLPGSGKTTIATRLADLLQKEGYRVEVLDGDWARTTVSEGAGFTREERLRHLKRIAWIARLLARNGVIVICSFVSPYKQARNMVRRIVEEEGIPFLEIYVKASLEEVIRRDPKGLYKKALKGELENFTGITDPYEPPENPQLVLDTESNTIEHNVSYLYSLVKAVIE

SEQ ID NO: 5769 - protein, 400 aa, Bordetella pertussis Tohama I
MSTSQKKPTVQQKKPAAQPAEKAAFKPKKSVALSGVVAGNTALCTVGRTGNDLHYRGYDILDFAGSAEFEEIAHLLVHGKLPNKAELKAYKEKLRALRGLPAQLQNVLECLPASSHPMDVMRTAVSVLGCVLPEKDDHNTPGARDIADRLMANLGSALLYWYHYSHNGRIIDVQTDDDSIGGHFLHLLHGAKPSDEWVRAMHTSLILYAEHEFNASTFTGRVIAGTGSDMYSSITGAIGALRGPKHGGANEVAFEVQKRYETPDEAEADIRQRVENKEVIIGFGHPVYTVSDPRNKVIKDVAKKLSRKAGSTKMFDIAERLETVMWDIKKMFPNLDWFSAVSYHMMGVPTAMFTPLFVIARTAGWSAHIIEQRIDNKIIRPTANYVGPEDQTYVPISKRA

SEQ ID NO: 5770 - protein, 228 aa, Leuconostoc mesenteroides subsp. mesenteroides ATCC 8293
MSSSQDLQKIIAGRRAADFVQDGMVVGIGSGSTIAQVITALGERVANENLKIVGVPTSEKTRRNAAKLGIPMYNVDDVDKIDLTIDGADQISDDFSAIKGGGAALLWEKIVAFNSRENIWVVDSSKRVSKLNQYLPVEIIPYGSDQLFKRFTADGFHPTWRLDQNGNPVRTDSANYLIDLHVPVIEDPRDLGQELINMVGVVEHGLFTDVVNRVVIGSDDGVEIIEAP

SEQ ID NO: 5771 - protein, 429 aa, Brucella melitensis 16M
MQPRAGPSLPGAKRLPKERIAYIRRIAEIYESRLDEMAKTISMEMGAPIKLARESQAAAGLSHTKAFIAACENFEVEEVLSPKYPNQTVVHEPIGVCGLITPWNWPMNQITLKVIPAIAVGCTVVLKPSEIAPMSAMLFAEFVDQAGLPKGVFNLVNGEGPVVGEALSQHPEVDMMSFTGSTRAGTAVSRAAAATVKRVSLELGGKSPNIVFADSDLEKAISRSLAHCFENTGQSCNAPTRMLVERSVYDKAVELAKKAAESTKVGDPAQEGDHIGPLSSSIQFEKVQALIQKGIDEGARLVAGGTGRPEGFTEGDYVKPTVFADVNNNMTIAREEIFGPVLAMIPFDTEEEAIAIANDTPYGLAAYIQTGSPERAKRVARKLRAGMIQINGTSRAPGSPFGGYKQSGNGREGGKWGLEDFMEVKLISG

SEQ ID NO: 5772 - protein, 450 aa, Zea mays
  unsure (1)..(450): unsure at all Xaa locations
MAYAAGRKKRVGRYEVGRTIGQGTFAKVKFAVDADTGAPVAMKVLDKETIFAHRMLHQIKREISIMKIVRHPNIVRLNEVLAGKTKIYIILELVNGGELFDKIARYGKLRENEARKYFQQLIDAIDYCHSKGVYXHRDLKPQNMLLDSRGNLKVSDFGLSTLSQNGAGLLHTTCGTPNYVAPEVLSSNGYDGSAADIWSCGVILYVLMAGYLPFEENDLPHLYEKITAAKYSCPYWFSPGAKSLIQRILDPNPRTRITIEEIREDPWFEKNYVAIRCGEDENVSLDDVQAIFDNIEDKYVSDEVTHKDGGPLMMNAFEMIALSQGLDLSALFDRQQEFVKRQTRFVSRKPAKTVVATIEVVAESMGLKVHSRNYKVRLEGPASNRASQFAVVLEVFEVAPSLFMVDVRKVAGDTPEYHRFYENLCSKLCSIIWRPTEVSAKSTPLRTTTC

SEQ ID NO: 5773 - protein, 159 aa, Glycine max
SFYETLPCRVTKISDGYNMVMVTVEDGRNFVADAVIVTVPIGILKANLIEFSPKLPHWKAEAIKDIGMGNENKIALRFDAVFWPNVEVLGIVAPTSYACGYFLNLHKATGHPILVYMAAGKFAYDLEKLSDESAANFAMQQLKKMFPDASKPVSSPLML

SEQ ID NO: 5774 - protein, 327 aa, Yersinia pestis KIM
MVKKIGVLTSGGDAPGMNAAIRGVVRAALSAGLDVFGIEDGYLGLYENRMKKLDRYSVSDMINRGGTFLGSARFPEFRDPEVRKVALKNMHERGIDGLVVIGGDGSYAGADLLTKEGGIHCVGLPGTIDNDVAGTDYTIGFFTALETVVEAIDRLRDTSSSHQRISIVEVMGRYCGDLTLAAAIAGGCEFIAIPEVEFKRDDLVAEIKAGIAKGKKHAIVAITEKLDDIDSLAKYIEKETGRETRGTVLGHIQRGGAPVAYDRILASRMGAYAVDLLLQDHDYKKGGFCVGVQNEKMVHELISVCIAPENKKSKFKEDWYDTAKKLF

SEQ ID NO: 5775 - protein, 187 aa, Lycopersicon esculentum
VYDDDGKVFTTFDAYWEKSLSIQNEPVSQLPPWRLTQAAGSVKMCSVEGVGDLENESEKSSNALLGKGWAPGWRPIADKALTEFVESNLLAYSKDRLRVGGNSTSLLSPYLHFGEVSVRKVFNSVRLKQILWTKEGNSVGKDSATIYLRAIGLREYSRYISLNFPFTHERSLLNNLRFFPRNADQAH

SEQ ID NO: 5776 - protein, 272 aa, Rhodobacter sphaeroides 2.4.1
MTATLEFHDGSRIPQLGFGLWQVPEDRTAEVVREALELGYRLADGAAIYGNEEGLGHGLRTSGLPRDKVFVTTKVWNDAQGFESALRAVEESLKRLGLDRLDLCLIHWPAPKRNLYVETWRALIRLRDEGRITSIGVSNFDLDQIDRLTAETGVTPVLNQIELHPMLQQAELRAGHAERGIVTQSWSPLGRGMAFETPAIREIAERTGRSPAQVVLRWHIELGCAVIPRSTRRAGLAENLALFDFELTEADHAAISALDAGTRTGPDPQSFG

SEQ ID NO: 5777 - protein, 496 aa, Mentha spicata
MELQISSAIIILVATFVASLLIKQWRKSESRQNLPPGPPKLPLVGHLHLLWGKLPQHAMADMAKKYGPVTHVQLGEVFSVVLSSREATKEAMKLLDPACADRFESIGTRIMWYDNDDIIFSPYSDHWRQMRKICVSELLSARNVRSFGFIRQDEMSRLLRHLQSSAGETVDMTERIATLTCSIICRAAFGAIINDHEELVELVKDSLSMASGFELADLFPSSKLLNLLCWNKSKLWRMRRRVDTILEAIVDEHKLKKSGEFGGEDIIDVLFRMQKDSQIKVPITTNAIKAFIFDTFSAGTETSSTTTLWVMAELMRNPAVMAKAQAEVRAALKGKTSVDVDDVQELKYMKSVVKETMRMHPPIPLIPRSCREECEVNGYKIPNKARIMINVWSMGRNPLYWEKPETFWPERFDQVSRDFMGSDFEFIPFGAGRRICPGLNFGLANVEVPLAQLLYHFDWKLAEGMKPSDMDMSEAEGLTGIRKNNLLLVPTLYKSP

SEQ ID NO: 5778 - protein, 75 aa, Triticum aestivum
MCDRPAPVSSDDDGKLGDEEGVEIREVWANNLEAECAVIRDVGDDYGYMVMDTELPDIVCRPLGSFRSNDEYNYA

SEQ ID NO: 5779 - protein, 178 aa, Glycine max
  unsure (1)..(178): unsure at all Xaa locations
MASSMISAPAGTTVNRAGAGMVATFTGLKFMAGFRTRKTNSVITCIASNGGRVQCMQAWPPVGTKKTETLSYLPDLDDAQLAXKYXYLLRKGWIPCLXFELEHGLVFRDHNRXPRYYDGLYWTMSNLSIYSFADAFXVLNELHDAKTAYPNSFIHIIGFYNIHQLHYISFISYIPAVF

SEQ ID NO: 5780 - protein, 254 aa, Treponema pallidum subsp. pallidum str. Nichols
MHERNTTTNTPLDVTAQKLLVAQRSVDTLVQEGVLHAHMSIGLGTGSTAMPAVKRIADHLARGTLSDIAAVPTSFQTALICERYNIPLFSLSSKRIGGKLDVTIDGADEIDTQNFVIKGGGAALLQEKIAAYNSAHFVIIVDETKVVETLGTRAALPIEVVPEARMSVMRTLQDWGLSVHIREAVRKKGPVVTDHGNFILDARWQSLPTRTPQDMERALNALPGVIENGLFTERTVRVFVAHADGSVEERSASF

SEQ ID NO: 5781 - protein, 74 aa, Glycine max
MGFWTLLEGFLLFANALAILNEDRFLARRGWTLAEMTGPQRNSLKGQVIGLIYACQFLRLPLILFNVITIIVKL

SEQ ID NO: 5782 - protein, 155 aa, Glycine max
  unsure (1)..(155): unsure at all Xaa locations
MEPMDIVGKSKEDASLPKATMTKIIKEMLPPDVRVARDAQDLLIECCVEFINLVSSESNEVCNREDKRTIAPEHVLKALQVLGFGEYVEEVYAAYEQHKLETMQDSLRGGGKWSNGAEMTEEEALXEQQRMFAEARAXMNGGAIAFKPAQMLTKS

SEQ ID NO: 5783 - protein, 425 aa, Ustilago maydis 521
MPFHNPLAKQPDSYVKKKEYDFKKTLGEGTFGIVRQATWKAADPPINVAVKVISKRILRGHDEIVKDEMNVLKGLDQPHVVKFLDWFESKDKYYLVFEEATGGELFERILSRGRFTELDACRTIRAVLSAIQYLHHHNIVHRDIKPENILYRTKAEDANVVLVDFGIAAHMKDDNEVLTSVCGSFGYAAPEILAKKGHGKAVDMWSLGVITYTMLCGYTPFRSDDAAALAAETQRGKVEFHDRYWKNVSNEAKDFVKACLTVDPKKRLTADQGMSHPWLTEHSEETQGVHDISAGLRENYRKRWKSAIAAVRASTKFRTFAQLASESRSGSQASLQTSDSSTAFADDPGKISPPTKRELYSESEDEQDGEDNQWFDTEDGSAARGNDATLADAASSQSENEPGWVEKLENKLDDLHLHSSSKSSE

SEQ ID NO: 5784 - protein, 389 aa, Escherichia coli
TLQNGKLNVPENPIIPYIEGDGIGVDVTPAMLKVVDAAVEKAYKGERKISWMEIYTGEKSTQVYGQDVWLPAETLDLIREYRVAIKGPLTTPVGGGIRSLNVALRQELDLYICLRPVRYYQGTPSPVKHPELTDMVIFRENSEDIYAGIEWKADSADAEKVIKFLREEMGVKKIRFPEHCGIGIKPCSEEGTKRLVRAAIEYAIANDRDSVTLVHKGNIMKFTEGAFKDWGYQLAREEFGGELIDGRPWLKVKNPNTGKEIVIKDVIADAFLQQILLRPAEYDVIACMNLNGDYISDALAAQVGGIGIAPGANIGDECALFEATHGTAPKYAGQDKVNPGSIILSAEMMLRHMGWTEAADLIVKGMEGAINAKTVTYDFERLMEGAKLL

SEQ ID NO: 5785 - protein, 210 aa, Shigella flexneri
LRPVRYYQGTPSPVKHPELTDMVIFRENSEDIYAGIEWKADSADAEKVIKFLREEMGVKKIRFPEHCGIGIKPCSEEGTKRLVRAAIEYAIANDRDSVTLVHKGNIMKFTEGAFKDWGYQLAREEFGGELIDGGPWLKVKNPNTGKEIVIKDVIADAFLQQILLRPAEYDVIACMNLNGDYISDALAAQVGGIGIAPGANIGDECALFEA

SEQ ID NO: 5786 - protein, 114 aa, Zea mays
  unsure (1)..(114): unsure at all Xaa locations
WSASLKKTARFLVLLRRAGIRCDILAVLGCSDWSXAKRARMLAWSRWLKHMGPDWSGLYQHEGNFLAQQRLAVISTLTGDQTLFSXDRTVLAVANGEMDNHLNVLKQFTFTHNF

SEQ ID NO: 5787 - protein, 389 aa, Escherichia coli
TLQNGKLNVPENPIIPYIEGDGIGVDVTPAMLKVVDAAVEKAYKGERKISWMEIYTGEKSTQVYGQDVWLPAETLDLIREYRVAIKGPLTTPVGGGIRSLNVALRQELDLYICLRPVRYYQGTPSPVKHPELTDMVIFRENSEDIYAGIEWKADSADAEKVIKFLREEMGVKKIRFPEHCGIGIKPCSEEGTKRLVRAAIEYAIANDRDSVTLVHKGNIMKFTEGAFKDWGYQLAREEFGGELIDGGPWLKVKNPNTGKEIVIKDVIADAFLHQILLRPAEYDVIACMNLNGDYISDALAAQVGGIGIAPGANIGDECALFEATHGTAPKYAGQDKVNPGSIILSAEMMLRHMGWTEAADLIVKGMEGAINAKTVTYDFERLMEGAKLL

SEQ ID NO: 5788 - protein, 213 aa, Shigella flexneri
YICLRPVRYYQGTPSPVKHPELTDMVIFRENSEDIYAGIEWKADSADAEKVIKFLREEMGVKKIRFPEHCGIGIKPCSEEGTKRLVRAAIEYAIANDRDSVTLVHKGNIMKFTEGAFKDWGYQLAREEFGGELIDGGPWLKVKNPNTGKEIVIKDVIADAFLQQILLRPAEYDVIACMNLNGDYISDALAAQVGGIGIAPGANIGDECALFEA

SEQ ID NO: 5789 - protein, 289 aa, Salmonella enterica subsp. enterica serovar Typhi Ty2
MEYSILSNNLKMPMVGFGVFKVTDKEECQQSVLSAIRSGYRLIDTAAVYGNEDAVGDAVREAIATGLCTREELFITSKLWVQDMANYDLAKAGIEASLKKSGLDYFDLYLLHQAMGDYFSAWRALEDAYEAGKLKAIGVSNFYAHVLANFCETVRITPMVNQVELHPYFAQPAALETMKHYNVQPEAWAPLGGGRHKPYENVMLQRIADAHQKTIAQVVLRWNVQRGVTVIPKSTRQERIEENFAIWDFSLTDNEMAQINALDLGYVGEAVKHFNPEFVRGCLGVKIHD

SEQ ID NO: 5790 - protein, 492 aa, Candida albicans SC5314
MNVNPHLQYLQQQQQQQQQQQQQQQQSQPSQSNQSQSNQSPQFSQLQLQQLQRQQLLNQHLQQQQSQSQSSQVPPQLTQQSMGTPTSTNPLLAVLNGGANSNATSTGNGSLSSNPVLQQLQLQQLQQQVQLQQLQAQQQQQQQQQQQQQAIPIIKEVWSSNLEHEFQALRTFINDKTSKVFIAIHQEIPGIVARPVGTFKSSSDYHFQTLRANSDLLNLIQLSLCVIKISKNETISTPVIWQFNFLYDLTKEMYNEEHLAMLAQTSQINFQLLSTHGIPHFEFAELMIESGLILDDNINWVSFHAGYDLGFFVSLLSNDDLPVDEPDFYWWCAKYFPNFYDLKYIGNQILNKSTTNGAGGTNSNTLDEKTNKPSIEYLAEELHLLPISPAIRQHFTNSTFHSQQLTSTLHAYLSMECFKELLRRSNMTLLSSFKGTIWGLGTFSGGTSINNTNNNGVTEDEIVASRINGISTPSTPVGIISKSGMVHFGGRV

SEQ ID NO: 5791 - protein, 389 aa, Escherichia coli
TLQNGKLNVPENPIIPYIEGDGIGVDVTPAMLKVVDAAVEKAYKGERKISWMEIYTGEKSTQVYGQDVWLPAETLDLIREYRVAIKGPLTTPVGGGIRSLNVALRQELDLYICLRPVRYYQGTPSPVKHPELTDMVIFRENSEDIYAGIEWKADSADAEKVIKFLREEMGVKKIRFPEHCGIGIKPCSEEGTKRLVRAAIEYAIANDRDSVTLVHKGNIMKFTEGAFKDWGYQLAREEFGGELIDGGPWLKVKNPNTGKEIVIKDVIADAFLQQILLRPAEYDVIACMNLNGDYISDALAAQVGGIGIAPGANIGDECALFEATPGTAPKYAGQDKVNPGSIILSAEMMLRHMGWTEAADLIVKGMEGAINAKTVTYDFERLMEGAKLL

SEQ ID NO: 5792 - protein, 182 aa, Mesembryanthemum crystallinum
MASSLMSNAATTMAAATTTAQANMVAPFNGLKSISAFPVTRKNNDITSVASNGGRVQCMVWPPLGMKKFETLSYLPPLSEESLLKEVQYLLNNGWVPCLEFEPTHGFVYREHGNTPGYYDGRYWTMWKLPMFGCTDPSQVVAELEEAKKAYPEAFIRIIGFDNVRQVQCVSFIAYKPASYGA

SEQ ID NO: 5793 - protein, 592 aa, Zea mays
  unsure (1)..(592): unsure at all Xaa locations
SKTSIKQLGRSLARATTSTVAALCFLLSCVSATPSTLAASSAIIHDIIRGLADTTAARVRTDAEATARAFTDFGTNATEDDAARPAAVFYPVXAADIAALLRASSASASPFPVSARGRGHSTRGQATAPGGVVVDMASLAVAAGRDETATTNASSTSASARLAVSVDGRYIDAGGEQLWVDVLHAALAHGLTPRSWTDYLRLTVGGTLSNAGISGQAFRHGPQISNVLELDVVTGTGDMVTCSKEKDADLFDAVLGGLGQFGIITRARIPLAPAPARARWLRLLYTGAADLTADQERLIADDERRGGALAGLMDYVEGSVVTDLQQGLIGSWRSQPPPSSSSLYSESATDAARIAALAEEAGGVLYFLEGAVYYGGASDTTAADVDKRVDVMLRELRYARGFAYVQDVSYEQFLDRVSAGERRLRGEGLWDVPHPWLNLFLPRSRILDFAAGVFHGVLXSPRPAAAAAGPGVVYPMNRGKWDGATSAVLPYDDGDGDEVFYTVGILRSAVADGDLRRMEEQNAEVARFCEAAGIPCTQYLPAYATQADWAARHFGPAGSGRWDTFLRRKRKYDPMAILSRGQRIFSSPLLAS

SEQ ID NO: 5794 - protein, 206 aa, Shigella boydii
YICLRPVRYYQGTPSPVKHPELTDMVIFRENSEDIYAGIEWKADSADAEKVIKFLREEMGVKKIRFPEHCGIGIKPCSEEGTKRLVRAAIEYAIANDRDSVTLVHKGNIMKFTEGAFKDWGYQLAREEFGGELIDGGPWLKVKNPNTGKEIVIKDVIADAFLQQILLRPAEYDVIACMNLNGDYISDALAAQVGGIGIAPGANIGD

SEQ ID NO: 5795 - protein, 132 aa, Glycine max
  unsure (1)..(132): unsure at all Xaa locations
YGCEKTTEGEGRIDMCLLRRASDDEEHSYMTXRILFMLKEXLSVGADYMRIDGIKAYAATYVTANMMLYARDMYLHXTPYATDAFXYTLIFERFFAQNSPMLTDTGXARVACSTYKAGEWDAACSTPLIPVA

SEQ ID NO: 5796 - protein, 286 aa, ASPERGILLUS NIDULANS FGSC A4
MQGWKTIVGKLMSRYDFPLPDLSVQAEDKILGGVPTRIYTPPDVADPPLALYFHAGGWVMGSIDEEDGFVRTLCKLARTRIFSVGYRLAPEFRFPMALDDCLTVARSVLETYPVQSICFIGASAGGNMAFSTALTLVSDGLGDRVQGVVALAPVTVHPDSVSADNRDRGEYTSYEENDRLTINTGSAMRSFFDCYGAPPDDPRLSCLLHPGLGKLNKVYMAVGDADTLRDDVRLMRDALVALEVPVKCDEYPGYPHFSWLFPSPALREHQALFFGNLLSGICWVCE

SEQ ID NO: 5797 - protein, 389 aa, Escherichia coli
TLQNGKLNVPENPIIPYIEGDGIGVDVTPAMLKVVDAAVEKAYKGERKISWMEIYTGEKSTQVYGQDVWLPAETLDLIREYRVAIKGPLTTPVGGGIRSLNVALRQELDLYICLRPVRYYQGTPSPVKHPELTDMVIFRENSEDIYAGIEWKADSADAEKVIKFLREEMGVKKIRFPEHCGIGIKPSSEEGTKRLVRAAIEYAIANDPDSVALVHKGNIMKLTEGAFKDWGYQLAREEFGGELIDGGPWLKVKNPNTGKEIVIKDVIADAFLQQILLRPAEYDVIACMNLNGDYISDALAAQVGGIGIAPGANIGDECALFEATHGTAPKYAGQDKVNPGSIILSAEMMLRHMGWTEAADLIVKGMEGAINAKTVTYDFERLMEGAKLL

SEQ ID NO: 5798 - protein, 102 aa, Nicotiana tabacum
PNSYVFVVDMPGLKSGDINVQVEDDNVLLISGERKREEEKEGAKYIRMERRVGKFMRKFTLLENANTDAISAVCQDGVLTVTVQKLPPPEPKKPKTIEVKIA

SEQ ID NO: 5799 - protein, 337 aa, Petroselinum crispum
ILSPFKFSRRATGDNDVRFKVLYCGVCHSDLHMVKNEWGMTTYPIVPGHEIVGRVTEVGSKVEKFKVGDAVGVGCLVGSCLSCENCDDDSENNCAKQVQTYAFTNVDGSITYGGYADSMVADQHFVLRWPENLPLDSGAPLLCAGITTYSPLRYHGLDKPGTKVGVVGLGGLGHVAVKMAKAFGAHVTVISTSESKKQEALEKLGADEFLVSSDSDQMQAATGTLHGIIDTVSALHPVVPLLGLLKVNGKLVMVGAPEKPLELPVFPLLMGRKVLAGSNIGGLKETQEMLDFAAQHNITADVEVIPVDYVNTAMERLVKSDVRYRFVIDVANTIKTE

SEQ ID NO: 5800 - protein, 130 aa, Triticum aestivum
  unsure (1)..(130): unsure at all Xaa locations
MAPTVMASSATSVAPFQGLKSTAGLPVSRRSNGASSAASXNGGRIRCMQVWPIEGIKKFETLSYLPPLSTEALLKQVDYLIRSKWVPCLEFSKVGFIFREHNASPGYYDGRYWTMWNCYVRVTTHTVSTR

SEQ ID NO: 5801 - protein, 483 aa, Arabidopsis thaliana
MADLLRKVKSIKKKQDQSNHQALILGKYEMGRLLGHGTFAKVYLARNAQSGESVAIKVIDKEKVLKSGLIAHIKREISILRRVRHPNIVQLFEVMATKSKIYFVMEYVKGGELFNKVAKGRLKEEMARKYFQQLISAVSFCHFRGVYHRDLKPENLLLDENGNLKVSDFGLSAVSDQIRQDGLFHTFCGTPAYVAPEVLARKGYDGAKVDIWSCGVILFVLMAGFLPFHDRNVMAMYKKIYRGDFRCPRWFPVEINRLLIRMLETKPERRFTMPDIMETSWFKKGFKHIKFYVEDDHQLCNVADDDEIESIESVSGRSSTVSEPEDFESFDGRRRGGSMPRPASLNAFDLISFSPGFDLSGLFEDDGEGSRFVSGAPVGQIISKLEEIARIVSFTVRKKDCKVSLEGSREGSMKGPLSIAAEIFELTPALVVVEVKKKGGDKMEYDEFCNKELKPKLQNLSSENGQRVSGSRSLPSFLLSDTD

SEQ ID NO: 5802 - protein, 396 aa, Erwinia carotovora subsp. atroseptica SCRI1043
MLDNHTIAIVKSTIPLLAETGPKLTAHFYDRMFTHNPELKDIFNMSNQRNGDQREALFNAICAYATNIENLAALLPAVERIAQKHTSFNIQADQYQIVGNHLLATLDEMFSPGQEVLDAWGKAYGVLANVFIQREDDIYRSTETKTGGWSGVRPFRIVNKQLQSSVITSFTLEPTDGQPIADFQPGQYLAIYIKHDSFANQEIRQYSLTHAPNGKSYRIAVKREAQGTVSGYLHDTAREGDIVHLAAPHGDFFLDIPTDTPVALISGGVGQTPMLGMLHTLKQQDHQAKVLWLHAAENGTAHAFTDEIEQTGQALPHFDHHIWYREPQQTDRPGEDYHHSGLMQLASLKGELTTPDMHYYLCGPVVFMQFVAQQLLAMGIPAEQLHYECFGPHKVV

SEQ ID NO: 5803 - protein, 196 aa, Triticum aestivum
EGGKKSGGGGGGHGEKGSSKSAEQERRQGIAWTEDEHRLFLLGLEKYGKGDWRSISRNFVISRTPTQVASHAQKYFIRLNSMNRERRRSSIHDITSVNGEASAAQGPITGTNGQAAVPGKSPKQSPHQPGNLPPGVDAFGTTIGQPVGGPLVSAVGTLVTLPVAAPPHMGYAMHAPVPGTVVPRAPMYPMPPPPSR

SEQ ID NO: 5804 - protein, 127 aa, Streptomyces coelicolor A3(2)
MPTGKVKWFNSEKGFGFLSRDDGGDVFVHSSVLPAGVESLKPGQRVEFGVVAGQRGDQALSLALLDPAPSVAAAQRKKPDELASIVQDLTTLLENITPMLERGRYPEKTAGKKIAGLLRAVADQLDV

SEQ ID NO: 5805 - protein, 303 aa, Zea mays
  unsure (1)..(303): unsure at all Xaa locations
PPLDAPSSIPSRSSWRPTLLASIDVQSFNVDLLYEPWEVLDEDRRPFTMFAPLLPPLHXFWNRCLCMPDPAAPLLPPKRINSGDLSRCPWDELVFEDESERGSNALLARAWSPGWQNADKALTAFLNGPLMDHSVNRKKADSASTSLLSPYLHFGELSVRKVFHQVRMKRLMWSNDDNHAGEESCTLFLCSIGLREYLRYLTFNHPYSHEKPLLSHLRFFPWVVNEVYIIKVLENSDWIYIMPWGLYKAVTYVKEKYRDDRNAAEIFRANGDIIGLKSHCNSQLKVIGDGGDPNGHYDKDDHQ

SEQ ID NO: 5806 - protein, 500 aa, Mentha x piperita
MELQISSAIIILVVTYTISLLIIKQWRKPKPQENLPPGPPKLPLIGHLHLLWGKLPQHALASVAKQYGPVAHVQLGEVFSVVLSSREATKEAMKLVDPACADRFESIGTKIMWYDNDDIIFSPYSVHWRQMRKICVSELLSARNVRSFGFIRQDEVSRLLGHLRSSAAAGEAVDLTERIATLTCSIICRAAFGSVIRDHEELVELVKDALSMASGFELADMFPSSKLLNLLCWNKSKLWRMRRRVDAILEAIVEEHKLKKSGEFGGEDIIDVLFRMQKDSQIKVPITTNAIKAFIFDTFSAGTETSSTTTLWVMAELMRNPEVMAKAQAEVRAALKGKTDWDVDDVQELKYMKSVVKETMRMHPPIPLIPRSCREECEVNGYTIPNKARIMINVWSMGRNPLYWEKPETFWPERFDQVSRDFMGNDFEFIPFGAGRRICPGLNFGLANVEVPLAQLLYHFDWKLAEGMNPSDMDMSEAEGLTGIRKNNLLLVPTPYDPSS

SEQ ID NO: 5807 - protein, 301 aa, Archaeoglobus fulgidus DSM 4304
MRVTSPEIQRGIKVSELLDMFGSTAFNARRLGEAAKICEEMVKSDSFVFLTLAGAMIPAGMRKIVAGMMQNGFISSLVTTGANIVHEIVESLGIGHEIGSCYVDDTALAEESINRIYDVFVGQEAFERVEEFLSGIIEGLDGIYTTYEFLWEVGKRIPDERSFLRIAAEREIPVFCPTLHDSIAGLHMTIYRKNLQIDFFRDVSRIIDFCFQKRKMGVIVVGGGVPKNFTLQAMLLAEGFDYAVQITTDSPQWGGLSGATLEEAKSWCKLKPDAKAVTVYCDATIALPMLYAYLLDRCGES

SEQ ID NO: 5808 - protein, 106 aa, Nicotiana tabacum
PNCYIFIVDMPGTKANEIKVQVEDDNVLVVSGERKRDKEKKDEKESVKYLRMERRVGKFMRKFVLPENANIDSITAVCQDGVLKVTVEKLPPPERKKPKTIDVKLA

SEQ ID NO: 5809 - protein, 112 aa, Bartonella sp. Rf1554yn
ANEACLKMLQEIGSIKRIPEFIARAKDKNDPFRLIGFGHRVYKNYDPRAKIMQKTCHKVLKELNIQNDPLLDIAIELEKIALSDEYFIEKKLYPNVDFYSGIILKALGFPTE

SEQ ID NO: 5810 - protein, 498 aa, Mentha x piperita
MELLQLWSALIILVVTYTISLLINQWRKPKPQGKFPPGPPKLPLIGHLHLLWGKLPQHALASVAKEYGPVAHVQLGEVFSVVLSSREATKEAMKLVDPACANRFESIGTRIMWYDNEDIIFSPYSEHWRQMRKICVSELLSSRNVRSFGFIRQDEVSRLLRHLRSSAGAAVDMTERIETLTCSIICRAAFGSVIRDNAELVGLVKDALSMASGFELADMFPSSKLLNLLCWNKSKLWRMRRRVDTILEAIVDEHKFKKSGEFGGEDIIDVLFRMQKDTQIKVPITTNSIKAFIFDTFSAGTETSSTTTLWVLAELMRNPAVMAKAQAEVRAALKEKTNWDVDDVQELKYMKSVVKETMRMHPPIPLIPRSCREECVVNGYTIPNKARIMINVWSMGRNPLYWEKPDTFWPERFDQVSKDFMGNDFEFVPFGAGRRICPGLNFGLANVEVPLAQLLYHFDWKLAEGMKPSDMDMSEAEGLTGILKNNLLLVPTPYDPSS

SEQ ID NO: 5811 - protein, 342 aa, Oceanobacillus iheyensis HTE831
MKAVFVEDAEKIIVKDIEVPELKPNEVQIKVNVAGICGSDIHTYKGLHPFRKPPVVIGHEVAGEVVEVGSSVTKFKVGDRVTVEPQIGTGESEGVMTGNVNYSDTRLAPGMGDWLGTMAEYFASPEEQVIKLPDSVSYDQGVLVEPLAVGVHAAFKGDVQPTDRVAILGAGPIGLLTLIAVKAKGVKDIVVTDVLDYSLQVAKEMGASEVINIKDNSNWIHDAKQSLDKGSFDKVFITAGVPGIVNDSLNLLRKGGRVVTVAMFHGQQSVDIEQLQQNEKEIIGCMTYNRPDTEEALEIIASGKLDVEKVISHKLHYEEAAKGFTIVDKKKDKSVKVLVSFE

SEQ ID NO: 5812 - protein, 101 aa, Rickettsia sp. Bar29-like
GSSEYIPKYIAKAKDKNDPFRLMGFGHRIYKNYDPRAAVLKETCKEVLKELGQLDNNPLLQIAIELEAIALKDEYFIERKLYPNVDFYSGIIYKAMGIPSQ

SEQ ID NO: 5813 - protein, 112 aa, Bartonella sp. Rf1561yn
ANEACLKMLQEIGSIKRIPEFIARAKDKNDPFRLIGFGHRVYKNYDPRAKIMQKTCHKVLKELNIQDDPLLDIAIELEKIALSDEYFIEKKLYPNVDFYSGIILKALGFPTE

SEQ ID NO: 5814 - protein, 337 aa, Streptococcus pyogenes SSI-1
MKRIAVLTSGGDAPGMNAAIRAVVRKAISEGMEVYGINRGYAGMVDGDIFPLGSKEVGDKISRGGTFLYSARYPEFAQLEGQLAGIEQLKKHGIEGVVVIGGDGSYHGAMRLTEHGFPAVGIPGTIDNDIAGTDYTIGFDTAVNTAVEAIDKLRDTSSSHGRTFVVEVMGRNAGDIALWAGIASGADQIIVPEEEFDIEKVASTIQYDFEHKGKNHHIIVLAEGVMSGEAFAQKLKEAGDKSDLRVTNLGHILRGGSPTARDRVIASWMGSHAVELLKEGKGGLAVGIHNEELVESPILGTAEEGALFSLTEEGQIIVNNPHKARLDFAALNRSLSQ

SEQ ID NO: 5815 - protein, 108 aa, Brassica napus
  unsure (1)..(108): unsure at all Xaa locations
FEAFQLGMAPVYMAFLRFMGDENDARNYSYSLEVGANGRKMIWEGTPRSIRDSHRKVRDSHDGLIIQRNMALFFSGGERKELKLRVTGRIXKEQQNPDSGACIPNLFS

SEQ ID NO: 5816 - protein, 280 aa, Triticum turgidum subsp. durum
MKTLLILTILAMATTIATANMQVDPSGQVQWPQQQPFPQPQQPFCEQPQRTIPQPHQTFHHQPQQTFPQPEQTYPHQPQQQFPQTQQPQQPFPQPQQTFPQQPQLPFPQQPQQPFPQPQQPQQPFPQSQQPQQPFPQPQQQFPQPQQPQQSFPQQQQPAIQSFLQQQMNPCKNFLLQQCNHVSLVSSLVSIILPRSDCQVMQQQCCQQLAQIPQQLQCAAIHSVAHSIIMQQEQQQGVPILRPLFQLAQGLGIIQPQQPAQLEGIRSLVLKTLPTMCNVY

SEQ ID NO: 5817 - protein, 122 aa, Zea mays
KLAGCSRVSDHRRGTKARDNRCVNESIAMASRLVAAAASSSSSLSSASPLARLISRRGLAGAADGHGSAKVPLWKDPLSPSKWKEEHFVLASLSMWGVIFYGGYKLFSGKKEAKTEAASPQA

SEQ ID NO: 5818 - protein, 73 aa, Glycine max
PTRPPTRPCGCEKTTEGGLGWERYYDGDPDLYQFHKHSSIDLISLPKDFSKFNSINMYDIVIKNPNVFHVRDK

SEQ ID NO: 5819 - protein, 179 aa, Triticum aestivum
  unsure (1)..(179): unsure at all Xaa locations
MAPTVMASTATSVAPFQGLKSTAGLPVSRRSSSAGLSSVSNGGRIRCMQVWPIEGIKKFETLSYLPPLSTEALLKQVDYLIRSKWVPCLEXFSKVGFVFREHNXSSPGYYDGRYWTMWKAAYVRGGTDATQVXNEXXREVKKEXPXDAYVXVIGFRTGAKLRLIRFKGQPGLPKEWERA

SEQ ID NO: 5820 - protein, 723 aa, Glycine max
MDFTSFLTSLGTSFVIFLVLMIVFAFLSSRPGNNVVYYPNRILKGLDPLEGGYKSRNPFSWIKEALTSSERDVIAMSGVDTAVYFVFLTTVLSILVLSGVILLPVLLPLSVTDHGMKTQTTSNGTFSELDKLSMANITAKSSRLWGFFIACYWVSIVTFALLWRAYKHVSWLRAEALKSPDVKPEQFAIVVRDIPHVPQGQTRKEQVDSYFRDIYPETFYRSMIVTDNKVVNKIWESLEKYTKKLARAEAVYAGSKTTAKPEGTRPTNKTGFLGLVGKKVDTIEYCNEKINELEARLESEQKVTLREKQQDAAVVFFSSRVVAASASQSLHAQMVDTWSVFDAPEPNQLIWPNLKIKYFQRELRQYLVYFIVALTIFFYMIPITFISALTTLDNLVKYLPFIKPIVNIKALKTVLEAYLPQLALIIFLALLPKLLLFLSKFEGIPTESHAVRAASGKYFYFTVLNVFIGVTIGGTLFKAFKRIREHPTLDEISSLLAESLPGNATFFLTYVALKFFIGYGLELSRIVPLIIYHLKRKYLCKTEAELKEAWRPGDLGYGTRVPGDMLIVTIVFCYSVIAPVIIPFGALYFGLGWLVLRNQALKVYVPTFESYGRMWPHIHNRILASLILYQITMFGYFGTQKFYYTPLVLPLPILSLVFGFVCAKKFYPAFQHPALEVAANTLKEVPNMELIFGAYIPPSLRSEKIDGDRVEDALSQASRTTPV

SEQ ID NO: 5821 - protein, 445 aa, Pseudomonas aeruginosa UCBPP-PA14
MQSLLIRNARMVNEGQVREGDLLVRHGRIERIAGCLENCGASREIDAAGRYLLPGMIDDQVHFREPGYPQKGSIASESRAAVAGGITSFMDMPNTRPATLSLEALAEKKRLAAAHSVANYGFHFGVSRDNLDTVAALDPRDVAAVKVFMGASTGDMLVDDLPTLERLFASVPTLLLSHCEDTPRIEANLARWRQRFGERIPAAAHPRIRDAEACYRSTALAVELAQRHGTLLHVLHLSTARELALFEDKPLCQKRITAEVCVHHLLFDDSDYARLGHLLKCNPAIKSREDRDALRRALAGNRLDVIGTDHAPHAWAEKQQAYPQAPAGLPLVQHALPALLELVREGWLSLATLVAKTSHRVAELFAIADRGFLREGYWADLVLVSELEHPALASAMPLLSRCNWTPFRHRAFHHRIDTTIVSGQLAWHAGRLSDDCQGLPLRFSR

SEQ ID NO: 5822 - protein, 197 aa, Shigella flexneri
PVRYYQGTPSPVKHPELTDMVIFRENSEDIYAGIEWKADSADAEKVIKFLREEMGVKKIRFPEHCGIGIKPCSEEGTKRLVRAAIEYAIANDRDSVTLVHKGNIMKFTEGAFKDWGYQLAREEFGGELIDGGPWLKVKNPNTGKEIVIKDVIADAFLQQILLRPAEYDVIACMNLNGDYISDALAAQVGGIGIAPGA

SEQ ID NO: 5823 - protein, 423 aa, Triticum aestivum
  unsure (1)..(423): unsure at all Xaa locations
MPLSGMAIAFKASTSACTAQQLWGHPTRDQCQHGFTHLNERKSRKGSAALHARAIPGNLDLDFGDPSWKQKYQEDWDRRFSLPHITDVFDLEPCRSAFPRSTHASPRGASDASSPDKWNGYVNKDDRALLKVSDYASNTSAGAECIDPDCSWVEHWVHRAGPRKEIYYEPEEVKAAIVTCGGLCPGLNDVIRQIVFTLEIYGVKNIVGIQFGYRGFFEKGLKEMPLSREVVENINLAGGSFLGVSRGGAKTSEIVDSIQARRIDMLFVIGGNGSHAGANAIHEECRKRKLKVSVVAVPKTIDNDILFMDKTFGFDTAVEEAQRAINSAYIEARSAYHGVGLVKLMGRSTGFIAMHASLSSGQIDVCLIPEVSFTLDGEHGVLAHLEHLLETKGFCVVCVAEGAGQDLLQKSNXTDASGNVILS

SEQ ID NO: 5824 - protein, 389 aa, Escherichia coli
TLQNGKLNVPENPIIPYIEGDGIGVDVTPAMLKVVDAAVEKAYKGERKISWMEIYTGEKSTQVYGQDVWLPAETLDLIREYRVAIKGPLTTPVGGGIRSLNVALRQELDLYICLRPVRYYQGTPSPVKHPELTDMVIFRENSEDIYAGIEWKADSADAEKVIKFLREEMGVKKIRFPEHCGIGIKPCSEEGTKRLVRAAIEYAIANDRDSVTLVHKGNIMKFTEGAFKDWGYQLAREEFGGELIDGGPWLKVKNPNTGKEIVIKDVIADAFLQQILLRPAEYDVIACMNLNGDYISDALAAQVAGMGIAPGANIGDECALFEATHGTAPKYAGQDKVNPGSIILSAEMMLRHMGWTEAADLIVKGMEGAINAKTVTYDFERLMEGAKLL

SEQ ID NO: 5825 - protein, 226 aa, Clostridium beijerinckii
MKLIIDDVNIEKIKDVFSIFQIDGVTSNPSILHKYGKQPYEILIKIREFIGENSELHVQVISESSEGMLKEAHKIIKELGKNTYVKIPVTRDGLKAIKILRKEEINVTATAIYTQMQAYLAGKAGAQYAAPYVNRIDNLGANGVQVAKDIHDIFEKNNFKTEVLAASFKNSQQVLELCKYGIGAATISPDVIEGLIKNDCVDVAVENFKKDFEILCGQGNTMLNCR

SEQ ID NO: 5826 - protein, 218 aa, Shigella boydii
QELDLYICLRPVRYYQGTPSPVKHPELTDMVIFRENSEDIYAGIEWKADSADAEKVIKFLREEMGVKKIRFPEHCGIGIKPCSEEGTKRLVRAAIEYAIANDRDSVTLVHKGNIMKFTEGAFKDWGYQLAREEFGGELIDGGPWLKVKNPNTGKEIVIKDVIADAFLQQILLRPAEYDVIACMNLNGDYISDALAAQVGGIGIAPGANIGDECALFEA

SEQ ID NO: 5827 - protein, 399 aa, Bacillus anthracis str. Sterne
MYWNDGNEGSEYRMISHLFQTYGRRTVEFVKGNGTKVIDNNGKQYLDFTSGIGVCNLGHCHPTVMKAVQEQLNDIWHISNLFTNSLQEEVASLLTENIALDYVFFCNSGAEANEAALKLARKHTGKSLVVTCEQSFHGRTFGTMSATGQNKVKEGFGPLLPSFLHTPFNDIKALKEVMNEEVAAVMVEVVQGEGGVIPADLSFLKEIETLCKKFGSLFIIDEVQTGIGRTGTLFAYEQMGIDPHIVTTAKALGNGIPVGAMIGRKELGTSFTAGSHGSTFGGNYVAMAAAKEVLQVSKRLSFLKEVQEKGEYVLQKLQEELQHVECIQNIRGKGLMVGIECTHEVASFIEQLEKEGLLVLQAGPNVIRLLPPLIVTNEELEQAVYMIKKVVCTKNVSII

SEQ ID NO: 5828 - protein, 535 aa, Glycine max
MGSISHVITTTLPHLPSTRSLGFPISHSNSRLLSLPPTRVAKQVGVFAELVSRSSTASFASVDFSVHDWKIQFHEDCQLRRPPPHLTDIFPNAPPIPSTFCLKMRTPIDRDFPGHYSLDEEWHGYINNNDRVLLKTIYYSSPTSAGAECIDPDCTWVEQWVHRAGPREKIYYKPEEVKAAIVTCGGLCPGLNDVIRQQIVITLEIYGVKNIVGIPFGYRGFSDKELTEVPLSRKVVQNIHLSGGSLLGVSRGGPGVSDIVDSLEKRGINMLFVLGGNGTHAGANAIHHECRKRRLKVSVIGVPKTIDNDILLMDKTFGFDTAVEEAQRAINSAYIEAHSAYHGIGVVKLMGRSSGFIAMQASLFSGQVDICLIPEVPFNLHGPHGVLSHLKYLLETKGSAVVCVAEGAGQNLLQKTNATDASGNVVFGDIGVYIQQETKKYFKEIGVHADVKYIDPTYMIRAIRANASDGILCTVLGQNAVHGAFAGYSGITVGLCNTHYVYFPIPEVISHPRLVDPNSRMWHRCLTSTGQPDFI

SEQ ID NO: 5829 - protein, 314 aa, ASPERGILLUS NIDULANS FGSC A4
MSLADTTYKLNTGAEIPALGLGTWQSAPGEVSAAVYHALKVGYRHIDAAQCYGNETEVGEGIKRALSEGIVKRSEIFVTTKLWCTYHTRIQQALDLSLSKLGLDYVDLYLVHWPLAMNPNGNHDLFPKLPDGSRDLVREHSHVTTWKGMEELITNNPDKVKAIGVSNYSKRYLEQLLPQAKIVPAVNQIENHPALPQQEIVDLCKEKGILITAYSPLGSTGSPLFKAEAIVAVAERRGVTPASVLLSWHLARGSSVLAKSVTPSRIEENRKLVKLEPEDVELIGKYSAELAATNGFQRYVYPPFGVDFGFPDKS

SEQ ID NO: 5830 - protein, 213 aa, Shigella dysenteriae
DLYICLRPVRYYQGAPSPVKHPELTDMVIFRENSEDIYAGIEWKADSADAEKVIKFLREEMGVKKIRFPEHCGIGIKPCSEEGTKRLVRAAIEYAIANDRDSVTLVHKGNIMKFTEGAFKDWGYQLAREEFGGELIDGGPWLKVKNPNTGKEIVIKDVIADAFLQQILLRPAEYDVIACMNLNGDYISDALAAQVGGIGIAPGANIGDECALF

SEQ ID NO: 5831 - protein, 303 aa, Arabidopsis thaliana
MALKFSGAYKQCKPCTGSSSSPLKKGHRSFPDYDNASEGVPYPFMGGSAGSTPAWDFTNSSHHPAGRLESKFTSIYGNDRESISAQSCDVVLDDDGPKEWMAQVEPGVHITFASLPTGGNDLKRIRFSREMFDKWQAQRWWGENYDKIVELYNVQRFNRQALQTPARSDDQSQRDSTYSKMDSARESKDWTPRHNFRPPGSVPHHFYGGSSNYGPGSYHGGPPMDAARTTTSSRDDPPSMSNASEMQAEWIEEDEPGVYITIRQLSDGTRELRRVRFSRERFGEVHAKTWWEQNRERIQTQYL

SEQ ID NO: 5832 - protein, 278 aa, Mycoplasma gallisepticum R
MITRMNHSKINWFPGHMKKTLDDINKIKKHIDLVIQVLDARAINLTSNPDLLEIFKQKKIINVALKSDLADLSYQYDPETIVTNIRDHQFSNFLLNKLHQILSDKIKRLQAKGLVTPHFNIMVIGLPNIGKSSLINKLIKKNHNKVENKAGVTKRQTFVKLNKNFTLYDTPGVLYKRIDDFILGAKLSLLNVINLEVIPMQEVLSFAYSYLNQYYHNQLLEWAKQEIIPEQFHEFIEQYAHKKGFLNKNNAIDLNATYMNFYQDISLAKIAKVNYEKN

SEQ ID NO: 5833 - protein, 204 aa, Shigella dysenteriae
RPVRYYQGAPSPVKHPELTDMVIFRENSEDIYAGIEWKADSADAEKVIKFLREEMGVKKIRFPEHCGIGIKPCSEEGTKRLVRAAIEYAIANDRDSVTLVHKGNIMKFTEGAFKDWGYQLAREEFGGELIDGGPWLKVKNPNTGKEIVIKDVIADAFLQQILLRPAEYDVIACMNLNGDYISDALAAQVGGIGIAPGANIGDEC

SEQ ID NO: 5834 - protein, 313 aa, Agrobacterium tumefaciens str. C58
MLELLWSGQTATKITAEDIRSQLGKARLRAFELMQLLFPGLAALTSVEALRLLLSWLPDDETTPHHLVAVAAVPVFATAIIRNRQGFAPIAPDASLTHSADFLRMLSGTLPSTEKVRALDTYLTTVADHGLNASTFTARVIASTGAGLFSSVVGALCALKGPLHGGAPGPVLDMLDAIGAEAEIEPWLLDALGRGERLMGFGHRIYRVRDPRADVLKHAVSTLKEGSDRIAFAGKVEEAALALLKEKKPLRPLQTNVEFYTALVLEAVGFPRDSFTNVFAAGRMAGWTAHVLEQERTGRLIRPQSHYIGPHPR

SEQ ID NO: 5835 - protein, 235 aa, Nostoc punctiforme PCC 73102
MTGTDPVKLMKQEVGKAAAALVKSGSIVGLGTGSTTAYTIQFLGDRLKSGELKDIIGIPTSFQSEVLAKQYGVPLATLDSIDHIDIAIDGADEVDPQKNLIKGGGAAHTREKVVDYLAEQFIVVVDSGKLVDRLGSSFAVPVEVIPMAITPVTNAIKKLGGKPELRMGVKKAGPVITDQGNFVLDVRFDSIEDPVSLEKTLNNIPGVLENGIFVNCVDLVLIGEVKDGQPLVRQL

SEQ ID NO: 5836 - protein, 466 aa, Triticum aestivum
NSARAAGKRLWDAGVRDLLILEATGRVGGRMHKHNFGGLNVEIGANWVEGLNGDKVNPIWPMVNASLQLRNFYSDFDGVVGNVYKESGGLYDEEFVQKRMDRGDEVEELGGKLAAEMDPSGRDDISILAMQRLFNHQPNGPATPVDMVLDYFRYDYEFAEPPRVTSLQGTEPTATFADFGDDANFVADQRGFETLIYHIAGQYLRSDKSGNIVDPRVKLNKVVREISYDQRGVVVTTEDNSAYSADYVIVSASIGVLQSDLIQFKPQLPAWKILAIYRFDMGVYTKIFLKFPRKFWPTGPGKQFFVYASSRRGYYGMWQSFEQEYPGANVLMVTVTDVESRRIEQQPDNVTMAEAVGVLRNMFPDRDVPDATDIYVPRWWSNRFFKGSYSNWPVGVNRYEYDQLRAPVGGRVYFTGEHTSEHYNGYVHGAYLAGIDSADILMNKVLNNVEFKVRPKYDEEQKAEAK

SEQ ID NO: 5837 - protein, 116 aa, Glycine max
  unsure (1)..(116): unsure at all Xaa locations
FVSDQRGCNYFLHKMAEVFLFPSQERMLDIRLKPNKVARELQYSQSGVTLQTENGXVCDTNYVILSDSIGVFQSDVMSLQSPLTRVCSILCPTLTSRKYTSAVVFFHTKNTRLFFQ

SEQ ID NO: 5838 - protein, 335 aa, ASPERGILLUS NIDULANS FGSC A4
MGSNGNNGPAYAPEWQHFITELGDPLLMRGETVAELYENSNENIQKLLAKYDFPPTDKSVTTEDITLKNGVWVRIYTPPAADFNATMADSDSGKEEKITVFMHGGGWIMGSVDHEDSAVRQLCRAVGHKIVSVGYRLAPKHKYPVALDDCLQATLWTLENFASSAPSVSLMGGSAGANLAFGVALRLLDSGLGDKFKGVHALVPCVVHPEAVPEPKREQFTAYEENAEATVNTLACMRCFLDSYGPPPDDIYFSVLLHPRIGDLKRVYIVECGTDTLRDDARLMRDALIEKGVDVRYDAYPGLPHYFWSYPAKALEGVSGVFHANMYRALQWIHE

SEQ ID NO: 5839 - protein, 389 aa, Escherichia coli
TLQNGKLNVPENPIIPYIEGDGIGVDVTPAMLKVVDAAVEKAYKGERKISWMEIYTGEKSTQVYGQDVWLPAETLDLIREYRVAIKGPLTTPVGGGIRSLNVALRQELDLYICLRPVRYYQGTPSPVKHPELTDMVIFRENSEDIYAGIEWKADSADAEKVIKFLREEMGVKKIRFPEHCGIGIKPCSEEGTKRLVRAAIEYAIANDRDSVTLVHKGNIMKFTEGAFKDWGYQLAREEFGGELIDGGPWLKVKNPNTAKKIVIKDVIADAFLQQILLRRPEYDVIACMNLNGDYISDALAAQVGGIGIAPGANIGDECALFEATHGTAPKYAGQDKVNPGSIILSAEMMLRHMGWTEAADLIVKGMEGAINAKTVTYDFERLMEGAKLL

SEQ ID NO: 5840 - protein, 483 aa, Pseudomonas sp. ND6
MTVQLVIDNQKQSASDGKTFERIDPLSSHAVSVGAACSVEDALRAAQSSERAFQTWSGTGPTERRRILLAAADALEAKMADFCSAMAEEIGASQLWAQFNVGASANLLREAAAMTTQIKGETIPTDKPGALSMTLRQPVGTVLSIVPWNGPVILGARAIAYPLACGNTVIFKGSESSPRTHALLAEAFYEAGLPAGVLNFLISAPEDAAAVTEALVAHDTVRRVNFTGSTKVGRMIAQTCASHLKRCLLELGGKAPFIVLDDADIEGAVNAAVFGAFLYQGQICMSTERFVVDEAVADAFVARFAERVNALETGLPAKSPGCVIGPMIGQGSVQRINHLLDDAVNKGAKIVTGGLAETALMGPTLVDCVTREMAIYDEETFGPVTTIVRVKGAEQALAVANDTAYGLSSSIFSRDVTKALGLASRLDAGCVHINGATVQNEPQAPYGGMKKSGYGRFDGNAVIEEFTEVKWVTVEPSGQPYPF

SEQ ID NO: 5841 - protein, 280 aa, Methanothermobacter thermautotrophicus str. Delta H
MAIGKESLEQVFRAGSPRWRTSITRVEPNRIVTRGYSQEDLIGGVSFSEMVYLLIRGELPPQNVARMLEAVLVSFCDHGVTPPSTQAARMIASAGSPVHACIAGGLLAFGKNHAGAIERSMKLFQETVSSCESEDEIPDAALRLVDDHLQANRRIPGFGHRYHNADPRAVRLLELAEDYGCVGPHTSLALEVQEILLERKGVRMNVDGANAGILSDMGFDWRTGAGVFMIGRLPGLISHVYEEKVREPAFRKFFEIEEIQYDGEEERDLSAGADLEPMPE

SEQ ID NO: 5842 - protein, 616 aa, Zea mays
MDSDYGVPRELSEVQKKRALYQPEVPPCLQGTTVRVEYGDAAIAADQAGAHVISHAFPHTYGQPLAHFLRKTAVVLDAKVISEHPVVRVGIVFCGRQSPGGHNVVWGLYEAIKAHNQNSKLIGFLGGSDGLLAQRTLEITNEVLASYKNQGGYDMLGRTKDQIRTTEQVNGAMASCQALKLDALVIIGGVTSNTDAAQLAETFAEAKCATKVVGVPVTLNGDLKNQFVETTVGFDTICKVNAQLISNVCTDALSAEKYYYFIRLMGRKASHVALECALQSHPNMVILGEEVAASKLTIFDITKQICDAVQARAEKDKNHGVVLIPEGLVESIPELYALLQEIHGLHGKGVSVENISSQLSPWASALFEFLPPFIRKQLLLHPESDDSAQLSQIETEKLLAQLVETEMNRRLKEGTYKGKKFNAICHFFGYQARGALPSKFDCDYAYVLGHVCYHIIAAGLNGYMATVTNVKSPVNKWRCGAAPISSMMTVQRWSRGPSATQIGKPAVHMASVDLKGKAYDVLRQNSSRFLLEDVYRNPGPLQFEGPGADSKPISLCVEDQDYMGRIKKLQEYLEKVKSIVKPGCSQDVLKAALSAMSSVTETLNIMTSSSTGQTAL

SEQ ID NO: 5843 - protein, 289 aa, Photorhabdus luminescens subsp. laumondii TTO1
MSQKEIWSETLHANFGQYFSVDKVLYHDKTEHQDLIIFENATLGRIMALDGTVQTTERDEFIYHEMMAHVPLFAHGNAKRVLIIGGGDGGMLREVCRHQYLESITMVEIDAGVVEFCRQYLPNHNAGAYDDPRFNLIIDDGVNFVNTTDQKFDVIISDCTDPIGPGEGLFTSEFYQGCQRCLNEGGIFVAQNGVCFLQQDEAVTSHKKLSNYFADSGFYQAAIPTYYGGIMTFAWASQNPALRHVDLATLQQRFDNASFTCRYYNPAVHVGSFALPQYLLDALFTGCTI

SEQ ID NO: 5844 - protein, 302 aa, Triticum aestivum
MKTLLILTILAMATTIATANMQVDPSGQVQWPQQQPFPQPQQPFCQQPQRTIPQPHQTFHHQPQQTFPQPQQTYPHQPQQQFPQTQQPQQPFPQPQQTFPQQPQLPFPQQPQQPFPQPQQPQQPFPQSQQPQQPFPQPQQQFPQPQQPQQSFPQQQQPAIQSFLQQQMNPCKNFLLQQCNHVSLVSSLVSIILPRSDCQVMQQQCCQQLAQIPQQLQCAAIHSVAHSIIMQQEQQQGVPILRPLFQLAQGLGIIQPQQPAQLEGIRSLVLKTLPTMCNVYVPPDCSTINVPYANIDAGIGGQ

SEQ ID NO: 5845 - protein, 104 aa, Oryza sativa (japonica cultivar-group)
MVDAKGRLLDRATMEEDLFWAIRGGGGRNFGIVLSWKLRLVPIPATVTVFTVHRSRNQSATNLLIKWQHVASSLPNDAFLRVVVPLYRVPASSPPWPTPSWSST

SEQ ID NO: 5846 - protein, 381 aa, Staphylococcus aureus subsp. aureus MSSA476
MLTEQEKDIIKQTVPLLKEKGTEITSIFYPKMFKAHPELLNMFNQTNQKRGMQSSALAQAVMAAAVNIDNLSVIKPVIMPVAYKHCALQVYAEHYPIVGENLLKAIQDVTGLEENDPVIQAWAKAYGVIADVFIQIEKEIYDQMMWIGFKPFKITNIKQESEDIKSFTVETEEYDFSEFTPGQYITVDVSSEKLPYRAKRHYSIVSGEKNHLTFGVKRDVTTEHEGEVSTILHDEIKEGDMINLAAPVGGFVLENTTEPQLFLGSGIGVTPLVAMYEAASAKGLDTQMVQVAENEQHLPFKDNFNSIASHHDNAKLYTHLKDKQGYIGAEELQAFLANKPEIYICGGTKFLQSMIEALKSLNYDMDRVHYETFIPRLSVAV

SEQ ID NO: 5847 - protein, 262 aa, Hypocrea lixii
MGHEDAVYLAKLAEQAERYEEMVENMKIVASEDRDLTVEERNLLSVAYKNVIGARRASWRIVTSIEQKEESKGNSSQVTLIKEYRQKIENELAKICDDILEVLDQHLIPSAKSGESKVFYHKIKGDYHRYLAEFAIGDRRKDSADKSLEAYKAATEVAQTELPPTHPIRLGLALNFSVFYYEILNAPDQACHLAKQAFDDAIAELDTLSEESYKDSTLIMQLLRDNLTLWTSSEAETPARLMPLLRRRPLLRLPSRRRRAQG

SEQ ID NO: 5848 - protein, 213 aa, Zea mays
MGCFHSTAKRQHPGYEDPVHLASQTSFSVSEVEALFELFKSISGSVIDDGLINKEEFQLALFKNQRKENLFANRIFDLFDVKKRGAIDFGDFVRALNVFHPNIPMDEKIDFSFKLYDMDSTGFIERKEVKQMLIALLGESEMRLSDDIIETILDKTFSDADANQDGKIDRTEWENFVTRNPSLMKIMTLPYLKDITTTFPSFVFNSEVDDLVT

SEQ ID NO: 5849 - protein, 351 aa, Staphylococcus aureus subsp. aureus MSSA476
MKALVKTREGHGNLELLDKEVATPLDDKVKIKVHYAGICGTDIHTYEGHYKVNFPVTLGHEFSGEIVEVGADVKDFKVGDRVTSETTFYVCNECEYCKSKDYNLCNHRKGIGTQVDGAFTNYVIAREESLHHIPDEVSYQSAAMTEPLACAHHGVSKIQVNSGDVAVVMGPGPIGLLVAQVLKSKGATVVVTGLDNDKVRLDKAEALHMDYVVNLQQTDLKTYINGITDGYGADVVVECSGAVPAARQGLDILRKKGFYSQIGIFKDAEIPFDMEKVIQKEITVVGSRSQKPADWEPSLQLMADGLVNAEALVTKIYDISKWDEAYQHLKSGEGIKALLKPLDLDENEGEN

SEQ ID NO: 5850 - protein, 462 aa, Bacillus subtilis subsp. subtilis str. 168
MPDQLTVYNPATGEEIKTIPQQSATEVEEAIERSHQAFKTWSKTSANERTSLLKKWYELIVEHKEELADLITKENGKPYQEAVGEVLYGAGYIEWFAEEAKRVYGRTVPAPTTGKRIVVTRQPVGPVAAITPWNFPNAMITRKAAPALAAGCTFIIKPAPDTPLSAYELARLAYEAGIPKDVLQVVIGDGEEIGNVFTSSPKIRKITFTGSTPVGKILMKNSADTVKHVSMELGGHAPLIVDEDADIDLAVEQAMASKYRNAGQTCVCANRLIVHESIKDEFAAKLSEQVSKLKVGNGLEEGVNVGPIINKRGFEKIVSQIDDAVEKGAKVIAGGTYDRNDDKGCYFVNPTVLTDVDTSMNIMHEETFGPVAPIVTFSDIDEAIQLANDTPYGLAAYFFTENYRRGIYISENLEYGIIGWNDGGPSAVQAPFGGMKESGIGREGGSEGIEPYLETKYLSIGL

SEQ ID NO: 5851 - protein, 168 aa, Malus x domestica
MAGHSESKSIHDFTVKDAKGNDVDLSTYKGKVLLIVNVASQCGLTNSNYTELAQLYEKYKTQGLEILAFPCNQFGAQEPGTNDEIVEFACTRFKAEYPIFDKVDVNGDNAAPIYKFLKSSKGGLFGDSIKWNFSKFLVDKEGKVVDRYAPTTSPLSIEKDVKKLLGVA

SEQ ID NO: 5852 - protein, 205 aa, Shigella dysenteriae
PVRYYQGAPSPVKHPELTDMVIFRENSEDIYAGIEWKADSADAEKVIKFLREEMGVKKIRFPEHCGIGIKPCSEEGTKRLVRAAIEYAIANDRDSVTLVHKGNIMKFTEGAFKDWGYQLAREEFGGELIDGGPWLKVKNPNTGKEIVIKDVIADAFLQQILLRPAEYDVIACMNLNGDYISDALAAQVGGIGIAPGANIGDECAL

SEQ ID NO: 5853 - protein, 439 aa, Nostoc punctiforme PCC 73102
MLESLGRIKNPLVRSIAAAATVSSVITLSAAVVIGVSNAKAKSAYQFGVYSSLFGTASGAVFGLVYTNKASGNKSTPDLKTLDSHVWQDWRNFVVVRKVKESEEITSFYLQPEDKGEITNFQPGQFLTIKLDIPGQDKPVIRTYSLSDYPENCEYYRLSIKREPAPNGLDVMPGIASNFMHDRIQEGSVILAKPPNGKFVLDVQKSIPAVLISNGVGITPMISMAKACSLLNPTRPIWFVHGARDGKFHAFRDEVREISRQNHNLNVHFRYSRPTPEDRGKYHSVGYVDAALIQELVRQEAEYFLCGSPSFMQSIMQGLKESGVPDSRVFFESFGKPMKSVSEKQTQTVTGDDKFAEIVFAKSGKTLTWQPSDGTILEFAEANDINPPFSCRVGVCGTCMCKIREGVVAYQEEPTATTDQGSVLICISQPGTSKLVLDI

SEQ ID NO: 5854 - protein, 289 aa, Populus alba
EENWAEEVREDWFQDELEGESYCSNNSNKLNTFPILLEQDLSWEDEELSSLFAKEEQNQLCKDLETNPSLARARCEAVEWILKVNEHYSFTALTAVLAVNYLDRFLFSVHLQKEKPWMAQLAAVSCLSLAAKVEETQVPLLLDFQVEDSKYVFEAKTIQRMEILVLSTLKWKMNPVTPISFLDYITRRLGLEHYLCLEFLKRCERMVLSILADSRSMPYVPSVMAAATMLYVIDNIKPSLAAEYQSQLLSILGIDKDKVEDCSKFLMEFALREHFKLLSNKRKFCSLPG

SEQ ID NO: 5855 - protein, 389 aa, Escherichia coli
TLQNGKLNVPENPIIPYIEGDGIGVDVTPAMLKVVDAAVEKAYKGERKISWMEIYTGEKSTQVYGQDVWLPAETLDLIREYRVAIKGPLTTPVGGGIRSLNVALRQELDLYICLRPVRYYQGTPSPVKHPELTDMVIFRENSEDIYAGIEWKADSADAEKVIKFLREEMGVKKIRFPEHCGIGIKPCSEEGTKRLVRAAIEYAIANDRDSVTLVHKGNIMKFTEGAFKDWGYQLAREEFGGELIDGGPWLKVKNPNTGKEIVIKDVIADAFLQQILLRPAEYDVIACMNLNGDYISDALAAQVGGIGIAPGANIGDECALFEATHGTAPKYAGQDKVNPGSIILSAEMMLRHMGWTEAADLIVKGMEGAINAKTVTYDFERLMDGAKLL

SEQ ID NO: 5856 - protein, 193 aa, Triticum aestivum
MPSTFCRRRSRRPTVAPANSSRENFWVLIRGEEMSDSEEHQFESKADAGASKTYPQQAGTIRKNGYIVIKNRPCKVVEVSTSKTGKHGHAKCHFVAIDIFTGKKLEDIVPSSHNCDVPHVNRTEYQLIDISEDGFVSLLTDNGNTKDDLKLPTDETLLGQIKDGFAEGKDLVVSVMSAMGEEQINALKDIGPK

SEQ ID NO: 5857 - protein, 218 aa, Shigella dysenteriae
LDLYICLRPVRYYQGAPSPVKHPELTDMVIFRENSEDIYAGIEWKADSADAEKVIKFLREEMGVKKIRFPEHCGIGIKPCSEEGTKRLVRAAIEYAIANDRDSVTLVHKGNIMKFTEGAFKDWGYQLAREEFGGELIDGGPWLKVKNPNTGKEIVIKDVIADAFLQQILLRPAEYDVIACMNLNGDYISDALAAQVGGIGIAPGANIGDECALFEATH

SEQ ID NO: 5858 - protein, 3471 aa, Bacillus thuringiensis serovar konkukian str. 97-27
MKKSLKCFNVVTIIALLLSITLPSPSAFAEINKKNWDELHGNDVRIKAEQVNAEIYRGEVAEREHVFQYTIENTGDTPIQELVLKQNNENEITFLSQSMKVNGEKLPENKVADFYVEEKDKGGKLLSSNLKIRDLKSHEKMTVLIKASRTQHFNKEYKQKISVQKDQVQIGSMSFDVEGIPSEDKVEATADDEADSSKKSVVPSVNNTTKKVDEKLKVSVEDTNKPTSNTELVKQPVTEAEKQPEKEVAKQSDAEVQAASENASKVQIQVGDKQGFGDPLYSTIAAGNLVQTGNVTLGLTTDHYGRQSLGYKTNKMTVDVDNDDSTFNSSTGAFPTIPAGSKVKKAYLFWTAAMGVPGNITDRKVTEDQVRQPVKMKMGNKQYAEVSADSIRKADYLPYISNYSGSGAGYVAYADVTNVIAQQGISQTLTVANVPQIKDVTGGGYYWGNWNLILVYENYKETVKDMKIWEGLVSQKSTAWTDVSVNKINTPKEGAFKAKFSYFSSQGDPAEKDGYAYDYGEYDFDAGYIKIKNINGKDNDANDSSMTEVQVDGTNEFVTKKYPGYNPDWTNSFSTDIHTYHFEGPNQVKNDLKEAKMRFRANGATGDIYVLNNATFVTEHNAPNLQVDKKALDSAGKEIKEVKAGEEITYKIEVKNDTKNNQAPVSNVKGFDKLDDRLEYVPGSIQYVTGSNTGQKTDDASDDEAEFVNNQIDFRIGEGADAKDGGVLKPGESAVLTFKVKVKESIKSDTTVKNVVAVKGQDSAEIKYESEDDANVTVTIPKEVPGEIEARKIASNKSPKLGDEVEYRITFKNKVKDGRLDVLTIEDELPSSLEFVKDSLKAEGVQPEPVELKFENGKIIAKYPAITDMEERSIVFKTKVKETAKIGEEIVNKAIVSDKTNPPKNIEEKITPQHKAGKIDAKKKATNKKPKLGEEFEYQISFNNTVENGKLEAVTIEDEIPANLEFIQGSERAEGAGPSPVELKVENGKVIAKYPAITDTKERSIIFKVKVKEEAKAGETIVNKAVVSDPNGQSEHPEEKVTPDYKDGKVDVDKSVTNQTPKLGEEVEYRITFHNTVENGKLEKVMIEDTLPAGVEYVKDSLKAEGIKPEPVELKMENGKIIAKYPEITDTEKRSIVFKVKVKDSAKVGEAIVNKAIAKDPKHDPVDAKVVITPQSKKGEIAATKVVNNEKPKLGEEIEYRISFHNTVENGKIAEVRVEDTIPKGLEYVENSIKAEGEAPSPVELTVEAGVVKAKYIDITDTKERSIVFKVKVKEEVEVGKEIVNKAIVDDTKHQPIEPEERITPQHKDGIINAAKIVDNPSPKLGEEVEYRISFKNTVENGKLEKVKIEDTIPNGLEYVKGSEKAEGDKPAPVKLHVKDGKVIAEYENITDTKERSIVFTVKVKEEAEIGKEIVNQAIVDDTKDSKKPEAKITPLHKDGKIKAKKSVNNETPKLGEEVEYRISFKNTVENGKLAEVKIEDTLPEGLEYVENSLKAEGAGPNPVELKMENGKVLAKYPEITDIEERSITFKVKVKEEVKVGEKIVNKAIVDDTKHDPINPKAEITPQYKDGKIEAEKVVNNPSPKLEEEVEYRISFKNTVEHGKLAEVIIEDDLPNGLEYVKGSLQAEGSKPNPVELKFENGKVLAKYPEITDTKERSITFKVKVKGNVSDTIINQAIVSDTKHPPETPKAEIIPQHKDGKLEAKKVVNNLLPKLGEEVEYRISFKNTLENGKLAEVKIEDTLPEGLEYVENSLKAEGAGTDSVELKFENGKILAKYPEITDTKERSITFKVKVKDEVKIGGKIVNKAIIDDTKKEPETPTAEITPQHKDGKVEAEKTVNNPSPKLGEEIEYRISFKNTVENGKLAEVKIEDTLPNGLEYVKDSLQAEGSKPNPVELKVKDGKVIAKYPAITDIEERSIVFKAKVKEDFKVGEGIVNKVVVDDTKDPKTREVTVTPEYKDGKLKAEKFVNNKKPKLGEEVEYRINFKNTVENGKLVEVKVEDEIPAGLEYVENSLQAEGSKPSPVELKFENGKVMAKYPVITDTKERSIVFKAKVKEEAEIGKEIVNKAIVVDTTHEPEKPYVEITPQYKDGKIVAEKVANNHKPKLGEEVEYRIRFKNTVESGKLAEVNIKDTLPKGLEYVEGSITAEGSKPKPVELKVENGKVTAKYPAITDTEERSIVFKAKVKESVKAGEEIVNEAIVDDTKNVPEEPYVPITPQYKDGKIEARKEVSNYEPKLGEEIEYRIIFNNTVKDGKLAEVKIEDEIPAGLEFVQGSEKAEGAEPKPMELKVENGKVIATYAEIMDTEERSIVFKVKVKESVTIGKAITNKAIIHVDDPNHPIIEPTAKITPQYKDGKIIAHKKVNNDKPKLGEEIEYRISFSNTVKDGKLAEVKIEDEIPSGLEYVKDSLKAEGDEPAPVELKEEAGKVTAKYENITDTKERSIIFKVKVKDSVEVEKAIVNKAIVDDTKNPPERPEVDITPQHKDGKVKADKKVSKKDPKLGEEVEYRISFKNTVENGKLAELKIEDQLPAGLEYVKDSLKAEGNEPNPVELKEEAGKITAKYENITDTAERSISFKVKVTEAVKVGKTIVNKAIVDDHNPKNPPQKPEAIITPEYKDGKLKAEKTVNNPAPKLGEEVEYRITFRNVVEHGKVAKVKIKDELPTGLEFVEGSERAEGENPKPLHVKVKNGIVLAEYPEIVDTKERSIIFKVKVKEKAKVGEEIVNTAVVEDTINPPEQPNIAIQPQYKDGALQAEKTVSNQEPKLGEEVEYRISFENTVENGRLTEVKVEDEIPAGLEYVQDSIKSDGPEPDPVELKVENGKVTAKYPEITDMKKRSIIFKVKVQETVQVGKEIINKAIVDDNNPTTPPVESLIPITPQYKDGKLEARKEVSNHEPKLGEEIEYRITFNGTVDGGKLVDVKIEDEIPAGLEYVKDSLEAVGDKPVPTELKVENGKVTAKYPEITDTKERSIIFKAKVKETVKVGGEITNKAIIHVDDPNHPVIEPTATIKPEYKDGKLKAAKAVSNKEPKLGEEVEYRISFKNTVENGKVAEVKVEDEIPAGLEYVQDSLRFEGAEPNPVELKVEFGKVIAKYLDIADRKERSIIFKAKVKETVETGEKIVNKAIVGDTINQPEEPVVSITPQYKDGMLKAEKEVSNKEPKLGEEVEYRISFKNTVENGKLAEVKIEDQLPDGLEYVKDSVKAKGAIEVKVENGKLTAKYENIIDTKERNITFKVKVKEKAGEEIVNRAIVDDGINQPLEPTVSIKPKEPEVKPEDPKEPEVKPEDPKEPEVKPEDPKEPEVKPEDPKEPEVKPEDPKEPEVKPEDPKEPEVKPEDPKEPEVKPEDPKEPEVKPEDPKEPEVKPEDPKEPEVKPEDPKEPEVKPEDPKEPEVKPEDPKEPEVKPEDPKEPEVKLEKPEVRLEKLIKEPQVKVERELPKTGAASPWMVSVGAGISFLVGGVLFVLGRRRKQ

SEQ ID NO: 5859 - protein, 389 aa, Escherichia coli
TLQNGKLNVPENPIIPYIEGDGIGVDVTPAMLKVVDAAVEKAYKGERKISWMEIYTGEKSTQVYGQDVWFPAETLDLIREYRVAIKGPLTTPVGGGIRSLNVALRQELDLYICLRPVRYYQGTPSPVKHPELTDMVIFRENSEDIYAGIEWKADSADAEKVIKFLREEMGVKKIRFPEHCGIGIKPCSEEGTKRLVRAAIEYAIANDRDSVTLVHKGNIMKFTEGAFKDWGYQLAREEFGGELIDGGPWLKVKNPNTGKEIVIKDVIADAFLQQILLRPAEYDVIACMNLNGDYISDALAAQVGGIGIAPGANIGDECALFEATHGTAPKYAGQDKVNPGSIILSAEMMLRHMGWTEAADLIVKGMEGAINAKTVTYDFERLMEGAKLL

SEQ ID NO: 5860 - protein, 507 aa, Zea mays
MDSPPLQPTVFSLILALILVLYLALRRRGGGKNRSYPPVAGTVLHQLFNFGRLMEYQTALSRRYRTFRMLTPTCSYIYTVEPANVEYILKANFGNYGKGSTLHELSEDLLGDGIFNVDGAKWRHQRKVASHEFSTRVLRDYSTGVFRDTAAELAGIVAAAAAAAGEKLDMQELLMRSTLDSIFKVGFGVSLGVLSGSSEEGAAFAKAFDDASEQVLRRFLDPFWKAKRFLNFSSEAAMKRSLRTINGFVYAVVDRKIEQMERDQQEFVSPEDITSPFLVERESDPGCSDNKYLRDIILNFVIAGRDTTAGTLSWFLYVLCRNQSIQDRIAQEVRAATSGDGGLGAPELVACLTEDAISKMHYLHAALTETLRLYPSVPIDVKCCFSDDTLPDGYAVKKGDMVNYQPYQMGRMRFLWGAGAEEFRPERWLDDAGVFVPESPFKFTAFQAGPRVCLGKEFAYRQMKIFAAALLYLFRFEMWDANATVGYRAMLTLKIDRPLYLRTSLRR

SEQ ID NO: 5861 - protein, 271 aa, Zea mays
  unsure (1)..(271): unsure at all Xaa locations
MLMKALSLLCRTSLSLHRKAAFLMPPKVLITSGSGRVGGRVGGRVGGRVGCAPLMLRLAWHSAGTXFDVATKTGGPFGTMKNPAEQAHGANAGLEIAIRLLEPIKEQFPILSYADFYQLAGVVAVEVTGGPDVPFHPGRQXKPEPPPEGRLPDATQGSDHLRQVFSTQMGLSDQDIVALSGGHTLGRCHKDRSGFEGAWTSNPLIXFDNSYFXELLSGEKEGLLQLPSDKALLSDPSFHPLVDKYAADEDAFFADYAEAHLKLSELGFVEA

SEQ ID NO: 5862 - protein, 199 aa, Shigella dysenteriae
PVRYYQGAPSPVKHPELTDMVIFRENSEDIYAGIEWKADSADAEKVIKFLREEMGVKKIRFPEHCGIGIKPCSEEGTKRLVRAAIEYAIANDRDSVTLVHKGNIMKFTEGAFKDWGYQLAREEFGGELIDGGPWLKVKNPNTGKEIVIKDVIADAFLQQILLRPAEYDVIACMNLNGDYISDALAAQVGGIGIAPGANI

SEQ ID NO: 5863 - protein, 496 aa, Pastinaca sativa
MIGVWCMLLAYTLVSIGRIRAKATRKLPPGPFPLPIIGNIHKLGKHPHKSLANLAQVYGPIMRLKLGHMTTVVISSSTTARQVLRKQDIAFSNRALPNAVRALDHNKYSAVWLPVGSQWRGLRKIMSMNLFTANKLDANQHLRSQKVHDLIRYCEKCSQSGEAVDIGGAAFLTSLNLMSNTIFSKDMIDSYENSEAKVFRDLVWNIMVEIGKPNLVDYFPLLQWMDPQGIKRRLAYNFDTLIKLFDVMVDERLELNGPQNSRDVLDELLKLVNTDEIDKSHIQHMFLDLFGAGTDTSSSTVEWAMSEILRKPATVLVKAKAELDQVIGNGKIVEEADISKLDYLRCIVKETLRLHPPAPLLVPRQVQEEVELCGYTVPKNSQVLVNAWAIGRDPMLWENPLSFQPERFVDSEIDINGHGYELIPFGAGRRICPGMPLAMRMVPIMLGSLLNCFDWKLQGGIAPEDLNMEDKFGLTLAKLHPLRVVPTSRPTHLFAF

SEQ ID NO: 5864 - protein, 388 aa, Escherichia coli
TLQNGKLNVPENPIIPYIEGDGIGVDVTPAMLKVVDAAVEKAYKGERKISWMEIYTGEKSTQVYGQDVWLPAETLDLIREYRVAIKGPLTTPVGGGIRSLNVALRQELDLYICLRPVRYYQGTPSPVKHPELTDMVIFRENSEDIYAGIEWKADSADAEKVIKFLREEMGVKKIRFPEHCGIGIKPCSEEGTKRLVRAAIEYAIANDRDSVTLVHKGNIMKFTEGAFKDWGYQLAREEFGGELIDGGPWLKVKNPNTGKEIVIKDVIADAFLQQILLRPAEYDVIACMNLNGDYISYALAAQVGGIGIAPGANIGDECALFEATHGTAPKYAGQDKVNPGSIILSAEMMLRHMGWTEAADLIVKGMEGAINAKTVTYDFERLMEGAKL

SEQ ID NO: 5865 - protein, 212 aa, Shigella dysenteriae
LDLYICLRPVRYYQGAPSPVKHPELTDMVIFRENSEDIYAGIEWKADSADAEKVIKFLREEMGVKKIRFPEHCGIGIKPCSEEGTKRLVRAAIEYAIANDRDSVTLVHKGNIMKFTEGAFKDWGYQLAREEFGGELIDGGPWLKVKNPNTGKEIVIKDVIADAFLQQILLRPAEYDVIACMNLNGDYISDALAAQVGGIGIAPGANIGDECA

SEQ ID NO: 5866 - protein, 285 aa, Xylella fastidiosa Dixon
MTTKDTWFTEHFQATGSAIGFRVTGKLDEVQSPFQKIEIYNSTDWGKLMVIDGALMLTSRDNFIYHEMISHPALFTHTAPKCVVIIGGGDCGTLREVLKHPDIEQVTQCDIDEQVTRMAEKHFPELCTSNNDPRATLLFSDGVAYMADCPTNSVDVIIVDSTDPIGPAKGLFNRTFYESCFRALKNDGLLIQQSESPLALLELIKEMRHEMSKAGFKAFKTLPFPQPCYPTGWWSVTLSSKQPNANFAFRQTDAQTKPFDTLYYNAHLHHGVLAPPPFIAHALGE

SEQ ID NO: 5867 - protein, 389 aa, Escherichia coli
TLQNGKLNVPENPIIPYIEGDGIGVDVTPAMLKVVDAAVEKAYKGERKISWMEIYTGEKSTQVYGQDVWLPAETLDLIREYRVAIKGPLTTPVGGGIRSLNVALRQELDLYICLRPVRYYQGTPSPVKHPELTDMVIFRENSEDIYAGIEWKADSADAEKVIKFLREEMGVKKIRFPEHCGIGIKPCSEEGTKRLVRAAIEYAIANDRDSVTLVHKGNIMKFTEGAFKDWGYQLAREEFGGELIDGGPWLKVKNPNTGKEIVIKDVIADAFLQQILLRPAEYDVIACMNLNGDYISDALAAQVGGIGIAPGANIGDECALFEATHGTAPKYAGQDKVNPGSIILSAEMMLRHMGWTEAADLIVKGMEGAINAKTVTYDFERLMEGDKLL

SEQ ID NO: 5868 - protein, 389 aa, Escherichia coli
TLQNGKLNVPENPIIPYIEGDGIGVDVTPAMLKVVDAAVEKAYKGERKISWMEIYTGEKSTQVYGQDVWLPAETLDLIREYRVAIKGPLTTPVGGGIRSLNVALRQELDLYICLRPVRYYQGTPSPVKHPELTDMVIFRENSEDIYAGIEWKADSADAEKVIKFLREEMGVKKIRFPEHCGIGIKPCSEEGTKRLVRAAIEYAIANDRDSVTLVHKGNIMKFTEGAFKDWGYQLAREEFGGELIDGGPWLKVKNPNTGKEIVIKDVIADAFLQQILLRPAEYDVIACMNLNGDYISDALAAQVGGIGIAPGANIGDECALFEATHGTAPKYAGQDKVNPGSIILSAEMMLRHMGWTEAADLIVKGMEGAINAKTVTYDFERLMEGAKLL

SEQ ID NO: 5869 - protein, 300 aa, Oryza sativa (japonica cultivar-group)
MGGGVMRTAAAKVGIAGGAAAAAAAAGGGRFRHVAPAFATAASAEAAAPTLVSAAGGGGGGEVPAVAASGAQWASSWEVDDWEFADWRDVAAAEPEVTAAGKPRLVFAPPSREEAEEATTELRDAIDRVYFSEAPIEVVKEQDKDLSKLGADAIIPAMPGHVMQAFTLLKSSPEAQGVVASLASDKNVWDAVLKNEKVMEFYKTHQQSLVYTFPEGTASVVSPEKLADASSENSSSGEKPESSPFADFMDNARKTVIDIVNNITNFFQDMFRKPNEAEILGGSFMALAIAVILLIMFKKA

SEQ ID NO: 5870 - protein, 190 aa, Glycine max
MPLILAKSDSIQIREVWNDNLEEEFALIREIVDNYPYIAMDTEFPGIVLRPVGNFKNSYDYHYQTLKDNVDMLKLIQLGLTFSDEHGNLPMCGGDDEESDTCCCIWQFNFREFNVNEDVFANDSIELLRQSGIDFKRNNENGIDAHRFGELLMSSGIVLNDNIHWVTFHSGYDFGYLYELLTCQALPDTQ

SEQ ID NO: 5871 - protein, 441 aa, Pseudomonas putida KT2440
MALTREQQIAALEKDWAENPRWKGVTRTYTAADVVRLRGSVQPEHTFARQGAEKLWKLVTEGAHPSFRPDKDFVNCMGALTGGQAVQQVKAGIQAIYLSGWQVAADNNSAESMYPDQSLYPVDSVPTVVKRINNAFRRADQIQWKAGKNPGDDGYIDYFAPIVADAEAGFGGVLNAYELMKNMIEAGAAGVHFEDQLASVKKCGHMGGKVLVPTQEAVQKLVAARLAADVSGVPTIILARTDANAADLLTSDCDPYDQPFVVGERTREGFYKVRAGLDQAIARGLAYAPYADLIWCETAKPDLDEARRFAEAIKKEYPDQILSYNCSPSFNWKKNLDDATIAKFQRELSAMGYKHQFITLAGIHNMWHGMFNLAHDYARNDMTAYVKLQEQEFADASKGYTFVAHQQEVGTGYFDDMTTVIQGGASSVTALTGSTEEEQFH

SEQ ID NO: 5872 - protein, 468 aa, Pseudomonas aeruginosa UCBPP-PA14
MNARLHATSPLGDADLVRADQAHYMHGYHVFDDHRVNGSLNIAAGDGAYIYDTAGNRYLDAVGGMWCTNIGLGREEMARTVAEQTRLLAYSNPFCDMANPRAIELCRKLAELAPGDLDHVFLTTGGSTAVDTAIRLMHYYQNCRGKRAKKHVITRINAYHGSTFLGMSLGGKSADRPAEFDFLDERIHHLACPYYYRAPEGVGEAEFLDGLVEEFERKILELGADRVGAFISEPVFGSGGVIVPPAGYHRRMWKLCQRYDVLYISDEVVTSFGRLGHFFASQAVFGVQPDIILTAKGLTSGYQPLGACIFSRRIWEVIAEPDKGRCFSHGFTYSGHPVACAAALKNIEIIEREGLLAHADEVGRYFEERLQSLRDLPIVGDVRGMRFMACVEFVADKASKALFPESLNIGEWVHLRAQKRGLLVRPIVHLNVMSPPLILTREQVDTVVRVLRESIEETVEDLVRAGHR

SEQ ID NO: 5873 - protein, 175 aa, Triticum aestivum
  unsure (1)..(175): unsure at all Xaa locations
MAPTVMASSGTSVAPFQGLNSTDGLPVSRRSNGASLGTVSNGGRIRCMQVWPIEGIKKFETLSYLRPIRTEALLKQVEYLIRSKWVPCLEFSKVGFIFREHNASPGYYDGRYWTMWKLPMFGCTDATQVINXCXEVKNEYPDAYVRIIGFDNMRQVQCVSFIAFKPPGCKESGKA

SEQ ID NO: 5874 - protein, 295 aa, Zea mays
MQYLFDVWKDMEELKKEVREARRIKMLHQPSKAMDLENEIRILRNTFAEKSKDCVSLLKELETHKRLKENGTIPSFDLEGLQCLGSMLRIVGLSGTHMDLSNISIQWFRIHPKESNKEIISGATRPVYALEPHDVGRYLQAEIDVGGEIAVAKTAGPVDPDAGLVDYVETLVRKPETEFNVVVLQSNGVDQPKESVHVLNVGRLRMRLTKGKSVVAKEFYSSSMQLCGVRGGGEAASQAMFWRPRNDLSLVLAFESTRERNAAIMLARRFAVDCNVCAFTKRYIILAGPGDKTPW

SEQ ID NO: 5875 - protein, 161 aa, Brassica napus
MSTKKIVLKSSDAESFEVDEAVARESQTLAHMVEDDCADNGIPLPNVTGKILARVSEYCKKHVDAAAAKTEAAADGGAPSDEDLKAWDAEFMKIDQATLFELILAANYLNIKNLLDLTCQTVADMIKGKTPEEIRTTFNIKNDFTAEEEEEVRRENQWAFE

SEQ ID NO: 5876 - protein, 424 aa, Staphylococcus aureus subsp. aureus MRSA252
MKLIKNGKVLQNGELQQADILIDGKVIKQIAPAIEPSNGIDIIDAKGHFVSPGFVDVHVHLREPGGEYKETIETGTKAAARGGFTTVCPMPNTRPVPDSVEHFEALQKLIDDNAQVRVLPYASITTRQLGKELVDFPALVKEGAFAFTDDGVGVQTASMMYEGMIEAAKVNKAIVAHCEDNSLIYGGAMHEGKRSKELGIPGIPNICESVQIARDVLLAEAAGCHYHVCHVSTKESVRVIRDAKRAGIHVTAEVTPHHLLLTEDDIPGNNAIYKMNPPLRSTEDREALLEGLLDGTIDCIATDHAPHARDEKAQPMEKAPFGIVGSETAFPLLYTHFVKNGDWTLQQLVDYLTIKPCETFNLEYGTLKENGYADLTIIDLDSEQEIKGEDFLSKADNTPFIGYKVYGNPILTMVEGEVKFEGDK

SEQ ID NO: 5877 - protein, 463 aa, Synechocystis sp. PCC 6803
MVSLTPNPSYSVSLLLELPNHAGTLASVTQAIADAGGSFGQISLIESNLKLTRREIAVDASSSEHAEKIIGAVKALDNVKLLKVSDRTFDLHRQGKISVVSRIPLTSQSDLAMAYTPGVGRICRAIAEDPEKVYSLTIKSNTVAVVTDGSAVLGLGNLGPEAALPVMEGKAMLFKEFAQLDAFPICLDTQDTEEIIRTVKAIAPVFGGVNLEDIAAPRCFEIEARLKKELNIPVFHDDQHGTAIVTLAALLNALKFVGKAMAAVRIVINGAGAAGLAIAELLKESGATDIWICDSKGIVGKHRTDLNSKKQSFAVDAEGTLADAMAGADVFLGVSAPGVVTKEMVQSMAKDPIVFAMANPIPEIQPELIQEDAAVIATGRSDYPNQINNVLAFPGVFRGAIDCRASIITTTMCIEAAKAIASLVHSNTLDSEHIIPSVFDNRVATTVASAVQLAARNEGVAGQ

SEQ ID NO: 5878 - protein, 117 aa, Vigna radiata
MASIKCACVVALLCLVVATAPTAHAITCGQVASSLTSCIPFITKGGIVPPSCCAGVKSLNAAAKTTPDRQAVCNCLKSEAGRIGGFNANNAAILPGKCGVSIPYKISTSTNCASIKF

SEQ ID NO: 5879 - protein, 487 aa, Sinorhizobium meliloti
MRAQPKASHFIDGEYVEDAAGTVIESIYPATGEIIARLHAATPGIVEKAIAAAKRAQPEWAAMSPTARGRILKRAAELMRQRNRELSELETLDTGKPIQETIVADPTSGADSFEFFGGVAPAALNGDYIPLGGDFAYTKRVPLGVCVGIGAWNYPQQIACWKGAPALVAGNAMVFKPSENTPLGALKIAEILIEAGLPKGLFNVIQGDRATGPLLVNHPDVAKVSLTGSVPTGKKVAGAAAAELKHVTMELGGKSPLIVFDDADLESAIGGAMLGNFYSTGQVCSNGTRVFVQRKIKEPFLARLKERTEAIVIGDPLDEATQLGPMVSAAQRDKVFSYIGKGKAEGARLVTGGGIPNNVSGEGTYIQPTVFADVTDGMTIAREEIFGPVMCVLDFDDEVEVIARANATEFGLSAGVFTADLTRAHRVADRLEAGTLWINTYNLCPVEIPFGGSKQSGFGRENSVAALNHYTELKTVYVGMGPVEAPY

SEQ ID NO: 5880 - protein, 494 aa, Sinorhizobium meliloti 1021
MQNLPKLSMYIDGQWVAPASGEYIETVDPFTARPWALVPRGNAEDADRAVRAAHRAFSQGPWGKMHPTERGRIIQRFAALIEEHADALADIEVRDNGRLLAEMTHQIRYIPRWYHYYAGFADKIEGTLHPCDKPALSFSRHEPLGVCVGIVPWNAPLLLFSLKAAPALAAGNTLVMKPAEFTSATALKLMELVEKAGFPTGVINVVTGYGPEVGEPLVTHPLTRHVGFTGSTKTGAHLYSLAAKDVKRVSLELGGKSPNIVFGDADLDNAVRGVVGGIFGAVGQTCIAGSRLLVHRSIHDEFLEKLAVFTKTARIGDPRKVETQIGPIANSMQFEKVLGYIDIARREGAELILGGGRPDLEECGTGYFIEPTIFAGVSNDMRIAREEVFGPVLSAIVFDEPEEALAIANDSEFGLGAGVWTSDMRLALKMSERLEAGSVWVNTYRDISYTTPFGGYKKSGIGRENGVAGIYEYLQTKAVWLSTAEEIANPFVIG

SEQ ID NO: 5881 - protein, 208 aa, GIBBERELLA ZEAE PH-1
MSDSGIQDGKPMVENQHEIDHDREHDEEQEQGTEMSATEEEEITAMKRRVAEMEEEAKKLREMQATLEQQSAELADDKESIDARSIFVGNVDYSASPEDIQGHFQSCGSINRVTILLDKFTGQPKGYAYVEFTEPSLVAQALVLNESMFKGRSIKVTPKRTNVPGMSRGRGRGGFRGGRGSFQGRGGFPRGGGYRGGYRGRGRGFAPY

SEQ ID NO: 5882 - protein, 347 aa, Staphylococcus aureus subsp. aureus MSSA476
MKALKLYGVEDLRYEDNEKPVIESANDVIVKVRATGICGSDTSRYKKMGPYIKGMPFGHEFSGVVDAIGSDVTHVNVGDKVTGCPAIPCYQCEYCLKGEYARCEKLFVIGSYEPGSFAEYVKLPAQNVLKVPDNVDYIEAAMVEPSAVVAHGFYKSNIQPGMTVAVMGCGSIGLLAIQWARIFGAAHIIAIDIDAHKLDIATSLGAHQTINSKEENLEKFIENHYANQIDLAIESSGAKVTIGQILTLPKKGGEVVLLGIPYDDIEIDRVHFEKILRNELTVCGSWNCLSSNFPGKEWTATLHYMKTKDINVKPIISHFLPLEKGPETFDKLVNKKERFDKVMFTIY

SEQ ID NO: 5883 - protein, 281 aa, Lactococcus lactis subsp. lactis Il1403
MTLTDTYTLNNGIKIPKVGFGTWQSASGEEAYNAVKAALEAGYRHIDTAAVYKNEESVGQAIADSGIPREELFVTTKLWGVGTTEDAAKALDESLKKLGLDYVDLYLIHWPNPKAFRPDFETRNLAVWKAMEAGVKAGKIRAIGVSNFHPRHLKPLLKFAEIKPAVNQIMVNPSDQQEEIVSFNVDNNILTEAYSPLGTGKIFEVPELADLASKYNKSIAQVVLRWSLHKGYLPLPKSVTPARIKENAEIFDFDLSIEDIAFIDSLHGKAGLAKNPDEVDF

SEQ ID NO: 5884 - protein, 248 aa, Arabidopsis thaliana
MYQWNLPYRKDDVETGVSSRRPLLYPAMHENPELRWGFIRKVYSIIAFQLLATVAVAATVVTVRPIALFFATTGLGLALYIVIIITPLIVLCPLYYYHQKHPVNYLLLGIFTLALAFVVGLTCAFTNGKVILESVILTSVVVLSLTLYTFWAARKGYDFNFLGPFLFGALTVLIFFALIQILFPLGRVSVMIYGCLVSIIFCGYIVYDTDNLIKRHTYDEYIWAAVSLYLDIINLFLYLLTVLRALQR

SEQ ID NO: 5885 - protein, 455 aa, Methanothermobacter thermautotrophicus str. Delta H
MEMIIDGEGVSGEKIFTVRNPFNGDEVDRVPLAGRSDVERAIRAAHRARDAMADLSARKISEKLYDVADELKTELDEFARLITLESGKPIRFSRDEVKRSVETARLSAEEAGRLYGESIPMDAGIGGKGLTGFTVRIPLGVVAAITPFNYPLNLAIHKVGPALAAGNTTILKPSLEAPLSALKLAWILSEHFPAGAVNAVTGRGSEVGDVIIDSPLVDKITFTGSVEVGRYISARASMKKITLELGGNDPLIVMDDADIDSAVEAAVRGSYLYSGQVCIAVKRMIVHEDVADEFADKLVNITGSLRAGDPMDVRTDVGPLINEDAAIEVERVIGAAVEDGAELLCGGSRRGNFVEPTVLDHVVPGMEVIERETFGPVSPIIRFNGADEAIRIANGTCYALQAGVFTENIRTALRMAREIEAGTVLVNKQSTFRVDHMPFGDSGAVEWVRRVSSTP

SEQ ID NO: 5886 - protein, 115 aa, Zea mays
RPGARAEREETVDGATGNTVRVNGNQQQQNLQNNMHRVLGIAPSISEASSSWTGREGGLVPVWSPPAASVHSDPYAADEADISSRSYLDRHQQSNTMMNWSQLSQSLTTGWEVDN

SEQ ID NO: 5887 - protein, 403 aa, Psychrobacter sp. TAD1
MIDNNNTTAQIVDLLPTAFSQSLPSSVSEQLTNNASDHQMWLLPPLVDLCARLREPGLQQHGTLASEGSAALANGFLHVVIPPDTNPILENGSLLKGLRERALEDGGIHLHILGALTAGLKGERPSNIAGLKKGGCIAVSNARRPFENDLVQLRTLEYAATFGMKVFFYPDEPSLSGDGVAHEGYIASYHGLQGIPWIAETVALSTQLLMVEETGIAAHFSQLSCKSSVELMRWAKDKGLPVTCDVAMHQLHLTDDNLEGFNAMSYVLPPLRSNTDQQALRRGLKDGTIDAICSHHEPLNVTAKKAPFAESIPGISNFDTFMALACQLVRDEVLTVEQLVAKICLNPAKIAGIEDQYLETGGAILVDPDMKWQVTAETMLSNGKNTPFFGQQLQGRVVETFFG

SEQ ID NO: 5888 - protein, 450 aa, Zea mays
MDIKDMKTRGKTLTERYELGKLLGKGAFGKVHYGRDLESNQDVAIKIMDKDRVLKAGLSEQVKCEITTMRLVTHKNIVRLHEVMATRNKIYIIMEYAKGGELFEKIKRSDRLTEADTHKYFQQLIDALDHCHSRGVYHRDLKPENLLLDENGDLKVSDFGLSAFSESRRTDGLLHTVCGTPVYIAPEVIKKTGYDGAKSDIWSCGVVLFVLAAGYLPFQGPNLMEIYRKIHDRDFRCPSWFSHKLKRLLYKILNPNPSMRPSIQEIKESTWFRKGPREISAVNEKVLSENATTTNAAPVLPSRRKEIAHEDMKSLVATNLNAFEIIALSAGLDLSGLFIKECRKETRFTSDKPALSIIAKLEDVAKALNLRIRKKDNNTISIQGRKEGGNGVLKFDTQIFEITPSCHLVQIKQTSGNLLEYEKLLEEGIRPGLKDVVSAWHGDDLQQKQK

SEQ ID NO: 5889 - protein, 492 aa, Arabidopsis thaliana
MFLCVIIPCLCSYLCSLFSWLLGQIPSFLFDKINESWLTSTKRNVEIVKNLMDKISQLPDELLVKVLSFLSTKDAVSTSILSMRWKSLWMWLPKLEYNFRHYSVSEGQGLARFITSSLRVHKAPAIESLSLKFRYGAIGSIKPKDIYLWVSLAVHVSNVRELSLKLFNFAELPTKLPKSLCKCKSIVILKLKDEILVDVPRKVCLPSLKTLFLGRVTYSDANSLHRLLSNCPVLEDLVMERDKIDNLGKLSVIVKSLQRLTLKMSRPCHLDGLKMNSPSLKYLKVIDERLESDSDDESDSDSPRYFYDFEDMPKLEEADFVLTFQNIKKFFGSITSVKRLSLCLGVYTEESLYHEGLVFNQLEQLKICSCDSDWSILLARLLKSSPNLRELEAYVIEDHPNGRTDLPNQWDNQLNCVPTCLLSSLETFRWSEMHGLLQNQMDVAKYILKNARCLKSATIFFPTTYAQETRDEMIEELSLSFQGPETCQVFFH

SEQ ID NO: 5890 - protein, 479 aa, Exiguobacterium sp. 255-15
MNGKFLINGQWLDQGRERTDVKNPATGEVVGSVPNGTKSDVNDAVEAAHNAFPDWSKRTVYERAALLEKLYAKMLEKKDELARLMTLEMGKPLAESEGEVEYAANFVKWFAEEGKRAYGRIIPSHDATKRLHVIKQPVGVVAAITPWNFPAAMITRKLAPALVAGCTFVLKPPTATPLTALRLLELCQEVGIPDGVVNAVTGSGKDLGESLATHPHVAKITFTGSTEVGRTLMAQGAETIKAMSLELGGHAPILVFDDCDLDLAVRETIKSKFRNGGQTCVCGNRIYVSDSIYDEFVEKLGQETAKLKTGNGLDQETKIGPMINKAGYDKVKKHVDDATSAGARIVTGGSGQTDDDNDVYYYEATVLADVTPQMLIMNEETFGPVAPVQRVSSDEEAVHYANQTPFGLASYVFTNNYARAFKAIEHLDYGIVGWNDGVPSAAQAPFGGMKQSGVGREGGSEGLEAYLETKYVSIGGLDQ

SEQ ID NO: 5891 - protein, 634 aa, Glycine max
MGSNRTIVWFRRDLRIEDNPALAAAAKEGSVLPVYIWCPKEEGQFYPGRVSRWWLKQSLAHLDQSLKSLGSRLVLIKTHSTVTALVECVKAIQATKVVFNHLYDPVSLVRDHNIKEKLVEQGISVQSYNGDLLYEPWEVNSESGRAFTTFNAFWKKCLHMQMDIVSVVPPWQLIPAEGKIEECSLEELGLENESEKPSNALLGRAWSPGWRNADKALREFVELHLLHYSKKRLKVGGESTSLLSPYLHFGELSARKVFQVTRMKQILWTNEGNSAGEESVNLFLRAIGLREYSRYLCFNFPFTHEKALLGHLKFFPWNPDADIFKNWRQGRTGFPLVDAGMRELWATGWIHNRIRVIVSSFAVKMLLLPWKWGMKYFWDTLLDADLESDILGWQYISGGLPDGHELERLDNPEIQGAKFDPEGEYVRQWLPELARMPTEWIHHPWDAPLTVLRAAGVELGQNYPKPIIDIDLARERLTEAIFKMWESEAAAKAAGSEPRDEVVVDNSNSLENLDTRKVVVLGKAPCATISANDQKVPALQDSKNEPPTRKRPKHMIEEGQNQDHSQNHNKDTGMSSIDQDICSTADSSSCKKQCASTSSYSFSVPQQCSSSSNLKWPWQDQIDMEQSSSKDGAM

SEQ ID NO: 5892 - protein, 298 aa, Glycine max
  unsure (1)..(298): unsure at all Xaa locations
SSRSSGSSARGLIFSGTASVVLARLVASLKLVGGNLADHRFLFLGAGEAGXGIAELIALETSKQTNAPLEEVRKNIWLVDSKGLIVSSRKDSLQHFKKPWAHEHEPVRNLVDAVNKIKPTVLIGTSGQGRTFTKEVIEAMASINERPIILSLSNPTSQSECTAEEAYKWSQGRAIFASGSPFPPVEYEGKVFVPGQANNAYIFPGFGLGLIMSGTIRVHDDLLLAASEALAAQVSQENFDKGLIYPPFTNIRKISAHIAANVAAKAYELGLATRLPQPKDLVKFAESCMYTPSYRSYR

SEQ ID NO: 5893 - protein, 87 aa, Triticum aestivum
MAFVPICVQCGTRSNPCRCKVVGPTLGFVALVVAGVVEWPLGAAVYLFRHPASARIMGHPARVVYSCSPAATPLSSSNASPHLPVRW

SEQ ID NO: 5894 - protein, 125 aa, Brassica napus
  unsure (1)..(125): unsure at all Xaa locations
DQSSMXSSXXXXTXXXQXXMVXXFXVLXXXAAXXVXXXAXNDIXSIAXNGGXVSCXKVWPPVXKKKFETLSYLPDLTEVELGLXKSXTLLRNKCIPCVEXELEHGFCAPXSXXXPPXXXXXXXXM

SEQ ID NO: 5895 - protein, 488 aa, Ralstonia solanacearum GMI1000
MIQNFINGAYREGRAGKRFRDLDPCTGRLVAEVSEAGKEDVDDAVQAARAALNGPWGKLTLAQRCDLLYAVADEIDRRKEDFLAAEVADTGKPRALASHLDIPRGAANFRVFADAVRNVATECFTGTAPDGKPSLNYALRRPKGVIAVVCPWNLPLLLMTWKVGPALACGNTVVVKPSEETPATAALLGEVMNAVGVPAGVYNVVHGFGPDSAGEFLTRHPDVDAITFTGETRTGAAIIKASADGIKPVSMELGGKNPALVFADADLDAVIAGLKRSVFENTGQVCLGTERVYVERPMFDKVVRALAEIAGTLRPGLPGDPHANFGPLISGEHQRKVLGYYALARDEGATVHYGGGVPDMPPDLREGAWIEPTVWTGLPRDSRVLTEEIFGPCCHVEPFDSEEEAVRLANGTPYGLATSLYTGDVNRAHRVSAKLKVGVVWVNTWFLRDLRTAFGGSGKSGIGREGGVHSLEFYTELSNVCLKLEPQA

SEQ ID NO: 5896 - protein, 341 aa, Shigella flexneri 2a str. 301
MKALSKLKAEEGIWMTDVPVPELGHNDLLIKIRKTAICGTDVHIYNWDEWSQKTIPVPMVVGHEYVGEVVGIGQEVKGFKIGDRVSGEGHITCGHCRNCRGGRTHLCRNTIGVGVNRPGCFAEYLVIPAFNAFKIPDNISDDLASIFDPFGNAVHTALSFDLVGEDVLVSGAGPIGIMAAAVAKHVGARNVVITDVNEYRLELARKMGITRAVNVAKENLNDVMAELGMTEGFDVGLEMSGAPPAFRTMLDTMNHGGRIAMLGIPPSDMSIDWTKVIFKGLFIKGIYGREMFETWYKMAALIQSGLDLSPIITHRFSIDDFQKGFDAMRSGQSGKVILSWD

SEQ ID NO: 5897 - protein, 389 aa, Escherichia coli
TLQNGKLNVPENPIIPYIEGDGIGVDVTPAMLKVVDAAVEKAYKGERKISWMEIYTGEKSTQVYGQDVWLPAETLDLIREYRVAIKGPLTTPVGGGIRSLNVALRQELDLYICLRPVRYYQGTPSPVKHPELTDMVIFRENSEDIYAGIEWKADSADAEKVIKFLREEMGVKKIRFPEHCGIGIKPCSEEGTKRLVRAAIEYAIANDRDSVTLVHKGNIMKFTEGAFKDWGYQLRREEFGGELIDGGPWLEVKNPNTGKEIVIKEVIADAFLQQILLGPAEYDVIACMNLNGDYISDALAAQVGGIGIAPGANIGDECALFEATHGTAPKYAGQDKVNPGSIILSAEMMLRHMGWTEAADLIVKGMEGAINAKTVTYDFERLMEGAKLL

SEQ ID NO: 5898 - protein, 168 aa, Zea mays
  unsure (1)..(168): unsure at all Xaa locations
SQKTEHTIRPEGELGEVPHPWLNLLIPRSSIHRFAKEVFGKILKDSNNGTILLYLVNKSKWDNITSVVIPDEEIFYLXVGFLSSAPFLSGYGSIAHSMNLNKEIVEFCEEAGIGMIQYLAPYTTQQQWKAHFGARWETFERRKHRYDPLAILAPGQRIFPKASLPLPL

SEQ ID NO: 5899 - protein, 389 aa, Escherichia coli
TLQNGKLNVPENPIIPYIEGDGIGVDVTPAMLKVVDAAVEKAYKGERKISWMEIYTGEKSTQVYGQDVWLPAETLDLIREYRVAIKGPLTTPVGGGIRSLNVALRQELDLYICLRPVRYYQGTPSPVKHPELTDMVIFRENSEDIYAGIEWKADSADAEKVIKFLREEMGVKKIRFPEHCGIGIKPCSEEGTKRLVRAAIEYAIANDRDSVTLVHKGNIMKFTEGAFKDWGYQLAREEFGGELIDGGPWMKVKNPNTGKEIVIKDVIADAFLQQILLRPAEYDVIRCMNLNGDYISDALAAQVGGIGIAPGTNIGDECALFEPTPGTAPKYAGQDKVNPGSIILSAEMMLRHMGWTEAADLIVKGMEGAINAKTVTYDFERLMDGAKLL

SEQ ID NO: 5900 - protein, 454 aa, Streptomyces parvulus
MEKTDVDRLRTLDREHMWYPWTPMTEWMARDQLVVERAEGCWLIDADGKRYLDGRSSMGMNLHGHGRSEIVEALVAQARKAGETTLYRVSHPAAVELAARLASMAPAGLQRVFFAESGSTAVETALKAAYAYWVAKGEPQRSTFVSMEGGYHGETLGTVSLRGTNGEQVDMIRKTYEPLLFPSLSFHQPHCYRCPVGQSSDSDCGLECTDSLENLLTREKGRIAAVIVEPRVQALAGVITAPEGHLAKVAEITRRHGVLLIVDEVLTGWARTGPTFSCEAEGVTPDLMTVGKALTGGYLPLSATLATEEIFGAFRESVFLSGSTYSGYALGAAVALASLDLFEKEDVPARAKALADVLTTALEPFRALTHVGDVRQLGLIAGVELVADRETRAPYPPQERVVDRICTLARDNGVLVNAVPGDVITMLPSPSMSPDDLRFLTGTLYTAVREVTEE

SEQ ID NO: 5901 - protein, 121 aa, Hordeum vulgare
MAAPRGAALVLAMVLAAMVVAPPVTVRAAISCSAVYSTLMPCLQYVQQGGTPARGCCAGIQNLLAEANNSPDRRTICGCLKNVANAAPGGSEITRAAALPSKCNVNLPYKISPSVDCNSIH

SEQ ID NO: 5902 - protein, 389 aa, Escherichia coli
TLQNGKLNVPENPIIPYIEGDGIGVDVTPAMLKVVDAAVEKAYKGERKISWMEIYTGEKSTQVYGQDVWLPAETLDLIREYRVAIKGPLTTPVGGGIRSLNVALRQELDLYICLRPARYYQGTPSPVKHPELTDMVIFRENSEDIYAGIEWKADSADAEKVIKFLREEMGVKKIRFPEHCGIGIKPCSEEGTKRLVRAAIEYAIANDRDSVTLVHKGNIMKFTEGAFKDWGYQLAREEFGGELIDGGPWMKVKNPNTGKEIVIKDVIADAFLQQILLRPAEYDVIACMNLNGDYISDALAAQVGGIGIAPGANIGDECALFEATPGTAPKYAGQDKVNPGSIILSAEMMLRHMGWTEAADLIVKGMERAINAKTVTYDFERLMEGAKLL

SEQ ID NO: 5903 - protein, 210 aa, Shigella dysenteriae
LYICLRPVRYYQGTPSPVKHPELTDMVIFRENSEDIYAGIEWKADSADAEKVIKFLREEMGVKKIRFPEHCGIGIKPCSEEGTKRLVRAAIEYAIANDRDSVTLVHKGNIMKFTEGAFKDWGYQLAREEFGGELIDGGPWLKVKNPNTGKEIVIKDVIADAFLQQILLRPAEYDVIACMNLNGDYISDALAAQVGGIGIAPGANIGDECA

SEQ ID NO: 5904 - protein, 389 aa, Escherichia fergusonii
TLQNGKLNVPENPIIPYIEGDGIGVDVTPAMLKVVDAAVEKAYKGERKISWMEIYTGEKSTQVYGQDVWLPAETLDLIREYRVAIKGPLTTPVGGGIRSLNVALRQELDLYICLRPVRYYQGTPSPVKHPELTDMVIFRENSEDIYAGIEWKADSADAEKVIKFLREEMGVKKIRFPEHCGIGIKPCSEEGTKRLVRAAIEYAIANDRDSVTLVHKGNIMKFTEGAFKDWGYQLAREEFGGELIDGGPWLKVKNPNTDKKIVIKNVIADAFLQQILLRPAEYDVIACMNLNGDYISDALAAQVGGIGIAPGANIGDECALFEATHGTAPKYAGQDKVNPGSIILSAEMMLRHMGWTEAADLIVKGMEGAINAKTVTYDFERLMEGAKLL

SEQ ID NO: 5905 - protein, 356 aa, Zea mays
TRPDGTHSAQTDMSVAYSLEEYAGAVVAAVGRVCDRKGVQHPIICSESGRALVSHHSVLVFEAFSATAPGRLDAATAYLLDELTDDCRADYRNVMAAAVRGDYDTCGLYADQLKRRSAEQFKEGVLGLEHLAAVDAFCELVARGMGAPEPPRTYHINLSVFTSLPDMWAIGQQFPIIPIQRLQERPAVDGVLSDLTCDSDGKVSEFIGGRHSLPLHELPTHATRGYYLGMFLGGAYQEALGGLHNLFGGPSVVRVSQCDGPHCFAVTRAAAGPSCADVLRAMQHEPEVMYEVLKQRTDGATAAALARAFGAMPYLVFDPEAAVMSGGESSDSERSAAGAAEEEDDEEWEFMRGLTV

SEQ ID NO: 5906 - protein, 438 aa, Zea mays
MAEKENILMQRYEMGKLLGKGSFAKVYHARNVKTSESVAIKVIDKDKIKKCGLMDQIIQEISVMKLVKHPNIVQLYEVMATKTKIYFVIEYVKGGELFKKVQRGRLKEDVARAYFQQLISAVDFCHTRQVYHRDLKPENLLLDGSRNLKISDFGLSALPNCKRKDGLLHTICGTPAYVAPEVISQKGYDGAKADIWACGVILYVLLAGYLPFQDKNMMDMYKKIFKAELKWPSWFSSDVRKLLRRILHPNPNRRISIEEIRTHPWFRIGLDARLFDSTTRDYVPSDMDLALNSLNSNMVECNSAAEKLTILNAFDIISLSNGFDLSGIFENSNKVSKFTSTNTAMTIITKLMEVAKSLDLKVITKTGGLLNMEAAESGIKGVMSINAEIFQITPNYHLVEIKKINGDILEYHNFMNQSMRPALEDIVWAWHGEQPDEK

SEQ ID NO: 5907 - protein, 493 aa, Triticum aestivum
MALSRAQTNSGESLISSTFASRYVRTALPRFRIPEQSIPKDAAYQIINDELMLDGNPRLNLASFVTTWMEPECDKLIQNSVNKNYVDMDEYPVTTEFQNRCVNMIAHLFNAPIGEDETAVGVGTVGSSEAIMLAGLAFKRKWQNKMKAEGKPHDKPNIVTGANVQVCWEKFARYFEVELKEVKLREGYYVMDPAKAVELVDENTICVAAILGSTLNGEFEDVKMLNDLLVAKNAETGWDTPIHVDAASGGFIAPFIYPELEWDFRLPLVKSINVSGHKYGLVYAGVGWIIWRNKEDLPDELIFHINYLGADQPTFTLNFSKGSSQVIAQYYQLIRLGFEGYKNIMENCQENAMVLKQGLEKTGRFNIVSKDNGVPLVAFSLKDSARHNEFEISDFLRRFGWIVPAYTMPPDAQHVTVLRVVIREDFSRTLAERLVLDVEKVLHELDALPARVVANGGDAAAASASEREMEKQREVISLWKRAVLAKKKTNGVC

SEQ ID NO: 5908 - protein, 70 aa, Glycine max
  unsure (1)..(70): unsure at all Xaa locations
SITTGNRSGTSMVAPFTGTKSMADFCIRNTNDDITIIASNGAXVQCMHMWTPVSMKQIDTDSYLPDIDHA

SEQ ID NO: 5909 - protein, 353 aa, Magnaporthe grisea 70-15
MASATEGKSPHDVCFEERPMPKLASEHDVLVAVNYTGICGSDVHYWHHGSIGDFVVKDPMVLGHESAGTVVEVGSAVKTLQVGDRVALEPGYPCRRCRDCLAGRYNLCPEMRFAATPPYDGTLAGFWTAPADFCYKLPESVSLQEGAMIEPLAVGVHIVRQAKVSPGQSVVVMGAGPVGLLCAAVARAFGATTVVSVDIVESKLEVAKQIAATHTYLSQRISPQDNAKALIAAAGLEDNGGADVVIDATGAEPSIQTSIHAVRVGGSYVQGGMGKPDITFPILAFCCKEVTASGSFRYSAGDYRLAIDLVANGKVNLKALITETVPFDKAQEAFTKVSEGQVIKVLIAGPNEK

SEQ ID NO: 5910 - protein, 339 aa, Glycine max
  unsure (1)..(339): unsure at all Xaa locations
MVVPQPIEGLHETGPPPFLTKTYDIVDDPSTNHIVSWSTGNNSFVVWDPQAFSVTLLPKFFKHNNFSXFVRQLNTYGFKKVDPDKWEFANEMFLRGQRILLKNIRRRKANHHQSHQHAMQQGVEEPFVEVGQFELDGEIDRLRRDRQVLMVELVKLRQQQQSTKSHLQEMEGRIKMTEQKQKQMMNFLARAMQNPNFVQQLAQQKECSRELEEVFSNKKRRPIDQGPNVVEVADDDDELLGCAEECSDFVKLEPQEYYSDDKVLEFEVPDLDLALNLDEENIESQKRIMEEEHVQLENSRERYIDEVFWQDLLNEGIEDQGVLGVEDVDVLAKQLGYLA

SEQ ID NO: 5911 - protein, 116 aa, Vigna radiata
MASLKVACMVAVVFMVVVSAHMAHAITCGQVASSLAPCISYLQKGGVPSASCCSGVKALNSAASTTADRKTACNCLKNLAGPKSGINEGNAASLPGKCKVNVPYKISTFTNCANIK

SEQ ID NO: 5912 - protein, 252 aa, Zea mays
  unsure (1)..(252): unsure at all Xaa locations
PSTSRLPALPQKKTARLLLLLRRAGITCGILAVLGCSDWSQAKRARILACSRRLKHRGPDWSGLYQHEGNFLAQQRLAVTKRHLVETEAAEKFGTELHSFVVGLEGSPDLKAAREVADYLGTIHHEFHFTVQDGIDAIEEVIYHDETYDVTTIRASTPMFLMARKIKSLGVKMVLSGEGSDELLGGYLYFHFAPNKEEFHRETCRKVKALHQYDCLRAXKATSAWGLEVRVPFLDKEFINVAMGMDPEWKMY

SEQ ID NO: 5913 - protein, 272 aa, Oryza sativa (indica cultivar-group)
MGRRACCAKEGMKRGAWTSKEDDVLASYIKSHGEGKWREVPQRAGLRRCGKSCRLRWLNYLRPNIKRGNIDDDEEELIVRLHTLLGNRWSLIAGRLPGRTDNEIKNYWNSTLSRKIGTAATAAAGSRGGSTPDTARATDAASSSSVVPPGQQQQPASRADTDTATAAAAAAATTTTVWAPKAVRCTRGFFFHDRETAPLAAAAPAPAGELGDGDDVDCDYYCSGSSSAATTTSSSSLPVVVEPCFSAGDDWMDDVRALASFLDTDDAWNLCA

SEQ ID NO: 5914 - protein, 366 aa, Triticum aestivum
  unsure (1)..(366): unsure at all Xaa locations
MGKGGKGEAAAAVAGEGENMAAWLVAKNTLKIMPFKLPPLGPYDVRVRMKAVGICGSDVHYLKEMRIAHFVVKEPMVIGHECAGIIEEVGDGVKHLAVGDRVALEPGISCWRCRHCXKGGRYNLCDDMKFFATPPYHGSLADQIVHPGDLCFKLPDNVSLEEGAMCEPLSVGVHACRRADVGAEKSVLIMGAGPIGLVTMLSARAFGAPRIVIADVDDHRLSLAKSLGADAVVKVSGNAEDLAGEIERIQAAMGGDIDVSLDCAGFSKTMSTALEATRPGGRVCLVGMGHNEMTVPLTSAAIREVDVVGIFRYKDTWPLCLEFLRSGKIDVKPLITHRFGFSQGEVEEAFEVSARGRDAIKVMFNL

SEQ ID NO: 5915 - protein, 272 aa, Oryza sativa (indica cultivar-group)
MGRRACCAKEGMKRGAWTSKEDDVLASYIKSHGEGKWREVRQRAGLRRCGKSCRLRWLNYLRPNIKRGNIDDDEEELIVRLHTLLGNRWSLIAGRLPGRTDNEIKNYWNSTLSRKIGTAATAAAGSRGGSTPDTARATDAASSSSVVPPGQQQQPASRADTDTATAAAAAAATTTTVWAPKAVRCTRGFFFHDRETAPLAAAAPAPAGELGDGDDVDCDYYCSGSSSAATTTSSSSLPAVVEPCFSAGDDWMDDVRALASFLDTDDAWNLCA

SEQ ID NO: 5916 - protein, 160 aa, Thermoplasma volcanium GSS1
MAFKRKVLGKTDYGRRLRLLKSKDRRFIVRITNKGIIAQIAEYSVNGDRILATITDKALSKYGIELRGNNLQICYLVGYAAGVEAQKAGVETAVLDIGRKKFRKGGRIAACLKGITDSGVDIPHGEDVFPDKKRLNGSHLKNPVKLNEAVKNFKKLEEKA

SEQ ID NO: 5917 - protein, 472 aa, Xanthomonas campestris pv. campestris str. ATCC 33913
MHRHVHEPEILADPAAFEAAEHWRQRDLAVVWHPCTQMREHPHTLPLVPIARGDGAWLIGHDGRHYLDAVSSWWTNLFGHAEPRIGAAIAQQAGRLEQVMLAGFTHAPAVQLAERLLAIAPRQPDRAPLAKVFYADNGSAGVEVALKMAFHYFHNRDEHRRTRFIALENGYHGETIGALSVGDIPLYRRVYAPLLLESIFAPSPDAYLAEPGQSAEDYALQAADALQHLLEQSPGEICALILEPRVQCAGGMRMYHPAYLRRARELCDAHGVFLIADEIATGFGRTGTLFACEQAGVMPDLLCLSKGLTGGFLPLSAVLATQQLYDAFLDDSRERAFLHSHSYTGNPLACAAALATLQIFADDDIIARNQRTAAHMTQLAAQIGEHSAVADVRQAGMIVAFELTQGGDKRTPFPAAARVGLQAYRAALARGVVLRPLGDVLYWMPPYCVDDAQLALLADTTRHAIAKAVACA

SEQ ID NO: 5918 - protein, 194 aa, Magnetospirillum magnetotacticum MS-1
MSRLLPTNPLGSFVASVVAAIGLAGGVAWGATGDHLDWSSLPLPAIAGGQVPADAFKGKVVLVVNTASQCGFTPQYQGLEALWREYRGRGLVVLGVPSNDFGAQEPGSNPEVASFCEINYGVDFPLLEKQVVTGTGAHPFYRWAAERTGALGVPRWNFHKILVGRDGQLVDWFASTTAPDSARLRAAIDKALTP

SEQ ID NO: 5919 - protein, 272 aa, Oryza rufipogon
MGRRACCAKEGMKRGAWTSKEDDVLASYIKSHGEGKWREVPQRAGLRRCGKSCRLRWLNYLRPNIKRGNIDDDEEELIVRLHTLLGNRWSLIAGRLPGRTDNEIKNYWNSTLSRKIGTAATAAAGSRGGSTPDTARATDAASSSSVVPPGQQQQPASRADTDTATAAAAAAATTTTVWAPKAVRCTRGFFFHDRETAPLAAAAPAPAGELGDGDDVDCDYYCSGSSSAATTTSLSSLPAVVEPCFSAGDDWMDDVRALASFLDTDDAWNLCA

SEQ ID NO: 5920 - protein, 272 aa, Oryza rufipogon
MGRRACCAKEGMKRGAWTSKEDDVLASYIKSHGEGKWREVPQRAGLRRCGKSCRLRWLNYLRPNIKRGNIDDDEEELIVRLHTLLGNRWSLIAGRLPGRTDNEIKNYWNSTLSRKIGTAATAAAGSRGGSTPDTARATDAASSSSVVPPGQQQQPASRADTDTATAAAAAAATTTTVWAPKAVRCTRGFFFHDRETAPLAAAAPAPAGELGDGDDVDCDYYCSGSSSAATTTSSSSLPAVVEPCFSAGDDWMDDVRALATFLDTDDAWNLCA

SEQ ID NO: 5921 - protein, 429 aa, Brucella melitensis 16M
MTDFYSLIPSAPKGRFDGIERAHTAEDVKRLRGSVEIKYSLAEMGANRLWKLIHEEDFVNALGALSGNQAMQMVRAGLKAIYLSGWQVAADANTASAMYPDQSLYPANAGPELAKRINRTLQRADQIETAEGKGLSVDTWFAPIVADAEAGFGDPLDAFEIMKAYIEAGAAGVHFEDQLASEKKCGHLGGKVLIPTAAHIRNLNAARLAADVMGTPTLIVARTDAEAAKLLTSDIDERDQPFVDYEAGRTAEGFYQVKNGIEPCIARAIAYAPYCDLIWMETSKPDLAQARRFAEAVHKAHPGKLLAYNCSPSFNWKKNLDDATIAKFQRELGAMGYKFQFITLAGFHQLNYGMFELARGYKDRQMAAYSELQQAEFAAEADGYTATKHQREVGTGYFDAVSLAITGGQSSTTAMKESTETAQFKPAAE

SEQ ID NO: 5922 - protein, 490 aa, GIBBERELLA ZEAE PH-1
MSNLRRSDHASKPHIAVVGAGLAGLRCADVLLQNGFQVTIIEARNRVGGRLHQETLPNGHLADVGPNWIHGTDDNPMLDLAKQTNTAVSDWDSTSCVFAEDGELFPLKDGEKYSTMVWDIVQEAFKHANNSSHDIDPKESLHDFFVQKVTEKVPSTEADHEKKRNIVMQISEMWGAFIGSPVYRQSLKFFWLEECIEGENLFCAGTYKKVLDEVAKPALEGAEIKFETQVDEISYRTSPEEKAKLRTQSGQTLEFDEIVMTAPLGWLKRNLDAFEPALPARMTKAIGAIGYGCLEKVYINFPKAFWLGSESDDRKAEGFVQWLSPNYVPDLNPKRWNQEVVELASLGPEVSHPTLLFYTYGEQSQFITGELLKISDPKKKDEFLLNFFKPYYSLLPHYSESDPDCKPSGFMATDWLHDELSGYGSYSNFQVGLEEGDVDIRTMREGLPDHGLWLAGEHTAPFVGLGTATGAYWSGEAVGKRIAEAYGRNK

SEQ ID NO: 5923 - protein, 502 aa, Capsicum annuum
MEIQFTNLVAFLLFLSSIILLLKKWKTQKLNLPPGPWKLPFIGSLHHLAVAGPLPHHGLKNLAKLYGPLMHLRLGEIPTVIISSPRMAKEVLKTHDLAFATRPKLVVADIVHYDSTDIAFSPYGEYWRQIRKICILELLSAKMVKFFSSIRQDELSMMVSSIRTMPNFPVNLTDKIFWFTSSVTCRSALGKICRDQDKLIIFMREIISLTGGFSIADFFPTWKMLHDVGGSKTRLLKAHRKIDEILEHVVNEHKQNRADGQKGNGEFGGEDLIDVLLRVRESGEVQISITDDNIKSILVDMFSAGSETSSTTIIWALAEMMKKPSVLAKAQAEVRQVLKEKKGFQQIDLDELKYLKLVIKETLRMHPPIPLLVPRECMKDTKIDGYNIPFKTRVIVNAWAIGRDPESWDDPESFSPERFENSSVDFLGSHHQFIPFGAGRRICPGMLFGLANVGQPLAQLLYHFDRKLPNGQSHENLDMTESPGISATRKDDLVLIATPYDP

SEQ ID NO: 5924 - protein, 111 aa, Triticum aestivum
MERRAARGTSDHRRRMQMPPAQVEQKPQRRGGPKSCQRTPPPPGCFTIQLLMVFLWVAASLAFLPLVLPPLPPPPLSLLLVPVCLLAVLAALAFVPLDAHNNVVGGGSSCL

SEQ ID NO: 5925 - protein, 187 aa, Oryza sativa (japonica cultivar-group)
MADGPGSPGGGGGSHESGSPRGGGGGGGGGGGGGGVREQDRFLPIANISRIMKKAIPANGKIAKDAKETVQECVSEFISFITSEASDKCQREKRKTINGDDLLWAMATLGFEDYIEPLKVYLQKYREVRTDGDSKLTAKAGDGSVKKDVLGSHGGSSSSAQGMGQQAAYNQGMGYMQPQYHNGDVSN

SEQ ID NO: 5926 - protein, 304 aa, GIBBERELLA ZEAE PH-1
MSSHNIPSYKLNDGNEIPNSQHTAALSHKANICKLAFGLGTAQFKKDSQSGLDQHVVDITTKAIKAGYLYGNEEELGEAIKAGGVPREQLYVTTKIPAEKKGSAIDAFDVSLKKLGLEYVDLYLIHGPWFAETDEDLQQRWSELEQIKESGRAKSIGVSNFLQVHLEPILKTAKVKPAINQIEYHPYLQHGDLLDFHKKHNIAVSAYGPLTPIVTAKGGPVDPLYTKLAEKYGVTESEVGLRWVIDQDTIALTTSNKVERLDGYLAKLPKFKLTQDEIAEISKLGAEKHFRGFWRNKFDENDRS

SEQ ID NO: 5927 - protein, 265 aa, Brassica napus
VDPRVRASKWLPDLSGNVSAITTPPPTESVTASVMKKRFFVETLIGILPPEKDSVPCNFLLRLLRTAKMVGANANYLTELENRVAWQLDQASLKELMIPSFSHTSGTLLDVELVTRLVKKFVGLDSEGVKTGAALVKVAKLVDSYLAEAALDGGLTLPEFISLIEALPSYARTTEDGLYRAIDTYLKAHPQVLKQERKELCRLIDSRKLSPEAALHAAQNDRLPVRSIIRVLFTEQTKLSRHVDWSGSLTRSPTNPSGSHYFEQE

SEQ ID NO: 5928 - protein, 235 aa, Zea mays
HACSVTLYQNAHLSDAFDPGVRLDGGLAYRPARLWEDLYAAIRDARRFVYVAGWSVNTEITLVRDAGRRAVPGAEGDTLGELLKRKADEGVAVLVMPWQDNTSVSFLGNAGLMKTHDEETRRFFEGTNVRCFLCPRNADASLTMVQHVETSAEFTHHQKTVTLDAATPGTDERHVVSFIGGIDLCDGRYDDENHTLFRDLDTTYSHDFMQNNYKHASLRRGGPREPWHDVHCRHA

SEQ ID NO: 5929 - protein, 432 aa, Tropheryma whipplei str. Twist
MSKIKLVTAIPGPESERLHRMRQATVARGVSSTFPIYIKESHGSILIDEDGNHLIDMGCGIGVTTLGHSHPAVVDAARAQINSVWHTLFSITPYESYVEVCKLLAKNTPGDFPKKSLLLNSGAEAVENAVKISRAYTGRPTVAVLDRSFHGRTNLTSSMTYRGSLYSSDFGPTASNIVSAPNSYPLHDRLSGKEAAARTISYLETRVAARNIACLFYEPIQGEGGVIVPADGFLPALQDWCRENDIVFVADEIQSGFGRTGCFFASETDGLEPDIVCSAKGIANGLPLSAVTGRSDIVDAARPGTLGGTFTGNHVSCAAALEVFEQYKDNAPLDSASRLGDILKELLLNLQSKHPQIAEVRGRGAMFGAEFSGNHAGEMVSRVITRAAELGVIFLSSGVEGNVVRFLPNVFMDKETIEEAIGVLDSAISSVV

SEQ ID NO: 5930 - protein, 507 aa, Streptomyces avermitilis MA-4680
MHNPGHRFQAQDRFADGAQYIAGRFAKGTSGRRHAVVDPATGEEVYRYELAGTADVDAAVAAARAAFPGWAATTPGDRSDALHRFAAVLADRAEEFARAESLQCGKPLKLTREFDVPGTIDNTSFFAGAARHLQGQSAGEYSGDHTSYIRREPIGVVGSIAPWNYPLQMAAWKVLPAIAAGNTIVLKPAEITPLTSLLFAEAATRAGIPDGVVNIVTGAGRDAGEHLVAHPDVAMTSFTGSTAVGRRVAEIATSTVKRLHLELGGKAPFVVFDDADLDAAVHGAVAGSLINTGQDCTAATRAYVQRPLYEEFVARTAALMETVRLGDPFAHGTDLGPLVSHAQRDRVAGFVDRARAYARVVTGGEIPEELKDGAYYRPTLIADAAQDSEIVQSEIFGPVLVVLPFDSDDEGIRLANDTPYGLAASAWSRDVYRANRATREIKAGCVWVNDHIPIISEMPHGGYKASGFGKDMSAYSFEEYTQIKHVMFDNTAIVRKDWHRTIFGDRP

SEQ ID NO: 5931 - protein, 219 aa, Shigella dysenteriae
QELDLYICLRPVRYYQGTPSPVKHPELTDMVIFRENSEDIYAGIEWKADSADAEKVIKFLREEMGVKKIRFPEHCGIGIKPCSEEGTKRLVRAAIEYAIANDRDSVTLVHKGNIMKFTEGAFKDWGYQLAREEFGGELIDGGPWLKVKNPNTGKEIVIKDVIADAFLQQILLRPAEYDVIACMNLNGDYISDALAAQVGGIGIAPGANIGDECALFEAT

SEQ ID NO: 5932 - protein, 489 aa, Dechloromonas aromatica RCB
MSQPQRIHHFINGEFTASPDPRYFDKRSPVDGRVIAHIAEAGQADVDAAVTAARAALKGEWGKLSTDQRVDLLYGVANEITRRFDDFVAAEMADTGQPSHVQTHVFIPRGAANFKVFADVIKNVAAESFRMATPDGKGALNYAIRNPKGVIGVISPWNAPFLLMTWKVGPALACGNTVVVKPSEETPLTATLLGEVMNSVGIPKGVYNVINGFGPDSAGAYLTQHPGVDAITFTGETRTGTAIMKAAAEGMRDVSFELGGKNAGIVFADCNFEAAVDGIFRSAFLNTGQVCLGTERVYVERPIFENFVQALKAKVEGVRYGRPEDHTSTYGPLISQEHRDKVLSYYKKAVDEGATVVTGGGVPDMPAELAGGSWVQPTIWTGLPETAAVVREEIFGPCCHIRPFDSEEEVIELANANDYGLATTIWTENLSRAHRVAERVEVGVTWVNSWFLRDLRTPFGGSKQSGIGREGGVHSLEFYTETRNVCIKL

SEQ ID NO: 5933 - protein, 213 aa, Candida maltosa
DQSLNILLAGRDTTAGLLSFAVFELGRNPEVWSKLRQEIGDKFGLDSDSRIEDISFELLKLCEYLKAVINETLRLYPSVPRNGRFAAADTTLPHGGGKDGMSPILVRKGQTVMYSVYALQRDEKYYGKDANEFRPERWFEPEVRKLGWAFLPFNGGPRICLGQQFALTEASYVLVRLIQSFETLELSPEAAYPPAKLTHLTMCLFDGAPVRIE

SEQ ID NO: 5934 - protein, 215 aa, Shigella flexneri
LYICLRPVRYYQGTPSPVKHPELTDMVIFRENSEDIYAGIEWKADSADAEKVIKFLREEMGVKKIRFPEHCGIGIKPCSEEGTKRLVRAAIEYAIANDRDSVTLVHKGNIMKFTEGAFKDWGYQLAREEFGGELIDGGPWLKVKNPNTGKEIVIKDVIADAFLQQILLRPAEYDVIACMNLNGDYISDALAAQVGGIGIAPGANIGDECALFEAT

SEQ ID NO: 5935 - protein, 264 aa, Triticum aestivum
FPWQPQQPFPQTQQSFPLQPQQPFPREPQQPFSQPQLQFPQQPEQIIPQQPQQPFLLESQQPFPQQPQQPFSQPQQLIPMQPQQPFPQQSQQSQQPFPGPQQLFPELQQPIPQQPQQPFPLQPQQPFPQQSQQPFPQQPQQPFPLQPQQPFPQQPQQPFPQQPQQPFPLQPQQPFPLRPQQPFSQQPQQSQQSFPQPQPQQPQQPSILQPQQPFLQPQQQLSQQLEQTISQQPQQPFPQQPHQPQQPYPQQQPYGSSLTSIGGQ

SEQ ID NO: 5936 - protein, 198 aa, Zea mays
PEPTRPDMPSVQAEVGGGWRPKQQQYPLEIREVWADNVEREFKLIRAAIERFPYVSMDTEFPGVIHHPPPSVHHSALTPPQRYALLKSNVDALHLIQVGLAFAPSASSPPALAFQVNLREFDPRLHRHAPDSVRLLAASGLDLPAHRARGVSARAFAALLMSSGLVCNPDVAWVTFASAYDMAYLVKVLMGRKLPRAL

SEQ ID NO: 5937 - protein, 280 aa, Zea mays
MEAMPRPSVAPSLQLQLRPCPRWPRRKHCPPSSVPSRRVACSASAADADVVDLFDAAKLTVDKFVTSGMVVGLGSGPASALAIQYLGTRLRRGSLTGITAVTSQSVLSASEADKAGIRANSYQEGTQIDFAFTDAEAIEEGTLAAVIGRRKTESGEPSFMAEKAMAKSAHKLAFITGNDKYVTTGVEGSIPVLIKKVWRRPSFGTAGPLGGDHPLVTKEGHHVLDVIFTTPIQDLGQVAEKLDKVDGVVDHGIICSNQPYAVIASKGEVQVLDEKSSVIQ

SEQ ID NO: 5938 - protein, 637 aa, Zea mays
HTGDWKIDESPVDGKKFDRQALEELSKEGVTLMMSDSTNVLSPGRSISESVVAGSLLRHISEAKGRVITTQFASNIHRIGSIKAAADLTGRKMVFVGMSLRTYLEAAFKDGKAPLDPSTLQIKVEDMDAYAPKDLLVVTTGSQGEPRAALNLASYGGSHALKLSKEDVLLYSAKVIPGNETRVMKMMNRLTDLGPKIIMGKDSGLHTSGHAYREELEEVLRIVKPQHFLPVHGELLFLKEHELLGRSTGIRHTTVIKNGEMLGVSHLRNRRVLSNGFVSLGKEDLQLMYSDGDKAFGTSTDLCVDERLRIASDGIIFVSMEIFRPQKEHGLAQSGLKGKFKITTRCLWLDNGRLLDALYKAAHAALSSCPVNCPHSHMERMVAEILRKMVRKYSGKRPDVIAVATENTTAGFSEHLDTKASGNFGPSSATSHLSRSPATSLEGSYKTHPDNPEVDAEEILPETVRTTPDDATTSSNGEALFSSDLHQPKTLEHFWESFKSPTAVKIARIVNGGNKQNFGKIGIMGQDSLIQSAPAPVKSSKKNKWKPEEIKSLIQMRGEMNERFQSVKGRMVLWEEISDNMLKQGISRTPAQCKSLWTSLVQKYEESKKDAESMKTWPYFSAMDRILSQQGEMATKG

SEQ ID NO: 5939 - protein, 81 aa, Glycine max
  unsure (1)..(81): unsure at all Xaa locations
TAKNTAPAETTDNRAGAGRXAPXTGRKAKAGHPTRKTNNDSTTRASNGGRXQGMHFLPPVGKKKGETLSYPPDLDDAQLSK

SEQ ID NO: 5940 - protein, 234 aa, Antirrhinum majus
MGRGKIVIQRIDKSTSRQVTFSKRRSGLLKKAKELAILCDAEVGVVIFSSTGKLYEFSSTSMKSIIERHTKTKEDHHQLLNHGSEVKFWQREAATLRQQLQDLQENHRKLMGEELQGLNVEDLHRLENQLEMSLRGVRMKKVQMLTDEVHELRRKGHLIHQENNELYEKVKLLQQENKELCKKAYGTRDVSAANGTALVPFGFAIGREQFEPIQLHLSQPEPENIETSRASGSK

SEQ ID NO: 5941 - protein, 309 aa, Glycine max
  unsure (1)..(309): unsure at all Xaa locations
PRRYLFFFFLLNYFSFYNLLLYHSSGVYLQEVLLPGGHGLMVRGYLPVINTLAKGLDILLGHRVTKVVRRYNGVKVTVESGKTFFADAAVIAVPLGVLKAKKILFKPKLPDWKEAAIADLGIGLENKIILHFENVFCPNVEFLGVVADTSYGCSYFLNLHKAAGHAVLVYMPSGQLAKDVEKMSDEAAVNFAFMQLKKILPDASSPIQYLVSRWGSDINSLGSYSYDXQLGKPHELYERLRVPVDNLFFAGEATSMSYPGSVHGAFSTGMMAAEDCRMRVLERYGEVDLFQPVMGEEASLSIPLQISRL

SEQ ID NO: 5942 - protein, 416 aa, Escherichia coli
MESKVVVPAQGKKITLQNGKLNVPENPIIPYIEGDGIGVDVTPAMLKVVDAAVEKAYKGERKISWMEIYTGEKSTQVYGQDVWLPAETLDLIREYRVAIKGPLTTPVGGGIRELLVALRQELDLYICLRPVRYYQGTPSPVKHPELTDMVIFRENSEDIYAGIEWKADSADAEKVIKFLREEMGVKKIRFPDHCGIGIKPCSEEGTKRLVRAAIEYAIANDRDSVTLVHKGNIMKFTEGAFKDWGYQLAREEFGGELIDGGPWLKVKNPNTGKEIVIKDVIADAFLQQILLRPAEYDVIACMNLNGDYISDALAAQVGGIGIAPGANIGDECALFEATHGTAPKYAGQDKVNPGSIILSAEMMLRHMGWTEAADLIVKGMEGAINAKTVTYDFERLMDGAKLLKCSEFGDAIIENM

SEQ ID NO: 5943 - protein, 242 aa, Zea mays
  unsure (1)..(242): unsure at all Xaa locations
LAGSCLRRLMFAWKVGPALACGNTLVPKTAEQTPLSALYISKLLHEAGLPEGVVNVVSGFGPTAGAALASHMDVDKIAFTGSTDTGKIILELAAKSNLKTVTLELGGKSPFIIMDDADVDHAVELAHFALFFNQGQCCCAGSRTFVHERVYDEFVEKAKARALKRVVGDPFRKGVEQGPQIDDEQFNKILRYIRYGVDGGATLXDGGDRLXDKGFYIQPTDFSDVQDGMKIAQEEILGPVQS

SEQ ID NO: 5944 - protein, 272 aa, Oryza rufipogon
MGRRACCAKEGMKRGAWTSKEDDVLASYIKSHGEGKWREVPQRAGLRRCGKSCRLRWLNYLRPNIKRGNIDDDEEELIVRLHTLLGNRWSLIAGRPPGRTDNEIKNYWNSTLSRKIGTAATAAAGSRGGSTPDTARATDAASSSSVVPPGQQQQPASRADTDTATAAAAAAATTTTVWAPKAVRCTRGFFFHDRETAPLAAAAPAPAGELGDGDDVDCDYYCSGSSSAATTTSSSSLPAVVEPCFSAGDDWMDDVRALASFLDTDDAWNLCA

SEQ ID NO: 5945 - protein, 416 aa, Escherichia coli
MESKVVVPAQGKKITLQNGKLNVPENPIIPYIEGDGIGVDVTPAMLKVVDAAVEKAYKGERKISWMEIYTGEKSTQVYGQDVWLPAETLDLIREYRVAIKGPLTTPVGGGIRSLLVALRQELDLYICLRPVRYYQGTPSPVKHPELTDMVIFRENSEDIYAGIEWKADSADAEKVIKFLREEMGVKKIRFPDHCGIGIKPCSEEGTKRLVRAAIEYAIANDRDSVTLVHKGNIMKFTEGAFKDWGYQLAREEFGGELIDGGPWLKVKNPNTGKEIVIKDVIADAFLQQILLRPAEYDVIACMNLNGDYISDALAAQVGGIGIAPGANIGDECALFEATHGTAPKYAGQDKVNPGSIILSAEMMLRHMGWTEAADLIVKGMEGAINAKTVTYDFERLMDGAKLLKCSEFGDAIIENM

SEQ ID NO: 5946 - protein, 275 aa, Sinorhizobium meliloti
MHAVSSNGANIPALGFGTFRMSGAEVLRILPQALKLGFRHVDTAQIYGNEAEVGEAIQKSGIPRADVFLTTKVWVDNYRHDAFIASVDESLRKLRTDHVDLLLLHWPGSDVPMAERIGALNEVRNAGKVRHIGISNFNTTQMEEAARLSDAPIATNQVEYHPYLDQTKVLQTARRLGMSLTSYYAMANGKVPADPLLTEIGGRHGKTAAQVALRWLVQQQDVIVLSKTATEARLKENFAIFDFALTREEMAAVRELARPNGRIVNPQGLAPEWDA

SEQ ID NO: 5947 - protein, 78 aa, Zea mays
MDSSSGSQDKKFRDNDRPEAKEANSTAQHLVDFTEAEEDLVSRMHRLVGNRWEIIAGRIPGRTAEEVEMFWSKKYQER

SEQ ID NO: 5948 - protein, 106 aa, Brassica napus
  unsure (1)..(106): unsure at all Xaa locations
MASVRLSSATMTSSLAHATMXAPFIGLKSSAAFPVXXXAXTEITSITSNGGRINCMKVWPPVGKKKFETLSYLPGLTDVEIAXEIDYLIRXKWTPCIEFEVEHGFV

SEQ ID NO: 5949 - protein, 183 aa, Triticum aestivum
MAGVGRNMVAPLLVLNLIMYLIVIGFASWNLNHFINGLTNRPGVGGNGATFYFLVFAILAGVVGAASKLAGVHHVRTWRGDSLATSASSALVAWAITALAFGLACKEIHIGGYRGWRLRVLEAFVIILMFTQLLYVLALHSGLFGNQFGGNHAGGYPAEHAYGAGGDPHNKGMGMGTGGVARV

SEQ ID NO: 5950 - protein, 341 aa, Nostoc sp. PCC 7120
MLAALLYGQEDLRLEQVADPSPDVGEVVIKVGAATTCGTDLKVWRRGGHAKMLKLPTLFGHEAAGEIVAVGADVTGWQIGDRVVANNSAPCMKCFFCQRQEYSLCPNLTWNNGTFAEYLKIPAPIVQHNLLQVPDELPLSLAAMTEPLACVLHGVARSHIKPQDRVVVLGDGAIGLMFVAVLADKVEVLLWGGNDQRLEIGQKLGATKTFNYHQNPDIPHVVKELTQGWGADVVIEATGVPSVWETAIACARPGAIVNLFGGCPRDTTITVNTEQLHYSELTLKGVFHNTPEYVRAALALIASRKIPFELLISEQRPLKDLEQVFYDMKARKVIKVAMVCS

SEQ ID NO: 5951 - protein, 117 aa, Nicotiana attenuata
MAKVALLVVVCMAAVAVMLTPHADAAISCGQVVASLSPCISYVRQGGAIPAPCCSGIKSLNNQATSTPDRQTACNCIKSAAAAINGINYSLAGSLPSKCGVNLPYKISPSIDCSTVH

SEQ ID NO: 5952 - protein, 166 aa, Glycine max
MAAAFASRCSRVGRSLSGGLSNSSPGLFTSSHGMTCNNLFSQQQRTFIQMRTVLKVVDNSGAKKVMCIQALKGKKGARLGDTIIASVKEAHPNGKVKKGKVVYGVVVRAAMQKGRCDGSEVKFDDNAVVLVDKQGQPIGTRVFGPVPHELRQKKHVKILTLAGHIA

SEQ ID NO: 5953 - protein, 75 aa, Zea mays
  unsure (1)..(75): unsure at all Xaa locations
KPFSDIRFYILLQATIICIDELLCMRNNHYSXNNFQAQADAVNLICSANTHSNPKNTIGVMTMAAKGDHFLNTPT

SEQ ID NO: 5954 - protein, 437 aa, Helicobacter hepaticus ATCC 51449
MLDLKALDLAHIWHPCTQMKDHETLPLIPIKSAKGVYLYDFEGKAFIDGISSWWVNLFGHCNPFINAAITKQLQQLEHIILAGFSHEGIIRYSEKLCALLPQSLQKCFYADNGSSAIEVALKMSFHSHYNAGNKDKNAFLSLSNAYHGETLGALSVGDVALYKSTYQPLLLECLSAPVPRGIWNPDDGTISGDYHMELEALEEILKHHAHRICAFILEPLLQCAGGMNMYPAAYIKEACALARKHNIHIIFDEIAVGFGRTGSMFALEQCDVTPDFLCLSKGITGGYLPLSVVVTSNNIYEGFYAPYEEQKAFLHSHSYTGNALAIAAANAVLDIFEQDDIIFSNHSLSVAIVKRWSMLAKHKKVGNLRVCGMVFAFDLQGCKLKRAGLYVYENALAKGVLLRPLGNTIYFMPPYVINLEIAEYVCNVLDAILEDDF

SEQ ID NO: 5955 - protein, 288 aa, Shigella flexneri 2a str. 301
MAEKKQWHETLHDQFGQYFAVDNVLYHEKTDHQDLIIFENAAFGRVMALDGVVQTTERDEFIYHEMMTHVPLLAHGHAKHVLIIGGGDGAMLREVTRHKNVESITMVEIDAGVVSFCRQYLPNHNAGSYDDPRFQLVIDDGVNFVNQTSQTFDVIISDCTDPIGPGESLFTSAFYEGCKRCLNPGGIFVAQNGVCFLQQEEAIDSHRKLSHYFSDVGFYQAAIPTYYGGIMTFAWATDNDALRHLSTEIIQARFLASGLKCRYYNPAIHTAAFALPQYLQDALASQPS

SEQ ID NO: 5956 - protein, 157 aa, Zea mays
  unsure (1)..(157): unsure at all Xaa locations
RATMRHCPSXTMCIEIEIQVVRDPRSEKYSDSFRLWREWELHRSCGESGIALYEFKGIDSXLGCTYRIVVLRLCLRHLWNSSIQWFGIQREGSMKEIISASTRSVYGPDPHDVGRFIQGEXNHGGQISVXKTAGSIDPIAGSVEYVETLVMNPESDY

SEQ ID NO: 5957 - protein, 381 aa, Glycine max
MSPAAGVSVPLLGDSKGTPPPASVPGAVFNVATSIVGAGIMSIPAIMKVLGVVPAFAMILVVAVLAELSVDFLMRFTHSGETTTYAGVMREAFGSGGALAAQVCVIITNVGGLILYLIIIGDVLSGKQNGGEVHLGILQQWFGIHWWNSREFALLFTLVFVMLPLVLYKRVVAFVGICCGLAITALVQGKTQTPRLFPRLDYQTSFFDLFTAVPVVVTAFTFHFNVHPIGFELAKASQMTTAVRLALLLCAVIYLAIGLFGYMLFGDSTQSDILINFDQNAGSAVGSLLNSLVRVSYALHIMLVFPLLNFSLRTNIDEVLFPKKPMLATDNKRFMILTLVLLVFSYLAAIAIPDIWYFFQFLGSSSAVCLAFIFPGSIVLR

SEQ ID NO: 5958 - protein, 197 aa, Shigella flexneri
YQGTPSPVKHPELTDMVIFRENSEDIYAGIEWKADSADAEKVIKFLREEMGVKKIRFPEHCGIGIKPCSEEGTKRLVRAAIEYAIANDRDSVTLVHKGNIMKFTEGAFKDWGYQLAREEFGGELIDGGPWLKVKNPNTGKEIVIKDVIADAFLQQILLRPAEYDVIACMNLNGDYISDALAAQVGGIGIAPGANIGD

SEQ ID NO: 5959 - protein, 368 aa, Nostoc sp. ATCC 53789
MPLAAVMTAPNQPVEVQQLPDPVLEKGGIILETLYSEVCGTDVHLLHGRLEGVPYPIIPGHFSVGRVVETGGAVSDVNGKLIQPGAIATFLDVHETCYNCWYCLVAKASTRCPKRKVYGVTYSAKDGLLGGWSELIYLKPGVKVLTLPEEVSPKQFIAGGCALPTALHAIDRAQIQIGDVVVVQGCGPVGLSVAILALLSGAGKVIVIDKFESRLVVAKSFGVDETLAIKADDPRQHIERVLELTNGHGADVTIEATGIPIAVKEGLNMTRNGGRYVIVGHYTNTGEILINPHLEINLKHIDIRGTWGIDFSHFYRMIELLKRHSDSSKNIAWSSIISRSYTLQQINQALADVEQGSVLKAVIQPNLS

SEQ ID NO: 5960 - protein, 155 aa, Glycine max
MSSAKKITLKSSDGEAFEVEEAVALESQTIKHMIEDDCADSGIPLPNVTSKILAKVIEYCKKHVEAANPEDKPSEDDLKAWDAEFVKVDQATLFDLILAANYLNIKSLLDLTCQTVADMIKGKTPEEIRKTFNIKNDFTPEEEEEVRRENQWAFE

SEQ ID NO: 5961 - protein, 99 aa, Brassica napus
MDQEIEIPTFFLCPISLDIMKDPVIVSTGITYDRDSIEKWLFTGKKNTCPVTKQVITETDLTPNHTLRRLIQSWCTLNASHGIERIPTPKPPISKSEIE

SEQ ID NO: 5962 - protein, 479 aa, Streptomyces avermitilis MA-4680
MSTELRRLRNHIDGEFRDAADGRTTEVVNPATGEAYATAPLSGQADVDAAMAAAAAAFPAWRDQTPAERQKALLKIADAFEERAEELIAAEVENTGKPIGLTRSEEIPPMVDQIRFFAGAARMLEGRSAGEYMEGMTSIIRREPIGVCAQVAPWNYPMMMAVWKFAPALAAGNTVVLKPSDTTPASTVLIADIIGSILPKGVFNVICGDRDTGRAMVEHPTPAMASITGSVRAGMSVAESAAKDVKRVHLELGGKAPVVVFEDTDIPKAVEDISVAGFFNAGQDCTAATRVLVQESIHDEFVAALAKAAADTKTGQPDDEDVLYGPLNNPNQLKQVAGFVERLPAHAKVEAGGHQVGEKGYFYAPTVVSGLKQDDEIIQNEVFGPVITVQSFTDEAQAIEWANGVDYALASSVWTKDHGRAMRLSKSLDFGCVWINTHIPLVAEMPHGGFKKSGYGKDLSAYGFDDYTRIKHVMTSLDS

SEQ ID NO: 5963 - protein, 502 aa, Lotus corniculatus var. japonicus
MAALPECSAANLAQLIGPNATDAAAVAGFICDQFTAVGQRFSDTAFAVDSTYLLFSAYLVFSMQLGFAMLCAGSVRAKNTMNIMLTNVLDAAAGGLFYYLFGFAFAFGAPSNGFIGRHFFGLKDVPTVAFDYSYFLYQWAFAIAAAGITSGSIAERTQFVAYLIYSSFLTGFVYPVVSHWFWSGDGWASATNTGNLLFGTGVIDFAGSGVVHMVGGVAGLWGALIEGPRIGRFDHAGRAVSLRGHSASLVVLGTFMLWFGWYGFNPGSFTKILSAYDSGNYYGQWSAIGRTAVTTTLAGCTAALTTLFGKRIISGHWNVTDVCNGLLGGFAAITAGCSVVEPWAAIVCGFVAAVVLIACNMLAEKVRYDDPLEAAQLHGGCGAWGIIFTALFAKEEYVNQVYPGKPGRPYGLFMGGGGKLLGAHVIQILVIIGWVSATMGPLFFILNKMKLLRISTEDELAGMDLTRHGGFAYAYEDDESHKPGIQLRKIEPNSSSTPSAES

SEQ ID NO: 5964 - protein, 296 aa, Glycine max
  unsure (1)..(296): unsure at all Xaa locations
MAIATETQPQQHKDSSEVSGSAAXERRWTLNDFDIGKPLGRGKFGHVYLAREKTSNHIVALKVLFKSQLQQSQVVHQLRREVEIQSHLRHPHILRLYGYFYDQKRVYLILEYAPKGELYKELQKCKFFSERRAATYVASLARALIYCHGKHVIHRDIKPENLLIGAQGELKIADFGWSVHTFNRRRTMCGTLDYLPPEMVESVEHDASVDIWSLGVLCYEFLYGVPPFEAKEHSDTYRRIIQVDLKFPPKPIVSSAAKDLISQMLVKDSSQRLPLHKLLEHPWIVQNAEPSGVYRS

SEQ ID NO: 5965 - protein, 323 aa, Zea mays
LVLSVFNTQEGIAHEVLQWYLCRMEGWFATDADSISLQGWDQEVLLPGGHGLMVRGYRPVINTLAKGLDIRLNHKVVEIVRHRNRVEVTVSSGQTFVADAAVVTVPLGVLKAKTIKFEPRLPEWKEEAIRELTVGVENKIVLHFGQVFWPNVEFLGVVSSSTYGCSYFLNLHKATGHPVLVYMPAGRLARDIEKTSDEAAAQFAFSQLKKILPNAAEPINYLVSRWGSDENTLGSYTFDGVNKPRDLYEKLRIPVDNLFFAGEATSVKYTGTVHGAFSTGVMAAEECKMRVLERFRELDMLEMCHPAMGEDSPVSVPLLISRL

SEQ ID NO: 5966 - protein, 272 aa, Oryza rufipogon
MGRRACCAKEGMKRGAWTSKEDDVLASYIKSHGEGKWREVPQRAGLRRCGKSCRLRWLNYLRPNIKRGNIDDDEEELIVRLHTLHGNRWSLIAGRLPGRTDNEIKNYWNSTLSRKIGTAATAAAGSRGGSTPDTARATDAASSSSVVPPGQQLQPASRADTDTATAAAAAAATTTTVWAPKAVRCTRGFFFHDRETAPLAAAAPAPAGELGDGDDVDCDYYCSGSSSAATTTSSSSLPAVVEPCFSAGDDWMDDVRALASFLDTDDAWNLCA

SEQ ID NO: 5967 - protein, 303 aa, Zea mays
MAGLSLEHPWAFAFGLLGNVISFMTFLAPIPTFYRIYKSKSTEGFQSVPYVVALFSAMLWIFYALIKSNETFLITINAAGCVIETIYIVMYFVYAPKKAKLFTAKIMALLNGGVFGVILLLTLLLFKGSKRVVLLGWICVGFSVSVFVAPLSIMRRVIQTKSVEYMPFSLSLSLTLSAVVWFLYGLLIKDKYVALPNVLGFIFGVVQMVLYVFYMNKTPVAAAVGKDAGKLPSAADDHVLVNIAKLNPALPERTSGTMMHPVTQMAAVPARSCAAEATAPAMLPNRDVVDVFVSRHSPAVHVV

SEQ ID NO: 5968 - protein, 270 aa, Oryza glaberrima
MGRRACCAKEGMKRGAWTSKEDDMLASYIKSHGEGKWREVPQRAGLRRCGKSCRLRWLNYLRPNIKRGNIDDDEEELIVRLHTLLGNRWSLIAGRLPGRTDNEIKNYWNSTLSRKIGTAATAAAGSRGGSTPDTARATDAASSSSVVPPGQQQQPASRADTDTATAAAAATTTTVWAPKAVRCTRGFFFHDRETAPLAAAAPAPAGELGDGDDADCDYYCSGSSSAATTTSSSSFPAVVEPCFSAGDDWMDDVRALASFLDTDDAWNLCA

SEQ ID NO: 5969 - protein, 170 aa, Zea mays
  unsure (1)..(170): unsure at all Xaa locations
MAPTVMMASSATAVAPFQGLKSAAXLPVARRSTRSLGNVSNGGRIRCMQVWPAYGNKKFETLSYLPPLSTDDLLKQVDYLLRNGWIPCLEFSKVGFVYRENSTSPCYYDGRYWTMWKLPMFGCNDATQVYKELQEAIKSYPDAFHRVIGFDNIKQTQCVSFIAYKPPGSD

SEQ ID NO: 5970 - protein, 269 aa, Oryza glumipatula
MGRRACCAKEGMKRGAWTSKEDDVLASYIKSHGEGKWREVPQRAGLRRCGKSCRLRWLNYLRPNIKRGNIDDDEEELIVRLHTLLGNRWSLIAGRLPGRTDNEIKNYWNSTLSRKIGTAAAGSRGGSTPDTARATDAASSSSVVPPGQQQQPASRADTDTATAAAAAAATTTTVWAPKAVRCTRGFFFHDRETAPLAAAAPAPAGELGDGDDVDCDYYCSGSSSAATTTSSSSLPAVVEPCFSAGEDWMDDVRALASFLDTDDAWNLCA

SEQ ID NO: 5971 - protein, 460 aa, Bradyrhizobium japonicum USDA 110
MSMLPNSQEARDVAYQLHPYTNARAHQQAGPLVIERGEGPYVFDASGKRYFEAMAGLWSVGLGFNEKRLVEAAHKQMLALPFYHTFSAKSHGPSIDLAEKLVALAPVPMSKVFFTNSGSEANDTVLKLIAYRSNALGQPQRKKVISRMRAYHGVTIASASLTGLPNNHRSFDLPLPNILHTGSPHFYKDGAPGESEEAFATRRAEELDALIQKEGPDTIAAFFGEPVMGAGGVIVPPATYWDKIQAVLKKYDILLVADEVICGFGRTGKMFGCETYGIKPDAIVVSKQITSSYFPLSAILMNDRMFEPIADESNKIGVLGHGFTAGGHPVGSAIALENLKIIEERGLVAHAAELGGYMQGKLRELAGHPLVGEVRGVGMIAALELVLDKQRKTAAATPGAVGGIASRMLQERGVISRNMLDAIAICPPLIVNKTQIDELVAAISGVLEDMKAEVAKLTPA

SEQ ID NO: 5972 - protein, 433 aa, Ralstonia eutropha JMP134
MTPSEVKATLSFSDGSPSVDLPIYQGTVGPDVIDIRKLYGQTGKFTYDPGFMSTASCNSKITYIDGDKGELLYRGYPIEHLAQKCDHLETCYLLLKGELPDATQKEEFVGRVMKHTMVHEQLQFFLRGFRRDAHPMAVLTGLVGAMSAFYHDAMDIDDPHQREISAIRLIAKMPTLVAMAYKYNIGQPYIYPQNDLSYSGNFLRMMFATPCAPYTVNPVLERALDRIFILHADHEQNASTSTVRLAGSSGTNPFAAIAAGVACLWGPAHGGANEAALKMLEEIGSVDNIGEFIKQVKDKNSGVRLMGFGHRVYKNYDPRAKLMRETCHEVLNELGLHNDPLFKLAMELEKIALEDEYFVSRKLYPNVDFYSGIVQRALGIPTSLFTCIFALARTPGWISQWEEMITDPEYKIGRPRQLFNGAASRDQSEAAAS

SEQ ID NO: 5973 - protein, 352 aa, Pseudomonas aeruginosa UCBPP-PA14
MKALRWHAARDLRLSELERQAPRPGEVELEVAYCGICGSDLHEYQSGPHSIPQAEAHPLSGCRAPLTLGHEFCGVVAALGPGVEGLRIGDRVAVEPEYRCGECRYCREGRYNLCESMGFIGLMGDGGFAERARVPAYMLHRLPDAVGFRQAAVLEPAAVALHALRRSSLAPGQRCAVFGLGPIGLLLVMLARLRGIEDIAAVDVSPERLALAGEFGASRALDARDGDTAARLREGGALDCAFEAAGSQASLDAALASLRKGGELVLVSLMGEVRLDAFDLVNRELRLLGSVGYRDAYPELIALLADGRLDLARAVTRSVPLEQAVEHGFEALLRDKSQVKVLVNPNPALADA

SEQ ID NO: 5974 - protein, 329 aa, Fusobacterium nucleatum subsp. nucleatum ATCC 25586
MRVKIKKMEKKLAILTSGGDAPGMNAAIRATAKIAEYYGFEVYGIRRGYLGMLNDEIFPMTGRFVSGIIDKGGTVLLTARSEEFKEARFREIAANNLKKKGINYLVVIGGDGSYRGANLLYKEHGIKVVGIPGTIDNDICGTDFTLGFDTCLNTILDAMSKIRDTATSHERTILIQVMGRRAGDLALHACIAGGGDGIMIPEMDNPIEMLALQLKERRKNGKLHDIVLVAEGVGNVLDIEEKLKGHINSEIRSVVLGHIQRGGTPSGFDRVLASRMAAKAVEVLNKGEAGVMVGIEKNEMVTHPLEEACSVDKRKSIEKDYELALLLSK

SEQ ID NO: 5975 - protein, 165 aa, Magnaporthe grisea 70-15
MSDSPQSNPKEIEGAHTPDEEAQMNDPQDPQSAGLGYEFEVKEQDRWLPIANASEKCHQEKRKTVNGEDILFAMTSLGFENYSEALKIYLAKYREQNQSTRGEGQQNRPSSQGYGAPPGAAPGTNATAGFPGGELGQQGTEAPGDASGYLYSTQPGHNGATAGEY

SEQ ID NO: 5976 - protein, 466 aa, Oryza sativa (japonica cultivar-group)
MPEKGTVVMSRYELGRSLGHGTFSKVYQARSLVSGETVAVKVIDKEKALRAGAGMVDQIEREVAVMRLVGRHPNVVRLHEVMASRSKIYFVMELVRGGELLARLVAGGGRLGEDAARRYFHQLVAAVDFCHSRGVYHRDLKPENLLVDDDGSGGGGNLKVTDFGLSALSASRRHDGLLHTTCGTPSYVAPEIIGDKGYDGATADVWSCGVILFLLLAGYLPFFDSNLMEMYKKITNGEFKVPDWFTPDARSLISRLLDPNPTTRITIDELVKHPWFKKGHTKRPASSNTMKLNEEEKPANAAMNMKPASLNAFDIISLSQGFDLSGMFCCHGHSSRTQDQLFVTGKPATAIVSRLEEIAETEHFTVKKKQKKRQEEDGMAVKLQGWKEGRKGQLAIDAEIFEVSPSCYVVEVKKTAGDTLEYQAFCNRDLRPSLNDICWTSPATAASEKNQLPAVSEVSPLSSPRN

SEQ ID NO: 5977 - protein, 193 aa, Zea mays
  unsure (1)..(193): unsure at all Xaa locations
MARMACRVALFATVLLCAAAGAAXGTKRAPIPDDLRDVIDEEEDDEWRQYRVPSSRGPGRGDGPPPXLSRMDPAALQAELLRGQTGPSFGFVKLRPGTTRSREHVVGIARRWSNVLRTGSVDARFTAVNFVTLMFTMERGRDILELKEFVLSQAEAYELRIGDQVFRRPGDPPLDQVLRKPRKKKRRKSRDEL

SEQ ID NO: 5978 - protein, 1571 aa, Lactobacillus johnsonii NCC 533
MVKENITIQSNAKEVQSKAAVTILGTDADNYPKKAGDLIGDNRYIYQILNLNGTSFVSSDNKKLILSVNRNNLSDDNLYAYVTDNSFTEILSTHTIQAGHFKNIEVVNGWHTVKFLVVNSGKSNISINGSETPVGNASTVVGSTRIEYCLGNSTSIDASSIGEIIPVYTEQSVIKYYYNQNGNLIEIPGTDKYPNVNISGWTGQGFIVDNVDQYKQLINGFYLDASKLPTGSFTGTLSQFGDGSYYKKVYYSAGDKNEGTIDQLTVDFTVVYRQIDATGKMEVLMYDGKDMTKVIESHTVEAGKSVNFSHNNYTARNPFVTDSAHEVQFVYKELGSLILVDENGKEIHPSVKFNNDKDDPTKAGLTYTPVIEGYIADIEFVTPEDPGKDIKVVYRLREDAKATITIVDLDNLENNGGKVAELNATGKVYSVINFVDLSTTLQDLIDRGYVVISNDFKPGTKFDVKDLEFKIELKHGLEEINESQSVDKIINYVDGVGNKLHDSVTQTAIFKTNGYRDKVTGKIVEVTEVEHDDGYVIAIEITNKDASLQWTSKTDVFESIKSPDIVGYTTTQKWSTADKVDQDVKHRVENIVYDKKAQVGTITFWDETSNKQLGSTINIAGNYREVINYQIIENVLNSIKDYENNNYILVSNPLTYATTFGDAEYNPGCNDFRVILKHKIAENTQNKEVNRVITYVYADGPNKDQEAANSVAQKVTFIGTGQYDSVDKAWIGDIVWTTEAGDMNYTFAPVESPKVTGYGADRGIVEAKIVSGSSDNITEEVLYYANQTGASIQYIDDVTGLVIGRDEVQGKVDHQINWKQNHENVLNLFIESGYKLVSSDYEFGKDYYYSADEAKNNFTIHLTRDLIIIDPTNPDSPAYGSEDYIKEVIQEIQYVFENGSTAAESNKQNIKFTAYGVVDKTTGKYVVLDENGKIVVDENKQPIEGTLTWKADITDPKFAEVISPTLAGYTADKTWVSGSSVTENTPNKVIVVTYTANAANAEIIYVDETTGKQLETAVVDGKYNETINYSTADKIKYYESLGYELVKDGYVGGEFGEDTKTFYVTFKHGMVVVNPETPGKPDEPINPDNPDGPKYPADSANLNKDVTNTIHYVYADGTTAKPSHTQTLTFVGSGVIDKVTGQYVEVDENGNVKLDENGNPIPGKLTWTASDGTTFVEVVSPTIVGYTPDKGVVNAVEGINQDSKNLETTVIYTANAAKAEIIYVDETTGKQLETAVVDGKYNETINYSTADKIKYYESLGYELVKDGYVGGEFGEDTKTFYVTFKHGTVTVTPDDKFTEEDPINPDNPDGPKYPFDSIALDKTITRTIKYVYADGTKAKDEVVQKLRFRGTAIIDKVTGEVIILDKNGRKISDGIKWTALDGTTFIQVISPDIAGYTPDRKEIGSLENVDNNTDDIIETVVYNKDIVDPEEPKDPVDPEEPKDPVDPEEPKDPEEPKDPVDPEEPKDPVDPEEPKDPEDPEDSKVPVQAETPTESTNDAPILPDQLSTDTTLKEVATVETKESGKVEAATTEDVSLPQTGHKHSNAGLIGLGLATIASLLGLAGTRKRKKD

SEQ ID NO: 5979 - protein, 279 aa, Bacillus anthracis str. Ames 0581
MKNLQSKAVLNNGVEMPWFGLGVFKVEEGPELVEAVKSAIKAGYRSIDTAAIYGNEKAVGEGIRAGIEATGISREDLFITSKVWNADQGYEETIAAYEESLKKLELDYLDLYLVHWPVEGKYKDTWRALETLYKEKRVRAIGVSNFQVHHLQDVMKDAEIKPMINQVEYHPRLTQKEVQAFCKEQGIQMEAWSPLMQGQLLDNETLQEIAEKHGKTTAQVILRWDLQNGVITIPKSTKEHRIIANADVFNFELTKEDMEKIDALNQNHRVGPDPDNFDF

SEQ ID NO: 5980 - protein, 337 aa, Streptococcus mutans UA159
MKRIAVLTSGGDAPGMNAAVRAVVRKAISEGMEVCGINRGYAGMVEGDIFPLDAKGVSNILSRGGTFLQSARYPEFAKLEGQLKGIEQLKKHGIEGVVVIGGDGSYHGAMRLTEHGFPAVGLPGTIDNDIVGTDYTIGFDTAVNTATDALDKIRDTSFSHGRTFVVEVMGRNAGDIALWSGIAAGADQIIIPEEPYDIKEVVANVKNGYLSKSKNHHLIVLAEGVMHGEEFAAQMKEAGDNSDLRVTNLGHILRGGAPTPRDRVIASWMGAHAVELLREGKGGLAIGIQNEELVEHPILGSAEDGALFSLTEQGEIVVNNPHKARLDFAALNRDLSN

SEQ ID NO: 5981 - protein, 204 aa, Shigella flexneri
DLYICLRPVRYYQGTPSPVKHPELTDMVIFRENSEDIYAGIEWKADSADAEKVIKFLREEMGVKKIRFPEHCGIGIKPCSEEGTKRLVRAAIEYAIANDRDSVTLVHKGNIMKFTEGAFKDWGYQLAREEFGGELIDGGPWLKVKNPNTGKEIVIKDVIADAFLQQILLRPAEYDVIACMNLNGDYISDALAAQVGGIGIAPGA

SEQ ID NO: 5982 - protein, 106 aa, Triticum aestivum
  unsure (1)..(106): unsure at all Xaa locations
MAPTVMASSATSVAPFQGLKSTAGLPVSRRSNGASLGSVSNGGRIRCMQVWPIEGIKKFETLSYLPTLSKEALLKAGRLPYXLKWVPCLQFNXVGVHLPRQKRNLG

SEQ ID NO: 5983 - protein, 176 aa, Triticum aestivum
  unsure (1)..(176): unsure at all Xaa locations
MAPAVMASSATTVAPFQGLKSTAGLPISRRSGSAGLSSVSNGGRIRCMQVWPIEGIKKFETLSYLPPLSTEALLKQVDYLIRSKWVPCLEFSKVGFVFRXEHNSSPGYYDGRYWTMWKLPMFGCTDATQVLNEVEEVKKEYPDAYVRVIGFDNMRQVQCVSFIAFRPPGCEESGKA

SEQ ID NO: 5984 - protein, 363 aa, Zea mays
  unsure (1)..(363): unsure at all Xaa locations
LSQTAQSPRLFKPTGGHILAARAAAGNAPTSPVREGVTELDAVAGFSEIVPDTVVFDDFERFAPTAATVSSSLLLGITGLPDTKFKSAIDTALADGGXTHLEKAEDRDVLVTSPGLLQMVGAXLGQQGPWGKVPPEKKARLAYDTQGIIHRVHELLNLYNQHDVSTDRLLFKIPATWQGIEASRLLESEGIQTHLTFVYSFAQAAAAAQAGASVVQMFVGRLRDWARHHSGDPEIDEALKNGEDAGLSLAKKVYAYIHRNGYKTKLMAAAIRNKQDVFSLLGIDYIIAPIXDVKYGYVPKLTPAIGKTYNFTEEELVKWDQLSLSAAMGPAAEELLASGLEGYVNQARRVEELFGKIWPPPNV

SEQ ID NO: 5985 - protein, 199 aa, Shigella flexneri
PVRYYQGTPSPVKHPELTDMVIFRENSEDIYAGIEWKADSADAEKVIKFLREEMGVKKIRFPEHCGIGIKPCSEEGTKRLVRAAIEYAIANDRDSVTLVHKGNIMKFTEGAFKDWGYQLAREEFGGELIDGGPWLKVKNPNTGKEIVIKDVIADAFLQQILLRPAEYDVIACMNLNGDYISDALAAQVGGIGIAPGANI

SEQ ID NO: 5986 - protein, 464 aa, Haloarcula marismortui ATCC 43049
MLVSLTKCMHVFWHQRDLRIPDNRGLTAAAADDEVLPVYVLDTDLLANIGKRQKAFLLAGVRALKQAYRDHGGELLVKKGTAVDVLSNVVDEYDADRVYYNEHYRPARRNRQRRVDEALPTKSLTDLVLVDPAGLDSQYENHSRFYDDWQAHHKLPPVGSPDSGSLVDVSDPTTAPTIETEMDLPTPGYEGARQRYDDFLTGGIETYNDTRDDMQAAVERPTSAVSRMSPYLAAGMIGIREMWRDASDRHTEATGDAQRNIQKYRYELSWREQSYHLLYYNPTLLSENYKTFPNRIEWENDEDNFEAWKHGETGYPFIDAGMRQLEQEGYIHNRPRQNVASFLTKHLLVDWREGARHFRKRLVDHDPANNAASWQWTASTGTDSVDVRIFDPVAQMSKYDSGADYVTEYVPELRGVPSTKIVDWPTLSDGEREELAPDYYHPIVDRNAAYERAQRVFETALGKR

SEQ ID NO: 5987 - protein, 398 aa, Zea mays
RFAVAVQIQSQATMICVDNSEWMRNGDYPPSRFAAQAHAFAVLSGAKTEANLESTVGLVAMAGKGVSVLVPPTNDFGKVLSGMNGLEIGGEANLTAAIQVAQFALKNRQNKQLRQRIIVFVGSPVIDEKNWLEVIGKNLKKNNVALDVVNFGESDNEKPEKLEALVAAVNSGGNSHIIHIPAGRDLSDALFSSPIILSEDRGSDSAAAARGASGFEFDVDPNVDPELALVLLISMEEERLRQEAAAKKAREESSKTENEGQSSTSNGDIVMADAEPEPNSYTEDKGLHCKDEGQLLEQARKIRIEDYISFEELFDGVTSDTMSAFQEEETCTQSDAGKDFGHQPFEPSLSDVELLNDLSNKVALEWEELFIDPSKCMAEGPQGFYFASLDEKGYLFSC

SEQ ID NO: 5988 - protein, 214 aa, Aeropyrum pernix K1
MGRGPRYRVPLRRRREGKTNYYRRFRLVKSGKPRMAVRISNEYLWVQFLEARIEGDRVIAAAHSRELIKKFGWKGDGNNTCAAYLTGYLAGLRALEKGVREAVLDVGLHKPVKGSRVFAALKGALDAGVEIPHSEEILPGDERVRCEHIAQWAEALKEENAELYQRQFSRYLDRGLNPEELPGHVEEVKKAIEEAYKHVAEETAAEGEEVEVKA

SEQ ID NO: 5989 - protein, 236 aa, Shigella flexneri 2a str. 301
MGYRSIDTAAAYKNEEGVGKALKNASVNREELFITTKLWNDDHKRPREALLDSLKKLQLDYIDLYLMHWPVPAIDHYVEAWKGMIELQKEGLIKSIGVCNFQIHHLQRLIDETGVTPVINQIELHPLMQQRQLHAWNATHKIQTESWSPLAQGGKGVFDQKVIRDLADKYGKTPAQIVIRWHLDSGLVVIPKSVTPSRIAENFDVWDFRLDKDELGKIAKLDQGKRLGPDPDQFGG

SEQ ID NO: 5990 - protein, 407 aa, Pseudomonas putida KT2440
MHRPTAWHVTHWSSDPFSLGAYSALLPGGSPLHRSALGQVLHGRLVIAGEACNASAPAMTHGAWNDGLRAAEAAVSAGASKVIVIGAGCAGLAAAQRLRERGVDCTVLEARGRTGGRTHTVELGGVKADEGAAWLQHFAENPLAAVALQHGLACVETDFSCPLAAARGGALPDIDAAWDALTRRLDRQQPLSDAIDGYMATLDPALARATQFAIDANLVLEACLPVEQLSACALDEEGVGHGDRMLPGGYSELVDLLSKHLDIRLNSPVTHIDWSSARVMVNEDVCDFCICTVPVGVLKTLRFTPALPEIQQGALAHLGMGKLEKVILQFDERWWPCSPSGYLRWYDVPASWGEWLDLTDAVGKPTIAGLIAADAIERQFTGRTDEQVAMAACEALQAWAAAVGPTP

SEQ ID NO: 5991 - protein, 111 aa, Brassica napus
MARVSFKDSLKALEADIQHANTVALDYPREKDGARVQMRLSYNPAAQFLLFLVQWTDCHLAGALGLLRVLIYMPCAVPRSSISVDVSQTSMTAFCAGFAPSRSETKRRSKE

SEQ ID NO: 5992 - protein, 207 aa, Neurospora crassa
MVTGTIKYAKTNHPLSRECVVVGDGAVGKTCLLISYTTNKFPSEYVPTVFDNYAVTVMIGDEPYTLGLFDTAGQEDYDRLRPLSYPQTDVFLICFSVASPASFENVSQKWAPEVNHHCPGVPFLIVGTQKDLRSDKELRDKLAQRKQSMIEFKQGEKLAQDLDAVKYVECSALTQEGLKNVFDEAIVAALEPPQKKTSKRDKKCLIL

SEQ ID NO: 5993 - protein, 458 aa, Geobacillus stearothermophilus
MSGPNDIDEAVQAAKEAQRQWALVPAPKRAEILYKVGMLLKERKEQLARLLTMEMGKVIEEARGEVQEGIDMAFYMAGEGRRLFGDTTPSELKDKFAMSVRTPVGVVGIITPWNFPIAIATWKSFPAIVAGNAVVWKPAPETPIMAQELARIFEEAGLPPGVFHVVHGDGPTVGNALVEHPDVKVISFTGSNEVGRMIAEKCGRLLKKVSLEMGGKNAVIVMDDADLTLAVDGIIWSAFGTSGQRCTACSRVIVHERVKQEFERRLLEAVKTLKIGNGLDETVKVGPVIHEEALQKIDRYVRIGVEEGAKLLVGGYILREGDYARGFYYAPTIFTDVTPNMRIAREEIFGPVVSIISVRSLDEAIAVNNSVDYGLSSAIFTRDVNNVFRAMRDLDTGIVYVNAGTTGAEIHLPFGGTKGTGNGHRDSGVAALDVFTEWRSIYVDFSGKLQRAQIDTDD

SEQ ID NO: 5994 - protein, 202 aa, Pseudomonas putida KT2440
MCVRRYPASSRIVMREKRVMRAHWLTVPVLALLASTSSWAADCPALLQGSLPELRGKGQVDLCERFAGKPLVVVNTASYCGFAPQFEGLEATYKEYHEQGLEMLGVPSNDFKQEDADSEKTAKVCYANYGVTFTMTKTQAVRGKDAIPLFAELASQSSAPKWNFYKYVVDRKGKVIGNFSSLTKPDDPAFRAAIEKAIASQP

SEQ ID NO: 5995 - protein, 432 aa, GIBBERELLA ZEAE PH-1
MSSPSGSSQGGKRKRNSLRVESTHDFAENGIQTSSRDASGEEGDTTAAESGRLHARGSAPIPKRQRSSSNRDNTIDPGEPSDTTEASIDIAERVGRKGRQALKELDEEEQRRIEAMPPPPIGNLQDPAGGYKTNPPPVGRPVRVYADGVFDLFHLGHMRQLEQAKKAFPDTTLVVGVTGDHETHKRKGLTVMSAAERAETLRHCKWVDEVIEDCPWVVTPEFLDENKLDYVAHDDLPYGADEGDDIYQPIKAAGKFLVTQRTEGVSTTGLITRIVRDYEKYIARQFKRGTSRQELNVSWLKKNELDLKRHVQDLRENITNNWSTTGQELGRELKQFWPVSRPQSPARFNSAGTAEGLRSPTTPGTSGTPKEFITGYALGLVGGVRGWMTKSRTNVADGSRPPSDDESEESDAHAKSPKESSNTPTAVAPSKL

SEQ ID NO: 5996 - protein, 464 aa, Edwardsiella tarda
  unsure (1)..(464): unsure at all Xaa locations
MKKGTDTRGGYLDSRFGSEAIRTAAEAHHFPQGEMREDIAFQVINDELFLDGNARQNLATFCQTWDDDYVHRLMDISINKNWIDKEEYPQSAAIDLRCVNMVADLWHAPRPADGQAVGTNTIGSSEACMLGGMAMKWRWRAKRLAQGKSVDKPNMVCGPVQVCWHKFARYWDVELREIPMAPGKLXMDPERMIAACDENTIGVVPTFGVTYTGNYEMPDVLHKALDDLQARTGLDIDMHVDAASGGFLAPFCAPDIVWDFRLPRVKSISASGHKFGLAPLGCGWVVWRDAASLPDDLIFKVDYLGGQVGTFAINFSRPAGRVIAQYYEFLRLGREGYTKVHTASYQVAQFLAAEIAKLGPYEFICSGDPQQGIPAVCFRIPAGKALGYSLYDLSERLRLRGWQVPAFALNGEMSDVVVMRIMCRRGFEMDFAQLLMEDFRAALAYLKAHPAVANVAHQNSFKHS

SEQ ID NO: 5997 - protein, 157 aa, Brassica napus
  unsure (1)..(157): unsure at all Xaa locations
MAQLIRPIRQLSPQCHHRLRNLRHLFSKKLPLNPPSSTPTLLLLSPSFSTARSPPRRRLRRPPEALSPPTLIAEEDGGSDESESESSRSRNQRKRDARRAVRWGMELASFSSDQIKRVMRAASLGEEVYDALMLAKRLGADVREGKRXXFNYIGKLL

SEQ ID NO: 5998 - protein, 422 aa, uncultured marine gamma proteobacterium EBAC31A08
MVLKILEIFGHLIFELKPRYNIFMKEIIKEYTNYMVPFYAPADFVVKKASGSHVWDLNNKKYIDFTAGIAVTNLGHSNKDLIKILKKQSEELWHLSNLYINEPSVTLARKLCKNSFADKVFFCNSGAESIEAAVKIARKFCSSTVNKNKNEVISFSTSFHGRTMLGIALAKAKHLTDGFAPLPRGIKNHPYNDITNLEKVFSDKTAAVILELVQWQSGITKADKKFIAKIKKLAKKHKALVIIDEVQSGIGRTGTLFAYEQFNITPDILCFAKGISNGFPLGGILTSDKVSKHMSAGSHGTTFGGGPIACAIGNEVIDTISKKSFLNKVLKKEVRFINLLNKINEKHKCFEKITSAGLWVGVEVSKDSKIQIDDLIKKSHHNGLMILKANASTVRFSPSLIIENELVDEGLKIFEKSIISLL

SEQ ID NO: 5999 - protein, 499 aa, Burkholderia fungorum LB400
MTRVRRLNDTFDTGLVWLRRDLRNTDNAALYYALKHCERVWCVFVFDTTILQPLVDAWHARHPDTQPQDRRIEFILAALGELDEALRADGGGLIVLYGNPAELVPKLADELGVDAVFANHDYEPVAIERDGTVRERLAEAGRQWLTFKDQVIFERDEVLTGQSKPFTVFTPYRNAWLRQLSAFDLKPYPVETYAKRLAALPSKFDRQLPTLEQLGFAPSNLGELNLPAGMSGAQRLLDDFMTRIDSYADRRDFPAAKGPSYLSIHLRFGTVSIRTLARLAHEMSLQPDGQGSATWLSELIWRDFYFMILAHHPRLARGASFREEYDRLRWEQGLQADEAFAAWCNGRTGYPLVDAAMLQLNRTGYMHNRLRMVTASFLVKDLGVDWRLGERYFAEQLNDFDFSANNGGWQWAASTGCDAQPYFRIFNPVTQSEKFDAEGRFIKRYLPQLAKLPSKWIHAPWLAGAERLADCGVVLGKDYPAPIVDHAEARARTLARFGK

SEQ ID NO: 6000 - protein, 294 aa, Triticum aestivum
MSAPPPPASSDDDGKPADEEGVEIREVWANNLEAEFAVIRDVVDDYPYIAMDTEFPGIVCRPLGSFRSNDEYNYATLKANVDMLSLIQLGLTLSDENGALPARGTGGRPCAWQFNFRGFDPRSDPANADSIDLLRNSGIDFDRFTTEGADTGHFAELLMSSGVLLNAELQWVTFHSGYDFGYLLKLLTGRNLPDTMPGFFDLIRIYFPVLYDIKHLMKYCGSLHGGLSKLGELLGVQRVGICPQAGSDSLLTLRCFQKLKEAYFRGSTENYAGVLYGLISDGGENRPPAALLIE

SEQ ID NO: 6001 - protein, 363 aa, Desulfitobacterium hafniense DCB-2
ADEQEIKKAYRKLARQYHPDVNPGDKDAEEKFKEATEAYDVLSDTEKRARYDQMGHSAFDPNQQGFGGFGGDFGGFGDIFDMFFGGGGGGGQRRQGPTRGNDLRYDLTITFEEAAFGTEKEIQVPRQETCTECHGSGSAPGTHPTTCSQCHGTGQVKATQRTPFGAIQTARTCPACNGSGQFISSPCKECSGKGTTRKVKTIKVTVPPGSEDGLNLRFSGNGEAGLRGGPSGDLYVVLNVKAHKFFEREGNDVYCEIPITFVQAALGSELDVPTLDGKVKMKIPEGTQTATVFRLRGHGIPYRRGNGRGDQHVRVVVATPTKLTDRQKELLREFGEVTSDQQQMGKKSFFEKVKENIRDAIDL

SEQ ID NO: 6002 - protein, 215 aa, Shigella flexneri
LDLYICLRPVRYYQGTPSPVKHPELTDMVIFRENSEDIYAGIEWKADSADAEKVIKFLREEMGVKKIRFPEHCGIGIKPCSEEGTKRLVRAAIEYAIANDRDSVTLVHKGNIMKFTEGAFKDWGYQLAREEFGGELIDGGPWLKVKNPNTGKEIVIKDVIADAFLQQILLRPAEYDVIACMNLNGDYISDALAAQVGGIGIAPGANIGDECALFE

SEQ ID NO: 6003 - protein, 293 aa, Nostoc punctiforme PCC 73102
MLSQLGATSHLSPHLTFGTISTRTVYQSTKALAEQLKTQPKAEFSLKAFRDRLRWHDSFTQRLYFHPEIAYTNRYREFDKLYTPETLSGAKQELYQAWQQGMTGFPLVDASMRQLQTMGWMNFRMRAMCATFLTINCGVSWHHGAKHYMNYLVDGDLAIDNWQWQMQAGVTNPLSDTFRIYNPSKNIAEKDPLGEFIYHWIPELRGYSLLEIEQEKYIETSNYPKVILDWSKTRKVNGKIVSDLRKQTKQRLLSQGGDEYDSAIAAKETVDKYWQHKDKEYKEYQQKLTELQE

SEQ ID NO: 6004 - protein, 250 aa, Solanum tuberosum
MGKSYPTVSEEYLKAVDKCKRKLRALIAEKNCAPIMLRLAWHSAGTYDVCSKTGGPFGTMRFKAEQAHGANNGLDIALRLLEPIREQFPTLSHADFHQLAGVVAVEVTGGPDVPFHPGREDKPEPPVEGRLPDATKGCDHLRDVFVKQMGLSDKDIVALSGAHTLGRCHKERSGFEGPWTANPLIFDNSYFTELLSGEKEGLLQLPSDKALLCDPAFRLLVEKYAADEDAFFADYAKAHLTLSELGFAEA

SEQ ID NO: 6005 - protein, 214 aa, Shigella boydii
ELDLYICLRPVRYYQGTPSPVKHPELTDMVIFRENSEDIYAGIEWKADSADAEKVIKFLREEMGVKKIRFPEHCGIGIKPCSEEGTKRLVRAAIEYAIANDRDSVTLVHKGNIMKFTEGAFKDWGYQLAREEFGGELIDGGPWLKVKNPNTGKEIVIKDVIADAFLQQILLRPAEYDVIACMNLNGDYISDALAAQVGGIGIAPGANIGDECAL

SEQ ID NO: 6006 - protein, 279 aa, Glycine max
  unsure (1)..(279): unsure at all Xaa locations
SSTQLILLFLTKLLSKNSSGDSISTMSNSEHNIITGHAGYVLEDVPHLSDYIPHLTTYPNPLQDNPSYSVVKEHSVDVDDTIAQKAIVHKNSPRETHFRRAGPRQKVYFESEDVYACIVTCGGLCPGVNTVIREIVCGLYHMYGVHKVLGIEGGYRGFYSCNTIPLTPKVVNDIHKRGGTILGTSQGEGGNDTLKIVDSIQDRGINQVYILGGDGTQRGASVIFEEIRRRGLKGSVVGIPESVDNDIPVIDKSXFXFDTAGEEAQRAINAAHVEAESTE

SEQ ID NO: 6007 - protein, 212 aa, Shigella boydii
DLYICLRPVRYYQGTPSPVKHPELTDMVIFRENSEDIYAGIEWKADSADAEKVIKFLREEMGVKKIRFPEHCGIGIKPCSEEGTKRLVRAAIEYAIANDRDSVTLVHKGNIMKFTEGAFKDWGYQLAREEFGGELIDGGPWLKVKNPNTGKEIVIKDVIADAFLQQILLRPAEYDVIACMNLNGDYISDALAAQVGGIGIAPGANIGDECAL

SEQ ID NO: 6008 - protein, 199 aa, Oryza sativa
MGCSSSVPARSTGGLNNISNDNSATDSKDLRAKLVLLGDSGVGKSCIVLRFVRGQFDPTSKVTVGASFLSQTLALEDSTIVKFEIWDTAGQERYAALAPLYYRGAAAAVVVYDITSPESFSKAQYWVKELQKHGSPDIIMVLVGNKADLHKNRHVSSQEAQEYAEKNNMVFIETSAKTADNINQVFEEIAKRLPRPTAS

SEQ ID NO: 6009 - protein, 216 aa, Shigella boydii
LDLYICLRPVRYYQGTPSPVKHPELTDMVIFRENSEDIYAGIEWKADSADAEKVIKFLREEMGVKKIRFPEHCGIGIKPCSEEGTKRLVRAAIEYAIANDRDSVTLVHKGNIMKFTEGAFKDWGYQLAREEFGGELIDGGPWLKVKNPNTGKEIVIKDVIADAFLQQILLRPAEYDVIACMNLNGDYISDALAAQVGGIGIAPGANIGDECALFEA

SEQ ID NO: 6010 - protein, 412 aa, Oryza sativa
MRPQGKTLEMGKRALPRSSDGDEDRTGDLPDGILHHILGSLPARDAARTCVLARRWRHLWKFATGLRITDREMREPAPMEKLQDFVDHLLLLRGRAPLETCWLNLTRLSSDGDARRVNLWFRHAVLCEVQVLRLDLILNGFQLKLDDLPLASRCLAKLNLSGVHLMHSFPDFSCCPVLEHLDIFFCDLSDAKKITSQSMKCLNIRHCTFSQISRTRISAPNLISLRLENYWHRTPVFEVMPLIVDAFVRVHDRSGDWYSCTSGNADFEECLCEDCDFCHSNTNCVIMQALSQAKNLVLSAHEQEFIFKKELMRCPTFSNLKTLLLINCFCVAFDLHGITSILRHTPVIEKLILEFFFEVTEHDDEVEMKGSCSQMERSSAISKHLKLVIVKCNAIDGRITKILKFLSTFNIC

SEQ ID NO: 6011 - protein, 436 aa, Streptomyces kasugaensis
MSDSVLLSARQPLPPIDYSHAAGAWIHTAEGDSLLDAASGLVCVNIGHAHPHVVEQITRQARTATFASPGVLLPAVQEELAGRLTEAVNRPGDGVSLACSGTSAVELAISYARLIQRSRGQDGRHHILTARLGYHGNSALTLGLSGHRRRRPHPDDALGLAPAFDPPYPGHHRDCPHDRCRASCADAVAEAIDRRGPESVAAVLIEPVNGTTGGAYTPPPGYLAALRRACHERGVLVIHDEVLTGLGRTGLPLGADHCTDAAADIVVLSKGLSAGYLPLAAVLVNPEGVARLRSGPRPLPLMGTMSATPLQAAAGLAVLDVLGEIGALDPARVRGGDVAAAVRAVAALPVVQETRGVGYFHAVELAPGTQAAALAAARDERLLLYPFNGFHADGTGEGLIVAPPLNSTPSEVEFLAQGLRRALERTAARSEDRSHR

SEQ ID NO: 6012 - protein, 160 aa, Brassica napus
  unsure (1)..(160): unsure at all Xaa locations
MVSGLGSHRAAFPVXRXSITXITSIAATSXXXSXLKVWPPVGKKKFETLSYLPDLTDVELAKEVDYLLRNKWIPCVEFELEHGFVYREHGNTPGYYDGRYWTMWKLPLFGCTDSAQVLKEVQECKTEYPNAFIRIIGFDNNRQVQCISFIAYKPPSFTGA

SEQ ID NO: 6013 - protein, 189 aa, Bradyrhizobium japonicum USDA 110
MMNRRTMLIAALAGAVAPVTRAVAGGGMSRISAYAFSFPALSGDDIRLAAFTGKPLLVVNTASLCGYTPQYAGLQELWSEFGERGLTVIGVPSNDFGGQEPGGTSEITETAHHQYGVTFPIAAKATVIGARAHPFYKWAADARPKDVPRWNFHKYLIGRDGYIAEVFASNIEPTDTRIKTAIAKTLADT

SEQ ID NO: 6014 - protein, 362 aa, Burkholderia cepacia R18194
MATPQFHPLRIRDVRPETADAVTVSFDVPPELRDAYRFTQGQFVTLKTHIDGEETRRSYSICVGTTDYDRDGELRIGIKRVRGGRFSNFAFDSLQPGHTIDVMTPDGRFFTHLNADHGKQYVAFSGGSGITPVLAIVKTTLELEPRSTFTLIYGNRSVDAIMFAEELEDLKNRYMNRFVLYHVLSDDQQDVELFNGVLDQTKCAEFLGTLTPADAIDEAFICGPAPMMDAAEAALKAAGVPQAKVHVERFGTPLPQAGAPVVEITDQTPAADLEIVLDGKKRKLRLPYEGVSLLDVGLRAGLALPYACKGGVCCTCRAKVLEGEVRMEKNYTLEEHEVKDGFVLTCQCHPISDKVVVSYDER

SEQ ID NO: 6015 - protein, 503 aa, Glycine max
MSIPIPHRQLFIDGDWKVPVLKNRIPIINPSTQHIIGDIPAATKEDVDLAVAAAKAALSRNKGADWASASGSVRARYLRAIAAKITEKKPELAKLEAIDCGKPLDEAAWDIDDVAGCFEFYADLAEKLDAQQKAHVSLPMDTFKSYVLKEPIGVVALITPWNYPLLMATCCFVRCLVSSLLCCHVLLCAIFRTCLELAEICKEVGLPPGVLNILTGLGPEAGAPLAAHPDVDKIAFTGSSATGSKIMTAAAQLIKPVSLELGGKSPIIVFEDVDLDKAAEWTIFGCFWTNGQICSATSRLIVHESIATEFLNRIVKWVKNIKISDPLEEGCRLGPIVSEGQYEKILKFISNAKSEGATILTGGSRPEHLKKGFFVEPTVITDVTTSMQIWREEVFGPVLCVKTFSTEEEAIDLANDTVYGLGSAVISNDLERCERITKAFKAGIVWINCSQPCFTQAPWGGIKRSGFGRELGEWGLDNYLSVKQVTQYISDEPWGWYQSPSRL

SEQ ID NO: 6016 - protein, 175 aa, Triticum aestivum
MAPTVMASSATSVAPFQGLKSTAGLPVSRRSTSAGLGSVSNGGRISCMQVWPIEGIKKFETLSYLPPLTVEDLLKQIEYLLRSKWVPCLEFSKVGFVYRENHRSPGYYDGRYWTMWKLPMFGCTDATQVLKELEEAKKAYPDAFVRIIGFDNVRQVQLISFIAYKPPGCEESGGN

SEQ ID NO: 6017 - protein, 265 aa, Triticum aestivum
LRVSRAGGAGRETPPPGNGQDPCGHPLRVGKRRVSRTGGRSWAQELSLPVVGGPRLVFAPPSREEAEEATAELREAIDRVYFKETPVEVVKEHDQELSKLGADALIPAMPGHVVQAFTLLKSSPEAQSVVASLASDKNVWDAVLKNERVMEFYKSHQQTLVNTFPEGTDSTDSVESPEKFEEASPEYALPTASPLSDFVDNAKKTMMEMVDNITNFFQDLFHNPAEAEAGPGSSSKKPSFAEMAAGGSFMALAMAVILVVLFKRA

SEQ ID NO: 6018 - protein, 426 aa, Schizosaccharomyces pombe
MSNGEFIDQYLLPESGAILQDYLDDYFYTSWYTGNRNLIQLDHYGFPTASNFELNPKSTDNCGTVDFQGIPWGNKAIGKRKNFRLYRLHTYSLSCNHSDWSPEELSLDTVQVAAEDSFYEFQRFLKNPNCLRNHHHLCKSVKVVGEHSVIYVSNNSIRMENTLHDNSVQIIDLKNNILQKKAISCLDTTNAVGCLGTLYGQYCIFNFKNGSFSTRKLSDDSINHIQLFSEKKFILGCNDGAVYVEDVQRTSPILVYRCSNAVNCVQLFDETPLALVCTDSKDAMLIDIRSNSVSAKLPHSDSVLTGSWHPNGNILATGGQDTTAKVWDIRALGKSFRNLGSQMSAVTNLCFSPLGESLAVTEQADFVQLFDTKLFNTSQVIDFFGEIAGTAYSSSGDSLFIGVDDPMLGGILEFRRPLQHPLSFIF

SEQ ID NO: 6019 - protein, 571 aa, Zea mays
PAGPGLHADLLYEPWEVLDDDGFPFTMFAPFWNRCLCMPDPAAPLLPPKRINSGDLSRCPWDELIFEDESEKGSNALLARAWSPGWQNADKALTAFLDGPLVDYSANHKKADSASTSLLSPYLHFGELSVRKVFHLVRMKQLMWSNDGDRAGEESCTLFLRAIGLREYSRYLTFNHPCSLEKPLLSHLRFFPWVVDEVHFKVWRQGRTGYPLVDAGMRELWATGWVHDRIRVVVSSFFVKVLQLPWRWGMKYFWDTLLDADLESDALGWQYISGSLPDGRELDRIDNPQFEGYKFDPHGEYVRRWLPELARLPTEWIHHPWDAPESVLQAAGVELGSNYPRPIVELDAANSRLQGALSEMWELEAASRAAIENGMEEGLGDSTDEPPIDFPQELRMEVDRQPAQPAIIHTPVVAGWRREDQRVPSMTSSLIRAETELTADFGNTSEDSRPEVPSNIHLQARAEREETVDGATGNTVRVNGNHHQQNLQNNMHRVLGIAPSISEASSSWTGRDGGVVPVWSPPAASGHSDPYAADEADISSRGYLDRHPQSHTMMNWSQLSQSLTTGWEVDN

SEQ ID NO: 6020 - protein, 492 aa, Rhodobacter sphaeroides 2.4.1
MLDSVTDLRSLLKDPSLLETRAFVAGEWVDADDGATFEVTNPARGDVICTVPDLGRAETARAIAAAEEAMKEWAARTGKERAQVMRKWFDLMMANQDDLGAILTAEMGKPLAEAKGEIAYGASFIEWFGEEAKRIYGETIPGHMRDKRITVLKQPIGVVGSITPWNFPNAMITRKCGPALAAGCGFVARPAAETPLSALALAVLGERAGLPKGILSVITSSRSSDIGKEMCENPIVRKLTFTGSTEVGRILLRQAADQVMKCSMELGGNAPFIVFDDADLDAAVQGAMASKFRNNGQTCVCANRIYVQSGVYDAFAEKLAAAVKKLKVGDGLVEGTEAGPLINEKAVAKVEEHIRDVLDGGGQVLTGGKRHALGGTFFEPTVVTGVKQEMKVSTEETFGPLAPLFRFETEDEAVGYANDTIFGLASYFYARDVGRITRVQEALEYGIVGVNTGIISTEVAPFGGVKQSGLGREGSRHGIEDYLEMKYICLSI

SEQ ID NO: 6021 - protein, 175 aa, Triticum aestivum
MAPTVMASSATSVAPFQGLKSTAGLPVSRRSNGASLGSVSNGGRIRCMQVWPIEGIKKFETLSYLPPLSTEALLKQVDYLIRSKWVPCLEFSKVGFIFREHNASPGYYDGRYWTMWNLPMFGCTDATQVINEVEEVKKEYPDAYVRIIGFDNMRQVQCVSFIAFKPPGCEESGKA

SEQ ID NO: 6022 - protein, 387 aa, Oryza sativa
MPPRIRRAPARRAAPEEVPDRVSALPDEALHAVLSLLPAHDAVRTCVLARRWRHLWEHAPALRVTDVEGWNPRLRGDGLGRFIRFVDGLFVSRRRRDAPLELCDLDFDFPEDKGKDWHVNRWIMLALLRHHARVLRISLPAYITLPDVPLISQRLTRLELDGVLGNDNILDFSCCPALIALKMKCCRINAEKMSSPSVKILSLASCEFYPATRTQMSFPSVVSLELDGCSGSVPFLESMPSLVAAIVIFDDDYADRCDNSVLGDCGDDSCVDCCNYSDRSKCVCLNGLLEATHLELSAEPAMQSPILEKLTIKIPEEPKCSMDAGQQKIPEEPFVSNHLKIVEIKCKGKEVMWVCKFLKTLGTFGIPLEKINIKLTSEHCRSECELI

SEQ ID NO: 6023 - protein, 373 aa, Oryza sativa
MASGADRISDLPDDVIHHVLSLLPSRDAVRTCALARRWRDLWRSVPAVRVAGDRGWASFDALARFVDSLLRLRRGGAALDACDFDLRFDGAFPGEELQGDTWIRRALRRQVRALRFAVSTHPRVPIPLSDSPLVSHSLTTLELRGVQGNDQVLDFSSCPSLVDLKMKDCYVGGLEMWSPSLKHLSITYCVFYCDYRTRMDFPSLVTFKFNTNTGRTPLLETMPSLATAAVRLDHFCHDRCANGWYDDCGDAGCKGCHDYYRPDEYDCVFLEGLTEATDLTLLAYSKVVPKNLVGMDGSFNQLEQPFAASHLQIVEIYCREVDGIILKILKVLNANGVPLEKISIRCSGCELSMNTHASYYAVVNMCCRAKHCP

SEQ ID NO: 6024 - protein, 449 aa, Triticum aestivum
MQLEVMANRGKILMERYELGRLLGKGTFGKVHYARSLESNRSVAIKMLDKEKVLKVGLSEQIRREVTTMRLVAHKNIVQLHEVMATRNKIYFVMEYVKGGELFDKVAKSGKLTEGAAHKYFQQLISAVDYCHSQGVYHRDLKLENLLLDENENLKVSDFGLSALSESKRQDGLLHTTCGTPAYVAPEVISKTGYDGAKSDIWSCGVILFVLVAGYLPFHGSNLMDMYRKIEQGDFRCPSWFSHKLQKLLCKILDPNPSTRASIQKIKESTWFRKGPRGTLAVKERTPSENVTTNAPPTAGVRPRKNTHEDVQPLTVTNLNAFEIISFSTGFDLSGLFIQEDCRKETRFTSDKPASAIISKLEYVAKALNLRVRKKDNGVVKMQARKEGRNGAVQLDMEIFEITPSHPLIEMKQTSGDPLEYRELLEDIRPALKDIVWAWHGDDPHQQLE

SEQ ID NO: 6025 - protein, 383 aa, Zea mays
  unsure (1)..(383): unsure at all Xaa locations
PGYSVVEQYFVNPDDTVCQKIVVHKDGPRGNHFRRAGPRQKGGYRGFYARNTITLTPKSVNDIHKRGGTILGSSRGGHDTVKIVDSIQDRDINQVYVIGGDGTQRGAVLIFQQVRRRGLKVSVAGIPKTIDNDIPVIDKSFGFDTAVEEAQRAINAAHVEAVSAENGIGLVKLMGRHSGFIAHYATLARRDVDCCLIPESPIYLEGEGGLFRYIEKRLKDNGHMDIVVAEGAGQKLIAETMQSIGKDASGNELLLDVXLWLSQKINEHFKKNKMTINLKYIDPTYMIRAIPSNASDNVYCTLLAHSVVHGAMAGYTGLPXQVNGXTXTSIYRITEKQTXXITDRCXKXLSSTTPTPTNLRKEGHKTPTRLHKYSKGHWSTHAR

SEQ ID NO: 6026 - protein, 507 aa, Mycobacterium tuberculosis H37Rv
MTVFSRPGSAGALMSYESRYQNFIGGQWVAPVHGRYFENPTPVTGQPFCEVPRSDAADIDKALDAAHAAAPGWGKTAPAERAAILNMIADRIDKNAAALAVAEVWDNGKPVREALAADIPLAVDHFRYFAAAIRAQEGALSQIDEDTVAYHFHEPLGVVGQIIPWNFPILMAAWKLAPALAAGNTAVLKPAEQTPASVLYLMSLIGDLLPPGVVNVVNGFGAEAGKPLASSDRIAKVAFTGETTTGRLIMQYASHNLIPVTLELGGKSPNIFFADVLAAHDDFCDKALEGFTMFALNQGEVCTCPSRSLIQADIYDEFLELAAIRTKAVRQGDPLDTETMLGSQASNDQLEKVLSYIEIGKQEGAVIIAGGERAELGGDLSGGYYMQPTIFTGTNNMRIFKEEIFGPVVAVTSFTDYDDAIGIANDTLYGLGAGVWSRDGNTAYRAGRDIQAGRVWVNCYHLYPAHAAFGGYKQSGIGREGHQMMLQHYQHTKNLLVSYSDKALGFF

SEQ ID NO: 6027 - protein, 333 aa, Oryza sativa (japonica cultivar-group)
MASPGSSGRCSRTPGFPAGPLGGGGRAVPAVGLGTASLRSVGEESFRGALLAALEVGYRHIDTASVYGSERVVGEAVAGAARRGVIACREEVFVTTKVWCTQCHPDLVLPSLRESLQNLQMEYVDMYLVHWPMSVKPTKPHYPMKREDIMPMDLRGVWQAMEECHQLGLAKMIGVSNFTTKKLQELLAFAKIPPAVNQVELNPVWQQKKLMEFCKAKGIHVTAYFPLGGRHSTSTVNPVLDSDVLKEIAAAKGKSVAQISLRWIYEQGASMVTTSTKRERLKENIDIFDWQLSDEDRLKISQIPQHKTVSVLSILCPDGVSSVELSEVDVVEV

SEQ ID NO: 6028 - protein, 323 aa, Oryza sativa (japonica cultivar-group)
MAVVVPEAVLRHGDARPMPAVGMGVAEYPSTPERTRDAVLAALEAGFRHFDTASLYRTEAPLGEAIAEATRRGLLASREEAFVTTKLWCTQCHPDLVLPSLRESLRNLQMEYVDLYLIHLPISVKPGPMVFPVKKEDVVPFDFGGVWRAMEECHRLGLAKAIGVSNFTTKHIDKLLAVATILPAVNQVEMNPTWQQRTVREYCDAKGIRVTAYSPLGGQNWGGSANYVMESSVLTEIARARGKSIAQVSLRWIYEQGVTPIAKSYRKERLKENLEIFDWELTDEDRLKISQIPQRKRVTAASLFSPDGEFTSVDLPDIEIVEE

SEQ ID NO: 6029 - protein, 360 aa, Lolium perenne
MGSTAADMAASADEDVALFALQLASSSVLPMTLKNAIELGLLEILVAAGGKSLTPTEVAAKLPSAVNPEAPDMVDRILRLLASYNVVTCLVEEGKDGRLSRSYGAAPVCKFLTPNEDGVSMAALALMNQDKVLMESWYYLKDAVLDGGIPFNKAYGMSAFEYHGTDPRFNRVFNEGMKNHSIIITKKLLELYHGFQGLGTLVDVGGGVGATVAAIAAHYPAIKGVNFDLPHVISEAPQFPGVTHVGGDMFKEVPSGDAILMKWILHDWSDQHCATLLKNCYDALPANGKVVLVECILPVNPEANPSSQGVFHVDMIMLAHNPGGRERYEREFQALARGAGFTGVKSTYIYANAWAIEFTK

SEQ ID NO: 6030 - protein, 422 aa, Streptococcus mutans UA159
MLLIKNGRVLDPKSGLDRVLDVLLDGKKVVKIAENIESVDAQVIDAEGLVVAPGLVDVHVHFREPGQTHKEDIHTGALAAAAGGVTTVVMMANTTPTISDVATLTEVLESAAKENIHIKTVATITKHFDGQHLTDFETLLKAGAVGFSDDGIPLTSSKVVKEALDLAKKNDTFISLHEEDPELNGILGFNEKIAKEHFKICGATGVAEYSMIARDVMIAYDRQAHIHIQHLSKAESVKVVAFAQKLGAQVTAEAAPQHFSKTENLLLEKGANAKMNPPLRLEADRLAVIEGLKSGVISVIATDHAPHHADEKNVADVTKAPSGMTGLETSLSLGLTYLVEAGHLSLMDFLAKMTINPAQLYDFDVGYLAENGPADLVIFADKEDRLVSNHFASKAANSPFIGETLKGQVKYTICSGEVIYQA

SEQ ID NO: 6031 - protein, 464 aa, Zea mays
MARSGREADPGEEERKLVLGKYELGRLLGQGTFAKVYYARDLSAGAGTGHSCSVAIKVIDKARLRRTEGMVEQLRREISIMRMVRHPNVVGIREVLASRSRVFVVMEYARGGELFAKVARGRLDEDHARRYFQQLVAAVGFCHRRGVAHRDLKPENLLLDEAGRLKVTDFGLAALPEQLRHDGLLHTQCGTPAYVAPEVLRKRGYDGARADLWSCGVVLYVLLCGFLPFQHDNYVKLYQKIFKADYQVPPWVSGDARRLIARLLVVDPAKRASIAEIMCTPWFRKGFVPPVLSPPVTPKKQQLDEGAALFDNDDDDNSNSNHSGATSPRSCNAFQLISSMSSGFDLSGLFESEQKTATVFTARAPAATVVEKLESVARALGFEVTRGKGWKVRMEAKAEGTNGRLAATAEVLEVAVDVTVVEFVHDAGDALDFNKFCAVDVRPGLTEIVWAWQGDSPAAAVGTA

SEQ ID NO: 6032 - protein, 186 aa, Pennisetum glaucum
MAKCYPTVSAEYQEAVEKARRKLRALIAEKSCAPLMLRLAWHSAGTFDVSTKTGGPFGTMKNPAEQAHGANAGLDIAVRMLEPVKEEFPILSYADLYQLAGVVAVEVTGGPEIPFHPGREDKPQPPPEGRLPDATKGSDHLRQVFGKQMGLSDQDIVALSGGHTLGRCHKERSGFEGPWTRNPLVF

SEQ ID NO: 6033 - protein, 248 aa, Clostridium perfringens str. 13
MENVWNGFRQLEIFKIEEEAKDIKSFYLRATDGKPLKEYKCGQFLPLKIETDDEVIKKEMRRYSLSGDPKKNYYRLTIKRVPNGKVSGYFHESINVGDTILAMPPFGNFTLTEDSNKPLVLLSGGIGITPILSMLYGAKEQSRDIYFVEAVLNSDNLALNSDVQGIKKVKNFKEIKIFSEPLESDIKGKDFDEEGFITKEWIKNNLPLNGEFFFCGPTLFMKSIRNSLKDLGVKEDNINFEFFGKEEF

SEQ ID NO: 6034 - protein, 175 aa, Glycine max
MAPTVMASSATSVAPFQGLKSTAGLPVSRRSNGASLGSVSNGGRIRCMQVWPIEGIKKFETLSYLPPLSTEALLKQVDYLIRSKWVPCLEFSKVGFIFREHNASPGYYDGRYWTMWKLPMFGCTDATQVINEVEEVKKEYPDAYVRIIGFDNMRQVQCVSFIDFQPPGCEESAKA

SEQ ID NO: 6035 - protein, 344 aa, Ralstonia solanacearum GMI1000
MDALVIHAANDLRIEDIDTPEVQPDQLRVQVRFGGICGSDLHYYNHGGFGTVRVKEPMVLGHEVAGRVEEIGPGVHRHAKGDRVAISPSRPCGQCHYCQQGLQNHCLDMRYYGSAMRTPHVQGAFRREIVIDESQAHRLADTLSDQEGAMAEPLSVALHAVRRAGPLLGKRVLVTGCGPIGALIVVAARRAGAAEIIVTDMGAYPLKAAVAVGADVTINVAEQPDGLKPYTTDKGQIDVLFEASGNERALRGAIDALRPRGIIVQVGLGGEMTLPLNAIVAKELELRGAFRFHEEFAMAVELLNKGLVDVKPLISATVPYRNAAHAFALAGDRTQAMKVLLDFQ

SEQ ID NO: 6036 - protein, 111 aa, Arabidopsis thaliana
MDVRGDHNRKNTSFRGSAPAPIMGKQELFRTLSSQNSPRRLISASYFSLESMVVLVGLTASLLILPLILPPLPPPPFMLLLIPIGIMVLLMVLAFMPSSNSKHVSSSSTFM

SEQ ID NO: 6037 - protein, 280 aa, GIBBERELLA ZEAE PH-1
MERSHTDTLPLANSVEIPQLGFGVYLSPPEVCVKSCLTALEAGYRHIDTAQYYGNEAEVGQAVQQSNVERKDVFLTTKILEAAGSVELSYSKCVESIGKLDPESGYVDLFLIHSPNPGAAKRKEMWQALERLYEEGKARSIGVSNFGIKHIDELKQYAKVWPPHVNQIELHPWLQQRDCVSYCEKNSIAVEAYAPLVRNQKANDKTLGSIASKHSVTPSKVLIRYCLQKNWIPLPKSDTPERIRDNADVFGFDLDDKDMKSLDNLDQGDTGAIVQAVDNY

SEQ ID NO: 6038 - protein, 143 aa, Zygosaccharomyces rouxii
MSRSGVSVADESLQAFNDLKLGKKYKFVLYGISEDKTTIVVKETSTSQSYDEFLGKLPENDCLYAIYDFEYEIGGNEGKRSKIVFFTWSPDTAPVRSKMVYASSKDALRRALTGVSSDIQGTDFSEVSFETVLERVSKSAGSH

SEQ ID NO: 6039 - protein, 162 aa, Triticum aestivum
  unsure (1)..(162): unsure at all Xaa locations
MSDTDEHHFESKADSGASKTYPQQAGAIRKGGHIVIKARPCKVVEVSTSKTGKXHGHAKCHFVAIDIFNGKRKLEDIVPSSHNCDVPXLTAKDYQXLIDITDDGYVSLLTESGNTKDDXKLPTDDVLAWQIKTXLMARTDLSVMSAMGEKQICAVKEIGGGK

SEQ ID NO: 6040 - protein, 446 aa, Aeropyrum pernix K1
MAGDSSSDDIGGARIIEIYRRYGGKIEVMPKVPVSGVEDFAIWYTPGVAEASIRINKDPDESFELTSRWNMVAIVTDATRVLGLGKLLPEAAYPVMEGKALIFKLFGGVDAVPIVHRRREPGAFASLVKDLEPSFGGVNLEDIESPKCFYLLDFLRMELEIPVWHDDQQGTAAASLAGLINAFKIVGKNLRESRIVLLGAGAANIALYRFLKAYGVNPRNIVVVDSKGVLHPEREDMDRLLFSNRYKYEIALETEGGGLAPGSSLEEALRGADALVAASRPGPGVVKKEWIRGMSRDPIVFALANPTPEIWPWEARDAGARVVATGRSDLPNQVNNALVFPGVFRGALDVRSRAITDGMAIAAAEEIARYTEEEIGIEEDRILPPITDWQVHYRVAAAVAWAASREKVARKPRTYAEELENARAIIETTRRKYGALLSAGLIERLV

SEQ ID NO: 6041 - protein, 335 aa, uncultured marine gamma proteobacterium EBAC31A08
MFQTFALKIFFYMPIWLLKIIFYRKRTVIRGHQFDAQSAALLSLLPKKDLSELLDGEIAKARITLEEARIQNKVSLTPSIQVRKVDHILPKHDLILREYKPHQEDLKKVILYFHGGGYVLNSVNTHDDMVSYMSDKIGVKFYSLDYRLSPESKYPDSLDDALDAFSWLIGQGYGPGDISVCGDSAGAHLAASLCHYLAEQNKDLPSSQLLIYPMCDPSCSSESYNLLSSGYLLTKKTMIWFWDKLRTSEVNNNDSAFNLLKFNFEKTLPPTIIVTGGFDPLCDDGEKYAYLLHKGKHNVKQLHYPTMFHGFASMTKLKAAQIAVEDFLKEYKKIL

SEQ ID NO: 6042 - protein, 1212 aa, Candida albicans SC5314
MNNQDPDSQYHNKKVYPPNLPSIPPPPQQPLSGRPATPRMLRSISGTLKSKTELAHSDKGQESNNETKNSNSPHYVPDTHTRQPPPESLKSNIQAPTAVHGNQQKGSLLPPPSIPNPNTMKPAPTPTGVDQPPAKQKPSPAPKQPQPQQQQQQQQQQQFHRKSIGDWNFVKTIGAGSMGKVKLAQHNATHEICAVKIIPRAAKLYQRAHANDPPPQTTQEAAQRHKEFEKEVARDRRTIREGALGRLLYHPFICRLYEMVPMTNHYYMLFEYIEGGQMLDYIVAHGSLKERHARKFARGIASALDYCHRNNVVHRDLKIENIMINEKGDIKIIDFGLSNLYAPKNLLKTYCGSLYFAAPELLSAKPYIGPEVDVWSFGVVLYVLVCGKVPFDDQSVSVLHEKIKKGNVEYPAFLSRECVSLLSRMLVVDPTKRASLYEVCSHPWMNKGYDYKVNNYLPRREPLRLPLDPEIIKTIANFELGTVQGVADELTSILTSVEYQMSCENWYKITETGREYASSQNAQILPDPTGGFHPLVSIYYLVDEMRKRKKAKEEALKAQRRAQVPTIAVPTPKQQQQQQPQPAQPQPQPQPEVSQPLPEPKPVPPEEIINPAVATQAQANMTAPKIVETFSETPQRTLDPSKQSVDEKPSAPGPSIAVPEQAHTTSVPSSFVKTQTSIDEDQLSIPEQQSPRTSTPQTLDPAKVVGGSSGSAISAPNAGSGAGFNSLLRRLSSKKYKGASSPKRSTSPSPNVEGLSPQPTKADPMVRRGVSMKVTAKEKQTNTRPPKSELIKKKPQHGRSSSTSNKMQGFIPVEYLPPLPTIDTNTNTIVSDGAKQQNLTVPSTARHMHPTARAKSVGGGHMRKDSYGRVSHGSQNPLPPLPTSMASQNSQEVVGKDTSEGFFDDVQLDDVGYQEVPQLTESEIIEQYNISKPNSMPSIEHCKTLFLKGFFSVQTTSAKPLPVIRYNIINVLSKLGVKFQEVKGGFVCMHTPSVQPSHSNELDEENKLYGDAFKSKSSDSFEAAEPEGSKTPSRQPSLQLPSHTPTTPSGPKSHKSSNSIGSIGGNVPRRKFSIGNAFNTYRKKNGSQVMMPPNTPATAKVIHGLYDDDDKERNGEDDDDEDDYGYDDSADSLNGYGGGSDMLISSRIEQRAKHQRTVSSSSQKASKSPLKFEIHIVKVPLVGLYGVQFKKILGNTWNYKTLASQILNEMNL

SEQ ID NO: 6043 - protein, 323 aa, Oryza sativa (japonica cultivar-group)
MAAVPEVALRHGAGRPMPAVGVGTADSAATSPETKRGAALAALEVGFRHFDTAALYGTEAPLGEAIAEATRRGLVASREEVFVTTKLWCTQCHPGLVLPSLRESLRNLQMEYVDLYLVHWPISVKPGPPMLPVKREDAVPFDFEGVWRAMEECHRLGLAKAIGVSNFTTKHLDKLLAVATIPPAVNQVEMNPVWQQRTVREYCAAKGIRVAAYSPLGGQNWIGEGNDVMESPVLADIARARGKSIAQVSLRWIHEQGVTPIPKSYNKERLKQNLEIFDWELTKEDRLKISQIPQKKIVTAARMFSPDGEFASVDLSDMEIVEE

SEQ ID NO: 6044 - protein, 128 aa, Aquifex aeolicus VF5
MATLTIDEIVEAIKNMSVLEVAELVKRLEEEFGVSAAAMVAAAPAAGAAAGAPAQAEEKTEFDVILKSPGKNKIQVIKVVREITGLGLKEAKELVDNAPKPIKEGVPKEEAEQIKKKLEEAGAEVELK

SEQ ID NO: 6045 - protein, 469 aa, Methanothermobacter thermautotrophicus str. Delta H
MTAMCAIAGFRGDDAPVKVQEMLDVLRHRGPDATGIYHDSRIVIRTATGEDVKEAPQSAEIAVGHNLLSIVGGPQPVSGDGVLVFNGEIYNQEELNWTGSDSELILDLIEGHGGDLEDALRFTVNKIDGDYAFAYTDGENLASRQDPVGVKPLYHSGEAFASEKKALWRIGLRNVETLPPGHAMINGVKVKLRGLPRAEPSDAEPEELRENLKSALRESVERRVRGLDEAALVFSGGVDSTLLAVLLDEHIDVRLYTVGLPGSSDPQFASRAAADLGMELEVLEVTEDTIREALPHVLGAIEEYNLMKIGVAMPLYLASEAASADGYRVMFSGQGADELFAGYHRYRRLLAEGRLEDALRHDLENIHHVNLERDDAVTMANSVELRVPFLDLQLIGVALTIPADLKIRGPEDELRKRILREAALEMGVPEYIAMRPKKAAQYGSGIDKVLRRKVLPGFDHETFLRRLMF

SEQ ID NO: 6046 - protein, 438 aa, Crocosphaera watsonii WH 8501
MTALLIRHPRILLPDGEFLLGDILIQQGKIVQIAPEITAPDGSNIIDATGLTLLPGVIDPQVHFREPGLEHKENLFTASCACAKGGVTSFLEMPNTKPLTTTQAPLDQKLQLASEKCLVNYGFFIGATPENLPDLLTTNPVCGIKIFMGSSHGALLVSREAEIEPIFARGDRLIAVHAEDQARILQRRQEFKGITDPAIHSQIQDETAALNATKLALKLSQKYQRRLHILHLSTGIEAEFLRENKPSWVTAEVTPQHLLLNTEAYEKIGTLAQMNPPLRSPENNQILWQALLDGVIDFIATDHAPHTLEEKAKGYPNSPSGMPGVETSLPLMLTQAMAGKCSVSQVSSWMATKPAEAYKIPNKGLIKTGYDADLVLVDLDNYRPVLREDLQTKCGWSPFEGWNLTGWPIITIVGGNIVYERGKLNTEVRGKALQFGKN

SEQ ID NO: 6047 - protein, 447 aa, Eremothecium gossypii
MASQEEFYRTQIFGTVFEITNRYADLNPVGMGAFGLVCSAVDTYTQQPVAIKKIMKPFSTAVLAKRTYRELKLLKHLRHENLICLEDIFLSPLEDIYFVTELQGTDLHRLLQTRPLEKQFLQYFLYQILRGLKYVHSAGVIHRDLKPSNILINENCDLKICDFGLARIQDPQMTGYVSTRYYRAPEIMLTWQKYNVEVDIWSAGCIFAEMIEGKPLFPGKDHVHQFSIITDLLGSPPKDVIDTICSENTLKFVTSLPHRDPVPFTERFKNLKPDAVDLLEKMLVFDPKKRITAGDALTHPYLAPYHDPTDEPVADAKFDWNFNDADLPVDTWRVMMYSEILDFHQVPDSQINPNDTFDDQVAAATAAAEAARQQQQQKQQQQKQQQQRHQGVEHGAQHVQLQHGAKQLSADPLVGDSNGGIPLNVSAANETLNNFANQAAQYATDFE

SEQ ID NO: 6048 - protein, 316 aa, Mycoplasma mycoides subsp. mycoides SC str. PG1
MSAEFNWFPGHMNKTLKDIEARIEIVDVVVEVIDSRAPYSSKNATFKKLLKDKPIVYIFSKADIADSKVTQQWVDYYIKNENSKVIVLYNRHTDIVNELINVINELTIKKREKDKAKGIKNTLINALVIGIPNVGKSTFINRVIKGKNVKVGNKPGVTRGIQLIHLNPFINLLDTPGVLPSKLESETVAVNICAINSIKDNVFPKERVAAKLMSYIYNNYDDIIEKYYKINLRLQKPISVIDSYKIFETIGIEKKWYVTEDILDMERILSSFLKDLDKGKLGKISFEKVLEVVPEEIQKAINPEDNKQDNDISSLW

SEQ ID NO: 6049 - protein, 400 aa, Streptomyces clavuligerus
MSNQEFAQRWQGVMIDSYGTPGLSFVRGEGSTLWDADGTAYTDFVSGLAVNALGHAHPAVVGAVSRQIASLGHISNFYSAEPTITLAERLIELFGRPGRVFFCNSGAEANETAFKIGRLTGRSRIVAAQSGFHGRTMGSLALTGQPAKREPFLPLPGDVTHVPYGDAEALRAAVTEDTAMVILEPIQGESGVVVPPKGYLRAAREITEATGTLLVLDEVQTGIGRTGHWFAAQAEGVEADVVTLAKGLGGGLPLGAAVAFGRAAELMTPGHHASTFGGNPVSCARTRVLDTIAADGLLDRVKQLGSAPDEWSVRDAAAIRWSPMSGAGLMLGIVLNEPLAPQVQLAAQKAGFLVNVPAPDVVRLIPPLVIEETEVDAFLQALPGLLDAVHERDREGQTGE

SEQ ID NO: 6050 - protein, 56 aa, Zea mays
  unsure (1)..(56): unsure at all Xaa locations
MSDGTATCIDIILAIILPPLGVFFKFGCGVEWXQRRVRGFFGYLPGIIYAVWAITK

SEQ ID NO: 6051 - protein, 323 aa, Oryza sativa (japonica cultivar-group)
MADEHEWWNSPCSARTGDDEAACSTADADESAVGSTPMSFGHGGQPASLSDAAASSSSSSFLLAGQHMDYWTQDFMGGRAAAAATASFDTLLQLQLQGGDAASRRLLLGDHAAAPPRHLVVPGAPYGGGGGDDTAAPPRGLSPTPYEAADNLQQQQSFPGGHHVVSNTDRLHDHHQDAGSPSPATRSSPGSPAAAKKPRIEAPSPMPTFKVRKEKLGDRITALQQLVSPFGKTDTASVLHEAIEYIKFLHDQVASLSSPYLRCGRPVQLQHQQGSHKVNGNCEGKQLDLRSRGLCLVPVASTYTVASETATEFWHPTFGGTFR

SEQ ID NO: 6052 - protein, 347 aa, Listeria innocua Clip11262
MKNAIKWIAIGFAGIILLPLVIVFFIYKKAVGKKEYDPEVLENLDEASQEFVKNTSPLSDVDSRYKYMRLATKALPSAKDIEIGDVENKKIDGPAGKIPIRIYTPKEDGPFEIIVYYHGGGFVLGGLQTHDAIARKLVQTTGARVVTVDYRLAPENPFPAAVEDAYAALLWVQNHRTSLRAKSSDIIVAGDSVGGNLATVVTQIAKAKGKPNVTAQILLYPATDIFSRDASVLYPSMDEFAEGYVLTKESLDKFFKLYIANSSDRKYDPLIAPIRSKDLAGLPKTFIATAEFDPLRDQGEAYAKKLKDAGVEVFAKRFEKVPHGFMTTTSEATDETYELISEFLEEK

SEQ ID NO: 6053 - protein, 494 aa, Burkholderia fungorum LB400
MNANPKHVADPTRLRNQNLIGGQWKAALSGQSIAVENPANEEIIAQVPRGQQEDIDEAVKVARATFESAAWRKIRPIDRGRILENIARKVEEHAEELSWLESLDTGKAISFARVIDLPSTVDVFRYMGGWCSKLGGTTPPISFDGKEYHAYTRREPVGVVGAITPWNYPLALGSWKIASALAAGCTMVLKPTELTPLSTLRLAELCLEAGLPEGALNVVNGYGHEAGEALARHPDIDKITFTGSTVVGKKIVEYALGNMKRVTLELGGKSPSIVFDDADLDQVGLGAALAVFFNSGQICFAASRLFVQASVYDRVVEAVAAVASQFKVGNGQDTDTMLGPLVSRKQQERVLGYVQSGIEQGASLIYGGQKIGDKGYFLQPTVFADADQSMKIAQEEIFGPVVSIIRFKDEVEAIRLANDTTYGLAANIWTRDIKKAHRVAHRLQAGSVWINCHGVIDPAAPFGGFKQSGWGREVSEEGLAAYTEIKTVCALLDD

SEQ ID NO: 6054 - protein, 484 aa, Agrobacterium tumefaciens str. C58
MKNLHRRDLIEDRAFVNGAWVERDQMFAIVDPAGGDHLADVASCTLNDVDFAIDAASKAFAGWRDMLPVDRGDILRNWSARMRENAHDLATIISAEQGKPLAESRGEIAYAANFLDWFASEGERSYGETIPTHLKGSNLSVRMQPIGVTVAITPWNFPSAMIARKAGAALAAGCTMIVKPAPETPLSALALARLAEESGVPPGVLQVLPGEAAPLARRLLENTEVRAFSFTGSTEVGRILLTQSAATVKKASLELGGHAPFIVFADADLTEAVKGCLGAKFATSGQDCLAANRIYVQRSLYPRFVERFAEATSRLTVGHGLETGVDIGPMTRPSVAEKCRQQVAQALSAGARLVCGGQDSPLGGNFVTPTVLADVTDDMLIAREETFGPVAAILPFDDEAEVIRRANATEMGLAAYLYTNDLGRAMRLTDQLEYGMVAVNTPKFTGAPIPFGGWKQSGLGREGSRHGLMEYLEPKYVCFGNLAA

SEQ ID NO: 6055 - protein, 273 aa, Brassica napus
MVLSQTTTESNEPVSSTFGSRYALTALPKYEIGESSIPKDAAYQIIKDELMLDGNPRLNLASFVTTWMEPECDKLIMDSINKNYVDMDEYPVTTELQNRCVNMIARLFNAPLGDTETAMGVGTVGSSEAIMLAGLAFKRNWQNKRKAEGKTYDKPNIVTGANVQVCWEKFARYFEVELKEIKLSEGYYVMDPEKAVEMVDENTICVAAILGSTLTGEFEDVKRLNHLLVKKNDATGWNTPIHVDAASGGFIAPFIYPELEWDFRLSLVKSINV

SEQ ID NO: 6056 - protein, 327 aa, Triticum aestivum
  unsure (1)..(327): unsure at all Xaa locations
QFLGQQQPFPPQQPYPQPQPFPSQQPYLQLQPFPQPQLPYSQPQPFRPQQPYPQPQPQYSQPQQPISQQQQQQQQQQQQQQQFPQQQQPLLPQQPPFSQQQPPFSQQQQQPPFSQQQQQPILLQQPPFSQHQQPVLPQQQIPSVQPSILQQLNPCKVFLQQQCSPVAMPQSLARSQTLWQSSCHVMQQQCCRQLPQIPEQSRYDAIRAIIYSIVLQEQQHGQGLNQPQQQQPQQSVQGXVSQPQQQQKQLGQCSFQQPQQQQQQQQQQQQQQQEQQILQQILQQQLIPCMGCCIAATQHSAWEITSFATKYLPAVARIVLSAPMADP

SEQ ID NO: 6057 - protein, 506 aa, Glycine max
MLSQKQGEDAIITNLNHTEHEGGSTSTREEEEQDHSMFNFKSLLWHGGSVWDAWFSCASNQVAQVLLTLPYSFAQLGMVSGILLQIFYGLIGSWTAYLVSVLYIEYRTRKEKENVSFKNHVIQWFEVLDGLLGRYWKAVGLAFNCTFLLFGSVIQLIACASNIYYINDKLYKRTWTYIFGACCAFTVFIPSFHNYRIWSFLGLGMTTYTAWYLAIAALIHGQVENVTHTGPTKLVLYFTGATNILYTFGGHAVTVEIMHAMWKPQKFKYIYLLATLYVFTLTIPSAAAVYWAFGDELLNHSNAFSLLPKNRFRDAAVILMLIHQFITFGFACTPLYFVWEKVIGMHDTKSICIRALARLPVVIPIWFLAIIFPFFGPINSAVGALLVSFTVYIIPAIAHMLTYRKASARQNAAEKPPFFMPSWTAMYVFNAFIVGWVLVVGFGLGGWASMINLINQIDTFGLFAKCYQCPDPPPPAGAPPPLTHPVVEGGVDLVEPWAPPNLLKII

SEQ ID NO: 6058 - protein, 435 aa, Bdellovibrio bacteriovorus HD100
MSKVTLFWFRRDLRLDDNAGLYHALKERSAVLPLFIFDSEILENLDDPADARVTFIYEQIQDMKQQLNAKKSDLIVRHGKPLEVLKTLSDEMAVEAIYANHDYEPAARKRDEKVAAWAAKAGIEFLTFKDQCLFEKDEILTDARKPYTVYTPYRNKVLANLSEFYLKSYPNDLYESSYAKVKKAEPLLTLKSLGFERSNIEFPPMDLSTKMLKTYHATRDFPADEKGTSHLGLHLRFGTLSVRELAREAKKYSPVWLSELIWRDFFMQILWHFPQVENQSFRPEYDKIAWRKSKADFQKWCEGRTGYPLVDAGMRELNATGYMHNRVRMVVASFLCKHLLIHWYEGERYFAKKLLDYDLSANNGNWQWAAGSGCDAAPYFRIFNPQTQFEKFDPDGKYVQKWVPEYGTDEYPQPMVDHNEARGRCLQAFTKVLKK

SEQ ID NO: 6059 - protein, 160 aa, Glycine max
MSDEEHHFDSQADAGASKTYPQQAGTIRKNGYIVIKSRPCKVVEVSTSKTGKHGHAKCHFVAIDIFNGKKLEDIVPSSHNCDVPHVNRTDYQLIDISEDGFVSLLTDNGNTKDDLKLPTDEALLAQIKDGFSEGKDLVVSVMSAMGEEQICSLKDIGPKN

SEQ ID NO: 6060 - protein, 172 aa, Zea mays
MAAGHHGQPPDGDDGRPSVVGGEQDRLLPIANVGRIMKQILPPNAKISKEAKETMQECVSEFIGFVTGEASDKCHKEKRKTVNGDDLCWAFGALGFDDYVDPMRGYLHKYREVEGDRAAAAASSSRGGGDHHPASASTSTSPPAAAPPAGHFMFGAAAIDRPDNNTSSARPF

SEQ ID NO: 6061 - protein, 275 aa, Triticum aestivum
  unsure (1)..(275): unsure at all Xaa locations
MEAETAAKRARENEGAAAADGAGEQAGISAVIPGWFSEISPMWXYQEMITHLPLCSIKDPKKVLVIGGGDGGVLREVSRHSSVEQIDICEIDKMVVDVSKQFFPHLALGFEDPRVSLHIGDGVAFLKNAPEGTYDAVIVDSSDPVGPAQELFEKPFFESVSRALRPGGVVCTQAESIWLHMHIIEDIVTNCRQVFKGSVNYAWTTVPTYPSGVIGFMLCSPEGPSVDFQHPVFSIEEDEYSPKSQGQLKFYNSEFHPASFCLPSFARRVIEAQAN

SEQ ID NO: 6062 - protein, 175 aa, Triticum aestivum
MAPAVMASSATTVAPFQGLKSTTGLPISRPSGSAGLSNVSNGGRIRCMQVWPIEGIKKFETLSYLPPLSTEALLKQVDYLIRSKWVPCLEFSKVGFVFREHNSSPGYYDGRYWTMWKLPMFGCTDATQVLNEVEEVKKEYPDAYVRVIGFDNMRQVQCVSFIAFRPPGCEESGKA

SEQ ID NO: 6063 - protein, 122 aa, Staphylococcus aureus subsp. aureus MRSA252
MANHEQIIETIKEMSVLELNDLVKAIEEEFGVTAAAPVAVAGAAGGADAAAEKTEFDVELTSAGSSKIKVVKAVKEATGLGLKDAKELVDGAPKVIKEALPKEEAEKLKEQLEEVGATVELK

SEQ ID NO: 6064 - protein, 207 aa, Vibrio vulnificus CMCP6
MSSVIAQKDENVVWHQHAVTKTQRADLKQQKPAVLWFTGLSGAGKSTVAGALENRLAEQGFHTYLLDGDNVRHGLCSDLGFSTQDRRENIRRIGELAKLMADAGLIVLTAFISPHRAERQLVRDLLPEGEFIEVFVNTSLEVCEQRDPKGLYKKARAGEIANFTGIDSEYEVPLNPEIDLPAGEKGIEALVDLLVEQLTLRGVISPR

SEQ ID NO: 6065 - protein, 361 aa, Zea mays
MAWRANPKPSQAEGKRGCERGAPSHYPAAASPHTPPSRAQGFGMEADAAAKRTRESGEDATAAGISAVIPGWFSEISPMWPGEAHSLKVEKVLFQGKSDYQNVMVFQSSTYGKVLVLDGVIQVTERDECAYQEMITHLPLCSIKDPKKVLVIGGGDGGVLREVSRHSSVEQIDICEIDKMVVDVSKQFFPHLAVGFEDPRVSLHIGDGVAFLKNAPEGTYDAVIVDSSDPIGPAQELFEKPFFQLVARALRPGGVVCTQAESIWLHIHIIEDIVVNCRQVFKGSVNYAWTTVPTYPSGVIGFMLCSTEGPAVDFQHPVFNIEEDEHPMKSKGPLKFYNSEIHTASFCLPSFAKRVIESKAN

SEQ ID NO: 6066 - protein, 439 aa, Glycine max
MDRRTGSTRNILFNKYEIGKLLGQGNFAKVYHGRNLSTNESVAIKVIKKERLQQKERLVKQIKREVSVMSLVRHPHIVELKEVMANKAKIFLVVEYVKGGELFAKVAKGKMKEDVARKYFQQLISAVDFCHSRGVTHRDLKPENLLLDENEDLKVSDFGLSALPDQRRSDGMLLTPCGTPAYVAPEVLKKKGYDGSKADIWSCGVILFALLSGYLPFQGENVMRIYSKSFKADYAFPEWISPAAKNLISNLLVVDPQKRYSIPDIMKDPWFQIGFLRPIAFSMKDDDGNSSSSNNEDGELTGAKPARPSYNAFEIISSLSNGFDLRNLFETRKRSPSMFISKFSASAVMAKLEGVAKKLNFRVTGKKEFVVRMQGATEGRKGKLAMTVEVFEVAPEVAVVEFAKSAGDTLEYIKFCEDQVRPSLKDIVWSWQGDANCHQ

SEQ ID NO: 6067 - protein, 356 aa, Triticum aestivum
MGSIAAGADEDACMYALQLVSSSILPMTLKNAIELGLLETLMAAGGKLLTPAEVAAKLPSAANPEAPDMVDRMLRLLASYNVVSCTTEEGKDGRLSRRYGAAPVCKYLTPNEDGVSMAALALMNQDKVLMESWYYLKDAVLDGGIPFNKAYGMSAFEYHGTDPRFNRVFNEGMKNHSIIITKKLLEVYKGFEGLGTIVDVGGGVGATVAAITAHYPTIKGINFDLPHVISEAPPFPGVTHVGGDMFQKVPSGDAILMKWILHDWSDEHCATLLKNCYDALPPHGKVVLVECILPVNPEATPKAQGVFHVDMIMLAHNPGGRERYEREFEALAKGAGFKAIKTTYIYANAFAIEFTK

SEQ ID NO: 6068 - protein, 509 aa, Candida albicans SC5314
MDQQEAPIYYGRSVNKVYNQEFIIDSRFKIVKELGHGAYGIVCSAKYDNGSKKVPDSNNGNASSSANASFVAIKKITNIFSKNILCKRALRELKLLQFFRGHKNITCLYDLDIIPNPMTGEFNEIYLYEELMECDMHQIIRSGQPLSDQHYQSFIYQVLCGLNFIHSADVLHRDLKPGNLLVNADCELKICDFGLARGFSENPDENAGFMTEYVATRWYRAPEIMLSFTNYTKAIDIWSVGCILAELLGGKPLFRGKDYVDQLNQILMILGTPPESTLQRIGSHRAQNYVRSLPITRKASYEELFPDANPLALDLLERMLTLDPRERITVRDALNHKYLELWHDPKEEIECQVKFDFKSFETVDGLDEMKQLIMDEVQKFREFVRKPIEEQQRIQMQLHMQKREEQRQEEEEKELLEQQRQFPAQESMDISQTPYNNLETNIGTPQVEDDYPRPQELDEFTFSNLESSSSMNLFQDMAKPSGEEYIKLEEELGFGLDGAMFNNYCNDHQ

SEQ ID NO: 6069 - protein, 275 aa, Escherichia coli O157:H7
MANPTVIKLQDGNVMPQLGLGVWQASNEEVITAIQKALEVGYRSFDTAAAYKNEEGVGKALKNASVNREELFITTKLWNDDHNRPREALLDSLKKLQLDYIDLYLMHWPVPAIDHYVEAWKGMIELQKEGLIKSIGVCNFQIHHLQRLIDETGVTPVINQIELHPLMQQRQLHAWNATHKIQTESWSPLAQGGKGVFDQKVIRDLADKYGKTPAQIVIRWHLDSGLVVIPKSVTPSRIAENFDVWDFRLDKDELGEIAKLDQGKRLGPDPDQFGG

SEQ ID NO: 6070 - protein, 365 aa, Aspergillus fumigatus
MAEFVRAQIFGTTFEITSRYNLQPVGMGAFGLVCSARDQLTGQPVAVKKIMKPFSTPVLSKRTYRELKLLKHLRHENIISLSDIFISPLEDIYFVTELLGTDLHRLLTSRPLEKQFIQYFLYQILRGLKYVHSAGVVHRDLKPSNILINENCDLKICDFGLARIQDPQMTGYVSTRYYRAPEIMLTWQKYDVEVDIWSAGCIFAEMLEGKPLFPGKDHVNQFSIITELLGTPPDDVIQTICSENTLRFVKSLPKRERQPLANKFKNADPEAVDLLERMLVFDPKKRIRAGEALAHEYLSPYHDPTDEPEAEEKFDWSFNDADLPVDTWKIMMYSEILDFHNIDQGNDAGQVLMEGGVAQAQQNYA

SEQ ID NO: 6071 - protein, 425 aa, Azoarcus sp. EbN1
MKIRIANGRVIDPANGLDDTRDMYLADGKIVAHGRVPEGFAAERTIDATGLVVAPGLIDLAARLREPGFEYRATLESEMDAAMAGGVTSLAIPPDTDPVLDEPGLVEMLCYRAKKLNRAHVYPVGALTIGLNGERLSEMAELVEAGCVAFGQANVPVVDSAVLLRAMQYAATFGFRVWLQPLAPFLSRGFAHDGEVATRLGLPGIPTAAETIALYAHIQLARATGARLHVTRLSSAEGLALIRQARADGLDVTCDVSINHLHLSEMDIGYFNSNCHLVPPLRSQRDRDALRQGLADGSIDALCSDHTPVDDNGKLTPFSESEAGATGLELLLPLTLKWAQETGLPLGQALARVTSDAARIVGITKAGHLGAGARADLCLFDPAAHTTVRRDTLRSQGKNTPFLGLELPGRVHYTLVEGQVMHEPS

SEQ ID NO: 6072 - protein, 419 aa, Zea mays
  unsure (1)..(419): unsure at all Xaa locations
MILSMLAVQPYSPVTRQQGESTTRSETTTFSTLSPSTSLITLHRPSNLKAMADLIIPPSPVMFPEDQDSWNVQLFRSIDGGACFGFPSTPEAAAQSGLVSGKNNVLDRSIHDAYIHAIRRAKHFIYIENQYFLGSSFAWKADGIKPEEIEALHLVPRELSLKIVSKIEAGEHFAVYVVLPMWPEGPPASGSIQGILDWQRRTMEMMYNDISVALDAKRIDRDPRDYLTFFCLGNREVKMDGEYEPSGRPLDGTDYARAQNARXRFMIYVHSKMMIVDDEYIIVGSANINQRSMDGGRDSEIAMGAYQPCHLNTKGQVARGQVHGFRMSLWYEHLGMLHDDFLNPGSLECVRRVNQMADRYWDLYAGDSLDADLPGHLLRYPVTVTKEGTVTELPGAKFFPDTQALVLGALSKLPPILTT

SEQ ID NO: 6073 - protein, 483 aa, Azotobacter vinelandii
MQLNDARLFRQQAYIEGRWVDADGGQTLAVNNPASNEILGGVPKMGAAETRRAIEAAERALLAWRALTAKERAGKLRCWFELLLEHQDDLARLMTLEQGKPLAEARGEIAYAASFLEWFAEEAKRIYGDTIPGHQADKRILVIKQPVGVCAAITPWNFPAAMITRKAGPSLAAGCTLVLKPASQTPFSALALAELAERAGIPAGVFNVVTGSAAEIGGELTANPIVRKLSFTGSTEIGRQLMAQCARDIKKVSLELGGNAPFIVFDDADLDAAVEGALASKYRNAGQTCVCANRLYVQDGVYDAFAEKLRAAVARLKVGNGLEEGVSIGPLIDDKAVGKVEEHIADAVSRGARVIAGGRPHALGGTFFEPTILAEVPADARVAREETFGPLAPLFRFGDDDEAIALANATEFGLAAYFYARDLSRVFRVAESLEYGIVGVNTGLISTEVAPFGGVKASGLGREGSKYGIEDYLEIKYLCLGGI

SEQ ID NO: 6074 - protein, 220 aa, Capsicum annuum
MESEHEKSETPNFKRPLKKKCENAKRFTDEQVKLLESMFKLGTKIEPREKLQLARDLGLQPRQVAIWFQNKRARWKSKQLEHEYRILQSKFDHLNTQFESLKIEKERLLIELETLNDQLGNKLARGSKSQDSRDSELHTSPENGFTDLLELKHCAGCSNSRFGHKSVNEEDDETTEETDKYFTPKEEAEFWNLDELGDNNSLEHWCVGLGSISNSKLWDF

SEQ ID NO: 6075 - protein, 445 aa, Streptomyces avermitilis MA-4680
MSDVELVLRSTRVITPEGTRPAAVAVAAGKITAVLPHDAEVPAGARLEDLGDDVLLPGLVDTHVHVNDPGRTHWEGFWTATRAAAAGGITTLVDMPLNSLPPTTTVGNLRTKRDVAADKAHIDVGFWGGALPDNVKDLRPLHDAGVFGFKAFLSPSGVDEFPELDQERLARSMAEIAGFGGLLIVHAEDPHHLAAAPQRGGPRYTDFLASRPRDAEDTAIANLLAQAKRLNARVHVLHLSSSDALPLIAGAKAEGVRVTVETCPHYLTLTAEEVPDGASEFKCCPPIREAANQDLLWQALADGTIDCVVTDHSPSTADLKTDDFATAWGGISGLQLSLPAIWTEARRRGHSLEDVVRWMSARTARLVGLAQKGAIEAGRDADFAVLAPDETFTVDPAALQHRNRVTAYAGKTLSGVVKSTWLRGERIMADGEFTEPKGRLLSREP

SEQ ID NO: 6076 - protein, 119 aa, Pennisetum glaucum
KTKKKLEDKWIADSDVIAQALEEKYPEPPLATPPDKAQLGQKYFPPFIGFLKSKDSSDGTEQALLDELTSFDNYLKDNGPFINGVTISAADLALGPKLYHMEIALGHYKNCLFQIHFHM

SEQ ID NO: 6077 - protein, 177 aa, Zea mays
MAGGGVEDVYGEDRATEEQLITPWAFSVASGYTLLRDPRHNKGLAFSEAERDAHYLRGLLPPALASQELQEKKLMQNLRRYEQPLHRYIAMMDLQERNERLFYKLLIDNVEELLPVVYTPTVGEACQKYGSIYRRPQGLYISLRDKGKILEVLKNWPERSIQVIVVTDGERILGLGD

SEQ ID NO: 6078 - protein, 398 aa, Ustilago maydis 521
MASLRTGLRVAQPLRASARNFATRPSIRSSVRHYSSPAPGSPPPPQPSSSSSTSKVLLTSVAIAAAAGGAFLAFGRDDKVSILGVGANGANKFQGSKGSVGPATTSAHSKADYQAVYNAIAEQLEANPDYDDGSYGPVLVRLAWHASGTYDKNSNTGGSNGATMRFAPESEHGANAGLGAARDFMEKIHQKFPWITYSDLWTLGGVAAIQELGGPKIPWRPGRKDATADKCTPDGRLPDGDKGPDHLRYIFYKMGFNDQEIVALSGAHALGRCHTDRSGFDGPWTFAPTSFTNEYFNLLMNEKWNIRKWNGPPQFEDKSTKSLMMLMTDMALVQDPSFKKHVQRYAKSEDEFFNDFRSAYAKLLELGVPAENFKAFETKLDGGKPFEFATSAEQENAN

SEQ ID NO: 6079 - protein, 75 aa, Brassica napus
  unsure (1)..(75): unsure at all Xaa locations
EKEEVVXAYSMLSSAAVVTSPAQATMGAPFTGLKSSSAFPVTRKXNNDITSIXSNGGRXVPSIFASINLPSLPLP

SEQ ID NO: 6080 - protein, 126 aa, uncultured marine gamma proteobacterium EB000-45B06
MATSKEDILKAIEEMSVMDLVDLISDIEEKFGVTAAAAVAAAPAAAAGGDAEAAEEKDAFDVVLNAAGDQKVQVIKAVRAITGLGLKEAKDMVDGAPSTVKEGASKDDAEAMLKQLTEAGATAELK

SEQ ID NO: 6081 - protein, 133 aa, Brassica napus
MEGVGSRLSRTSSRYSGPAATAVFSGRVRKWKKKWVRVSTSPVGVFRASKSNGRSNNNNNSSSNSPHHLLLHKWTPLPSDANGSGETEEPPKRRFRYAPIAMFEHRERVGAKDSEVEAEETDEFDNDSPLPKA

SEQ ID NO: 6082 - protein, 230 aa, Zea mays
  unsure (1)..(230): unsure at all Xaa locations
MTKNYPAVSEEYQKAIEKCKRKLRGLIAEKNCAPIMVRLAWHSAGTFDCASRTGGPFGTMRFDDELAHGANNGLHIALRLLEPIREQFPTISHADFHQLAGVVAVEVTGGPEIPFHPGREDKPQPPPEGRLPDATKGCDHLRQVFLKQMGXLTDQDIVALSGAHTLGRCHKDRSGFEGAWTSNPLIFDNSYFKELLSGEKEXLLRLSLTKPLLDDPVFRPLVEKYAADDV

SEQ ID NO: 6083 - protein, 400 aa, Magnaporthe grisea 70-15
MATTQTTQGQIQPCRYKVGKTLGAGSYSVVKECVHIDTGRYYAAKVINKRLMAGREHMVRNEIAVLKKVSMGHQNILTLVDYFETMNNLYLVTDLALGGELFDRICRKGSYYESDAVDLIRATLSAVAYLHDHGIVHRDLKPENLLFRTPEDNADLLIADFGLSRIMDEEQFHVLTTTCGTPGYMAPEIFKKTGHGKPVDIWALGVITYFLLCGYTPFDRDSDLEEMQAILNADYSFTPIEFWRGVSDSAKDFIRRCLTIDPTKRMSAHEALQHPFVAGYLADKGANLLPTVKKNFNARRTLHAAIDTVRAINKLREGQGLNGQRLMAGVKSREPNKAAAAAAAAASIPTSTGEVGTVGAATHKDSGYGSTRPDALRPGVETNKVVETSKGLWTGVGSRG

SEQ ID NO: 6084 - protein, 82 aa, Triticum aestivum
  unsure (1)..(82): unsure at all Xaa locations
MSNDAEHDTTFESADAGASLTYPMQCSALRKNGFVVIKGRPCKIAEMSTSKTGXKHGHAKXHLVAIDIFTGKXLEELCPSTQ

SEQ ID NO: 6085 - protein, 435 aa, Burkholderia cepacia R1808
MSRQQQALELQKQWDTDPRWTGIKRGYTADDVVRLRGSIAVEHTLAKRGAEKLWRLINEEPFVNALGALTGNQAMQQVKAGLKAIYLSGWQVAGDANVAGEMYPDQSLYPANSVPLVVKRINNTLTRADQIQWSEGKNPGDDGYVDFFAPIVADAEAGFGGVLNAFELMKAMIEAGASGVHFEDQLASVKKCGHMGGKVLVPTREAVAKLSAARLAADVMGTPTVLVARTDAEAADLITSDIDDNDKPFLTGERTVEGFFRTKPGLEQAISRGLAYAPYADLVWCETGKPDLEYAKKFAEAIHKQFPGKMLSYNCSPSFNWKKNLDDATIAKFQKELGAMGYKFQFITLAGFHALNYSMFNLAHGYARTQMSAFVELQQAEFEAADKGFTAVKHQREVGTGYFDAVTQTVEREASTTALHGSTEDEQFFDGKKVA

SEQ ID NO: 6086 - protein, 194 aa, Glycine max
  unsure (1)..(194): unsure at all Xaa locations
DTSFILARDAIGDTYLFIAWRLNGSHXTPSYLNGDYDDCEHYESFPPGHLYSIKXRALLTIAQSLHGFCDAILLSHLMITLALRHAFEMAVVKRMMTDVPSAGSLSQGSYSTLSAVXLYLYLSGSRCSXQRASKLHSLCVCLEGAPDLMASLEVTYYIGTVHHEYXYSVQEGIYTIDDEIYHIYSSWVDTIRAS

SEQ ID NO: 6087 - protein, 154 aa, Prunus persica
MALSLFGGRRSNVFDPFSLDIWDPLEGLGTLANIPPSARETTAIANTRIDWKETPEAHIFIADLPGLKKEEVKVEVDDGKVLHISGERSREQEEKNDKWHRIERSTGKFSRRFRLPDNAKIDQVKASMENGVLTVTVPKEEEKRPQVKAIDISG

SEQ ID NO: 6088 - protein, 390 aa, Oryza sativa (japonica cultivar-group)
MEGGGAGSGMERWREMFRGADIYDVIRNAILIAGADSPRELLRRRQGIIEWLFAVAPVTVPVPAPLACGRVVDGAGNRLPPAAIPDGGGHHHDDNDGNFAAAEAQTSLIDQQILEALYDEIEEDTQVINEVLRIKDILINYKEQSVDTLFDGLRRLQLMRLSISVLKSTQIAEAVAPLNKHRSPVICKIARDLAKGWKGVAADWVGPSSANADTSPDISNPSTVEDDFGLPTPPMDVGAFFLPQSAAEQYVSEFLHKADDDDDESLIPNAKNDCGFGGYKMEIAKPVANMDENILRKGKDLSRQHGPPMRQANLQMKLAQHHAIAITEQRPIAVVRKPLPDHVSKLERQATILEGCKVGIGKRNNTDIADLRLEATKRKLNDAYQEAENS

SEQ ID NO: 6089 - protein, 499 aa, Burkholderia fungorum LB400
MDASTILADLGIAHAAQAGDIAVHSPITGELIGRVASNTVAEVDTALAQAKQAYTAWRNVPAPRRGELVRLLGNRLREKKQALGSIITLETGKILQEGMGEVQEMIDICDFAVGLSRQLYGLTIASERPGHRMAETWHPVGTCVVISAFNFPAAVWSWNAALALVCGNAVIWKPSEKTPLTALAVNQILSEALQEFGDAPAGLTALINGGRDVGAKLVADPRASIVSATGSTEMGRTVGVEVAKRFGRSLLELGGNNAGIVTQTADHELAMRGILFSAVGTAGQRCTSLRRLFVHESVYDKTIERLKQLYSKVPIGNPLEKGTLMGPLIDKQSYGRMQEALQQATAEGGKVFGGERVEVKGYEGGYYVRPAIVEMPSQTSVVLKETFAPILYVLRYTDFADAVEANNAAVHGLSSCVFTTDLREAERFLSDSGSDCGIANVNIGPSGAEIGGAFGGEKETGGGRESGSDAWKAYMRRATNTVNYSSALPLAQGIDFNIG

SEQ ID NO: 6090 - protein, 429 aa, Streptomyces avermitilis MA-4680
MSDNSVVLRYGDGEYTYPVIDSTVGDKGFDIGKLRAQTGLVTLDSGYGNTAAYKSAITYLDGEQGILRYRGYPIEQLAERSTFLEVAYLLINGELPTVDELSTFKGEITQHTLLHEDVKNFYRGFPRDAHPMAMLSSVVSALSTFYQDSHNPFDEKQRNLSTIRLLAKLPTIAAYAYKKSIGHPFVYPRNDLGYVENFLRMTFSVPAQDYDLDPVVVSALDKLLILHADHEQNCSTSTVRLVGSSQANMFASISAGISALWGPLHGGANQSVLEMLEGIQTSGGDVDTFIRKVKNKEDGVKLMGFGHRVYKNFDPRAKIIKAAAHDVLSALGKSDELLDIALKLEEHALADDYFVERKLYPNVDFYTGLIYRAMGFPTEMFTVLFALGRLPGWIAQWHEMIKEPGSRIGRPRQIYTGEVLRDFVPVEGR

SEQ ID NO: 6091 - protein, 457 aa, Azotobacter vinelandii
MKDATGNPQTRHWQALGHAHHLPPFSDYRQLKEHGPRIITRASGVYLWDSEGNCILDGMAGLWCVNVGYGREELVEAASRQMRELPYYNLFFQTAHPPAVELARAIAELAPPGMHHVFFTGSGSEANDTVLRLVRHYWAIKGQPRKNVVIGRWNGYHGSTVAGASLGGMKAMHGQGDLPIPGIEHIDQPYWFGEGGGLDPEAFGIRVADQLERKILEIGEERVAAFIAEPIQGAGGVIIPPDSYWPRIREILRKYDILFAADEVVCGFGRTGEWFGSQYYGLEPDLMAIAKGLTSGYLPMGGVVVRDRIVEVLEEGGEFYHGFTYSGHPVAAALALENIRLLREEGIVERVRTRTGPYLQRRWRELAEHPLVGEVRGLGMLAALELVKDKKTRERFPADLAAGMRCREHCFANGLVMRAVGDTMIVAPPLVISEAEIDELIAKARHCLDLTASEMPG

SEQ ID NO: 6092 - protein, 131 aa, Sulfolobus acidocaldarius
MSIQYTTVGDLKVGSYVMIDGEPCRVVEITKAKTGKHGSAKANVVAIGLFTGQKRSLMAPVDQQVEVPIIEKHVGQILADKGDNLTIMDLESYETFDLEKPTENEIVSKIRPGAEIEYWSVMGRRKIVRVK

SEQ ID NO: 6093 - protein, 478 aa, Agrobacterium tumefaciens str. C58
MHTYPDIKLLIDGEWRDAVSGKTIAVSDPATDEIIGAIAHAEKEDLDLALAAAERGFKLWRDTSPYERSKIMRKAADILRERKDKIAYIMTREQGKPLAQSATEIMGAADTIDWFAEEARRTYGQVIPARATGVSQLAIKVPVGPVAAFTPWNFPLNQIVRKLSAALATGCSIIVKAPEETPASPAELIRAFVDAGVPAGVIGLVYGVPSEISEYLIPHPVIRKISFTGSTPIGKHLAALAGKHMKRATMELGGHAPVMIFDDADIEKAIEVTSLAKFRNAGQVCVAPTRFLVQDGVADRFLEGFVEATKAIKVGNGLEEGVIMGPLANERRIPALEGLINDAVSHGAELKTGGRRIGNKGNFFEPTVLANVPVTAKIMNDEPFGPVAIINRFSSFDDAITEANRLPFGLASYAFTGSVKTAHALGQQVEAGMLTINHNGLALPEVPFGGIKDSGYGTEGGSEAVQAYLETKFVSQMS

SEQ ID NO: 6094 - protein, 225 aa, Populus tomentosa
MAREKIKIKKIDNVTARQVTFSKRRRGLFKKAEELSVLCDAEVAVIIFSATGKLFEYSSSSMKGVLARYNLHSNNLDKINQPSLELQLENSNHMRLSKEVSEKSHQLRRMRGEDLQGLNIEELQQLEKALEVGLSRVLETKGERIMNEISTLERKGVQLLEENKQLKQKIATITRGKRPALVDLDTAVQEEGMSSESTTNVCSCSSGPPVEDDSSDTSLKLGLAI

SEQ ID NO: 6095 - protein, 502 aa, Arabidopsis thaliana
MVLSHAVSESDVSVHSTFASRYVRTSLPRFKMPENSIPKEAAYQIINDELMLDGNPRLNLASFVTTWMEPECDKLIMSSINKNYVDMDEYPVTTELQNRCVNMIAHLFNAPLEEAETAVGVGTVGSSEAIMLAGLAFKRKWQNKRKAEGKPVDKPNIVTGANVQVCWEKFARYFEVELKEVKLSEGYYVMDPQQAVDMVDENTICVADILGSTLNGEFEDVKLLNDLLVEKNKETGWDTPIHVDAASGGFIAPFLYPELEWDFRLPLVKSINVSGHKYGLVYAGIGWVIWRNKEDLPEELIFHINYLGADQPTFTLNFSKGSSQVIAQYYQLIRLGHEGYRNVMENCRENMIVLREGLEKTERFNIVSKDEGVPLVAFSLKDSSCHTEFEISDMLRRYGWIVPAYTMPPNAQHITVLRVVIREDFSRTLAERLVIDIEKVMRELDELPSRVIHKISLGQEKSESNSDNLMVTVKKSDIDKQRDIITGWKKFVADRKKTSGIC

SEQ ID NO: 6096 - protein, 93 aa, Triticum aestivum
  unsure (1)..(93): unsure at all Xaa locations
MSDTDEHHFESKADSGASKTYPQQAGAIRKGGTHRHQGXPCKVVEXPLPKTGKHXHAKCHFCCNLILWELGTFLSMPKAKFQLIYKPIISPSN

SEQ ID NO: 6097 - protein, 486 aa, Candida albicans SC5314
MTKKYSSTDLKSSKLLHRDLNSPPIVIDHANGNNLFTQDHHQLFDSVGGAAVISVGHNNKEVIDAITTQLQKVSYLHTGEFTVPIAEELAHELINNLDSSSGYSGGDVDPSKKIAKVYFANSGSEANEAAIKLVMQYFYEQGKHTKTQFISRHQSYHGNCLGGMSLSGHIARRKPYESIIDQSRFHKVDPCYEFRYKQSNDESNESSDQYVKRLLEQLENKILQIGPENVAAFFAETIVGATTGCVPATPGYFKGVREICDKYDILLVLDEIMCGSGRTGTFFAWQQEQEGEEQGGKSIIPDITTCGKAITSGYCPLSCVFFNKKILDVLSNGSSCFNCGHTYQSFPIACAAAHAVQKIIKRDNLLDNVVKMGVILQELLMMKIDPLEIVANIRGRGLFWGIEFCKNKSTLEPFNPSCNVSIKIGEYTKRNGVVVYPGKGTIDGIKGDHILIAPSFTITKEEIEFIVDIVAKSIKEFIANEVDLFK

SEQ ID NO: 6098 - protein, 191 aa, Candida albicans SC5314
MQTIKCVVVGDGAVGKTCLLISYTTSKFPADYVPTVFDNYAVTVMIGDEPFTLGLFDTAGQEDYDRLRPLSYPSTDVFLVCFSVISPASFENVKEKWFPEVHHHCPGVPIIIVGTQTDLRNDDVILQRLHRQKLSPITQEQGEKLAKELRAVKYVECSALTQRGLKTVFDEAIVAALEPPVIKKSKKCTIL

SEQ ID NO: 6099 - protein, 329 aa, Brassica napus
MSNVTADPTTDGPSTAVAVSGSAAIQASPPTDRPVRVYADGIYDLFHFGHARSLEQAKKSFPNTYLLVGCCNDETTHKYKGRTVMTAEERYESLRHCKWVDEVIPDAPWVINQEFLDNHRIDYVAHDSLPYADTSGAGKDVYEFVKKVGRFKETMRTEGISTSDIIMRIVKDYNQYVMRNLDRGYSREDLGVSFVKEKRLRVNMRLKKLQERVKEQQEKVGEKIQTVKMLRNEWVENADRWVAGFLEIFEEGCHKMGTAIRDSIQERLIRQIPRKKLENGEDDDTDDQFYEEYFDHDMGSDEDEDERYYDEEEDVEEEKSVKKDAQDNK

SEQ ID NO: 6100 - protein, 178 aa, Glycine max
  unsure (1)..(178): unsure at all Xaa locations
MASSMISSPAVTTVNRAGAGMVAPFTGLKSMAGFPTRKTNNDITSIASNGGRVQCMQVWPPIGKKKFETLSYLPDLDDAQLAKEVEYLLRKGWIPCLEFELEHGFVYREHNRSPXYYDGRYWTMWKLPMFGCTDASQVLKELQEAKTAYPNGFIRIIGFDNVRQVQCISFIAYKPPGF

SEQ ID NO: 6101 - protein, 123 aa, Zea mays
MAGCCVFLRWPSASPSRIGYRSLVDAAADDAAPPSTVTVVVGKERRAFAVDRLVLDSYPLRLLLETAARREERRAGGGAGAIFVDVDAILFEHILWLACDARSVSQILHLDLKEIIDFYAQDA

SEQ ID NO: 6102 - protein, 188 aa, Triticum aestivum
  unsure (1)..(188): unsure at all Xaa locations
IVAHAPPRGGLVGTPGGSFQGVKSTAGLPXSRRYKGGSLGSVSNGGRIRCMQVWPIEGIKKFETLFYLPPLSTEALLKQVDYLIRSKWVPCLEFSKVGFIFREHNAFPGYYDGRYWTMWKLPMFGCTDATQVINEVEEVKKEYPDAYVRIIGFDNMPQVQWVSFIAFKPPGCAPPPPGLNRSLTTGHI

SEQ ID NO: 6103 - protein, 156 aa, Methylococcus capsulatus str. Bath
MALIITSEAFPPNGEIPRKYTCDGGDVSPPLTWSGLPPGTRSLALIVDDPDAPDPRAPRMTWVHWVLYNLPPEAPGLPEAVQALPAGTLQGLNDWKRTGYGGPCPPIGRHRYFHKLYALDTVLPDLHRPDKAKLEQAMTGHVLGQAELIGIYQRAR

SEQ ID NO: 6104 - protein, 470 aa, Mycobacterium tuberculosis H37Rv
MQGQLSRTRVYTVPVPGSAQSAYACGVERLLASYRSIPATASIRLAKPTSNLFRARVKHDARGLDASGLTGVIGIDPEARTADVAGMCTYEDLIAATLHYGLSPLVVPQLRTITLGGAVTGLGIESASFRNGLPHESVLEMDILTGAGELLTVSPGQHSDLYRAFPNSYGTLGYSTRLRIQLEPVRPFVALRHIRFSSLTAMVAAMERIIDTGGLDGESVDYLDGVVFSADESYLCIGMQTSVPGPVSDYTGQDIYYRSIQHEAGIKEDRLTIHDYFWRWDTDWFWCSRSFGAQNPRLRRWWPRRYRRSSVYWRLMALDQRFGIADRFENSRGRPARERVVQDIEVPIERTCEFLEWFGENVPISPIWLCPLRLRDHAGWPLYPIRPDRSYVNIGFWSSVPVGATEGATNRKIENKVSALDGHKSLYSDSFYTREEFDELYGGETYNTVKKAYDPDSRLLDLYAKAVQRR

SEQ ID NO: 6105 - protein, 291 aa, Zea mays
MPMYSKSELIHVPPPPCSRPRYVMAPPLVFTSIGASMNAAVRDVWASNFDEELSNLSAVLPRYPCVCVDTEFPGAVHDSNLPRYMRGPRESYELVKRNVDDLKLLQVGIALSGPAGRFPIAWQFNIRGFDPALHPHAPASIAMLREQGMDFAMLNEFGIDPEDFAAGFRRSGLACGWLTWTAFSGSYDFGYLAKALTGGQPLPDTLDGFLALVRRLFGHSVFDVKHLARCCALRGGLEQVATALGVKRAAGRAHCAGSDSLLTTDVLLLMMDRFFRNVDVLAHAGTIVDLT

SEQ ID NO: 6106 - protein, 367 aa, Nicotiana tabacum
MVFPLDTQLLNPIFDGLFCEEDRFLDDDDLGEWSCTLEQVENNVKKTLPLLECDMFWEDDQLVTLLAKEKESHLGFDCLISDGDGLLVEVRKEALDWMLRVIAHYGFTAMTAVLAVNYFDRFVSGLCFQKDKPWMSQLAAVACLSIAAKVEETQVPLLLDLQVADSRFVFEAKTIQRMELLVLSTLKWKMNPVTPLSFIDHIMRRFGFMSNLHLDFLRRCERLILGIITDSRLLYYSPSVIATAVMFFVINEIEPCNAMEYQNQLMSVLKVKQDSFEECHDLILELMGTPGYNICQSLKRKHQSVPGSPSGVIDAYFSCDSSNDSWSVASSISSSPEPQYKRMKTQDQTMTLAPLSSVSVVVGSSPR

SEQ ID NO: 6107 - protein, 397 aa, Agrobacterium tumefaciens str. C58
MAGRKTGLPQNPAISGLRWRKPFWHGHCTFSGIKCHRGENMRALRFHAAKDLRIEDIAEPKRPGPGQVLVRNRFVGICGTDLHEYSYGPIFIPTEPHPFTGAHGPQILGHEFGGVVEAIGDGVTSVNVGDRVSIQPLIMPRSGDYFADRGLFHLSTQLALVGLSWDGGGMAEAALVNEYNVQKIPDEMTDEEAALVEPSAVAVYACDRGGVTAGNSVLVTGAGPIGMLTLLAARAAGATQLFVSDLNDARLELARNVIRDVITINPKRDNVGDVVRSATEGKVGCDVAIECVGNEHALKACVDAVRKQGVVVQTGLHPHENPIDWFQVTFRDLEIKGSWAYPTHYWPRVIRLIASGLLPATKIVTKRITLDTAVTEGFDALLDPAGTHLKILIDLSK

SEQ ID NO: 6108 - protein, 362 aa, Triticum aestivum
  unsure (1)..(362): unsure at all Xaa locations
MGAGDKTAAGMPRIGMGTAVQGPKADPIRRAVLRAIQIGYRHFDTAAHYETEAPIGEAAAEAVRSGAVASRDELFITSKLWCSDAHRDRVVPALRQTLRNLQMEYVDLYLVHWRPGVPETTSLSPPSSGAAMRTATGSSPPSGRRSGISRWSTWNLYLVHXPVSMKPGRFKAPFTAEDFVPFDMRAVWEAMEECHRLGLAKAIGVANFSCKKLETLLSFATIPPTVNQVEVNPVWQQRKLREFCRGKGIQLCTYSPLGAKGTHWGSDAVMDAGVLQEIAASRGKSVAQVCLRWVYEQGDCLIVKSFDEARMRENLDVDGWELTEEEHRRIAEIPQRKINLGKRYVSEHGPYKSLEELWDGEI

SEQ ID NO: 6109 - protein, 296 aa, Saccharomyces cerevisiae
MITTPLVHVASVEKGRSYEDFQKVYNAIALKLREDDEYDNYIGYGPVLVRLAWHISGTWDKHDNTGGSYGGTYRFKKEFNDPSNAGLQNGFKFLEPIHKEFPWISSGDLFSLGGVTAVQEMQGPKIPWRAGRVDTPEDTTPDNGRLPDADKDAGYVRTFFQRLNMNDREVVALMGAHALGKTHLKNSGYEGPWGCANNVFTNEFYLNLLNEDWKLEKNDANNEQWDSKSGYMMLPTDYSLIQDPKYLSIVKEYANDQDKFFKDFSKAFEKLLENGITFPKDAPSPFIFKTLEEQGL

SEQ ID NO: 6110 - protein, 195 aa, Triticum aestivum
  unsure (1)..(195): unsure at all Xaa locations
MAPTVMASSATSVAPFQGLKSTAGLPVSRRSNGASLGSVSNGGRIRCMQVWPIEGIKKFETLSYLPPLXSTEALLKQVDYLXIRSKWXVPCLEFSKVGFIFREHNAXPLGYYDGRYWXTMWKAAYVRVATDATQVINEVGKGQERSTLTRYVRIIGFDNMRQGAVPSSFNRLQGNRAAKESRQRTKTSSLTTGHI

SEQ ID NO: 6111 - protein, 496 aa, Arabidopsis thaliana
MSGAITCSAADLSALLGPNATAAADYICGQLGSVNNKFTDAAYAIDNTYLLFSAYLVFAMQLGFAMLCAGSVRAKNTMNIMLTNVLDAAAGGLFYYLFGYAFAFGESSDGFIGRHNFGLQNFPTLTSDYSFFLYQWAFAIAAAGITSGSIAERTKFVAYLIYSSFLTGFVYPVVSHWFWSPDGWASPFRSEDRLFGTGAIDFAGSGVVHMVGGIAGLWGALIEGPRIGRFPDGGHAIALRGHSASLVVLGTFLLWFGWYGFNPGSFTKILIPYNSGSNYGQWSGIGRTAVTTTLSGCTAALTTLFGKRLLSGHWNVTDVCNGLLGGFAAITAGCSVVDPWAAIVCGFVASLVLIGCNKLAELLKYDDPLEAAQLHGGCGAWGLIFVGLFAKEKYINEVYGASPGRHYGLFMGGGGKLLGAQLVQIIVIVGWVSATMGTLFFILKKLNLLRISEQHEMRGMDLAGHGGFAYIYHDNDDDSIGVPGSPVPRAPNPPAV

SEQ ID NO: 6112 - protein, 498 aa, Arabidopsis thaliana
MSGAITCSAADLATLLGPNATAAADYICGQLGTVNNKFTDAAFAIDNTYLLFSAYLVFAMQLGFAMLCAGSVRAKNTMNIMLTNVLDAAAGGLFYYLFGYAFAFGGSSEGFIGRHNFALRDFPTPTADYSFFLYQWAFAIAAAGITSGSIAERTQFVAYLIYSSFLTGFVYPVVSHWFWSPDGWASPFRSADDRLFSTGAIDFAGSGVVHMVGGIAGLWGALIEGPRRGRFEKGGRAIALRGHSASLVVLGTFLLWFGWYGFNPGSFTKILVPYNSGSNYGQWSGIGRTAVNTTLSGCTAALTTLFGKRLLSGHWNVTDVCNGLLGGFAAITAGCSVVEPWAAIVCGFMASVVLIGCNKLAELVQYDDPLEAAQLHGGCGAWGLIFVGLFAKEKYLNEVYGATPGRPYGLFMGGGGKLLGAQLVQILVIVGWVSATMGTLFFILKRLNLLRISEQHEMQGMDMTRHGGFAYIYHDNDDESHRVDPGSPFPRSATPPRV

SEQ ID NO: 6113 - protein, 270 aa, Zea mays
  unsure (1)..(270): unsure at all Xaa locations
FATASITKGGPREPWHDIHSRLEGPIAWDVLYNFEQRWRKQGGKDLLVQLRDLSDIIIPPSPVMFPEDRDTWNVQLFRSIDGGAAFGFPDTPEEAARAGLVSGKDQIIDRSIQDAYINAIRRAKDFIYIENQYFLGSSYCWKPEGIKPEEIGALHVIPKELSLKIVSKIEAGERFTVYVVVPMWPEGMPESASVQAILDWQRRTMEMMYTDITQALEAKGIEANPKEYLTFFCLXNREVKQDGEYEPQEQPELNTDYVRAQERLGRFMIY

SEQ ID NO: 6114 - protein, 280 aa, Zea mays
  unsure (1)..(280): unsure at all Xaa locations
MATANGSSKGSFEVPKVEVRFTKLFIDGKFVDAVSGKTFETRDPRTGEVIASIAEGGKADVDLAVKAAREAFDNGPWPRMTGYERGRILHRFADLIDEHVEELAALDTVDAGKLFAVGKARDIPGAAHLLRYYAGAADKVHGATLKMAQRMHGYTLKEPVGVVGHIVPWNYPTTMFFFKVGPALAAGCAVVVKPAEQTPLSALFYAHLAREAGVPAGVLNVVPGFGPTAGAAVAAHMDVDKVSFTGSTEVGRLDMRAAAESNLQPVSLELGXGKTPEIVF

SEQ ID NO: 6115 - protein, 230 aa, Dechloromonas aromatica RCB
MNTNFEIANQGSSGLALQQNRVLRNTYMLLGLSMVPTVIGALVGIQMGFSFLAGSPLMSFLLFMGIAMGFMWGIEKNKDSGLGVALLLGFTFFMGLMLSRILQVALGFSNGGSMIAMAAGGTGAVFFTMSTVAAVSKRDFTGMGKFLFVGMIVILLAAVANIFFQIPALSLTIAVAVVGIFSAYILYDISRIVQGGETNYVSATLAVYLDVYNVFVSLLQLIMAFTGERD

SEQ ID NO: 6116 - protein, 440 aa, Wolbachia endosymbiont of Drosophila melanogaster
MNDDLDSTTKQEALKYHSRGGNPGKISIMPTKPLSTQYDLSLAYSPGVAAPCLEIAKNPEVVYDYTAKSNCVAVISNGTAVLGLGNIGPLAAKPVMEGKAVLFKRFADIDAVDIEVGTENIEDFINAVRYLGPSWGGINLEDIRSPDCFIIEKRLNELMDIPVFHDDQHGTAVVVAAGIENALDIVEKKLEDVKIIMNGAGAAGIACLEILKSMGAKNIVLCDKQGVIYKGRNEDMNEWKEKYAIDTSERSLLDTIKGADVFIGLSAKDVLNEEMLKSMGKDPIIFALANPDPEVRPEFAKSVRPDAIIATGRSDYNNQVNNVMGFPYIFRGALDVHATTINDEMKIAAADAIAKLAREPVPGEISAVYGSRKMGYGREYIIPTPFDPRLISIVAPAVAKAAVDSGVARKAIQDWSKYENQLKSRLSNVLSTLNLLSSHM

SEQ ID NO: 6117 - protein, 178 aa, Glycine max
  unsure (1)..(178): unsure at all Xaa locations
MASSMISSPAVTTVNRAGAGMVAPFTGLKSMAGFPTRKTNNDITSIASNGGRVQCMQVWPPVGKKKFETLSYLPDLDDAQLAKEVEYLLKKGWIPCLEFELEHGFIYHKHNKSPXYYNRHYXTMWKLPMFGCTDASQVLKELQXANTAYPNSFIHIIRFDNIHQIHCISFITYKLPSF

SEQ ID NO: 6118 - protein, 118 aa, Hordeum vulgare subsp. vulgare
MARAAATQLVLVAMVAAMLLVATDAAISCGQVSSALSPCISYARGNGAKPPVACCSGVKRLAGAAQSTADKQAACRCLKSLATSIKGINMGKVSGVPGKCGVSVPFPISMSTDCNKVH

SEQ ID NO: 6119 - protein, 114 aa, Triticum aestivum
  unsure (1)..(114): unsure at all Xaa locations
MGTSNAKFIYPHNXPXYKGAYCYRMIFESSFPQEFTFRSAILTVPGGPSVACSTAKAVEWDAQWSGNLDPSGRAALGVHLSAYEQEHLPATILTGTSKKPRMIEVAAPGVAIES

SEQ ID NO: 6120 - protein, 447 aa, Methanosarcina mazei Go1
MTEIGIVAVGGYNEMGRNMTAIIIGEDIVILDMGLRLDRVQIHEDVEIDKMHSLELIEMGAIPDDTIMKEINGTVRAIVCTHGHLDHIGAIPKLAHRYNAPILATPYTAAIIRQQIESERKFEVCNRVIPLQAGGTYQVTEDISIEFIRVQHSIIDCVLAAVHTPAGAVLYACDFKLDRTPTMGEAPDFDRFKSLGKEGVIAMITESTNAGRSGKTPSEQIAKDMVRDVLLGTEESGVGMIVTTFASHIARLKAIIEAAEEMGRIPVLMGRSMERYVGAARDIGYLDLPSNVEIYGTRKDVDRAFKRIMQEGKNKYLPIVTGHQGEPGSILVRVANGETPYTIDPGDRIIFSANVIPSPMTQANRYALETKLRMKGGRIYDDVHVSGHAYREDHWELLRMVNPEHVIPAHGDMEMHGHYIEMAEDAGYVLGDTVHLLRNGEVLYIEE

SEQ ID NO: 6121 - protein, 159 aa, Burkholderia cepacia R1808
MSTLYSFSAETLAGEPVSLDAYRGKVLLIVNTASECGFTPQYAGLQKLYDRYAARGFSVLGFPCNQFGKQEPGDATQIGAFCERNYGVTFPMFAKIDVKGDHAHPLYRYLTDEAPGILGLKAIKWNFTKFLIGRDGRIVKRYAPSTKPEEIAADIDKLL

SEQ ID NO: 6122 - protein, 205 aa, Schizosaccharomyces pombe
MSSCFGSKKKPIYRKIVILGDGAAGKTSLLNVFTKGYFPQVYEPTIFENYIHDIFVDGNSIELSLWDTAGQEEYDQLRSLSYSDTHVIMICFAVDSRDSLENVITKWLPEVSSNCPGVKLVLVALKCDLRGADEEQVDHSKIIDYEEGLAAAKKINAVRYLECSAKLNRGVNEAFTEAARVALAAQPRGTKDGADESHGTGCIIA

SEQ ID NO: 6123 - protein, 273 aa, Arabidopsis thaliana
MEGIQHPIPRTVEEVFSDFRGRRAGLIKALSTGQLDLSFSIYSVSFDRILDDFYVQKFYHQCDPEKENLCLYGLPNETWEVNLPVEEVPPELPEPALGINFARDGMQEKDWISLVAVHSDSWLISVAFYFGARFGFGKNERKRLFQMINDLPTIFEVVTGNAKQSKDQSANHNSSRSKSSGGKPRHSESHTKASKMSPPPRKEDESGDEDEDDEQGAVCGACGDNYGGDEFWICCDACEKWFHGKCVKITPAKAEHIKHYKCPSCTTSKKMKA

SEQ ID NO: 6124 - protein, 231 aa, Glycine max
  unsure (1)..(231): unsure at all Xaa locations
MASNDSDSQMKIVHGDAGYILEDVPHFADYIPNLPTYPNPLRSNPAYSVVKQYFVHMDDTVPQKVVVHKDSPRGVHFRRAGPRQKVYFKSDEVHACIVTCGGLCPGLNTVIREIVCGLSYMYGVNKVLGIDGGYRGFYSKNTITLTPKVVNDIHKRGGTILGTSRGGHDTGKIVDSIQDRGINQVYIIGGDGTQRGATVIYEEVRRRGLKVAIAGIPXNHDDTVIDKSFWF

SEQ ID NO: 6125 - protein, 375 aa, Zea mays
MPAASWSAPTTSFAPAPAPPWGPWRTKAAPLPIRTLPRRVLLNAVGESAMVAAGDTLLGLYEKERLGLLQYADDESKEERYWETLDADLRYWTRSLRPVQWYPGHIAKTEKELKEQLRLMDVVIEIRDARIPLSTSHPKMDSWLGNRKRIIVLNRKDMISTEDMNAWATYFGNQGIKVVFSNGQLGMGTMKLGRMAKSVASVANTKRKEKGLLPRPVRAGIVGYPNVGKSSLINRLLKRRMCPAAPRPGVTRELKWVRFGTDLELLDSPGILPMRISDQTSAIKLAICDDIGERSYDFADVAAILVQMLIRHPAVGSEAFRRRYKIDVDSECGKTFVTKLSVHLFNGDTSQAAFRILSDYRKGKFGWVALERPPT

SEQ ID NO: 6126 - protein, 81 aa, Glycine max
  unsure (1)..(81): unsure at all Xaa locations
MSALFNFHSFLTVILLGICACTYFKMQFPAILDQKTGLDGMTYMLSXRFRGFFWKAARIGERLSPWVAAGCFMMGVSIIFF

SEQ ID NO: 6127 - protein, 498 aa, Nostoc sp. PCC 7120
MAINTGKNKLMNRHIRPWQRLLVLAIGSMVFAVFAPTIVQAVDTPTLESLSETTIKLQISIDTTWVLLSGFLVFFMQTGFAMLEAGLVRQRSVVNTLLENFIDAAVTVLAWWAVGFGIAFGTSAGGLFGIDTFFLSQLPGADGSYPLGAPGSTAAINTYTLFFFQFAFAATASTITTGSMAGRTDFIGDLIYSAIMGAISYPIIVHWAWNSNGWLGKLSYHDFAGGSIVHTVGGWTALVGAYLLGPRPDRPPWGKLPPAHNLALATLGTMILWFGWYGFNPGSTLGTANPGLIGLVTINTTLAAGAGALAALIFLYVRTGKWDLVYCLNGSLAGLVAITAPCAYVAPWASVLIGLTGGIAVVLGVSLIESLHIDDPVGAFSVHGISGMMGTLSIGFLGQEELTLNQKAGLLLGGGFDLLGIQMLGIVAITVFTVAFAFLMYGGLKAMGHLRVNAEADRIGIDTYEHGASVWPDVYSVEELSKPQEHTKISENKTLEGE

SEQ ID NO: 6128 - protein, 294 aa, Glycine max
MAHANPMIFVVGILGNLVSFCCFLAPVPTFYRVCKKKTTEGFQSLPYVAALFTSMLWIFYAYIKTGEILLITINAFGCFIETVYLVIYITYCPKKARFFTFKMIFLFNVGVIFLVVLLTHVLAKERTARIELLGWICVVLSTSVFAAPLSIIKVVIRTKSVEFMPITLSLLLTVSAMMWMAYGILLRDIYVTLPNFVGITFGTIQIVLYLIYRKNKPVKDQKLPEHKDDVANDENVNTAVSGENRGANATGFVDIEIGEKKQVQEQADKKQDQQAVNARDQTEHNNNSNKTREG

SEQ ID NO: 6129 - protein, 114 aa, Glycine max
MEGVGARLGRSSTRYGPATVFTGPVRKWKKKWIHVSPSSASSNSNANNHHNHASHASHLLLYKWTPLTHSQNTATTNNANAKDSPPEPPEEPPRRKFKYVPVFKLRFSSSPIII

SEQ ID NO: 6130 - protein, 396 aa, Salmonella enterica subsp. enterica serovar Typhi Ty2
MLDAQTIATVKATIPLLVETGPKLTAHFYDRMFTHNPELKEIFNMSNQRNGDQREALFNAIAAYASNIENLPALLPAVEKIAQKHTSFQIKPEQYNIVGTHLLATLDEMFNPGQEVLDAWGKAYGVLANVFIHREAEIYHENASKDGGWEGTRPFRIVAKTPRSALITSFEFEPVDGGTVAEYRPGQYLGVWLKPEGFAHQEIRQYSLTRKPDGKGYRIAVKREDGGQVSNWLHHHANVGDVVHLAAPAGDFFMNVAADTPVSLISAGVGQTPMLAMLDTLAKEQHTAQVNWFHAAENGDVHAFADEVSELGRTLPRFTAHTWYREPTEADRAQRVFDSEGLMDLSKLEAAISDPAMQFYLCGPVGFMQFAAKQLVSLGVNNENIHYECFGPHKVL

SEQ ID NO: 6131 - protein, 317 aa, Escherichia coli
  unsure (1)..(317): unsure at all Xaa locations
MTDKLTSLRQYTTVVADTGDIAAMKLYQPQDATTNPSLILNAAQIPEYRKLIDDAVAWAKQQSNDRAQQIVDATDKLAVNIGLEILKLVPGRISTEVDARLSYDTEASIAKAKRLIKLYNDAGISNDRILIXLASTWQGIRAAEQLEKEGINCNLTLLFSFAQARACAEAGVFLISPFVGRILDWYKANTDKKEYAPAEDPGVVSVSEIYQYYKEHGYETVVMGASFRNIGEILELAGCDRLTIAPALLKELAESEGAIERKLSYTGEVKARPARITESEFLWQHNQDPMAVDKLAEGIRKFAIDQEKLEKMIGDLL

SEQ ID NO: 6132 - protein, 368 aa, Zea mays
  unsure (1)..(368): unsure at all Xaa locations
MGKGAQGSDAAAAGGEVEENMAAWLVAKNTLKIMPFKRPPVRPYDVRVRMKAVGICGSDVHYLREMRIAHFVVKEPMVIGHECAGVVEEVGAGVTHLSVGDRVALEPGVSCWRCRHCKGGRYNLCEDMKFFATPPVHGSLANQVVHPADLCFKLPDGVSLEEGAMCEPLSVGVHACRRVGVXGPETGVLVVGAGPIGLVSLLAARAFGAPRVVVVDVDDXRLAVARSLGADAAVRVSPRXEDLADEVERIRAAMGSDIDVSLDCAGFSKTMSTALEATRPGGKVCLVGMGHNEMTLPLTAAAAREVXVVGVFRYKDTWPLCIDFLRSGKVDVKPLITHRFGFSQRDVEEAXFEVSARGRDAIKVMFNL

SEQ ID NO: 6133 - protein, 149 aa, Brassica napus
MEEISERVKARLAVISAHLTSADPLESGSPAIERWTTSADINPPPHGSLKGALTVVDERTGKKYQVPVSDDGTVKAVDLKKISMGKEDKGIKLYDPGYLNTAPVRSSISYIDGDEGILRYRGYPIEEMAENSTFLEVAYLLMYGNLPLK

SEQ ID NO: 6134 - protein, 369 aa, Magnaporthe grisea 70-15
MGDQQVYPQPPYPLHDSIKDKLDPEYVEFYNKYLLNAPQVHYQPVAASRVGGKIIPVKAPLAAFPSQNPRTDKLSTQNQGGTDPVPVGKTIDKAIPRQETTGPDVRVRAFVPAGQPPSPSGWPVFLWYHGGGWVLGNIDSENSLCSSICARARCVVVTTDYRLAPEHPFPAAVHDAWEAALWVATGAAAPALGEPLDLAKVAVGGSSAGGNLAAVVTQRALRHEAFARAGLFRFQLLVVPVTDNTASVETSTTYAEYEHTAALPVDKMLWYRRHYLPDRADWASVEASPLFADADTFAKLPPALVVVAGLDVLRWEGEEYARKLRDAGVEAEVKVIEGVPHPFIVMDAVLQKGKEGVDFVCERLAAVLA

SEQ ID NO: 6135 - protein, 355 aa, Halobacterium sp. NRC-1
MTRGEARRPPQEFDRVLSSMCTTPHPAAREAAQAFLATNPGDPETYPAVAERERDAVALLGEIVGLSSPHGYIAAGGTEANLQAVRAARNRADADAVNVVAPASAHFSFQKAADVLGVELRLAPTDGDHRADVAAVADLVDGDTAVVVGVAGTTEYGRVDPIPALADIAAGVDANLHVDAAWGGFVLPFTDHDWSFADAPVNTMAIDPHKMGQAPVPAGGFLARDPETLDALAIETPYLESDTQPTLGGTRSGAGVAGALASLRALWPDGYREQYERTQGNAEYLAAELAARGYDVVDPELPLVAADMPDAEFQALREEGWRISRTASDALRVVCMPHVTREMLAAFLDDVDALA

SEQ ID NO: 6136 - protein, 372 aa, Methanopyrus kandleri AV19
MILQRDSDYSDGTVLGSMCTEPHPVAAEAFVAGLHVNLGDPYLFPNAYRAERECIGWLAETLLDHPAPEEAEGSIVSGGTEANILAAYAAREVTGGREIIVPATRHFSFEKAARMLRMKLVEAPLRSDYTVDVDAVQDLISRDTALIVGIVGTTETGSVDDIEALSDVAEDHGVPLHVDAAFGGFTAPFLREEYPLPRFGFDLEAVVSVTVDPHKMGLVPPPAGGIVFRDDEFPKAIEVYAPYLSGGGASQYTITGTRPGAPVLALYANILELGEEGYRRIAFRCYEETLKVAEKARELGLELAVDPPHLNLVNIRLPDRGTAERLLRESEREGWKISVSTKPLGVRIVMMPHLDAETVSRFLELVARVLGG

SEQ ID NO: 6137 - protein, 506 aa, Pseudomonas putida KT2440
MRYAHPGTEGAKVSFKSRYGNYIGGEFVTPVKGQYFENTSPVNGKLIAEFPRSTAEDIDKALDAAHAAADAWGRTSVQDRSNVLLKIADRIEQNLELLAITETWDNGKPIRETLNADIPLAVDHFRYFAGCIRAQEGGAAEINEGTVAYHIHEPLGVVGQIIPWNFPILMAAWKLAPALAAGNCVVLKPAEQTPLGITVLLEVIGDLLPPGVLNVVQGYGREAGEALATSKRIAKIAFTGSTPVGSHIMKCAAENIIPSTVELGGKSPNVYFEDIMQAEPSFIEKAAEGMVLAFFNQGEVCTCPSRALVQESIYPQFMEVVMKKVLQIKRGDPLDTDTMVGAQASQQQFEKILSYLQIAQEEGAELLTGGKVEKLEGSLATGYYIQPTLLKGNNKMRVFQEEIFGPVVSVTTFKDEAEALAIANDTEFGLGAGVWTRDINRAYRMGRGIKAGRVWTNCYHLYPAHAAFGGYKKSGVGRETHKMMLDHYQQTKNLLVSYDINPLGFF

SEQ ID NO: 6138 - protein, 108 aa, Glycine max
  unsure (1)..(108): unsure at all Xaa locations
AASMISSPAVTTVNRAGAGMVAPFAGLKSMGGFPTIKTNSDVAFIASYGGRVQFKLVWPPVGNKMFYTLFFLPYLYDAQLAKEVXFLHRKGWITWLEFEWEHGFLCRE

SEQ ID NO: 6139 - protein, 244 aa, Glycine max
  unsure (1)..(244): unsure at all Xaa locations
MTSASELFHSRRHRLGRSALDLGLDTELNAADSLRRHYHLRRLRHHPERASDRIDGRYRRSFASESVDSXEENVRSSLRGSDSERLPVGVSCRLLQRLRGEPLSTNFLRQYDRDSFGEDPESESSNEDPSGASLVTELTSQMARSQFLQELSTKPPGLTQEALDCLHQEVFSSNASEIGLDSRVLQDCSICLESFTDGDELIRLPCGHKFHSVCLDPWIRCCGDCPYCRRCIVVNTHSSLNEDE

SEQ ID NO: 6140 - protein, 170 aa, Campylobacter jejuni
MINSPYIIWLTGLAGSGKTTIGQALYEKLKLKYKNLIYLDGDELREILGHYAYDRQGRIDMALKRAKFAKFLNNQGMIVIVTTISMFNEIYDYNRKQLKNYYEIYIECDMHELMQRDQKGLYTKALNKEIDNVVGVDIEFDKPEADLVINNSCRNNLEEKVEFIIKKLAL

SEQ ID NO: 6141 - protein, 263 aa, Oryza sativa (japonica cultivar-group)
MVFKKNAMSSSVLFLAALLLLSSSSMSSAARWLEEEYPPHPTVPELPKPEVPPHPAVPELPKHEEPPHPVVPELPKHEEPPHPVVPELPKPELPPHPVVPELPKHEEPPHPAVVPELPKHEEPPHPAVVPEFPKHEEPPHPAVPELPHPAVPEIPHPAVPELPKHEEPPHPVVPELPKPEVPHAAVPELPKPELPPHPAVPELPKHEEPPHPVVPELPKHEEPPHPVVPELPKPEEPHHPEVPEHEQPPKPESHYPEVPMAKP

SEQ ID NO: 6142 - protein, 227 aa, Zea mays
  unsure (1)..(227): unsure at all Xaa locations
VDPRVREHQPNGPVTPVDMVVDFYKFDYEFGEPPRVTSLHNTVPVATFNDFCDDVYFVADQRGYEAVVYYLAGQYLKTDDKSGKIVDPRLQLNKVVREIKYSPGGVTVKTESDLIQFKPKLPTWKVRAIYQFDMAVYTKILLKFPRKFWPEGKGREFFLYASSRRSYYGVWQEFEKQYPDANVLLVTVTDEESRRIEQQSDEQTKAEIMXVLRKMFPGIDXPDATDI

SEQ ID NO: 6143 - protein, 539 aa, Zea mays
  unsure (1)..(539): unsure at all Xaa locations
MGNCCVTPKAADDAGGGKKPKEPKQKKGKKPNPFSIEYNRSGPXSAPKLVVLRDPTGRDIAARYELGAELGRGEFGVTYLCTDRASGEALACKSISKKKLRTAVDLEDVRREVEIMRHLPKHPNVVTLRDTYEDDNAVHLVMELCEGGELFDRIVARGHYTERAAALVLRTIVEVVQMCHKHGVMHRDLKPENFLFANKKESAALKAIDFGLSVFFTPGERFSEIVGSPYYMAPEVLKRNYGPEVDVWSAGVILYILLCGVPPFWAETEQGVAQAIIRSVIDFKRDPWPRVSDNAKDLVRGMLNPDPKRRLTAHQVLGHPWLQNIKKAPNVNLGETVKARLQQFSVMNKFKKHALRVIAEHLSVEEAADIKDMFEKMDLNKDQMLSFEELKLGLHKFGHQMPDADVQTLMEAADADGNGSLNYGEFVTLFVHLRKIGNDEHLHKAFAYFDRNQSGYIEIDELRESLADDLGQNREEIINAIIRDVDTDKDGKISYDEFATMMKAGTDWRKASRQYSRERFTSLSLKLQKDGSLQMTSTR

SEQ ID NO: 6144 - protein, 193 aa, Betula pendula
LGSGYSLEVVCLSCGQAVKFVCDRRSVKHPVICSESGRAIVSHHSVLIFEAVSASAYGSQALSTSSFQHFVEGLSDEALADIGNLNAAAIKGEHETCLLYADQLKQRCVDQFKDGSLGMEQLAAVDGLCDMVSKAIGTTDPVRTYHVNLSVFTSIPDFWGIGQLFPIVPIHRHDQRPSVKGILSDLTQSTPAR

SEQ ID NO: 6145 - protein, 369 aa, Thermosynechococcus elongatus BP-1
MSSSRKRLGVFTSGGDCPGLNTAIRAIVAHATLSYGWEVLGILHATQGLIERKAIPLNAEGLGGMDVLLNMGGTILGAINKGDTLGHADEVIAGYYELGLDALIAICGDGSLRILHQLAQKGNWNFLAIPKTIDNDVALTDRAIGFDTAVNTVVEALNRITSTAASHDRVFVVEVMGRTAGHLALYSGIAGGADIILIPEIPYSIEGICQHLQKLRDRWGRQFALIVVAEGSKQLEEDANHPRHCSIGQYIADKIAQHSPIPIELRVSVLGHIQRGGAPMAMDRLLAAGMGNTAVDLAAQGTFGRMVAWQAGQVVTVPIADVVAKCPRHVDPNSFLIRTAQGLGIYVGDKPMLPYVDPTLCRDQVICAI

SEQ ID NO: 6146 - protein, 450 aa, Zea mays
MRGSMSNYYDDYDDIDEIEDDYDMDDPADDMVDEQRGVRDSDAEDNDYGQPNDKIPDTSSADARNGRDIQGIPWEQLNITRKKYRQSRLEQYKNYENVPNSGEEAMKDCKPTEKGGMYYEFRRNTRSIKSTILHFQLRNLVWATSKHDIYLVSHYSIRHWSALSGVDTELINVQGHVAPREKHAGSLSEGFYQTQVSTLAVKDNLLVAGGFQGELICKHLDQEGISFCCRTTYDDNAITNAVEIFNTSSGAVHFMASNNDSGVRYYDMERFQLFKHFQFEWPVNHASLSPDRKVVVIVGDDPDGLLIDANSGKTVHSIKGHRDYSFASAWSPDGRTFATGNQDKTCRIWDVRNLSKSVHVLRGNLGAIRSIRFTSDGQFMSMAEPADFVHIYDVKSDYNKRQELDFFGEISGTSFSPDTDTLFVGVWDRMYGSLLQFGRLYNYSYLDSLF

SEQ ID NO: 6147 - protein, 112 aa, Bartonella sp. Bi3726tl
ANEACLQMLQEIGSIKRIPKFIARAKDKNDPFRLIGFGHRVYKNYDPRAKIMQKTCHEVLKELNIQDDPLLDIAIELEKIALSDEYFIEKKLYPNVDFYSGIILKALGFPTE

SEQ ID NO: 6148 - protein, 112 aa, Bartonella sp. Rr4252tl
ANEACLKMLQEIGSIKRIPKFIARAKDKNDPFRLIGFGHRVYKNYDPRAKIMQKTCHEVLKELNIQDDPLLDIAIELEKIALSDEYFIEKKLYPNVDFYSGIILKALGFPTE

SEQ ID NO: 6149 - protein, 247 aa, Zea mays
MAMAYKMATEGMNVKEECQRWFMEMKWKKVHRFVVYKIDERSRAVLVDKVGGPGEGYEELVAALPGDDCRYAVFDFDFVSVDTCQKSKIFFIAWSPAASRIRAKILYATSKQGLRRLLDGVHYEVQATDPSEMGYRRHQRPRAMRPALRSAPIYVLTCAWACSPTTHCSVVICVRVCVCVCDRPDANWRWCAPVAIDAANLTRLRVCLLCYFRFSGEMVQAWCVDVDGWSRSSGEWQRTNETSTSAT

SEQ ID NO: 6150 - protein, 198 aa, Zea mays
TPIGRLGPSRPAVMLAQPHGSSSLKDVQVAFSNADHKDSSSKVEQPADSSLKPASLNAFDIISHSRGFDLSSLFEVDQEQKASNSRFMTQKPASAIVSKLEQIAETERFMVKKQDGLVKLQGSKQGRKGQLAIDAEIFEVTPAFHVVEVKKSAGDTLEYEMFCSKGLRPSLSDICWSSRSEENMAPSVVQPSQLEPST

SEQ ID NO: 6151 - protein, 105 aa, Bartonella sp. Bi4271tl
ANEACLKMLQEIGSIKRIPKFIARAKDKNDPFRLIGFGHRVYKNYDPRAKIMQKTCHEVLKELNIQDDPLLDIAIELEKIALSDEYFIEKKLYPNVDFYSGIILK

SEQ ID NO: 6152 - protein, 280 aa, Glycine max
MGSHNALAATFGILGNIISVMVYLAPVPTFYRIYKKKCTDGFHSLPYLLSLMSSMLWLYYAFLKIHDGVVPLITINSIGCVIELIYILTYIKYAHKDARNLTYTLFAAMNIGFLALVLSSRFALNGSHRVKVIGWICDAVSLSVFASPLSIMAKVIRTKSVQFMPFYLSFFLTLNAITWFVYGLSMQDKCIYIPNVGGFALGLVQMVLYGIYRKGSESEKEQGLGEGVINIVVVNPLGPAEVFPIAVDDNKVKDLVVVDDVTVSQQEKEKNVEAKDDCPV

SEQ ID NO: 6153 - protein, 371 aa, Malus x domestica
MGKGGMSDGDHADRCYGEAINGDVQQENMAAWLLGVKNLKIQPYKLPNLGPHDVRVRLKAVGICGSDVHHFKNMRCVDFIVKEPMVIGHECAGIIEEVGSEVEDLVPGDRVALEPGISCKRCNLCKQGRYNLCRKMKFFGSPPNNGCLANQVVHPGDLCFKLPDNVSLEEGAMCEPLSVGIHACRRANVCQETNALVVGAGPIGLVTLLAARAFGAPRIVIADVNDERLLIAKSLGADEVVKVSTNIEDVAEEVAKIQKVLENGVDVTFDCAGFNKTITTALSATRPGGKVCLVGMGQREMTLPLATREIDVIGIFRYQNTWPLCLEFLRSGKIDVKPLITHRFGFSQKEVEEAFETSARGGNAIKVMFNL

SEQ ID NO: 6154 - protein, 477 aa, Candida albicans SC5314
MSTDHHSHPVEGHQFKKIFNRLSGQPESYSRKQNYTFGKTLGAGSFGIVRYARDNSTDEEVAVKIILKKALKGNESMIIDEMQLLEQLNNPHIVGFRDWFESKDKFYLVTQLATGGELFDRIVQKGRFTEHDASLVVLQMLEALEYLHNKDIVHRDIKPENILYLTSKDDSPIVLADFGIAKRLQNPNEKLTSSAGSFGYAAPEVILGTGHGKPCDIWSLGVVTYTLLCGYSPFRSENVQDFINEVKHNNAVIFHADYWKDVSKDARRFIIKALQFNPDNRPTATELLNDPWLVSIAKEYKETDLLPNFKQGFDAKKKFRQAIELVKLNNRIKKLKEWQTDEDDDPTEINLFNEHGSVEQRANPSTNDGLTIPGTTSPRRGESPLNTWKKFNDVINSLDTNRSKASLSSFKSPYDLAHSNRGTDVSNSGATNVGKSDTASSAFVQLVHAATANKEKVANYTEDEEGKEKKQKDGDKN

SEQ ID NO: 6155 - protein, 321 aa, Thermoanaerobacter tengcongensis MB4
MKTIGILTSGGDAPGMNAAIRAVVRTGIYYGLKVKGIMRGFAGLVEDEVIDLGLSSVGDIIQKGGTILRTARCEEFKQKEVRKKAYETLQKHGIEGLVVIGGDGSFRGAQLLSEEWNVNTICIPGTIDNDIPCTDYTIGFDTACNTVIDAINKIRDTATSHERANIIEVMGRNSGYIALYAGVAGGAEMIILPEVEWSIDELCDKITYGIKRGKLHHIIVLAEGVMSAPELAKMIKERLPKLDLRYTILGHIQRGGAPTVMDRVLASQMGARAVELLLENKTKRVISIRNNQIVDDDIDEALSMKKEFNRKLYELSKILSI

SEQ ID NO: 6156 - protein, 219 aa, Lilium longiflorum
VEQFSPVPYLATLLNCMLWVVYGLPLVHPHSTLVLTINGLGLIIELTYVLLFLLYSNGRARIRVLAMLLTEIVFVGLITVIVLSTAHTLVTRSLIIGVLCVFFGTMMYAAPLSVMKLVIQTKSVEYMPLFLSVASFLNGICWTTYALIRFDLFITIPNALGTMFAVAQLILHAMYYKSTKIQMEAQKRKLEMGFEEVMAPVENTEKIRGASQTGKYPPV

SEQ ID NO: 6157 - protein, 427 aa, Streptomyces avermitilis MA-4680
MAEARTTAAEELTRRWAFDPRWQGIERTYGAADVVRLSASVREEHTLARRGAERLWRQLHELDYVHALGALTGGQAVQQVKAGLQAIYLSGWQVAADANQAGHTYPDQSLYPANSVPQVVRRINNALLRADQIATAEGGEDTTDWLAPIVADAEAGFGGPLNAFELTKAMIAAGAAGIHYEDQLASEKKCGHLGGKVLVPTSQHIRTLNAARLAADIADVPTVIIARTDALAANLLTSDVDERDAEFVTGERTAEGFYRVRGGMAPVIARGLAYAPYADLIWVETGTPDLAQAREFAEAIHAEYPDRMLAYNCSPSFNWKAALDDDQIAKFQRELGAMGYRFQFITLAGFHSLNHGMFDLARGYAEHGMTAYVDLQEREFAAQEHGFTAVRHQREVGTGYFDLVSTAVNPASSTTALAGSTEEEQFH

SEQ ID NO: 6158 - protein, 362 aa, Pseudomonas putida KT2440
MNDLSHTHMRAAVWHGRHDIRVEQVPLPADPAPGWVQIKVDWCGICGSDLHEYVAGPVFIPVEAPHPLTGIQGQCILGHEFCGHIAKLGEGVEGYAVGDPVAADACQHCGTCYYCTHGLYNICERLAFTGLMNNGAFAELVNVPANLLYRLPQGFPAEAGALIEPLAVGMHAVKKAGSLLGQTVVVVGAGTIGLCTIMCAKAAGAAQVIALEMSSARKAKAKEAGANVVLDPSQCDALAEIRALTAGLGADVSFECIGNKHTAKLAIDTIRKAGKCVLVGIFEEPSEFNFFELVSTEKQVLGALAYNGEFADVIAFIADGRLDIRPLVTGRIGLEQIVELGFEELVNNKEENVKIIVSPGVR

SEQ ID NO: 6159 - protein, 467 aa, Arabidopsis thaliana
MAEAKIEEIGCEDRISVLPEDLLVVILDLLPTKDVVATMILSKRWLSIWTMVRTLEYTDDMDDESKKSVWWFLNKSLQLHKAPVIDSLCMELGPQCPTTDDVDIGKWVAKAVDCLVMTLTIKLLWSAGPTSLPKSLYSCTSLSELTLSDQILVNVPSSAYLPSLTELELICVVYKDEDSLVSFLSSCPVLEFLFVLRKIDDNVKTFTVKVPSLLELTYKNLCSDVVDNTDRCLVVNAPAVNTCQITDYSLESFSIEDMPCLQDATIDVDEAYHPDDKFLTSFSSVLSLRMHLSDAMVSSSLISSHCNSIAASNYLLKLCLFSFQVMRCTTINFSRLIKLSIYPYGPDMLETLLRLLGNAPKLKEFLVDYPSLIASQKFVYNPEDLPWSWKQPSHVPECLSSQLEIFEWRDYGDRIIEEEFLTYVLANSKRLKTATISLRLNLEDPELIIEEIKDLPRVSTTSHLLFK

SEQ ID NO: 6160 - protein, 133 aa, Oryza sativa (japonica cultivar-group)
MASSHTKPSILLLAAALLLLSCSSIGGAARYLEEAAPAAAAAEEEEHPAHPAVPEIPKPELPELPKVPELPHPVVPELPKPELPKIPEVPHLAVPELPKPEVPEIPKAELPPLPKFELPPKPEFHFPEPEAKP

SEQ ID NO: 6161 - protein, 123 aa, Oryza sativa (japonica cultivar-group)
METDINAPPPPAPAPAGAGEGSSSAAGPSSRKPNKRFEIKKWNAVALWAWDIVVDNCAICRNHIMDLCIECQANQASATSEECTVAWGVCNHAFHFHCISRWLKTRQVCPLDNSEWEFQKYGH

SEQ ID NO: 6162 - protein, 342 aa, Oryza sativa (japonica cultivar-group)
MAARKIAMSTSSLLLLLLAAALLLTGDAARILQEAAWPPYDYPKPDQPPPLLPTPDVVPNPNQPPLQPTPGVPPLPNPDVPPMNKPDVPPMPKPDGPPIPPVQPCPDQPPQPKPDGPPLPNPNQPPQPNPNGPPKPDMPPMPKPDGLPNTYEPSRPDQPPQPISDGPPLPNPNVPPKPDQPPQPIPNGPPKPDMLPMPKPDGSPNSYAPSVPDQSTQPNPNGPSIPNQPPQPIPNGPIKPDQPPQPNPDMPPKPDQPPQPCPDGPPKPDQPPQPNPNGPPKPDQPPQPNPNGPSKPDQPPRPNPDMPPKPDQPPQPEYYEQPPKPDAPQMPPLPNGEIPFSP

SEQ ID NO: 6163 - protein, 512 aa, Escherichia coli O157:H7
MTNNPPSAQIKPGEYGFPLKLKNRYDNFIGGEWVAPADGEYYQNLTPVTGQLLCEVASSGKRDIDLALDAAHKVKDKWAHTSVQDRAAILFKIADRMEQNLELLATAEAWDNGKPIRETSAADVPLAIDHFRYFASCIRAQEGGISEVDSETVAYHFHEPLGVVGQIIPWNFPLLMASWKMAPALAAGNCVVLKPARLTPLSVLLLMEIVGDLLPPGVVNVVNGAGGEIGEYLATSKRIAKVAFTGSTEVGQQIMQYATQNIIPVTLELGGKSPNIFFADVMDEEDAFFDKALEGFALFAFNQGEVCTCPSRALVQESIYERFMERAIRRVESIRSGNPLDSVTQMGAQVSHGQLETILNYIDIGKKEGADVLTGGRRKLLEGELKDGYYLEPTILFGQNNMRVFQEEIFGPVLAVTTFKTMEEALELANDTQYGLGAGVWSRNGNLAYKMGRGIQAGRVWTNCYHAYPAHAAFGGYKQSGIGRETHKMMLEHYQQTKCLLVSYSDKPLGLF

SEQ ID NO: 6164 - protein, 150 aa, Glycine max
  unsure (1)..(150): unsure at all Xaa locations
ISFGLKDIPSSSYDYSYFLYQWAFAFAAAGITSGSMVERXQGVAYLIYCSFLTGFVXEKDSHWFWAPERWAFAFNITDRLFSTGVIDFAGSGEIHMGGGIPGLWGALIESPRMGRFYHPRQAGALGGHTPPLVVLGTFLLWLGWYGSNPG

SEQ ID NO: 6165 - protein, 200 aa, Glycine max
MTFQPVPTLLLLLLLASANSHFALAGKRKVHIPDELDDVFDDEEDDAWREWGKKPEPPFPSSDISKLDPSQIQQEMMKRHAGPVIGFVKLRPGSRRTPDMVAEFAMKWTHVLRTGAVGVRFMGVDLNTIMFNLESIKDLEELKEFVLDQSEAYEIKMGDQFFRRSGDPPLDEVIEKYNSEKAKADNADSEEIDPNVKTEL

SEQ ID NO: 6166 - protein, 539 aa, Glycine max
MASSLRISRLLSRSFLSASTTTPLFSRGGSGALGAGLSKFSTAAAIEEPIKPPLKVEHTQLLIDGKFVDAATGKTFPTLDPRTGDVISHVAEGDHEDVDRAVAAARKAFDRGPWPKMTAYERQRILLRAADLFEKHNDDLAALETWDNGKPYEQSAQIEIPMLVRLFRYYAGWADKIHGLTVPADGPYHVQTLHEPIGVAGQIIPWNFPLVMFAWKVGPALACGNTIVLKTAEQTPLSALYASKLLHEAGLPPGVLNVISGFGPTAGAAIASHMDIDKLAFTGSTETGKVVLELAARSNLKPVTLELGGKSPFIVCEDADVDEAVELAHFALFFNQGQCCCAGSRTFVHERVYDEFIEKAKARALKRAVGDPFKGGIEQGPQIDSEQFQKILKYIRSGVESGATLETGGDRFGNSGFYIQPTVFSNVKDDMLIAKEEIFGPVQSILKFKDLDDVIQRANNTHYGLAAGVFTKNINTANTLTRALRAGTVWVNCFDTFDAAIPFGGYKMSGQGREKGEYSLKNYLQVKAVVTSLKNPAWL

SEQ ID NO: 6167 - protein, 374 aa, Ferroplasma acidarmanus
MAVSLGLEDVFIKYTGLTFIDGNAGVLRYRGYDINDLVQNTGFEEVCYLMTNGELPNSQQLAEFKKSVKEHYKLPDHVMELISDLPREADTLTMMETAFASLSSGDYQWNKENDRKQVPKILGENLGIISNIYRHKMGMGLQNPDPKYDYAEAFLRNCFGNADEKKISAMNAALVIYVDHEVPASTTAALVASSTLSDMYSCITAATAALKGPLHGGAAEAAYKQLLDIGNVDNVENWFKTNILDGKRRLMGFGHRVYRTYDPRMKIFKKLATTLEQTDEQKKLFEIAVKLEELGVKEFGGKGIYPNTDYYSGIVFNEIGFPIYMFTTLFGFSRVLGWLSHITEYVEEEERLIRPRAVYTGPDKRDFVKIQDRK

SEQ ID NO: 6168 - protein, 130 aa, Brassica napus
MAPVSALAKYKLVFLGDQSVGKTSIITRFMYDKFDNTYQATIGIDFLSKTMYLEDRTVRLQLWDTAGQERFRSLIPSYIRDSSVAVIVYDVASRQSFLNTTKWIDEVRTERGSDVIVVLVGNKTDLVDKR

SEQ ID NO: 6169 - protein, 365 aa, Lotus corniculatus var. japonicus
MDFSSSNGSEDTELSQAQIHLYKHVYNFVSSMALKSAMELGIADVIHSHGKPITLPELATALNLRPSKIGVLHRFLRLLTHNGFFAKTTVSRGEGAEEETAYGLTPPSKLLVKSNSTCLAPIVKGALHPSSLDMWRSSKKWFLEDNEELTLFESATGESFWEFLNKETESDTLSMFQEAMAADSHMFKLALKECKHVFEGLGSLVDVAGGRGGVTKLIREAFPHVKCTVFDQPQVVANLTGDENLNFVGGDMFKSVPPADAVLLKWVLHDWNDELSLKILKNCKEAISGRGKEGKVIIIDISIDETSDDRELTELKLDYDLVMLTMFNGKEREKKEWEKLIYDAGFSSYKITPICGFKSLIEVFP

SEQ ID NO: 6170 - protein, 138 aa, Pyrobaculum aerophilum
MVLKWVMSTKYVEAGELKEGSYVVIDGEPCRVVEIEKSKTGKHGSAKARIVAVGVFDGGKRTLSLPVDAQVEVPIIEKFTAQILSVSGDVIQLMDMRDYKTIEVPMKYVEEEAKGRLAPGAEVEVWQILDRYKIIRVK

SEQ ID NO: 6171 - protein, 79 aa, Brassica napus
  unsure (1)..(79): unsure at all Xaa locations
CPKASTPPQEKLIGLDXPAKFEFVKRKLQETSHHXHDKPKKQSPIQVLEPIPKQGSSAAQKPQLKSPGMTNRSWSTGRQ

SEQ ID NO: 6172 - protein, 197 aa, Zea mays
MATSFQGTTTKRTACDKTVYLVDKLTADNRIYHKACFRCHHCKGTLKLANYNSFEGVLYCRPHFDQLFKRTGSLDKSFEGTPKVVKPERNVGNENATKVSSAFAGTREKCVGCSKTVYPTERVTVNNTMYHKSCFKCCHGGCTISPSNYIAHEGKLYCKHHHIQLIKERGTSASLRMTTRRHHRLGHWRRMNMSIDH

SEQ ID NO: 6173 - protein, 456 aa, Bordetella bronchiseptica RB50
MTTLSSAQQQDIQYQLHSYTNAVKHRDVGPRIITHGEGVYVFDDQGNRYLEGMAGLWSVAVGFGEQRLVEAAARQFQELPYYHTFTHKSHPSVIALAERLIGYTDGRMAQAFFTNSGSEANDTVVKLVWYYNNALGRRDKKKIIARQRGYHGVTVASASLTGLPGNHKDFDLPLPQIRHTACPHYYRYGLPGETEEDFATRMAGELEAMILREGPDTVAAFIGEPVMGAGGVIVPPRTYWQKIQAVCRKYDILVIADEVITGFGRLGQRFGSQVFDIEPDIMVLSKQITSSYQPLGAVLLNARVADVVAEHSGRLGTFGHGYTASGHPVATAVALENLRLIDERGLIEHAAEMGALLHLELQALSSHPLVGEVRGVGLIAGVELVADKATRQPFDPLGKAGGYAYERAHDHGLIVRGIQDTVAFCPPLIITAEQVRDMVARFARTLDDVAAHVAQG

SEQ ID NO: 6174 - protein, 454 aa, Xanthomonas campestris pv. campestris str. ATCC 33913
MSYDTVNPANGQVEHTQHTLDAAAIEARLAASAKAFPEWAALPLAERGALLRRVGEELTKRREDLQRIMTAEMGKLRREALAEIDKCAQGCAYYAEHAAEYLAPRAIPTEAQSSYVRYEPLGCVFAVMPWNFPLWQAFRFLAPGLMAGNVALLKHASNVPRCADAMKEVLDAAGIPPGVFDVLHIDNDQAAEVLRDDRIAAVTLTGSERAGRSLAANAGDQLKKCVMELGGSDAFVVLDDADLERTVQSAVQSRFDNSGQTCIAAKRFIVVDAIADQFVERFVAAAAQRVLGDPQQDATTLAPMARADLRDELHKQVQESVSKGAKVLLGGEPVAGSHAGYPATILDQVGPGMPAYEQELFGPVAAVIRVADEAEAVRVANDTTFGLGGSVWTADAKRGERVAQQLQCGAAFVNSVVKSDVRLPFGGIKRSGFGRELAEHGIHEFMNIKTIYVA

SEQ ID NO: 6175 - protein, 311 aa, Bradyrhizobium japonicum USDA 110
MPLDPLAKRLLTMMAAAGPQVRNRPSVEARRQSLAKLMQFARTDAPDVTVSDGTLPGPGGELPYRLYSPATAAERAPGFVFFHGGGLVAGSVATHDRIAAALAHATGCRLVSVDYRLAPEHKFPAAVDDAIAATEWVAREASSLGIDAGRLVVGGDSAGATLAAIVCQEALQNAGLSIVAQCLICPVLDFEETSPSREAFAEGHLIDRITIEADLADYLPGGIDAADPRISPLRATRFAGLPTAIIHTAEFDPMRDEGNAYARKLLAAGVTVEHVCHDGMVHNFHAMGAILPQAQLVLSQIGEQVRRAVEK

SEQ ID NO: 6176 - protein, 458 aa, Streptomyces coelicolor A3(2)
MATSVVLFTRDLRLHDHPPLRAALDRSDAVVPLFVRDRAVDAAGFAAPNRLALLADCLRDLDSGLRDRGGRLVVRSGDLVEEVCAVAGEAEADEVHLAADVSAHAHRREELLRSALSARGCRLHVHDAVTTVLAPGSVTPASSDHFAVFTPYFRRWSERAVREPLAAPRRVRVPDGVGSEPLPARGDLTGLSPGLPTGGERDARKRLTAWLRGGIADYADHHDDLAGDATSRLSPDLHLGALSPVELVHRARRAGGPGAEAFVRQLAWRDFHHQVLAARPHASAADYRTRHDRWRTGAAAEADAAAWRDGRTGYPVVDAAMRQLRHEGWMHNRGRLLVASFLTKTLYVDWRVGAWHFLELLVDGDVANNQLNWQWAAGTGTDTRPHRVLNPTTQARRFDPGGTYVRRWVPELAGLAGRSVHEPWRLARAARAAYDAYPDPIVDLSEGLDRFRRARGRD

SEQ ID NO: 6177 - protein, 500 aa, GIBBERELLA ZEAE PH-1
MSLDIQLTAPNGRTYKQPTGLFINNEWVKSSNGEKITSINPTNEQEITSVYAGSSEDVDKAVRAARRALHNPSWRDLPGTERGKLLSRLATLVEENKEILATIETWDNGKPYTVALNDDVNEVAETLRYYGGFADKVYGQVIETTGDKFGYTIREPIGVCGQIIPWNFPLAMAAWKLGPALACGNAVILKPAEQTPLSILYLANLIVEAGFPPGVVNIINGLGTVAGAALASHMDVDKIAFTGSTPTARSIMKMASSNLKNITLETGGKSPLIVFDDADVDLAAYWAHAGIMYNQGQVCTATSRILVQESIYDKFMAAFGAQVKNISKVGDPFEESTFQGPQVTKAQYERILSFVDVGKKEGAKLALGGQPFKVGDGKGYFVEPTVFTDVTPKMRVFQEEVFGPFVVVTKFSSEDEAIHLANDTQYGLGSALFTTNLTRAHQVAKRIEAGMVWVNSSNDSDWRIPFGGVKQSGIGRELGEAGLAAYSNIKAVHVNIAAKL

SEQ ID NO: 6178 - protein, 126 aa, uncultured marine alpha proteobacterium HOT2C01
MADLQQIVDQLSDLTVIEAAELSKMLEDKWGVSAAAPVAVAAAGAAPSGDAAAAEEKDEFTIVLAAAGDKKINVIKEVRTITGLGLKEAKDLVEGAPKELKTGVSKDEANGFKEKLEAAGATVELK

SEQ ID NO: 6179 - protein, 296 aa, Saccharomyces cerevisiae
MITTPLVHVASVEKGRSYEDFQKVYNAIALKLREDDEYDNYIGYGPVLVRLAWHISGTWDKHDNTGGSYGGTYRFKKEFNDPSNAGLQNGFKFLEPIHKEFPWISSGDLFSLGGVTAVQEMQGPKIPWRCGRVDTPEDTTPDNGRLPDADKDAGYVRTFFQRLNMNDREVVALMGAHALGKTHLKNSGYEGPWGAANNVFTNEFYLNLLNEDWKLEKNDANNEQWDSKSGYMMLPTNYSLIQDPKYLSIVKEYANDQDKFFKDFSKAFEKLLENGITFPKDAPSPFIFKTLEEQGL

SEQ ID NO: 6180 - protein, 439 aa, Thermoproteus tenax
MSDYLEKIKAQIPNIQPFAGKYAEPVEGSYITYTGPGQLKVPDKVVIGYIEGDGTGPEVAYAAIKVANAAVERAYGKSRRVLWYEVLVGSKAEKILGSRLPDQSVEVLKKIRVFLKAPLETPVGGGFRSLNVTLRQIFDLYANIRPVKYFPGLPSPLKRPESVDLVIFRENTEDVYMGIEWPWNSPEAAKVREFLRRELKVDIRDDAGIGIKPISKFGTQRIARLALKFAVENKRRVVTIMHKGNIQKYTEGAFRDWAYEVAKNEFRDHVVLEEELAQYGGKVPPGKILVNDRIADNMLQQLLTRTGEYDVILAPNLNGDYVSDEAAGLVGGLGVAPGIDVGDWGMMAEPVHGTAPKYTGKNYVNPTATILALELLFRFIGWREAADLITRGVSKAYSEGYFTGDLARQMTDEERKVVKEVLGTQEFAEKVAEIIKTEL

SEQ ID NO: 6181 - protein, 170 aa, Campylobacter jejuni
MINSPYIIWLTGLAGSGKTTIGQALYEKLKLKYKNLIYLDGDELREILGHYAYDRQGRIDMALKRAKFAKFLNDQGMIVIVTTISMFNEIYDYNRKQLKNYYEIYIECDMHELMQRDQKGLYTKALNKEIDNVVGVDIEFDKPEADLVINNSCRNNLEEKVELIIKKLAL

SEQ ID NO: 6182 - protein, 410 aa, Thermoproteus tenax
MSEQTVSIRTTGKIIQSPCGPIIHGLEDVLVKITTISDIDGHTGRLWYRGYRIEDLAENTTYEEVVYLLLYGKLPSARELADIKSRLSANRELNPATIEILRALAKAHPMFALEAAVASEGAFDEDNLKLADALRAGRYKQEEKDLALRIAEKLIAKLPTIVAYHYRLSRGLELVRPRGDLAHSANFLYMFFGKEPDPLATKAIDLYLILHADHEIPASTFTALVIGATLSDLYSVIAGAIGALKGPLHGGANEAAVKSYLEIADPSKAKEIVEAATKPGGPRLMGVGHRVYKAYDPRAKIFKKLVEDYTAKFGDPQRLYAIASNIEQAVMAHPYFQQRKLYPNVDFWSGIVFYYMGIPYDYFTPLFAMSRVAGWTAHVLEYWENNRLFRPRACYVGPHDQQFIPLENRS

SEQ ID NO: 6183 - protein, 267 aa, Arabidopsis thaliana
MPVHDEQEHEVYGGEIPEEEEGEMDTEEYEEHGGEEGAAAGDEELEPGSSSRDLEDMKKRIKEIEEEAGALREMQAKAEKDMGASQDPSGGVSAAEKEEVDSRSIYVGNVDYACTPEEVQQHFQSCGTVNRVTILTDKFGQPKGFAYVEFVEVEAVQNSLILNESELHGRQIKVSAKRTNVPGMRQFRGRGRPFRPMRGFMPGVPFYPPYAYGCESSQVQTAYALQTVLIRQIGVKKVAAASPFSGKLIIINTVHRTLQLFRLTEMS

SEQ ID NO: 6184 - protein, 462 aa, Mesembryanthemum crystallinum
MGEQELLLQQQIKEDRNVSRETEMKHPALQGKYELGRVLGQGTFARVYHARNLVTGNSLAIKVVAKDKVIKVGMMEQMKREISVMKRVKHPNIVQLHEVMASKSKIYLAMDLVRGGELFSKVSKGGKLDEDVARSYFKQLISAVDFCHSRGVYHRDLKPENLLLDEHGNLKITDFGLSASFENEDHHQTLLRTSCGTPHYVAPEVISRKGQQGYHGAKSDIWSCGIILFVLLAGFLPFHDDNIIRMYRKVFKGDFTCPSWLSSQARDLITRLLDINPATRITVSEIMQSDWYCMDTSSMTAVTTDEFDLDHNNNNNNNSNYNNIHHHKKEPEMLNAFHIISLSQGFDLSPLFEEKHREERQDMRFATTKSASTVVSRLEEVAAKAGKFIVKKFCGDSVVRLQGQERGRKGKLAIAAEIMSVSPSLLVVEVKKDNGDTLEYNQFCTKQLRPALKDIVWTCPSS

SEQ ID NO: 6185 - protein, 122 aa, Zea mays
  unsure (1)..(122): unsure at all Xaa locations
TDKAIERLLSQLRKESLKIIPVNASSEVDALYSFKTEFSVNEDLHLIXLYSEKGISKDRILIKIAATXEDIKAXEILQXDHGINTNLTLMVSLIQAIGAAEAAAYLISPFVGXILDWFKPLP

SEQ ID NO: 6186 - protein, 452 aa, Arabidopsis thaliana
MNRPKVQRRVGKYEVGKTLGQGTFAKVRCAVNTETGERVALKILDKEKVLKHKMAEQIRREICTMKLINHPNVVRLYEVLASKTKIYIVLEFGTGGELFDKIVHDGRLKEENARKYFQQLINAVDYCHSRGVYHRDLKPENLLLDAQGNLKVSDFGLSALSRQVRGDGLLHTACGTPNYAAPEVLNDQGYDGATADLWSCGVILFVLLAGYLPFEDSNLMTLYKKIIAGEYHCPPWLSPGAKNLIVRILDPNPMTRITIPEVLGDAWFKKNYKPAVFEEKEEANLDDVDAVFKDSEEHHVTEKKEEQPTSMNAFELISMSRALDLGNLFEEEESIPFNLQGFKRETRFAAKGAANDLVQKIEEASKPLGFDIQKKNYKRYLCTQMRLENVTAGRKGNLRVATEIFQVSPSLHMIEVRKTKGDTLEFHKFYKKLSTSLNDVVWKSGESSGLSK

SEQ ID NO: 6187 - protein, 420 aa, Listeria innocua Clip11262
MSQKIQVENGVLKTPNNPVIPFIEGDGTGPDIWAAAKRVLDAAVKKAYNGEKEIAWKEVLAGEKAFKQTGEWLPQETLDTIDEYLIAIKGPLTTPIGGGIRSLNVALRQELDLYVCLRPVRYFKGVPSPVKRPEDTDMVIFRENTEDIYAGIEFKEGSAESKKLIDFLKSEFGVDKIRFPETSGIGIKPISKEGTERLVRSAIEYAIKEGRKSLTLVHKGNIMKFTEGAFKNWGYDLCEREYGDKVFTWNEYDRIKEAEGTEAADAKQKEELAAGKILVKDSIADIFLQQILTRPAEFDVVATMNLNGDYISDALAAQVGGIGIAPGANINYLTGHAIFEATHGTAPKYAGLDKVNPSSVILSGTLLLEHIGWGEAAALINHSMEKTIAAKTVTYDFARLMDGATEVKCSEFADELIKNF

SEQ ID NO: 6188 - protein, 444 aa, Zea mays
MDEFELEDNLEFILQSIQELMEDPGDNNAFGDANQNELFASIVNYDQENMLPDVSAADVAAGKDIQGIPWEKMLFGRDKYREMKMKNYRNYQNLSYAREDALQECKQVKKDSPYYDFHYNTRRARPSIVHFQLRNLVWATTKHDVYTMHDQSVTHWSSLEQTSTELINADDCIVPKQRGHGSQSVAMVQVTTMAVDSNLLVVGGFQGEIICKRLDDEGVVYSTRVTDDENAITNSLEMYQDPSGSRRLVAANNDCSIRIFDTEYFDLLKHYVFPWSVNSVSVSPNGKLFAVLGDHEDGCVVDPKCGKAIGSLRGHLDYSFASAWHPDGNIVATGSQDTTCRLWDIRNLSQSVAVLGGRMGSIRCVKFSPDGRFLATAEPVDFVHMYDAYADYSRSHEIDLFGEIGGLAFSPDTEAFYVGLADQTYGGMIEFSKRHQHHYFNSLW

SEQ ID NO: 6189 - protein, 317 aa, Pichia guilliermondii
MSIKLNSGYDMPSVGFGCWKVDNATCADTIYNAIKVGYRLFDGAEDYGNEKEVGDGINRALDEGLVARDELFVVSKLWNSFHDPKNVEKALDKTLSDLKVDYLDLFLIHFPIAFKFVPFEEKYPPGFYCGDGDKFHYEDVPLIDTWRALEKLVEKGKIRSIGISNFSGALIQDLLRSAKIKPAVLQIEHHPYLQQPRLVEYVQSQGIAITAYSSFGPQSFVELDHPRVKDVKPLFEHDVIKSVAGKVKKTPAQVLLRWATQRGLAVIPKSNNPDRLLSNLKVNDFDLSQEDFQEISKLDIELRFNNPWDWDKIPTFI

SEQ ID NO: 6190 - protein, 155 aa, Lilium longiflorum
MGSKLTREEYDTLLAAFHKLTVRLEVASVPKDATPADIKNLPDAYLYFIDMPGVRTGEIKVEVEDDSALVIIGERKREEEEKYQMMERWTGKRMRKFELPENADTKAVSAVWKNGVLAVTVRKLPAWEVAGISFNIERLPVPLPTKTKSIEVKIA

SEQ ID NO: 6191 - protein, 203 aa, Lilium longiflorum
QSSQSMESAMITLDLPVIAAYRQLMEIPGETSNSLGDPSQSYALDAPTLTYALDAPTRSYVLDAPTLSYAHDAPTLTYALGAPASTYALDAGAMASTAADVKDLPAAYVFVVDMPGVGSGDLKVKVEGDNVLLISGERKREEEGVYLCIERRVGKLTKMFVLPENANTEAVSAVCKDGVLTVTVEKRPPQEPKKPKVIEVKVA

SEQ ID NO: 6192 - protein, 199 aa, Candida albicans SC5314
MSVPKTKSSSNGYTSVPQGENQADNLSNSETLTNNNQERSTDEYELQTLNSLDYEVENGPEEQQEEEQTGSSTMKMAFMNMANSILGAGIIGQPYAFRNSGLIGGILIMILLTVLIDWTLRLIIKNSILSQTKSYQDTVNYCFGVWGKIVLLVSICSFAYGGCMAFCVIIGDTIPHVLKAFIPESITRSDGSIWVGLVA

SEQ ID NO: 6193 - protein, 512 aa, Streptomyces clavuligerus
MVTAAISGTDEIRARAEQALTRCGVDLTAVKGDALTARTPLTGADLFGLRAQTPEDVDRAVEAAHTAFLTWRTTPAPVRGALVKRFGELLTEHKQDLADLVTIEAGKIRSEALGEVQEMIDICDFAVGLSRQLYGRTMPSERPGHRLMETWHPLGVVGVISAFNFPVAVWAWNAAVALVCGDTVVWKPSELTPLTALACAALLDLAIADAGAPKGLNQVVVGAADVGERLVDSPRVPLVSATGSTRMGRAVGPRVAARFGRTILELGGNNAAVVTPSADLDLTVNAAVFAAAGTAGQRCTTLRRLIVHEDIADTVVERLTAAFERLPIGDPFQDTTLVGPLVNEAAFGRMREAVERATAEGGTLCAGGERQFPDAAPGAYYVRPALVRMPAQTAVVREETFAPILYVLTYRDLDEAIRLNNEVPQGLSAGIFTADQSEAERFLAPDGADCGIANVNIGTSGAEIGGAFGGEKETGGGRESGSDAWRAYMRRATNTVNYSGRVALAQGVDFSQ

SEQ ID NO: 6194 - protein, 460 aa, Xanthomonas campestris pv. campestris str. ATCC 33913
MSERVVDPSVLRSLQQLDAAHHLHPFNDNAALASKGTRILTRGEGVYVWDADGNKLLDAFAGLWCVNLGYGRAELAQAAARQMEQLAYYNSFFQCTTEPTVHLAAKLAELAPGDLNHAFFANSGSEANDTILRLVRHFWAVQGQPQKHIFIGRHDGYHGTTMGGASLGGMRGMHRQGGLPIPGIEHIAPPNHFGEGGEMDPDDYGLLAARRLEEKILQLGPDTVAAFIGEPIMGAIGVYIPPRSYWPEIERICRRYDVLLVADEVICGFGRTGAWFGAEYFGFQPDVMTLAKGITSGYIPLAAAMFNDRVAGVLKRQGGELAHGGTYAGHPVCAAVALENLRLLQDEGIVDTARTQIAPYLAQRWAELGAHRLVGEARIAGLVGALELVPDKRRRGVYFPERGRVGALCRDFALRRGLILRATYDAMLLSPPLIITCEQVDELFDKTWAALDDTAQALGK

SEQ ID NO: 6195 - protein, 382 aa, Saccharomyces cerevisiae
MRALAYFKKGDIHFTNDIPRPEIQTDDEVIIDVSWCGICGSDLHEYLDGPIFMPKDGECHKLSNAALPLAMGHEMSGIVSKVGPKVTKVKVGDHVVVDAASSCADLHCWPHSKFYNSKPCDACQRGSENLCTHAGFVGLGVISGGFAEQVVVSQHHIIPVPKEIPLDVAALVEPLSVTWHAVKISGFKKGSSALVLGAGPIGLCTILVLKGMGASKIVVSEIAERRIEMAKKLGVEVFNPSKHGHKSIEILRGLTKSHDGFDYSYDCSGIQVTFETSLKALTFKGTATNIAVWGPKPVPFQPMDVTLQEKVMTGSIGYVVEDFEEVVRAIHNGDIAMEDCKQLITGKQRIEDGWEKGFQELMDHKESNVKILLTPNNHGEMK

SEQ ID NO: 6196 - protein, 429 aa, Rhizobium tropici
MTEQSAKLTWGEKTVDLPVKTGTIGPSVIDIGALYKNTSTFTYDPGFTSTASCESSITFIDGDEGVLLHRGYPIEQLAEHGDFLEVCYLLLYGELPTAAQKKDFDYRVVHHTMVHEQMSRFFTGFRRDAHPMAVMCGCVGALSAFYHDSTDITDPHQRMVASLRMIAKMPTLAAMAYKYHIGQPFVYPKNDLDYASNFLRMCFAVPCEEYVVNPVLARAMDRIFILHADHEQNASTSTVRLAGSSGANPFACIAAGIACLWGPAHGGANEAALNMLTEIGTVDRIPEYIARAKDKNDPFRLMGFGHRVYKNYDPRAKIMQKTAHEVLGELGIKDDPLLDIAIELERIALTDDYFIEKKLYPNVDFYSGITLKALGFPTTMFTVLFALARTVGWIAQWNEMIEDPDQRIGRPRHVYTGAPLREYVPVSKR

SEQ ID NO: 6197 - protein, 319 aa, Bartonella grahamii
DGDKGILLYRGYPIDQLAEKGDFLESCYLLLYGELPTQQEKNEFDRCIMQHTMVHEQFARFFHGFRRDSHPMAVMVACLGAMSAFYHDSIDITDPHQRMIASVRLISKVPTLAAMAYKYSIGQAFVYPRNDLSYAANFLRMCFAVPCEEYKTNPVLARAMDQIFILHADHEQNASTSTVRLAGSSGANPFACIAAGVACLWGPAHGGANEACLKMLQEIGSIERIPEFIARAKDKNDPFRLMGFGHRVYKNYDPRAKIMQKTCHEVLKELNIQDDPLLDIAIELEKIALSDEYFIEKKLYPNVDFYSGITLKALGFPTE

SEQ ID NO: 6198 - protein, 215 aa, Aspergillus oryzae
MSSTSPSKEPEVEPEVQSGEEQEQMDKEQQDQAQNQGEFEVKEQDRWLPIANVARIMKLALPDNAKIAKEAKECMQECVSEFISFITSEASEKCQQEKRKTVNGEDILFAMTSLGFENYAEALKIYLSKYRETQSARGEHQNRPTSSGYASGGPVGGVSSAPGGRPATAGGFPDAADNTNSIMNPSLDPTEQDPSAYGYPPMVGQPHNGTAGDSY

SEQ ID NO: 6199 - protein, 373 aa, Listeria innocua Clip11262
MTLSKGLENVYVAETSISSIIDDMLTYVGYGIDDLMENNASFEEVIYLLWHLRLPNKEEFKKFKLEIQENMAVSETIITSLRMQNHQKLHPMSVLRTTVSMLGVFDTEAELDDGEAVYRKGLRLQAKMPTIVAAFSRIRRGLDPIPPREDLNMAANFLYMITGEEADELSVEAMNKALVLHADHEFNASTFTARVCVATLSDVYSGVTSAIGALKGPLHGGANERVFDMLEEIDAAGDVRNYIQEKIDTKQKIMGFGHRVYRGGDPRAKHLREMSRKLTAEKGEEKWFDISLQVEEAVWELKHLKPNVDFYSASVYHALGIDRDLFTLVFSVSRVSGWLAHIFEQYRDNRLIRPRAIYVGPENRSYLPVEERI

SEQ ID NO: 6200 - protein, 229 aa, Streptococcus agalactiae NEM316
MNDNVIYTQSDSGLNQFFAKIYGLVGIGVGLSAAVSAIMLYMFPQNMIAIMQKMPGLYFGAIILELVLVFVASGAARRNTPAALPLFLIYSALNGFTLSFIIARYTQTTVLQAFITSAAVFFAMALIGAKTKKDLSGMRKALMAALIGILIASLVNLFIGSGGMSYIISIVCVIIFSGLIAYDNQMIKYVYNSQGGQVADGWAVSMALSLYLDFINLFLNILRLFARND

SEQ ID NO: 6201 - protein, 211 aa, Thermosynechococcus elongatus BP-1
MSANFLIQTVSNTPENILWHQSTVTRARREQLNGHKSYVLWFTGLSGAGKSRLAHTVEERLHRLGCRTFVLDGDNVRHGLCSDLDFSEVGRKENIRRIGEVAKLMMEVGLIVMTAFISPFRADREAVRNRMPYGDFLEIYCQVSLEACEARDVKGLYKKARAGQIKNYTGIDSAYEAPLKPELVVNTECLTLEESVSAVLRMLHERGMVVQ

SEQ ID NO: 6202 - protein, 119 aa, Arabis alpina subsp. caucasica
PGSFNKILISYESGTVNGQWSAVGRTAVTTTLAGCTAALTTLFGKRLLSGHWNVTDVCNGLLGGFAAITGGCSVVEPWAAIICGFVAACVLLGCNKLAEKLRYDDPLEAAQLHGGCGAW

SEQ ID NO: 6203 - protein, 121 aa, Clostridium perfringens
MTKEQIIGALKEMSVLELNEVVKACEEEFGVSAAAPVAVVGGAAAGAAAEEKSEFDVVLTNAGANKIKVIKAVRELTGLGLKEAKEIVDGAPKTLKEAVAKEEAEDMKAKLAEVGAEVELK

SEQ ID NO: 6204 - protein, 319 aa, Listeria innocua Clip11262
MKRIAILTSGGDAPGMNAATRAVVRKAIYEGLEVYGINYGFLGLVNGDIRKLELGSVGDLLHRGGTFLYSARYPEFATEEGQLKGIEQLKKHQIDGLVVIGGDGSYHGAEALTKRGFPTIGIPGTIDNDISGTDFTIGFDTALNTVLDALDKIRDTATSHERTFIIEVMGRDAGDIALWSGLAGGAEAIIVPEESFNMDDVVDRLNKGRERGKKHSIIVVAEGVMSGNEFAKQLAEYGDYHARVTVLGHVQRGGSPTAFDRVLASRLGARSVELLLENRGGLAVGIRENRIVENNIGEILKEKHTLDQKLFDLASILSI

SEQ ID NO: 6205 - protein, 130 aa, Nostoc sp. PCC 7120
MSAATDQILDQLKSLSLLEAAELVKQIEEAFGVSAAAPAGGMMMMAAPGAAAAAEPVEEQTEFDVVLESVPADKKIAVLKIVREITGLGLKEAKDLVEAAPKAVKEAIAKDAAEDAKKRIEEAGGKVTVK

SEQ ID NO: 6206 - protein, 506 aa, Oceanobacillus iheyensis HTE831
MRYANPNKQDAIVNFEKRYDNFIGGKYQPPINGNYFENVSPVTGEVFCEIARSTKEDVDAAIDAAHAAKDAWGKTSVAERAVILNKIADRIEENLEKLAVAETWDNGKAVRETLAADIPLAVDHFRYFAGVIRAQEGTLSQIDEDTVAYHFHEPLGVVGQIIPWNFPILMATWKLAPALAAGNCVVLKPAEQTPASIHVLLDLIKDLLPDGVLNVVNGFGVEAGKPLASNSRIAKIAFTGETTTGRLIMQYASENIIPVTLELGGKSPNIFFEDVMDKDDAFVDKAIEGMVMFALNQGEVCTCPSRALVHESIYDRFMEKVIQRVNQIKIGHPLDTDTMMGAQASQEQMEKIKSYLDIGKQEGAEVLTGGNVNALEGELAAGYYVEPTIFKGNNKMRIFQEEIFGPVLSVTTFKDKDEAMEVANDTLYGLGAGIWTRDINTAYRFGRGIEAGRVWTNCYHQYPAHAAFGGYKKSGIGRENHLMMLGHYQQTKNLLISYGEGTAGLF

SEQ ID NO: 6207 - protein, 197 aa, Bacillus cereus ATCC 14579
MDTNITWHTASVSKDERRVKNGHHSFVIWFTGLSASGKSTVANAVARKLFEKNIGNYVLDGDNIRHGLNKDLGFSESDRMENIRRIGEVAKLFVDQGAVVLTAFISPFRVVRKQVRDLLAADEFIEIFVKCPIEECEKRDPKGLYKKARKGDIKDFTGIDSPYEEPEQAELIVETHKYSIEECAEQIVKYLQERSFI

SEQ ID NO: 6208 - protein, 164 aa, Cleisostoma racemiferum
IENKINRQVTFAKRRNGLLKKAYELSVLCDAEVALIIFSNRGKLYEFCSSTSMLKTLEKYQKCNFGSPESTIISRETQSSQQEYLKLKSRVEALQRSQRNLLGEDLGPLGSKELEQLERQLDSSLKQIRSTRTQFMLDQLADLQRREHMLCEANKALKRRFEES

SEQ ID NO: 6209 - protein, 495 aa, Escherichia coli
SYYHHHHHHLESTSLYKKAGLMQHKLLINGELVSGEGEKQPVYNPATGDVLLEIAEASAEQVDAAVRAADAAFAEWGQTTPKVRAECLLKLADVIEENGQVFAELESRNCGKPLHSAFNDEIPAIVDVFRFFAGAARCLNGLAAGEYLEGHTSMIRRDPLGVVASIAPWNYPLMMAAWKLAPALAAGNCVVLKPSEITPLTALKLAELAKDIFPAGVVNILFGRGKTVGDPLTGHPKVRMVSLTGSIATGEHIISHTASSIKRTHMELGGKAPVIVFDDADIEAVVEGVRTFGYYNAGQDCTAACRIYAQKGIYDTLVEKLGAAVATLKSGAPDDESTELGPLSSLAHLERVGKAVEEAKATGHIKVITGGEKRKGNGYYYAPTLLAGALQDDAIVQKEVFGPVVSVTPFDNEEQVVNWANDSQYGLASSVWTKDVGRAHRVSARLQYGCTWVNTHFMLVSEMPHGGQKLSGYGKDMSLYGLEDYTVVRHVMVKH

SEQ ID NO: 6210 - protein, 177 aa, Triticum aestivum
  unsure (1)..(177): unsure at all Xaa locations
MAPTVMASSATSVAPFQGLKSTAGPPXSARRSNGASLGSVSNGGRIRCMQVWPIEGIKKFETLSYLXPPLSTEALLKQVDYLIRSKWVPCLEFSKVGFIFREHNASPGYYDGRYWTMWKLPMFGCTDATQVINEVEEVKKEYPDAYVRIIGFDNMRQVQCVSFIAFKPPGCEESGKA

SEQ ID NO: 6211 - protein, 330 aa, Methanococcus maripaludis S2
MHKICVIEGDGIGKEVVPAAVEVLKATGVEFEFNHALAGDEVFEKTGVALPEETIAAAKAADAILFGAAGETAADVIVKLRKILDTYANIRPVKSYNGINCLKTGIDYIIVRENTEGLYKGIEAEIADGVTVATRVITKDASERIFKHAFEMAKDRKKQGTAGKVTCAHKANVLKITDGLFKKTFYEVSNDYKDIQTEDFYVDAMNMFIISRPETFDIVVTSNLFGDILSDGAVGMVGGLGMAPSGNVGDKYGLFEPIHGSAPDIAGKGLANPTATILTAVMMLRYLKENEAAEKVEKALEEVLSLGLTTPDLGGTLSTSEMGQEVAKRV

SEQ ID NO: 6212 - protein, 303 aa, Triticum aestivum
MGGGVMRTAAKVGLAGGAAAAAGRFRNVAPSFATAPAAEAAAAAPLLSAAGEIPAVAPAGSQWASWEVDDWEFADWRSESASEADVAVVGGPRLVFAPPSREEAEEATAELREAIDRVYFKETPVEVVKEHDQELSKLGADALIPAMPGHVVQAFTLLKSSPEAQSVVASLASDKNVWDAVLKNERVMEFYKSHQQTLVNTFPEGTDSTDSVESPEKFEEASPEYALPTASPLSDFVDNAKKTMMEMVDNITNFFQDLFHNPAEAEAGPGSSSKKPSFAEMAAGGSFMALAMAVILVVLFKRA

SEQ ID NO: 6213 - protein, 108 aa, Triticum aestivum
MEHGSVADSSASTFSVMEEDHTLANSVRFVLNQDPRVAFCGYSIPHPADNKVNIRVQTTGDQAKDVMKDALQDLMVMGQHVRGTFDKAVADFKSKMPAEQMDVDLNQQ

SEQ ID NO: 6214 - protein, 151 aa, Picea abies
MAMDPLLSTVQQLLGVPDDLERILHAPTRSYMRDTEATASTPVDVKEYPNSYVFIVDMPGLKSNDIKVQVEDENVLNISGERKRNEKEEGAVKYIRMERRVAKFMRKFTLPADCNLEAISAACQDGVLTVTVPKLPPPEPKKPKTIAVKIG

SEQ ID NO: 6215 - protein, 502 aa, Atriplex hortensis
MAFPIPARQLFIDGEWREPLLKNRIPIINPSTEEIIGDIPAATAEDVEVAVVAARKAFKRNKGRDWAALWSHRAKYLRAIAAKITEKKDHFVKLETLDSGKPRDEAVLDIDDVATCFEYFEYFAGQAEALDAKQKAPVTLPMERFKSHVLRQPIGVVGLISPWNYPLLMDTWKIAPALAAGCTTVLKPSELASVTCLEFGEVCNEVGLPPGVLNILTGLGPDAGAPIVSHPDIDKVAFTGSSATGSKIMASAAQLVKPVTLELGGKSPVIMFEDIDIETAVEWTLFGVFWTNGQICSATSRLLVHESIAAEFVDRMVKWTKNIKISDPFEEGCRLGPVISKGQYDKIMKFISTAKSEGATILCGGSRPEHLKKGYYIEPTIITDITTSMQIWKEEVFGPVICVKTFKTEDEAIELANDTEYGLAGAVFSKDLERCERVTKALEVGAVWVNCSQPCFVHAPWGGVKRSGFGRELGEWGIENYLNIKQVTSDISDEPWGWYKSP

SEQ ID NO: 6216 - protein, 267 aa, Humulus lupulus
MADANMGAGGGQFPDFPSVLTHGGQYVQFDIFGNFFEITTKYRPPIMPIGRGAYGIVCSVLNTELNEMVAVKKIANAFDIYMDAKRTLREIKLLRHLDHENVIGLRDVIPPPLRREFSDVYIATELMDTDLHQIIRSNQGLSEDHCQYFMYQLLRGLKYIHSANVLHRDLKPSNLLLNANCDLKICDFGLARPNIENENMTEYVVTRWYRAPELLLNSSDYTAAIDVWSVGCIFMELMNRKPLFAGKDHVHQIRLLTELLGTPTESN

SEQ ID NO: 6217 - protein, 119 aa, Barbarea verna
PGSFNKIAVTYATGTYNGQWSAVGRTAVTTTLAGCTAALTTLFGKRLLSGHWNVTDVCNGLLGGFAAITGGCSVVEPWAAIICGFVAALVLLGCNKLAEKLKYDDPLEAAQLHGGCGAW

SEQ ID NO: 6218 - protein, 321 aa, Bartonella sp.
YIDGDKGILLYRGYPIDQLAEKGDFLESCYLLLYGELPTQQEKNDFDRCIMQHTMVHEQFSRFFHGFRRDSHPMAVMVACLGAMSAFYHDSIDITDPHQRMIASVRLISKVPTLAAMAYKYSIGQAFVYPRNDLSYAANFLRMCFAVPCEEYKINPVLARAMDQIFILHADHEQNASTSTVRLAGSSGANPFACIAAGVACLWGPAHGGANEACLKMLQEIGSIKRIPEFIARAKDKNDPFRLMGFGHRVYKNYDPRAKIMQKTCHEVLKELNIQDDPLLDIAIELEKIALSDEYFIEKKLYPNVDFYSGITLKALGFPTE

SEQ ID NO: 6219 - protein, 119 aa, Crambe cordifolia
PGSFNKILVTYESGSMNGQWSAVGRTAVTTTLSGCTAALTTLFGKRLLSGHWNVTDVCNGLLGGFAAITGGCSVVEPWAAIICGFIAALVLLGCNKLAERLRYDDPLEAAQLHGGCGAW

SEQ ID NO: 6220 - protein, 482 aa, Ralstonia eutropha JMP134
MLKLQDPSLLRQQCYIDGRWTDGERRIDVTNPATGELVAQVPQFGVAETRHAIEAANRALPAWRARLAKERSALLRKWFELILANQDDLARIMTAEQGKPFAEAKGEIAYAASFIEWFAEEGKRVYGETIPAPVSSQRIVVTKEPIGVCAAITPWNFPAAMITRKAGPALAAGCTMVVKPASQTPLTALALAVLAERAGIPAGVLSVVTGSAGAIGGELSSNPLVRKLTFTGSTEVGRVLMAQTASTIKKVSMELGGNAPFIVFDDADLDAAVEGAIISKYRNAGQTCVCANRIYVQDKVYDAFAQKLVAAVAQLKVGNGMEDGVRIGPLIDEKAVAKVEEHIADALGKGARVLEGGHRHGLGHTFFQPTVLADVAPNMLVAREETFGPLAPLFRFKTEDDVVAMANDTEFGLASYFYARDLGRVWRVSERLEYGMVGVNTGLISNEVAPFGGVKQSGVGREGSHYGIEDYLVIKYTCMAGI

SEQ ID NO: 6221 - protein, 288 aa, Bacillus sp. KSM-K16
MKTIQWYPGHMAKARREIKEKLKLIDVVIELVDARLPQSSRNPLIDELAQQKPRLMLLNKADLADPAETERWRAFFKRTGAEVLAINAQTGAGVKNIAPACKTLASALYQKWEQKGMKPRPLRAIILGIPNVGKSTLINRLVNKRQAKVGDRPGVTKQQQWIKVKQELELLDTPGILWPKFDDQEVGLRLAATGAIKDELLDYGDVAAYALRYLAAEYPDLLEARYGIERNSEEDDVVPLFEAIGKKRGCIVRGGLVDFDKTAELILRELRSGTIGKVTLEKAEHEAL

SEQ ID NO: 6222 - protein, 362 aa, Pseudomonas putida
MNDLSHTHMRAAVWHGRNDIRVEQVPLPADPAPGWVQIKVDWCGICGSDLHEYVAGPVFIPVEAPHPLTGIQGQCILGHEFCGQIAKLGEGVEGFAVGDPVAADACQHCGTCYYCTHGLYNICERLAFTGLMNNGAFAELVNVPANLLYRLPQGFPPEAGALIEPLAVGMHAVKKAGSLLGQTVVVVGAGTIGLCTIMCAKAAGAAQVIALEMSSARKAKAKEVGATVVLDPSQCDALAQIRALTFGLGADVSFECIGNKHTAKLAIDTIRKAGKCVLVGIFEEPSEFNFFELVSTEKQVLGALAYNGEFADVIAFIADGRLDIRPLVTGRIGLEQIVELGFEELVNNKEENVKIIVSPGVR

SEQ ID NO: 6223 - protein, 450 aa, Xanthomonas campestris pv. campestris str. ATCC 33913
MHDHPSSDAAHAMQTPAAMEAFWMPFTANRQFKARPRLLASAAGMYYRDVEGRQILDGTAGLWCCNAGHARERIVAAIRAQAGTLDFAPTFQMGSPLPFALAERLAALAPPGLGHVFFTNSGSEAVDSAMKIVLAYHRLRGEGQRTRFIGREKAYHGVGFGGMSIGGLPNNRKWFGPLLAGTDHLRHTLDLQRNAYSRGLPAFGVELADDLERLITLHDASTIAAVFVEPVSGSAGVILPPEGYLQRLRAICDRHGIVLVFDEVITGFGRVGEAFAAQRFGVTPDLITAAKGLTSGTVPMGAVLVADAIHDAFMHGPQAAIELFHGYTYSGHPLACAAALATLDTYAEEQLFTRAITLGPQWEEALHSLRGLPHVIDIRNIGLIGAIELAPREGAPGARGYEVFERCFHEGGLLVRVTGDVIALSPPLIVTPDQIGQMVETLAAILRKVD

SEQ ID NO: 6224 - protein, 296 aa, Saccharomyces cerevisiae
MITTPLVHVASVEKGRSYEDFQKVYNAIALKLREDDEYDNYIGYGPVLVRLAWHISGTWDKHDNTGGSYGGTYRFKKEFNDPSNAGLQNGFKFLEPIHKEFPWISSGDLFSLGGVTAVQEMQGPKIPWRCGRVDTPEDTTPDNGRLPDADKDAGYVRTFFQRLNMNDREVVALMGAHALGKTHLKNSGYEGPFGAANNVFTNEFYLNLLNEDWKLEKNDANNEQWDSKSGYMMLPTDYSLIQDPKYLSIVKEYANDQDKFFKDFSKAFEKLLENGITFPKDAPSPFIFKTLEEQGL

SEQ ID NO: 6225 - protein, 476 aa, Saccharopolyspora spinosa
MPAQAAVIDGKLVEGPETLDVLDPSTGTLLDRTLRGTGEHVDAAVAAARAASREWAHTPYSERSAILRRIGELIRRDRGEFALLESQDTGKPLAQACADTDVAARYFEYYANTMEAFFGHSLPPNGDFVAYTRHVPFGVTGHIIPWNYPLQIGCRTIAPAIAVGNCAVVKPAEEAPLSVLKVARTALEAGLPAGVLNVVPGLGAQAGAALAGHAGIDHLSFTGSVPVGAAVAHAAAENVIPVVLELGGKSPNIVFPDADLDAAIPVIVKSMLQNAGQTCSAGSRLLVHEEVRDEVLARIDEALRGVRIGPGPQDLDLGPLISAKQRDRVTQMVQRAADSGARQLGGPGQVELPEGGFYFPPTVFTDVDPAQEIAQEEVFGPVLAAMSFGTVDEAIQLANGTQYGLIAAAWTRNLDVAHVMAEEIRAGQVYLNTYGGGGGVEYTFGGFGKSGYGREKGFEALKGFCQTKTIVTKVTR

SEQ ID NO: 6226 - protein, 306 aa, Sporothrix schenckii
MDGKRQLNSFQQLEKLGEGTYATVFKGRNRHTGEFVALKEIHLDSEEGTPSTAIREISLMKELKHENIVALHDVIHTESKLMLVFEYMDGDLKKYMDTNGERGALKPMLIKSFMYQLLKGIDFCHQNRVLHRDLKPQNLLINGKGQLKLGDFGLARAFGIPVNTFSNEVVTLWYRAPDVLLGSRTYNTSIDIWSVGCIMAEMYTGRPLFPGTTNEDQMLRIFRIMGTPTEHNWPGISQFPEYKATAPRYATQDLRQILPQIDATGIDLLQRLLQLRPELRISAHDALQHPWFHDILQYQHCQQAAG

SEQ ID NO: 6227 - protein, 460 aa, Zea mays
MVNGERRADAECTRASLLGRYEIGRTLGEGNFGKVKYARHIASGGHFAIKILDRSKILSLRIDDQIRREIGTLKLLKHPNVVRLHEVAASKTKIYMVLEFVNGGELFDKIAIKGKLSEHEGRRLFQQLIDGVSYCHDRGVYHRDLKPENVLVDRKGTIKISDFGLSALPQHLGSDGLLHTTCGSPNYIAPEVLQNRGYDGSLSDLWSCGVILYVMLVGCLPFDDRNLVVLYQKIFKGDCQIPKWLSPAAQDLLKRILQPNPMKRINVAGIREHEWFKKDYVPAVPHDDDEDVLPSPAPSIKPIDEPAQEKCSPINAFQLIGMASSLDLSGFFEEEDAAQRKIRFTSTHPPKDLFDKIESVVMEMGFKVHRGAGKLKVLRNSKCSRNPSSLLVCTEVFELGPSLYVVELRKSHGDSTLYRQLCERLSDELGACKTDQIARTESSSDDLSSVDGEAFPLSGF

SEQ ID NO: 6228 - protein, 432 aa, Rhodospirillum rubrum
MSLRSPGRVAYVNARLLDPASGLDQTGALLADGEHIVEVHPGAFTAPEDAEIIDCQGACLAPGLVDMRVQLREPGEEHKESMRSAGQAAVAGGITSMVCLPNTNPPMDDEATLEFVARRARLAGLAKVYCYGACTKGLRGEDLAELGIMAEAGALAFTDGVKAIANAQMMRRVLAYAATFDLLVMQHPEEPTLAGGVMNAGDLATRMGLSGIPREAEIILLERDLRLVAMTGGRYHAAHISTGESVALIRRAKDQGLRVSCDTAPFYFALNELAVGDYRTFAKLSPPLRGESDRRAIIEGLKDGVIDAIASDHSPQDQDTKRLPFAQAAFGAVGLETLLSISLELHHNGHLSLLEVLKRLTVAPAGLLGLDAGRLRPGGKADLLVFDPYRAGKVDATRFLSKSKNSPFDDRPVQGRVLRTVVDGRTVFPANG

SEQ ID NO: 6229 - protein, 109 aa, Zea mays
  unsure (1)..(109): unsure at all Xaa locations
MICSCADIYMPTDSNHTENIQDLDQLNRKLNQIDDEVAIFHHMQAKVHKYIHERDPYFISSDATRSCIHQALXVGNIDYAFTPQXVHHHFQACXTINKVTILTDKFFIQ

SEQ ID NO: 6230 - protein, 186 aa, Zea mays
  unsure (1)..(186): unsure at all Xaa locations
MTASQSSMSGGGEPGVRTVVWFRRDLRVEDNPALAAAARTAGEVVPAYVWSPEEDGPYYPGRVSRWWLSQSLKHLDASLRRLGAWRLVTRRSSDAVVALIDLVRSTGATHLXFFNRLYDPLSLVRDHRVKEQLSAEGITVQSFNADLLYEPWEVLDDDGFPFTMFAPFWNRCLCMPDPAAPLLPPK

SEQ ID NO: 6231 - protein, 580 aa, Glycine max
  unsure (1)..(580): unsure at all Xaa locations
FGSSDLTLGELLKYKSEEGVRVLLLVWDDKTSHDKVFLKTAGVMGTHDEETRKFFKHSSVMCVLSPRYASNKMSFLKQQVVGTVFTHHQKCVIVDTQAAGNNRKITAFIGGLDLCDGRYDTPEHRLFRNLDDVFDGDFHNPTFSAGTRVPRQPWHDLHCRIDGPAAYDVLINFEQRWRKATKWKEFAILFKKSSQWHDDALIRIERISWILSPSGAATLKDKSDDYTVPEDDPLVWVSSEDDPENWHVXGSLKGFPKRVDVALSQNLICAKNLVIDKSIQTAYIQAIRSAQHFIYIENQYFIGSSYAWPAYKDAGADNLIPMELALKIASKIRAKERFAVYIVLPMWPEGDPKTGAMQEILFWQGQTMQMMYDAVARELKSMQLTDVHPQDYLNFYCLGNREHFNEDSSSTNGAQVSTAYKYRRFMIYVHAKGMIVDDEYVIIGSANINQRSMAGTKDTEIAMGAYQPHYTWSAKKRHPHGQIYGYRMSLWGEHLGMLDETFEEPERLECVHKVNKIADNNWKLFASEDFSLLQGHLLKYPVQVDSDGKIRSLPDCENFPDAGGKILGAHSTTIPDILTT

SEQ ID NO: 6232 - protein, 115 aa, Malus x domestica
MASSAVTKLALVVALCMAVSVAHAITCGQVTSSLAPCIGYVRSGGAVPPACCNGIRTINGLARTTADRQTACNCLKNLAGSISGVNPNNAAGLPGKCGVNVPYKISTSTNCATVK

SEQ ID NO: 6233 - protein, 436 aa, Glycine max
MSPAAGVSVPLLGDSKGTPPPASVPGAVFNVATSIVGAGIMSIPAIMKVLGVVPAFAMILVVAVLAELSVDFLMRFTHSGETTTYAGVMREAFGSGGALAAQVCVIITNVGGLILYLIIIGDVLSGKQNGGEVHLGILQQWFGIHWWNSREFALLFTLVFVMLPLVLYKRVESLKYSSAVSTLLAVAFVGICCGLAITALVQGKTQTPRLFPRLDYQTSFFDLFTAVPVVVTAFTFHFNVHPIGFELAKASQMTTAVRLALLLCAVIYLAIGLFGYMLFGDSTQSDILINFDQNAGSAVGSLLNSLVRVSYALHIMLVFPLLNFSLRTNIDEVLFPKKPMLATDNKRFMILTLVLLVFSYLAAIAIPDIWYFFQFLGSSSAVCLAFIFPGSIVLRDVKGISTRRDKIIALIMIILAVVTSVLAISTNIYNAFSSKS

SEQ ID NO: 6234 - protein, 460 aa, Kurthia sp. 538-KA26
MNSHDLEKWDKEYVWHPFTQMKTYRESKPLIIERGEGSYLFDIEGNRYLDGYASLWVNVHGHNEPELNNALIEQVEKVAHSTLLGSANVPSILLAKKLAEITPGHLSKVFYSDTGSAAVEISLKVAYQYWKNIDPVKYQHKNKFVSLNEAYHGDTVGAVSVGGMDLFHRIFKPLLFERIPTPSPYTYRMAKHGDQEAVKNYCIDELEKLLQDQAEEIAGLIIEPLVQGAAGIITHPPGFLKAVEQLCKKYNILLICDEVAVGFGRTGTLFACEQEDVVPDIMCIGKGITGGYMPLAATIMNEQIFNSFLGEPDEHKTFYHGHTYTGNQLACALALKNIELIERRDLVKDIQKKSKQLSEKLQSLYELPIVGDIRQRGLMIGIEIVKDRQTKEPFTIQENIVSSIIQNARENGLIIRELGPVITMMPILSMSEKELNTMVETVYRSIQDVSVHNGLIPAAN

SEQ ID NO: 6235 - protein, 117 aa, Glycine max
  unsure (1)..(117): unsure at all Xaa locations
VFCHLLFAQQYHDMYQREERMRMSREERARTPYVDYLRPIIADGDTGFGGPTTTVKLCTLYEERGAGGIHIEDQSSATKKCGHIYPKXLDAISEHINRLDAGRLQFDGMXAETVLAA

SEQ ID NO: 6236 - protein, 166 aa, Zea mays
MADDGGSHEGSGGGGGVREQDRFLPIANISRIMKKAVPANGKIAKDAKETLQECVSEFISFVTSEASDKCQKEKRKTINGDDLLWAMATLGFEEYVEPLKIYLQKYKEMEGDSKLSTKAGEGSVKKDAISPHGGTSSSSNQLVQHGVYNQGMGYMQPQVIYRTVIC

SEQ ID NO: 6237 - protein, 535 aa, Glycine max
  unsure (1)..(535): unsure at all Xaa locations
MGNCCATPSTDETANKKGKKGKKENPFAIDYGFNAAAAANGSKLTVLKSPTGREIEARYELGRELGRGEFGITYLCTDKETGEELACKSISKKKLRTAIDIDDVRREVEIMRHLPQHPNIVTLKDTYEDDNAVHLVMELCEGGELFDRIVARGHYTERAAAAVTKTIVEVVQMCHKQGVMHRDLKPENFLFANKKETAALKAIXFXLSVFFKPRERFNEIVGSPYYMAPEVLKRNYGPEVDIWSAGVILYILLCGVPPFWAETEQGVAQAIIRSVVDFKRDPWPKVSDNAKDLVKKMLDPDPRRRLTAQEVLDHPWLQNAKKAPNVSLGETVRARLKQFSVMNKLKKRALRVIAEHLTVEEAAGLKEGFQLMDTNNRGKINIDELRVGLHKLGHQVPESDVQALMEAGDVDGDGHLDYGEFVAISVHLRKMGNDEHLRKAFQFFDQNKSEYIEIEELRSALSDDLDTNSEEVISAIMHDVDTDKDGRISYDEFATMMKAGTDWRKASRQYSRERFASLSLTLMRDGSLHLNNEKQ

SEQ ID NO: 6238 - protein, 316 aa, Triticum aestivum
  unsure (1)..(316): unsure at all Xaa locations
HAHCPQQYIRFAPQSTARALSVFNDDIQGTASVVLAGPLGGLXRMIGGGLVDQTYLFLGAGEXAGTGXIAELIALGDVENTLNLPVDDXHKKIWLVDSXKGLLVESRKXSLQHFKXPFAHEHEXLKTLLEAVQSIKPTVLIGASGVGKTFTXEVIEAMASFNEKPVIFSLSNPTSHSECTAEEAYTWSKGTAVFASGSPFDPVEYEGKTFVPGQSNNAYVFPGFGLGVVISGAIRVHDDMLLAASEALAEEATQENFDKGLIFPPFTNIRKISASIAAKVAAKAYDLGLASRLPRPDDLVKYAESCMYTPLYRSYR

SEQ ID NO: 6239 - protein, 115 aa, Malus x domestica
MASSAVTKLALVVALCMAVSVAHAITCGQVTSSLAPCIGYVRNGGAVPPACCNGIRTINSLARTTADRQTACNCLKNLAGSISGVNPNNAAGLPGKCGVNVPYKISTSTNCATVK

SEQ ID NO: 6240 - protein, 151 aa, Picea glauca
MAMDPLLSTVQQLLGVPDDLERILHAPTRSYTRDTEATASTPVDVKEYPNSYVFIVDMPGLKSNDIKVQVEDENVLNISGERKRNEKEEGEVKYIRMERRVAKFMRKFSLPADCNLEAISAACQDGVLTVTVPKLPPPEPKKPKTIAVKIG

SEQ ID NO: 6241 - protein, 312 aa, Medicago sativa
MGSVEIPTKVLTNTSSQLKMPVVGMGSAPDFTCKKDTKDAIIEAIKQGYRHFDTAAAYGSEQALGEALKEAIELGLVTRDELFVTSKLWVTENHPHLVIPALQKSLKTLQLDYLDLYLIHWPLSSQPGKFSFPIDVADLLPFDVKGVWESMEESLKLGLTKAIGVSNFSVKKLENLLSVATVLPAVNQVEMNLAWQQKKLREFCNAHGIVLTAFSPLRKGASRGPNEVMENDMLKEIADAHGKSVAQISLRWLYEQGVTFVPKSYDKERMNQNLRIFDWSLTKEDHEKIAQIKQNRLIPGPTKPGLNDLYDD

SEQ ID NO: 6242 - protein, 179 aa, Chrysanthemum x morifolium
MASISSSAVATVNRTTSAQASMVAPFTGLKSNVAFPVTKKSNDFSSLPSNGGRVQCMKVWPPLGLKKYETLSYLPPLTETQLAKEVEYLLRNKWVPCLEFELEHGFPYRENNRSPGYYDGRYWTMWKLPMFGCNDASQVLKELNECKKEYPQSWVRIIGFDNVRQVQCISFIAHKPDGY

SEQ ID NO: 6243 - protein, 312 aa, Medicago sativa
MDSVEIPTKVLTNTSSQLKMPVVGMGSAPDFTCKKDTKDAIIEAIKQGYRHFDTAAAYGSEQALGEALKEAIELGLVTREELFVTSKLWVTENHPHLVIPALQKSLKTLQLDYLDLYLIHWPLSSQPGKFSFPIDVADLLPFDVKGVWESMEESLKLGLTKAIGVSNFSVKKLENLLSVATVLPAVNQVEMNLAWQQKKLREFCNANGIVLTAFSPLRKGASRGPNEVMENDMLKEIADAHGKSVAQISLRWLYEQGVTFVPKSYDKERMNQNLCIFDWSLTKEDHEKIDQIKQNRLIPGPTKPGLNDLYDD

SEQ ID NO: 6244 - protein, 318 aa, Bartonella sp.
ITYIDGDKGVLLYRGYPIDQLAEKGDFLESCYLLLYGELPTKQEKNDFDRCIMQHTMVHEQFARFFHGFRRDSHPMAVMVACLGAMSAFYHDSIDITDPQQRMIASVRLISKVPTLAAMAYKYSIGQAFVYPRNDLSYAANFLRMCFSVPCEEYKTNPVLTRAMDRIFILHADHEQNASTSTVRLAGSSGANPFACIAAGVACLWGPAHGGANEACLKMLQEIGSVKRIPEFIARAKDRNDPFRLMGFGHRVYKNYDPRAKIMQKTCHEVLKELNIQDDPLLDIAIELEKIALNDEYFVEKKLYPNVDFYSGITLKAL

SEQ ID NO: 6245 - protein, 480 aa, Saccharomyces cerevisiae
MSELGEYSKLENKELRTEFELTNFPFPGTTDNDSDDGSQGQNSLNIITPDMDDTLVNDVLRENDKKSSMRMAFMNLANSILGAGIITQPFAIKNAGILGGLLSYVALGFIVDWTLRLIVINLTLAGKRTYQGTVEHVMGKKGKLLILFTNGLFAFGGCIGYCIIIGDTIPHVLRAIFSQNDGNVHFWLRRNVIIVMVTTFISFPLSMKRNIEALSKASFLAVISMIIIVLTVVIRGPMLPYDWKGHSLKLSDFFMKATIFRSLSVISFALVCHHNTSFIFFSMRNRSVAKFTRLTHISIIISVICCALMGYSGFAVFKEKTKGNVLNSFPGTDTAINIARLCFGFNMLTTFPMEIFVLRDVVGNLLHECNLIKNYDEHTQLSGKQHVVITSSLVFITMGISLTTCNLGALFELIGATTASTMAYILPPYTNLLLTSKKKSWKERLPFYLCICFGFMIMIISSTQTIIDAVNGSDGQHCQI

SEQ ID NO: 6246 - protein, 128 aa, Triticum aestivum
MAPTVMASSATSVAPFQGLKSTAGLPVSRRSNGASLGSVSNGGRIRCMQVWPIEGIKKFETLSYLPPLSTEALLKQVDYLIRSKWVPCLEFSKVGFIFREHNASPGYYDGRYWTMWKLPMFGCTDATQ

SEQ ID NO: 6247 - protein, 494 aa, Rubrobacter xylanophilus DSM 9941
MNVEREGRVETRMIERLFVGGEWVGEASTGRTFEVENPASGRVIAVLPDGGGGEMRRAVEAAVAAQPGWEEATAYERASVLWRAAGLMRERAEHLARVMTLEQGKPLAESRGEISYAASFVEWFAEEGKRVYGESVPSSFRDKRILVLKRPVGVAAAITPWNFPAAMITRKLAPALAAGCAMVVKPSELTPLSALELAKIFEEAGLPRGLLSVVVGTDPGDITAPLMEDGRVRKLSFTGSTEVGKHLMRQAAKTMKRLSLELGGHAPFIVFEDADLEAAVEGALVSKMRNMGQTCVCANRIFVQKSVLEPFAERLVERMGRMKVGDGLQEGVSVGPLIEERALRKVERHVEDARQKGARVLLGGSRLSSGGGYFFAPTVLCGADESMLVFREETFGPVAALASFESEQEVVERANATPYGLAGYYYTRDVGRVMRLAEKLRYGILGANDGLPSTAQAPFGGLKESGFGREGGHWGIEEYLDVKYLSLGGLGSSS

SEQ ID NO: 6248 - protein, 140 aa, Brassica napus
KPGDKFKDLVGSAYYVAPEVLKRNYGPEADIWSAGVILFILISGVPPFWGENETGIFDAILKGELDFSADPWPTVSAGAKDLVKKMLKYDPKDRLTASEVLNHPWIKEDGEASDKPLDNAVLSRMKQFRAMNKLKKMALN

SEQ ID NO: 6249 - protein, 505 aa, Glycine max
MASLSCSANDLAPLFNDTAAANYLCAQFDSISRKLNVTTYAVDNTYLLFSAYLVFAMQLGFAMLCAGSVRAKNTMNIMLTNVLDAAAGGLSYYLFGFAFAFGGPSNGFIGRHFFGLRKFPKDSPPSGDYSFFLYHWAFAIAAAGITSGSIAERTQFVAYLIYSSFLTGFVYPIVSHWFWSSDGWASATRSHGNVLFGSGVIDFAGSGVVHMVGGIAGLWGALIEGPRIGRFDRSGRSVALRGHSASLVVLGTFLLWFGWYGFNPGSFLTIAKGYESGGYYGQWSAIGRTAVTTTLAGSTAALTTLFSKRLLAGHWNVIDVCNGLLGGFAAITSGCAVVEPWAAIVCGFVAAWVLIGLNKLAAKVEYDDPLEAAQLHGGCGAWGVFFTGLFAKKVYVEEIYGVGRPFGALMGGGGRLLAAQVIQILVVCGWVTATMAPLFYGLHKMKLLRISRDDETAGMDLTRHGGFAYAYHDDEDGSSRGVGFMLRRIEPAASTTPSPPAAPQV

SEQ ID NO: 6250 - protein, 161 aa, Antirrhinum majus
LKTKKITLRSSDGEVFEVEESLALESQTIKHMIEDDCADNVIPLPNVTGKILSKVIEYCKRHVDAAAAKADDKLASTGTSDDELKAFDADFVKVDQATLFDLILAANYLNIKTLLDLTCQTVADMIKGKTPEEIRKTFNIKNDFTPEEEEEVRRENQWAFE

SEQ ID NO: 6251 - protein, 384 aa, Synechocystis sp. PCC 6803
MGTKRIGILTSGGDCPGLNAVIRAVVKASALKGWEVYGIPYGTDGFVEVAHGKYQAEDLLLTKHGYALPGMLKGLDVLQFLSGSVLGSLSKGHPEQPAIAEAILKGYAILDLEALIVIGGDGSLDIIYDLAQKGNWHIIAIPKTIDNDVPFTDLAVGFSTAVDIVTQALYDLTFTAASHERIIIVQVMGRDAGHLTLHAGIAGGADIILIPEITPCLTSEIIRNCCYQLMNLRKSGRHFALIVISEGVHDQNNKKNKHIADYLAEEISETSQHLCDIKDPAFCDLISLDIRATTLGHLQRSGTPLSFDRLLATVFGIRAVELIEQEIYDQVVIWRSGKVEHADLKPIISIIKECHQENRCPFPVDRDGFMVKTAKSLGIYLGED

SEQ ID NO: 6252 - protein, 177 aa, Glycine max
  unsure (1)..(177): unsure at all Xaa locations
MSGWVSGKVKWFNDQKGFGFITPDDGSEELFVHQSQIKSDGFRSLAEGESVEFAIESESDGRAKAVDVTGPDGASVQGTRRGGDGGRSYGGGQGGGGGGYGGGGACYNCXESGHLAWDCSQGGGGDRYGGGGGGGGRYGGGGGGRYGGGGGGGGGGGSCYSCGESGHFARDCPSSAR

SEQ ID NO: 6253 - protein, 169 aa, Bacillus anthracis str. A2012
MIVKRGAKTMTVYDFSAKTITGEEKSLKDYEGKVLLIVNVASKCGFTPQYKGLQEVYDKYKEQGLEILGFPCNQFGGQEPGTEADITSFCELNYGVNFPMFAKIDVKGDKAHPLYTYMTEQAPGLLGMKAVKWNFTKFLIGKDGKVVGRFAPQTKPVDLEVEIEKVLGE

SEQ ID NO: 6254 - protein, 293 aa, Saccharomyces cerevisiae
TPLVHVASVEKGRSYEDFQKVYNAIALKLREDDEYDNYIGYGPVLVRLAFHISGTWDKHDNTGGSYGGTYRFKKEFNDPSNAGLQNGFKFLEPIHKEFPWISSGDLFSLGGVTAVQEMQGPKIPWRCGRVDTPEDTTPDNGRLPDADKDAGYVRTFFQRLNMNDREVVALMGAHALGKTHLKNSGYEGPWGAANNVFTNEFYLNLLNEDWKLEKNDANNEQWDSKSGYMMLPTDYSLIQDPKYLSIVKEYANDQDKFFKDFSKAFEKLLENGITFPKDAPSPFIFKTLEEQGL

SEQ ID NO: 6255 - protein, 94 aa, Glycine max
MASFARGAASLTRIGLSSSKTPLQLIHRRGLADHHGPPKVACWKDPMSPSKWKEEHFVIVSLTGWGLLIYGGFKLATGGKGKKEEVLAKASTEA

SEQ ID NO: 6256 - protein, 384 aa, Listeria innocua Clip11262
MKHVFPTYNRFPVDIVKGNGTVVKDATGKTYLDFTSGIAVCNLGHCPENVTEAIQSQLANIWHTSNLYECALQDSVAELITDGTDKLVFFCNSGTEANEAALKLARKYTGKEKIITFEKSFHGRTFGSMSATGQAKIHQGFGRLVPGFTYVPYNDIESFKTELDENTAAVMLEVIQGEGGVIPGNAAWLMEVQMLCKKAGALLIIDEVQTGLGRTGTLFGFQQTFLDPDIFTLAKGLGNGLPIGAMVGKEHLSSAFGPGSHGSTFGGNKLALAAAKEILLTMKQTGFLEEVNAKAAYFRNLLEEHFEQLENVVAIRGEGFLIGIELGSSAAPVVTELRDKGLLILTAGPNILRILPPLTVSYAEIDQAISILKSVLEKQLIGSE

SEQ ID NO: 6257 - protein, 68 aa, Brassica napus
  unsure (1)..(68): unsure at all Xaa locations
MAYSMLSSXAVVTSPAQATMVAPFTGLKSSSAFPVTXARPNNDITSIVXNGXKRLXACRWXXXNXXXN

SEQ ID NO: 6258 - protein, 147 aa, Funaria hygrometrica
MDFPLFQILSFPDELEKSLNPQSQKYVRDTKAMVSTAVDVKELPDAYIFVADMPGLKSADMKVQLENDNVLVIGGTRKREEPDPKVKYIRMERNSGSFMRKFTLPQNSNLDKIAASCVDGILTVTVPKIPPPEPAKPRTIEVTMGNQ

SEQ ID NO: 6259 - protein, 496 aa, Triticum aestivum
  unsure (1)..(496): unsure at all Xaa locations
MVLSHAASAGSSDDSVHSTFASRYVRASLPRFRMPENSIPKEAAYQIINDELMLDGNPRLNLASFVTTWMEPECNKLMMDSINKNYVDMDEYPVTTELQNRCVNMIAHLFNAPLGETETAVGVGTVGSSEAIMLAGLAFKRRWQNKMKAAGKPCDKPNIVTGANVQVCXWEKFARYFEVELKEVKLSEGYYVMDPEKAVEMVDENTICVAAILGSTLNGEFEDVKMLNDLLVKKNEETGWDTPIHVDAASGGFIAPFLYPELEWDFRLPLVKSINVSGHKYGLVYAGIGWCIWRSKEDLPDELIFHINYLGADQPTFTLNFSKGSSQVIAQYYQLIRLGFEGYRNIMDNCQENAMVLKEGLERTGRFNIVSKDQGVPLVAFSLKDSSRHDEFEISEFLRRFGWIVPAYTMPPDAQHVTVLRVVIREDFSRTFAERLVIDIEKVLHELDALPSRSSGPALQHPNGDTVSEKDLARQREVVSVWKRAVAARKKTQGVC

SEQ ID NO: 6260 - protein, 262 aa, Glycine max
  unsure (1)..(262): unsure at all Xaa locations
KALNTGTAFSMTERDRLDLRGLLPPNVMSPDLQIERFMVDLKRLEVQARDGPSDPNALAKWRILNRLHDRNETMYYKVLIAKIEEYAPIVYTPTVGLVCQNYSGLFRRPRGMYFSAEDRGEMMSMVYNWPAEQVDMIVVTDGSRILGLGDLGVHGIGIAIGKLDLYVAAAGINPQRVLPVMIDVGTNNEKLLEDPLYLGLQQHRLDGDDYLAVVDEFMEAVFTRWPNVIVQFEDFQSXWAFKLLPAYRNTYRMFNDDVXGTS

SEQ ID NO: 6261 - protein, 349 aa, Flaveria brownii
EFYIGLRQRRATGQEYAELMNEFMSAVKQNYGEKVLIQFEDFANHNAFDLLEKYRTTHLVFNDDIQGTASVVLAGLISALKLVGGSLADHKFLFLGAGEAGTGIAELIALEISKQTNIPLEESRKKVWLVDSKGLIVRSRLDSLQHFKKPWAHDHEPVDKFLDAIKTIRPTVLIGSSGTGQTFTKEVVETMSSLNEKPIILALSNPTSQSECTAEQAYTWSEGRAIFASGSPFGPVEYNGKLYMSGQANNAYIFPGFGLGLIISGAIRVHDDMLLAASEALAEQVTEEHFDNGLIYPPFTNIRKISAHIAAKVAAKAYELGLASRLPQPENLVAYAESCMYSPKYRSYR

SEQ ID NO: 6262 - protein, 177 aa, Zea mays
  unsure (1)..(177): unsure at all Xaa locations
AVLDCSDCLLAKMARILACSRKXKHRGPDXCVTVHSTRCNFLMPQRLAAVSPLSVDRXLFNVDRTDVVPAIGEIYXHKNGRKHITGTHNFSTSSDCEVIMPLYDKYGENFGYMLDGELAFVLYYTRDRTYVASRDAIGVNPLYIGXSSDGSDWIASEMKALNEDCVRFEIFPSSHLY

SEQ ID NO: 6263 - protein, 165 aa, Antirrhinum majus
SSSDNASKKITLRSSDGEVFEVDEAIALLSQTIKHMIEDDCADNVIPLPNVTGKILSKVIEYCKRHVDADAAKSEEKVAAAAAGDDDLKAFDADFVKVDQATLFDLILAANYLNIKTLLDLTCQTVADMIKGKTPEEIRKTFNIKNDFTPEEEEEVRRENQWAFE

SEQ ID NO: 6264 - protein, 486 aa, Pseudomonas putida
MKEIKHFINGAFVDSASGRTFEDINPVNGQVIGRVHEAGRAEVDAAVRAARAALKGPWGKMTVAERAEILHRVADGVTARFDEFLEAECLDTGKPKSLASHIDIPRGAANFKVFADLIKNVPTEAFEMATPDGAGALNYGVRRPKGVIGVISPWNLPLLLMTWKVGPALACGNCVVVKPSEETPLTATLLGEVMQAAGVPAGVYNVVHGFGGDSAGAFLTEHPDVDAYTFTGETGTGETIMRAAAKGVRQGSLELGGKNAGIVFADCDLDKAIEGTLRSAFANCGQVCLGTERVYVERPIFDAFVARLKAGAEALKIGEPNDPEANFGPLISHKHREKVLSYYQQAVDDGATVVTGGGVPEMPAHLAGGAWVQPTIWTGLTDDSAVVTEEIFGPCCHIRPFDSEEEAIELANSLPYGLASAIWTENASRAHRVAGQIEAGIVWVNSWFLRDLRTAFGGSKQSGIGREGGVHSLEFYTELKNICVKL

SEQ ID NO: 6265 - protein, 119 aa, Antirrhinum majus
TIIPVPNVTSKILAKVIEYCKRHVEAAAKTDADDGQGDRDALKVFDAEFVKVDQGTLFDLILAANYLNIKSLLDLTCQTVADMIKGKTPEEIRKTFNIKNDFTPDEEEEVRRENAWAFE

SEQ ID NO: 6266 - protein, 387 aa, Ustilago maydis 521
MNALRQLNRAAAPALKQATKSGLVLPNVPQLLRPATTLAAGTPKISKGPTKYGGVYTVTLIPGDGVGVEITDSVKEIFEVMNVPVEWEQFNVSGETHGSESLFKEAMESLKRNKVGLKGILFTPIETGSHNSWNVAMRQQLDIYASLVICKSLPGYPTRHKDVDFAIIRENTEGEYSGLEHSSYPGVVESLKVSTRAKAERISRFAFDFALKNGRKRVTCVHKANIMKLGDGLFLNTFRRVAEEYKSSGIESNDMIVDNTSMQLVSRPQQFDVMVMPNLYGNIVSNIGAALVGGPGTVPGCNIGREFALYEPGCRHVAKDIMGTNAANPAAMILSATMMLRHLGLDTQANQIAESVYKVIADGKVRTADMGGKSKTHEFTQAVLSNL

SEQ ID NO: 6267 - protein, 140 aa, Magnetospirillum magnetotacticum MS-1
MLYPTYLRRSDPFALMRSMMRDLDRGFWPPARAAFPAVNVWQGPEAVGVTAELPGIEPGDIEISVKDNVLTLSGERKAPEVLDGARWHRNERSFGRFSRTIRLPFAASDDKVEARMTNGVLRIVISRPEEEKPKKIEGIL

SEQ ID NO: 6268 - protein, 319 aa, Bartonella vinsonii subsp. vinsonii
DGNKGILLYRGYPIEQLAEKGDFLESCYLLLYGELPTQQEKSDFDRCIMQHTMVHEQFARFFHGFRRDSHPMAVMVACLGAMSAFYHDSIDITDPQQRMIASVRLISKVPTLAAMAYKYSIGQAFVYPRNDLSYAANFLRMCFSVPCEEYKTNPVLTRAMDRIFILHADHEQNASTSTVRLAGSSGANPFACIAAGVACLWGPAHGGANEACLKMLQEIGSVKRIPEFIARAKDKNDPFRLMGFGHRVYKNYDPRAKIMQKTCHEVLKELNIQDDPLLDIAIELEKIALNDEYFVEKKLYPNVDFYSGITLKALGFPTE

SEQ ID NO: 6269 - protein, 191 aa, Chlorobium tepidum TLS
MMSRSIQNPLAALVALLMLMPVMLRAGQKGEAMTFELTSTAFRNMGAIPALYTCEGKNISPPLTWKNIPKGTKSLVLIVDDPDAPDPAAPKFTWVHWVLYNIPPGKTGFAEGAGNHPAETEMQEGFNSWNRGGYGGPCPPIGTHRYFFKLYALDTVIDDLLSPLKADVEAAMQGHILGETVLIGTYKKRGK

SEQ ID NO: 6270 - protein, 365 aa, Vanilla planifolia
MATWVEHQQQQNGSKDVDEEACMYAMQLSSMVVLPMTLRVAVELGILEQIQAGGPDSYLTAEDLAARLGNSNPLAPVMIERILRLLTSYSILNFTDTVDGEGRTVRSYGAAHVCKYLTPNQDGVSMAPLVLMNTDKVLMESWYHMKDAVTNGGIPFNLAYGMTAFEYHGKDLRFNKVFNEGMKNNSIIITKKILERYKRFEDVNVLIDVGGGIGGTISMITAKYPHIHGINFDLPHVVSEAPPFQGVEHVGGNMFESVPIGDAIFIKWILHDWSDEHCLKLLRNCAKSLPDKGKVIVVECILPDAPLVTPEAEGVFHLDMIMLAHNPGGKERTKKEFKELAMLSGFSNFKALFSYANVWVMEFNK

SEQ ID NO: 6271 - protein, 348 aa, Glycine max
VSYGVEFEGAGASKESKVNGDGGRDVNLGDSNYSFGEAEALSDEMEEESRYVAEILRIRDVLLNPEDESEAVLFDSLRRLQMMELTEDCLKATEIGKAVNSATSAPPHTYASTLHLLNGWKEMVDEWVKATTTTAITGSEEGTPDSVNPSVVDDDEEEGLPSPPLDEGAFFVTQAGSMELSQFFDGMDDDGNPRPTGPFSKNHENGRKPAFDSHSQQQAKENKAAVMPVRPNKPVTADSGPGRPPKSNVQRKSNMEPKMQQKMENNSITRRPPTAQLDKSKRSDDDAVQVKLEATKRKLQESYQQAEKAKRQRTIQVMEINDLPKQGLHRNTHFKPGYHSRHWANGRR

SEQ ID NO: 6272 - protein, 349 aa, Bradyrhizobium japonicum USDA 110
MTSTALAATLFGPEDLRMIEHPLDKLASGMVRIRFGAGGICGSDMHYFRHARTGDFVVKSPLVLGHEISGEVVEISGSAANLKVGDRVAVNPSRWCGHCVACREGRPNLCENIYFMGSASKTPHMQGGFANYFDAIPAQCVKIPDHVSYQAAALAEPLAVCLHAVARAGNIEGKRGIIFGAGPIGLLTMLAAHRAGMADITVADIAPAPLAFASRLGASHVENVSGGEEGLKAQAAARPYDVAFEVSGTAAGLASAIGIVRRGGVVVQIGNLPGGQIPTPSNAVMAKEIDLRGSFRFGFEFMTAVELISAGSVDVLSLVTAERPLSTAPDALRLALDRSQSVKVVLTAN

SEQ ID NO: 6273 - protein, 457 aa, Zea mays
MSHYHSADFEEMEDEYDMNEPVDDMEGEDEYQELVIRDSDAEDEDDADQLHKLSDTSAADARSGKDIQGIPWETIEVTRETYRQARLEQYKNYENIPNSGVAAMMVQFVNQPKKACKSTEKGRTYYEFRRNTRSVKSTISHFQLRNLVWATSKHDVYLLLHYSVLHWSALNGVDTEIMDVHGHVAPSEKHPGSLLEGFLHTQISTMAVKDNLLVAGGFQGELICKHLDREGISFCCRTTYDDNAITNALEIFNTSSGALHFIASNNDCGVREYDMERYQLFKHFRFDWPVNHTSLSPDGKLVIIVGDDTDALLIDANSGKTIHSMKGHLDFSFASAWSPDGLTFATGNQDKTCRIWDARNLTESVHVLRGNVGAIRSIRFTSDGHFLSMAEAADFVHIFDIKSDYNKRQELDFFGEVSGMSFSPDTDTLYVGISDRTYGSLLQFGRLYNYSYLDSLL

SEQ ID NO: 6274 - protein, 405 aa, Halobacterium sp. NRC-1
MGPMETYVVTEPALVERLLVSDAAEFRKPEFQADAIDDLLGDGLLLSEGESWREQRGRANPAFSMARVAGFDADIAAHAADRVDDWPVGDTVDVEAAMTHITLDVILDVMLGVSLPEARVDAIGDALEPVGARFEPDPVRFAVPEWLPMPDDREYAAAVATLDDLVDDIVAAREGTASGGDGDDPMDLLSVLLRARDRGEQSLDRLRDEVMTTLLAGHDTTALTLTYTWFLLSEHPDVEARLHAELDGALDDGAQPTVAQLQDLDYLEWVLQESMRLYPPVYNVFRTPIEPVELAGSEVPAGAPIMLPQWAIHRSPDHWDDPEAFDPERWRPERRADRPRFAYFPFGGGPRHCIGKQLALLEAKLIVATVASDYRLRYEGDTPLSFVPSLTIHPEQEMRMRVEPR

SEQ ID NO: 6275 - protein, 492 aa, Oryza sativa (japonica cultivar-group)
MVTKNVYSSLPDPPVSLHAPLAFAAAAWPPRDGVDRISALPVDILRDILSRLPARDAARTSALSTRWRRLWRSAPLVLADAHLKHTGRAPGPAAHPGPFRSVHITCTPMDAHRSELALWLQLLAARGVQELVFVNRASKFDTDVPFPATLFRCSSLTRLYIGFLRFPAVATVPRAASFPHLRELGLCSLIMGQRELAFLLDRCPVLENFEIVCHRELLRLRVASHSLRCVEVCMSIVEEITVEHAARLERLMFWETCGTGGVIDNVGGIIDMRTRVKIGHAPNLRVLGFLVPVMHELSIGNTDIRAGTKPTRRTMVPSVQMLGIQLKLFDNNQVRMLPSFLRCFPNVETLYIQSETTLSGNTTGKLNPKLLQETSPIECLQKHIKKVIMREFRMQRSELDFLKFIAGRGQVLEKVVVVLTHTCSSSADRLRASLSTFMASTRLANEDCKLIVYESPFPIDATAWCFQGAFNMSKDPFDVSKCFKDGASCRAD

SEQ ID NO: 6276 - protein, 189 aa, Zea mays
MSLCTIARRLCLSKPSSGGRLSAIWAHLYSTEVAKDMGAKKYKYPDVYDPYGPMPPPSEKVVELADRIAALPPEEIKQIAPALLLRLNQEPPQAVSGQGFGAQDGSGAGSGKAEKKAEKTVFDVRLEKFDAAAKIKIIKEIRTFTDLGLKEAKELVEKAPVVLKQSLTKEEAEAIIAKIKAAGGVAVME

SEQ ID NO: 6277 - protein, 357 aa, Thermococcus kodakaraensis
MKARKAWRVVREVVDEADIVVEVVDARDPIGTRNRKLERLILEEGKPLLIVMNKADLVPKEWAEEYKRKSEVPVVFISARERKGTGILRKEIKKLAKPLLDEKEKVKVALIGYPNVGKSTIINTLKGKRAVGTAPIPGYTKGKQLIRLSKKIWLLDSPGVIPIDDFDELVIRGGFPADKIEEPVKPAVKLIGRILETRKEAITEKFGITEFESEEDILRKIGERRGLIKAGGEVDIEETARWFLREWQTGRFTLFGSEEEGKRDFIWDFEDVLNGVEKDLLLDPRRILWKYGDELREKLDGQKRAGVREIEGITVGIATGFKKCDSAVKFLEELTGKHALASECFGKKWKGVVAVLD

SEQ ID NO: 6278 - protein, 402 aa, Bacillus cereus ATCC 14579
MLSAKTIEIVKSTVPLLQEKGVEITTRFYQILFSEHPELLNIFNHTNQKKGRQQQALANAVYAAATYIDNLEAIIPVVKQIGHKHRSLGIKAEHYPIVGTCLLRAIKEVAGAPDEVLNAWGEAYGVIADAFISIEAEMYEEAAHKEGGWKDFRNFVIVKKVKESDVITSFYLKPEDGGKVSSFIPGQYVTIQINIEGETYTHNRQYSLSDAPGKEYYRISVKKEKGVDTPDGKVSNYLHGHVKEGDVLPVSAPAGDFVLNMDSTLPVVLISGGVGITPMMSMLNTLIEQDSKRNVYFVHAAINSNTHAMKEHVKAVENEYEQVKAYTCYSAPTEKDLEMKNFDKEGFIESEWLKTIIPTTEAEFYFCGPVAFMKHINAALTDLSVKQEHIHYEFFGPATSLQ

SEQ ID NO: 6279 - protein, 482 aa, Arabidopsis thaliana
MASRTTPSRSTPSRSTPSGSSSGGRTRVGKYELGRTLGEGTFAKVKFARNVENGDNVAIKVIDKEKVLKNKMIAQIKREISTMKLIKHPNVIRMFEVMASKTKIYFVLEFVTGGELFDKISSNGRLKEDEARKYFQQLINAVDYCHSRGVYHRDLKPENLLLDANGALKVSDFGLSALPQQVREDGLLHTTCGTPNYVAPEVINNKGYDGAKADLWSCGVILFVLMAGYLPFEDSNLTSLYKKIFKAEFTCPPWFSASAKKLIKRILDPNPATRITFAEVIENEWFKKGYKAPKFENADVSLDDVDAIFDDSGESKNLVVERREEGLKTPVTMNAFELISTSQGLNLGSLFEKQMGLVKRKTRFTSKSSANEIVTKIEAAAAPMGFDVKTNNYKMKLTGEKSGRKGQLAVATEVFQVAPSLYMVEMRKSGGDTLEFHKFYKNLTTGLKDIVWKTIDEEKEEGTDGGGTNGAMANRTIAKQST

SEQ ID NO: 6280 - protein, 375 aa, Arabidopsis lyrata
MALSLQSPPCATLSASIQKGRWKTLAAGFSATPLPAVNFSIRRSIPRILASASSSSSPSSSSLEAGENNELNAVSAFSEIVPDTVVFDDFERFPPTAATVSSSLLLGICGLPDTIFRNAVDMALADSSCAGLETTESRLSCFFNKAIVNVGGDLVKLVPGRVSTEVDARLAYDTNGIIRKVHDLLRLYNEIDVPHDRLLFKIPATWQGIEAARLLESEGIQTHMTFVYSFAQAAAAAQAGASVIQIFVGRLRDWARNHSGDTEIESAIKSGEDPGLALVKRSYNYIHKYGYKSKLMAAAVRNKQDLFSLLGVDYVIAPLKVLQSLKDSPAIPGDEKYSFVRKLTPETATHYHFTNKELIKWDQLSLASAMGPASV

SEQ ID NO: 6281 - protein, 195 aa, Petunia x hybrida
MTFAGTTQKCSACDKTVYLVDRLAADNRVYHKACFRCYHCKSTLKLSNFNSFEGVIYCRHHFDQLFKRTGSLDKSFEGTPKFTKPEKPVDNENGSGNKVSSLFGGTRDKCVGCSKTVYPIEKVSVNGAAYHKACFKCTHGGCTISPSNYIAHEGRLYCKHHHIQLFKEKGNYSQLESENEPESALPTPLQIAAES

SEQ ID NO: 6282 - protein, 115 aa, Pisum sativum
MSKVVLISVMTACMLISSSYGKATLTCEQVTIWLTPCIPYGTLGGSVLPLCCQGVHSLNAAYKNGDDRRLACHCVQDRAALIPLIDYTRINQIGDLCGSKCPFKVYPSTDCDKVK

SEQ ID NO: 6283 - protein, 265 aa, Glycine max
MEHFNNDDLEYVVDEYYDVPDFAVEDTSSDIVPELTSDVDSDFEDEFPTSNAKTDTTASEARNGKDIQGIPWERLNYSRDKYRETRLKQYKNYQNFSRSRHDLRKECLEVQKGETFYDFFFNTRLVKSTIVHFQLRNLLWATSKHDVYFMQNYSVMHWSALLRRGKEVLNVAKPIIPTLKRPGFLAQPVSRVQISTMTVKENLMVAGGFQGELICKNLKHPGVLFCGKITTDDNAITHAVDVYSNPAGSLRVITANNDFQGRVFD

SEQ ID NO: 6284 - protein, 531 aa, Zea mays
  unsure (1)..(531): unsure at all Xaa locations
MEAVGVTPAPVAAPEKKKLLDLKDPFPAAANGGAKASPAAKWAMKKKLVGGDAGYVLEDVPHLTDYMPQLPTYPNPLQDNPAYSVVKQYFVNPDDTVTQKIVVHKTSARGTHFRRAGPRQRVYFQSDEVNAAIVTCGGLCPGLNTVIRELVCGLYDMYGVSSVVGIEGGYKGFYSKNTVALTPKSVNDIHKRGGTVLGTSRGGHDTAKIVDCLQDRGINQVYIIGGDGTQKGASVIYEEVRRRGLKCSVVGVPKTIDNDIAVXDKSFGFDTAVEEAQRAINAAHVEAESAENGIGVVKLMGRNSGFIAMYATLASRDVDCCLIPESPFYLEGKGGLLEFVERRLKDNGHMVIVVAEGAGQDLIARSMNFVDTQDASGNKLLLDVGLWLSQKIKDHFKKKPSFPITLKYIDPTYMIRAVRSNASDNVYCTLLAHSALHGAMAGYTGFTVAPVXGRHAYIPFYRITEKQNKVVITDRMWARVLCSTNQPCFLSHEDVENMKHDDDEHHHMHNTQLLEGGSSPVSKCNGSAAAV

SEQ ID NO: 6285 - protein, 299 aa, Arabidopsis thaliana
MEDQSAARSIGKVSWFSDGKGYGFITPDDGGEELFVHQSSIVSDGFRSLTLGESVEYEIALGSDGKTKAIEVTAPGGGSLNKKENSSRGSGGNCFNCGEVGHMAKDCDGGSGGKSFGGGGGRRSGGEGECYMCGDVGHFARDCRQSGGGNSGGGGGGGRPCYSCGEVGHLAKDCRGGSGGNRYGGGGGRGSGGDGCYMCGGVGHFARDCRQNGGGNVGGGGSTCYTCGGVGHIAKVCTSKIPSGGGGGGRACYECGGTGHLARDCDRRGSGSSGGGGGSNKCFICGKEGHFARECTSVA

SEQ ID NO: 6286 - protein, 154 aa, Triticum aestivum
  unsure (1)..(154): unsure at all Xaa locations
SATSVAPFQGLKSTAGLPVSRRSNGASLGSVSNGGRIRCMQVWPIEGIKKFETLSYLPPLSTEALLKQVDYLIRSKWVPCLEFSKLGSSSXEHNASPGYYDGRYWXTMWXLPXFGCTDXTQVIXRLEGVKEGYPDPKSDHRQMVSACVTSSPTT

SEQ ID NO: 6287 - protein, 230 aa, Helicobacter pylori 26695
MALYDRANSRNAYAEDSLLRESELVSFVKTTYKFFAGSLLLATIGALLGLMNFQAVVQYKWVFFIAEIAAFFGLMFSKSKPGLNLFMLFAFTSLSGVTLVPLLGMVIAKAGLGAIWQALGMTTIVFGLMSVYALKTKNDLANMGKMLFIALIVVVVCSLINLFLGSPMFQVVIAGASAILFSLYIAYDTQNIVKGMYDSPIDAAVSLYLDFLNVFISILQIIGIFSDRDT

SEQ ID NO: 6288 - protein, 214 aa, SYNECHOCOCCUS SP. WH 8102
MSASPTYGELTNQGASTNIAWHQASVDRAARAEQRGHRSAILWFTGLSGSGKSTLANAVNAALFQRGLATYVLDGDNVRHGLCKDLGFSDADREENIRRIGEVAKLFLDSGVIVLTAFVSPFRADRDKARALVDDGDFIEIHCAADLEVCESRDPKGLYAKARAGQIKEFTGISSPYEAPQAAELKIDTGSQELAESVDLVIKALQERGVIPAA

SEQ ID NO: 6289 - protein, 115 aa, Malus x domestica
MASSAVIKLALVVALCMAVSVAHAITCGQVSSNLVPCFDYVRSGGPVPPACCNGIRTINGLAKTTPDRQAACNCLKSLAGSVSGVNPGNAESLPGKCGVNVPYKISTSTNCATVK

SEQ ID NO: 6290 - protein, 182 aa, Triticum aestivum
MSDEAASPPGGGGGGGGGGSDDGGGGGGFGGVREQDRFLPIANISRIMKKAIPANGKIAKDAKETVQECVSEFISFITSEASDKCQREKRKTINGDDLLWAMATLGFEEYIEPLKVYLQKYRETEGDSKLAGKSGDVSVKKDALGPHGGASGTSAQGMGQQVAYNPGMVYMQPQYHNGDISN

SEQ ID NO: 6291 - protein, 370 aa, Lactococcus lactis subsp. lactis Il1403
MPETTTILYRGGVFMRAARFYDRGDIRIDEINEPIVKAGQVGIDVAWCGICGTDLHEFLDGPIFCPSAEHPNPITGEVPPVTLGHEMSGVVNFIGEGVSGLKVGDHVVVEPYIVPEGTDTSETGHYNLSEGSNFIGLGGNGGGLAEKISVDERWVHKIPDNLPLDEAALIEPLSVGYHAVERANLSEKSTVLVVGAGPIGLLTAAVAKAQGHTVIISEPSGLRRKKAQEAQVADYFFNPIEDDIQAKVHEINEKGVDAAFECTSVQPGFDACLDAIRMGGTVVIVAIWGKPASVDMAKLVIKEANLLGTIAYNNTHPKTIDLVSTGKIKLDQFITAKIGLDDLIDKGFDTLIHHNETAVKILVSPTGKGL

SEQ ID NO: 6292 - protein, 507 aa, Isatis indigotica
MTSVNVKLLYHYVITNFFNLCFFPLTAIVAGKASRLTTNDLHYFYYSHLQHNLLTITLLFAFTAFGSVLYILTRPKPVYLVDYSCYLPPPHLKSSVSKVMDIFYQVRKADPLPNVACDDSSWLDFLRKIQERSGLGDETYGPEGLLQVPPRKTFAAAREETEQVIIGALENLFENTKVNPKEIGILVVNSSMFNPTPSLSAMVVNTFKLRSNIRSFNLGGMGCSAGVIAIDLAKDLLHVHKNTYALVVSTENITYNIYAGDNRSMMVSNCLFRVGGAAILLSNKPGDRRRSKYELVHTVRTHTGADDKSFRCVQQEDDESGKTGVSLSKDITGVAGRTVKKNIATLGPLVLPLSEKFLFFVTFMAKNLLKDKIKHYYVPDFKLAIDHFCIHAGGRAVIDVLESNLGLAPIDVEASRSTLHRFGNTSSSSIWYELAYIEAKGRMKKGNKVWQIALGSGFKCNSAVWVALRNVKASTNSPWEHCIDRYPVKIDSDSAKTSETRVQNGRS

SEQ ID NO: 6293 - protein, 350 aa, Synechococcus elongatus PCC 6301
MTDQPCPRGIPRKFAEDESMDASLLLRQITTGYWGSQALYVAAKLGIADQLVNGPRSCEDLAIVVGAKPEVLYRLLRALASLGIFTEVSDRQFALTPAAELLRSGTAGSLRNLVMMFGEEHYVAWGELLHSIQTGENAFEHHYGAPVFAYYAQHPASADIFNGAMSDMSRPDTAAVLSSYDFQGIRCLVDVGGGHGQLLSQILAAYPDLTGILYDQPAVVAGADSVLADVSDRCEVVGGDFFASVPAGGDAYLLKHIIHDWDDADSLKILANCRQVMQPGDRLLLLEQVVRAGNEPNLAKWLDLNMLVMTQGGRERTQAEFATLLADAGFQLSQIHGTASEVCIIEGRAI

SEQ ID NO: 6294 - protein, 506 aa, Sinapis alba
MTSVNVKLLYHYVITNLFNLCFFPLTAIVAGKASRLTIDDLHHLYYSYLQHNLITIAPLFAFTVFGSVLYIVTRPKPVYLVEYSCYLPPTHCRSSISKVMDIFYQVRKADPSRNGTCDDSSWLEFLRKIQERSGLGDETHGPEGLLQVPPLKTFAAAREETEQVIIGALENLFENTKVNPKEIGILVVNSSMFNPTPSLSAMVVNTFKLRSNVRSFNLGGMGCSAGVIAIDLAKDLLHVHKNTYALVVSTENITYNIYAGDNKSMMVSNCLFRVGGAAILLSNKPRDRRRSKYELVHTVRTHTGADDKSFRCVQQGDDESGKTGVSLSKDITDVAGRTVKKNIATLGPLILPLSEKLLFFVTFIAKKLFKDKVKHYYVPDFKLAIDHFCIHAGGRAVIDVLEKNLALAPIDVEASRSTLHRFGNTSSSSIWYELAYIEAKGRMKKGNKVWQIALGSGFKCNSAVWVALSNVKASTNSPWEHCIDRYPVQIDSDSAKSETRVQNGRS

SEQ ID NO: 6295 - protein, 409 aa, Haemophilus ducreyi 35000HP
MDNNFIFGIIAFTALVLVLAVIILFAKSKLVDSGDITISINDDPEKGITLPAGGKLLGALASKGIFVSSACGGGGSCGQCKVQVNSGGGEILPTELSHISKKEAKEGWRLACQVNVKSSMDVELPEEIFGVKKWECTVISNDNKATFIKELKLQIPEGEEVPFRAGGYIQIEAEPHTVNYKDFDIPKEYHEDWDKFNLWRYVSKVDEHIIRAYSMASYPEEKGIIMLNVRIATPPPRQPDAPPGQMSSYIWSLKAGDKVTISGPFGEFFAKETDNEMVFIGGGAGMAPMRSHIFDQLKRLKSKRKMSFWYGARSKREMFYVEDFDQLQAENDNFKWHVALSDPLPEDNWDGYTGFIHNVLYENYLKNHEAPEDCEYYMCGPPVMNAAVIGMLKSLGVEDENILLDDFGG

SEQ ID NO: 6296 - protein, 506 aa, Sinapis arvensis
MTSVNVKLLYHYVITNFFNLCFFPLTAIVAGKASRLTIDDLHHLYYSYLQHNLITIVPLFAFTVFGSVLYIATRPKPVYLVEYSCYLPPTHCRSSISKVMDTFYQVRKADPFRNGTCDDSSWLDFLKKIQERSGLGDETHGPEGLLQVPPRKTFAAAREETEQVIIGAVENLFKNTKVNPKDIGILVVNSSMFNPTPSLSAMVVNTFKLRSNVRSFNLGGMGCSAGVIAIDLAKDLLHVHKNTYALVVSTENITSSIYAGDNRSMMVSNCLFRVGGAAILLSNKPRDRRRSKYELVHTVRTHTGADDKSYRCVQQGDDENGKTGVSLSKDITDVAGRTVKKNIATLGPLILPLSEKLLFFITFMAKKLFKDKVKHYYVPDFKLAVDHFCIHAGGRVVIDVLEKNLGLAQIDVEASRSTLHRFGNTSSSSIWYELAYIEAKGRMKKGNKVWQIALGSGFKCNSAVWVALSNVKASTNSPWEHCIDRYPVKIDYDSAKSEVRVQNGRS

SEQ ID NO: 6297 - protein, 463 aa, Corynebacterium diphtheriae NCTC 13129
MAYATTNPYTGEVVKEFPTATAQEVEQAITRAHDTFTQWSRKPVAERVEVLARAADILETKKREYAEIITLEMGKLIAEAEAEIDICVDMLRYYVANGEAQLAPRYLPAKGFGEHDVQLVNEPLGVLYAVEPWNFPYYQVIRIGAPQFTAGNTIVLKHASNVPQSALKMVELFREAGAPEGLLVNIFADHNATETILSDPRVRGVALTGSEGAGAAVSATASKYLKKSTLELGGADAFIVLNDAELDKAVDWAVFGRHWNAGQVCCSSKRIIVEDSLYDAFLTQYTQKVAALTAGDPMDPNTQLAPLSSQTAADDLGKLVDKARAEGATVTEVGIDLPEHGAFYQPTILTDIPLDSDTAHSEFFGPVSQIYRARDIDHAVEIANSSPFGLGGSVFSQDEAKAKDIARRLDTGMVYINQPTGVKADIPFGGTKRSGFGRELIDLGLHEFVNQKVVVVTDIDGSF

SEQ ID NO: 6298 - protein, 181 aa, Arabidopsis thaliana
MIIYLSVYTPLYQHIYIYIAHTLHGFLILIKINKLIFEYPKKNLASSNFFKYIITSTMSGVWVFNKNGVMRLVENPYNQSAGDSSESSSSGGNQQQRMRRKILVHLPSSEVVSSYGSLEKILKNLGWERYYSGDNTDHLLQFHKRTSIDLISLPRDFSKFNSIHMYDIVVKNPNVFHVRDM

SEQ ID NO: 6299 - protein, 429 aa, Brucella suis 1330
MTDFYSLIPSAPKGRFDGIERAHTAEDVKRLRGSVEIKYSLAEMGANRLWKLIHEEDFVNALGALSGNQAMQMVRAGLKAIYLSGWQVAADANTASAMYPDQSLYPANAGPELAKRINRTLQRADQIETAEGKGLSVDTWFAPIVADAEAGFGGPLNAFEIMKAYIEAGAAGVHFEDQLASEKKCGHLGGKVLIPTAAHIRNLNAARLAADVMGTPTLIVARTDAEAAKLLTSDIDERDQPFVDYEAGRTAEGFYQVKNGIEPCIARAIAYAPYCDLIWMETSKPDLAQARRFAEAVHKAHPGKLLAYNCSPSFNWKKNLDDATIAKFQCELGAMGYKFQFITLAGFHQLNYGMFELARGYKDRQMAAYSELQQAEFAAEADGYTATKHQREVGTGYFDAMSLAITGGQSSTTAMKESTETAQFKPAAE

SEQ ID NO: 6300 - protein, 384 aa, Pyrococcus abyssi GE5
MSKFPEKGLPREEVLNLLEDKTKVDLTFSSGKILGSMCTMPHELAIEVFARYIDRNLGDPGLHPGTRKIEEEVIEMLSDLLHLEKGYGHIVSGGTEANILAVRAFRNISDAERPELILPKSAHFSFIKAGEMLGVKLVWAELKQDYAVDVKDVEAKISDNTIGIVGIAGTTGLGVVDDIPALSDLAREYGIPLHVDAAFGGFVIPFAKSLGYDLPDFDFKLKGVESITIDPHKMGMAPIPAGGIIFRRKKYLKAISVLAPYLAGGKVWQATITGTRPGASVLAVWALIKHLGFEGYREIVRKAMELSRWFAEEIKKLNNAWLVREPMLNIVSFQTKNLRKVERELKRRGWGISAHRGYIRIVFMPHVTKEMVEEFLRDLREVLK

SEQ ID NO: 6301 - protein, 278 aa, Chloroflexus aurantiacus
MPALGTTVQVSRFMGPYAAQELLAHYAHEIGVTMIPFTELVYLKREGRYVTIDEVPPGAEISSISGTQVRDEYLAKGRLLPEWFTRPETAEILRQMYPPRHRQGFCVWFTGLSGAGKSTIAAILNVLLLERGRTPTVLDGDVVRTHLSKGLGFSREDRDTNILRIGFVASAVVKAGGAVICAAVSPYRAARNECRTMIGSDQFIEVFVDTPLEVCEQRDVKGLYAKARRGELRGFTGIDDPYEPPVNPELTLTTTDVTPEENARKIIRYLEEKGFLEG

SEQ ID NO: 6302 - protein, 303 aa, Brassica napus
  unsure (1)..(303): unsure at all Xaa locations
MVFVKPSKSNAYFKRYQVKFRRRRDGKTDYRARIRLINQDKNKYNTPKYRFVVRFTNKDIVAQIVSASIAGDIVKASAYAHELPQYGLTVGLTNYAAAYCTGLLLARRVLKMLEMDEEYEGNLEATGEDFSVEPTESRRPFXRALLDVGLIRTTTGNRVFGALKGALDGGLDIPHSDKRFAGFNKENKQLDAEIHRNYIYGGHVSNYMKMLNEDEPEKFQTHFSQYLKKGVDAESMEELYKKVHAAIRADPNPKKTKKPAPKTHKRYNLKKLTYEERKNKLIERVKALNGAAGGDDDDEDDEE

SEQ ID NO: 6303 - protein, 228 aa, Vicia faba
PVYISIGCNLPAIPHPTFSRDPVPFSLAPRLSNQIGLEAAVEAAAEFLNKAVKPVLVGGPKLRVAKASDAFVELADASGYALAVMPSAKGMVPEHHPHFIGTYWGAVSTAFCAEIVESADAYLFAGPIFNDYSSVGYSLLLKKEKAIIVQPDRVVIANGPAFGCVLMNDFLKALAKRLKHNNVAYENYHRIFVPDGKPLKCVPKEPLRVNVMFQHIQKMLSSETAVIA

SEQ ID NO: 6304 - protein, 548 aa, Zea mays
MEAATAATAAMMWFRKGLRVHDNPALDAARRHGVGAASARLYPVFVLDPRYLRPDPVAASPGSARAGVARIRFLLESLSDLDARLRRLGSRLLLLRARDDVADAVCAALKDWNIGKLCFESDTEPYALARDKKVTDFALASGIEVLTPVSHTLSDPEEIIKKNGGRPPLTYQSFVSIAGEPPAPAMEEYSELPPLGDTGEYELLPVPTVEGLGYGDISQEEIPPFHGGETEALRRMKESLQNKEWVAKFEKPKGDPSAFVKPSTTVLSPYLKFGCLSSRYFYHCIQDVHRSVRNHTKPPVSLTGQLLWRDFFYTVSYGTPNFDRMKGNKICKQIPWSENEDLFVAWRDGQTGYPWIDAIMIQLRKWGWMHHLARHSVACFLTRGDMFIHWEKGRDVFERLLIDSDWAINNGNWLWLSCSSFFYQYHRIYSPITFGKKYDPNGNYIRHFIPVLKDMPREYIYEPWTAPTSIQKKANCIIGKDYPKPVVDHETASKECRKRMGEAYASSRVDAKPSKGKTLNSRRKMLHGDRDTSNSTIAKRLKRNSRVE

SEQ ID NO: 6305 - protein, 316 aa, Zea mays; identical to SEQ ID NO: 330

SEQ ID NO: 6306 - protein, 426 aa, Arabidopsis thaliana
MESPYPKSPEKITGTVLLGKYELGRRLGSGSFAKVHVARSISTGELVAIKIIDKQKTIDSGMEPRIIREIEAMRRLHNHPNVLKIHEVMATKSKIYLVVEYAAGGELFTKLIRFGRLNESAARRYFQQLASALSFCHRDGIAHRDVKPQNLLLDKQGNLKVSDFGLSALPEHRSNNGLLHTACGTPAYTAPEVIAQRGYDGAKADAWSCGVFLFVLLAGYVPFDDANIVAMYRKIHKRDYRFPSWISKPARSIIYKLLDPNPETRMSIEAVMGTVWFQKSLEISEFQSSVFELDRFLEKEAKSSNAITAFDLISLSSGLDLSGLFERRKRKEKRFTARVSAERVVEKAGMIGEKLGFRVEKKEETKVVGLGKGRTAVVVEVVEFAEGLVVADVKVVVEGEEEEEEVESHWSELIVELEEIVLSWHN

SEQ ID NO: 6307 - protein, 115 aa, Malus x domestica
MASSAVINLALVVALCMAVSVAHAITCGQVSSNLVPCFDYVRSGGPVPPACCNGIRTINGLAKTTPDRQAACNCLKSLAGSVSGVNPGNAESLPGKCGVNVPYKISTSTNCATVK

SEQ ID NO: 6308 - protein, 729 aa, Zea mays
MPAWWPRSKLRSRSKAKPGAGSVSAASSPRKSADLESPSPSPSPTPTPTPRDRKAHSLDFPGAAAARGRPAGAAPGHGSVGYKLPTPVEAVEPVGTLYGLLLAAAAAAAAGDGCSSAEESSVCSAASLDEPHYQHGFRPMDPVAFARERNMPSDSDRILNEDKRFMSCSMPREHQKFFDVPAASVRELHLQSDGPSTSEANCSRGRMISGDLFAPRTRSLSPIPKGHAFAVSNGNSREFGFSPRSPVRKMDGLRSPPHPLPLPPASGACSPLHPASGACSPLHPASGACSPLLPTHSFCSPLPSSPSSCPPLPASPTNCSQSQSQWKKGKLLGSGTFGQVYLGFNSENGQFCAIKEVQVIMDDPHSKERLKQLNQEIDMLRQLSHPNIVQYHGSELSDESLSICLEYVSGGSIHKLLREYGSFKEPVIRNYTGQILAGLAYLHGRNTVHRDIKGANILVGPNGEVKLADFGMAKHISSFAEIRSFKGSPYWMAPEVIMNCKGYSLSVDIWSLGCTIIEMATARPPWHQYEGVAAIFKIANSKDIPEIPDSFSEEGKSFLQLCLKRNPASRASAVQLMDHPFVQDHPAVRAAKSSVLRNTPSSPADGRHTMSNRELPSRKIITPLKDIGLGMRDFTGFSTTVPSPHSPIPGRANMSTPVSPCSSPLRQFKQSNVRGMRSPPHPMLSPGLGNTVSYTQNQTRRNPAPAISDPWMDVGQMKLQSPNISPRRF

SEQ ID NO: 6309 - protein, 337 aa, Thermococcus kodakaraensis
MTEPKDIVLKESEEVEGIPIEGPWLDDVSSLEEVLDYYERIGFQATHLGKAIEIWKKVEKRRAEGKEVRVFLGYTSNIISSGLRELVAWLVKEGKIDVIVTTAGGIEEDFIKALKPFILGDWHVNDALMREKGINRIGNIFVPNDRYIEFEKYMIPFFERVLEIEKERGKPLTASEFIYELGRYMDEKLGKEKERSVIYWAYKRNVPIFCPAITDGSIGDMLYFFKEERGDRELIIDIANDIVKLNNLAVTAKETASIILGGSLPKHAIINANLFRGGTDYAIYITTAVPWDGSLSGAPPSEGVSWGKIRAKADYVEIWADATLVFPLLVWKVMKAP

SEQ ID NO: 6310 - protein, 115 aa, Malus x domestica
MASSAVINLALVVALCMAVSVAHAITCGQVSSNLVPCFDYVRSDGPVPPACCNGIRTINGLAKTTPDRQAACNCLKSLAGSVSGVNPGNAESLPGKCGVNVPYKISTSTNCATVK

SEQ ID NO: 6311 - protein, 217 aa, Mesorhizobium sp. BNC1
MKFFVDTADVNEIRELSETGLLDGVTTNPSLIMKSGRPILEVTREICEIVDGPVSAEVTAVDFKEMMREADILSKIADNIAIKVPLTMDGLKACKALTSSGRMVNVTLCFSANQALLAAKAGATFISPFIGRIDDMGIDGMELIAEIRTIYDNYDFDTEILAASIRSVNHVKQAAIIGADVATVPPAVLKSLVKHPLTDKGLEAFLADWAKTGQKIG

SEQ ID NO: 6312 - protein, 257 aa, Medicago sativa
MEGMAQHPVPRTVEEVFSDYKGRRAGLIKALTTDVEKFYQLVDPEKENLCLYGFPNETWEVNLPVEEVPPELPEPALGINFARDGMQEKDWLSLVAVHSDSWLLAVAFYFGARFGFGKNDRKRLFQMINDLPTVFELATGTAKQSKDQLTAHNNGSNSKYKSSGKSRQSESQTKGVKMSAPVKEEVDSGEEEEEDDDEQGATCGACGDNYGTDEFWICCDMCEKWFHGKCVKITPAKAEHIKQYKCPGCSIKKPRIG

SEQ ID NO: 6313 - protein, 506 aa, Orychophragmus violaceus
MTSVNVKLLYHYIITNFFTLCFFPLTAIVAGKASRLTTNDLHHFYYSHLQHSLITITLLFAFTVFGSVLYIITRPKPVYLVDYSCYLPPPHQKASVSKVMDIFYHLRKADPLRNVACDDSSWLEFLRKIQERSGMGDETYVPAGLLEVPPRKTFSASREESEQVINGAIENLFKNTKVNPKEIGLLVVNSSIFNPTPSLSAMVVNTFKLRSNIRSFNLGGMGCSAGAIAIDLAKDLLHVHKNTYALVVSTENITDHIYAGDNRSMMVSNCLFRVGGAAILLSNKPRDRRRSKYELVHTVRTHTGADDKCYRCVQQGDDESGKNGVSLSKDITAVAGKAIKINISTLGPLVLPLSEKILVFVSFIGKKLLKDKIKNLYVPDFKLVIDHFCIHAGGRAVIDVLEKNLGLEPVDVEPSRSTLHRFGNTSSSSIWYELAYIEAKGRMKKGNKVWQIALGSGFKCNSAVWVALRNVKASTNSPWEHCIDRYPVNIDSDSAESVTRVQNGRS

SEQ ID NO: 6314 - protein, 316 aa, Salmonella typhimurium LT2
MNQLDGIKQFTTVVADSGDIESIRHYQPQDATTNPSLLLKAAGLEQYGHLIEDAIAWGKKHGGTQEQQVAAASDKLAVNFGAEILKSIPGRVSTEVDARLSFDKEKSIEKARHLVDLYQQQGVDKSRILIKLAATWEGIRAAGQLEKEGINCNLTLLFSFAQARACAEAGVYLISPFVGRIYDWYQARSPLEPYVVEEDPGVKSVRNIYDYFKQHRYETIVMGASFRRTEQILALTGCDRLTISPNLLKELKEKEEPVIRKLVPSSQMFHRPTPMTEAEFRWEHNQDAMAVEKLSEGIRLFAVDQRKLEDLLAAKL

SEQ ID NO: 6315 - protein, 506 aa, Brassica napus
MTSVNVKLLYHYVITNLFNLCFFPLTAIVAGKAYRLTIDDLHHLYYSYLQHNLITIAPLFAFTVFGSVLYIATRPKPVYLVEYSCYLPPTHCRSSISKVMDIFYQVRKADPSRNGTCDDSSWLDFLRKIQERSGLGDETHGPEGLLQVPPRKTFAAAREETEQVIIGALENLFKNTNVNPKDIGILVVNSSMFNPTPSLSAMVVNTFKLRSNVRSFNLGGMGCSAGVIAIDLAKDLLHVHKNTYALVVSTENITYNIYAGDNRSMMVSNCLFRVGGAAILLFNKPGDRRRSKYELVHTVRTHTGADDKSFRCVQQGDDENGKIGVSLSKDITDVAGRTVKKNIATLGPLILPLSEKLLFFVTFMGKKLFKDKIKHYYVPDFKLAIDHFCIHAGGRAVIDVLEKNLALAPIDVEASRSTLHRFGNTSSSSIWYELAYIEAKGRMKKGNKVWQIALGSGFKCNSAVWVALNNVKASTNSPWEHCIDRYPVKIDSDSGKSETRVQNGRS

SEQ ID NO: 6316 - protein, 279 aa, Lactobacillus gasseri
MATIQWYPGHMNKAKNQLEDNLDLIDVLIEVLDARLPVSSRNPMIGQLTKKKPHIIILNKSDLADPIQTKKWTRYFQDEGNFVISMDAQHNTNMTSLFKIIKLAGKKKTEKLIAKGASNPMIRVAIAGIPNCGKSTIINRMVGRNAAIVGDKPGVTRGQSWLKTKTNVQILDTPGILWPKFSDQEVGYKLAACGAIKADVFHPDDVALFVIEFLKQNYKKDLTKFAQATNEELENMSNPDLLLAMTNKYGMRDDYDKFSLFMLQRLRKGKLGRITFDLR

SEQ ID NO: 6317 - protein, 442 aa, Synechococcus elongatus PCC 6301
MSDLWIRNARVLLPTGEWQLADVEVRAGKIVAIADQLPAASDDTPEVQAEGLALLPGVIDPQVHFRDPGLTHKEDLHTASRACARGGVTSFMEMPNTKPLTTTQAILTEKLAIAAEKSLVNYAFFIGATPENHPDLHTATPTCGIKIFMGASHSPLMVPTEPELEPIFAAGRRLIAVHAEDQPRILARREFMLAGPHVPDLHSAIQDNEAALLATRLALKLSKKYQRRLHILHLSTGDEALLLRQDKPAWVTTEVTPQHLLLNRDAYYEIGSLAQMNPPLRTRWDNEVLWQALLDGVIDCIATDHAPHTLEEKAQPYPNCPSGMPGVETSLPLMLTEAQKGRCTVAQVAQWMSTNVAKIFGIANKGKIEPGYDADLVLVDLDRYQLVRREDLQTKCGWSPFEGWNLTGWPQVTIVGGQIVYDRGQFNESVRGQALQFDESGW

SEQ ID NO: 6318 - protein, 256 aa, Arabidopsis thaliana
MEGITHPIPRTVEEVFSDFRGRRAGLIKALTNDMVKFYQTCDPEKENLCLYGLPNETWEVNLPVEEVPPELPEPALGINFARDGMQEKDWVSLVAVHSDSWLLSVAFYFGARFGFGKNERKRLFQMINELPTIFEVVSGNAKQSKDLSVNNNNSKSKPSGVKSRQSESLTKVAKMSSPPPKEEEEEEDESEDESEDDEQGAVCGACGDNYGTDEFWICCDACEKWFHGKCVKITPAKAEHIKHYKCPTCSNKRARP

SEQ ID NO: 6319 - protein, 287 aa, Glycine max; identical to SEQ ID NO: 254

SEQ ID NO: 6320 - protein, 317 aa, Erwinia carotovora subsp. atroseptica SCRI1043
MTDKLTSLRQVTTVVADTGDIAAMKLYQPQDATTNPSLILNAAQIPEYRKLIDEAIAWAREQSSDRKQQVVDATDKLAVNIGLEILKLIPGRISTEVDARLSYDTEASVAKAKHLIKLYNDAGISNERILIKLASTWQGICAAEQLEKEGINCNLTLLFSFAQARACAEAGVFLISPFVGRILDWYKANGDKKEFAPHEDPGVVSVSEIYDYYKEHGYETVVMGASFRNVGEILELAGCDRLTIAPALLKELSESEGEVVRKLSYVGDVKVRPARMTEAEFYWQHNQDPMAIDKLADGIRKFAIDQEKLEKMIADLL

SEQ ID NO: 6321 - protein, 222 aa, Zea mays
  unsure (1)..(222): unsure at all Xaa locations
MDRAGVLAVVDSRTGKRYEVKVSEDGTVRATDFKKITAGKDDKGLKTYDPGYLNTAPVRSSICYIDGDEGILRYRGYPIEEVAESSSFVEVAYLLMYGNLPSQSQLAAWGFAISQHSAVPQGLLDIIQSMPHDAHPMGVLASAMSTLSVFHPDANPALRGQDLYNSKQVRDKQIVRVLGKAPAIAAAAYLRLAGRPAVLPSKNLSYSQNXLDMLDSLGDQKY

SEQ ID NO: 6322 - protein, 123 aa, Oryza sativa (japonica cultivar-group)
MIQPQTLLNVADNTGARKLMCIRVIGAASSQRYARIGDVIVAVIKDVVPQMPLERSEVIRAVIVRTCKEFKCEDGIIIRYDDNAAVIIDQKGNPKGTRVFGAIAEELRELNFTKIVSLAPEVL

SEQ ID NO: 6323 - protein, 178 aa, Triticum aestivum
  unsure (1)..(178): unsure at all Xaa locations
MAPTVMASSATSVAPFQGLKSTAGLPVSRRSNGASLGSVSNGGRIRCMQVWPIEGIKKFETLSYLPPLSTEALLKQVDYLIRSKWVPCLEFSKVGFIFREHNASPGYYDGRYWTMWKLPMFGCTDATQVINEVEEVKKEYLTXVVRIIGFTTSQVQCVSHRKQRAARSGRLNSHHTAH

SEQ ID NO: 6324 - protein, 416 aa, Escherichia coli O157:H7 EDL933
MESKVVVPAQGKKITLQNGKLNVPENPIIPYIEGDGIGVDVTPAMLKVVDAAVEKAYKGERKISWMEIYTGEKSTQVYGQDVWLPAETLDLIREYRVAIKGPLTTPVGGGIRSLNVALRQELDLYICLRPVRYYQGTPSPVKHPELTDMVIFRENSEDIYAGIEWKADSADAEKVIKFLREEMGVKKIRFPEHCGIGIKPCSEEGTKRLVRAAIEYAIANDRDSVTLVHKGNIMKFTEGAFKDWGYELAREEFGGELIDGGPWLKVKNPNTGKEIVIKDVIADAFLQQILLRPAEYDVIACMNLNGDYISDALAAQVGGIGIAPGANIGDECALFEATHGTAPKYAGQDKVNPGSIILSAEMMLRHMGWTEAADLIVKGMEGAINAKTVTYDFERLMEGAKLLKCSEFGDAIIKNM

SEQ ID NO: 6325 - protein, 277 aa, Desulfitobacterium hafniense DCB-2
SCLAEGPITLRFGEVHSYIIDEGEMVPVPGRLIYRGYDITDLARGFMEDNRFGFEETAYLLLFGRLPNRQELIDFHNLLDIYQKLPDNFARDMILNVPSKDIMNGMARSVLGFYCYDTNPDDTSIRNVLKQCIRLIAAFPALAVYCYQAYTHYHGNKSLVIHSPQPELSLAENILYMLRPNHKYTELEARLLDLALVLHAEHGGGNNSSFVTHVVTSTGTDTYSAVAAALGSLRGPKHGGANHKVIQMFQDIKEKISDWQDEDELSAYLDKFFLGCL

SEQ ID NO: 6326 - protein, 85 aa, Brassica napus
MAPVSALAKYKLVFLGDQSVGKTSIITRFMYDKFDNTYQATIGIDFLSKTMYLEDRTVRLQLWDTAGQERFRSLIPSYIRDSSVA

SEQ ID NO: 6327 - protein, 352 aa, Vibrio parahaemolyticus RIMD 2210633
MQQMNSIVMQDGSVRLKQVEIPKPAAGQVLVRSLACGICGSDLHITRHADEVFDVFHQLGLMPDEAGEHAQVMLGHEFCAEIVEYGSDTQQTLAVGSRVTSVPMLLSQNGAGVGVTPGTYGAYSEYFLLDEALLLPVPDGMPSEAAALTEPLAVGLHAVNRSEIETEETALVVGCGPIGLAVIAALKQRGVSNILAVDLQEEKLQLASEFGANRLISPTKEDEIAVGEQYAMNSRLVIYECVGKHTLIDDFLRRAPARARIVISGIHTTPAIINYAYATVKELDLRFSYYYQPHEFEQCLQAIAEHKLPWQKMLTAKVGIDGVEDAFRQLMTPNDHIKVVIEPWRCGALEVI

SEQ ID NO: 6328 - protein, 115 aa, Malus x domestica
MASSAVINLALVVALCMAVSVAHAITCGQVSSNLVPCFDYVRSGGPVPPACCNGIRTINGLAKTTPDRQAACNCLKSLAGSVSGVNPGNVESLPGKCGVNVPYKISTSTNCATVK

SEQ ID NO: 6329 - protein, 401 aa, Triticum aestivum
  unsure (1)..(401): unsure at all Xaa locations
IEQVCTKKQAGTGPEFPGYRRPTRPISYTLFDKDGRQIPQEIVTKVGEIFEQILKETVKVRDEYANDMPLVQAISMVLDRNPHLKLEGLQYEVLQWCICRLEAWFATDVDNISLKNWDQEHVLTGGHGLMVNGYDPVIKALSRDLDVHLNHGLQXIQRYNKVIVCVEEVQFVAMRYITVSRCIRLYSGRTSSTVDPELPDWKXSAISDLXVGLETRIALRFNTVFWPNVEVLGRVAXTSNACGYFLNLHKATGHPVLVCMVAGRFAYEMEKLSDEESVNFVMSQLRRMLPGATEPVQYLVSRWGTDPNSLGSYSCDLVGKPADLYERFCARVGNLFFAGEAACIDHSGSVHGAYSSGIDAAEDCRRRLSTQLGISDLFQVGKIVMREEMTEVMVPLQISRL

SEQ ID NO: 6330 - protein, 501 aa, Chromobacterium violaceum ATCC 12472
MQSLKPGFELKSRYANYIGGRWVPPVNGRYFENVTPITGKPLCEIPRSDEQDVELALDAAHAARYAWGHTPVTERAIALNRIADRMEANLALLAEVETWDNGKPIRETRAADIPLAIDHFRYFASCVRAQEGSLGEIDANTVSYHFHEPLGVVGQIIPWNFPILMAAWKLAPALAAGNCVVLKPAEQTPLSILVLMELIGDLLPPGVLNVVNGFGVEAGKPLASSKRIAKIAFTGETGTGRLIMQYASQNLIPVTLELGGKSPNIFFGDVAAKDDAFLDKAIEGFVMFALNQGEVCTCPSRALIHESIYDRFMEKALARVAAIKQGNPLDPATMIGAQASQEQMDKIQSYLAIGRDEGAKVLAGGARAQLDGDLAGGFYIQPTVFHGHNKMRIFQEEIFGPVVSVTTFQDRDEALAIANDTLYGLGAGVWTRDMNTAFFMGRHIEAGRVWTNCYHAYPAHAAFGGYKQSGIGRETHKMMLEHYQQTKNLLVSYAEDKLGFF

SEQ ID NO: 6331 - protein, 231 aa, Zea mays
MCPTKKGMTGEPSSPCSSASASTLPEHHQTVWTSPPKRPAGRTKFRETRHPVFRGVRRRGSAGRWVCEVRVPGRRGCRLWLGTFDTAEAAARAHDAAMLALAGAGACCLNFADSAWLLAVPASCASLAEVRHAVADAVDDFLRHQLVPEDDALAATPSSPSSEDGNTSDGGESSSDSSPPTGASPFEFDVFNDMSWDLHYASLAQGLLVEPPSAVTAFMDEGFADVPLWSY

SEQ ID NO: 6332 - protein, 199 aa, Zea mays
  unsure (1)..(199): unsure at all Xaa locations
MKTRGKTLTERYEMGKLLGKGAFGKVHYARDLESNQGVAIKIMDKERVLKAGLSEQVKREITTMRLVEHKNIVRLHEVMATRNKIYIIMEYAKGGELLDKVKRSGRLTEADTHRYFQQLIGALDHCHSRGVYHRDXKPENLLLNENGDLKVTDFALSAFSESRRTNGVLHTVCGTPVYIAPEVIKXTGFDRAKSDIWSC

SEQ ID NO: 6333 - protein, 325 aa, Mycoplasma mobile 163K
MAKKIAILTSGGDSPGMNNAIRTIVKTSKIHGIEVFLVYNGYKGLVEKTIKNANEINVDQYIGSGGTFIGSARYLEFKKLEVRQKAVQNLKEMGIDSLVVIGGDGSYAGAQLLHELGVKTIGLPGTIDNDIASTEYTIGLDTALNTIVENVDRLRDTMNSMNMVALVEVMGHGAGDLAMLSGLATGAEIIVTNAHRKSIDEMIEIVKDQMIAKTKRSVIGIVSEFIYDDLKKVAKEIEDKTGIRTRAIILAHTQRGGNPKAYERINASFLGIAAVESLLKNESGVALGFKGNKIISTPIPEALKAQNSAKNENELVTKINKINQS

SEQ ID NO: 6334 - protein, 207 aa, Glycine max
FGSRAMCEPLSVGVHACRRANIGPETYVLIMGAGPIGLVTMLAARAFGAPRTVIVDVDDYRLSVAKSLGADDIVKVSTNIQDVAEEVVQIQKVMGADIDVTFDCAGFDKTMSTALSATQPGGKVCLVGMGHSEMTVPLTPAAAREVDVLGVFRYMNTWPLCLEFLRSGKIDVKPLITHRFGFSQKEVEEAFETSARGGNAIKVMFNL

SEQ ID NO: 6335 - protein, 267 aa, Ralstonia metallidurans CH34
MSIPSFGVGTFRLTGQVVVDSVRNALDVGYRAIDTAQIYGNEADVGQAIAESGVERGELFVTTKIWTANYAADKLVPSLRESLDKLRTDYVDLTLIHWPAPGNGVALSEYMAALAEAKALGLTRQIGVSNFNIELTRQAIEAVGKGEIATNQIELSPYLQSRKLTAFLKEQGIAVTSYMTLAYGKVLKDPVLGQIAAKHHATVAQVALAWALQLGYAVIPSSTKRENLASNLLARDLKLDADDMALIASLERNGREVSPEGLAPVWD

SEQ ID NO: 6336 - protein, 212 aa, Zea mays
MDEEEHEVYGQEIPEDGDMDGADVDMAASGDDAAKLQELDEMKRRLKEMEEEAAALRDMQAKVAKEMQGGDPSASTAEAKEQVDARSVYVGNVDYACTPEEVQQHFQACGTVNRVTILTDKFGQPKGFAYVEFLEQEGVQEALNLNESELHGRQIKVAPKRTNVPGMKQRPPRGYNPYHGYPYRSYGAPYFPPYGYGRAPRFRRPMRYRPYF

SEQ ID NO: 6337 - protein, 591 aa, Zea mays
  unsure (1)..(591): unsure at all Xaa locations
MCGILAVLGVAEVSLAKRSRIIELSRRLRHRGPDWSGLHCHEDCYLAHQRLAIIDPTSGDQPLYNEDKTVVVTVNGEIYNHEELKAKLKTHEFQTGSDCEVIAHLYEEYGEEFVDMLDGMFSFVLLDTRDKSFIAARDAIGICPLYMGWGLDGSVWFSSEMKALSDDCERFITFPPGHLYSSKTGGLRRWYNPPWFSETVPSTPYNALFLREMFEKAVIKRLMTDVPFGVLLSGGLDSSLVASVASRHLNETKVDRQWGNKLHTFCIGLKGSPDLKAAREVADYLSTVHHEFHFTVQEGIDALEEVIYHIETYDVTTIRASTPMFLMSRKIKSLGVKMVISGEGSDEIFGGYLYFHKAPNKKEFHEETCRKIKALHLYDCLRANKATSAWGVEARVPFLDKSFISVAMDIDPEWKMIKRDLGRIEKWVXRNAFDDEERPYLPKHILYRQKEQFSDGVGYSWIDGLKDHASQHVSDSMMMNAGFVYPENTPTTKEGYYYRMIFEKFFPKPAARSTVPGGPSVACSTAKAVEWDAXWSKNLDPSGRAALGVHDAAYEDTAGKTPASADPVSDKGLRPAIGESLGTPVASATAV

SEQ ID NO: 6338 - protein, 276 aa, Oryza sativa (japonica cultivar-group)
MASAAVAAAAAPLRRSLLPSLNPSCLFSSLASSSHRLSLPRALRPAGPLPSDVEDSDDSNAGDGAGEALRKSRNDLKREARRAVQWGMDLAKFSPPQIKRILRAASLDREVFDALMLVKRFGSDVREGKRRQFNYIGRLLRGAQPELMDTLIQYSKDGDDNRLLALMSENTFLMEDEEIEDLPCNEEEGDKEHIEIADRWFEGLLSKDISVTNEIYAIHNVEFDRQELRKLVRTVHMVQDNIENEHEEESTMKLLGAKKQLLCFLRSIAKEAYVKS

SEQ ID NO: 6339 - protein, 120 aa, Zea mays
  unsure (1)..(120): unsure at all Xaa locations
TVSFGYDSTKLQELDEMNLLLREMEDESAALREMHAKVGKDMLDPNATTSENRDEMDSLSVFVGNVDYACTPEEVQPHFNSXGTSYRVTILTDKSVQPKGSAYVEFVEDEAAQEAIKLNE

SEQ ID NO: 6340 - protein, 428 aa, Pasteurella multocida subsp. multocida str. Pm70
MSELTAKLTLSDGREYDLPVHKGSLGYDAIDVQSLVKNKLFTFDPGFMSTACCRSEITYIDGDNGVLLHRGYPIAELAKNADYLEVAHLLLFGERPSPEEYKNFTQLVRRHTLVHEQISRFFHGFRRDSHPMAIMCGVSGALAAFYHDSLDINDITHREITAIRLLAKMPTLAAMCYKYSIGQPFMFPQNHLSYSGNFLYMMFATPCEPYIVNPVLERAMDRIFILHADHEQNASTSTVRTAASSGANPFACIAAGIASLWGPAHGGANEACINMLEEIGTVDRIPEFIARAKDKNDPFRLMGFGHRVYKNYDPRAKVMRQTCHEVLKELNIQNPLFDVAMELERIALSDPYFIDHKLYPNVDFYSGIILKAIGIPTSMFTVMFALARTVGWIAHWKEMFKPGNMKIVRPRQLYMGEKERSFEAMDKS

SEQ ID NO: 6341 - protein, 368 aa, Arabidopsis thaliana
MEDDRVFSSVHSTVFKESESLEGKCDKIEGYDFNQGVDYPKLMRSMLTTGFQASNLGEAIDVVNQMLDWRLADETTVAEDCSEEEKNPSFRESVKCKIFLGFTSNLVSSGVRDTIRYLVQHHMVDVIVTTTGGVEEDLIKCLAPTFKGDFSLPGAYLRSKGLNRIGNLLVPNDNYCKFEDWIIPIFDEMLKEQKEENVLWTPSKLLARLGKEINNESSYLYWAYKMNIPVFCPGLTDGSLGDMLYFHSFRTSGLIIDVVQDIRAMNGEAVHANPKKTGMIILGGGLPKHHICNANMMRNGADYAVFINTGQEFDGSDSGARPDEAVSWGKIRGSAKTVKVYCDATIAFPLLVAETFATKRDQTCESKT

SEQ ID NO: 6342 - protein, 54 aa, Triticum aestivum
MGSATVLEVILAIILPPVGVFLRYKLGVEFWICLLLTILGYIPGIIYAVYVLVV

SEQ ID NO: 6343 - protein, 232 aa, Brucella suis 1330
MDEARKLKIAAAAEALTYVKDGMRLGIGTGSTAEEFVRLLAEKVKGGFRVIGVPTSERTAKLCEELGVALTTLEETPHLDLTIDGADEVDGELSLIKGGGGALLREKIVAAASDSMIVIADQSKVVETLGRFPLPIEVNRFGLGATIRAIEAAAVKCGLAGPLNLRLKDGSPFLTDGGHYIVDASFGRIPDPKTLSDALFAIPGVVEHGLFIGLARAAIIAGTDGIRTMNRS

SEQ ID NO: 6344 - protein, 438 aa, ASPERGILLUS NIDULANS FGSC A4
MVPPMTSAVLHRDTRFVPKKAVGGKGSYLLLEDGTKFLDSTGGAAVSCLGHGHEKIIQAITEQFTKVEYCHTAFFGTEASENLASLLVDSTGGKLSKLFVVSSGSEAVEAALKLARQYFLELPTPQPQRTRFIARKPSYHGTTLGALGVGGHALRRQPFEPILSQNVSHVSPCYAYRGKNDGESDADYVARLAGELDAEFRRVGPDTVCAFIAEPIVGAALGCVPAVPGYFAAMKTICEKHGALFILDEIMCGMGRCGTLHAWEQEDVTPDLQTIGKALGGGYAPVSGLLISDKVVQTVDKGTGAFRHGQTYQGHPISCAAALAVQTVIVEEQLLDNVKSMGEYLEKRLRGTLEGMQYVGDIRGKGLFWGVEFVKNKATKEPFSSETALAFKIQETGTVNGTRGDHIILAPAYNVTKEEIDIIVDTTAKVLAEVFAQL

SEQ ID NO: 6345 - protein, 292 aa, Oryza sativa (japonica cultivar-group)
MAIATESRCEEEKASPHSQEVKRWVLSDFDIGKPLGRGKFGHVYLAREKRSNHIVALKVLFKSQLKQSQVEHQLRREVEIQSHLRHPNILRLYGYFYDQTRVYLILEYALKGELYKELQRCKHFSERRSATYIASLAHALIYLHGKHVIHRDIKPENLLIGSQGELKIADFGWSVHTFNRRRTMCGTLDYLPPEMVEKTEHDYHVDIWSLGILCYEFLYGVPPFEAKEHSETYRRIVKVDLKFPLKPFVSPAAKDLISQMLVKNSAHRLPLHKLLEHPWIVQNADPSGVYRG

SEQ ID NO: 6346 - protein, 370 aa, Pneumocystis carinii
MDSKHSVFNVMGQEFVLQKGYEVIKGLGKGSYGVVCSAKNIEVEDNNKVAIKKITNIFSKKMLAKRALREIMLLQHFRNHKNITTLYDMDIVDPSKFNELYLYEELMQANLNSIIRSDQPLTDAHFQSFIYQILCGLKYIHSANVLHRDLKPSNLLINADCKLKICDFGLSRGISVNQGQGTEYMTEYVTTRWYRAPEVMLSFQSYSKAIDLWSVGCILAELLGRKPFFKGSNYVDQLNQIFCILGTPNENIISKIKSASAQSYIRSLPTLPKMPYSKIFPYANPDALDLLNCLLTFDPYDRISCEEALEHPYLIIWHDPNKEPVCSEQFDFGFEAIDSIEEIRQMIINEVSRFKGLTGNQKLYHSISNT

SEQ ID NO: 6347 - protein, 312 aa, Glycine max
KATNVIVVLGWLENIDDAPSPDASLLQRVMRVMVRRKIFSAEQSETGETLYGLTRASKWILRDTKMTLAPMLLLENHPIHLNPAHYISEIIREGTKNGTAFFKCHGHEQFEMTGLDPEYNRLFNEGMVCTARVVSKAVITGYKDGFNQIKSLVDVGGGIGGSLSEIVRAYPHINAINFDLPHVVATAPKYDGITHVGGDMFVSIPDADAIYMKWILHDWSDEHCVKILKNCRKAIPEKTGKVIIVDHVLRPEGNELFTDVGIAFDMMLLAHNAGGKERTEENWKWLFKETGFARYNIIKINALPSIIEAFPI

SEQ ID NO: 6348 - protein, 341 aa, Anabaena variabilis ATCC 29413
MLAALLYGQEDLRLEQLADPSPEVGEVVIKVGAATTCGTDLKVWRRGGHAKMLKLPTLFGHEAAGEIVAVGAGVTGWQIGDRVVANNSAPCMKCFFCQRQEYSLCPNLTWNNGTFAEYLKIPAPIVQHNLLQIPDELPLPLAAMTEPLACVLHGVARSQIKPQDKVVVLGDGAIGLMFVATLADNVEVLLWGGNDQRLEIGQKLGAAKTFNYHQNPDIPGTVKDLTQGWGADVVIEATGVPKVWETALACARPGAIVNLFGGCPRDTTITVNTEQMHYSELTLKGVFHNTPEYVRAALALIASRKIPFELLISEQRPLKDLEQVFDDMKARKVIKVAMVSS

SEQ ID NO: 6349 - protein, 166 aa, Pirellula sp. 1
MDETNQIILVGISFPIHFKITDSKSTLDMTPEQVTLVKESWEKVKPISEQAAELFYGRLFTLDPSLRSLFKGDMSEQGKKLMSTITLAVTSLDRLETILPTVQALGRKHAVEYEVPDSSYATVGEALIWTLGQGLGDDFTEDVKEAWLLTYTTLSGAMLSGKSTAA

SEQ ID NO: 6350 - protein, 355 aa, Sclerotinia sclerotiorum
MASRAPNPSSGSRKISFNVSEQYDIQDVVGEGAYGVVCSALHKPSGQKVAIKKITPFDHSMFCLRTLREMKLLRYFNHENIISILDIQKPRNYESFTEVYPIQELMETDMHRVIRTQDLSDDHCQYFIYQTLRALKAMHSANVLHRDLKPSNLLLNANCDLKVCDFGLARSAASQEDNSGFMTEYVATRWYRAPEIMLTFKEYTKAIDVWSVGCILAEMLSGKPLFPGKDYHHQLTLILDVLGTPTMEDYYGIKSRRAREYIRSLPFKKKVPFKTMFPKTSDLALDLLEKLLAFNPVKRITVEEALKHPYLEPYHDPEDEPTANPIPEEFFDFDKNKDNLTKEQLKQLIYHEIMR

SEQ ID NO: 6351 - protein, 174 aa, Zea mays
MEDEEHEVYGQEIPVDGEDVDMSAGDDATKELDEMKRRLKEMEEEAAALREMQAKVAKDMQDPNATTSENKEEMDSRSVFVGNHVDYACTPEEVQQHFNSCGTVNRVTILTDKFGHPKGFAYVEFVEVEPVQEAIKLNESELHGRQLKVAPKRTNVLGMKHPPGGGFNPSRPKG

SEQ ID NO: 6352 - protein, 370 aa, Methanocaldococcus jannaschii DSM 2661
MRDIKDNPIRRGIAEQSEAMHPGYTNRAKPYGCKRDPKDIVLKESEDIEGIAIEGPWLEDDISLEEIIKKYYLKIGFQASHIGKAIKIWKHIEEKRKKGDEITVFFGYTSNIVSSGLREIIAYLVKHKKIDIIVTTAGGVEEDFIKCLKPFILGDWEVDGKMLREKGINRIGNIFVPNDRYIAFEEYMMEFFEEILNLQRETGKIITASEFCYKLGEFMDKKLKSKEKEKSILYWAYKNNIPIFCPAITDGSIGDMLYFFKKYNKDEELKIDVANDIVKLNDIAINSKETACIVLGGSLPKHSIINANLFREGTDYAIYVTTALPWDGSLSGAPPEEGVSWGKIGAKADYVEIWGDATIIFPLLVYCVMK

SEQ ID NO: 6353 - protein, 336 aa, Sulfolobus tokodaii
GFTVALIQGDGIGPEIVSKSKRILAKINELYSLPIEYIEVEAGDRALARYGEALPKDSLKIIDKADIILKGPVGESAADVVVKLRQIYDMYANIRPAKSIPGIDTKYGNVDILIVRENTEDLYKGFEHIVSDGVAVGMKIITRFASERIAKVGLNFALRRRKKVTCVHKANVMRITDGLFAEACRSVLKGKVEYSEMYVDAAAANLVRNPQMFDVIVTENVYGDILSDEASQIAGSLGIAPSANIGDKKALFEPVHGAAFDIAGKNIGNPTAFLLSVSMMYERMYELSNDDRYIKASRALENAIYLVYKERKALTPDVGGNATTDDLINEIYNKLG

SEQ ID NO: 6354 - protein, 344 aa, Streptomyces coelicolor A3(2)
MTGGMSAVVWAGVNDVRVEEVPMPEVPPGWALVRVACTGICGTDLGIVHGKHPRARQGLILGHEISGWVEVTAPGGPPEGALVVAEPLISCKDCRACREGHSHVCARLGLFGIDAPGGAAQFVALPTSTLHQVPSRVEPTQAALTEPLAVAVHAVSRSGMEAGDVVAVFGAGPIGILTALVARHEGASHVVVAEPNARRRAVASDMGLIAVPDGAQLRDMVAELSQGDGADTTFDSAAHPAVAAELADVTRVLGRVVIVGVYKEPAAVDLQAVCFKEQSVVGVRVYTREDFRTAIDLVAQNALGLDRFPVSVYGFDRISDAFDAAATGSGGLKVLISTHRDEAT

SEQ ID NO: 6355 - protein, 384 aa, Xanthomonas axonopodis pv. citri str. 306
MNDTATPGFKPKKSVALSGTAAGNTALCTVGRSGNDLHYRGYDILDLATTSEFEEIAYLLVHGKLPNRGELRGYKAKLRSLRGVPAAVKTALEQLPPSAHPMDVMRTGVSVLGCLQPEKDDHNHPGARDIADKLMASLGSMLLYWYHYSHNGKRIEVETEDDSIGGHFLHLLHGFAPKDSWVRAMHTSLILYAEHEFNASTFASRVIAGTGSDMYSAIAGGIGALRGPKHGGANEVAFEVQKRYDTPDEAEADIKARVERKEVVIGFGHPVYTVSDPRNKVIKVVARELSDEQGSRKMYDIAERLESVMWDIKKMFPNLDWFSAVSYHMMGVPTAMFTPLFVLARTAGWSAHIIEQRVDGKIIRPSANYTGPEDQVFVPLDQRS

SEQ ID NO: 6356 - protein, 270 aa, Nicotiana langsdorffii x Nicotiana sanderae
MTMSLLSYLSLLIFLSSLCAASVDVQKKFLQCLSVSDQKFPIYTTNNKNYSSVLQFSIQNLRFNTTKTPKPLVIVTPVSEAEIQRVILCAKESSIHVRVRSGGHDYEGLSYVSEDPFVLIDLVGHRNITINVDDKTAWVETGSTIGELYYKISKKSKTLGFPAGLCPTVGVGGHISGGGTGVMLRKYGLAADNVIDARLMDANGRILDRKSMGEDLFWAIRGGGGNTFGLVLAWKIKLVDVPEKVIVFTIDKTLEQNATKLVHKWQYVSS

SEQ ID NO: 6357 - protein, 418 aa, Nicotiana langsdorffii x Nicotiana sanderae
YEGLSYVSEDPFVLIDLVGHRNITINLDDKTAWVETGSTIGELYYKISKKSKTLGFPAGLCPTVGVGGHISGGGTGVMLRKYGLAADNVIDARLMDANGRILDRKSMGEDLFWAIRGGGGNTFGLVLAWKIKLVDVPEKVIVFTIDKTLEQNATKLVHKWQYVSSKLHQDLYIRIFIHKDEQNIFLASFVSIFLGDIDRLLLIMQENFPELGLVRENCIEMSWIESTLYFAGFPRGESLDVLRSRGLPPTLYSEAKADYVQKPISVQQLEGIWDFFNAGEAKFEQMIFTPYGGRMDEISEYELPFPHRPGNLYEIQYLMFWDEEGVEEAERHMRWMRRLYAHMEPLVSTSPRAAYINYRDLDIGVNNKKGNTSYAQAKVWGIKYFKNNFDRLVQVKTKVDPSNVFRNEQSIPPLVEQE

SEQ ID NO: 6358 - protein, 174 aa, Triticum aestivum
MAPAVMASSATTVAPFQGLKSTAGLPVSRRSSASLGSVSNGGRIRCMQVWPIEGIKKFETLSYLPPLSTEALLKQVDYLIRSKWVPCLEFSKVGFVFREHNSSPGYYDGRYWTMWKLPMFGCTDATQVLNEVEEVKKEYPDAYVRVIGFDNLRQVQCVSFIAFRPPGCEESGKA

SEQ ID NO: 6359 - protein, 250 aa, Nicotiana tabacum
MGKCYPTVSEEYLKAVDKCKRKLRGLIAEKNCAPLMLRLAWHSAGTYDVCSKTGGPFGTMRFKAEQGHGANNGIDIAIRLLEPIKEQFPILSYGDFYQLAGVVAVEVTGGPDVPFHPGREDKTEPPVEGRLPDATKGSDHLRDVFVKQMGLSDKDIVALSGGHTLGRCHKERSGFEGPWTTNPLIFDNSYFTELLSGEKEGLLQLPSDKALLSDPAFRPLVEKYAADEDAFFADYAEAHLKLSELGFAEV

SEQ ID NO: 6360 - protein, 370 aa, Agrobacterium tumefaciens str. C58
MTVRSLFLLPGDGIGPEAMTEVRKLIEYMNSAHNAGFTVSEGLVGGSAYDAHGVAISDADMEKALAADAILFGAVGGPKWDGVPYEHRPEAGLLRLRKDLELFANLRPAICYPALAAASSLKPELVEGLDILIVRELTGGVYFGEPKQIIDLGNGQKRGIDTQIYDTFEIERIASVAFELARSRDNRVCSMEKRNVMKSGVLWNQVVTETHAAKYKDVQLEHMLADAGGMQLVRKPKQFDVIVTDNLFGDMLSDVAAMLTGSLGMLPSASLGAPDAKTGKRKAMYEPVHGSAPDIAGKSIANPIAMIASFAMCLRYSFNMVDEATKLEAAIANVLDKGIRTADIMADGCRQVGTSDMGDAVLAEFKALSA

SEQ ID NO: 6361 - protein, 427 aa, Nitrosomonas europaea ATCC 19718
MPPQNVATLSPGKGKQEIELPIVSGNEGPDVVDIRSLYAQSGMFTYDPGFVSTASCKSAITFIDGDKGVLLYRGYPIEQLATRCDFMEVSYLLLNGELPTPDQKAKFVDNIKNHTMLHEQLIKFLSGFRRDAHPMAVMVGVVGALSAFYHDAMDVSDAQHREQSAFRLIAKLPTITAIAYKYNIGQPFIYPHNDLGFTENFLHMMFATPAEQYTPNPVIVRALDRILILHADHEQNASTSTVRLAGSSGANPFACISAGITCLWGPAHGGANEACLNMLEQIGDVSRINEYIARAKDKNDPFRLMGFGHRVYKNFDPRATLMRETCHEVLDELGLHNDRLFKLALELEKIALEDDYFITKKLYPNVDFYSGIVQRALGIPTSMFTAIFATARTVGWVAQWNEMISDPEQKIGRPRQLYVGAPRRDVP

SEQ ID NO: 6362 - protein, 208 aa, Arabidopsis thaliana
MTSSVVVAGAGDKNNGIVVQQQPPCVAREQDQYMPIANVIRIMRKTLPSHAKISDDAKETIQECVSEYISFVTGEANERCQREQRKTITAEDILWAMSKLGFDNYVDPLTVFINRYREIETDRGSALRGEPPSLRQTYGGNGIGFHGPSHGLPPPGPYGYGMLDQSMVMGGGRYYQNGSSGQDESSVGGGSSSSINGMPAFDHYGQYK

SEQ ID NO: 6363 - protein, 119 aa, Triticum aestivum
MAETAAIAPPPQPMAPPQPVEENATAAPSQPMAPPQPMAENATAAPPQPMAESATVVVVVPPPPPDGTTTFLCLILAFFIPPLGVFLKYKCEIEFWICLILTFLAYAPGIIQAVRVIVK

SEQ ID NO: 6364 - protein, 292 aa, Arabidopsis thaliana
MGVIINHHFLAFIFGILGNVISFLVFLAPVPTFYRIYKRKSTESFQSLPYQVSLFSCMLWLYYALIKKDAFLLITINSFGCVVETLYIAMFFAYATREKRISAMKLFIAMNVAFFSLILMVTHFVVKTPPLQVSVLGWICVAISVSVFAAPLMIVARVIKTKSVEYMPFTLSFFLTISAVMWFAYGLFLNDICIAIPNVVGFVLGLLQMVLYLVYRNSNEKPEKINSSEEQLKSIVVMSPLGVSEVHPVVTESVDPLSEAVHHEDLSKVTKVEEPSIENGKCYVEATRPETV

SEQ ID NO: 6365 - protein, 435 aa, Chromobacterium violaceum ATCC 12472
MTGSIAVETNRKVTLSYNEGKETLDLPVLGGTLGPDVVDIRGFGKTGMFTFDPGFLATASCESKITFIDGDLGHLYYRGYPIEQLAEKSDYLEVCYLLLNGELPTAAQRKEFERGVMRHNMLHDQLMSLFKGFRRDAHPMAVMVGVVGALSAFYHDSLDISNPEHRRISAHRLIAKLPTIAAQAYRYNKGLPFSYPKNGLTYAENFLHMMFSTPCEEYKVNPVLARALDRIFTLHADHEQNASTSTVRLAGSSGANPFACIAACIACLWGPSHGGANEAVLKMLDEIGSVDNVADFMQGVKDKRYKLMGFGHRVYKNMDPRAAIMKQTCDEVLNELGLHNDPKFKLAMELEKIALSDPYFIERKLYPNVDFYSGIVLSAIGIPVSMFTPIFALARTVGWIAHWNEMIGDPGMKIGRPRQLYTGAARRDFVEVAKR

SEQ ID NO: 6366 - protein, 454 aa, Bacteroides thetaiotaomicron VPI-5482
MPEYELIKVIGQGGMGSVYEGRSGDGKRVAIKMMNSKATMNPEFKELFYIEAAALKKMRHPSVVGIVDNPFSDEHGNMYLPMEYVDGETIEHHVEMAGPYTEFTAKDLMGKILDAMAYIHRMGCIHRDIKPSNIMVRPDGSICIIDFGIAKDMKTSTGKTIGRIIGTDGYMSPEQAKGDSIDYRTDIYSLGCLLHYMLTGSHAIKKRSNDYDTICSILNDEFPRAKTFNPHLSDQTQEAILKAVDKNMLRRFQTVMEFKSGLFRETVVDPNRVKVSVGRRECDITIPSDYISGHHLEIEYREERCTGSIHRYLLFTDSSTNGTSVDGKYLRHGSIKIPFSFENPSPLPNVWLAGRSEYLLDWDEVIQKLRDKGGRTVIMEEVVGDILPPTPPTPSVKEDKLGIGYGILSVVCPIVGWVLWAQWKKETPRRARAAAICGWIGFVVGFIINILSSI

SEQ ID NO: 6367 - protein, 101 aa, Glycine max
  unsure (1)..(101): unsure at all Xaa locations
STENQVNGEIYNHEELRKQLPNHTFRTGSDCDVIAHLYEEHGENFMDMLDGYFHLFCWISXNSFIVARDAIGVTSLTLGGGLDGSVWISSEXXGXNDDANF

SEQ ID NO: 6368 - protein, 132 aa, Chlorobium tepidum TLS
MLMKIAKDPMRLFDDIWSGSQMAVAPSFKVDISEDENAYHLDAELPGIAKEQIALNIEDDVLTIKAERTHKEEEKKKNYHRVERTYGSFSRSFNIGEIIDQEHIGATYDNGVLHVTLPKTQPAKKTKEIPIN

SEQ ID NO: 6369 - protein, 503 aa, Pisum sativum
MDIPIPTRQLFINGDWKAPVLNKRIPVINPATQNIIGDIPAATKEDVDVAVAAAKTALTRNKGADWATASGAVRARYLRAIAAKVTEKKPELAKLESIDCGKPLDEAAWDIDDVAGCFEYYADLAEKLDARQKAPVSLPMDTFKSHVLREPIGVVGLITPWNYPMLMATWKVAPALAAGCAAILKPSELASLTCLELGEICKEVGLPRSVLNIVTGLGHEAGAPLASHPDVDKISFTGSSATGSKIMTTAAQLVKPVSLELGGKSPLVVFEDVDLDKAAEWAIFGCFWTNGQICSATSRLILHESIATEFLNRIVKWIKNIKISDPLEEGCRLGPVVSEGQYEKILKFVSNAKSEGATILTGGSRPEHLKKGFFIEPTIITDVTTNMQIWREEVFGPVLCVKTFSTEEEAIDLANDTVYGLGAAVISNDLERCERVTKAFKAGIVWVNCSQPCFTQAPWGGVKRSGFGRELGEWGLDNYLSVKQVTQYISEEPWGWYQPPAKL

SEQ ID NO: 6370 - protein, 526 aa, Glycine max
  unsure (1)..(526): unsure at all Xaa locations
MVSPISHLPLIIVLLLSFSLANSASLQESFVQCLNLNSDRTFPFYSSIYTPSNPSFTSILDSSAQNLRLLVPSAPKPEFIFTPSRDSHVQAAVICSKKLGIHIRVRSGGHDYEGISYVSEIETPFIVVDLVKLRGINVDVKSNTAXXVQAGATTGEXVYYRIYEKSSVHGFPAGLCTSLGIGGHITGGAYGSMMRKYGLGADNVLDAKIVDANGRILDRKAMGEDLFWALRGGGGGSFGILLWWKVKLVPVPPTVTVFTVKKTLEQGATKLLHRWQEVAPFLDENLFIRVRIQRAQSTVTTSYEGLFLGGARKLLKIMKTSFPELGVTRKDCMETSWIKSVLYIAGFPSGTPPEVLLKGKPIAKFFFKGKSDFVRKPIPETGLEGLRQRLLVEDSPLILWSPYGGRMNQFSESDTPFPYRNGTLFISLYISLWQEGEKNVAKHIDWIGNLHNYMGAYVPSFPRGQYVNYRDLDLGINTKNNTGNIQESAWGYRYFKNNFDRLVKIKTKVDPQNVFRHEQSIPPLPK

SEQ ID NO: 6371 - protein, 170 aa, Escherichia coli
  unsure (1)..(170): unsure at all Xaa locations
XSLKLISNDLRDGDKLPHRHVFNGXGYDGDNISPHLAWDDVPAGTKSFVVTCYDPDAPTGSGWWHWVVVNLPADTRVLPQGFGSGLVAXPDGVLQTRTDFGKTGYDGAAPPKGETHRYIFTVHALDIERIDVDEGASGAXVGFNVHFHSLASASITAXFSEGGSHHHHHH

SEQ ID NO: 6372 - protein, 240 aa, Arabidopsis thaliana
MGRGKIAIKRINNSTSRQVTFSKRRNGLLKKAKELAILCDAEVGVIIFSSTGRLYDFSSSSMKSVIERYSDAKGETSSENDPASEIQFWQKEAAILKRQLHNLQENHRQMMGEELSGLSVEALQNLENQLELSLRGVRMKKDQMLIEEIQVLNREGNLVHQENLDLHKKVNLMHQQNMELHEKVSEVEGVKIANKNSLLTNGLDMRDTSNEHVHLQLSQPQHDHETHSKAIQLNYFSFIA

SEQ ID NO: 6373 - protein, 331 aa, Zea mays
  unsure (1)..(331): unsure at all Xaa locations
RTRGLRELEALTNEIDEESQIVGEVLRIKELLLXREDHSDATLFDSLRRLQLMQLSVSTLKATEIGRAVNRLRKHNSRKIRHLVCTLIEGWKVLVDEWVSTTNAALTENSPGSSNPSVVDEEEEGLPSPPLDEGAFFATQTTSIQLSEFFDEMDEDGNLRHSNDPSLAKQEGQANPQTLQSSSLQAKPHGALNKQSNNPSSYESGPGRPVKAAQQRPFGDMKPKQTREHVAIERKPMASQTDKSRPGARPSAGAKLELAKPKVYDDGLDNNRKLEAAKRRLQERYQEAENAKRQRTIQVMELGDIPKPKNQNRQPVVKSRNSLRNWANGRR

SEQ ID NO: 6374 - protein, 347 aa, Sinorhizobium meliloti
MKAVRLESVGNISVRNVGIPEPGPDDLLVKVEACGICGTDRHLLHGEFPSTPPVTLGHEFCGIVVEAGSAVRDIAPGARITGDPNISCGRCPQCQAGRVNLCRNLRAIGIHRDGGFAEYVLVPRKQAFEIPLTLDPVHGAFCEPLACCLHGVDLSGIKAGSTVAILGGGVIGLLTVQLARLAGATTVILSTRQATKRRLAEEVGATATVDPSAGDVVEAIAGPVGLVPGGVDVVIECAGVAETVKQSTRLAKAGGTVVILGVLPQGEKVEIEPFDILFRELRVLGSFINPFVHRRAADLVATGAIEIDRMISRRISLDEAPDVISNPAAAGEVKVLVIPSAERVAQQ

SEQ ID NO: 6375 - protein, 482 aa, Chloroflexus aurantiacus
MLPLYIVEPSLIHAPDFAARHWTFIRGCLVELRANLARLGQPLVVRVGEAVEVLDHLVSTWPIEAIWAHEETGNLLSYARDRAVRRWARARGIPFHELPQNGVVRRLPSRDEWQARWEERMAAAQAQPPSALPPLAIDPGTIPTADELSLPPDTLSEHQPAGETAALQTLTDFIHRRSQQYHRALASPLTAWEGCSRLSAYLAWGALSIRTVVQATRHRISELAFDPSPATRGWVRALNAFESRLHWHCHFIQKLEDEPEIEVRNLVRAYDGMREENHRPDLLVAWASGRTGYPFVDACMRALTATGWLNFRMRAMLVSFVAYDLWQHWREPALILARRWIDYEPGIHYSQMQMQAGTSGNRTIRIYNPVKQGIDHDPEGIFIRRWVPELAHVPTPYIHTPWLLDRHGQERAGCRIGRDYPAPIVDHEAAYRRARAAIAAVRARPETAQEAAAVHQRHGSRTWRPQRRPSKTVSSRQLRLDL

SEQ ID NO: 6376 - protein, 492 aa, Streptomyces coelicolor A3(2)
MTHELFDSKGLLGSAPAAFVAGEYELDSSHGTLPVINPANGQLVAEVPSSSSSTVDRAVTAAVAAQREWGRRSHVARAAVLEAVRDAIAVHADELARIVSVEQGKPLSDARGETEGACAFFDFAISQKYRAVGSMMASEPGRSLGVREEPIGVVAAILPWNFPVAIFARKVAPALMAGNAVVLKPSELTPLSALALARLCRLAGVPDGLLSVVCGEGKDTGRALVTHPGVGMVTMTGSTRGGREILAQVADQIIPVSLELGGKAPFIVFEDADLDAAVEAAADARLWNTGQVCTCNEVTYVHADLHDEFVRRVVDRFASVTPLDPFAAGSRLGPLVAERERTRVQGMVDAAVAAGARVRTGGGRPDGEQYQSGAWFAPTVLTNVRPEMDIARREVFGPVLPIIPFDAEAEVVSAANSTAYGLTAYVYTRDLSRAMRMIDALEFGEVYVNQAGPEQVQGFHTGWKSSGLGGDDGPHGYEKYLRRKTVYVRHAV

SEQ ID NO: 6377 - protein, 221 aa, Triticum aestivum
  unsure (1)..(221): unsure at all Xaa locations
MVLEAVMVVVDNSESSRNSDYQPTRFDSQVDAVNITFQSITQGNPESSVGLMSMGGKGPEVLVTLTTEQGKILEGLHRTKKKIGGSSHLKTGIQVATLALKHRQNRSQRQRIIVFVCSPVEESEKELTTLAKKMKKANISVDFVLFGDLDDDSTKNKLQLFIDTVKTNEGCHLVVIPPSSKLLSDQLVSXPILLGENAGGSGGAGGAGGGNDXVEFGFDPA

SEQ ID NO: 6378 - protein, 503 aa, Burkholderia cepacia R1808
MQFNDILAALDIDLAQWKGNALTARSPVDGATLATLAVDSPADAERKIDAAHAAFLKWRTVPAPVRGELVRVFGNVLREHKAELGRLVTLEAGKITSEGLGEVQEMIDICDFAVGLSRQLYGLTIASERPGHRMMETWHPIGVCGVISAFNFPVAVWAWNAALAFVCGDPVVWKPSEKTPLTAIACHQLLAKALREFDRTHPGVAPEGLHQLVLGMRDVGEVLTSSKKVPVISATGSVRMGQEVAKVLSQRLARGILELGGNNGMIVAPSADLDLVVRAVTFAAVGTAGQRCTTLRRLIVHRSIVDQLLPRIEKAYASVKVGSPLEEGTLVGPLVDRAAFDAMQKALADAREQGGEVKGGERVDVGHADAYYVRPALVRMPKQSAVVERETFAPILYVLVYDDFEQAIDVHNAVPQGLSSAIFTNDMREAEQFMSAAGSDCGIVNVNIGTSGAEIGGAFGGEKETGGGRESGSDAWKAYMRRATNTINYSRQLPLAQGVKFDV

SEQ ID NO: 6379 - protein, 432 aa, Wolinella succinogenes
MDNKTLAQEDLRYLWHPCTQMKDHEQFPLIPIARGKGVYLYDFEGNAYIDGVSSWWVNLFGHSHDYINSQIVEQMGRLEHVILAGFTHEPIIKLSKRLVEMTPHGLEKCFYADNGSSAIEVALKMSFHRHKIEGKKRALFLSLSNSYHGETIGALSVGDVALYKETYGEILLATLQTPVPRDLTQEATQEALEALEVILENRGEEISAFVLEPLVQCAGGMHMYSADYVKGASQLCRARGIHLIFDEIAVGFGRTGTLLALEQCGVVPDFLCLSKGITGGYLPLSVVMMSQETYDCFYAPYHENRAFLHSHSYTGNALACAAANATLDLLEDGSVLKNNRLLGERIDTHLKRLALHPRIGNARRTGMIAALDLLGFDPKERVGLRVYSEALKRGILLRPLGNVIYFMPPYVITLTEIDQVFEALEEVLGRIL

SEQ ID NO: 6380 - protein, 168 aa, Zea mays
MAAASSATSVHDFTVKDASGKDVDLSVYKGKVLLIVNVASQCGLTNSNYTELSQLYPKYKDQGFEILAFPCNQFGGQEPGTNDEIVQFACTRFKAEYPIFDKVDVNGSNVSPLYKFLKSSKGGLFGDSIKWNFSKFLVDKEGRVVDRYAPTTSPLSIEKDIKKLLGSS

SEQ ID NO: 6381 - protein, 409 aa, Sulfolobus tokodaii str. 7
MLYKEPEDGEKIKFDKGKWIVPNKPVILYIEGDGIGPEITNAAIKVINKAVERAYGSSREIKWLEVYAGEKAEKLVNDRFPKETQEMLLKYRVVLKGPLETPIGKGWKSVNVAIRLMLDLYANIRPVKYIEGLESPLKHPEKVDMIIFRENTDDLYRGIEYPFNSEEAKKIRDFLRKELKVEIEDDTGIGIKVMSKYKTQRITRLAIQYAIEHKRKKVTIMHKGNVMKYTEGAFREWAYEVALKEYRDFIVTEEEINQGKPDQGKIILNDRIADNMFQQIIIRPEEYDIILAPNVNGDYISDAAGALIGNIGMLGGANIGDEGGMFEAIHGTAPKYAGKNVANPTGIIKAGELMLRWMGWNEAADLIEKAINMAIRDKKVTQDIARFMGVKALGTKEYADELIKIMDTI

SEQ ID NO: 6382 - protein, 347 aa, Sulfolobus solfataricus
MRAVRLVEIGKPLSLQEIGVPKPKGPQVLIKVEAAGVCHSDVHMRQGRFGNLRIVEDLGVKLPVTLGHEIAGKIEEVGDEVVGYSKGDLVAVNPWQGEGNCYYCRIGEEHLCDSPRWLGINFDGAYAEYVIVPHYKYMYKLRRLNAVEAAPLTCSGITTYRAVRKASLDPTKTLLVVGAGGGLGTMAVQIAKAVSGATIIGVDVREEAVEAAKRAGADYVINASMQDPLAEIRRITESKGVDAVIDLNYSEKTLSVYPKALAKQGKYVMVGLFGADLHYHAPLITLSEIQFVGSLVGNQSDFLGIMRLAEAGKVKPMITKTMKLEEANEAIDNLENFKAIGRQVLIP

SEQ ID NO: 6383 - protein, 470 aa, Arabidopsis thaliana
MNIYTYTKSYVFPQMDQEEEEIEIPNYFICPISLEIMKDPVTTVSGITYDRQNIVKWLEKVPSCPVTKQPLPLDSDLTPNHMLRRLIQHWCVENETRGVVRISTPRVPPGKLNVVEEIKNLKKFGQEALGREETLQKLEVLAMDGNNRRLMCECGVHKSLILFVVKCTSEDEDGRRRIKGLDESLRLLHLIGIPSNDAKTILMENDRVMESLTWVLHQEDFLSKAYTIVLLRNLTEYTSSHIVERLNPEIFKGIIGFLKDVVNSVNRTSPTVRETVQSSSRPSLGKTEPSKLDHSLVIKQAVTAALMILLETSSWSRNRSLLVDLGAVSELIELEISYTGEKRITELMLGVLSRLCCCANGRAEILAHRGGIAVVTKRLLRVSPAADDRAISILTTVSKFSPENMVVEEMVNVGTVEKLCSVLGMDCGLNLKEKAKEILKDHFDEWKKFPCIDITLLTKLLSISPKGPKI

SEQ ID NO: 6384 - protein, 108 aa, Zea mays
MEDEEHEVYGQEIPVDGEDVDMAAGDDATKLQELDDMKRRLKEMEEEAAALREMQAKVAKEMQGVDPNATTSENKEEMDSRSVFIGNVDYAWCLRYQVVFLGQKKKKK

SEQ ID NO: 6385 - protein, 384 aa, Rickettsia bellii
DISKVYSEADCFTYDPGFMSTASCRSTITYIDGDQGILRHRGYDIKDLAEKSDFLEVAYLLIYGELPNNKLYNDFTKKVAHHALVNERLHYLFQTFCSSSHPMAIMLAAVGSLSAFYPDLLNFFKEADYELTAIRMIAKIPTIAAMSYKYSIGQPFVYPDNSLDFTENFLHMMFATPCEKYKVNPVIKNALNKIFILHADHEQNASTSTVRIAGSSGANPFACVSTGIASLWGPAHGGANEAVINMLKEIGSVENIPKYIAKAKDKNDNFRLMGFGHRVYKNYDPRAAVLKETCKEVLKELGQLDNNPLLQIAIELEAIALKDEYFIERKLYPNVDFYSGIIYKAMGIPPQMFTVLFATARTVGWMAQWKEMHEDPEQKISRPR

SEQ ID NO: 6386 - protein, 194 aa, Mirabilis jalapa
MMKNDMNKSGGGVIAKDVNDNTKVNGANNNADLAKPPAKAQVVGWPPVRSYRKNMLAVQKSTGAPESESEKPAANGGLVKVSMDGAPYLRKVDLKLYKSYQDLSDALGKMFSSFTLGNYGSQGMIDFMNESKLMDLINGSDYVPTYEDKDGDWMLVGDVPWEMFVESCKRLRIMKGKEAAGLAPRAMEKCKNRI

SEQ ID NO: 6387 - protein, 601 aa, Zea mays
GQPPRPSVVTCAAKQTLSGCCPLSSPRRAVGMEGGGVGDAYGEDRATEEQLITPWAFSVASGYTLLRDPRHNKGLAFSEAERDAHYLRGLLPPALASQELQEKKLMHNLRQYERPLHRYIAMMDLQERNERLFYKLLIDNVEELLPVVYTPTVGEACQKYGSIYRRPQGLYISLKDKGKILEVLKNWPERSIQVIVVTDGERILGLGDLGCQGMGIPVGKLSLYTALGGVRPSACLPITIDVGTNNEALLNDDFYIGLRQRRATGEEYHELLEEFMTAVKQNYGEKVLTQFEDFANHNAFDLLEKYRESHLVFNDDIQGTASVVLAGLLAALKVVGGTLADHTYLFLGAGEAGTGIAELIALEMSKHTGSPIEECRPKIWLMDSRGLIVASRKESLQAFKKPWAHEHGAVETLLEAVRSLKPTVLIGTSGKGGTFTKDVVEAMASQNERPVVFALSNPTSHSECTAEQAYTWTEGRAVFASGSPFPAVELDGRALVPGQSNNAYIFPGFGLGVVISGAIRVRDDMLLAASEALAEQVTEAHYAKGLIFPPFTNIRAISARIAAKVAAKAYELGLASRLPRPDDLVSYAESCMYTPTYRSYR

SEQ ID NO: 6388 - protein, 408 aa, Nicotiana tabacum
MDEATCSTNALPPFLTKTYEMVDDPSSDAIVSWSSSNKSFVVWNPPDFARDLLPRYFKHNNFSSFIRQLNTYGFRKVDPEKWEFANEDNFFRGQPHLLKNIHRRKPVHSHSAQNLHGLSSPLTESERQGYKEDIQKLKHENESLHLDLQRHQQDRQGLELQMQVFTERVQHVEHRQKTMLSALARMLDKPVTDLSRMPQLQVNDRKRRLPGNSCLYNETDLEDTRAISSRALTWENMNPSSLLTINAELLNQLDSSLTFWENVLQDVDQAWIQQNCSLELDESTSCADSPAISYTQLNVDVGPKASDIDMNSEPNANTNPEVAAPEDQAAVAGTTTNVPTGVNDIFWEQFLTENPGSVDASEVQSERKDIGNKKNESKPVDSGKFWWNMKSVNSLAEQLGHLTPAEKT

SEQ ID NO: 6389 - protein, 57 aa, Glycine max
MADDSTATCIDILLAIILPPLGVFLKYGCKVEFWICLVLTLFGYIPGIIYAVYAITK

SEQ ID NO: 6390 - protein, 233 aa, Ralstonia solanacearum
MSSPSLAAPALARARDRLARRRTAGVLSRHHLLIIAIAIVIAIIALLLPRTCHAAAGAQAAPAPQPAAAGPCPTALDFRVRRLQDDAPQNLCQYAGRVVLVVNTASYCGYTYQYEGLEALYARFRDKGLTVLGFPSNDFEQEPGTGKQIADFCYNTYGVKFPMFSKTSVVGPAASPLYHWLAQQTGQPPKWNFHKYLLDRSGRVVAVYPSKVEPGDPALIKRIDALLAEPAPR

SEQ ID NO: 6391 - protein, 301 aa, ASPERGILLUS NIDULANS FGSC A4
MAPYSKTVKSSAYYSRYQTKYRRRREGKTDYYARKRLITQAKNKYNAPKYRLVVRFTNRDIVTQIVYSEITGDKVFASAYSHELKRYGITNGLTNWAAAYATGLLLARRTLKKLGLDEDFTGVEEPDGEFSLTEAAETEEGTRRPFKAFLDVGLARTSTGARVFGAMKGASDGGIFIPHSESRFPGYDIEAEELDAETLRSYIFGGHVAEYMEGLADDDEERFRGQFHKYTENEIDAGDIEELYAEAHKAIRADPFKKDESEGPKKTKEEWKAESKKYRKTKLSHEEKKARVEAKIRELAA

SEQ ID NO: 6392 - protein, 321 aa, Rhodococcus sp. X309
AAAGGKIDATADANKLALDVIGLAGFGYDFASFDGDEHPFVGAMSRVLEHVNRTSNDIPFLRKLRGNGADLQYEKDIAFVRTVVDDVITERQAKPGEHQDDLLDLMLNNIDDETGEKLDPVNIRNQVLTFLVAGNETTAGAIAFALYFLSRHPEIADAARAEVADITGGETPAFEDVARMRYLRRVVDETLRLWPSAPGYFRKVRTDTTLGGRYAMPKGSWVFVLLPQLHRDPVWGENPDSFDPDRFKPENVKKRPAHAYRPFGTGPRSCIGRQFALHEAVLSLATILQRYSFQSDPEYKLDVREALTLKPVGLELSLQRL

SEQ ID NO: 6393 - protein, 393 aa, Azotobacter vinelandii
MLTEQQRAIVKATVPLLETGGEALTSHFYRIMLAEHPEVRPLFNQAHQASGEQPRALANAVLMYARHIDRLEALGPLVAQIVNKHVSLQVLPEHYPIVGACLLRAIREVLGAETATDAVLDAWGAAYGMLAELLIGAEEAAYAAGAAVPGGWRGARAFRVARRVVESEEIVSLHLRPEDGGALPAFRPGQYIGLRLVLDGEEVRRNYSLSAAPNGEEYRISVKRHATGRVSRHLHEQVREGDRLELFPPAGEFVLNDSDKPLVLIGAGVGVTPLLAMLEAALPGGRPIRFIHCARHAGVQAFRQQVEALAGRHPQLEAFFCYSAPRAGDRADANGRLDAQRLAAWLPAERDLDAYFLGPKSFMAQVKRQLRELGVPQEQCHYEFFGPAQALEA

SEQ ID NO: 6394 - protein, 266 aa, Zea mays
TTTASVEPEGRRRRKKLGTRFPAARIKKIMQADEDVGKIALAVPVLVSRSLELFLQDLIDRTYEITLQSGAKTLNSFHLKQCVKRYSSFDFLTEVVSKVPDLGGADSCGDERVLPRRRKSNGSDPENDESRSSKMAIRNANISPRGRGRGRGRGRGRPPTKRKEVGYVQFEDESSMFAEQGEPLPGEETVQEINGNETMPQSTQPPVEAPPTALAQATTSSKAEEANTDHQSDWPMPDAIGSIGVVPSGFGHLTVQVEDEDYDNED

SEQ ID NO: 6395 - protein, 158 aa, Xanthomonas axonopodis pv. citri str. 306
MNIVRYPQFPTHALQNEIKHVFDRFFEQNGDTDESAVVTAQWVPRVDIKEEVNHFVLYADLPGIDPSQIEVQMDKGILSIRGERKSESSTETERFSRIERRYGSFHRRFALPDSADADGITAAGRNGVLEIRIPKRPAATPRRIQVGNGQNTSGSTVQ

SEQ ID NO: 6396 - protein, 371 aa, Zea mays
MDPFHGIVKEEFDLDFDFTCASAAAAAAASWAVALPEMPRPMEGLGEVGPTPFLTKTYDVVDDPNTDTIVSWGFAGTSFVVWDANAFALVILPRYFKHSNFSSFVRQLNTYGFRKVDPDRWEFANEGFQRGQRELLRTIKRRRPPSSPSAQQGQAPSACLEVGQFGLDGEVHRLQRDRGILLAEVVKLRQEQQATRAQMQAMEKRITTAEQKQQQMTVFLARAMKNPSFIRMLVDREGLGGCRRELEDALSRKRRRPIEYLPRDGERSGTATESAVSDYISGLPVGVNGVAEADDDERRWERRGGGGGGEDTESFWAKLLNLGLEEKHREGRCDGEEGNGADVDNDVDDDVDVLVQSIYHLNPNPGSPGGK

SEQ ID NO: 6397 - protein, 284 aa, Thermoplasma acidophilum
MNGMQTAEFDGTGRKVSVIGVGTWSLEGSRSENVRSIRYALDHGVNFIDTAEMYGTEDIVGEAIKGYRREDLFIATKVWPTHFAYHDVLKSCEESLKKLGTDYVDLYQLHWPNPSVSIKETMSAMEKLVDEGRIRYIGISNFSVKEMKEAMSALAKYRIVSNQLEYNVATREIEDEGIYDFCRKNGMAIIAYSPLSHGKIFGNEMILETLTDIGKKYGKRPAQVALNWIIRKGAFPIPKASKPIHMAENIESTDFTLSDEDMKTLDSLYQRHPIRSIASRYKGH

SEQ ID NO: 6398 - protein, 193 aa, Zea mays
MSAVNITNVAVLDNPTAFLNPFQFEISYECLVPLDDDLEWKLIYVGSAEDENYDQQLESVLVGPVNVGTYRFVLQADPPDPSKIREEDIIGVTVLLLTCSYMGQEFMRVGYYVNNDYDDEQLREEPPAKVLIDRVQRNILADKPRVTKFPINFHPEPSTGTGRQQQQQEPQTASPEKHAGSGEGNGSKPEADQ

SEQ ID NO: 6399 - protein, 360 aa, Pisum sativum
MDFSTNGSEESELYHAQIHLYKHVYNFVSSMALKSAMELGIADAIHNHGKPMTLPELSSSLKLHPSKVNILYRFLRLLTHNGFFAKTTVKSNEGEEETAYVLTPSSKLLVSGKSTCLSSLVKGALHPSSLDMWGVSKKWFHEDKEQTLFECATGENYWDFLNKDSDSLSMFQDAMAADSRLFKLAIQENKHVFEGLESLVDVAGGTGGVAKLIHEAFPHIKCTVFDQPQVVGNLTGNENLNFVGGDMFKSVPSADAVLLKWVLHDWNDELSLKILKNSKEAISHKGKDGKVIIIDISIDENSDDRGLTELQLEYDVVMLTMFLGKERTKKEWEKLIYDAGFSRYKITPICGFKSLIEVYP

SEQ ID NO: 6400 - protein, 440 aa, Rhodobacter sphaeroides 2.4.1
MAKLGKSAQPVLTHAEGIYVHTEDGRRLIDGPAGMWCAQVGYGRREIVDAMAHQAMVLPYASPWYMATSPAARLAEKIATLTPGDLNRIFFTTGGSTAVDSALRFSEFYNNVLGRPQKKRIIVRYDGYHGSTALTAACTGRTGNWPNFDIAQDRISFLSSPNPRHAGNRSQEAFLDDLVQEFEDRIESLGPDTIAAFLAEPILASGGVIIPPAGYHARFKAICEKHDILYISDEVVTGFGRCGEWFASEKVFGVVPDIITFAKGVTSGYVPLGGLAISEAVLARISGENAKGSWFTNGYTYSNQPVACAAALANIELMEREGIVDQAREMADYFAAALASLRDLPGVAETRSVGLVGCVQCLLDPTRADGTAEDKAFTLKIDERCFELGLIVRPLGDLCVISPPLIISRAQIDEMVAIMRQAITEVSAAHGLTAKEPAAV

SEQ ID NO: 6401 - protein, 503 aa, Glycine max
MAISIPSRQLFIDGEWKVPLLNNRFPIINPATEDIIGHIPAATKEDVDLAVDAAKRAFSHNKGKDWSSAPGSVRARYLRAIASKITEKKDELGKLEAIDCGKPLDEALADLDDVIGCFNYYAELAEGLDAKQNAPVSLPMETFKSYVLKEPIGVVALITPWNYPLLMATWKVAPALAAGCTAILKPSELASVTCLELAEICREVGLPPGVLNIVTGLGNEAGAPLSSHPDVDKISFTGSSATGSRIMTAAAQLTKPVSLELGGKSPIIVFEDVDLDKTAEWTIFGCFFTNGQICSATSRLIVHESIATEFVNRLVQWAKNIKISDPFEEGCRLGPIVSEGQYKKVLNCISTAKSEGATILIGGSRPEHLKKGYFVEPTIITDVTTSMQIWREEVFGPVLCVKTFSTEEEAIELANDTHYGLGSAVMSKDLERCERISKAIQAGIVWINCAQPSFIQAPWGGVKRSGFGRELGEWGLENYLSVKQVTKYISDEPWGWYQSPSKL

SEQ ID NO: 6402 - protein, 103 aa, Triticum turgidum subsp. durum
AVVAAMLLAVTEAAVSCGQVSSALSPCISYARGNGASPSAACCSGVRSLASSARSTADKQAACKCIKSAAAGLNAGKAAGIPTKCGVSVPYAISSSVDCSKIR

SEQ ID NO: 6403 - protein, 388 aa, Zea mays
MAGKGGSSNGGGGGRESKKPALLLGRYEVGKLLGQGNFAKVYHARSVRTGEEVAIKVMEKEKILKSGLMAHIKREIAVLRRVRHPHIVQLYEVMATKLRIYFVMEYVRGGELFARVARGRLREDDARRYFQQLVSSVAFCHARGVYHRDIKPENLLLDDAGELKVTDFGLSAVAEQMRHDGLFHTFCGTPAYVAPEVLSRRGYDAAKADLWSCGVVLFVLAAGYLPFRDRNLVAMYRKIHRGEFRCPRWFSPGLTRLLRRVLDTSPPRRATAAEIMGDEWFKVGFRRFSFRVEDDRSFTRFDLDDDASTSPPEPDTPRADAAAAGREKPRRVAAGLTSCASAPSLLQTPSLHISYNLARVITRGPSHPMHVLNVLKTHSNVSTVSSPS

SEQ ID NO: 6404 - protein, 159 aa, Glycine max
MDFRVMGLESPLFHTLQHMMDMSEDGAGDNKTHNAPTWSYVRDAKAMAATPADVKEYPNSYVFEIDMPGLKSGDIKVQVEDDNLLLICGERKRDEEKEGAKYLRMERRVGKLMRKFVLPENANTDAISAVCQDGVLSVTVQKLPPPEPKKPRTIQVKVA

SEQ ID NO: 6405 - protein, 383 aa, Rickettsia amblyommii
DISRVSAEADCFTYDPGFMSTASCQSTITYIDGDQGILRHRGYDIKDLAEKSDFLDVAYLLIYGELPSGEQYNNFTKQVAHHSLVNERLHYLFQTFCSSSHPMAIMLAAVGSLSAFYPDLLNFKEADYELTAIRMIAKIPTIAAMSYKYSIGQPFIYPDNSLDFTENFLHMMFATPCTKYKVNPIIKNALNKIFILHADHEQNASTSTVRIAGSSGANPFACISTGIASLWGPAHGGANEAVINMLKEIGSSEYIPKYIAKAKDKNDPFRLMGFGHRVYKNYDPRAAVLKETCKEVLKELGQLDNNPLLQIAIELEAIALKDEYFIERKLYPNVDFYSGIIYKAMGIPSQMFTVLFAIARTVGWMAQWKEMYEDPEQKISRPR

SEQ ID NO: 6406 - protein, 558 aa, Triticum aestivum
  unsure (1)..(558): unsure at all Xaa locations
MAAAAVASNGGAAPVPGRLASVYSEVQTSRIAHALPLPSVLRSHFTLADGPASTAAGSPDEIAKLFPCLYGQPSAAVVPSAEAGRDEXLKIGVVLSGGQAPGGHNVICGIFDYLQERAKGSTMYGFKGGPAGVMKGKYVELTTDFVYPYRNQGGFDMICSGRDKIETPEQFQQAEDTVNRLDLDGLVVIGGDDSNTNACLLGEYFRGRNLKTRVIGCPKTIDGDLKCKEVPTSFGFDTACKIYSEMIGNVMTDARSTGKYYHFVRLMGRAASHITLECALQTHPNVALIGEEVAEKKETLKNVTDYITDVVCKRAKLGYNYGVVLIPEGXIDSIPEIQKLIAXLNECYAIVXDEGGAWKASKLEPASRXFDFLPKTIQEQLLLERDPHGNVQVAKIETEKMLIAMVETELEKRRAAGKYSAHFRGQSXTHFFGYEGRCGLPTNFDSSYCYALGYGAGALLQFGKTGLISSVGNLAAPVEEWTVGGTALTALMDVERRHGKNKPVIKKAMVELDAXPFKKFASLRDEWAXKNRYISPGPIXFSGPGSDASNHTLMLSWR

SEQ ID NO: 6407 - protein, 297 aa, Triticum aestivum
MGDRPKLPARYEQVKLLGEGNFAKVYLARHMDTKEEVAIKVMDKEKLIKLGAVQQIKREIAVMRRLRHPNIVQLHKVMACKSRIFVVMEYVRGGPLYRHIPANSGLKEDETRRIFQQLVSALTFCHAQGVYHRDIKPDNLLVDEHGNLKVADFGLSAHADTARREALLHTVCGTPLYVPPEVFARRGYDGAKADAWSCGIVLFVLAAGRKPFRDDDFITLYRTICRGDYRCPRTFSPELVRIVRRLLQPNPAHRITLLQIKETDWFKKGFKEISFYIDNKDCLRSLDGSEELISVTL

SEQ ID NO: 6408 - protein, 336 aa, Agrobacterium tumefaciens str. C58
MLAIFCDTPGQLTAKDLPNPVRGEGEVLVRIRRIGVCGTDLHIFTGNQPYLSYPRIMGHELSGTVEEAPAGSHLSAGDVVTIIPYMSCGKCNACLKGKSNCCRNIGVLGVHRDGGMVEYLSVPQQFVLKAEGLSLDQAAMTEFLAIGAHAVRRGAVEKGQKVLIVGAGPIGMAVAVFAVLDGTEVTMIDGRTDRLDFCKDHLGVAHTVALGDGDKDRLSDITGGNFFDAVFDATGNPKAMERGFSFVGHGGSYVLVSIVASDISFNDPEFHKRETTLLGSRNATADDFERVLRALREGKVPEALITHRMTLADVPSKFAGLTDPKAGVIKGMVEVA

SEQ ID NO: 6409 - protein, 420 aa, Lotus corniculatus var. japonicus
MVLSNTASSGSESDLSIHSTFASRYVRTSLPRFKMPQESIPKEAAYQIINDELMLDGNPRLNLASFVTTWMEPECDKLIMASINKNYVDMDEYPVTTELQNRCVNMIAHLFNAPLGDSDTVGTVGSSEAIMLAGLAFKRTWQNRRKAEGKPHDKPNIVTGANVQVCWEKFARYFEVELKEVKLSEGYYVMDPQKAVDLVDENTICVAAILGSTLNGEFEDVKRLNDLLIEKNKETGWDTPIHVDAASGGFIAPFIYPELEWDFRLPLVKSINVSGHKYGLVYAGIGWVIWRNKEDLPEELIFHINYLGADQPTFTLNFSKGSSQIIAQYYQLIRLGYEGYKHVMENCRDNMLVLKEGLQKTGRFEIVSKDNGVPLVAFTLKDHTHYNEFQISDSLALRVDSAGIQHAPKYSARDRGPCSH

SEQ ID NO: 6410 - protein, 452 aa, Arabidopsis thaliana
MIDKPNQIMEEEGRFEAEVAEVQTWWSSERFKLTRRPYTARDVVALRGHLKQGYASNEMAKKLWRTLKSHQANGTASRTFGALDPVQVTMMAKHLDTIYVSGWQCSSTHTSTNEPGPDLADYPYDTVPNKVEHLFFAQQYHDRKQREARMSMSREERTKTPFVDYLKPIIADGDTGFGGTTATVKLCKLFVERGAAGVHIEDQSSVTKKCGHMAGKVLVAVSEHINRLVAARLQFDVMGTETVLVARTDAVAATLIQSNIDARDHQFILGATNPSLRGKSLSSLLAEGMTVGKNGPALQSIEDQWLGSAGLMTFSEAVVQAIKRMNLNENEKNQRLSEWLTHARYENCLSNEQGRVLAAKLGVTDLFWDWDLPRTREGFYRFQGSVAAAVVRGWAFAQIADIIWMETASPDLNECTQFAEGIKSKTPEVMLAYNLSPSFNWDASGMTDPLTC

SEQ ID NO: 6411 - protein, 75 aa, Glycine max
  unsure (1)..(75): unsure at all Xaa locations
MAFSMISSPAVTTVNRAGAGMVAPFTGLKFMAGFATRKTNFDFTCIASNGGRVQCTHVRPPVAKKXFATLSYLSD

SEQ ID NO: 6412 - protein, 146 aa, Vitreoscilla stercoraria
MLDQQTVDTSKATVPVLKEHGVTITTTFYQNLFAKHPEVRPLFDMGRQASLEQPKALAMTVGAAAQNIENLPAILPAVQKIAVKHCQAGVAARHYPIVGQELLGAIKELLGDAATDDILDAWGKAYGVIADVFIQVEADLYAQDAE

SEQ ID NO: 6413 - protein, 487 aa, Zea mays
RPPAQGRRLPVVNPTTEAHIGEIPAGTAEDVDAAVAAARAALKRNRGRDWARAPGAVRAKYLRAIAAKVIERKQELAKLEALDCGKPYDEAAWDMDDVAGCFEYFADQAEALDKRQNSPVSLPMETFKCHLRREPIGVVGLITPWNYPLLMATWKVAPALAAGCAAVLKPSELASVTCLELADICKEVGLPPGVLNIVTGLGPDAGAPLSAHPDVDKVAFTGSFETGKKIMAAAAPMVKPVTLELGGKSPIVVFDDVDIDKAVEWTLFGCFWTNGQICSATSRLLVHTKIAKKFNERMVAWAKNIKVSDPLEEGCRLGPVVSEGQYEKIKKFILNAKSEGATILTGGVRPAHLEKGFFIEPTIITDITTSMEIWREEVFGPVLCVKEFSTEDEAIELANDTQYGLAGAVISGDRERCQRLSEEIDAGIIWVNCSQPCFCQAPWGGNKRSGFGRELGEGGIDNYLSVKQVTEYISDEPWGWYRSPSKL

SEQ ID NO: 6414 - protein, 290 aa, Triticum aestivum
  unsure (1)..(290): unsure at all Xaa locations
MAISTDSRGEEKPSQHSQEEKRWVLSDFDVGKALGRGKFGHVYLAREKRSSQIVALKVLFKSQLKQSQVEHQLRREVEIQSHLRHPNILRLYGYFYDQTRVYLILEHAAKGELYKELQRCKHFSERRSATYIAYRKTLLVGVQGELKIADFGWSVHSFGVQGELKIADFGWSVHTFNRRRTMCGTLDYLPPEMVEKTEHDYHVDIWSLGILCYEXLYGRPRFDAKEHSETYRRIVKVDLKFPLKPFVSPAAKDLISQMLVKNSAHRLPLHKVLEHPWIVQNADPSGVYRG

SEQ ID NO: 6415 - protein, 258 aa, Pyrobaculum aerophilum str. IM2
MKETWRLVRRVVEDGDIVLEVLDARDPEATRSVEVEKIAEELGKRLLVVLNKADLVEREIAEQWKSYLESRGMNVVYISAKYRLGTRKLITHIRALAPRIPATVVVVGYPNVGKSTIINYLKGRHVAPTSPKPGWTRGEQLVKAKSWLTVLDTPGIVRTKSTGDLALDVIRGLVDPGTVDDPVPYAYALLKRVVKHNPDALKEAYGIESDIDNALVEIGKVKRRLLKGGRINIEEAARIVLKDWIVGKLRYALPPPNV

SEQ ID NO: 6416 - protein, 335 aa, Xylella fastidiosa Ann-1
MTQTITVIRGDGIGPEIMDATLSVLNALQANLNYEFADAGLSALEKHGDLLPEATLNSISKNKIALKSPLTTPVGEGFSSINVALRRKFDLYANVRPAKSFPNTKSRFSDNVDLITVRENTEGAYLSEGQTISPDGEVATSRARVTRKGSERIVRYAFDLARTTGRKKVTAVHKANIIKSTSGLFLKTARDVASQYPEIDFQEMIVDNTCMQLVMRPEQFDIIVTTNLFGDILSDLCAGLVGGLGLAPGANIGNEQAIFEAVHGSAPDIAGQGKANPCALLLGAVQMLDHIGQPQNAERLRNAIVATLNAKDSLTPDLGGNGNTMGFAKAIASRL

SEQ ID NO: 6417 - protein, 346 aa, Bacillus sp. KSM-K16
MRASVLKALKTIELEERTKPKPGAGEVLIQMKAVGICGSDLHYYEHGRIGERVAKPPFVLGHECAGVVTKVGPEVADLNVGDHVVIEPGLPCGECSSCRVGHYNLCPKVLFLSSPPNDGVLMEYICHPAKFTYKMPEGLSFELASLAEPLSVGLYTAQKTSIQPGSNIVIMGMGPVGLCMILAAKWYGASNIVVTDIEPYRLEIAKKIGAMDTIQVNHEADRAGLLAEADRLGGFDMVIDTSGAEAAFDMAVNLLKRGGTIGGIGFPGGAKSTIPLLKMMQREIVYQPIYRYRHTFKHALALLEKEQEAAQLLLTDFFPMSQISAAFDYAASNKDKSIKVIIHPDK

SEQ ID NO: 6418 - protein, 318 aa, Anabaena variabilis ATCC 29413
MKGLWLENNQLQLLTDIPIPEPAPEEALVRVLRAGICNTDLELLRGYYPYTGILGHEFVGVVEQGPENLLNQRVVGEINAVCGYCRFCRRGQPTHCENRTVLGIVNRHGAFAEYLCLPVKNLHPVPENVATEVATFTEPLAAALEIQQQVILSKDDRVLVVGDGKLGQLVAQTLALTGCELLVVGRHQEKLANLKVRGIQTGLVDAVQDRAFDIVVECTGNPEGFAIARRALRPRGTLVLKSTYAGNLSLDASSLVVDEITLIGSRCGSFPPALELLATGKVDVEPLIHAHYPLSQGLLAFEEAQRRGVLKVLLEIGN

SEQ ID NO: 6419 - protein, 273 aa, Lactobacillus gasseri
MKQLTLNNDVKIPIFGFGTYEISPDQTKQAVLSAFEEGYRLIDTAQYYQNEQQVGEAVKASGLNRDEVFITTKTMTDGYEDTKIGLDESLRRIGLDYFDLVLIHWPMGHDIDTWHALEAAYKAGKTRAIGISNFNSRQTLDLIHQSSVRPMVDQIETHLFLQQWKMHEFLEKENIVHESYSPLGNGQQNLISNPVLKEISEKYGKSPIQVILRYLVQNDVVTIPRSTNPAHIKSNIDIFDFELDNDDLKRLRVLDERKPIDGWPAEMREDEDY

SEQ ID NO: 6420 - protein, 505 aa, Synechococcus elongatus PCC 6301
MLSKELFQMPRGVAPAFAGRKPKGWAWASTAVPDFQGGFKRLINRFQGSKLWLACVPLAATIAVFWGVAANAQGSADPVPSAQFLVNNLWLMVATVLVIFMNAGFAMVETGLCRQKNAVNVLAKNLIVFTLAATAYWFIGYSLMYGSPVVDGFLYFGKGGPLGFFFDPTVSAETIKNDGLISSLDFLFQAAFAGTAATIVSGSVAERIKFVDFIIFSLILTAVIYPIAGSWQWNVGSGWLNKAGFIDFAGSTVVHSVGGWAALIGAITLGPRMGKFQDGRPGALPGHNLAIATLGALILWIGWYGFNGGSVLAFNTAVPYVAVTTTLGGAAGGISATITSWSTSGKPDLSMVINGILAGLVGVTAGCDGFGMGGSFIVGLIAGVLVVFSVYTFENLKIDDPVGACSVHLVCGIWGTLAVGLFNLEKGLFYGGGFGQLGSQILGIISYGVWTVVASVIIWNILKALLGLRVSPEEELQGLDIGEHGMEAYSGFAKDASNALSSISE

SEQ ID NO: 6421 - protein, 110 aa, Populus tomentosa
MDTDVTMVPAGEASSSSSRKPKRFEIKKWNAVALWAWDIVVDNCAICRNHIMDLCIECQANQASATSEECTVAWGVCNHAFHFHCISRWLKTRQVCPLDNSEWEFQKYGH

SEQ ID NO: 6422 - protein, 270 aa, ASPERGILLUS NIDULANS FGSC A4
MATNARYEPAPQRDSFEDQHYTQAPPSYQATAQEPTPRSEDDNVPDDFKFGGTVAEGTLPIRMQFIRKVYAILTVQLLLTTVMSSISFFSPSYCEWIRSNVWLMMVSVFGAFGFLLVTYWKRKSYPANLLFLSAFTILEAYSISVVTSYYQPRIVVQALILTLGLFVGLTLFACQTKYDFTNWMPYLFGALWFLILFGFVAAFVPHGSTMELIYGSLAALIFSGYILVDTQLIMRHYHVEEEIAASISLYLDILNLFLAILRILNNQNNN

SEQ ID NO: 6423 - protein, 192 aa, Zea mays
MSLCTIARRLCLSKPSSVNRLSVIWAHLYSTEAAKDTGAKKYKYPDVYDPYGPMSLPSEKVVDLADRIAALPPEEIKQIAPALLFRLNQEPPQAISGQGFSFGAQGGAGVGAGKAEEKKAEKTVFDVKLEKFDAAAKIKIIKEIRTFTDLGLKEAKELVEKAPVILKQSLTKDEAEAIIGKIKAAGGVAVME

SEQ ID NO: 6424 - protein, 160 aa, Glycine max
  unsure (1)..(160): unsure at all Xaa locations
MEPMDIVGKSKEDASLPKATMTKIIKEMLPPDVRVARDAQDLLIECCVEFINLVSSESNEVCNREDKRTIAPEHVLKALQVLGFGEYIEEVYAAYEQHKLETMQDSLRGGXWWXKWNNGAEMTEEEALAEQQRMFAEARARMNGGAIASKQPDADQSLDS

SEQ ID NO: 6425 - protein, 625 aa, Zea mays
MAGPEKTVVWFRRDLRIQDNPALAAAAKGGSVLPIFIWCPSDYGQYYPGRCSRWWLKQSLVHLGKSLELLGCPLVLIRAEDSTLAALLECVRSISATRVVYNRLYDPISLVLDNKIKNELPAHGISIQSFNGDLLYEPWDVYDENGQAFTTFNKYWEKCMSLPIEISQYLAPTRLVAAPGLANVRCCSIDDLGLESSKDVESSNALLSRAWSPGWRNAENMLEEFVSYGLLEYSEHGMKVGGSTTSLLSPYLHFGELSVRMIYQLVKMRQVKWQNEGKSEAEESVRLFLRSIGFREYSRYLCFNYPFTHERSFLGNLKHYPWLLDEGRFKSWRQGMTGYPLVDAGMRELWATGWTHNRIRVIVSSFAVKFLQIPWIWGMKYFWDVLLDADLESDILGWQYISGSLPDGHELSRLDNPEVQGQKYDPDGEYVRTWIPELARMPTEWIHSPWAAPNSILQVAGVELGFNYPKPIVELHMARECLDDAISTMWQLDTAAKLAELDGEVVDDNLNNIRNFDIPKVVLNKKLSPSTSSMEHRVLSTNGKDEKSQPTEVKALYKQIIRDDMMNDSNMDDTCSTANLKVTRKRSSSDSYFQKTADRDGTSKVEDNDSEDSGTSISRPSKKAA

SEQ ID NO: 6426 - protein, 355 aa, Blumeria graminis
MSTRAPNATTGSRKISFNVSEQYDIQDVVGEGAYGVVCSALHKPTGQKVAIKKITPFDHSMFCLRTLREMKLLRYFNHENIISILDIQKPRSFDSFTEVYLIQELMETDMHRVIRTQDLSDDHCQYFIYQTLRALKAMHSANVLHRDLKPSNLLINANCDLKVCDFGLARSAASQEDCSGFMTEYVATRWYRAPEIMLTFKEYTKAIDVWSVGCILAEMLSGKPLFPGKDYHHQLTLILDVLGTPTMEDYYGIKSRRAREYIRSLPFKKKIPFKQMFPKTSDLALDLLEKLLAFNPVKRITVDEALQHPYLEPYHDPEDEPTADPIPEEFFDFDKNKDNLSKEQLKELIFQEIMR

SEQ ID NO: 6427 - protein, 433 aa, Pseudomonas syringae
MSGMAGWVDLRHGVGQQANLPHSKVTKVILDMIAAMAGRGPDGQAVWLGPDLALGHCSTVASRYDFNEQPWIGEIRGATVAIMYTGQIYNMWQLQQELASFGPAPDRWSYAEIIRARLWRGYGTARSALRACSLLPLDGQKRELLLARDRLGLQPLYYTLTDGGIIFASVPTAIQAHPQFTAKLDRSALAIVLQPRMAMPGETPLKGLHELPPANVLSFSKRGHTQVRYWQLESAPHTDNFEQTSDHVRALLEGVVARQFEDQVPSAAMLSGGIDSTSVAALVMKQLATRGAGPALDTFCLKFDTDEDAFTSSELRPDIDAPFAALAAEYMGTRHTTLSATMQDLLNVIPATRTARGLPGWGQFDASMYLLFERMRDNFSVALTGEAADEIFGGYPYYFKPDLLARAQFPWLGDGPKLADYLSPALITAQQVA

SEQ ID NO: 6428 - protein, 495 aa, Shigella flexneri 2a str. 2457T
MNFHHLAYWQDKALSLAIENRLFINGEYTAAAENETFETVEPVTQAPLAKIARGKSVDIDRAVSAARGVFERGDWSLSSPAKRKAVLNKLADLMEAHAEELALLETLDTGKPIRHSLRDDIPGAARAIRWYAEAIDKVYGEVATTSSHELAMIVREPVGVIAAIVPWNFPLLLTCWKLGPALAAGNSVILKPSEKSPLSAIRLAGLAKEAGLPDGVLNVVTGFGHEAGQALSRHNDIDAIAFTGSTRTGKQLLKDAGDSNMKRVWLEAGGKSANIVFADCPDLQKAASATAAGIFYNQGQVRIAGTRLLLEESIADEFLALLKQQAQNWQPGHPLDPATTMGTLIDSAHADSVHTFIREGEGKGQLLLDGRNAGLAAAIGPTIFVDVDPNASLSREEIFGPVLVVTRFTSEDQALQLANDSQYGLGAAVWTRDLSRAHRMSRRLKAGSVFVNNYNDGDMTVPFGGYKQSGNGRDKSLHALEKFTELKTIWISLEA

SEQ ID NO: 6429 - protein, 443 aa, Photorhabdus luminescens subsp. laumondii TTO1
MSKTHYSESLNLKSHWMPFSANRSFQRDPRLIVAAEGQWLKDDKGRQIYDSLSGLWTCGAGHTRTEIQQAVAAQLSTLDYSPGFQFGHPLSFQLAEKIANLTPGDLNHVFFTSSGSESVDTAVKMVRAYWRVKGQPEKTKLIGRALGYHGVNIAGTSLGGIGGNRKMFGQLMDVDHLPHTLQTDMAFTPGMAETGGAELANEMLKLIELHDASNIAAVIVEPVSGSAGAIIPPKGYLQRLREICDQHNILLIFDEVITGFGRMGRWTGAEYFGVTPDLLNFAKQITNGAIPLGGVVASSEIYEAFMSQSLPEHSVEFSHGYTYSAHPVACAAGLATLDLLDKNHLIQRSAELAPHFETALHALRNCPNVTDIRNCGLVGAIELAARDGDTAVRPFDASMALWKAGFYVRFGGDTLQFGPMFNAERADLDRLFDAVGEVLHHID

SEQ ID NO: 6430 - protein, 348 aa, Actinosynnema pretiosum subsp. auranticum
MTLTDDEHTAHRHDEGAAAFQALATAAAGWGALRAAVELRLPDLLPDAPTAVPDLAALAGVAPTRLAQLVAVLADVGVLALDERAHVRHTPLSRALRSTDGLALTRLLTAGWADEAWRGLAEGVRTDTSPLELVHGRPLFDLLAADPAAAAVFHDAVATGPGDPFDEAIRSALDLTGAARVVDVGGGRGRLLAALLREHPVLSGVLFDLPEAVRDAVPELRGDDRVQIRAGDLFADRVGAADVYVLRTVLHVLDDAQAVRALANVRADAPAHARVVVVEALSDDEANRTYAAHSSLRLFVLCGGRERSTAEFAELFDRAGLELRSVTPTGTPYHLLEGAPRLSPRTDG

SEQ ID NO: 6431 - protein, 1148 aa, Photorhabdus luminescens subsp. laumondii TTO1
MKSEFKEGYCTLCRSRCGTVNEVRNDTLIKIQQNPKHPTGNAMCMKGKAAPELAHSPNRILHPLRRTNPKGDADPGWEKITWDEALTYVAEKLAFYKAESGAESVAFSVTSPSGTPLSDSLEWIERFIRNFGSPNVCYSTEVCNWHKDEAHKFTFGCSIPVADYRNAELIILWGHNPTNTWLAQAEALGAGRNAGAKLIVVDPRHTALAKESDNWLNINPGTDAALALGLINIIINRRGYDQAFVARWTNASLLVRNDNGLFLREKDINISAKKNRYVVWNNITQSPLPYDIHENVPCDENDHYALLGEFSINSAEDVNKKIPCKSAFQRLLNECQPYTPEYVEKITGITKEKLLYAADLIISSKRIAYHSWTGVAQHTNATQSERAIAVLYALTGCFDTQGSNRVYNKHPVNPVNARRLMPKEQQEKALGFKERPLGPPLDGWITSHDLYQAILHKRPYPIRAMMAFGTNMLSSHADTKIGIDALKQLEFHVHCDLFETPTAHYADILLPVNTPWEREGLRVGFEISAKAEELVQLRQKMISPRGESRSDNEIVFDLACRLGMNDLFFNGSVEAGWNYILEPIGLTVEALREKPAGISMPLIQHDRKYAGIDPVKNTVKGFDTETGVVEIYSEKLWRHGYPPLPIYDEPKENLNSESHFPYRLTSVKNGFYCHSQQRSLTRLRKKSPYPKLEINSRLAEKKGINNGDWVEVITRNGEARFKASLDDNIAYDTIIAEFGWWQACPDYGKEGFPAIGKNSSNYNALISDDSCDPISGASPLRSFRCDIKLAEDINPERRPWQGRKAFRVVDTKPEAKGVKTVIFESQDGTMLPDYEPGQHITVQVSIPGQDAPVIRAYSLTGTATLEGRKSYSISVRHQKSITSDGETFEGVMSSYINKTLVAGAEVNLTPPGGNFIIPLNAKQPVVMLAGGIGITPFISYLESLPANGEKPELLLLYANQNSNTHTFSKRLKEIESKIKQLKVINYYSNPLPVDIEGINYQYHGYITADAVPETLIKQQARFYMCGPAPMMKTFEEGLLTLGVPPFDIYKEMFRSLTPVKIKDGKSFAVKFEKSGVPLEWSPDKGTLLNFGEKSGIKMASGCRVGQCESCAVKLKSGEVQHLNGVEPSEQGMCLTCQCIPISDISIDA

SEQ ID NO: 6432 - protein, 496 aa, SYNECHOCOCCUS SP. WH 8102
MTSSGKVRIYELSKDLGLENKDVLDAAEKLSIAAKSHSSSISDAEAGQIRSLLKSKGNGSKASAPAPAKPAPGKAILSVKKAAPAKPAPAQAKPATPAKPAASASKPAAPAKPAAPAAPARPAPARAAAPAAPAKPVPRPAAAPPPRPQPAKPEVVSKPKPATPATASAPSKPTAPPARPTVVKPTVAKPTVAKPTVAKPTVAKPAPAKPAAAKPAPARPAPARPAPARPSADQPKPRPAAAPSRPTPGAGQKPQIVSRPGSAPRPGAPTRPGAPAPARPGAPVKAGPPTRPTPRPELVGKPVPRRPGTGAPTRSGAGAPQRPGTGVPQRPGSPGRPTRPGAPARSGGNTLELVGKPIRRDGSSTGSGGRPAPPTRPGAGSPQRPGMPSGMRKPVAPGELMQLQKPVGRPAAPAPRRPDAPTKAGDGAGTATPPVARPTPPTAPRRPGGFRPGAPGGQRRLDVRTGMTAPSWKPCAAVRHRSSARRSTSSARTTMR

SEQ ID NO: 6433 - protein, 223 aa, Oryza sativa (japonica cultivar-group)
MAWIGLCVLQKSPFLLCCGPCLEAPGRSGGGGGRRRGGDDGSAGRGGGKLGRSRAEQRGGRSGRSRAAEVAGGGGRRRDGELADPELTPAAAAAAAVAALAREGASSRTRPTAPLPWICSCFLFLFLKILTANTSLFGMSEFLLIYTVEHLFFAQLYDDRKQREACMSMSRAEHAHESYVDYLKPIIADVPSLRELLERIPAPEVERLRTGCGSGKKRGARRR

SEQ ID NO: 6434 - protein, 323 aa, Candida shehatae
MSPSPIPAFKLNNGLEMPSIGFGCWKLDKSTAADQVYNAIKAGYRLFDGAEDYGNEQEVGEGVKRAIDEGIVTREEIFLTSKLWNNYHDPKNVETALNKTLKDLKVDYVDLFLIHFPIAFKFVPIEEKYPPGFYCGDGDNFVYEDVPILETWKALEKLVKAGKIRSIGVSNFPGALLLDLFRGATIKPAVLQVEHHPYLQQPKLIEYAQKVGITVTAYSSFGPQSFVEMNQGRALNTPTLFEHDVIKAIAAKHNKVPAEVLLRWSAQRGIAVIPKSNLPERLVQNRSFNDFELTKEDFEEISKLDINLRFNDPWDWDNIPIFV

SEQ ID NO: 6435 - protein, 306 aa, Photorhabdus luminescens subsp. laumondii TTO1
MPLDKNVEKWLASTPEIAIGEDSPLEQLRIVLEHALIQQQGEWNDATYNSSFTVLAEDGFPIPVRMYVPYGKEKMSDKPALVYAHGGGWCLGSLDAWDRPCRKLAESMGCVIFSVDYRLAPENPFPVPLTDFYAALCYVTDNAEKFGINRQQIAVGGDSAGGNLAVAACLMSRNQEGPAICYQLLFYPALDASMETDSYDKYGEGYVLTKQMMAFFWQAYINEHNSRTNPLISPSHLTHFEGLPDATILLCEYDPLRSEGEAYAQQLRDAGVSVQIETIEGMIHGAMHMTAVTPSVEAFYKKFCFC

SEQ ID NO: 6436 - protein, 479 aa, Streptomyces coelicolor A3(2)
MSTELRRLRNYIDGEFRDAADGRTTEVVNPATGEAYATAPLSGQADVDAAMAAAAAAFPAWRDLVPAERQKALLKIADAFEERAEELIAAEVENTGKPIGLTRSEEIPPMVDQIRFFAGAARMLEGRGAGEYMEGLTSFVRREPIGVCAQVAPWNYPMMMAVWKFAPALAAGNTVVLKPSDTTPASTALMADIIGSIVPKGVFNVVCGDRDTGRLMVEHETPAMASITGSVRAGMSVAESASKDLKRVHLELGGKAPVVVFEDTDIPKAVEGISEAGYFNAGQDCTAATRVLVHESVHDEFVSALAKAASEIKTGQPDDEDVMYGPLNNPNQLKQVSGFIERLPAHAKVEAGGHRVGDKGYFYAPTVVSGLKQDDEIIQREVFGPVITVQAFRDEDQAVEWANGVEYALASSVWTKDHGRAMRMSKKLDFGCVWINTHIPLVAEMPHGGFKKSGYGKDLSGYGFEDYTRIKHVMTSLDM

SEQ ID NO: 6437 - protein, 299 aa, Arabidopsis thaliana
MFSTLETLILKYLALVDVPSPVCMKSLRTLHLDCVNFKHNESFSNLISGCPNLEDLFMYQYYPLDVVMNFIIVAPSLKRLVIIDYREAGGYVINAPTLKYLKIKGLSHCGFCLIENAPVLVEAKIRNLFYIYKEKILGSLKSAKRLSLDLSPLECPIDSIFYQLVHLEIYTCKEEWWNLLKLMLDSSPKLQVLKLIGKNLDFKKVGMVGGKWNEPKNVPECLLSQLKMFVWTSYHWESEVEKEVATYILKNARQLKNVSFSTRPIHSKEHNKLEEKCKMLKELDGVVRASSSCHLVFIE

SEQ ID NO: 6438 - protein, 493 aa, Zea mays
MDQPPNGFAAGGFFTHIDGQNRSPPSIIVIGGGISGIAAARALSTASFNVTLLESRDRLGGRVHTDYSFGCPIDMGASWLHGVCNENSLAPLIRMLGLRLYRTSGDNSVLYDHDLESYALFDKHGQQVPQEIVSKVGETFERILKETVIVRDEHANDMPLFQAIGIVFDRNPHMKLQGLEYEVLQWCICRLEAWFATDMDNISLKTWDQEHMLTGGHGLMVNGYDPVIRAPAQGLDIHLNHRVTKIIQRYNKVIVCVEDGASFVADAAIVTVPLGVLKANIIKFEPELPKEKLSAIADLGVGIENKIALKFDTVFWPDVEVIGRVAPTSNACGYFLNLNKATGNPVLVCMVAGRFAYEIEKLSDEESVNFVMSQLRNMLPQATDPVQYLVSRWGSDPNSLGSYSCDLVGKPADLYERFCAPVGSLFFAGEAACIDHSGSVHGAYSSGIAAAEDCRRRLSAQLGISAGLFQVGKAAMREEMTAEAMVPFQISRL

SEQ ID NO: 6439 - protein, 193 aa, Zea mays
  unsure (1)..(193): unsure at all Xaa locations
MDAVMFGLETPLMAALQHLLDVPDGDAGAGGDSDNKTGGGATRTYVRDARAMAATPADVKELPGAYAFVVDMPGLGTGDIRVQVEDERVLVVSGERRREEREDDAKYLRMERRMGKFMRKFVLPDNADVDKVAAVCRDGVLTVTVEKLPPPEPKKXPKTIEVKVAFREQAVAVLLKLCVFQFASFFGITNHPI

SEQ ID NO: 6440 - protein, 294 aa, ASPERGILLUS NIDULANS FGSC A4
MVPTSIPTTQLKDGTSIPVIGYGTGTAWFKKKGDTSINRDLVESIKTAIRLGYHHLDSAEVYGTERELGVAIKECGVPREQLFVTTKVNQNIANVPKALEDSLEKLQLSYVDLYLIHQPFFAESPTELQDAWAAMEKVKEAGKARAIGVSNFLESHLETILDSARIPPAINQIEYHPYLQHGSLVPYHERKGIAVASYGPLTPVTRAKGGPLDPLLSELAGKYGVGEGEILLRWSLYRGAVAITTSGKESRLSTYLNVFKFQLTHEEVLKISRIGDQKHYRGFWSDKFAADDRS

SEQ ID NO: 6441 - protein, 404 aa, Oryza sativa (japonica cultivar-group)
GPFNHGNAKDLFGDGIFAIDGEKWKQQRKIASYDFSTRALRDFSCAVFKRNAAKLAGIVSNHAASNQSMDFQGLMLRATMDSIFTIAFGTDLNTLDGSGEGSRFAAAFDDASEFTMLRYISPLWKLARLLNVGVEAMLKERIKVVDEFVYRLIRARSDELSNSHDSGSRQDILSRFLQATTSDSVVDYKYLRDIILNIVIAGKDTTAGALAWFLYMVCKHPEVQEKICHEAMVATSAGDTASVDEFLQSLTDQALNNMHYLHAALTETLRLYPSVPMENKQCFSDDVLPNGFNVSKGDIVFFIPYAMGRMESLWGKDAEYFRPERWLDENGVFQQESPFKFTAFQAGPRICLGKEFAYRQMKIFAAVLLRFFVLKLRDEKEIVSYRTTLTLAIDQGLHLTATAR

SEQ ID NO: 6442 - protein, 353 aa, Burkholderia cepacia R18194
MSDSRFHRLTVAEVIAESDDACSFVFDVPAALRDAFAYRPGQFLTLNVPCADATVARCYSLSSAPGIDAAPKITVKRVRDGRASNWLCDRVKAGDALDVLPPAGVFTPRTLDGDLLLFAGGSGITPVLSILKSALVHGRGMLTLIYANRDERSVIFRAELQQLAQRHPGRVRVIHWLDSVQGIPQQRHLEELARPFSQQETFICGPALFMENALAAMLGLGLPRARVHVERFASLPDAPAQAPAASDTTASSVAAAASASGDGAAIETVLDGDAFAFDSAPGETLLDAMLRAGVPAPNSCRMGQCGACMCRIERGEVALDSNHVLDEDEIAAGWTLACCARPASDALRVVFPD

SEQ ID NO: 6443 - protein, 327 aa, Triticum aestivum
RSGIFGSTHASGKTIVLKTAEQTPLSALYVSKLLHEAGLPEGVLNIVSGFGPTAGAALASHMDVDKIAFTGSTDTGKVILELSARSNLKPVTLELGGKSPFIVMDDADIDQAVELAHFALFFNQGQCCCAGSRTFVHERVYDEFVEKSKARALKRVVGDPFRKGVEQGPQIDDEQFKKILRYIKSGVDSGATLVTGGDKLGDKGYYIQPTIFSDVQDGMKIAQEEIFGPVQSIFKFNDLNEVIKRANASQYGLAAGVFTNNLDTANTLTRALRAGTVWVNCFDIFDAAIPFGGYKMSGIGREKGIDSLKNYLQVKAVVTALKNPAWL

SEQ ID NO: 6444 - protein, 277 aa, Staphylococcus aureus subsp. aureus MRSA252
MEVKTFYNGNTMPQIGLGTFRVENDENCMESVKYAIEQGYRSIDTAKVYGNEEQVGAGIRAGLESTGIAREDLFITSKLYFEDFGRENVAAAYEASLSRLGLKYLDLYLVHWPGTNEAVMVDTWKGMEDLYKNNKVKNIGVSNFEPEHLEALLAQVSIKPVINQVEYHPYLTQHKLKLYLAAQHIVMESWSPLMNAQFLNDETIKDIAQELGKSPAQVVLRWNVQHGVVTIPKSVTPNRISENFRIFDFELSDEQMTRIDGLNQDKRIGPDPKTFEG

SEQ ID NO: 6445 - protein, 471 aa, Chloroflexus aurantiacus
MKLAWRTKIGLGLGFGLGLWLVGTGRAFAQEGPTTAELAVAMNTFFLIVAAALVFFMQAGFAMLTAGLTRSKNTTNILFKNLMDFVMCSIAFWAVGWGIAYGTSAGGFIGTDQFFLSPVTAEGEVPVMASWFFQVVFAGTAATIVAGAMAERTKFAAYLIYSFIISLFIYPVVVHWVWSGAGWLNTYSGSTEGNWGFTDFAGSTVVHSVGGWASLVGAMILGPRLGRFGPDGKPRVIPGHNMSLAALGTFILWLGWFGFNPGSQLAIASQANADAVALVAVTTNLAAAAGALGALFTAWLRYGKPDLGQTLNGVLGGLVAITAGCAYVDPLSSIIIGFIAGPIVVFSAELLEKLKIDDPVGAVPVHLVNGIWGTLAVGLFASVPGNTGTTGLFYGGGLTLLISQFVGVVAIGLWTVATAALMFFAIKATIGLRVSKAEEEAGLDIGEHGMVAYPDLSGAPAGGEVSGALAR

SEQ ID NO: 6446 - protein, 488 aa, Methanosarcina barkeri str. fusaro
MCGIAGAAGTPDTNEEVKRMLAALGHRGPDACGTYQAKGLSIGNTLLKITGDMLQPLVGKGALVLNGEIFNFRELAAEQGIKTNSDTEVLFALIETKIKEGETPTNAIFSVLSRVNGDYALAYVLGNKLVLARDPVGVKPLFYSLEKEGKKPKLAFASEKKAFSSQKDQIKSFPPGRVMAFDIRNGRLEEKSLTIDPPQERISEEHEASSRLKAALEKAVEIRLTKTSGIAFSGGIDSTFLAALAKNIDPSISLYAVGLPDSHDLVQAQRAAEVAGMSDSLKTHTLSPEEIEAAIPNVIYSTESTDPMKIAIGLPLYFVAKTAKEDGKRVLLTGQGADELFGGYNRHKALLEHGPKVLDRAIYTDLKNISTINLERDDMVTMANSVELRVPFLDKEVIKTGLAISPELKVLKRDSLYIRKYILRKAADGLLPSELLWKEKKAIQYGTGVQKVLDRLAREAGFSKREGNHIEKYLKKVAENQGFDFIFR

SEQ ID NO: 6447 - protein, 509 aa, Camptotheca acuminata
MAVLLLFLPLIFIFLAYKLYQRLRFKLPPGPRPLPFVGNLYSVKPVKFRCFAEWAQVYGPIMSVWFGSTLNVVISNSELAKEVLKENDQHLADRERNRSSNSFSRGGKDLIWADYGPHYVKVRKLCTVELFTPKRLEALRPIREDEVTAMVDSIFKDSANPDNYGKSLLVKQYIGAVAFNNITRLVFGKRFMNSEGVMDEQGKEFRGIVANGVKIGGLRFIGEHIPWLRCMFPQEEEILVKHEARRDRLTRAIMEEHTLARKHSGGAKQHFVDALLTLQKEYELSDDTVIGLLWDMITAGMDTTSISVEWAMAELIKNPRVQQKAQEELDRVIGYERIMSETDFPNLPYLQCVAKEALRLHPPTPLMLPHKANSNVKIGGYDIPKGSIVHVNVWAIARDPATWKDPHEFRPERFLEEDVDMKGHDFRLLPFGAGRRICPGAQIAINLITSMLGHLLHHFSWAPPEGVKPEEIDMTENPGLVTFMKTPVQAVAKPRLPSHLYKRVAVGAV

SEQ ID NO: 6448 - protein, 343 aa, Escherichia coli CFT073
MQVKTQSCVVAGKKTVAVTEQTIDWNNNGTLVQITRGGICGSDLHYYQEGKVGNFMIKAPMVLGHEVIGKVIHSDSSKLHEGQTVAINPSKPCGHCKYCIEHNENQCTEMRFFGSAMYFPHVDGGFTRYKMVETSQCVPYPAKADEKVMAFAEPLAVAIHAAHQAGELQGKRVFISGVGPIGCLIVSAVKTLGAAEIVCADVSPRSLSLGKEMGADVLVNPQNDDMDHWKAEKGYFDVSFEVSGHPSSVNTCLEVTRARGVMVQVGMGGAMAEFPMMTLIGKEISLKGSFRFTSEFNTAVSWLANGVINPLPLLSAEYPFTDLEEALRFAGDKTQAAKVQLVF

SEQ ID NO: 6449 - protein, 227 aa, Glycine max
VIVFDDADVDKAAELALLGILFNKGEICVAGSRVLVQEGIYDEFEKKLVEKAKAWVVGDPFDPKVQQGPQVDKKQFEKILSYIEQGKKEGATLLTGGKRVGNKGYYIEPTIFSNVKEDMLIVQDEIFGPVMALMKFKTIEDAIKIANNTRYGLASGIVTKSLDTANTVSRSIRAGIVWINCYFAFGNDIPYGGYKMSGFGRDFGMEALHKYLQVKSVVTPIYNSPWL

SEQ ID NO: 6450 - protein, 202 aa, Glycine max
MEGVGARLGRSSTRYGPATVFTGPVRKWKKKWIHVSPSSASSNSNANNHHNHASHASHLLLYKWTPLTHSQNTATTNNANAKDSPPEPPEEPPRRKFKYVPVALLEEQKNEGAESEGTEKVDEESKPIDADSGAAEATHKNETLDEKPDINDVPMEESQSQYKNQVVRQDLNESTLDLSLGLTSHDDEHDSDSKTNQTRDGQ

SEQ ID NO: 6451 - protein, 180 aa, GIBBERELLA ZEAE PH-1
MAMSCRYAAQSCARQLRSARTARAPAQLVRIPATSRRWNSTEAAPVNPKIEAIVDQISQLTLLETADLVSSLKNKLNIPDMPIGGFAAAPAAAPAAVEEAEEAAPAAAEKTLFTLKLQGFDAPSKAKVIKEVKNMLGLSLVDSKKFVESAPKMMKENVPKEDAEKIINTMKELGATVVME

SEQ ID NO: 6452 - protein, 208 aa, Azospirillum brasilense
MKLAEALLRALKDRGAQAMFGIPGDSACPSLGGGGNADPAAPHAEHEPPVGFAADAAARYSSTLGVAAVTYGSGAFNMVNAVAGAYAEKSPVVVISGAPGTTEGNPGLLLHHQDRTLDTQFQVFKEITVAQARLDDPAKAPAEIARVLGAARALSRPVYLEIPRNMVNAEVEPVGDDPAWPVDRDALAACADEVLAAMRSATSPVQMV

SEQ ID NO: 6453 - protein, 238 aa, Arabidopsis thaliana
MERGAPFSHYQLPKSISELNLDQHSNNPTPMTSSVVVAGAGDKNNGIVVQQQPPCVAREQDQYMPIANVIRIMRKTLPSHAKISDDAKETIQECVSEYISFVTGEANERCQREQRKTITAEDILWAMSKLGFDNYVDPLTVFINRYREIETDRGSALRGEPPSLRQTYGGNGIGFHGPSHGLPPPGPYGYGMLDQSMVMGGGRYYQNGSSGQDESSVGGGSSSSINGMPAFDHYGQYK

SEQ ID NO: 6454 - protein, 123 aa, Coxiella burnetii
ELTGVSIVTYQHIKVPSQGEKITVNKAVLEVPDRPIIPFIEGDGIGIDITPVMKNVVDAAVEKSYAGKRKIEWMEIYAGEKATKVYGKDNWLPDETLEAIKEYQVAIKGPLTTPVGGGIRSLN

SEQ ID NO: 6455 - protein, 301 aa, Arabidopsis thaliana
  unsure (1)..(301): unsure at all Xaa locations
MVFVKSTKSNAYFKRYQVKFRRRRDGKTDYRARIRLINQDKNKYNTPKYRFVVRFTNKDIVAQIVSASIAGDIVKASAYAHELPQYGLTVGLTNYAAAYCTGLLLARRVLKMLEMDDEYEGNVEATGEDFSVEPTDSRRPFRALLDVGLIRTTTGNRVFGALKGALDGGLDIPHSDKRFAGFHKENKQLDAEIHRNYIYGGHVSNYMKLLGEDEPEKLQTHFSAYIKKGVEAESIEELYKKVHAAIRAXPNXRKTVKPAPKQHKRYNLKKLTYEERKNKLIERVKALNGAGGDDDDEDDEZ

SEQ ID NO: 6456 - protein, 371 aa, Treponema denticola ATCC 35405
MIDSHVHLRDGLLSDKETIAHALALACPAGFTAFFDMPNTNPPLTNAEAVLERFALAEKSIKQAGVSAFYGIYGGLTSDIAQIEKMVLFYKKYFPKIVGFKMFAGHSTGNMGIVEKEDQRKVYAALKKFDYRGILAVHCEKESLMNNSIFDIENPITHSLARPPIAETESIKDQIELMQSEDFKGHLHVCHISTKEGIRLVAEAKKSGLSISCGATAHHALLNIDSYKKSGIFVKMNPPLREKEEQEAVFNALISGGIDWIESDHAPHTYEDKKKGASGIPGFAGSLILLKELRKAGCSEKRLDELCGKAVNHIFKLDLSYKVPSNTEIDASLPSLRSGYPFDAFEFFGISKFSFLNFIVTLTICTIAYIL

SEQ ID NO: 6457 - protein, 287 aa, Mesembryanthemum crystallinum
MAMPPVVDSVYLKEIDKARRDLRALISNRSCAPIMLRLAWHDAGTYCAKTKTGGANGSIRNEEEYAHGANNGLKKAIDWCEEVKAKYPKITYADLYQLAGVVAVEVTGGPTIEFVPGRKDSKVSTNEGRLPDAKKGPPHLRDIFYRMGLTDKDIVALSGAHTLGRAHPERSGFDGPWTQEPLKFDNSYFVELLKGESEGLLQLPTDKALVEDPAFRPYVELYAKDEDAFFRDYAVSHKKLSELGFTPSGSKSGPKDSTILAQGAVGVAVAAAVVILSYIFEVRKRLK

SEQ ID NO: 6458 - protein, 324 aa, Yersinia pestis KIM
MTVQPQAELAMILPPIFHGCYCEGEAPNMSQKELWYETLHANFGQYFSVENVLFREKTEHQDLVIFENPELGRVMALDGVVQTTERDEFIYHEMMTHVPLLAHGQAKKVLIIGGGDGAMLREVSRHKNIEQITMVEIDAGVVEFCRQYLPNHSAGAYDDPRFKLVIDDGVNFVNQTTEKFDVIISDCTDPIGPGESLFTSVFYEGCARSLNEGGIFVAQNGVCFLQQDEAVNSHNKLSHYFSDVSFYQAAIPTYYGGIMTFAWATQNPALRQLDLATLQNRFAQAGLACRYYNPAIHVGSFALPQYLLDALTTIPKVIGVDSSE

SEQ ID NO: 6459 - protein, 222 aa, Chlorobium tepidum TLS
MKFFIDTASLDEIKAANELGVLDGVTTNPSLIAKIVKDSTNFTYADFKAHIAKICEIVDGPVSAEVTTLKAGEMIAQGEELAAIHKNIVVKCPLTVDGLKAIKHFSSNGIKTNATLVFSPTQALLAAKAGADFVSPFVGRLDDISTSGMELVRQIVTIYDNYGYLTEVIVASVRNPLHVVESAMVGADIATIPYSVIKQLANHPLTDKGLEKFMEDAAVMKP

SEQ ID NO: 6460 - protein, 350 aa, Chlorobium tepidum TLS
MEERSMQKAGFLKEPIKHIGITKHNVVPMVEEMADMAFQARNLARAAFIVDLMQKDKECAVILTLAGSLISAGLKQVIIDMLEHNMVDVIVSTGANIVDQDFFEALGFKHWKGSQFVDDSELRELAIDRIYDTYIDEDELRVCDDTIAIIANSMQPGAYSSREFIVEMGKYIEEKGLDKNSIVYKAYEKGVPIFCPAFSDCSAGFGLVHHQWHNPDQHVSIDSVKDFRELTKIKIENDKTGIFMIGGGVPKNFTQDIVVAAEVLGYENVSMHTYAVQITVADERDGALSGSTLKEASSWGKVDTVYEQMVFAEATVAMPLIAGYAYHKRNWEGRPARNFNAMLDAKPVNA

SEQ ID NO: 6461 - protein, 145 aa, Triticum aestivum
  unsure (1)..(145): unsure at all Xaa locations
MXPNVMGSSGTSVAPFXGLKSXAGLPVXRRSNXANLXSVXSNGXRIRCMQVWAIXGIXKFETLSYLPTLNTEALLKQVDYLIRSKWVPCLXEFNKXGFIFREHXNASPGYYDGXRYWTMXETAYVPGCTDPHKVXKPSGRSKKEP

SEQ ID NO: 6462 - protein, 306 aa, Oryza sativa (japonica cultivar-group)
MPASTAWAARLAEGGEEGTESIVRCGSPLATTTTSPMPPPPHRGGGGGRDTSAFFAATLVLWAVSVGFEIGARGRRELAPVAAGFAFFQAASAAVRAAVSRDPLFVNTAVSLLHSSLTSASVIFVLVNRWHNKDLKNMFEHEELFGGSWVGAYSALCFSCGYFAYDQLDMLRYRLYSGRIPGILMHHLILLICFTLALYRNVTINYLILTLVCERKLRRMAGFRDYNRKIVKLEWVLNWTTFVSARVACHILITYKLIIDAHKFDSGIELPLALFGMAGMNLLNIFLGLDLLKAYTLERNQQTHQD

SEQ ID NO: 6463 - protein, 316 aa, Triticum aestivum
MKTLLILTILAMAITISTANMQVDPSGQVQWPQQQLVPQPQQPLSQQPQQAFAQPQQTFPHQPQQQVPQPQQPQQPFLQPQQPFSQQPQQIFPQPQQTFPHQPQQAFPQPQQTFPHQPQQQFPQPQQPQQPFPQQPQQQFPQPQQPQQPFPQQPQQQFPQPQQPQQPFPQPQQPQLPFPQQPQQPFPQPQQPQQPFPQLQQPQQPLPQPQQPQQPFPQQQQPLIQPYLQQQQQQQQQQQGMHILLPLSQQQQLGQGTLVQGQGIIQPQQLAQLEAIRSLVLQTLPTMCNVYVPPECSIIRAPFASIRASSGHHLPA

SEQ ID NO: 6464 - protein, 287 aa, Synechococcus elongatus PCC 6301
MSAPQIQWYPGHIAKAERQLQEQLKRVDVVLEVRDARIPLATDHPRLKSWLGSRERLLILNRLDMIPAPARQAWIDWFRSQGDRVLLTDAHAGTGVAQLSQAAQAAGAAMNARRKQRGMLPRAVRAVVIGFPNVGKSALINRLVKKKVVESARRAGVTRSLRWVRVSEHLDLLDAPGVLPSRLDDQTAALKLALCDDIGEAAYDNQRVAAALVDCLQALEAQPLSGVTPTLFFDRYGLSVDDTGEAYLAALADHRCQGDRERTALMLLNDFRRGSLGPIALELPPTA

SEQ ID NO: 6465 - protein, 204 aa, Zea mays
MASSMLSSAAVATSPAQATMVAPFTGLKSSAAFPVTRKSNTDITSIASNGGRVSCMKVWPPVGKKKFETLSYLPDLTDVELAKEVDYLLRNKWIPCVEFELEHGFVYREHGSTPGYYDGRYWTMWKLPLFGCTDSAQVLKEVQECKTEYPNAFIRIIGFDNNRQVQCISFIAYKPPSFTGCLISFQKQPKKNPNPFPFPMAGFT

SEQ ID NO: 6466 - protein, 177 aa, Streptomyces sp. AM-7161
MTGATIWLTGLPSAGKTTIAYELAGRLRDEGHAVEILDGDEIREFLSAGLGFTREDRHTNVQRIGFVAELLASHGVKVLVPVIAPYNDSREAVRKRHQAEGTAFVEVHVATPVDVCSVRDVKGLYAKQAAGEISGLTGVDDPYEAPENPDLRIESQNQTVQESAAQLHALLTERGLL

SEQ ID NO: 6467 - protein, 225 aa, Zea mays
  unsure (1)..(225): unsure at all Xaa locations
RYYLKDAVLDGGVPFNKAYGMTAFEYHGTDARFNRVFNEGMKNHSVIITKKLLDFYTGFEGVSTLVDVGGXGVGATLHAITSRHPHISGVNFDLPHVISEAPPFPGVRHVGGDMFASVPAGDAILMKWILHDWSDAHCATLLKNCYDALPENGKVIVVECVLPVNTEATPKAQGVFHVDMVMLAHNPGGKERYEREFRELAKGAGFSGFKATYIYANAWAIEFIK

SEQ ID NO: 6468 - protein, 186 aa, Physcomitrella patens
MSTSRFIKCVTVGDGAVGKTCMLISYTSNTFPTDYVPTVFDNFSANVVVDGNTVNLGLWDTAGQEDYNRLRPLSYRGADVFLLAFSLISKASYENISKKWIPELRHYAPSVPIILVGTKLDLRDDKQFFADHPGAAPITTSQGEELRKSIGAASYIECSSKTQQNVKAVFDAAIKVVLQPPKQKKK

SEQ ID NO: 6469 - protein, 321 aa, Zea mays
  unsure (1)..(321): unsure at all Xaa locations
SRDTLLDADLESDXLGWQYISGSLPDGRELDRIDNPQFEGYKFDPHGEYVRRWLPELARLPTEWIHHPWDAPESVLQAAGVELGSNYPRXIVELDAANSRLQDALSEMWELXAASRXAAMENGMEEGLGDSXSDEPPIDFPQELRXEVDRQPVQPAIHAPGVTGRRXEDQMVPSMTSSFIRAETELTADFGHTSEDSRPEVPSNIHHLQXRPERXETVDGGTGNAVRVHGNHHQQNLQNNMHRVLGIXPSISEASSSWTGRDGGVVPVWSXXXXASGHSDSYXADEADISSRGYLDRHPQSHTXMNWSQLSQSLTTGWVDN

SEQ ID NO: 6470 - protein, 160 aa, Triticum aestivum
MSDSEDHHFESKADAGASKTFPMQAGAIRKGGYLVIKNRPCKVVEVSTSKTGKHGHAKCHFVALDIFNGKKLEDIVPSSHNCDVPHVDRTEYQLIDISEDGFVSLLTDNGSTKDDLKLPTDDAILTQLKDGFAEGKDLALTVMSAMGEEQICAVKDVGPR

SEQ ID NO: 6471 - protein, 313 aa, Brassica napus
MEISARPKARLAVLTAHLAVSDPVGSIQVLPPAIEPWCTSSALPPHGSLKGSLTIVDERTGKKYQVPVSEDGTVKSVDLKKITTGKDDKGLKLYDPGYLNTAPVRSSISYIDGDEGILRYRGYPIEELAESSTFIEVSYLLMYGNLPSQSQLADWEFTISQHSAVPQGVLEIIQSMPHDAHPMGVLVSAMSALSIFHPDANPALSGQDIYKSKQIRDKQIVRILGKAPTIAAAAYLRMAGRPPVLPSGHLSYAENFLYMLDSMGNRSYKPNPRLARVLDILFILHAEHEMNCSTAAARHLASSGVDVYTAVAG

SEQ ID NO: 6472 - protein, 290 aa, Triticum aestivum
  unsure (1)..(290): unsure at all Xaa locations
MGGLSMEHPWAFAFGLLGNVISFSSLLAPIPTFYRIFKSKSTEGFQSVPYVVALFSAMLWIFYALVKTGEGLLISINAAGCVIETVYIVMYLVYAPRKAKIFTAKIVVLLNIAGFGLIFLLTLFAFHGETRVVSLGWICVGFSVCVFVAPLSIIGRVIKTKSVEYMPFTLSLTLTLSAIVWFLYGLLIKDKYVALPNVLGFTFGVXQMVLYVFYMNKTPVASEVKEGKEAWKVPAEDHVVVINVGKADKSSCAEVRPVTEMAGAVDVPRRCAAEAAAAPGMDFARSVDVV

SEQ ID NO: 6473 - protein, 124 aa, Zea mays
  unsure (1)..(124): unsure at all Xaa locations
MAYSMLSSAAXCYLPGSXHMVAPFTGLKSSSAFPVTGRAXXDLTLLVSNGEKVNWMEGGPQLGKKNFETLFLTFRDLYPKFKLGGGEGEKLFSPKKGGVPLGGEEIPRGGEHPFFFFGPRGETQ

SEQ ID NO: 6474 - protein, 196 aa, Glycine max
MAFAGTTQKCMACDKTVYLVDKLTADNRVYHKACFRCHHCKGTLKLSNYNSFEGVLYCRPHFDQLFKRTGSLDKSFEGTPKIAKPEKTGEEKPAATKVSSMFGGTRDKCAGCQKTVYPTEKVTVNGTPYHKSCFKCTHGGCVISPSNYIAHEGKLYCKHHHIQLIKEKGNLSQLEGDHEKSTEEEKINGEVVAAET

SEQ ID NO: 6475 - protein, 382 aa, Pinus radiata
MDSNMNGLAKSNGCEISRDGFFESEEEELQGQAEAWKCTFAFAESLAVKCVVLLGIPDMIAREGSRATLSLGEIVAKLPTESPDAACLFRIMRFLVAKGIFRASKSAREGGAFETRYGLTPASKWLVKGRELSMAPMLLMQNDETTLAPWHHFNECVLEGGVAFQKANGAEIWSYASDHPDFNNLFNNAMACNARIVMKGILSKYQGFHSLNSLVDVGGGTGTAVAEIVRAYPFITGINYDLPHVVATASSLSGVQHVGGDMFETVPTGDAIFMKWIMHDWNDEDCIKILKNCRKAIPDTGKVIIVDVVLDADQGDNTDKKRKKAVDPIVGTVFDLVMVAHSSGGKERSEKEWKRILLEGGFSRYNIIEIPALQSVIEAFPR

SEQ ID NO: 6476 - protein, 477 aa, Vibrio parahaemolyticus RIMD 2210633
MQQIKNETLKEVFKQWASDDGVVVINPATEQELIRLKPSSIEELDCLIEACSAEQVRWAKLSAKERSSCLKNWHQLLMEHAEDIATIITLEQGKPLSESRGEVSYGASFVEWFAEEARRAYGEVIPAPAIDRRLSTIKQPVGVCAAITPWNFPIAMITRKAAPALAAGCGMIIKPSELTPLTALAVVELAYQAGIPKPLLPVVISEQAAEFGQVLSMDPRIKKISFTGSTRVGKILMKQASETVKAVSMELGGNAPFIVFEDADLESAADGLIASKFRNAGQTCVCTNRLYVHQNAKERFMEKVLAKMTELNVGNGLESGVTVGPVITMASKHRLEAVIDQALQEGATIANRPQKLAGRFMEPVILDNVDQGMAIVQQELFGPVLPVLTFEDDEQVLAMANDTEYGLACYFYTDSLKRIIKFTEGLEYGMVGVNEGIISTEVAPFGGIKESGVGREGAKQGLDEYLETKYICLGGLN

SEQ ID NO: 6477 - protein, 392 aa, Thermobifida fusca
MTSDRSSRLDDDPAFALHRGGKLEVRSTVEVNDQKSLSLAYTPGVARVCTAIADTPELADTYTWKNNVVAVVTDGTAVLGLGDIGPEASLPVMEGKSLLFKQFAGIDSVPIALACTDVDEIVETVVRMAPSFGGINLEDISAPRCFEIEQRLRERLDIPVFHDDQHGTAIVALAAIRNAARVTGRELSDLRAVVSGAGASGIAVSRMLIRGGIGDIAVADSKGLIYEGRPGLNKYKAELAAISNKAGLQGSIESALAGADVFVGLSAGEVPEEVVATMADNAIICAMANPNPEVHPDVARKYAAVVATGRSDFPNQINNVLAFPGVFRGALDVRATQITENMKLAAATALADLVGDDLAPDYIIPKPFDERVVPAVAAAVADQARKDGVARA

SEQ ID NO: 6478 - protein, 148 aa, Triticum aestivum
  unsure (1)..(148): unsure at all Xaa locations
MSDTDEHHFESKADSGASKTYPQQAGAIRKGGHIVIKARPCKVVEVSTSKTGKHGHAKCHFVAIDIFNGKKLXEDIVPSSTNCDVPHVDRQDYQLIDINXWMGYVSLLTESGNTKDDLKLPTDDVLLGQIKTGFADGKDLILSGCPPG

SEQ ID NO: 6479 - protein, 604 aa, Glycine max
  unsure (1)..(604): unsure at all Xaa locations
LKYKSEEGVRVLLLVWDDKTSHDKVFLKTAGVMGTHDEETRKFFKHSSVMCVLSPRYASSKMSFLKQQEIGFFVSXFSVESNVKCPVFCGLSSKQWVVGTVFTHHQKCVIVDTQAAGNNRKITAFIGGLDLCDGRYDTPEHRLFRNLDDVFDGDFHNPTFPAGTRVPRQPWHDLHCRIDGPAAYDVLINFEQRWRKATKWKEFAILFKKTSQWHDDALIRIERISWILSPSGAATLKDKSDDYTVPEDDPLVWVSSEDDPENWHVQIFRSIDSGSLKGFPKRVDXALSQNLICAKNLVIDKSIQTAYIQAIRSAQHFIYIENQYFIGSSYAWPAYKDAGADNLIPMELALKIASKIRAKERFAVYIVLPMWPEGDPKTGAMQEILFWQGQTMQMMYDAVARELKSMQLTDVHPQDYLNFYCLGNREHFNEDSSSTNGAQVSTAYKYRRFMIYVHAKGMIVDDEYVIIGSANINQRSMAGTKDTEIAMGAYQPHYTWSAKKRHPHGQIYGYRMSLWGEHLGMLDETFEEPGRLECVEKVNEIAENNWKLFASEDFSLLQGHLLKYPVQVDSDGKIRSLPDCENFPDAGGKILGAHSTTIPDILTT

SEQ ID NO: 6480 - protein, 274 aa, Listeria innocua Clip11262
MNLKDTVKLANGVEMPRLGFGVWKVQDGDEAVNSVKWAIEAGYISIDTAAAYKNEEGVGQAIKESGVKREDLFVTTKLWNAEQGYESTLAAFDESLRKLELDYVDLYLIHWPVEGKFKDTWRAFEKLYKDKRVRAIGVCNFHEHHLKELMEDAEIAPMVNQIELHPQLTQEPLRKFCAENNIVVEAWSPLGNGKLLANPEIKAIADAHGKSVAQVILRWDLQIGVVTIPKSVHQERIIQNADIFDFELSDEEVAKISGLNKDERTGPDPDNFNF

SEQ ID NO: 6481 - protein, 448 aa, Methanocaldococcus jannaschii DSM 2661
MKLEIIAIGGYEEVGRNMTAVNVDGEIIILDMGIRLDRVLIHEDTDISKLHSLELIEKGIIPNDTVMKNIEGEVKAIVLSHGHLDHIGAVPKLAHRYNAPIIGTPYTIELVKREILSEKKFDVRNPLIVLNAGESIDLTPNITLEFIRITHSIPDSVLPVLHTPYGSIVYGNDFKFDNFPVVGERPDYRAIKKVGKNGVLCFISETTRINHEGKTPPEIIASGLLKNDLLAADNDKHGIIVTTFSSHIARIKSITDIAEKMGRTPVLLGRSMMRFCGIAQDIGLVKFPEDLRIYGDPSSIEMALKNIVKEGKEKYLIIATGHQGEEGAVLSRMATNKTPYKFEKYDCVVFSADPIPNPMNAAQRYMLESRLKLLGVRIFKGAHVSGHAAKEDHRDMLRWLNPEHIIPSHGDFNLTAEYTKLAEEEGYRLGEDVHLLRNGQCLSFERII

SEQ ID NO: 6482 - protein, 180 aa, Zea mays
  unsure (1)..(180): unsure at all Xaa locations
MEVGDARNGSAAAALTKGGADDAARKPLPPCCVKAKARVPETEANCHDTVVSGWFTEPRSRFGEAHSLKVEKILFQGKSPYQEILVFESSTYGNVLVLDGIVQLTDKDECAYQEMVTHLPLCSIPAPKNVLVVGGGDGXGVLREIARHDSVETIDICEIDQLVIDVSKEFFPNLSIGSKI

SEQ ID NO: 6483 - protein, 381 aa, Cicer arietinum
WRSLRRACATKIFSPQQLDSTQFHRKRKVQDLLNYVQKCCEKGEALDFGEVVLATVMNSISETFISMDLFHYCDPSNDDDNKKSREFKEMVFGIMEEVGRPNVVDFFPFLKLFDPQGVRTRMRNHFEKLLAFFYEVMKERMRLRASGESKEYKDVLDSFLDLLNEENSQLCRHDVLHLFTDLFVAGIDTTSTTMEWAMAELLHNPSKLARLRKELEQIHGKFGQIEESDASKLPYLRAVVKEILRLHPSVPFLVPHKSKDDGELGGFMVPKNAQILVNVWSIGRNSSIWDNQIHLNLKDFWRVKLISKGRDFELVPFGAGRRICPGLPLASRSIHYIMASLLHHFNFKLADDLKPDDMDMSHKFGVTLHKAQPLRVVPIKA

SEQ ID NO: 6484 - protein, 345 aa, Methanosarcina acetivorans C2A
MHHNVFTNNPTVPIDVKNRSVSELMDGMLKTGFQGRKLAESVQAWNNMLKEKNTTVFMGLSGAMVPAGMRRIISHMIRERMIDCLVSTGANLFHDCHEALGRKHYVGSHLANDEKLFEQGVDRIYDIFAVEEEFRTADNLIADFAQEIGEITCSSREFMYLLGKELGRRGAAEDSIVVSAYRHNVPIFVPALSDSSIGIGLTIARRRGLKLEIDQIKDVDEITQIVEKSERTGVVYVGGGVPKNFIQQTEVIASILGMDIGGHDYAIQYTSDSPHWGGLSGCTFDEAVSWGKIAPQAKKVQVFVDATIALPIVAHALHEKTHDLKRIAPVFFWDGPEGLAIDYKE

SEQ ID NO: 6485 - protein, 460 aa, Haloarcula marismortui ATCC 43049
MPAAGFPLGATTMEVEIATIGGYEAVGRQMTAVRAGDDVVIFDMGLNLSKVLIHDNVETERMHSLDLIDMGAIPDDRVMSDLEGDVKAIVPTHGHLDHIGAISKLAHRYDAPIVATPFTIELVKQQIKSEEKFGVQNDLVKMDAGETMSIGERNELEFVNVTHSIIDAINPVLHTPEGSVVYGLDKRMDHSPVIGDPIDMKRFREIGREGEGVLCYIEDCTNAGKKGRTPSESVARRHLKDVMDSVADYDGGIVATTFSSHIARVKSLVEFADDIGRQPVLLGRSMEKYSGTAERLDFVDFPEDLGMYGHRKSVDRTFKRIMNEGKENFLPIVTGHQGEPRAMLTRMGRGETPYELDDGDKVLFSARVIPEPTNEGQRYQSEKLLGMQGARIYDDIHVSGHLREEGHYEMIDALQPKNIIPAHQSLEGFAPYVDLAENMGYKAGRDLHITRNGNMIKLTE

SEQ ID NO: 6486 - protein, 315 aa, Digitalis purpurea
MAEEIRFFKLNTGAKIPSVGLGTWQSSPGDAAQAVEVAIKCGYRHIDGARLYENEKEIGVVLKKLFDDGVVKREDLFITSKLWSTDHAPEDVPVALDKTLEDLQLDYIDLYLIHWPVRLKKGSVGLDPENFIPTDIPGTWKAMEALYDSGKARAIGVSNFTLKKLSDLLDVARIPPAVNQVGCHPSCAQTKLRAFCKSKGVHLSGYSPLGSPGTPWVKHDVLENPILVDVAEKLGKTPAQVAIRWGLQMGHSVLPKSVHESRIKENIDVFSWCIPDDLFAKFSEIEQVSPGKPEFPVHPEISQYKTVEEMWDGGI

SEQ ID NO: 6487 - protein, 1005 aa, Actinosynnema pretiosum subsp. auranticum
MVATGTRIPGPKPLPLVGNLLDVLTSDLDTDVDFLDRCHREHGGIVALTFAGQRQVFASSHELVARMCSDPSWGKAVHPALEQVRDFAGDGLFTARGDEPNWGKAHRLLMPAFGPTAMRDHFPAMLDIAEQMLVRWRRFGPDHRIDVADDMTRLTLDTIALCAFGARFNSFYRDRAHPFVDAMVRSLVEAGERAERLPGVQPFLVGRNQRYRDDIATMNRIADGIVAARAALPAGERPDDLLERMLTCADPVTGERLSARNVRYQLATFLIAGHETTSGLLSFAVHRLLAHPEVLRKAKDAVDGVLGDRVPAFEDLARLDYLGQVLRETLRLHPTAPAFALAPDEPAELGGHAIGAGEPVLVMLPTLHRDPAVWRDPDVFDPERFAPERMDEIPACAWMPFGHGARACIGRPFALQEATLVLALVLQRFDLALADPDHRLTIKQTLTLKPDSLVVRARPRADRPGATATVETVVPHQVPATHRHGTPLHVFYGSNGGSGEGLARTIAGDGAARGWATSVAPLDDAVRALPASGPVVIVSSSYNGAPPDNAAHFVRWLTQDGPDLSGVDYLVLGCGNLDWSATYQRVPTLIDEAMAAAGARRLRERGATDARADFFGDWERWYEPLWPLLSAECGVEVGEIGPRFRVVESDAADGLGDLASAVVLENRELVRGPDAGSKRHLELRLPDGTSYRTGDYLSVLPQNHPDLVRRAVARLGTRAERVVTVESSAPTGLVPVGRALRVDELLTRCVDLSAPAGAGVVARLAERCPCPPERAELAATTGATLLELLERFPSCAVDLALALELLPAPRTRLYSISSAAEEQRAEVALTVSVTGVTSGYLSRVRPGDRVAVGIASPPESFRPPADNTVPVVLIAAGTGIAPFRGFLRARAALGGEPGPALLLFGCRGPELDDLYAEEFAALGDWLEVDRAYSRHPDGEVRHVQHRLWQRRDRVRELVDAGARVYLCGDATRVGPAVEEVLGRIGPGAGWLDALRAGGRYATDVF

SEQ ID NO: 6488 - protein, 334 aa, Triticum aestivum
  unsure (1)..(334): unsure at all Xaa locations
MYKRLLSGMEFRRIRPEIIAGSLAYYARKYIPGLSRRNSMGTMPLAGTLSDVEQRNLLEEIDRLLPVQKGLVPTKLLLGLLKTSMILKASSTCIANLEKRVGMQLDQASLEDLLLPNYSYTMETLYNVECVHRILEHFLAMDQANGGCSPCIDDMMASPSMIPITAVAKLLDGYLAEVAPDVNLKPPKFQALASALPEYARPLDDGLYRAIDVYLKAHSWLSEAEREQLCRLMDCQKLSLEACTHAAQNERLPLRVVVQVLFFEQLQLRTSIAGCLLVSDNLEGSSRPLRSGCVAMSGEAXGWSAAVRENQVLKVGMDNMRMRLAELEKECSDM

SEQ ID NO: 6489 - protein, 296 aa, Arabidopsis thaliana
MTEEFEIAGISTGAWWSSPTNTAAVFSGYSLPCSTEISPDVTNFGWQNFDNKINDHNDGCMNMHNSFFEGLLIDPNDQLLPDPWSKSTIPNAKSELLENFPFLDNMFLVDSEAESLLDHEIRNHKSSKEQITQDYKNLTSKAQLEENSDEYSPRLLKRPRLETLSPLPSFKVRKEKLGDRITALQQLVSPFGKTDTASVLNEAVEYIKFLQEQVTVLSNPEQNTIGSVQQQQCSNKKSINTQGEVEEDECSPRRYVDLSSRGLCLMPISASYPVAAAAASAAEMNVHLVSGIFHSL

SEQ ID NO: 6490 - protein, 315 aa, Digitalis purpurea
MAEEIRFFELNTGAKIPSVGLGTWQSSPGDAAQAVEVAIKCGYRHIDGARLYENEKEIGVVLKKLFDDGVVKREDLFITSKLWSTDHAPEDVPVALDKTLEDLQLDYIDLYLIHWPVRLKKGSVGLDPENFVPTDIPGTWKAMEALYDSGKARAIGVSNFTLKKLSDLLDVARIPPAVNQVGCHPSCAQTKLRAFCKSKGIHLSGYSPLGSPGTPWVKHDVLENPILVDVAEKLGKTPAQVALRWGLQMGHSVLPKSVHESRIKENIDVFSWCIPDVLFAKFSEIEQVSPGKPEFPVHPEISQYKTVEEMWDGGI

SEQ ID NO: 6491 - protein, 107 aa, Oryza sativa (japonica cultivar-group)
MESSGGSQLGKNSKTSDGRETKATSSLLLLITAIHFVALCPKGENEDARKEVNSTAQNFVHFTEEEEDIVFRMHRLVGNRWELIAGRIPGRTAEEVEKFWAIKHQAT

SEQ ID NO: 6492 - protein, 471 aa, Exiguobacterium sp. 255-15
MIEQNVINGVWYDTEETIPVFNPATKELLGHVPSSTADDAQRAVDAASTAFVDWSERTADDRADKIDAWYRLIQEHRDELADIMTREQGKPFIEARGEIDYGNQYVRWYAEEARRIYGETIPASVPGKRLFVEKEPVGVVAAITPWNFPAAMITRKLAPALAAGCTVVLKPSEETPYTALRLVELAIEAGIPAGAINVLTGDAATISGVWQADSRVRKITFTGSTAVGKLIMRQAADTMKKLSLELGGHAPFIVTENADLDKAVQGAIRSKFRNGGQACVATNRFYVQASVLDTFTEKFVAEVKRLKVGNGLDADSTIGPLINAKAVAKVKAHIDDAVAKGATILTGGTIDDSVGYFVEPTVLGNVTEDMICMQEETFGPLAPISVFETLDEVIERANNTPYGLAAYAFSEKIDEALRLGKKLEYGIVGLNDGAPSAAQAPFGGYKESGLGREGGVYGIEDYLEVKYLSLG

SEQ ID NO: 6493 - protein, 309 aa, Pseudomonas syringae pv. tomato str. DC3000
MTSKLDQLKKFTTVVADTGDFGAIKSLKPQDATTNPSLLLKAASSESNDQMLADAFSGAKGDIGLACDRFAVAIGQEILKVVPGRVSTEVDARLSFDTDALIERSERIIGLYDTAGISRDRVLIKLAATWEGIRAAEKLEKDGIQTNLTLLFSFAQAVACAEAGVFLISPFVGRIYDWYKKSSGTDYVGADDPGVQSVTRIYNYYKANDFKTVVMGASFRNLNQIEQLAGCDRLTISTELLKQLAEDTGTLEQKLAPGNAGEARQSLTESQFRWASNEDAMATEKLAEGIRQFARDQEKLEALLSAKKS

SEQ ID NO: 6494 - protein, 498 aa, Glycine max
  unsure (1)..(498): unsure at all Xaa locations
MASLSCSANDLAPLFNDTAAANYLCAQFDSISRKLNVTTYAVDNTYLLFSXYLVFAMQLGFAMLCAGSVRAKNTMNIMLTNVLDAAAGGLSYYLFGFAFAFGGPSNGFIGRHFFGLRKFPKDSPPSGDYSFFLYHWAFAIAAAGITSGSIAERTQFVAYLIYSSFLTGFVYPIVSHWFWSSDGWASATRSHGNVLFGSGVIDFAGSGVVHMVGGIAGLWGALIEGPRIGRFDRSGRSVALRGHSASLVVLGTFLLWFGCXGFNPGSFLTIAKGYESGGYYGQWSAIGRTAATTTLAGSTAALTTLFSKRLLAGHWNVIDVCNGLLGGFAAITSGCAVVEPRAATVCGFVAAWVLIGLNKLAAKVDDDDPLEAAQLHGGCGAWGVIFTALFAKKEYVSQVYGEGRAHGLFMRGGGKLLAAHVIQILVIVGWVSATMGPLFWGLNKLKLLRISSEDELAGMDLTRHGGFAYAYEDDESHKHGIQLRKVGPNASSTPTTDE

SEQ ID NO: 6495 - protein, 506 aa, Pseudomonas aeruginosa
MIYAAPGTPGAVVTFKPRYGNYIGGEFVPPVKGQYFTNTSPVNGQPIAEFPRSTAEDIDKALDAAHAAADAWGRTSVQERSNILLKIADRIEQNLELLAVTETWDNGKAVRETLNADIPLAADHFRYFAGCIRAQEGSAAEINDSTVAYHIHEPLGVVGQIIPWNFPLLMAAWKLAPALAAGNCVVLKPAEQTPLGICVLLELIGDLLPPGVLNVVQGFGREAGEALATSKRIAKIAFTGSTPVGSHILKCAAESIIPSTVELGGKSPNIYFEDIMQAEPAFIEKAAEGLVLAFFNQGEVCTCPSRALVQESIYPAFMEEVLKKVRAIKRGDPLDTETMVGAQASQQQYEKILSYLDIAQQEGAELLAGGSVEKLEGNLASGYYIQPTLLKGHNGMRVFQEEIFGPVVGVTTFKDEAEALAIANDTEYGLGAGLWTRDINRAYRMGRGIKAGRVWTNCYHLYPAHAAFGGYKKSGVGRETHKMMLDHYQQTKNLLVSYDIDPLGFF

SEQ ID NO: 6496 - protein, 475 aa, Rickettsia conorii str. Malish 7
MNLLKNITGKNYINGEFIEFGKQISVINPATLKEIATVPNLGLSEINSAINNTVTSFSLWSQSSFEARIAILRRWYNLVIENIEELSYILTLEQGKVLAESKKEILYGASFIDWYTYAIHNIHSTIKPGNSNTHKIVTQYEPVGPSAAITPWNFPNAMITRKVVPAIAAGCSVILKPSSLTPLSALVLAKFASDAGLPAGVFNVITGSSDIIGKAFCEDFRLRKLSFTGATNVGKILYQNAANTLKRLSLELGGNAPFIITADNNLEKVVSDLVIAKTRNSGQSCTSPNRIFIEESIYEKFIEILKAKFTKLKAGDGFDKESDIGPLINSAAIEKIQKLLADAQSKGAKLICGGKTVDNFIEPTIIIDCLDNMDIFRIEIFGPVVACYKFKDLDEVIEHANNTEYGLQGYVYSNNISVAQMIASKLDFGMVSINDPLPANAKAPFAGRKASGFGVEGSFEGIFEYLNTKYINLQN

SEQ ID NO: 6497 - protein, 214 aa, Zea mays
MGLFSWWRGGRPWWVLPAPRSAAVSAALVPAAVSLFFNPPAGLSSPLLTQLTSARSPFPSLSFPLLSYPCALELESETQPAMSYYGDRRAESSIVEAFTLSPLPYPVILVLLMVTLLLGASWFFTYDDFIEEASQQLSWALLGVPIALVLLIRWISSVDSFEGYLGFYPRESRWKGRYERGPAEGSSPWGVALLVLLLLVLASFHSTIHDMWGP

SEQ ID NO: 6498 - protein, 272 aa, Triticum aestivum
  unsure (1)..(272): unsure at all Xaa locations
KPPRGEIPQVLAKTLEAQFAVIPEILDDYPYLPMDTEFPGFVFRPFGTFXSKREFHYATLKANVDMLKLIQLGLTFSDERGGLPALGPDARPCVWQFNFRGFDPRTDVAAADSIDLLRRSGIDFARHATEGADSRRFAELLMSSGVVLNAEIHWVTFHSGYDFGYLLKLLTGSNLPDTSSGFFDLIRIYFPVIYDIKHLMRFCNSLHGGLNKLAELLDVERVGICHQAGSDSLLTALSFNKLKESYFGGLTEKYAGVLYGLGTEGGETTSVH

SEQ ID NO: 6499 - protein, 127 aa, Rickettsia sp. TwKM01
PAHGGANEVVINMLKEIGSSEHIPKYIAKAKDRNDPFRLMGFGHRIYKNYDPRAAVLKETCKEVLKELGQLDNNPLLQIAIELEAIALKDEYFIERKLYPNVDFYSGIIYKAMGIPSQMFTVLFAIA

SEQ ID NO: 6500 - protein, 185 aa, Dechloromonas aromatica RCB
MFSSLKRCFGIAALITVGVVPVAAAAECPPLLNHSFASLQDGKPMPLCQYAGKVILVVNTASYCGFTSQYDGLEKLYARLKDKGLVVLGFPSNDFGEQEPGSEKEIADFCRLTYGVEFPMVSKTVVKGKGAHPFYLKLAEITGSKPKWNFHKYLINRDATQVVAYTSFTKPDDKDLLKKIDEFLK

SEQ ID NO: 6501 - protein, 510 aa, Gossypium hirsutum
MPSFDTILLRDLVAAACLFFITRYFIRRLLSNPKRTLPPGPKGWPIVGALPLLGSMPHVELAKLAKKYGPVMYLKMGTCNMVVASTPDAARAFLKTLDLNFSNRPSNAGATHIAYNSQDMVFAEYGPRWKLLRKLSNLHMLGGKALEDWSQVRAVELGHMLRAMCESSRKGEPVVVPEMLTYAMANMIGQVILSRRVFVTKGSESNEFKDMVVELMTSAGLFNIGDFIPSIAWMDLQGIEGEMKKLHNRWDVLLTKMMKEHEETAYERKGKPDFLDIIMDNRENSAGERLSLTNVKALLLNLFTAGTDTSSSIIEWALAEILKNPKILNKAHEEMDKVIGRNRRLEESDIPKLPYLQAICKETFRKHPSTPLNLPRVSTQACEINGYYIPKNTRLSVNIWAIGRDPDVWGNPLDFTPERFLSGRFAKIDPRGNDFELIPFGAGRRICAGTRMGIVLVEYILGTLLHSFDWMLPPGTGELNMDEAFGLALQKAVPLSAMVRPRLAPTAYVS

SEQ ID NO: 6502 - protein, 423 aa, Pseudomonas aeruginosa UCBPP-PA14
MTISIRGARVIDPASGLDQVGDLHIEAGKIVAIGAAPAGFSAQKTLDGAGLVAAPGLVDLSVALREPGYGRKGNVESETRAAAAGGTTSLCCPPYTRPVLDTPAVAELILDRAREAGNAKVYPIGALTRGFGGEQLSELVALRDTGCVAFTNGLHGFASNRILRRALEYAATFDLTVIFTSQDTDLAEGGLAHEGPTASFLGLAGIPETAETVALARNLLLVEQSGVRAHFSQLTSARGIELVAQAQARGLPVTCDVALYQLILTDEALVGFSSLYHVQPPLRTKADREALREAVKNGVVQAIASHHQPHEADAKNAPFAATEPGISGAELLLPLAMTLVQDGLLDLPTLLARLSHGPAQALRLPAGRLAVGQAADLVLFDPQGSTLAGESWYSKGQNSPFVGHCLPGRVRYTLVDGHLTHEG

SEQ ID NO: 6503 - protein, 119 aa, Bacillus cereus ATCC 14579
MTKEQIIEAVKSMTVLELNDLVKAIEEEFGVTAAAPVAVAGGAGEAAAEKTEFDVELTSAGAQKIKVIKVVREITGLGLKEAKELVDNTPKVIKEAAAKEEAEEIKAKLEEVGAAVEVK

SEQ ID NO: 6504 - protein, 1234 aa, Magnaporthe grisea 70-15
MTVDHWESIVQIRRSPIVAEHPAGRNPIRSFAWLLRVFMVIVVIAVSLVCLPYDGHSSPSREGYHANLQQPSSNVATQRSSRRPSSHDHQNQHQPQEHSPPIASQSNSPMSSRAAIASPVAVAPAGAPEYYQPTSSDRRRHHAPIAPPRTSSSHQTSAPVNGAQTSRRPVSASHQPQNSSSRRAPDHHGSSADQQTDQSSSSRRRDRHHAPATGDYPPQRQGSTRDPRTATTTTMPIRTNTGGSATASSSKQPSREASEILNSMLVSQPEVDIEREKERLALAQPTSSAHDASEVASPPVVPTQRSRQDHSSKREKHTKFGEYILGNTIGEGEFGKVKLGWKSEGGVQVAIKLIKKDALGSNPNRMQKIMREVSILKQLTHPNIVRLHKMEESERHFGIILEYASGGELFDYILNNRYLKDNAARRLFAQLVSGVGYLHKKGIVHRDLKLENLLLDRNRNIIITDFGFANTFDPALELTEEEEAGLSNREFVKRLGLDKIGANGSRKGDLMQTSCGSPCYAAPELVVSDSLYTGRKVDVWSCGVILYAMLAGYLPFDDDPANPEGDNINLLYKYIVSTPLTFPEYVTPHAKDLLRRILVPDPRRRADLFEVARHSWLSEYAHVVEFITSSTTTHTEIQNTTVPAEDSENPNLARSASVREASRRTPVSPTIGGLASKQGGIDQETEYAARQQKDNKRRTVQVEYVAPTTQTQRGEPAQQQATSGKTRARSGSEGPVEVDPRLSSDKPLPRDPPVSKESYSKPSVRGDPRKPPSSHRNQPSISRPPQSGRVPSDSYVTTMAPGSRPGTSGSMNTAGARPVAGASRSSYGQPLPPTVAGTNVHGRIQQPTDQQSEFGRPSAGGVPSKFAHVPGVAGHDQPDSREGSAKGHRRSNTLGEITGKMFGRSGSIFGNKNRKSSKVDQPQTPTEAKNRDSRKYPPVSMSAAPNPNGEYEPRKSVDSKRSRRSFSFGLGPRKKSGSIHNGSQTSVDKQNKRFSFIPGSISLKAIGIGKETPPGSTQGGGNDSQVDLGYQQEHLREPYRPDSQQQHQRQQSHYVDQRVNEQDLEAAGMDGMYAQLHSPSAPTFSTQQPHQQQQQQHYPAHYTSGQYGDRQMATAVPGYMQSGAHLQTSESESSVNMLSPEQQQFQAHGLRSVSVDHHQKLMEAQGGLGPAGRTGSSVGADGRQARVLQKNKRFVDAYDTDHSGGADHAGSSGAARRVMDFFRRRGKARGGDDR

SEQ ID NO: 6505 - protein, 122 aa, Brassica napus
MSPEKDGVSIPLHVDITDVASPLPMPLDILHGNPIPPFLSKTFDLVDDPSLDPVISWGLTGASFVVWDPVEFARIILPRNFKHNNFSSFVRQLNTYGFRKIDTDKWEFANEAFLRGQKHLLK

SEQ ID NO: 6506 - protein, 167 aa, Zantedeschia hybrid cultivar
MAADAAAAGASKKLTLKSSDGEVFEVEETVAMESQTIRNLIEDDCTADGVPLPNVTGRILAKVIEFCKKHVEIAALKADEGVDRAADEELKVWDADFVKVDQTTLFDLILAANYLNIKSLLDLTCQTVADMIKGKTPEEIRKTFNIKNDFTPEEEEEVRRENQWAFE

SEQ ID NO: 6507 - protein, 209 aa, Zea mays
  unsure (1)..(209): unsure at all Xaa locations
MADQELKLFQEEVEAVKQWWKNPRFAQTTRPYTAEQVVSKRGTLKQTYPSNIQAKKLYATLEAHAAKGTTSHTYGALDPVQVTQMAKHLETVYVSGWQCSSTASSTNEPGPDLADYPYNTVPLKVEHLFMAQLFHDRKQREERSNMSPEQRAKTPVIDYLRPIVADADTGHGGLTAVMKLTKLFVEKGAAGIHIEGPAPGTKKCGHMXR

SEQ ID NO: 6508 - protein, 360 aa, Rhodobacter sphaeroides 2.4.1
MDIRTHRIAAIPGDGIGIEVVAAGLEVLEALADRDGGFRFDVESFDWGTDRYRRTGAFMPEDGADRLRGFDAILFGAVGAPDVADHLTLWGLRLAICQPLDQYANVRPTRMLPGIRSPLRHVGESELDWVIVRENSEGEYAGQGGRSHPGLPLEVATDVSIFTRAGVERIMRFAFRLAQSRPRKLLTVVTKSNAQRHGMVLWDQIAGEVAREFPDVRWDKMLVDAMTVRMVQKPASLDTIVATNLHADILSDLAAALAGSIGVAPTANLNPERDTPSMFEPIHGSAFDITGRGIANPVATFWTAAMMLEHLGEAEAAGRLMTAVGRVTADEDLHTPDLGGRATTRQVTDALIAALRGRNA

SEQ ID NO: 6509 - protein, 252 aa, Glycine max
MEGVPHPIPRTVEEVFTDFKGRRAGLIKALTTDVEKFYQQCDPEKENLCLYGFPNETWEVNLPVEEVPPELPEPALGINFARDGMQEKDWLSLVAVHSDSWLLAVAFYFGARFGFGKNERKRLFQMINDLPTIFELVTGSAKQSKDQPAAHNNGSKCKSSGKSHQSESQAKGMKMSAPPKEEDESGEEEEEDDEQGATCGACGDNYGTDEFWICCDMCERWFHGKCVKITPAKAEHIKQYKCPSCSNKRVRV

SEQ ID NO: 6510 - protein, 454 aa, Rhodobacter sphaeroides 2.4.1
MNVLIWFRNDLRVADHPALARAADDRVLPLAIVDPAEWADPARSGRQWAFRAECLADLRADLAALGAPLAVRVGDAQAVLSKLCKLHRIGRILCLEDPAFAELDLALQAWAGGTGLDFIRLKPGAGAPAALTPLPAVEPGPIPPARALRLAEDRCPHRQPGGRPQGQLLLQSFLERRGALYRDGRNRLLQAERASSRLSPHLAAGTLSREEVLAAVAARLAERPDADWVRSLGAFRAALASGAPGARGAVCPPGRPGGGGSPRGYLDQTEGEADALRLRLAALHAGETGLPFVDAALRAMAASGWLPARLRGMLASVALHHLGLSEQAAGAALAAGLTDHSPPIHWAQMRRVALGRPVDPERLAGVLDPDGAFTRRWLPELAEVPDRVLQAPWRWEGARGLLGRRYPEPLVDPSAARAAGRTLARRPTARVEVIEGAAPRRPASDPTQQLCLDL

SEQ ID NO: 6511 - protein, 423 aa, Medicago sativa
MFGRGPTRKSDNTKYYDILGVSKSASEDEIKKAYRKAAMKNHPDKGGDPEKFKELGQAYEVLSDPEKKELYDQYGEDALKEGMGGGAGSSFHNPFDIFESFFGAGFGGGGPSRARRQKQGEDVVHSIKVSLEDVYNGTTKKLSLSRNALCSKCKGKGSKSGTAGRCFGCQGTGMKITRRQIGLGMIQQMQHVCPDCKGTGEVISERDRCPQCKGNKITQEKKVLEVHVEKGMQQGHKIVFEGQADELPDTITGDIVFVLQVKGHPKFRRERDDLHIEHNLSLTDALCGFQFNVTHLDGRQLLVKSNPGEVIKPGQHKAINDEGMPQHGRPFMKGRLYIKFSVDFPDSGFLSPSQSLELEKILPQKTSKNLSQKEVDDCEETTLHDVNIAEEMSRKKQQYREAYDDDDDEDDEHSQPRVQCAQQ

SEQ ID NO: 6512 - protein, 363 aa, GIBBERELLA ZEAE PH-1
MTSTQSVKAVRYHGQQDIRLESVPVKPLDPTTVRIAPKFCGICGTDVHEYLGGNNLIPKPGTPHGITGETSPLTLGHEFSGIVEEVGSEVTRLQKGDRVCVQPIIYDNECRSCKRGLQNCCDQNGFIGLSGWGGGLAESTVVPQDAVKKLPDNVSLEVGALVEPLAVGWHATKISPYEDGNSAFVVGGGPIGLAVVQALVGRGCKNIMLTEVSSKRREFAKKFGAHHVFDPTKDDVVAMVKKLTGGLGADVGFDAAGSQHAIDVAFDCLKARAVLVNIAVWEKRAQLNMNQIVFRERSYVGCATYALGDFEEVIDALSNGKIKPEGMITKVIKMDKVVEEGFQTLINDKDNHVKILVDVSAGV

SEQ ID NO: 6513 - protein, 1144 aa, Photorhabdus luminescens subsp. laumondii TTO1
MSQEYTEDKNIKLKRLSSGRRLLEAVLLVIVILAAYLLVALVSFNPSDPSWSQTAWHEPVHNLGGGVGAWLADTLFSAFGILAYVIPPVMILGCWTAFKQHDDREYVDFFALALRVIGALAIVLTSCGLAALNVDDLHYFASGGIIGSLFSSAMLPWFNELGATLVLLCIWAIGLTLFTGWSWLTIAEKTGAIILGAIGLITNRSRNEQEYTPYDETAIAREDLADDKTEPEFTAAGIDHDDVLFTAPSAVELAKAELDEPESVKAEIEIEQEQPIDIPTTNMANIDAEPEIRVNTSDDGIVQSQPLVEESEKNNNDEPVRYTFEIPAEYHFEPISEFNRQGTPTFEPVENSRNSSDTFTFMPETEPKNVVAATSATVITGNSQVKQGIGPELPRPNPVRIPTRRELYGIKVPSQRLAEQQREEEVKQQVGGADDDIESDKQQEVLLSQQFLEQQRERYRITTDTEEQAPIQPQIRQNPFEPENQPSVEERAQTATETVKQTVEQPQYKRYQEQGHQEKKELSALESLSILNNFSPVEDLVEKEPAEPLFMPSVHSAPENQLERPTEIAFAPAPVHNVVQQPQQPQQPQQPQQPQQPQQPQQPQQPQQPQQPQQPQQPQQPQQPQQPQQPQQDSLFHPFLVRNDQPLPKPTTPMPSLDLLTSPLAEEEPVDMFALEQTSRLIEARLSDYRVKADVVGFSPGPVITRFELDLAPGVKASRISNLSRDLARSLSAVAVRIVEVIPGKPYVGLELPNKKRQTVYLREVLDCEKFRDNPSPLTIVLGKDIGGQPVVADLGKMPHLLVAGTTGSGKSVGVNAMILSILYKAKPEDVRFIMIDPKMLELSVYEGIPHLLTEVVTDMKDAANALRWSVGEMERRYKLMSALGVRNLAGYNEKVKQAEEMGRPIPHPFWKPGDSMDVIHPVLKKEPYIVVMVDEFADLMMTVGKKVEELIARLAQKARAAGIHLVLATQRPSVDIITGLIKANIPTRIAFTVSSKIDSRTILDQGGAESLLGMGDMLYLAPNSSIPVRVHGAFVRDQEVHEVVNDWKARGRPEYVDSILSGGDDAEGGSGFDSDEELDALFDQAVQFVTEKRRVSISGVQRQFRIGYNRAARIVEQMEAQQIVSAPGHNGNREVLAPPPHES

SEQ ID NO: 6514 - protein, 183 aa, Eucalyptus grandis
MGRGRVELKRIENKINRQVTFAKRRNGLLKKAYELSVLCDAEVGLIIFSNRGKLYEFCSSSSMLKTLERYQKCNYGALEPNVSARESLELSCQQEYLRLKARYEGLQRTQRNLLGEELGQLCSKELESLERQLDGSLKQIRSRRTQYMLDQVTDLQHREQVVHEANRTLNQRLMEGYQVMRSS

SEQ ID NO: 6515 - protein, 199 aa, Bacillus subtilis subsp. subtilis str. 168
MTHNPNIIWHPAAISKSDRQSLNGHKSCVLWFTGLSGSGKSVLANAVDEKLYRKGIQSYVLDGDNIRHGLNKDLGFQTGDRIENIRRIGEVAKLFVDSGQMILTAFISPFREDRDMVRALFPKGEFFEIYVKCPLHVCEQRDPKGLYKKARNGEIKHFTGIDSPYEAPLSPDFIIESDQTSISDGADLIINALQNRGII

SEQ ID NO: 6516 - protein, 481 aa, Burkholderia fungorum LB400
MAIPSYTDTRLLINGEWCDAASGKTLDVINPATGQAIGKVAHAGIADLDRALAAAQRGFEAWRKVPANERATTMRRAAALVRERASDIGRLMTQEQGKPFAEARIEVLAAADIIEWFADEGRRVYGRIVPSRNLAAQQLVLKEPIGPVAAFTPWNFPVNQVVRKLSAALACGCSFLVKAPEETPASPAALLQAFVEAGVPAGTVGLVFGDPAEISGYLIPHPVIRKVTFTGSTPVGKQLAALAGAHMKRATMELGGHAPVIVAEDADVALAVKAAGGAKFRNAGQVCISPTRFLVHNSIREEFAAALVKHAEGLKLGDGLAEGTTLGPLANARRLSAMSKVLDDARKTGAKVETGGERVGSEGNFFAPTVLTNVSLEADVFNNEPFGPIAAIRGFDKLEEAIAEANRLPYGLAGYAFTKSFSNVHLLSQQVEVGMLWINQPATPSPEMPFGGVKDSGYGSEGGPEAMEGYLVTKAVSVMAV

SEQ ID NO: 6517 - protein, 127 aa, Rickettsia sp. TwKM02
PAHGGANEAVINMLKEIGSSEKIPKYIAKAKDKNDPFRLMGFGHRVYKNYDPRAAVLKETCKEVLKELGQLENNPLLQIAIELEAIALKDEYFIARKLYPNVDFYSGIIYKAMGIPSQMFTVLFAIA

SEQ ID NO: 6518 - protein, 176 aa, Zea mays
  unsure (1)..(176): unsure at all Xaa locations
GPVLSAASTPRFLHAQPPQSVAFPSATAIRRAKSAAIPLRPQRPPAAISPPAAPAIRRLSIRGRNRFHPRPQSTAPNPPPHPCARNASTLLLSPYMHFGELSVRKVFHXGNDSNHAGEESCTLFLCSIGXFNHPCSHEKPLLSHLRFFPWVVNEVYFKXPLVDAGMRELRATGWVH

SEQ ID NO: 6519 - protein, 175 aa, Triticum aestivum
MPPPVMAWSATSVAPLQGLESTGVLPVSRRSNGDSLDSVSNGGRIMCMQVWPIEGIKKFETLFYLRPLSTEALLKQVDYLIRSKWVPCLEFSKVGFIFREHNASPGYYDGRYWTMWKLPMFGCTDATQVINEVEEVKKEYPDAYVRIIGFDNMRQVQCVSFIAFKPPGCEESGKA

SEQ ID NO: 6520 - protein, 118 aa, Brassica napus
MAESQAKSPGGGESGGDQSPRSSSHVREQDRFLPIANISRIMKRGLPANGKIAKDAKEIVQECVSEFISFITSEASDKCQREKRKTINGDDLLWAMATLGFEDYIDPLKIYLTRYREM

SEQ ID NO: 6521 - protein, 310 aa, Zea mays
  unsure (1)..(310): unsure at all Xaa locations
MAARSSPSSTSPPAGGPAAAAWRRRRVASEPPYSCGAGASPNIPFCDVGLPIDRRVDDLGSRMTVAKKTSQLGDQSPAIPRLGVPAYKWWSEALHGIFNQGRGIHLDGPLRAATSFPQVILTAASFNLHLWDRIGQDVDELKEEVQEAPRVKMLHCPSKAMDIENEIQVLCDQLAKKSSDSLRLLKELELHRSYGENDMPLYELKGLETLGSTLHIVVHDCASVDFWNSSIQWFRIQPEGSKKEIIXGTTKPAYAPEPHDVGRYTQAEVKSGGQTSITKIAGSVDPVSXAAGLVHYVEALVRRRETGYNV

SEQ ID NO: 6522 - protein, 303 aa, Bartonella bacilliformis
YIDGDEGILLYHGYSIDQLAENGDFLETCYLLLYGELPNKQQKIDFDRCIMRHTMVHEQFARFFHGFRRDSHPMAVMVACLGAMSAFYHDSINITDPQQRMIASIRLISKVPTLAAMAYKYSIGQPFVYPRNDLNYATNFLHMCFSVPCEEHKISPVIARAMDRIFTLHADHEQNASTSTVRLAGSSGANPYACIAAGVACLWGPAHGGANEACLKMLQEIGSVKKIPEFIARAKDKNDPFRLMGFGHRVYKNYDPRAKIMQKTCHEVLQELNIQDDPLLDIAMELEHIALNDEYFINKKLYP

SEQ ID NO: 6523 - protein, 501 aa, Glycine max
MTSLTNGDAGSLNKVPTIKFTKLFINGDFVDSLSGKTFETIDPRTGDVIARISEGDKEDIDIAVKAARHAFDNGPWPRLPGSERARILLKWAEIIEENAEELAALDAIDAGKLYHMCRNVEVPAAANTLRYYAGAADKIHGEVLKMSREFHAYTLLEPLGVVGHITPWNFPNTMFYIKVAPSLAAGCTMVLKPAEQTPLSALFYAHLAKLAGIPDGVINVVPGFGPTAGAALSSHMDVDKVSFTGSTQTGREIMQAAAKSNLKPVSLELGGKSPLIIFDDADIDKAAELALFGIISNKGEICVASSRVFVQEGIYDEFEKKLVEKAKSWVVGDPFDPKVQQGPQVDKNQFEKILSYIEHGKREGATLLTGGKTVGNKGYYIEPTIFSNVKEDMLIAQDEIFGPVIALMKFKTIEEAIKSANNTKYGLAAGIVTKNLDTANTVSRSIRAGIVWINCYFAFGDDVPFGGYKMSGFGRDHGLEALHKYLQVKSVVTPLYNSPWL

SEQ ID NO: 6524 - protein, 320 aa, Bartonella doshiae
TYIDGDKGILLYRGYPIEQLAEKGDFLESCYLLLYGELPTQQEKNDFDRRIMQHTMVHEQFSRFFQGFRRDSHPMAVMVACLGAMSAFYHDSIDITDPQQRMIASIRLISKVPTLAAMAYKYSIGQAFVYPHNSLSYAANFLRMCFAVPCEEYQVNPVLTRAMDRIFILHADHEQNASTSTVRLAGSSGANPFACIAAGVACLWGPAHGGANEACLKMLKEIGSVKKIPEFIARAKDKNDPFRLMGFGHRVYKNYDPRAKIMQKTCHEVLKELNRQDDPLLDIAIELEHIALNDEYFIEKKLYPNVDFYSGITLKALGFP

SEQ ID NO: 6525 - protein, 467 aa, Listeria monocytogenes str. 4b F2365
MLYSEDDKRKQESYRIPLFGSEEESTSIPKYVLKKEPMEPRIAYQLVKDQLMDEGNARQNLATFCQTYMEKEAEILMAETLEKNAIDKSEYPQTAELENRCVNILADLWNAPKDMSYLGTSTVGSSEACMLGGLAMKFRWRNHAEKRGLDIQAKRPNLIISSGYQVCWEKFCVYWDVDMRVVPMDKEHLSIDVDKVFDLVDEYTIGIVGILGITYTGKFDDIQLLDEKVEAYNEANEHQLVIHVDGASGAMFTPFVNPELPWDFRLKNVVSINTSGHKYGLVYPGVGWILWKDKEYLPKELIFEVSYLGGSMPTMAINFSRSASQIIGQYYNFLRYGFEGYREIHEKTKKTALYLAKSVEKSGYFEIINDGANLPIVCYKMKEGLDVEWTLYDLADQLLMKGWQVPAYPLPADLSDTIIQRFVCRADLGYNVAEEFAVDFADALHNLEHARVLYHDKERNDSYGFTH

SEQ ID NO: 6526 - protein, 194 aa, Methanosarcina barkeri str. fusaro
MNRKTGAVVLIFLFAAIVFISGCVQNEKVGAPVNKEFPEDGKGDESMNIQSIKVSSSAFESNGSIPGKYTCDGQNINPPLEFEGIPEEAESLVIIVDDPDAPTKTFTHWIVWNIEPVAKIEEDSIPGIEGLNDFKKIGYGGPCPPSGTHRYFFRVYALDKNLDLKAGAGRKGLENEMIGHIIAEGELMGKYSRK

SEQ ID NO: 6527 - protein, 467 aa, Pseudomonas aeruginosa UCBPP-PA14
MGLNADWMQRDLNVLWHPCTQMKDHERLPVIPIRRGEGVWLEDFEGKRYIDAVSSWWVNVFGHANPRINQRIKDQVDQLEHVILAGFSHQPVIELSERLVKITPPGLDRVFYADSGSAGIEVALKMSYHFWLNSGRPRKKRFVTLTNSYHGETIAAMSVGDVALFTETYKSLLLDTIKVPSPDCFLRPDGMCWEEHSRNMFAHMERTLAEGHDEIAAVIIEPLIQGAGGMRMYHPVYLKLLREACDRYGVHLIHDEIAVGFGRTGTMFACEQAGIAPDFLCLSKALTGGYLPMSAVLTSETIYRGFYDDYQTLRAFLHSHTYTGNPLACAAALATLDIFEEDKVIEANRALSTHMARATAHLADHPHVAEVRQTGMVLAIEMVQDKASRTPYPWQERRGLKVFQHGLERGALLRPLGSVVYFLPPYVITPEQIDFLAEVASEGIDIATRDAVSVAVSDFHPDHRDPG

SEQ ID NO: 6528 - protein, 484 aa, Pseudomonas aeruginosa UCBPP-PA14
MLGVFSAVALGKDKQPTAIVVGAGLAGLSAAYELQKDGWQVTVLEARPQVGGRSGLATSEWVGNQKVQPTLNAYLDTFKLKPVPAPDFVRTPSYLIDGLYYSSSDLALKQPNVAADLKRFESTLDDLSASISDPLNPASSNTLFALDQMNAARWLDKLNLSPTARLLVNQRIRSRYDEPSRLSLLYLAQQGRAYRGVDDRDLRAARLPGGSQVLAEAFVKQIKTIKTKSKVSSIVQAKDGVAVKAGSETYKADYVVLAVPLKALGQIQMTPSLSGTQMSALKGTNYGWRDQILLKFKRPVWDDKSRLSGEIFSDQGLGMIWVEPALKGGANVLINLSGDNARVLQAFGDRQMVDQVLIRMNKFYPKMRGAFGGYEIRRYSADPGTGGSYLAYGPGQVTRFWRIWEQPLSRVAFAGEHTDALYPGTIEGALRSGKRAASQVRDLYAGKTPVIEGAPMVAKAEKVAAPTTGGEKKNPFAWFTRLFD

SEQ ID NO: 6529 - protein, 232 aa, Zea mays
  unsure (1)..(232): unsure at all Xaa locations
MAQILLHGTLHATIFEAESLSNPHRATGGAPKFIRKLVEGIEDTVGIGKGTTKIYATVDLEKARVGRTRMVSNEPVNPRWYESFHIYCAHMAADVVFTVKIDNPIGASLIGRAYLPVEDILGGDEIDKWLEIRDEKREPIGDSKIRVKLQYFDVGKDRNWARGVRSTKYPGVPYTFFSQRQGCKVTLYQDAHVPDNFVPRIPLADGKNYEPHRVXWEDIFDAISKGQHLIYI

SEQ ID NO: 6530 - protein, 378 aa, Anabaena variabilis ATCC 29413
MMVCEYKPGLEGIPAAQSSISYVDGQKGILEYRGIRIEDLAQKSTFLETAYLLIWGELPTKEELQVFEEEVRLHRRIKYRIRDMMKCFPESGHPMDALQASAAALGLFYSRRDLHNPVYIRDAVVRLIATIPTMVAAFQLMRKGNDPVKPRDDLDYSANFLYMLNEKEPDALAAKIFDICLILHVEHTMNASTFSARVTASTLTDPYAVVASAVGTLGGPLHGGANEEVIQMLEEIGSVENVRSYVEERLQRKDKLMGFGHRVYKVKDPRATILQGLAEQLFAKFGADKYYDIAQEMERVVEEKLGHKGIYPNVDFYSGLVYRKMGIPTDLFTPIFAIARVAGWLAHWKEQLEENRIFRPTQVYNGKHSVTYTPIDQR

SEQ ID NO: 6531 - protein, 350 aa, Listeria monocytogenes str. 4b H7858
MTYKITSLAGDGIGPEIMTSGLQVLEAVAKKYNHTFEIESHPFGGAGIDVAQDPIPSSTLKACRDADAILLGAIGGPKWDNAPKRPEDGLLALRKALGLFANIRPIQVPSSITHLSPLKKEIVENTDFVVVRELTGGLYFGEPKYWDNEAAVDSLTYTRAEIERIIEKAFEIAATRNKKVTSVDKANVLASSKLWRKIADEVASRHPDITLEHLYVDAAAMLMIQRPTTFDVIVTENLFGDILSDEASVITGSLGMLPSASHAENGPSLYEPIHGSAPDIANQNIANPMSMISSVSMMLRQSFSLFEEADATDAATARTMQAGFLTADLGGNTSTTDFTNEVLKQIEGGE

SEQ ID NO: 6532 - protein, 294 aa, Staphylococcus aureus subsp. aureus MRSA252
MVIQWYPGHMAKAKREVSEQLKKVDVVFELVDARIPYSSRNPMIDEVINQKPRVVILNKKDMSNLNEMSKWEQFFIDKGYYPVSVDAKHGKNLKKVEAAAIKATAEKFEREKAKGLKPRAIRAMIVGIPNVGKSTLINKLAKRSIAQTGNKPGVTKQQQWIKVGNALQLLDTPGILWPKFEDEEVGKKLSLTGAIKDSIVHLDEVAIYGLNFLIQNDLARLKAHYKIEVPEDAEIIAWFDAIGKKRGLIRRGNEIDYEAVIELIIYDIRNAKIGNYCFDIFKDMTEELANDANN

SEQ ID NO: 6533 - protein, 335 aa, Burkholderia cepacia R1808
MALEQRPKPELQSPTDAIVRVTRTTICGTDLHILKGDVPTCEPGRVLGHEGVGVVEQVGAAVDALKPGDRVLISCISSCGRCEYCRRGLYSHCTTGGWILGNRIDGTQAEYVRIPHAQTSLYPIPAGADEDALVMLSDILPTGFECGVLNGKVQPGCSVAIVGAGPIGLAALLTAQFYSPGQIIMIDPDSNRLDIARRFGATDCVDGRSGDAAADVMKLTDGIGVDCAIEAVGIPATFELCTSIVAPGGVVANVGVHGVKADLHLEKLWDRNIAITTRLVDTVSTPMLLKTVRAGRLDPAQLITHRFALDDVEGAYDTFGRAAQTHALKVIIEVS

SEQ ID NO: 6534 - protein, 263 aa, Oryza sativa (japonica cultivar-group)
MSPPLELDYIGLSPPPPPPSSSSAAAARADDVDLKGTELRLGLPGSESPDRRPAAIAAAAATATTLELLPAKGAKRVFPDEAALTPPTAAAGKGKAAREGEEVGAEEEDKKVAAPPQPAAKAQVVGWPPIRSYRKNTMATNQIKSNKEDVDAKQGQGFLYVKVSMDGAPYLRKVDLKTYKNYKDMSLGLEKMFIGFSTGKEGAENQKDGEYVLTYEDKDGDWMLVGDVPWEMFTDSCRRLRIMKGSDAIGLAPRAGEKSKNRN

SEQ ID NO: 6535 - protein, 248 aa, Glycine max
WFRFQVDWTPELHKKFVKAVEQLGIDQAIPSRILEIMKVEGLTRHNVASHLQKYRIHKRQSAPREEDRKWHNQRDAMQRNYYMQRPIMAYPPYHSNHTLSPAPIYPMWGQPGSQTAGVQIWGHPGYHIWHPTESCHWKPYQGVHVDAWGCPLLPAPQAPCFPYNQNIPGLHNPKAVDYRFGMPQSSFEHHPAEEVVDKVVKEAISKPWLPLPLGLKPPSMDSVLAELSKQGISGIPLGNKRSSTPKLR

SEQ ID NO: 6536 - protein, 335 aa, Moorella thermoacetica ATCC 39073
MKHVVTLIPGDGTGPELIAAARRVLEASGAELEWEVMAAGEGAQEKYGSVLPEETLASIRKNGVALKGPITTPVGTGFRSVNVALRKELDLYANVRPFRNLPNVPSRYQGVDLVIYRENTEDLYAGVEHMVGEDAAESIKIITRKGSERIARAAFEYARRQGRKRVTAGHKANIMKFSDGLFLRTFYDVARDYPEITADDRIVDNLSMQLVQKPEQYDVLVLPNLYGDILSDLCAGLVGGLGVAPGANIGEKAAVFEPIHGSAPKYAGQNKVNPLATILSGVMMLEHLGEKEAAARIQRAILAVLAEGKYLTYDLGGSAGTSDMADAIVRRLEVE

SEQ ID NO: 6537 - protein, 199 aa, Zea mays
  unsure (1)..(199): unsure at all Xaa locations
MASSMLSSAAVVTSPAQATMVAPFTGLKSSAAFPVTRKANNDITSIASNGGRVSCMKVWPPVGKKKFETLSXYXXDXXEVEWVKEXXYLLPHKWIPLCEFXXEHGFVYREHGNTPEYYNARTGHGGTSLGPMTDFAQGLKEAKRAKGKPNPFLGTSIPKNRKAGDNFYPKNPKFPGGKFERNPKKTPPIYSQGGFFPRG

SEQ ID NO: 6538 - protein, 370 aa, Arabidopsis thaliana
MVDQGFFTLKKEKKKNILIKLFYVKILGFCFCDSWSSSDMAHSLTSLAVFQSVIRKEMVRSLHVYESVEIEREFWFKSKSCYVEKKAKPLFRSEDFRRPEISEGSVFGTWRCIFVFRFNHSLPRFPTLLCLSRNPKLEDIPNLANELKFISELKPSKIYEEEQCSSSTEGYYNSDLPKPRKLVLKQDLNCLPDSETESEESVNEKTEHSEFENDKTEQSESDAKTEILKKKKRTPSRHVAELSLEELSKYFDLTIVEASRNLKVGLTVLKKKCREFGIPRWPHRKIKSLDCLIHDLQREAEKQQEKNEAAAMAVAKKQEKLETEKRNIVKRPFMEIGIETKKFRQENFKKRHRASRAKKNQESLVTSSST

SEQ ID NO: 6539 - protein, 422 aa, Desulfovibrio vulgaris subsp. vulgaris str. Hildenborough
MSDILFLRNARLLGTPVDLIARDGVIAAIGEHGTLDTPADATVHDAGGHILFPSFIDAHVHLREPGFEYKEDIASGLAAAAHGGFGAVMCMANTRPVNDDAAVTRHIIETSLRHWPHGPRVYPVGAATVGLKGTELAPMAELAAAGCAAFSNDGAPVPDTEMFRRAVEYAADLGRVVIDHCEDPYLAKGAHMNEGATSGRVGVKGQPDVGEALHVARDILLADYLGLPIHLAHISCRRSVELIAWAKVRGVPVTAETCPHYLILDDTALENYDTNAKVNPPLRTPDDVAALREAVKSGVIDMFVTDHAPHAAHEKETPLDEAPNGISGLDTAVALTWGLVREGLLTEGDLVRLWNREPARVFGLPRNGFEPGDPADFFLFDPDEAWVVSRETMHSKSCNTPFLGHTLTGRVKAHWMGGRRIA

SEQ ID NO: 6540 - protein, 333 aa, Zea mays
MEAEAAAKRAREGGEDATAPVAGAEAVVAGAGEQAGISAVIPGWFSEISPMWPGEAHSLKVEKVLFQGKSDYQNVMVFQSSTYGKVLVLDGVIQVTERDECAYQEMITHLPLCSIKDPKKVLVIGGGDGGVLREVSRHISVEQIDICEIDKMVVDVSKQFFPHLAVGFEDPRVSLHIGDGVAFLKNAPEGTYDAVIVDSSDPIGPAQELFEKPFFHSVARALRPGGVVCTQAESIWLHMHIIEDIFVNCRQVFKGSVNYAWTTVPTYPSGVIGFMLCSTEGPAVDFQHPVFNIEEDEHSTKSKGPLKFYNSEIHTASFCLPSFAKRVIESKAS

SEQ ID NO: 6541 - protein, 345 aa, Arabidopsis thaliana
MDGKASNGNGLEKTVPSCCLKAMACVPEDDAKCHSTVVSGWFSEPHPRSGKKGGKAVYFNNPMWPGEAHSLKVEKVLFKDKSDFQEVLVFESATYGKVLVLDGIVQLTEKDECAYQEMIAHLPLCSISSPKNVLVVGGGDGGVLREISRHSSVEVIDICEIDKMVIDVSKKFFPELAVGFDDPRVQLHISDAAEFLRKSPEGKYDAIIVDSSDPVGPALALVEKPFFETLARALKPGGVLCNMAESMWLHTHLIEDMISICRQTFKSVHYAWSSVPTYPSGVIGFVLCSTEGPAVDFKNPINPIEKLDGAMTHKRELKFYNSDMHRAAFALPTFLRREVASLLAS

SEQ ID NO: 6542 - protein, 488 aa, Shigella flexneri 2a str. 301
MKKVNHWINGKNVAGNDYFQTTNPATGEVLADVASGGEAEINQAVAAAKEAFPKWADLPMKERARLMRRLGDLIDQNVPEIAAMETADTGLPIHQTKNVLIPRASHNFEFFAEVCQQMNGKTYPVDDKMLNYTLVQPVGVCALASPWNVPFMTATWKVAPCLALGNTAVLKMSELSPLTADRLGELALEAGIPAGVLNVVQGYGATAGDALVRHHDVRAVSFTGGTATGRNIMKNAGLKKYSMELGGKSPVLIFEDADIERALDAALFTIFSINGERCTAGSRIFIQQSIYPEFVKRFAERANRLRVGDPNDPNTQVRALISQQHWEKVSGYIRLGIEEGATLLAGGPDKPSDLPAHLKGGNFLRPTVLADVDNRMRVAQEEIFGPVACLLPFKDEAEGLRLANDVEYGLASYIWTQDVSKVLRLARGIEAGMVFVNTQNVRDLRQPFGGVKASGTGREGGEYSFEVFAEMKNVCISMGDHPIPKWGV

SEQ ID NO: 6543 - protein, 489 aa, Mycobacterium avium subsp. paratuberculosis str. k10
MALLADGVSELFIDGKMSAGNAGTFPTVNPATEEVLGVAANADAADMDRAIDAARRTFDETDWSRNTELRVRCVRQLRDAMREHIEELRDITIAEVGAPRMLTSAAQLEGPVGDLSFAADTAESYEWNQDLGQASPMGIPTRRTIAREAVGVVGAITPWNFPHQINLAKLGPALAAGNTVVLKPAPDTPWCAAVLGQLIAEHTDFPPGVVNIVTSDDHGVGALLSKDPRVDMVSFTGSTATGRSVMSDAAATIKRVFLELGGKSAFVVLDDADLGGACSMSAFTAAMHAGQGCAITTRLLVPRDRYDEAVAAAAGTMGSIKPGDPNDPGTVCGPVISARQRDRVQSYLDLAIAEGGTFACGGGRPADKDVGFFIEPTVIAGLTNDARPAREEIFGPVLTVIAYDGEEDALRIANDSPYGLSGTVFSADPERAANFASRMRVGTVNVNGGVWYSADAPFGGYKQSGNGREMGLAGFEEYLEIKTIATAVQ

SEQ ID NO: 6544 - protein, 365 aa, Yersinia pestis biovar Medievalis str. 91001
MRLAMKKTYRIAAIPGDGIGHEVMPEGINVLQAAALRWDLDISFENIEWASCEYYQHHGQMMPNDWQRQLQCFDAIYFGAVGWPATVPDHISLWGSLLKFRRDFQQYVNLRPVRLFPGIPCPLVGKQPGDIDFYVVRENTEGEYSSVGGRLFEGTEQEMVLQASIFTRRGVDRILKYAFELAQMRPRKRLTSATKSNGLAFSMPYWDERFEVMAAQYPQISADKQHIDILCARFVLNPERFDVVVASNLFGDILSDLGPACAGTIGIAPSANLNPERDFPSLFEPVHGSAPDIYKRNIANPIAMIWAGAMMLDFLGQGDERYHAAHNGILNAIEQVIAQGPKTPDMCGDASTQQVGSAIVQVLSH

SEQ ID NO: 6545 - protein, 283 aa, Oenococcus oeni PSU-1
MVLSRSVPNIVLNDGHSLPAIGLGTYLVRGGQGVDQILSAIEDGYRLIDTSTNYDSEGAVGEAIRRSGIPRSEFIVTSKLPGKYHHYQDALMMIQESIFRMGIDYLDLYLIHWPLPKRDHYVKAWKALVDAQKLGLIRSIGVSNFLPEHLDRIINESGVTPAVNQIEVHPYWVQEDMLAANKSRGIVSEAWSPLGRGSAALKEDIIKNLADKYGKNTGQIILRWHTQRGIIPLPKSSSLIHQRSNIDIFDFSLTSSEIEQINALNRSDGRVDGQDPNTYEEFD

SEQ ID NO: 6546 - protein, 400 aa, Streptomyces avermitilis MA-4680
MLSEQSAATVRATLPAVGAAVGEITARFYDRLFAARPELLRDLFNRGNQAAGTQRQALAGSIAAFATYLVEHPDERPDAMLDRIAHKHASLGIAPGQYAVVHEHLFAAIAEVLGDAVTPEVAAAWDEVYWLMANALIAIERRLYAQHENTGDTGGRRPWRVVERVDETADVAAFRLRPADGRPLPDFRPGQYVSVRVELPDGARQTRQYSLVGAPGSPELRIAVKRVHGGTTPDGEVSNHLHARVREGSVLELSAPYGDLALEATDVPLLLASAGIGVTPMIAMLEHLALTGHRAPVTVVHADRSPAEHALRADHEAYAAKLADAAVHFWYEHPEPGHPADRTGLVDLTGVPVSAGTRAYLCGPLPFMRAVRTQLIEKGVAPADIHYEVFGPDLWLARES

SEQ ID NO: 6547 - protein, 123 aa, Saprolegnia ferax
MIHIQTKLKIKDNTGVKIGQCIKIYKKATGTIGDTILISVKNLRLNKKKKIKITKGDLLKALIIQTKYSVKNTIGNYIKFDNNCAVILNNQNKLMGTRILGPITSEFRKKKQFKILSLASNIL

SEQ ID NO: 6548 - protein, 325 aa, Glycine max
  unsure (1)..(325): unsure at all Xaa locations
MGGGGAMRSAAAKIAGIGISKAALRPSALPTEQAVHNASRPTSVVGVKGAKSTEVASLHAAAPWDDWDLADDGDLVVPRMVFGSVPTFAEAKEATAELKDAIDQVYLSPESSQYSSRGGQVSALSPTGGQVSALSPTLYEPVNRSCVVDAISDSSAPKXAIQAFHLLSTSRDVFAVVASLACDPNVWNAVMENPAVSSFFQSQQSVADLGAAGNTEELDKFSSCTSETVESPERLGVSAESHPGNGIFDFMDLLQNVKLTVIELVSRVSGFLQNIFPTPDAMKEKMSGDVDGNTKASFMDSKISMGGTFTGLAIKKIMVIVTKRA

SEQ ID NO: 6549 - protein, 320 aa, Bartonella quintana
IDGDKGILLYCGYPIDQLAEKGDFLESCYLLLYGELPTKQEKIDFDRCIMQHMMVHERFTRFFHGFRRDSHPMAVMVACLGAMSAFYHDSIDIKDAQQRMIAAIRLISKVPTLAAMAYKYSIGQAFVYPRNDLSYAANFLHMCFSVPCEEYKINPVLSRAMDRICTLHADHEQNASTSTVRLVGSSGANPFACIAAGVACLWGPAHGGANEACLKMLQKIGSVERIPEFIARAKDKNDPFRLMGFGHRVYKNYDPRAKIMQQTCHEVLKELNIQDDPLLDIAIALENTALNDEYFIEKKLYPNVDFYSGITLKALGFPTE

SEQ ID NO: 6550 - protein, 352 aa, Coxiella burnetii RSA 493
MKNKNLSMPSLKEKLLQETVEHIDITRFDARPIIDAMDHMSFTSRDLARATQIFNRMLQDEQCSIILSLAGSTSAGGCMKLYADLVKYNMVDAIVATGASIVDMDFFEALGFRHYQGSPAVEDRQLRDLYIDRIYDTYIDEEDLQRCDHTIYEIANSLEPRPYSSREFIHHMGAYLAQGKAKKEESLVQLAYEHDVPIFCPAFTDSSAGFGLVLHQVKNPDRHLTIDSIRDFRELTDIKIKAGTTGLLMIGGGVPKNFVQDTVVCAEVIGKTVDMHKYAIQITVADVRDGACSSSTLKEACSWGKVDTAYEQMVYAEATSGLPLLASDAYHRGYWKDRSPRQYANLFKSESK

SEQ ID NO: 6551 - protein, 243 aa, Medicago truncatula
MGKSLFQESLKALEADIQYANTLALGHPRDKEGGCFQMRLSYSPVAPLFLSLVQWTDYRLAGALGLLRILIYVTYGNGKTTISIYERKASIRQFYSIIFPALLQLQKGVTDLEERKQKEVYANRYQKKTDFKDRRESKIDIEREKECGVCLEVKAKVVLPNCCHQMCFKCYREWCLRSQSCPFCRDSLKRVNSGDLWIYTDTSDIVDVGTIFKENCKILFLYIEKLPLIIPDPRHVSYDPFFR

SEQ ID NO: 6552 - protein, 106 aa, Arabidopsis thaliana
MDVGRNNRKNMSFRSSPEKSKQELRRSFSAQKRMMIPANYFSLESLFLLVGLTASLLILPLVLPPLPPPPFMLLLVPIGIMVLLVVLAFMPSSHSNANTDVTCNFM

SEQ ID NO: 6553 - protein, 426 aa, Chlorobium tepidum TLS
MTIDLDFDRCHLWHPYTSMADPLPVWPVKRASGVMIELEDGRKLIDGMSSWWAAIHGYNHPVLNRAVTEQLGRMSHVMFGGLTHEPAIELGKILTSLLPDPLDRIFFCDSGSVAVEVAIKMALQYWLAAGKPGKKRLLTVRSGYHGDTFMAMSVCDPVTGMHSLFSGAVPEQLFVEAPACGFNEPWREEAIDKMRQALEDHANTIAAVIIEPIVQGAGGMRFYSPHYLRRLRELCTEHGVLLIFDEIATGFGRTGKLFAMEYASVTPDIVCLGKALTGGYMTLAATVTTGHVADTISGGNPGLFMHGPTFMANPLACAVAVASLKLLLSGDWQSTVWRIERQLAEELAPCTGMTGVRDVRVLGAIGVVELDRPVDMAKIQQAFVERGIWVRPFGRLVYLMPPFIIRDNELTRLTSVICEVIGAEYR

SEQ ID NO: 6554 - protein, 319 aa, Bartonella sp.
ITYIDGDKGVLLYRGYPIDQLAEKGDFLESCYLLLYGELPTKQEKNDFDRCIMQHTMVHEQFARFFHGFRRDSHPMAVMVACLGAMSAFYHDSIDITDPQQRMIASVRLISKVPTLAAMAYKYSIGQAFVYPRNDLSYAANFLRMCFSVPCEEYKTNPVLTRAMDRIFILHADHEQNASTSTVRLAGSSGANPFACIAAGVACLWGPAHGGANEACLKMLQEIGDVKRIPEFIARAKDRNDPFRLMGFGHRVYKNYDPRAKIMQKTCHEVLKELNIQDDPLLDIAIELEKIALNDEYFVEKKLYPNVDFYSGITLKALG

SEQ ID NO: 6555 - protein, 315 aa, Bartonella sp.
DGDKGVLLYRGYPIDQLAEKGDFLESCYLLLYGELPTKQEKNDFDRCIMQHTMVHEQFARFFHGFRRDSHPMAVMVACLGAMSAFYHDSIDITDPQQRMIASVRLISKVPTLAAMAYKYSIGQAFVYPRNDLSYAANFLRMCFSVPCEEYKTNPVLTRAMDRIFILHADHEQNASTSTVRLAGSSGANPFACIAAGVACLWGPAHGGANEACLKMLQEIGSVKRIPEFIARAKDRNDPFRLMGFGHRVYKNYDPRAKIMQKTCHEVLKELNIQDDPLLDIAIELEKIALNDEYFVEKKLYPNVDFYSGITLKALG

SEQ ID NO: 6556 - protein, 472 aa, Escherichia coli CFT073
MTTHLVWFRQDLRQHDNLALAAACRNSSARVLALYIATPRQWAAHNVSPRQAELINTQLNALQIALAEKGIPLLFREVDDFAASVEIVKQVCAEYRVTHLFYNYQYEVNERARDVQAERTLRNVVCEGFDDSVILPPGAVMTGNHEMYKVFTPFKNAWLKRLREGMPECVAAPKVRSSGSIEPAPSITLNYPRQSFDTAHFPVEEKAAIAQLRQFCLNGAGEYEQQRDFPAVEGTSRLSASLATGGLSPRQCLHRLLAEQPQVLEGGPGSVWLNELIWREFYRHLMTYYPSLCKHRPFIAWTDRVQWQSNPAHLKAWQEGKTGYPIVDAAMRQLNSTGWMHNRLRMITASFLVKDLLIDWREGERYFMSQLIDGDLAANNGGWQWAASTGTDAAPYFRIFNPTTQGEKFDREGEFIRQWLPELRDVPGKAVHEPWKWAEKTGVTLDYPQPIVDHKEARLRTLAAYEEARKGA

SEQ ID NO: 6557 - protein, 500 aa, Bordetella parapertussis 12822
MDTPSDLLRKLGLDPAALAQGSLRARSPIDGALLARVPEHSVAQAHAAITRARQASQQWRDVPAPRRGELVRRFGDVLREHKEALGRLVSLEAGKILAEGAGEVQEMIDICDFAVGLSRQLYGLTIASERPGHRMMETWHPLGVVGVISAFNFPVAVWSWNAALALVCGNAVVWKPSEKTPLTALACQALLARALQDYGEAPAGLAEVLIGGRQLGEALVDSHDVALVSATGSTRMGRQVGPRVAQRFGRVLLELGGNNAIIVAPSADLEMATRGIVFGAIGTAGQRCTTTRRLIAHTDIADTLVARLKQAYASATVGDPLQPGTLVGPLIDRAAYDAMQAALTAAREQGGQVSGGERLLAERYPDAWYVRPAIVEMPGQTDVVCHETFAPILYVMRYGDFPAALAMHNGVPQGLSSAIFTNDLREAEAFLSSAGSDCGIANVNIGTSGAEIGGAFGGEKETGGGRESGSDAWKHYMRRATNTVNYSRALPLAQGIRFGE

SEQ ID NO: 6558 - protein, 221 aa, Glycine max
  unsure (1)..(221): unsure at all Xaa locations
MALFAAFSICKVAKDAAGVAGNVFAFGLFVSPIPTFRRIIRNGSTEMFSGLPYIYSLLNCLICMWYGTPLISADNLLVTTVNSIGAVFQFVYIIIFLMYAEKAKKVRMIGLSLAVLXIFAIILVGSLQIDDIIMRRFFVGFLSCASLISMFASPLFIIKLVIQTKSVEFMPFYLSLSTLLMSTCFLLYGLLNDDAFIYGPDGVGTMLGLVPGVLCWVLRGG

SEQ ID NO: 6559 - protein, 425 aa, Fusobacterium nucleatum subsp. nucleatum ATCC 25586
MLLKNCKILKNTKFEKVDILIRDNKIEKISENIDITDENIIDIKNRFVTAGFIDVHVHWREPGFSKKETVYTASRAAARGGFTTVMTMPNLNPVPDSVETLNKQLEIIKKDSVIRAIPYGAITKEEYGRELSDMEAIASNVFAFTDDGRGVQSANVMYEAMLMGAKLNKAIVAHCEDNSLIRGGAMHEGKRSAELGIKGIPSICESTQIVRDVLLAEAANCHYHVCHISAKESVRAVREGKKNGIKVTCEVTPHHLLSCDEDIKEDNGMWKMNPPLRSREDRNALIVGILDGTIDIIATDHAPHTMEEKIRGIEKSSFGIVGSETAFAQLYTKFVKTDIFSLEMLVKLMSENVAKIFDLPYGKLEENSFADIVVIDLEKEITINPNNFLSKGKNTPYINEKINGIPVLTISNGKIAYIDKEEINL

SEQ ID NO: 6560 - protein, 481 aa, Pseudomonas putida KT2440
MHPIAPHWLNFIDGQWTDSEQHLSIHNPGTTDLVATIAQASVADAECALQAARRCADSNALNRVRPAQRVTWLLEVAAQIRAITDEGAWVLCQENGKSLRDARDEFIEAARYFEYYAGMADKIEGKSIPLGDGYIDFTVYDPLGVSLQIVPWNFPVSICARSLAPALAAGNAVVIKSPELSPLGLCVLMQAIERAGLPQGAVNLICGRGREVGAYLAGHRDVDQIVFTGSVGTGQSILRSAAEHAIPSVMELGGKSAALVFPDADREQLISSVKSGIFFNAGQVCSAMSRLLVHRSIYDEVVADVVAMAEGLTVGLGQDNPDHTPVISAAQLEGIEALCRRAQQQGAVVATGGEAISGLSGHYMAPTVLRDVTAQMEIAQTEVFGPVLAVIPFDSEEEALAIANGTVFGLVAGVFTQDLNRALRCARRLCTGQVFVNEWYAGGIETPFGGVGLSGFGREKGQEALYSYVRTKNLAVRIKGE

SEQ ID NO: 6561 - protein, 175 aa, Triticum aestivum
MGPTVMASSATSVAPFQGLKSTAGLPVSRRSNGASLGSVSNGGRIRCMQVWPIDVIKKWETLSYLPPLSTEALLKQVDYLIRSKWVPCLEFSKVGFIFREHNASPGYYDGRYWTMWKLPMFGCTDATQVINEVEEVKKEYPDAYVRIIGYDNMRQVQCVSFIAFKPPGCDESGKA

SEQ ID NO: 6562 - protein, 458 aa, Synechocystis sp. PCC 6803
MIRRRSFFKLSQLMFVSYLLSTSCGKNNTPVTANDAPSILIIGAGLAGLAAAQSLMKQGYTVRVLEARDRLGGRTWTSNYWDDAPLDMGASWIQGTEGNPITELAEKIATPLVMTSYDNAITYEVGGQPFTAKEDRIIEQLEKKWQGAIATAQNGDGDQSLQAVIENVFDLENQPLETKQIIDWYMNSTIEHEYAGSLKDTSIYWFDGDGGFGGDDAIFVEGYQAIVNYLAKDISIELNQIVESIDYSEEIPKIITNQGAYTADQVIITLPLGVLKSGQVKFIPELPSPKRKAIKALGMGILNKCYLRFPKVFWPKKVDWIEQVPTERGLWSEWVNIFRVNQLPILLGFNAADEGKEIETWTDEEIIKSAMKTLRHLFGDDIPDPTDYQITRWQSDSFSRGSYSFNALGSHPDMRDHLAKSLNDQIFFAGEATERDYFATAHGAYLSGLRVAEEINNL

SEQ ID NO: 6563 - protein, 254 aa, Arabidopsis thaliana
MENEREKQVYLAKLSEQTERYDEMVEAMKKVAQLDVELTVEERNLVSVGYKNVIGARRASWRILSSIEQKEESKGNDENVKRLKNYRKRVEDELAKVCNDILSVIDKHLIPSSNAVESTVFFYKMKGDYYRYLAEFSSGAERKEAADQSLEAYKAAVAAAENGLAPTHPVRLGLALNFSVFYYEILNSPESACQLAKQAFDDAIAELDSLNEESYKDSTLIMQLLRDNLTLWTSDLNEEGDERTKGADEPQDEV

SEQ ID NO: 6564 - protein, 506 aa, Brassica napus
MTSINVKLLYHYVITNLFNLCFFPLTAIVAGKAYRLTIDDLHHLYYSYLQHNLITIAPLFAFTVFGSVLYIATRPKPVYLVEYSCYLPPTHCRSSISKVMDIFYQVRKADPSRNGTCNDSSWLDFLRKIQERSGLGDETHGPEGLLQVPPRKTFAAAREETEQVIIGALENLFKNTNVNPKDIGILVVNSSMFNPTPSLSAMVVNTFKLRSNVRSFNLGGMGCSAGVIAIDLAKDLLHVHKNTYALVVSTENITYNIYAGDNRSMMVSNCLFRVGGAAILLSNKPRDRRRSKYELVHTVRTHTGADDKSFRCVQQGDDENGKTGVSLSKDITDVAGRTVKKNIATLGPLILPLSEKLLFFVTFMGKKLFKDKIKHYYVPDFKLAIDHFCIHAGGKAVIDVLEKNLGLAPIDVEASRSTLHRFGNTSSSSIWYELAYIEAKGRMKKGNKVWQIALGSGFKCNSAVWVALNNVKASTNSPWEHCIERYPVKIDSDSGKSETRAQNGRS

SEQ ID NO: 6565 - protein, 373 aa, Zea mays
MRRRRMGALHVVGEPRISFRQQPAAVVAKNGGHGAVVEEIHGLIRVYKDGHVERLPAIPAVPCTWGGTAAPDAPGGVVARDVVVDPATGVWARLYAPTSAAAGDGARRPVVVYFHGGGFCVGSAAWSCYHEFLAQLAARAGCAVMSVDYRLAPEHRLPAAFDDGLAAVRWLRHQAAASASASACSNDDLSWWRARCGFDRVFLMGDSAGASIALHVAARLGQGQLGALPPLTVRGAVLIQPFLGGEGRTASEKNVAQPPRSALTLPTSDCYWRLALPAGASREHPWCNPLSGRAAPRLETTPLPPLLVCVSETDILRDRNLELCRALREAGKRVEQAVYGGVGHAFQVLHNCHLSQPRTQEMLAHIKAFVSAR

SEQ ID NO: 6566 - protein, 391 aa, Zea mays
MCCLQLKDMVLKFSGSSKQCKGTAGTQSFRSSGDRYRRPYPGFIDDTGFTPASKVLGEDYYPRTALAGAAGAAGGARTASSDTLDMGRSNRKSPGSSGWIPGTDEAAAGGDDVLALEDAAAPREWTAQVEPGVQITFGTIPTGGNDLKRIRFSREMFNKWEAQRWWGENYDRIVELYNVVMFSGRQQGCSTPVSSVDDLALVGRDSSYSRGGSTSRGSPITAPPPPPPLPPVASKEPITRSASYKATAAGSSSAPYAAAHSTRAAAAYFPSAAVPDPSDHVWAHHFNMLNSAAAAAGTSAAMGGGAPSSYDPSRATTSSRDEASVSLSNVSDLEATEWIEEDEPGVCLTIRELGDGTRELRRIRFSREIFGEDRAKVWWEQNRERIQAEYL

SEQ ID NO: 6567 - protein, 506 aa, Brassica oleracea
MTSINVKLLYHYVITNLFNLCFFPLTAIVAGKAYRLTIDDLHHLYYSYLQHNLITIAPLFAFTVFGSVLYIATRPKPVYLVEYSCYLPPTHCRSSISKVMDIFYQVRKADPSRNGTCDDSSWLDFLRKIQERSGLGDETHGPEGLLQVPPRKTFAAAREETEQVIIGALENLFKNTNVNPKDIGILVVNSSMFNPTPSLSAMVVNTFKLRSNVRSFNLGGMGCSAGVIAIDLAKDLLHVHKNTYALVVSTENITYNIYAGDNRSMMVSNCLFRVGGAAILLSNKPRDRRRSKYELVHTVRTHTGADDKSFRCVQQGDDENGKTGVSLSKDITDVAGRTVKKNIATLGPLILPLSEKLLFFVTFMGKKLFKDKIKHYYVPDFKLAIDHFCIHAGGKAVIDVLEKNLGLAPIDVEASRSTLHRFGNTSSSSIWYELAYIEAKGRMKKGNKVWQIALGSGFKCNSAVWVALNNVKASTNSPWEHCIDRYPVKIDSDSGKSETRAQNGRS

SEQ ID NO: 6568 - protein, 285 aa, Moorella thermoacetica ATCC 39073
MALRGIWFSELQTPDLAISVRLNQTLHHEKTPYQELAVVDTEAYGRMLLLDNIIQTTVKDEFFYHEMIAHVPLNTHPNPRTALVIGGGDGGVVREIVKHPSIEKVTLVEIDARVVANAREYLPEIACGLDDARVEIRFEDGIEHVRQRENTYDVIIVDSTDPIGPAVGLFSAEFYRNVYRALKADGVFVAQTESPIFNSRLIRRIQRDLKEIFPIARLYLTTVPTYPGGLWAFSLGSKKYDPLEVDWRQAPKVATRYYTPAIHQAAFSLPPFVQEFLEAPEEEEF

SEQ ID NO: 6569 - protein, 506 aa, Brassica rapa
MTSINVKLLYHYVITNLFNLCFFPLTAIVAGKAYRLTIDDLHHLYYSYLQHNLITIAPLFAFTVFGSVLYIATRPKPVYLVEYSCYLPPTHCRSSISKVMDIFYQVRKADPSRNGTCDDSSWLDFLRKIQERSGLGDETHGPEGLLQVPPRKTFAAAREETEQVIIGALENLFKNTNVSPKDIGILVVNSSMFNPTPSLSAMVVNTFKLRSNVRSFNLGGMGCSAGVIAIDLAKDLLHVHKNTYALVVSTENITYNIYAGDNRSMMVSNCLFRVGGAAILLSNKPGDRRRSKYELVHTVRTHTGADDKSFRCVQQGDDENGKTGVSLSKDITDVAGRTVKKNIATLGPLILPLSEKLLFFVTFMGKKLFKDKIKHYYVPDFKLAIDHFCIHAGGRAVIDVLEKNLALAPIDVEASRSTLHRFGNTSSSSIWYELAYIEAKGRMKKGNKVWQIALGSGFKCNSAVWVALNNVKASTNSPWEHCIDRYPVKIDSDSGKSETRVQNGRS

SEQ ID NO: 6570 - protein, 384 aa, Glycine max
KLQIIREIATLKLLRHPNVVRLYEVLASKTKIYMVLEYVNGGELFDIIASKGKHIEGEGRKLFQQLIDGVSYCHTKGVFHRDLKLENVLVDNKGNIKITDFGLSALPQHLREDGLLHTTCGSPNYVAPEVLANKGYDGATSDTWSCGVILYVILTGHLPFDDRNLVVLYQKIFKGDVQIPKWLTPGARNMIRRILDPNPETRITMAGIKEDPWFKKGYIPVNPEDEDVYVDQEAFSIHEQPNEAEQRNSGSPSLINAFQLIGMSSCLDLSGFFEKEDVSERKIRFASNLSVKDLIERIEDTATEMEFRVEKKNGKLKVIRENKVHKTLGCLSVVVEVFGISSSLYVVELRKSYGDGSVYKQLCNKLLNDLGIPPKQPLVRSAAN

SEQ ID NO: 6571 - protein, 506 aa, Brassica napus
MTSINVKLLYHYVITNLFNLCFFPLTAIVAGKAYRLTIDDLHHLYYSYLQHNLITIAPLFAFTVFGSVLYIATRPKPVYLVEYSCYLPPTHCRSSISKVMDIFYQVRKADPSRNGTCDDSSWLDFLRKIQERSGLGDETHGPEGLLQVPPRKTFAAAREETEQVIIGALENLFKNTNVNPKDIGILVVNSSMFNPTPSLSAMVVNTFKLRSNVRSFNLGGMGCSAGVIAIDLAKDLLHVHKNTYALVVSTENITYNIYAGDNRSMMVSNCLFRVGGAAILLFNKPGDRRRSKYELVHTVRTHAGADDKSFRCVQQGDDENGKIGVSLSKDITDVAGRTVKKNIATLGPLILPLSEKLLFFVTFMGKKLFKDKIKHYYVPDFKLAIDHFCIHAGGRAVIDVLEKNLALAPIDVEASRSTLHRFGNTSSSSIWYELAYIEAKGRMKKGNKVWQIALGSGFKCNSAVWVALNNVKASTNSPWEHCIDRYPVKIDSDSGKSETRAQNGRS

SEQ ID NO: 6572 - protein, 307 aa, Sorghum bicolor
MSAELKRDYEIGAEIGRGRFGVVHRCTSRATGEAFAVKSVDRSQLADDLDRELAELEPKLAQLAGAGNPGVVQTHAVYEDETWTHTVMDLCAGPDLLEWVRLRRGAPVPEPLAAAIVAQVAQALALCHRRGVAHRDVKPDNILIDTAPAGSDDGEDEEEDSGEAEEAETAPRARLADFGSAAWVGAGGLGRAEGLVGTPHYVAPEVVGGGEYGAKADVWSAGVVMYALLSGGALPFGGETAAEVLAAVLRGSVRFPPRLFSGVSPAAKDLLRRMICRDEWRRFTAEQVLAHPWIVSGGGARAIERPT

SEQ ID NO: 6573 - protein, 395 aa, Yersinia pestis biovar Medievalis str. 91001
MNAMSLLSVEVSNFTFVGLFKNDNVNIVSIHRVLLLLEELMSQLPEKMSAVVCHGPQDYRLEHVPTPVPKAKELVIKVKGCGICAGDCKCKNGAKMFWGETPWVKPPVVPGHEFYGHIVALGEGTESKYKLGERVIAEQIVPCWDCRYCNSGSYWMCETHNIYGFQKDVAEGGMAEYMRFSENAIVHKIPESLSHEDAVLIEPMACAIHTVARGDIQLDDVVVLAGAGPLGLCMVQVARLKTPKKLIVIDTIEERLALAKAFGADVVINPLKEDADKIVKSLTGGYGCDVYIEATGAPIGVTQGLQMIRKLGRFVEFSVFGQETTVDWSIIGDRKELDIRGAHLAPYSYEIATDLFERGLVTSKGIVTHSYSLDDWEKAFELADSTNSIKVILVP

SEQ ID NO: 6574 - protein, 500 aa, Oryza sativa (japonica cultivar-group)
MENSQVWLLWGALSVAVLFYLSTLRRRHAGGKPLPPGPTPLPLIGNLHLAGGTSFHHKLRDLARVHGPVMTLKLGLATNVVISSREAAIEAYTKYDRHLAARATPDTFRACGFADRSMVFIPSSDPRWKALRGIQGSHVFTPRGLAAVRPIRERKVGDLMAYLRAHAGEEVLLGQAMHTGLLNLVSFSYFSIDIVDMGSQMARDLREVVDDIISVVGKPNISDFYPFLRPLDLQGLRRWTTKRFNRVFSIMGDIIDRRLAHIRDNKPSHNDFLDSLLELMAAGKIDRVNVLDMLFEAFVAGADTMALTLEWVMAELLKNPGVMAKARAELRDVLGDKEVVEEADAARLPYLQAVLKEAMRLHPVGALLLPHFAVEDGVEVGGYAVPKGSTVLFNAWAIMRDPAAWERPDEFVPERFVERAPLLDFRGKDAEFMPFGSGRRLCPGLPLAERVMPFILASMLHTFEWKLPGGMTAEDVDVSEKFKSANVLAVPLKAVPVLIK

SEQ ID NO: 6575 - protein, 282 aa, Oryza sativa
GEFEDVKLLNNLLTEKNKETGWDVPIHVDAASGGFIAPFLYPELEWDFRLPLVKSINVSGHKYGLVYPGVGWVIWRSKEDLPEELIFHINYLGTDQPTFTLNFSKGSSQIIAQYYQLIRLGFEGYKNIMQNCMETPAILREGIEATGRFEILSKEAGVPLVAFSLKASGRYTVFDISEHLRRFGWIVPAYTMPANAEHVAILRVVIREDFSRSLAERLVSDIVKILHELDAHSAQVLKISSAIAKQQSGDDGAVTKKSVLETEREIFAYWRDQVKKKQTGIC

SEQ ID NO: 6576 - protein, 319 aa, Bacillus sphaericus
MKKIAVLTSGGDVPGMNAAIRAVVRKAAFHGINVVGIKHGYEGLVKGYLEELDLGSVGGIIQRGGTHLNSARCPEFKEDAVQQQGIENLRAAGIEGLVVIGGDGSYRGAMDLVKKGFPAVGVPGTIDNDVPGTEYTIGFDTALNTVVESIDKIRDTATSHENSFIVEVMGRDAGDIALWAGLAAGAETVLIPEEDYDLDDIVARLDRGAARGKKHSIIIVAEGVMSGNELAKLIKEKTGKETRVSVLGHIQRGGSPTARDRVLASQFGAHAVELLMEGKYGRAVGIRNHQVIDYDMPEAFEKNHEADVSLYTLMKELSI

SEQ ID NO: 6577 - protein, 44 aa, Zea mays
AIILPPFGVFLKVGCKGEIWVCLLVPFLAYFPGVIFPIFGFPQG

SEQ ID NO: 6578 - protein, 109 aa, Ipomoea batatas
CWQFITLAGFHGNALIIDTFAKDFASRGMLAYVEKIQREERNNGVDTLAHQKWSGANYYDRVLRTVQGGITSTAAMGKRVTEEQFQESWTRPGTTNMGDGGVVIAKARM

SEQ ID NO: 6579 - protein, 200 aa, Triticum aestivum
MSAVNITNVAVLDNPTAFLNPFQFEISYECLVPLDDDLEWKLTYVGSAEDETYDQQLESVLVGPVNVGTYRFVFQADPPDPLKIREEDIIGVTVLLLTCSYVGQEFMRVGYYVNNDYDEEQLREEPPAKLLLDRVQRNILADKPRVTKFPINFHPEPGTSSEQPQQDAEQQQQPTSPEPQTAPVEPHMAPLENVPIAADQ

SEQ ID NO: 6580 - protein, 441 aa, Glycine max
  unsure (1)..(441): unsure at all Xaa locations
MPETESAAAAAVEEENNTALFGKYEVGRLLGCGAFAKVYHARNTETGQSVXAVKVISKKKLNSSGLASNVKREISIMSRLHHPNIVKLHEVLATKTKIYFILEFAKGGELFARIAKSRFSEDLARRYFQQLISAVGYCHARGVFHRDLKPENLLLDEQGNLKVSDFGLSAVKDQIGVDGLLHTLCGTPAYVAPEILAKKGYDGAKVDVWSCGIILFVLVAGYLXPFNDPNLMVMYKKIYKGEFRCPRWFSMELRRILTRLLDTNPDTRITVDEIMKDTWFKKGYKEVKFGDLGLEWKSEGEGVKDLNAFDIISFSTGLNLSGLFDSSCGVEEGERFLLRESPEKVVEMLVAAAEKEGVVVRMRKECGVELEGCGGNFAALVEVYRLPGELVVVEVRRRDGDGGVFRDVWRNKLRPCLCAASSSTTSDRDGTTLAQPVAGDS

SEQ ID NO: 6581 - protein, 411 aa, Zea mays
MRHHLMCPISLQPMQDPVTAPTGITYDRRAIERWLAAGHATCPVTGQPLALADLTPNHTLRRLIQSWCAPRPSTPPEAAGANKPADGDDDAVEHSQSQTDDDVVKKLLRAATSPPIDVLREAAAAAFESDAARRRMVDAGVLQRVLRGVAAIASEVKADDPRHHENESRSSSAIARAIEARLDLARALAVSSCDDDELRPQLVSDSLVHGLLDAATDVLAALERAGGGGGDDGDAARASAVRLLDSVTGAAGAAVLERLRPGLFRAVTAVVRDRVSPAATRSALRVLLHACPLGRNRALAVEAGAAREAIELELDAPPPPPGGGGGRRATELALALLAELCACADGRAAVAAHPAGVAVVARRLLRVSAAADACAVRVLAAVGGRAASPEVLREMARVGAVGKLCCVLQAC

SEQ ID NO: 6582 - protein, 290 aa, Nicotiana tabacum
ELFDRIIAKGHYTERAAASMCRAIVNVVHVCHFMGVIHRDLKPENFLLTDKSENAALKATDFGLSMFIQEGKVYKDIVGSAYYVAPEVLRKSYGKEIDVWSAGVMLYILLSGVPPFWAETERGIFDAILKEDIDFESQPWPSITSSAKDLVRKMLTKDPKKRISAAQVLEHPWLKVGGVASDKPLDNAVLSRMKQFRAMNKLKKLALKVIAENMSAEEIQGLKSMFHNIDTDNSGTITYEELKSGLARLGSKLTEAEVKQLMEAADVDGNGSIDYIEFITATMHKHTEFL

SEQ ID NO: 6583 - protein, 427 aa, Escherichia coli CFT073
MADTKAKLTLNGDTAVELDVLKGTLGQDVIDIRTLGSKGVFTFDPGFTSTASCESKITFIDGDEGILLHRGFPIDQLATDSNYLEVCYILLNGEKPTQEQYDEFKTTVTRHTMIHEQITRLFHAFRRDSHPMAVMCGITGALAAFYHDSLDVNNPRHREIAAFRLLSKMPTMAAMCYKYSIGQPFVYPRNDLSYAGNFLNMMFSTPCEPYEVNPILERAMDRILILHADHEQNASTSTVRTAGSSGANPFACIAAGIASLWGPAHGGANEAALKMLEEISSVKHIPEFVRRAKDKNDSFRLMGFGHRVYKNYDPRATVMRETCHEVLKELGTKDDLLEVAMELENIALNDPYFIEKKLYPNVDFYSGIILKAMGIPSSMFTVIFAMARTVGWIAHWSEMHSDGMKIARPRQLYTGYEKRDFKSDIKR

SEQ ID NO: 6584 - protein, 73 aa, Glycine max
AFSMIFSPAVITVNLAGADMVAPFTVLMSMAGFPTRKTNNDITSIASNGGRVQCMQVRPPICKNKSETLSYLA

SEQ ID NO: 6585 - protein, 362 aa, Triticum aestivum
  unsure (1)..(362): unsure at all Xaa locations
AYRQDQIVSVWLLQSTTFFSIWIKQHLQSIVHIFYSEGTDHSYSWYLQLRNLVWATSKHDVYMAQNNSVMHWSSLLQRGTEVLHVAGQVVPKQKAHGARTLSRVQISSMALKDNLMVAGGFRGELIFKYVDKPGVAFCTNAADNKNSVTNAVDVYESPSGATRVTAANNDCTVKFLDAERCSLLSRFTFPWSVNNNIGEXPDGKLLAVLGDSXPDCVIADAQSGEEIATLKGHLDYSFSSAWHPGGHVLATGNQDKTCRLWDTRNLSAPFAVLGGRIGAVRGLRFSSDGRFLAAAEAADFVHVYDARAGYGAAQEIGLFGEIAGVAFSPDADALFVGVADRAYGSLLEFGRRGRHAYLDSYL

SEQ ID NO: 6586 - protein, 100 aa, Burkholderia cepacia R18194
MVIVALISPYEADRQRARQIVGVDHFVEVYLKTDIATCSARDPKQLYAKAITGQTTQFTGISDPYEVPTTPDLVVETGSMDIASSVALIMNFERQRFTHA

SEQ ID NO: 6587 - protein, 431 aa, Burkholderia cepacia R18194
MGALNRAGSRVIVKADGVYLWDSDGNKIIDGMAGLWCVSVGYGCKALADAAYRQIQELPFYNTFFKTTHPPVIELSAMLAEVSPKGFNHFFYCNSGSEGNDTVLRLVHQYWRVQGQPQKKYVISRKNGYHGSTIAGGTLGGMGYMHEQMPSKVENIVHIDQPYFFGEAAAGETPEAFGLARAQQLEAKILELGAENVAAFIGEPFQGAGGVIFPPSTYWPEIQRICRKYDILLAADEVIGGFGRTGEWFAHQHFGFEPDLITMAKGLTSGYVPMGAVGIHERVARPIIDNGEFNHGLTYSGHPVAAAVAVANLKLLRDEGIVERVKNDIGPYFQRRLRDALGDHPIVGEIAGAGLVAGVQLARDRDRRERFGASVDIGTICRDFCFNGNLIMRATGDRMLLSPPLVIREAEVDEIVDKAKRAFDATAERVG

SEQ ID NO: 6588 - protein, 111 aa, Brassica napus
  unsure (1)..(111): unsure at all Xaa locations
MAYSMLSSAAVVTSPAQATMVAPFTGLKSSSAFXVXRXXXXXFTSIVXXXRRVSCMPVXSLLSPVPPRRYPPVAPLFACALPARAFGPSAGLAFLPRLPPPARCRRRAFVS

SEQ ID NO: 6589 - protein, 409 aa, Streptomyces coelicolor A3(2)
MAAEIVNPRSDSEAGAEQEAGAEPLDSFDPAFALHRGGKMAVQATVPIRDKEDLSLAYTPGVAKVCSAIAEQPDLVHDYTWKSSVVAVVTDGTAVLGLGDIGPEASLPVMEGKAILFKQFGGVDAVPIALNCTDADEIVETVVRLAPSFGGVNLEDISAPRCFEIERKLQERLDIPVFHDDQHGTAVVTLAALRNAARLSGRTLGELRAVISGAGAAGVAIAKMLVEAGIGDVAVADRKGVVSADREDLTPVKQELASFTNKAGLSGPLEAALAGADVFIGVSGGTVPEPAVASMAEGAFVFAMANPNPEVHPEVAHKYAAVVATGRSDFPNQINNVLAFPGIFAGALQVRASRITEGMKLAAAEALASVVGDDLAADYVIPSPFDERVAPAVTAAVAAAARAEGVARR

SEQ ID NO: 6590 - protein, 423 aa, Candida albicans SC5314
MMNIDQHHQLQQQHQQQMLQQQAQAQAQAQAQAQQQQQQQQQAAAAAAAANAAATTSSSSPRQVSFNVSDHYQILEIVGEGAYGIVCSAIHKPSQQKVAIKKIEPFERSMLCLRTLRELKLLKHFNHENIISILAIQRPINYESFNEIYLIQELMETDLHRVIRTQNLSDDHIQYFIYQTLRALKAMHSANVLHRDLKPSNLLLNSNCDLKICDFGLARSIASQEDNYGFMTEYVATRWYRAPEIMLTFQEYTTAIDVWSVGCILAEMLSGRPLFPGRDYHNQLWLIMEVLGTPNMEDYYNIKSKRAREYIRSLPFCKKIPFSELFANTNNNTSTSTSNTGGRTNINPLALDLLEKLLIFNPAKRITVEDALKHPYLQLYHDPNDEPISDKIPEDFFDFDKMKDQLTIEDLKKLLYEEIMKPL

SEQ ID NO: 6591 - protein, 467 aa, Listeria monocytogenes str. 4b H7858
MTSVMWFRRDLRVNDNKALYHACKEDDLLLLFQVNPAQFITGSPSHQAFFASVAHFKQEIDKTAHLQIMFGEPIECFQQLKDSLPSWDKVYFNRDETGYGAKRDEAAQAFFDEQKIEVQAFHDSYLHSAEEVKKSPTEYYKIFTPYYKKWREEIKETPFKVTLKHENIRKESLFLKYEEQFAEMTSDLPILDIGERAANTRLANFIKHDVADYDKARDFPELDKTSHLSRYLRTGEISIRTIWQTLQETEATEGRATFEKELCWRDFYNMIYVSFPNQKNEPIQENYRFIEWENNREYFKAWQEGKTGFPLVDAAMRQLKETGWMHNRLRMITASFLTKDLLIDWRFGEKYFQQMLIDYDPASNIGGWQWAASTGTDAVPYFRIFNPTTQSQKFDSTGKFIRKYVKELANLPDKYIHQPEKMSETEQKEHGLLLGKDYPFPIVDHKERRKLAIARYEFSKEHSRGNI

SEQ ID NO: 6592 - protein, 314 aa, Zea mays
ACLQAVIKRLMTDVPFGVLLSGGLDSSLVASVTKRHLVKTDAAGKFGTELHSFVVGLENRARDGTLTARTFQGSPDLKAAREVADYLGTTHHEFHFTDGIDAIEEVIYHDETYDVTTIRASTPMFLMARKIKSLGVKMVLSGEGSDELLGGYLYFHFAPNKEEFHRETCRKVKALHQYDCLRANKATSAWGLEVRVPFLDKEFINVAMGMDPEWKMYDKNLGRIEKWVMRKAFDDDEHPYLPKHILYRQKEQFSDGVGYNWIDGLKSFTEQQVTDEMMNNAAQMFPYNTPVNKEAYYYRMIFERLFPQDSARET

SEQ ID NO: 6593 - protein, 334 aa, Deinococcus radiodurans R1
MTQPDMAYPNPAGIKRVAVLTSGGDAPGMNAAIRAVVRTGAQQGIEVVGVRRGFSGLHRGEVQLLGPRDVANTIQRGGTILLTARSHTWRSPEGRAKGAAVLREWGVDGLVVIGGDGSFHGGYFLQEEHGIPVIGVPGTIDNDLYGTDHTIGYFTAVETALEAVDKLRDTGASHERIFVIEVMGRHAGHIALDVAVAGGAEEVFIPEDKKPIGDVVNIVKDSIAKGKRGSIIIVAEGYDGGAEAVAQAIHAGTGLETRVSILGHIQRGGTPVSSDRILASRLGEAAVYALMDGKKGVMVGRIGGGIAYTPLHETWEKRKDVSRDLYRCAKMLSI

SEQ ID NO: 6594 - protein, 270 aa, Moorella thermoacetica ATCC 39073
MPAPLQSLRQYLKVVDAVLEVADARLPVSSRYPDLEKLIGFRARVVVLTRADLADPAATACWLEKLRAGGTRAVAMNARTGSGDRLLYQYLKAIAKAKREARARRGLGEAPLRVMALGIPNVGKSSVLNRLAGRGAARTGNRPGITRGPQWIRIKDNLELLDTPGVLWPRWREPRTALWLGALGCAPEESVPVVGIACLVGEFLLREAPGTLAARYGIQEQGDATDILAAIGRARGFLLPGGVVDQEKTARALVNDFREGRLGRFTLERP

SEQ ID NO: 6595 - protein, 486 aa, Pseudomonas aeruginosa UCBPP-PA14
MIKHWINGREVESKDVFENYNPATGELIGEVASGGAAEIDAAVAAAREAFPKWANTPAKERARLMRRLGELIDRNVPHLAELETLDTGLPIHQTKNVLIPRASHNFEFFAEVCTRMNGHSYPVDDQMLNYTLYQPVGVCGLVSPWNVPFMTATWKTAPCLALGNTAVLKMSELSPLTANELGRLVHEAGIPPGVFNVVQGYGASAGDALVRHRDVRAVSFTGGTATGRRIMEAAGIKKYSMELGGKSPVLVFEDADLERALDAALFTIFSLNGERCTAGSRIFVQESVYPQFVAEFAARARRLIVGDPQDPKTQVGSMITQAHYDKVTGYIRIGLEEGATLVAGGLERPTGLPAHLSKGQFIQPTVFADVDNRMRIAQEEIFGPVVCLIPFKDEAEALRLANDVEYGLASYIWTQDIGKAHRLARGIEAGMVFINSQNVRDLRQPFGGVKASGTGREGGEYSFEVFAEIKNVCISMGSHHIPRWGV

SEQ ID NO: 6596 - protein, 498 aa, Thermoplasma volcanium GSS1
MINTENFGNIINGTEEMVGDESIVKSPVDGSPIASVYFADRDAVSKAIDSSYDSYYKVWSKFTLSERKKLLAKLADRIQEKSERYATLESLNTGKTLRQSMLMDIPLGIEHLRYFATETEFKMERQITHPEYPDSHGIVQYVPMGVVGAITPWNVPFLMAVWKAAPALLAGNTVVIKPSSFTPLTTIEMARDAISVGFPPGVLNVVNGRGETVGEELARNKKVRMLSFTGSTYTGKRITEITGIKKVTLELGGKSPNIVFDDADLERAALGVMFGIYLNSGQLCESGSRLLVQSSIKDKFLNLLKSKIEKMRPGNPMSMETDISAITTKNQRDKIEKMVNSGLKDGSVIFYQKSIDGSVPKGGLYFPPTILDKVSEDMEVAKEEIFGPVLSVMEFDDEADAIDKANMTDYGLAAGVWTQDSEKATRVASSIEAGTVWINEYHLLSAAAPRGGFKNSGVGRELGLDGIMEFTQTRHLFVSHGSTDQDTVAYGLVLADLS

SEQ ID NO: 6597 - protein, 514 aa, Triticum aestivum
  unsure (1)..(514): unsure at all Xaa locations
PPPPEPPSLVITDSHFLPLASHSSQQNPPHLFSTRDSETNWRRAERKRSHTPDLRFAEGGFQRQRGIRQPGSQGLSTTKVKGRVGKYELRRTIGEGTXVKVRNVINPETVDPVAIKIVGKEKLLKHXMVEQIKREIATMKLIKNPNVVCIHEVMGSKTKVYIVLDNRAGWNTVNSITSXSLFLDSCGNLMLSGFWAXARYLSSSRMTDYCTQLVALQFMLHXGILEVSDFGLSALSQQLKDDGLLHTTCGTPNYVAPEVLEDQGYDGAMADLWSCGVILFVLLAGYLPFEDSNLMALYKKISDAEFTFPPWTSFPAKRLLTRILDPNPMTRITVQEMLEDEWFKKGYKRAEFDEKYDTTLDDVDAVFNDSEEHHVTEKKEEEPVALNAFELISMSAGLNLGNLFDSEQEFKRETRFTSKSSPKEILRKIEEAAKPLGFDIHKKNYKLRLEKVKAGRKGKLNVATEILRVGPSLHMVEVRKAKGDTLEFHKFYKNLSNTLKDVVWKSDDLQIQPS

SEQ ID NO: 6598 - protein, 123 aa, Triticum aestivum
  unsure (1)..(123): unsure at all Xaa locations
THLIXDMLSICREVFKGGVHYAWASVPTYPSGVIGFLLCAKDGPPVDFLTPVNPIEKIEGATKDGREMRFYNSEIHRAAFILPTFVKRELEAYNTSTEKEKPEKPAAKPVKMKVMRDSAITAS

SEQ ID NO: 6599 - protein, 133 aa, Zea mays
MSYYGDRRAESSIVEAFTLSPLPYPVILVLLMVTLLLGASWFFTYDDFIEEASQQLSWALLGVPIALVLLIRWISSVDSFEGYLGFYPTESRWKGRYERGPAEGSSPWGVALLVLLLLVLASFHSTIHDMWGP

SEQ ID NO: 6600 - protein, 273 aa, Ralstonia eutropha JMP134
MEHCMTNMTKTADRKYWRTAIGDPTPHEGTMVRGYDVLTDLVGKIDFGAMVYLLYKGELPKGNESKIINAMFISVADHGISPSSTVTRFVQAAGVPIQCAVAAGAMMFGDVHGGAGEEFSRYIQELVSLAASSGRTYEDVATEHVANHKRLDGFGHPQHPEGDPRGKVLFALAEEYGIAGDHVRMTRELEKALIKKKNRPLLANIDAAVGAIISDMGFDWRLARAFIVVPRTAGLFAHAFEESVREPGWRQINLDQVEYDGPARRKNENPSAI

SEQ ID NO: 6601 - protein, 200 aa, Cichorium intybus x Cichorium endivia
MATIGHNNLNAKLVLLGDMGAGKSSLVLRFVKGQFLEFQESTIGAAFFSQTLVVNDATVKFEIWDTAGQERYHSLAPMYYRGAAAAIIVYDITSADSFTRAKKWVQELQKQGNPNMVMALAGNKADLEDKRKVTVEEARVYAEENGLFFMETSAKTAANVNDVFHEIAKRLPRAQPTQNPAGMVLVDRPAEGARAASCCS

SEQ ID NO: 6602 - protein, 1071 aa, Arabidopsis thaliana
MAEKVSEDVMLLHGDLDLKIVKARRLPNMDMFSEHLRRLFTACNACARPTDTDDVDPRDKGEFGDKNIRSHRKVITSDPYVTVVVPQATLARTRVLKNSQEPLWDEKFNISIAHPFAYLEFQVKDDDVFGAQIIGTAKIPVRDIASGERISGWFPVLGASGKPPKAETAIFIDMKFTPFDQIHSYRCGIAGDPERRGVRRTYFPVRKGSQVRLYQDAHVMDGTLPAIGLDNGKVYEHGKCWEDICYAISEAHHMIYIVGWSIFHKIKLVRETKVPRDKDMTLGELLKYKSQEGVRVLLLVWDDKTSHDKFGIKTPGVMGTHDEETRKFFKHSSVICVLSPRYASSKLGLFKQQASPSSSIYIMTVVGTLFTHHQKCVLVDTQAVGNNRKVTAFIGGLDLCDGRYDTPEHRILHDLDTVFKDDFHNPTFPAGTKAPRQPWHDLHCRIDGPAAYDVLINFEQRWRKATRWKEFSLRLKGKTHWQDDALIRIGRISWILSPVFKFLKDGTSIIPEDDPCVWVSKEDDPENWHVQIFRSIDSGSVKGFPKYEDEAEAQHLECAKRLVVDKSIQTAYIQTIRSAQHFIYIENQYFLGSSYAWPSYRDAGADNLIPMELALKIVSKIRAKERFAVYVVIPLWPEGDPKSGPVQEILYWQSQTMQMMYDVIAKELKAVQSDAHPLDYLNFYCLGKREQLPDDMPATNGSVVSDSYNFQRFMIYVHAKGMIVDDEYVLMGSANINQRSMAGTKDTEIAMGAYQPNHTWAHKGRHPRGQVYGYRMSLWAEHLGKTGDEFVEPSDLECLKKVNTISEENWKRFIDPKFSELQGHLIKYPLQVDVDGKVSPLPDYETFPDVGGKIIGAHSMALPDTLTTQGGKERLILRFIALTKTLILSVSIATSVSSAMADSPQRRRDSRSPSPRKERARSRSRSRSRSRSRPRLRSRSRSLPRPVSPSRSRGRSRSRSRGRSEVENPGTTLYVTGLSTRVTDKDLEAHFAKEGKIEKAVAVEGGTMIVMITETVGHQDATIHLVMKEGLEEIGLTLLMEEAQREDQREGLRGQREGMNPVARDDLFSSF

SEQ ID NO: 6603 - protein, 498 aa, Anabaena variabilis ATCC 29413
MKTPLNCQNYINGQWLNAATETTLNSHNPANKSEIVATFPRSQADDTDRAVTAARQAYGSWRKVPAPARAEYIFRVGELLLQHKEELAQLISREMGKPITEARGDVQEGVDCAFYSAGEGRRLFGQTTPSEMPNKFAMTVRMPIGVCALITPWNFPVAIPCWKAMPALVCGNTVILKPAEDTPACATKLIEIFAAAGLPPGVINLVHGVGEEAGKALVEHPNIDLVSFTGSSATGAYVGETCGRTHKRVCLEMGGKNAQVVMEDADLELALDGALWGAFGTTGQRCTATSRLILHRDIKEKFTTMLRERTSQLRLGAGTEPETDIGPIINNRQLQRVHEYMNIAREEGAKILIGGEIVTEGQLKQGYFFQPTILDNVTPQMRVAREEIFGPVVALIEVSTFEEAIAILNDTKYGLSSSVYTRDINRAFVAMRDIEVGITYINGPTIGAEVHLPFGGVKQTGNGHREAGTTALDVFTEWKSVYVDFSGSLQRAQIDNRS

SEQ ID NO: 6604 - protein, 200 aa, Cichorium intybus x Cichorium endivia
MATIGHNNLNAKLVLLGDMGAGKSSLVLLFVKGQFLEFQESTIGAAFFSQTLAVNDATVKFEIWDTAGQERYHSLAPMYYRGAAAAIIVYDITSADSFTRAKKWVQELQKQGNPNMVMALAGNKADLEDKRKVTAEEARVYAEENGLFFMETSAKTAANVNDVFHEIAKRLPRAQPTQNPAGMVLVDRPAEGARAASCCS

SEQ ID NO: 6605 - protein, 272 aa, Lactococcus lactis subsp. lactis Il1403
MKLNNQIEIPELGLGVFQIPNDETADVVKNAIVNGYRLIDTAKIYENEEGTGQGIKEGLAMTGLSRDDLFITSKLWGDNHSYEETVQNFEKSLKKLDLDYLDLYLIHWPGTHYAYKEAWNAMEDLYKAGKIKAIGVSNFQKSHLEELLSYAKITPVLNQIELHPKLSQEELRNFLELHDIKVQAWSPLMQGQLLDNEVLKKIADKHGKSVAQIILRWDIQQDILVNVKSIKSERMIANRQIFDFSLDSEDMKAINSLNEELRVGPDPEHFNF

SEQ ID NO: 6606 - protein, 115 aa, Corylus avellana
MGSLKLVCAVLLCMMVAAPVARASLTCPQIKGNLTPCVLYLKNGGVLPPSCCKGVRAVNDASRTTSDRQSACNCLKDTAKGIAGLNPNLAAGLPGKCGVNIPYKISPSTNCNNVK

SEQ ID NO: 6607 - protein, 162 aa, Zea mays
QPGKRSEDQDPSVVVVAAIVVVAAIVVVATPVAAASVRLLPLQEALGGLHNLFGGPSVVRVSQCDGPHCFAVTRAAAGPSCADVLRAMQHEPEVMYEVLKQRTDGATAAALARAFGAMPYLVFDPEAAVMSGGESSDSERSAAGAAEEEDDEEWEFMRGLTV

SEQ ID NO: 6608 - protein, 158 aa, Shigella flexneri 2a str. 301
MKLISNDLRDGDKLPHRHVFNGMGYDGDNISPHLAWDDVPAGTKSFVVTCYDPDAPTGSGWWHWVVVNLPADTRVLPQGFGSGLVAMPDGVLQTRTDFGKTGYDGAAPPKGETHRYIFTVHALDVERIDVDEGASGAMVGFNVHFHSLASASITAMFS

SEQ ID NO: 6609 - protein, 212 aa, Shigella boydii
LYICLRPVRYYQGTPSPVKHPELTDMVIFRENSEDIYAGIEWKADSADAEKVIKFLREEMGVKKIRFPEHCGIGIKPCSEEGTKRLVRAAIEYAIANDRDSVTLVHKGNIMKFTEGAFKDWGYQLAREEFGGELIDGGPWLKVKNPNTGKEIVIKDVIADAFLQQILLRPAEYDVIACMNLNGDYISDALAAQVGGIGIAPGANIGDECALF

SEQ ID NO: 6610 - protein, 202 aa, Shigella boydii
RPVRYYQGTPSPVKHPELTDMVIFRENSEDIYAGIEWKADSADAEKVIKFLREEMGVKKIRFPEHCGIGIKPCSEEGTKRLVRAAIEYAIANDRDSVTLVHKGNIMKFTEGAFKDWGYQLAREEFGGELIDGGPWLKVKNPNTGKEIVIKDVIADAFLQQILLRPAEYDVIACMNLNGDYISDALAAQVGGIGIAPGANIGD

SEQ ID NO: 6611 - protein, 1342 aa, Shigella flexneri 2a str. 301
MSQEYTEDKEVTLTKLSSGRRLLEALLILIVLFAVWLMAALLSFNPSDPSWSQTAWHEPIHNLGGMPGAWLADTLFFIFGVMAYTIPVIIVGGCWFAWRHQSSDEYIDYFAVSLRIIGVLALILTSCGLAAINADDIWYFASGGVIGSLLSTTLQPLLHSSGGTIALLCVWAAGLTLFTGWSWVTIAEKLGGWILNILTFASNRTRRDDTWVDEDEYEDDEEYEDENHGKQHESRRARILRGALARRKRLAEKFINPMGRQTDAALFSGKRMDDDEEITYTARGVAADPDDVLFSGNRATQPEYDEYDPLLNSAPITEPVAVAAAATTATQSWAAPVEPVTQTPPVASVDVPPSQPTVAWQPVPGPQTGEPVIAPAPEGYPQQSQYAQPAVQYNEPLQQPVQPQQPYYAPAAEQPAQQPYYAPAPEQPVAGNAWQAEEQQSTFAPQSTYQTEQTYQQPAAQEPLYQQPQPVEQQPVVEPEPVVEETKPARPPLYYFEEVEEKRAREREQLAAWYQPIPEPVKEPEPIKSSLKAPSVAAVPPVEAAAAVSPLASGVKKATLATGAAATVAAPVFSLANSGGPRPQVKEGIGPQLPRPKRIRVPTRRELASYGIKLPSQRAAEEKAREAQRNQYDSGDQYNDDEIDAMQQDELARQFAQTQQQRYGEQYQHDVPVNAEDADAAAEAELARQFAQTQQQRYSGEQPAGANPFSLDDFEFSPMKALLDDGPHEPLFTPIVEPVQQPQQPVAPQQQYQQPQQPVAPQQQYQQPQQQVAPQPQYQQPQQPVAPQQQYQQPQQPVAPQPQYQQPQQPVAPQPQYQQPQQPVAPQPQDTLLHPLLMRNGDSRPLHKPTTPLPSLDLLTPPPSEVEPVDTFALEQMARLVEARLADFRIKADVVNYSPGPVITRFELNLAPGVKAARISNLSRDLARSLSTVAVRVVEVIPGKPYVGLELPNKKRQTVYLREVLDNAKFRDNPSPLTVVLGKDIAGEPVVADLAKMPHLLVAGTTGSGKSVGVNAMILSMLYKAQPEDVRFIMIDPKMLELSVYEGIPHLLTEVVTDMKDAANALRWCVNEMERRYKLMSALGVRNLAGYNEKIAEADRMMRPIPDPYWKPGDSMDAQHPVLKKEPYIVVLVDEFADLMMTVGKKVEELIARLAQKARAAGIHLVLATQRPSVDVITGLIKANIPTRIAFTVSSKIDSRTILDQAGAESLLGMGDMLYSGPNSTLPVRVHGAFVRDQEVHAVVQDWKARGRPQYVDGITSDSESEGGAGGFDGAEELDPLFDQAVQFVTEKRKASISGVQRQFRIGYNRAARIIEQMEAQGIVSEQGHNGNREVLAPPPFD

SEQ ID NO: 6612 - protein, 287 aa, Erwinia carotovora subsp. atroseptica SCRI1043
MSQKEIWYETLHANFGQYFSVDRVLYHEKTDHQDLIIFENDALGRVMALDGVVQTTERDEFIYHEMLTHVPLLSHGNAKRVLIIGGGDGGMLREVSRHHGVEQITMVEIDAGVVEFCRQYLPNHSAGSYDDPRFNLVIDDGVNFVRQCSEKFDVIISDCTDPIGPGESLFTSDFYQGCARSLNEGGIFVAQNGVCFLQQDEAIGSHKKLSHYFNDVSFYQAAIPTYYGGIMTFAWASNNPALRQMDIVTLRQHFAQSGITCRYYTPDVHIGSFALPQYLLSALQNAQ

SEQ ID NO: 6613 - protein, 279 aa, Brassica napus
MTIINLDTYPRNKPGGAIAIREVWAENLESEFELISGIIDDYPFVSMDTEFPGVIFKSDLRRGNPADLYSLLKSNVDALSLIQVGLTLSDADGNLPDLGAGRRFIWEFNFKDFDVARDAHAPDSIELLRRQGIDFERNCRDGVDSERFAELMMSSGLVCNEEVSWVTFHSAYDFGYLMKILTRRELPCALGEFQRMMKALFGERVYDMKHMMRFCERKLYGGLDRVARTLEVSREVGKCHQAGSDSLLTWHAFQRTRASDFLQDGPEKHAGVLYGLEVF

SEQ ID NO: 6614 - protein, 214 aa, Shigella boydii
LYICLRPVRYYQGTPSPVKHPELTDMVIFRENSEDIYAGIEWKADSADAEKVIKFLREEMGVKKIRFPEHCGIGIKPCSEEGTKRLVRAAIEYAIANDRDSVTLVHKGNIMKFTEGAFKDWGYQLAREEFGGELIDGGPWLKVKNPNTGKEIVIKDVIADAFLQQILLRPAEYDVIACMNLNGDYISDALAAQVGGIGIAPGANIGDECALFEA

SEQ ID NO: 6615 - protein, 221 aa, Zea mays
MATTKREKVILVLLFSLTMLPLSTLGTRSGPAAVQHHGHGGTTKHPSPPSPATAALVRSTCNSTAYYDVCVSALGADPSSATADVRGLSTIAVSAAAANASGGAATAAALANGTGTASSSNAQAAPATASAAAALLRTCAAKYGQARDALAAAGDSIAQQDYDVASVHVSAAAEYPQVCRVLFRRQKPGQYPAELAAREETLRQLCSVALDIIGLASTNTN

SEQ ID NO: 6616 - protein, 190 aa, Brassica napus
MAFAGTTQKCMACDKTVYLVDKLTADNRVYHKACFRCHHCKGTLKLSNYNSFEGVLYCRPHFDQNFKRTGSLEKSFEGTPKIGKPDRPLEGERPAGTKVSNMSGGTREKCVGCDKTVYPIEKVSVNGTLYHRSCFKCTHGGCTISPSNYIAHEGKLYCKHHHIQLIKEKGNLSQLEGGGENAAKDKVVAA

SEQ ID NO: 6617 - protein, 416 aa, Salmonella enterica subsp. enterica serovar Typhi Ty2
MESKVVVPVEGKKITLQNGKLNVPENPIIPFIEGDGIGVDVTPAMLKVVDAAVEKAYKGERKISWMEIYTGEKSTQVYGQDVWLPAETLDLIRDYRVAIKGPLTTPVGGGIRSLNVALRQELDLYVCLRPVRYYQGTPSPVKHPELTDMVIFRENSEDIYAGIEWKADSADAEKVIKFLREEMGVKKIRFPEHCGIGIKPCSEEGTKRLVRAAIEYAITNDRDSVTLVHKGNIMKFTEGAFKDWGYQLARDEFGGELIDGGPWLKIKNPNTGKEIVVKDVIADAFLQQILLRPAEYDVIACMNLNGDYISDALAAQVGGIGIAPGANIGDECALFEATHGTAPKYAGQDKVNPGSIILSAEMMLRHMQWFEAADLIVKGMEGAIAAKTVTYDFERLMDGAKLLKCSEFGDAIIANM

SEQ ID NO: 6618 - protein, 489 aa, Bacillus sp. KSM-K16
MAKFTQTVEVFQNYINGEWKDSTSGQVMDSVNPANKTETIGQLQSSTTEEVDEAIQSATEAKIGWRKTGAYQRGQLLASVANELEKNVDDIAETLTKEMGKTLPEAIGETQRGIAILRYYAAEGMRKEGEVIPASDKEALMFTKRTPLGVVGIITPWNFPVAIPIWKIAPALVYGNTVVFKPASESAVTAAKVVKCFEHAGLPKGVLNFITGKGSIVGEALINSKKLNGITFTGSESTGKRVAKAASANGIKYQLEMGGKNPVIVLDDADVQSAVQGILSGAFKSTGQKCTATSRVIVQEGIYEELKAALLAETKKITIGDGMNSSIWMGPCASESQLNTVLEYIQIGQEEGATLLYGGQRLTENEYAHGFYVEPAIFEQVTSTMRIAQEEIFGPVIALLKVKTVEEAIDIANDTEFGLSASLYTSNIGSALSFIDDIEAGLVRVNSESAGVELQAPFGGMKASSTGTREQGEAAKEFYTAIKTVLIRS

SEQ ID NO: 6619 - protein, 261 aa, Zea mays
  unsure (1)..(261): unsure at all Xaa locations
MSCSIAAVVVSLFLSLNQIISCRAAGADDDGAARSLASCLISHGVTNFTLPTSRSYAGVLNSSISNLRFALPDVGKPAAVVLPGSRQDLQRSVLCARSSSLAVRVRSGGHSYEGLSYTSENRVPFVVIDVANLNRVRVDRGSATAWAEAGATLGELYHAVGRSGRSLAFSAGSCSTIGLGGTVSGGGFGLLSRRFGLAADNVLDAVLVDADGRALDRAAMGRDVFWAIRGGGGGSWGVMYAWKLRLVPVPRNVTXALGGAD

SEQ ID NO: 6620 - protein, 192 aa, Triticum aestivum
  unsure (1)..(192): unsure at all Xaa locations
ELHSFVVGLEGSPDLKAAREVADYLGTIHHEFHFTVQDGIDAIEEVIYHDETYDVTTIRASTPMFLMARKIKSLGVKMVLSGEGSDELLGGYLYFHFAPNKEECHRETCRKVKALHQYDCLRANKATSAWGXEVRVPFSTRSHNVRWHGPQWKSPQDLGRSRMGQRKGPHDSTYCQDISTGEEIMTGKWLPI

SEQ ID NO: 6621 - protein, 358 aa, Triticum aestivum
  unsure (1)..(358): unsure at all Xaa locations
MRRRLSSNGHMLRAGCGVAAVFLMWMQFRSWLVAKNTLKIMPFKLPPLGPYDVRVRMKAVGICGSDVHYLKEMRIAHFVVKEPMVIGHECAGIIEEVGDGVKHLAVGDRVALEPGISCWRCRHCRGGRYNLCDDMKFFATPPYHGSLADQIVHPGDLCFKLPDNVSLEEGAMCEPLSVGVHACRRADVGAEKSVLIMGAGPIGLVTMLSARAFGAPRIVIADVDDHRLSVAKSLXGADAAVKVSGNAEDLAGEXERIQAAMGGDIDVXWDCAGSSKTMSTALEATRPGRRVCLVGMGHNEMTVPLTSAGSRQVDXVGIFRXKDTWPLCPKFLRSGITDLKPSSKVRFPREWRASPTIR

SEQ ID NO: 6622 - protein, 428 aa, Zea mays
MGRGLGAAPVSPRLASLGAAALALLVAAALPSPAAGVNATAVLSAFPNFADFARLLASTPVASELAGRSSLTLLAVPNANLPQSPSAFVAGAAAGADIADVLRYHVLLEYLSPADLARLPPSGKLVTTLFQTTGRAPSDFGAVNLTVGPNSTVVVRSPAPSPGSSATVLGAVTAVPYNLSVLAVGGLIVPSGFDLAASESRPPPPVNITRVLTDARGFYVAASMLQASGVASEFEADERGAGITVFVPTDDAFAGLPTTDRLQSLPAERKAVVLRFHVLHSYYPLGSLESIVNPVQPTLATEHTEAGHFTLNITRVNGSIAIDTGIVQASITRTVFDQNPVAVFAVSKVLLPKEMFSRGDSGSTAMVPPSVAMAPGDAGTEQTPQTRLSSPPDLHGEDSESSAALATAKGTSWWCVGLMYLHLLLSLV

SEQ ID NO: 6623 - protein, 143 aa, Glycine max
  unsure (1)..(143): unsure at all Xaa locations
ALNLALGSLPQFTICNRAGAGGXVXFTVPLFTAGLPTRKTNNDITNIVSNGGRVRCMQVWAPVGKKKHETLSYLPDLDDAQLAKEVEYLPRKGWIPCLESEREHGLVYREHIRLPGYYDGRYWTMWKLLMIGCTDASQVLKEL

SEQ ID NO: 6624 - protein, 48 aa, Mirabilis jalapa
EDRDGDWMLVGDVPWEMFVNSCKRLRIMKGSEAIGLAPRAVEKCKSRS

SEQ ID NO: 6625 - protein, 356 aa, Uncultured crenarchaeote
MSDAHSFTGKKIEPPLISKNMTISQLVDFFGSTGYNARRLFEAANIMKQMIDAGSTICLTLAGAMTPIGMGNTIKTLIENGYIDWIVTTGANVYHDLHFAYDLPVRQGHFQVDDDVLFSKQIVRIYDVYIKEIGTLQAQDLIVQREIKKIEKSYSKSYSTADMSHGLGKATYENSTNPEKSFLASAYKNDVPVFIPAISDSSIGLNMLPLLFEDMTRFPNVIMDIAESTAILWKSKVSGGIELGGGVPKNFFQQTGPALYQILKLKDGGHDYVIQITDARPDTGGLSGATIQEGKSWGKIKTSHKNNVIVYGDSSICFPIIGAYVLSECKKRSSKRLYSKKNAWVEEMKKEYLKNK

SEQ ID NO: 6626 - protein, 179 aa, Daucus carota
MERADQQARGFQGYRKIHQQQQLPASGTASTGTDNNPAAGDQDCLVREQDRFMPIANVIRLMRKSIPSHAKISDDAKELVQESVSEFISFVTSEANYRCQKEQRKTITAEDVLWAMSSLGFDDYVEPLTFYLDRFREADGGERTALRGEPLVKKSGEHGHRGFLQHLHHGTIWGRIMRF

SEQ ID NO: 6627 - protein, 393 aa, Mycobacterium tuberculosis H37Rv
MTGPLAAARSVAATKSMTAPTVDERPDIKKGLAGVVVDTTAISKVVPQTNSLTYRGYPVQDLAARCSFEQVAFLLWRGELPTDAELALFSQRERASRRVDRSMLSLLAKLPDNCHPMDVVRTAISYLGAEDPDEDDAAANRAKAMRMMAVLPTIVAIDMRRRRGLPPIAPHSGLGYAQNFLHMCFGEVPETAVVSAFEQSMILYAEHGFNASTFAARVVTSTQSDIYSAVTGAIGALKGRLHGGANEAVMHDMIEIGDPANAREWLRAKLARKEKIMGFGHRVYRHGDSRVPTMKRALERVGTVRDGQRWLDIYQVLAAEMASATGILPNLDFPTGPAYYLMGFDIASFTPIFVMSRITGWTAHIMEQATANALIRPLSAYCGHEQRVLPGTF

SEQ ID NO: 6628 - protein, 467 aa, Pseudomonas aeruginosa PAO1
MGLNADWMQRDLNVLWHPCTQMKDHERLPVIPIRRGEGVWLEDFEGKRYIDAVSSWWVNVFGHANPRINQRIKDQVDQLEHVILAGFSHQPVIELSERLVKITPPGLDRVFYADSGSAGIEVALKMSYHFWLNSGRPRKKRFVTLTNSYHGETIAAMSVGDVALFTETYKSLLLDTIKVPSPDCFLRPDGMCWEEHSRNMFAHMERTLAEGHDEIAAVIVEPLIQGAGGMRMYHPVYLKLLREACDRYGVHLIHDEIAVGFGRTGTMFACEQAGIAPDFLCLSKALTGGYLPMSAVLTSETIYRGFYDDYQTLRAFLHSHTYTGNPLACAAALATLDIFEEDKVIEANRALSTHMARATAHLADHPHVAEVRQTGMVLAIEMVQDKASRTPYPWQERRGLKVFQHGLERGALLRPLGSVVYFLPPYVITPEQIDFLAEVASEGIDIATRDAVSVAVSDFHPDHRDPG

SEQ ID NO: 6629 - protein, 496 aa, Pseudomonas aeruginosa PAO1
MSLRWLRAAAFLMLGVFSAVALGKDKQPTAIVVGAGLAGLSAAYELQKDGWQVTVLEARPQVGGRSGLATSEWVGNQKVQPTLNAYLDTFKLKPVPAPDFVRTPSYLIDGLYYSSSDLALKQPNVAADLKRFESTLDDLSASISDPLNPASSNTLFALDQMNAARWLDKLNLSPTARLLVNQRIRSRYDEPSRLSLLYLAQQGRAYRGVDDRDLRAARLPGGSQVLAEAFVKQIKTIKTKSKVSSIVQAKDGVAVKAGSETYKADYVVLAVPLKALGQIQMTPSLSGTQMSALKGTNYGWRDQILLKFKRPVWDDKSRLSGEIFSDQGLGMIWVEPALKGGANVLINLSGDNARVLQAFGDRQMVDQVLIRMNKFYPKMRGAFAGYEIRRYSADPGTGGSYLAYGPGQVTRFWRIWEQPLSRVAFAGEHTDALYPGTIEGALRSGKRAASQVRDLYAGKTPVIEGAPMVAKAEKVAAPTTGGEKKNPFAWFTRLFD

SEQ ID NO: 6630 - protein, 295 aa, Bordetella bronchiseptica RB50
MTARDPLAAIRARLAEVTASWQAAESLARIRASFADYLAEVGPRGAAMARPRPQPLAPALAGAWIGQGARRALYCHGGGFQIGGIASHASLIARLAEAGQARILAVEYRLAPEHRYPAAIDDAFAAYQWLLANGGAPAAIIGDSAGGALALQTAQRARDAGLPLPRSLVLLSPWLDLSMQGRSYVELAEQDIFSKPAQLRAMARSYLGRLGPPPDAPPASPLWDDLSGLPPIVVHAGAHDITLDDSHTLAARVRAAGGQVQLQVFPGMCHHFQIYEALAEARESIDALGRHLRQD

SEQ ID NO: 6631 - protein, 452 aa, Fusobacterium nucleatum subsp. nucleatum ATCC 25586
MRGVCIMINNLSELQKKDLKYVFHPCAQMKDFEENPPLVIKKGDGLYLIDENGNKYMDCISSWWVNLFGHCNKRINRIITEQVNNLEHVIFANFTHEPAAELCEELTKVLPKGINKFLFSDNGSSCIEMALKLSFQYHLQTGNPQKTKFISLENAYHGETIGALGVGDVDIFTETYRPLIKEGRKVKVPYIDSKLSNDEFVKLEDECIKELEDLIIKNHNEIACMIVEPMVQGAAGIKIYSAKFLKAARDLTKKYNIHLIDDEIAMGFGRTGKMFACEHAGIEPDMMCIAKGLSSGYYPIAMLCITTDIFNAFYADYKEGKSFLHSHTYSGNPLGCRIALEVLRIFKEENILKTINEKGTYLRNKMKEIFEDKSYIKDIRNIGLIGAIELKDNLLPNVRIGKEIYNFALKKGAFLRPIGNSVYFMPPYVITYEEIDKMLHVCKESIEELLKI

SEQ ID NO: 6632 - protein, 447 aa, Ralstonia eutropha JMP134
MTITSPKLPQAAELDLKAHWMPFSANRNFHDDPRMVVAAKGRWLIDDQGRKVFDGLSGLWTCGAGHARAEIQAAVASQLGTLDYSPAFQFGHPQSFMLAERIAELFPGDLNHVFYTGSGSECADTAVKMARAYWRIKGQPAKTKLIGRARGYHGVNIAGTSLGGIGGNRKMFGQLMDADHLPHTLQADCAFTKGQAETGGVELANELLKLIELHDASNIAAVIVEPMSGSAGVIVPPKGYLQRLREICTQHGILLIFDEVITGFGRLGKASGAEYFGVTPDIANVAKQLTNGAIPMGAVIASSEIYNTFMAQPTSGHAVEFGHGYTYSGHPVACAAGLATLDLLARENLIQQAADLAPHFEQAIHGIRGAKHVVDIRNCGLAGAIQMAPRDGDATIRPFEAGLALWKKGFYVRFGGDTLQFGPAFNTTISELDTMFDSVGAVIETLA

SEQ ID NO: 6633 - protein, 351 aa, Oceanobacillus iheyensis HTE831
MKAAVWYGKHDIRVENKEEPIIKPGKVKIKVAWTGICGSDLHAYHGAEGVVQVGEPHPVTGEMAPLTLGHEFSGVIHEIGEGVSGLSVGDRVAIEPAIKCGKCENCVRGNYNLCEHNGFVGLQSDGAFAEYAIVDPHMVHKLPDNISFEEATAIEPTAVSFHALKLSNMKAGDTVAVFGVGPIGLTAILCAKAAGASRIYAIDVSNERLEMAQKLGATTVINAIEENAAEKIYAETGSGVTIAFDCAGAEATVNSAIDSLAKGGQLVIVSIIPEPIKVNLLQANLKEINILATIGYRDVYKDVIAMVESGQLDLKPIITKKIGLDDIIEEGFHALTNDKSQAKILVSPTGV

SEQ ID NO: 6634 - protein, 495 aa, Staphylococcus aureus subsp. aureus COL
MAVNVRDYIAENYGLFINGEFVKGSSDETIEVTNPATGETLSHITRAKDKDVDHAVKVAQEAFESWSLTSKSERAQMLRDIGDKLMAQKDKIAMIETLNNGKPIRETTAIDIPFAARHFHYFASVIETEEGTVNDIDKDTMSIVRHEPIGVVGAVVAWNFPMLLAAWKIAPAIAAGNTIVIQPSSSTPLSLLEVAKIFQEVLPKGVVNILTGKGSESGNAIFNHDGVDKLSFTGSTDVGYQVAEAAAKHLVPATLELGGKSANIILDDANLDLAVEGIQLGILFNQGEVCSAGSRLLVHEKIYDQLVPRLQEAFSNIKVGNPQDEATQMGSQTGKDQLDKIQSYIDAAKESDAQILAGGHRLTENGLDKGFFFEPTLIAVPDNHHKLAQEEIFGPVLTVIKVKDDQEAIDIANDSEYGLAGGVFSQNITRALNIAKAVRTGRIWINTYNQVPEGAPFGGYKKSGIGRETYKGALSNYQQVKNIYIDTSNALKGLY

SEQ ID NO: 6635 - protein, 282 aa, Mycobacterium leprae TN
MMPSTPRTSIPSITLNDENTMPLLGLGVAELSEDETERAVLAALEIGCRLIDTAAAYGNEAAVSRAIAASGIPRAQLFVTTKLATPDQGFTKSQDACNASLDRLGMDYVDLYLIHWPAPPVGQYVDAWGGMIQSRGEGHARSIGVCNFTEEHLSAIIDLTFVTPAVNQIELHPLLNQDEMRKSNAQHNVITQSYTPLVLGRLMDNSTLTAIAAEYGKTPAQVLLRWNLQLGNAVVFRSAKAEHIASNFDVFDFELAVNHMDAMNELHDGTRLRPDPETYAGS

SEQ ID NO: 6636 - protein, 429 aa, Vibrio vulnificus CMCP6
MADKKATLHVEGKAPIELPIMEGSLGTPVIDVRKLGANGYFTFDPGFLATASCESQITYIDGGKGILLHRGYPIDQLANNADYLEVCYILLYGEAPTREQYEKFKTTVTRHTMVHEQIASFFHGFRRDAHPMAVMCGVVGALAAFYHDSLDINNDLHREITAYRLLSKMPTLAAMCYKYSTGQPFIYPRNDLSYAENFLHMMFATPCEEYEVNPVVARAMDKIFTLHADHEQNASTSTVRLAGSSGANPFACIAAGIASLWGPAHGGANEACLKMLEEIGSVDNIPEYVDRAKDKDDPFRLMGFGHRVYKNYDPRATVMRETCHEVLKELNIQDPLLDVAMELERIALSDEYFVSKKLYPNVDFYSGIILKAIGIPVSMFTVIFAISRTIGWIAHWNEMHSDPLNRIGRPRQLYTGEVQRDFQPMHERE

SEQ ID NO: 6637 - protein, 204 aa, Shigella boydii
LYICLRPVRYYQGTPSPVKHPELTDMVIFRENSEDIYAGIEWKADSADAEKVIKFLREEMGVKKIRFPEHCGIGIKPCSEEGTKRLVRAAIEYAIANDRDSVTLVHKGNIMKFTEGAFKDWGYQLAREEFGGELIDGGPWLKVKNPNTGKEIVIKDVIADAFLQQILLRPAEYDVIACMNLNGDYISDALAAQVGGIGIAPGAN

SEQ ID NO: 6638 - protein, 215 aa, Shigella boydii
DLYICLRPVRYYQGTPSPVKHPELTDMVIFRENSEDIYAGIEWKADSADAEKVIKFLREEMGVKKIRFPEHCGIGIKPCSEEGTKRLVRAAIEYAIANDRDSVTLVHKGNIMKFTEGAFKDWGYQLAREEFGGELIDGGPWLKVKNPNTGKEIVIKDVIADAFLQQILLRPAEYDVIACMNLNGDYISDALAAQVGGIGIAPGANIGDECALFEA

SEQ ID NO: 6639 - protein, 219 aa, Ustilago maydis 521
MRKFKLVFLGEQSVGKTSLITRFMYDTFDNTYQATIGIDFLSKTMYLEDRTVRLQLWDTAGQERFRSLIPSYIRDSSVAVVVYDITNRASFQNTSKWVDDVRAERGNDVIIVLVGNKTDLSDKRQVTTEEAEKKAQEFNVMFIETSAKAGHNVKVLFKKIAQALPGMDKDADAATGGAAANKSEYRSQAWHLHYASRMTDLLVCCASAFTPIALEQIST

SEQ ID NO: 6640 - protein, 209 aa, Shigella sonnei
RPVRYYQGTPSPVKHPELTDMVIFRENSEDIYAGIEWKADSADAEKVIKFLREEMGVKKIRFPEHCGIGIKPCSEEGTKRLVRAAIEYAIANDRDSVTLVHKGNIMKFTEGAFKDWGYQLAREEFGGELIDGGPWLKVKNPNTGKEIVIKDVIADAFLQQILLRPAEYDVIACMNLNGDYISDALAAQVGGIGIAPGANIGDECALFEA

SEQ ID NO: 6641 - protein, 212 aa, Oryza sativa (japonica cultivar-group)
MAEEEDLADMPRVVGVLAALLERVTERNDAAAAELELAVAGAPAASAFRATTKPDITVRAYMARIARFAGCSPACYVVAYIYLDRLLRRRRRACAFSVDSYSVHRLLITAVLAAVKFMDDICYNNAYFAKVGGVSLPEMNYLEVDFLFGVGFDLNVSPETFGHYCAVLQSEMLCLELEPPPSPSPAPAARLHCFLSEDDTSSSGSTQHQLAA

SEQ ID NO: 6642 - protein, 298 aa, Zea mays
MEAMPRPSVAPSLQLQARPCPRWPRRKHCPPSSVASRRVACSASAADADVVDLFDAAKLTVDKFVTSGMVVGLGSGPASALAIQYLGTRLRRGSLAGITAVTSSVLSASEADKAGIRANSYQEGTQIDFAFTDAEAIEEGTLAAVIGRRKTESGEPSFMAEKAMAKSAHKLAFITGNDKYVTTGVEGSIPVLIKSGNWIDTAEEIDDLFLGDAEVWRRPSFGTAGPLGGDHPLVTKEGHHVLDVIFTTPIQDLGQVAEKLDKVDGVVDHGIICSNQPYAVIASKGEVQVLDEKSSVIQ

SEQ ID NO: 6643 - protein, 215 aa, Shigella sonnei
ELDLYICLRPVRYYQGTPSPVKHPELTDMVIFRENSEDIYAGIEWKADSADAEKVIKFLREEMGVKKIRFPEHCGIGIKPCSEEGTKRLVRAAIEYAIANDRDSVTLVHKGNIMKFTEGAFKDWGYQLAREEFGGELIDGGPWLKVKNPNTGKEIVIKDVIADAFLQQILLRPAEYDVIACMNLNGDYISDALAAQVGGIGIAPGANIGDECALF

SEQ ID NO: 6644 - protein, 467 aa, Zea mays
  unsure (1)..(467): unsure at all Xaa locations
MMSSQQQQQQMARPDRQAMYGAPVLPEIPTRFVYMPQTATDVMSGSSSLWKTGAPPHDTLAESAAMYTATLSSQQQQQMARPDRQAMYGAPVLPEIPTRFVYRPQTATDVMSSFSSLWETGAPPPAAYAAMLSSQQQQMPTARPGWQAAPRGAPVPPPMNMRFIPNTMPAADAMDVGSSAPMTPADSSSERTPSPLQRVXVRQVWAHNFDSEAKLIESLLPKFRYVAVETEFPGTVYRPAGPAYKLEPAERYRLLRCNVDALHPVQLGLTLFDAGCVLPGGATRYVWQFNFRDFDVRRHRHVAESVTALRSRGVDLDRTRQYGVAAAAAFGPRLRKWTRAGLGRAGVVTSRGGYDLAYLMKMMFGTGFRMPGSAAEFNAVVKSVLHRRRVFDIGEMARLCPHEHLHRGLDSIAGQLNAARFAADAACQAGYDSLRTCYTFMKLREIYFDDDGKLAGVDGILAEVTAF

SEQ ID NO: 6645 - protein, 209 aa, Shigella sonnei
QELDLYICLRPVRYYQGTPSPVKHPELTDMVIFRENSEDIYAGIEWKADSADAEKVIKFLREEMGVKKIRFPEHCGIGIKPCSEEGTKRLVRAAIEYAIANDRDSVTLVHKGNIMKFTEGAFKDWGYQLAREEFGGELIDGGPWLKVKNPNTGKEIVIKDVIADAFLQQILLRPAEYDVIACMNLNGDYISDALAAQVGGIGIAPGANI

SEQ ID NO: 6646 - protein, 200 aa, Simmondsia chinensis
MATIGHNNLNAKLVLLGDMGAGKSSLLLLFVKGHFLEFQESTIGAAFFSHTLAVNDATVKFEIWDTAGQERYHILAPMYYRGAAAAIIVYDITSADSFALAKKWVQELQKQGNPNMVMALAGNKADLEDRRSVPAEEARIYAEDNGLFFMETSAKTALNVNEIFYEIAKRLPRAQPPQNPAGMVLVDRPPEGSRASTCCS

SEQ ID NO: 6647 - protein, 372 aa, Magnaporthe grisea 70-15
MSATNGSAAAAPSKKNIGVFTNPKHDLWINEAEPSLESVQKGSDELKEGQVTIAIRSTGICGSDVHFWHHGCIGPMIVREDHILGHESAGEIIAVHPSVTSLKVGDRVAVEPQVICYECEPCLTGRYNGCEKVDFLSTPPVPGLLRRYVNHPAVWCHKIGDMSWEDGAMLEPLSVALAGIQRAGITLGDPVLVCGAGPIGLITLLCAKAAGACPLVITDIDDGRLKFAKELVPDVITFKVEGRPTAEDAAKSIVEAFGGVEPTLAIECTGVESSIASAIWAVKFGGKVFVIGVGRNEISLPFMRASVREVDLQFQYRYCNTWPRAIRLIQNKVIDLTKLVTHRFPLEDALKAFETAADPKTGAIKVQIQSLE

SEQ ID NO: 6648 - protein, 492 aa, Burkholderia cepacia R18194
MPAKSSVAPAIVWFRDDLRVTDQPALTRAVESGRPLVCVFVDDTGDGAGRALGGAARWWLHGSLAGLDAALARHGGRLLLLRGDAQREIERVVHDTGAEAVYWNRRYAQPQRDADAALKASLKARGVTVESSNGSLLNEPWEVLTGSGGPYQVFTAYWRAARRDRTVAVPLPEPERIAFHPWPKAVRDCALALDVLALRPPVPDWAGGLRDAWPAPDEAGAHARLDAFLTASLAGYADARDLPDRPATSRLSPFLRFGNLSPRQVWHAVQGAANAGGAAVAADADKFLSELGWREFSYTLLYHFPALASDNFRAQFDAMPWRDDPAALRAWQRGRTGYPLVDAGLRELWTTGWMHNRVRMVVASFLIKHLLIDWRAGEAWFWDTLVDADPANNAASWQWVAGCGADAAPYFRIFNPVAQGQKFDPDGAYVRRWVPELAGLDNASIHAPWEASPLELDAAGVRLGVDYPAPLVEHAAARARALDALAALPKRR

SEQ ID NO: 6649 - protein, 194 aa, Methanosarcina mazei Go1
MNRKAGAVVLICLFAGVILVPGCINKQHVEQPVNNESSNAGKGDESVDIQVIKVFSSAFESNSTIPRKYTCNGENINPPLEFADIPEETESLVLIMDDPDSPMNPFTHWIVWNIEPVAKIEEDSIPGIEGMNNFRKIGYGGPCPSSGTHRYFFKVYALDRKLELKAGSGRKELESEMIGHIIAEGELMGKYGKT

SEQ ID NO: 6650 - protein, 316 aa, Rubrivivax gelatinosus PM1
MSSQLEQLKAYTTVVADTGDFKQIAAFAPRDATTNPSLILKAVSQPAYAPLLAQTAAAHRGQPLDAIVDRVLVRFGCEILNVVPGRVSTEVDARLSFDAAATVARAQRIMALYESEGIARERVLIKIAATWEGIQAAKALEHHGIHCNLTLLFAFCQAVACGESGVRLISPFVGRIHDWHKKAAGARWDEAANAGANDPGVKSVAQIWRYFRKFGIETEVMGASFRNTGQILALAGCDLLTISPELLAQLQASEATVMRALDVDAALHCDAKALSFNEASFRYALNEDAMATEKLAEGIRAFAVDAAQLDRLIQAL

SEQ ID NO: 6651 - protein, 151 aa, Sinorhizobium meliloti
MIRLLIALFLLLASVAPGFAVNPDEVLADPALEARARAISAQLRCMVCQNQSIDDSNAELAKDLRLLVRERLKNGDSDEAVISYVVSRYGEFVLLNPRLEAKTLVLWGMPAILLVAGIITLVVAARRRGARVPGAPLSDEEKERLDRLLRP

SEQ ID NO: 6652 - protein, 421 aa, Arabidopsis thaliana
MVIKGMRVGKYELGRTLGEGNSAKVKFAIDTLTGESFAIKIIEKSCITRLNVSFQIKREIRTLKVLKHPNIVRLHEVLASKTKIYMVLECVTGGDLFDRIVSKGKLSETQGRKMFQQLIDGVSYCHNKGVFHRDLKLENVLLDAKGHIKITDFGLSALSQHYREDGLLHTTCGSPNYVAPEVLANEGYDGAASDIWSCGVILYVILTGCLPFDDANLAVICRKIFKGDPPIPRWISLGAKTMIKRMLDPNPVTRVTIAGIKAHDWFKHDYTPSNYDDDDDVYLIQEDVFMMKEYEEEKSPDSPTIINAFQLIGMSSFLDLSGFFETEKLSERQIRFTSNSLAKDLLENIETIFTEMGFCLQKKHAKLKAIKEESTQKRQCGLSVTAEVFEISPSLNVVELRKSHGDSSLYKQVMMHSCNIS

SEQ ID NO: 6653 - protein, 400 aa, Ralstonia eutropha JMP134
MIANTDDLAYLMTREQGKPLDEAKGEIAYAASFLEWFAEEAKRVDGEVLASPAADKRLVTLRQPVGVCAAITPWNFPAAMITRKAAPALAAGCAIVIKPAELTPLSAFALAELAHRAGVPAGVLQVVTGDARTIGAVLTASPIVRKLSFTGSTEVGRILMAQSAATVKRLSLELGGNAPFVVFDDADVDAAVDGAIAAKFRNGGQTCVCANRFYIQDGIYDAFATKFAQRASQLRVGNGLEQGVVIGPLIEEAAVEKVTSLVDDATSKGGRLLTGGLKHQLSGTYYAPTVIADATATMRVAREEIFGPLAPLFRFKRDEDAVAAANATEYGLAAYLYTRDIARAWRTAEALEYGMVGLNTGLISNEVAPFGGIKQSGLGREGSRHGIEEYLETKYLCLQM

SEQ ID NO: 6654 - protein, 321 aa, Ureaplasma parvum serovar 3 str. ATCC 700970
MNQVNFLNLDKNILIITSGGDAPGMNASLISLIHRLMNNNFNVFIGIEGLLGLYNNLIEPIKDKRVFDVYFNEQGTVIKTSRFIKLDINDKKTQIIKDNLLSHNIQKIIILGGQGSMQAGLVLTKMGFEVFGILHTIDNDFSETQMCIGALSAASFNQKLLKCLNYTAKAHCAFNLVELMGRECSWLVNNSVGKLKPILMLTNQDNKYTVDEVIDLIKDKINSIKEYDPLIIVQELIYDQKWYELLVKTFEQKLHKSLRITILNYLQRGAPVSDFDLQLAKDSANVLVDFIVNQNDIKNTNNMYVVINKFDNKLEVIKFNK

SEQ ID NO: 6655 - protein, 153 aa, Desulfovibrio desulfuricans G20
MKLKSPIFEQGELLPAANPQHGGESPPLAWEDVPEGTASFVLLCDDPDADGGTATLWMLYNLPADLRSLEAGIADDFAPLKGAAHGINTRGNCRYDAPQPSCHPRRVYYRLYALDSRLSLKAGIARGQLVRAMEGHIISEASLTTVVGSAHTA

SEQ ID NO: 6656 - protein, 400 aa, Rubrivivax gelatinosus PM1
MVWMMAAGALVFFMQAGFALLESGMSRAKNAINVIMKNYCDTCFGAVAYWAVGFGLMFGANASGWIGTDRFLPHAMPEADYGLLFFQMMFAATAATIVSGAIAERARFWAYIVSSVLITGLIYPVFGSWAWGSLFSGQGWLREMGFIDFAGSTVVHSVGGWSALAAILVIGPRLGRFGPNGEARPMLGHNLTSVALGGFILWLGWFGFNGGSTAAATVGIGKIVLNTHLAGAAGAIGALAVLALGRQPVLMTAAVNGSIAGLVGITAGCHVMEPAYALLTGFVAGGLSVLAGWLLEAGRIDDVVGAVSVHAVGGVWGTLAAGLFKHDAMFDLRQLGVQAIGCGVAFAWSFGTALLMYWLLARGVGLRASTLDEQRGLDFTEHYEIGYPEFQQDAVHRGKR

SEQ ID NO: 6657 - protein, 491 aa, Fusobacterium nucleatum subsp. nucleatum ATCC 25586
MENILKKSYKMFINGEWIDSSNGVMVKSYAPYNNELLSEFPDASESDIDFAIKSAKEAFKTWRKTTVKERARILNKIADIIDENKDLLATVETMDNGKPIRETKLVDIPLAATHFRYFAGCILADEGQATVLDEKFLSLILREPIGVVGQIIPWNFPFLMAAWKLAPALAAGDTVVLKPSSTTTLSLLVLMELIQDVIPKGVVNLVTGKGSTAGEFLKNHPDLDKLAFTGSTAVGRDIALAAAEKLIPATLELGGKSANIILDDADIEKALEGAQLGILFNQGQVCCAGSRIFVQEGIYDEFISKLVKKFENIKIGNPLDPTTIMGSQIDARQVKTILDYVEIAKQEGGVILTGGVKYTENGCDKGNFVRPTLITNVNNGCRVSQEEIFGPVAVVIKFKTDDEVIAQANDSEYGLGGAVFTKNINRALKLAREIQTGRVWINTYNQIPEHAPFGGYKKSGIGRETHKVILEHYTQMKNILIDLEEGTSGLY

SEQ ID NO: 6658 - protein, 314 aa, Oryza sativa
EESMEMMVHGRRDEQYGGLGLGLGLGLSLGVAGGAADDEQPPPRRGAAPPPQQQLCGWNGGGLFSSSSSDHRGRSAMMACHDVIEMPFLRGIDVNRAPAAETTTTTARGPSCSEEDEEPGASSPNSTLSSLSGKRGAPSAATAAAAAASDDEDSGGGSRKKLRLSKDQAAVLEDTFKEHNTLNPKQKAALARQLNLKPRQVEVWFQNRRARTKLKQTEVDCELLKRCCETLTDENRRLHRELQELRALKLATAAAAPHHLYGARVPPPTTLTMCPSCERVASAATTTRNNSGAAPARPVPTRPWPPAAAQRSSA

SEQ ID NO: 6659 - protein, 426 aa, Pichia pastoris
MSGDHKSFTVFNQEFIIDRDFELIKALGQGAYGVVCSAQYKGNEDGGKVAIKKVTNIFSKKILAKRALREIKLLRHFRGHKYITCLYDLDVIPDQNNNFNEIYLYEELMECDLHHIIKSKQPLTDSHYQSFIYQILGGLKYIHSADVLHRDLKPVNLLVNSDCELKICDFGLARGYSSDAEKNAGFLTEYVATRWYRAPEIILSFQTYTKAIDIWSVGCILAELLGGRPIFRGRDYVDQLNLILSTLGTVSEETLQSIRSERAQDYVRSLPFMPKIPFSQLFPGANPEAIDLLDRMLTVDPTHRITVTEALEHPYLKVWHDPNDEPVCSSKFDFSFEVVDDIETMKQMIVDEVLSLREFVRRPIQEQQLPFTEPDKHFDVSFDQPQIEPPAENYRDDHLPRPHELESQILDLEHELQYGLDRYGTQ

SEQ ID NO: 6660 - protein, 320 aa, Arabidopsis thaliana
MSALTFPIGSVHHLMPVLALGTAASPPPEPIVLKRTVLEAIKLGYRHFDTSPRYQTEEPLGEALAEAVSLGLIQSRSELFVTSKLWCADAHGGLVVPAIQRSLETLKLDYLDLYLIHWPVSSKPGKYKFPIEEDDFLPMDYETVWSEMEECQRLGVAKCIGVSNFSCKKLQHILSIAKIPPSVNQVEMSPVWQQRKLRELCKSKGIVVTAYSVLGSRGAFWGTHKIMESDVLKEIAEAKGKTVAQVSMRWAYEEGVSMVVKSFRKDRLEENLKIFDWSLTEEEKQRISTEISQSRIVDGEVYISEKGPIKSVTEMWDGEI

SEQ ID NO: 6661 - protein, 273 aa, Thermoplasma volcanium GSS1
MKLIENWFSERYSDNLQLSFRVSDQLLSIKTDYQRIDLFDTYDFGKLLAIDGTVQLTERDEYIYHELITMIPYHMTKNPPQSALVIGGGDGGAARRLLDLGLNKIVNVEIDGQVVEVSKRFFPDLSSAFTDKRVNLIIDDGIKYVRKCNEKFDLVIIDSTDPEGPAEGLFSMEFYSDITKILSDGGVIVSQSGSPFYQPKALKLAYTGMRRLFKDVKVYTGFIPTYPSGFWSFTIASEDAMNPRKPAIKGKYFNEDVLDGVFKLPQFVKDLIT

SEQ ID NO: 6662 - protein, 310 aa, Thermoplasma volcanium GSS1
MDRKELLSKPVQDLRIDGNTTLSNLMAQFSNIGGFTAAKLYEAHSIISDMFLEDNTTFLSFPADIISTGLRGLINDVVKRKLVDVIITTSGTLDHDIARTFGKYYCGSFNYSDVELREININRLGNVLVPDESYGELIEEKVMEQLEKLYSIKKEWATVDLIKEIGLSINNESSILYNAAKNDIPIFVPGITDGSFGSQLWSFYEQHHDFKINLLEDEHRLSDIIFDAKKTGAIMVGGGISKHHTIWWNQFRDGLDYAVYITTAQEYDGSLSGAKLEEAISWKKVRPNARFVNIYGDATVIMPILMAPFL

SEQ ID NO: 6663 - protein, 76 aa, Triticum aestivum
MSSESLGKNSKIMGGRERKEVNSTAKHFVDFTEAEEDLVFRMHRLVGNRWELIAGRIPGRTAEEVEMFWAKRHQDQ

SEQ ID NO: 6664 - protein, 43 aa, Zea mays
PTRPRTRVLKYGCGHEWWVCLLLTFLGYIPGIIYAFYAITKNN

SEQ ID NO: 6665 - protein, 425 aa, Mesorhizobium loti MAFF303099
MSGRSLMSPVWHPFTQHALELAIPEIARTEGAYLHKADGTRILDAISSWWVVTHCHRHPRIIKAIETTAASLDQIIFAGFTHEPAERLARALVGLAPAGLDWVFYSDSGSTSVEVALKMALGYFRNIGAPRSRIVVMEHSYHGDTIGTMSVGARGVFNAAYEPLLFEVDTIPFPAAGQEQETLDRFEAVSRDRRAAALIVEPLVLGAGGMQMYPAWVLAELKKITEASGTLLITDEVMTGWGRTGTMFACEQASISPDILCTSKGLTGGTIPLAATLATDAIFQAHYSEDRKKTFFHSSSYTANPIACGAALANVEIWRDEPVAERIAALSAMQAAGLRRFGDNPRFTDSRVTGTIAALDLRTSSAGYLADIGPKLRAFFLERGLLVRPLGNVLDLMPPYCITGDELDGLYDAIEEAAERFGSRP

SEQ ID NO: 6666 - protein, 299 aa, Arabidopsis thaliana
MASEDQSAARSTGKVNWFNASKGYGFITPDDGSVELFVHQSSIVSEGYRSLTVGDAVEFAITQGSDGKTKAVNVTAPGGGSLKKENNSRGNGARRGGGGSGCYNCGELGHISKDCGIGGGGGGGERRSRGGEGCYNCGDTGHFARDCTSAGNGDQRGATKGGNDGCYTCGDVGHVARDCTQKSVGNGDQRGAVKGGNDGCYTCGDVGHFARDCTQKVAAGNVRSGGGGSGTCYSCGGVGHIARDCATKRQPSRGCYQCGGSGHLARDCDQRGSGGGGNDNACYKCGKEGHFARECSSVA

SEQ ID NO: 6667 - protein, 320 aa, Lupinus cosentinii
FAHYGPQWRLRRKLSSVHMFSGKALEDFTHLRQEEVARLTSNLASSRSKAVNLGQVLNVCTTNALTRVMIGRRVFNDGNDGFDPKADEFKSMVVELMVLAGALNIGDFIPALEWLDIQGVQAKMTKLHKKFDAFLTNIVEEHKNSKIEKHQDMLSTMLSLKDGTEDGGKLTDIEIKALLLNMFAAGTDTSSSTTEWAISELIKNPNIQAKLQQELDSVVGRDRLVTEADLAHLPYLEAVVKETFRLHPSTPLSLPRIASESCEVFGYHIPKGSTLLVDVWAIARDPKEWNNPLEFKPERFLPGGEKANVDIKGNDFEVIP

SEQ ID NO: 6668 - protein, 90 aa, Brassica napus
MASFARRAMNLAQIPSARAPASVCQRRGFAGAADHHGSTKVDFWKQPTNPGNWKEEHFVLISLSGWGMLFYGGYKLFTGGKGEKPVEAAQ

SEQ ID NO: 6669 - protein, 413 aa, Burkholderia fungorum LB400
MPIYKGTLGPDVIDIRKLYGQTGKFTYDPGFMSTAACNSAITYIDGDKGELLYRGYPIDNLAENADFLETCYLLLKGELPNAQQNAEFVKTVTNHTMVHEQMHFFFRGFRRDAHPMAILVAAVGALSAFYHDSLDINNPRHREVSAIRMIAKLPTLVAMAYKYSIGQPFAYPKNDLSYSANFMHMMFSNPCEEYKVNDVLVRALDRILILHADHEQNASTSTVRLAGSSGANPFACIAAGIACLWGPAHGGANEAALNMLEEIGSVDNIPEFIKQVKDKNSGVKLMGFGHRVYKNYDPRAKLMRETCHEVLEELGLHDDPLFKLAMALEKIALEDEYFVSRKLYPNVDFYSGIVQRALGIPTSMFTCIFAMARTVGWIAQWNEMIADPEQKIGRPRQLFIGDTQREAKPIAQR

SEQ ID NO: 6670 - protein, 170 aa, Glycine max
  unsure (1)..(170): unsure at all Xaa locations
MASDGSEEFRLVSPAFSNEGKLPRNYTDEGQGAKKNISPPLEWYNLPEGTKTLALVVEDIDGSDSDGPIMPWTHWVVANIPATVKGLPEGFSGKAAEMGGDYVTIKEGNNDLKKTGWNGPRLPTXGHRIQFRLYALDDELKLGNKVTKEKLLEETIEGHVLGEATLMAIF

SEQ ID NO: 6671 - protein, 216 aa, Shigella sonnei
QELDLYICLRPVRYYQGTPSPVKHPELTDMVIFRENSEDIYAGIEWKADSADAEKVIKFLREEMGVKKIRFPEHCGIGIKPCSEEGTKRLVRAAIEYAIANDRDSVTLVHKGNIMKFTEGAFKDWGYQLAREEFGGELIDGGPWLKVKNPNTGKEIVIKDVIADAFLQQILLRPAEYDVIACMNLNGDYISDALAAQVGGIGIAPGANIGDECALF

SEQ ID NO: 6672 - protein, 415 aa, Magnaporthe grisea
MSDLQGRKIFKVFNQDFIVDERYTVTKELGQGAYGIVCAAVNNQTSEGVAIKKVTNVFSKKILAKRALREIKLLQHFRGHRNITCLYDMDIPRPDNFNETYLYEELMECDLAAIIRSGQPLTDAHFQSFIYQILCGLKYIHSANVLHRDLKPGNLLVNADCELKICDFGLARGFSVDPEENAGYMTEYVATRWYRAPEIMLSFQSYTKAIDVWSVGCILAELLGGRPFFKGRDYVDQLNQILHILGTPNEETLSRIGSPRAQEYVRNLPFMAKKPFPTLFPNANPDALDLLDRMLAFDPSSRISVEQALEHPYLHIWHDASDEPDCPTTFNFDFEVVEDVGEMRKMILDEVYRFRQLVRTAPGAGGHGAPHAPQVPIPAGAGQGQWKAEDPRPQEYVGQMNDLEAELAGGLDQRR

SEQ ID NO: 6673 - protein, 439 aa, Anabaena variabilis ATCC 29413
MEKASLQHRDMFTAEVIGFGDTVVFVSHPQGIQTIFANDRKKLVAVGEANRILYPLVGNNSMFLLEGVKHKQRRQLLMPSFHGERMREYGHLIRNITETLFSQLQQNVTFSALTAMREISMQVILQAVFGFYEGERCQQFKHLLPVFLSELFQSPLASSILFFPFLQKDLGNLTPWGRFVRQREKIDKLLYEEIAERRQEINSDRIDILSLLISSRDETGNSMSDQELRDELITLMISGHETTGTAMAWSLYWILQTPEVFQRLIQELDSLGDSPDPMSIFRLPYLTAVCNETLRINPVAMLTLPRVVKEPVELLGNRLESGTTVVGCIYLTHHREDLYPESKLFQPERFLKREFSQYEFMPFGGGVRGCIGQAIAMFEMKIVLATVLSRYQFALADGKPERPQRQGFTLTPANGVKMLITGKHQRQNYSTAASTTFTT

SEQ ID NO: 6674 - protein, 429 aa, Pseudomonas putida KT2440
MADKKAQLVIEGAAPVELPILTGTVGPDVIDVRGLGATGHFTFDPGFMATASCESKITYIDGDKGILLHRGYPIEQLAEQSDYLETCYLLLNGELPNAEQKAQFVSTVKNHTMVHEQLKSFFNGFRRDAHPMAVMCGVVGALSAFYHDSLDINNPQHREISAVRLVAKMPTLAAMVYKYSMGQPMMYPRNDLSYAENFLHMMFNTPCEIKPISPVLAKAMDRIFILHADHEQNASTSTVRLAGSSGANPFACIAAGIAALWGPAHGGANEAVLTMLDEIGDVSNIDKFIAKAKDKNDPFKLMGFGHRVYKNRDPRATVMKQTCDEVLRELGIKNDPQLELAMRLEEIALTDPYFIERSLYPNVDFYSGIILKAIGIPTSMFTVIFALARTVGWISHWKEMLSSPYKIGRPRQLYTGEQKRDIVALKDRK

SEQ ID NO: 6675 - protein, 333 aa, Zea mays
MASPPRNVGTRTTSNPEIPEFLVGPAGRPVPAVGLGTASFPFVEENVRTAVLAALELGYRHLDTASLYRSERAVGDAVAEAARRGIVASREEVFVTTKMWCSQCHPDLVLPSLKESLQNLQMDYVDLYLVHWPIAAKPGKPQFPFKREDIMPMDLIGVWRAMEECHRLGLARMIGVSNFTTKKLQELLAIAKIPPSVNQVEMNPIWQQKRLAEFCKDKGIHLTAYSPLAGQSTSKVNPVMQSEVLQEVAKARGKSVAQISLRWIYEQGASVVVKSFGRDRLKENVEIFDWELTNEDRRKISQIPQHKRVTVLGILSPDGVSSVDLAELDIVEM

SEQ ID NO: 6676 - protein, 476 aa, Rhodopseudomonas palustris CGA009
MVNRMQFYIDGAWVDPVVKKSTPVVNPATEEAMYEVALGSKADVDKAVAAAKRAFETFSVTSREERIALLEKVVAIYKSRMKEIGAAISDEMGAPLPMAEKMQAGAGLGHIMSTLDVLKNYQFEEPLGSAMIVREPIGVVGMITPWNWPLNQIACKVAPAIAAGCTMVLKPSEFTPTSALLFAEILHEAGVPKGVFNLVNGLGPEVGAAMSEHPDIDMISFTGSTRAGIDVAQRAAPTVKRVSQELGGKSPNVILEDADLTKAVTGGVMHMFNNSGQSCNAPSRMIVPLSKMKEVAAIAKGVAEKTKAGDPRGEGTTIGPVVNRIQWDKIQTLINKGIEEGATLVAGGPGLPEGVNKGFYVRPTVFADVTKDMTIAREEIFGPVLVIMGAKDENEAVELANDTPYGLAGYVSAGSVDRARAVGRKIRAGNVNLQGVPNERTAPFGGYKQSGNGREWGKFGLEEYLEVKAIAGFNAA

SEQ ID NO: 6677 - protein, 210 aa, Zea mays
MASDRVLGTVKWFNGTKGFGFITPDDGSEDLFVHQSSIKSDGYRSLNDGDAVEYTVGSGNDGRAKALDVTAPGGGPLAGGERPDGGNGGGRGGYGGGDRGYGGGGDRGYGGGGDRGYGGGDRGYGGGGDRGYGGGGDRGYGGGGGYGGGYGGGGGGGGRGCFKCGEEGHMARDCSQGGGYGGGGGGGRGSECYNCGQEGHISRDCPNKRR

SEQ ID NO: 6678 - protein, 418 aa, Bordetella pertussis Tohama I
MSYQHIKVPTGGQKITVNADYSLNVPDQVIIPVIEGDGTGADITPVMIKVVDAAVQKAYAGKRKIHWMEVYAGEKATKVYGPDVWLPEETLDAVKDYVVSIKGPLTTPVGGGIRSLNVALRQQLDLYVCLRPVRYFKGVPSPVREPEKTDMVIFRENSEDIYAGIEYMAESEQAKDLIQYLQTKLGVTKIRFPNTSSIGIKPVSREGTERLVRKALQYAIDNDRASVTLVHKGNIMKFTEGGFRDWGYALAQNEFGAQPIDGGPWCKFKNPKTGREIIVKDSIADAFLQQILLRPAEYDVIATLNLNGDYISDALAAQVGGIGIAPGANLSDSVAMFEATHGTAPKYAGKDYVNPGSEILSAEMMLRHMGWTEAADLIIASMEKSILSKKVTYDFARLLEGATQVSCSGFGQVMIDNM

SEQ ID NO: 6679 - protein, 294 aa, Allium cepa
MDQYEKVEKIGEGTYGVVYKARDRLTNETIALKKIRLEQEDEGVPSTAIREISLLKEMQHANIVRLQDVVHSEKRIYLVFEYLDLDLKKHMDSCPDFAKDSRLAKTFLYQLLRGIAYCHSHRVLHRDLKPQNLLIDRRTNSLKLADFGLARAFGIPVRTFTHEVVTLWYRAPEILLGARQYSTPVDIWSVGCIFAEMVNQRPLFPGDSEIDELFKIFRIMGTPNEDTWPGVTSLPDFKSAFPKWPAKDLATIVPKLDSAGIDLLYKMLHLEPSKRITARKALEHEYFRDLGTIP

SEQ ID NO: 6680 - protein, 247 aa, Pisum sativum
EHLANLEYANAGLLSHLSLAFWDQDDPYDMGGDHCFLPGGNGKLVQALAENVPILYEKTVHTIRYGSDGVQVIAGSQVFEGDMALCTVPLGVLKKGSIKFIPELPQRKLDGIKRLGFGLLNKVAMLFPHVFWEMDLDTFGHLSDDPSRRGEFFLFYSYATVAGGPLLIALVAGEAAHKFESMPPTDAVTKVLQILKGIYEPKGINVPEPIQTVCTRWGSDPFCFGSYSNVAVGASGDDYDILAEMVG

SEQ ID NO: 6681 - protein, 298 aa, Archaeoglobus fulgidus DSM 4304
MARTGFQGRKLGEAFEIWTEMLREENITILMGLSGAMVPAGMRKIIAWLIRNRYIDVLVSTGANLFHDIHEAMGFRHFMGSEHVNDCKLFEEGIDRIHDVFAYEKEFNVIDYTLAEIISEMSGVMSSREFLEEIAGRLNVKDRNSIVIAAYESKVPIFSPAIADSSIGIAAALAKREVVIDTIRDVEELTEIVVNSEKTGVIYVGGGVPKNFIQQTEVVARLKGYDVRGHEYAIQITTDVPQFGGLSGCTFEEGVSWGKISGKAKKVQVNCDATIALPVLAHGLIGIRRQKYPIFNGL

SEQ ID NO: 6682 - protein, 290 aa, Coxiella burnetii RSA 493
MSPGKLFRQAVANEHPLQIVGAINAYCALLAENVGFKAIYLSGGGVANTLGLPDLGITDLHDVLEDARRITAATHLPLLVDIDTGFGGAFTIARAIKEMERAQVAAVHMEDQVAQKRCGHRPGKELVNTNEMVDRIKAAVDVKSNDFVLIARTDAYAVEGLKATIDRACTYVEAGADMIFAEALENINDYPTFCKAVKVPVLANMTEFGKTPLYTAAQLADHGVKMVLYPRSADRAMSKAALAVYEDIKKHGVQTASLPFMQTREALYEVLNYHAYEDKLNQLFKRKEDD

SEQ ID NO: 6683 - protein, 372 aa, Coxiella burnetii RSA 493
MTKTAKGLRGQSAGETSIATVGKEGHGLTYRGYRIEDLAANATFEEVAYLLLKNKLPTKSELDAYTKKLVNLRSLPPALKDTLERIPASSHPMDVMRTGCSMLGNLEPENGFENEQNIADRLVAIFPAIQCYWYHYSHHGKRIDTELDDLTLAGYFLHLLLGKKAAQMAIDCMNASLILYAEHEFNASTFAARVCSATLSDIYSAVTAAIATLRGPLHGGANEAAMDLIMLYKTPSEAIAGIKRKLANKELIMGFGHAVYRERDPRNAIIKSWAQKLAPNAADGYLFDISDAIENTMQDEKKLFPNLDFYSATAYHFLNIPTKLFTPIFVMSRVTGWCAHIFEQRKDNRIIRPNADYIGPEEQGWVPIEKRR

SEQ ID NO: 6684 - protein, 325 aa, Bradyrhizobium japonicum USDA 110
MEGPAMAAPLDPVIAQIIPLLPLRDPTTMTPQSARDSLRALAAARAAVPPPPVDTVQDIKVKGGAGPLDARLYRIGSDPAPTVVFFHGGGWVAGDLETHDRQARNLAIETGAVVVSVDYRRPPETRFPGAFEDAFAAARDIFNRVAEFGGDAKRLGVAGDSAGGNLAAATAIACRDAGIKLAAQLLVYPVTDVAGHYADARENARFPSRAENADGYFLSRAVMEWFCGHYLADPGHGADWRVSPLRAASLAGLAPAIVATASFDPLRDEGAAYARALEAAGVRVKHHEGPGLIHGYFGLGDASDVARAEAQRARADFKALLARGI

SEQ ID NO: 6685 - protein, 203 aa, Glycine max
  unsure (1)..(203): unsure at all Xaa locations
MVAGKYPSPTYFILLLITITRLISTVGKTSQWMKALTPPPELASVSLDDTIFSKLRNDPEALQGRASRDYGNLVREVPSAVFHPTSSSDIARLIKLSYNGSVPFKIAARGQGHSTRGQAMVRDGVVVDMAGFRERGNGEGIRVVMSVVVDPYNKNGYGXYYADVGGEQLWIDVLNATLEHGLAPMSWTDYLYLTVGGTLFNAG

SEQ ID NO: 6686 - protein, 486 aa, Dechloromonas aromatica RCB
MLQDKILNFINGEFVATNKWFENRTPISNAVIGQVAEAGKAEVDAAVAAAQAALKGPWGKMTLAKRVELLEALVAEINNRFDEFLEAECADTGKPKSLASHIDIPRGAANFKVFADVIKNVPGEFFDMATPDGGTAINYTFRSPVGVVGVICPWNLPLLLMTWKVGPALACGNTVVVKPSEETPRTAALLGEVMNKVGIPKGVYNVVHGFGPNSAGEFLTTHPDVDAITFTGETRTGEIINRAASVGSRPVSLEMGGKNAAIVFADCDFDAAIEGTLRSAFANCGQVCLGTERVYVERPIFEKFVAAMKAGAEKLKIGVPEDPATGMGPLISKEHQNKVLSYFQIAKEAGATIVTGGGVPDMPGELKDGCWVQPTIWTGLPETARVIKEEIFGPCCHIAPFDTEEEVLEKANDNIYGLATAIWTKDVSRANRVAQQMEVGIAWVNSWFLRDLRTAFGGAKQSGIGREGGVHSLEFYTELKNICIKL

SEQ ID NO: 6687 - protein, 256 aa, GIBBERELLA ZEAE PH-1
MPGVGFGTFANEGAKGETYKAVIAALKTGYRHLDCAWFYLNEGEVGQAVRDFLAEDNGVKREDLFICTKVWNHLHEPEEVKWSFENSLKNFGLDYIDLFLVHWPIAAEKGDDYQPKIGPDGKYVIKKDLTENPEPTWRAMEEIYASGKARAIGVSNWTIDGLKQLMAFAKVKPAVNQIEIHPFLPNEDLVKFCLENDILPAAYSPLGSQNQVPTTGETVRSNKTLNEVADRSGNTLAQVLIAWGLRRGYAPVRRGL

SEQ ID NO: 6688 - protein, 66 aa, Triticum aestivum
  unsure (1)..(66): unsure at all Xaa locations
ERERETLEHXXWSGANFYDRVLKTVQGGMSSTAAMGKGATXXQFWTXPGSESNNQARSQVQDVMKV

SEQ ID NO: 6689 - protein, 288 aa, Glycine max
MRVAREEAMGGGKRNTVETFFLATLILWFASLCFQILLNKRWELLSVIAGSIFYQTSNCLIRFFSPHKDKDALFVNTSVSLLHSLLTSSSVIFILFRELLSNGPSGMSDHSQLVEDAWSWAFEALSFSCGYFAYDQWDMLHYRLYNGWIPSILVHHLVLLICFTLALYRNVTINYLILTLICELHSIFLHLRKVRRMAGIRDAKSILVKLEWFLNWVTFFVARSVPHVLITAKLIKDAYKFEKGMELPLALLGMAGMNLLNIGLGIDLLKAFKRERKSQQGNLHHHRE

SEQ ID NO: 6690 - protein, 372 aa, Arabidopsis thaliana
MPEIEIAAGSGDNNDALFGKYELGKLLGCGAFAKVFHARDRRTGQSVAVKILNKKKLLTNPALANNIKREISIMRRLSHPNIVKLHEVMATKSKIFFAMEFVKGGELFNKISKHGRLSEDLSRRYFQQLISAVGYCHARGVYHRDLKPENLLIDENGNLKVSDFGLSALTDQIRPDGLLHTLCGTPAYVAPEILSKKGYEGAKVDVWSCGIVLFVLVAGYLPFNDPNVMNMYKKIYKGEYRFPRWMSPDLKRFVSRLLDINPETRITIDEILKDPWFVRGGFKQIKFHDDEIEDQKVESSLEAVKSLNAFDLISYSSGLDLSGLFAGCSNSSGESERFLSEKVAGDVGGGSGGVCERGESEDEEEEGGRVWV

SEQ ID NO: 6691 - protein, 499 aa, Triticum aestivum
  unsure (1)..(499): unsure at all Xaa locations
RPTLPKSSAETGNFRLTIPTXSAPTSGFSSPVGSPRRLSNADVSSTVASSHAPQAWSAPSIHTIDFLGALSPRTLPEKLTGASEPSPYSSTFRSPILMPRNTSAPPSPLPKLFPENQISRTEVNGSASLHPLPLPPSAISPMQTSFSNQPAPKVEMPSVSCQWQKGKLLGSGTFGCVYEATNRNTGALCAMKEVNIIPDDAKSAESLNQLEQEIKFLSQFKHENIVQYYGSDTIEDRFYIYLEYVHPGSINKYVQQHYGAITESVIRNFTRHILXGLAFLHGQKIMHRDIKGANLLVDINGVVKLADFGMAKHLSSAAPNLSLKGPPYWMAPEMIRATLVKDVGYDLAVDIWSLGCTIIEMFNGKPPWSGLEGPTAMFKVLNKDPPLPDNLSHEAKDFLKCCFKRNPAARPSARELLTHPFIRNSSHYSKHVQEVIIAGCEEVIRASCDPSLTRKTTTSGGNDARSSESLVSQLTLQPVQVVTPYFPPRNSGFVSNPGS

SEQ ID NO: 6692 - protein, 395 aa, Burkholderia fungorum LB400
MSETTQTAGTPGGNEPKSGFKPKKSVALSGVTAGNTALCTVGKTGNDLHYRGYDILDIASACEFEEIAYLLVHEKLPTQAELTAYKTKLKALRGLPANVKAALEWIPAAAHPMDVMRTGVSVLGTVLPEKDDHNLPGARDIADRLMASLGSMLLYWYHYSHNGKRIEVETDDDSIGGHFLHLLHGVEPSNAWVDAMHVSLNLYAEHEFNASTFTGRVIAGTGSDIYSALTGAIGALRGPKHGGANEVAFEIQSRYQTPDEAEADIRRRVENKEVVIGFGHPVYTISDPRNKVIKEVAKKLSKEAGNTRLFSIAERLESVMWDAKKMFPNLDWFSAVSYHMMGVPTAMFTPLFVIARTAGWSAHIIEQRIDNKIIRPSANYTGPENLKYLPLNRRK

SEQ ID NO: 6693 - protein, 512 aa, Robinia pseudoacacia
MDQLVWRVLPMLALLVSFLVFFYLQDSYKAQLSPFIKLPGDECSLLPHRHYWISSKRIVTPQGIISGSVEINEGEIVSIIEGYGKQGNSMQEAVIDYGEAVVMPGLIDVHVHLDEPGRTEWEGFDTGTRAAAAGGVTTVVDMPLNNYPTTVSKETLQLKLEAAEKKLYVDVGFWGGLIPENALNTSILEGLLSAGVLGVKSFMCPSGIDDFPMTTIDHIKEGLSVLAKYRRPLLVHAEIQQDSKNHLELKGNGDPRAYLTYLNTRPPSWEQAAIKELVDVTKDTIIGGPLEGAHVHIVHLSDSSASLDLIKEAKSRGDSISVETCPHYLAFSSEEIPDRDTRFKCSPPIRDALNKEKLWEAVLEGHIDLLSSDHSPTVPELKLLEEGDFLRAWGGISSLQFDLPVTWSYGKKHGLTLEQLSLLWSKKPATFAGLESKGAIAVGNHADIVVWQPELEFDLNDDYPVFIKHPSLSAYMGRRLSGKVLDTFVRGNLVFKDGKHAPAACGVPILAK

SEQ ID NO: 6694 - protein, 162 aa, Arabidopsis thaliana
MSSEELRLVSPTIDNDGKLPRKYTMAGQGVKKDISPPLEWYNVPEGTKTLALVVEDIDAPDPSGPLVPWTVWVVVDIPPEMKGLPEGYSGNEDQTTGIREGNNDHKIPGWRGPLLPSHGHRFQFKLFALDDKPKIGHTVTKERLLIAIEGHVLGEAILTCLA

SEQ ID NO: 6695 - protein, 111 aa, Lactobacillus delbrueckii subsp. lactis
MKRIGILTSGGDAPGMNAAVRAVTRVAIANGLEVFGIRYGFAGLVAGDIFPLESEDVAHLINVSGTFLYSARYPEFAEEEGQLAGIEQLKKHGIDAVVVIGGDGSYHGALQ

SEQ ID NO: 6696 - protein, 267 aa, Shigella flexneri 2a str. 301
MAIPAFGLGTFRLKDDVVISSVKTALELGYRAIDTAQIYDNEAAVGQAIAESGVPRHELYITTKIWIENLSKDKLIPSLKESLQKLRTDYVDLTLIHWPSPNDEVSVEEFMQALLEAKKQGLTREIGISNFTIPLMEKAIAAVGAENIATNQIELSPYLQNRKVVAWAKQHGIHITSYMTLAYGKALKDEVIARIAAKHNAIPAQVILAWAMGEGYSVIPSSTKRKNLESNLKAQNLQLDAEDKKAIAALDCNDRLVSPEGLAPEWD

SEQ ID NO: 6697 - protein, 84 aa, Brassica napus
  unsure (1)..(84): unsure at all Xaa locations
MGCFHSKVAREFRGHEDPVKLASETAFSVSEVEALFELFKSIXSSSVVDDGLINKEEFQLALFKSRKRENIFANRIFDMFDVKR

SEQ ID NO: 6698 - protein, 429 aa, Pseudomonas syringae pv. tomato str. DC3000
MADKKAQLIIEGAAPVELPILTGTVGPDVIDVRGLTATGRFTFDPGFMSTASCESKITYIDGDNGILLHRGYPIEQLAEQSDYLETCYLLLNGELPTAEQKAQFVAVVKNHTMVHEQLKTFFNGFRRDAHPMAVMCGVVGALSAFYHDSLDINNPQHREISAVRLVAKMPTLAAMVYKYSMGQPMMYPRNDLSYAENFLHMMFNTPCEIKPISPVLAKAMDKIFILHADHEQNASTSTVRMAGSSGANPFACIAAGIAALWGPAHGGANEAVLTMLDEIGDVSNIDTFIAKAKDKNDPFKLMGFGHRVYKNRDPRATVMKQTCDEVLKELGIKNDPQLELAMRLEEIALTDPYFIERSLYPNVDFYSGIILKAIGIPTSMFTVIFALARTVGWISHWKEMLSSPYKIGRPRQLYTGNVQRDIIALKDRK

SEQ ID NO: 6699 - protein, 479 aa, Saccharomyces bayanus
MSAILSTTSKNFLSRNPARQCQSAQKALFALLSSRHYSSATEQTLKERFAEIIPAKAEEIKKFKKEHGKTVIGEVLLEQAYGGMRGIKGLVWEGSVLDPDEGIRFRGRTIPEIQRELPKAEGSTEPLPEALFWLLLTGEIPTDAQVKALSADLAARSEIPEHVVQLLDSLPKDLHPMAQFSIAVTALESESKFAKAYAQGVSKKEYWSYTFEDSLDLLGKLPVIASKIYRNVFKDGKITTVDPNADYGKNLAQLLGYENKDFVDLMRLYLTIHSDHEGGNVSAHTTHLVGSALSSPYLSLAAGLNGLAGPLHGRANQEVLEWLFKLREEVKGDYSKETIEKYLWETLNSGRVVPGYGHAVLRKTDPRYMAQREFALKHFPDYELFKLVSTIYDVAPGVLTKHGKTKNPWPNVDSHSGVLLQYYGLTEASFYTVLFGVARAIGVLPQLIIDRAVGAPIERPKSFSTEKYKELVKKIESKN

SEQ ID NO: 6700 - protein, 308 aa, ASPERGILLUS NIDULANS FGSC A4
MTRTHPSSFQQLEKLGEGTYATVYKGRNCQTGEMVALKEIHLDSEEGTPSTAIREISLMKELHHDNILSLYDVVHTENKLMLVFEYMDQDLKKYMDTHGNHGQLEPAIVKSFAFQLLRGIAFCHDNRILHRDLKPQNLLINSKGQLKLADFGLARAFGIPVNTFSNEVVTLWYRAPDVLLGSRTYNTTIDIWSIGCIIAEMFTGRALFPGTTNEDQLQKIFRVMGTPSERTWPGVSQFPEYKSDFPVYPPQDLRQVVPRIDPYGLDLLRCMLRLQPDLRISAVDALRHPWFNDPVSDLPIDHGMEALT

SEQ ID NO: 6701 - protein, 204 aa, Paracoccidioides brasiliensis
MAQQQLQQLQTENVMRRKLVIIGDGACGKTSLLSVFTLGYFPTHYVPTVFENYVTDCRVDGRSVQLALWDTAGQEDYERLRPLAYSKAHVLLIAFAVDTPDSLENVRNKWIEEANERCPDVPIILVGLKKDLREDPLAIEEMRKKSLRFVSSKEGHDTAAQVGARKYLECSSLTGEGVDDVFEAATRAALLTFEKDRGSCCVIL

SEQ ID NO: 6702 - protein, 114 aa, Lycopersicon esculentum
MEMFGKIACFVVFCMVVVAPHAESLSCGEVTSGLAPCLPYLEGRGPLGGCCGGVKGLLGAAKTPEDRKTACTCLKSAANSIKGIDTGKAAGLPGVCGVNIPYKISPSTDCSTVQ

SEQ ID NO: 6703 - protein, 294 aa, Saccharomyces bayanus
MTVPYLNSGRNVASYLQTHSHQEKTLKERFSEIYPSHAQDVKQFVKEHGKTKISDVLLEQVYGGMRGVPGSVWEGSELDAEEGIRFRGRTIADIQKELPKAKGSSQPLPEALFWLLLTGEVPTQAQVENLSADLMSRSELPHHVVQLLDNLPKDLHPMAQLSIAVTALESESKFAKAYAQGISKQDYWSYTFEDSLDLLGKLPVIAAKIYRNVFKDGKIGEVDPNADYGKNLVNLIGSKDEDFVDLMRLYLTIHSDHEGGNVSAHTSHLVGSALSSPYLSLASGLNGLAGPLHG

SEQ ID NO: 6704 - protein, 286 aa, Listeria monocytogenes str. 4b H7858
MILPGNETIPYIGLGVFQVTEQEFIAGAVEKAIEVGYRLFDTAAVYNNEAIVGQAIASSAVSREELFISSKVWNGDLGFDETLFAFERTLRNLKLDYLDLYLIHWPVAGKYRDSWRAMERLHDEKLIKSIGVANFKQHHLSDLLVAANEKPVLNQVETHPLLPQNDLRKYLAEQNIAHAAWSPLAKGILMQNPVITEIAKKHQASVDQVILQWHLNRNTIIFPKSITSSRIEENSRLSYFQLDAIDMEKIDRLETGKRVGPDPDDLEYFLSSIERERAYLSGENAE

SEQ ID NO: 6705 - protein, 491 aa, Zea mays
  unsure (1)..(491): unsure at all Xaa locations
MAREQLEESIVADGNGKEEEVGVMGIGAADGADDQHGGGKLSMKSLLWHGGSVWDAWFSCASNQVAQVLLTLPYSFSQLGMLSGVLLQIFYGFLGSWTAYLISVLYVEYRSRKEKEGVSFKNHVIQWFEVLDGLLGPYWKAAGLAFNCTFLLFGSVIQLIACASNIYYINDRLDKRTWTYIFGACCATTVFIPSFHNYRIWSFLGLGMTTYTAWYLAIAALLNGQAEGVAHSGPTKLVLYFTGATNILYTFGGHAVTVEIMHAMWKPAKFKYIYLLATLYVFTLTLPSSAAMYWAFGDELLTHSNAFSLLPKTRWRDAAVILMLIHQFITFGFACTPLYFVWEKVIGMHDAKSIFKRALARLPIVVPIWFLAIIFPXFFGPINSAVGALLVSFTVYIIPALAHVLTYRTASARMNAAEKPPFFLPSWTGMFVLNMFIVVWVLVVGFGLGGWASMVNFVRQIDTFGLFAKCYQCPKPPVPAAAQSPAPLPHH

SEQ ID NO: 6706 - protein, 204 aa, Ustilago maydis 521
MASHQEEVSLSEPGTSELHHAQSTDAAGVEPTSTDTTADVTAMTDEDAEIEAMKQRVAEMEAEAAKLRELQQAAGEAGGAGLHPTEEEREEVDSRSIYVGNVDYGATPEEVQQHFQSCGTINRVTILCDKFTGHPKGFAYVEFAEPSLVANAMVLNESLFRGRLIKVTAKRTNMPGLSARGRGRGRGRGRPFRGRGRGRGRGYY

SEQ ID NO: 6707 - protein, 283 aa, Listeria monocytogenes EGD-e
MKTVKLNNGVEVPILGFGTYQITDAAEAEHAVKDAIKAGYRHIDTAQSYMNEEAVGRGIAASGVDRKELFITTKIWVENVSYKGVMSSFDRSLKRLGLDYVDLLLIHQPFNDVYGAWIAMEELQASGKIRAIGVSNFSPDRVIDLAAFNEVTPQVNQIEVNPFQQQTANLAILRKEGVAIEAWAPFAEGKNDIFNNPVLTKIGAKYGKSAAQVILRWLVEQDIIVLAKSVKPERMAQNLAIFDFELTEADKEEIAGLDQGESQFFSHADPEMVKWMASRKLNV

SEQ ID NO: 6708 - protein, 158 aa, Staphylococcus aureus subsp. aureus MRSA252
METIYDFVVETNKGVTYKLDAYKGDVMLIVNTASECGFTSQFEGLQSLYEKYKDQGFVILGFPCNQFGGQEPGSGEEAAQNCKLNYGVTFPMHQKIDVKGEHQLPLFRYLTAAQHGFFNEKIKWNFTKFLVDREGNVVKRFAPQKKPVQIEREIEKLL

SEQ ID NO: 6709 - protein, 422 aa, Streptococcus pyogenes SSI-1
MILIKNGRVMDPKSQRDQVADVLIDGKQIVKIASAIECQEAQVIDASGLIVAPGLVDIHVHFREPGQTHKEDIHTGALAAAAGGVTTVVMMANTNPVISDVETLQEVLASAAKEKIHIYTNASVTQAFNGKDVTDFKALLEAGAVSFSDDGIPLESSKVLKEAFDLANANQTFISLHEEDPQLNGVLGFNEGIAEEHFHFCGATGVAEYSMIARDVMIAYDRQAHVHIQHLSKAESVQVVAFAQQLGAKVTAEVSPQHFSTTEDLLLTAGTSAKMNPPLRTQRDRLAVIEGLKSGVITVIATDHAPHHKDEKAVDDMTKAPSGMTGLETSLSLGLTHLVEPGHLTLMSLLEKMTLNPALLYGFDAGYLAENGPADLVIFADKQERLITENFASKASNSPFIGNKLKGVVKYTIADGEVVYPN

SEQ ID NO: 6710 - protein, 174 aa, Lactuca sativa
MASISSSAIATVNRTTSTQASLAAPFTGLKSNVAFPVTKKANNDFSSLPSNGGRVQCMKVWPPIGLKKYETLSCLPPLSDEALSKEIDYLIRNKWIPCLEFELEHGFVYREHHHSPGYYDGRYWTMWKLPMFGCTDSAQVMKEVGECKKEYAGTEFAKGSLKVKLLKWPRSPLQ

SEQ ID NO: 6711 - protein, 159 aa, Triticum aestivum
  unsure (1)..(159): unsure at all Xaa locations
MSDSEDHHFESKADAGXASKTYPMQAGRHPGRAASSVIKNRPCKVVEVSTSKTGKHGHAKCHFVALDIFNGKKLEDIVPSSHNCDVPHVDRXTEYQLIDISEDGFXVSLLTDNGNTKDDLKSQLDDAILTNSRMVAEGKXSTDIMXXGEEKFGIKDSAK

SEQ ID NO: 6712 - protein, 445 aa, Pisum sativum
GGFSVVRKGTRKSNNDDEKSQSQSKSQSQSQVAIKTLRRLGTSNNLPRKKDGGENSTETMMKFPTMRQVSVSDALLTNEILVMRRIVENVSPHPNVIDLYDVYEDTNGVHLVLELCSGGELFDRIVAQDKYSETEASTVVHQIVAGLEAIHRANIIHRDLKPENCLFLDVGKDSSLKIMDFGLSSVEEFTDPVVGLFGSIDYVSPEALSQGKITTKSDMWSLGVILYILLSGYPPFIAQNNRQKQQMILNGNFSFYEKTWKGISQSAKNLISSLLTVDPAKRPSAQELLSDPWVKGEKAKDDQMDPEIVSRLQRFNARRKLRAAAIASVWSSTIFLRTKKLKSLVGSYDLKEDEIENLRMHFKKICADRDNATLCEFEEVLKAMKMPSLIPFAARIFDLFDNNRDGTVDMREILCGFSSLKNSKGEDALRLCFQMYDTDRSGCIT

SEQ ID NO: 6713 - protein, 273 aa, Triticum aestivum
HSITSLYKKAGWYRSGIPGISSTHASGDEYLAAVAKAKRKLRGFIAEKNCAPLMLRLAWHSAGTFDVATKTGGPFGTMKCPAELAHGANAGLDIAVRLLEPIKEQFPILSYADFYQLAGVVAVEVTGGPEVPFHPGRQDKPEPPPEGRLPDATQGSDHLRQVFSTQMGLSDQDIVALSGGHTLGRCHKERSGFEGAWTANPLIFDNSYFTELLSGEKEGLLQLPTDKTLLTDPAFRPLVDKYAADEDAFFADYAEAHLKLSELGFGEAVEGCC

SEQ ID NO: 6714 - protein, 276 aa, Thermosynechococcus elongatus BP-1
MSGEGMTAVSEPVQLTVPQMLAQLQGTDTSLRYYAAWWLGKFGLETATAAERQAIVSALIAALADEADRTELGGYPLRRNAARALGKLGDRQAVPALIECLRCEDFYVREAAAIALGQLGDPRAIAPLQSLLEGGVAMARLVPGRPHLVQPVEAVIESLGHLGATEAIALIEPFLAHEMPRVQFAAARALFQLTGDAVYGDRLLAALNSEDVQLRRTALLDLGAMGYLPAAEAILQAGVEASFKLIALHGILGQQLRQAAPAEQTLSLFQGLDQLL

SEQ ID NO: 6715 - protein, 329 aa, Ralstonia eutropha JMP134
MKTRTMSVPLDPELAAIVAAMREARAPAPFSGSPEHARERMRSAILAARARTPLPEVGAIEDGIAVHDGQRVPVRVYRPRTASAMLATVVFFHGGGFVLGSVELMDDIARKLCRDLDAVVVSVDYRLAPEHPFPAAHDDALAATSWAIRNVSALGGNPARIAVAGESAGANLAASTALLLRDQGETLAAQLLIVPGVDLARDTQKLEAARGEFPMLSPTDLRDISRLYMGERAALAGRFPPSPMHAVNVHRLPPAVVAVAGHDPLCEEGTRYAARLEAAGVPVCLLRFDDMFHPFFGFFEASASARRANNAICHTFKSWLHQHASPTST

SEQ ID NO: 6716 - protein, 500 aa, Amaranthus hypochondriacus
MAIRVPSRQLFIDGEWREPIKKNRIPIINPSTEEIIGVIPAATAEDVELAVAAARRALKRNKGEDWASASGAHRAKYLRAIAAKITEKKDYFAKLEAMDCGKPLDEAAWDIDDVAGCFEYYADQAEALDAKQKAPIALPMDTFKCHVLKQPIGVVGLISPWNYPLLMATWKVAPALAAGCSAVLKPSELASVTCLELAEVCREVGLPPGVLNILTGLGPEAGGPLACHPDVDKVAFTGSTATGSKVMSSAAQLVKPVTLELGGKSPIVIFEDVDLDKAAEWTAFGCFWTNGQICSATSRLLVHESIAAEFLDRLVKWCKNIKISDPFEEGCRLGPVVSKSQYEKVLKFISTAKSEGATILCGGSRPEHLKKGYYVEPTIISDVSTSMQIWREEVFGPVLCVKTFGSEDEAIELANDTQYGLGAAVLSKDLDRCERITKALQAGIVWVNCSQPCFCQAPWGGTKRSGFGRELGEWGIENYLNIKQVTEYISDEPWGWYKSP

SEQ ID NO: 6717 - protein, 304 aa, Zea mays
MAFLNMEQQTWAFTFGILGNIVSLMVFLSPLPTFYRVYRNKSTEGFQSTPYVVTLFSCMLWILYALLKPGAELLVTINGVGCVVETVYLAMYLVYAPKAARVLAAKMLLGLNVAVFGLVALVTMLLSDAGLRVHVLGWICVSVSLSVFAAPLSIMRQVIRTKSVEFMPISLSFFLVLSAVVWFAYGALKKDVFVAFPNVLGFVFGLAQMALYMAYRKPAAALVIIPEQSKEEVAEGKASCGGAEVHPIDIAEVHDLQTVVVDVDVEPVTYAAASGMVDGSVGRPRAPEQLVIKPDMVTVIAAEA

SEQ ID NO: 6718 - protein, 85 aa, Glycine max
TRPCEKTTEGDIKHLMKFCNSLHGGLNKLAELLEVERVGVCHQAGSDSLLTSCTFRKLRDTFFSGSTEKYAGVLYGLGVESGQTN

SEQ ID NO: 6719 - protein, 511 aa, Agrobacterium tumefaciens str. C58
MDMDAMTKLDVKQEAAALLDKMGVARDLYTGGDMASFSPVTGEQIASLRTVSVEGVAAVVDKADAAFRTWRNVPAPRRGELIRLLGEELRAFKTDLGRLVSLEAGKIPSEGLGEVQEMIDICDFAVGLSRQLYGLTIATERPGHRMMETWHPLGVVGVISAFNFPVAVWSWNAALALVCGNSVVWKPSEKTPLTALAVQGIFERAAARFGDAPEGLSQLLIGDRAVGEAMVDYPKVPLVSATGSTRMGRDVGPRLAKRFARAILELGGNNAGIVCPSADLDMALRAIAFGAMGTAGQRCTTLRRLFVHDSVYEELVPRLKKAYASVSVGNPLESSALVGPLVDKAAFDGMQKAIEAAKAAGGVVHGGDRVDTGAADAYYVKPALVEMPKQVGPVLEETFAPILYVMKYSDLDQAIDAHNAVAAGLSSSIFTRDIQESERFLSSEGSDCGIANVNIGTSGAEIGGAFGGEKETGGGRESGSDSWKAYMRRATNTINYSKALPLAQGVSFDIE

SEQ ID NO: 6720 - protein, 189 aa, Desulfovibrio desulfuricans G20
MMVSKLNPWNWFKKESEQEKTLPVKQTERGAREYASPLDHFHAEFDRMVDSMFSGFGMPSPRRLFDAASPMLGKSVIKPKVDIYGTDKEYVVEVDLPGIEEKDLSVELKDDVLILSAEKKHEEKTEEKGYYRVERSYGSFRRVLNVPDDADKEGINAKLNKGVLRITMPRNKAIETESRKIAIESSKED

SEQ ID NO: 6721 - protein, 366 aa, Cupriavidus necator
MTAMMKAAVFVEPGRIELADKPIPDIGPNDALVRITTTTICGTDVHILKGEYPVAKGLTVGHEPVGIIEKLGSAVTGYREGQRVIAGAICPNFNSYAAQDGVASQDGSYLMASGQCGCHGYKATAGWRFGNMIDGTQAEYVLVPDAQANLTPIPDGLTDEQVLMCPDIMSTGFKGAENANIRIGHTVAVFAQGPIGLCATAGARLCGATTIIAIDGNDHRLEIARKMGADVVLNFRNCDVVDEVMKLTGGRGVDASIEALGTQATFEQSLRVLKPGGTLSSLGVYSSDLTIPLSAFAAGLGDHKINTALCPGGKERMRRLINVIESGRVDLGALVTHQYRLDDIVAAYDLFANQRDGVLKIAIKPH

SEQ ID NO: 6722 - protein, 255 aa, Glycine max
EKQWQRSGIILSVSIGVLQSDLLAFNPTLPRWKLDAIEKCDVMVYTKIFLKFPYKFWPSGPDKEFFIYAHERRGYYTFWQHMENAYPGSNMLVVTLTNEESKRVEAQADEETLREAMAVLRDMFGPNIPNAIDILVPRWWNNRFQRGSYSNYPIISNHKLFHNIKAPVGRIFFTGEHTSERFNGYVHGGYLAGIDTSKALLEEMRKEKESQTLLLEPLLASLTMSKPETVSNIHKCDIPTQLYLSGKLGVPEAIL

SEQ ID NO: 6723 - protein, 318 aa, Pseudomonas putida KT2440
MSLNPDLAAYLQLVEAGRSAGKVLPMHALAADEARRQFEESSALIAGKADEPDCISDLSLTTRDGHTLPVRLYRPPQADPALAGAALLYLHGGGYVVGSLDSHDTLCWNLAQDAGVPVIAVGYRLAPQWRFPTASDDALDAWRWLVEQAEALGIDAQRLAVVGDSVGGSLATILANQLAAQRELPAPRLQVMIYPVTDASCRRPSVQRYGSGYLLEAQTLEWFYQQYATVPADRHDPRFSPLLGSVASNSAPALMLIAECDPLHDQGVAYARHLEQAGVAVQLAVIPGVTHDFMRMGSIIEEADEGLAMVVEALQQHL

SEQ ID NO: 6724 - protein, 170 aa, Arabidopsis thaliana
MNSSSNGMMNGSILSQQQHRTFIQMGTILKCVDNSCAKEVMCIQSLRGKKGARLGDIIVGSVKEANPIVQKKVKKDAVPKGKVKKGMVVYGVVVRAAMPKGRADGSQVKFDDNAIVVVGIKEKKGQNNSHGSKRKMEYNQPTGTRVFGPVPHEMRLRKQLKILSLAQHIV

SEQ ID NO: 6725 - protein, 231 aa, Triticum aestivum
MGERVKGTVKWFNVTKGFGFISPDDGGEDLFVHQSAIKSDGYRSLNENDAVEFEIITGDDGRTKASDVTAPGGGALSGGSRPGEGGGDRGGRGGYGGGGGGYGGGGGGYGGGGGGYGGGGGGYGGGGYGGGGGGGRGCYKCGEDGHISRDCPQGGGGGGGYGGGGYGGGGGGGRECYKCGEEGHISRDCPQGGGGGGYGGGGGRGGGGGGGGCFSCGESGHFSRECPNKAH

SEQ ID NO: 6726 - protein, 277 aa, Bacillus cereus ATCC 14579
MILTNLKDYTTLHNGVKMPWFGLGVFKVEDGSEVIDSVKAAIKNGYRSIDTAAIYQNEEGVGQAIRESGVSREELFITSKVWNSDQGYETTLQAFETTLEKLGLEYLDLYLVHWPVKGKYTESWKALETLYKDGRVRAIGVSNFHIHHLQDVFEIAEIKPMVNQVEYHPRLAQEELHAFCKEHNIQLEAWSPLMQGQLLDNPTLQEIATKYNKSTAQIILRWDLQNEVVTIPKSIKEHRIIENANIFDFELSADDMKAIQALNEDRRVGPDPDNFNF

SEQ ID NO: 6727 - protein, 194 aa, Uncultured crenarchaeote
MDSRGYYAILGVSQSANFQEIKKSYRKLAKKYHPDKNKSPLAEETIKKINQAFEILSDRRKRKQYDLEASNIYDANDSTYEEKEENLSDQMQRNSYNFAKPESTSNLGFDNLLLDTIKSRFHILIEPSLCLAFGGCETIAPKVFVVDKSKHINPKARVQSETADTLDRIVLAAQACPTKAIKIIDRYTGNQIYP

SEQ ID NO: 6728 - protein, 518 aa, Zea mays
MAAITPPTQSEPSPQTGRPASSAAAAAKRGGGGAGAAGGPLMGKYELGRLLGHGTFAKVYHARHVDTGDNVAIKVLDKEKAVKSGLVPHIKREIAVLRRVRHPNIVHLFEVMATKTKIYFVMELVRGGELFSRVSKGRLREDTARRYFQQLVSAVGFCHARGVFHRDLKPENLLVDEQGNLKVSDFGLSAVAEQFRPDGLLHTFCGTPAYVAPEVLGRRGYDGAKADVWSCGVILFVLMAGYLPFHDKNIMAMYKKIYKGEFRCARWFSKDLTSLLMRILHTNPNTRITLPEIMESRWFKKGFKPVKFYIEDDQLHNVIDDEDGLLDMGPAGPVPPPLPPPPPPLPPPKVDGDESGSDSDSSISSCPASMLSDESQRPRGSLPRPASLNAFDIISFSRGFNLSGLFEEKGDEVRFISAEPMSDIITKLEDIAKLKSFKLRRKDWRICLEGTREGVKGPLTIGAEIFELTPPLVMVEVKKKAGDNEEYENFCDKELKPGMQHLVHHMVRAPSMLLTDAK

SEQ ID NO: 6729 - protein, 385 aa, Aspergillus fumigatus
MISARNFVAPARQCLRTTRVSSGFASHLSQLRGYASAADDRVAKFKGQKGPDGKYTVTLIEGDGIGPEIAQSVKDIFAAAKAPIKWEPVDVTPILKDGKTTIPEEAIKSVQKNYVALKGPLATPVGKGHVSLNLTLRRTFNLFANLRPCRSVAGYKTPYDNVDTVLIRENTEGEYSGIEHVVVDGVVQSIKLITREASERVLRFAFQYARSVNKKKVRVVHKATIMKMSDGLFLNTAREIAKEFPDIEFDAELLDNSCLKIVTDPTPYNDKVLVMPNLYGDILSDMCAGLIGGLGLTPSGNIGDECSIFEAVHGSAPDIAGKGLANPTALLLSSIMMLQHMGLHEHAARIQKATFDTLAEGKTLTGDLGGKAKTHEYAEAICKRL

SEQ ID NO: 6730 - protein, 363 aa, Pseudomonas aeruginosa UCBPP-PA14
MNSSPQANAAMRAAVWHGRHDIRVEDVPLPAEPPPGWVQIRVHWCGICGSDLHEYLAGPVFIPVEAPHPLTGLKDQCILGHEFSGEIVRLGNGVTGFALGQAVAADACQHCGTCYYCRHGLYNICENLAFTGLMNNGAFAEYVNVPANLLYALPAGFPSEAGALIEPLAVGMHAVKKAGSLLGQNVVVVGAGTIGLCTIMCARAAGAAQVIALEMSSARKAKALEVGASQVLDPSRCDALGEIRALTGGLGADVSFECIGNKHTAKLAIDAIRKAGKCVLVGIFEEPSEFNFFELVSTEKQLLGALAYNGEFADVIAFIADGRLDIAPLVTGRIGLEEIVERGFEELVNNKEHNVKIIVSPGG

SEQ ID NO: 6731 - protein, 180 aa, Triticum aestivum
MAGVGRNMVAPLLVLNLIMYLIVIGFASWNLNHFINGLTNRPGVGGNGATFYFLVFAILAGVVGAASKLAGVHHVRTWRGDSLATSASSSLVAWAITALAFGLACKEIHIGGYRGWRLRVLEAFVIILAFTQLLYVLALHSGLFGNQFGNHAGGYGAEHGGYGAGDPHNKGMGTGGVARV

SEQ ID NO: 6732 - protein, 284 aa, Glycine max
MTRLCSCRYYLKDAVLEGGIPFNKAYGMTAFEYHGTDPRFNKVFNKGMADHSTITMKKILETYTGFEGLKSLVDVGGGTGAVVNMIVSKYPTIKGINFDLPHVIEDAPSYPGVEHVGGDMFVSVPKADAIFMKWICHDWSDEHCLKFLKNCYEALPDNGKVIVAECILPVAPDSSLATKGVVHIDVIMLAHNPGGKERTEKEFEALAKGSGFQVKRVWSTPMRSFWHIIHQGKRVQRKSLRLFPKGKDSKVSELFAVLSTPPSWNFSKKFKFFGMNSCQAAFGF

SEQ ID NO: 6733 - protein, 293 aa, Methanocaldococcus jannaschii DSM 2661
MNQNNDFKCHIWFTEYHNNNVALSVRVKDILYREKSGFQEIEIIDTYDFGKALILDNTFQTTERDEFIYHELISHIPLFTHPNPRNVLVIGGGDGGTVREVVKHKSVETVDFVELDEKVIEACKKYMPKLSCEIDNEKVNLIITDGIKYVAETEKKYDVIIVDCPDPVGPAKGLFEKEFYKNVFKCLNDDGIMVQQSESPLYNLDLIQNICRYLKDAGFKIIMPYTYPMPTYPSGFWSFTLASKKYNPLEVDEARIKEALKDMETKYYDEEVHKGIFLAAPKFLKDAVKKALE

SEQ ID NO: 6734 - protein, 117 aa, Zea mays
  unsure (1)..(117): unsure at all Xaa locations
MATVDLEKLRMSGAGKAIGVLTSGGDAQGMNAAVRAVTRMGIYVGAKVFLIYEGYEGLVEGGENIKPANWLSGSDIMQLGGTIIGSARCKAFTTREGRLAAGYTLLRRGXTNLCVIG

SEQ ID NO: 6735 - protein, 289 aa, Neurospora crassa
MPETVTDMLSRRVKLSNGLSIPQIQLGLYMMSGPETTRAVRWALGAGYRGFDSAQWYYNEREAGQAILSFLSSPENTAGLTRKDVHFTSKLRDNSTNYDAVRASISKSVKASGLGYIDLFLLHSPLGGREARLTSWKAVEDAVLAGEVKMAGVSNYGVKHLDEVMSAPFKIKPLVNQIECHPFNTQPEIRAACEKYGIVIEAYAPLARGMRMKHPVLTAVAKKYGVTPAQVLVRWSVQHGFVTLPKSTKKERLVENADVGRFELAEEDMEKLDGLDEKLVTDWDPTDAD

SEQ ID NO: 6736 - protein, 304 aa, Kluyveromyces lactis
MVAPSQFKQLEKVGNGTYATVYKGLNKTTGVYVALKEVKLDSEEGTPSTAIREISLMKELKHDNIVRLFDVIHTENKLTLVFEFMDNDLKKFMDNRNKGNPHKGLEMDLVKYFQWQLLQGVAFCHENRILHRDLKPQNLLINNRGQLKLGDFGLARAFGIPVNTFSSEVVTLWYRAPDVLMGSRNYCTLIDIWSCGCILAEMIMGKPLFPGSNDEEQLKLIFDTMGTPVEQTWPQVTQLAKYNPLLPPHMPRDLKQLLQNNTEEVLDDNVVDLLHGLLQLNPDARLSAKDALNHPWFAEYNHAN

SEQ ID NO: 6737 - protein, 447 aa, Sinorhizobium meliloti 1021
MTHLLHRAIHAKLPVAVRGEGIRLFDAEGRAYIDASGGAAVSCLGHAHPDVLAALHAQLDRIAYAHTGFFTTEAAERLADRLVADAPDGLDHVYLVSGGSEAVEAALKMARQYFVEKGEPQRRHIIARRQSYHGNTLGALAAGGNEWRRAQFRPLLVETHHIDPCFAYRLQQAGESDTDYAARAAGQLEAKILELGADQVIAFVAETVVGATAGAVPPVADYLKRVRAICDKYGVLLILDEVMCGMGRTGTLHACEQDGVVPDLMTIAKGLGGGYQPVGAVLLSSAIFQAFSEGSGFFQHGHTYMGHPMAAAAGLAVQEVIRRDGLLENVVSMGDYLERCLVERLGNHHHVGDIRGRGLFRAVELVADRATKSPFDPGLKLNARIKKEAMARGLMVYPMGGTIDGQRGDHVLLAPPFILNREDVGQIVERLGDAVDAAIASLTKAAG

SEQ ID NO: 6738 - protein, 249 aa, Triticum aestivum
  unsure (1)..(249): unsure at all Xaa locations
RRRRGRRCHAQHPAGHQGAHGADQGGNDLKRIRFSRERFNKWQAQRWWAENYDKVMELYNVQRFNHQSVPLPTTPKSXDESSKEDSPVTPPLDKERVPRSLQRPTSGGGAMGYSSSDSLEHHSNHYCNGLHPHHGHQCYDSVGLASTPKLSSISGAKTETSSMDASMRTSSSPEEVDRSGELSVSISNASDQEREWVEEDQPGVYITIRALPGGIRELRRVRFSREKFSEMHARLWWEENRARIHEQYL

SEQ ID NO: 6739 - protein, 313 aa, Glycine max
MSTFMLKIFLLISIFQISFATRRLNELVQDQTQLLRYHNGPLLSGKISINLIWYGHFKPSQKAIVSDFITSLSPSSPHSTQPSVATWWKTTEKYYHHLSNTKKTSPLSIPLNKQILDENYSLGKSLTSKHLIQLASKGDHKNAINVVLTSADVAVEGFCTSRCGTHGSSSAGHAKNKNYKFAYIWVGNSEAQCPGQCAWPFHQPIYGPQSPPLVAPNNDVGIDGMVINLASLLAGTVTNPFGNGFYQGPAEAPLEAATACPGVYGKGAYPGYAGNLNVDSSTGASYNAHGANGRKYLLPALYDPATSSCSTLV

SEQ ID NO: 6740 - protein, 481 aa, Ralstonia eutropha JMP134
MNVFLNHIDGEWTACQSGRTFDNVNPADTGDIVGRFQASSAVDAQAAVAAAAAAFAGWKKTPVGKRAAVLNRAADHLEANADSIAAELTREEGKALTLARDEVLRSAQTLRFYAVEGQTFTGEVFPNDDPDQLVFSQREPLGVVTVIAPWNFPVSIPARKIAPALVTGNTVVFKPSSEAPLSGYRLAEALIKAGLPKGVLNFITGSAAEIGAAITEAPVVRAISFTGSSRAGEQIHRAVPLTTRTQMELGGKNPLIVMEDADLDRAVDLTIKGGFSLSGQACTGTSRVLVAESVKAAYTERLLAKVATLKVGSGMTAGMDLGPLASQKQMETVLRYIDIGKSEATLLCGGERLTGGEFDKGYYVAPTVFTDVTQQMRIAREEIFGPVIAILGFTDYADAIAKANDTEYGLAAAIVTSNPRYIHHFANDIEAGTVKINRTTTGNLVNAPFGGLKRSSTSTFRESGRTGLEFYTQIKTVYRGA

SEQ ID NO: 6741 - protein, 118 aa, Brassica napus
MVTGVKKVAKRGLIGGMSFAKEAGAINWFPGHMAAATRAIRSRLKLSDLVIEVRDARIPLSSANEDLQPQLSAKRRIIALNKKDLANPNVLNKWTHHFESKKQDCVAINAHSRSSVKK

SEQ ID NO: 6742 - protein, 376 aa, Populus tremula x Populus tremuloides
MASMYNPETSAVQDQQQNPTLLYDALYCSEENWVEEVREDWFQDELEGESYCSNNSNKLNTFPILLEQDLSWEDEELSSLFAKEEQNQLCKDLETNPSLARARCEAVEWILKVNEHYSFTALTAVLAVNYLDRFLFSVHLQKEKPWMAQLAAVSCLSLAAKVEETQVPLLLDFQVEDSKYVFEAKTIQRMEILVLSTLKWKMNPVTPISFLDYITRRLGLEHYLCLEFLKRCERMVLSILADSRSMPYVPSVMAAATMLYVIDNIEPSLAAEYQSQLLSILGIDKDKVEDCSKFLMEFALRDHFKLLSNKRKFCSLPGSPSGVVDVSFSSDSSNDSWSVASSVSSSPKPLSKKSRALQSLNNATTSDFSQHSSPVP

SEQ ID NO: 6743 - protein, 174 aa, Ustilago maydis 521
MSIVHLQSVEILNAEASFKDPYVFKITFECISPLQDDLEWRLVYVGSAGDEKYDQELDTCMVGPVPVGVNSFEFEAAAPSPSKIPPEDLLGVTVILLTASYRDQEFIRVGYYVNNAYESEELRENPPEKVDLTQVRREVLVSKPRVTRFNIKWDDSATASASTQQQGSAEGLTA

SEQ ID NO: 6744 - protein, 505 aa, Neurospora crassa
MGIIHEKAHYVVAVALVAFLIRAFVLSQWNTIKRNGERLKKPPNTLPLVGNGLQFLQSRWKLFSWFDACQRKFGYETVAISVPTLPPGVLIHDPRNLDYVFKNEGIFTKGNFVKGRTWDLFGNGIINAEGDFWKTQRKAGLSFLNTANLRVLTDVALPQYLSESISQLRSSTNGTVVDLQHMAMHADDEFTVSFDYASGGTAERFQNPLWFVTEIFLGAELRKSIAVVKNFGRHIVTKAVQDRQEKEFGEEEGKLDQISGSLIQSLLDAIQDEQMVADAALTYLSAGRDTTGQALTWTFYLLMRHPRVVAKIREEATQLLKEKNVTLTPDQFDSSLFNPVTMPYSMAVFYEVLRLYPPIPFEIRQCNEDVTLPDGTFLPKSSILVWCLWAMQRSKLTWGDDADEFRPERFLDGNKLISRSPSEFPVFYGGPRTCLGRKMAEAIAAQVIPTMACLFDFVPTSDEERTSKTSLTLPMEGGLPVTVKTLTGEEREKLVRIPEIRFSEH

SEQ ID NO: 6745 - protein, 177 aa, Zea mays
  unsure (1)..(177): unsure at all Xaa locations
VHASRRAGVGPETGVLVVGAAPIGVVSLLAARXFGAPRVVVVNVKEHRLPVARSLGANAAVRVSPRAKALANXVKRIGAAMGWDIEVSLDCAGLTKPMSRALKPTGPAGKLCLVGLAPTKLPWPLRRRRARKLNVVGCSGQDPWPCDHFCQGKWTQALITPVRLSQRDVEEASRSAP

SEQ ID NO: 6746 - protein, 258 aa, Glycine max
MAINHETWAFIFGLLGNVISFMVFLAPLPTFYQIYKKKSTDGFQSLPYIVALFSSMLWIYYALVKKDASLLLITINSFGCVIETIYLAIFLIYAPSKTRLWTIKLLLMLNVFGFGAMLLSTLYLTTGSKRLSVIGWICLVLNISVFAAPLCIMKRVIKTKSVEFMPFSLSFFLTINAVMWFFYGLLLKDYYIALPNTLGFLFGIIQMVLYLIYRNAKPQGLEEPTKVQELNGHIIDVVKPNHVTKNGPVPVIETASNV

SEQ ID NO: 6747 - protein, 106 aa, Glycine max
MELGSYSDQSKSTFSLVDEDHTFANSVRFTLNQDPRVTFCGYSIPHPSDNRVNIRVQTTGDPAREVLKDGCQDLMLMCQHVRSTFDNAMTDFKRTQTNTEQEMDTK

SEQ ID NO: 6748 - protein, 142 aa, Triticum aestivum
  unsure (1)..(142): unsure at all Xaa locations
MAPAVMASSATTVAPFQGLKSTAGLPVSRRSGSAGLSSVSNGGRIRCMQVWPIEGIKKFETLSYLPPLSTEALLKQVDYLIRSKWVPCLEFSKGWLRLPXEHNSSPXYYDGRYWXTMWKLPMFGCNDATQVLSKWRSQRRIP

SEQ ID NO: 6749 - protein, 143 aa, Glycine max
  unsure (1)..(143): unsure at all Xaa locations
MASSMISSPAVTTVNRAGAGMVAPFTGLKSMAGFPTRKTNNDITSIASNSGRVQCMHVWPPVDKKKFETLSYLPYLDNTQLAKEXEYLLKKEXIPYLEFECKHDFIYHKHNRSPGYYNKHYXTIVKLAIYNYTNTSQILRDLQ

SEQ ID NO: 6750 - protein, 433 aa, Ustilago maydis 521
MVLEATMLVLDNSEWMRNGDYTPTRWEAQADAVSMIFDAKTNSNPESEVGLMTMAGKSPEVLVTLTQDIGKILAALHRSKIVGNSDLTTGINVASLALKHRQNKNQRQRVVVFVGSPVEQTEEDLVKLGKKLKKNNIAVDIISFGEDVENEEKLSKFIEAVNSGDNSHLLSIPAGPQLLSDIILSSPVLQEEGGDSGAGPSGSGGGGNNFEFGVDPSMDPELAMALRLSLEEEQARQRAAEGSSGSQVPSLPTVSEGAENITAATGSAGPAAGLAGSGSMVPKGAESITGEGHNADDESEEAMLQKAIALSQAGEAKTNDEDVDMTSAEPSGGRRAVVAGQVEGEEDEEMDEDEAIARAIQMSLQEGDGQDESNVQIGVQSAYSRLDPMRLLPTSRVNVSWHLYTRAVEQSRRHVTANMAELHERTHLAAAHN

SEQ ID NO: 6751 - protein, 118 aa, Glycine max
LQKNVLISITYVQIQSVDQLLSKLSYIPSTLFLSEVSYVEFLDRVHVSENKLRAQGLWEVPHPWLNLLIPRSEIHDFAEEVFGNILKDTSNGPILIYPVNQTRCVLYMDTTTQTNEFN

SEQ ID NO: 6752 - protein, 300 aa, Aspergillus fumigatus
MPFHKLVKNSAYYSRYQTKYRRRREGKTDYYARKRLITQAKNKYNAPKYRLVVRFTNRDIITQIVYSEITGDKVFASAYSHELKRYGITQGLTNWAAAYATGLLLARRTLKKLGLDEQFTGVEEPDGEYKLTEAVETDDGTRRPFKAFLDVGLVRTSTGARVFGAMKGASDGGIFIPHSENRFPGYDIESEELDAETLRNYIFGGHVSEYMETLADDDEERYRSQFAKYIENEIDAGDLEEIYAEAHKAIREDPFKKDEDEKPKKSKEEWKAESKKYKKAKLSREEKKARVEQKIRELAA

SEQ ID NO: 6753 - protein, 66 aa, Glycine max
TYRIDLCFVEKSSQVSDVEFSEAEEILIAMVYNLVGERWSLIAGRIPGRTAEEIEKYWTSRFSTSQ

SEQ ID NO: 6754 - protein, 126 aa, Brassica napus
MARTGTAKNGAGQFFLATLLLWLVSVVFEIAFNLRTELLWVLGGGCFFQLVNCFVRSYLSRDPLFVNTSVSLLHSIITSASVVFILVNQCLAKGVDEMFDHSELVGGSWRWAYQALCFSCGYFAYD

SEQ ID NO: 6755 - protein, 490 aa, Photorhabdus luminescens subsp. laumondii TTO1
MTNNVNTELLRQQAYINGQWVDADNQATFKVTNPANGEVIAHVSNMGAAETERAIAAAQQALPAWRTMTAKQRSQILQRWFQLMMANQPALAELLSREQGKSQTEAMGEIAYGASFIEWFAEEGKRTYGETIPSPLPGRRIVTIKQPIGVVAAITPWNFPNAMITRKVGPALAAGCTVILKPASETPLSALALAALAEQAGIPAGVFNVVTGIDAKAIGGAMTQSPIVRKLSFTGSTRVGKLLMAQSADTVKKLSLELGGNAPFIVFDDANIDAAVQGALIAKFRNSGQTCVCANRILVQETIYDTFAERLAQAVNQLQVGPASDAKSQQGPLINQAAVDKVEEHISDAISHGARILAGGKPHALGGLFFEPTVLADVNKSMLISQEETFGPIAPLFKFRDEAEAIHLANETEFGLAAYFYSRDIGRIYRVAEALESGMVGINEGLISNEAAPFGGIKQSGLGREGSRYGIEDYLEVKYLCFGGIEDTGV

SEQ ID NO: 6756 - protein, 488 aa, Photorhabdus luminescens subsp. laumondii TTO1
MTVISHWINGKNISSKTYFETTNPATGEVLAEVASGGQEEVDQAVAAAKAAFPKWADLPMKERARLMRRLGELIDENVPEIAAMETKDTGLPIHQTQNVLIPRASHNFNFFAEICQQMNGRTYPVDDKMLNYTLVQPVGVCALISPWNVPFMTATWKVAPCLALGNTAVLKMSELSPLTANRLGELALEAGIPAGVLNVVQGYGATAGDALVKHHDVRAVSFTGGTATGRQIMKNAGLKKYSMELGGKSPVLIFEDADIERALDAALFTIFSINGERCTAGSRIFIQQSIYPEFIKRFAERANRLRVGDPQDPTTQIGALISKPHWEKVSGYIRLGIEEGATLLAGGPDKPIDLPAHLKDGHFLRPTVLADVDNRMRVAQEEIFGPVACLLPFKDEAEGLRLANDVEYGLASYLWTQDVSKVLRLARNIEAGMVFVNTQNVRDLRQPFGGVKASGTGREGGEYSFEVFAEMKNVCISMGDHPIPRWGV

SEQ ID NO: 6757 - protein, 490 aa, Escherichia coli
MSRMAEQQLYIHGGYTSATSGRTFETINPANGNVLATVQAAGREDVDRAVKSAQQGQKIWASMTAMERSRILRRAVDILRERNDELAKLETLDTGKAYSETSTVDIVTGADVLEYYAGLIPALEGSQIPLRETSFVYTRREPLGVVAGIGAWNYPIQIALWKSAPALAAGNAMIFKPSEVTPLTALKLAEIYSEAGLPDGVFNVLPGVGAETGQYLTEHPGIAKVSFTGGVRSGKKVMANSAASSLKEVTMELGGKSPLIVFDDADLDLAADIAMMANFFSSGQVCTNGTRVFVPAKCKAAFEQKILARVEPIRAGDVFDPQTNFGPLVSFPHRDNVLRYIAKGKEEGARVLCGGDVLKGDGFDNGAWVAPTVFTDCSDDMTIVREEIFGPVMSILTYESEDEVIRRANDTDYGLAAGIVTADLNRAHRVIHQLEAGICWINTWGESPAEMPVGGYKHSGIGRENGVMTLQSYTQVKSIQVEMAKFQSIF

SEQ ID NO: 6758 - protein, 294 aa, GIBBERELLA ZEAE PH-1
MSNEEITHPTIVDGWFREISDMWPGHAMTLRVEKVLVHEKSKYQDVLIFKSTDFGNVLVLDNVIQCTERDEFSYQEMIAHLALNSHPNPKKVLVIGGGDGGVLREIVKHDCVEEATLCDIDEAVIRLSKEHLPSMACGFDHPKSKTHVGDGFKFLNDYKNEFDVIITDSSDPDGPAEALFQKSYFQLLHDALREGGVITTQGSESPWLHLPLIARLKKDCGAIFPVAEYAYTTIPTYPSGQIGFMVCSKDPKADVKNPIRSWTKEEEDEKLRYYSSEIHKASFVLPKFAAKALE

SEQ ID NO: 6759 - protein, 276 aa, Bacillus subtilis subsp. subtilis str. 168
MSELWYTEKQTKNFGITMKVNKTLHTEQTEFQHLEMVETEEFGNMLFLDGMVMTSEKDEFVYHEMVAHVPLFTHPNPEHVLVVGGGDGGVIREILKHPSVKKATLVDIDGKVIEYSKKFLPSIAGKLDDPRVDVQVDDGFMHIAKSENQYDVIMVDSTEPVGPAVNLFTKGFYAGIAKALKEDGIFVAQTDNPWFTPELITNVQRDVKEIFPITKLYTANIPTYPSGLWTFTIGSKKYDPLAVEDSRFFDIETKYYTKDIHKAAFVLPKFVSDLIK

SEQ ID NO: 6760 - protein, 481 aa, Thermosynechococcus elongatus BP-1
MKAMSKLKLKRARRQKRPLLNLDWQPNFRWRSPALVACIPLALIIVAVWGVAAQAQDKPLTPEDVQGVLNTIWVLVAAILVIFMNAGFGMLETGFCRQKNAVNILAKNLIVFALATLAYWAIGYSFMFGTEGNAFIGWGGFFLSSEDPATYGLNPFPKGLPISVAFLFQAAFAGTAATIVSGAVAERIKFVDFLIFSLLLTGISYPITGHWVWGGGLLSSIGFLGENVAFKDFAGSTVVHAVGGWSALMGAAFLGPRIGKYAADGTPQALPGHNMGFAMLGCLILWIGWFGFNPGSQLAADEAVPYIAVTTNLAAAAGGVAATITAWLAIGKPDLSMIINGILAGLVSITAGCAGVSYWSAVIIGTIGGVIVVYSVLFFDRIKIDDPVGATSVHLVCGTWGTLAVGLFDKELGLFSGYGVTQLIAQIIGILTIGGFTVLLTSIFWLALKQTLGIRVSEEEEIKGLDIGEHGMEAYSGFLKE

SEQ ID NO: 6761 - protein, 422 aa, Staphylococcus aureus subsp. aureus COL
MTAEKITQGTEGLNVPNEPIIPFIIGDGIGPDIWKAASRVIDAAVEKAYNGEKRIEWKEVLAGQKAFDTTGEWLPQETLDTIKEYLIAVKGPLTTPIGGGIRSLNVALRQELDLFTCLRPVRWFKGVPSPVKRPQDVDMVIFRENTEDIYAGIEFKEGTTEVKKVIDFLQNEMGATNIRFPETSGIGIKPVSKEGTERLVRAAIQYAIDNNRKSVTLVHKGNIMKFTEGSFKQWGYDLALSEFGDQVFTWQQYDEIVENEGRDAANAAQEKAEKEGKIIIKDSIADIFLQQILTRPAEHDVVATMNLNGDYISDALAAQVGGIGIAPGANINYETGHAIFEATHGTAPKYAGLNKVNPSSVILSSVLMLEHLGWQEAADKITDSIEDTIASKVVTYDFARLMDGAEEVSTSAFADELIKNLK

SEQ ID NO: 6762 - protein, 373 aa, Staphylococcus aureus subsp. aureus COL
MAELQRGLEGVIAAETKISSIIESQLTYAGYDIDDLAENAQFEEVIFLLWNYRLPNEEELAHLKGKLNQYMTLNPRVYTHFEEYVTDHVHPMTALRTSLSYIAHFDPDAENESDENRYERAMRIQAKVASLVTAFARVRQDKEPLKPNPDLSYAANFLYMLRGELPTDIEVEAFNKALILHADHELNASAFTARCAVSSLSDMYSGIVAAVGSLKGPLHGGANEQVMTMLSEIGSIENVDAYLDEKFANKDKVMGFGHRVYKDGDPRAKYLREMSRQITKDAGREELFEMSVKMEKRMAEEKGLIPNVDFYSASVYHCMEIPHDLFTPIFAVSRSAGWIAHILEQYKDNRIMRPRAKYIGETNRKYIPLEERK

SEQ ID NO: 6763 - protein, 407 aa, Zea mays
  unsure (1)..(407): unsure at all Xaa locations
MEVGDARNGSAAAALTKGSADDAARKPLPPCCVKAKARVPETEANCHDTVVSGWFTEPRSRFGKTSKVQYFNNPMWPGEAHSLKVEKILFQGKSPYQEILVFESSTYGNVLVLDGIVQLTDKDECAYQXNGCYFATEQIELKDVLPTLRLLMSSNFMGSXPYDISLLTDXVLVVGGGDGXGVLREIARHDSVETIDICXKEFFPNLSIGFKDPRVRLHXGDAVDFLRNSPEGKYDAIIVDSSDPIGPAQALVEKPFIQTIARALKPGGVLCNLAESMWLHTHLIQDMLAICRQTFKGAVHHAWTSVPTYPSGVIGFLLCAKEGRAVNFLTPVNPIEKIEGTAKAGRELRFYNSEIHRAAFVLPTFVRRELEAYTTPSASAENEKPKESVSEPQKIKILSNNAILTAT

SEQ ID NO: 6764 - protein, 322 aa, Staphylococcus aureus subsp. aureus COL
MKKIAVLTSGGDSPGMNAAVRAVVRTAIYNEIEVYGVYHGYQGLLNDDIHKLELGSVGDTIQRGGTFLYSARCPEFKEQEVRKVAIENLRKRGIEGLVVIGGDGSYRGAQRISEECKEIQTIGIPGTIDNDINGTDFTIGFDTALNTIIGLVDKIRDTASSHARTFIIEAMGRDCGDLALWAGLSVGAETIVVPEVKTDIKEIADKIEQGIKRGKKHSIVLVAEGCMTAQDCQKELSQYINVDNRVSVLGHVQRGGSPTGADRVLASRLGGYAVDLLMQGETAKGVGIKNNKIVATSFDEIFDGKDHKFDYSLYELANKLSI

SEQ ID NO: 6765 - protein, 512 aa, Glycine max
  unsure (1)..(512): unsure at all Xaa locations
EVRREKWQSPLPSRQLFTKMESGKFPLLNKXRFPIINPATEDIIGHIPAATKEDVDLAVDAAKRAFSHNKGKDWSSAPGSVRARYLRAIASKITEKKDELGKLEAIDCGKPLDEALADLDDVIGCFNYYAELAEGLDAKQNAPVSLPMETFKSYVLKEPIGVVALITPWNYPLLMATWKVAPALAAGXTAILKPSELASVDCLELSEICXEVGLPPRVLNIVTGLGXHEAGAPLAAHPDVDKIAFTGSSATGSKIMTAAAQLIKPVSLELGGKSPIIVFEDVDLDKAAEWTIFGCFWTNGQICSATSRLIVHESIATEFLNRIVKWXKNIKISDPLEEGCRLGPIVSEGQYEKILKFISNAKSEGATILTGGSRPEHLKKGFFVEPTVITDVTTSMQIWREEVFGPVLCVKTFSTEEEAIDLANDTVYGLGSAVISNDLERCERITKAFKAGIVWINCSQPCFTQAPWGGIKRSGFGRELGEWGLDNYLSVKQVTQYISDEPWGWYQSPSRL

SEQ ID NO: 6766 - protein, 498 aa, Hypericum androsaemum
MEFLLITQCSLLFVATYLLVNHVILRGRSKNNGSTKLPPGPRPLPIIGNLLALRDKPHKSLAKLARVHGPLVTLKLGQVTTVVVSSPATAREILQKHDATLSNRYIIDAIRAQGHHEAGLAWVPVGPTWRKFRKVCYSHIFTNQKLNSSQHVRQRTIQQLLAEARESCRVGEAMDVGKAAFRAALSSLSISVMSLDLADAASDTAREFKELARCIMNDVGEPNLADYFPVLKRFDPQGVRGRVEISFGRILDLFGSIIADRMEKRGADEDILDTLLTTHDENPELVEINDIKHLLLDLFVAGTETTSSTLEWAMAELLHKPTTMAKAKAELEQIIGKGNSIDQESEVSRLPYLQAVIQETLRLHPAVPLLLPRRAGEEVHVSGFTIPKDAQVLVNVWAMGRDPEVWEDPCSFTPERFLGSSIDVIGTCFELIPFGAGRRICPGLPLAMRMLQMMLGNLLLSFDWKLPDGVTPECMDMEDRFGITLQKAQPLLAIPLSL

SEQ ID NO: 6767 - protein, 164 aa, Zea mays
MDAVMFGLETPLMAALQHLLDVPDGDAGAGGDNKTGSGGSATRTYVRDARAMAATPADVKELPGAYAFVVDMPGLGTGDIRVQVEDERVLVVSGERRREEREDDAKYLRMERRMGKFMRKFVLPDNADVDKVAAVCRDGVLTVTVEKLPPPEPKKPKTIEVKVA

SEQ ID NO: 6768 - protein, 391 aa, Zea mays
  unsure (1)..(391): unsure at all Xaa locations
MELEATMICIHNSEWMRNGDYAPSRFQAQADAVNLICGAKTQSNPENTVGVLVTPTSDLGKILACMHGLEVGAEANLAAAIQVAQLALKHRQNKRQQQRIIAFIGSPVKYDKKVLETIGKKLKKNNVALDIVDFGESDDEKPEKLEALIAAVNSSDSSHIVHIPPGENALSDVLLSTPIFTGEEGGSGFAASAAAAAATGASGFEFGVDPNVDPELALALXRLSMEEERARQEAIAKKAAEDTSNTEHNNVPSSNSDSVMAEGEPASNAAAGDKEQPKDDDDLLQQALAMSMEGXASGSAAVTDSAMAEAGAVDPDLALALQMSVQDANMSSDTDMSKVFEDRTFVSSILNSLPGVDPNDPSVKDLLASLHSQGEQEKKEDTSDKTEDDKN

SEQ ID NO: 6769 - protein, 171 aa, Zea mays
  unsure (1)..(171): unsure at all Xaa locations
MPDSDNDSGGPSNAGGELSSPREQDRFLPIANVSRIMKKALPANAKISKDAKETVQECVSEFISFITGEASDKCQREKRKTINGDDLLWAMTTLGFEDYVEPLKHYLHKFREIEGERAAASAGASGSQQQGELPRGAANAAGYAGXGAPGSGGMMMMMMGQPMYGGLPPQQ

SEQ ID NO: 6770 - protein, 338 aa, Leuconostoc mesenteroides
MEALVLTGTKKLEVKDIDRPKVLPNEVLIHTAFAGICGTDHALYAGLPGSADAVPPIVLGHENSGVVAEIGSAVTNVKVGDRVTVDPNIYCGQCKYCRTARPELCENLSAVGVTRDGGFEEFFTAPASVVYPIPDNVSLKSAAVVEPISCAVHGIQLLKVTPYQKALVIGDGFMGELFVQILQAYGIHQVDLAGIVDEKLAMNKEKFGVKNTYNTMKGDKIPEGEYDVIIEAVGLPQTQEAAIEASARGAQVLMFGVGGPDAKFQMNTYEVFQKQLTIQGSFINPNAFEDSLALLSSGKLNVEALMSHELDYKTVDDFVNGKLGVVSKAVVKVGGEEA

SEQ ID NO: 6771 - protein, 220 aa, Zea mays
MPVQRSQRQRRILSFVGGLDLCDGRYDTPCHSLFRTLDGAHHDDFHQPNFATAAIAKGGPREPWHDIHCRLEGPVAWDVLYNFEQRWRKQGGKDLLIQLRDLADEIIAPSPVTFPNDPETWNVQLFRSIDGGAAFGFPDTPDDATRAGLVSGKDQIIDRSIQDAYIHAIRRARSFIYIENQYFLGSSYCWKPDGIKPEDIGALHVIPKELSMKVVSKIEA

SEQ ID NO: 6772 - protein, 316 aa, Ustilago maydis 521
MAGRIREVWAENLEVEMALLRDTIEKYPYVAMDTEFPGIVARPIGTFKGSSDYHYQTLRCNVDLLKLIQLGITLCDENGNLPPDVCTWQFNFRFSINDDMCAPDSLDLLTKAGLDFDRHERMGIDVEHFGELLITSGLALFDDVKWVSFHSGYDFGYLLKVVTCSPLPAQESDFFALLRVWFPCIYDIKFLMRSCKTLKGGLQDVADDLQVSRIGQQHQAGSDSLLTATTFFKMRQKYFDGSIDDSKYLGCLYGFSSSSSHVNGMVHYSQGRPVSVQSFHDASAVPRSVSGGYAAGGYGSNFGSPFKSTLSASTER

SEQ ID NO: 6773 - protein, 122 aa, Bdellovibrio bacteriovorus HD100
MSLTNDQIVEALSAKTVLEIAELVKTLEEKWGVSAAAPVAAAAAGPAAAVEEKTAFDVILVDAGANKINVIKEVRGLTGLGLAEAKALVEAGNKAVKEGATKEDAEKIKKALEAAGAKVTVK

SEQ ID NO: 6774 - protein, 358 aa, Ralstonia eutropha JMP134
MSKFHELTVASVTRETRDAVAVTFAVPEDLADTYRYVQGQHLTLRAGIGGEDVRRSYSICSAVQDRRLRVAIKRVDGGMFSNWANDALQPGMTLEVMPPSGHFHVPLSDTHSKHYVAFAAGSGITPMLSIIKTTLMTEPDSRFTLFYGNRASSSVLFKEELEDLKDTYLERFNLVFILSREQLDIDLFNGRIDGEKVRALLRHWVRPQDIDVAFICGPHSMMEEVSQALQENGVDKARIKRELFATSIPAARPAAHAHKQLGQQQCEVTVIQDGRTRQFTLEKNKETILDAALAQGIELPYSCKGGVCSTCRCKRIEGEVDMDVNFALEDYEVARGFILSCQSYAVTDKLVIDFDQET

SEQ ID NO: 6775 - protein, 181 aa, Zea mays
MASSMFSSTAVVTSAAQATMVAPFTGLKSSASFPVTRKANNDITSITSNGGRVSCMKVWPPIGKKKFETLSYLPDLSDVELAKEVDYLLRNKWIPCVEFELEHGFVYREHGNTPGYYDGRYWTMWKLPLFGCTDSAQVLKEVEECKKEYPGAFIRIIGFDNTRQVQCISFIAYKPPSFTEA

SEQ ID NO: 6776 - protein, 400 aa, Zea mays
  unsure (1)..(400): unsure at all Xaa locations
RLELEPLGCQGMGIPVGKLSLYTALGGVRPSACLPITLDVGTNNEELLNDEFYIGLRQRRATGQEYTDFLQEFMSAVKQNYGEKVLIQFEDFANHNAFDLLARYGTTHLVFNDDIQGTASVVLAGLIAAQTLLGGSLADHTYLFLGAGEAGTGIAELIALEISRQTKAPIEECRKKIWLVDSKGLIVSTRKESLQHFKKPWAHEHKPLSNLLDAVNAIKPTVLIGTSGKGQTFTKDVVEAISSFNERPIILALSNPTSQSECTAEQAYTWSKGQAVFATGSPFDPVEYNGKIHVPGQANNAYIFPGFGLGVVMSGAIRVHDDMLLAASEALAQQVTEENFEKGLIYPPFSNIRKISAHIAASVAAKXAYELGLASRRPRPKDLVKYAESCMYSPIYRNYR

SEQ ID NO: 6777 - protein, 361 aa, Saccharomyces cerevisiae
MTTAVRLLPSLGRTAHKRSLYLFSAAAAAAAAATFAYSQSQKRSSSSPGGGSNHGWNNWGKAAALASTTPLVHVASVEKGRSYEDFQKVYNAIALKLREDDEYDNYIGYGPVLVRLAWHTSGTWDKHDNTGGSYGGTYRFKKEFNDPSNAGLQNGFKFLEPIHKEFPWISSGDLFSLGGVTAVQEMQGPKIPWRCGRVDTPEDTTPDNGRLPDADKDADYVRTFFQRLNMNDREVVALMGAHALGKTHLKNSGYEGPWGAANNVFTNEFYLNMLNEDWKLEKNDANNEQWDSKSGYMMLPTDYSLIQDPKYLSIVKEYANDQDKFFKDFSKAFEKLLENGITFPKDAPSPFIFKTLEEQGL

SEQ ID NO: 6778 - protein, 487 aa, Arabidopsis thaliana
MGSKLKLYPLLNHSSVFHPDSRYQSAPTMEEEQQQLRVLFAKYEMGRLLGKGTFGKVYYGKEITTGESVAIKIINKDQVKREGMMEQIKREISIMRLVRHPNIVELKEVMATKTKIFFIMEYVKGGELFSKIVKGKLKEDSARKYFQQLISAVDFCHSRGVSHRDLKPENLLVDENGDLKVSDFGLSALPEQILQDGLLHTQCGTPAYVAPEVLRKKGYDGAKGDIWSCGIILYVLLAGFLPFQDENLMKMYRKIFKSEFEYPPWFSPESKRLISKLLVVDPNKRISIPAIMRTPWFRKNINSPIEFKIDELEIQNVEDETPTTTATTATTTTPVSPKFFNAFEFISSMSSGFDLSSLFESKRKLRSMFTSRWSASEIMGKLEGIGKEMNMKVKRTKDFKVKLFGKTEGRKGQIAVTAEVFEVAPEVAVVELCKSAGDTLEYNRLYEEHVRPALEEIVWSWHGDNHNNNIVKSNGNYVSDENSGSDC

SEQ ID NO: 6779 - protein, 71 aa, Triticum aestivum
MAPRQVGIVKSFNDEKGFGLITPAGGGADLFVHFRNIQASGFKSLKEGQQVTFVAVQGQKGMQANEVITEE

SEQ ID NO: 6780 - protein, 101 aa, Brucella melitensis 16M
MLPDDLLSINSIHRDVCEACGLNSYYVTKDIPMATGTVKWFNTTKGFGFIQPDQGGTDVFVHISAVQRAGLTTLDEGQKVSYEIVQDRRSGRSSADNLVAA

SEQ ID NO: 6781 - protein, 409 aa, Staphylococcus aureus subsp. aureus COL
MSLRDEALEMHKRNQGKLEVKPNVKVTNKEELSLAYSPGVAEPCKDIYEDKRKVYDYTIKGNTVAVITDGTAVLGLGNIGPEASIPVMEGKAVLFKSFAGINGVPIALNTTDTEEIIKTVKLLEPNYGGINLEDISAPRCFEIEERLKKETNIPVFHDDQHGTAIVTLAGLVNALRVVNKDIAKIKVVLNGAGAAGIAIVKLLYAYGVRNMVMCDSRGAIFEGRSYGMNPTKDVVAKWTNKDKIEGSLEEVVKDADVFIGVSVANALSQDMVKSMADNPIIFAMANPNPEIIPDDAKAAGARVVGTGRSDYPNQINNVLAFPGIFRGALEVEATHINEEMKKAAVEAIADLIDSSELNEDYCIPGPFDKRVAPSVARNVAKAAMESGVARIEVDPQDVYDKTMKLTDLQ

SEQ ID NO: 6782 - protein, 390 aa, Crocosphaera watsonii WH 8501
MATLLEQLREFTVVVADTGDIQAIETFTPRDATTNPSLITAAAQMPQYQSIVDDTLKTARKELGKDADESAVVTLAFDRLAVAFGLKILEIIPGRVSTEVDARLSYDTEATLEKARYLISEYEKAGVSRDRILIKIASTWEGIKAAEVLEKEGIHCNLTLLFGMHQAVACAEANVTLISPFVGRILDWYKKETGKEYAPTEDPGVMSVTTIYNYYKKFGHKTEVMGASFRNIGEICELAGCDLLTISPKLLDQLNSTEETLPRKLDPEAAAKMDIAKIAMDKAIFDKMHQEDKMAYEKLDEGIKGFTKALETLEEMLKERLTRIEGETRVNNAAADIFRVYDLDGDGFITREEWAGTDVVFDAIDINHDGKITPEEMAAGLGAAICLVEA

SEQ ID NO: 6783 - protein, 449 aa, Centaurium erythraea
MDVIFPLLVAFITWAIASSLTFRRFGRLPPGPFPVPVIGNIHQLGKHPNQSLAKLSKIYGPLMSLKLGTQTAIVASSSTVVREILQKHDQVFSSRTIPSALHAHDHHKFSMALLPASSRWRHLRKITKEQMFSVQRLDESQGLRQDKLKELRDYLHSCCVTGQAVNIGEAAFTTTLNLMSCTLFSVNFASFDSKFSDELKRDICAFVQVIAAPNLADFSPVLRHVDPQGLLKRTKTYMQKVFDSFEDIITKRLQERGTSQQDSLRRHDLLEALLDEMEKNDSAFTINDMKHLILDLFIAGADSTSSTTEWGMAELLHNPEKMEKAKAELNEVIGQKNLVEESDISRLPYLQAVVKEVFRLHPPGPLLVPHKADADVEIDGYVVPKNANVLVNVWALGRDSSSWADPEAFMPERFLDNEIDVKGQHFELIPFGAGRRMCPGLPLSYRMLH

SEQ ID NO: 6784 - protein, 143 aa, Glycine max
MAMAYKMATEGMNIKEECKRWFTEMKWKKVHRFVVYKIDERTRAVLVDKVGGPGEGYDELVAALPGDDCRYAVFDFDFVSVDNCQKSKIFFIAWSPAASRIRAKILYATSKQGLRRVLEGVHYEVQATERSEMGFDVIRERAQ

SEQ ID NO: 6785 - protein, 214 aa, Triticum aestivum
  unsure (1)..(214): unsure at all Xaa locations
MAPTVMAXXXTSVXPFQGLKXTAXLPVSRRSNGASXXSXSNXGRIRCMQVWXXEGIKKFETLSYLXPXNTEALLKQXDYLIXXKWVPCLEXSKVGFIFREHNASPGYYYGRYWTMWKLPMFXCTDATQVINEVEXXKKEXPDAYVRIIGFDNMRQVXXVSLIXFKPXGCEERGLKQNSPGQHIKVFAGFFDFWGCFLSHLFLVPKKNIGKGPFG

SEQ ID NO: 6786 - protein, 465 aa, Haloarcula marismortui ATCC 43049
MRLHWHRRDLRATDNAGLAAATPSDPVVPVFIFDTAVLDHAGPPRVAFMLDALDSLREWYRDKGSDLVVAEGDPTSVLPELAAQHGAEKVTWGKDYSGLARERDAAVRQALDDADVAREAVQNAVLHEPGEITTNDGDPYSVFTYFGRKWHDREKAAPYDPPSADTLADVDGDALPTLADLGFEEPEADVPAAGTEEARALLDDFLDENVYEYEERRDFPADECTSRLSAHLKFGTIGIREVYDRTQAAKEGTGGDRRDSVREFQSQLAWREFYTQVLFAHPHVVSSNYKSYENPIEWENDEELLQAWKDGDTGYPIVDAGMRQLRDEAYMHNRVRMIVASFLTKDLLIDWRHGYEWFREKLVDHDTANDNGGWQWAASTGTDAQPYFRIFNPMTQGEDYDPNAEYIKEYVPELRDAAPEIIHDWNDCSLTQRRSAAPEYPDPVVDHSERREEALAMFERARGDD

SEQ ID NO: 6787 - protein, 466 aa, Arabidopsis thaliana
MNSGDVFILSRSKGHDMLAPFTAGWQSADLDPLVIAKSEGSYVYDDTGKKYLDSLAGLWCTALGGNEPRLVSAAVEQLNTLPFYHSFWNRTTKPSLDLAKVLLEMFTANKMAKAFFTSGGSDANDTQVKLVWYYNNALGRPEKKKFIARKKSYHGSTLISASLSGLPPLHQNFDLPAPFVLHTDCPHYWRFHLPGETEEEFSTRLAKNLEDLIIKEGPETIGAFIAEPVMGAGGVIPPPATYFEKVQAVVKKYDILFIADEVICAFGRLGTMFGCDKYNIKPDLVTLAKALSSAYMPIGAILMSQEVADVINSHSSKLGVFSHGFTYSGHPVSCAVAIEALKIYKERNIPEYVAKVAPRFQDGVKAFASGSPIIGETRGTGLILGTEFVDNKSPNEPFPPEWGVGAFFGAECQKHGMLVRVAGDGILMSPPLIISPEEIDELISIYGKALKATEEKVKELKAQHKK

SEQ ID NO: 6788 - protein, 148 aa, Oryza sativa
DGLVGIPKCGKAIGALKGHLDYSFASAWHPDGNILATGSQDTTCRLWDIRNLSESVAVLGGRMGSIRCIKFSSDGRFLATAEPVDFVHIYDSYADYGRSHEIDLFGEIAGLSFSPDAEALYVGIADPTYGGLIEFNRRHQHHYLNCMW

SEQ ID NO: 6789 - protein, 316 aa, Buchnera aphidicola str. Bp (Baizongia pistaciae)
MNQLECLKKYTDIVVDSGDLVSINKFKLGDVTTNPSLIRQVMSLQKYQYIIYDSIRYAKKKGGSHKFKLENAIDKVSVILGSEILKNISGKISTEIDSRLSFNTNLCIERAKKLISMYEEHDIHRDRVLIKLAATWESVSAAKELKKENIQSNLTLLFSFAQAKICAEAGVFLISPFVGRIYDWYKSKSLIKSAMIDDDPGVNAVRKIYQYYKEYGYHTIIMGASFRNVDQVLALSGCDRLTISPNLLHKLQLSDDLVIRKLIPPKHKKLQPVCMSKSEFCWFHNEDAMAVEKLSEGIRQFGKDQQELENIINNNF

SEQ ID NO: 6790 - protein, 250 aa, Zantedeschia aethiopica
MGKSYPAVSEEYQTAVGKAKRKLRALIAEKNCAPLMLRLAWHSAGTYDVSTRTGGPFGTMRFQAELAHGANNGIDIAVRLLEPIKEQFPILSYADFYQLAGVVAVEVTGGPEIPFHPGREDKPAPPVEGRLPDATKGSDHLRQVFSQQMGLNDQDIVALSGAHTLGRCHKERSGFEGAWTTNPLIFDNSYFKELLSGEKEDLLQLPSDKALLSDPVFRPLVEKYAADEDAFFADYTEAHLKLSELGFAEC

SEQ ID NO: 6791 - protein, 432 aa, Dechloromonas aromatica RCB
MTTERKATLSIDGQAPVDFSIMSPTHGNDCIDIRTLGGKTGLFTYDSGFLSTASCKSKITFIDGDVGQLLYRGYPIEQLAENCNFLEVTYLLKNGELPNAKQKADFESTIKNHTMVHEQLSKFFSGFRRDAHPMAVMTGVVGALSAFYHDAMDFSDAEHRNVSFNRLVAKMPTIVAMAYKYNTGAPFMYPDNSLDYTANFMRMMFGNPCEKYVPNPVLVRALDTIFTLHADHEQNASTSTVRLAGSSGANPFACIAAGIACLWGPAHGGANEACLQMLEEIGDVSRVPEYIARAKDKNDSFKLMGFGHRVYKNFDPRAKLMRQVCNEVLAELGLENDRLFKLAMELERIALEDPYFVEKKLYPNVDFYSGIVQKAIGIPTEMFTCIFALARTVGWMTQWEEMISDPEYKIGRPRQLYMGAAKRDVVPLAQRG

SEQ ID NO: 6792 - protein, 202 aa, Glycine max
  unsure (1)..(202): unsure at all Xaa locations
MSGRVSGKVKWFNDQKGFGFITPDDGSEELFVHQSQIKSDGFXRSLAEGESVEFAIESESDGRAKAVDVTGPDGASVQGTRRGGDGGRSYGGGRGGGGGGYGGGGGYGGGGGYGGGGGYGGGGRGGGGGACYNCGESGHLARDCSQGGGGDRYGGGGGGGGRYGGGGGGRYGGGGGGGGGGGSCYSCGESGHFARDCPSSAR

SEQ ID NO: 6793 - protein, 636 aa, Zea mays
FHTGDWKIDESPVDGKKFDRQALEELSKEGVTLMMSDSTNVLSPGRSISESVVAGSLLRHISEAKGRVITTQFASNIHRIGSIKAAADLTGRKMVFVGMSLRTYLEAAFKDGKAPLDPSTLVKVEDMDAYAPKDLLVVTTGSQGEPRAALNLASYGGSHALKLSKEDVLLYSAKVIPGNETRVMKMMNRLTDLGPKIIMGKDSGLHTSGHAYREELEEVLRIVKPQHFLPVHGELLFLKEHELLGRSTGIRHTTVIKNGEMLGVSHLRNRRVLSNGFVSLGKEDLQLMYSDGDKAFGTSTDLCVDERLRIASDGIIFVSMEIFRPQKEHGLAQSGLKGKFKITTRCLWLDNGRLLDALYKAAHAALSSCPVNCPHSHMERMVAEILRKMVRKYSGKRPDVIAVATENTTAGFSEHLDTKASGNFGPSSATSHLSRSPATSLEGSYKTHPDNPEVDAEEILPETVRTTPDDATTSSNGEALFSSDLHQPKTLEHFWESFKSPTAVKIARIVNGGDKQNFGKIGIMGQDSLIQSAPAPVKSSKRNKWKPEEIKSLIQMRGEMNEKFQSVKGRMVLWKEISDTMLNQGVSRTPAQCKSLWTSLVQKYEESKDTESMKTWPYFSAMDKILSQQGEMATKG

SEQ ID NO: 6794 - protein, 370 aa, Senecio vulgaris
MAESNKEAIDSARSNVFKESESLEGTCAKIGGYDFNNGIDHSKLLKSMVSTGFQASNLGDAMIITNQMLEWRLSHDEVPENCSEEEKKNRESVKCKIFLGFTSNLISSGVRETICYLTQHRMVDVLVTTTGGIEEDFIKCLASTYKGKFSLPGADLRSKGLNRIGNLIVPNDNYIKFEDWIIPIFDQMLIEQKTQNVLWTPSRMIARLGKEINNETSYLYWAYKNNIPVFCPSITDGSIGDMLYFHSVSNPGPGLVVDIVQDVIAMDNEAVHASPQKTGIIILGGGLPKHHICNANMMRNGADFAVFINTAQEYDGSDSGARPDEAVSWGKISSTGKAVKVHCDATIAFPLLVAETFAVKKEKASKVNGF

SEQ ID NO: 6795 - protein, 122 aa, Panax ginseng
MIQPQTLLNVADNSGARELMCIRIIGASNRRYAHIGDVIVAVIKEAVPNMPLARSEVVRAVIVRTCKELKRDNGMIIRYDDNAAVVIDQEGNPKGTRVFGAIARELRQLNFTKIVSLAPEVL

SEQ ID NO: 6796 - protein, 358 aa, Triticum aestivum
  unsure (1)..(358): unsure at all Xaa locations
MAPAAASQHQATTTVAPTSGRKVVDEVSGWLRVMDDGSIDRTWTGPPEALPLMEPVQPYAVPRDGHTLHDLPGEPNLRVYLPEVDAGSAGRLPVIVQLHGGGFCISHPSWVLYHHFYARLACAVPAVVVTAELPLAPEHRLPAQLHTGVDVLRRLRSIAMSDEGSLDDPAAELLREAADMSRVFLVGDSSGGNLVHLVAARVGEDGADAWAPLRVAGGVPIHPGGSMRATRSKSELQDTPDSVFFTLDMLDKFLAMALPXGATKDHPYTCPMGPNAPPLESVPLPPMLVVVGEKDLIRDTNLEYCDALRAAGKEVEVLINRGMSHSFYLNKFAVDMDPTTGERAQELIDAIKSFVARH

SEQ ID NO: 6797 - protein, 299 aa, Triticum aestivum
ASTHASGWLGWLCGLTRTRPPRRRPQEESDKNAADARSDFDTCGLYADQLKRRCAEQFKEGVLGLEHLAAVDGLCEIVARGMGAAEGPRRYHINLSVFTSLPDMWAIEQLFPIIPIQRLQERPAVDGVLSDLTCDSDGKVDQFIGGRSSLPLHELPTHGTRGYYLGMFLGGAYQEALGGLHNLFGGPSVVRVSQSDGPHCFAVTRAAPGPSCADVLRAMQHEPEVMFEVLKQRTTDDGATAAALARAFGSMPYLSFDAEEAVAMSGAESSGMSSDSEGSAAGAAEDDDEEWEFMRGLTV

SEQ ID NO: 6798 - protein, 434 aa, Magnetospirillum magnetotacticum MS-1
MSHILRKFPNDPAKPRVVKAEGLYIHTEDGRKLLDMTAGTTTFGVLGYSHPEVLAAMQAQMGKFCHIDYNTWVDPNLEELAALLLSRAPRGLDKVYFPGNSGSEAMEAAMKLSYHVHHDSGKPGKTHYIARLQSFHGATLHGISISELPILAFYEPLLPDGRSKIAQHNPSLNRLPGESMEDYARRSAKELEDKILEIGPDKVGAFIGETMLGSLVGDVPPAPGYWKLIREVCDRYDVHLILDEIYCGLGRSGRIYCCDWDGIVPDFVCIGKNLAAGHAPLSAVVTNHRVEDIIAKGQGRIQHGHTHQGYSLGVAAALAVQRIVHTDAMLDHIQARGRQIVDTITTRLGGHPFFKEVRGRGLLQSFEYDCADKNGFGMTLAKRMLDEHATVINAKWHRVSFTPGYIITEAQLGRVLDDFVAVFESTASGWKTAG

SEQ ID NO: 6799 - protein, 180 aa, Triticum aestivum
  unsure (1)..(180): unsure at all Xaa locations
MAPTVMASSATSVAPFQGLKSTAGLPVSRRSNGASLGSVSNGGRIRCMQVWPIEGIKKFETLSYLPPLSTEALLKQVDYLIRSKWVPCLEFSKLGSSSRXHNASPGYYDXRYWXTMWKLPXFGCTDXTQVXNKWKSQEGLPDAYSASDRQHRKCMSSSPTTGCKIRKAKQSQRQIKCMRL

SEQ ID NO: 6800 - protein, 399 aa, Bacillus thuringiensis serovar konkukian str. 97-27
MLENQINERSLLLHKELVGKIEITSKVEVNSADDLSLTYTPGVAESCKAIAADEETVYDYTARGNMVAVVSDGTAVLGLGNIGPKAAMPVMEGKSILFKKFANVDAFPLCLGTTDVDEIVTLVKNLEPTFAGINLEDIAAPRCFEIEKRLKEETNIPVFHDDQHGTAIVVLAAVINALKVVSKQMDHVKIVINGAGSAGIAIGKLLLKAGAQHITLVSLEGIVCEGEAWMNEAQIEVSKKTNREHVRGTLKEAIHQADIFIGVSAPNVLTKELVQMMNEKAIVFAMANPIPEIFPEDALEAGAAVVGTGRSDYANQVNNVLAFPGIFRGALDVRATDITEEMKLAAAYGIANIITDEERNANYVIPNPLDKRVVPSVAEAVAKAAIDSGVAQIMKIPSY

SEQ ID NO: 6801 - protein, 453 aa, Arabidopsis lyrata subsp. petraea
MESSISQTLSKVSDPTTALLIVVSLFIFIGFITRRRRPPYPPGPRGWPIIGNMLMMDQLTHRGLANLAKKYGGLCHLRMGFLHMYAVSSPDVARQVLQVQDSVFSNRPATIAISYLTYDRADMAFAHYGPFWRQMRKVCVMKVFSRKRAESWASVRDEVDKMVRSVSCNVGKPINVGEHIFALTRNITYRAAFGSACEKGQDEFIRILQEFSKLFGAFNVADFIPYFGWIDPQGINKRLVKARNDLDGFIDDIIDEHMKKKENQNAVDDGDVVDTDMVDDLLAFYSEEAKLVSEAADLQNSIKLTRDNIKAIIMDVMFGGTETVASAIEWALTELLRSPEDLKRVQQELAEVVGLDRRVEEADIEKLTYLKCTLKETLRMHPPIPLLLHETAEDTSIDGFFIPKKSRVMINAFAIGRDPTSWADPDTFRPSRFLEPGVPDFKGSNFEFIPFGS

SEQ ID NO: 6802 - protein, 344 aa, Oryza sativa (japonica cultivar-group)
MVGAVQEGIVREMNGGFEVMSGYDRSSMAPKQQQREEESKWYEEEIDDDLKLCYALNSVLHRGASKYQEIALIDTKHFGKALIIDGKMQSTEVDEFIYHESLIHPPLLFHPNPKTVFIMGGGEGSAAREVLRHNTVHRVVMCDIDQEVVDFCRTYLTVNWDAFASDKLCLIINDARAELEKSREKFDVIVGDLADPVEGGPCYQLYTKSFYQHIVKPKLNDRGVFVTQAGPAGVLTHKEVFSSIYNTLRHVFKYVKAYTAHVPSFADTWGWVMASDYPFSMNAQQINERIKERIDGELVYLSGESLISSTILNKSVYQSLLNETHVYTEDDARFIYGHGRARCA

SEQ ID NO: 6803 - protein, 147 aa, Crocosphaera watsonii WH 8501
MALLRYNPWTEMNALQRQINQLFDDGVLTTSERGLKEAIFAPSAELSETDEAVMLKLELPGVKAEDVDIQATKEAIYITGERKKETKSEENGVTRSEFRYGKFSRFIGLPALIDNTKISAEYKDGILNLTLPKAEEEKHKVVKITLG

SEQ ID NO: 6804 - protein, 485 aa, Magnetospirillum magnetotacticum MS-1
MIKHLINGKHVESASTIANLNPATNEVICQIAAGGEAEVARAVAAAKEAFPKWAGLAPAQRAKLLRKVGDLINQHVDEIAKLESLDTGQSYWRTKKMLVPRAADNFYFFADTCQHVDGETYPTNDHLNYTIYQPVGVVGLISPWNVPFMTATWKTAPCLAFGNTAVLKMSELSPLSADRLGQLILEAGIPAGVFNIVHGYGSAVGEALVKHPDVRGVSFTGSTATGNRIIQSGGLKKYSMELGGKSPNIVFDDCDFERAVDAAIVAVYGNNGESCTNGTRILVQDGIYDRFVAALAERTKKVVVGDPLDEATNVGPMITRDHWKKVTGYIELGIKEGARVVAGGLGEPEGLPAHLKNGNFVKPTVLADVDNSWRVAQEEIFGPVACVIRFKDEAEALKIANATTYGLASYVWTENGAKAIRMAEGIEAGLVFVNSQNVRDLRQPFGGIKGSGTGREGGHYSYEAFLEVKNVCVSKGNHHIPRWGV

SEQ ID NO: 6805 - protein, 307 aa, Zea mays
  unsure (1)..(307): unsure at all Xaa locations
ADIWSCCLRVFVLLAGCLPFHNANLMEMYRKISTSDIKYPXWLSPELQRVMPKLLXPNPNNRITIEKLLEHPMVKKEYRPAVVLAHPARXSSSLKDVQVAFSNADLLDSSSKVEQPADSSLKPASLNAFDIISHSRGFDLSSLFEVDQEQKASNSRFMTQKPASAIVSKLEQIAETERFMVKKQDGLVKLQGSKQGRKGQLAIDAEIFEVTPAFHVVEVKKSAGDTLEYEMFCRKGLRPSLSDICWSTRSEENMAPSIVSALPNCEPSPLTPISGRITQPLFIRLAIPAPFPFLAATTIHSSYFFSP

SEQ ID NO: 6806 - protein, 222 aa, Pseudomonas syringae pv. tomato str. DC3000
MEKNVFSLCVHNPEWMIMENSQGGQSLVWQPSQVSSKDREQHLRQTPKTVWLTGLSGSGKSTIAFALERALMDLGKLAYTLDGDNIRQGLCRDLGFSAEHRSENIRRIAEVARLMNDAGLIVISSFISPYEADREAARSIIGNERFMEVFISTPLETCIQRDPKGLYRRAVAGELKDFTGISAPYESPLYPVLQLDTRHVPIEECVARILDILQITKNHFRA

SEQ ID NO: 6807 - protein, 477 aa, SYNECHOCOCCUS SP. WH 8102
MTTPRVLFWHRRDLRLTDNLGLAAAAAISPAVTGVYVLDPQVISPSEHLLPMAPARLWFLIESLIELQQRWRDAGSRLLVVEGDPVQLLPQLAERIAAEAVVWNRDVEPYARERDRQVAQRLQADGRKVVVDWDQLLIAPELLKTGGGDPYRVYGPFLRNWRGQVQAKQPVTVPAPAGLVDLDPAAVPSGEPLMARRDSHGFKGTELCPCRPGEAAAMQQLTSFCDGALFGYEPDRNFPGVVGTSYLSAALSVGTLSPRQAWSAAQEAREQARSEEQLHAIAVWEQELCWREFYQQALFHFPELSDGPYREQWRRFPWENNEDWFDFWREGQTGMPIIDAAMRQLNQTGWMHNRCRMIVASYLVKDLICDWRWGERAFMELEVDGDLAANNGGWQWSASSGMDPKPLRIFNPATQASKFDAAGDYIRQWVPELRHVNTKDLLSGEIGALERRDYPEPLVNHKTQQAKFKALYATIRS

SEQ ID NO: 6808 - protein, 109 aa, Triticum aestivum
MIEQVCTKKQAGTGPEFPGYRRPTRPRPPCSHHPSPLAFRWTLREREGGRRKMADEGTANCIDIILAIILPPLGVFFKFACGIEFWICLLLTFFGYLPGIIYAVWVITK

SEQ ID NO: 6809 - protein, 179 aa, Lycopersicon esculentum
MASFGGTTQKCKACEKTVYLVDQLTADNKVYHKACFRCHHCKGTLKLSNYNSFEGVLYCRPHFDQLFKMTGSLDKSFEGAPKTVRERSADQGSNSKVSSLFGGTQDKCVACKKTVYPLEKVAVDGTSYHRPCFKCSHGGCVISPSNYVAHEHRLYCRHHHTQLFKERGNFSQMEDHEKN

SEQ ID NO: 6810 - protein, 323 aa, Sporidiobolus salmonicolor
MVGTTTLNTGASLELVGYGTWQAAPGEVGQGVKVAIETGYRHLDLAKVYSNQPEVGAAIKEAGVKREDLFITSKLWNNSHRPEQVEPALDDTLKELGLEYLDLYLIHWPVAFPPEGDITQNLFPKANDKEVKLDLEVSLVDTWKAMVKLLDTGKVKAIGVSNFDAKMVDAIIEATGVTPSVNQIERHPLLLQPELIAHHKAKNIHITAYSPLGNNTVGAPLLVQHPEIKRIAEKNGCTPAQVLIAWAIVGGHSVIPKSVTPSRIGENFKQVSLSQEDVDAVSKLGEGSGRRRYNIPCTYSPKWDINVFGEEDEKSCKNAVKIK

SEQ ID NO: 6811 - protein, 160 aa, Gibberella avenacea
RAEYGKSGNITCMRKWLCCEKLVDKYPYIAMDTEFPGVVSRPMGGFRGKSDYHYQCLRTNVDMLKVIQIGSHSSMRTAKPAPRPVHGSSTSNLSQDDMYNESRSESLQPSRYRTSICSNVTESTLSNCLTPHPFRSRVLRQRAMDFIPRRLRFWLPHQAL

SEQ ID NO: 6812 - protein, 162 aa, Ustilago maydis 521
MSASDDEQHNATFETADAGSSLTFPMQCSALRKNGHVVIKGRPCKIVDMSTSKTGKHGHAKVHLVAVDIFTTKKYEDISPSTHNMDVPNVRREEYQLVNIDDGFLNLMTNDGDTKDDVRVPDGELGDQIQAAFDDGKDLMVTVVSAMGEEHCLSFKDAPQGK

SEQ ID NO: 6813 - protein, 1348 aa, Oryza sativa (japonica cultivar-group)
MPDIRSAPGRGKSDEDERRPIGSLFKLKRKRRAPGSAEAKGDSNPSVESEAPDGVVPGEMDDTLAIIKRKLRKPKKGKEGGDAVVVGSGAEGELLVEEEDVQGGVNVGDGVAEDKSNLEGVKVEVDEVIGGELKDSGGLGLEDSLSTLFKRSGRKSRQVSVKEEEGVEVAGSHGEEILEKGSGLVSDRVAKGTKRRRRRTKEEMKNAAAKSESAMAHEGSPNRKVGTSLPRKAKAEAKVKISNSNRRSKKSDEKPKASDDVLCHRSLGETIEQDAETRTVLDDGSRNSSDGASHRIEVSACLSNQPCLKPCSGELAEEVSLSAANAATDGVSNEHTYSETLLKERNDDAGCSHGKPPTLAIKSIPGKKPIEMPKKPVRQKDQLLSTDVDNKCVVGSGDTKDVNIENQPAFGIPESHVTGKGLHPHKMATSVKELDVVDVVAPTDFEDMENASKSKRVTRSSRKRKHGDMAYEGDIDWETLMQEQGLFSNLSAALVDYPLKSKDKIKISEVLDNGDGSGVAAVRAGLKAKAVTPIEKIKFKDILKRRGGLQEYLECRNMILSRWCKDVKHILDLAECGVSDVCLDDESPRQTLIRDVYLFLDQNGYINAGIASDKVKTDHESPPEDVEVSKLNESHERKSVSIQDCIVTEAVQDKKAVVKQTDCVLTEASNEESSSAAIHCDAQDLLPPLKSEELIFKEKNQGVLTEVEGGSLHQAEAADIEHSENKHEASDRVESGGYGKKIIVVGAGPAGLTAARHLQRQGFSVTVLEARNRIGGRVYTDRVSLSVPVDLGASIITGVEADIATERRADPSSLICSQLGLELTVLNSACPLYDVVTGDKVPDDLDTDLESEYNGLLDEMAQLFAQNGESAVGLSLEDGLEYALRKNRVTRSEQDDQLRNVSSAGAVDISESASTEKEIAHCGKEDKTDVLSPLERRVMNWHFAHLEYGCAAMLKSVSLPYWNQDDVYGGFGGAHCMIKGGYDTVLESLAKGLDVQLNHVVTEVLYGSEELGASGNSRKFVKISTSNGNEFVGDAVLITVPLGCLKAQTIKFSPSLPDWKLSSIDRLGFGLLNKIVLEFPEVFWDDNVDYFGATAEQTDLRGQCFMFWNLKKTVGVPVLIALLVGKAAIDGQSISSDDHVKNAIVVLRKLFKDASVPDPVASVVTNWGLDPFSRGAYSYVAVGASGRDYDILGRPVSDCLFFAGEATCKEHPDTVGGAILSGLREAVRIIDLVHSGKDYVAEVEALQTYQMQSDSERNEVKDMSNKLDACELSTALCKTSSDASYPLFSKETLLQEMFFSAKTTSGRLHLAKELLKLPPDVLKSFAGSKDGLSTLNSWILVSGLSSEF

SEQ ID NO: 6814 - protein, 137 aa, Brassica napus
  unsure (1)..(137): unsure at all Xaa locations
QREVCNMRYRRKDENKSXEPSEIEMEREKKFGICMEMNSLVVLPNCTHSLCIXCYRDWRRRSQSCXFCRDSLKRVDSGDLWMFLEGTDTVNPSVIARENQKRLFVYIEKXPLVVPRQAFASSPYDLHVKVKKEKKGC

SEQ ID NO: 6815 - protein, 506 aa, Magnaporthe grisea 70-15
MALVAMQKRDKRKMLGSQTLPTVAAVLAAVVSASPVSGREVATVPDDLTGELGCEALKLVYGSGSVFLPGDAEYAEEAAAFWSNTQLMSPTCIFRPTSAEQVASAVVGNSGTGTQWAVRGGGHMGIRGANNIDKGMLIVMSGIKTLRISEDRTAVHVGPGNKWGDVYDYLAQFDVAVAGGRLGPVGVPGLLLGGGVSFYGHQAGWSADNVLEYEVVLADGRTVAASADENQDLFWALKGGSANFGIVTDFKLRTFPSKKVWAGVYTVSGEHMAAFEEAVARYSSEPQDPLSHAVPMVIPMAGGVTVASVILFYDSETVSEPECFRDFLAIPPISPPTTAFKTVAEFAKENGALVVPGVNDVFLAGTTVGKTQAELLEGVQITNKPIGAAWQAASEKMNPAGNALGIDTAAKGTYLAWALAIEWVDGPGHDEIVDKWVRETIAAMEEATKAAGLYDAFNYMGDAAGFQEVYAGYGEENQKKLLEISRKYDPERVTQKLWPGGFKVGV

SEQ ID NO: 6816 - protein, 647 aa, Zea mays
MATMKLGSKPEIFVLQDLTWRCTIELESDVVVEVGEMSFYLHKFPLLSRSGVLQRMISEYQAPADGGGMCTLQLDDIPGGAKAFELAAKFCYDVKIELNALNVVCLRCAAEYLRMTDDYAEGNLITQAECFLVDVLANWKDSIKALETCEGVLPTAEDLHLVSRCITALASKACGSDAAAPVVRNASVDKDALWNGIRSGDTTSSAAAAAAAAGMDWWYEDVSFLSLPMFKRLIQAMEAKGMRDESIAGAIMFYAGRFLPGLKRNTSFSNALASYGADGSGGAGGGMSSRNITPRAASVSAPSEGDQRYFLEEIVALLPTKKGVASTKFLLGMLRTAMLLHASPLCRENLERRIGAQLEDASLDDLLVPNLGYHVETLYDIDCVQRILDYFMSSTDGIGTGYTSPALAEEGGGSLGIPQGATPSSSLSPITMVAKLMDGFLAEVAPDTNLKLPKFQALAAVVPDYARPVDDGIYRAIDIYLKSHPWLSESEREQLCRLLNCQKLSLEACTHAAQNERLPLRVVVQVLFFEQLRLRTSIAGWFFVSDNAAGGDGARPHAGGAIVPKGTAAIAGCPQADADSDVEGDAPDGKETITDVKARVSDLEKECKSMKQEIRRLGKPRRSWSLLTRKCGFGAKVQQAQTAMSGK

SEQ ID NO: 6817 - protein, 462 aa, Streptomyces avermitilis MA-4680
MKAQDGMYIDGAWRPAAGPDMIEVVNPADEQVIGRVPAGTPEDVDAAVRAARAALTAWAATPPAERAARISALRDVLVARQDEIAETVTAELGSPLSFSQSVQVGLPILVAGSYAELAATYAFEERVGNSTVHHEPVGVVGAITPWNYPLHQIVAKVAPALAAGCTIVLKPAEDTPLTAQLFAEAVHEAGVPAGVFNLVTGLGPVAGQALAEHEDVDLVSFTGSTAVGRQIGATAGAAVKRVALELGGKSANVILPSADLAKAVNVGVANVMANSGQTCSAWTRMLVHAERYEEAVELAAAAAVKYADRIGPLVNAKQRARVRGYIDKGVAEGARLVAGGPESTEPQGYFVSPTVFADVTPEMTIAKEEIFGPVLSVIRYEDEEEALRIANGTVYGLAGAVWAGDEAEAVAFARRLDTGQVDINGGRFNPLAPFGGYKQSGVGRELGAHGLAEYLQTKSLQF

SEQ ID NO: 6818 - protein, 455 aa, Mycobacterium tuberculosis CDC1551
MSTTQLINPATEEVLASVDHADANAVDDAVQRARAAQRRWARLAPAQRAAGLRAFAAAVQAHLDELAALEVANSGHPIVSAEWEAGHVRDVLAFYAASPERLSGRQIPVAGGVDVTFNEPMGVVGVITPWNFPMVIASWAIAPALAAGNAVLVKPAELTPLTTMRLGELAVEAGLDEDLLQVLPGKGTVVGERFVTHPDIRKIVFTGSTEVGKRVMAGAAAQVKRVTLELGGKSANIVFHDCDLERAATTAPAGVFDNAGQDCCARSRILVQRSVYDRFMELLEPAVHSIVVGDPGSRATEMGPLVSRAHRDKVAGYVPDDAPVAFRGTAPAGRGFWFPPTVLTPKRGDRTVTDEIFGPVVVVLTFDDEADAISLANDTAYGLSGSIWTDDLSRALRVARAVESGNLSVNSHSSVRFNTPFGGFKQSGVGRELGPDAPLQFTETKNVFIAVGEEM

SEQ ID NO: 6819 - protein, 291 aa, Triticum aestivum
FAVLDQIPAPGAGINQWYPGHIAKTEKELKGQLKLMDVVIEVRDARIPLATTHPKMDSWLGNRRRIIVMNREDMVSADDRNAWATYFSSQGIKVIYSNGQLGMGTMKLGRMAKSAASTVNTRRREKGLLPRPVRAGIVGYPNVGKSSLINRLLKRRMCPAAPRPGVTRELKWVRFGKDLELLDSPGILPMRISDQTAALKLAICDDIGERSYDFADVAAILVQILLRHPAVGSEAFRKRYKIDVDSDCGKLFVTKLSVHLFNGDTTQAAFRILSDFRKGRFGWVALERPPT

SEQ ID NO: 6820 - protein, 504 aa, Lycopersicon esculentum
MANRNVPIPRRQLYIGGEWREPVKKNRIPIINPATEEIIGDIPAATAEDVDIAVEAARKAIARDDWGSTTGAQRAKYLRAIAAKVLEKKSVLATLESLDSGKTLYESAADMDDVAGCFEYYAGLAEALDSRRMTPVNLNSDSYKSYVLREPLGVVGLITPWNYPLLMAIWKVAPALAAGCAAILKPSELASITCLELGEICREIGLPSGALNILTGLGPEAGGPLASHPHVDKISFTGSGPTGSKIMTAAAQLVKPVSLELGGKSPIVVFDDIDNLDIAAEWTLFGIFANTGQVCSATSRLIVQENIASAFMDRLLKWTKNIKISDPLEEDCKLGPVVSAGQYEKVLKFISNAKSEGATILCGGERPQHLKKGYYVQPTIITDVNTSMEIWKEEVFGPVLCVKTFKTEEQAIELANDTKYGLGAAVMSKDVKRCERFTKAFQTGIIWINCSQPTFNELPWGGKKRSGFGRDLGKWGLENFLNIKQVTEYTSAEPLAFYKSPSKN

SEQ ID NO: 6821 - protein, 405 aa, Arabidopsis thaliana
MPLSLQSPPCATLSASIRKGRWKTLAAGFSVTPLPAVNFSLRRSIPRILASASSSSSPASSSLEAGENNELNAVSAFSEIVPDTVVFDDFERFPPTAATVSSALLLGICGLPDTIFRNAVDMALADSSCAGLETTESRLSCFFNKAIVNVGGDLVKLVPGRVSTEVDARLAYDTNGIIRKVHDLLRLYNEIDVPHDRLLFKIPATWQGIEAARLLESEGIQTHMTFVYSFAQAAAASQAGASVIQIFVGRLRDWARNHSGDTEIESAIKSGEDPGLALVKRSYNYIHKYGYKSKLMAAAVRNKQDLFSLLGVDYVIAPLKVLQSLKDSPAIPDDEKYSFVRKLTPETATHYHFTNKELVKWDQLSLASSMGPASVELLSAGVEGYANQAKRVEELFGKIWPPPNV

SEQ ID NO: 6822 - protein, 213 aa, Wolbachia endosymbiont of Drosophila melanogaster
MEIFLDSVDLNEIKGLKEFIDGITTNPSLIAKSGRKDKYEDLVREICSIIKGPVSVEVVADSHEEMITEGLNLAKIADNVVIKLPLTHEGLISCKKLWTEHKIPVNITLCFSPGQALLAAKVGACFISPFVGRLDDISYDGLSLIEDICTIYSNYGFDTKVLVASVRSPAHVIEAARLGADSITVPAKVLRQLVNHPLTDQGLAIFEKDWGVK

SEQ ID NO: 6823 - protein, 177 aa, Arabidopsis thaliana
MSSNKIVLTSSDGESFQVEEVVARKLQIVKHLLEDDCVINEIPLQNVTGNILSIVLEYCKKHVDDVVDDDASEEPKGDDASEEAKQNLDAWDAEFMKNIDMETIFKLILAANYLNVEGLLGLTCQTVADYIKDKTPEEVRELFNIENDFTHEEEEEAIRKENAWAFEADTKHEDPKP

SEQ ID NO: 6824 - protein, 369 aa, Oryza sativa
MDAQYNPRTVEEVFRDFKGRRAGLVRALTADVEDFFRQCDPEKENLCLYGFPNEHWEVNLPAEEVPPELPEPALGINFARDGMQEKDWLSMVAVHSDAWLLSVAFYFGARFGFDKNDRKRLFGMINDLPTIFEVVSGKSKAKPPSANNHSNSKSKSSNKTKSSEPRAKQPKPQPQPPVKNEGREEEGGPDDEEGGGGGGGGGREEEHGETLCGACGESYGADEFWICCDICEKWFHGKCVKITPAKAEHIKQYKCPSCSGGNGGGGGVSGNGKQLKICSTKREAIISQYLVRDERSKNTSTHARSPLISDNPYEVISDIRIMLAEQYTTNAREDDFDAKPNDKDNQGEGNVAWGGINKELYSLQVTIQN

SEQ ID NO: 6825 - protein, 515 aa, Glycine max
  unsure (1)..(515): unsure at all Xaa locations
EWEMDQLLWRVLPLLTILVSFGVFFYLQDSYTAQFYALIKLPRDKCSLLPHRHFWISSKRIVTPQGIISGSVEINDGKIISVVEGHAKQGKPKQEEIIDYGDAVVMPGLIDVHVHLDEPGRTEWEGFDTGTRAAAAGGVTTVVDMPLNNYPTTVSKEKLKLKLDAAEDKIYVDVGFWGGLIPENALNTSILDGLLSAGVLGLKSFMCPSGINDFPMTTIDHIKAGLSVLAKYRRPIVVHAEIQQDFEKHLEXMSNLDPRAYLTYLNTRPPSWEEAAIKELVGVTKDTRKGGPLEGAHVHVVHLSDSSASLDLIKEAKRRGDSISVETCPHYLAFSSEEIPNGDTRFKCSPPIRDAYNREKLWEAVLEGHIDLLSSDHSPTVPQLKLLEEGDFLKAWGGVTSLQFDLPVTWSYGKKHGLTLEQLSLLWSKKPATFAGLESKGAIAVGNHADIVVWKPEVEFDLNEDYPVFLKHPSLSAYMGRRLSGKVLETFVRGNLVFKKGKHAPSACGVPILAK

SEQ ID NO: 6826 - protein, 176 aa, Triticum aestivum
  unsure (1)..(176): unsure at all Xaa locations
MAPTVMASSATSVAPFQGLKSTAGLPVSRRSNGASLGSVSNGGRIRCMQVWPIEGIKKFETLSYLPPLSTEALLKQVDYLIRSKWVPCLEFSKVGFIFREHNASPGYXXAGNWAMWKLPKFGXCTDXTQXVXTKWKEVKKEYPDAXVRIIXFDNMRQVXXVSFXAXKPTGCEVRKG

SEQ ID NO: 6827 - protein, 259 aa, Candida albicans SC5314
MTLTTVSGDPITIGIGTGTSIKDLKRGQPTAENKARIVDILRYALSIGYNHIDTAEVYTTQPEVGTAIAGFQREKLWITTKYSVTSSMIKKKSFTPTDFVEQALDEMNTNYIDLLLIHFPPKPNDPYTIQSLWQEFVSIKATGKVRYIGVSNFDIPQLNTLLEIGTPTINQIQYYLGSDNLEVVEFCKNHGILVEAYGPLTPLRNPNPKTDALIEKLQNANHLTKSQALFRYLLDNNILPITTSFKKERLKEALHSYTY

SEQ ID NO: 6828 - protein, 422 aa, Pseudomonas aeruginosa UCBPP-PA14
MSDLKTAALEYHAQPRPGKLSVELTKPTATARDLSLAYSPGVAEPVREIARDAELAYQYTGKGNLVAVISDGTAILGLGNLGPLASKPVMEGKGVLFKRFAGIDVFDIEVDAESPQAFIDTVKRISITFGGINLEDIKAPECFEIERALIEQCDIPVFHDDQHGTAIVTAAGMLNALELAGKKLEEAKIVCLGAGAAAISCMKLLVSMGAKVENIYMIDRKGVIHAGRDDLNQYKSVFATETDKRTLADALEGADVFVGLSGANLLEPEDLKRMAPNPIVFACSNPDPEIKPELAHATRNDVIMATGRSDYPNQVNNVLGFPFIFRGALDVRATRINEEMKIAAALALRDLAKQPVPEDVCAAYGVDKLEFGREYIIPKPMDKRLITVVSDAVAKAAIETGVATLPYPKNYPLKSVDEVFNG

SEQ ID NO: 6829 - protein, 392 aa, Wolbachia endosymbiont of Drosophila melanogaster
MDHVVNAYNRLDTPIVRGEGAYLFDKDGKKYLDFAAGISTTSLGHCHPYITDKLKEQSSSLWHCSNIFTIPEQERLAEHLTTLTFADKVFFCSSGLEATEAAIKFIRRYFYSKGQAKRNRIITIEGGFHGRSIAAISAGGNEKSREGFAPLLSGFDKVPRNNIKALEEKINNEIAAVFLEPIQSEGGVYPLDVEYLQKVREITKAQGIILCFDEVQCGYGRIGSLFHYQNVGIEPDMLTCAKAMGNGFPVAACLVKDYIAEAITPGTHGSTYGGNPLAMTVGNAVLDIMLKEGFFDHVKRISKYLKEKLLLLAKEFPEMILEVRGEGLLMGIELATLVADKIISRSLDKGLIITRVLNNKVVRVTPPLIIEDEHVNAACNMLYDLFLKIKGI

SEQ ID NO: 6830 - protein, 302 aa, Pyrodictium abyssi
MQRELPRLLEDAVEVLRRRGPVVRLGAGSVLVAGDTHGYPEVSRWVLGLADELGVDAVVFLGDYVDRGPRGVENLSLLVERLLAEPGRVVLLRGNHESPSMNLYYGFRGEFAAKVGVEHLDILHGFYSCLPYAALMGRVLLVHGGVPCRECQGGPEEPLRLGEIEERLRGLFCRRWLLEWGDSVAVQLLWNDPRGELDWFAPSLRGPGIYYYGRLAWKGFLEANGLELIVRAHEAVDAHHVWTSSGRPVHGLEHGYTMGLEELRGSVVTVFSSLYHGAGAGALLLREGEVVFLRYPGGAQGL

SEQ ID NO: 6831 - protein, 173 aa, Oryza sativa (japonica cultivar-group)
MAGVGRTMIAPLLVLNLIMYLIVIGFASWNLNHYINGETNHPGVAGNGATFYFLVFAILAGVVGAASKLAGVHHVRSWGAHSLAAGAASALIAWAITALAFGLACKEIHIGGYRGWRLRVLEAFVIILAFTQLLYVAMLHGGLFSGNHAAGAGGYGGDYPADHHHKPAAAARV

SEQ ID NO: 6832 - protein, 391 aa, Wolbachia endosymbiont of Drosophila melanogaster
MTISPILPVYSPVNINFSHGKGIYLYDVDGERYVDFHSGIAVSSLGHTNSRLISALKLQGEKLWHISNTYNIPAANNFAEKLINNSFADTVFFSNSGSEAVECGLKIARIYQNGKGNKNRHRILTFHGAFHGRTFLTCATNDKQKFSELLNPYIDWCDNIEPNIESVKKAISSGIGVILIEPIQGQGGIKVMNEVFMKELRRLCDENDILLFFDCVQCGAGRTGKLFAYEHIGVEPDICALAKGIGGGFPLGACLATENAAKYMAVGMHGSTFGGNPLATSVGNAVLEELLSPGFLKNVEIRGKYLKNKLEDLASKFPIIEEVRGKGLMLGIKVKADNQKFAEELSHRGLLTVGVTSDNVVRILPPLIITEKEIDEGIEILTQYLSEKSSD

SEQ ID NO: 6833 - protein, 381 aa, Zea mays
FGSRKLDAQQKAHVSLPMDTFKSYVLKEPIGVVALITPWNYPLLMATWKVAPALAAGCAAILKPSELASVTCLELAEICKEVGLPPGVLNILTGLGPEAGAPLAAHPDVDKIAFTGSSATGSKIMTAAAQLIKPVSLELGGKSPIIVFEDVDLDKAAEWTIFGCFWTNGQICSATSRLIVHESIATEFLNRIVKWVKNIKISDPLEEGCRLGPIVSEGQYEKILKFISNAKSEGATILTGGSRPEHLKKGFFVEPTVITDVTTSMQIWREEVFGPVLCVKTFSTEEEAIDLANDTVYGLGSAVISNDLERCERITKAFKAGIVWINCSQPCFTQAPWGGIKRSGFGRELGEWGLDNYLSVKQVTQYISDEPWGWYQSPSRL

SEQ ID NO: 6834 - protein, 157 aa, Triticum aestivum
  unsure (1)..(157): unsure at all Xaa locations
PTTLEAKAGSGAFQGLPAIRPAPFRKGGHLVIRGRPCKAFXVSTSNNGKHGHAKCHFVAMTVLDVRNLEDIVLSSHSRGVPHVVRQDYQVIAITHDRYVSVVTQRVIPKDGLQLPTDDLPRGQIKTGFTDGKGPIQYVMHRMGEAQLCAVKEIGGGN

SEQ ID NO: 6835 - protein, 334 aa, Mesorhizobium sp. BNC1
MTAWKVAPALAAGCSCIVKPAEQTPLSAIRMAELAQQAGLPDGVLNILPGLGETAGQAIGRHNDVDIISFTGSTEVGGFFLRYSGESNLKVVGLEMGGKSPFIVLDDADLNDDLVEHAVSSAFWNGGQNCSANMRQLVDTRVADEFVERVVARAEKYKVGDPLDPSTDIGAMVTEEHMKRVVGYIERGESEGARRLTGGARQGRGYFIEPTVFSGLRPEMTIAREEIFGPVLGVMPVKGLDDALRIASDTIYGLHATVFTRDLDRALHLARRLPCGTVSVNGFSEGDIKTPFGGYKQSGSLSRDNGTEAMDQYLQTKTIWITLRGPSNRGSIAG

SEQ ID NO: 6836 - protein, 463 aa, Nostoc sp. PCC 7120
MADLTPNSSFSVTLRLQIPNRVGMLASITQAIASSGGNLGQIDLIEQTRQVSLRDLTVDAASTEHAETIVQAVKAIPDIKLVSVYDRTFNLHRGGKISITSRIPLKSVSDLAMAYTPGVGRVCTAIAQDPSQVYNLTIKQNTVAIVTDGSAVLGLGNLGPHAALPVMEGKAMLFKEFAGLDAFPICLATQDTEEIIQAVKNIAPVFGGVNLEDIAAPRCFEIEKRLRDELDIPVFHDDQHGTAIVTLAALFNSLKLVQKSLADIRIVINGAGAAGVAIARLLRKAGAEKIWMCDSKGIISTTRTDLNEEKQEFAVKAQGTLAGAVQGADVFIGVSAPGVLTPEMVKSMAKDAIVFAMANPIPEIQPELISKDVAVIATGRSDYPNQINNVLAFPGVFRGALDCRAQTITTTMYLEAASAIASLVNPSDLSREHIIPSVFDERVVTAVAAAVQRAAREEGIARG

SEQ ID NO: 6837 - protein, 454 aa, Enterococcus faecalis V583
MQAELVIKNGLVILETGEVITDVAVQGGKIVAIGQDLSGERVIDATGLVVSPGMVDAHVHITDPGGGYRDEWEGYVTGTAACAKGGVTTFMEMPLNQIPATVDKTSLEIKYKAGENKLKVDVGSFGGVVPTNLADGIQELDEGGVSGYKCFLGTCGDRSIEGDFQNVDDYSLYEGMKQVAKTGKVLAIHAENAPITDKLGAVAYQNGETTLAAYVATRPVFTEVEAIQKAILFAKETGCRIHICHVACQEGVEEVLKAQAEGVDVTCETCTHYLYFTTDELDAIGPVVKCSPPIRDADQQAALWNHVQTGGIAFVTSDHSPCTPDLKDTTNAFEAWGGISGVQNNVDVLFDEAVQKRGLSLKQFADMIAANPADRYHLAQKGRISIGKDADFVLIKPNAPYILKAEDLEYRNKISPYIGREIGAQVIQTILRGETIYAQETGVTEAFNGVFIKN

SEQ ID NO: 6838 - protein, 356 aa, Rickettsia sp.
GFMSTASCRSTITYIDGDQGILRHRGYDIKDLAEKSDFLEVAYLLIYGELPNSKQYNDFTKKVAHHALVNERLHYLFQTFCSSSHPMAIMLAAVGSLSAFYPDLLNFFKEADYELTAIRMIAKIPTIAAMSYKYSIGQPFVYPDNSLDFTENFLHMMFATPCEKYKVNPVVKNALNKIFILHADHEQNASTSTVRIAGSSGANPFACVSTGIASLWGPAHGGANEAVINMLKDIGSVENIPKYIAKAKDKNDNFRLMGFGHRVYKNYDPRAAVLKETCKEVLKELGQLDNNPLLQIAIELEAIALKDEYFIERKLYPNVDFYSGIIYKAMGIPPQMFTVLFATARTVGWMAQWKEM

SEQ ID NO: 6839 - protein, 159 aa, Corynebacterium glutamicum ATCC 13032
MTSIHDISVTLNDGTETTMADWAGHLLLIVNVASKCGLTPQYEGLQKLYEEYQDRGFFVIGVPCNQFNGQEPGTDAEVCAFAQNQYDVTFPLLSKTEVNGEGAHPLYKVLKEATDGSEIEWNFEKFLVDAEGNTIKRFAPRTEPSAAEVVEAIEENLPI

SEQ ID NO: 6840 - protein, 371 aa, Pyrococcus furiosus
LAKGLEDVYIDQTNICYIDGKEGKLYYRGYSVEELAELSTFEEVVYLLWWGKLPSLSELENFKKELAKSRGLPKEVIEIMEALPKNTHPMGALRTIISYLGNIDDSGDIPVTPEEVYRIGISVTAKIPTIVANWYRIKNGLEYVPPKEKLSHAANFLYMLHGEEPPKEWEKAMDVALILYAEHEINASTLAVMTVGSTLSDYYSAILAGIGALKGPIHGGAVEEAIKQFMEIGSPEKVEEWFFKALQQKRKIMGAGHRVYKTYDPRARIFKKYASKLGDKKLFEIAERLERLVEEYLSKKGISINVDYWSGLVFYGMKIPIELYTTIFAMGRIAGWTAHLAEYVSHNRIIRPRLQYVGEIGKKYLPIELRR

SEQ ID NO: 6841 - protein, 300 aa, Zea mays
MRTTTHATGATAGTKVGRGFPQHVRSPSASWIPSIGEEDDEEDEEVVVVEEDRVPREWTAQVEPGVQITFVSTAGGAGNDIKRIRFSRDMFNKWEAQRWWGENYDRVVELYNVQTFSRQQGVSTPTSSIDDATQRDSSFYSRAGSTRDSPVILPPTAVGREQPIARATSCRATAAAASTARAACNPSSSAVPDPSDHVWAHHFNLLNSAPAPAPAAPHLDPSRATTSSLDEASVSVSNASDLEATEWVEQDEPGVSITIREFGDGTRELRRVRFSRERFGEERAKVWWDQNRNRIHAQYL

SEQ ID NO: 6842 - protein, 500 aa, Glycine max
  unsure (1)..(500): unsure at all Xaa locations
MGLVKKIGKYQLGRTIGEGTFSKVKLAVNGNNGQKVAIKVIDKHMVLENNLKNQAKREIRTMKLLHHPNIVRIHEVIGTKTKIYIVMEYVSGGQLLDKISYGEKLNACEARKLFQQLIDALKYCHNKGVYHRDLKPENLLLDSKGNLKVSDFGLSALQKHNDVLNTRCGSPGYVAPELLLSKGYDGAAADVWSCGVILFELLAGYLPFNDTNLMNLYGKIWKAEYRCPPWFTQNQKKLIAKILEPRPVKRITIPDIVEDEWFQTDYKPVFASEFDQNINLDDVDVAFNSIKENIRESTIPKSSSFINAFQLIAMSQDLDLSGLFEEQDEKKQRTRLGSKHTINETIEKIEAAATDVGLSIEKMNNFKIKMQPKQIMTRCSRSYLSAQVIEVAPTHCVIEISKXTGDXRXXHKFCESLSNXLKQKPDPSQSQDSVDCAAERKNKMLDATKSQKVKIANLFLAINLLEDGLNPCLFHFSEVHGSLTRMKQSTKKNHVANFLL

SEQ ID NO: 6843 - protein, 381 aa, Phanerochaete sordida
MAFSTLVALVALAAIARAAPTTDSAVCSDGTTVNNAACCAFIPLAQDLQANLFQNDCGEDAHEVIRLTFHDAIAISQSQGPTAGGGADGSMLLFPTVEPNFGANNGIDDSVNNLIPFMQKHNTISAGDLVQFAGAVALANCPGAPRLEFLAGRPNKTTAAIDGLVPEPQDSVTKILQRFADAGNFSPFEVVSLLASHSIARADKVDETIDAAPFDSTPFTFDTQVFLEVLLKGVGFPGAANNTGEVTSPLPTGSGADTGEMRLQSDFALARDSRTACFWQGFVNEQAFMASSFRAAMSKLAVLGHSRSALIDCSDVVPQPKPAVNKPATFPASTGPQDLELACTTSKFPTLTTDPGASETLIPHCSDGSMSCPAIQFDGPA

SEQ ID NO: 6844 - protein, 474 aa, ASPERGILLUS NIDULANS FGSC A4
MWSPFLEVAKALREGHVVEFITQKYNEYGWTFEQNVLGRSGISTIEPENLKALLATQFNDFCLGTREREFGPLLGQGIFTLDGAGWSHSRALLRPQFTRDQVADLDLMESHISRLIELVPKDGSAFDIQRLFFLMTLDSSTHFLFGESVHCMDEGNVLARSTVNNAQGFANAFNTALDYLNWRSVAGNFYWMITSKEFRDANKRVHEVVDYYVHQAIEAKRHPEKKEPGRYIFAEALAADNDNPKVLRDNMLNILLAGRDTTASLLSSAFFYLSRHPAVWEKLRRVIIEEFGDVQNPKGEITHAKLKDLPYLRYVLNEVLRLQPPVPLNLRVAVKDTSLPVGGGPDGKSPVFVEKDQPVLYSVYAMHRRKDLWGPDADSFRPERWEENAKHGWEYLPFNGGPRICLGQQYALTEASYTMVRLMQRFSKVENGEPGLDEPLIRATLTMSHENGVKVRFKLQHVRRKPSPLQTCTR

SEQ ID NO: 6845 - protein, 377 aa, Phanerochaete sordida
MAFTTLFAFVALAAMTRAAPTAVCSDGTRVSNAACCAFVPLAQDLQQTLFMGDCGEDAHEVVRLTFHDAIAISQSQGPKAGGGADGSMLLFPTIEPNFGANNGIDDSVNNLIPFMQKHNTISAGDLVQFAGAVALANCPGAPRLEFLAGRPNKTIAAVDGLIPEPQDSVTKILQRFEDAGNFSPFEVVSLLASHSIARADKVDETIDAAPFDSTPFTFDTQVFLEVLLKGTGFPGQTNVTGEVASPIPVGSGEDTGEMRLQSDFALARDSRTACFWQGFVNEQAFMAASFRAAMAKLAVLGHNRNSLIDCSDVVPQPKPAVNKPATFPATKGPKDLELTCNARFPTLTTDPGAQETLIPHCSDGGMDCPAVQFDGPA

SEQ ID NO: 6846 - protein, 445 aa, Ralstonia solanacearum GMI1000
MKPAPHPLETTDLSYFWMPFTANRQYKAAPRLLVSAQGMYYRDADGREVLDGTAGLWCVNAGHCRKAIVDAITAQAAAMDFAPTFQMGHPVAFRAAEKVAEIMPAGLNRIFFVNSGSEAVDTALKIALAYHRARGEGQRTRFIGRERGYHGVGFGGISVGGIAPNRKAFSANLMPGVDHLPHTHAPEHNAFSKGQPAWGAHLADELERIVTLHDPSTIAAVIVEPLAGSTGVLVPPKGYLERLRALCDKHGILLIFDEVITGFGRLGAATASAFFGVTPDLLTMAKGINNAAVPMGAVAVRQSLHDAVIEAGAPGAIELFHGYTYSAHPLAAAAAVAAIDLYRTEGLFERARALSPAFEAAAHSLKGAPHVKDIRNLGLVAGIELEPRPGAVGARAYEVFLKCLERGVLVRYTGDTLAFSPPLIISEAEIARIFDTVRTVLQEVA

SEQ ID NO: 6847 - protein, 382 aa, Phanerochaete sordida
MAFASLLAIFALVAVASARPRPNPGAVCSDGTRVSNGACCAFIPLMQDLQQNVFQNECGEDAHEVIRLTFHDAIAISRSQGPKAGGGADGSMLLFPTVEPNFAANNGIDDSVNNLIPFMQKHNTISAGDLVQFAGAVALTNCPGAPRLEFLAGRPNKTIAAVDGLIPEPQDDVTKILKRFDDAGGFTPFEVVSLLASHSVARADKVDSTIDAAPFDSTPFTFDTQVFLEVLLKGTGFPGLSNNTGEVASPLPVGTGSDTGEMRLQSDFALARDERTACFWQSFVNEQEFMSASFKAAMSKLAVLGHNRNTLTDCSEIIPEPLPAVKKPATFPATTSAKDLQLTCRALRFPTLTTDQGAQQTLIAHCPNGSMNCTSVQFNGPA

SEQ ID NO: 6848 - protein, 455 aa, Magnaporthe grisea 70-15
MSSTTQAAANKRKRLTGGSTTSLPDEVAAAERAQISESRDASAEEGDTTAAETPATAPTSHPPIKRQRSSNNAVGDATVDLGEPSDTTEASVDIENRVGRKGRKSSNPEKEEESMAPPPIGKLTHPVGYRTNDPPVGRPVRIYADGVFDLFHLGHMRQLEQAKKAFPDVYLIVGVTGDAETHKRKGLTVLSGKERAETVRHCKWVDEVIENCPWIVTPEFLEEHKLDYVAHDDIPYGADEGDDIYGPIKAEGKFLVTQRTEGVSTTGIITKIVRDYEKYIARQLKRGTSRQELNVSWLKKNELDLKRHVQDLRENIRSNWTTTGQELSRELRQYWPASRPQSPAPSRPSLQVPNGDQLTSPQQQSSLREAQLRSPTTPGGANVNSNDFVAGYAVGLIGGVRSWMTKSRRSLRDERDDSSSRPPSDDSSEESEGKEKTTRTRRVVPKGNNAAATGA

SEQ ID NO: 6849 - protein, 243 aa, Triticum aestivum
  unsure (1)..(243): unsure at all Xaa locations
NLFGTTVVNCSLNWQTICRYYLKDVALEGGQPFHRAHGMTAYEYNSTDPRANCLFNEAMLNHSTIITKKLLEFYRGFDNVETLVDVAGGXVGATAHAITSKYPHIKGVNFDLPHVISEAPPYPGVQHIAGDMFKKVPSGDAILLKWILHNWTDDYCMTLLRNCYDALPMNGKVVIVEGILPVKPDAMPSTQTMFQVDMMMLLHTAGGKERELSEFEELAKGAGFSTVKTSYIYSTAWVIEFVK

SEQ ID NO: 6850 - protein, 508 aa, Arabidopsis thaliana
MGSANNEYEFLSEIGLTSHNLGSYVAGKWQANGPLVSTLNPANNQPIAQVVEASLEDYEQGLKACEEAAKIWMQVTAPKRGDIVRQIGDALRSKLDYLGRLLSLEMGKILAEGIGEVQEVIDMCDFAVGLSRQLNGSVIPSERPNHMMLEMWNPLGIVGVITAFNFPCAVLGWNACIALVCGNCVVWKGAPTTPLITIAMTKLVAEVLEKNNLPGAIFTAMCGGAEIGEAIAKDTRIPLVSFTGSSRVGSMVQQTVNARSGKTLLELSGNNAIIVMDDADIQLAARSVLFAAVGTAGQRCTTCRRLLLHESVYDKVLEQLLTSYKQVKIGNPLEKGTLLGPLHTPESKKNFEKGIEVIKSQGGKILTGGKAVEGEGNFVEPTIIEISADAAVVKEELFAPVLYVLKFKSFGEAVAINNSVPQGLSSSIFTRNPENIFRWIGPLGSDCGIVNVNIPTNGAEIGGAFGGEKATGGGREAGSDSWKQYMRRSTCTINYGNELPLAQGINFG

SEQ ID NO: 6851 - protein, 65 aa, Brassica napus
  unsure (1)..(65): unsure at all Xaa locations
MSTFLMRILLALLVLAXTVSQQLEXESEXWCXADEQTPDDELQAALDWACSKGGADCXXXQQXNQ

SEQ ID NO: 6852 - protein, 471 aa, Triticum aestivum
  unsure (1)..(471): unsure at all Xaa locations
MGATGDSEVAAAEGAAAGCRARAALLGAYELGRTLGEGNFGKVKQARHRATGEHFAVKILDRGRVLSLRGADDQVRREIATLTMLAHPNVVRLHEVAASKTKIYMVLEFVNGGELFDRIAIKRKLSEREGTRLFQQLIDGVSYCHGKGVYHRDLKPENVLIDRKGNIKISDFGLSALPQHLGNDGLLHTTCGSPNYIAPEVLQNRGYDGSLSDIWSCGVILYIMLVGHLPFDDRNMVVLYQKIFKGDTQIPEWLSPGAQNLLKRILEPNPMKRINMAEIKLHEWFQKDYIPAAPYDDDDEDVRLGAILPIKQQISEAPGDKSTHQMNAFQLIGMASSLDLSGLFEEEGVSQRKIRFTSAHPPKDLFDKIEVSATQSGFHVQRAHSKLKITGNCNGPNNPTPFLVCAEVFALGPSLHGVELRKXHGDTAVYKKLCDRISSDLGIDKTFGMGSLFDDNLPGFDSRATTPLVAL

SEQ ID NO: 6853 - protein, 166 aa, Vitis vinifera
SRSRKEKENVSFKNHVVQWFEVLDGLLGPYWKAVGLAFNCTFLLIGSVIQLIACASNIYYINDKLDKRTWTYIFGACCATTVFIPSFHNYRIWSFLGLGMTTYTAWYLAIAALIHGQSEGVEHSAPTKLVLYFTGATNILYTFGGHAVTVEIMHAMRKPQKFKYIY

SEQ ID NO: 6854 - protein, 470 aa, GIBBERELLA ZEAE PH-1
MAPSTIADFQDVPCHQAYTPIKPIHREGALMHRSLVQHPYMVESAQGIELKLSTGQTIIDGCGGAAVALIGHGREEVIHAITEQARKVSYVHTQSYTTAPAEELANVLLQGNPYGLEKAFFVGSGSEAVESALKLARQYHYEKGGLEKVHIISRRQCYHGNTMATMSISTNIARRAPYHGFLYPNVSHVSPAFAYHYKDSSESEDQFTARLLVELEEEFLRVGPQKVAAFIAETVVGATSGCVAAPAGYFQGVRALCDKYDVVMILDEIMCGIGRTGTFFAFEQEGVVPDITTVAKGLGGGYAAIAGVLIHKRVVDVLRQGSAAFNHGHTYQAHPISCAAALAVQRIVRRDNLVERCAEMGLVLEKMLKEDLSGCRSVGDIRGRGLFWGVEFVKDRQSKQPFDPAAKFGLLVQQLAFEKGVALYPGGATIDGVKGDHILLAPPFTVTEGSGGGGKNSLLGLTTAHKNMTI

SEQ ID NO: 6855 - protein, 351 aa, Streptococcus agalactiae NEM316
MRAATYLSANELSLTDKAKPQVIKPTDAVVRLVKTTICGTDLHILGGDVPACKPGTTLGHEGIGIVEEVGSAVNHFKVGDKVIISCVTACNTCYYCKHQLPSHCEDGGWILGHLIEGTQAEYVHIPHADGSLYHAPEGVCDDALVMLSDILPTSYEIGVLPSHIKPGDTVCIVGAGAIGLSALLTAQFYSPAKIIMVDLSQKRLEASKKFGATHTILSTSTQEVKEEIDKITKGRGVDVVLECVGYPATFDICQNVVSIGGHIANVGVHGKPVEFNLQDLWIKNITLNTGLVNANTTEMLLEVLETGKIDATQLVTHHFKLSEIEEAYKVFKAAEENNTLKVIIENDITPA

SEQ ID NO: 6856 - protein, 202 aa, Triticum aestivum
MRWSPPGPRELITYHHQRPFLPPSSSSRVLIHHPAQVMIKVAMSDSEDHHFESKADAGASKTYPMQAGAIRKGGFLVIKNRPCKVVEVSTSKTGKHGHAKCHFVALDIFNGKKLEDIVPSSHNCDVPHVDRTEYQLIDISEDGFVSLLTDNGSTKDDLKLPTDDAILTQLKDGFAEGKDLALTVMSAMGEEQICAVKDVGPR

SEQ ID NO: 6857 - protein, 1023 aa, Schizosaccharomyces pombe
MNAQPFHNNTSDVQSFQDIISNSYQKPLSLVDSTDRALPDSSLSSLSRSTFQFHKHHLSGNENPQPSSESPYFTNNERLNSSSFPQIHDNQLSPSFNTSYQAIPSSSSNRSRGGPYTPSIRDDSLLALLSFSSNHRLHSMPSQLQPFNNASSYTTPMAPFTASFSNKVSHSAYPTRRLPSQAKKTSAIERVPVNLNFLQSDNLVVQSSPQTNFENFEFPKKIPSKEDLETREVLLLPPQTSKLSNKNLDTKSFTDVNKISQQGFVEISSNSSKVTPNTSLHQSFGIASSSSNNYMQTSSELTSSTEKMNGSHPLQLSNKSLLSIHLMQSKNQGHVSMTGSDKLSSHVQSETENAPVSKPSKPNTLTEDEKPLQSTKLPGNSLTVGELYQEPKSIQLPELSVSRTTYSAQSSSVKNCNERIPSAKALKKQKHLVPENKSKLQYVWQKKESLPYANLTSASNTHFFLSENQNDTSERLTRTLRKSTKNYTFGSYILGRTIGTGEFGKVKLGWPLPKANSTIHRSTPQVVIKIVLSTKQNCQTSRLMREVAILKGLGNNHPHIVKYLDFVKTKHHFGIVLDYVNGGELFDYILARRRLEDSVACRLFAQLISGVAYLHSRGVVHRDLKLENILLDTNRNIVIADFGFATTFGHFNTLSEHSLPTEKPDLFSTSCGSPCYAAPELVNCKSGMYAGTQADIWSCGVILYAMLAGYLPFDDDPHNPNGENVPRLYRYICSTPLIFPEFFKSKARDILKKILVPDPAKRVRMSAIMNHAYLRSHVSLFETYNDDEATSLRPSPIRLLSQKSLASVSSVSSISTYSSSIELTPQITKTSLNREKPALHGSINLKHSTRPVVPIADGIYASTTLHPIDNAKNRLVSLLRRPKHKVKHAKVETRESPMKNKPTKKQHKRAFSMFERPTSQKAPLSPVESKINLMVAPKRVLNCASDSLRALLAGKTDKSFWGSRIPFLFNKLKSKQKAVSSSFNTENSFLILQAVSPLTFGGCFKEENAYGQKKQHMRHATVF

SEQ ID NO: 6858 - protein, 315 aa, Magnaporthe grisea 70-15
MAAATQKSCLQKLEEMLDVDVDDMDADYIRSMPIKPHDQTSNQAFVDVALAQESNKDLVFQVATEMKGSDWLAVYTRIAVLMCKKNLDLISGRVLLQTSPSKAYDTAATLAHARLYDAEFTRAGVPRDRFCIKIPSTGPGLNAAKVLQGEGISTLGTALFSVVQAVACSQAGCLSISPYFNGHFISVEEAMAAAEMGCQSATLSREILTKLAETPYDANTQPGEGRPKPPHAYNAPEPLPARLQPLLKHDPLTEGWDGSSPSTDVDYLADGGAALQAAIEADPATQKRVRDALEFFVDAEERSRKRIETVMAAVA

SEQ ID NO: 6859 - protein, 317 aa, Zea mays
  unsure (1)..(317): unsure at all Xaa locations
MMDPALLDDVIRRLLEVKNLKPGKNAQLSESEIKQLCAAAKEIFLHQPNLLELEAPIKICGDVHGQYSDLLRLFDYGGYPPQANYLFLGDYVDRGKQSLETICLLLAYKXKYPENFFLLRGNHECASVNRIYGFYDECKRRFSVKLWKTFTDCFNCLPVSALIDEKILCMHGGLSPELNKLEQILNLSRPTDVPDTGLLCDLLWSDPSNEATGWAINDRGVSYTFGPDKVSEFLEKHDLDLICRAHQVVEDGYEFFASRQLVTMFSAPNYCGEFDNAGAMMSVDETLMCSFQILKPARKVLGGSTNNKSGFKSSRGW

SEQ ID NO: 6860 - protein, 229 aa, Triticum aestivum
MGERVKGTVKWFNVTKGFGFISPEDGSEDLFVHQSAIKSDGYRSLNENDTVEFEVITGDDGRTKASDVTAPGGGALSGGSRPGDGGGDRGGRGGYGGGGYGGGGGGGGYGGGGGGYGGGGGGYGGGGGGRGCYKCGEEGHISRDCPQGGGGGGGYGGGGYGGGGGGGRECYKCGEEGHISRDCPQGGGGGGGGGGYGGGGGRGGGGGGGGCFSCGESGHFSRECPNKAH

SEQ ID NO: 6861 - protein, 139 aa, Aeropyrum pernix
MSVNYATLGDLKKGSYIVIDGEPCRIVEMSRAKTGKHGSAKAHVVAICVFSGQKKSLVAPVDTRVQIPVIEKRLGQVLADMGDMVQIMDLETYDTFEVEKPGGNEEEEQLAAKLQPGVTVEYWLIMGKPKIIRIRSSSS

SEQ ID NO: 6862 - protein, 275 aa, Salmonella typhi
  unsure (1)..(275): unsure at all Xaa locations
MANPTIIRLQDGNVMPQLGLGVWKASNEEVIAAIHKALEVGYRSIDTATAYQNEEGVGKALKAASVAREELFITTKLWNDDQKRPREALQESLKKLQLDYLDLYLMHWPVPAIDHYVDAWKGMIALQKEGLVKSIGVCNFQIHHLQRLIDETGVPPVINQIELHPLMQQRQLHAXNATHKIQTESWSPLAQGGEGVFDQKVIRELADKYGKTPAQIVIRWHLDCGLVVIPKSVTPSRIAENFAVWDFRLDKDELGEIAKLDQGKRLGPDPDQSGG

SEQ ID NO: 6863 - protein, 428 aa, ASPERGILLUS NIDULANS FGSC A4
MALFLTGYLLLTFTLTLSFSTLRVWAAGRWPDVVAQELGPQLSSLASIITEPGAVESDFERWSAYSAPQPGVVVSVATEEDVAKTVKFCVSNSIRFLAQNGGHGWADTFDLGPNRRGLLIDITQLNTVVFNANRTQVTLGGGVSIGEAVAAAVEHDTLIPTGNCNCVGTLGAILGGGYGNLLGMVGFGVDNVLELKVVLADGEVHTVTPGRQGKDHDLFWALRGAGPNYGIVTSATLKAYPVDSATNITAWMGQLVFSGEQVEAVVQAIEELTLTPEMNIFLYYMTVNGTQRFIATPFYYGDEGEARGRAAFASLLDIGPIEDQTAEVPYARWNDGSDGFCTSGGYKPAYSAALQTQNSVVIMEAYSLDRARALPDDSAAFPGRSRVNFQAVAIPWYYDQGLENSAIAWGETMRALWWETDGLDDPAV

SEQ ID NO: 6864 - protein, 174 aa, uncultured marine gamma proteobacterium EBAC31A08
MNKFYIFGLLFFTLNAFSCSDLLDTDMRVLDSAESRNLCEFEGKALLVVNVASRCGYTYQYAGLQKLYESYKDEDFLVIGIPSRDFLQEYSDESDVAEFCSTEYGVEFPMFSTAKVKGKKAHPFYKKLIAESGFTPSWNFNKYLISKEGKVVSTYGSKVKPDSKELISAIEGLL

SEQ ID NO: 6865 - protein, 284 aa, Desulfitobacterium hafniense DCB-2
MELWYTEEHTENVRFSIKVDRQLYSGQSEFQRIDVFESKEFGTFFTLDGLMMVTQKDEFIYHDMIVHVPMATNPQIKDVLVIGAGDGGTVRELTRYDSIVNIDMVEIDKLVVDVCKEYLPQTACKLEDPRVRLFFEDGLRFIRTKENSYDLIIVDSTDPFGPGEGLFTKEFYGNCYKALKDDGILVNQHESPYYETYAQNMGRAHQRIKEFFPVCRVYQAHIPTYPSGHWLFGFASKKYDPLIDIDEQAWNDLGIKTQYYNTEIHKGCFALPNYVKEQLADAVE

SEQ ID NO: 6866 - protein, 252 aa, Zea mays
MASKSTLRSLVLIMGLLLLSCSGMSSAARLLEEVAPKEEYPHPEVPELPKPELPPHPTVPELPKPVVPELPKPEVPVHPAVPELPKPEIPPHSTVPELPKPEVPELPKPEVPEHPAVPELPKPELPPHPTVPELPKPEVPELPKPEVPEHPAVPELPKPELPPHPTVPELPKPEVPELPKPEVPEHPAVPELPHPDVPEHPASVPELPKPEVPEHPTVPELPKQELPPLPEPELPLPPKAESHYPEPGMAKP

SEQ ID NO: 6867 - protein, 461 aa, Sorghum bicolor
MDERRTILMDRYEIGRQLGQGNFAKVYFARNLTDGQSVAIKMIDKDKITRVGLIVQIKREISIMRLVKHPNVLQLFEVMASKSKIYFVLEYAKGGELFNKISKGKFSEDVARRYFHQLISAVDYCHSRGVYHRDLKPENLLLDENENLKVSDFGLSALAESKRHDGLLHTTCGTPAYVAPEVLSRRGYDGTKADIWSCGVILFVLVAGYLPFHDPNLIEMYRKISKAEYRCPRSFSGELKDLLFRMLDPDPSTRISISRIKRSTWYRKPIEVNSAKIKHDTTRDKVCNGEATTSNSIECSNSEETRGSSSLPNLNAFDIISLSTGFDLSNLFEEKYGRREERFTTRQPAGTVFAKLNELAERLKLKIKKKENGVLKLASPKEGIKGFLELDAEIFELAPSFLLVELKKTNGDTIEYQRLVKEEIRPALKDMVWAWQSDRHQQRNESVQGEQQLSSPLPPQQ

SEQ ID NO: 6868 - protein, 466 aa, Shigella flexneri 2a str. 301
MDQKLLTDFRSELLDSRFGAKAISTIAESKRFPLHEMRDDVAFQIINDELYLDGNARQNLATFCQTWDDENVHKLMDLSINKNWIDKEEYPQSAAIDLRCVNMVADLWHAPAPKNGQAVGTNTIGSSEACMLGGMAMKWRWRKRMEAAGKPTDKPNLVCGPVQICWHKFARYWDVELREIPMRPGQLFMDPKRMIEACDENTIGVVPTFGVTYTGNYEFPQPLHDALDKFQADTGIDIDMHIDAASGGFLAPFVAPDIVWDFRLPRVKSISASGHKFGLAPLGCGWVIWRDEEALPQELVFNVDYLGGQIGTFAINFSRPAGQVIAQYYEFLRLGREGYTKVQNASYQVAAYLADEIAKQGPYEFICTGRPDEGIPAVCFKLKDGEDPGYTLYDLSERLRLRGWQVPAFTLGGEATDIVVMRIMCRRGFEMDFAELLLEDYKASLKYLSDHPKLQGIAQQNSFKHT

SEQ ID NO: 6869 - protein, 181 aa, Zea mays
  unsure (1)..(181): unsure at all Xaa locations
MASSMLSSATMVASPAQATMVAPFNGLKSSAAFPATRKANNDITSITSNGGXRVNCMQVWPPIGKKKFETLSYLPDLTDSELAKEVDYLIRNKWIPCVEFELEHGFVYREHGNSPGYCDGRYWTMWKLPLFGCTDSAQVLKEVEECKKEYPNAFIRIIGFDNTRQVQCISFIAYKPPSFTG

SEQ ID NO: 6870 - protein, 174 aa, Triticum aestivum
  unsure (1)..(174): unsure at all Xaa locations
MSDTDEHHFESKADSGASKTYPQQAGAIRKGGHIVIKARPCKVVXEVSTSKTGKHGHAKCHFVAIDIFNGKKLEDIVPSSHNCDVPHVDRQDYQLIDITDDGYVSLLTESGXTKDDLKLPTDDGLLXQIKTGFADGXDWILAVMSAMGEEQICAVRKIGWQVAVAWLATCDTCI

SEQ ID NO: 6871 - protein, 498 aa, Medicago truncatula
MGILSYLCYSLFYLSIFFIIRLLFQSRKFKNLPPGPTSLPIIGNLHHLKRPLNRTFKALTEKYGNVISLWFGSRLVVVVSSLSEFQECFTKNDVVLANRPRFLSGKYIFYNYTTLGSTSYGEHWRNLRRITSLDVLSNHRINNFAPIRRDETQRLIKKLAEDSSTKFAEVELTFRFFDMTFNNIMRMISGKRYYGDDCDISEVQEASQFRDMVSELLQLSGANNKTDFMPLLKFLDFENLEKRVKRIGEKNDVFLSGLLQEQRSKKERTNTMIDHLLNMQESQPEYYTDTIIKGLCLAMLLAGTDSSAVTLEWTMSNILNYPEVLKKVRDEVDTHVGQDRLVDESDLPKLTYLRNVIYETLRLYTPAPLLLPHSTADECIMGGYKVPRDTIVLINAWAIHRDPETWSEATTFKPERFDKKGELEKMIAFGMGRRACPGEGLALRAISMTLALLVQCFDWKRINDEKIDMSERDGFTMTKLLPLKAMCKTRPVVNKVFK

SEQ ID NO: 6872 - protein, 291 aa, Saccharomyces cerevisiae
  unsure (1)..(291): unsure at all Xaa locations
XVHVASVEKGRSYEDFQKVYNAIALKLREDDEYDNYIGYGPVLVRLAWHISGTWDKHDNTGGSYGGTYRFKKEFNDPSNAGLQNGFKFLEPIHKEFPWISSGDLFSLGGVTAVQEMQGPKIPWRCGRVDTPEDTTPDNGRLPDADKDAGYVRTFFQRLNMNDREVVALMGAHALGKTHLKNSGYEGPWGAANNVFTNEYYLNLLNEDWKLEKNDANNEQWDSKSGYMMLPTDYSLIQDPKYLSIVKEYANDQDKFFKDFSKAFEKLLENGITFPKDAPSPFIFKTLEEQGL

SEQ ID NO: 6873 - protein, 484 aa, Triticum aestivum
MANNNSSYGENVSRKSHTPSAIVIGGGFAGIAAANALRNASFRVVLLESRDRIGGRVHTDYSFGFPVDLGASWLHGVCEENPLAPIIGRLGLPLYRTSGDDSVLFDHDLESYALYDTNGSQVPQEFVEKIGEVFEAILEETAKLREEMREDISIAKAIAIVLERNPHLRQEGIAHDVLQWYWCRMEGWFATDADAISLQCWDQEVLLPGGHGLMVRGYRPVINTLAKGLDIRLGHRVVEIVRHWNRVEVTVSNGKTFVADAAVITVPLGVLKSNTIKFEPRLPEWKEEAIRELSVGVENKIVLHFSEVFWPNVEFLGVVSSTTYGCSYFLNLHKATGHAVLVYMPAGRLACDIEKMSDEAAAQFAFSQLKKILPNAAEPLNYLVSHWGSDENTLGSYTFDGVGKPRDLYEKLRIPVDNLFFAGEATSVQYTGTVHGAFSTGEMAAEECRMRVLEKFRELDMLEMCHPMAEQTATVSVPLLISRL

SEQ ID NO: 6874 - protein, 291 aa, Saccharomyces cerevisiae
  unsure (1)..(291): unsure at all Xaa locations
XVHVASVEKGRSYEDFQKVYNAIALKLREDDEYDNYIGYGPVLVRLAWHISGTWDKHDNTGGSYGGTYRFKKEFNDPSNAGLQNGFKFLEPIHKEFPWISSGDLFSLGGVTAVQEMQGPKIPWRCGRVDTPEDTTPDNGRLPDADKDAGYVRTFFQRLNMNDREVVALMGAHALGKTHLKNSGYEGPWGAANNVFTNEKYLNLLNEDWKLEKNDANNEQWDSKSGYMMLPTDYSLIQDPKYLSIVKEYANDQDKFFKDFSKAFEKLLENGITFPKDAPSPFIFKTLEEQGL

SEQ ID NO: 6875 - protein, 254 aa, Acinetobacter sp. ADP1
MTPQQIELVKSTVPVLREHGVTLTSYFYNRMLNNHPELKNVFNLDHQSTGRQPRALAAAVLAYAEHIEQPEKLAKAVERITTKHVSLNIQPEQYAIVGENLLHSISEVLNVPFESELIEAWKQAYLQLADILIEVEKEKYHQLAKQDGGWTGWRSFKIIAIQEQYEGKCFKISATDQQAILAATLGEYISVKVHVPEKELDQPQQFNLNTTQADDHYEFVVKPEPAHSDYDVANILLNHYSLGDEVMVSAPIRN

SEQ ID NO: 6876 - protein, 534 aa, Glycine max
MGNCCATPSTDETANKKGKKGKKENPFAIDYGFNATAANGSKLTVLKSPTGREIEARYELGRELGRGEFGITYLCTDKGTGEELACKSISKKKLRTAIDIEDVRREVEIMRHLPQHANIVTLKDTYEDDNAVHLVMELCEGGELFDRIVARGHYTERAAAAVTKTIVEVVQMCHKQGVMHRDLKPENFLFANKKETAALKAIDFGLSVFFKPGEKFNEIVGSPYYMAPEVLKRNYGPEVDIWSAGVILYILLCGVPPFWAETEQGVAQAIIRSVVDFKRDPWPKVSDNAKDLVKKMLDPDPKRRLTAQDVLDHPWLQNAKKAPNVSLGETVRARLKQFSVMNKLKKRALRVIAEHLTVEEAAGLKEGFQLMDTNNRGKINIDELRVGLHKLGHQVPESDVQALMDAGDVDGDGHLDYGEFVAISVHLRKMGNDEHLRKAFQFFDQNKSEYIEIEELRSALSDDLDTNSEEVISAIMHDVDTDKDGRISYDEFATMMKAGTDWRKASRQYSRERFASLSLTLMRDGSLHLNNEKQ

SEQ ID NO: 6877 - protein, 501 aa, Medicago truncatula
ALFYYSLLSLSFIITIKILLKITSRRLKNLPPGPPTIPIIGNLHHLKHPLHRTFTTLSQTYGDIFSLWFGSRLVVVVSSPSLAHECFTKNDIILANRPRFLTGKYIFYNYTTLGSASYGDHWRNLRRITTIDVLSNNRLNSFLGVRRDETNRLIQKLLKDVVSEGFGFTKVELRPRLTEMTFNAMMRMISGKRYYGDDGDVSDVEEAKQFREIISEMMSLLGANNKGDFLPLLRVVDLDNLEKRCKRIAKRSNAFLEGLIEEHRRGNIHSDGGTMIDHLLKLSESQPEYYSDHLIKGLIQGMLLAGTDTSAVTIEWVMSELLNHPEVLKKAKEELDTQIGKNKLVDEQDLSKLPYLQNIISETLRLHPPAPLLLPHYSSEDCTIGEFNVPKDTIILTNVWGIHRDPKHWNDALSFKPERFEKEEEVNKVMAFGLGRRACPGLSLAQRTVGFTVGLLIQCFEWERESEEKLDMMEGKGITMPMKIPLRAMCKALPIANDVTK

SEQ ID NO: 6878 - protein, 384 aa, Exiguobacterium sp. 255-15
MLTPSAITIIKSTVPVLAEHGHSITRVFYQRLFENHPEMKHIFNQSNQKNDRQSQALATAVYAAAAYIDQLETLKPTLLPVLHKHRSLQIKPYMYDIVGTELIGAIQDVLKDAATPDIIDAWTAGYGEIAKLFISLEAELYQQDEQATDFEGYQPFVIETMTTESSDIKAFTLRPADGRPLAPYQTGQYVTVRLQAPDGLWQNRQYSLTTVANGTSYTIGVKQDGSVSRQLHGLSVGEKVLLSAPAGSFTLTDASTPFVGLAGGIGLTPLLAMTEAALAVGRKTTLYVAVQDDLDRPFAEQLARFEEQGATIIRYAERNALPGTTPGRLSVADVTNIDPAADTYVCGPEAMIQFVRRYFSGQADKLHFEVFGPSLALEAPTAVS

SEQ ID NO: 6879 - protein, 120 aa, Glycine max
  unsure (1)..(120): unsure at all Xaa locations
FGTNKAAQLASSMISSPAVTTVNRAGAGMVAPFTGLKSMAGFPTXKTNNDITSIASNGGRVQCMQVWPPVGKKKFETLSYLPDLDDAQLAKEVEYLLMKGWIPCLEIQLEQRFVFREPHQ

SEQ ID NO: 6880 - protein, 1238 aa, Brassica napus
MDGKGKKCGSKKESKVFDFEDDDEPIGSLLKVMKHKTATKSKVETETTGKQRQKGAVEKKLTHVRKDSEDMDDTLASFRKRLKGHKKRVRNDKDVPPVDTVTDSNLIPSPDMADDASELGREGTVNKKSLDDIYKTKVKSSTRSVTLEKEADADDKSKRPLPNVDVYPPVDRKDVSVPSPDQHIHLGEPESESGHFREEKIVMCDCGIQFNFEDRSLDSNSEVAICQKCKRSSHRDASNGGGIQVNTLKDGTAEASPVSVTPYEDEDFRGDAVSLPNSGKPSTLQRPERIARKRKHENMVYGEDMNWENEQGFLDCQSDKSFKGSDKCDFGPFISKEFEIGRAAAVAAGLKAQSVSPVEKTILKEVLKRKGSHQEYLRCRNSILGLWSKNVSRILPVTECVVGHSESEFPSAGLIREVYKFLDQRGYINTGVSSVRGKGGPSTNHDDDLSQGKKLEESSMASVANSDGDTFIFGQVKAVESTSEGKNCALQNDETEIVECATSAMLGSTRKTCEASIIDDCKHSVSINALLADANAPKVEKCPETISVRKTVLSSTLSSANCDQMRGRDCVQGEVEDEKKVIVIGAGPAGLTAARHLQRQGFSVTVLEARSRVGGRVYTDRSSLSVPVDLGASIITGIEADVPSERMPDPSALVCNQLGEKVPPELDDALQGEFNSLIDDMDLLVEEIGKDRANKMSLEDGLEYGLQRLRMPHEKVNIERFGIGNSINGSFSRTGITGTFKHDGRLKEDFLNPLERRVMNWHFAHTEYGCAAVLKEVSLSNWNQDEFYGGFGGPHAMIKGGYSRVAESLAEGLDIRLNNVVSEVSYASDVSAMHNNKHKVIVSTSNGGEYLGDAVLVTVPLGCLKAETIKFSPPLPDWKYSSIKQLGFGVLNKVVLEFSKVFWDDSLDYFGATAEETDQRGECFMFWNVKKTVGAPVLIALVVGKAAVDYKDKSKSEHVNHAMMVLRKLFGGDLVPDPVASVVTDWGADPYSYGAYSYVAIGASGEDYDVLGRPVQNCLFFAGEATCKEHPDTVGGAMMTGVREAVRIIDILRSGNDYTAEIETLEKAQRKSVSIRDEVSDLIKRLEVVELSNVLARHSLLRNMFFSAKTTVGRLHLAKELLNLPGETLKSFAGTKEGLTVLNSWILDSMGKNGTQLLRHCVHILVRVTSDLFAVRLSDSKGNLSNGNYTTTDGEIEDNQLPMSEEEKAVFATAEAARVAAEAAAKASFFYLRMSEMH

SEQ ID NO: 6881 - protein, 324 aa, Magnaporthe grisea 70-15
MDSYQEPTGEEPPTIDPYEVLSLDHTATPDQVKAAYRKAALKNHPDKVPEDQKASAHEKFQQIAFAYAVLSDPARRARYDATGSTSESIVDSDGFDWSDFYRAQFADAVSGEAIEKFARTYKGSDEERDDVLAAYEAGRGDLDVVYESVMLSNVLEDDERFRAWIDEAISKGDVEGFKAYTKESKKKRDKRVKDAKGEAAEAEEYAKELGVHGKLFGGGAAGEGKGKGKGKKKDAGGEDALAALIRGRQADRMDALDRLAEKYGAAAPKAKKKGKKRAAEDEDDEDGGEPSEEAFQATQARLFGKKSNGEKAAAGSTKKRTRRG

SEQ ID NO: 6882 - protein, 315 aa, Bradyrhizobium japonicum USDA 110
MPVVLDPDAAAVYMAFQEAGRPAYETLTAAEARAYYAQARFATNPEPPELARVAPLAIPAPHGTIPARIYVPNDPRRHDGLSPALVFFHGGGWVIGDLDSHDVVCRQLAVEAALIVISVDYRLAPEHKFPAAADDAIAATKWVAANACELGIDASRLSIGGDSAGGNLAAVVALAARDDSGPAIAGQILIYPAVDFAMTHGSHSEPETSVLLTHSVIRWFRDHYLNGAADIHDWRASPARAENLAGLPPAYVLTAGADPLRDEGDEYAARLKQAGVSVTYKHFPGQFHGFFTMGKLLREANVAVSEIGAWLKGLG

SEQ ID NO: 6883 - protein, 468 aa, Methanosarcina acetivorans C2A
MISRKMNLESLDESKKYRVGAYSARYVPKTKEKGIPKYEFPEEGMSPRAAYQLVHDEQSLDGNPFLNLASFVNTWMEPEADKLVMENISKNIIDIFEYPQTSRVIHHNMVNMLGRLFNGHHTDFVGTSTAGSSEAIMLGLLAHKWSWKKSGRGTDKPNIIFGNDAHVCWDKFARYFDVDTRKVPIDKDRRTITAEAVAERIDENTICVGCVLGTTFTGEIDPVKDINDLLLEYKEEKGWDIPIHIDAASGGFILPFTEPDFEWDFRLERVKSINVSGHKYGLTYPGLGWLIFRNKNALPEDLIFHVNYLGEMEDSYTLNFSGGSAMVAAQYYNFLRFGRAGYTGIMKKILAVSQDLAEKVDRLGRFEMLNKGERLPIIAFRQKEKTGYSLLQLSHKLREKGWIVPAYCLPENAADIEIMRIVVRENLTPDMASIIVEDLEKACQFLENGTEAGAEKPCPSGKDMAHIC

SEQ ID NO: 6884 - protein, 437 aa, Methylobacillus flagellatus KT
MPISLLPLTLLFSLCIVPLPVSAGEGAPQALAVDSVWVAISGALVFMMQAGFAMLESGMTRAKNAVNVMMKNYMDLAVGALLFWLVGYGLMFGSNPSGWIGTDHFALAHGDDWGASMLFFQVMFAATAATIVSGAMAERTNFIAYLLGACGIMALIYPVFGSWAWNEHGWLKQMGFIDFAGSTVVHSVGAWCALAGIMVLGPRLGRFGSKGEVHMIPGHNLSLVAMGGFLLWFGWFGFNGGSTLAAGVEIGPILLNTHMAGAAGAVGALLVALAMRRPILMAYVVNGSLGGLVAITAGCASMDVPFAVLTGFIGGIVTMLGVWALEKLRLDDVVGAVAVHGFSGVWGTVAAGLFLKDNMFDLNQVLVQMIGVAVAFVWVFLSALLMYGLLARTIGLRVSTMHEQRGLDITEHGEVGYPEFNREAAYQPEHVQHLSRL

SEQ ID NO: 6885 - protein, 206 aa, Zea mays
  unsure (1)..(206): unsure at all Xaa locations
MTTGEGAEAAAVPRVVSILSALLQRVAERNDAAAAAPPPAAAAGPPVLSAFQGLTKPAISIGGYLERIFRFAGCSPSCYVVAYIYLDRFLRRRPALAVDSFNVHRLLITSVLTAVKFVDDICYNNAYFARVGGISLVEMNYLEVDFLFGIGFDLNVAPGXFGDYCAVXRSELLCAEAAPAPLRLQHCCLSEDDAGAGCSAQQQLAA

SEQ ID NO: 6886 - protein, 252 aa, Zea mays
  unsure (1)..(252): unsure at all Xaa locations
MAKNYPTVSAEYSEAVEKARRKLRALIAEKSCAPLMLRLAWHSAGTVRRVVEDRAVPFGTMKCPAELAHGANAGLDIAVRLLEPIKEEFPTLSYADFYQLAGVVAVEVTGGPEIPFHPGREDKPQPPPEGRLPDATKGSDHLRQVFAXKQMGLSDQDIVALSGGHTLGRCHKERSGFEGAWTTNPLVFDNSYFKELLSGDKEGLLQLPSDKALLSDPVFRPLVEKYAADEKAFFDDYKEAHLKLSELGYADA

SEQ ID NO: 6887 - protein, 124 aa, Brucella melitensis biovar Abortus
MADLAKIVEDLSALTVLEAAELSKLLEEKWGVSAAAPVAVAAAGGAAPAAAAEEKTEFDVVLADGGANKINVIKEVRALTGLGLKEAKDLVEGAPKAVKEGASNDEAEKIKAQLEAAGAKVELK

SEQ ID NO: 6888 - protein, 225 aa, Listeria innocua Clip11262
MNEINPTSERVNTEKRTNKQIIMQKILNWFVFSLLLASIGAAIGSKLSPELYLPLVVLEVALLITAMVVRRSKTINKVVGYPVVLAFAFVTGLTLGPTLTYYFGAGQGAAVLMAFVTATITFTTLAFIGAKMKRDLSFLSSALFAAIIILIIFSFAGVFLPLGSMLTTIISAGGTIIFSLYILYDFNQIMKRDVELADVPMLALNLYLDFLNLFMFLLRLFTGRD

SEQ ID NO: 6889 - protein, 423 aa, Kluyveromyces lactis
MRVIRQLHTSKRLLQSLVDKQKYQATTYARPNHLVLTRGKNAILYDDVNNKEYIDFTAGIAVTALGHANPEVAEIMYKQSKKLIHSSNLYYNEECLKLSENLVEATKSFGGQYDASRVFLCNSGTEANEAALKFAKRYGILKSPSKQGIIAFQNSFHGRTMGALSVTSNPKYREPFGSLIPGVEFLNINDELTKLDQQVSSLKEKTAGLIVEPIQGEGGVFPIPLDSLVGLKKICEDHDIIVIYDEIQCGLGRSGKLWAHSYLPKEAHPDIFTTAKALGNGFPIAATVTNDKVNDILKVGDHGTTYGGNPLGSAVGNYVVNVIAEQKFLDEVNKKGEIITNRLRKLQERFPEHIKDIRGKGLMIGCDFDEAPAKIVDAARDSGLLIITAGKTTVRFVPALTIEDNLLEKGLNIFEKAVEKVYS

SEQ ID NO: 6890 - protein, 437 aa, Cicer arietinum
NSARVMTLKLGQVTTVVISSADMAKEVLLTHDLITSNRTVPDALSVLNHDQYSLSFMRVSPRWRDLRKICNYQLFSNKTLDSSQALRRRKLQDLLNDIERCSKVGEAVDVGKAAFKTTVNLLSNTFFSVDFVHSAKEAGEYKEIIVSILKEVGVPNVSDFFPMLKFLDLQGIRKRSIVSVKKVLSIFKRFVGERVKMREGTGSIGNDDVLDALLNMSSDGGKIEMDKDEIEHLLLNIFVAGTDTTTYTLEWAMAELIHNPEMMSKLKEELEKTVGKGIPVEETDIAKLPYMQAVIKETFRLHPPVPLLLPRRAEIDVKIGDYVIPKDAQILINAWVVGRDPTKWENPNVFIPERFLDSEIDIKGHHFELIPFGSGRRTCPGLPLAIRMLPLMLGSLVNCFDWKLEDGLNVEDFNKEDEFGITLEKSQPVRIVPTKLY

SEQ ID NO: 6891 - protein, 320 aa, Vibrio cholerae
MIKKIGVLTSGGDAPGMNAAIRGVVRTALGAGLEVFGIYDGYQGLYEDRIKQLDRSSVSDVINRGGTFLGSARFPQFREVEVREKAIENLKKHGIEALVVIGGDGSYMGAKKLTEMGFPCIGLPGTIDNDIAGTDYTIGYLTALNTVIEAIDRLRDTSSSHQRISIVEIMGRHCGDLTLTSAIAGGCEYIITPETGLNMEQLISNIKDGIAKGKKHAIIALTELMMDANKLAKEIESATGRETRATVLGHIQRGGKPTAFDRVLASRMGNYAVHLLMEGHGGRCVGIQKEQLVHHDIIDAIENMKRPVRTDLYKVAEELF

SEQ ID NO: 6892 - protein, 371 aa, Populus alba
MSFLQQQETHNQSPALALDGLYCEEDGFGEDYSCGLDDETSQVYDQNVKKEQNLSSVLLEQDLFWEDSELLSLISKEKETHVVFDSVGSRDGSLMVVRREAVEWFLRVKAHYGFSALTGVLAVNYFDRFISSSRFRRDKPWMGQLAAVACLSLAAKVEETQVPLLLDLQVEDAKYVFEAKTIKRMELWVLSTLHWRMNPVTSISFFDHIIRRLGLKTHMHWEFLWRCERLLLSVISDSRFMSYLPSILATATMLHVIKEVEPRNQLQYQTQLMAVLKTNEDEVNECYRLILEQPGSQNQRHKRKYLSTPSSPNGVIDASFSSENSNDSWAVASSISSSSSVPQFKRSRAQVQQMRLPSLNRMCVDVLSSPH

SEQ ID NO: 6893 - protein, 316 aa, Salmonella enterica subsp. enterica serovar Typhi Ty2
MNQLDGIKQFTTVVADSGDIESIRHYQPQDATTNPSLLLKAAGLEQYGHLIEDAIAWGKKHGGTQEQQVAAASDKLAVNFGAEILKSIPGRVSTEVDVRLSFDKEKSIEKARHLVDLYQQQDVDKSRILIKLAATWEGIRAAEQLEKEGINCNLTLLFSFAQARACAEAGVYLISPFVGRIYDWYQARSPLEPYVVEEDPGVKSVRNIYDYFKQHRYETIVMGASFRRTEQILALTGCDRLTISPNLLKELKEKEEPVIRKLVPSSQMFHRPTPMTEAEFRWEHNQDAMAVEKLSEGIRLFAVDQRKLEDLLAAKL

SEQ ID NO: 6894 - protein, 280 aa, Glycine max
MKGEYVEQQQQHPKSETPPSMFSKLQPQHHPFPHHPFQLSAEDATTITPSTAQKANSSGGDGATIEVVRRPRGRPPGSKNKPKPPVIITRDPEPAMSPYILEVSGGNDVVEAIAQFSHRKNMGICVLTGSGTVANVTLRQPSTTPGTTVTFHGRFDILSVSATFLPQQSGASPAVPNGFAISLAGPQGQIVGGLVAGGLMAAGTVFVIAASFNNPAYHRLPPEEEGASAGDGHSPPVSGGGDSGHGQAESCGMSMYSCHLPSDVIWAPTARPPPPPPPPY

SEQ ID NO: 6895 - protein, 402 aa, Bacillus cereus ATCC 10987
MLSEKTIEIVKSTVPLLQEKGVEITTRFYEILFSEHPELLNIFNHTNQKKGRQQQALANAVYAAATYIDNLEVIIPVVKQIGHKHRSLGIKAEHYPIVGTCLLRAIKEVAGAPDEVLNAWGEAYGVIADAFISIEAEMYEEAAHKEGGWKDFRNFVVVKKVKESDVITSFYLKPEDGGKVSSFIPGQYVTVQINIEGETYTHNRQYSLSDAPGKEYYRISVKKEKGVDTPDGKVSNYLHDHVKEGDMLPVSAPAGDFVLNMDSTLPVVLISGGVGITPMMSMLNTLIEQDSKRNVCFVHAALNSNTHAMKEHVEALDNEYEQVKAYTCYSAPTEKDLEMKNFDKEGLIEAEWLQTIIPTTEAEFYFCGPVAFMKHINATLTDLGVKQEHIHYEFFGPAASLQ

SEQ ID NO: 6896 - protein, 510 aa, Oryza sativa (japonica cultivar-group)
MAEFRQRGQVPEDVESSIGTVLSYIHFAIPDAPVSSHARLSALPPDDDDDGVDRLSLLPDALLRRIVSRLPVKDAARTAALSSRWRDAWRSTPLVLVDADLLPAGVSDADTDAAREEARAVTFAVSRVIAAHPGPFRRLHLTSSFMDQYQGLLASWLQVLAVKGIQELILVNRPFPADLTLPATFFGMATLTRLYLGLWKFPDTAALPRAACFPNLRDLGFSLIGITNHDMDFVLARSPVLETLCLQANTLQRVRVASRSLRCLMMMGFDQDVNVVNAPRLERLIMLYSCGSSMLVKIGRAPSLRAIGYLDLETHVLEIGDTIIKAGTRASPSTMVPSVKILGIIVCFGVRNEAKMLPSFLRCFPNVETLHVESRKTDELTGKLNLKFWQDAGAIECIQSHITVMIFRRFRATRGEINFLKFVLESARMLKKLIIVSPKGTFASTDEANFRLKPLFATKWASKCCSLVVLESDASAGESNWNFERGCDFSLMDPFAIIIRSSRLDISGSC

SEQ ID NO: 6897 - protein, 322 aa, Neurospora crassa
MVPAIKLNSGFDMPQVGFGLWKVDGSIASDVVYNAIKAGYRLFDGACDYGNEVECGQGVARAIKEGIVKREELFIVSKLWNTFHDGDRVEPIVRKQLADWGLEYFDLYLIHFPVALEYVDPSVRYPPGWHFDGKSEIRPSKATIQETWTAMESLVEKGLSKSIGVSNFQAQLLYDLLRYAKVRPATLQIEHHPYLVQQNLLNLAKAEGIAVTAYSSFGPASFREFNMEHAQKLQPLLEDPTIKAIGDKYNKDPAQVLLRWATQRGLAIIPKSSREATMKSNLNSLDFDLSEEDIKTISGFDRGIRFNQPTNYFSAENLWIFG

SEQ ID NO: 6898 - protein, 396 aa, Escherichia coli O157:H7
MLDAQTIATVKATIPLLVETGPKLTAHFYDRMFTHNPELKEIFNMSNQRNGDQREALFNAIAAYASNIENLPALLPAVEKIAQKHTSFQIKPEQYNIVGEHLLATLDEMFSPGQEVLDAWGKAYGVLANVFINREAEIYNENASKAGGWEGTRDFRIVAKTPRSALITSFELEPVDGGAVAEYRPGQYLGVWLKPEGFPHQEIRQYSLTRKPDGKGYRIAVKREEGGQVSNWLHNHANVGDVVKLVAPAGDFFMAVADDTPVTLISAGVGQTPMLAMLDTLAKAGHTAQVNWFHAAENGDVHAFADEVKELGQSLPRFTAHTWYRQPSEADRAKGQFDSEGLMDLSKLEGAFSDPTMQFYLCGPVGFMQFAAKQLVDLGVKQENIHYECFGPHKVL

SEQ ID NO: 6899 - protein, 499 aa, Medicago truncatula
MTTFYLSLIISLFFLIITLKVFFNTSRKFKNLPPGPQCLPIIGNLHQLKQPLHHTFHTLSQKYGQIFSLWFGSRLVVVVSSLTIAQECFTKNDIVLANRPHFLTGKYIGYNNTTVAQSPYGDHWRNLRRILSIEILSSHRLNSFLEIRRDEIMRLIQKLAQKSYNGFTEVELRPMFSEMTFNTIMRMVSGKRYYGNDCDVSDVEEARLFRGIIKEVVSLGGANNVGDFLGFLRWFDFDGLEKRLKKISKRTDAFLQGLIDEHRFGKRNSNTMIDHLLTQQQSQPEYYTDQIIKGLMVVMLLAGTDTSSVTIEWAMSNLLNHPEIMKKAKNELDTHIGHDRQVDEHDISKLPYLQSIVYETLRLHAAAPLLVPHLSSEDFSLGGYNIPQNTILMVNAWVIHRDPNLWSDPTCFKPERFEKEGEVNKLLSFGLGRRACPGENLSQRTEGLTLGLLIQCFEWKRIGEEKIDMVEAKGITAGKKTSLNAMCKVRHPLKINDVF

SEQ ID NO: 6900 - protein, 341 aa, Streptomyces avermitilis MA-4680
MLGCVIHGRGDLRVDELPEPAAGPGQALVAVRYGGVCGSDLHYWRHGGVGDFRLREPMVLGHEVVGTVLSYGPGAAGPAPGTAVAVHPATPCGVCPECADGRANVCRDTRYLGSAARMPHVQGGFAARVVVPAAQVRALPEGLDLRRAALAEPLSVALHAVRRAGPVAGRPVLVTGAGPIGCLVVAAAKAAGAGRVTVTDLLPRALSYAAGVGADDVVRADDPADAGWPDSVDVAVEASGVAAGLDTCLRLVRRGGVVVQLGMLPPGQTPFAGNLVVSREIELRGAFRFADEFDEALTLLAREPAFDSLISAVVPLEEAESAFALAADRGEACKVLLDFGV

SEQ ID NO: 6901 - protein, 213 aa, Arabidopsis thaliana
MGCFHSTAAREFPDHENPVKLASETAFSVSEVEALYELFKSISSSVVDDGLINKEEFQLALFKNRKKENLFANRIFDLFDVKRKGVIDFGDFVRSLNVFHPNASLEEKTDFTFRLYDMDCTGFIERQEVKQMLIALLCESEMKLADDTIEMILDQTFEDADVDRDGKIDKTEWSNFVIKNPSLLKIMTLPYLRDITTTFPSFVFNSEVDEIAT

SEQ ID NO: 6902 - protein, 294 aa, Daucus carota
MDQYEKVEKIGEGTYGVVYKARDRVTNETIALKKIRLEQEDEGVPSTAIREISLLKEMQHENIVRLQDVVHSEKRLYLVFEYLDLDLKKHMDSCPEFAKDPRLIKMFLYQILRGIAYCHSHRVLHRDLKPQNLLIDRRTNALKLADFGLARAFGIPVRTFTHEVVTLWYRAPEILLGSRHYSTPVDVWSVGCIFAEMVNQQPLFPGDSEIDELFKIFRIVGTPNEDTWPGVTALPDFKSAFPKWPSKELGNVVPNLDVAGLNLLKKMLCLDPSRRITARSALEHEYFKDIGIVP

SEQ ID NO: 6903 - protein, 375 aa, Zea mays
MDSTLNQVKEESHGEGGDLMAGTVEAADGPSAAVAAAPKPMEGLHDPGPPPFLTKTYDMVDDSDTDLIVSWSATNNSFVVWDPHAFATVLLPRHFKHNNFSSFVRQLNTYGFRKVDPDRWEFANEGFLRGQRHLLKNIRRRKPPAQNATNQQSIGPYLEVGHFGYDAEIDMLKRDKQLLMAEVVKLRQEQQNTKANLKAMEDRLQGTEQKQQQMMAFLARVMRNPEFLKHLVSQNEMRKELQDAISKKRRRRIDQGPEADDLGASSSLEQGSPVLFNAQDPVEFLVDGIPADLESPAFDGHGLIGPHDIDIDIDIGSTSEQQQDMPQEDLNDNFWEQLLNEGLGEENDSPVIEDDMNVLSEKMGYLNSDGPTSSN

SEQ ID NO: 6904 - protein, 408 aa, Pirellula sp.
MLSEKTIRIVKEITPLVAANAETITRRFYERMFEANPEVKAFFNQAHQHSGGQQKALAGAICAYFTHIDNPAVLMPAVELIAQKHVSLGIKPEHYPIVGSNLLAAIGDVMGDAATPEIVEAVSEAYGFLADIFIGREGAIYEEQASMPGGWNGTRTFVVTKKVRESEIVTSFYLKPEDEGPLPPFKPGQYITVHMDHPHTPTSPRNYSLSDCASQPHYRISVKREERLVPDAPDGLISNHLHDGIEEGHRIELGPPCGEFTVDPATIAKPIVLIAGGIGVTPLLSMAKSIVHANPNAELHFIQAARNSKVHAFADELRRLAQAGPNVHTKVIYDSPLPGDVEEGKCDEAGFVTENQIRESTPFTDADFYFCGPKPFMKNVHSCLRELGVDEHRVRYEFFGPKEELVAV

SEQ ID NO: 6905 - protein, 481 aa, Haemophilus somnus 129PT
MNIQHLLKTQAYINGEFISAKNHRTFPVINPANQQVICEIACCGKEETELAIKSAKQAQVHWKKYTAKERSKILKKWFELIMQHQESLAYLLSLEQGKPLSESRAEIAYGASFVEWFAEEAKRAYGEIIPQVREDHRLLVIKQPVGVVAAITPWNFPNAMITRKAAPALAAGCAIIIKPAPETPLSALALAALAEQAGIPKGIFNVLPTVYAEEVGSVLTRSTDVRKLTFTGSTKIGKILMQQCADTVKKISLELGGNAPSLIFNDADLDRTVDSVIASKFRNSGQTCICTNRIYVQSEIYRAFADKLKQKVRSFIVGDFQQEAVNIGPLINESAVRKIERHIEDALSKGAILTLGGQRHSLGGTFFEPTILENVSQDMLVCHEETFSPLAALIPFDTEEQAISMANDSEFGLAAYVYTQDFSRIWRLSEELECGLVGVNEGIISNEVSPFGGVKQSGLGREGSRHGLDEFLEMKYLCMKV

SEQ ID NO: 6906 - protein, 250 aa, Brassica juncea
MTKNYPTVSEVYQKVYEKCKRKLRGLIAEKNCAPIMVRLAWHSAGTFDCASRTGVPFGTMRFDGELAHGANSGLHIALRLLEPIREQFPTISFADFHQLAGVVAVEVTGGPDIPFHPGREDKPQPPPEGRLPDATKGCDHLRQVLLKQMVLTDQDIVALSGAHTLGRYRAAPSGFEGAWTSNPLIFDNSYFKELLTGEKEGLLQLVSDKALLDDPVFRPLVEKYAADEEAFFADYAEAHLKLSELGFADA

SEQ ID NO: 6907 - protein, 214 aa, Ustilago maydis 521
MAPAAIRRKLVIVGDGACGKTSLLCVFAIGEFPQEYEPTIFENYVAEIRLDGKPVQLALWDTAGQEEYERLRPLSYSQAHVILIAFAIDTPDSLENVQVKWMEEVRQICGPSVPVLLVGCKKDLREDAIAKGKPVQGHYVERQQAKLVAAQIGARSYHECSSLNNQGVDAVFEAATRAAMLVRNSGASSGGAISQSKTKEALHNDAGSCKCIVL

SEQ ID NO: 6908 - protein, 282 aa, Craterostigma plantagineum
MKTQNTSETLGALISICPNTTDEERVSNVETSAMFGLDDECFASEKKRRLSNEQVKALEKYFEVENKLEPERKVKLAQELGLQPRQVAVWFQNRRARSKTKNLERDYGVLKSNYNALKHDFETLKRDNESLLKEIHELKSKLNEDDDSKSVEEEPFVEALELDANSDDVEPDSNQLFGSSDSDSSAILNEDNNNSRSSFLDDHRRKLSKIHGGSSPPSSAKIASEKNGSDESCKRAAAYKPQFVKIEEQHNLFREEDESCTTTFFSDEQAPTLNWYTPDEWN

SEQ ID NO: 6909 - protein, 481 aa, Pseudomonas sp.
MFHVPLLIGGKPCSASDERTFERRSPLTGEVVSRVAAASLEDADAAVAAAQAAFPEWAALAPSERRARLLRAADLLEDRSSEFTAAASETGAAGNWYGFNVYLAAGMLREAAAMTTQIQGDVIPSNVPGSFAMAVRQPCGVVLGIAPWNAPVILGVRAVAMPLACGNTVVLKSSELSPFTHRLIGQVLHDAGLGDGVVNVISNAPQDAPAVVERLIANPAVRRVNFTGSTHVGRIIGELSARHLKPAVLELGGKAPFLVLDDADLDAAVEAAAFGAYFNQGQICMSTERLIVTAVADAFVEKLARKVATLRAGDPNDPQSVLGSLIDANAGQRIQVLVDDALAKGARQVVGGGLDGSIMQPMLLDQVTEEMRLYREESFGPVAVVLRGDGDEELLRLANDSEFGLSAAIFSRDVSRAMELAQRVDSGICHINGPTVHDEAQMPFGGVKSSGYGSFGSRASIEHFTQLRWLTIQNGPRHYPI

SEQ ID NO: 6910 - protein, 1859 aa, GIBBERELLA ZEAE PH-1
MAPRIEFSIEQIRNKARKDLLYLLEGVRGKKNVILDQSLVGPIGTIVKVATLQEYGVDKFFILENDNADTSQRNVVFISRGECGRHAETIAAQIKRIQRESQTGHEFHIFWIPRRTLVSDKLLEDAGVLGDVNISELPLSFFPLEKDVLSLELDGSFRDLYLSKDVTPNFLMAKALMEIQQNHGLFPRVIGKGDNAKRVADLLSRMRQELLAGEGTAEANKIGLTPSTTNESVIIIDREVDFVTPLLTQLTYEGLIDEVFEIHNNQTKVDTTVVGAPAQASAATSQSRKRTIQLDSTDKLYEQLRDANFAIVGSLLNKVARRLQKVQSDYESKHKTKTIAELKDFVSQLPGYQQEQQSVKTHTGLAEEIMKHTRTDEFKGLLEVQQNLAAGADPSSQFDGIEELISRDAPIAQTLRLLCIYSCISGGIRPKEFDQFKRLILQGYGYQHLLTLSNLEKLQLFLSKSSPLAGMIPIPGTNVGAVTIGSKTNYTYLRKQLRLIVDEVQEDDPNDVSYVYSGYAPLSIRLVQCILQKQYLLSVTKGNNASAAGAPPGVGTQGWQGFDEAVKHVRGQTFYEHQKGEDKAVKARALLSGSGNKQTVFVVFVGGITFTEIAALRFIAKQEEGRRNIVICTTSIINGNKMMESAIEKESFTKEKYCQLAGCCFGMFYVGASRLIKKRQDTWLRRAQDQENNDKTMLVVRVEVRIVAVMGTRPTAESISKRSWYRNEPINYKFLSLVIDSLTSNDNGSSQTNRDQYQKKPRTNAAMGTDFGQSFRKGIGIRKRDVDEGNVIDSVPPSDTSPISGVPGRISPPITPDVVSVPQSRQTSMEIASEIAPEIVVWTEDMDIDMDIDNASPVESDDELSSLKTDPEEEPLQVDADPTPMQTSTNGGAVGSFPSSLSNLTELSDLSSIPSTASSKATTPTPVEAEGSQDQEQPIDEQPPSHQQSPSHEAERYNFNIRSKASIPTDISPYRYASECISAAESSRLNPYALHPEEYHLLRHHISYAQVTTYLNVRNGILRLWSKRPWVGVTRLEAVGCANARWFDAASVCYDWLVRRGYINYGCVQVPETETEDSIAPVRRQKTIAVIGAGISGLACGRQLEGLFKQFADRFHERGEPPPRVVVLEGRSRVGGRVYSREFQTKPKEPMPAFKGKRHTAEMGGMIITGFDRGNPINILLRGQLSLPYHALTADTTIYDSSGRAVDPVRDQLVEKLYNDCLDRVSEYKHKNRTAKLIEGRRDLIEEGRDSPGDGSKTMFQEEEAAAAQPYAAPVAQQNVPEKVNLIPVSSDKLTGRVHMEPGTPATIKASDKAKLMGWTIRDSADGENIDLVPAVNEEGATLGSVLDSAISQYKQIVGLNAQDHRLINWHVANLEYSNATSLHNLSLPLWDIDAGNEWEGSHTMVVGGYQSVARGLAQCPSPLDLKTKFPVKSVSYHTGEGMASAAIECEDGSVVDADAVVCTVPLGVLKQNNIVFNPPLPSWKTDVVERLGFGILNKVVLVYDEIFWEQDRHIFGVLRESTNRHSTSQKDYATSRGRFFQWFNVSNTTGLPCLIALMAGEAGFETEHSSNDSLVAEATEVLRRVFGKDVPYPVEAMVTRWGSDRFARGSYSSAAPGMQPEDYDVMARPVGNLFFAGEHTIGTHPATVHGAYLSGLRAASEVLEALIGPVEVPTPLILPRDSVLLRKRKEPAKDLKPARLQAYEQDIQAHIQAKIGDRPSRPAKVASNPYILYSKDLFDVARKRCEENRKPGRGGRAVPNEVRIMTSKMWKEATPEERKPYEDQATEMKRGYAEAVQSWNQATEKWDRESAALRTAYEKENPFDSYKIQMEDPREASYKQRRTRNISYAEDGDSDVGF

SEQ ID NO: 6911 - protein, 1124 aa, Gossypium hirsutum
MDNNPHQHPYPYHHGYPPNQDPYAAFPYQYPYNTPQYPHAPHMYPPSAHVPVAAPIDYRHAHSHSGQVPYQYSHPVPPNPSQLQHHGNFQYGSTPYPYQQSLSGHYPPPEINPQSSSTYQQPAQYPPQSSSSYQQPAQYPPPESNAEHLSRHVSFSGHNRQDSTSSLGANMRSASPAYPPLDHQLNNMHLSGSHSSAPASPPAPSVPILAAGTSTPDYASNSSNWEGPSLGRADLANRSSFSHKDSFKGSQQVQGMQIVPFQKGSLRVLLLHGNLDIWVLEAKNLPNMDMFHKTLGDMFGNFSSNISKKIGGRSEGKNTSDPYVTIAVSGAVIGRTFVINNDENPVWRQHFYVPVAHHAAEVQFVVKDIDILGSEIIGVVTIPVEQIYAGEKIEGTYPVLNGNGKPCKPGAVLKLSIQYTPMEKLSFYHHGVGAGPEYVGVPGTYFPLRKGGKVTLYQDANVPDGCLPNIKLDQGMHFVQGKCWSDIFDAIRQARRLVYITGWSVWHKVRLVRDVAPASDCTLGDILRSKSQEGVRVLLLLWDDPTSRSILGYKTDGIMTTHDEETRSYFKHSSVHVLLCPRIAGKKHSWVKQKEVGTIYTHHQKTVIVDADAGNSNRKIIAFLGGLDLCDGRYDNPDHALFRTLQTYHKDDYHNPTYTGSTAGCPREPWHDMHSKIDGPAAYDVLVNFEERWLKAAKPHGLKKLKKPFDDALLRIERIPDIMGVSDFTENENDPERWHVQIFRSIDSNSVKGFPKDSKDATSKNLVCGKNVLIDMSIHTAYVKAIRAAQHFIYIENQYFLGSSYNWSSYKDLGADNLIPMEIALKIASKIKANERFAAYIVIPMWPEGVPTGSATQRILYWQNKTRSMMYETVYRALVEAGLDSTFVPEDFLNFYCLGNRELDGYQPPADGSPRAANSPEVIYTKSQKPFLFGNSTSWAISWYSKILKPDPKALPKLPRLALSQKSRRFMIYVHSKGMIVDDEFIIVGSANINQRSLEGTRDTEIAMGAYQPQHTWAAKHSSPHGQIYGYRMSLWAEHVGVVEDCFARPESLECVRRINQMTILNWRQFAAEEVTEMRGHLMKYPVEVDPKGKVKPLPGAETFPDTGGNVVGSFLGIQENLTI

SEQ ID NO: 6912 - protein, 368 aa, GIBBERELLA ZEAE PH-1
MSFAGMLNRLHGQPESYDKKAKYKFGRTLGAGTYGVVREADGPTGKVAVKIILKRNVKGNEQMVYDELEMLQKLKHPHIVKFVDWFESRDKFYIVTQLATGGELFDRICEQGKFTEKDAAETIKQVLLAVDFLHKNNIVHRDLKPENLLYLNRDPESDLVLADFGIAKMLDGKGESLKTMAGSFGYAAPEVMRKEGHGKPVDMWSMGVITYTLLCGYSPFRSENLQDLIRECTDNSVVFHERYWKDVSNDAKDFILKLIDPDADKRWTSEEALGHIWLTGENATDYNLLPEIKSFRARSRFRRIIEKIKLQARIEKLKAMEEDPDNSDLSAIFSEVARAKLADEKEEREVLRITQEVEKEVKRRSFQA

SEQ ID NO: 6913 - protein, 500 aa, Pseudomonas fluorescens
MNTLPSQVWRTNIGSAPSQLLNYIDGNFVTSASSFANINPVNGKLISDVFEADAKQVNEAVVAAQNALKGPWGKLSVQDRAALIHKIADGIQARFEEFVAAEVADTGRPVHQARTLDIPRAIANFRTFADLAKTSHTDLFEMSTSDGSGALNYTVRKPLGVIGVISPWNLPLLLFTWKVAPALACGNTVVAKPSEESPSSATLLAEVMHDAGVPPGVFNLIHGFGKDSAGEFLTQHPGISALTFTGESKTGSTIMKAVADGVKEVSFELGGKNAAVVFADADLDAAIEGVLRSSFTNSGQVCLCSERVYVHRSIFDEFVSGLKVEAERLVVGYPDQDGVNMGPLISHGHRDKVLSYYRLAVDEGATVVTGGGVPKFNDERDQGAYVQPTIWTGLSDKARCVTEEIFGPVCHISPFDDEDEVINRVNDSNYGLACAIWTTNLSRAHRVSRQIHVGLVWVNTWYLRDLRTPFGGVKLSGLGREGGRFSMDFYSDIANICIKI

SEQ ID NO: 6914 - protein, 329 aa, Coffea canephora
MCGGAILEGLIPPRNNNDGTRRLSSADLWPSAADFWPNSHLAKPSRSNPTDAPHKATHETCHDPHDEAGGKQQVLPKGAKRQRKNLYRGIRQRPWGKWAAEIRDPRKGVRVWLGTFNTAEEAARAYDKEARKIRGKKAKVNFPNEDSTSYPTCIPSQTQYQQVHIPSPPTFCGPSSSNCKFNQLRVGSSDCSASDCYHANSIDDCARFTNMMGFRNPSEEVSGSGSSDNECFLGHLKQVAKAAAEEEAASVITENDTKDNNKAAESEEYQVEKLSEELLAYESFMKFYQIPYIDGQSAAASANPAQELATSIQLWSFDDVSPANRPMPL

SEQ ID NO: 6915 - protein, 451 aa, Methylococcus capsulatus str. Bath
MGSAGRQWMERDLAVLWHPCSQMKDHESLPLIPIRRGEGVWLEDFDGRRYLDAISSWWVNLFGHCHPAINAALADQLGRLEHVIFAGFSHEPGIRLAERLVDITPPGLERCFYADNGSAAVEVALKMSFHYWRNRGRPGKTRFVTLENSYHGETLGALAVGDVPLYKETYRPLLMEAVAAPSPDAYGREPGETEAGYAERRFRDMLAILERGADEICAVIVEPLVQCAGGMRMYDPLYLRLLRAACDRLGIHLIADEIAVGFGRTGTLFACEQAGISPDFLCLSKGLTGGYLPLAAVLTRPEIYAAFYDDYGTLKAFLHSHSYTGNPLACRAALATLELFDATDVLGRNRELARCMADATERFQEHPHVAEVRQRGMILAIEMVKDKTTREPYPWQERRGLRVYRRALERGVLLRPLGNVIYFMPPYLITPEQIRLMAEVAWEGLLVAAED

SEQ ID NO: 6916 - protein, 318 aa, Burkholderia cepacia R1808
MLEAQIAAFVAAVDAAYPAGTAARSPAEQRRIYDRFAAAWTPAELPPGIVRHDALWRAPHGPAIALRRYAPAHGAPRGTVLFFHGGGFVVGSLDSHALITAQLAADTGLAVIAVAYRLAPEHRAPAALEDCLAVTRAARDAAHWPFGPCARPLTLAGDSAGGNLAAAVATALRDAGEAGLDGIALAYPMLGIEPQAPARDTEAHARMLTLDDVRRYRALYWAQADAAALSADPLLRASVPLVASRFDGLPPVLAIGAQHDPLRDDARVYVERIVAAGGVARYWMGEGLVHGCWRALGTSPQAARMHRMIGGFLLAPHA

SEQ ID NO: 6917 - protein, 336 aa, Glycine max
  unsure (1)..(336): unsure at all Xaa locations
MADESVVESPVKRQRDDDEENEVSVSMDVEGGKDPLSNGLSSVIPGWFSEISSMWPGEAHSLKVEKILFQGKSEYQNVMVFQSSTYGKVLVLDGVIQLTERDECAYQEMITHLPLCSIPNPKKVLVIGGGDGGVIREVAHHSSVEKIDICEIDKMVVDVSKQYFPDVAVGYDDPRVTLHIGDGVAFLKEVPEGTYDAVIVDSSDPIGPAQELFEKPFFSSVAKALRPGGVVCTQAESIWLHMDIIEDIVANCRQIFKGSVNYAWTTVPTYPXSGMIGFMLCSTEGPPVDFKHPVNPIDENESQKSVRPLKFYNSEIHTAAFCLPSFAKRKIGSKAN

SEQ ID NO: 6918 - protein, 364 aa, Populus balsamifera subsp. trichocarpa X Populus deltoides
MGSTGETQMTPTQVSDEEAHLFAMQLASASVLPMILKTAIELDLLEIMAKAGPGAFLSTSEIASHLPTKNPDAPVMLDRILRLLASYSILTCSLKDHPDGKVERLYGLAPVCKFLTKNEDGVSVSPLCLMNQDKVLMESWYYLKDAILDGGIPFNKAYGMTAFEYHGTDPRFNKVFNKGMSDHSTITMKKILETYKGFEGLTSLVDVGGGTGAVVNTIVSKYPSIKGINFDLPHVIEDAPSYPGVEHVGGDMFVSVPKADAVFMKWICHDWSDAHCLKFLKNCYDALPENGKVILVECILPVAPDTSLATKGVVHIDVIMLAHNPGGKERTEKEFEGLAKGAGFQGFEVMCCAFNTHVIELRKN

SEQ ID NO: 6919 - protein, 503 aa, Brassica napus
MAITVPRRQLFIGGQWTEPLRRQTLPVVNPATEDIIGYIPAATSEDVELAVEAARKALTRNKGNDWSKASGAVRARYLRAIAAKVTERKSELANLEAIDCGKPLDEAAWDMDDVAGCFEYYADLAQGLDSKQKAPLSLPLDTFKGYVLKEPIGVVGLITPWNYPLLMAVWKVAPALAAGCTAILKPSELASVTCLELADICREVGLPPGVLNILTGLGTEAGAPLASHPHVDKIVFTGSTATGSNIMTSAAKLVKPVSLELGGKSPIIVFDDVKIDKAVEWTMFGCFWTNGQICSATSRLLVHEKIADEFLDKLVKWTKNIKISDPFEEGCRLGPVVSKGQYERVVKFVSNARKEGATVLCGGARPGHLKKGYFVEPAIISNVTTSMEIWRDEVFGPVLCVKTFSTEDEAIQLANDSQYGLAGAVLSNDLERCDRVSKAFEAGIVWVNCSQPCFCQAPWGGTKRSGFGRELGEWGLENYLSVKQVTQYISNEPWGWYKSPSKL

SEQ ID NO: 6920 - protein, 494 aa, Medicago truncatula
MAASPAYQAHLPTSPEWLNKGDNAWQMTAATLVGLQSMPGLVILYASIVKKKWAVNSAFMALYAFAAVLICWVLVAYRMAFGDELLPFWGKGAPALGQKFLVARAKVPASTHYYKNGVDIETPMEEPFFPMASLVYFQFTFAAITMILLAGSVLGRMNIKAWMAFVPLWLIFSYTVGAFSLWGGGFLYHWGVIDYSGGYVIHLSSGIAGFTAAYWVGPRIKSDRERFPPNNVLLMLAGAGLLWMGWSGFNGGAPYAANVASSIAVLNTNICAATSLLVWTSLDVVFFGKPSVIGAVQGMMTGLVCITPGAGLVQSWAAIVMGILSGSIPWVSMMILHKKSSLLQKVDDTLGVFHTHAVAGLLGGLLTGLFAEPALCRLLLPVTNSRGAFYGGSGGMQLLKQLVAAMFVIGWNIVSTTIILLVIQLFIPLRMPDEQLEIGDDAAHGEEAYALWGDGEKYDPTRHGSLNTGNTGVSPYVNGARRCDYKFMSHNLQV

SEQ ID NO: 6921 - protein, 274 aa, Exiguobacterium sp. 255-15
MEFVTLNNGLVMPQLGYGVFKVPEQEVYEAVREALRVGYRSIDTAMIYENEAGVGRALKDSGIPREDIFLTTKVWNKDQGYERTLAAFETSLQKLGVDYVDLYLIHWPMPDEDLYMDTWRALEQLYRDGKAKAIGVSNFHIPHLTRVLEEGTVVPAVNQIELHPFLSQEAIRAFCQKNGIVVEAWSPLMKGRDALTDPVITDIAARHGKTPAQVVLRWHLQHDIIAIPKSVTPSRIQENLDIFDFVLSPDDMRQIDQLNRNERTGSNPDEMHKK

SEQ ID NO: 6922 - protein, 124 aa, Desulfitobacterium hafniense DCB-2
MSGYVAGAAFAKGHRESWPDAVDPPIRYIVAPRFLLATSTRTFALTTPRFRERVAMSGKEIGTVKWFNDAKGFGFISRENGEDVFVHFRAIQSQGFKSLKEGQKVSFTVVQGQKGLQADAVEPL

SEQ ID NO: 6923 - protein, 308 aa, Helianthus annuus
MAILSRYSSSNTLFCIEEQVHEDEDELTHQDSSAIHPLDLQDLCWEHEELVSLFTKEEEQQKQTPWPSSCTLSFRKEAVDWILKVKGCHGFTPLTAILAINYLDRFLSSLHFQKANTPWMIHLVAVTCLSLAAKIQETHVPLLLDLQLEESKFLFEAKNIQKTELLVMSTLKWRMNLVTPISFLDHIVRRLGLSNHLHWDFFKKCEAMILYLVADSRFVCYKPSVLATATMLCVVEEIDPTNSIGYKSQLLDLLKTTKDHINECYKLVMDLSYDNHNKGKRDENERTIYPVSPAGFIGFMCHESSNDS

SEQ ID NO: 6924 - protein, 508 aa, Psychrobacter sp. 273-4
MLYAYPNTENSPVQFRKKYDNFINGEWVAPIDGEYFDNSSPIDGKTFCQIARSKEADVEAALDAAHAAKDAWGKTSVTERSNMLLKLADGIEANLEKIAIAESYENGKPVRETLAADIPIAIDHLRYFAGVIRAQEGGISQIDEDTVAYHFHEPLGVVGQIIPWNFPILMAIWKIAPALAAGNCVVLKPAEQTPASILYMLDVIGAADILPKGVLNVVNGFGVEAGKPLASNPRIDKVSFTGETTTGRLIMQYASENIIPVTLELGGKSPNIFFADVMDEDDDFLDKAVEGLVMFALNQGEVCTCPSRALVHESIYDEFMKRCIARVKAIKMGNPLDTDTMIGAQASSDQLEKILSYLDIGKKEGAKVLVGGELAKHDGDIANGYYVQPTIFEGTNDMRVFQEEIFGPVLAVTTFKDDEEAMALANDTLYGLGAGVWTRNGTRAYRFGRGIKAGRVWTNCYHLYPAHSAFGGYKQSGIGRENHLMMLDHYQQTKNMLVSYSPKAMGFF

SEQ ID NO: 6925 - protein, 490 aa, Arabidopsis thaliana
MESRKNSDRQMRRANCFSAGERMKTRSPSVIVIGGGFGGISAARTLQDASFQVMVLESRDRIGGRVHTDYSFGFPVDLGASWLHGVCKENPLAPVIGRLGLPLYRTSGDNSVLYDHDLESYALFDMDGNQVPQELVTQIGVTFERILEEINKVRDEQDADISISQAFSIVFSRKPELRLEGLAHNVLQWYVCRMEGWFAADAETISAKCWDQEELLPGGHGLMVRGYRPVINTLAKGLDIRVGHRVTKIVRRYNGVKVTTENGQTFVADAAVIAVPLGVLKSGTIKFGPKLPEWKQEAINDLGVGIENKIILHFEKVFWPKVEFLGVVAETSYGCSYFLNLHKATGHPVLVYMPAGQLAKDIEKMSDEAAANFAVLQLQRILPDALPPVQYLVSRWGSDVNSMGSYSYDIVGKPHDLYERLRVPVDNLFFAGEATSSSFPGSVHGAYSTGLMAAEDCRMRVLERYGELDLFQPVMGEEGPASVPLLISRL

SEQ ID NO: 6926 - protein, 89 aa, Zea mays
MSEGTANCVDILIAIILPPLGVFLKYGCGHEFWICLLLTFLGYIPGIIYAIYGHHQEQLASHPCRRRSMSLYLRLFICPDADLCCMPVA

SEQ ID NO: 6927 - protein, 162 aa, Crypthecodinium cohnii
MSDEDHTFESTDAGASATYPQQAGEIRKGSYLMIKGRPCKCIEVSTSKTGKHGHAKAHIVALDIFSGKKYEDLCPTSHNLDVPFVKRTEYLLTADGTLARACDGHKDDLNLPTVVKVGEPTDRDKKVTAEILESVEKGTTIFVIVQAASGEEKIIQTKTTSG

SEQ ID NO: 6928 - protein, 425 aa, uncultured marine gamma proteobacterium EBAC31A08
MSCLVLKILEIFGHLIFELKPRYNIFMKEIIKEYTNYMVPFYAPADFVVKKASGSHVWDLNNKKYIDFTAGIAVTNLGHSNKDLIKILKKQSEELWHLSNLYINEPSVTLARKLCKNSFADKVFFCNSGAESIEAAVKIARKFCSSTVNKNKNEVISFSTSFHGRTMLGIALAKAKHLTDGFAPLPRGIKNHPYNDITNLEKVFSDKTAAVILELVQWQSGITKADKKFIAKIKKLAKKHKALVIIDEVQSGIGRTGTLFAYEQFNITPDILCFAKGISNGFPLGGILTSDKVSKHMSAGSHGTTFGGGPIACAIGNEVIDTISKKSFLNKVLKKEVRFINLLNKINEKHKCFEKITSAGLWVGVEVSKDSKIQIDDLIKKSHHNGLMILKANASTVRFSPSLIIENELVDEGLKIFEKSIISLL

SEQ ID NO: 6929 - protein, 158 aa, Clostridium perfringens str. 13
MEIYDISVKDINGENVSLERYRGKVLLIVNTASKCGFTKQFDGLEELYEKYKDEGFEVLGFPCNQFKEQDPGSNSEIMNFCKLNFGVTFPMFEKIDVNGENESLLYSYLKEQKSGMFGSKIKWNFTKFLVDREGNVIKRFSPQTTPKSIEKDIEELLA

SEQ ID NO: 6930 - protein, 183 aa, Arabidopsis thaliana
MASSSEEIVSAGESSEIEEAVASLTMSSNKILLTSSDGESFEIDEAVARKFLIIVHMMEDNCAGEAIPLENVTGDILSKIIEYAKMHVNEPSEEDEDEEAKKNLDSWDAKFMEKLDLETIFKIILAANYLNFEGLLGFASQTVADYIKDKTPEEVREIFNIENDFTPEEEEEIRKENAWTFNE

SEQ ID NO: 6931 - protein, 177 aa, Rubrobacter xylanophilus DSM 9941
MDQGKSDEWIADALGTSASSVQSFRSRNDIYRRERVQREPESIFEGVLDHGERDGWGLWLDPSVAEDPIWKRHWQDVDAVVVKLAREAIVLEPDRAEQEGGEKPARQARPSQREQGRVKWFDPEKGYGFLVRPGGEDLFVHHSEVEGDASSLGQGVEVEYEVGRNERGPNARRVRVL

SEQ ID NO: 6932 - protein, 109 aa, Brassica napus
MASSMLSSAAVVTSPAQATMVAPFTGLKSSSAFPVTRKANNDITSIVSNGGRVSCMKVWPPVGKKKFERRLISVLKEMVRLQSEFLKPMRPRPKLLKKRLQYQQQEEEE

SEQ ID NO: 6933 - protein, 305 aa, Arabidopsis thaliana
MARCVGRCYVSPAFGESESHRLSERRFLKLSSSTNSDPAGSKSLKLRGKIHRRMSYFRPIMAKDESISSRSGETKQINGKQKNIVWHDCPVTKSDRQELIKHKGCVIWITGLSGSGKSSLACALSRALHNRGKLSYILDGDNVRHGLNSDLSFEADDRAENIRRVGEVAKLFADSGIICIASLISPYRIERAACRALLPQGDFIEVFMDVPLHVCEARDPKGLYKRARAGKIKGFTGVDDPYEAPLDCEIVIQNSRDKGLSSSSSSSSSPSSSSSSLCEMADIVVSYLDQNGYLKKHSTKSRDCM

SEQ ID NO: 6934 - protein, 1162 aa, Gossypium hirsutum
MDNNPHQNPYPYHHGYPPPNQDPYAPPPYQYPYNSPQYPPALHMYPPPAHALAAAPIDYGHSHSYSGPIPYQYSHPIPPNSSQPAPQYHGSFQYGSTFNPYQQSLSGHYPPPKSNPQSSSTYQQPAQYPPQSSSSYQQPGQYTPPESNSELLSTHISFSGHNRQDSTKYGSTFNPYQQSLSGHYPPPKSNPQSSSTYQQPAQYPPQSSSSYQQPGQYTPPESNSELLSTHISFSGHNRQDSTSYLAANSGSASPAYPLLDHQFSNMHLSGSHPSAPASPLAPLGPPLAAATSTPDYASESSNWEGLSLGRADSANHSTFSHNHSFNGSQKGQGMQIVPFQKGSLRVLLLHGNLDIWVLEANNLPNMDMFHRTLGDMFANFSSNISKKVGGRSDEKITSDPYVTIAVAGAVIGRTFVISNNENPVWMQHFNVPVAHHAAEVQFVVKDSDILGSDIIGVVAIPVEQIYAGGKIEGTYPVLNAAGKPCKPGAVLKLSIQYTPMEKLSFYHQGVGAGPEYVGVPGTYFPLRKGGKVTLYQDAHVPDGCLPNIKLDQGIHFVQGKCWTDMFDAIRQARRLVYITGWSVWHKVRLVRDVAPASDCTLGDILRSKSQEGVRVLLLLWDDPTSRSILGYKTEGIMATHDEETRSFFKHSSVQVLLCPRIAGKKHSWVKQKEVGTIYTHHQKTVIVDADAGNNHRKIIAFVGGLDLCDGRYDNPDHVLFRTLQTYHKDNYHNPTYTGSTVGCPREPWHDMHSKIDGPAAYDVLVNFEERWLKAAKPHGLKKLKKPFDDALLRIERIPDIMGVSDFTENENDPERWHVQIFRSIDSNSVKGFPKDPKDAPSKIWCAVRTSLIDMSIHTAYVKAIRAAQHFIYIENQYFLGSSYNWSSYKNLGADNLIPMEIALKIASKIKANERFAAYVVIPMWPEGVPTGAATQRILYWQNKTMSMMYETIYRALVEAGLDSTFVPEDFLNFYCLGNRELDGYQPPVDESPKAANTPEALSRKSRRFMIYVHSKGMIVDDEFIIVGSANINQRSMEGTRDTEIAMGAYQPQHTWAAKRSSPLGQINGYRMSLWAEHVGVVEDCFARPESLECVRRINQMAKLNWRQFAAEEVTEMRGHLLKYPVEVDPKGKVKPLPGSESFPDTGGSVVGSFIGIHENLTI

SEQ ID NO: 6935 - protein, 52 aa, Zea mays
MVLEATMICIDNSEWMRNGDYAPSRFQAQADAVNLICGAKTQSNPENTVRRE

SEQ ID NO: 6936 - protein, 262 aa, Capsicum annuum
MNTAIIAKSSGVRKGAWTEEEDFLLRKCIQNYGEGKWHLVPIRAGLNRCRKSCRLRWLNYLRPHIKRGDFGWDEIDLILRLHKLLGNRWSLIAGRLPGRTANDVKNYWNSHLQKKLITAPHRQEKKYNTALKITTKNVLRPRPRTFSSSAKNNISWCTNKSTVITNTLDKDERDKEIGLNICQKLTSETSSTIDDGVQWWTSLLENCKEIEEDVAAVGIFEEKNKLVPSLLHDEINSLTMQQGQSDGWDDFSADIDLWNLLN

SEQ ID NO: 6937 - protein, 452 aa, Neurospora crassa
MAPSDPVNPPGTPAPSLLEGRLWVDGCFDFFHHGHAGAVVQARQLGTELYVGVHSDEAILENKGPTVMTLRERLLATDACRWVTKSVAYAPYVTQLDWISHFGCKYVVHGDDITSDSSGEDCYRFVKAANRFKVVKRTPSISTTDLVGRMLLCTRTHFIKDLEKMLEGEEGNGTAEEKKKVGEEMKERIRLYATDETAKNPGANVWFWKGDEKKKKKEDEGKEEEKGVFRELFGGIGPKPGQRVVYVDGGFDLFSSGHIEFLRLVTQKEEELARQEGWYSQQAIDERKGKGADYGPAFVVAGVHDDEVINREKGVNYPIMNVFERGLCVLQCKYINAVVFGAPFKPTKGYLTSLPWGTPDAVYHGPTSFMPHTEDVYAVPKEMGIYKEIGQHEYKDVNAGTIVQRIMKSRDLYEARQKAKGMKADIEAAHRERELLEEQQRQKEEAIAAQKE

SEQ ID NO: 6938 - protein, 427 aa, Bacillus sp. KSM-K16
MAMKVTGGFILDENGEQVAKDVYIKDGKIVEHVADGDIRQQFDATGLLISPGFVDVHVHLREPGGEKKETIETGTKAAARGGFTTVAAMPNTRPVPDNAEQLDLLQARISETAVVRVLPYASITTRQLGQELTDFKALKEAGAFAFTDDGVGIQEAGMMLSAMKEAAALNMAVVAHCEDNSLINGGAVHEGHYAKAHGLNGIPSVCEAVHIARDVLLAEAAGAHYHVCHVSTKESVRTIRDAKKAGIRVTAEVTPHHLLLCEDDIIGKDPNFKMNPPLRAKEDRDALVAGLLDGTIDFIATDHAPHTAEEKSASLERAPFGIVGLETAFPLLYTHFVKPGTFTLKQLIDWLTVKPAQTFNLPYGTLQVGAAADLTLIDLKANETIDPSMFLSKGKNTPFAGWDCAGIPQATMVAGKTVYKKERITNE

SEQ ID NO: 6939 - protein, 443 aa, Glycine max
MKLEESVSNSNITAPLLPPEDPSPSPQNGSISGAVFNITTTMIGAGIMSIPATMKVLGIVPGLVVIVLVALITDVTVEFMLRYTSSGKSSTYAGMMAESFGSIGSLAVKICVIITNLGVLIIYFIILGDVLCGNESNGITHLGILQEWFGINWLTSRAFALLFVALFIMLPLVMLRRVDSLRYSSAISILLALVFVVICSSMAVSALLSGKSQTPRIVPDFSQVTVLDLFTAIPVFVTGFGFHVNVHPIRAELIKVEHMGLAARISLIICVAIYFAIGFFGYLLFGDSIMPDVLVNFDQNSHTSTGRLLNAIVRLSYALHLALVFPIMNYSLRANIDELIFSNKNKPPLASDTPRFVSLTLTLLALTYLVAVTIPNIWYFFQFLGSTTIVSTSFIFPAAIVLRDMHGISKTKDQVMAIVVIVLAVGTSGIAIWTNLNGSGDDQ

SEQ ID NO: 6940 - protein, 497 aa, Methanosarcina acetivorans C2A
MCGIAGVFGTPDSNLKVKKMLAALGHRGPDACGIHTAGDLSIGNTLLKITGDMPQPLTGKGALVLNGEIFNFRELAAEIGIKIDSDTELLFSLIETGVKEGSTPIDAVCSALSKVNGDYALAYACGGELVLARDPSGVKPLFYCSGTEGEKPEIAFASEKKALAFISRKAKPFPQGGILGFNTESGKITEKIPEGYLEIKSPEKRIYTEHEALSQLKETLEKAVELRLTPTTGIAFSGGIDSTFLAALAKRIDPGVSLYAVGLPDSHDITQAERAAEAIGMRKNLKVHFLSPEEIEAAVPRVVYATESTDPMTVAIGIPLYIVAKTAKEDGKRVLLTGQGADELFGGYRRHEEFLKKGAEVLDREIYSDLATISKINLERDDMVTMANSVELRVPFLDKEVIKTGLAIRPELKVLKKDGYYEDGYYERKYILRKAAKGLIPPEILWKEKKAMQYGTGVQKVLDRLARDSGFSKKQESHIEKYLMQIASEKGFEFVNN

SEQ ID NO: 6941 - protein, 196 aa, Oryza sativa (japonica cultivar-group)
NILFKHIKELLSGDTALIAETGDSWFNCQKLRLPEGCGYEFQMQYGSIGWSVGATLGYAQAAKDKRVMSCIGDGSFQMTAQEVYTMLRCGQKSIIFLINNGGYTIEVEIHDGPYNVIKNWDYTGLIDAIHNSDGNCWTKKVRTEEELIEAIATATGAKKDCLCFIEIIVHKDDTSKELLEWGSRVSAANSRPPNPQ

SEQ ID NO: 6942 - protein, 209 aa, Brassica napus
MPKKKNASNSLVDDTRGSLYPALSDRSSQLNFQSEKMQQRKTTAAAAGRPSGTDGSDFSYRMVVDSRYTKVTKGRSRLRLLILVQATIYLIGLSCAFMTSTKNEERNTLGIASASIGLLFAFIGDFGCRRSRVNLLRLYTAASTVVMVLSVFSAVRSRLTMEERNSSGTAANLELLGFISAQLGAVVQILAIIVTGSLVNNMSPPTKTE

SEQ ID NO: 6943 - protein, 434 aa, Escherichia coli O157:H7 EDL933
MFDFVCNHMSAKSEWFKNYLQQQPGFEDFFIAVDPQTDLSAVTRPRALPLLTPFQMDDNSTRHLWTTFSDDQIDLNYRSPDVLLAMVDVLLCYLEKGAEYVRLDAVGFMWKEPGTSCIHLEKTHLIIKLLRSIIDDIAPGTVIITETNVPHKDNIAYFGEGDDEAHMVYQFSLPPLVLHAVQKQNVEALCQWAQSLSLPSGKTTWFNFLASHDGIGLNPLRGLLPESEILALVEALQQEGALVNWKNNPDGTRSPYEINVTYMDALSRRESSDEERCARFILAHAILLSFPGVPAIYIQSILGSRNDYAGVEKLGYNRAINRKKYHSEEITRELNDEATLRHAVYHELSRLITLRRSHNEFHPDNNFTIDTVNSSVMRIQRSNAEGNCLTGLFNVSKNIQHVNITGLHGRDLISEVDILGNKITLRPWQVMWIK

SEQ ID NO: 6944 - protein, 414 aa, Azoarcus sp. EbN1
MSTSHITVPTGGQKIIPGQPIPDNPIIPFIEGDGIGVDITPVMIKVIDAAVAKAYGGKRKIHWMEVYAGEKSTQVYGPDEWLSKETLDALKEYSVSIKGPMTTPVGGGIRSLNVALRQELDLYQCVRPIQYFKGVPSPLKNPELTNMVIFRENTEDIYAGIEWQADSEQARKVIAFLQNEMGVRKIRFPATSGIGIKPVSVEGTQRLVRAALKYVIDNDRKSLTIVHKGNIMKFTEGLFRDVAYELAQKEFGAQPIDGGPWCKFKNPNTGREIVVKDSIADAFLQQILLRPAEYDVIATTNLNGDYISDALAAQVGGIGIAPGANISDQYACFEATHGTAPKYAGLDKVNPGSLILSAEMMLRFMKWTEAADLVIKGMEAAIGDKVVTYDFARLMEGAQEVSCSAFGDAMIARM

SEQ ID NO: 6945 - protein, 484 aa, Azotobacter vinelandii
MQLTDSTLLRTRAFIAGQWVDADDGATFVVTDPADLSPIGTVASLGAAETARAIAAAEAALPAWRAKTAKERSVLLRKWFELIMANREDLARLLSREQGKPLAESRGEIAYGASFIEWFAEEAKRTYGDVIPHDKQGRRLVVIRQPIGVVAAITPWNFPNAMITRKAGPALAAGCTIVIKPASETPLSALALAELAVRAGIPAGVINVVTGDPRVIGGELTRNPAVRKLSFTGSTGIGKLLMAQCADTMKKVSMELGGNAPFIVFDDADLDAAVAGALASKYRNSGQTCVCTNRLLVQEGVYDAFARRLVAAVKALKVGPACEEGAQLGPLINAKAVLKVQEHIEDALTKGARLLAGGKPHSLGGSFFEPTVLGEATPEMLVAREETFGPLAPIFRFRSEAEAIQMANDTEFGLASYLYTRDLSRAWRVSEALEYGMVGVNEGVISTEIAPFGGIKESGTGREGSKFGIDDYVELKYLCFGIDA

SEQ ID NO: 6946 - protein, 119 aa, Triticum aestivum
  unsure (1)..(119): unsure at all Xaa locations
MSDTDEHHFESKADSGASKTYPQQAGAIRKGGHIVIKARPCKVVEVSTSKXLGKHGHAKCHFXVAIDIFXMGKNFEDIVPSSHNXDFPHVXRQDYQLIXDITDDGIQPSXTEIGNTKDD

SEQ ID NO: 6947 - protein, 216 aa, Thermoanaerobacter tengcongensis MB4
MKFFLDTANIEEIKEAYSLGVISGVTTNPSLVAKEGRDFKEVIREIAEIVDGPISAEVISDDHEGMVKEARELAKIHKNIVIKIPMTAEGLKAVNILSKEGIKTNVTLIFSANQALLAARAGATYVSPFVGRLDDINTDGMQIIEDIVTIFTNYDIQAEIITASVRHPIHVLEAAKLGAHIATVPYKVLMQMIKHPLTDIGIERFKEDWKKAGLKI

SEQ ID NO: 6948 - protein, 109 aa, Brassica napus
  unsure (1)..(109): unsure at all Xaa locations
RHKVDMHSGCTYNXHSYVKGNTIEVDNXSWMSTVFYCYGEYLSLHFXHFNFXLAPVYMAFLHYMGDETXTWCYNYSLXVGGYGRKPIWXGTLRCVRYSHWKVRDSHDGL

SEQ ID NO: 6949 - protein, 178 aa, Streptomyces avermitilis MA-4680
MTTGATIWLTGLPSAGKTTIAYELAGRLREEGHLVEVLDGDEIREFLTADLGFTRADRHTNVQRIGYLADLLARNGVKALVPVIAPYADSREAVRKRHGASGAAYLEVHVATPVEVCSQRDVKGLYAKQAAGEISGLTGVDDPYEAPASPDLRIESHTQTVQESAAALHALLTERGLA

SEQ ID NO: 6950 - protein, 294 aa, Zea mays
  unsure (1)..(294): unsure at all Xaa locations
MTMYSQSVRAPPPPPCRFVPRPCYVMARPLLVFTPSGALLKAAVRDVWASNFDEELSNLSAVLPRYPCVCVDTEFPGAVHDSDLPRYMRGPRESYELVKRNVDDLKLLQVGIALSGPAGRFPIAWQFNIRGFDPALHPHAPASIAMLREQGMDFAMLNEFGIDPEDFAAGFRCSGLACGRLTWTXFSGSYDFGYLAKALTGGQPLPDTVDGFLALVRRLFGXSVFDVKHLARCCAMRGGLEQVATALGVKRAAGRAHCAGSDSLLTTDVLLLMLHRFFRNVDVLAHAGTIVDLT

SEQ ID NO: 6951 - protein, 411 aa, Bacillus halodurans
MSTATLSQETKQIVKATVPILAEHGEAITKHFYKRMFSHHPELLNIFNQTHQKQGRQPQALANSIYAAAEHIDNLEAILPVVSRIAHKHRSLNIKPEQYPIVGENLLAAMREVLGDAASDDVLEAWREAYELIADVFIQVEKKMYEEASQAPGGWREFRSFVVEKKQRESATITSFYLKPEDGKALASYKPGQYITVKVTIPGHEHTHMRQYSLSDAPEKGYYRITVKREEGDGDLPPGIVSNYLHQHIHEGDVLEITAPAGDFTLQEEGERPIVFISGGVGITPLMSMFNTLMQRGVKREVIFIHAAINGFYHAMHDHLAQTASQQENVHYAVCYERPTPGDRMNPFMKKEGFIDESFLRSILHDREADFYFCGPVPFMKTIAQILKDWDVPEQQVHYEFFGPAGTLASS

SEQ ID NO: 6952 - protein, 275 aa, Bifidobacterium longum NCC2705
MAIQSTIMLNNGTVIPQVGLGVFQTPDGDTTVNAVQTALENGYRHIDTAMIYHNEASVGEGIRRAGVPRSDFFLTTKLWNDDIRARRGKDAFQESLDRLGVDYVDLYLIHWPADGWQQAWDDLQEIYASGRAKAIGVSNFQKHHIDELLTHSDVVPAVDQVESSPQFTNQELIGQLRAKGIHTEAWSPLGGTGGNLLSNPVLAGIGAKYGRSAAQVVIRWHIQRGIVVLPKSTHAERIKQNFEVFDFNLSVDDMTAISAINTGKRNGADPDNFNF

SEQ ID NO: 6953 - protein, 160 aa, Arabidopsis thaliana
MAGNYHSFQNPIPRYQNYNFGSSSSNHQHEHDGLVVVVEDQQQEESMMVKEQDRLLPIANVGRIMKNILPANAKVSKEAKETMQECVSEFISFVTGEASDKCHKEKRKTVNGDDICWAMANLGFDDYAAQLKKYLHRYRVLEGEKPNHHGKGGPKSSPDN

SEQ ID NO: 6954 - protein, 277 aa, Halobacterium sp. NRC-1
MRMAQDTQQRAAVVEEMPEFGLGTWENEDPSACADSVRTALEMGYRHIDTAQIYENEDAVGDGIAAADVDREDVFLATKVWTSELGDGDVAPATEQSLEKLGVDYVDLLYVHWPANQYDATETLAALADLQADGVTERIGVSNFEPRHLDEAEDVLGELPFANQVEFHPLLQQEELREYADGEDIELVAYSPLARGEVFDVPEIQAVAEKHGVSEAQVSLAWVRRKGVTAIPKATGEDHIADNWASLDLELDDEDVAKIDGIDRRERQVDPEFGPWN

SEQ ID NO: 6955 - protein, 415 aa, Neurospora crassa
MSFANMLNRLHGQPESYDKKSKYSFGRTLGAGTYGIVREASGPTGRVAVKIILKKNVKGNEQMVLDELEMLQRLKHPHIVKFVDWFESRDKYYIVTQLATGGELFDRICEQGKFTEKDASQTIKQVLGAVNYLHENNVVHRDLKPENLLYLTRDADSDLVLADFGIAKMLDNKDEVLTTMAGSFGYAAPEVMLKQGHGKPVDMWSMGVITYTLLCGYSPFRSENLQDLIDECSSGSVVFHERYWKDVSNDAKDFILRLLQPKPENRWTSQVRLTLAHPWLRGDSATNHNLLPEIKAYLTKARLRRGIEMVKLANRIEALKMQEDDPENTDMPGDATLAADQAQSRHRALSLASTKGGSSDAENATAPAEKRTLSKTIKTAIFREVVLAKVREMKEAEEANKLKEEAETKAKSFQA

SEQ ID NO: 6956 - protein, 220 aa, Zea mays
  unsure (1)..(220): unsure at all Xaa locations
MARRAASSLVSRCLLARAPAGAPPAAPSAPRRTVPADGMHRLLPGVLQRFSTAAAVEEPITPSVHVNYTKLLINGNFVDSASGKTFPTLDPRTGEVIAHVAEGDAEDINRAVAAARKAFDEGPWPKMTAYERFRILLRFADLIEKHNDELAALETWDNGKPYEQAAQIEVPMVARLMRYYAGWADKIHGLIVPADGLHHVQILHEPIXIAGPLIPLISYL

SEQ ID NO: 6957 - protein, 453 aa, Persea americana
MDNKGGILMQRFELGRLLGQGTFAKVYHARNLKSSQSVAIKVIDKEKVLKVGMIDQIKREISTMRLASHPNVVQLYEVMATKTKIYFVLEYVKGGELFNKVAKGKLKEDVAWKYFQQLVSAVDFCHSRGVYHRDLKPENLLVDENENLKVTDFGLGALAESKRQDGLLHTTCGTPAYVAPEVISRKGYDGAKADIWSCGVILFVLLAGYLPFHDSNLMELYRKVGKAEYKCPNWFPPEVRRLLARILDPNPNTRISIAKIKDNSWFKRGFEAKFAKGETKSKELAPLDTDAAFASSDTGVAARKPELVKPQHLNAFDIISLSAGFDLSGLFEDTNCRKEARFASKQPASAIISKLEDIAKRLRLKVKKKDEGILKLEGSKEGRKGVLSIDAEIFVVNPSFHLVEVKKSSGDTLEYQKLWNQDMRPALTDIVWAWQGDQQQQQESLVCSLGQSL

SEQ ID NO: 6958 - protein, 101 aa, Glycine max
  unsure (1)..(101): unsure at all Xaa locations
MRTKRKEMASSMISXPADTSGNRASSGLDARFAVLKSMAGFPTSETNKDITLIAXNCGRVLCMQVXSPIVMMKFXTLCYLPDLDDAQLAXEVRYLLKNGWI

SEQ ID NO: 6959 - protein, 189 aa, Leptospira interrogans serovar Copenhageni str. Fiocruz L1-130
MKEGASFMYSKYFIWFMTLGIFLPLAGIFAKGSFYDFKVKDIKGNEVSLSKYKGKVVMVVNVASKCGYTYQYEHLEKVYKKYKDQGFAVVGFPANNFGGQEPGTDQEIETFCRIQKGASFDMMSKISVKGKDIHPLYFYLIQNSPNPGEVEWNFEKILISKSGTIEARYRSSVEPDSSAVTQKIETLLK

SEQ ID NO: 6960 - protein, 457 aa, Mesorhizobium sp. BNC1
MLYHRAKNSWEQRDQENVFHGFTDLETLNQNGPVVLTHGEGIHVFDVHGKSYMDANSGLWNNVAGFNHKGLIEAICDQARRFPGYHAFFGRIADTTVALSEKLIEISPFPSGRVYYTNSGSEANDTVVKMLWLLHRRNGQPQRRKIITRVNAYHGVTVATASMTGKTYNAEFGLPLPGFLHADCPHHWRYGEPGESEAAFSQRLARKLEELIIKEGPDTIAGMFAEPVQGAGGVIPPSRGYFEAIRPILRKYGIPLIADEVITGFGRTGEMWGGDKYNVEPDAIVASKCITAGYFPMGAIILGPELADALTRACEAAEEFPHGFTSGGNPLGSAIALKALEVIETEGLLDNVRRVSPRFLAGLDRLARHDHAGEARGVGLMGAVELVADKNSKAPLDGALRIPERIANKALEKGLICRPLGQAIVLGPPFIITEGQIGEIFDILEDTMAEVFADVGL

SEQ ID NO: 6961 - protein, 105 aa, Bacillus cereus G9241
MSKRDYYEVLGLSKGASKDEIKKAYRRLAKKYHPDVSKEENAIEKFKEVQEAYEVLSDDQKRAQYDQFGHAGANQGFGGFGGGGDFGGGFGFEDIFSSFFGGGGG

SEQ ID NO: 6962 - protein, 238 aa, Schedonorus arundinaceus
MCGIKREMSGESGLSCSGEYHSPSTSPEQQQGHSQKQTAWMKRPAGRTKFRETRHPVFRGVRRRGNAGRWVCEVRVPGRRGSRLWVGTFDTAEIAARAHDAAMLALAAGDACLNFADSAELLAVPASYRNLAEVRHAVTEAVEDFERRQELGEKDSLSGTSSSTPSSSSLTDDEEASSQADNSPFELEVLSDMGWDLYYSSLAQGMMLMAPPFLAASAAFGDYGEVNLADVPLWSYQS

SEQ ID NO: 6963 - protein, 382 aa, Burkholderia cepacia R1808
MMRDAANFEPVDSRVTHPAFWNALPERWTSDVEETLVCCHVRQETHDVKSFFFRSPQGRTFSFEPGQFITLELDIDGETINRCYTISSSPARPHTISITVKRVPGGKVSNWLHDNLQPGAPVRVLGPAGEFTCARHPARKYLFLSAGSGITPLMSMSRAHHDLAEDRDIMFVHSARTPDDIIFARELDLIASNHTNFRTSFVVERVGARTNWPGVTGFLTLPLLKLIAPDFMEREIFTCGPAPYMKAVRDLLDEAGFDRKQYHEESFSFETLAQTASDDVLAELVPAADGGDVATKQYTVSFAKSNREISCGSEQHVLDAARQSGVRLPASCTQGMCGTCKVKLVSGQVEMKHNGGIRQREIDQGMVLLCCSKPLSDLVIDK

SEQ ID NO: 6964 - protein, 285 aa, Burkholderia cepacia R18194
MSTTLLFHPTPDAAYGFPNARRLARVASPHQQIEVWETPQLGRLFTLDGRPMTSVGDEYVYHECMTHPAALAHPAPRRALVLGGGDGGAARQLLKHACIERIVIAELDDEVVGMARRYLDDVHQGALDDPRVEVVIGDAAHFVESTVEHFDLVVFDLTPPDSPAAGLYTRAFYARLKRILTPCGAISMHLGSPVFHAARIAALLDDLRACFAVVDPLSAHVPLYGSQWLMAIASDTLDAAALFAHDIDERLAARRVQGLRYYDARLHASLFALPCALRDTLGVRR

SEQ ID NO: 6965 - protein, 180 aa, Zea mays
MAEAPASPGGGGGSHESGSPRGGGGGGGGSVREQDRFLPIANISRIMKKAIPANGKIAKDAKETVQECVSEFISFITSEASDKCQREKRKTINGDDLLWAMATLGFEDYIEPLKVYLQKYREMEGDSKLTAKSSDGSIKKDALGHVGASSSAAQGMGQQGAYNQGMGYMQPQYHNGDISN

SEQ ID NO: 6966 - protein, 484 aa, Geobacter metallireducens GS-15
MMILKNSSLLKQQCYLDGHWCCADGGATIDVTNPATGEILGVVPKMGTQETRRAIEAANGALDGWKARTAKERSAILRRWFELIMENLEDLAVIMTAEQGKPLAESRGEIAYAASFIEWFAEEGKRIYGDTIPSYARDKRIVVIKEPIGVCAAITPWNFPAAMITRKAGPALAAGCTMVVKPATATPFSALALALIGEQAGIPAGVFSVITGSSKEIGDEMTGNPIVRKLTFTGSTEVGKQLTAQCAGTMKKVSMELGGNAPFIVFDDADLDAAVEGAIASKYRNTGQTCVCTNRILVQESVYEAFSAKLVAAVSKMTVGDGLKGEVQQGPLIDMTALEKVEEHIADAVAKGARVVLGGKRHALGGTFFEPTIITDVTPGMLVAREETFGPLAPLFKFSTDEEAIRMANDTEFGLASYFYSRDIRRVWKVSEALEYGMVGINTGLISSEVAPFGGVKESGVGREGSKYGIEEFVEVKYLCMGGI

SEQ ID NO: 6967 - protein, 128 aa, Rickettsia sp. TwKM03
GPAHGGANEAVINMLKEIGSSENIPKYIAKAKDKNDPFRLMGFGHRVYKNYDPRAAVLKETCKEVLKELGQLENNPLLQIAIELEAIALKDEYFIERKLYPNVDFYSGIIYKAMGIPSQMFTVLFAIA

SEQ ID NO: 6968 - protein, 280 aa, Zea mays
  unsure (1)..(280): unsure at all Xaa locations
QTNEDGLLHTACGTPNYVAPEVLADKGYDGMAADVWSCGIILFVLMAGYLPFDDANLMRLYKLICHATFSCPPWFSSGARKFIKRILDPNPDTRIKIAEILEDEWFKKGYKPPHFEQGEDVNLDDGDAAFNDXEDRLVAEKREKPESMNAFALISRSQGFNLGNLFEKEMMGMVKRETSFTSQCTAQEIMSKIEDACGPLGFNVRKQNYKMKLKGDKSGRKGHLSVATEVFEVAPSLHMVELRKTGGDTLEFHNFYKNFSSELKDIVWKAESDASMKQTK

SEQ ID NO: 6969 - protein, 495 aa, Escherichia coli O157:H7 EDL933
MNFHHLAYWQDKALSLAIENRLFINGEYTAAAENETFETVDPVTQAPLANIARGKSVDIDRAVSAARGVFERGDWSLSSPAKRKAVLNKLADLIEANAEELALLETLDTGKPIRHSLRDDIPGAARAIRWYAEAIDKVYGEVATTSSHELAMIVREPVGVIAAIVPWNFPLLLTCWKLGPALAAGNSVVLKPSEKSPLSAIRLAGLAKEAGLPDGVLNVVTGFGHEAGQALSRHNDIDAIAFTGSTRTGKQLLKDAGDSNMKRVWLEAGGKSANIVFADCPDLQQAASATAAGIFYNQGQVCIAGTRLLLEESIADEFLALLKQQAQNWQPGHPLDPATTMGTLIDCAHADSVHSFIQEGESKGQLLLDGRNAGLAVAIGPTIIVDVDPNASLSREEIFGPVLVVTRFTSEEQALQLANDSQYGLGAAVWTRDLSRAHRMSRRLKAGSVFVNNYNDGDMTVPFGGYKQSGNGRDKSLHALEKFTELKTIWISLEA

SEQ ID NO: 6970 - protein, 539 aa, Zea mays
MGNCCVTPKAADDAGGGKKPKEPKQKKGKKPNPFSIDYNRSGQASAPKLVVLRDPTGRDIAARYELGAELGRGEFGVTYLCTDRASGEALACKSISKKKLRTAVDLEDVRREVEIMRHLPKHPNVVTLRDTYEDDNAVHLVMELCEGGELFDRIVARGHYTERAAALVLRTIVEVVQMCHKHGVMHRDLKPENFLFANKKESAALKAIDFGLSVFFTPGERFSEIVGSPYYMAPEVLKRNYGPEVDVWSAGVILYILLCGVPPFWAETEQGVAQAIIRSVIDFKRDPWPRVSDNAKDLVREMLNPDPKRRLTAHQVLGHPWLQNIKKAPNVNLGETVKARLQQFSVMNKFKKHALRVIAEHLSVEEAADIKDMFEKMDLNKDQMLSFEELKLGLHKFGHQMPDADVQTLMEAADADGNGSLNYGEFVTLFVHLRKIGNDEHLHKAFAYFDRNQSGFIEIDELRESLADDLGQNREEIINAIIRDVDTDKDGKISYDEFATMMKAGTDWRKASRQYSRERFTSLSLKLQKDGSLQMTSTR

SEQ ID NO: 6971 - protein, 279 aa, Triticum aestivum
MNIQVDPSSQVQWPQQQPVPQPHQPFSQQPQQTFPQPQQTFPHQPQQQFPQPQQPQQQFLQPQQPFPQQPQQPYPQQPQQLFPQTQQPQQLFPQSQQPQQQFSQPQQQFPQPQQPQQSFPQQQPPFIQPSLQQQVNPCKNFLLQQCKLVSLVSSLWSMIWPQSDCQVMRQQSCQQLAQIPQQLQCAAIHTVIHSIIMQQEQQQGMHILLPLYQQQQVGQGTLVQGQGIIQPQQPAQLEAIRSLVLQTLPTMCNVYVPPECSIIKAPFSSVVAGIGGQYR

SEQ ID NO: 6972 - protein, 106 aa, Arabidopsis thaliana
MDNTDRRRRRKQHKIALHDSEEVSSIEWEFINMTEQEEDLIFRMYRLVGDRWDLIAGRVPGRQPEEIERYWIMRNSEGFADKRRQLHSSSHKHTKPHRPRFSIYPS

SEQ ID NO: 6973 - protein, 141 aa, Triticum aestivum
MGERVKGTVKWFNVTKGFGFISPEDGSEDLFVHQSAIKADGYRSLNENDVVEFEVITGDDGRTKAADVTAPGGGALAGGSRPGDGGGDRGGRGGGGYGGGGYGGGGGGYGGGGGGYGGGGGGCFSCGESGHFSRECPNKTN

SEQ ID NO: 6974 - protein, 487 aa, Mesorhizobium loti MAFF303099
MRAQPTASHYVNGRYIDDEQGAPLPVIYPATGETIAMLRSATPNVLELAIEAARAAQPAWARLKPVERGRILRRAADILRARNADLARIETLDTGKAIQETLVADAPSAADCLEYFGGAVAAYNGEAVDLGGPFAYTRREALGVCVGIGAWNYPIQIAGWKSAPALAMGNAMVFKPSENTPLSALALAEIYSEAGLPDGLFNVVQGYGDVGAGLVGHDVVAKVSVTGSVPTGRKVLSLAGSKMKHATMELGGKSPLIVFDDADIENAIGGAMLGNFYSTGQICSNGTRVFVQSGIHDRFVERLVERTKKIRIGNPLDPETQMGPLVSKAQHEKVVGYIGIGKQDGAVLACGGNVPSLQGFDGGFFVEPTVFTGVTDTMRIAREEIFGPVMSVLKFDGEDEVIDRANDTEFGLAAGVFTRDLPRAHRVIAELQAGTCWINAYNLTPVEIPFGGFKQSGIGRENSLAALALYSQLKSIYVETGDVASPY

SEQ ID NO: 6975 - protein, 505 aa, GIBBERELLA ZEAE PH-1
MAHELPFKIPTLQVKQQAPSQVQPLTSSVILPSNSLTTLTTPDPGTNKPWAKVKDNSADDVDHTVQVAYDAFQTFKKTSPRLRAQWLLKWDALIREHKADLATLLVYETGKPYAEAIGEMDYSLTFTSWFAGEAERIQGTCFMPSAPNRRVFTIKQPLGVAVALVPWNFPVAMVLRKAAAALAAGCTMVVKPSPETPVTAMALAKLASEAGFPNGVLNILPTSLDNTPSLSEALCKHDLVKKVTFTGSTRVGTLVANLCSLGLKKVVLELGGNCPCLIFNDADIEAALRELVGLKWRHAGQACVTVNRFLVQSAVYDKFLQRFAEETAKYVVGHGASEGTTLGPVTKPESLDRAERLIKDAVSKGARIVTGGNRLSPKDGEGGYFFEPTILADMTHDTLISCEECFAPIAAFYKFETEEEAVRVANDTPMGLASYAFTKDADRIWRLFENLEAGMIALNTGNSSAAESPFGGIKMSGYGKEAGKDVAVNEYMIQKTGTITVDGLV

SEQ ID NO: 6976 - protein, 492 aa, GIBBERELLA ZEAE PH-1
MALTVELSTPVTGTYQQPIGLFIDGKWVEGVDKGKFEVINPSTEEVITSVCEGTEKDIDLAVAAARKAFDGEWKNTAPQTRGNLLLKLADLAEKNLDLLAAVESLDNGKSITNARGDVGAVVGCLRYYGGWADKIEGKTIDIAPDMFHYTRSEPIGVCGQIIPWNFPLLMLAWKIGPALATGNTVVMKTAEQTPLSALVFTQFIEQAGFPAGVFNLVSGYGKTAGAALSSHMDVDKIAFTGSTVIGRQIMKAAASSNLKKVTLELGGKSPNIVFEDADIEEAINWVNFGIYYNHGQCCCAGTRIFVQESIYDKFLAAFKKRAEENKVGDPFNEETFQGPQVSQLQYDRIMGYIKAGKDEGATVEIGGERLGDKGYFIKPTIFSNVRPDMKIMQEEIFGPVCAISKFKDEAEVIDLAHDTAYGLAAAVHTKNLNTALRVSNALKAGTVWVNCYNMLHHQLPFGGYKESGIGRELGEAALANYTQNKSVAIKLY

SEQ ID NO: 6977 - protein, 376 aa, Zea mays
  unsure (1)..(376): unsure at all Xaa locations
MAAASWSAPTTSFAPAPAPPWGPWRTKAAPLPIRTLPRRVLLNAVGESAMVAAGDTLLGLYEKERLGLLQYADDESKEERYWETLDADLRYWTRSLRPXGQWYPGHIAKTEKELKEQLRLMDVVIEIRDARIPLSTSHPKMDSWLGNRKRIIVLNRKDMISTEDMNAWATYFGNQGIKVVFSNGQLGMGTMKLGRMAKSVASVANTKRKEKGLLPRPVRAGIVGYPNVGKSSLINRLLKRRMCPAAPRPGVTRELKWVRFGTDLELLDSPGILPMRISDQTSAIKLAICDDIGERSYDFADVAAILVQMLIRHPAVGSEAFRRRYKIDVDSECGKTFVTKLSVHLFNGDTSQAAFRILSDYRKGKFGWVALERPPT

SEQ ID NO: 6978 - protein, 171 aa, Triticum aestivum
  unsure (1)..(171): unsure at all Xaa locations
MAAFLRSKCSSVGRTLMGGVGNNLYGGINSSVETVTRPSRCDAISQQIRTFIQMRTNLKVVDNSGAKRVMCIQSLRGKKGARLGDMIIGSVKEAQPRGKVKKGDVVYGVVVRAAMKKGRSDGSEVXKFDDNAIVIVNNKGELIGTRVFGPVPHELKKKKHLKILALAEHIV

SEQ ID NO: 6979 - protein, 179 aa, Brassica napus
VDPASGLEQRARWKSKQLETEFNILRQNYNDLASQFESLKKENQGLVSELDRLNEAMQKKRVEGRECCGDQTVVALSSTDHESEKEENTNPEPEEVRPDMEVYEKGHHDDYGYNSHIKREYFGGFEEEADHLMNIVEPADSCLTSSVGWRGFKPNTNILDQSSSNYPWWHFLVITYIRL

SEQ ID NO: 6980 - protein, 347 aa, Burkholderia cepacia R18194
MCVVIHGPNDLRVEEQDAGEIGPGQVRVDVAMGGICGSDLHYFRHGGFGAIRLQQPMVLGHEVAGTVAEVAPDVTSVKVGDRVAVNPSRPCGACRYCLEGLPNQCLDMRFYGSAMRMPHVQGAFRNALVCDAVQCVKVADHVPLSLAALAEPFAVGLHAVSRAGPLIGKRVLVSGCGPIGVLAVAAARVHGAAEIVATDVVEAPLEVASALGADRTINAATDAGWVERYAADKGTFDVMIECSGNARALRDGLDVMRPRGVVVQLGLGGDVSLPQNVVVAKELSICGSFRFHAEFALAVQLINAGRVDLRPAVTRVFPMRDANLAFELAGDRQRAMKVLIDFADEAA

SEQ ID NO: 6981 - protein, 263 aa, Prunus ilicifolia
AHYKTEVDVGNAIAEAIRSGLVKREELFITSKASNHGHVVEACKNSLEKLQLDYLDLYLVHYPLATKHSGVGTTASLLDENKVLDIDVTVSLESTWHDMEKTVSLGLVRSIGLSNYELFLTRDCLSYAKIKPQVSQFETHPYFQRESLVRFCKKHGVTPMAHTPLGGATANVKSFGSISPLEDPVLLGLAKKYKKSVAQIALRWNIERDTPVIPKSSKVERLKENLEVLNFKLEKEDIELINTIDKKSRTTLPSKTWGLDVYA

SEQ ID NO: 6982 - protein, 215 aa, Arabidopsis thaliana
MTEESPEEDHGSPGVAETNPGSPSSKTNNNNNNNKEQDRFLPIANVGRIMKKVLPGNGKISKDAKETVQECVSEFISFVTGEASDKCQREKRKTINGDDIIWAITTLGFEDYVAPLKVYLCKYRDTEGEKVNSPKQQQQRQQQQQIQQQNHHNYQFQEQDQNNNNMSCTSYISHHHPSPFLPVDHQPFPNIAFSPKSLQKQFPQQHDNNIDSIHW

SEQ ID NO: 6983 - protein, 170 aa, Zea mays
  unsure (1)..(170): unsure at all Xaa locations
MAPTVMMASSATAVAPFQGLKSTASLPIARRSSRSLXNVSNGGRIRCMQVWPAYGNKKFETLSYLPPLSTDDLLKQVDYLLRNGWIPCLEFSKVGFVYRENSTSPCYYDGRYWTMWKLPMFGCNDATQVYKELQEAIKSYPDAFHRVIGFDNIKQTQCVSFIAYKPPGSD

SEQ ID NO: 6984 - protein, 250 aa, Prunus andersonii
LKSEADVGNAIAEAIQSGLVKREELFITSKASNHGHVVEACKNSLKKLQLDYLDLYLVHYPLATKHSGVGTTASLLDENKVLDIDVTVSLETTWHDMEKTVDLGLVRSIGLSNYELFLTRDCLSYAKIKPQVSQFETHPYFQRESLVRFCKKHGVVPMAHTPLGGATANVNAFGSISPLEDPVLIGLAKKYQKSVAQIALRWNIERGTPVIPKSSKVERLKENLEVLNFKLEKEDIELINTIDKKSRTTL

SEQ ID NO: 6985 - protein, 355 aa, Burkholderia multivorans
MKIAVLPGDGIGPEIVTEAVKVLNALDEKFELEQAPVGGAGYEARGHPLPDATLKLAKEADAILFGAVGDWKYDSLERALRPEQAILGLRKHLELFANFRPAICYPQLVDASPLKPELVAGLDILIVRELNGDIYFGQPRGVRAAPDGPFAGEREGFDTMRYSEPEVRRIAHVAFQAAQKRAKKLLSVDKSNVLETSQFWRDIMIDVSKEYADVELSHMYVDNAAMQLAKAPKQFDVIVTGNMFGDILSDEASMLTGSIGMLPSASLDKNNKGLYEPSHGSAPDIAGKGIANPLATILSAAMLLRYSLNRAEQADRIERAVKTVLEQGYRTGDIATPGCKQVGTAAMGDAVVAAL

SEQ ID NO: 6986 - protein, 232 aa, Brassica oleracea var. botrytis
MASSSYAPFSAVFSGFAATKPNPPPTCSAFLVPKRRSNSRNLKNGVSLKSWNKHGFQFKSRNLSVYARATEEKTVHDFTVKDISGKDVSLDKFKGKPLLIVNVASKCGLTSSNYTELSQLYDKYRNQGFEILAFPCNQFGGQEPESNPDIKRFVCTRFKAEFPIFDKVDVNGPSTAPIYQFLKSKSGRFLGDLIKWNFEKFLVDKKGNVVQRYPPTTPPLQIEKDIQKLLVA

SEQ ID NO: 6987 - protein, 115 aa, Bartonella sp. BM51YN
MLQEIGSIKRIPEFIARAKDKNDPFRLIGFGHRVYKNYDPRAKIMQKTCHKVLKELNIQDDPLLDIAIELEKIALSDEYFIEKELYPNVDFYSGIILKALGFPTEMFTVLFACPH

SEQ ID NO: 6988 - protein, 217 aa, Triticum aestivum
  unsure (1)..(217): unsure at all Xaa locations
SSPSAGRKIDDHGGHGQLHRHHPRHHPPAPRRLPQVRLRARVLDLXAAHLXRVHPGXXXEXVXXXPRXDSXXGXXGXXXXXXXRXXXGXAXGXGDXXXGXXAXXLWGXXWXXXAPXXXXXXXAGXISLVISVVAAESLLSSTASPPSTDRVKSSPSAGTSTTMAGTANCIDIILAIILPPLGVFLKFGCGHEFWICLLLTFLGYIPGIIYAIYAITK

SEQ ID NO: 6989 - protein, 405 aa, Chromobacterium violaceum ATCC 12472
MTKPRAVYLQSGGPTAVLNASAQGAIETARRLGLSLYAAYDGLAGLLDGRLCDTDGVSDTAIAQLAFMPGGSFGVSRRMIGTFEEAPEDWLRLRDVLAKHDIHYLLINGGNGSLGCAERLVDFEKHTGYKLGVIGIPKTIDNDLVGTDNSPGYGSSAKFLASAMREVGLDMTSMGWGRVFIMETMGRHTGWLAAACAAASRNPHEAPHLLLLPEVPFDQARFLAALDASLAKYGQCAIAVAEGITGQDGRFVAEAKKSETYGHEQLGGAGHWLAQLILRERGISAHVAQVDYLQRAGGHLASATDVRQAYVMGERAVEWLLAGKTGLMAGIRRLNDHPYCWDVAEVPLSAVGDKEKRLPPEFIGADGFSVTQAFLDYVKPLIEGERIPPFKDGLPDYRPIAWPRV

SEQ ID NO: 6990 - protein, 250 aa, Zea mays
MVKAYPTVSEDYLKAVDKAKRKLRGLIAEKNCAPLMLRLAWHSAGTFDVATKTGGPFGTMKNPAEQAHGANAGLEIAVRLLEPIKEQFPILSYADFYQLAGVVAVEVTGGPDVPFHPGRQDKPEPPPEGRLPDATQGSDHLRQVFSTQMGLSDQDIVALSGGHTLGRCHKDRSGFEGAWTSNPLIFDNSYFTELLSGEKEGLLQLPSDKALLSDPSFRPLVDKYAADEDAFFADYAEAHLKLSELGFAEA

SEQ ID NO: 6991 - protein, 168 aa, Zea mays
MNERSSGTHQSLSHSRRADPLSLVRDYRVKEQLAAEGIDVQSFNADLLYEPWEVLDEDRRPFTMFAPFWNRCLCMPDPAAPLLPPKRINSGDLSRCPWDELVFEDESERGSNALLARAWSPGWQNADKALTAFLNGPLMDYSVNRKKADSASTSLLSPYLHFGELRRR

SEQ ID NO: 6992 - protein, 412 aa, Glycine max
MGNCWGSPPHNPTPTTTGNLSTGTTGTSQAISSGSYTTTTTTTTNSSGSGSSSINSKFSVSSGDQPYPNGQILPTSNLRIFTFAELKAATRNFKADTVLGEGGFGKVFKGWLEEKATSKGGSGTVIAVKKLNSESLQGLEEWQSEVNFLGRLSHTNLVKLLGYCLEESELLLVYEFMQKGSLENHLFGRGSAVQPLPWDIRLKIAIGAARGLAFLHTSEKVIYRDFKASNILLDGSYNAKISDFGLAKLGPSASQSHVTTRVMGTYGYAAPEYVATGHLYVKSDVYGFGVVLVEILTGLRALDSNRPSGQHKLTEWVKPYLHDRRKLKGIMDSRLEGKFPSKAAFRIAQLSMKCLASEPKHRPSMKDVLENLERIQAANEKPVEPKFRSTHAASRQGHQAVHHRSPRQDGSN

SEQ ID NO: 6993 - protein, 297 aa, Acinetobacter sp. ADP1
MIEPKLKIETAQTNPMSIEKNIPDLILHDGHSIPALGFGTYTLKGQQGVDTMLRALGHGYRMLDSAFNYENEGAVGAAVRQSGLLRDEIFITSKLPGRHHAYDKAMETIEESLYRMQFDYLDLYLIHWPNPQQGLYIEAWQALIDAQKKGYIRSIGVSNFLPKHIETLRRETGVIPVINQVELHPYFNQAEQRAYDESQQIITMAWSPLGRAKAILDDAVLKQIAQETSRTVVQVVLRWQVQMGVIPIPKAASDQNQMANQAIFDFSLSDDQVQRINALTCADGRIRNQDPAVYEEF

SEQ ID NO: 6994 - protein, 345 aa, Zea mays
MMSSQQQQQQMARPDRQAMYGAPVLPEIPTRFVYMPQTATDVMSGSSSLWKTGAPPHDTLAESAAMYTATLSSQQQQQMARPGPTGDVRGAPVPPPMNMRFIPNTMPAADAMDRTPSPLQRVEVRQVWAHNFDSEAKLIESLLPKFRYVAVETEFPGTVYRPAGPAYKLEPAERYRLLRCNVDALHPVQLGLTLFDAGCVLPGGATRYVWQFNFRDFDVRRHRHVAESVTALRSRGVDLDRTRQYGVAAAAAFGPRLRKWTRAGLGRAAVRVAVQLPGFRCPAAPSRGGVRRGAAEQRRGSRLGRGSTASPRRRRSARACASGRVPASAAPAVSHVPRRLRPSRT

SEQ ID NO: 6995 - protein, 483 aa, Acinetobacter sp. ADP1
MDLQQQPLFRQKALVAGQWCDADNAEKTPIFNPATQELIGYVPNMGRAETERAIEAAYASWEMWKTKTAKERSALLKKWYDLILLNLDVLAEILTTEQGKPFNEAKGEIIYAASFIEWFAEEAKRIYGDIIPSPYPDARIVVNKQPIGVVAAITPWNFPAAMITRKVAPALAAGCPCIVKPAPETPFTALALADLAIQAGIPAEIMSVVTGDAAQIGDAIFASDHVRKFTFTGSTPIGKLLLEKSAKTLKKVSLELGGNAPFIVFDDADIEAAVEGALIAKFRNAGQTCVCVNRFLVQSGVYEKFIQVFKAKIESLKIGNGLEAGSEIGPLINAQAVAKVQSHIEDALSKNGRLITGGQVHATGELFFEPTLIADANTEMMVATQETFGPLAAIFKFDTEQQAIQMANDTEFGLAAYCYTRDLGRAWRMSEQLEYGMVGINKGLISNEVAPFGGIKHSGLGREGSKYGIEDYLEIKYTLFGGL

SEQ ID NO: 6996 - protein, 505 aa, Alteromonas sp.
MIYAKPGSEGSVVSFKESYGNFINGEWVAPVKGEYFTATSPVDGSDIAQVPRSTSEDVELALDAAHAAKKGWAEKSVAERSNVLLKIADRIEENLELLAVAETWDNGKAVRETLNADIPLCADHFRYYAGCIRSQEGTIGEIDKNTVAYHFHEPYGVVGQIIPWNFPLLMAAWKLAPALVTGNVVVLKPAEQTPVSILLFAELIQDLLPPGVLNIVNGFGAEAGQALATSTRIAKIAFTGSTPVGGHILRCAAENLIPSTVELGGKSPNLFFADIMDHEPEFIDKCAEGLVLGYFNQGEVCTCPSRAIIQEDIYDAFMEKVLEKIQKIKRGNPLDTETMVGAQASNEQFEKILKYIDIGKSEGAQVVTGGEKEQLPGFDDGYYIQPTILKGENHMRVFQEEIFGPVIAVQTFKTEEEAIEIANNTSFGLGAGVWSRDANVAFRVGRAIEAGRVWTNCYHLYPAHAAFGGYKKSGIGRETHKMMLDHYQQTKNLLVSYDINPLGFF

SEQ ID NO: 6997 - protein, 354 aa, Prunus armeniaca
MGSVRASHELLQAQAHIWNHIFSFINSLSLKCAVQLDIPDVIQKHGQPMTLSELVSALPISPTKAHFIPRLMRILVHSGFFAKESLSGCGEQGYILTDASALLLKDNPMSARPFLLAMLSPILTDPYQYLTTWFQNDNPTPFHVVNGMTCWDYVNQDPTLAHFFNDAMASDAQLISSLVIDDCKEVFQGVDSLVDVGGGTGTVAKSIADAFPHMKCTVLDLPHVVADLKGSKNLEYVAGDMFEAVPAADAIFLKWILHDWSDEECVKILERCKAAVTREGKKGKVIIVEMTVENKNTDKESGETQLFFDMHMMVMSTGKERNEKEWAKLFSDAGFSQYKITPLFGFKSLIEVYP

SEQ ID NO: 6998 - protein, 251 aa, Prunus andersonii
AHYKSEADVGNAIAEAIQRGLVKREELFITSKASNHGHVVEACKNSLKKLQLDYLDLYLVHYPLATKHSVGTTASLLDENKVLDIDVTVSLETTWHDMEKTVDLGLVRSIGLSNYELFLTRDCLSYAKIKPQVSQFETHPYFQRESLVRFCKKHGVVPMAHTPLGGATANVNAFGSISPLEDPVLIGLAKKYQKSVAQIALRWNIERGTPVIPKSSKVERLKENLEVLNFKLEKEDIELINTIDKKSRTTL

SEQ ID NO: 6999 - protein, 488 aa, Acinetobacter sp. ADP1
MQQFQLYINGKFEDGAAQFDSINPATGEIWAKMPEARTDQVNRAVDAAEQAFYDSSWSGLTASQRGKLLYKLADLVEKSAPRLAALETTDTGKIIRETSSQIAYVAEYYRYYAGLADKIEGSFIPVDKPDMQAWLVREPVGVVAAIVPWNSQLFLSAVKVGPALAAGCTVVLKASEEAPAPLLEFAKLIDEAGFPAGVVNVITGFGPECGAVLSAHPKVAHIAFTGGPETAKHIVRNSAENLAKVSLELGGKSPFIVFADTDINSALNAQIAAIFAATGQSCVAGSRLLIEESIKDEFLQRLAERVQSIKMGLPDDMQTEYGPLCTLKQREKIQQVVQRSVEQGAKLITGGQVCDGAGYYYPPTILDCSGVSDAQSIHTELFGPVLSVDTFSTEAEAIQKANSTPYGLASGVFTSNLTRAHRMTRAIRSGIVWLNTYRVVSPLAPFGGYGLSGHGREGGLSAALEYTTTKTVWLRMSDQPIDDPFVMR

SEQ ID NO: 7000 - protein, 252 aa, Prunus mexicana
AHYKSEADVGNAIAEAIQSGLVKREELFITSKASNHGHVVEACKNSLKKLQLDYLDLYLVHYPLATKHSGVGTTASLLDENKVLDIDVTVSLETTWHDMEKTVDLGLVRSIGLSNYELFLTRDCLSYAKIKPQVSQFETHPYFQRESLVRFCKKHGVVPMAHTPLGGATANVKAFGSISPLEDPVLIGLAKKYQKSVAQIALRWNLERGTPVIPKSSKVERLKENLEILNFKLEKEDIELINTIDKKSRTTL

SEQ ID NO: 7001 - protein, 78 aa, Zea mays
FVFEKNLVQSFRLLVDYACTPEEVQQHFQACGTVNRVTILTDKFGQPKGFAYVEFLEQEAVQEALNLNESELHGRQIK

SEQ ID NO: 7002 - protein, 83 aa, Zea mays
MTCLLGCLSLFCLKVRAGIVGYPDVGKSSLINRLLKRRMCPAAPRPGVTRELKWVRFGTDLELLDSPGILPMRISDQTSAIKL

SEQ ID NO: 7003 - protein, 501 aa, Burkholderia cepacia R1808
MTRRAVANLEILMSVYGLQRLYIGGAYVDATSGKTFDTFDPATGELLAQVQQASAADVDRAVASAQQGQREWAALTAMQRSRILRRAVDLLRERNDELAAIETRDTGKPIGETLAVDIVTGADVIEYYAGLATAIEGLQVPLRAESFVYTRREPLGVCAGIGAWNYPIQIACWKTAPALAAGNAMVFKPSEVTPLTALKLAEIYTEAGVPAGVFNVVQGDGSVGALLTGHPDIAKVSFTGGVETGKKVMSLAGASSLKEVTMELGGKSPLIVFDDADLDRAADIAVIANFFSSGQVCTNGTRVFVQRSIKDAFTAKVLERVKRIRVGKPTDADTNFGPLVSAAQLDKVLGFIASGKAEGAKLLAGGTRLTDGHFADGQYVAPTVFGDCRDDMKIVREEIFGPVMSILDFESEDEVIARANDTHYGLAAGVVTENLSRAHRTIHRLEAGICWINTWGESPAEMPVGGYKQSGVGRENGITTLEHYTRIKSVQVELGRYNPVF

SEQ ID NO: 7004 - protein, 303 aa, Zea mays
  unsure (1)..(303): unsure at all Xaa locations
WYPRFCRELIYIENXYFLGSSYGWKPEGINPQEIGALHLIPKELSLKIVSKIEAGERFTVYVVVPMWPEGVPESASVQAILDWQRRTMEMMYTDIAQALEANGIEANPKDYLTFFCLGNREVKQEGEYEPEEHPEPDTDYIRAQEARRFMIYVHTKMMIVDDEYIIIGSANINQRSMDGARDSEIAMGAYQPYHLATRQPARGQIHGFRMSLWYEHLGMLEDVFQRPESVECVQKVNEVAEKYWDLYSSDDLEQDLPGHLLSYPIGVTADGSVTELPGMENFPDTRARVLGNKSDYLPPILTT

SEQ ID NO: 7005 - protein, 251 aa, Prunus fasciculata
AHYKSEADVGNAIAEAIQSGLVKREELFITSKASNHGHVVEACKNSLKKLQLDYLDLYLVHYPLATKHSGVGTTASLLDENKVLDIDVTVSLETTWHDMEKTVSLGLVRSIGLSNYELFLTRDCLSYAKIKPQVSQFETHPYFQRESLVRFCQKHGVVPMAHTPLGGATANVKAFGSISPLEDPVLIGLAKKYQKSVAQIALRWNIERGTPVIPKSSKVERLKENLEVLNFKLEKEDIELINTTDKKSRPL

SEQ ID NO: 7006 - protein, 67 aa, Triticum aestivum
MAESTAIAPPPPPDGTTTFLCLILAFFIPPLGVFLKYKCEIEFWICLILTFLAYAPGIIYAVWVIVK

SEQ ID NO: 7007 - protein, 485 aa, Agrobacterium tumefaciens
MQNKVQFITYVDRLTRGGFRQLKELVDGKFAGLFGGVHVLPFFNPIDGADAGFDPTDHTIVDPRLGDWEDVRALSGSVEIMADLIVNHVSSQSGAFTDFIAKGSASEFADMFMTFDKVFPDPATEEDLLRIYRPRPGLPFSKVTLADGTQRMLWTTFTPEQIDIDVHSAKGTTYLETILDRFSEANVTAIRLDAAGYAIKKAGSSCFMIDDTYAFLEEVAGKARNRGMEVLVEIHSYHRDQIEIAKKVDRVYDFALPPLILHALFTGDATPLAKWLAISPRNAITVLDTHDGIGVIDVGAHSDGRAGLLEPQAIDNLVGEIHRRSDGQSRQATGAAASNLDLYQVNCTYYDALGRNDNDYLIARAIQFFAPGIPQVYYVGLLGGVNDMDLLAKTGVGRDINRHYYGNDEIGTALETPLFHRLSNLIRFRNTHPAFGGALKATIADAGALVLSWQHGDAFAELKISFADRKASIAASGQSEMQIVE

SEQ ID NO: 7008 - protein, 252 aa, Prunus fasciculata
AHYKSEADVGNAIAEAIQSGLVKREELFITSKASNHGHVVEACKNSLKKLQLDYLDLYLVHYPLATKHSGVGTTASLLDENKVLDIDVTVSLETTWHDMEKTVSLGLVRSIGLSNYELFLTRDCLSYAKIKPQVSQFETHPYFQRESLVRFCQKHGVVPMAHTPLGGATANVKAFGSISPLEDPVLIGLAKKYQKSVAQIALRWNIERGTPVIPKSSKVERLKENLEVLNFKLEKEDIELINTIDKKSRTTL

SEQ ID NO: 7009 - protein, 293 aa, Oryza sativa (japonica cultivar-group)
MSDPTAAVIPKPGGIGVGGGGGDDEEPVEIREVWADNLEEEFALIRDVVDEFPFVAMDTEFPGIVCRPVGAFRSPADYNYATLKANVDMLHLIQLGLTFSSPRGELPALGPGRRRCVWQFNFREFDDARDIFASDSIELLRRSGIDFRRNSERGVDARRFAELLMSSGVVLNDSVYWVTFHAGYDFGYLLKILTCSSLPDTQAGFFKLMKIYFPTVYDIKHLMKFCNSLHGGLNKLAELLDVERVGESHQAGSDSLVTSCAFWKLKDSFFAGSTEKYAGVLYGLNAENVVSAH

SEQ ID NO: 7010 - protein, 334 aa, Triticum aestivum
  unsure (1)..(334): unsure at all Xaa locations
MGSTATDMAASADEEACMYALQLVSSSILPMTLKNAIELGLLETLVAAGGKLLTPAEVAAKLPSTANPAAADMVDRMLRLLASYNVVSCTMEEGKDGRLSRRYGAAPVCKFLTPNEDGVSMAALALMNQDKVLMESWYYLKDAVLDGGIPFNKAYGMSAFEYHGTDPRFNRVFNEGMKNHSIIITKKLLEVYKGFNGLDTLVDVGGGIGATVGAITAHYPTVKGINFDLPHVISEAXILHDWSDEHCATLLKNCYDALPAHGKVVLVECILPVNPEATPEAQGGFHLDMIMLAHNPGGRERYEREFEALAKGAGFGAIKTTYIYANIWVIEFTK

SEQ ID NO: 7011 - protein, 366 aa, Thermosynechococcus elongatus BP-1
MQGTTIFRGDAFAKVSMKAQVFRGVNQLSYEEIPIPEIAADEVLVRVRVVGLCQSDIKKIRYPLYEPPRIFGHETAGEIAAVGDAVTGWQVGQRVVVMHHIPCMHCAYCLNENYSMCHVYKTVTTTAGFIPSGGGFAEYVKVPGHIVEHGGLIPIPDPISDEEASFVEPTNCCLKAVKKAGIAPGQTVLITGAGPIGLMFIMLVNLFGARAIATDLLPSRIAKAKEVGAAAAFDARDPDLSAKVQALTHGLGVDVSLLAVPSEKAFFQALECTRKGGKILFFAEFPDEVEIPLNPNILYRREIDLMGSYSSSYRLQSLACDIIFNRRIDVKTLVSDRYPLSKLAEAVEQAVHPTPETYKILIYPES

SEQ ID NO: 7012 - protein, 252 aa, Prunus subcordata
AHYKSEADVGNAIAEAIHSGLVKREELFITSKASNHGHVVEACKSSLKKLQLDYLDLYLVHYPLATKHSGVGTTASLLDENKVLDIDVTVSLETTWHDMEKTVDLGLVRSIGLSNYELFLTRDCLSYAKIKPQVSQFETHPYFQRESLVRFCKKHGVVPMAHTPLGGATANVKAFGSISPLEDPVLIGLAKKYQKSVAQIALRWNIERGTPVIPKSSKVERLKENLEILNFKLEKEDIELINTIDKKSRTTL

SEQ ID NO: 7013 - protein, 175 aa, Triticum aestivum
MAPTVMASSATSVAPFQGLKSTAGLPVSRRSNGASLGSVSNGGRIRCMQVWPIEGIKKFETLSYLPPVSTEALLKQVDYLIRSKWVPCLEYSKVGFIFREHNASPGYYDGRYWTMWKLPMSGCTDATQVINEVEEVKKEYPDAYVRIIGYHNMRQVQCVSFIAFKPPGCEESGKA

SEQ ID NO: 7014 - protein, 130 aa, Glycine max
MGYGRSRASSVLDGFSLNPVPYPVLLILSLILLFLGISWYLSYEEVVEAAEEQLGWMLLATPVVLILVVRWLSSVDTSEWFFFNSSPWERRRRTHHFPSEGSSPWGVAALILLVLVLLHYHSTFLDAWFV

SEQ ID NO: 7015 - protein, 87 aa, Zea mays
  unsure (1)..(87): unsure at all Xaa locations
FGQPKGFAYVEFLKLNXFQEAIKLNESELPGRQLKVAPKRTNVLGMKHPPGRGFNPYHGPPYMRPDGYSPYGYGRFPRFPRPRSPYF

SEQ ID NO: 7016 - protein, 168 aa, Avena agadiriana
VMASSATSVAPFQGLKSTAGLPVSRRSNAGLGSVSNGGRIRCMQVWPIEGIKKFETLSYLPPLSEEALLKQIDFLIRSKWVPCLEFSKVGFIFREYGSTPGYYDGRYWTMWKLPMFGCTDASQVIKEVEEVKKEYPDAYVRIIGFDNIRQVQCVSFIAFKPPGCEESG

SEQ ID NO: 7017 - protein, 373 aa, Triticum aestivum
  unsure (1)..(373): unsure at all Xaa locations
MAASAWAALPRPAPGRPSRPLTAQIKDMALKAPGLSLSVGQRGRACARSPAAGCSRASPARGGSGAGCRRWTSRRRTRTSSMPARAWEALPRPAPGRPSRRSRPRSRTWRSRRRARTGTASPAPAPPRGRRGATTRTTTAAAAACRDADDVLQLPLTRTAALRAGEAARRSAETCANVTALYNVQRFNHQSVPLPTTPKSEXDESSKEDSPVTPPLDKERVPRSLQRPTSGGGAMGYSSSDSLEHHSNHYCNGLHPHHGHQCYDSVGLASTPKLSSISGAKTETSSMDASMRTSSSPEEVDRSGELSVSISNASDQEREWVEEDQPGVYITIRALPGGIRELRRVRFSREKFSEMHARLWWEENRARIHEQYL

SEQ ID NO: 7018 - protein, 308 aa, Azotobacter vinelandii
MTSKLEQLKQHTTVVADTGDLDAIARLQPVDATTNPSLLLKAASLPRYAGLLEHAITGCSGDLGLACDRFAVAVGQEILGVIPGRISTEVDARLSFDSQATIGRAERLIGLYEQAGITRERVLIKIAATWEGIRAAERLEKAGIQTNLTLLFSFAQAAACADAGVFLISPFVGRIYDWYKKAEGRDFASVEDPGVQSVTRIYNYYKANGYDTVVMGASFRNLGQIEQLAGCDRLTISPELLQQLAGEQGSLERKLAPGSSGEPRQTLDEPTFRWALNEDAMATEKLAEGIRLFARDQIKLEALLSEKI

SEQ ID NO: 7019 - protein, 436 aa, Helicobacter pylori 26695
MNFQENLAALDLEYLWHPCSQMQEHQNFPIIPIKKAQGIYLYDFNDNAYMDLISSWWVNLFGHNNAYISQQLKNQIDDLEHVLLASFSHKPIITLSQRLCQLTHMDKCFYADNGSSCVEIALKMSYHAHFLKNQTRRKKLFLSLSNSYHGETLGALSVGDVKLYKDTYTPLLLKNLTTPVPKNDHEIENSLNALKRLLDKHSEEICAFIAEPLLQCAGNMHIYSARYLKQAVLLCKQKNIHIIFDEIATGFGRTGSMFAYEQCEIKPDFLCLSKGISGGYLPLSALLTHNEIYNQFYAPYEENKAFLHSHSYTGNALACACANATLDIFEKENVIEKNKALSGFIFNTLQNALKPLMEQQVVSDLRHLGMVFAFEVFIQTKERLSLAVFKKTLKKGLLLRPLNNTIYLMPPYIITHEEVKKAVAGLVEILDELRKG

SEQ ID NO: 7020 - protein, 54 aa, Brassica napus
MGTATFIDILLAILLPPLGVFLRYGCGVEFWICLVLTLLGYLPGIIYALFVLTK

SEQ ID NO: 7021 - protein, 456 aa, Pseudomonas fluorescens PfO-1
MTTSRETRDYQAADAAHHIHAFVDQKALNDEGPRVMVRGDRLHLWDNDGRRYLDGMSGLWCTNLGYGRKDLNAAASRQLEQLPYYNMFFHTTHPQVIELSELLFSLLPGHYSHAIYTNSGSEANEVLIRTVRRYWQVLGKPEKKIMIGRWNGYHGSTLAATALGGMKFMHEMGGMIPDIAHIDEPYFFAHEGNLTPAEFGLRAAQQLEAKILELGADKVAGFIAEPFQGAGGMIFPPESYWPEIQRICRQYDVLLCADEVIGGFGRTGEWFAHEYFGFEPDTLSIAKGLTSGYIPMGGLILSKKMADVLVEQGGVFAHGLTYSGHPVAAAVAIANLKALRDEGVVTRVKDDIGPYLQQCLREVFGNHPLVGDIQGTGMVAALQLAEDKATRKRFANENDIAWRCRTIGFEEGVIIRSTLGRMIMAPALIASREEIDELVGKTLKALDRTAQEYGRL

SEQ ID NO: 7022 - protein, 279 aa, Exiguobacterium sp. 255-15
MAKARREVTEKLKLIDVVIELVDARLPMSSRNPMVEQITAGKPRLIVLNKSDMADARLTEKWMHALRKDGVDVIAVDAKHSKGLGQIHEGALRLMKDKHDRMRDKGRNPSAIRALIIGIPNVGKSTLINRLAGRNIAITGDRPGVTKRQQWIKMKTGEMELLDTPGILWPKFDDQLVGYRLAATGAIKDDILNIDDIALFAIRELKSRYPEQLKARYRLQDVSGEAVEVLEAIGKNRGFVTGGYVDFERTSEMLLHELRTEKIGRVTLETVEEWATVTE

SEQ ID NO: 7023 - protein, 400 aa, Lycopersicon esculentum
RILGLGDLGCQGMGIPVGKLALYTALGGVRPSACLPITIDVGTNNEKLLNDEFYIGLRQRRATGQEYYDFLHEFMSAVKQNYGEKILVQFEDFANHNAFELLAKYRNSHLVFNDDIQGTASVVLAGLIASLKLLGGALCDHTFLFLGAGERGTGIAELIALEISNKTNIPVEETRKKIWLVDSKGLIVSGRKETLQAFKKPWAHEHEPVNNLLDAVKAVKPTVLIGTSGTGRTFTKEVVEAMACMNKRPLIMALSNPTSQAECTAEEAYSWSEGRAVFASGSPFPSFEYDGKLNIPGQANNCYIFPGFGFGLVMSGTIRVDDDMLLAASEALAAQVTEEHYAKGMIYPPFADIRKISAHIAASVARKAYELGVATSLPRPADLVKYAESCMYTPNYRSYR

SEQ ID NO: 7024 - protein, 297 aa, Zea mays
  unsure (1)..(297): unsure at all Xaa locations
MDPMDIVGKSKEDVSLPKSTMVKIIKEMLPPDVRVARDAQDLLVECCVEFINLLSSESNEVCSREEKKTIAPEHVIKALSDLGFREYIEEVYAAYEQHKLETLDSPKAGKFTRIEMTEEEAVAEQQRMFAEARARMNNGAPKPKEPEQEPPQLPQAQPQLQLHTEPQQPMQSQVQLHSQTQHSLQPQLQLHHQPQQLPQVQLHSQPQLQPQVHLHPQPQLXPQLQVHQQLQQSPQVQVHEQPQVQPQEAQLQSSAQQTSQPQPQVQLQSQGHSQAQLQAGLLGQLQTQAQTGPGMDS

SEQ ID NO: 7025 - protein, 254 aa, Oryza sativa (indica cultivar-group)
MEAGYPGAAANGAAADGNGGAQQAAAAPAIREQDRLMPIANVIRIMRRVLPAHAKISDDAKETIQECVSEYISFITGEANERCQREQRKTITAEDVLWAMSRLGFDDYVEPLGVYLHRYREFEGESRGVGVGVGAARGDHHHGHVGGMLKSRAQGSMVTHHDMQMHAAMYGGGAVPPPPHPPPHHHAFHQLMPPHHGQYAPPYDMYGGEHGMAAYYGGMYAPGSGGDGSGSSGSGGAGTPQTVNFEHQHPFGYK

SEQ ID NO: 7026 - protein, 397 aa, Magnaporthe grisea 70-15
MATKAMQLEECFEHLNVNDENDHGDRLVQKSKISMSTAQISHGSSRPNLFKVALQSQSANTVTSVTLPSQAAQRKMAPPPKSREPPSPSKHKKDSVSSSVDELANEEVEASAPRVPKEFHLGMFEIGRPLGKGKFGRVYLARERTTGFICALKVLYKKELESGSVEKQVRREIEIQTNLCHPNILKMYGHFHDNKRIFLILEFAGKGELYKHLRKENRFPEWKAAQYVAQMASALKYLHRKHVIHRDIKPENILVGLHGELKISDFGWSVHAPNNRRKTLCGTLDYLPPEMIKSGNKDNTYDEKVDLWSLGVLTYEFVVGEAPFEDTPVMTQRRIARADMTIPSFVSPECRDLIKKLLVLDPVKRLSLDAVQKHPWIIKHCVKGERATNREKGRGSD

SEQ ID NO: 7027 - protein, 246 aa, Arabidopsis thaliana
MVDVIVTTTGGVEEDLIKCLAPTFKGDFSLPGAYLRSKGLNRIGNLLVPNDNYCKFEDWIIPIFDEMLKEQKEENVLWTPSKLLARLGKEINNESSYLYWAYKMNIPVFCPGLTDGSLGDMLYFHSFRTSGLIIDVVQDIRAMNGEAVHANPKKTGMIILGGGLPKHHICNANMMRNGADYAVFINTGQEFDGSDSGARPDEAVSWGKIRGSAKTVKVYCDATIAFPLLVAETFATKRDQTCESKT

SEQ ID NO: 7028 - protein, 377 aa, Hypocrea jecorina
MSPSAVDDAPKATGAAISVKPNIGVFTNPKHDLWISEAEPSADAVKSGADLKPGEVTIAVRSTGICGSDVHFWHAGCIGPMIVEGDHILGHESAGEVIAVHPTVSSLQIGDRVAIEPNIICNACEPCLTGRYNGCEKVEFLSTPPVPGLLRRYVNHPAVWCHKIGNMSWENGALLEPLSVALAGMQRAKVQLGDPVLVCGAGPIGLVSMLCAAAAGACPLVITDISESRLAFAKEICPRVTTHRIEIGKSAEETAKSIVSSFGGVEPAVTLECTGVESSIAAAIWASKFGGKVFVIGVGKNEISIPFMRASVREVDIQLQYRYSNTWPRAIRLIESGVIDLSKFVTHRFPLEDAVKAFETSADPKSGAIKVMIQSLD

SEQ ID NO: 7029 - protein, 252 aa, Zea mays
  unsure (1)..(252): unsure at all Xaa locations
MAVLRGRLTLVLILSLSCCFSFPTVLSSVTSDGFLQCLSDNIPVGLIYTQGSTNFTDELVSSVRNPRLFTSATVRPLCIVTPVDASHVQAAVRCGRASGVRLRVRSGGHDYEGLSYRSERPEVFSVVDLSNLRAITVSADDDERPVPPTASAWVDSGATLGELYYTVAKNNPELAFPAGICPTIGXSAGTWSGGGIGXMMRRFGLSVDNVLDAKLVNASGDLVDGRXMGEDHFWAIPGGGGESFRVRGVVGK

SEQ ID NO: 7030 - protein, 252 aa, Prunus besseyi
AHYKSEADVGNAIAEAIQSGLVKREELFITSKASNHGHVVEACKNSLKKLQLDYLDLYLVHYPLATKHSGVGTTASLLGENKVLDIDVTVSLETTWHDMEKTVDLGLVRSIGLSNYELFLTRDCLSYAKIKPQVSQFETHPYFQRESLVRFCKKHGVVPMAHTPLGGATANVNAFGSISPLEDPVLIGLAKKYQKSVAQIALRWNIERGTPVIPKSSKVERLKGNLEILNFKLEKEDIELINSIDKKSRTTL

SEQ ID NO: 7031 - protein, 462 aa, Thermosynechococcus elongatus BP-1
MVKLTPTPAYSLTLRLETSLDPTELGTVLQIIGGQQGQVGSIRLLEKTANRILRELVVVAASQEHGQAIVNAVKSDGQATVLEVSDRTFRLHEGGKITIKSKHPLQEYDDLAMAYTPGVGRVSQAIADDPDLVHKLTIKSHTVAIVSDGSAVLGLGNIGPEAALPVMEGKAMLFQEFAGLDAFPICLATQEVDEIVATVKRIAPVFGGINLEDISAPRCFDIEARLQAELDIPVFHDDQHGTAIVTLAALKNALQFVGKSLETVRIVINGAGAAGIAVARLLRKAGAKDLILCNRRGILSLQTDLTPAQKEFAVTQTGTLADALGDADVFIGLSAPGVLTVEMVQRMAKEAIVFAMANPVPEIQPELIYNHVAVVATGRSDYPNQINNVLAFPGVFKGTLACRAPRMTEEMFLAAAEAIAGLVSPSERHSAYIVPSVFDPRVAPAVAKAVEDCARSLGLARA

SEQ ID NO: 7032 - protein, 252 aa, Prunus salicina
AHYKSEADVGNAIAEAIQSGLVKREELFITSKASNHGHVVEACKNSLKKLQLDYLDLYLVHYPLATKHSGVGTTASLLDENKVLDIDVTVSLETTWHDMEKTVDLGLVRSIGLSNYELFLTRDCLSYAKIKPQVSQFETHPYFQRESLVRFCKKHGVIPMAHTPLGGATANVKAFGSISPLEDPVLIGLAKKYQKSVAQIALRWNLERGTPVIPKSSKVERLKENLEILNFKLEKEDIELINTIDKKSRTTL

SEQ ID NO: 7033 - protein, 328 aa, Blumeria graminis
MDTKMEDVGKTPEPIRFQTTTEPASISTLDGWIENLMACKQLPEVDVLRLCEKAREVLHSESNVQPVKCPVTVCGDIHGQFHDLMELFRIGGPNPDTNYLFMGDYVDRGYYSVETVTLLVALKIRYPQRITILRGNHESRQITQVYGFYDECLRKYGNANVWKYFTNLFDFLPLTALIENQIFCLHGGLSPSIDTLDNIKSLDRIQEVPHEGPMCDLLWSDPDDRCGWGISPRGAGYTFGQDISEAFNHNNGLTLVARAHQLVMEGYNWSQDRNVVTIFSAPNYCYRCGNQAAIMEIDEHLKYTFLQFDPCPRAGEPMVTRRTPDYFL

SEQ ID NO: 7034 - protein, 252 aa, Prunus armeniaca
AHYKSEADVGNAIAEAIQSGLVKREELFITSKASNHGHVVEACKNSLKKLQLDYLDLYLVHYPLATKHSGVGTTASLLDENKVLDIDVTVSLETTWHDMEKTVDLGLVRSIGLSNYELFLTRDCLSYAKIKPQVSQFETHPYFQRESLVRFCKKHGVVPMAHTPLGGATANVKAFGSISPLEDPVLIGLAKKYKRSVAQIALRWNLERGTPVIPKSSKVERLKENLEILNFKLEKEDIELINTIDKKSRTTL

SEQ ID NO: 7035 - protein, 168 aa, Avena strigosa
VMASSATSVAPFQGLKSTAGLPVSRRSNAGLGSVSNGGRIRCMQVWPIEGIKKFETLSYLPPLSEEALLKQIDFLIRSKWVPCLEFSKVGFIFREHGSTPGYYDGRYWTMWKLPMFGCTDASQVIKEVEEVKKKYPDAYVRIIGFVNIRQVQCVSFIAFKPPGCEESG

SEQ ID NO: 7036 - protein, 220 aa, Prunus emarginata
  unsure (1)..(220): unsure at all Xaa locations
NAIAEAIQSGLVKREELFITSKASNHGHVVEACKSSLKKLQLDYLDLYLVHYPLATKHSGVGTTASLLDENKVLDIDVTVSLETTWHDMEKTVSLGLVRSIGLXNYELFLTRDCLSYAKIKPQVSQFETHPYFQRESLVRFCKKHGVIPMAHTPLGGATANVKAFGSISPLEDPVLLGLAKKYQKSVAQIALRWNIERDTPVIPKSSKIERLKENLEILN

SEQ ID NO: 7037 - protein, 168 aa, Avena clauda
VMASSATTVAPFQGLKSTAGLPVSRRSASSLGNVSNGGRIRCMQVWPIEGIKKFETLSYLPPLSEEALLKQIDFLIRSKWVPCLEFSKVGFIFREHGSTPGYYDGRYWTMWKLPMFGCTDASQVIKEVEEVKKEYPDAYVRIIGFDNIRQVQCVSFIAFKPPGCEESG

SEQ ID NO: 7038 - protein, 274 aa, Clostridium acetobutylicum ATCC 824
MLDINSFTVLNNGVKMPWLGFGTYKIEYEESSVDYIKTALKVGYRHLDTAAVYGNEPIVGKAVKESGIPRNEIFITSKVWNNKHGYDKTLKAFEDTLKRLDTDYLDLYLIHWPKTLNKETWKALEKLYKDGRVRAIGVSNFKVHHLEEILEDCEIVPMVNQVEYHPQFPQTEVHEFCKKNKIQLESWGPLMQGKIFDIPLMKELSLKYGKTISQIALRWDLQMGVVTIPKSINENRIKENCDLYDFEISKEDMKKIESLNTGVRIGHDPDTITF

SEQ ID NO: 7039 - protein, 223 aa, Lolium perenne
MCQIKKEMSGESGSPCNGEYCSPSTSSEQKQQTVWTKRPAGRTKFRETRHPVYRGVRRRGNAGRWVCEVRVPGRRGSRLWVGTFDTAEIAARAHDAAMLALAAGDVCLNFADSAELLDMPASSYRSLDEVRHAVTEAVEEFERRQALGEEDALSGTESSTLTDDEESSTPFELDVLSDMGWDLYYASLAQGMLMSSPFLAASAALGDYGEANLADVPLWSYLS

SEQ ID NO: 7040 - protein, 168 aa, Avena sterilis subsp. ludoviciana
VMASSATSVAPFQGLKSTAGLPVSRRSNAGLGSVSNGGRIRCMQVWPIEGIKKFETLSYLPPLTEEALLKQIDFLIRSKWVPCLEFSKVGFIFREHGSTPGYYDGRYWTMWKLPMFGCTDASQVIKEVEEVKKEYPDAYVRIIGFDNIRQVQCVSFIAFKPPGCEESG

SEQ ID NO: 7041 - protein, 77 aa, Zea mays
  unsure (1)..(77): unsure at all Xaa locations
MAHAYCCTFLXILLAIILPPFGVFLRFGCYRIEFCICVMLTILDYDPGIIYPMYVIVALDFDQHDSEYDTHDYSIWL

SEQ ID NO: 7042 - protein, 271 aa, Triticum aestivum
  unsure (1)..(271): unsure at all Xaa locations
TRPRTRGRTRGHHPWDAPASVLQAAGVELGSNYPLPIVELDTAQVRLQEALSEMWQLEAASRAXAMDTGMEEGLGDSSEVPPIEFPQDLQMEVHWEPARVAPNVLTTAQRRQDQMVPTMTASLNRVETEISADLGNSVDSRAEVPFRMHFEPRTEREEVIQSTGNAAGTNGIHHHNNFQQPQHRMRNIFAPSVSEASSSWTGRDGGVVPVWSPPAASGHSETYGADEADVSSRSYLDRHPQSHRIMNWHQLSQSLTTGRDVENSVQPNFIG

SEQ ID NO: 7043 - protein, 192 aa, Chromobacterium violaceum ATCC 12472
MGWLGRENAMKRWGAMLMLWGQAALAACPALLNHSVPGLMGGQINLCQYADRPLLVVNTASHCGFTPQFTQLESLYKQYGPRGLMVIGFPSNDFFQELDKPSEIGAFCQANYGVTFPMAGKGHVRGADAQPLFKDLIAATDDAPSWNFHKYLILPGASKVISIGTRTKPDAPEVVNAFLPYLQPETQAAAKP

SEQ ID NO: 7044 - protein, 767 aa, Zea mays
MDGRRTILMGRYEIGKQLGQGTFAKVFYARNLTTGLAVAIKMINKDKVMKVGLMEQIKREISIMRLVKHPNILQLYEVMASKSKIYFVLEYAKGGELFNKIAKGGKLSEDAARKYFQQLVSAVDFCHSRGVYHRDLKPENLLLDENENLKVSDFGLSALAESKRQDGLLHTTCGTPAYVAPEVLSRKGYDGAKEERFTTRQPVTTVFTKLKELAKRLKLRVKKKENGTLKLAAPKEGKKGMLELDAEIFERNVSPGDIQRHPDMSPSKKQLTNNNDSLYWSNEKYDYSCSWLDDRAMISALLDVVIEEDSARALSPLPLVAGVEAELHPVSVGHKSMDAEMKQPLEGSMSLNIDSEGEPHIGNGSIVVENPASDLVKSESDRIKTFYQTVLSAIMVFVTAALSSYKDMKPLYSTTSHGKAHLSNLLVDEGLFIFMTFLCAMVLMMSEFVVHQHGRRGHVWCWVRTILVAVTGVMLIVADTILLIVTNRSNMLLSVLLVPEVLLFGVAVSVGAWMQESLPSSELGSRYDSAMKGTFDIATVGTIVSFTLQGGIVFGYLKTPDSNQVKHDPPLDLAACYATSTLSLTGMTMCAMPLAYLPNGMLEVLVRVVERLRSAVLAALAMMALVVSVEFLDGFVVVSFFPDAVTIALYYVVKLFSACQPREEISQLDFTFRIVAAAGFTLMTGLYAAFTGTDHYGFNLKTAMFILLLAVVSSLSRLAIPLHMPEAGVGGVIEFGIVSIALSFPLLALLAAIPLVFKVFVDHYINR

SEQ ID NO: 7045 - protein, 249 aa, Zea mays
  unsure (1)..(249): unsure at all Xaa locations
MAAAARQRGTVKWFNDTKGFGFISPEDGSEDLFVHQSSIKSEGFRSLAEGEEVEFSVSEGDDGRTKAVDVTGPDGSFVRGGGGGGGGGGGGYGSRGGGGSGGGGRSYGGSWGGGRRSGGGGGPGACYKCGEPGHMARDCPSADGGGYGGGGYGGGGYGGGGGGGGGGCFKCGEPGHMARDCSSGRRRLXGGGGGGGGGCYNCGQAGHMARDCPSGGGGGGGRFGGGGGGGDRSCYNCGEAGHIARDCPT

SEQ ID NO: 7046 - protein, 363 aa, Exiguobacterium sp. 255-15
MAGVVWYRKDLRVDDHEALTRACEEEKIVRAVFVRQTADGRGKQQMTFEEETLQSLNEHLVQLGIELTILQGETVEQLTSFIQPEDVVYFHRMTGEYEARQEQEVQKRFNTRMYETQTLHLRDDIGSDELKRVFTAFRKRVEQDGRFAEPIEAPGNIQYIELPQTRGGYDPRTAFPFIGGEAAGRNRLAAYLEQPIFTYKETRNGFNVDDSSKLSAWLANGSLSPRRVMAELQRTEQEHGANESTYWLYFELLWRDFFHLTMRETGHRLFRSNGLKDGRLTWKTDQAAIDSWMAGETGEPFVDAFMREIKDTGWMSNRGRQITASYLIHDLKQDWRIGARYFEQQLIDYDVASNYGNWAYIAG

SEQ ID NO: 7047 - protein, 496 aa, Amaranthus hypochondriacus
MRKINKVEAMKFLLFLVMGLLVSLISASSYPSVIVIGAGMSGISAAKTLHDNNIKDFIILEATNRISGRIHKTEFAGYTVEKGANWLHGAEGPEKNPMYEIAEKINLKNFYSDFSNVSLNTYKQNGEKYSMEEVEAAIALADDNEEFGTKLAEQFSANTKEDDDMSLLAAQRLNKKEPKTILERMVDFYFNDGEQAEAPRVSSLKHILPRPEFSLYGDGEYFVADPRGFEGITHTIAKSFLSYTNHTVTDPRLMFNQVVTEIEYKRRSVTVKTEDGNVYKAKYVIVSPSLGVLQSDLITFTPELPLWKRRAISEFSIGIYTKIFLKFPYKFWPTGPGTEFFFYVHARRGYYAIWQQLENEYPGSNILFVTVADEESKRVEQQPDEVTKAEAMEVLRKIFGEDIPEATDIMIPRWYSDRFYRGTFTNWPVGYTNKKHKNLRAPVGRVFFTGEHTHPELFGYADGAYFAGITTANDILARLKGGILPWHNQDMKLMKI

SEQ ID NO: 7048 - protein, 534 aa, Glycine max
  unsure (1)..(534): unsure at all Xaa locations
MDSNSSSPSPNNHASTTKINGFFHPKLGSQPATSSRSRLAMASPVNSDPKVVTGTAGYILEDVPHFTDYIPNLPTYPNPLQDNPAYSVVKQYFVHVDDSVPQKVVVHKDGARGVHFRRAGPRQKVYFEADEVQAAIVTCGGLCPGLNTVIRELVCGLHHMYGVKRVLGINGGYRGFYARNTITLTRYHTEETLTRCLRGTVCFGXQVIPRVNSTKVRGINKDYINGGDGTEKGASSIFEEVRWCGLKVSVVGFPKTIDSDIPVIDKSFGFDTAVEEAQRAINAAHVEAESVENGIGVVKLMGRNSGFIAMYATLASRDVDCCLIPESPFYLEGPGGLYEYIEKRLKENGHMVIVIAEGAGQELVSESVQSMSKQDASGNKLFQDVGLWISQKIRDHFAAQKTLPITLKYIDPTYMIRAIPSNASDNVYCTLLAQSAVHGAMAGYTGYTSGLVNGRQTYIPFYRITERQNHVVITDRMWARLLSSTNQPSFLDSKGDNEEKKEEEAALNQLPDGHCSKDTSLANKEINSIYPTTC

SEQ ID NO: 7049 - protein, 215 aa, Gracilariopsis lemaneiformis
MPFVSVRPVDYLFKVVLIGDAGVGKSNLLSRFTRNEFSLESKSTIGVEFATRSIQCEGKIIKAQIWDTAGQERYRAITSAYYRGAVGALLVYDITKKDSFDNVQRWLKELKDHADANIVIMLVGNKSDLQHLKAVTTDDASAFAESNGLSFIETSALDNSNVEEAFRSILSEIYRLGSKKALEKGSTSNFAPNATQTIVINPPADEGKTEKAKCC

SEQ ID NO: 7050 - protein, 74 aa, Glycine max
MAFVPICVQCGTRSNPCRCKVVGPTLGFVALVVAGVVEWPLGAAVYLFRHRKGRRIMGHPTTVVYPRVTGAIPI

SEQ ID NO: 7051 - protein, 149 aa, Glycine max
  unsure (1)..(149): unsure at all Xaa locations
MAHDTTVGLSMAGVVAPFTGLKCMAGFPTRKTNNDITSIASNGGRVQCMQVWPPVGKKKFETLSYLPDLDDAQLAKEVEYLLRKGWIPCLGFELEPRFVYREHNRXPGYYDGRYWTMWKLAMFGWPGASQEWNELKELPLYTGAGYCYH

SEQ ID NO: 7052 - protein, 273 aa, Panax ginseng
PYYVAPEVLLKHYGPEADVWTAGVILYILLGGVPPFWAETQQGIFDAVLKGHIDFESDPWPLISDSAKDLIRKMLCSRPSDRLTAHEVLCHPWICENGVAPDRALDPAVLSRLKQFSAMNKLKKMALRVIAESLSEEEIAGLKEMFKAMDTDNSGAITFDELKAGLRKYGSTLKDTEIRDLMDAADVDNSGTIDYGEFVAATIHLNKLEREEHLMAAFQYFDKDGSGYITVDELQQACAEHNMTDVFLEDIIREVDQDNDGRIDYGEFVAMMK

SEQ ID NO: 7053 - protein, 324 aa, Haemophilus ducreyi 35000HP
MAKEIKKIAVLTSGGDAPGMNAAIRGVVRAALNEGLEIFGVQDGYYGLYHDKVIPLDRRSVSEIINRGGTFLGSARFPQFKDIEVRKQAVKILAKYEIDALVVIGGDGSYMGAKLLTEEFGYPCIGLPGTIDNDIVGTDYTIGYQTALQTAVEAIDRLRDTSTSHQRISIVEIMGRHCGDLTISAALAGGCEYIIVPEKGLDKESLIHSIADNFRKGKRHAIIAITELMTDVHQLARELEEKFGHETRATVLGHIQRGGSPCPFDRILASRMGVYAVDLLRQGFGGRCVGIQNEHLVHHDIIDAINNMRRPFKQDIFEAASKLA

SEQ ID NO: 7054 - protein, 227 aa, Cicer arietinum
PEVLKRSYGPEVDVWSAGVILYILLCGVPPFWAETEQGVALAILRGVLDFKREPWPQISDSAKSLVRQMLEPDPKKRLTAEQVLEHPWLQNAKKASNVPLGDIVRTRLKRFSLMNRFKKRALRVIADHLSLEEVEIIKDMFTLMDTDKDGRITYEELKAGLQKVGSQLAEPEIKLLMDVADVDGNGVLDYGEFVAVTIHLQRMENDEHFRKAFKFFDKDGSGYIELS

SEQ ID NO: 7055 - protein, 127 aa, Escherichia coli
MADTKAKLTLNGDTAVELDVLKGTLGQDVIDIRTLGSKGVFTFDPGFTSTASCESKITFIDGDEGILLHRGFPIDQLATDSNYLEVCYILLNGEKPTQEQYDEFKTTVTRHTMIHEQITRLFHAFRR

SEQ ID NO: 7056 - protein, 317 aa, Burkholderia cepacia R1808
MTTALDQLKQYTTVVADTGDFQQLAQYKPQDATTNPSLILKAVQKDAYKPILEKTVRDHRNESTDFIIDRLLIAFGTEILKLIPGRVSTEVDARLSFDTQRSIDKGRELIKLYEAAGIGRERILIKLASTWEGIRAAQVLQQEGIKCNMTLLFSLVQAAACAEAGAQLISPFVGRIYDWYKKQAGADWDEAKDGGANDPGVQSVRRIYTYYKTFGYHTEVMGASFRTTSQIIELAGCDLLTISPDLLQKLQDSNDPVERKLSPDALHDKPTERVAIDEASFRFQLNDDAMATEKLAEGIRVFAADAVKLEKLIAALR

SEQ ID NO: 7057 - protein, 422 aa, Haemophilus ducreyi 35000HP
MGDLKQAALDFHEFPIPGKISVTPTKSLKTQHDLALAYSPGVAEPCLAIEKDPSTARRYTAKGNLVAVISNGTAVLGLGNIGALASKPVMEGKGVLFKKFAGIDVFDIEINEQDPDKLIDIIASLEPTFGGINLEDIKAPECFYIEQKLRERMGIPVFHDDQHGTAIIVGAAVLNGLQIVGKSLDQVRLVVNGAGASAIACTNLLCSLGIKKENITMCDSKGIIFKGRGDQIDQTKQAYAIVDNGWRTLSDAINGADVFLGCSKAGALTQAMVKKMAKDPLILALANPVPEITPDEVKQARLDAIVCTGRSDYRNQVNNVLCFPFLFRGALDVGATEINEEMKIAAAKAIADLAKQPVSLEVLSTYGELSFGPEYIIPMPFDPRLIVEVSTAVAKAAMASGVATRPISDCAVYAEKLKTLLA

SEQ ID NO: 7058 - protein, 252 aa, Prunus fremontii
AHYKSEADVGNAIAEAIQSGLVKREELFITSKASNHGHVVEACKNSLKKLQLDYLDLYLVHYPLATKHSGVGTTASLLDENKVLDIDVTVSLETTWHDMEKTVDLGLVRSIGLSNYELFLTRDCLSYAKIKPQVSQFETHPYFQRESLVRFCKKHGVVPMAHTPLGGATANVNAFGSISPLEDPVLIGLAKKYQKSVAQIALRWNIERGTPVIPKSSKVERLKENLEVLNFKLEKEDIELINTIDKKSRTTL

SEQ ID NO: 7059 - protein, 252 aa, Prunus dulcis
AHYKSEADVGNAIAEAIQSGLVKREELFITSKASNHGHVVEACKNSLKKLQLDYLDLYLVHYPLATKHSGVGTTASLLDENKVLDIDVTVSLETTWHDMEKTVSLGLVRSIGLSNYELFLTRDCLSYAKIKPQVSQFETHPYFQRESLVRFCKKHGVVPMAHTPLGGATANVKAFGSISPLEDPVLIGLAKKHQKSVAQFALRWNLERGTPVIPKSSKVERLKENLEVLNFKLEKEDIELINTIDKKFRTTL

SEQ ID NO: 7060 - protein, 233 aa, Prunus persica
NAIAEAIQSGLVKREELFITSKASNHGHVVEACKNSLKKLQLDYLDLYLVHYPLATKHSGVGTTASLLDENKVLDIDVTVSLETTWHDMEKTVSLGLVRSIGLSNYELFLTRDCLSYAKIKPQVSQFETHPYFQRESLVRFCKKHGVVPMAHTPLGGATANVKAFGSISPLEDPVLIGLAKKYQKSVAQIALRWNIERGTPVIPKSSKVERLKENLEVLNFKLEKEDIELINT

SEQ ID NO: 7061 - protein, 168 aa, Avena maroccana
VMASSATSVAPFQELKSTAGLPVSRRSNAGLGSVSNGGRIRCMQVWPIEGIKKFETLSYLPPLSEEALLKQIDFLIRSKWVPCLEFSKVGFIFREHGSTPGYYDGRYWTMWKLPMFGCTDASQVIKEVEEVKKEYPDAYVRIIGFDNIRQVQCVSFIAFKPPGCEESG

SEQ ID NO: 7062 - protein, 491 aa, Escherichia coli
MTEPHVAVLSQVQQFLDRQHGLYIDGRPGPAQSEKRLAIFDPATGQEIASTADANEADVDNAVMSAWRAFVSRRWAGRLPAERERILLRFADLVEQHSEELAQLETLEQGKSIAISRAFEVGCTLNWMRYTAGLTTKIAGKTLDLSIPLPQGARYQAWTRKEPVGVVAGIVPWNFPLMIGMWKVMPALAAGCSIVIKPSETTPLTMLRVAELASEAGIPDGVFNVVTGSGAVCGAALTSHPHVAKISFTGSTATGKGIARTAADHLTRVTLELGGKNPAIVLKDADPQWVIEGLMTGSFLNQGQVCAASSRIYIEAPLFDTLVSGFEQAVKSLQVGPGMSPVAQINPLVSRAHCDKVCSFLDDAQAQQAELIRGSNGPAGEGYYVAPTLVVNPDAKLRLTREEVFGPVVNLVRVADGEEALQLANDTEYGLTASVWTQNLSQALEYSDRLQAGTVWVNSHTLIDANLPFGGMKQSGTGRDFGPPLAGRAGC

SEQ ID NO: 7063 - protein, 252 aa, Prunus maritima
AHYTSEADVGNAIAEAIQSGLVKREELFITSKASNHGHVVEACKNSLKKLQLDYLDLYLVHYPLATKHSGVGTTASLLDENKVLDIDVTVSLETTWHDMEKTVDLGLVRSIGLSNYELFLTRDCLSYAKIKPQVSQFETHPYFQRESLVRFCKKHGVVPMAHTPLGGATANVKAFGSISPLEDPVLIGLAKKYQKSMAQIALRWNLERGTPVIPKSSKVERLKENLEILNFKLEKEDIELINTIDKKSRTTL

SEQ ID NO: 7064 - protein, 404 aa, Sinorhizobium meliloti
MAKKKVAMLTAGGLAPCLSSAVGGLIERYTDIAPDYELVAYRSGYQGLLLADRIEITPAMREKAHVLHRHGGSPIGNSRVKLTNTADCVKRGLVKEGENPLRVAAERLASDGISILHTIGGDDTNTTAADLAAYLGANGYDLTVVGLPKTVDNDVVPIRQTLGAWTAAEYGARFFDHVSNEQSAAPRTLVVHEVMGRHCGWLTAATARAYIHLAGNKEYVDGFMMNAQLKNIDGLYLPEMAFDLEAEAARLREVMDRAGFVTLFVSEGACLDAIVAEREAAGETVKRDAFGHVKIDTINVGNWFSKQFAALLGAERSMVQKSGYYARSAPANVDDLRLIQSMVDLAVESALNKVSGVTGHDEDQGGRLRTIEFPRIKGGKHFDTSAKWFGEVMDVVGQKWQTAD

SEQ ID NO: 7065 - protein, 96 aa, Brassica napus
IFFFVPTKTVKMDRRRRRQSKAKASCSEEVSSIEWEAVKMTEEEEDLISRMYKLVGDRWELIAGRIPGRTPEEIERYWLMKHGVVFANRPRDFVRR

SEQ ID NO: 7066 - protein, 168 aa, Avena maroccana
VMASSATSVAPFQGLKSTAGLPVSRRSNAGLGSVSNGGRIRCMQVWPIEGIKKFETLSYLPPLSEEALLKQIDFLIRSKWVPCLEFSKVGFIFREHGSTPGYYDGRYWTMWKLPMFGCTDASQVIREVEEVKKEYPDAYVRIIGFDNIRQVQCVSFIAFKPPGCEESG

SEQ ID NO: 7067 - protein, 231 aa, Prunus maritima
  unsure (1)..(231): unsure at all Xaa locations
NAIAEXXQSGLVKREELFITSKASNHGHVVEACKNSLKKLQLDYLDLYLVHYPLATKHSGVGTTASLLDENKVLDIDVTVSLETTWHDMEKTVDLGLVCSIGFSNYELFLTRDCLSYAKIKPQVSQFETHPYFQRESLVRFCKKHGVVPMAHTPLGGATANVKAFGSISPLEDPVLIGLAKKYQKSVAQIALRWNLERGTPVIPKSSKVERLKENLEILNFKLEKEDIELI

SEQ ID NO: 7068 - protein, 404 aa, Oryza sativa (japonica cultivar-group)
MASAAAEVPSYFVCPISLQLMRDPVTLPTGISYDRAAIARWLAAPGARRTCPVTRQPLEHGLELTPNHTLRRLIQSWAASVSPGSAVDEEVAALRPVSSDEVASLLSDAAAAQVGALRRLRELAAECEDSRAMLESQGGVFDVLSRVVTSGSACSTAREEAVGVLASLRIPEQELIGVSTRHGNLAESLTAVLRSSNLQSRAHAVQLVRTLADAVVPAWVIGLNAELLAEVVGVVRDRVSARATKASLHALAALCPYGRHRVKIVGAGAVAALVELLLDEPERRVCELALAVLDRLCTCAEGRAELVAHAAGVAVVGKKVLRVSEAASERAVRVLRSVARHAATPAVLQEMAQCGVVGKLCLALRSEQCGVKTKEKAHEVLKLHSRVWRASPCLSPSFLALYPS

SEQ ID NO: 7069 - protein, 141 aa, Brassica napus
MRNLRTISSHLSRGLRSIQPHPIQSHRSYSSQSENVSKIVTELSNLTLLETMDLTELLRKKLGVTEMPVMAAMAFPGSGGGGSPGAAAGGKGEEKKKAEAKTAFDVMLQGFESASKIKVIKEVRTVTDLGLKEAKDLVEKA

SEQ ID NO: 7070 - protein, 163 aa, Rubrivivax gelatinosus PM1
MITTTIYDFEARSIDGRTVSLADYRGKVLLIVNTASACGFTPQFAGLQSLWQAYGERGLAVLGFPSNEFGGQDPGSNDEIASFCQLNYGVSFPMMAKVEVNGAGAHPLYRWLTGEVKGLLGTRAIKWNFTKFLVGRDGRVLGRYAPTDKPESLTRDIEAALAA

SEQ ID NO: 7071 - protein, 595 aa, Zea mays
MAGPEKTVVWFRRDLRIEDNPALAAAAKGGSVLPIFIWCPSDYGQYYPGRCSRWWLKQSLAHLGKSLELLGCPLVLIRAEDSTLAALLECVRSISATRVVYNRLYDPISLVLDNKIKNELPAHGISVQSFNGDLLYEPWDVYDENGQAFTTFNKYWEKCMNLPIEISQYLAPTRLVAAPGLANVRCCSIDDLGLESSKDVESSNALLSRAWSPGWRNAENMLEEFVSYGLPEYSEHGMKVGGSTTSLLSPYLHFGELSVRMIYQLVKMRQVKWQNEGKSEAEESVRLFLRSIGFREYSRYLCFNYPFTHERSFLGNLKHYPWLLDEGRFKSWRQGMTGYPLVDAGMRELWATGWTHNRIRVIVSSFAVKFLQIPWIWGMKYFWDVLLDADLESDILGWQYISGSLPDGHELSRLDNPEVQGQKYDPDGEYVRTWIPELARMPTEWIHSPWAAPNSILQVAGVELGFNYPKPIVELHMARECLDDAISTMWQLDTAAKLAELDGEVVDDNLNNIRNFDIPKVVLNKKLSPSTSSMEHRVLSTNGKDEKSQPTEVKALYKQIIRDDMMNDSNMDDTCSTANLKVTRKRSSSDSAARA

SEQ ID NO: 7072 - protein, 127 aa, Corynebacterium efficiens YS-314
MPVGTVKWYDPERGFGFVSNPGGEDCFVGKQVLPKGVTELHQGQRIEFDFAAGRKGPQALRVKVLETPRRRPQHTYKPEELNGIISDMVTMLEGTVQPALLKGHYPDRKVGEQVAKILRAVAKELEA

SEQ ID NO: 7073 - protein, 97 aa, Glycine max
  unsure (1)..(97): unsure at all Xaa locations
MACRKMITLCLIDCLSLFSLTKNXGLXAKVPFLDKNFIGVAMNMDPDYKMIKQEHCRIXKCVLKRPFDDEERPYLXRHGMQLMEQVSDVSGYGWMHG

SEQ ID NO: 7074 - protein, 136 aa, Glycine max
MQHRNLTSGRPSGTDGSDYSYRMVVDSRYQLVAKGKKRLSLYFITEAVLLLIGVTLTYLPGIEADAPNTVAYSSVIVSVVSLIIGNIGRRRSRSGLLRFYAAVSSIAMLLLIASLAQQHLLLKAIQDSKLWKTGKV

SEQ ID NO: 7075 - protein, 355 aa, Cryphonectria parasitica
MSRSQAPNPAGSRKISFNVSEQYDIKDVVGEGAYCVVCSAIHKPSGQKVAIKKITPFDHSMFCLRTLREMKLLRYFNHENIISILDIQRPRNYESFNEVYLIQELMETDMHRVIRTQDLSDDHCQYFIYQTLRALKAMHSANVLHRDLKPSNLLLNANCDLKVCDFGLARSAASQEDKSGFMTEYVATRWYRAPEIMLTFKEYTKAIDVWSVGCILAEMLSGKPLFPGKDYHHQLTLILDVLGTPTMEDYYGIKSRRAREYIRSLPFKKKVPFKTLFPKTSELALDLLEKLLAFNPVKRITVEEALKHPYLEPYHDPDDEPTAPPIPEEFFDFDKHKENLSKEQLKQLIYQEIMR

SEQ ID NO: 7076 - protein, 396 aa, Salmonella typhimurium
MLDAQTIATVKATIPLLVETGPKLTAHFYDRMFTHNPELKEIFNMSNQRNGDQREALFNAIAAYASNIENLPALLPAVEKIAQKHTSFQIKPEQYNIVGTHLLATLDEMFNPGQEVLDAWGKAYGVLANVFIHREAEIYHENASKDGGWEGTRPFRIVAKTPRSALITSFEFEPVDGGTVAEYRPGQYLGVWLKPEGFAHQVFRQYSLTRKPDGKGYRIAVKREDGGQVSNWLHHHASVGDVVHLAAPAGDFFMNVAADTPVSLISAGVGQTPMLAMLDTLAKEQHTAQVNWFHAAENGDVHAFADEVSELGRTLPRFTAHTWYREPTEADRAQRLFDSEGLMDLSKLEAAISDPAMQFYLCGPVGFMQFAAKQLVSLGVNNENIHYECFGPHKVL

SEQ ID NO: 7077 - protein, 54 aa, Glycine max
NSDRFRLTKWPYTARDVMFLRGNLRHTYASNDMAKKLWRLLNNHQSYGTVSKTF

SEQ ID NO: 7078 - protein, 316 aa, Vibrio cholerae O1 biovar eltor str. N16961
MSNKLAQLRKLTTVVADTGEIDAIKKYQPEDATTNPSLILKAAQIAEYAPLIDQAIAYAKTQSNDKAQQVQDTCDMLAVNIGKEILKTIPGRISTEVDARLSYDTERSVAKARQLVKMYNDAGISNDRILIKLASTWEGIRAAEILEKEGINCNLTLLFSFAQARACAEAGVFLISPFVGRIMDWYKAKEGRDFAASEDPGVLSVTKIYNYYKEHGYKTVVMGASFRNIGEILELAGCDRLTIAPSLLAELEAAEGELVAKLVDSKGSKARPAPMTHSEFLWEHNLDAMAVEKLAEGIRNFAVDQGKLEAMIAAKL

SEQ ID NO: 7079 - protein, 226 aa, Gossypium hirsutum
MLQCLDGLKHLFASVLHCCDIDLCKQSRGLEDPELLARETVFSVSEIEALYELFKKVSSAVIDDGLINKEEFQFALFKTNKKESLFADRVFDLFDTKHNGILGFEEFARALSVFHPNAPIDNKIDFSFQLYDLKQQGFIERQEVKQMVVATLAESGMNLSDDVIESIIDKTFEEADTKHDGRIDKEEWRSLVLRHPSLLKNMTLQYLKDITTTFPSFVFHSQVDDT

SEQ ID NO: 7080 - protein, 93 aa, Glycine max
MFFIQVLVVGGGDGGVLREVARHSSVEHIDICEIDKMVIDVSRKFFPQLAVGFEDSRVHLHVGDAVDFLKSAPEGKYDAIIVGSSDPVGMSFQ

SEQ ID NO: 7081 - protein, 243 aa, Schizosaccharomyces pombe
MVLEATMILIDNSEWMINGDYIPTRFEAQKDTVHMIFNQKINDNPENMCGLMTIGDNSPQVLSTLTRDYGKFLSAMHDLPVRGNAKFGDGIQIAQLALKHRENKIQRQRIVAFVGSPIVEDEKNLIRLAKRMKKNNVAIDIIHIGELQNESALQHFIDAANSSDSCHLVSIPPSPQLLSDLVNQSPIGQGVVASQNQFEYGVDPNLDVELALALELSMAEERARQEVAAQKSSEETEDKKMQE

SEQ ID NO: 7082 - protein, 392 aa, Picrophilus torridus DSM 9790
MDRIMFENGSWIVPEKPVILYANGDGIGPEIMDATRKVVDAATAMEKKSIAWKEILLGDRAEELKGDRFPEESIKAINDYRVLLKAPLNTPVGKGFKSINVRIRMLLDLYANIRPVKFMPGLESPLKNPEKVNLTIFRENTDDLYLGYEWSYDTDEAKRIRKFLKDEFNIDISDDSGIGIKPMSRYKTQRITRLAVKYAMDNNLKKITIMHKGNVMKYTEGAFREWAYETALNEFSDYVSRDDDKKIIINDIIADNMFQQIITRPDEYQLILAPNVDGDYISDAAGALIGNIGTLGGANIGDNGAMFEAVHGTAPKYAGKNVADPLGLIRGAQLMLRYMGWNRAADAIEKAIQASINEKKVTNDLARFFNVEPLGTREYGDYLVDKIKVLVS

SEQ ID NO: 7083 - protein, 365 aa, Picrophilus torridus DSM 9790
MDVDLGLENTYIKHTKLTYIDGELGVLRYRGYDINDVVNNLSFMETAYLMLYGRIPDPKELKLFSSYIGDGKLPERIFSMIDTFPEGDPLSMASSVFAALAIDNNMKWSIDENKRNAGRIIGLSFNVFANIYLHIKGKKLYNIDLGDPVSGFLRVTNNMDQKNVKAFEAAMILYMDHEIPASTTAALVTASTLSDMLSSLSSAMNALKGPLHGGAAENAFLEFLDIGSPENVKPWFNEHIIKNRERLIGFGHRVYKTYDPRIKKFRELSMSLCDEKNRIILDTALELERVALDYFMEKKIYPNTDFFSGLLFNELGFEHWFFTSLFALSRVTGILAHIIEYNENEQRLIRPRAIYNGDGERFIKR

SEQ ID NO: 7084 - protein, 87 aa, Glycine max
DSSMISSPMLPLSTVARAGMYAPFSGLESMAVFPTRMTNNDITSFASYLGILQCMSGCAPDVKKTFDTLSYLPDLDDALLDYEVSIL

SEQ ID NO: 7085 - protein, 277 aa, Bacillus cereus ATCC 10987
MSLTSLKDYTTLHNGVKMPWFGLGVFKVEDGSEVIESVKAAIKNGYRSIDTAAIYQNEEGVGQAIRESGVSREELFITSKVWNSDQGYETTLQAFETTLEKLGLEYLDLYLVHWPVKGKYTESWKALEKLYKDGRVRAIGVSNFHIHHLQDVFEIAEIKPMVNQVEYHPRLAQEELHAFCKEHNIQLEAWSPLMQGQLLDNPTLQEIATKYNKSTAQIILRWDLQNEVVTIPKSIKEHRIIENANIFDFELSADDMKAIQALNEDRRVGPDPDNFNF

SEQ ID NO: 7086 - protein, 291 aa, Lactobacillus gasseri
MTEVPTITLNDGNKMPQVGLGVFRIPDHDKARQTVEMALANGYRMIDTAEAYDNQIAVGEAIAESAVNRDDIFLTTKIWVSNMSFEKATKAIDHDLKELGTDYIDLVLLHQPYGDTFGAWNALEAAKSAGKIRSIGLSNFYPDQYMNLELAHEDKPAINQIEISPWFQQANDVKFFQGRNVAVEAWAQFANGKHDIFNNKVLTEIAETHHKTVGQVILRWLTQKSIIVIPKAVHDEHQKENINIFDFELTQDEMAKIGELDKGESQFFDHRDPAAIDDIFGESLKQLRDSE

SEQ ID NO: 7087 - protein, 214 aa, Zea mays
PAVPVRNSRVPNLSIGFKDPRVRLHVGDAVDFLRNSPEGKYDAIIVDSSDPIGPAQALVEKPFIQTIARALKPGGVLCNLAESMWLHTHLIQDMLAICRQTFKGAVHYAWTSVPTYPSGVIGFLLCAKEGRAVNFLTPVNPIEKIEGTSKAGRELRFYNSEIHRAAFVLPTFVRRELEAYTSPSTSAENEKPKESVSEPQKIKILSNNAILTAS

SEQ ID NO: 7088 - protein, 198 aa, Gossypium barbadense
MAPKKDGVSKRVFNKGSWTAEEDRRLAKYIEIHGAKRWKTIAIKSGLNRCGKSCWLRWLNYLRPNIKRGNISDEEEDLIIRLHKLLGNRWSLIAGRLLGRTDNEIKNYWNSHLSKKIINHDVRTEQTSSSEQIVPHKAWETVQMEEEEVVKGSDEIENSEFSIDVDEFFDFTTEGCFSLDWVNKFLELDDQQDPLAMV

SEQ ID NO: 7089 - protein, 152 aa, Zea mays; identical to SEQ ID NO: 357

SEQ ID NO: 7090 - protein, 194 aa, Saccharomyces cerevisiae
MVTSNVVLVSGEGERFTVDKKIAERSLLLKNYLNDMHDSNLQNNSDSESDSDSETNHKSKDNNNGDDDDEDDDEIVMPVPNVRSSVLQKVIEWAEHHRDSNFPDEDDDDSRKSAPVDSWDREFLKVDQEMLYEIILAANYLNIKPLLDAGCKVVAEMIRGRSPEEIRRTFNIVNDFTPEEEAAIRRENEWAEDR

SEQ ID NO: 7091 - protein, 252 aa, Prunus maritima
AHYKSEADVGNAIAEAIQSGLVKREELFITSKASNHGHVVEACKNSLKKLQLDYLDLYLVHYPLATKHSGVGTTASLLDENKVLDIGVTVSLETTWHDMEKTVDLGLVRSIGLSNYELFLTRDCLSYAKIKPQVSQFETHPYFQRESLVRFCKKHGVVPMAHTPLGGATANVKAFGSISPLEDPVLIGLAKKYQKSVAQIALRWNLERGTPVIPKSSKVERLKENLEILNFKLEKEDIELINTIDKKSRTTL

SEQ ID NO: 7092 - protein, 252 aa, Prunus maritima
AHYKSEADVGNTIAEAIQSGLVKREELFITSKASNHGHVVEACKNSLKKLQLDYLDLYLVHYPLATKHSGVGTTASLLDENKVLDIDVTVSLETTWHDMEKTVDLGLVRSIGLSNYELFLTRDCLSYAKIKPQVSQFETHPYFQRESLVRFCKKHGVVPMAHTPLGGATANVKAFGSISPLEDPVLIGLAKKYQKSVAQIALRWNLERGIPVIPKSSKVERLKENLEILNFKLEKEDIELINTIDKKSRTTL

SEQ ID NO: 7093 - protein, 416 aa, Polytomella sp. Pringsheim 198.80
MPAPSAHADRWTGISRVFSEKDVERLRGSVTIEHTLARIGAEKFWKLLHTEDYVPALGALTGHQAVEMISAGLKAIYLSGWQVAGDNNSAYQTYPDQSLYPADSVPKVVKRINNAFQRADQIQHSQGSTEVDFFAPIVADAEAGFGGVLNAYELMLGMIEAGAACVHFEDQLASAKKCGHMGGKVLVPTNEFIQKITAARLAADVANVPTLIIARTDALGAYLLTSDIDERDKAFCTGERTAEGFYRVRGGIDAAIARGLSYAPYADLVWFETGEPNMEEAKKFAAAIHAKFPGKLLAYNCSPSFNWKKLLSDEEIGAFQKTLGALGYKFQFVTLAGFHALNYGMFSLAKEYSKTGMTAYSELQANEFASEKDGYKATTHQRFVGTGYFDALSQVITEGTSSVTALSGSTEEEQFH

SEQ ID NO: 7094 - protein, 505 aa, Populus balsamifera subsp. trichocarpa X Populus deltoides
MDLLLLEKTLLGSFVAILVAILVSKLRGKRFKLPPGPIPVPVFGNWLQVGDDLNHRNLTDLAKKFGDIFLLRMGQRNLVVVSSPDLSKEVLHTQGVEFGSRTRNVVFDIFTGKGQDMVFTVYGEHWRKMRRIMTVPFFTNKVVQQYRYGWEEEAAQVVEDVKKNPEAATNGIVLRRRLQLMMYNNMYRIMFDRRFESEDDPLFNKLKALNGERSRLAQSFDYNYGDFIPILRPFLRGYLKICQEVKERRLQLFKDYFVDERKKLASTKNMSNEGLKCAIDHILDAQKKGEINEDNVLYIVENINVAAIETTLWSIEWGIAELVNHPEIQKKLRHELDTLLGPGHQITEPDTYKLPYLNAVIKETLRLRMAIPLLVPHMNLHDAKLGGFDIPAESKILVNAWWLANNPAHWKNPEEFRPERFLEEEAKVEANGNDFRYLPFGVGRRSCPGIILALPILGITLGRLVQNFELLPPPGQSKIDTAEKGGQFSLHILKHSTIVAKPRSF

SEQ ID NO: 7095 - protein, 200 aa, Schizosaccharomyces pombe
MTTELRRKLVIVGDGACGKTCLLIVFSKGTFPEVYVPTVFENYVADVEVDGRHIELALWDTAGQEDYDRLRPLSYPDSHVVLICFSVDAPESLDNVQEKWISEVLHFCSNLPILLVGCKVDLRNDPKTIEELSKTSQKPITFEEGQVVAQKIGAYKYLECSAKLNEGVNEVFETAARASMLKFKPASVPKTKKKKHCILL

SEQ ID NO: 7096 - protein, 231 aa, Prunus maritima
AHYKSEADVGNAIAEAIQSGLVKREELFITSKASNHGHVVEACKNSLKKLQLDYLDLYLVHYPLATKHSGVGTTASLLDENKVLDIDVTVSLETTWHDMEKTVDLGLVRSIGLSNYELFLTRDCLSYAKIKPQVSQFETHPYFQRESLVRFCKKHGVVPMAHTPLGGATASVKAFGSISPLEDPVLIGLAKKYQKSVAQIALRWNLERGTPVIPKSSKVERLKENLEILNF

SEQ ID NO: 7097 - protein, 252 aa, Prunus takesimensis
  unsure (1)..(252): unsure at all Xaa locations
AHYKSEADVGNAIAEAIXSGLVKREELFITSKASNHGHVVEACKNSLKKLQLDYLDLYLVHYPLATKHNGVGATASLLDENKVLDIDVTVSLETTWHDMEKTVSLGLVRSIGLSNYELFLTRDCLSYAKIKPQVSQFETHPYFQRESLVRFCKKHGVIPMAHTPLGGATANVKAFGSISPLEDPVLLALAKKYQKSVAQIALRWNLERDTPVIPKSSKVERLKENLEVLNFKLEKEDIELINTIDKKSRTTL

SEQ ID NO: 7098 - protein, 121 aa, Triticum aestivum
  unsure (1)..(121): unsure at all Xaa locations
GPMLIYPMLKSKWDPNTSVALPEGEVFYLVALLRFCPGGSGAAVEELVARRHRXAGGCRSSGYDFKTYFPHYRTEADWARHFGAKWARFVDRKARYDPLAILAPGQKIFARTPSSSRTDRS

SEQ ID NO: 7099 - protein, 490 aa, Oryza sativa (japonica cultivar-group)
MAIFLVLALSIAQLLPSLVAGTGRPRVIIVGAGISGISAGKRIWEAGIADVLILEATDRIGGRMHKQSFAGVNVEIGANWVEGVNGEKKNPIWPIVNSTLKLRSFRSDFDSLAQNVYKDGGLCDEAYVQKRMDRADEVDKSGENLSATLHPSGRDDMSILSMQRLNDHLPNGPSSPVDMAVDYFTYDYEFAEPPRVTSLQNTVPLPTFTDFGDDTYFVADQRGYESVVHHLAGQYLNADKSGNIADARLKLNKVVREISYSSTGVTVKTEDNSTYQADYVMVSASLGVLQSDLIQFKPQLPSWKILAIYQFDMAVYTKIFVKFPKKFWPEGAGREFFLYASTRRGYYGVWQEFEKQYPDANVLLVTVTDEESRRIEQQPDSQTKAEIMEVVRCMFPDEDVPDATDILVPRWWSDRFFRGSFSNWPIGVSRYEYDQLRAPVGRVYFTGEHTSERYNGYVHGAYLAGIDSAEILINCAQKKMCKYNVGGKHG

SEQ ID NO: 7100 - protein, 470 aa, Corynebacterium efficiens YS-314
METFVSRNNILAARDASDLVIESGDLPQPGGTDKKFEREIVASDNNKAVLHYPGGEFEMGIKQATEGNSGVILGKMLSETGLVTFDPGYVSTGSTESKITYIDGDAGILRYRGYDIADLAENATFNEVSYLLIKGELPTPEELHKFNDEIRHHTLLDEDFKSQFNVFPRDAHPMATLASSVNILSTYYQDQLDPLDEAQLDKATVRLMAKVPMLAAYAHRARKGAPYMYPDNSLNARENFLRMMFGYPTEPYEVDPIMVKALDKLLILHADHEQNCSTSTVRMIGSAQANMFVSIAGGINALSGPLHGGANQAVLEMLEEIAANGGDATDFMNRVKNKEKGVRLMGFGHRVYKNYDPRAAIVKDTAHEILEHLGGDPLLDLALKLEEIALNDDYFISRKLYPNVDFYTGLIYRAMGFPTDFFTVLFAIGRLPGWIAHYREQLADPGAKINRPRQIYTGETARKIIPREER

SEQ ID NO: 7101 - protein, 122 aa, Lotus corniculatus var. japonicus
MIQPQTHLNVADNSGARKLMCIRIIGASNRRYAYIGDIVVAVIKEAVPNTPLERSEVIRAVIVRTCKELKRSNGIIIQYDDNAAVVIDQEGNPKGTRIFCAIARELRQFNFTKIVSLAPEIL

SEQ ID NO: 7102 - protein, 102 aa, Zea mays; identical to SEQ ID NO: 326

SEQ ID NO: 7103 - protein, 322 aa, Paenibacillus macquariensis
MTIKKIAVLTSGGDSQGMNAAVRAVVRSGLFYGLEVYGIQRGYQGLLNDDIFSMDLRSVGDIIQRGGTVLQSARCKEFMTPEGQQKGADILRKRGIDGLVVIGGDGSYHGANKLSKLGINTMALPGTIDNDISYTDFTIGFDTSVSIVVDAINKLRDTMSSHERSSIVEVMGRHCGDIALYAGLASGAETIIVPEVPFDMDEIAERMKQNFAHGKRHSIVVVAEGAGNGENVAKQLVERCETLEPRVTVLGHIQRGGTPTPADRNLASRLGDFAVRMLIAGESAKACGIISNELVLTDIDKVVNSKKEFNMELYELAARLSQ

SEQ ID NO: 7104 - protein, 284 aa, Corynebacterium efficiens YS-314
MSPTPSPTLSLSDGSEIPQIGLGTWQMHGEEAYRTVREAIGMGYRHIDTAKLYDNEVEVGRAVTDAIRSGEVTRDELFITSKVWNDDQGREQAARAFQASLARLGLDYLDLYLVHWPCPRKGLYNETFEAVARIQGLGQVQSIGVANFYAGVLEDLVVTTGIVPAVNQVELHPGFSQAPLRALHDRLGVVTTAWAPLARGGVLSHPVIKGIAGRYGVPASAVVLRWLVQLGVVAIPKSSDPGRLRSNLDVHGFQLSVEEVERITALDEGPGMGRLFHDPEEFPA

SEQ ID NO: 7105 - protein, 168 aa, Glycine max
  unsure (1)..(168): unsure at all Xaa locations
MGSLALETEDVISDIYLSLGLKESDKGVGVPRVLSLLSSLLERSVQRNETLLEAKHVKDVVTVFHGLRAPTLSVRKYIDRIFKYSGCSPSCFVVAHIYVDRFIQHTEIKLTSLNVHRLLITSIMLAAKFIDDAFYNNAYYAKVGGVSTSEXNRLEMSXLXGIEFRLQF

SEQ ID NO: 7106 - protein, 326 aa, Medicago sativa
MEQAVLDDIINRLLEVRCRPGKQVQLSETEIRQLCSTAREIFLQQPNLLELEAPIKICGDIHGQYSDLLRLFEYGGLPPQANYLFLGDYVDRGKQSLETICLLLAYKIKYPENFFLLRGNHECASINRIYGFYDECKRRFNVRIWKVFTDCFNCLPVAALIDEKILCMHGGLSPDLHNLDQIRNLQRPTDVPDTGLLCDLLWSDPSKEVQGWGMNDRGVSYTFGADKVSEFLQKHDLDLICRAHQVVEDGYEFFANRQLVTIFSAPNYCGEFDNAGAMMSVDETLMCSFQILKPADKKTKLNFGSTTTTKPGNSPAGVKSFLGTKV

SEQ ID NO: 7107 - protein, 325 aa, Medicago sativa
MEQSVVDIINRLLEVRNRPGKQVQLSESEIRQLCNVSRDIFLKQPFLLQLEAPIKICGDVHGQYSDLLRLFEYGGFPPEANYLFLGDYVDRGKQSLETICLLLAYKIKYPENFFLLRGNHECASINRIYGFYDECKRRFNVRLWKTFTDCSNCLPVAALIDEKILCMHGGLSPDLHNLDQIRNLQRPTDVPDTGLLCDLLWSDPSKDVQGWGMNDRGVSYTFGADKITEFLEKHDLDLICRAHQVVEDGYEFFANRQLVTIYSAPNYCGEFDNAGAMMSVDETLMCSFQILKPADKKTKLNFGSTTTAKPENSPAGVKYLLGAKV

SEQ ID NO: 7108 - protein, 154 aa, Rickettsia conorii str. Malish 7
MTFIITSTAFKHNDRIPDKFTCKGQNVSPHLEWSNAPSDTKSFALIMDDPDAPVEIAPPHGIWDHWVIYNISASITKLSEGQIDSSIKILNNSWQEKKYGGPCPPAGKPHRYFFKLYALNDYLELDENASKPDLVLALQKHLLAEAALIGIYSI

SEQ ID NO: 7109 - protein, 483 aa, Streptomyces coelicolor A3(2)
MRHRLSELSELSDLSEPSERLPDELRVLNPATEEVVATVPAASAADVDAAVARAARAQTAWAALAPGDRARLLRRFAVTVDEHLEELARLEVRQAGHLLGNARWEAGNVRDLLDYAAGGVERLTGRQIPVAGGLDVTLLEPLGVVGVIAPWNFPMPIAAWATAPALAAGNAVLLKPAETTPLTALRLAELALVAGLPEDLFQVLPGHGPVAGDALVEHPDVAKIVFTGSTAVGRQVAAKGAALLKPVTLELGGKSPNIVFADADVEAAAAATPMSFLDNSGQDCCARTRILVQRSVHDRFLELLAPAIEAVRVGDPADESTEMGPLISRAQLERVRSHVPADAAGIRGRAPRGGPGFWFPPTVLTGVDAHARVAVEEVFGPVAVVLPFDDEADAVRLANATDYGLAGSLWTRDVGRALRVSGAVRAGNLSVNSHASVRYWTPFGGFKQSGIGRELGPDALTAFTETKNVFFSTTPSSTEGPAQ

SEQ ID NO: 7110 - protein, 453 aa, Pirellula sp. 1
MNSRSRTSTSKQPSPLLTGRRNSKDSIGSWKIHAFASLELSEPILMSIKRVGILTAGGLAPCLSSAIGALIEAYTEQAPEIEILCYRSGYKGLLLGDSFVVDAHSRKNAAILHQHGGSPIGNSRVKLTNVADCVKRGLVSEGQDPLQVAAERLQSDEVDVLHTIGGDDTNTTAADLAAYLAKHEYQLTVVGLPKTIDNDVIPIKQSLGAWTAAEEGAKFFENVVGEHNANPRMLIIHEVMGRNCGWLTAATAAKYRERLQKLNFLPEMGLSQERRDVHGVFVPEMSFDLEEEAKRLRAIMDEIDCVNIFISEGAGVDTIVKEMESRGESVPKDAFGHYKLDAVNPGKWFGKQFADMLGAEKTLVQKSGYFSRAAAANAEDIALIGRCAKKAVECAMQGIGGVVGEDEDQNNELRAIEFERIAGGKPFDINVEWFGDLLSQMGQPKGEVLETSH

SEQ ID NO: 7111 - protein, 132 aa, Ehrlichia canis str. Jake
MSTVDIDSLVEQICSLDLCKAAELVDKMEQKLGFPKGGLLTAVPAAGGGQAESSAAEEKTDFSVIFDSYAADKKISVIKAVRECTNLGLKEAKEFVEKEGAKELIEGKKYKKEEAEEIKKKLEDAGAKVIIK

SEQ ID NO: 7112 - protein, 332 aa, Glycine max
  unsure (1)..(332): unsure at all Xaa locations
TTLAPTPLPSLPHPSPDMDRRTGSTRNILFNKYEIGKLLGQGNFAKVYHGRNLSTNESVAIKVIKKERLQQKERLVKQIKREVSVMSLXCVTPTSSNKKRVMANKAKIFLVVEYVKGGELFAKVAKGKMKEDVARKYFQXQLISAVEFCHSRGVTHRDLKPENLLXDENEDLKVSDFGLSALPDQRRSDGMLLTPCGTPAYVAPEVLKKKGYDGSKADIWSCGVILFALLSGYLPFQGENVMRIYSKSFRADYAFPEWISPGAKNLISNLLVVDPQKRYSIPDIMKDPWFQIGFMRPIAFSMKESAVEDNIDFSGDDVSIITIRLGLDLLPM

SEQ ID NO: 7113 - protein, 365 aa, Phaeosphaeria nodorum
MPSHNIVVLAGDGVGPEVVAEAFKILKVVEKHTDNTFNFQEHLFGGCSIDAHNNPLTDEALAAAKGADAIILGAVGGPKWGTGKVRPEQGILKLRKELGTFGNLRPCFFASDSLVDSSPLKAENVRGVNFNIIRELTGGIYFGERKEDEGDGKAMDTEPYSVEEIERVVRLAGSLASAENPPVPVWSLDKANVLATSRLWRKTFERIMKDEYPHLKSGTHLIDSAAMLMIKNPRALNGVVVTSNLFGDIISDEASVIPGSLGLLPSASLGGIPDGKTKLNGIYEPIHGSAPDIAGQGIVNPIATILSISMMFKYSLCLPELALKIDEATKITIDKGVRTGDIGGTSKTAEVGDAIAAELETLLKK

SEQ ID NO: 7114 - protein, 252 aa, Prunus fruticosa
VDYKSEADVGNAIAEAIQSGLVKREELFITSKASNHGHVVEACKNSLKKLQLDYLDLYLVHYPLATKHNGVGATASLLDENKVLDIDVTVSLETTWHDMEKTVSLGLVRSIGLSNYELFLTRDCLSYAKIKPQVSQFETHPYFQRESLVRFCKKHGVIPMAHTPLGGATANVKAFGSISPLEDPVLLALAKKYQKSVAQIALRWNLERDTPVIPKSSKVERLKENLEVLNFKLEKEDIELINTIDKKSRTTL

SEQ ID NO: 7115 - protein, 319 aa, Burkholderia cepacia R18194
MPLNPKIAQVLDMIERAKRPSYHHQTPQQARAAYEKSAPILDVASAPMHSVEECVVPTRDGRTIGARLYLPVEPSLAEPLPALVYYHGGGFTVGSVDTHDALCRMFARDAQCAVLSVGYRLAPEHRFPTAVNDADDALQWLHREAATFGIDAARLAVGGDSAGGTLATVCAVLARDAGIRLALQMLIYPGVTGYQDTESHARLANGYLLTQDTIQWFFTQYVRDRADRDDWRFAPLDGTRDAPSFAGVAPAWIATAEYDPLSDEGAAYAEKLRAAGNVVTLVCYPGMIHEFFKMGGYVPEVRAAHADAVAALKAAFDDV

SEQ ID NO: 7116 - protein, 226 aa, uncultured bacterium
MAGVQLGAGCWICEYLSPWDVYAHGVAKTLVHRKTKFQEMHIIETGTFGKALILDGFWQSCTGDEFLYHEPLVHPAMLLHGRPRRVLVLGGAEGAAVREVLRWKSVEQVVMVDIDGEVVEACRQHLPEMHQGACDDPRVEVRIQDALVYLDETRSTFDVIISDLSDPIEDGPSFKLFTRETFERARGSWRRRGCSSCKPAASRRPSCTCTPAWSARSDGCSPTPPH

SEQ ID NO: 7117 - protein, 502 aa, Delphinium grandiflorum
MSISLFLAGAAILFFVTHLLLSPTRTRKLPPGPKGWPVVGALPMLGNMPHVALANLSRRYGPIVYLKLGSRGMVVASTPDSARAFLKTQDLNFSNRPTDAGATHIAYNSQDMVFADYGPRWKLLRKLSSLHMLGGKAIEDWAVVRRDEVGYMVKAIYESSCAGEAVHVPDMLVFAMANMLGQVILSRRVFVTKGVESNEFKEMVIELMTSAGLFNVGDFIPSIAWMDLQGIVRGMKRLHNKFDALLDKILREHTATRSERKGKPDLVDVLMDNRDNKSEQERLTDTNIKALLLNLFSAGTDTSSSTIEWALTEMIKNPSIFRRAHAEMDQVIGRNRRLEESDIPKLPYLQAVCKETFRKHPSTPLNLPRVAIEPCEVEGYHIPKGTRLSVNIWAIGRDPNVWENPLEFNPDRFLTGKMAKIDPRGNNSELIPFGAGRRICAGTRMGIVLVEYILGTLVHAFEWKLRDGEMLNMEETFGIALQKAVPLAAVVTPRLPPSAYVV

SEQ ID NO: 7118 - protein, 468 aa, Oryza sativa (japonica cultivar-group)
MAIFLSIVLLSMAQLPSLVAGTGRPRVIIIGAGISGISAGKRLSEAGITDILILEATDHIGGRMHKQRFAGVNVEIGANWVEGVNGEKMNPIWPIVNSTLKLRNFLSDFDSLAQNVYKDGGLCDAAYVQKRIDLADEADKSGENLSATLHPSGRDDMSILSMQRLNNHLPNGPSSPVDMVVDYFTYDYEFAEPPRVTSLRNTVPLPTFTDFGDDNYFVADQRGYEAVVYYLAGQYLEADKSGNIVDARLQLNKVVREISYSSTGVTVKTEDNSTYQADYVMVSASLGVLQSDLIQFKPQLPSWKILAIYQFDMAVYTKIFVKFPKKFWPEGAGREFFLYASTRRGYYGVWQEFEKQYPDANVLLVTVTDEESRRIEQQPDSQTKAEIMEVVRSMFPDEDVPDATDILVPRWWSDRFFQGSFSNWPIGVSRYEHDQLRAPVGRVYFTGEHTSERYNGYVHGAYLAGIYA

SEQ ID NO: 7119 - protein, 443 aa, Botryotinia fuckeliana
GWKRAYPSSVMARKLFNLIKEREANGKPIHTMGAIDPVQMTQQAANQEVLYISGWAYSSVLTTTNEVSPDFGDYPYNTVPNQVQRLAKAQSMHDRKQWDARRKLSKEERAKTPYTDYLRPIIADGDTGHGGLSAVLKLAKLFAENGAAAVHFEDQMHGGKKCGHLAGKVLVPVGEHINRLVAARFQWDVMGSENLVIARTDSESGKLLSSAIDVRDHEFIKGVAEDGIESLAETLQAMELAGATGADIDIFEAEWVKKTELMTCDEAVVKQLKEQGVSESSINGYLEATKKDRDMSITKRKDLATKYSKTPIIFNIDIPRTREGFYHYKAGMEAATKRAIQYAPYADLLWVETGDPNVENAAKFSGEIRAKYPGKGLVYNLSPSFNWMGHGFTDETLKSFIWDIAKHGFVLQLISLAGLHSTATITSELSKAFKDEGTLASNR

SEQ ID NO: 7120 - protein, 562 aa, Glycine max
MAPSTTVPNGTLPSGSVTGRLASVYSEVQKTRVDHALPLPSVLKHPFTILHGPPSSAAGNPDEIAKLFPHLFGQPSAALARSDAAQTQKKLKIGVVLSGGQAPGGHNVISGIFDYLQERAPGSTLYGFKGGPAGIMKCKYVELTSEYIYPYRNQGGFDMICSGRDKIETPEQFKQAEETAKKLDLDGLVVIGGDDSNTNACLLAENFRSKNLKTSVIGCPKTIDGDLKCKEVPTSFGFDTACKIYSEMIGNVMIDARSTGKYYHFVRLMGRAASHITLECALQTHPNITIIGEEVAAKKLTLKNVTDYIVDVVCKRAEINYNYGVILIPEGLIDFIPEVQHLIAELNEILAHDTVDEGGLWKKKLTDQSLKLFDFLPQAIQEQLMLERDPHGNVQVAKIETEKMLIQMVETELEKRKQEGKYKGEFKGQSHFFGYEGRCGLPTNFDATYCYALGYGAGALLHSGKTGLISSVGNLCAPVKEWTVGGTALTSMMDVERRHGKFKPVIKKAMVELEGAPFKKFASLRDEWALKNCYISPGPIQFSGPGSEVINHTLLLELEAQA

SEQ ID NO: 7121 - protein, 57 aa, Zea mays
MKEGTANCVDILIAIILPPLGVFLKFGCKVEFWLCLLLTFLAYLPGIIYAIYAITKD

SEQ ID NO: 7122 - protein, 217 aa, Volvox carteri
MARIPGRPDYDALIKLLLVGDSGVGKSCLLLRFTDDMFTSSFITTIGIDFKIKKVDVDGKLVKLQIWDTAGQERFRTITSAYYRGAQGIILVYDITDEASFNNVRNWMRNIEQHASDNVNKILVGNKLDLAEDKRVVSIARGQALADEFGFRFYETSAKDNVHVEEAFIAVAKDVLARMEGEHANQQLLQQQQLSAAQPVRLTSGSPSPAQGKSCCR

SEQ ID NO: 7123 - protein, 480 aa, Zea mays
  unsure (1)..(480): unsure at all Xaa locations
SVPPRLLHGKSSRAYGSIWESTVRNVKFVSDKTVKPVYIITPTEAAHIQATVACGRKHGLRVRVRSGGHDYEGLSYRSAKPETFAVVDLSMMRQVRIDGKAATAWVDSGAQLGELYYAVAKMTPSLGFPAGVCATIGVGGHFSGGGFGMLLRKYGTAGDNVIDAKVVDANGTLLDRKSMGEDYFWAIRGGGGESFGIVVSWQVQLVPVPPKVTVFQIHGGGVKDGAIDLINKWQQVAPXLPDDLMIRIMAMEQDAMFEALYLGTCKDLLPLMASRFPELGVKQEDCNEMPWIQSVAFIPMGKSATVMDLLNRTSNIKAFGKYKSDYVKDPIPRDVWEKIYTWLAKPGAGVMIMDPYGARISSIPQDATPFPHRQGVLFNIQYVSYWFGEGDGAAPTQWSRDMYAFMEPYLSKNPRQAYANYRDLDLGVNEVVGDVSTYDSGRVWGEKYYNGNFERLARTKAKVDPCDYFRNEQSIPPLLK

SEQ ID NO: 7124 - protein, 181 aa, Brassica napus
MASSMLSSAAVATSPAQATMVAPFTGLKSSAAFPVTRKSNTDITSIASNGGRVSCMKVWPPVGKKKFETLSYLPDLTDVELAKEVDYLLRNKWIPCVEFELEHGFVYREHGSTPGYYDGRYWTMWKLPLFGCTDSAQVLKEVQECKTEYPNAFIRIIGFDNNRQVQCISFIAYKPPSFTGA

SEQ ID NO: 7125 - protein, 461 aa, Erwinia amylovora
  unsure (1)..(461): unsure at all Xaa locations
MKNVSSXVAVXRNPAXXXVXARXPXAXIDXVARALXLTHGAFQDWRXSVMSDRVRLLRNVAGALRQQARELAEMMTSEMGKPVDQGLAEVEKSARLCEWYAEHGPAFLQREPTLVEGNKAFVDYLPLGPVLSVMPWNFPVWQVLRGAVPILLAGNSYLLKPAPNVMGCALLLQQILSRAGVPQGLFAVVNADNDGVAQAINDRRIAAVTVTGSVRAGAAIAALSGAAIKKCVLELGGSDAFIVLAEADIDAAVKGAIAGRFMNNGQLCISAKRIIVEAAVFETFRDKFVCAVREMKIGDPRESGTWIGPMARYDLRDELDAQVQATLKEGATLLLGGHVLPGEGNYYAPTVLSDVKPGMTSFVQELFGPVASLIMADDAGHAVAMANDSEFGLGGSLWSRDLAVAQKLASRIETGSVFINSPSFSDPRVPIGGVKKXGFGRELSHFGLREFTNAQTVWMEG

SEQ ID NO: 7126 - protein, 148 aa, Novosphingobium aromaticivorans DSM 12444
MRIASEHAKTIVKATAPAIEKHGVDITTAMYKRLFQNDEVKAMFDQAAQDSGEQPRRLAGAILAYAKNIDKLENLGSAVQRMVQRHVDTGVKAEHYPYVAEALLPAIRDVLGAEVATDEVLAAWGEAYWMLADILIAAEKQAYLEAVA

SEQ ID NO: 7127 - protein, 396 aa, Salmonella typhimurium LT2
MLDAQTIATVKATIPLLVETGPKLTAHFYDRMFTHNPELKEIFNMSNQRNGDQREALFNAIAAYASNIENLPALLPAVEKIAQKHTSFQIKPEQYNIVGTHLLATLDEMFNPGQEVLDAWGKAYGVLANVFIHREAEIYHENASKDGGWEGTRPFRIVAKTPRSALITSFEFEPVDGGTVAEYRPGQYLGVWLKPEGFAHQEIRQYSLTRKPDGKGYRIAVKREDGGQVSNWLHHHASVGDGVHLAAPAGDFFMNVAADTPVSLISAGVGQTPMLAMLDTLAKEQHTAQVNWFHAAENGDVHAFADEVSELGRTLPRFTAHTWYREPTESDRAQRLFDSEGLMDLSKLEAAISDPAMQFYLCGPVGFMQFAAKQLVSLGVNNENIHYECFGPHKVL

SEQ ID NO: 7128 - protein, 486 aa, Pseudomonas putida
MKEFLNFINGEYVRNASGKTFQDINPVNGQVIGNIYEAGQVEVDAAVAAARAALKGDWGRLSVAERCKLLDAVAGEINRRFDDFLQAEIADTGKPHHLASHVDIPRGAANFQIFIDTIKSTATESFNMRTPDGKTALSYGVRVPRGVIAVVCPWNLPLLLMTWKVGPALACGNTVVVKPSEETPATATLLGEVMNAVGMPKGVYNVVHGFGPASAGEFLTKHPGVNGITFTGETRTGTAIMKAAADGVRPVSLEMGGKNAAVVFADCDFQVTIDTLTRSCFENAGQVCLGTERVYVERPIFDKVVAALKERAEAMKPGLPFDHDTRIGPLISKKHQAKVLGLYKTAKDEGATIVTGGGIPDMPEELKNGSWVQPTIWTGLPETATVVTEEIFGPCCHISPFDSEEEVLGKVNANRYGLATAIFTQDIARANRLAHQIEVGLCWINAWFLRDLRTPFGGSKQSGIGREGGVHSLEFYTELRNVMVKF

SEQ ID NO: 7129 - protein, 176 aa, Triticum aestivum
  unsure (1)..(176): unsure at all Xaa locations
QPGRPLMAXSATSLAPFQGLKSPAGFPVKRRSKGGSLGRVRNGGRIRCMQVWPIEGIKKFETLFYLPPLSTEALLKQVXYLIRSKWXPCLEFSKVGFIFREHNGSPGXYDGRYWTMWKLPMFGCTDATQVINEVEEVKEEYPDGYVRIIGFDNMPQVQWVSFIAFKPPGCEESGKA

SEQ ID NO: 7130 - protein, 600 aa, Glycine max
MWKVVRFAAARSRRFSTAIPGPCKVHKRGTDILHDPWFNKDTGFPLTERDRLGLRGLLPPRVISFEHQYDRFMNSYRSLEKNTQGQSDRFVSLSKWRILNRLHDRNETLYYRVLIDNIKEFAPIIYTPTVGLVCENYSGLFRRPRGMYFSAKDKGEMMSMIYNWPSDQVDMIVLTDGSRILGLGDLGVQGIGIPIGKLDMYVAAAGINPQKILPVMLDVGTNNQKLLEDPLYLGVRQPRLEGEEYLLIVDEFMEAVHARWPKAIVQFEDFQMKWAFETLKRYRERFCMFNDDIQGTAGVALAGLLGTVRSQGQPLSDFLKQKIVVVGAGSAGLGVLSMAVQAVSRMSGGSGTDANSQFFLIDKDGLVTTERSNLDPAAVPFAKNPRDLEGLSEGASIIEVVKKVKPHVLLGLSGVGGVFNTEVLKAMRESVSTKPAIFAMSNPTMNAECTAIEAFSHAGENIVFASGSPFENVDLGNGEVGHVNQANNMYLFPGIGLGTLLSGARHITDGMLRAAAECLASYMTEDDVRKGILYPSIDCIRDVTAEVGAAVVCAAVAEKQAEGHGDVGFKELENMSKEETVEYVRGNMWYPEYCPLVHEK

SEQ ID NO: 7131 - protein, 201 aa, Pseudomonas fluorescens PfO-1
MPPRSDVLAPTASISRAQREARNGHRGTAMLLTGLPAAGKSTLAQALHAELFSRGLQSVVLDGDGLRVGLNRDLGFTDADRLENIRRASELAALLVENGQIVILAMIAPLAELREVFARRLGEDYREVWCSAALAVCEQRDPKGHYARARRGELAGFTGVSAPYEAPAQASLVLDTGTLTVEACLDRLLTWLGESAVLPKA

SEQ ID NO: 7132 - protein, 129 aa, Triticum aestivum
  unsure (1)..(129): unsure at all Xaa locations
MDAAAAAVTTLSALAVFASTLHQGAVRSVHGYRVVAMGGRCAWDRWVEREVRLLXPPPGREVPLPAAAPRXILPVEWRXRPGYREGASCWGALGAGVPGXXIPIRRPXAVSGPKPXPRFXWPPSGEPGG

SEQ ID NO: 7133 - protein, 229 aa, Thermococcus kodakaraensis
MNVEEMKKAVAKEALKFIEDEMVVGLGTGSTTAYFINYLGKLLMEGELEDVYGVPTSHQARLLALEAGIPVVSLDEVDAIDIAVDGADEVDPHMNLIKGRGAALTMEKIIEYRAGMFIVLVDESKLVEYLGQKMPVPIEVIPAAWRAIAEELEVFNATAELRMAVKKDGPVVTDNGNFILDAKFARIEDPLDLEIELNTIPGVVENGIFADIADIILVGTPEGVKRMER

SEQ ID NO: 7134 - protein, 304 aa, Glycine max
MALNYNIALAFSAVLTLLLFPLPTVGELVEEQPLVLKYHNGQLLKGRITVNLIWYGTFTPIQRSIIVDFINSLSSAPNAPLPSTATWWKTTEKYKVGGGSSALVVGKQFLHSAYSLGKNLKGKDVLALASKFNELKSITVVLTAKDVAVEGFCMSRCGTHGSTRNVKNAARTAYIWVGNSETQCPGQCAWPFHQPIYGPQTPPLVAPNGDVGVDGMVINLATLLAGTVTNPFNNGYFQGPPTAPLEAVSACTGVFGSGSYPGYPGRVLVDKATGASYNAHGANGRRYLVPAMWDPQTSTCKTLV

SEQ ID NO: 7135 - protein, 425 aa, Thermococcus kodakaraensis
MNPLEFHRDNFPGNGKIEVIPKVPVNRETLSLAYTPGVAEPSKAIANGADPDEYTVIPNTVAVVTDGSAILGLGDIGPVAGMPVMEGKAVLFKALAGVDAFPILINTKDVDEIVRTVELISPGFGGINLEDISAPRCFEIEERLRERLDIPVFHDDQHGTAVVTLAGLINALKLVGKKFSEIKVAISGAGAAGIAIAKILHSVGVKEIVTVDRKGIIHEGREDLNPYKREVAEYNVHGIEGGLKEAMEGADVFIGVSAGGIVTPDMVRAMADDAIVFAMANPIPEIMPEEAKRAGARIVATGRSDFPNQINNVLGFPGIFRGALDVKAEDITPSMKLAAAEAIASVVSDDELGEDYIIPSPLHPDVFPKEARAVAEVAMKEGVAGRKVSGEWVEEHTRRLREFYSAFIEPLNEKRKTFSGRGSSP

SEQ ID NO: 7136 - protein, 663 aa, Zea mays
MISARTAAASPASLWKQGGRSEGGGSCDGCRTYRNTLRRAAAAKVRALPSRAVEAVKMGSAAEMEQEEAEVAAAAAGVVVEDHYGEDSATEELPILPWAFSVARYVSFSWLKKYAEESYFYISGYTLLRDPHHNKGLAFMEKERDAHHLRGLLPPAVVPQELQIKKIMHNLRQYQVPLQRYMAMMDLQERNERLFYKLLIDNVEELLPVVYTPTVGEACQKYGSIFRQPQGLYVSLRDKGKVLEVLRNWPHRNIQVICVTDGEAILGLGDLGSQGMGIPVGKLALYTALGGVRPSACLPITIDVGTNNEKLLNDEFYIGLRQKRATGEEYHELMEEFMAAVKQIYGEKVLIQFEDFANHNAFNLLAKYSKSHLVFNDDIQGTASVVLAGLLAALKVVGGTLAEHTYLFLGAGEAGTGIAELIALEISKQTSAPIEECRKKIWLVDSKGLIVDSRKNSVQSFKKPWAHEHEPLTTLYDAVQSIKPTVLIGTSGVGRTFTKEVVEAMASFNERPIIFSLSNPTSHSECTAEEAYNWTQGRAIFASGSPFDPVEYDGKVFVPGQSNNAYIFPGFGLGLVISGAIRVHEDMLLAASEALAAQATQENFDKGSIFPPFTNIRKISARIAAAVAAKAYELGLATRLPPPRDLVKYAQSCMYTPVYRNYR

SEQ ID NO: 7137 - protein, 479 aa, Mesorhizobium loti MAFF303099
MKSMSLTTLDRGKTTVDAATIETLSAQLRGTLLQQGDAAYNEARTVWNATVDRRPGLIVCCVGASDVIRAVNFARENRLLVSVRGGGHNIAGSAVCDGGLMIDLSPMKSVRVDPVARRAWVGPGATLADVDRETQAFGLAVPTGINSTTGISGLTLGGGFGWITRKFGLTIDNLVSADVVTADGKLLRASQTENPDLFWALRGGGGNFGIVTAFEFQLHQMGPQVLSGLVVHPFADAEKVLEEYRNALETAPDELTCWVVMRQAPPLPFLPAEWHGKDVLVLAMCYCGDLQAGEKATKKLRAIGSPIADVVGPNPFTGWQQAFDPLLAPGARNYWKSHDFTELSDRAAEIVTEAIRELPGPECEIFIGHVGGAAGRVAQNATAFPQRSSHFVMNVHARWRDPAMDRACIGWARGLYEAAKPYAAGTAYVNFMPEDEVDRVEAAYGGNYQRLLEIKQRYDPLNLFRMNQNLRPKQSQRAA

SEQ ID NO: 7138 - protein, 581 aa, Zea mays
MGNTCIGPSAPSDRHSFFNTVSLAVLWRTPAAADPAEPSPTAEPSSSTPCSPPSRAPNPVTISDSEHPPHSTSTALGPAAPPNPNGKPKPKPKVKRVQSAGLLAGSVLKRDSERLKDVYTLGKKLGQGQFGTTYQCVEKATGKHFACKSIAKRKLVTDEDVEDVRREIQIMHHLAGHPNVVSIVGAYEDAVAVHLVMELCAGGELFDRIIQRGHYSEKAAAQLARVIIGVVEACHSLGVMHRDLKPENFLFVNQKEDAPLKAIDFGLSIFFKPGEIFSDVVGSPYYVAPEVLKKRYGCEVDVWSAGVIIYILLSGVPPFWAESEQGIFKQVLKGGLDFSSDPWPSISESAKDLVRKMLNRDPRKRLTAHDALCHPWVCVDGVAPDKPLDSAVLTRLKQFSAMNKLKKMALRVIAENLSEDEIAGLKEMFKMLDTDNSGQITLEELKIGLKRVGANLKDSEITTLMEAADIDNSGSIDYGEFLAATLHLNKVEREDNLFAAFSYFDKDGSGYITHDELQKACEEFGIEDAHLEDIIHDVDQDNDGRIDYNEFVTMMQKGNNPLGKKGHCQMSFGLREALKLG

SEQ ID NO: 7139 - protein, 136 aa, Glycine max
HASDHAYGCELRRRSKWLPSMISSPAVTTVNRAGAGMVAPFTGLKSMAGFPTTKTNNDITSIASNSGRVPCMQVWPPACTKNFETLSYLPYLDDAQLAKAVVYLPKKAWISCWAFELEHVYLYREHIMSPGYYYGR

SEQ ID NO: 7140 - protein, 72 aa, Glycine max
SSSQVLRTRNRAGAGMGAPFTGLKSMAGLKTRKTNDDITYIASNGCRVQCMHETTPIGMKNLETLDYLPDDL

SEQ ID NO: 7141 - protein, 155 aa, Mesorhizobium loti MAFF303099
MKARFCAALLVLMLALGFAGTALAVKPDEMLADPALEARARALSEGLRCMVCQNQSIDESDADLARDLRILVRQRLVAGDTDQQVMDYVVSRYGEFVLLKPRFDLRNALLWGTPVLLLLVGGVFIVLTARSRRTLATKTLSADEQAALDAILHRD

SEQ ID NO: 7142 - protein, 278 aa, Zea mays
  unsure (1)..(278): unsure at all Xaa locations
GCGTHKAPINGNFVDSASGKTFPXLDPRTGEVIAHVAEGDAEDINRAXIEVPMVARLMRYYAGWADKIHGLIVPADGPHHVQILHEPIGVAGQIIPWNFPLLMYAWKVGPALACGNTLVLKTAEQTPLSALYISKLLHEAGLPEGVVNVVSGFGPTAGAALASHMDVDKIAFTGSTDTGKIILELAAKSNLKTVTLXELGGKSPFIIMDDAXDVDLAVELAHFALFFNQGQCCCAGSRTFVHERVYDEFVEKAKARALKRVVGDPFRKGVEQGPQVHL

SEQ ID NO: 7143 - protein, 117 aa, Brassica napus
MAQCIDGFKHLCTSVLGCFDLDLYKQPGGLGDPELLARDTVFSVSEIEALYELFKKISSAVIDDGLINKEEFQLALFKTNKKESLFADRVFDLFDTKHNGILGFEEFARALSVFHPN

SEQ ID NO: 7144 - protein, 168 aa, Xylella fastidiosa Temecula1
MSSIYTFTFTRLDGRPQALADWRGQVLLLVNVASRCGFTPQYAGLEMLWQRYRDAGLIVIGFPCDQFAGQEPGDEAKIAEFCTLTYGVDFPMAAKIKVNGADAHPLWQWLKHRRRGLFGVAAIKWNFTKFLIGRNGQPIARYSPIKSPEQLEVHIVRALGEEGGGNTH

SEQ ID NO: 7145 - protein, 368 aa, Glycine max
  unsure (1)..(368): unsure at all Xaa locations
MPGHRSKSEKHDVDGGGGEKQLRRDPYEVLGVSRNSTDQEIKTAYRKMALKYHPDKNANDPKAADMFKEVTFSYNILSDPDKRRQYDSAGFEAVESDNQELELDLSSLGAVNTMFAALXFPIKTTVSATVLEEALNGLVTIRPLPLGHNIAKRVEKQCAHFYSVTITEEEAQAGFVCRVQSPDKSKFKLLYFDQEDNSGLSLALQEDSAKTGKVTSAGMYFLGFPVYRLDQTMNSIAAAKDPDTSFFRKLDAFQPCELTELKAGTHVFAVYGDNFFKSANYTIEALCAAPFSEEKENLRNIEAQILSKRAEISKFEAEYREVLAQFSDMTNRYAHEMQAIDELLKNRNEIQASYTSAPLKRTTSRSKK

SEQ ID NO: 7146 - protein, 218 aa, Bacteroides thetaiotaomicron VPI-5482
MKFFIDTANLEQIQEAYDLGVLDGVTTNPSLMAKEGIKGTENQREHYIKICKIVNADVSAEVIATDYEGMIREGEELAALNPHIVVKVPCIADGIKAIKYFTEKGIRTNCTLVFSVGQALLAAKAGATYVSPFVGRLDDICEDGVGLVGDIVRMYRTYDYKTQVLAASIRNTKHIIECVEVGADVATCPLSAIKGLLNHPLTDSGLKKFLEDYKKVNG

SEQ ID NO: 7147 - protein, 254 aa, Oryza sativa (japonica cultivar-group)
MEAGYPGTAANGAAADGNGGAQQAAAAPAIREQDRLMPIANVIRIMRRVLPAHAKISDDAKETIQECVSEYISFITGEANERCQREQRKTITAEDVLWAMSRLGFDDYVEPLGVYLHRYREFEGESRGVGVGVGAARGDHHHGHVGGMLKSRAQGSMVTHHDMQMHAAMYGGGAVPPPPHPPPHHHAFHQLMPPHHGQYAPPYDMYGGEHGMAAYYGGMYAPGSGGDGSGSSGSGGAGTPQTVNFEHQHPFGYK

SEQ ID NO: 7148 - protein, 435 aa, Rickettsia conorii str. Malish 7
MTNENNNDSEFAELKIRGKIFKLPILKASIGEDVIDISRVSAEADCFTYDPGFMSTASCQSTITYIDGDKGILRHRGYDIKDLAEKSDFLEVAYLLIYGELPSGEQYNNFTKQVAHHSLVNERLHYLFQTFCSSSHPMAIMLAAVGSLSAFYPDLLNFKEADYELTAIRMIAKIPTIAAMSYKYSIGQPFIYPDNSLDFTENFLHMMFATPCTKYTVNPIIKNALNKIFILHADHEQNASTSTVRIAGSSGANPFACISTGIASLWGPAHGGANEAVINMIKEIGSSEYIPKYIAKAKDKNDPFRLMGFGHRVYKNYDPRAAVLKETCKEVLKELGQLDNNPFLQIAIELEAIALKDEYFIERKLYPNVDFYSGIIYKAMGIPSQMFTVLFAIARTVGWMAQWKEMHEDPEQKISRPRQLYTGYVHREYKGIRER

SEQ ID NO: 7149 - protein, 363 aa, Candida milleri
MSTTKTIVVLPGDHVGTEITEEATKVLNAIAEKRPNIKFDFQHHLIGGAAIDATGVPLPDEALEASKKADAVLLGAVGGPKWGTGDVRPEQGLLKIRKELGLYANLRPCNFAFDSLLDMSPLKPEYARGTDFTVVRELVCGIYFGKRKEDTGDGVTWDSEQYSVPEVQRITRMAASLALQHNPPLPIWSLDKANVLASSRLWRKTVEETIKNEFPTLSVQHQLIDSAAMILVKNPTKLNGLVITSNMFGDIISDEASVIPGSLGLLPSASLASPPDTNKAFGLYEPCHGSAPDLPKGKVNPVATILSVAMMLKLSLDMVEEGIAVEKAVRKVIDNGIRTADLRGTNSTTEVGDAIAAAVKEFL

SEQ ID NO: 7150 - protein, 427 aa, Coxiella burnetii
MTELTGVSIVTYQHIKVPSQGEKITVNKAVLVVPDRPIIPFIEGDGIGIDIAPVMKNVVDAAVEKSYAGKRKIEWMEIYAGEKATKVYGKDNWLPDETLEAIKEYQVAIKGPLTTPVGGGIRSLNVALRQQLDLYVCLRPVRYFTGVPSPVKTPEKVNMVIFRENSEDIYAGIEWPAGSPEAVKLINFLQNEMGVKKIRFPETAGIGIKPVSKEGTSRLVRRAIQYAIDNDRDSVTLVHKGNIMKFTEGAFKDWGYEVAVKEFGAKPLDGGPWHVFENPKTGQKITIKDVIADAFLQQILLRPAEYSVIATLNLNGDYISDALAAEVGGIGIAPGANLSDTVGLFEATHGTAPKYAGQDKVNPGSLILSAEMMLRYLGWKEAADLVVQGIEGAIESKTVTYDFARLMTGAKEVSTSQFGKAIIKHIL

SEQ ID NO: 7151 - protein, 471 aa, Bacillus megaterium
TIKEMPQPKTFGELKNLPLLNTDKPVQALMKIADELGEIFKFEAPGRVTRYLSSQRLIKEACDESRFDKNLSQALKFVRDFAGDGLFTSWTHEKNWKKAHNILLPSFSQQAMKGYHAMMVDIAVQLVQKWERLNADEHIEVPEDMTRLTLDTIGLCGFNYRFNSFYRDQPHPFITSMVRALDEAMNKLQRANPDDPAYDENKRQFQEDIKVMNDLVDKIIADRKASGEQSDDLLTHMLNGKDPETGEPLDDENIRYQIITFLIAGHETTSGLLSFALYFLVKNPHVLQKAAEEAARVLVDPVPSYKQVKQLKYVGMVLNEALRLWPTAPAFSLYAKEDTVLGGEYPLEKGDELMVLIPQLHRDKTIWGDDVEEFRPERFENPSAIPQHAFKPFGNGQRACIGQQFALHEATLVLGMMLKHFDFEDHTNYELDIKETLTLKPEGFVVKAKSKKIPLGGIPSPSTEQSAKKVR

SEQ ID NO: 7152 - protein, 440 aa, Zea mays
MSTTKVKRRVGKYELGRTIGEGTFAKVRFARDTVTGEAVAIKILDKEKVLRHKMVEQIKREISTMKLIKHPNVVRIYEVMGSKTKIYIVLEFATGGELFDTIVNHGRMREDEARRYFQQLINAVDYCHSRGVYHRDLKPENLLLDSYGNLKVSDFGLSALSQQIKDDGLLHTTCGTPNYVAPEVLEDQGYDGAMADLWSCGVILFVLLAGYLPFEDSNLMTLYKKISNAEFTFPPWTSFPAKRLLTRILDPNPMTRITIPEILEDEWFKKGYKRPEFDEQYDTTLDDVDAVFNDSEEHHVTEKKEEEPVALNAFELISMSAGLNLGNLFDSEQEFKRETRFTSKCPPKEIVRKIEEAAKPLGFDVQKKNYKLRLEKVKAGRKGNLNVATEILQVAPSLHMVEVRKAKGDTLEFHKFYKNLSKTLKDVVWKSDDLQTQHAS

SEQ ID NO: 7153 - protein, 238 aa, Oryza sativa (japonica cultivar-group)
MGEEAPEEYELGGGEDERVMEWETGLPGADELTPLSQPLVPAGLAAAFRIPPEPGRTLLDVHRASAATVSRLRRASSSSSSSFPAFASKGAGTGADEAESGGGADGGNGNTNNSSSKRARLVWTPQLHKRFVEVVAHLGMKNAVPKTIMQLMNVEGLTRENVASHLQKYRLYVKRMQGLSNEGPSPSDHIFASTPVPHASLHDQVPSPYHPHPHHHSYNNAAYAATVSSYHHYHHANH

SEQ ID NO: 7154 - protein, 427 aa, Coxiella burnetii
MTELTGVSIVTYQHIKVPSQGEKITVNKAVLEVPDRPIIPFIEGDGIGIDIAPVMKNVVDAAVEKSYAGKRKIEWMEIYAGEKATKVYGKDNWLPDETLEAIKEYQVAIKGPLTTPVGGGIRSLNVALRQQLDLYVCLRPVRYFTGVPSPVKTPEKVNMVIFRENSEDIYAGIEWPAGSPEAVKLINFLQNEMGVKKIRFPETAGIGIKPVSKEGTSRLVRRAIQYAIDNDRDSVTLVHKGNIMKFTEGAFKDWGYEVAVKEFGAKPLDGGPWHVFENPKTGQKITIKDVIADAFLQQILLRPAEYSVIATLNLNGDYISDALAAEVGGIGIAPGANLSDTVGLFEATHGTAPKYAGQDKVNPGSLILSAEMMLRYLGRKEAADLVVQGIEGAIESKTVTYDFARLMTGAKEVSTSQFGKAIIKHIL

SEQ ID NO: 7155 - protein, 471 aa, Bacillus megaterium
TIKEMPQPKTFGELKNLPLLNTDKPVQALMKIADELGEIFKFEAPGRVTRYLSSQRLIKEACDESRFDKNLSQALKFVRDFAGDGLFTSWTHEKNWKKAHNILLPSFSQQAMKGYHAMMVDIAVQLVQKWERLNADEHIEVPEDMTRLTLDTIGLCGFNYRFNSFYRDQPHPFITSMVRALDEAMNKLQRANPDDPAYDENKRQFQEDIKVMNDLVDKIIADRKASGEQSDDLLTHMLNGKDPETGEPLDDENIRYQIITFLIAGHEATSGLLSFALYFLVKNPHVLQKAAEEAARVLVDPVPSYKQVKQLKYVGMVLNEALRLWPTAPAFSLYAKEDTVLGGEYPLEKGDELMVLIPQLHRDKTIWGDDVEEFRPERFENPSAIPQHAFKPFGNGQRACIGQQFALHEATLVLGMMLKHFDFEDHTNYELDIKETLTLKPEGFVVKAKSKKIPLGGIPSPSTEQSAKKVR

SEQ ID NO: 7156 - protein, 71 aa, Triticum aestivum
MASRSCTFLEILLAIILPPLGVFLHYGCCSMEFCICLLLTILGYIPGIIYAVYMLVALGSEERDRDYNTLA

SEQ ID NO: 7157 - protein, 88 aa, Brassica napus
MRVHDQRLRFDVTPKPMGLTGSSFITARSIAVLLFVSLSLLILPPFLPPLPPPPATFLLLPLILMILLIFLAFSPSNEPSLAVESLYP

SEQ ID NO: 7158 - protein, 371 aa, Triticum aestivum
  unsure (1)..(371): unsure at all Xaa locations
YNKFVQKSRLVPVRNSRDIVDPRVRGRVGNRAARKGAPTTPLITIAMTKIVASVFEKNNLPSAIFTAFCGGAEIGQAIALDTRIPLVSFTGSTKVGQMVQQQVSARFGKCLLELSGNNAIIVMDDADIPLAVRSVLFAAVGTAGQRCTTCRRLLLHESIYQTFLDQLVEVYKQVRIGDPMEKGTLLGPLHTTTSKESFLKGIQTIQSQGGXILLGGSAIESEGNFVQPTIVEISPAAPVVREELFGPVLYAMKFLALNNPDLCVIHLLYMALISLSXAYVPWLSIILQTLKEAIEINNSVPQGLSSSIFTXEPDAXFKWIGPHGSDCGIVNVNIPTNXAEIGGALGGKKATGGGQEQEXPWKQYMRRATVN

SEQ ID NO: 7159 - protein, 272 aa, Thellungiella halophila
MATQPPSSSSAREEFVYMAKLAEQAERYEEMVEFMEKVAKAVDKEELTVEERNLLSVAYKNVIGARRASWRIISSIEQKEESRGNNDHVSLIRDYRTKIETELSGICDGILKLLDTMLIPAAASGDSKVFYLKMKGDYHRYLAEFKTSQERKDAAEHTLNAYKAAQDIANAELAPTHPIRLGLALNFSVFYYEILNSPDRACNLAKQAFDDAIAELDTLGEESYKDSTLIMQLLRDNLTLWTSDMQDDDDVIKEAAAAAPAAPKPAEEQQQS

SEQ ID NO: 7160 - protein, 258 aa, Triticum aestivum
  unsure (1)..(258): unsure at all Xaa locations
MSATCAADLAPLLGAAAMNATDYLCNRFADTTSAVDSTYLLFSAYLVFAMQLGFAMLCAGSVRAKNTMNIMLTNVLDAAAGALFYYLFGFAFAFGTPSNGFIGKHFFGLKDMPQTGFDYSFFLFQWAFAIAAAGITSGSIAERTQFVAYLIYSAFLTGFVYPVVSHWIWSVDGWASAARTSGPLLFKSGVIDFAGSGVVHMVGGIAGFWGALIEGPRIGRFDHAGRSVALKGHSASLVVLGXFLLWFGWYGSTGVLRH

SEQ ID NO: 7161 - protein, 526 aa, Glycine max
  unsure (1)..(526): unsure at all Xaa locations
FGSRSLVSHLRLLVLLLSVSLGNSASLQENFVQCLNLNSDRTFPFNPLIYTPKSPSFTSVLDSSGKNQRLLVPSTPKPKFIFTPTRDSHVQAAVICSKKLGIHLRVLSGGHDFEGVSYVSEXQSPFIVVDLIKLRDINVDIKSNTAWVQAGATNGELYYRIYEKSSLHGFPAGTCTSLGIGGHITGGAYGSMVRKYGLGADNVLDAKIVDANGRILDRKAMGEDLFWAIRGGGGXGSFGILLWWKVKLVPVPPTVTVFTVKKTLEQGATKLLHRWQEVAPFLDENLFIRVRIQRAQSTVTTSYEGLFLGGARKLLKIMKTSFPELGVTRKDCMETSWIKSVLYIAGFPSGTPPEVLLKGKPIAKFFFKGKSDFVRKPIPETGLEGLRQRLLVEDSPLILWSPYGGRMNQFSESDTPFPYRNGTLFISLYISLWQEGEKNVAKHIDWIGNLHNYMGAYVPSFPRGQYVNYRDLDLGINTKNNTGNIQESAWGYRYFKNNFDRLVKIKTKVDPQNVFRHEQSIPPLPK

SEQ ID NO: 7162 - protein, 254 aa, Zea mays
MRKKLGTRFPAARIKKIMQADEDVGKIALAVPVLVSRALELFLQDLIDRTYEITLQSGAKTLNSFHLKQCVKRYSSFDFLTEVVSKVPDLGGADSCGDERVLPRRRKSNGSDPENDESRSSKMAIRNANISPRGRGRGRGRGRGRPPTKRKEVGYVQFEDESSMFAEQGEPLPGEETVQEINGNETMPQSTQPPVEAPPTALAQATTSSKAEEANSDHQSDWPMPDAIGSIGVVPSGFGHLTVQVEDEDYDNED

SEQ ID NO: 7163 - protein, 435 aa, Erwinia carotovora subsp. atroseptica SCRI1043
MTTSRTQQVQHIEKEWKTARWEGITRPYSAEDVINLRGSVNPECTLAQLGAARLWSLLHGEARKGYVNCLGALTGGQALQQAKAGIEAIYLSGWQVAADANLASSMYPDQSLYPANSVPAVIERINNTFRRADQIQWANHIEPGDKRHTDYFLPIVADAEAGFGGVLNAFELMKSMIEAGAAAVHFEDQLASAKKCGHMGGKVLVPTQEAVQKLVAARLAADVMGVPTLVVARTDADAADLMTSDCDEYDRDFITGERTVEGFYRTRAGIEQAISRGLAYAPYADLVWCETSTPDLSLARRFAEAIHAKFPGKLLAYNCSPSFNWKKNLDDSTIARFQDELSAMGYKYQFITLAGIHSMWFNMFDLAHAYAQGEGMRHYVEKVQQPEFEAIKDGYTFSSHQQEVGTGYFDKVTNIIQGGQSSVTALTGSTEEQQF

SEQ ID NO: 7164 - protein, 496 aa, Crocosphaera watsonii WH 8501
MRSLTYFGSLIKEQPLINDHCMYEKLTAPTTGSKITFEDGNPIVPNDPIIPFIRGDGTGIDIWPATEKVIDAAVKTAYGDSKKINWFKVYAGDEACDQYGTYQYLPEDTLTAIKEYGIAIKGPLTTPVGGGIRSLNVALRQIFELYACVRPCRYYPGTPSPHKSPEKLNVIVYRENTEDIYLGIEWTEGTEIAQKLINYLNNELIPATAEHGKKQIRIDSGIGVKPISKTGSQRLVRRAIEHALRLPKAKQMVTLVHKGNIMKYTEGAFRDWGYELATSEFRDVCVTERESWILSNKEGKADISIEDNARKVEPGYDSLTPEKKQEICDEVKGVIDAIWDSHGDGKWKEKIMVNDRIADSIFQQIQTRPDEYSILATMNLNGDYLSDAAAAVVGGLGMGPGANIGDTCAIFEATHGTAPKHAGLDRINPGSVILSGVMMLEYMGWQEAADLIKKGIGNAIANRQVTYDLARLMEPKVDPPLKCSEFAQAIIDYFND

SEQ ID NO: 7165 - protein, 498 aa, Rhodobacter sphaeroides 2.4.1
MTLLTTEDYKAIAAGLTLPTGAFIDGRFRPAQSGATFETRNPATGQLLAEVAACGPADVDLAVQKARDAFEDGRWSRLPPRARKEVLIRLAKLLKRHARELAVMESLDSGKTIYDCETVDLPETIHCLTWHAELIDKIYDQTAPASDDHLALVLREPVGVVGLVLPWNFPLLMLAWKIGPALAAGCSVIVKPAEETPLTALRVAELATEAGVPPGVFNVLPGHGPEVGEPIGRHMDIDAVSFTGSTETGRRFLRYAAESNLKEVTLEMGGKNPAVVLDDAENLDRVAAHVVTGAFWNMGENCSAASRLIVQSGVKEALIARILAHAREWPMGDPLDPANRVGALVSPAHLDKVRSYLAEGPTVLLGGKAHGAFVEPTILEITDREAAPAREEIFGPVLSVLTVESFDEAIALANDTPYGLAASIFTANVKKALRGARALRAGTVTVNSFGEGDITTPFGGFRQSGFGGRDNGIHAHDQYTQLKTIWIDLADDAAEAVS

SEQ ID NO: 7166 - protein, 86 aa, Glycine max
MASSMISSPAVTTVNRAGAGMVAPFTGLKSMAGFPTRNTNSDITCVASNGGRVRWVRVWPPIGEREWESVCSLPNVPDRAVRGDVQ

SEQ ID NO: 7167 - protein, 570 aa, Triticum aestivum
MWRHAAARRSAQIRRLLSTSAPSAGAVRGPCIVHKRGTDILHDPWYNKDTAFPLTERDRLGLRGLLPPRVMSFEQQYERFINSYHSLEHNTQGEPDSVVSLAKWRILNRLHDRNETLYYRVLIDNIKDFAPIIYTPTVGLVCENYSGLFRRPRGMYFSAKDKGEMMSMIYNWPAEKVDMIVVTDGSRILGLGDLGVQGIGIPIGKLDVYVAAAGINPQKVLPIMLDVGTNNEELLEDKLYLGLRQPRLEGEEYLAVVDEFMEAVHARWPKAIVQFEDFQMKWAFETLQRYRSRFCMFNDDVQGTAGVALAGLLGAVRAQGRPLADFTKQKIVVVGAGSAGIGVLNMAKHAMLRMPGTHKIGELGEGHNQFWVLDKDGLITKSRKDLDPAVARFARGYGPEEVEDLHEGASLVEVVKKVKPHVLLGLSGVGGIFNEEVLKAMKESDSPCPAIFAMSNPTTKAECTPEDVFKHVGENAVFASGSPFSNVTLSNGRKGYANQANNMYLFPGIGLGALLSGARHISDGMLHAAAECLASYITDDAIRKGILFPSISSIRHITARARRCSRPCCR

SEQ ID NO: 7168 - protein, 564 aa, Zea mays
MAAAAVTSNGGAVAANGPAPGRLASVYSEVQTNRLLHALPLPSVLRSNFSVVDGPASSAAGNPDEIAKLFPNLFGQPSASLVPSAEPAATRPLKVGVVLSGGQAPGGHNVICGIFDYLQERAKGSTLYGFKGGPAGIMKCKYVELTSDFVYPYRNQGGFDMICSGRDKIETPEQFKQAEDTANKLDLDGLVVIGGDDSNTNACLLGEYFRSRNMKTRVIGCPKTIDGDLKCKEVPTSFGFDTACKIYSEMIGNVMTDARSTGKYYHFVRLMGRAASHITLECALQTHPNAALIGEEVAAKKQTLKNVTNYITDIICKRADLGYNYGVILIPEGLIDFIPEVQKLIAELNEILAHDVVDEAGAWKSKLQPESRELFEFLPNTIQEQLMLERDPHGNVQVAKIETEKMLISMVETELEKRKAEGRYSAHFRGQAHFFGYEGRCGLPTNFDSNYCYALGYGAGALLQSGKTGLISSVGNLAAPVEEWTVGGTALTSLMDVERRHGKFKPVIKKAMVELDAAPFKKYASMRDEWAIKNRYISPGPIQFSGPGSNDSNHTLMLELGAAL

SEQ ID NO: 7169 - protein, 198 aa, Trillium camtschatcense
QVTFSKRRNGLLKKAFELSVLCDAEVGVIVFSPRDKLYEFSSTSMQSTIDRYRMHTKCVNTNMPTEHNTQQWKYEAVSMANKIELLEASKRKLMGESLEPCTVDELQELESQIERSLSNIRGRKDYLLEQQIEELKEKERRLLEDNELLRHKSEEETELQLATPKGVQYDHGSQQMELETELHIGWPPKVATQCISHA

SEQ ID NO: 7170 - protein, 179 aa, Glycine max
  unsure (1)..(179): unsure at all Xaa locations
MASSMISSPAVTTVNRAGAGMVAPFTGLKSMAGFPTRKTNNDITSIASNGGRVQCMQVWPPVGKKKFETLSYLPDLDDAQLAKEVEYLLKKGWIPCLEFELKHSFIYHKHNKSPKYYDRRYXNHXKLPIFNYTNTSQVLKELQQAKTTYPNHFIHIIKFDNXVRQVHYIIFITYKPPSF

SEQ ID NO: 7171 - protein, 297 aa, Triticum aestivum
IDGGFSWVQIKDMALKASGAYRHCKPCAGSSAGASGRHHPYHHRGGSGFRGSDASDRFHYAYRRAAGGGSSGEATPSMSARTDFPAGDEEEEEEEDGMSSGGGGGKEDNAKEWVAQVEPGVLITFVSLPQGGNDLKRIRFSREMFNKWQAQRWWAENYDKVMELYNVQRFNHQSVPLPTTPKSEDESSKEDSPVTPPLDKERVPRSLQRPTSGGGAMGYSSSDSLEHHSNHYCNGLHPHHGHQCYDSVGLASTPKLSSISGAKTETSSMDASMRTSSSPEEVDRSGELSVSISNASD

SEQ ID NO: 7172 - protein, 175 aa, Triticum aestivum
MAPAVMASSATSVAPFQGLKSTAGLPVSRRSNGASLGSVSNGGRIRRMQVWPIEGIKKFETLSYLPPLSTEALLKQVDYLIRSKWVPCLEFSKVGFIFREHNASPGYYDGRYWTMWKLPMFGCTDATQVINEVEEVKKEYPDAYVRIIGFDNMRQVQCVSFIAFKPPGCEESGKA

SEQ ID NO: 7173 - protein, 234 aa, Yersinia pestis KIM
MPWFAVISHIGVRVICWGVNSVPAHQLDDHNQETRSDDENIVWHPHAITRQDREQQHGHQGVVLWFTGLSGSGKSTLAGALEQALFARGVSTYLLDGDNVRHGLCRDLGFSDADRRENIRRVGEVAKLMVDAGLVVLTAFISPHRAERKMVQDMLASGQFIEVFVDTPLAICEARDPKGLYKKARAGELKNFTGIDSVYESPASPDIHLQGEQLVTNLIEQLLDVLRGRAIIKS

SEQ ID NO: 7174 - protein, 469 aa, Streptococcus pyogenes MGAS8232
MVSVMWFRRDLRIDDQKALAHVIASQSPTLCVFQFNKEQLNLLHSRNQSSFITSVLAFRKLLKCEGIDLYLMYGDLMTCFEQLLTQLKDWTDVYFNYDESGYGRLRDQKAAQFFKKNGIAVHTYQDHYLHGSQEIINQSGQPYKVFTPYYRIWQNYPKETPIKVELSQGRWLNLETPDDVLRTVESFKDEKYQDVATFDEASKQLNRFIQDQLAAYHANRDFPAQLGTSRLSPFLRIGAIGIRTVYHAVRQAPNSLGQATFLKELAWRDFYNMVYVAYPDQKTQPIQKAFSQIEWVNNPDWFQLWKEGKTGYPIVDAAMLQLQKTGWMHNRLRMIVASFLTKDLLCDWRLGEQYFQQQLIDYDAASNIGGWQWAASTGTDAVPYFRIFNPVTQGKRFDPKGEFIKAYLPQLEHVPEKYLHEPWKMPKNLQESVSCIIGTDYPQPIVDHAKQREQAIAKYEWAKEKAKIE

SEQ ID NO: 7175 - protein, 175 aa, Triticum aestivum
MAPAVMASSATSVAPFQGLKSTAGLPVSRRSNGASLGSVSNGGRIRCMQVWPIEGIKKFETLSYLPPLSTEALLKQVDYLIRSKWVPCLEFSKVGFIFREHNASPGYYDGRYWTMWKLPMFGCTDATQVINEVEEVKKEYPDAYVRIIGFDNMRQVQCVSFIAFKPPGCEESGKA

SEQ ID NO: 7176 - protein, 112 aa, Bartonella sp. af82up
AYETCLKMLQEIGAVQKIPEFIARAKNKNDRFRLMGFGHRVYKNYDPRAKIMQQTCHEVLKELNIQDDPLLDIAMELEKIALNDEYFIEKKLYPNVDFYSGITLKALGFPTE

SEQ ID NO: 7177 - protein, 283 aa, Triticum aestivum
  unsure (1)..(283): unsure at all Xaa locations
PRVRPRVRRWVGTINDFVYAVIDKKMEQMGRDGHEFAKKGDILSRFLLEREKDPGCFGNKYLRDIILNFVIAGRDTTAGTLSWFLHVLCRDQRIQDKIAREVREATSTGDRQGXAGVREFTARLTEDAIGSMHYLHAALTETLRLYPAVPVDVKCCFSDDTLPDGHAVRRGDMVNYQPFAMGRMKFLWGDDAEESRPERWLDDDGVFVPESPYKFTAFQAGPRICLGKEFAYRQMKIFAAVLLYLFRFEMSEHNSTVGYRPMLTLKMDGPLYVCVSPRRSTGN

SEQ ID NO: 7178 - protein, 173 aa, Triticum aestivum
MAPAVMASSATTVAPFQGLKSTAGLPVSRRSSEPRPRHNGGRIRCMQVWPIEGIKKFETLSYLPPLSTEALLKQVDYLIRSKWVPCLEFSKVGFVFREHNSSPGYYDGRYWTMWKLPMFGCTDATQVLNEVEEVKKEYPDAYVRVNGFDNLRQVQCVSFIAFRPPGCEESGKA

SEQ ID NO: 7179 - protein, 112 aa, Bartonella sp. ma106up
LNEACLKMLQEIGSIERIPEFIARAKDKNDPFRLMGFGHRVYKNYDPRAKIMQKTCHEVLKELNIQDDPLLDIAIELEKIALSDEYFIEKKLYPNVDFYSGITLKALGFPTE

SEQ ID NO: 7180 - protein, 395 aa, Campylobacter jejuni subsp. jejuni NCTC 11168
MKMDYKEQSHIIPTYKRFDIVLEKGQGVYLFDDKAKKYLDFSSGIGVCALGYNHAKFNAKIKAQVDKLLHTSNLYYNENIAAAAKNLAKASALERVFFTNSGTESIEGAMKTARKYAFNKGVKGGQFIAFKHSFHGRTLGALSLTANEKYQKPFKPLISGVKFAKYNDISSVEKLVNEKTCAIILESVQGEGGINPANKDFYKALRKLCDEKDILLIADEIQCGMGRSGKFFAYEHAQILPDIMTSAKALGCGLSVGAFVINQKVASNSLEAGDHGSTYGGNPLVCAGVNAVFEIFKEEKILENVNKLTPYLEQSLDELINEFDFCKKRKGLGFMQGLSLDKSVKVAKVIQKCQENALLLISCGENDLRFLPPLILQKEHIDEMSEKLRKALKSF

SEQ ID NO: 7181 - protein, 91 aa, Brassica napus
MDTVAPRLSRSSTRYGPISSSAASFSGPVRKWRKAWVPLTGTGTGTAGSGGGSSRGDNKVVLFRWTPVNGCSGGGGGTDGGMELAAAGAST

SEQ ID NO: 7182 - protein, 168 aa, Glycine max
MAGVREQDQYMPIANVIRIMRRILPAHAKISDDAKETIQECVSEYISFITAEANERCQREQRKTVTAEDVLWAMEKLGFDNYAHPLSLYLHRYRESEGEPASVRRASSAMGINNNMVHPPYINSHGFGMFDFDPSSQGFYRDDHNAASGSGGFVAPFDPYANIKRDAL

SEQ ID NO: 7183 - protein, 112 aa, Bartonella sp. af170up
ANEACLKMLQEIGSVERIPEFIARAKDKNDPFRLMGFGHRVYKNYDPRAKIMQKTCHEVLKELNIQDDPLLDIAIELETIALNDEYFVEKKLYPNVDFYSGITLKALGFPTE

SEQ ID NO: 7184 - protein, 189 aa, Zea mays
MGVYTKIFLKFPERFWPVGEGKQFFMYASSRRGYYALWQSFEREYPGANVLLATVTDDESRRIERQSDDQTKAEVAEVLRDMFPAADVPGPDQIDIYVPRWWSDRFFKGSYSNWPVGVSRYEYDQLRAPVGKVYFTGEHTSERYNGYVHGAYLAGIDSANILINYIFKNEEYKVRGKYDVEDDLIAQAR

SEQ ID NO: 7185 - protein, 112 aa, Bartonella sp. sa192up
ANEACLKMLQEIGSVERIPEFIARAKDKNDPFRLMGFGHRVYKNYDPRAKIMQKTCHEVLKELNIQDDPLLDIAIELEKIALSDEYFVEKKLYPNVDFYSGITLKALGFPTE

SEQ ID NO: 7186 - protein, 498 aa, Nostoc punctiforme PCC 73102
MTTPLSCRNYINGQWLNAVGEATLESRNPADKTEIVATYPRSQVNDVDTAVASARKAYRSWRTVPAPARAEYIFRVGEILLQHKEELAQLISREMGKPLTEARGDVQEGIDCAFYSAGEGRRLFGQTTPSEMSNKFAMTVRMPIGVCALITPWNFPVAIPCWKAMPALVCGNTVILKPAEDTSACATKLIEIFQQAGLPPGVINLVHGVGEEAGKALVEHPNVDLVSFTGSSETGAFVGATCGRTHKRVCLEMGGKNAQIVMEDADLELALDGAVWGAFGTTGQRCTATSRLILHRDIKEKFTTMLYERTSKLRLGAGNDTDTDIGPIINEKQLQQVSKYLDIAREEGAKVLIGGEIASEGSLKNGYFFQPTILDRVTPDMRVAREEIFGPVVALIEVSSFEEAIAILNDSNYGLSSSVYTRDINRAFTAMRDIEAGITYINGPTIGAEVHLPFGGVKQTGNGHREAGTTALDVFTEWKSVYVDFSGSLQRAQIDNRS

SEQ ID NO: 7187 - protein, 381 aa, Xylella fastidiosa Ann-1
MPLLAEHGTTIIEAMYHQLFEDPQIEALFNQANQKNGTQIHALAGAILAYARNIDNPGVLASAIERISQKHVGYAIHPEHYPHVATALLGAIKQVLGDVATSEVLQAWGEAYWFIANLLKDREAVIREGIMTKNGGWIHWRRFVISKRIPESETITSFMLHPDDGGPVVPHQAGQYLTFRFDAAGMPGMKRNYSISCGPNSDHYRITVKREHGTGASAFLHDQAKVGTIIECTPPVGDFFLPSVIERPIVLLSGGVGLTPMVSMMEQIAEAYPDAQVWYVHGTQNRETHAMDAHIRALVSRHKHMKATTFYTQRSEADDAEAGFITIDWLRANTPFQKADFYLCGPRPFLRTFVRDLIGAGVPAAQVHYEFFGPMDEEMAA

SEQ ID NO: 7188 - protein, 390 aa, Onion yellows phytoplasma OY-M
MNIKEKALEIHEKNKGKVGIVSKVKVQNLDDLALAYTPGVAEPCLKIKENPSDVYRYTMKGNMVGVVTNGTAVLGLGNIGPKASLPVMEGKAILFKELAGIDSFPICIDSTDSQEIVNIVSKISTVFGAINLEDIKSPQCIEVEDALEAKLDIPVFHDDQHGTAIVVAAGILNSLKVVKKSIEDVQVVINGAGSAGMAIAKMLLLLKVNNIVLVDKTGALYKGVANLNEPQKKLVEVTNKYQEKGTLKEVLKGKDIFVGVSAPGIVTAEMVSTMAKDAIVFALANPVPEIMPDEAKKGGARIVATGRSDFPNQVNNCLAFPGVFRGALDAKATKITEEMKKAAIYALKNIIKEQDLNENNILPTSFNKEVVKQIALAVCKVAKETGVVRK

SEQ ID NO: 7189 - protein, 204 aa, Glycine max
  unsure (1)..(204): unsure at all Xaa locations
MAEEESPSVMPKVITFLSSLLERVAESNDHNQQHQKISVFHGLTRPNISIHSYLERIFKYANCSPSCFVVAYVYLDRFTQRQPSLPINTFXNVHRLLITSVMVAAKFMDDMYYNNAYYAKVGGITKXEMNFLELDVSCFGFGFXLNVTPGTFQAYCVNLQREMXLIQQPLNFADSTLNFGKSTKGXLCFNEDESSHQKQKQQQH

SEQ ID NO: 7190 - protein, 108 aa, Zea mays
VDYACTPEEVQQHFNSCGTVNRVTILTDKFGQPKGFAYVEFVEVEAVQEAIKLNESELHGRQLKVAPKRTNVPGMKQPRGRGFNPYHGHPYMTPYGYSPYGYGQVVTG

SEQ ID NO: 7191 - protein, 146 aa, Triticum aestivum
MDPMDIVGKSKEDVSLPKSTMTKIIKEMLPPDVRVARDTQDLLVECCVEFINLLSSESNDVCSRDDKKTIAPEHVMMFLGKSCTSGARAKQTTSSPPSMSLQNEGDADHGRRISLVVLFVKKIECATVVTVVKVIDWYLVWCVVQR

SEQ ID NO: 7192 - protein, 403 aa, Onion yellows phytoplasma OY-M
MFDFMINHLSSKSLMYQDFKKNHNNSQYKDFFLRWEKFWQQVGPNRPTKQDVDSIYKRKDKAPTHLIEFDDGTTEHLWNTFGTDQIDLNVKEPIVKEFIKTTLTNMVKQGASIIRLDAFAYACKKADTSFFVEPDIWQLLDEVRDVLKPLDVELLPEIHENHSISHKISEHGYFIYDFALPLVVLYTLYSKNPQRLVEWLKKSPMKKFTTLDTHDGIGVIDAYDILTDKEIKYTSEQLYKQGANVKKVYSSSLYNNLDIYQINFTYYSALGNDDDAYLLSRAFQIFAPGIPQVYYVCLFAGENDIKLLESSKEGRNTNRHYYSRQEIKEEVKRPVVANLFKLLAWRNKSNAFDLDGVMECSAYASKIKILRKDKLGNNVAVLDADLMNKKFVIVENDKQIFSN

SEQ ID NO: 7193 - protein, 387 aa, Chloroflexus aurantiacus
MQIEYTLARMGAERLWNLLHTEPYINALGALTGNQAMQQVKAGLKAIYLSGWQVAADANLAGQMYPDQSLYPANSGPQLVRNINNALRRADQIYHSEGRNDIYWFAPIVADAEAGFGGPLNVFEIMKAYIEAGAAGVHFEDQLASEKKCGHMGGKVLIPTQAAIRNLVAARLAADVMGVPTIIVARTDANAATLLTSDIDERDRPFCTGERTSEGFYRVRAGLDQAIARGLAYAPYADMIWCETSEPNLEEARRFAEAIHAQFPGKLLAYNCSPSFNWKKKLDDATIAAFQRELGAMGYKFQFVTLAGFHALNYSMFELARNYRDRGMAAYSELQQAEFAAEAYGYTATRHQREVGTGYFDEVAQVIAGGEISTTALTGSTEEEQFH

SEQ ID NO: 7194 - protein, 495 aa, Rhodospirillum rubrum
MPEGTTRIAALDIVREAGLLKDKAYIDGAWVGADDGGDFPVLDPATGREIGRVPNMGAAETRRAIDAAAAAWPAWRARTAKDRAAVLRRWYGLIMDNQEALAVLMTAEQGKPLGEARGEIAYGASFVEWFAEEGKRLYGEVVPAHGTDKRILTLREPIGVVAAITPWNFPSAMITRKVAPALAAGCPVVLKPAEDTPLSALALVELAERAGLPKGLINVVTTHEAKAVGGEMTANPIVRKLSFTGSTEVGKILMAQCAGTVKKVSLELGGNAPFIVFDDADLEAAVAGAIASKYRNAGQTCVCANRLYVQEGIYEAFTEKLKAKVEAMRVGPALEGDVQQGPLINKKGLDKVDGLVRDALDKGATAVLGGKVHALGGTFYEPTILTGVTAAMRMATEEIFGPVAPLYRFSTEAEAIALANATRFGLAAYFYTRDIGRVWRVAEGLEYGIVGINEGIISTESAPFGGVKESGIGREGSRHGIDDFVEIKYLCMGGI

SEQ ID NO: 7195 - protein, 222 aa, Phanerochaete chrysosporium
TLTFVIYFLTQHPDVLQRLRQEILDVVGPSNLPTYDDIKQMKYLRAVLNETQRLYPPVPWNMRYAVEDSIVPNSEPEGKPWFIPAGASVSYSVHCMHRRKDYWGPDAEEFDPDRFLDERLHKYLTPNPFIFLPFNAGPRICLGQQFAYNEMSFFLVKLLQTFEDISFERDAFEPNALPPAEWAKFPGRKGKEKFWPRAHLTLYSEGGMWVKMREAQAMGQVA

SEQ ID NO: 7196 - protein, 123 aa, Glycine max
  unsure (1)..(123): unsure at all Xaa locations
MEAVGSRLSRAXSRYGAPTVFSGPVRKWKKKWVHVTPSSLPNNNSHSHTNNFTTTTTNDSSRLLLRRWTPTTADDSAGAVSDDPPRRKFRYTPIAVLEEQKKMNVVKAEHEPTIEADQLAFRQ

SEQ ID NO: 7197 - protein, 107 aa, Triticum aestivum
  unsure (1)..(107): unsure at all Xaa locations
ETVTRPSHCDAISQQIRTFIQMRTNLKVVDNSGAKRVMCIXGXGGKKGARLGDMIIGFCEGSATXGKVKKGDVGYGVVVRXAMKKDVXDGSEXHFDDNAISSXNNKS

SEQ ID NO: 7198 - protein, 414 aa, Azotobacter vinelandii
MTIDFKKTALDYHEFPTPGKIGIELSKPAETAAHLSLAYSPGVAEPVREIARDPENAYRFTAKGNLVAVISNGSAILGLGNLGPLASKPVMEGKALLFKRFAGINAVDIEVTAESPAAFIDTVVRIADTFGGINLEDIKAPDCFEIEQLLIEQCSIPVFHDDQHGTAIVTAAGMLNALEIQGKRLEEARIVCLGAGAAATACMRLLISLGARKDNLYMIDSRGVIHSGRDGLNRYKQEFVNDGGARTLLEAMQGADVFLGLSGANLLPPEALLAMAPRPIVFACSNPDPEIDPELAKATRQDLILATGRSDYPNQVNNVLGFPFIFRGALDVRARRVDEAMKIAAVEALRQLAKEPAPAEVLKAFAIDRLQFGPDYILPKPMDARLLGAVAGAVAKAAVESGVARLPYPAHYPL

SEQ ID NO: 7199 - protein, 328 aa, Rubrobacter xylanophilus DSM 9941
MIRAVTVKCVEDYGYEVVGIKRGWRGLLAPQEDSVEKLTVDGVRYILDEGGTVLLSSRTNPYKKEGDAEKVVKNMQEFGIDALVAIGGDDTLGVASRLHKDFGVQVVGCPKTIDNDLSGTDICFGYDTAVSIATEALDRVRTTAKSHERILVVEIMGRHAGWITYGAGLAGAANVTLIPEVEPDIDAIADLFKKRAERGERWGVVAVSEGVTIGEEYITQSAERDEFGHVRLGGIGETLAKELKERTGIDTRHVVLGHLQRGGTPTAYDRILSTRYGLRAAEAVKNGEWGKMVALRGSDIVTVPLEEATGETRTVPEDLYGVLKTFFG

SEQ ID NO: 7200 - protein, 333 aa, Pantoea agglomerans
NGIAGSYAEYVPVVHIVGAPRLTSQRKGELLHHTLGDGEFCHFMRMSAPVSVAQASLTPENALAEIDRVIEEVMYSSRPGYLLLPSDVPALPVSTRAHALPARQPPFSPSSLEAFTAAAQTQLRGANRVSLLADFLADRFKVKKALEQWMEEVPLGTSTLLMGKGLFNEQQAHFAGTYSGAASAPSTKEAIEGADVVITVGVKFTDTITAGFYQQRPSGNASTSALFAARAIRSSITGRSKNGQRDAPPPPLNLAFRPGRLILLNTTHCRWSRDNSLGQYAFWQQIQDSLQPGDVLVAEQGTACFAAAALNLPQDLQFVVQPLWGSIGYTLAA

SEQ ID NO: 7201 - protein, 332 aa, Enterobacter cloacae
NGVAGSYAEYVPLLHIVGAPCSGVQQRGELLHHTLGDGDFHHFYRMSEPVTAARAILTAQNACYEIDRVLEVMLMQSRPGYLMLPADVAKKPATPPVNALTTPPFPVNEACLNAFRQHAQAMLSVGSSVALLADFLAAFGFIQMLQCWMTDQLPTHTTVILGKGIVKRKHGGFSYPYHGAGGQRGPVPAIEGADTVICIGTRFTDTVTAGFTQQFARERTIEIQPFAARVGDVWFSGIPMREAINALIPLVRARAHAAANHRPPQAARAPVHQGTLNQETLWQTVQQFIRPDDILLADQGTAAFGAASLRLPAGAELLVQPLWGSIGYTLAA

SEQ ID NO: 7202 - protein, 480 aa, Pseudomonas fluorescens PfO-1
MQLKDTQLFRQQAFIDGAWVDADNGQTIKVNNPATGEILGTVPKMGAAETRRAIEAADKALPAWRALTAKERAGKLRRWFELMIENQDDLARLMTLEQGKPLAEAKGEIVYAASFIEWFAEEAKRIYGDVIPGHQPDKRLIVIKQPIGVTAAITPWNFPAAMITRKAGPALAAGCTMVLKPASQTPFSAFALAELAQRAGIPKGVFSVVSGSAGDIGSELTSNPIVRKLSFTGSTEIGRQLMSECAKDIKKVSLELGGNAPFIVFDDADLDKAVEGAIISKYRNNGQTCVCANRLYIQDSVYDAFAEKLKVAVAKLKIGNGLEEGTTTGPLIDEKAVAKVQEHIADAVSKGATVLAGGKPMEGNFFEPTILTNVPKDAAVAKEETFGPLAPLFRFKDEADVIAMSNDTEFGLASYFYARDLGRVFRVAEALEYGMVGVNTGLISNEVAPFGGIKASGLGREGSKYGIEDYLEIKYLCLGI

SEQ ID NO: 7203 - protein, 448 aa, Methanococcus maripaludis S2
MQLEVVAIGGYEEVGRNMTAVNIDGEIIIFDMGVRLDRIMIHEDTDISKMHSLNLIEMGVIPDDTVMKNIEGEVKAIVLTHGHLDHIGAITKLAHRYNAPIIGTPYTLELVKREILSEKKFDVRNPLITLENGNKLDLTANITLEFVKITHSIPDAAMAVLHTPYGAVVYGNDFKFDNFPVVGEKPDYKALKRIGKQGVIAMVSESTRVDFEGKTASEGVAANLLKNDLLGTDNEDNAVVVTTFSSHIARIKSITDIASKMGRIPVLVGRSMSKYCGIAQDIGLVKFPKETKICWDPSSIDKTFHQIMKDGKENYLMVVTGHQGEEGAVLSRMATNKTPFRFEKYDQVVFSADVIPNPMNAAQRYLLEARLNLAGVRLFKGAHVSGHAAKEDHRDILRWLQPEHLIPAHGDFNLTSAYAKLAEEEGFRLGEDVHLLRNGQSLKFERVI

SEQ ID NO: 7204 - protein, 382 aa, Yersinia pestis KIM
MCDKKPLKESSMSHENLKGAQMAEGIPETMRAVVAYGPRDYRFERVPVPTIDAKEILVKVEGCGICAGDTKAFEGAPSFWGDDKQPAYIKAPMIPGHEFIGHVVGLGADVEGFELGDRVTSEQIVPCWGCRFCNHGQYWMCEKHDLYGFQSNVNGAMAEYLKFTKEAINYHVPDHLPLEKAILIEPYACAFHAVQRAKIKLGDVVVLAGSGTLGLGMIGAIKKSGAAKLIVLDLSDDRLALAKKFGADLVLNPSRDDVNTLIKEMTGGYGCDIYIDATGAQKAVEQGLTLLRKLGTFVEFSVFKDPVTVDWSIISDRKELDVLGSHLGPYCFPLVIEGISNGDLPTEGVVTHILPLEKYAEGIELVKRGVDSLKVVLNPNLT

SEQ ID NO: 7205 - protein, 211 aa, Leuconostoc mesenteroides subsp. mesenteroides ATCC 8293
MTPLKAEILPEIHEHYSIPKKINDHGYFTYDFALPMTTLYTLYSGKTNQLAKWLKMSPMKQFTTLDTHDGIGVVDARDVLTDEEIDYASEELYKVGANVKKTYSSASYNNLDIYQINSTYYSALGNDDAAYLLSRIFQVFAPGIPQIYYVGLLAGENDIELLESSKEGRNINRHYYSVDEVKEEVKRPVVAKLLKLLSWRNNFAAFDLDGS

SEQ ID NO: 7206 - protein, 646 aa, Zea mays
MTRGLGAAPVSSCLALGAAAVVLLVAAALPSPASGVDVTAVLSVFPNFADFARLLASTPVASELSGRSSLTLLAVPNANLPQSPSAFVASAGADIADVLRYHVLLEYLSPSDLARLSPSGKLVTTLFQTTGRAPSDFGAVNLTVGGNSTVVVRSPAPSLGSNATVLGAVTAVPYNLSVLAVGGLIIPSGFDLAASESRPPPPVNITRVLTDARGFNVAASMLQASGVASEFEADEHGAGITVFVPTDDAFAGLPATDRLQSLPAERKAVVLRFHVLHSYYPLGSLEGPRRDLAVDPAAARAALVTCGGLCPGLNTVLRELVVGLQELYGVRHRFVALDRGSLRHPQWQEVAEVVSSRDSYSKAPKSDVQCKNRIDTLKKKYKVEKAKHDSDWRYFDRLDDLLAPVLLKPNSSSSSAAAATAAAAARSAGPMVPPRINFPQRTRTPLHSSAGAKWRMPSPLPQPSASSDSSDGFPPSAVANGKRQRVEEPAAAAADNGAESSVSRAQGLRELAQAIRRLGEVYERVESAKRDQELRMERERLDSARQLEEQRVQFSTSMPRSSRITRTAQAPPGAMTTAATRTRKLRRMRKTKRKRASDCSPLQQWNGNSTQKSGEREGKTRSKKAWRRETHPGKKRREGKTRKEIC

SEQ ID NO: 7207 - protein, 273 aa, Synechococcus elongatus PCC 6301
MSEAGTPAEALTYEQAIANLRQTADTGDRYYAAWWLGRFRMKQPEAIALLIEALDDSLDRAPDGGYPLRRNAARALGKLESPEAIAPLIACLQCEDYYVREAATQSLGELQATVAVPALLKLLEGGPEAIAAIPGKPHLTQPADAVMETLGQLRATVAVPVVQAFLEHPIDKIRLAAARSLYQLTGDDHYAERVVQGLSDPKLQRRRSALMDLGAIGYLPAAPQIAQTLAENSLKLISLKGLLDTHLRQQTPEAIAELDESAIALMDLMDGLL

SEQ ID NO: 7208 - protein, 464 aa, Listeria monocytogenes str. 1/2a F6854
MLYSKENKESYLEPVFGSSAEDRDIPKYTLGKEPLEPRIAYRLVKDELLDEGSARQNLATFCQTYMEDEATKLMSETLEKNAIDKSEYPRTAELENRCVNIIADLWHAPKDQKFMGTSTIGSSEACMLGGMAMKFAWRKRAEKLGLDIYAKKPNLVISSGYQVCWEKFCVYWDIDMRVVPMDKEHMQLNTDQVLDYVDEYTIGVVGILGITYTGRYDDIYALNEKLEEYNSKTDYKVYIHVDAASGGFFTPFVEPDIIWDFRLKNVISINTSGHKYGLVYPGIGWVLWKDESYLPEELIFKVSYLGGEMPTMQINFSRSASHIIGQYYNFLRYGFEGYRTIHQKTSDVAQYLAHAVEQTGYFDIFNDGSHLPIVCYKLKNDANVKWTLYDLADRLQMRGWQVPAYPLPKSLENIIIQRYVCRADLGFNMAEEFIQDFQASIQELNNAHILFHNTQQSGVHGFTH

SEQ ID NO: 7209 - protein, 507 aa, Triticum aestivum
  unsure (1)..(507): unsure at all Xaa locations
MDSPLLVAALSSLLLLLALYLLGGKRRRRSYPPVAGAMLQQLLHWGRLPEYMTELSRRYGTFRMLTLTCNWVYTVDPANVEHILRTNFANYGKGPMTHGVLGDLLGDGIFNVDGAKWRHQRKVASFEFTTRALREYSSGVFRDMAAELAGIVAAAAAXGERLDMENLFMRSTLDSIFTVGFGGHLGALSQSTRXGAAFARAFDDASEQVLYRFFDPLWKAKRLLNVLSEAAMKRSVRTINDFVYAVIDKKIEQMGRDEHEFAKKQDILSRFLLEREKDPGCFDNKYLRDIILNFVIAGRDTTAGTLSWFLYVLCRDQRIQDKIAREVREATTGDRQNVGGVQEFTACLTEDAISSMHYLHAALTETLRLYPAVPTDVKCCFSDDTLPDGHTVRRGDMVNYLPYAMGRMKFLWGDDAEEFRPDRWLDDEGVFVPESPYKFTAFQAGPRICLGKEFAYRQMKIFAATLLYLFRFEMWERDSTVGYRPMLTLKMDGPLCVRASPRRSTGN

SEQ ID NO: 7210 - protein, 510 aa, Picrophilus torridus DSM 9790
MKMDMNVFHDLGLEEVNSGVYDGEWARPSGKMIDVKSPIDGSDIARVSMATESDYERIISRAVEEFKKWRMIPAPKRGIIIKEIGDELRKEKKNLGKIVTMEVGKTASEGEGEIQEMIDVSDLALGLSRQLYGLTIASERPYHRMYEQWIPLGPVAVISSFNFPASVWSWNAFIAAVDGDVVIWKPSSKAALTAVAVMRVIESVLKRNNAPNIFFLMVSPGHDGGEWITNDKRIPLVSFTGSVAVGKKISENVAKRLGKTILELGGNNGAIVSDKSDINIALRGVVFGALATAGQRCTTTRRVIVQENIYDDFLERLKNAYSTIKVGDPRDKGVLVGPLIDEDAVKNYERAIETAIKQGGKLVFGGRRIKISGCENGHYVMPAIIEAKPDMAIVSEETFAPILYVMKYRNIEEAIEIHNSVPQGLSSSIFTNDLREEEAFLSAYGSDCGLANVNTSTAGAEIGGAFGGEKDTGGGRESGSDAWKYYMRRQTVTKNWGKTLPLAQDVVFDF

SEQ ID NO: 7211 - protein, 160 aa, Brassica napus
  unsure (1)..(160): unsure at all Xaa locations
MTKVCPETEERTLQEPVLTVSTDVSFASNHFPTYKLGPDNEIVDEPKEDEKGPSVKETVEEESQLLSDQHKRLSVRDLASKFDKKLAAAVSLADEAKLKEVASLEGHVMLKKLRDAXEYMRGRTDGQNREDVEKAIXMVEALAXEXTQNEGELIQEKFEV

SEQ ID NO: 7212 - protein, 78 aa, Brassica napus
  unsure (1)..(78): unsure at all Xaa locations
AILMESKMILSXDELLTXMIIDKTFADADADKAGKISKEEWKVYVLKHPTLLKNMTLPYLKDVTTAFPSFIFNTEVED

SEQ ID NO: 7213 - protein, 294 aa, Glycine max
MSEALEEVVPSMKGGCEEEGLNLKATELRLGLPGCESPEREGVFKSVVVSGAKRGFSDAIDGNWNGGGSEKDAAALFSPTSRGAVSVSVSAAKSLTLTATDCTNQPTALGASVLKETVPRSPKPLHENKPQISAPAAKAQVVGWPPIRSFRKNSMASQPQKNDAAADAEAKSGCLYVKVSMEGAPYLRKVDLNSFTTYKDLSLALEKMFSCFTLSQCGSYGVSSRENLSESRLMDLLHGSEYVLTYEDKDGDWMLVGDVPWEMFTESCKRLRIMKSSEAIGLAPRAMEKCKSRY

SEQ ID NO: 7214 - protein, 415 aa, Tradescantia virginiana
TTPISIEDVRREVKILKALSGHKHLVKFYDACEESLNVYLIMELCEGGELLDRILSRGGKYTEEDAKAIVMQILNVVAYCHLQGVVHRDLKPENFLFINRDENAPMKLIDFGLSDFTRPDERLNDIVGSAYYVAPEVLHRSYSMEADIWSIGVITYILLCGSRPFWARTESGIFRSVLRADPNFDDSPWPTASPEAKDFVKRLLNKDYRKRMTAAQALSHPWLRDKEPQIPLDILIYKQTKLYLRATPLKRAALKALSKALTEDELVYLRLQFKLLEPNNDGRVSLENFHTALAQNATEAMKESRVLDILNSLESLAYRRMDFEEFCAAAISCYQLEALEHWEQIASTAFEYFEQDGNRVVSVEELAQDLNLPQNAYAILKDWIRQSDKKLSFLGYTRYTRYLHGVTPRPNTRQH

SEQ ID NO: 7215 - protein, 405 aa, Thermoplasma acidophilum
MAYIQVKEDGTLQVPDRVTIGYIEGDGIGPDISKTTINVLNAALDIAYGGKRSIEWKKILAGDEAYDKTGDRLPQSSLDELKKCVVSLKGPLTTPIGEGFRSLNVTLRQYLDLYANIRPVRYFPGVPSPVVHPEYMNMVVFRENTEDLYAGIEWRYDSDGAKKVREFLASTFNINLTSDTGIGIKPISKFKSTRLVRKAIQYAIANKRKSVTLVHKGNIMKYTEGAFKEWGYEVAKTEFGNYTVTETEYLQDPEKYSNKIVIKDRITDNMFQQVLTRTQEYDVIATPNLNGDYLSDALAAQVGGIGLAPGANIGDHYAVFEAVHGTAPKYAGMDVANPTSLILSGEMMLQHIGWNEAANILDEAIMQTYRDQKLTQDIARLLNVKALKCSEFGEEIINRMKKPVH

SEQ ID NO: 7216 - protein, 166 aa, Bordetella parapertussis 12822
MNTMYDFSAPTITGAERALADFRGQVALVVNVASRCGFTPQYSGLEELYRSYRNEGFVVLGFPCNQFGRQEPGDEAAIAQFCETQYAISFPLFAKIDVNGAHAHPLYRWLKAHKPGLLGTRAIKWNFTKFLVGRDGLPLRRYAPAHTPESLRHDIARACAAPGPTP

SEQ ID NO: 7217 - protein, 328 aa, Capsicum annuum
MASQSFVPPIFENPFLNIEELAGDTIVRKPEPLTQANSDPNGTSLVVSKDVDLDINKKTWLRIYVPQRIITNHNDDEKLPVIFYYHGGGFVFFHANSFAWDLFCQGLAGNLGAMVISLEFRLAPENRLPAAYDDAMDGLYWIKSTQDEWVRKYSDLSNVYLFGSSCGGNIAYHAGLRVAAGAYKELEPVKIKGLILHQPYFSGKNRTESEEKLKDDQLLPLHAIDKMFDLSLPKGTLDHDHEYSNPFLNGGSKHLDDVIAQGWKILVTGVSGDPLVDNARNFANFMEEKGIKTFKLFGDGYHAIEGFEPSKAAALIGATKDFICATTN

SEQ ID NO: 7218 - protein, 365 aa, Glycine max
MGSTGETQITPTHVSDEEANLFAMQLASASVLPMVLKSALELDLLEIIAKAGPGVHLSPTDISSQLPTHNPDAPVMLDRILRLLACYNILSFSLRTLPDGKVERLYGLAPVAKYLVRNEDGVSIAALNLMNQDKILMESWYYLKDAVLEGGIPFNKAYGMTAFEYHGTDPRFNKVFNKGMADHSTITMKKILETYTGFEGLKSLVDVGGGTGAVVNMIVSKYPTIKGINFDLPHVIEDAPSYPGVEHVGGDMFASVPKADAIFMKWICHDWSDEHCLKFLKNCYEALPDNGKVIVAECILPVAPDSSLATKGVVHIDVIMLAHNPGGKERTEKEFEALAKGSGFQGFRVLCCAFNTYVMEFLKKV

SEQ ID NO: 7219 - protein, 476 aa, Photorhabdus luminescens subsp. laumondii TTO1
MPVPTLRHFINSQYVESKSSEYFDLISPVTGETYARSPNATIADVNEAYASAKEAFKIWGRSTPSARQQALLALADAVEKNSERLIEAQSRNTGQLKHLIASEEVAASVDHIRFFAGAARFLEGKATAEYLPDMTTSIRREPLGVVGQVTPWNYPLMMAVWKIAPALAAGNTVVLKPSDTTPESTLLLAELAAPFFPTGAFNVVLGNASAGALVVSHKTPAMVSITGSVRAGLQVASSAAANLTRAHLELGGKAPVVVFADADMDKAVETIATAGYFNAGQDCTAASRVLVHESVYDTFVAKLVAAAKATRFGYPEDEEALYGPLNNARQLEQVKGFIARLPAHACIETGGRQAERSGYYFEPTVITGLEQHDEAIQTEIFGPVITVQKFRDEQDAIEKANDVKYGLASSVWTRDHGRALRLSRELDFGTVWINTHIPLTAEAPHGGFKSSGYGKDLSAYGFDEYTRIKHVMSSND

SEQ ID NO: 7220 - protein, 238 aa, Wolinella succinogenes
MSLYDRNYLNSSAQDQGAFGGARESLSESALVGFVKQTYQLFAGSLLAATVGAYVGLGMAPVIASWYWGLVILEFALLFGMFFLKDKPGINLVVLFAFTFMTGLTLTPLLSRIFNMPGGASIVANAFLLTTAIFGIMSIFALKTKSDLASMGKMLFIALIVVVVASIINLFLGSPLLQVIIAGAGAILFSLYIAYDTQNIVRGVYDSPVMAAISLYLSFLNLFISLLQLLGILGNSDE

SEQ ID NO: 7221 - protein, 122 aa, Staphylococcus epidermidis ATCC 12228
MANQEQIIEAIKEMSVLELNDLVKAIEEEFGVTAAAPVAAAGAAGGGDAAAEKTEFDVELTSAGSSKIKVVKAVKEATGLGLKDAKELVDGAPKVIKEAMPKEDAEKLKEQLEEVGASVELK

SEQ ID NO: 7222 - protein, 280 aa, SYNECHOCOCCUS SP. WH 8102
MGGWIDEEHRGVRYGLAGDVLVEETSPFQRISVIRSERYGKGLLLDGCWMTAEQQERHYHEALVHPALCSAEAIERVLVIGGGDGGTARECLRYPEVIHLDLVEIDGRVVELSQEHLPGIGGAVWSDSRCQLTVGDGIAWAANAPDQSYDVVLVDGSDPAGPAEGLFNRAFFEHCRRILKPGGVFATQSESPEAFREVHVAMVRLLREVFGHADPLYGWVPMYPSGWWSWTFAAVDGPRYRTVQPARAALVAEGCEIWSPRWQQGALDAVPAFIARELAP

SEQ ID NO: 7223 - protein, 71 aa, Glycine max
MAETRRSTGTVKWFNAHKGFGFITPQDGTDDLFVHFTSIRSDGYRSLSDGQSVEFLLDDSDDRRAMGVEGS

SEQ ID NO: 7224 - protein, 339 aa, Streptomyces tenebrarius
MKALSFEAPGEAVFGTREVPVPAPGEALIHLGYNSICGSDLSLYRGVWHGFSYPVVPGHEWSGTVVEVNGPGAELVGRDVVGDLTCACGSCAACGRGTPVLCENLQELGFTRDGACAEYMTIPTGNLHVLPEGLSLRAACQVEPVAVALHAVSTVGVEPGERVAVLGAGGIGLMLMQVARQRGGVITTVGEPVAERRAVAAQLGARTVTTGRPGELAELVAKHPDLTPDVVLEASGYPVAVQEAIEVVRPGGRIGLVGYRVEEVGPMATHHVAVKALTIRGSLGPGGRFPEAIDLLARGEIEVEPLLSHEFALDDHARALDLALRRAEGNVRSFFNLRA

SEQ ID NO: 7225 - protein, 112 aa, Bartonella sp. Rt222sm
NEACLKMLQEINSVKRIPKFIARAKDKNDPFRLMGFGHRVYKNYDPRAKIMQQTCHEVLKELNIQDDPLLDIAIELEKIALNDEYFVEKKLYPNVDFYSGITLKALGFPTEM

SEQ ID NO: 7226 - protein, 511 aa, Erwinia carotovora subsp. atroseptica SCRI1043
MAHDNLEGRSAFGEVGSLDLKKRYDNFIGGTWVPPDAGQYFVNLTPVTGQPMCEVASSSTRDIDHALDAAHKAKAEWGGLSVQERALVLNRIADRMEQNLERLAQVETWDNGKPIRETSGADVPLAIDHFRYFAACIRAQEGAISEIDGDTVAYHFHEPLGVVAQIIPWNFPLLMACWKMAPALAAGNCIVLKPAKLTPMSVLILMELIQDLLPAGVINVVNGSGSEIGEYLATSKRVAKVAFTGSTEVGQQIMSYAAQNVTPVTLELGGKSPNIFFADVMDKEDSFFDKALEGFTLFAFNQGEVCTCPSRALVQESIYDRFMERAIKRVEAIRIGNPLDSKTMMGAQVSAGQLETILNYIDIGKKEGARVLTGGQRKAMPGGLAEGYYLEPTILFGKNSMRVFQEEIFGPVLAVTTFKTMEDALEIANDTEYGLGAGVWSRNGNVAYRMGRGIQAGRVWTNCYHAYPAHAAFGGYKQSGIGRENHKMMLDHYQQTKCLLVSYSDKPMGLF

SEQ ID NO: 7227 - protein, 494 aa, Bacillus cereus ATCC 10987
MLTKNIELKPKVKAFLNEEIKMFINGEFVPSISGKTFETYNPATEDVLAVVCEAQEEDINVAVKAARSAFESGPWAEMTTAERAHLIYKLADLIEEHGEELAQLEALDNGKPYQVALDDDIAATVENYRYYAGWATKIIGQTIPISKDYLNYTRHEPVGVVGQIIPWNFPLVMSSWKMGAALATGCTIVLKPAEQTPLSLLYTAKLFKEAGFPKGVVNFVPGFGPEAGAAIVNHHDIDKVAFTGSTVTGKYIMRQSAETIKHVTLELGGKSPNIILEDADLEEAINGAFQGIMYNHGQNCSAGSRVFVHRKHYETVVNELVKMANNVKLGAGMEKETEMGPLVSKKQQERVLHYIEQGKAEGATVAAGGERAFEKGYFVQPTVFTNVTDDMTIVKEEIFGPVVVVLPFDSTEEVIERANRSSYGLAAGVWTQNIKTGHQVANKLKAGTVWINDYNLENAAAPFGGFKQSGIGRELGSYALDNYTEVKSVWVNIK

SEQ ID NO: 7228 - protein, 304 aa, Glycine max
MTLNYNIALAFSAVLTLLLFPLLTVGELVEEQPLVLKYHNGQLLKGRITVNLIWYGTFTPIQRSIIVDFINSLSSAPNAPLPSTATWWKTTEKYKVGGGSPALVVGMQFLHPAYTLGKNLKGRDLLALASKFNEINSITVVLTAKDVAVEGFCMSRCGTHGSTRNVKSNARTAYIWVGNSETQCPGQCAWPFHQPIYGPQTPPLVSPNGDAGVDGMVINLATLLAGTVTNPFNNGYFQGPPTAPLEAVSACTGVFGSGSYPGYPGRVLVDKATGASYNAHGANGRRYLVPAMWDPQTSTCKTLV

SEQ ID NO: 7229 - protein, 514 aa, Zea mays
RCPWEDHIFEDQSERGSNALLARAWSPGWQSADKALTAFLNGPLVDYSANHKKADSASTSLLSPYLHFGELSVRKVFHLVRMKQLMWSNDGDRAGEESCTLFLRAIGLREYSRYLTFNHPCSLEKPLLSHLRFFPWVVDEVHFKVWRQGRTGYPLVDAGMRELWATGWVHDRIRVVVSSFFVKVLQLPWRWGMKYFWDTLLDADLESDALGWQYISGSLPDGRELDRIDNPQFEGYKFDPHGEYVRRWLPELARLPTEWIHHPWDAPESVLQAAGVELGSNYPRPIVELDAANSRLQGALSEMWELEAASRAAIENGMEEGLGDSTDEPPIDFPQELRMEVDRQPAQPAIIHTPVVAGWRREDQRVPSMTSSLIRAETELTADFGNTSEDSRPEVPSNIHLQARPEREETVDGGTGNAVRVHGNHHQQNLQNNMHRVLGIAPSISEASSSWTGRDGGVVPVWSPPAASGHSDPYAADEADISSRGYLDRHPQSHTMMNWSQLSQSLTTGWEVDN

SEQ ID NO: 7230 - protein, 339 aa, Schizosaccharomyces pombe
MAELEFTDEKFTKVDPELKEILKKHPAGTENITNIWQMRAMDEECRKQLAETILPLPDDVSVTDILIPTRDGTEIDGRVFTPVSVPADYRSLMVFYHSSGWCMRGVRDDDSLFKILTPKFGCVCVSVDYRLAPESKFPVAHNDAIDSFKWVASNIEKLGANPKRGFFLGGASAGGNFVSVLSHIARDEKIKPELTGLWHMVPTLIHPADLDEETMAQFRSYKETIHAPVITPKIMDIFFENYQPTPKSPLVNPLYYPTGHKDLPPSFFQCCGWDPLRDEGIAYEKALKAAGNETRLIVYEGVPHCFWVYYPMLSLRKKYFEDAIDGFTWLLSHVKKEDD

SEQ ID NO: 7231 - protein, 352 aa, Leptosphaeria maculans
MPPTGSGSSRKISFNVSEQYDIQDVVGEGAYGVVCSALHKPSGQKVAIKKITPFDHSMFCLRTLREMKLLRYFNHENIISILDIQKPRNYETFTEVYLIQELMETDMHRVIRTQELSDDHCQYFIYQTLRALKAMHSANVLHRDLKPSNLLLNANCDLKVCDFGLARSAASTEDNSGFMTEYVATRWYRAPEIMLTFKEYTKAIDVWSVGCILAEMLSGKPLFPGKDYHHQLTLILDVLGTPTMEDYYGIKSRRAREYIRSLPFKKKIPWKAMFPKTNDLALDLLERLLAFNPVKRITVEEALKHPYLEPYHDPDDEPTADPIPEEFFDFDKNKDNLTKEQLKLLIYQEIMR

SEQ ID NO: 7232 - protein, 309 aa, Zea mays
SVRPASAQRPPSVRRCAGAARRSPSEPTTNPMPPHRAGGAAGGGDTSAFFAATLVLWAVSVGFEIGVRGRRELAPVAAGFAFFQAANTAVRGSVSRDPLFVNTAVSLLHSSLTSVSVIFVLANQWRNKGLENMFEHEELFGGSWIGAYSALCFSCGYFAYDQLDMLRYRLYSGWLPGILMHHLILLICFTLALYRNVTINYLILSLVCELHSIFLHVRKVRRMGGFRDFDRTMVKLEWLLNWTTFVAARVICHILITYKLVADAHKFGKGIELPLALLGMAGMNLLNIFLGLDLLKAFTRERNQQSHQD

SEQ ID NO: 7233 - protein, 481 aa, Rhodobacter sphaeroides 2.4.1
MTDFRREKILVGGDWIQADAGGRIEVTNPATGAVIGTVPDAGAAETARAVAAAEAAFGPWRALTAAERATHLRRLAQAILDHREALAELLTEEQGKPLAEARGEVGMSAAYIQWFAEEARRVYGEVIPSPWPDRRLLVTRQPVGVVAAITPWNFPSSMLARKIGPALAAGCTVVAKPASQTPFSGLAWGVLGEMAGLPAGVLNIVTGSARAIGGELTANPSVRKITFTGSTPVGKVLLAQAAGTVKKMSMELGGNAPFLVFDDADLDRAVEGAIAAKFRNAGQTCVCTNRFYAQAGIHDEFVKRLAAATAALKVGPGAQDGSEIGPLIDAAAVAKTEEMVADATAKGGRIVTGGRRHTAGAGFYEPTVIADATDAMTFAREEIFGPVAPVFRFETEEEAIRRANATEYGLACYFYTSDLGRAFRVSEALDYGIVGVNEGLVTTEVAPFGGVKESGFGSEGSHHGMQDYLTLKYTAMGGLGR

SEQ ID NO: 7234 - protein, 337 aa, Rhodobacter sphaeroides 2.4.1
MKAAIFDGSPTLRLTDLPIQEPGPDEVLIRIDSATICGTDQHILEGKFWAKPPVVLGHEFAGYVERVGERVQNCRPGDLVSVEPHVYCGCCKPCRLGKPHLCLDRLAWGINLNGGFEQYATVRMDTVYQVPEGIGPEEAALGEITGCCMHGIDRVGVELGDLVVILGGGAAGLILARLAELRGAARIVISEPNAARREQIRAFGYPDVVDPLNEDLAARIGALTDGLGADVVIEAAGRAETAAQAVELVCHGGRVLFFGVAAPGTMAAIEPNRIFAREITVVGSIRNPYTHHRVMEILPRLRLKDIVTHRFPLENIAEAFDAAHRGEGLKICIKPNG

SEQ ID NO: 7235 - protein, 284 aa, Bacillus halodurans C-125
MTIQWFPGHMAKARREVTEKLKLIDVVIELLDARVPLSSRNPMMDEIVAHKPRLVLLNKDDLADPSKTKEWTRFFEEGGATVLPINAQTGQGVSRISPACQTLAQALIEKQRAKGMKPRAIRAMILGIPNVGKSTLINRLASKRIAKVGDRPGITKQQQWIKVGKELELLDTPGILWPKFDDQATGFRLAATGAIKDELLDFQDVALFVLRYMREMYPDRLMDRYKLNELPEDGVTLFDAIGKKRGHLLSGGYIDYDKTAEMILRELRAGTLGRITLEVPGKTV

SEQ ID NO: 7236 - protein, 307 aa, Sinorhizobium meliloti
MDSKTTKPMPTEAGIRAFHERCEAFYPADAVNASVEQQRQWYDALCAEFDAPSPEGLTRRDERVAGRIPVRYYRPAEVASGTRVFYIHGGGFVVGSLESHDAICAELAHGAQVELVSVDYRLAPEHLWPAAFEDCCDVLEALLADGRPLVVAGDSAGGNLSAGIVLKAKAEGLAGIVGQVLIYPGLGGDLTRGSYIEMAQAPLLSTADVDYYREVLKAPADEPFAHPLRAADLSGLPPAYVSGAYFDPLRDDARAYAARLAQAGVDVTYREEPQMVHSWLRARRMSPGAREGFVRLVQAVARLAGTA

SEQ ID NO: 7237 - protein, 469 aa, Vibrio cholerae O1 biovar eltor str. N16961
MRLVWFRRDLRSFDNTALTAALNSGDPVAAMYIATPEQWHQHHLAPIQADLIWRRLAELQQELAALNVPLFYQQVADFQAAAVAVSQLAKTLNATQVLANRDYELDEQQRDQLAQQLLSEQGIIWSAFDDKCVLPPGSVRTKQGEFFKVFTPFKRAWLTLFQPPVIGKNRPVALWNVPSALAELVWHPEQAFDYPRIDSTPWAADFETVRAQLRDFCRERVQDYHQARDFPAREGTSSLSPYLAIGVLSARQCVARLYHESSMGELSEGAQVWLSELIWREFYQHLVAIEPNLSKSRDFVEWGARLEWWNDNEKFQLWCEGKTGYPIVDAAMRQLNQTGWMHNRLRMIVASFLTKDLHIDWRWGERYFMSRLIDGDYAANNGGWQWCASTGCDGQPYFRIFNPVSQGEKFDPNGDFIRRWVPELRSVSSAYIHQPWTYPAVNSVLYPARLVDHKQEREVTLRLYKTAKG

SEQ ID NO: 7238 - protein, 340 aa, Micromonospora echinospora
MGGRMRALQFHGGHKAQIIDTPRPEAPPGWAVVKVHYCCLCGSDLWLYRGKWHGNRYPIVPGHEWAGVVDSAPEGYESWVGRPVTGDLIVGCQGCGPCRDGLPVMCENLIEIGFTVDGGCAGYVAVPITNLYLLPEGMDLAAASQTEPLAVALHAVDRINLRPAERVAVLGAGGIGQLILQSARATGATVTLATDLVAERRKIAEESGAAAAVHPSELPELTSYADKVDVVFEASGDPESVVRALDLVRPGGRVCLVGYQVGAEHALETARLPLSYASLVGVMGPGGKYREAVDLLANGAIDTQPILTDIVTLDDYAPAIDRAINRTDGTVRVVFDLRNE

SEQ ID NO: 7239 - protein, 492 aa, Oryza sativa (japonica cultivar-group)
MVLSKAVSESDMSVHSTFASRYVRASLPRYRMPENSIPKEAAYQIINDELMLDGNPRLNLASFVTTWMEPECDKLIMAAINKNYVDMDEYPVTTELQNRCVNMIAHLFHAPLGEDETAVGVGTVGSSEAIMLAGLAFKRRWQNKRKAEGKPFDKPNIITGANVQVCWEKFARYFEVELKEVKLRDGYYVMDPEKAVDMVNENTICVAAILGSTLNGEFEDVKLLNDLLDKKNKETGWETPIHVDAASGGFIAPFLYPELEWDFRLPWVKSINVSGHKYGLVYAGIGWCIWRNKEDLPEELIFHINYLGTDQPTFTLNFSKGSSQVIAQYYQLIRHGFEGYRNIMENCHENAMVLKEGLVKTGRFDIVSKDEGVPLVAFSLKDRSRHDEFEISDMLRRFGWIVPAYTMPPDAQHVTVLRVVIREEFSRTLAERLVLDIEKVMYQLDALPSRLMPPVPPAPLLVVAKKSELETQRSVTEAWKKFVLAKRTNGVC

SEQ ID NO: 7240 - protein, 277 aa, Thermoanaerobacter tengcongensis MB4
MELWFTEHQDENLRFSIKVKETLVVEKTPYQHLAILDSYQFGRVLVLDGILQTTEKDEFVYHEMIVHVPLFTHKNPKDVLIIGGGDGGSVREVLKHSSVERVVLAEIDEAVIRNSKKYLPTISSALDDPRVEIMIGDGIKYVNEHKNEFDVVIVDSTDPIGPAVGLFTSDFYRAVYECLREDGIIVAQTESPFIYGKLINKISKMFKEIYPITKAYIATVPTYPGSLWTFTMGSKKYDPEEVDINSIPRIQTKYYTPEIHKAAFVLPKFVKDIFDEV

SEQ ID NO: 7241 - protein, 343 aa, Mycobacterium leprae TN
MRIGILTGGGDCPGLNAVIRAIVRTCDARYGSSVVGFQDGWRGLLENRRMQLCNDDRNDRLLAKGGTMLGTAHVHPDKLRAGLHQIKQTLDDNGIDVLIPIGGEGTLTAAHWLSQEDVPVVGVPKTIDNDIDCTDVTFGHDTALTVATEAIDRLHSTAESHQRVMLVEVMGRHAGWIALSSGLASGAHMTLIPEQPFDVEEVCCLVKRRFQRGDSHFICVVAEGAKPVPGSITLRQGGMDEFGHERFTGVAAQLGAEVEKRINKDVRVTVLGHVQRGGTPTAFDRVLATRFGVNAADASHAGEYGQMVSLRGQDIGRVPLEDAVRQLKLVPESRYDDAAAFFG

SEQ ID NO: 7242 - protein, 466 aa, Magnetospirillum magnetotacticum MS-1
MSMSDELRDAALEYHRLPTPGKISVTPTKPLATQRDLALAYSPGVAAACELIVADEDSAADVTARGNLVAVVTNGTAVLGLGPIGPLAAKPVMEGKGVLFKKFAGIDVFDMELAELDPDKLVDIIAAMEPTFGAINLEDIKAPECFEVERKLQERVKIPVMHDDQHGTAIVVGAAMVNALRVVGKDIGEVKLVASGAGAAALACLNLLCKLGVKRENVWVTDIKGVVYEGRTELMDQYKSIYSKKTDMRTLAEVIEGADIFLGLSAPRVLTGEMVDKMAQKPIVFALANPTPEILPDEVKAVRPDAIIATGRSDYPNQVNNVLVFPYIFRGALDVGATQINDEMKLACVYALANLAMAESDERVRAAYGTAPLTFGPEYLIPKPFDSRLIIKIAPAVAKAAMESGVARRPIIDFDVYMDRLNQFVFRSGLVMKPVFDRARQDMRRIVYTEGEGRRVLHAVQTVVDE

SEQ ID NO: 7243 - protein, 408 aa, Methanococcus maripaludis S2
MATADLFADPTNIVTGLSTLATSGDVMFLVLMGVLVFSMQLGFALLEGGQVRKKNVNNVMMKNMADWLIGAVSWLFIGGVLSVSLVPADFFSWWGQIFTTNFANNGIDLANWFFGLVFAATAATIVSGGVAERIKFKSYLLMSIIITAILYPLFVYLGPWGSGMIPFNDYAGSFVVHGLGGFLALGAIAALGPRIGKFVNKKAISIPGHNIPMSVFGAFVLAIGWYGFNVGSSFAVADISGLVCATTTLAMAGGGIGALLASKDDVLFTANGIVAGLVAICSGTDVVSPIGALIIGLVAGIQVPIVYKIVEKMGLDDVCGVIPVHGTAGILGGILTGVFGMAALGGAGGVSLVNQLIAAGLTVVYGTGLGFGLGKLVGGFTGGLRVTEEEEKMGLDLAEHKLPAYPDE

SEQ ID NO: 7244 - protein, 312 aa, Triticum aestivum
  unsure (1)..(312): unsure at all Xaa locations
NGYFFFFNEKKLKAGKGCTRVSRXXYTAXXVXLXXXXXRXKXAPXTKWPXKLXWRTLKAHXXXXRAXXTFGAXXPVQVKIMAKHLNTIYVSGWQCSSTHTSTNEPGPDLADYPYDTVPSKVEHLFFAQQYHDRKQQEARMSLPRAERAHAPFVDFLKPIIADGDTGFGGATATVKLCKLFVERGAAGVHLEDQXSSVTKKCGHMAGKVLVAVSEHVNRLVAARLQFDIMGVETVLVARNXTPVAATLIKNNIHARXXKFILGATNPRLKKPASTGNSGPSARRNGGFKAIQGWTQRGKKNLPRVGKIAKGKL

SEQ ID NO: 7245 - protein, 447 aa, Glycine max
RPTRSGHRAAAADPRVQYHRPRAWVTAWERQRIWLRAADLFEKHNDDLAALETWDNGKPYEQSAQIEIPMLVRLFRYYAGWADKIHGLTVPADGPYHVQTLHEPIGVAGQIIPWNFPLVMFAWKVGPALACGNTIVLKTAEQTPLSALYASKLLHEAGLPPGVLNIISGFGPTAGAAIASHMDIDKLAFTGSTETGKIVLELAARSNLKPVTLELGGKSPFIVCEDADVDEAVELAHFALFFNQGQCCCAGSRTFVHERVYDEFIEKAKARALKRAVGDPFKGGIEQGPQIDSEQFQKILKYIRSGVESGATLETGGDRFGNSGFYIQPTVFSNVKDDMLIAKEEIFGPVQTILKFKDLDDVIQRANNTHYGLAAGVFTKNINTANTLTRALRAGTVWVNCFDTFDAAIPFGGYKMSGQGREKGEYSLKNYLQVKAVVTSLKNPAWL

SEQ ID NO: 7246 - protein, 373 aa, Bacillus sp. KSM-K16
MQVEQTYHPGLDGVIAAETDLSFLDTEQGQIIIHGYDLIQLSKTNGYLDIVHLLLKGELPSEQERLALAERLSGSYDLPEAVLDVLKRLPASTHPMDALRTGVSVLGGFDTRLDDRSEEANRERAYELLAKLPAVVANSYRILEKKQVLTPKDSLSYSANFLYMITGNVPSELEERVFDQSLLLYSEHEMPNSTFAARVIASTLSDMYGALTGAVASLKGHLHGGANEAVMYMLLDANSPEEFETLLSNKLKKKEKIMGFGHRVYMKKIDPRALIMKEALAELSQAAGDDRLLQMCEAGEALMAKEKGLYPNLDYYAAPVYWMLGIPISLYTPIFFSSRTAGLSAHVIEQHRNNKLFRPRVKYTGPRYTSVQK

SEQ ID NO: 7247 - protein, 464 aa, Zea mays
MVNGEQRADAECTRASLLGRYEIGRTLGEGNFGKVKYARHIATGGHFAIKILDRSKILSLRIDDQIRREIGTLKLLKHPNVVRLHEVAASKTKIYMVLEFVNGGELFDKIAIKGKLSEHEGRRLFQQLIDGVSYCHDRGVYHRDLKPENVLVDRKGTIKISDFGLSALPQHLGSDGLLHTTCGSPNYIAPEVLQNRGYDGSLSDLWSCGVILYVMLVGCLPFDDRNLVVLYQKIFKGDCQIPKWLSPAAQDLLKRILQPNPMKRINVAGIREHEWFKKDYVPAVPHDDDEDVLPSPAPSIKEPIDEPAQEKCTPINAFQLIGMASSLDLSGFFEEEDAAQRKIRFTSTHPPKDLFDKIESVVMEMGFKVHRGAGKLKVLKNSKCSRNSRNPSSLLVCTEVFELGPSLYVVELRKSHGDSTLYRQLCERLSDELGACKTDQIARTESSSDDLSSLDGEAFPLSGF

SEQ ID NO: 7248 - protein, 391 aa, Clostridium tetani E88
MSLDVKEEALRIHEEKKGKLEIIGTMSVETPRDLSLAYTPGIAAPCLEISKDKEKAYKYTIKGKTVAVITNGTAVLGLGDIGPEAGLPVVEGKALLLKRFGGVNAVPISIDSKDADDIVNTIKNISPGFGGIHLEDIKAPECFYIEDKLKEKLNIPVYHDDQHGTSIAVLAGLYNSLKILKKDIEDIKVVINGAGASGIAIAKLLIKAGVKEIILCDLQGALVEGDSTLNNAQKEIAKVTNRNFEKGSLEDVIKNKDVFIGVSDGNLLTKEMVNSMNKDSIVFALANPVPEIMPEEAKKGGARIIATGRSDFPNQINNVLVFPGIFKGALKVGAKDICNEMKIAAAKGLANLIKDNELNEEYIVPSVFEDGVADAVANEVISIAKKLNLTR

SEQ ID NO: 7249 - protein, 506 aa, Brassica napus
MTSINVKLLYHYVITNLFNLCFFPLTAIVAGKAYRLTIDDLHHLYYSYLQHNLITIAPLFAFTVFGSVLYIATRPKPVYLVEYSCYLPPTHCRSSISKVMDIFYQVRKADPSRNGTCDDSSWLDFLRKIQERSGLGDETHGPEGLLQVPPRKTFAAAREETEQVIIGALENLFKNTNVNPKDIGILVVNSSMFNPTPSLSAMVVNTFKLRSNVRSFNLGGMGCSAGVIAIDLAKDLLHVHKNTYALVVSTENITYNIYAGDNRSMMVSNCLFRVGGAAILLSNKPGDRRRSKYELVHTVRTHTGADGKSFRCVQQGDDENGKIGVSLSKDITDVAGRTVKKNIATLGPLILPLSEKLLFFVTFMGKKLFKDKIKHYYVPDFKLAIDHFCIHAGGRAVIDVLEKNLALAPIDVEASRSTLHRFGNTSSSSIWYELAYIEAKGRMKKGNKVWQIALGSGFKCNSAVWVALNNVKASTNSPWEHCIDRYPVKIDSDSGKSETRVQNGRS

SEQ ID NO: 7250 - protein, 504 aa, Triticum aestivum
  unsure (1)..(504): unsure at all Xaa locations
MGSNEGGGCDGKPVVVVPEIKYTKLFINGEFVDAASGKTFETRDPRTGDVLAHIAEADKADVDLAVEAAREAFEHGKWPRMSGYERSRAMNKLADLMEQHIEELAALDGADAGKLLLLGKIIDIPSAVQMLRYYAGAADKIHGESLRVSGKYQGYTLKEPIGVVGIIIPWNFPSLMFFLKISPALAAGCTVVVKPAEQTPLSALYYAHLAKLAGIPDGVINVVPGFGPTAGAAIASHMDVDSVAFTGSGEVGRLIMEASARSNLKTVSLELGGKSPLIIFDDADVDMAVELSRLAIFFNKGEVCVAGSRVYVQEGIYDEFVKRAVVAAQNWKVGDPFDVATNMGPQVDKEQFERVLRYIEHGKSEGATLLTGGKPASDKGYYIEPTIFADVKEDMKIAQDEIFGPVMSLMKFKTVDEAIEKANCTKYGLAAGIITKNLDIANRVSRSVRAGTVWVNCYFAFDPEAPFGGXYKMSGFGRDQGMMAIDKYMQVKSVITAVPDSPWY

SEQ ID NO: 7251 - protein, 382 aa, ASPERGILLUS NIDULANS FGSC A4
MAPTITALQYYGAKNVRLQQVQPRPCHADEVRIQIAYCGICGSDIHEYLGGPVFSPPPGKKNPYTGAELPVTLGHEISGTIVELGSSVPASDPNLKLGMRVAVNPAMNDRHHGVEKCTACQLGLPNICKRYTSYGFSAAGGGLASEIVVKHYACIPLPDSISLKVGALLEPLAVAWHCIRISGFQRDQTVLILGAGPIGLAILMILRVWGVKTVVISEVAASRKRMARELGADLVLDPTELGSSKDGLDPVVVATQKAMKADGADVTFDCTGLQSTLDTAIAATRPGGTVFNVAIHEKPLMVNLNELTLGERRLTGGICYTDVDFQELIAALEAGKIQAERLITSIVDLDDVIDKALMELIHNKAAHVKILVKPNHVRSVRL

SEQ ID NO: 7252 - protein, 198 aa, Gossypium barbadense
MCGGAIISDFVAPKYDRKLTGDDLWSELDIFSDLLGFDNNGKSFVNHQFHNNNNNKLINPKDNQLNKERSETIQKTSQVTKKVEKTQRTRKNFYRGIRQRPWGKWAAEIRDPQKGVRVWLGTYNTAEEATRAYDEAAKRIRGDKAKLNFPQTPTKNQAASPALTLLPPAKKRCIVPGVNSTEFTRLDSPPISLWVLGV

SEQ ID NO: 7253 - protein, 634 aa, Glycine max
  unsure (1)..(634): unsure at all Xaa locations
MGSNRTIVWFRRDLRIEDNPALAAAAKEGSVLPVYIWCPKEEGQFYPGRVSRWWLKQSLAHLDQSLKSLGSRLVLIKTHSTVTALVECVKAIQATKVVFNHLYDPVSLVRDHNIKEKLVEQGISVQSYNGDLLYEPWEVYSESGRAFTTFNAFWKKCLHMQMDIVSVVPPWQLIPAEGKVEECPLEELGLENESEKPSNALLGRAWSPGWRNADKALTEFVEQHLLDYSKKRLKVGGDSTSLLSPYLHFGELSVRKVFQVTRMKQILWTNEGNSAGEESVNLFLRAIGLREYSRYLCFNFPFTHEKALLGHLKFFPWNPDADIFKNWRQGRTGFPLVDAGMRELWATGWIHNRIRVIVSSFAVKMLLLPWKWGMKYFWDTLLDADLESDILGWQYISGGLPDGHELERLDNPEIQGVKFDPQGEYVRQWLPELARMPTEWIHHPWDAPLTVLRAAGVELGQNYPKPIIDIELARERLTXAIFKMWESEAAAKAAGSEPRDEVVVDNSNSLENLDTQKVVVLGKAPCATISANDQKVPALQDSKNEPPTRKRPKHMIEEGQNQDHSQNHNKDTGLSSIDQDICSTADSSSCKKQCASTSSYSFSVPQQCSSSSNLKWPWQDQIDMEQSSSKDGAM

SEQ ID NO: 7254 - protein, 475 aa, Sinorhizobium meliloti
MDTQLLIGSRFEAGTEAEEHILNPRTGAGIIDLAEASHAQIDAAVDAAERAFVGWSQTTPAERSNALLKIADAIEKEADEFAALEALNCGKPINAVKNDELPAIIDCWRFFAGAVRNLHAPAAGEYLPGHTSMIRRDPIGIVGSIAPWNYPLMMMAWKLAPAIGGGNTVVFKPSEQTPLTALKLARLIADILPEGVVNVITGRGETVGNALINHPKVGMVSITGDIATGKKVLAAAAKTVKRTHLELGGKAPVIVYGDADLEAVVNGIRTFGYYNAGQDCTAACRIYAEAGIYEKLVADLTSAVSTIRYNLDDDTENEIGPLISRRQRDRVASFVERAADQKHIEITTGGRTGSDEGFFFQPTVVAGATQEDEIVRREVFGPVVSVTRFTGKDDAVAWANDSDYGLASSVWTKDISKAMRAASRLQYGCTWINTHFMLTNEMPHGGIKQSGYGKDMSVYALEDYTAVRHIMINHG

SEQ ID NO: 7255 - protein, 449 aa, Bacillus cereus G9241
MKTKQTDELLAKDEQYVWHGMRPFSPNSTMVGAKAEGCWVEDIQGKRYLDGMSGLWCVNSGYGRKELAEAAYKQLQTLSYFPMSQSHEPAIKLAEKLNEWLGGEYVIFFSNSGSEANETAFKIARQYYAQKGEPHRYKFMSRYRGYHGNTMATMAATGQAQRRYQYEPFASGFLHVTPPDCYRMPEIERENIYDVECVKEVDRVMTWELSETIAAFIMEPIITGGGILMPPQDYMKAVHETCQKHGALLISDEVICGFGRTGKAFGFMNYDVKPDIITMAKGITSAYLPLSATAVKKEIYEEFKGKGEYEFFRHINTFGGNPAACALALKNLEIMENENLIERSAQMGSLLLEQLKEEIGEHPLVGNIRGKGLLVGIELVNDKETKEPIDNDKIASVLNACKEKGLIIGRNGMTTAGYNNVLTLAPPLIISSEEIAFVVGTLKTAMERI

SEQ ID NO: 7256 - protein, 159 aa, Capsicum frutescens
MSMIPSFFGGRRSNIFDPVSLDLWDPFEGFPISSTIANTPSSARETSAFPNARIDWKETPQAHIFKVDVPGIKREEVKVQVEEGRILQITGERSREQEEKNDQWHRMERSSGKFLRRFRLPENTKMGEIKAAMENGVLTVTVPKEEEKRSEVKAIDISG

SEQ ID NO: 7257 - protein, 489 aa, Halobacterium sp. NRC-1
MPAAQPPGMQLFWHRRDLRTTDNRGLAAAAPGVTAVDGGHDQGPVAAVFCFDDEVLAHAAPPRVAFMLDALAALRERYRDLGSDLIVRHGDPAAVLPAVANDLDATRVVWNHDYSGLATDRDAGVRDALDAAGVAHAQFHDAVHHRPGEIRTNAGDPYSVYTYFWRKWQDREKNPPAPEPEPADLAADTALADTSPLPSVQELGFAEPEAAVPDAGTAAARSLLDAFRESGDIYRYEDRRDYPHEEPTSRLSPHLKFGTIGIRTVYEAARAAKSDADTDDERENVAAFIGQLAWREFYAQVLYFNQNVVSENFKAYEHPIEWRDDPAALQAWKDGETGYPIVDAGMRQLRAEAYMHNRVRMIVAAFLTKDLLVDWRAGYDWFREKLADHDTANDNGGWQWAASTGTDAQPYFRVFNPMTQGERYDPDADYITEFVPELRDVPADAIHSWHELSLSERRRHAPEYPDPIVDHSQRREDAIAMFERARGDE

SEQ ID NO: 7258 - protein, 318 aa, Thermobifida fusca
MPLDPETRALIDELVSGSPPGEAVGVPDASLHSSLRERRIVGPGVALVRDLTIPSPAGGIPARLYHPAPDNPATGCAVFFHGGGYVFGNLDTHDHIARLLAAESRAAVVAVDYRLAPQHRFPAAVEDAFTATRWVAEHATRLGVDAARLAVVGDSAGGGLAAAVALLVRDGGPPLAAQVLIYPVIDLTGYPVTADTPYPSRIAHGEGCFLTTAAMQHVVEQYLADPADAADFRASPIRAADLSGAAPALVVSAEFDPLRDEAEAYARALAAVGVPATTVRINGGVHGMFGLGPVLPLSRHAELPVIALLRDTLQPPQR

SEQ ID NO: 7259 - protein, 334 aa, Arabidopsis thaliana
  unsure (1)..(334): unsure at all Xaa locations
SDAKETSATDLKRPREEDDNGGAATXETENGDQKKEPACFSTVIPGWFSEXSPXWPGEAHSLKVEKVLFQGKSDYQDVIVFQSATYGKVLVLDGVIQLTERDECAYQEXITHLPLCSIPNPKKVLVIGGGDGGVLREVARHASIEQIDXCEIDKXVVDVSKQFFPDVAIGYEDPRVNLVIGDGVAFLKNAAEGSYDAVIVDSSDPIGPAKELFEKPFFQSVARALRPGGVVCTQAESLWLHXDIIEDIVSNCREIFKGSVNYAWTSVPTYPSGVIGFXLCSTEGPDVDFKHPLNPIDESSSKSNGPLKFYNAEIHSAAFCLPSFAKKVIESKAN

SEQ ID NO: 7260 - protein, 267 aa, Triticum aestivum
  unsure (1)..(267): unsure at all Xaa locations
MXFLIFVLLAMAMKIATAARELNPSNKELQSPQQSFSYQQQPFRQPQQPFYQQPQXXFPQPQQAFPHQPQQQFPQPQQPQQQFPQPQQPQQPFPQPQQAQLPFPQQPQQPFPQPQQPQQPFPQSQQPQQPFPQPQQPQQSFPQQQQPLIQPYLQQQMNPCKNYLLQQCNPVSLVSSLVSMILPRSDCQVMQXQQCCQQLAQDXPAKLQVCKPSISVVHSNRHASKEQQQXNTRFSGQLVQAPSKGKGIIQPQQPGIGGRFGPFQNKV

SEQ ID NO: 7261 - protein, 122 aa, Cucumis sativus
MIQPQTLLNVADNSGARELMCIRIIGASNRRYAHIGDVIVAVIKKAVPNTPLERSEVIRAVIVRTCKELKRENGMIIRYDDNAAVVIDQEGNPKGTRIFGAIARELRQLNFTKIISLAPEVL

SEQ ID NO: 7262 - protein, 411 aa, Methanococcus maripaludis S2
MVTADLFNNPTNIMDALNTLANSSDVMFLIFTGAFIFIMHLGFAMLEGGQVREKNVNNAMMKNMGDWIIGCISWLLVGSVIARTLNPADFFIWWGKIASATPFLTNNGLELANWFLGLVFAATAATIVAGGIAERIKFKSYILISIVITALLYPFFSYLGPWGAGVIPFHDYAGSLMVHGVGGFLALGLIAAIGPRFGRFVNKKAITIPGHNIPMSILGAYILAFGWYGFNVGSSLALSDISGLVCATTTLAMAGGGLGGCLFSKNDVLYTANGLLAGTVAICAGTDIVSPLGALIIGFIAGSQVPLIFKIVEKMGLDDVCGVIPVHATSGALGAILAGIFGMTAFGGVGGVSLTEQIIATLICAVYGTGAGFILGKLVGAVTGGLRVKESEEKAGLDISIHKLPAYPKEN

SEQ ID NO: 7263 - protein, 494 aa, Bacillus anthracis str. Ames 0581
MLTTNIELKPKVKAFLDEEIKMFINGEFVPSISGKTFETYNPATEDVLAVVYEAQEEDIDVAVKAARSAFESGPWVEMTTAERAHLIYKLADLIEEHGEELAQLEALDNGKPYQVALDDDIAATVENYRYYAGWATKIIGQTIPISKDYLNYTRHEPVGVVGQIIPWNFPLVMSSWKMGAALATGCTIVLKPAEQTPLSLLYTAKLFKEAGFPNGVVNFVPGFGPEAGAAIVNHHDIDKVAFTGSTVTGKYIMRQSAETIKHVTLELGGKSPNIILEDADLEEAINGAFQGIMYNHGQNCSAGSRVFVHRKHYETVVNELVKMANNVKLGAGMEKDTEMGPLVSKKQQERVLHYIEQGKAEGATVAAGGERAFEKGYFVQPTVFTDVTDDMTIVKEEIFGPVVVVLPFDSTEEVIERANRSSYGLAAGVWTQNIKTGHQVANKLKAGTVWINDYNLENAAAPFGGFKQSGIGRELGSYALDNYTEVKSVWVNIK

SEQ ID NO: 7264 - protein, 274 aa, Mesorhizobium sp. BNC1
MQTVTAHGATIPALGFGVFRMSDAEVERIIPAALEAGFRHFDTAQIYQNEAALGRALERAGARREDLFLTTKVWVDNYSADKFAASVDESLEKLKVDQVDLLLLHWPAHEVPVAAQIERLNAVKDAGKTRFIGVSNQNIAQMRESIARSAAPIVTNQVELHPYLPQHSLVAAARDSAVAVTAYYGMADGAVPKDPVLQQIGARYGKSAAQVGLRWLVQQGYVALSKTANPARVAENIAIFDFALDETDMAAIAKLARPDGRLVSPPGLAPDWDA

SEQ ID NO: 7265 - protein, 482 aa, Rhodococcus rhodochrous
MSMQYDSLFIGGDWIAPSSSKRITAISASTEQPIGSVPEAQEADVDAAVAAARRALDDPAGWAHWAPAARAAAIERLADVLERRAEDVVQCVSAQNGMPVAVARQLEGVFPVVLLRYYAGLARDTATEETRPGLFGGSTLVCREPLGVVGAIVPWNFPQTLAAFKYAPALAAGCTLVIKPSPETVLDAFVFAEAVAEAGIPAGVVNVVPGGREVGAYLVEHPGVDKISFTGSTAAGRSIGEVCGRLLRPVTLELGGKSAAIVLDDAGLDLQTMSEKLFAATLLNNGQTCFLGTRVLAPRSRYSEIVDLFTDLAGTLKVGDALDDTTQIGPMATAAQRDRVEQYIAKGLGDGARITIGGGRPADQDKGWFVEPTIFADVENNHTIAQEEIFGPVLSVIPYSDEDEAVRIANDSDFGLGGTVWTNDPDRGLALAKRVQTGTIGINGYLPEPTAPFGGVKASGLGRELGPEALSNYQQLKSIYLD

SEQ ID NO: 7266 - protein, 280 aa, Vigna radiata
GEGTYGVVYKARDRVTNEAIALKKIRLEQEDEGVPSTAIREISLLKEMQHRNIVRLQDVVHSGKRLYLVFEYLDLDLKKHMDSSPEFAKDLRQVKMFLYQILCGIAYCHSHRVLHRDLKPQNLLIDRSTNSLKLADFGLARAFGIPVRTFTHEVVTLWYRAPEILLGSPRYSTPVDIWSVGCIFAEMVNQRPLFPGDSEIDELFKIFRILGTPNEDTWPGVTSLPDFKSAFPKWQPKDLKTVVPNLDPAGLDLLSRMLHLDPSKRITGRSALEHEYSERH

SEQ ID NO: 7267 - protein, 499 aa, Escherichia coli
MTEPHVAVLSQVQQFLDRQHGLYIDGRPGPAQSEKRLAIFDPATGQEIASTADANEADVDNAVMSAWRAFVSRRWAGRLPAERERILLRFADLVEQHSEELAQLETLEQGKSIAISRAFEVGCTLNWMRYTAGLTTKIAGKTLDLSIPLPQGARYQAWTRKEPVGVVAGIVPWNFPLMIGMWKVMPALAAGCSIVIKPSETTPLTMLRVAELASEAGIPDGVFNVVTGSGAVCGAALTSHPHVAKISFTGSTATGKGIARTAADRLTRVTLELGGKNPAIVLKDADPQWVIEGLMTGSFLNQGQVCAASSRIYIEAPLFDTLVSGFEQAVKSLQVGPGMSPVAQINPLVSRAHCDKVCSFLDDAQAQQAELIRGSNGPAGEGYYVAPTLVVNPDAKLRLTREEVFGPVVNLVRVADGEEALQLANDTEYGLTASVWTQNLSQALEYSDRLQAGTVWVNSHTLIDANLPFGGMKQSGTGRDFGPDWLDGWCETKSVCVRY

SEQ ID NO: 7268 - protein, 160 aa, Triticum aestivum
  unsure (1)..(160): unsure at all Xaa locations
PAVMASSATTVAPFQGLKSTAGLPVSRRSGSAGLSSVSNGGRIRCMQVWPIEGIKKFETLSYLPPLSTEALLKQVDYLIRSKWCPASIQQVGSVSVSTTXPRYYDGRYWDMWXLPXFXCTDQPSAQQVEEXRRXLTLAVQFDKQMLTHASGTARASKSIE

SEQ ID NO: 7269 - protein, 499 aa, Ruegeria sp. PR1b
MNAASFTKSFWHDEAKKLEFRTKHLINGEWVDSEDGTTFDTINPATGETIAKVASGKAADIDKAVKNARETFKSGVWSMLAPRERLAVIERFSALIEENAVEFALLDCLDMGKPVMDMINIDIPESVKNLKFFAETADKVHGSLTATDPSVVHYILRQPLGVVGLITPWNYPLMMAAWKLGPALITGNSVVLKPAEQAPLSCALLGDLFLKAGGPAGVLNVVQGLGEEAGKAIGLHPDVDKIGFTGSTEVGKLLMTYAGQSNMKRVTTECGGKTPQIVFADYDNLDKAVTSAVYGIYGNMGEMCNAGSRILVQRPIYDEFIKRFSELTASNMVVGDPLDPDTTIGPLVTVEQQERVLEYIEIGKKEGATLALGGGRGLNSGCYVEPTLFTDVTNSMRVAQEEIFGPVGTVIPFDTAEEALEIANDSLYGLAAAVWTNDLKTAHRFGRDLESGFVWVNTFDIGDMTSIWGGYKQSGNGRDTCIEALSQYTQTKSVWMDMA

SEQ ID NO: 7270 - protein, 146 aa, Clostridium tetani E88
MFDMIPFKRNNSMKRDSYFDEFFDNFFNNDFLVPIKFPKNNFRADLKETNNEYIIEADLPGISKDAVKVNYSNNNLVISAKREDIIENKDENYIRRERSYGEFKRAFYVDNVDENNIKASFKNGVLRINLTKLEDTTKARKQIEIE

SEQ ID NO: 7271 - protein, 110 aa, Triticum aestivum
  unsure (1)..(110): unsure at all Xaa locations
MDSQFGALERGGSRQRRGPALARPNTAKRHMQQQRANAADKKVVIPNYFGIEAFFVLACLTVSLLILPLVLPPLPXPPSLLLFVPVCLLILLMVLAFMPNDVRSMATSYL

SEQ ID NO: 7272 - protein, 230 aa, Triticum aestivum
MKTLLILTILAMATTIATANMQVDPSGQVQWPQQQPFPQPQQPFCQQPQRTIPQPHQTFHHQPQQFPQTQQPQQPFPQPQQTFPQQPQLPFPQQPQQPFPQPQQPQQPFPQSQQPQQPFPQPQQQFPQPQQPQQSFPQQQQPAIQSFLQQQMNPCKNFLLQQCNHVSLVSSLVSIILPRSDCQVMQQQCCQQLAQIPQQLQCAAIHSVAHSIIMQQEQQQGVTILRPLFQ

SEQ ID NO: 7273 - protein, 292 aa, Zea mays
MPSVEVEVQVGGAGGWRPKQQHHHPLEIRQVWADNVDREFKLIRAAIERFPYVSMDTEFPGVIHHPPPAVHHSTLTAPQRYALLKSNVDALHLIQVGLALAPSPGSPPALAFQINLRGFDPRVHRHAPDSVRLLAASGLDLAAHRARGVPARAFAALLASSGLICNPAVAWVTFSSAYDFAYLVKLLMGRKLPRALPDFLRYVRVYFGAAVYDVKHMARVACASHGEVALLGGLERVAAALRVRRAAGQGHQAASDSVLTWDTFREMARIYFPKEGSLEPCAGVLYGLELPN

SEQ ID NO: 7274 - protein, 272 aa, Leptospirillum ferrooxidans
GPQDRKNTPKMAKSNAHCGPKHSPLLFLGTFILWLGWFGFNPGSTLMATTPSVGYFAYIAMTTNLAAAAGALAAMFTAWKILGAPDMSMVANGAIAALVAITASCAFVDPWASVVIGAVAGVIAVVGVLAIDRIHIDDPVGAVSVHGMAGIWGTLSNGLFATPDRVKLLAVGTPGLFYGGGFHQLLVQAEGVSASLAYVFFVSLLVFYVIKVTIGLRVSEHDEVSGLDISEHKMWGYPEMFSGGFGGGTAPGELAGRSEMSMSAAKPVTQRT

SEQ ID NO: 7275 - protein, 506 aa, Bacillus sp. KSM-K16
MAYQQPNTEGALVHFKERYDNFIGGEWVAPVNGRYFENRSPVTGKPFCEVARSSAEDVELALDAAHNAKASWGKMPAAQRANLLNKVADRIEENLEMLAVAETWDNGKPIRETLNADIPLAVDHFRYFAGVIRAQEGTLSQIDENTVAYHFQEPLGVVGQIIPWNFPILMAVWKLAPALAAGNCVVLKPAEQTPASIFVLLELLSDLLPPGVVNVVSGFGLEAGKPLASSPRIAKIAFTGETTTGRLIMEYASANLIPVTLELGGKSPNIFFRDVMEKEDDFLDKAIEGFVLFALNQGEVCTCPSRALIDETIYDAFIEKALQRVAAIKQGNPLDPETMMGAQASEEQLEKILSYLAIGKEEGAEVLAGGNQRQLSGDYSGGYYVEPTVFKGTNNMRIFQEEIFGPVVSVATFKDADEALRIANDSLYGLGAGVWTRNINTAYRFGRQIEAGRVWVNCYHAYPAHAAFGGYKKSGVGRETHLMMLNHYQQTKNMLVSYNDDSQGFF

SEQ ID NO: 7276 - protein, 219 aa, Coxiella burnetii RSA 493
MYRYGNLFQTPILRSPLEDQFSDYVLWRLDCEPFVEVLERTCRMNDEKLRTQNVEATLFDSAKKPEISFADYIWRIVAYARLTHSQMIHTLIYLDRCQENFFLTSLNFYRLFLVAALVAQKFHQDDSFSNKSFADLVGITVKELNILEAKFLFAISFSLYVLPKTYKEYNRIVGGQRINRQLVEARRSNLSFFSLFPHTVNTFPHRKRNSYHFLHRPRF

SEQ ID NO: 7277 - protein, 430 aa, Oryza sativa (indica cultivar-group)
AAAGAKEDVKEDGAAAAAAAADYDGSPPPPRGKKKKDDEERSSSLPEEKDAKNGGGDEVLSAVTTEDSSAGAAKSCSPSAEGHSKRKPSSSSSSAAAGKNSHGKRKVKVDWTPELHRRFVQAVEQLGIDKAVPSRILELMGIECLTRHNIASHLQKYRSHRKHLMAREAEAASWTQKRQMYTAAAAAAAVAAGGGPRKDAAAATAAVAPWVMPTIGFPPPHAAAMVPPPPHPPPFCRPPLHVWGHPTAGVEPTTAAAPPPPSPHAQPPLLPVWPRHLAPPPPPLPAAWAHGHQPAPVDPAAYWQQQYNAARKWGPQAVTPGTPCMPPPLPPAAMLQRFPVPPVPGMVPHPMYRPIPPPSPPQGNKLAALQLQLDAHPSKESIDAAIGDVLVKPWLPLPLGLKPPSLDSVMSELHKQGIPKVPPAASGAAG

SEQ ID NO: 7278 - protein, 186 aa, Thermus thermophilus
ATGPRYKVPMRRRREARTDYHQRLRLLKSGKPRLVARKSNKHVRAQLVTLGPNGDDTLASAHSSDLAEYGWEAPTGNMPSAYLTGLLAGLRAQEAGVEEAVLDIGLNSPTPGSKVFAIQEGAIDAGLDIPHNDDVLADWQRTRGAHIAEYDEQLEEPLYSGDFDAADLPEHFDELRETLLDGDIEL

SEQ ID NO: 7279 - protein, 262 aa, Triticum aestivum
  unsure (1)..(262): unsure at all Xaa locations
MERKSAILMNRYELGRMLGQGTFAKVYHARSLATNQSVAIKVIDKDKVLRVGMIDQIKREISIMRLVRHPNIVQLHEVMASKSKIYFAMEYVRGGELFARVAKGRLKEDAARKYFQQLIGAVDFCHSRDVYHRDLKPENLLVDEHGNLKGSDFGLSALKECQKQDGLLHTTCGTPAYVAPEIINKKGYDGEKADIWSCGVILFVLLAGYLPFQDSNLMEMYRKISKGDVRYPQXXSSDARXXLSRLLXXNPNXXXTMDKLIE

SEQ ID NO: 7280 - protein, 430 aa, Brucella suis 1330
MSDKTASFTLDGKTFDLPVRKGTVGPDVVDIGPLYKNSHAFTYDPGFTSTASCESKITYIDGDEGVLLYRGYPIDQLAEHGDFLETCYLLLYGELPTATQKADFDYRVTRHTMLHEQMTKFFTGFRRDAHPMAVMVGCLGAMSAFYHDSTDITDPHQRMVASIRLIAKVPTLAAMAYKYHIGQPFVYPKNDLDFASNFLHMCFTVPCEEYKVNPVLARAMDRIFILHADHEQNASTSTVRLAGSSGANPFACIAAGVACLWGPAHGGANEAALNMLSEIGSVDRIPEYIARAKDKNDPFRLMGFGHRVYKNYDPRAKIMQKTCHEVLGELGIKDDPLLDVAMELERIALTDEYFIEKKLYPNIDFYSGITLKALGFPTEMFTVLFALARTVGWVAQWKEMIEDPQQKIGRPRQLYTGATERDYVPLAKRK

SEQ ID NO: 7281 - protein, 325 aa, Triticum aestivum
  unsure (1)..(325): unsure at all Xaa locations
MKTLLILTIIAVALTTTTANIQVDPSGQVQWPQQQQPFPQPQQPQQIFPQPQQTFPHQPQQAFPQPQQTFPHQPQQQFPQPQQPQQPFPQQPQQQFPQPQQPQQPFPQQPQQQFPQPQQPQQPFPQPQQPQLPFPQQPQQPFPQPXQPQQPFPQLQQPQQPLPPXPKQHWLTPIPPCKTFLVFALLALAAASAVAQISQQQQQPPFSQQQQPPFSQQQQSPFSQQQQQPPFLQQQQPPFSQQPPISQQQQPPFSQQQQQGIQIMRPLFQLVQGQGIIQPQQPAQLEVIRSLVLGTLPTMCNVFVPPECSTTKAPFASIVADIGGQ

SEQ ID NO: 7282 - protein, 95 aa, Zea mays
YPPVHPGNVGRLRMRLTKGKSVVAKEFYSSSMQLCGVRGGGEAASQAMFWRPRNDLSLVLAFESTRERNAAIMLARRFAVDCNIILAGPGDKTPW

SEQ ID NO: 7283 - protein, 267 aa, Escherichia coli K12
MAIPAFGLGTFRLKDDVVISSVITALELGYRAIDTAQIYDNEAAVGQAIAESGVPRHELYITTKIWIENLSKDKLIPSLKESLQKLRTDYVDLTLIHWPSPNDEVSVEEFMQALLEAKKQGLTREIGISNFTIPLMEKAIAAVGAENIATNQIELSPYLQNRKVVAWAKQHGIHITSYMTLAYGKALKDEVIARIAAKHNATPAQVILAWAMGEGYSVIPSSTKRKNLESNLKAQNLQLDAEDKKAIAALDCNDRLVSPEGLAPEWD

SEQ ID NO: 7284 - protein, 472 aa, Rhodobacter sphaeroides 2.4.1
MRNIDRFFIGGAWTAPLGTDRHRLVNPATEEEIAAIPMASTEDVDRAVTAARAAFEGWQASSKEERLLLLRRLLDLYNEAYDELAELMTREMGTVARFSREAQAWVGRAHLEAAIEALEAESFEEMRGSTLISKEPIGVCALITPWNWPMNQLVVKVAPALAAGCTVVAKPSEFSPLSSIRFAELVEAAGFPPGVYNHITGAGPVAGEALARHPDVDMISITGSTRAGIAVARAAADTVKRVTQELGGKSANIILPDADLATAVRQGVLDCFGNAGQACKAPARMLVPAERMEEAAALAGAAAEALTVGAPEGEVDLGPVVNESQWRRIQSLIEAGIAEGARLVTGGPGRPDHLPRGWYVRPTVFADVAHGSTIATEEIFGPVVALIPYRDEEEAVRIANDSIYGLAGYIQTGDPETARRIARKLRVGMVYINGAGWDARAPFGGYKQSGNGREHGAWGLADYLETKATAGL

SEQ ID NO: 7285 - protein, 170 aa, Triticum aestivum
MAAFLRSKCSSVGRAMMGSLGNNLYGGATSSIETVARPSRSDAVCQQIRTFIQMRTNLKVVDNSGAKRVMCIQSLRGKKGARLGDMIIGSVKEAQPRGKVKKGDVVYGVVVRAAMKKGRSDGSEVQFDDNAIVIVNNKGELIGTRVFGPVPHELRKKKHLKILALAEHIV

SEQ ID NO: 7286 - protein, 488 aa, Listeria innocua Clip11262
MSIKETSLPKVQTKLFINGKWIDGDNKETKDIVNPANGEVIAKIAQAGPKETKQAIKAAKDAFPDWAKMELADRVKLLHNIADLMEERADTLAKIMTLEQGKPLKESKGEVLTGAENFRFAAEEARRLYGETIPAPNNHAFIVKKQPIGVVAAITPWNFPGGMVTRKLAPALATGNTIVLKPSGDTPLSALAIFEIFEEAGLPKGVANIVMGSSKEIGETLTDSDDVRKLTFTGSTKVGQTLFKQSADTLKKISLELGGHAPFIVFADANLEAAVDDLITAKFRNNGQVCVSPNRIFVAKEIKEKFTKTLVAKVEKLKVGNGLDDVNVGPLIREDAIDKIDKQLKNATDKGAKVLTGGERLTGSDYDKGNFYKPTVLDNVTREMDIFYEETFGPVIPLIVFENEDEAIEMANDSEFGLASYFYTKDLARVEKVGAALEYGMVGANEIAISNPETPFGGVKHSGFGRENGHYGMEEYIQVKFINLKYRD

SEQ ID NO: 7287 - protein, 133 aa, Triticum aestivum
  unsure (1)..(133): unsure at all Xaa locations
MAPTVMASSATSVAPFQGLKSTAGLPVXRRSNGASLGSVSNGGRIRCMXVWPIEGIKKFETLSYLPPLSTEALLKQVDYLIRSKWVPCLXFNKVGFIFREQNATPGYYHXRYXWTMXWKLPMFGXCTDPTQGD

SEQ ID NO: 7288 - protein, 440 aa, Glycine max
  unsure (1)..(440): unsure at all Xaa locations
MSGKQAVRPRTRVGKYELGKTIGEGSFAKVKFAKNVENGNHVAIKILDRNHVLRHKMMEQLKKEISAMKMINHPNVVKIYEVMASKTKIYIVLELVNGGELFNKIAKNGKLKEDEARRYFHQLINAVDYCHSRGVYHRDLKPENLLLDSNGVLKVTDFGLSTYAQQEDELLRTACGTPNYVAPXEVLNDRGYVGSTSDIWSCGVILFVLMAGRRRQGYWDGRSIFFPFVLILLCNECSTRAYPAWKIVIALFDQLSKLKKEELKKDHXWFKKGYKPTTFVEEEDVKVDDVAAAFXDSKENLVTERKEKPVSMNAFELISRSQSFNLENLFEKQTQGIVKRETHFTSQRPANEIMSKIEEAAKPLGFNVHKRNYKMKLQGDKSGRKGHLSVATEVFEVAPSLHMVELRKTGGDTLEFHKFYKSFSSSSGLQDIVWHSEAKQ

SEQ ID NO: 7289 - protein, 170 aa, Glycine max
MADSDNDSGGAHNGGKGSEMSPREQDRFLPIANVSRIMKKALPANAKISKDAKETVQECVSEFISFHSPGGLAGECQKEKRKTINGDDLLWAMTTLGFEEYVEPLKVYLHKYRELEGEKTAMMGRPHERDEGYGHATPMMIMMGHQQQQHQGHVYGSGTTTGSASSARTR

SEQ ID NO: 7290 - protein, 377 aa, Lactuca sativa
MGEVVKEAGVIENLRSVVFKESESLEGSCAKIQGYDFNTGINYSQILKSLISTGFQASNLGDAIETVNQMLDWRLSHEQVTEDCSEEESNPAYRESVKCKIFLGFTSNLISSGVRDIIRYLTQHHMVDVIVTTTGGIEEDLIKCLADTYRGEFSLPGAALRSKGLNRIGNLLVPNDNYCKFEDWIIPIFDQMLQEQNTQHVLWTPSKVISRLGKEINNESSYLYWAYKNDIPVFCPGLTDGSLGDMLYFHSFRNPGLVIDVVQDIRAINSEAVHANPRKTGMIILGGGLPKHHICNANMMRNGADYAVFINTAQEFDGSDSGARPDEAVSWGKIRGSAKSVKVHCDATIAFPLLVAETFAAKREGEMKNVESTKALV

SEQ ID NO: 7291 - protein, 388 aa, Ajellomyces capsulatus
MFSLRTAQPAQSLFRAATNTYSTSLPRSAIAARSFATVQSDIFKPTKYGGKYTVTLIPGDGIGTEVAESVKTIFKADNVPIEWEQVDVSGLDAGNKHSEDLFKESIASLKRNKLGLKGILHTPVERSGHQSFNVALRQELDIYASIVLIKNIPGYKTRHDNVDLCIIRENTEGEYSGLEHQSVSGVVESLKIITRAKSERIAKFAFSFALANNRKKVTCIHKANIMKLADGLFRSTFHKVAESYPTLETNDMIVDNASMQAVARPQQFDVMVMPNLYGGILSNVGAALVGGPGIVPGCNMGRDVAVFEPGCRHVGLDIKGKDQANPTALILSGSMLLRHLGLDEHANRISKAVYDVIGEGVTRTRDMGGQASTHEFTRAVLDKMESAL

SEQ ID NO: 7292 - protein, 1807 aa, Phytophthora infestans
MPGPDDDVREPTAAARTNNSGYGLRAAPSSITSGLDSVVSVNSYRSSELNAEEVNVDDQECADSDILESPNDGMTIMNDDDADLSEEEEEVMENSIDFSVNRATVTKAGVIPCCVFVGRVRWGTTDWEIYFGQKQLLRLHFNLHLYSLFNRHKLLRGVHLPCTIWREKRAEKRVMDVYVVQDYIRQLLKDRDLRNSEPLLSFLEVSPSRAMLRLGPSLKEGYVHMRINGPFQLPLYTCFNRTIEALYRHLYRAWMRIAFVSAIVGFIFPICLVIVTSLPTFFSPQKELVNSDSGTKEVSTKLNTAGVFLGLAVLGGILFFAVFVYKFFQHRLGVIRRWVVLKPSCFAAYRNRNDREPSEVFLFDKNFTARKGSYRQGVSWMPSGLVVGSKAGDIEIDTGHYYTRLTAFVALMGVCYGIMRLSNSIYDFEYLSLDKSMGVPITNASGYENWTESRDAEYCGYYFIVPKGTTVYVESKDDSAVISQLQMPSSNSMTANLGFFWQSDSMGYSLNVITNAVGAGTMVSVVKPIDAKNDRFFESGTNYSMPTVGNLTLEGVKTDIDVQSFSNVESFCAITVRIAPLTWRSYVYYILFLFAGGIIAPVVGFLANYFVTYLGIWHPHVRRDHWFRCVRRLQKLKRQETSTRFNSFAPQHISTIDDDESATITAKAKAAKLAIGNTPTSNINQVVDSVVKQEAETASRMGTGNLAPASSRVDSSTQSEDSFEAPKPPPSSVSWHVDAEDTYAAMYKAISNAKYEILIAGWWVCPDLFLLRPGRKLPPREADEDPDGQQVNKTMLRQVLMKKAEAGVKIYVLIYREVKLALTLNSAYTKRSLMVHPNIRVLRDPIFQIQSLGFWSHHEKIVCIDQSLAFVGGLDLCFGRYDHHGHPISDPSDDPVWTGKDYSNPIIKDFVRVNKPFEDLIDRASQPRMPWHDVHCSISGPPVQDVAYHLIQRWNFVCSKNDYQLRTGWCICFRSRRFKFLPKCLVPMDFNGWTLQYPSSDPEPMRDGSTRTTIPLVREDSLSMVEPFQVVQSVNPMYPCTATGPQWPPTSSLHPINPMRPPLTSASTTTGPLDDGEVLRAQRGESILQVFHPSANICNIQVCRSVSMWSAGVPTEASIQAAYMDVIANSKHFLYIENQFFVSGMDGNGIVRNRILQALVDRIERAVQRDEKFRVYVVMPLLPAFEGNIRSHELTNLHAVMHWQFATICRGRYSLFEALKGVTNHPENYVAFFGLRKYGIMPNGCAATEQIYIHSKLMIADDRCAILGSANINDRSMNGDRDSEIALVIEDMQYEDGVMNEKPYRRGVAASKLRLQLFREHLGLADDDLSVADPTSDHTWQAIKSTASSNTKIFEAVFDCAPSNRMRAFVNFQSIEVTQIFENQRMNVLKVPGRSHVWDAQNLKDGDYAPWTDVNGVPIAADRVDLRDFEVDNYRDKKKKLFSMDHDGWCYARNFSIFQEVRTMKTDYKKREKLQHLVADRLMAQVRRRRWVKKGLLPPRDPRESSFSLASDDEEHGRFYSLWRRLQQGDFSRSNSVSTPTNFSQLDTDGGISGSVSVGGTNHGRRLYNSNSMPSNASILGDNPTTRPPVLGDAPSYPNSPSVASFQHTPQSPAIATGARSVRSARTSSLLCTGAGVRTRGNTRSARGSFYGMFSVTGNRNLDTDDESSDAGSEYGGGHGIRASLKRWYSTMDVLDFGRRSKFNAEYFDTDEDHLHSDDPLLEDGRGSYHAATREGLLTEEAVEGSDDEDAECQIGHVQTAATVRKEDETRARAQLSEIRGHLVEFPLDFLVEEILKPSVLPADIHI

SEQ ID NO: 7293 - protein, 158 aa, Escherichia coli CFT073
MKLISNDLRDGDKLPHRHVFNGMGYDGDNISPHLAWDDVPVGTKSFVVTCYDPDAPTGSGWWHWVVVNLPADTRVLPQGFGSGLVAMPDGVLQTRTDFGKTGYDGAAPPKGETHRYIFTVHALDVERIDVDEGASGAMVGFNVHFHSLASASITAMFS

SEQ ID NO: 7294 - protein, 178 aa, Glycine max
MASSMISSPAVTTVNRAGAGMVAPFTGLKSMAGFPTRKTNNDITSIASNGGRVQCMQVWPPVGKKKFETLSYLPDLDDAQLAKEVEYLLRKGWIPCLEFELEHGFVYREHNRSPGYYDGRYWTMWKLPMFGCTDASQVLKELQEAKTAYPNGFIRIIGFDNVRQVQCISFIAYKPPGF

SEQ ID NO: 7295 - protein, 107 aa, Brassica napus
MARMKKSLFAILLSSPLLIICLIAFLADPISVGARRLLEEIPKLEIPKLPELPHPELPKFEVPKLPELPKPELPKLPDFPKPELPKMPEIPKPELPKFPEIPKPELP

SEQ ID NO: 7296 - protein, 317 aa, Ralstonia solanacearum
MSWQNWVVSWLARNRIKKPTERLPFDPIATRVNAETRSMPMPVRLPPDWRIVRADGALPGEWIEPADSDSLGDAPPVVFYLHGGGYFFCSPRTHRSITIGLAVHARARVFALDYRLAPEHPFPAAVLDALAGYRGLLAQRVAPSRIVVAGDSAGGGLSLALLVALRDAGDPLPAGAILYSPWTDLAATGASLVENDASDVMFRGAWMARGATLYLGDSGVPADHPLASPLYADFTGLPPLHCYVSTSEVLRDDTLRMAERARAAGVSVSVELGRRLPHVWPIFYPFLPEARKALRQSGDAVRRMTAGRAVPAECAPA

SEQ ID NO: 7297 - protein, 466 aa, Mesorhizobium loti MAFF303099
MVEPALSLNETGAPTNERFHLIQAAPLAGSIGAEARELITSSEDIFVTDQSGRKLIDGPAGMWCINVGHRNQALADTLRDQAMSMTYSTPWYTSNAPAEKLAQMLAERAPGDLNHVFLTTGGSSAVETAIRLVQFYNNVRGLPQKKLLISRQGSYHGSTYLTASLNGRPRDHDWMDGAGDLVRKLTCPNPFHRPANLSLEAFEDFLVNEFRALIEHEGAQQIAAFIAEPIQASGGVLMSPPNYLKRMRALCTENDILFITDEVVTAFGRLGHIFASQDVFGIQPDMITFAKGVTSGYFPLGGVMVSDRLLSELRRLNHPKANFVHGLTYSSHPIGCAVAIRNIELLEDGLLHHAREIGPYFQEQLRTLEELPLVGEVRGAGLMAGIECVADAKTEDRLDLDLTVGKRIDFHCQENGLLVRPLINMCVMSPPLTISRSQIDMMTDALRKGIEATADDLIREGLWKPA

SEQ ID NO: 7298 - protein, 481 aa, Burkholderia cepacia R18194
MANVTYTDTQLLIDGEWVDAASGKTIDVVNPATGKPIGKVAHAGIADLDRALAAAQRGFDAWRKVPAHERAATMRKAAALVRERADAIAQLMTQEQGKPLTEARVEVLSAADIIEWFADEGRRVYGRIVPPRNLGAQQTVVKEPVGPVAAFTPWNFPVNQVVRKLSAALATGCSFLVKAPEETPASPAALLRAFVDAGVPAGVIGLVYGDPAEISSYLIPHPVIRKVTFTGSTPVGKQLAAMAGLHMKRATMELGGHAPVIVAEDADVALAVKAAGGAKFRNAGQVCISPTRFLVHNSIRDEFTRALVKHAEGLKVGNGLEEGTALGALANPRRLTAMASVVDNARKVGARIETGGERIGTEGNFFAPTVIADVPLEADVFNNEPFGPVAAIRGFDKLDDAIAEANRLPFGLAGYAFTRSFANVHLLTQRLEVGMLWINQPATPWPEMPFGGVKDSGYGSEGGPEALEPYLVTKSVTVMAV

SEQ ID NO: 7299 - protein, 269 aa, Archaeoglobus fulgidus DSM 4304
MVWFFEYYDGCGLAIKVKKKLYEAEGVQKVEIYETESMGKMLVIDGKIQLTELDEPFYHEMLVHVPMLSHENPRKVAVIGGGDGGALREVLKHNVERAVLVDIDRNVIDLSRKFLKIDHGAFEDERVEIAIMDGKEFLRDCEIFDVIIVDSTDPVGVSDTLFDREFFELARQKCDVISLQSQSPLIQKEYFRTLLVNSAPFERRDVYLSCVPTYPLALWSFIIGGEYDFSNLEERFERIKGKTVHYNPDVHRAAFALPEWLKKEVEACI

SEQ ID NO: 7300 - protein, 496 aa, Mesorhizobium loti MAFF303099
MPSAAEPMARTNNNLTGASMQSDNASKFYIDGQWVMPGGAGRMDVVNPATEQSFMQIAIGTTEDADLAVQAAFEAFPTFSQTSRTERVELLRNVLRCYNDRYDDIARAVSTELGAPLKFAREAQAWAGQIHLESTIAALEAFSFDELHGSSMITWEPIGVCALITPWNWPLNQIVCKVAPALAAGCTVVLKPSELAPLSAIIFAEVLEEAAIPKGVFNLINGTGPEVGQYLAGHPRVDMVSFTGSTRAGIMVAKTAAETVKRVAQELGGKSANIVLADADLENAVVKGVEACFSNSGQSCDAPTRLLIPADRHAEALDIARRVAAATRVGDPSSEDTDMGPVISQQQFDKIQRMIGLGIEEGATLVAGGPGKPEGLDVGFYVKPTIFGGVTPEMTIAREEIFGPVLSIIPYDTEADAIRIANDSIYGLAAYVQGGSLEGARAVARKLQAGSVYVNYAPWDTHAPFGGYKQSGNGREYSHWGIRDFMEVKGIVGWGA

SEQ ID NO: 7301 - protein, 388 aa, Nicotiana attenuata
MEVISTNTNGSTIFKNGAIPMNGYQNGTSKHQNGHQNGTSEHRNGHQNGISEHQNGHKNGTSEHQNGHQNGTSEQQNGTISHDNGNELQLLGSSNSIKPGWFSEFSALWPGEAFSLKVEKLLFQGKSDYQDVMLFESATYGKVLTLDGAIQHTENGGFPYTEMIVHLPLGSIPNPKKVLIIGGGIGFTLFEMLRYPSIEKIDIVEIDDVVVDVSRKFFPYLAANFNDPRVTLVLGDGAAFVKAAQAGYYDAIIVDSSDPIGPAKDLFERPFFEAVAKALRPGGVVCTQAESIWLHMHIIKQIIANCRQVFKGSVNYAWTTVPTYPTGVIGYMLCSTEGPEVDFKNPINPIDKETTQVKSKLAPLKFYNFDIHKAAFILPSFARSMIES

SEQ ID NO: 7302 - protein, 192 aa, Sinorhizobium meliloti
MADRTSSKDVIHNGEFGNDALDLIEITGVIKWFDVAKGFGFIVPDNGMQDVLLHVTCLRRDGYQTVLEGARVVALIQKRDRGYQAFRILSMDQSTAVHPSQLPPVRTHVQVTPTSGLERVLVKWFNRTKGFGFLTRGEGTEDIFVHMETLRRFGLTELRPGQVVLCRFGDGEKGLMAAEIHPDGPTPTTRSH

SEQ ID NO: 7303 - protein, 1106 aa, Neurospora crassa
MVDMLGTNANVLQSRDPISEFLQLLQDPFAAQLSSNSIYAALGSSVSITVAVALGFSLVRPLNTVVYAPKLKHADDKHAPPQLGKGFFSWIKPLWTTTEQDLVRLVGMDATIFMRFTRMCRNIFLCLAVLCCCIQIPINWYKNAAPESPWLQKVTPMNVWNQWQWATVVMSWVTTLIVCFFLWWNYRKVCELRIQYLRSEEYQQSLHARTLMLYDIPKNLTSDEGIARIIDSVAPSSSFSRTAVARDVKILPTLIEEHEKTVRKLEQVLAKYLKDPKNLPVTRPVCRPSKKDPSFSTYPKDKKLDAIDYLTQRIKLLELEIKEVRQRIDKRGSMPYGFASYSDISEAHAIAYLCRSKKPQGARVTLAPKPNDIVWENMPLSSASRATRRLWNNLWITVLTVVWVAPNAMIAIFLVNLSNLARVWPDFQKSLETNRNFWAIVQGIASPALTSLVYMVLPIIFRRLSMKAGDMTKTGRERHVVAKLYSFFVFNNLFVFSLFSALWSFGATVIKNTATDDDAWQAILDADFGTTVFVSLCGISPFWVVWLIQRQLGAAIDLSQLWKLIYGSIMRKFTNPTPRELIELTAPPPFDYASYYNYFLFYATAALCYAPIMPLVLPAAGMYFAIDVALKKYLLMYVFVTKTESGGMFWRILFNRILFGLMLSHLIVFLVVWVRGFGYKTQAYAVVPLPILIIIFKFVCSWIYDNKITYFSTRIIKHRNAEEGFGLKEQGPRNDRLASRFGHPALYKPLITPMVHAKAQNILASVYQGRLSDGRDAGLGDSMSVSGYSDTYALDSMASGKVGKLSSAVPGFEVVPESRLDFEFYKNRDEFAADHGAGELFGRASDIVRPDTPGTMATGSDNNSRPGTPVGGMGFSHNRRFFSNQSDMGNTAYVGGYMSPSQQYSSNNQAPYSPPILGPSEVPGRGRSPLYHMGDNGNDSSSNLVYNAAGMPTSTPAGFEVADDGLHRERSFDSTRSRGALGGFSIPNPRAPGVLGASRYGYGNVPQTDDDMMQTPPNAIQSSHFQPNQGQNDPMQYDYFRGNRRQGPPPGAPGRGKPRRTVNEVVELSTLNKGKKRDILRFWVRKTTAESEHERLASSAPGDEEN

SEQ ID NO: 7304 - protein, 217 aa, Methanocaldococcus jannaschii DSM 2661
MKFFLDTANVEEIKKYAELGLVDGVTTNPTLVAKEGRDFYEVVKEICEIVEGPVSAEVISTDAEGMVKEARELAKLADNIVIKIPMTKDGMKAVKILSAEGIKTNVTLVFSPLQALVAAKAGATYVSPFVGRLDDIGHVGMKLIEDVVKIYKNYDIKTEVIVASVRHPWHVLEAAKIGADIATMPPAVMDKLFNHPLTDIGLERFLKDWDEYLKSRK

SEQ ID NO: 7305 - protein, 226 aa, Davidia involucrata
SLPNNATFFLTYVALKFFVGYGLELSRIVPLIIYHLKRKYLCKTQAELKEAWSPGDLGYATRFPGDMLIITIVLCYSVIAPIIVPFGVLYFGLGWLVLRNQVLKVYVPSYESYGRMWPHMHTRILAALLLYQVTMFGYFGVKKFYYVPILIPLPILSLIFAFVCKKKFYHFFQATALEVACREMKETPNMELVFRSFIPPSLSAEKSDDDQFEDAKSQVSRAASFV

SEQ ID NO: 7306 - protein, 422 aa, Azotobacter vinelandii
MSDLKTAALEYHAQPRPGKLSVELTKPTQTARDLSLAYSPGVAEPVREIARDPELAYRYTGKSNLVAVISDGTAILGLGNLGPLASKPVMEGKGVLFKRFAGVDVFDIEVDAESPQAFIDTVKRISVTFGGINLEDIKAPECFEIERALIEQCNIPVFHDDQHGTAIVTAAGMLNALEIAGKSLPTARIACLGAGAAAISCMRLLVSLGARVENIHMIDRQGVIHAGRDDLNQYKAVFAHETDKRTLADALDGADVFVGLSGANLLSAENLLRMAPNPIVFACSNPDPEISPELAHATRGDVIMATGRSDYPNQVNNVLGFPFIFRGALDVRATRINEEMKIAAAHALRELAKLPVPKAVCEAYGVSGLEFGREYIIPKPMDPRLITVVSDAVARAAIESGVASLPYPRHYPLQSVEEVFNS

SEQ ID NO: 7307 - protein, 521 aa, Glycine max
MHHQHNTTMSKTTTSSEQTARNRLATLAAHLLPSDATSAAAILHPHRLSAPTGDLPPANLKGTLTVVDERTGKKYQIEVTPDGTVRASDFKKISSGKNDKGLKLYDPGYLNTAPVISRISYIDGDAGILRYRGYPIEDLAEKSTFTEVSYLILYGNLPSESQLAEWEFALSQHSAVPQGVLDMIESMPHDAHPMGMLVNAMSALSVFHPDANPALKGLDIYDSKQIRDKQITRVIGKITTIAAAVYLRLAGRPPVLPSNKLSYTENFLYMLDSFGNRSYKPNPRLTRALDIIFILHAEHEMNCSTSAVRHLSSSGVDVYTAIAGAVGALYGPLHGGANEAVLKMLSEIGTVENIPAFIEGVKARKRKLSGFGHRVYKNYDPRAKVLRKLTEEVFSIVGRDPLIEIAVALEKIALSDEYFIKRKLYPNVDFYSGLIYRAMGFQPEFFTVLFAIPRMAGYLAHWRESLDDPDTKIMRPQQVYVGEWLRHYAPINQRTASSNTDKLGQLAVSNASKRRLAGSGA

SEQ ID NO: 7308 - protein, 313 aa, Pyrobaculum calidifontis
MPLSPILRQILQQLAAQLQFRPDMDVKTVREQFEKSSLILVKMANEPIHRVEDITIPGRGGPIRARVYRPRDGERLPAVVYYHGGGFVLGSVETHDHVCRRLANLSGAVVVSVDYRLAPEHKFPAAVEDAYDAAKWVADNYDKLGVDNGKIAVAGDSAGGNLAAVTAIMARDRGESFVKYQVLIYPAVNLTGSPTVSRVEYSGPEYVILTADLMAWFGRQYFSKPQDALSPYASPIFADLSNLPPALVITAEYDPLRDEGELYAHLLKTRGVRAVAVRYNGVIHGFVNFYPILEEGREAVSQIAASIKSMAVA

SEQ ID NO: 7309 - protein, 487 aa, Zea mays
MDPNGLKTGGLLLPTIERRCTSPPSVIVIGGGISGVAAARALSNSSFKVTVLESRDRIGGRIHTDNSFGCPIDMGASWLHGVCNENPLAPLISYLGLRLYRTSDDNSVLYDHDLESYALFDKDGNQVPKETVDKVGETFERILEETVKVRDEQEHDMPLLQAISIVFERHPHLKLEGLDDQVLQWCVCRLEAWFAADADEISLKNWDQERVLTGGHGLMVNGYYPVIEALAQGLDIRLNQRVTEITRQHNGVKVTTEDGTSYLADACIISVPLGVLKANVIKFEPELPQWKSSAIADLGVGTENKIAMHFDRVFWPNVEVLGMVGPTPKACGYFLNLHKATGNPVLVYMAAGRFAQEVEKLSDKEAVGLVVSHLKKMLPDATEPTQYLVSRWGSDPNSLGSYSCDLVAKPADVCARFAAPVENLHFAGEAASAEHSGSVHGAYSSGIAAAEECRKRLLALKGIPDLVQVAAWEEMAGAVAPLQICRT

SEQ ID NO: 7310 - protein, 156 aa, Glycine max
ASATQLFRPSKRRTARASSKKESIESQAGVSRSMVAPLLVLTLVMYIVVIGLASWNLNHFINGTTNYAGVAGNGATFYFLLFAILAGVVGAASKLAGVHHVRTWRGDSLATSASSALVAWAITALAFGLACKEIHVGGHRGWRLRVLEAFIIILAF

SEQ ID NO: 7311 - protein, 129 aa, Kineococcus radiotolerans SRS30216
MPTGKVKWFDADKGFGFLAAEDGAEVFVHASALPAGTTTLSKGSRVEFGVVQGKNGTQALSVRLLDPVHSVARATRKKPEDVVPIVEDLIKLLDGVSGSLRRGRYPDKAGAKKVATVLRAVADDFEAGA

SEQ ID NO: 7312 - protein, 508 aa, Haloarcula marismortui ATCC 43049
MSSDSKQQSATERKSAIKKRHEQAANEVLPDRRELYIGGEWVQSSGGETFETIDPTTGETLAEVQAGTAEDIDSAVAAAWNAYDETYSELSTGERQAMLDGIADAIAERSEEFAKLESLDNGKPITEARIDIDLVIDHFRYFAGLARSGEGRTIETDDSRHVQTLREPYGVVGQIIPWNFPLLMAAWKLAPALSAGNTVVLKPAEETPLSILKLMEITEDVIPDGVVNVVTGFGPEAGEPLSKHPDIRKLAFTGSTEIGSKVMQSAAESITDVTLELGGKSPLVVFPDADLEQAVQTTITSIFFNTGECCCAGSRLFVHEDIKDEFLDELAAAAEDLTVDDPLLESTDLGPKVTAEQVERTLGYIEEAEREGAAFVTGGSQPDDEALSDGCFVAPTLIDEIDHDSKAVQEEIFGPVQEVFSWSEYDEMIELANDVDYGLAAGVLTEDLSKAHQCAKDIEAGNIWVNTYNDFPAGQPFGGYKQSGIGREIGQETIDHYTQTKTVNISLD

SEQ ID NO: 7313 - protein, 262 aa, Oryza sativa
MSQPAELSREENVYMAKLAEQAERYEEMVEFMEKVAKTVDSEELTVEERNLLSVAYKNVIGARRASWRIISSIEQKEESRGNEDRCTLIKEYRGKIETELSKICDGILKLLDSHLVPSSTAPESKVFYLKMKGDYYRYLAEFKTGAERKDAAENTMVAYKAAQDIALAELPPTHPIRLGLALNFSVFYYEILNSPDRACNLAKQAFDEAISELDTLSEESYKDSTLIMQLLRDNLTLWTSDISEDAAEEIKEAPKGESGDGQ

SEQ ID NO: 7314 - protein, 175 aa, Zea mays
  unsure (1)..(175): unsure at all Xaa locations
MAGIGRNMVAPLLVLNLIMYIIVIGFASWNLNHFINGQTNYPXGVAGNGATFYFLVFAHPGPGVVGXAASKLAGVHXHVRAWXRHDSLATNAASSLIAWAITALAFGLACKEIHIGGHRGWRLRVLEAFVIILAFTQLLYVLMLHTGLFGGSGGYRDHDYGVGGAAGEPKGVTRV

SEQ ID NO: 7315 - protein, 361 aa, Triticum aestivum
MKTLLILTILAMAITIGTANIQVDPSGQVQWLQQQLVPQLQQPLSQQPQQTFPQPQQTFPQPQQTFPHQPQQQVPQPQQPQQPFLQPQQPFPQQPQQPFPQTQQPQQPFPQQPQQPFPQTQQPQQPFPQQPQQPFPQTQQPQQPFPQLQQPQQPFPQPQQQLPQPQQPQQSFPQQQRPFIQPSLQQQLNPCKNILLQQCKPASLVSSLWSIIWPQSDCQVMRQQCCQQLAQIPQQLQCAAIHSVVHSIIMQQQQQQQQQQGMHIFLPLSQQQQVGQGSLVQGQGIIQPQQPAQLEAIRSLVLQTLPSMCNVYVPPECSIMRAPFASIVAGIGALMMEHSGGTYTLHMDGRVCNTNDLIASN

SEQ ID NO: 7316 - protein, 121 aa, Glycine max
MASSMLSSAAVGTSPAQATMVAPFTGLKTSAAFPATRKANNDITSIASNGGRVSCMKVCPPDGKKKFETLSYLPDLTEVELGKEVDYLLRNKCTPCAEFQLEHEFVYRDHRSKPGYYDARY

SEQ ID NO: 7317 - protein, 188 aa, Zea mays
  unsure (1)..(188): unsure at all Xaa locations
HSECQTDSVCHVFDHLYEEYGDVLEGMLDGVLFFALVDTRNKSCIAIGDALGFRPWCMGWALGGSLWMTAXMNDWKHYRELSITFLXWHMYCSMTRGLRRSCNPPXFHRLLIKPXYIALLLQKMVDKTVITKLTTDVPLCVLLYCGLDSSVAASDCLQTLDETQGDRQWRTKWLTLCVGSEGTADLKA

SEQ ID NO: 7318 - protein, 81 aa, Triticum aestivum
KGSYSNWPVGVNRYEYDQLRAPVGGRVYFTGEHTSEHYNGYVHGAYLAGIDSADILMNKVLNNVEFKVRPKYDEEQKAEAK

SEQ ID NO: 7319 - protein, 382 aa, Pinus radiata
MDSNMNGLAKSNGCEISRDGFFESEEEELQGQAEAWKCTFAFAESLAVKCVVLLGIPDMIAREGPRATLSLGEIVAKLPTESPDAACLFRIMRFLVAKGIFRASKSAREGGAFETRYGLTPASKWLVKGRELSMAPMLLMQNDETTLAPWHHFNECVLEGGVAFQKANGAEIWSYASDHPDFNNLFNNAMACNARIVMKAILSKYQGFHSLNSLVDVGGGTGTAVAEIVRAYPFIRGINYDLPHVVATASSLSGVQHVGGDMFETVPTGDAIFMKWIMHDWNDEDCIKILKNCRKAIPDTGKVIIVDVVLDADQGDNTDKKRKKAVDPIVGTVFDLVMVAHSSGGKERSEKEWKRILLEGGFSRYNIIEIPALQSVIEAFPR

SEQ ID NO: 7320 - protein, 319 aa, Clostridium tetani E88
MRKIAVLTSGGDAPGMNAAIRAVVRTGLDKGITVLGIERGFDGLLNGEIFEMTRRSVADIIQRGGTILRTARSEEFKTEEGQKKATDILRVFGVEGLVVIGGDGSFQGAKSLSELGVKTIGIPGTIDNDLAYTDYTIGFDTAVNTVLDAINKLRDTSTSHGRASVVEVMGRNCGDIALYAGLAGGAESIIVPELRFDIDKLCKTILEGKKNGKMHNLIIVAEGAGKANDIAKTIEKVTGVGTRATVLGHIQRGGSPTANDRILASRMGNRAVELLLEEKSSRVVGINDNRIVDMDIHEALSIEGKFDEKLYEIAKALSY

SEQ ID NO: 7321 - protein, 420 aa, Listeria monocytogenes str. 1/2a F6854
MSQKIQVENGVLKTPNNPVIPFIEGDGTGPDIWAAAKRVLDAAVKKAYNGEKEIAWKEVLAGEKAFKQTGEWLPQATLDTIDEYLIAIKGPLTTPIGGGIRSLNVALRQELDLYVCLRPVRYFKGVPSPVKRPEDTDMVIFRENTEDIYAGIEFKEGSIESKKLIDFLKSEFGVDKIRFPETSGIGIKPISKEGTERLVRSAIEYAIKEGRKSLTLVHKGNIMKFTEGAFKNWGYNLCEREYGDKVFTWNEYDRIKEAEGTEVADAKQNEALAAGKILVKDSIADIFLQQILTRPAEFDVVATMNLNGDYISDALAAQVGGIGIAPGANINYLTGHAIFEATHGTAPKYAGLDKVNPSSVILSGTLLLEHIGWGEAAALINQSMEKTIAAKTVTYDFARLMDGATEVKCSEFADELIKNF

SEQ ID NO: 7322 - protein, 184 aa, Physcomitrella patens subsp. patens
MASAVASTVVAPVSVTVASSSVAASRESSSVKAFSGLKSATLFTSKSQQLSSVQNGSRVQCMQVWNPIGQPKFETFSYLPPLSDDQIARQVDYMIQQNLIPCIEFDTVGAVSRTNFSGSGSSGYYDGRYWTMWKLPMFGCTDSSQVLREIQECKTSYPSCWVRVLGFDSKKQVQICGFLVARPN

SEQ ID NO: 7323 - protein, 337 aa, ASPERGILLUS NIDULANS FGSC A4
MTTSRWWLYVQAVFWRCLMRLGMIFHNIPHPRPPSPSFSRSFPSGSSKVVLQFYCPPGYSQTRKEGRRLPVVVNFHGGGFTLGGPSDDSRWAQAVLSEVGAVVVSVGYRRAPEHPFPAAVDDGVLALQYLASHAVELGLDISRIALSGFSAGGNLAVTVPLRFRDMLIQAEHEGWLSRADSTVQLVSPTASDLHIVALFCWYPILDFEEPREHRRAMSIEPNKTLPSFFTNLFDESYLPDLEQRKSPYASPVHATDDALRDSLPHDIFFFICEWDMLLNEGQLFCRRLQDINKHVRAMMVEKARHAWDKSPNPFRNTTEVNILYKDACADMKAIFEK

SEQ ID NO: 7324 - protein, 371 aa, Nicotiana attenuata
MEVISTNTNGSTIFKNGAIPMNGHQNGTSKHQNGTSEHPNGHQNGTSEHQNGHQNGTSEQQNGTISHDNGNKLVGNSNCIKPGWFSEFSALWPGEAFSLKVEKLLFQGKSDYQDVMLFESATYGKVLTLDGAIQHTENGGFPYTEMIVHLPLGSIPNPKKVLIIGGGIGFTLFEMLRYPSIEKIDIVEIDDVVVDVSRKFFPYLAANFNDPRVTLVLGDGAAFVKAAQAEYYDAIIVDSSDPIGPAKDLFERPFFEAVAKALRPGGVVCTQAESIWLHMHIIKQIIANCRQVFKGSVNYAWTTVPTYPTGVIGYMLCSTEGPEVDFKNPVNPIDKETTQVKPKLAPLKFYNSDIHKAAFILPSFARSMIES

SEQ ID NO: 7325 - protein, 271 aa, Dunaliella salina
MGYVKVVKTSPYFSRYQVKYRRRRQGKTDYRARLRLVRQDKNKYNTHKYRLVVRFSNKNVTCQIVYSTIQGDVVMAAAYSKELPNYGLKVGLTNYSAAYCVGLLVARRILTKLNLADTYKGQEEPDGEDYNVEPVEDGPKPFYCLLDTGLKRTSTGSKVFAAMKGALDGGLDIPHNEKRFVGYADKKLDTEVLQKYIYGGHVAEYQETMQEEEPEKYQAHFSSYVENEIEPDGIEDMYKEVHAKIRENPCPPKKERTKPADAKRWSPQAHL

SEQ ID NO: 7326 - protein, 383 aa, Neurospora crassa
MATDGKSNLSFVLNKPLDVCFQDKPVPKINSPHDVLVAVNYTGICGSDVHYWLHGAIGHFVVKDPMVLGHESAGTIVAVGDAVKTLSVGDRVALEPGYPCRRCVHCLSGHYNLCPEMRFAATPPYDGTLTGFWTAPADFCYKLPETVSLQEGALIEPLAVAVHITKQAKIQPGQTVVVMGAGPVGLLCAAVAKAYGASKVVSVDIVPSKLEFAKSFAATHTYLSQRVSPEENARNIIAAADLGEGADAVIDASGAEPSIQAALHVVRQGGHYVQGGMGKDNITFPIMALCIKEVTASGSFRYGSGDYRLAIQLVEQGKVDVKKLVNGVVPFKNAEEAFKKVKEGEVIKILIAGPNEDVEGSLDTTVDEKKLNEAKACGGSGCC

SEQ ID NO: 7327 - protein, 180 aa, Escherichia coli
VPENPIIPYIEGDGIGVDVTPAMLKVVDAAVEKAYKGERKISWMEIYTGEKSTQVYGQDVWLPAETLDLIREYRVAIKGPLTTPVGGGIRSLNVALRQELDLYICLRPVRYYQGTPSPVKHPELTDMVIFRENSEDIYAGIEWKADSADAEKVIKFLREEMGVKKIRFPEHCGIGIKPCS

SEQ ID NO: 7328 - protein, 439 aa, Pyrobaculum aerophilum str. IM2
MAVDIEKIKQGIPNIVPYAGKYVDPPEGDYVEYTGPGQFKVPDKVVIGYIEGDGIGPEVAYAAIRVANAAVEKAYGKSRKVIWYEVVVGEKAEKIFGNRLPDQSINVLKKIRVFLKAPLETPVGGGFRSINVTLRQLFDLYANIRPVKYFPGLPSPLKRPEVVDLVIFRENTEDVYAGIEWPYNSPEASKIRDFLRREFGINIRDDAGIGIKPISKFGTQRIARLALKFAIENKRRVVTVMHKGNIQKYTEGAFKDWAFEVARNEFREHVVFEDELAQYGGQVPPGKVLVNDRIADNMLQQLLTRTGEYDVILAPNLNGDYVSDEAAGLVGGLGVAPGIDVGDWGMMAEPVHGTAPKYRGKNYVNPTATILALELLFRFLGWREAANYIIKGVETAYREGYFTGDLARQMDEEERKHRVKEVLGTQEFADKVVEIIKRL

SEQ ID NO: 7329 - protein, 424 aa, Methylobacillus flagellatus KT
MNILIKQGRLIDPRHRVDAVQDLYVSNGKVVGIDHAPDDFMPNEVIDASGLIVCPGLVDVSARLREPGNEYKASLKSELHAAVAGGVTSLACPPDTDPVLDESGLVEMLRHRAKQLHLSNVHPLGALTRQLAGKQLTEMSELTDAGCVGFSQADEPIMDTLVLWRALQYAATFGFTVWLRPQEPYLAQGGVAHDGEVAARLGLKTIPVAAETLALATILHIVRETGAKVHLCRLSSAEGVAMVREAKQQGLHISSDVSAHHLHLTEHDIGFFDANCHLRPPLRSQRDRDALRQGLADGTIDLVCSDHAPVDDDAKLVPFGEAEAGATGLELLLPLTLKWAEEQKVALVEALARITSTPANILGIAKGHLGLNAAADICIFDPAQYWKVTAANLRSQGKNTPLNGLELAGKVRYTIVNGGIAYRS

SEQ ID NO: 7330 - protein, 503 aa, Chrysanthemum lavandulifolium
MTTIPSRQLFIDGEWREPVKKNRIPVINPSTEQIVGDIPAATAEDVDVAVKAARKALKRNGGKDWASATGAHRAKYLRAIAAKITGKKELFSKLEAIDCGKPYDEAAWDIDDVAGCFEYNADLAEALDKKQNAPIELPMDTFKCHVIKEPIGVVGLITPWNYPLLMATWKVAPALAAGCAAILKPSELASLTCLELGEVCKEVGLPAGVLNILTGLGPDAGAPLAAHPDVDKIAFTGSSATGSKIMTAAAPNVKPVTLELGGKSPIVVFDDVDIDKAVEWTLFGCFWTNGQICSATSRLILHESIAKEFLDKLVKWAKNIKISDPLEEGCRLGPVVSSGQYERVLKFVETARSEGATILSGGQRPQHLKKGFFIEPAIITDITTSMQIWRDEVFGPVLCVKTFSSEEEAIELANDTHYGLGSAVISNDLDRCDRVTRAFDAGIVWVNCSQPCFCQAPWGGKKRSGFGRELGEWGLDNYLSVKQVTRYISNDAWGWYTPPSPKL

SEQ ID NO: 7331 - protein, 365 aa, Aegilops tauschii
MKTFLIFALLAVAATSAIAQMETSHIPGLEKPSQQQPLPLQQILWYHQQQPIQQQPQPFPQQPPCSQQQQPPLSQQQQPPFSQQQPPFSQQELPILPQQPPFSQQQQPQFSQQQQPFPQQQQPLLLQQPPFSQQRPPFSQQQQQPVLPQQPPFLQQQQQQPILPQQPPFSQHQQPVLPQQQIPYVQPSILQQLNPCKVFLQQQCSPVAMPQSLARSQMLWQSSCHVMQQQCCQQLPRIPEQSRYDAIRAIIYSIVLQEQQHGQGFNQPQQQQPQQSVQGVSQPQQQQKQLGQCSFQRPQQQQLGQWPQQQQVPQGTLLQPHQIAQLELMTSIALRTLPMMCSVNVPVYGTTTSVPFGVGTQVGAY

SEQ ID NO: 7332 - protein, 251 aa, Triticum aestivum
GAMEQGEEDGDWMVEPAAGKKGGAMIDRKKRFSEEQIKSLESMFATQTKLEPRQKLQLARELGLQPRQVAIWFQNKRARWKSKQLERQYAALRDDYDALLSSYDQLKKDKQALVNQLEKLAEMLREPGGAKCGDNAGAAARDDVRLAVAGMSMKDEFVDAGGASKLYSASEGCGGSGKLSLFGEDDDDAGLFLRPSLQLPTAHDGGFTASGPAEYQQQSPSSFPFHSSWPSSAAEQTCSSSQWWEFESPSE

SEQ ID NO: 7333 - protein, 384 aa, Rickettsia bellii
DISKVYSEADCFTYDPGFMSTASCRSTITYIDGDQGILRHRGYDIKDLAEKSDFLEVAYLLIYGELPNNKQYNDFTKKVAHHALVNERLHYLFQTFCSSSHPMAIMLAAVGSLSAFYPDLLNFFKEADYELTAIRMIAKIPTIAAMSYKYSIGQPFVYPDNSLDFTENFLHMMFATPCEKYKVNPVIKNALNKIFILHADHEQNASTSTVRIAGSSGANPFACVSTGIASLWGPAHGGANEAVINMLKEIGSVENIPKYIAKAKDKNDNFRLMGFGHRVYKNYDPRAAVLKETCKEVLKELGQLDNNPLLQIAIELEAIALKDEYFIERKLYPDVDFYSGIIYKAMGIPPQMFTVLFATARTVGWMAQWKEMHEDPEQKISRPR

SEQ ID NO: 7334 - protein, 1048 aa, Magnaporthe grisea 70-15
MTTAISSNHEPPYPPSSGDRGQAYPPVSRSQSTRHRPSTAQPPAPHRSVSHNHSGSMSSRPSSSARPVQDVLPNNDYETTNVAQKATKDSRPPQSSRDTATRQHRRSGSQRSGHHGHDGNAEAGPSTPSQASHGSSDPRTRKMRTVIPAQSGKWNLGKTIGAGSMGKVKLARKEDGTEQVACKIIPRVTPDDGHTPRAERERADLSKEVRTAREAAIVTLLSHPHICGLRDVVRTNFHWYMLFEYVNGGQMLDYIISHGKLKEKQARKFSRQIASALDYCHRNSIVHRDLKIENILISKTGDIKIIDFGLSNLFAPKSHLKTFCGSLYFAAPELLQARPYTGPEVDVWSFGIVLYVLVCGKVPFDDQNMPALHAKIKKGVVDYPNWLSSECKHLLGRMLVTDPKQRITMAEILSHPWMVKGYSGPPENYLPNREPLTLPLDQEVINGMTGFSFGPPEVIKAQLTRIIESEDYQRSIRAYQREKETQQTPKDPEKKRGFGFYRRRNSFSSKDTLTTPSSEGLALGNDPLNAFNPLVSVYYLVREKQEKDSASRRPATSARPNAVPEIAPPQEAHTNASAYEMPGENATGGRTRPRARTHGEDDAPTEPIRPPQLSPPAAPPPERLEPPKKESAAAGLLRRFSTRRRKEQPERLDKDRSHPPVVQVHSPAENSSQPTSAIRKSFSIRRGRRDREEQASAESQARMRAGSSQPQHSDLLSPPLSAGANTQTFRKGLGRSASVNSGEFSRRRAMGTARTSKDPPPTSGSDHSTIHEKPPKEQQEKRSPTTAGPSQSMTSRAKSLGHARQESIQARRQRREAEKKREANVPEETDAEVNGADDSSKERVTDFDLDKPVYLKGLFSVSTTSGKPVREIRTDIKRVLKQLGVDYTEIKGGFYCRHSPSIDLQNVADNGAASPAQTPSGAKRRFSFGALRSDGKEESNGERVPVTPRTPGRSGGGSGTDRDRHDSSSEVSENSEAREETSRRRDHPAGETRTHVRSDMGESMVSEFEIFIVKVPMISLHGIQFKRLGGNTWQYKNLADQILKELKL

SEQ ID NO: 7335 - protein, 471 aa, Rhodobacter sphaeroides 2.4.1
MMADAPLILWFRRDLRLADNPMLAEAAATGRPLIPLFILDPETEALGAAPKWRLGLGVEAFARALEGLGSRLVLRRGPALAVLEALVAETGAAGVHWSRLWEPDWRARDEGVKAGLRQAGIEAASHAGHTIFEPREVETGQGGFYRVYTPFWKAVKDRPVAASSPPPARLLSPAEWPVSERLACWDLGRAMHRGAAVVAPHLAVGEAAAAERLTRFLSGPLDRYAAERDRPDAPVTSRLSENLTYGEISARSLWHAGMRARAEGRAGAEKFLQELAWREFGWHLLYHTPEIARRNWRGDWDAFPWRGDNPDAERWRRGMTGEPFVDAAMRELFVTGTMHNRARLIAGSYLTKHLLTDWRVGQAWFEDCLIDWDPASNALGWQWVAGSGPDASPYFRIFNPATQAEKFDPESAYRQRFLAEIARRPGPEALAFFEAVPRSWGLRPDRCYPRPVVGLAEGRERALAAYGRRNN

SEQ ID NO: 7336 - protein, 506 aa, Chrysanthemum lavandulifolium
MTTTIPIPSRQLFIDGEWREPVKKNRISVINPSTEQIVGDIPAATAEDVDVAVKAARKALKRNGGKDWASATGAHRAKYLRAIAAKITEKKELFSKLEAIDCGKPYDEAAWDIDDVAGCFEYNADLAEALDKKQNAPIELPMDTFKCHVIKEPIGVVGLITPWNYPLLMATWKVAPALAAGCAAILKPSELASLTCLELGEVCKEVGLPAGVLNILTGLGPDAGAPLAAHPDVDKIALTGSSATGSKIMTAAAQNVKPVTLELGGKSPIVVFDDVDIDKAVEWTLFGCFWTNGQICSATSRLILHESIAKEFLDKLVKWAKNIKISDPLEEGCRLGPVVSSGQYEKVLKFVETARSEGATILSGGQRPQHLKKGFFIEPAIITDITTSMQVWREEVFGPVLCVKTFSSEEEAIELANDTHYGLGSAVISNDLDRCDRVTRAFDAGIVWVNCSQPCFCQAPWGGKKRSGFGRELGEWGLDNYLSVKQVTRYISNDAWGWYTPPSPKL

SEQ ID NO: 7337 - protein, 344 aa, Aegilops tauschii
MKTFLIFALLAIAATSAIAQMETSRVPGLEKPWQQQPLPPQQQPPCSQQQQPFPQQQQPIIILQQSPFSQQQQPVLPQQQPVIILQQPPFSQQQQPVLPQQPPFSQQQQPPFSQQQQPVLPQQPPFSQQQQPPFSQQQQPSSQQPPFPQQHQQFPQQQIPVGQPSVLQQLNPCKVFLQQQCSHVAMSQRLARSQMWQQSSCHVMQQQCCQQLPQIPEQSRYEAIRAIVYSIILQEQQQGFVQPQQQQPQQSGQGVSQHQQQSQQQQQLGQCSFQQPQQLQQFGQQPQQQQIPQGIFLQPHQISQLEVMTSIALRTLPTMCGVNVPLYSSTTSMPFSIGTGVGGY

SEQ ID NO: 7338 - protein, 396 aa, Triticum aestivum
MALSISAPTSSPFLPAPRQVGRWSSSPSSAKPAVFSLRRPVVVARAAAGNAPSSPAGAVVTEFDVPSGRSEIVPDTGVFDDFEKFAPTAATVSSSLLLGIAGLPDTKFKSAIDTALVDGECNTMEKPGDRMSCYLTKALGNVGAELALQVPGRVSTEIDARLAYDTQGIVQRVHELLQIYNEHDIPSERLLFKIPATWQGIEASRLLESEGTQTHLTFVYSFAQAAAAAQAGASVVQIFVGRIRDWAKNHSGDPEIDEALKKGEDAGLALVKKAYVYIHKNGYKTKLMAAAVRNKQDVFSLLGIDYIIAPLKILQSLDESVTDSDEKYGYVQRLTPSLDKMYNFSQEELVKWDHLSLAAAMGPAAEELLASGLEGYANQARRVEELFVKIWPPPNV

SEQ ID NO: 7339 - protein, 143 aa, Triticum aestivum
MAMAYKMATEGMNIKEECKRWFTEMKWKKVHRFVVYKIDERTRAVLVDKVGGPGEGYEELVAALPGDDCRYAVFDFDFVSVDNCQKSKIFFIAWSPAASRIRAKILYATSKQGLRRVLEGVHYEVQATERSEMGFDVIRERAQ

SEQ ID NO: 7340 - protein, 407 aa, Zea mays
MMSKTKAAVRPRSWHLPFLFLLLLAQTCSPQEQGGGGALHGSFVRCVARLSPATTDTSRLVHAPSAASYPSLLNATIQNLRFASPRTPRPALLLTPATVAEARACVTCCRRHGLTVRARSGGHDYEGLSYRSVAGARPFAVVDVAALRDVRVDAGRRVARAGPGATLGELYYAVTRESGGALGFPAGICPTVCVGGHLSGGGFGPMMRKHGLGADNVVDAEVVDAEGRLLDRAAMGEGLFWAIRGGGGGSFGVVVSWTVRLVPVPPVVGVFTVRRLVRRGDQRQTQAAVRLLTKWQRVAHALPEDLFVKVAMEPEVDDAGERHPSVTFKSLFLGNCSGMVAEMSAHLPELDVRAGDCREMSWIQSTLYFYGYTGEQAAEVLLDRSLQPKDYYKVKLDYLTSPIPAAG

SEQ ID NO: 7341 - protein, 213 aa, Zea mays
MAATRVSPVLLLLLTVQLSLLFRLPDSPSTLALALAAEPEQQNAKQHRQPALLVQSTCNSTSFYDLCIAALAADPASSTADVPGLGAIAVSAAANNASGTAAFLGNASDAAATPQADRALLRTCAGKYAAARDALVQARASLAEQAYDYAFVHVSAAGEYPAVCRTLFRRRQQQRGASRTAYPAELAKREEALRRLCTIALDIISLLQNQETY

SEQ ID NO: 7342 - protein, 240 aa, Glycine max
MHLSNLIHTVPTRDMRVVNGELCCLENPLPPTHFASSSSSFLCFVNTEMSAVNITNVTVLDNPASFLTPFQFEISYECLTALKDDLEWKLIYVGSAEDETYDQLLESVLVGPVNVGNYRFVLQADPPDPSKIREEDIIGVTVLLLTCSYLGQEFIRVGYYVNNDYDDEQLREEPPPKVLIDRVQRNILSDKPRVTKFPINFHPENNENEEQQPPPSEHPSETGEDPLAVVDRDPPDEKDS

SEQ ID NO: 7343 - protein, 243 aa, Schizosaccharomyces pombe
MSLAFTLLTSKDNTDEDEEHLELSSFNQEKLLEMISVFLSRLTRLNDSKQEATESDQIPLSPTSLKNPCLIFSAKNVPSISIQAYLTRILKYCPATNDVFLSVLIYLDRIVHHFHFTVFINSFNIHRFLIAGFTAASKFFSDVFYTNSRYAKVGGIPLHELNHLELSFFVFNDFNLFISLEDLQAYGDLLLSWYRQNGQNYNPTDVSCSIESPISHTPQQNQQDEQPRRPIMDRRLLSSHSIG

SEQ ID NO: 7344 - protein, 364 aa, Glycine max
  unsure (1)..(364): unsure at all Xaa locations
MARRSLPLLKHLLSRRIPARSVTYMHRPGDGSPRPVTLIPGDGIXGPMVTGAVEQVMEAMHAPXYFEKFEVHGNMKXVPPEVLDSIRKNKVCLKGGLVTPXGGGVSSLNVQLRKELDLYASLVNCFNLPGLPTRHDNVDIVVIRENTEGEYSGLEHEVVPGVVESLKVITKFCSERIAKYAFEYAYLNNRKKVTAVHKANIMKLADGLFLESCREVATKYPGIKYNEIIVDNCCMQLVSKPEQFDVMVTPNLYGNLVANTAAGIAGGTGVMPGGNVGAEHAVFEQGASAGNVGSDKIREQKKANPVALLLSSAMMLRHLQFPAFADRLETAVEKVILEGKCRTKDLGGTSTTQEVVDAVIDALD

SEQ ID NO: 7345 - protein, 504 aa, Arabidopsis thaliana
MVVINSLRRLARTTQVHLHSRYATCMSGNSTSRRIFTTEAAPEKKNTVGSKGHDMLAPFTAGWQSADLDPLVIAKSEGSYVYDDTGKKYLDSLAGLWCTALGGNEPRLVSAAVEQLNTLPFYHSFWNRTTKPSLDLAKVLLEMFTANKMAKAFFTSGGSDANDTQVKLVWYYNNALGRPEKKKFIARKKSYHGSTLISASLSGLPPLHQNFDLPAPFVLHTDCPHYWRFHLPGETEEEFSTRLAKNLEDLIIKEGPETIGAFIAEPVMGAGGVIPPPATYFEKVQAVVKKYDILFIADEVICAFGRLGTMFGCDKYNIKPDLVTLAKALSSAYMPIGAILMSQEVADVINSHSSKLGVFSHGFTYSGHPVSCAVAIEALKIYKERNIPEYVAKVAPRFQDGVKAFASGSPIIGETRGTGLILGTEFVDNKSPNEPFPPEWGVGAFFGAECQKHGMLVRVAGDGILMSPPLIISPEEIDELISIYGKALKATEEKVKELKAQHKK

SEQ ID NO: 7346 - protein, 183 aa, Triticum aestivum
  unsure (1)..(183): unsure at all Xaa locations
PKHSTKFNNKQSNAVQPEEIDRARDQRARMAGMVFGLDAPMMAALQHLLDIPDGEAGAAGGEKQGPTRAYVRDARAMAATPADVKELPGAYAXVVDMPGLGSGDIKVQVEGEGVLVIGGERGREEKEDAKYRRMERRRKFVLPENADMEKISAVCRDGVLTVTVHKLPAPEPKKPKTIQVQVA

SEQ ID NO: 7347 - protein, 499 aa, Cicer arietinum
MEYNFLTYIIFLSLFLITTKLLFSKRKFKKLPPCPPSIPIIGNLHQVKQPIHHTFYNLSKKYGPIFTLKFGSQPVVVVSSASLVEECFTKNDIIFANRIHSAKTKYLGYNNTNMVSTSYGDLWRNLRRISSIEILSTHRLNSFSEIRKDETMRLIGKLAKKSHKDFTKVELRSLFGELTFNTIMRMVCGKRFYGEESDGTNAEEAKKFRDMMNEMQEFGLGSNLGDFVPLFKLFDFSGGHKKLKKVGEKMDALFQGLVDEHRNNKDKNLNTMIDHLLSLQESQPDYYSDQIIKGLIMALIVAGTETSSVTLEWAMSNLLNHPEILEKAKIELDNHIGQEHLIEEAEATKLQYLQNIISETLRLHPPVTMLLPHLSSHDCTIGGYDVPRNTMLMVNAWAIHRDPNLWADPMSFKPERFENGQGDIGGFIPFGMGRRACPGSGLALRTLGLTLGSLIQCFEWKRIGKEEVDMSEGSGTVVPKAIPLEAQCKARPIINKIFN

SEQ ID NO: 7348 - protein, 365 aa, Apium graveolens
MAKSSEIEHPVKAFGWAARDTTGLLSPFKFSRRATGEKDVRLKVLFCGVCHSDHHMIHNNWGFTTYPIVPGHEIVGVVTEVGSKVEKVKVGDNVGIGCLVGSCRSCESCCDNRESHCENTIDTYGSIYFDGTMTHGGYSDTMVADEHFILRWPKNLPLDSGAPLLCAGITTYSPLKYYGLDKPGTKIGVVGLGGLGHVAVKMAKAFGAQVTVIDISESKRKEALEKLGADSFLLNSDQEQMKGARSSLDGIIDTVPVNHPLAPLFDLLKPNGKLVMVGAPEKPFELPVFSLLKGRKLLGGTINGGIKETQEMLDFAAKHNITADVEVIPMDYVNTAMERLVKSDVRYRFVIDIANTMRTEESLGA

SEQ ID NO: 7349 - protein, 169 aa, Saccharomyces cerevisiae
  unsure (1)..(169): unsure at all Xaa locations
GAHXVTSNVVLVSGEGERFTVDKKIAERSLLLKNYLNDXGDDDDEDDDEIVXPVPNVRSSVLQKVIEWAEHHRDSNFPDEDDDDSRKSAPVDSWDREFLKVDQEXLYEIILAANYLNIKPLLDAGCKVVAEXIRGRSPEEIRRTFNIVNDFTPEEEAAIRRENEWAEDR

SEQ ID NO: 7350 - protein, 276 aa, Mesorhizobium loti MAFF303099
MPELITLNDGAAIPQLGLGVWQVDHGITADVVGWAIKAGYRLIDTAQGYQNEEGVGEAIRAADVARSELYITSKLRNGAHERDAALRAFDDTMEKLGIEQIDLFLIHWPVPSRDKYVEAWKTLIELKQAGRIKSIGVSNFNRDHLERIIGETGVVPVANQIELHPRFQQRELREFHAGHNIQTESWSPLGSGRLLGDPTIAGIAKKHGKSAAQTIIRWHLQQGLIVIPKSVRQDRIAANFDVFDFELDAQDLKTIAGMDSADGRDGPNPATAAFLF

SEQ ID NO: 7351 - protein, 383 aa, Rickettsia sp. COOPERI
DISRVSAEADCFTYDPGFMSTASCQSTITYIDGDKGILRHRGYDIKDLAEKSDFLEVAYLLIYGELPSGEQYNNFTKQVAHHSLVNERLHYLFQTFCSSSHPMAIMLAAVGSLSAFYPDLLNFKEADYELTAIRMIAKIPTIAAMSYKYSIGQPFIYPDNSLDFTENFLHMMFATPCTKYTVNPIIKNALNKIFILHADHEQNASTSTVRIAGSSGANPFACISTGIASLWGPAHGGANEAVINMLKKIGSSEYIPKYIAKAKDKNDPFRLMGFGHRVYKNYDPRAAVLKEACKEVLKELGQLDNNPLLQIAIELEAIALKDEYFIERKLYPNVDFYSGIIYKAMGIPSQMFTVLFAIARTVGWMAQWKEMHEDPEQKISRPR

SEQ ID NO: 7352 - protein, 357 aa, Anabaena variabilis ATCC 29413
MRKKIGILTSGGDCPGLNCVIRAVVSHATLTYDWEVFGIPYATQGLLERQAIALNMHGWDLRGIDPLLNMGGTILGTINKGDTLAHVDEMLASYEALALDALIVIGGDGSLGILHELASRGNWNLVAIPKTIDSDVALTERAVGFDTAVNTIVDALNRLTFTAASHDRVMIVEVMGRSAGHLALHAGIAGGADVILIPEISYTISGLCQYIAELRDRWQRKFAIVVVAEGAKLCLEDVQENIASACVSPKCGRGQYIAEQIARCSKNLIDTRVSVLGHIQRGGIPSALDRLTATVFGKTAVDLVAQGKFGQMVAWQNGEAIPVPIQDVVAQSPLHVNPQGSLVQSARCLGIYVGEKT

SEQ ID NO: 7353 - protein, 244 aa, Oryza sativa (japonica cultivar-group)
MFRYEKGGDVEAGTSGGARELYPGMTEPPEMRWALIRKIYVILSMQLLLTAAVAAVVVKVRAISHFFVSSHAGLGLYIFLIILPFIVLCPLYYYHQKHPVNLILLGLFTVAISFAVGMTCAFTSGKVILESAILTTVVVFSLTAYTFWAAKRGRDFSFLGPFLFASLIVLLVFAFIQILFPLGRISQMIYGGIASLIFSGYIVYDTDNIIKRYTYDQYVWAAVSLYLDVINLFLSLMTLFRAAD

SEQ ID NO: 7354 - protein, 478 aa, Bacillus anthracis str. A2012
MKIAGRNLNHHGTSAAFVKNKLLWKVEEMMKTKQTDELLAKDEQYVWHGMRPFSPNSTMVGAKAEGCWVEDIQGKRYLDGMSGLWCVNSGYGRKELAEAAYKQLQTLSYFPMSQSHEPAIKLAEKLNEWLGGEYVIFFSNSGSEANETAFKIARQYYAQKGEPHRYKFMSRYRGYHGNTMATMAATGQAQRRYQYEPFASGFLHVTPPDCYRMPGIERENIYDVECVKEVDRVMTWELSETIAAFIMEPIITGGGILMPPQDYMKAVHETCQKHGALLISDEVICGFGRTGKAFGFMNYDVKPDIITMAKGITSAYLPLSATAVKREIYEAFKGKGEYEFFRHINTFGGNPAACALALKNLEIIENENLIERSAQMGSLLLEQLKEEIGEHPLVGDIRGKGLLVGIELVNDKETKEPIDNDKIASVVNACKEKGLIIGRNGMTTAGYNNILTLAPPLVISSEEIAFVIGTLKTAMERI

SEQ ID NO: 7355 - protein, 198 aa, Zea mays
  unsure (1)..(198): unsure at all Xaa locations
MASSMLSSAAVVTSPAQATMGAPFTGLKSSAAFPVTRKANNDITSIASNGGRVSCMKVCPPAAKKKFETLSYLPDLTELELGXGEVDYLLRNKWIPCVEIRCWKHGILCNREHGSTPRNTTRARYWTMWEAFPLFRMALNSWLQGVERKTPKKGRNREVTPKTLPLHQGILRDFNTTTRPRPQGDSSFQSPQTSPHKL

SEQ ID NO: 7356 - protein, 438 aa, Pirellula sp. 1
MSPSLFFAAIFCGSCFLLFVGSADAIEEWEWKRLTRKRLPKLRSGKAIDAVSAKLADQSASAAKPDVTNHPSRWKGWRSASVQSVKDESLDCRSFVFVPTDGEPFPPFLGGQYLTVRLKDPSSGKNVSRCYSLSSGPDEPHYRITVKRVPGGTMSNLLHDTIDVGDRIEIQAPKGRFHYSVEESQSANLEPLNLVAAGIGITPMLSMLFQSLNERTDRDVNLFYQVRNAVDAPFLAPIREIAKMLEATTGVRVHLWFSKPEDDDLRPGDSVGRLSAERIVERLGHHRGEYLICGPDVFMNAIAEGLIECGASADRVMFESFGGKSKSAGALAVPACDPCSDASDVDESNSDDSVGWNVTFQTSGKSASFEAGMDGLLDVAESLDVDVDSGCRSGDCGACVRRLLSGEVRYAETPECDVEDGEAVLCVAKPVSEVVVDA

SEQ ID NO: 7357 - protein, 336 aa, Escherichia coli CFT073
MDKITQVLFSDIGKVTTQYVEVPHQQLKPHEVRIAPVFYGICGSDLHVLKGGHPFAKPPVVPGHEIAARVTEVGSDVKNVQPGDHVVVDPIMACMECRACKAGRFNLCEPPQVAGFRAPGFARSQHIVPARNCHVAPASLPLKVLAFAEPAACARHCVNRMPKASLESVLVIGAGTIGLSIVQALRIMGAGKITVIEPDAAKRALALKLGAAEVWAPGELAADVRFTGAIDVVAAQATLNDACTRVYAGGTVVCMGVPSGPREIPLPMMQRFERDLLNSGMYIPEDFDAVIEWLADGRFDTSELVTDLFAIEDAAAAFERAQQNDSIKVMLQFAPE

SEQ ID NO: 7358 - protein, 122 aa, Ureaplasma parvum serovar 3 str. ATCC 700970
MIQHMTRLKVADNTGAKEVGVIKVLGGSKKRYASVGDIVVVSVKKATPAGLIAKGQMAKAVIVRTKKSIRRESGLLIRFDENACVLIKEDKTPRGSRIFGPVAREIRDRGYTKIASLAPEVL

SEQ ID NO: 7359 - protein, 312 aa, Burkholderia cepacia R18194
MPLDPQAQALLAAFAQAPAIDFAQLTVPAYRASLADGGAFAPGDAVVAEEDWQIPASGRQLSARLYRPAVDGPLPLTVFFHGGGFVSCGIDTHANLCRSLAARARTLVLSVDYRLAPEARFPAAAHDACDAMRWAAASARDLGARAGALAVAGDSAGGNLAAVAALQLRGSGIAIAHQLLLYPVVDCATEHPSYETLGNGYFLTADMMRWFKRQYFDEGADRASPLASPLAAPDVAGAAPATIVSAEFDPLRDEAEAYALRLAQAGTPVTLVRWPGQLHGFASMLGAVDAADRVLTFGADALRRAFDATEAP

SEQ ID NO: 7360 - protein, 307 aa, Zea mays
MDGGRPEMRRTMTLSEQLSSTPDPAIRDFLKIPHDADVGGILHDGDSPSAVDAQGPRAGRTSGWKPLRDRLRLRRAAGAWQTPPKPGAAAAHAPTNSGNLSNRYNYNPGEAAAAFSRTFSRAPSLRAPSLRATPTFSRVASTRLGPASSRSSSRRPATYDFRDLDERRHDADADDGGEEEEEDDEGEEDDDEGDEEDEKEEAPAAQMSLMALLEQTDSQWDDDEDEEESGGGGGARKKGEGDDDEDDGEGREEEMVHVCCVCMVRHKGAAFIPCGHTFCRLCSRELWVSRGNCPLCNGFIQEILDIF

SEQ ID NO: 7361 - protein, 192 aa, Pirellula sp. 1
MSRFLLLTLALGCLMNAPQPVSAADSTADHECVLAHEAKTIEGKEVDLHDYEGKVVLIVNVASKCGYTKQYAGLQSLYEAHKDDGLVILGFPCNQFGSQEPGTNADILEFCSARYNVTFPMMGKVDVNGDDASPLYKQLTSVEAKPAGKGPISWNFEKFLIGRDGQVVGRYKSKVAPSDEELVSAIKSALKG

SEQ ID NO: 7362 - protein, 100 aa, Agrobacterium tumefaciens
MATGKVKWFDATKRFGFITPDDGGPDVFLHLSSITDPACPTLHPGFRLHYGVEQRGGKVTASDVRPAPVEQAVHRAPVTPPQGEEEFSDAFEREWGLRRG

SEQ ID NO: 7363 - protein, 327 aa, Triticum aestivum
  unsure (1)..(327): unsure at all Xaa locations
MPGDTEPRVVEDFLGVVQLLSDGSVVRGDEAVLRSNEPLPDVPGVQWKDVLYHAAHGLSVRVYRPASSVAGGSKLPVLVYFHGGGYCLGSFAEPNFHSFCLRAAAEISAVVLSVQYRLAPEHRLPAAIDDGASFLSWLRGQAELGAGADPWLAESADFAGTFLSGHSAGANLAHHVTVQVASGEIATTPVRIVGYILLSAFFAGADRTATEADPPGXVSLTTAMADQLWRMSLPVGASMDHPLANPFGPESPSLAPVELPPALVVAPLSDVLRDRVLGYGARLKDMGKAVEVVQFEGEQHGFSVRQPFGEAADELLRVIKRFVYSGN

SEQ ID NO: 7364 - protein, 94 aa, Zea mays
  unsure (1)..(94): unsure at all Xaa locations
ESSINKINTRDHQFIVRDTNPXGIKGQSLAAXLSAGISAGXSGRELQAIDDEWLDAARLKTFSECVRDAIAGLGVAGHVNHRTLQEWDRATGGV

SEQ ID NO: 7365 - protein, 143 aa, Glycine max
MAMAFKMATTGMWVTDECKNSFMEMKWKKVHRYIVFKIDEKSRLVTVDKVGGPGESYGDLAASLPDDDCRYAVFDFDFVTVDNCRKSKIFFIAWSPTASRIRAKMLYATSKDGLRRALDGISYEVQATDPTEMGFDVIQDRAK

SEQ ID NO: 7366 - protein, 455 aa, Rhodobacter sphaeroides 2.4.1
MRDDAPNSWESRADASSFYGFTDLPSVHQRGTVVLTHGKGPYIYDVHGRAYLDANSGLWNMVAGFDHPGLIEAAKAQYERFPGYHAFFGRMSDQTVMLSEKLVEVSPFARGRVFYTNSGSEANDTMVKMLWFLGAAEGHPERRKIITRVNSYHGVTAVSASMTGKPYNSLFGLPLPGFIHVGCPHYWRFGQAGETEAEFTQRLARELEATIIKEGPDTIAGFFAEPVMGAGGVIPPSEGYFQAVQPVLKRYGIPLIADEVICGFGRTGNTWGCQTYDFMPDGIISSKNITAGFFPMGAVILGPELADRLQAASEAVEEFPHGFTASGHPVGCAIALKAIDVVMNEGLAENVRALTPKFEAGLAYLAENPNIGEWRGKGLMGALEAVKDKATKTPFPGDLSVSERIANSCTDHGLICRPLGQSIVLCPPFIMTEAQMDEMFEKLGAALKKVFAEVA

SEQ ID NO: 7367 - protein, 363 aa, Methanothermobacter thermautotrophicus str. Delta H
MTYTSGRILGSMCTSSHPLARRVYCDFLESNLGDPGLFRGTRELESGVIGMLGELLSEPDAAGHIITGGTEANLMAMRAARNMAGAEKPEIIVPKSAHFSFRKAADILGLRLREAELDQDYRVDVESVRKLISENTVAVVGVAGTTELGRIDPVEELSEICLDEDIHLHIDAAFGGFIIPFLRETGAELPEFDFKLQGVSSITVDPHKMGLAPIPSGCILFRDASYLDAMSIETPYLTEKQQSTIVGTRTGASAAATWAIMKHMGREGYRKLALRVMGVTRRLRDGLVELDYQLVVEPELNIVAFNHPAMGPHELADRLEELGWAVSVSSCPPAIRVVLMPHIMEEHIELLLRDLEGIRLREE

SEQ ID NO: 7368 - protein, 250 aa, Rehmannia glutinosa
MVKNYPTVSEEYLNAVEKCKKKLRGLIAEKNCAPIMLRLAWHSAGTFDQCSKTGGPFGTMRFKAEQGHAANNGLDIALRLLQPIREQFPILSHADFYQLAGVVAVEVTGGPEVPFHPGRPDKEEPPVEGRLPDATKGSDHLRDVFTKQMGLSDQDIVALSGAHTLGRCHKERSGFEGPWTANPLIFDNSYFKELLSGEKEGLLQLPSDKALLADPSFRPLVEKYAADEDAFFADYAEAHLKLSELGFADA

SEQ ID NO: 7369 - protein, 441 aa, Lactococcus lactis subsp. lactis Il1403
MNKSAKLIVLSVIYERKKMTLLIKNGRLVDPKSNRDEVLDILIENDKIVKIGLNLSVENAEIVDARGLVVAPGLIDVHVHFREPGQTHKETIHSGAKSAAAGGFTRVVMMANTKPILSTPKVLTETLEIADKEDIKIDAVGSITQDFDGEHLTDFDELIKAGAIGFSDDGIPLTDAGVLRKALQKAKLTDSLISIHEEDPNLIGTLGVNDGEVAHKCGFTGAPTVSEYSMMARDSMIAYETGARLHIQHLSAGESVEVVRFAKNLGAKITAEVTPQHFSITEQMIFEQGTNAKLNPPLRSTTDIGKIIEGLKDGTIDVIATDHAPHTREEKNVSLDKAPSGMIGLETSLQLGLTNLVAKGHLTLSELLTKMTVNPAKLYNFDAGYLAENGPADLVIFDAENDYQVGETFDSKATNSPFIKQKVQGQVKYTICDGKIVYQAK

SEQ ID NO: 7370 - protein, 351 aa, Clostridium beijerinckii
MKGFAMLGINKLGWIEKERPVAGSYDAIVRPLAVSPCTSDIHTVFEGALGDRKNMILGHEAVGEVVEVGSEVKDFKPGDRVIVPCTTPDWRSLEVQAGFQQHSNGMLAGWKFSNFKDGVFGEYFHVNDADMNLAILPKDMPLENAVMITDMMTTGFHGAELADIQMGSSVVVIGIGAVGLMGIAGAKLRGAGRIIGVGSRPICVEAAKFYGATDILNYKNGHIVDQVMKLTNGKGVDRVIMAGGGSETLSQAVSMVKPGGIISNINYHGSGDALLIPRVEWGCGMAHKTIKGGLCPGGRLRAEMLRDMVVYNRVDLSKLVTHVYHGFDHIEEALLLMKDKPKDLIKAVVIL

SEQ ID NO: 7371 - protein, 427 aa, Campylobacter jejuni subsp. jejuni NCTC 11168
MQNQILKNLDLKHIWHPCTQMKDHETLPLIPIKKAKGVWLYDFDDKAYMDCVSSWWVNLFGHCNEKIANAIKKQVDELEHVILAGFTHEPIIKLSARLCEKVGRNFNKCFYADNGSSAIEVALKMSFHYHLNKGVKKSKFLSLSNSYHGETLGALSVGDVALYKDTYKALLLECLSTPVPQGKDYTKELEILKDILEKNASEICAFILEPLVQCAGNMHMYEARFIDEAIKLCHKFGVQVIFDEIAVGFGRTGTLFALHQCKQSPDFICLSKGITGGFMPLSVVLTRDEIYNAFYDTYESQKAFLHSHSYTGNTLACAAANAVLDIFEDENILVKNQILSEFIKKEFSRLEKFDFLGNFRTCGMISAFDILSTKYKRVGLFVFQKALEKGLLLRPLANTIYFMPPYIITKEQIVYVLESLEQIFKEF

SEQ ID NO: 7372 - protein, 486 aa, Azoarcus sp. EbN1
MTLALNDPDLFRSRCLVGGTWADADSGATIAIHNPATGEQLGTIPKMGAAETRRAIDAASRAWPAWRALTAGARARVLRKWFDLIVEHQEDLALLMTSEQGKPLGEARGEVLYAASFVEWFAEEAKRIYGDVIPGHQPDKRIVVTKEPVGVCAAITPWNFPLAMITRKAGPALAAGCTMVLKPATQTPYSALALAVLAERAGVPAGVFSVLTGSATEIGGELTANPIVRKLTFTGSTEVGIKLAAQCAPTIKKLSLELGGNAPFIVFDDADLDAAVDGALASKYRNTGQTCVCANRLLVQDSVYDAFAEKLTAAVAKLKVGNGVDEGVTQGPLIDMRAVEKVEEHIADALAKGARVVTGGGRHALGRTFFEPTILADVTPQMKVAREETFGPVAPLFRFKDEAEAIRMANDTEFGLAAYFYSVGMNRVWRVSGALEYGIVGINTGIISTEVAPFGGMKSSGLGREGSKYGIEDYLEIKYLCMGGVQ

SEQ ID NO: 7373 - protein, 356 aa, Verticillium fungicola
MSRANPPNNASASRKISFNVSEQYDIQDVVGEGAYGVVCSAIHKPSGQKVAIKKITPFDHSMFCLRTLREMKLLRYFNHENIISILDIQKPRGYDSFNEVYLIQELMETDMHRVIRTQDLSDDHCQYFIYQTLRALKAMHSANVLHRDLKPSNLLLNANCDLKVCDFGLARSAASQEDNSGFMTEYVATRWYRAPEIMLTFKEYTKAIDVWSVGCILAEMLSGKPLFPGKDYHHQLTLILDVLGTPTMEDYYGIKSRRAREYIRSLPFKKKVPFRTLFPKTSDLALDLLEKLLAFNPVKRITVEEALKHPYLEPYHDPEDEPTAPPIPEEFFDFDKHKDNLSKEQLKQLIYQEIMR

SEQ ID NO: 7374 - protein, 137 aa, ASPERGILLUS NIDULANS FGSC A4
MPASVHSQDNDQSMLDAQAQNQDHIDETLLEQKRIIVLPGATDTAASFQFEGEGHTLGNALRFAIMKNPEVEFCGYTIPHPSESKMNIRIQTYDSTTAVEALEKGLDTLMDLCDVVTDKFTAARDEFNAEQANRMES

SEQ ID NO: 7375 - protein, 166 aa, Zea mays
MATSFQGTTTKCTACDKTVYLVDKLTADNRIYHKACFRCHHCKGTLKLANYNSFEGVLYCRPHFDQLFKRTGSLDKSFEGTPKVVKPERNVGNENATKVSSAFAGTREKCVGCSKTVYPTERVTVNNTMYHKSCFKCCHGGCTISPSNYIAHEGKLYCKHHHISVG

SEQ ID NO: 7376 - protein, 498 aa, Shewanella oneidensis MR-1
MSTPKTRSDWENLAVSLAINGKAFINGEYRDASSGNTFDCISPIDGRLLAPVASCDLMDANIAVANAREVFDSGVWSKAAPVKRKQVMIRFAELLEENANELALLETLDMGKPIRFSKAVDVAGAARAIRWSGEAIDKLYDELAPTAHNEIGMITREPVGVVAAIVPWNFPLLMACWKLGPALVTGNSVILKPSEKSPLTAIRIAELAVQAGIPKGVLNVLPGYGHTVGKALALHMDVDTLVFTGSTKIAKQLMIYAGESNMKRVWLEAGGKSPNIVFNDAPDLKAAAVAAAEAIGFNQGEVCTAGSRLLVESGVKDELVGLIAEELASWQPGHPLEPTTVSGAVVDKQQLDTILSYIKAGQNEGASLVYGGQQVLAETGGVYVQPTVFSNVKNQMKIASEEIFGPVLSVIEFNGMEEAIAIANDTIYGLAAGVWTADISKAHKTAKALRSGMVWINHYDGGDMTAPFGGYKQSGNGRDKSLHSFDKYTEIKATWIVL

SEQ ID NO: 7377 - protein, 446 aa, Shewanella oneidensis MR-1
MADSPNNLAHEHPSLEHYWMPFTANRQFKASPRLLAQAEGMYYTDINGNKVLDSTAGLWCCNAGHGRREISEAVSKQIRQMDYAPSFQMGHPIAFELAERLTELSPEGLNKVFFTNSGSESVDTALKMALCYHRANGQASRTRFIGREMGYHGVGFGGISVGGLSNNRKAFSGQLLQGVDHLPHTLDIQHAAFSRGLPSLGAEKAEVLEQLVTLHGAENIAAVIVEPMSGSAGVILPPQGYLKRLREITKKHGILLIFDEVITAFGRVGAAFASQRWGVIPDIITTAKAINNGAIPMGAVFVQDYIHDTCMQGPTELIEFFHGYTYSGHPVAAAAALATLSIYQNEQLFERSFELERYFEEAVHSLKGLPNVIDIRNTGLVAGFQLAPNSQGVGKRGYSVFEHCFHQGTLVRATGDIIAMSPPLIVEKHQIDQMVNSLSDAIHAVG

SEQ ID NO: 7378 - protein, 462 aa, Arabidopsis thaliana
MASNGVDEQIKLVEGPAGYVLEDVPHLSDYILDLPTYPNPLQSNAAYSVVRQYFVDEDDTVQEKIVVHKDSPRGTHFRRAGPRQKVYFKPSDVRACIVTCGGLCPGLNTVIREIVCGLHFMYGVTEVIGVDCGFRGFYSKNTVALTPKTVSDIHKRGGTILGTSRGGHDTSKIVDNIQDREINQVYIIGGDGTQKGANAIYKEIRRRGLKVAVAGIPKTIDNDIPVIDKSFGFDTAVEEAQRAINAAHVEATSVENGIGIVKLMGRYSGFIAMYATLASRDADCCLIPESPFYLEGKGGLYEFIAKRLRENGHMVIVIAEGAGQDLVAESIEQQDASGNKLLKDVGLWMSLKIKEYFAKHNVMDITLKYIDPTYMIRAIPANASDNVYSTLLAQSAVHGAMAGYTGFVSGLVNGRHTYIPFNRITERQNKVVITDRMWARMLSSTNQPSFMNPPKGTTEFTD

SEQ ID NO: 7379 - protein, 337 aa, Zymomonas mobilis
MKAAVITKDHTIEVKDTKLRPLKYGEALLEMEYCGVCHTDLHVKNGDFGDETGRITGHEGIGIVKQVGEGVTSLKAGDRASVAWFFKGCGHCEYCVSGNETLCRNVENAGYTVDGAMAEECIVVADYSVKVPDGLDPAVASSITCAGVTTYKAVKVSQIQPGQWLAIYGLGGLGNLALQYAKNVFNAKVIAIDVNDEQLAFAKELGADMVINPKNEDAAKIIQEKVGGAHATVVTAVAKSAFNSAVEAIRAGGRVVAVGLPPEKMDLSIPRLVLDGIEVLGSLVGTREDLKEAFQFAAEGKVKPKVTKRKVEEINQIFDEMEHGKFTGRMVVDFTHH

SEQ ID NO: 7380 - protein, 280 aa, Streptococcus pneumoniae TIGR4
MNTYQLNNGVEIPVLGFGTFKAKDGEEAYRAVLEALKAGYRHIDTAAIYQNEESVGQAIKDSGVPREEMFVTTKLWNSQQTYEQTRQALEKSIEKLGLDYLDLYLIHWPNPKPLRENDAWKTRNAEVWRAMEDLYQEGKIRAIGVSNFLPHHLDALLETATIVPAVNQVRLAPGVYQDQVVAYCREKGILLEAWGPFGQGELFDSKQVQEIAANHGKSVAQIALAWSLAEGFLPLPKSVTTSRIQANLDCFGIELSHEERETLKTIAVQSGAPRVDDVDF

SEQ ID NO: 7381 - protein, 266 aa, Glycine max
GNIISVMVYLAPVPTFYRIYKKKCTDGFHSLPYLLSLMSSMLWLYYAFLKIHDGVVPLITINSIGCVIELIYILTYIKYAHKDARNLTYTLFAAMNIGFLALVLSSRFALNGSHRVKVIGWICDAVSLSVFASPLSIMAKVIRTKSVQFMPFYVAFILTLNAITWFVYGLSMQDKCIYIPNVGGFALGLVQMVLYGIYRKGSESEKEQGLGEGVINIVVVNPLGPAEVFPIAVDDNKVKDLVVVDDVTVSQQEKEKNVEAKDDCPV

SEQ ID NO: 7382 - protein, 306 aa, Escherichia coli CFT073
MSSTMALEKGIAELVEEFIAAGRPSSRQQSITQRREGYIASAVLAGETETRVDIQTIELEGMTLRIVSPLNAPTLLPTIIYYYGGCFVSGGFATHDNQLRQLAYYGQCRIIAVQYRLAPEHTFPAAHDDAQRGAELVRQHAERLGVDKQRITLAGDSAGGHLALVTALRLKRAGEWQPAQLILIYPMLDATGHFESYIRNGHDYIITRDTLLSGFEMYLPGIERRHPEASPIWRNDFNGLPPVHIITAEYDPLCDEGEALYHRMTGQGVQCTCQRYLGVIHGFFQLGGISEAARSALRDVAWRAGR

SEQ ID NO: 7383 - protein, 327 aa, Glycine max
MRPPTRPPTRPPTRPGNPNNNNLFDGCQGESDHWSELDTDLYHWTKALRPVQWFPGHIAKAEKELKEQLKLMDVVIEVRDGRIPMSTSHPQMDLWLGNRKRILVLNREDMISTADRNAWADYFTRNGTKVVFSNGQLGMGTMKLGRLAKELAADVNVKRRSKGLLPRAVRAGIVGYPNVGKSSLINRLLKRRMCPAAPRPGVTRELRWVRFGKDLELLDSPGILPMRISDQSAAIKLAICDDIGERSYDVADVAAILVQMLSKLPTVGRDALCKRYKIDVDCRDGRIFIEKLAVRVFNGDVHQAAFRVLADFRKGKFGWTALERPPK

SEQ ID NO: 7384 - protein, 391 aa, Synechocystis sp. PCC 6803
MGKNLLEQLRQFTVVVADTGDIQAIETFTPRDSTTNPSLITAAAQMPQYQEIVDSTLLKAKDEAGENASIKDIVRLAFDRLAVAFGLKILQIIPGRVSTEVDARLSYDTEATIAKARYLIGEYAKAGIDKKRILIKIASTWEGIKAAEVLEQEGIHCNLTLLFGLHQAIACAEAKVTLISPFVGRILDWYKKSTGKEYDSHEDPGVQSVTTIYNYYKRFGYKTEVMGASFRNIGEIIELAGCDLLTISPQLLDQLRNTEGDLPRKLDPATVPQDIEKIVMDKATFDKMHAEDPMASEKLAEGIAGFTKALEVLEHLLEERLKVLDGQEHIKHGAEEIFHAYDLDGDGFITREEWAGTDVVFDALDRDHDGKITAAEMSAGLGAAFRLASVG

SEQ ID NO: 7385 - protein, 350 aa, Glycine max
  unsure (1)..(350): unsure at all Xaa locations
DQKSSILKHSNVRPGLACGNTIVLKTDEQTPLSALYASKLFHEAGLPAGVLNVVSGFGPTAGAALASHMEVDKLAFTGSTDTGKVVLELAAKSNLKPVTLELGGKSPFIVCEDADVDQAVELAHFALFFNQGQCCCAGSRTFVHESVYDEFVEKAKARALKRVVGDPFKGGIEQGPQIDSDQFEKILRYIRSGVESGATLXTGGDKLGNKGFYIQPTVFSNVKDGMLIAKDEIFGPVPSILKFKGLGEVVQRANNPRYGLSAGVFTKNMDPANPFTRALKVGTVWINCFDTFDAAIPFGGDKMSGQGREKGEYSLQNYLQVKAVVNPFKNPAWLLETLVPSLDPSPPGPP

SEQ ID NO: 7386 - protein, 250 aa, Lycopersicon esculentum
MGKCYPTVSEEYLKAVDKCKRKLRGLIAEKNCAPIMLRLAWHSAGTYDVCSKTGGPFGTMRFKAELQHGANNGLDIALRLLEPIREQFPTLSHADFHQLAGVVAVEVTGGPDVPFHPGREDKPEPPVEGRLPDATKGCDHLRDVFKKQMGLSDQDIVALSGAHTLGRAHKERSGFEGPWTANPLIFDNSYFTELLSGEKQGLLQLPSDKALLCDPAFRPLVEKYAADEDAFFADYAEAHLKLSELGFAEA

SEQ ID NO: 7387 - protein, 294 aa, Schizosaccharomyces pombe
MPFIKAVKSSPYFSRYQTKYRRRREGKTDYYARKRLIAQAKNKYNAPKYRLVVRFSNRFVTCQIVSSRVNGDYVLAHAHSSELPRYGIKWGLANWTAAYATGLLVARRALAKVGLADKYEGVTEPEGEFELTEAIEDGPRPFKVFLDVGLKRTSTGSRVFGAMKGASDGGLFIPHSPNRFPGFDIETEELDDETLRKYIYGGHVAEYMEMLIDDDEERYQKQFSGLIADGIESDQLEDIYAEAYAKIREDPSFQKSGKDAAAFKAESLKYTQRKLTAEERKERFNAKVIEAGRA

SEQ ID NO: 7388 - protein, 199 aa, Triticum aestivum
MEGVGARLGRSSARYGPAMTFTGPVRKWRKEWVTISAATATATSAAASSTGTGSRGNNLILFKWTPLNGANEGDEEQTAPAKTATRRRRYVPVSVVQDQRQESAKSDDENKANDGEPSSTETEQSIGKTNMDDILMDESQASDEVRDSGNFVGGTDINLNLGPKDPDREDEGDTGEQHEVRTEHRLKRKSVTPDLEMRM

SEQ ID NO: 7389 - protein, 257 aa, Brassica napus
IQFLLECDEARVDYEDLYAAVMRGDQESCLLYVDKLKQRCVDGFKEGVLSIEQLASVDGLCEWVLKAIGASDPVQTYNINLSVFTSIPDLWGIDQLFPIVPIHKLDQRPGARGVLSDLTCDSDGKIDKFIGGESSLPLHELDGGGGGRYFLGMFLGGAYEEALGGVHNLFGGPSVVRVSQSDGPHSFAVTRAMPGQSSADVLRAVQHEPEIMFQSLKHRAEKLMHTKGGGEDEDDEELNNVVACLDRSFNNMPFLAT

SEQ ID NO: 7390 - protein, 346 aa, Dictyoglomus thermophilum
MSKMRIGVLTGGGDCPGLNPAIRGIVMRALDYGDEVIGLKYGWAGLLKADTMPLSLEMVEDILEIGGTILGSSRTNPFKKEEDVQKCVENFKKLNLDALIAIGGEDTLGVASKFSKLGLPMIGVPKTIDKDLEETDYTLGFDTAVEVVVDAIKRLRDTARSHARVIVVEIMGRHAGWLALYGGLAGGADYILIPEVEPNLEDLYNHIRKLYARGRNHAVVAIAEGVQLPGFTYQKGQEGMVDAFGHIRLGGVGNVLAEEIQKNLGIETRAVILSHLQRGGSPSIRDRIMGLLLGKKAVDLVHEGKSGLFVAVKGNELVPVDITLIEGKTKNVDPAFYESVKTFFNK

SEQ ID NO: 7391 - protein, 500 aa, Atriplex centralasiatica
MAFPMPVRQLFIDGEWREPLLKNRIPIINPSTEEIIGDIPAATAEDVEVAVVAARKAFKRNKGRDWAATSGAHRARYLRAIAAKITERKDHFVKLETLDSGKPLDEAVLDIDDVATCFEYFAGQAEALDAKQKAPVTLPMDRFKSHVLRQPIGVVGLISPWNYPLLMATWKIAPALAAGCTAVLKPSELASVTCLEFGEVCNEVGLPPGVLNILTGLGPDAGAPIVSHPDVDKIAFTGSSATGSKIMASAAQLVKPVTLELGGKSPVIMFEDIDIETAVEWTLFGVFWTNGQICSATSRLLVHESIAAEFVDRMVKWTKNIKISDPFEEGCRLGPVISKGQYDKIMNFISTAKSEGATILCGGSRPEHLKKGYYIEPTIITDITTSMQIWKEEVFGPVICVKTFSTEDEAIELANDTEYGLAGAVFSKDLERCERVTKALEVGAVWVNCSQPCFVHAPWGGVKRSGFGRELGEWGIENYLNIKQVTSDISDEPWGWYKSP

SEQ ID NO: 7392 - protein, 425 aa, Blastocladiella emersonii
MTLIDKLMEKTKKVVGSSDKDAPAPASPSSPSTAAGAGSASSTASSTTTAAASGNLSIPSPLVAGSTTSSSISHAQKMATAAHTNSDYSPSPAATPSAPLDAVAERRRRKTTLADLELRQTLGTGSFGRVHLVRLRSTGKYYAMKVLKKAEVVKHKQVEHTLNEKGILEQIDHPFLVALHSSFQDSANLYMVMEYVTGGELFTYLRRSQRFSNNVAKFYAAEVVLAFEYLHSKDIIYRDLKPENLLLDAQGHVKITDFGFAKHVPDITWTLCGTPDYLAPEIIQSRGYGRAVDWYALGVLIFEMLAGYPPFYDEDHVRMYEKILQGKVKWPSHFDPAAKDLLKRLLTTDLTKRYGNLKGGSKDIKMHKWFAGLDWTKLFNKQIPPPYTPPNRGDGDTSNFDAYPEETEPYGKVQPDPYAQLFKDF

SEQ ID NO: 7393 - protein, 200 aa, Nicotiana tabacum
MATSGNKNMNAKLVLLGDVGAGKSSLLLRFVKGQFIEFQESTIGAAFFSQTVAVNDATVKFEIWDTAGQERYHSLPPMYYRGAAAAIIVFDITNQASFDRAKKWVQELQAQGNPNMVMALAGNKADLLDARKVAAEEAQTYAQENGLFFMETSAKTASNVNDIFYEIANRLPRLQPAQNPSGMVLMDRPAQTPASASCCS

SEQ ID NO: 7394 - protein, 500 aa, Atriplex centralasiatica
MAFPMPVRQLFIDGEWREPLLKNRIPIINPSTEEIIGDIPAATAEDVEVAVVAARKAFKRNKGRDWAATSGAHRARYLRAIAAKITERKDHFVKLETLDSGKPLDEAVLDIDDVATCFEYFAGQAEALDAKQKAPVTLPMDRFKSHVLRQPIGVVGLISPWNYPLLMATWKIAPALAAGCTAVLKPSELASVTCLEFGEVCNEVGLPPGVLNILTGLGPDAGAPIVSHPDVDKIAFTGSSATGSKIMASAAQLVKPVTLELGGKSPVIMFEDIETVVAVEWTLFGVFWTNGQICSATSRLLVHESIAAEFVDRMVKWTKNIKISDPFEEGCRLGPVISKGQYDKIMNFISTAKSEGATILCGGSRPEHLKKGYYIEPTIITDITTSMQIWKEEVFGPVICVKTFSTEDEAIELANDTEYGLAGAVFSKDLERCERVTKALEVGAVWVNCSQPCFVHAPWGGVKRSGFGRELGEWGIENYLNIKQVTSDISDEPWGWYKSP

SEQ ID NO: 7395 - protein, 449 aa, Triticum aestivum
MYRAKRAALSPKVKRRVGKYELGRTIGEGTFAKVRFAKNTETMEPVAIKILDKEKVQKLRLVEQIRREICTMKLIKHPNVVRLHEVMGSKARIFIVLEYITGGELFDTIYTNGRLKEEEARKYFQQLINAVDYCHSRGVYHRDLKLENLLLDAAGNLKVSDFGLSALTEQVKADGLLHTTCGTPNYVAPEVIEDRGYDGAAADIWSCGVILFILLAGFLPFEDENIIALYKKISEAQFTCPSWFSTGAKKLITRILDPNPATRITIPQILEDPWFKKGFKPPVFDDKYETSFDDVYAAFGDSEDQHVKEETEHKPTSMNAFELISLNQGLNLDNLFEAKEEHKRETRFTSQCPPKEIISKIAEAARPLGFDIQKKNYKMRMENPKAGRKGNLNVATEVFQVAPSLHVVELKKAKGDTLEFQMFYRSLSTQLKDVVWKCGGEVEDNGTAA

SEQ ID NO: 7396 - protein, 229 aa, Haloarcula marismortui ATCC 43049
MSVAVDRAGAVALTERVGKVRVRVQSLSSHAPVLGQQERGVFVDPRAVAHDLHVRRFGAEPQMAAGTTFLCLSVISPDMADLQLRSPAFDDGDRIPEEHGYSAANTNPPLEIENVPSDASSLLLIVDDPDAEEPAGKVWDHWLVWNIPPDIGRIPAGWEPDEATEGQNDFGEVGWGGPNPPDREHTYRFLLYALDTTLDRSPAADKDDVYDAASGHVVEKAQLNGTYPA

SEQ ID NO: 7397 - protein, 618 aa, Glycine max
DQLRRPPPQGVTLMMSDSTNVLSPGRTTSESVVADALLRNISAAKGRVITTQFASNIHRLGSVKAAADLTGRKLVFVGMSLRTYLDAAWKDGKSPIDPSTLVKAEDIDAYAPKDLLIVTTGSQAEPRAALNLASYGSSHAFKLAKEDVVLYSAKVIPGNESRVMKMLNRISEIGSTIVMGKNEGLHTSGHAYRGELEEILRIVKPQHFLPIHGELLFLKEHELLGKSTGIRHTTVIKNGEMLGVSHLRNRRVLSNGFISLGKENLQLMYSDGEKAFGTSSDLFIDERLKIALDGIIVVNMEIFRPQNLDSPVENTLKGKIRITTRCLWLDKGKLLDALHKAAHAALASCPVSCPLAHMEKIVSEMLRKMVRKYSGKRPEVIAIAIENPAAVLANEINTKLSGKLNVDGMSALRKVVDGHEKENQRTEMQIRDRIDVGGLLPTKDNAISSGAEDGLSDAEDPNDYFKPFVESSPVEKSIKTNNGYVPRKEKSSPLKDDCSEDTEECNSVNTSDSEPKSSKSAKRNKWKHEEVKKLIDMRGELNDRFQVVKGRMALWEEISQNLLANGISRSPGQCKSLWTSLLQKYEQEVKNEKKNKKKWPYFEDMERILADNKTLETK

SEQ ID NO: 7398 - protein, 433 aa, Porphyromonas gingivalis W83
MTIDEMLRLDRNHLWHPYTSTIDPLPVFPVKRAEGVRIYLEDGRELIDGMSSWWAAIHGYNHPRLNAAVERQLREMSHIMFGGFTHRPAVELAELLLSILPSELNKIFYADSGSVAVEVAMKMALQYQQACGQSRRTRFATIRSGYHGDTWHAMSVCDPVTGMHGIFSGALPVQYFLPQPKSRFGGEWLPADIEPLRDLLSAKGAELAALILEPIVQGAGGMYFYYPRYLVEARRLCSEAGVLLIFDEIATGFGRTGELFALRHAATVPDILCLGKSLTGGYMTLSATITTEAIARTICSGEAGCFMHGPTFMGNPLACAVAAESIRLLLESPWQERVRAIEAQLREELSPAISFDGVAEVRVLGAIGVVEMKRPVDMATLQQRFIREGIWVRPFGRLCYLEPPFIISPEDLRILTHGLLRVLGQDRSISFTR

SEQ ID NO: 7399 - protein, 434 aa, Pyrobaculum aerophilum str. IM2
MTEKWYQLSVEIHRKYGGKISITPKVPIRSMDDFAIYYTPGIAEVSRQIHKNPELAFELTSRWNIIGVITDGTRVLGLGNIGPEAAYPVMEGKALIFKYLGGVDAVPIPIRVKTQEEFVFVAKALEPALGGINLEDIESPKCFYLLERLREELRIPVWHDDQQGTATATLAGLINALKLVGKKISDVTIALIGAGASNIYTARILIKYGAKPGNLILVDSRGILHPERDDIDKLMIENPWKYKYAIETNAERRKGGIPEAMRGADVVIAASSPGPGVIKKEWVASMNKDAIVFALANPVPEIWPWEAKEAGAKIVATGRSDFPNQVNNSLIFPAVFRGALDVRATAITDEMLIAAAEEVAKFAEEKGIHEEYIIPKMTEWEVYVREAAAVAATASAQKVARIPRSYKEELEIAGSIIGKSIKMLEVLMMEKIIE

SEQ ID NO: 7400 - protein, 409 aa, Pyrobaculum aerophilum str. IM2
MSEQTVQVKTTGKILQSPCGPIIHGLEDVLIKSTSISDIDGEKGILWYRGYRIEELARLSTYEEVSYLILYGRLPTKRELEDYINRMKKYRELHPATVEVIRNLAKAHPMFALEAAVAAEGAYDEDNQKLIEALSVGRYKAEEKELAYRIAEKLVAKMPTIVAYHYRFSRGLEVVRPRDDLGHAANFLYMMFGREPDPLASRGIDLYLILHADHEVPASTFAAHVVASTLSDLYSSVAAAIAALKGPLHGGANEMAVRNYLEIGTPAKAKEIVEAATKPGGPKLMGVGHRVYKAYDPRAKIFKEFSRDYVAKFGDPQNLFAIASAIEQEVLSHPYFQQRKLYPNVDFWSGIAFYYMGIPYEYFTPIFAMSRVVGWVAHVLEYWENNRIFRPRACYIGPHDLQYIPLEQR

SEQ ID NO: 7401 - protein, 293 aa, Zea mays
CVSATPSTLAASSTSSSSAIIQDIIRGLADTTAARVRTDAEATARASTDFGTNATADDAARPAAVFYPSCAADIAALLRASSASASPFPVSARGRGHSTRGQATAPGGVVVDMASLAVAAGPARLAVSVDGRYIDAGGEQLWVDVLHAALAHGLTPRSWTDYLRLTVGGTLSNAGISGQAFRHGPQISNVLELDVVTGTGDMVTCSKEKDADLFDAVLGGLGQFGIITRARIPLAPAPERARWLRLLYTGAADLTADQERLIADDERRGGALAGLMDYVEGSVVTDLQQGLIG

SEQ ID NO: 7402 - protein, 425 aa, Vibrio parahaemolyticus RIMD 2210633
MSEDNRQAATPEEEHRQKALDYHAYPTPGKIAVELTKPAETAGDLALAYSPGVAEPVREIAQNPDNVYKYTAKGNMVAVISNGTAILGLGNLGPLASKPVMEGKALLFKRFAGLDSIDIEVKHRTIDEFVDTVANIADTFGGINLEDIKAPDCFEIEKRLIERCDVPVFHDDQHGTAIVTAAGMLNAIELQGKKLEDSTIVCLGAGAAAVACMELLIKCGAMREKIYMLDRKGVIHTRRDDLNEYKQLFANNTDKRTLEDVIEGADLFLGVSGPNLLPPEALKLMADKPVVFACSNPDPEIKPELAHAVRDDLIMGTGRSDYPNQVNNVLCFPFIFRGALDVRASEINDDMKLAAVDAIRALAKEPVPESVLKAAGVEKLEFGSDYIIPKPMDPRLLPRVAKAVAQAAVDSGVARIEMPENYMAE

SEQ ID NO: 7403 - protein, 286 aa, Deinococcus radiodurans R1
MGWPEGRAPVAPEQGAPGPFFSDRGGVCWRHPAQVRQGKSGAGPAVPLRRTHMEFFIDTAIVDEIREINAWGVLSGVTTNPSLIVASGRDFKEVIGEIAELVPGGAISAEVTALDAEGMIKEGKDVAAWHKQVVVKLPLTPAGLQACKALTSEGIKTNVTLCFSVPQALLAARAGATYVSPFVGRVDDTGWDGSELIRQIKEAFVLGDIQTKVLAASIRHPQHVVQAALAGADVATIPYKVFTQMVKHPLTQAGLDSFMADWAKRQGASPETPPSEAGTNPVKKEG

SEQ ID NO: 7404 - protein, 264 aa, Triticum aestivum
MEAAVGGSWTRVRTLGRGASGAVVSLAADDLSGALFAVKSAPAAAADQLRREGDILSGLSSPHVLPCLGFRAAAGECQLFLEFAPGGSVADVAARSGGRLEECAVRAYAADVARGLAYLHGRSLVHGDVKARNVVVGADGRAKIADFGCARAVGSSDRPVGGTPAFMAPEVARGEEQGPAADVWALGCTVVEMATGRAPWSDMDDVLTAMHRIGYTDAVPEVPAWLSAEAKRFLAMCFARDARDRCTAAQLLEHPFLASAGCGV

SEQ ID NO: 7405 - protein, 503 aa, Triticum aestivum
MVAPAAIPQRQLFIDGDWRAPALGRRLPVINPTTEVTIGEIPAGTSEDVDAAVAAARAALKRNRGRDWSRAPGAVRAKYLRAIAAKMIERKSDLARLEALDCGKPLDEAAWDMDDVAGCFEFFAGHAEALDKRQNAAVALPENFKCHLKKEPIGVVALITPWNYPLLMAVWKVAPALAAGCTAVLKPSELASVTCLELGDVCKEIGLPSGVLNIVTGLGHEAGAPLSSHPDVDKVAFTGSYATGQKIMVAAAPTVKPVTLELGGKSPIVVFDDVDIDKAVEWTLFGCFWTNGQICSATSRLLIHKNIAKEFVDRMVAWSKNIKVSDPLEEGCRLGPVVSEGQYEKIKKFVANAKSEGATILTGGVRPKHLEKGFFIEPTIITDINTSMEIWREEVFGPVLCVKEFSTEEEAIELANDTHYGLAGAVISGDRERCQRLAEEIDAGCIWVNCSQPCFCQAPWGGNKRSGFGRELGEGGIDNYLSIKQVTEYTSDAPWGWYKAPAN

SEQ ID NO: 7406 - protein, 307 aa, Glycine max
IRLERLELLGICGLPDTIFRNAVEMALADSECYGLENPNARLSCFVNKAFANIGSDMAKLVPGRVSTEVDARLAYDTHAIIRKVHDLLKLYNDSNVPPQRLLFKIPSTWQGIEAARLLESEGIQTHLTFVYSFAQAAAAAQAGASVIQIFVGRIRDWARNHSGDTEIESAQLRGEDPGLALVTKAYNYIHKYGHKSKLMAAAVRNKQDLFSLLGVDYIIAPLKVLQSLKESVASPDEKYSFVRRLSPQSAAKYTFSDEELVRWDEDSLSKAMGPAAVQLLAAGLDGHADQAKRVEELFGKIWPPPNV

SEQ ID NO: 7407 - protein, 166 aa, Zea mays
MTKAATIYGSKTQSDALRPGPLRPANIIRNKFPTYKNGSNGIVIKLADGPEIPPLKEIVAKETADLLDRRQRLSVRELAMKFEKGLSTATLLSNEVKWRQVALMERDILLKNLKSVLESLRGQVTGKTKDEIEESISMVEILTVQLFKRESELVQQKEEVTKLAKS

SEQ ID NO: 7408 - protein, 337 aa, Zymomonas mobilis
MKAAVITKDHTIEVKDTKLRPLKYGEALLEMEYCGVCHTDLHVKNGDFGDETGRITGHEGIGIVKQVGEGVTSLKVGDRASVAWFFKGCGHCEYCVSGNETLCRNVENAGYTVDGAMAEECIVVADYSVKVPDGLDPAVASSITCAGVTTYKAVKVSQIQPGQWLAIYGLGGLGNLALQYAKNVFNAKVIAIDVNDEQLAFAKELGADMVINPKNEDAAKIIQEKVGGAHATVVTAVAKSAFNSAVEAIRAGGRVVAVGLPPEKMDLSIPRLVLDGIEVLGSLVGTREDLKEAFQFAAEGKVKPKVTKRKVEEINQIFDEMEHGKFTGRMVVDFTHH

SEQ ID NO: 7409 - protein, 286 aa, Zea mays
  unsure (1)..(286): unsure at all Xaa locations
MAPKAAAAARKTRVGPYEVGKTIGEGSFAKVKHARDSRTGAVRAIKVLDRNHVLRHRMVEQIKREISTMKLIKHPNVVQLHEVMASKTKIYMVLEFVDGGELFDKIVNSGRLGEDEARIYFHQLINAVDYCHSRGVYHRDLEPENLLLDSHGTLKVSDFGLSAFAPQTKEDGLLHTACGTPNYVAPEVSFSPLLSCQLICVVTLCDXCTSRCVSIAHFLQVLADKGYDGMAADVWSCGIILFVLMAGYLPFDDANLMRLYKLICHATFSCPTWFSSGARKFIKRIL

SEQ ID NO: 7410 - protein, 191 aa, Zea mays
  unsure (1)..(191): unsure at all Xaa locations
MAQDDQSAARSTGTVNWFSDAKGYGFIAPDDGGDELFVHQSSIVSDGFRTLTVDEPVEYAIAVGNDGXTKAVDVTAPGGGSLNKKEMSSRGNGGSCFSCGEVGHMAKDCAGGKRYGGGGRRSGGEGSCYVCGNVGHFARDCRQNAGGNSGGGGGGECXNCGVVGHMAKDCRGGNRIRGRGSGGEGCYTWWR

SEQ ID NO: 7411 - protein, 352 aa, Bipolaris oryzae
MPPAGSGSSRKISFNVSEQYDIQDVVGEGAYGVVCSALHKPSGQKVAIKKITPFDHSMFCLRTLREMKLLRYFNHENIISILDIQKPRNYETFTEVYLIQELMETDMHRVIRTQELSDDHCQYFIYQTLRALKAMHSANVLHRDLKPSNLLLNANCDLKVCDFGLARSAASTEDNSGFMTEYVATRWYRAPEIMLTFKEYTKAIDVWSVGCILAEMLSGKPLFPGKDYHHQLTLILDVLGTPTMEDYYGIKSRRAREYIRSLPFKKKIPWKAMFPKTNDLALDLLERLLAFNPVKRISVEDALKHPYLEPYHDPDDEPGADPIPEEFFDFDKNKDNLTKEQLKLLIYQEIMR

SEQ ID NO: 7412 - protein, 202 aa, Triticum aestivum
  unsure (1)..(202): unsure at all Xaa locations
MKPCTAIALLLVVAAQCAALATAAGPRVIIVGAGMSGISAGKRLSEAGITDLVILEATDRIGGRIHKTKFAGVNVEMGANWVEGVNGDEMNPIWTMANGTGGLNLRTFRSDFDHLASNTYKQDGGLYDEKVVEKIIERMDEVEXSGSKLSAPFTTAATGLAVWPATPLHPWAWKAGDWGSLSHFSPDPAVQPNQFRNFGKLF

SEQ ID NO: 7413 - protein, 123 aa, Phytophthora infestans
MIQIQTKLKVNDNSGIKIGQCLKIYKKKVGKIGDTILISAKKLRLNQKKKIKIIKGDLFKALIIHTTYQKKSTIGNLIKFDKNCIIILNNQNKPLGTRIFGPITSEFRKQKNFKILALASNIL

SEQ ID NO: 7414 - protein, 481 aa, Papaver somniferum
SLVAVVITTFLYLIFRDSSPKGLPPGPKPWPIVGNLLQLGEKPHSQFAQLAETYGDLFSLKLGSETVVVASTPLAASEILKTHDRVLSGRYVFQSFRVKEHVENSIVWSECNETWKKLRKVCRTELFTQKMIESQAEVRESKAMEMVEYLKKNVGNEVKIAEVVFGTLVNIFGNLIFSQNIFKLGDESSGSVEMKEHLWRMLELGNSTNPADYFPFLGKFDLFGQSKDVADCLQGIYSVWGAMLKERKIAKQHNNSKKNDFVEILLDSGLDDQQINALLMEIFGAGTETSASTIEWALSELTKNPQVTANMRLELLSVVGKRPVKESDIPNMPYLQAFVKETLRLHPATPLLLPRRALETCKVLNYTIPKECQIMVNAWGIGRDPKRWTDPLKFSPERFLNSSIDFKGNDFELIPFGAGRRICPGVPLATQFISLIVSSLVQNFDWGFPKGMDPSQLIMEEKFGLTLQKEPPLYIVPKTRD

SEQ ID NO: 7415 - protein, 570 aa, Triticum aestivum
  unsure (1)..(570): unsure at all Xaa locations
MASHIILPPDGDDDEQQRREDEENDGGGSGSGGDGEQQQQGGGNAKAALPFSAMCVRISRDSYPNLRALRNASHASLTDAAYVKISEGDFGYVLDDVPHLADYIPDVPTYPNPLQDHPAYSTVKQYFVNEDDTVPQKVVVQKNSRRGVHFRRAGPRQRVNFESDEVKACIVSCGGLCPGLNTVIRELVCGLAHMYNVNNIFGIQNGYKGFYSSNYVAITPKTVNDIHKRGGTVLGTSRGGHDTKKIVDNIQDRGINQVYIIGGDGTQKGAYEIYKEIRKRGLKVAVAGVPKTIDNDIAIIDKSLGFGSPVEEXAQRAINSAHGEASSAENGIGLVKLMGRYSGFIAMYATPASRDVDCCLIPESPFYMDGEGGLLPYVERRLKENKHMVFVVAEGAGQDIIAKSIPASDQQDASGNKLLLDIGLWLTHKIKDHFKSKKMEMTIKYIDPTYMIRAIPSNAADNVYCTLLAHSAIHGAMAGYSFTVGMVNGRHAYIPFYRVTSTRNKVKITDRMWARLLSSTNQPSFLSQKDIDEAREADRLANKPPLPSVANHNVAKAFDQSASASSNGEI

SEQ ID NO: 7416 - protein, 513 aa, Glycine max
  unsure (1)..(513): unsure at all Xaa locations
MGACVSTPQGCVGGRLSSSKKKTRKRRREGLRRRVTSRLCKESSEKVDVAGLPDCSFANPTFQAGSIEEAWFDSIAVFDSDCDDDYQSVPDDVVSLSGIEGGSVSSFPSSRDATRGVSTDQVQKQKELLAGSEAARSSDVQYFGVDVIDSQREPVFLDEISSVDANSNKDDGLLDNCGILPNNCLPCLASTIPSVEKRRSSSSSPPNARKKGSCKTFLXWKEGHXNATLFSSKMLLQRPIAGSQVPFCPIEKKMLDCWSQIDASTFKVRGVNYFKDKKKDFAPNYPAYYPFGVDVFLSPRKVDHIARFVELPVMSSSVKFPPILVVNVQVPLYPATLFQGETDGEGMSIVLYFKLSESYSKELPPPFQESIRRLMDDEVEKVKGFPVDTIAPFRERLKILGRVVNLEDLHLSAAERKLMQAYNEKPVLSRPQHEFYTGENYFEIDLDMHRFSYISRKGFEAFLERLKVCTLDVGLTIQGNKQEELPENVLCCIRLNGIDYMNYHQLGLTQDPL

SEQ ID NO: 7417 - protein, 50 aa, Lactococcus lactis subsp. lactis
KGFGFITTEEGNDVFAHFSAIQTDGFKTLDEGQKVTFDVEEGPRGPQAAN

SEQ ID NO: 7418 - protein, 400 aa, Candida albicans SC5314
MPIDINTKAKCYFDTRPLTKGERKIIKDSIPILEYLDIQFGEKFFKRLIKQFPQYKPYFNETHLKLLRQPRSFHHCLLEFARNIDDLRPMKDFIMRIASKHVARQVSPDQYRVFGQVLVEVMMDQFPKEFVDQEFVEAWTMAFRILANILINIEVREYQDKPWYGFKAFRVTRLQPECVGTKSFFITPVDGTPVPIPKRGQYLCMRWKFPGEKQERLREYTISEFPKNNEYRITVRYIPGGKVTTYIHEKLAVGDIVQVSPPCGDCYYRSSKRNMVMLAGGNGVVALAPMIEKGLAEGRKVKFLYSNRSTETRSFGQFFRDLKQKYGDQLEVVEYLSRRRVIDPIDKYYRRSLTVEDLDFIVPEDDVYLIGPRTYMKMIEDYLKGRGVNVTLDYFGPQEV

SEQ ID NO: 7419 - protein, 343 aa, Listeria monocytogenes EGD-e
MKAVVKTNPGYDQMELKDVEEPQVYGDKVKIKVAFTGICGSDIHTFKGEYKNPTTPVTLGHEFSGVVVEVGPDVTSIKVGDRVTSETTFETCGECIYCKEHDYNLCSNRRGIGTQANGSFAEFVLSREESCHVLDERISLEAAALTEPLACCVHSALEKTTIRPDDTVLVFGPGPIGLLLAQVVKAQGATVIMAGITKDSDRLRLAKELGMDRIVDTLKEDLAEVVLGMTGGYGAERVFDCSGAVPAVNQGLPLTKKKGDFVQVGLFAEKKNAIDEESIIQREIAYIGSRSQKPSSWILALDLLANGKIDTDKMITKVYGLDDWREAFEAVMAGNEIKVLVKS

SEQ ID NO: 7420 - protein, 350 aa, Listeria monocytogenes EGD-e
MRAAVLYENNVIKAEQIDEATCGKDQVRVEVKAVGICGSDIHKMQTRWKYPLPAVMGHEFAGVITEIGSEVTNVAMGDRVAGIPLEPCMECNYCKAGDFALCDNYRMVGSHFHGGFAENVVMKADNVISIGDLDFEEGAMIEPLAVSMHGVLGIQPRLGDTVIVFGIGTIGILVVQCLLLAGVKDIIAVDISDKKLADAREFGCKYTINPKNEDLKERVFAYTNGLGADIALECAGSKITQEQCLLVTKKKGKVGFLGIAYADVLLHEEAFENIFRRELTLKGFWNSYSAPFPGEEWRTSIEFVKQGRIKLKPLISHRYKLEETKEAFDMILSREHDYNKVMILPQKGDD

SEQ ID NO: 7421 - protein, 50 aa, Lactococcus lactis subsp. cremoris
KGFGFITSEDGQDVFAHFSQIQTSGFKTLDEGQKVTFDVEAGQRGPQAAN

SEQ ID NO: 7422 - protein, 475 aa, Synechocystis sp. PCC 6803
MYEKLQPPSVGSKITFVAGKPVVPNDPIIPYIRGDGTGVDIWPATELVINAAIAKAYGGERKINWFKVYAGDEACELYGTYQYLPEDTLTAIKEYGVAIKGPLTTPVGGGIRSLNVALRQIFDLYTCVRPCRYYPGTPSPHKTPEKLDIIVYRENTEDIYLGIEWAEGTEGAKKLIAYLNDELIPTTPALGKKQIRLDSGIGIKPISKTGSQRLVRRAILHALRLPKAKQMVTLVHKGNIMKFTEGAFRDWGYELATTEFRAECVTERESWILGNKESNPDLTIEANAHMIDPGYDTLTEEKQAVIKQEVEQVLNSIWESHGNGQWKEKVMVNDRIADSIFQQIQTRPDEYSILATMNLNGDYLSDAAAAVVGGLGMGPGANIGDSAAIFEATHGTAPKHAGLDRINPGSVILSGVMMLEFMGWQEAADLIKKGIGAAIANREVTYDLARLMEPKVDKPLKCSEFAQAIVSHFDD

SEQ ID NO: 7423 - protein, 50 aa, Lactococcus lactis subsp. cremoris
KGFGFITSEEGKDLFAHFSAIQSDGFKTLDEGQKVEFDVEEGQRGPQAAN

SEQ ID NO: 7424 - protein, 526 aa, Triticum aestivum
MAMAMRRAAALGARHILAASASASSRVASRRHMGSVDAGAAMDKIRAAGLLRTRGLIGGQWVDAYDGKTTEVQNPATGEVLANVACMGNRETADAITSANTTFYTWSKLTASERSKALRKWHDLLMSHKEELALLMTLEQGKPMKEALGEVNYGASFIEFFAEEAKRVYGDIIPPTLADRRLLVLKQPIGVVGAITPWNFPLAMITRKVGPALACGCTVVVKPSEFTPLTALAAADLALQAGIPAGALNVVMGNAPEIGGELMQSTQVRKITFTGSTAVGKKLMAGSANTVKKVSLELGGNAPCIVFDDADIDVAVKGSLAAKFRNSGQTCVCANRILVQEGIYEKFASAFVKAVQSLQVGNGLEESTSQGPLINEAAVEKVEKFVGDATSKGANIMLGGKRHSLGMSFYEPTVVGNVSNDMLLFREEVFGPVAPLIPFKTEEEAIHLANDTNAGLAAYMFTKSIARSWRVSEALEYGLVGVNEGLISTEVAPFGGVKQSGLGREGSKYGMDDYLEIKYVCMGNLG

SEQ ID NO: 7425 - protein, 327 aa, Chlamydia trachomatis D/UW-3/CX
MSSQFDQLKLWSVLVGDTGDPALIKTLGVQDATTNPSLILKVAQEPKYQSMLTEAISWGIRQNGDDVQTLTFVLDKIQVNLGLEILKHVPGRVSLEIDARLSFNTEAMVQRAIFLSQLFEKMGGDKKRLLVKIPGTWEGICAAEVLESQGIACNVTLIFNLVQAIAAAKAKVTLVSPFVGRIYDWWIAAYGAEGYSIEADPGVASVANIYSYYKKFDIPTQIMAASFRTKEQVLALAGCDFLTISPKLLEELKKDQQPVERKLSVEEAKKLDIQPVELSESVFRFLMNEDAMATEKLAEGIRIFSGDTQILESAVTEFIRQIAAQEA

SEQ ID NO: 7426 - protein, 188 aa, Triticum aestivum
  unsure (1)..(188): unsure at all Xaa locations
MAIVYVLLVALITAASHAPHGAHGQTWHGDLAALAAAGKLRSDPNATLAASTDFGNITAALPAAVLFPSSPADVAALLRAAHTTVAWPYTISFRGRGHSVMGQALALGGVVVDMPSLGGPSSAARINVSADGQYVDAGGEQMWIDVLRAAXARGVAPQSWTDYLHTHVGGTLSNAGISGQTYRHXPQI

SEQ ID NO: 7427 - protein, 130 aa, Chlamydia trachomatis D/UW-3/CX
MTTESLETLVEQLSGLTVLELSQLKKLLEEKWDVTAAAPVVAVAGAAAAGDAPASAEPTEFAVILEDVPSDKKIGVLKVVREVTGLALKEAKEMTEGLPKTVKEKTSKSDAEDTVKKLQEAGAKAVAKGL

SEQ ID NO: 7428 - protein, 339 aa, Bacillus firmus
DQVLKKDGTPYKVFTPYYKAWAKERKRTPAVIKRDVLLGSVHKGTAPDREAETLFNNLIKKCSYDWSAIGEEHAIKRLQMFTKKRLSGYKANRDFPSITGTSRLSPYIKTGAVSSRSIYYHILNAEADSYSAETFLKELAWRDFYRMVHFYEPDCKDREIMEGYRELNWSHDQDDLTSWKRGETGFPIVDAGMRQLLNEGWMHNRLRMITASFLTKDLLIDWRLGERYFERMLIDYDPSSNIGGWQWAASVGTDAVPYFRIFNPVTQSKRFDENGTYIRTYIPELNHVPDHYIHEPWKMSEEEQVKYKCRLDEDYPLPIVDHSKQRKKALSFFKGDDEE

SEQ ID NO: 7429 - protein, 110 aa, Sinapis alba
MSGVWVFKNGVIRLVENPNQSGGDTNSRRKVMVYLPTGEVISSYSTLEQILRSLGWERYFGGGDTDLLQFHKRSSIDLISLPKDFTKFSSVYMYDIVVKNPNYFHVRDSN

SEQ ID NO: 7430 - protein, 339 aa, Clostridium thermocellum ATCC 27405
MVSPGKIEFHEVEKPELKPGQVLIKIMRIGICGSDIHVNHGKHPFTKYPVTQGHEVSGKIVEVAEDVEHLKVGQKVTIEPQVVCGKCHPCRTGKYNLCEELKVMGFQTVGAGSEYFAVDAKNVTTVPDHLSYDEAAMIEPLAVTVHAANRVGDVKDKDIVVIGAGPIGILLVQTLKAKGARKVMVTDVSDYRLELALKCGADFAVNTKKEDFGEAMLRCFGPDKADVIYDCAGNNTTMEQAIKHSRKGSIIVLVAVFEGMATVDLATLNDKELDLNTTMMYRHEDYVEAIELVEAGKVKLTPLMSKHFAFRDWEKAYEYIDNNREITMKVLIDVNNDDD

SEQ ID NO: 7431 - protein, 339 aa, Bacillus subtilis subsp. subtilis str. 168
MKAVQVRKAYDLVTAEVKKPVLSKDDEVLVKVKRVGICGSDMHIYHGTNPLATLPRVIGHEVTGQVEAVGANVQSLKPGDHVVIEPISYCGSCYACRKGRPNVCAKLSVFGVHEDGGMREYIVLPERQLHAVSKDLPWEEAVMAEPYTIGAQAVWRGQVEKGDTVLIQGAGPIGICVLKMAKLAGAAVMMTDLNNERLAFAKENGADAVVNVQAEHVAERVLEWTGNEGANVVIDAVCLPETFALSIEAVSPAGHVVVLGFDERAAQISQLPITKKEVTITGSRLQTNQFPKVVELLNGGRLMHNGLVTHTFSVDDVHHAFQFIKEHPDQVRKAVITFD

SEQ ID NO: 7432 - protein, 110 aa, Bartonella sp. SC12uk
ANEACLKMLQEIGSVRRIPEFITRAKDKNDPFRLMGFGHRVYKNYDPRAKIMQQTCHEVLKELNIQDDPLLDIAIELEKIALNDQYFGEKKLYPNVDFYSGITLKALGFP

SEQ ID NO: 7433 - protein, 110 aa, Bartonella sp. SV06uk
ANEACLKMLQEIGSVKRIPEFIARAKNKNDPFRLMGFGHRVYKNYDPRAKIMQKTCHEVLKELNIQDDPLLDIAIELEKIALNDEYFVEKKLYPNVDFYSGITLKALGFP

SEQ ID NO: 7434 - protein, 159 aa, Glycine max
MDFRVMGLDSPLFHTLQHMMDMSEDAAGDNKTYSAPTRSYVRDAKAMAATPADVKEYPNSYVFEIDMPGLKSGDIKVQVEDDNVLLISGERKRDEEIEGVKYLRMERRIGKFMRKFVLPENANTDAISAVCQDGVLSVIVQKLPPPEPKKPKTIEVKVA

SEQ ID NO: 7435 - protein, 342 aa, Streptomyces avermitilis MA-4680
MRVGVLTGGGDCPGLNAVIRGVVRKGVQEYGYDFVGFRDGWRGPLEGDAVRLDIPAVRGILPRGGTILGSSRTNPLKLDDGIRRIKENLAKQEVDALIAIGGEDTLGVAARLTDEYGVPVVGVPKTIDNDLSATDYTFGFDTAVGIATEAIDRLHTTAESHMRVLVCEVMGRHAGWIAIHSGLAGGANVILIPEQRFDVDQVCAYVTSRFKASYAPIVVVAEGAMPKDGQMVLKDESLDSFGHVRLSGVGEWLAKEIEKRTGKEARTTVLGHVQRGGTPSAFDRWLATRFGLHAIEAVRDGDFGKMVALRGTDIVRVPIAEATAKLKTVDPKLYEEVGVFFG

SEQ ID NO: 7436 - protein, 495 aa, Triticum aestivum
  unsure (1)..(495): unsure at all Xaa locations
SLRGENRAEQIANNNSRYGQNLIRKSHTPSDIGMAGGYCGCDCAKALGNAASDFAFPQSGKLLRNAAEPLYSFGSPWGLEESWLGCYTFDGVGKPSDLYEKLRIPGDNLFFAGEATSVQDTGTVHGAFSTRVPQAEVGRIRVLFEAILEETGKLCHPMAEHTATASVPLLISRLXQSPPKLPTYCRGRFAGRSFQWLLGEGGVGAISPCSSSWHEACGRVTLWPAGHGLCGRGYRPGRLAWALGPGCRRGCLVSGIERRSTYQLCTVSRGCTLVADAAVITVPLGVLKSNTTKYERRLPXVEGGIGVENKIVRRYSEVFWPXNVEFLGVVEFLGVVSSTTYGCSYSTGHAVLVYMPAGRLACDIEHVSDEAAAQFAFSQLKKILPNAAEPLNYLVSHWGSDENTLGSYTFDGVGKPRDLYEKLRIPVDNLFFAGEATSVQYTGTVHGAFSTGEMAAEECRMRVLEKFRELDMLEMCHPMAEQTATVSVPLLISRL

SEQ ID NO: 7437 - protein, 133 aa, Parietaria judaica
MRTVSMAALVVIAAALAWTSSAEPAPAPAPGEEACGKVVQDIMPCLHFVKGEEKEPSKECCSGTKKLSEEVKTTEQKREACKCIVRATKGISGIKNELVAEVPKKCDIKTTLPPITADFDCSKIQSTIFRGYY

SEQ ID NO: 7438 - protein, 106 aa, Rickettsia prowazekii
AVINMLKEIGSSENIPKYVAKAKDKNDPFRLMGFGHRVYKSYDPRAAVLKETCKEVLNELGQLDNNPLLQIAIELEALALKDEYFIERKLYPNVDFYSGIIYKAMG

SEQ ID NO: 7439 - protein, 133 aa, Parietaria judaica
MRTVSMAALVVIAAALAWTSSAELASAPAPGEGPCGKVVHHIMPCLKFVKGEEKEPSKSCCSGTKKLSEEVKTTEQKREACKCIVAATKGISGIKNELVAEVPKKCGITTTLPPITADFDCSKIESTIFRGYY

SEQ ID NO: 7440 - protein, 176 aa, Parietaria judaica
MRTVSAPSAVALVVIVAAGLAWTSLASVAPPAPAPGSEETCGTVVRALMPCLPFVQGKEKEPSKGCCSGAKRLDGETKTGLQRVHACECIQTAMKTYSDIDGKLVSEVPKHCGIVDSKLPPIDVNMDCKTLGVVPRQPQLPVSLRHGPVTGPSDPAHKARLERPQIRVPPPAPEKA

SEQ ID NO: 7441 - protein, 257 aa, Zea mays
KTDIIAIDDEIYSNDDDPERWDVQVCLPKGSINHCKISNSDIHGRALSKFHLNFFCLGNREAEDTTCTSSGPFSASNPQDQARKNRRFMVYVHSKGMIVDDEYVIIGSANINQRSMEGTRDTEIAMAAYQPQHTWANMLSAPRGQIFGYRMSLWAEHIGAIEESFTRPESLECTRQVRHIGQQNWEKFISSHVTEMKGHLLKYPVSIDSRGKVNPLSGCATFPDLGGNICGSFLQHCISRKKNPYFLNRFKRSPSFL

SEQ ID NO: 7442 - protein, 352 aa, Escherichia coli CFT073
MLYYLHIRWITSMCKKTSGNRFHFAFQSSEVVMIKKIGVLTSGGDAPGMNAAIRGVVRSALTEGLEVMGIYDGYLGLYEDRMVQLDRYSVSDMINRGGTFLGSARFPEFRDENIRAVAIENLKKRGIDALVVIGGDGSYMGAMRLTEMGFPCIGLPGTIDNDIKGTDYTIGFFTALSTVVEAIDRLRDTSSSHQRISVVEVMGRYCGDLTLAAAIAGGCEFVVVPEVEFSREDLVNEIKAGIAKGKKHAIVAITEHMCDVDELAHFIEKETGRETRATVLGHIQRGGSPVPYDRILASRMGAYAIELLLAGYGGRCVGIQNEQLVHHDIIDAIENMKRPFKGDWLDCAKKLY

SEQ ID NO: 7443 - protein, 143 aa, Zea mays
  unsure (1)..(143): unsure at all Xaa locations
MAMAYKMATEGMNVKEECQRWFMEMKWKKVHRFVVYKIDERSRAVLVDKVGGPGEXHEELVAALPGDDCRYAVFDFDFVTVDNCQKSKIFFIAWSPAASRIRAKILYATSKQGLRRLLDGVHYEVQATDPSEMGFDVIRGRAQ

SEQ ID NO: 7444 - protein, 50 aa, Lactobacillus acidophilus
KGFGFITGEDGQDVFVHFSAINGEGYKSLDEGQAVSYDVEQSDRGPQAAN

SEQ ID NO: 7445 - protein, 386 aa, Lactobacillus plantarum WCFS1
MVEQDEILKLHAAHTGVLDIHSDLAVTDKADLGKAYTPGVAVISKLIAAHPELKAKYTMSGKLVALITDGSAVLGLGNIGPAGGLPVVEGKALLYKNLAGINAIPLALNQVSVPAMVATIKNMSLSFAGIHLEDITAPKCFELEAALKDELDIPVYHDDQEGTAIVVLAGLINAAHVVGKSLRQMRIVVNGVGASGLATARLLAAVGVKQLTLVDVYGVVTADDQRYNQYQRNLAKQLGTPAQLKGQPLAKVMADQDVFIGLSDANVLSAGAVHLMNHDPIVFALANPVPEINPAVAEKAGATVIATGSSQYPNQVNNILAFPGLFKGLLTNGVKQVDNALQIQVAQALAKTVSNPTATTIVPSVFDSQVVPNVTAAVAAYAQAQH

SEQ ID NO: 7446 - protein, 50 aa, Lactobacillus helveticus
KGFGFITGSDNKDVFVHFSAIKTDGFKSLEEGQKVSYDVEQGGRGPQAAN

SEQ ID NO: 7447 - protein, 183 aa, Avena sativa
YRVSIGLPGNGGWCSGWGRGDDGGAANARASVQGRGETWVRRRSGRQGCGGGGGRREEEGAGPAAKAQVVGWPPIRSYRKNTMATSLSAPRSKDEVEAKQAPVAGCLYVKVSMDGAPYLRKVDLKMYKNYKDLSLELEKKFSCFTVGHGESNGKSGRDGLSDCRLMDPKSGAELVLTYEDKDG

SEQ ID NO: 7448 - protein, 50 aa, Streptococcus thermophilus
KGFGFITSEDGQDLFAHFSSIQSDGFKSLDEDQKVEFDVEVGQRGPQAAN

SEQ ID NO: 7449 - protein, 302 aa, Magnaporthe grisea 70-15
MPFHKLVKNSAYYSRFQTKYKRRQQGKTDYYARKRLITQAKNKYNAPKYRLVVRFTNRDIIMQIVTSEISGDKVFASAYSHELKAYGITHGLTNWAAAYATGLLIARRVLKKLGLDEDFTGVEEPEGEFTLTEAAETDEGTRRPFKAYLDVGLARTSTGARVFGAMKGASDGGILIPHSENRFPGFDIESKELDSETLKKYIFGGHVAEYMETLADDDEERYKSQFQQYIDEDIDADGLEDIYTEAHAAIREDPFKKPEGAEAKKSKEEYKKESLKFKAKKLTLAERKARVQERIAELRDAE

SEQ ID NO: 7450 - protein, 361 aa, Synechocystis sp. PCC 6803
MGEIKRIGILTSGGDCAGLNAVIRSVVHHAIGTYGWEVIGIQEATQGLMENPSKAIALHRDNIDHLLMMGGTFLGTTNKGNPFAFPMADGTVRDRTEDIIAGYRQLGLDALIGIGGDGSLAILRRIAQQGGINLVGIPKTIDNDVGATEISIGFDTATNIATEALDRLHFTAASHNRVMVLEVMGRDAGHIALAAGIGGGADIILIPEIPYRIQSVCNKIRQRQAEGKNFCLVMVSEAVRTELGDQVKQIQQFGEDRYGGIGKYIAEQIAQRTGAETRVTVLGHIQRGGIPSPFDRLLGSVFGVAAVDLIAEGKFDHMVAWRNRQTISVPIEEAIQTYQTVQLDGTLVKTARGLGICLGND

SEQ ID NO: 7451 - protein, 120 aa, Avena sativa
GSVVGWPPVRSYRRNAMTVQSVKIKKEEETEKQQPASAVAAAAAAATAGGNGSAFVKVSMDGAPYLRKVDLKMYNTYKDLSIALQKMFSTFTATGNEGKMVEAVNGSDVVTTYEDKDGDW

SEQ ID NO: 7452 - protein, 312 aa, Saccharomyces cerevisiae
MDSQPVDVDNIIDRLLEVRGSKPGQQVDLEENEIRYLCSKARSIFIKQPILLELEAPIKICGDIHGQYYDLLRLFEYGGFPPESNYLFLGDYVDRGKQSLETICLLLAYKIKYPENFFILRGNHECASINRIYGFYHECKRRYNIKLWKTFTDCFNCLPIAAIIDEKIFCMHGGLSPDLNSMEQIRRVMRPTDIPDVGLLCDLLWSDPDKDIVGWSENDRGVSFTFGPDVVNRFLQKQDMELICRAHQVVEDGYEFFSKRQLVTLFSAPNYCVEFDNAGAMMSVDESLLCSFQILKPAQKSLPRQAGGRKKK

SEQ ID NO: 7453 - protein, 56 aa, Triticum aestivum
MKVSMSDSEDHHFQSKADAGASKTYPMQAGAIRKGGLLVMKNPPCKVADVSTSKTG

SEQ ID NO: 7454 - protein, 293 aa, Aspergillus fumigatus
MSEITHPTIKDGWFSEQSDMWPGQAMNLKVNQILHHEKSKYQDVLVFESTDYGTVLVLDNVIQCTERDEFSYQEMITHLAMNSHPNPKKVLVIGGGDGGVLREVVKHESVEEAILCDIDEAVIRVSKKYLPGMSIGFQHPNVKVHIGDGFQFLKERKNEFDVIITDSSDPEGPAESLFQKPYFELLRDALRDGGVITTQGSENQWLHLSLITDLKKACKEVFPVAEYAYTTIPTYPSGQIGFMVCCKDATRNVREPVRTWSREEEERLCRYYNQDIHRASFVLPNFARKALDV

SEQ ID NO: 7455 - protein, 358 aa, Cryphonectria parasitica
MAEFVRAQIFGTTFEITSRYSDLQPVGMGAFGLVCSARDQLTNQNVAIKKIMKPFSTPVLAKRTYRELKLLKHLRHENIISLSDIFISPLEDIYFVTELLGTDLHRLLTSRPLEKQFIQYFLYQIMRGLKYVHSAGVVHRDLKPSNILVNENCDLKICDFGLARIQDPQMTGYVSTRYYRAPEIMLTWQKYDVEVDIWSAGCIFAEMLEGKPLFPGKDHVNQFSIITELLGTPPDDVINTIASENTLRFVKSLPKRERQPLASKFKNADEQAVDLLERMLVFDPKKRITASDALAHEYLAPYHDPTDEPVAEEKFDWSFNDADLPVDTWKIMMYSEILDYHNVDASGASAAMGEFNGQ

SEQ ID NO: 7456 - protein, 490 aa, SYNECHOCOCCUS SP. WH 8102
MTTAFHSPTSRRRKTLQEANLLEGPLMLIKSIRGFSSNRAMTWLACAPLALMGLGIFTLSAKAEELPDLNAAFLANNLWLLVATILVIFMNAGFAMVEAGMCRQKNAVNILAKNLFVFALAVTAYWFVGYSFMYGDAAIDGWLYFGGLFFDPTVTAETISDAGLVPTVDFLFQAAFAGTAATIVSGLVAERIKFGEFVVFALILTAFIYPVAGSWEWNGGWLNSVGNAEFIDFAGSSIVHSVGAWAGLVGAALLGPRIGKYVGGNVQAIPGHNMSIATLGALILWIGWYGFNPGSQLAMDQWVPYVAVTTTLGAAGGAIGATVISTITSKKPDLTMIINGILAGLVSVTAGCGNLTLTGSWVAGLVGGIIVVFSVSALDSAGIDDPVGAFSVHGVCGVWGTLVIGLWGFDVQGDGSPLGLLVGGGIEQLGIQALGTAAYAIWTVVTCFIAWQIIGALFGGIRVTEQEETEGLDIGEHGMEAYAGFSTTNN

SEQ ID NO: 7457 - protein, 501 aa, Arabidopsis thaliana
MANLRLMITLITVLMITKSSNGIKIDLPKSLNLTLSTDPSIISAASHDFGNITTVTPGGVICPSSTADISRLLQYAANGKSTFQVAARGQGHSLNGQASVSGGVIVNMTCITDVVVSKDKKYADVAAGTLWVDVLKKTAEKGVSPVSWTDYLHITVRGTLSNGGIGGQVFRNGPLVSNVLELDVITGKGEMLTCSRQLNPELFYGVLGGLGQFGIITRARIVLDHAPKRAKWFRMLYSDFTTFTKDQERLISMANDIGVDYLEGQIFLSNGVVDTSFFPPSDQSKVADLVKQHGIIYVLEVAKYYDDPNLPIISKVIDTLTKTLSYLPGFISMHDVAYFDFLNRVHVEENKLRSLGLWELPHPWLNLYVPKSRILDFHNGVVKDILLKQKSASGLALLYPTNRNKWDNRMSAMIPEIDEDVIYIIGLLQSATPKDLPEVESVNEKIIRFCKDSGIKIKQYLMHYTSKEDWIEHFGSKWDDFSKRKDLFDPKKLLSPGQDIF

SEQ ID NO: 7458 - protein, 55 aa, Zea mays
MAGTANCIDIILAIILPPLGVFLKFGCGHEFWICLLLTFLGYIPGIIYAIYAITK

SEQ ID NO: 7459 - protein, 200 aa, Anabaena variabilis ATCC 29413
MSRRRDFLLQSFSIIGLVKLSAIACSSVGNKNTEIASTPSSKLTTERKSMKLESVFGANSQIPAKYTCDGVDISPTLSWDEPPEETQSLALIVDDPDAPRHTFVHWVIYDIPPTVRQLPEHITATKTLPSGGVQGKNDFGKLGYGGPCPPSGTHRYFFKLYALDKNLGLPPGATKEQILQAMKGHVLATAELIGGYQRQP

SEQ ID NO: 7460 - protein, 279 aa, Zea mays
MASTPLLLLSPQRLCLAALPSPGRDHPPPGLLPPGPRRAMEEPPPGSSKAAAARAPRVVGVLAGLLERAAERGDTATPAPAGSAFRGRALPGIPVRRYAERIYRYAGCSPACFVVAYVYLDRLARGRRDAGAGEDEDEDEAAVVGIDSYTVHRLLITSVLVAAKFMDDRHHNNAYFARVGGVEVAEMNALELRLLFALRFRLNVAPDTFARYCAALECHVDTPDAGGPVPRMPPSSHVDGEEAVTSSKDKVAAAGGGSVVVQRSHRQRRAVVQIMTTAQ

SEQ ID NO: 7461 - protein, 119 aa, ASPERGILLUS NIDULANS FGSC A4
MIQLKTLLNCIDNSGAAVVECVNVLKKKRAATVGDRIVIVVQKQRNFGPEGTSSTGIANKVRRGDIRHAVVVRVKKEMQRPDGTLVKFDDNACVLVNKSGDPIGTRMNEHTFPGISLIT

SEQ ID NO: 7462 - protein, 447 aa, Triticum aestivum
  unsure (1)..(447): unsure at all Xaa locations
MSTGRRQASLKVRRRVGTYELGRTIGEGTFAKVRFAKDTESGDPVAIKILDKAKVHKHGLVEQIRREICTMKLIQHPNVVRLHEVMGSKARIFIVLEYVTGGELHDIIAARGSLKEDEARRYFQQLINAVDYCHSRGVYHRDLKLENLLLDTAGNLKVSDFGLSAISEQAKADGLLHTTCGTPNYVAPEVIQDKGYNGALADLWSCGVILFVMLAGYLPFEDDNVSALYKKISGAQFTCPSWFSDGAKRLIPRILDPNPSTRITIPQLLKDPWFKKGYKPPVFDEKHQTSLDDVDAAFGDSEEKQVEEEMEGQPASMNAFELISLNKGLKLDNFFEADKKYRRETRFTSQCPPEEIIXRIEEAAKPLGFDIQKKNYKMRMKNLEAGRKGNLNVATEVFQVAPSLFVVELKKAKGDTLEFQKFYKTLSAQIKDVVWVCESEAEERGST

SEQ ID NO: 7463 - protein, 416 aa, Arabidopsis thaliana
MGLFGTKKIGKYEIGRTIGEGNFAKVKLGYDTTNGTYVAVKIIDKALVIQKGLESQVKREIRTMKLLNHPNIVQIHEVIGTKTKICIVMEYVSGGQLSDRLGRQKMKESDARKLFQQLIDAVDCCHNRGVYHRDLKPQNLLLDSKGNLKVSDFGLSAVPKSGDMLSTACGSPCYIAPELIMNKGYSGAAVDVWSCGVILFELLAGYPPFDDHTLPVLYKKILRADYTFPPGFTGEQKRLIFNILDPNPLSRITLAEIIIKDSWFKIGYTPVYHQLSDSIKDNVAEINAATASSNFINAFQIIAMSSDLDLSGLFEENDDKRYKTRIGSKNTAQETIKKIEAAATYVSLSVERIKHFKVKIQPKEIRSRSSYDLLSAEVIEVTPTNCVIEISKSAGELRLYMEFCQSLSSLLTAEVS

SEQ ID NO: 7464 - protein, 449 aa, Xylella fastidiosa Ann-1
MNPTLIVNARLVNEGREFDSDLRIENGRIARIDTGLSAQSKDIVIDAAGRRLLPGMIDDQVHFREPGLTHKGDIVSESAAAVAGGLTSFMDMPNTNPPTLGAAALQAKYDAARGRAWGNYGFYLGASNDNLAAIQALDPKTSPGIKVFMGASTGNMLVDNETTLEGIFRHAPTPIITHCEDTPTINATLAKYHSRYGNTLSAEQHPDIRSRQACLKSSQLAVSLAKKNGTRLHVLHISTADELRLFEAGPLVDAAGKRRKQITAETCIHFLHFDRMDYARLGNLIKCNPAIKEASDREALIAALAKDVIDVLATDHAPHTWEEKQQPYAQAPSGLPLVQYALVAALELVHAGRLSVTEIVRKFAHAPAQLFDVIERGFLREGYWADLVLVEDTPFTVKRQEILSKCGWSPFEGTTFRSRIASTWVNGNHVWDGNRLVGVPNGQRLEFDR

SEQ ID NO: 7465 - protein, 140 aa, Triticum aestivum
  unsure (1)..(140): unsure at all Xaa locations
GKVVEVSTSKTGKHGHAKCHFVAIDIFNGKKLEDIVPSSHNCDXPHVDRQDYQLIDXITDDXXVXPPKXEKXXTTKGXLKASQLMMFCLGXXKTGFADGKXLILSVMSAMGXEKQICAXXGIRGXKLTTVRGCPTATLGT

SEQ ID NO: 7466 - protein, 358 aa, Zea mays
HASAEDQDSWNVQLFRSIDGGACFGFPSTPEAAAQSGLVSGKNNVLDRSIHDAYIHAIRRAKHFIYIENQYFLGSSFAWKADGIKPEEIEALHLVPRELSLKIVSKIEAGEHFAVYVVLPMWPEGPPASGSIQGILDWQRRTMEMMYNDISVALDAKRIDRDPRDYLTFFCLGNREVKMDGEYEPSGRPLDGTDYARAQNARRFMIYVHSKMMIVDDEYIIVGSANINQRSMDGGRDSEIAMGAYQPCHLNTKGQVARGQVHGFRMSLWYEHLGMLHDDFLNPGSLECVRRVNQMADRYWDLYAGDSLDADLLGHLLRYPVTVTKEGTVTELPGAKFFPDTQALVLGALSKLPPILTT

SEQ ID NO: 7467 - protein, 499 aa, Glycine max
  unsure (1)..(499): unsure at all Xaa locations
MNSNGYPASSFKIPTVKFTKLFINGHFVDSLSGGEFETIDPRTGEVIARIAEGTKEDIDLAVKASRLAFDHGPWPRMPAVERARIMMKWADLIDQHVEEIAALDAIDAGKLYHMCKAIEIPATANTIRYYAGAADKIHGEVLKTSREFHAYTLLEPLGVVGHIIPWNFPSIMFVXKVSPCLAAGCTMVLKPAEQTPLSALFYAHLAKLAGIPDGVLNVVPGFGATAGAAISSHMDIDKVSFTGSTEVGREVMRAAANSNLKPVSLELGGKSPFIIFDDADLDKAVELALMAVVYNQGRXCAAGSRVFVQEGIYDEFEKRLVEKAKAWVVGDPFDPNVQQGPQVDKKQFEKILSYIEHGKREGATLLTGGKRVGNKGYYIEPTIFSNVKEEMLIAQDEIFDPVIALMRFKTIEEAIKSANKSRYGLVAGVVTKSLDTANTMSRSIRPGVVWINCYFAFENDIPYGGCKMSGFGKDSGLEALHKYLHVKSVVTPIYNSPWL

SEQ ID NO: 7468 - protein, 375 aa, Pseudomonas syringae pv. tomato str. DC3000
MAEAKVLSGAGLRGQVAGQTALSTVGMAGAGLTYRGYDVRELAAEAQFEEVAYLLLYGELPTQSQLAAYLGKLKGLRDLPQALKEVLERIPADTHPMDVMRTGASMLGTLEPELSFDQQRDATDRLLAAFPAIMCYWYRFSHDGQRIDCTTDESSIGGHFLHLLLDKTPSELHRKVMDVSLILYAEHEFNASTFTARVCASTLSDLYSCVTAAIGTLRGPLHGGANEAAMEMIQRFASADEATQGTLGMLERKEKIMGFGHAIYKESDPRNEVIKGWSKKLADEAGDSVLFPVSEAIDKVMWEQKKLFPNADFYHASAYHFMGIPTKLFTPIFVCSRLTGWAAHVFEQRANNRIIRPSAEYIGVEQRSFVPIEQR

SEQ ID NO: 7469 - protein, 170 aa, Zea mays
MAGIGRNMVAPLVVLNLIMYIIVIGFASWNLNHFINGQTNYPGVAGNGATFYFLVFGILAGVVGAASKLAGVHHVRAWRHDSLATNAASSLIAWAITALAFGLACKEIHIGGHRGWRLRVLEAFVIILAFTQLLYVLMLHTGLFGGSGGYRDHDYGVGGAAGEPKGVTRV

SEQ ID NO: 7470 - protein, 493 aa, ASPERGILLUS NIDULANS FGSC A4
MPPPVGRYGPTGLTGPYSHLAQQQAHLQQQQQAQHHPAHAQSSNTALPPPSLGVHPGFTTANANANMNPFTLAGAGVGNGMSVAGFGAAGDGGGTGLASHAAQMGFARGAQMQQQQLHQAHDGRFTLEGKGGGVKTRIRDVWKHNLAQEMAVLRHLVERYPYISMDTEFPGIVARPIGSFTNKADYHYQTLRCNVDLLKMIQLGITLFSPKGEVPPPDATDANGQPLGNGLVPAPCTWQFNFRFSLEEDMYAQESTAMLAKAGIDFATHEKNGIDPLEFGALLISSGLVLLDDVHWISFHSGYDFGYLMKIMLCQALPENEEEFHKLLNIFFPSLYDIKYLMKHATRNQAVNDSPLTPAAAQIISNLGQKSGLQDIADELGVKRVGIAHQAGSDSLVTGEIFWKMRQLVFNGKIDDSKYSGQIWGLNGQMPTVTYHNNPHQTPNLNGATIYSAAGTPSTPNNAGVQTPQNHTPGALTPGATGGVLGQYQMAKS

SEQ ID NO: 7471 - protein, 151 aa, Rhizobium etli
MMRRLLLVLALMLSAVPAFAVNPDEVLADPALEARARALSAELRCMVCQNQSIDDSNAELAKDLRLLVRERISNGDSDAAVLNYIVSRYGEFVLLKPRFSMRTVLLWGAPVLLVLAGGVSLLVFARKRTGRPTGSKLTPEEQAKLSELLEK

SEQ ID NO: 7472 - protein, 146 aa, Rickettsia peacockii
ANEAVINMLKEIGSSEYIPKYIAKAKDKNDPFRLMGFGHRVYKNYDPRAVVLKETCKEVLKELGQLDNNPLLQIAIELEAIALKDEYFIERKLYPNVDFYSGIIYKAMGIPSQMFTVLFAIARTVGWMAQWKEMHEDPEQKISRPR

SEQ ID NO: 7473 - protein, 116 aa, Zea mays
  unsure (1)..(116): unsure at all Xaa locations
MAMAYKMATEGMNVKEECQRWFMEMKWKKVHRFVVFKIDDWRYAVFDFDFVTVDNCQKNKIFFIAWSPAASRIRAQILYATSKQGLRRLLDGVHYEVQATDPSEXMGFDVIRGRAQ

SEQ ID NO: 7474 - protein, 145 aa, Zea mays
MCPTKKEMSAESSGSASSWTSASTSTSPEHQTVWTSPPKRPAGRTKFRETRHPVFRGVRRRGSAGRWVCEVRVPGRRGCRLWLGTFDAAEAAARAHDAAMLAIAGASACLNFADSAWLLAVPASYASLAEVRRAVAEAVEDFQRR

SEQ ID NO: 7475 - protein, 42 aa, Triticum aestivum
ILLPPVGVFLRYGIGVEFWICLLLTILGYIPGIIYAVYVLVA

SEQ ID NO: 7476 - protein, 147 aa, Brassica napus
MDFGRFPIISILEDMLEVPEEHSEKGRSNPWRAYVRDQKAMAATPADVIEHPDAYAFVVDMPGIKGDEIKVQVESDNLLVVSGERKRENKEKEGVKYVRMERRMGKFMRKFQLPENADLEKISASCNDGVLKVTVGKLPPPEPKKPK

SEQ ID NO: 7477 - protein, 466 aa, Methanothermobacter thermautotrophicus
MCAIAGFRGDDAPVKVQEMLDVLRHRGPDATGIYHDSRIVIRTATGEDVKEAPQSAEIAVGHNLLSIVGGPQPVSGDGVLVFNGEIYNQEELNWTGSDSELILDLIEGHGGDLEDALRFTVNKIDGDYAFAYTDGENLASRQDPVGVKPLYHSGEAFASEKKALWRIGLRNVETLPPGHAMINGVKVKLRGLPRAEPSDAEPEELRENLKSALRESVERRVRGLDEAALVFSGGVDSTLLAVLLDEHIDVRLYTVGLPGSSDPQFASRAAADLGMELEVLEVTEDTIREALPHVLGAIEEYNLMKIGVAMPLYLASEAASADGYRVMFSGQGADELFAGYHRYRRLLAEGRLEDALRHDLENIHHVNLERDDAVTMANSVELRVPFLDLQLIGVALTIPADLKIRGPEDELRKRILREAALEMGVPEYIAMRPKKAAQYGSGIDKVLRRKVLPGFDHETFLRRLMF

SEQ ID NO: 7478 - protein, 162 aa, Ureaplasma parvum serovar 3 str. ATCC 700970
MERLNMKLSDYPVLDIDKKLFNWSKVKNKLVLIVNVASKCGYAKQYEQLEYLYKKYKNKGFIIVAFPCRQFMFQEFDDNNKIKEFCSTKYNVTFPIMDLTNVVGSNISPLYKQLITEYPWSPKAKAVKWNFEKFFVKNDEIIGRFESKCEPNDLEEFIKNNL

SEQ ID NO: 7479 - protein, 411 aa, Deinococcus radiodurans R1
MCPARSHLFVTPAGTFDRPFFAPWKKGRCYPLLTMSNIAKGLEGVLFTESKLTFINGSEGILTHLGIPIQEWAEKSTFEELSLALLDAKLPTAEELAKFDAELKANRAIPDQLVGIIRDMPKGVHPMQALRTAVSYLGLLDPQAEDITPEARRAISTRMIAQFSTIIAAINRAQEGQDIVAPRADLTHAGNFLYMLTGNEPTPEQARLFDIALVLHADHGMNASTFTAIATSSTLSDMYSCMVSAIGALKGPLHGGANEAVMTMLDEIGTVDKAEAYITGKLDNKEKIMGVGHRVYKYFDPRSRVLRDYAEHVANKEGKSNYYQILEAIEKIIVDRMGAKGIYPNVDFYSGTVYSDLGIKKEYFTPIFALARISGWCASVIEYSQDNRLLRPDAEYTGARDQHYVDIKDRQ

SEQ ID NO: 7480 - protein, 253 aa, Triticum aestivum
  unsure (1)..(253): unsure at all Xaa locations
MKTLLIVTILAMATTIATANMQVDPGYQVHWPQQQPFPQPQQPFCQQPQQTIPQPHQTFHHQPQQTFPQPQQTYPHQPQQQFPQTQQPQQPFPQPQQTFPQQPQLPFPQQPQQPFPQPQQPQQQFPQSQQPQQPFPQPQQQFLQPQQPQQSFPQQQQPLIQLSLQQQMNPCKNFLLQQCNPVSLVSSLISMILPRSDCQVMQQQCCQQLAQIPQQLQXCAAIHKGGIPINQCSKNNGPRRCRIRRATGFSSVG

SEQ ID NO: 7481 - protein, 250 aa, Zea mays
MAKNYPTVSAEYSEAVDKARRKLRALIAEKSCAPLMLRLAWHSAGTFDVSSRTGGPFGTMKHQSELAHGANAGLDIAVRLLEPIKEEFPILSYADFYQLAGVVAVEVTGGPEIPFHPGREDKPQPPPEGRLPDATKGSDHLRQVFGKQMGLSDQDIVALSGGHTLGRCHKERSGFEGAWTTNPLVFDNSYFKELLSGDKEGLLQLPSDKALLSDPVFRPLVEKYAADEKAFFDDYKEAHLKLSELGFADA

SEQ ID NO: 7482 - protein, 318 aa, Shewanella oneidensis MR-1
MANTLEQLKSYTTIVADTGDIEAIKRYQPEDATTNPSLILKAAQIPEYSALIDNAIAWAKLQSTDIEQQIDDASDKLAVNIGVEILKLVPGRISTEVDARLSFDKEKSIAKAHKLVRLYQEAGVDKSRILIKLASTWEGICAAKELEQEGINCNLTLLFSFSQARACAEAGVYLISPFVGRILDWYKKDTGKDYDAVNDPGVVSVTEIYNYYKQHGYNTVVMGASFRNIGEIIELAGCDRLTIGPSLLEELANSQLAIQPKLVPTSTTVAVAEPLTEAQFRWEFNQDAMAVDKLAEGIRNFAIDQGKLEVMLKAKLAN

SEQ ID NO: 7483 - protein, 374 aa, Glycine max
  unsure (1)..(374): unsure at all Xaa locations
MSQPKIKRRVGKYEVGRTIGEGTFAKVKFARNSETGDPVALKILDKEKVLKHKMAEQIRREVATMKLIKHPNVVRLCEVMGSKTKIYIVLEFVTGGELFDKIVNHGRMSENEARRYFQQLINAVDYCHSRGVYHRDLKPENLLLDAYGNLKVSDFGLSALSQQVRDDGLLHTTCGTPNYVAPEVLNDRGYDGVTADLWSCGVILFVLVAGYLPFDDPNLMNLYKKXRKLITRILDPDPTTRITIPEILDDEWFKKDYKPPVFEENGETNLDDVEAVFKDSEEHHVTEKKEEQPTAMNAFELISMSKGLNLENLFDTEQGFKRETRFTSKSPADEIINKIEEAAKPLGFDVQKXNYKMRLANVKAGRKGNLNVAT

SEQ ID NO: 7484 - protein, 509 aa, Oryza sativa
MGSFARKEHQFLAELGLAPRNPGSFACGAWGGSGPVVTSTNPTNNQVIAEVVEASAREYEEGMRACYDAAKTWMAIPAPKRGEIVRQIGDALRAKLHHLGRLVSLEMGKILPEGIGEVQEIIDMCDYAVGLSRQLNGSIIPSERPNHMMMEVWNPLGVVGVITAFNFPCAVLGWNACIALVCGNCVVWKGAPTTPLITIAMTKIVASVLERNNLPGSIFTAFCGGADIGQAISLDTRIPLVSFTGSTKVGLMVQQQVNARFGKCLLELSGNNAIIVMDDADIQLAVRSVLFAAVGTAGQRCTTCRRLLLHESIYRTFLDQLVEVYKQVRIGDPLENGTLLGPLHTPASRDAFLKGIQTIRSQGGKILYGGSAIESEGNFVQPTIVEISPSAPVVREELFGPVLYVMKVQNLKEAVEINNSVPQGLSSSIFTKRPDIIFKWIGPHGSDCGIVNVNIPTNGAEIGGAFGGEKATGGGREAGSDSWKQYMRRATCTINYGSELPLAQGINFG

SEQ ID NO: 7485 - protein, 254 aa, Methanosarcina mazei Go1
MTSYKALVKDVINKADVLLEVVDARFPDETRNSEVEKEIIRLKKPFIIVINKCDLVSKEKLDKTKSRLSRIAPTVFISSKDRSGTTMLRHQILASACIKGRDILVGTLGYPNVGKSSVINGVTGRHRASTSPVSGHTKGVQHVDAGSHIMFMDTPGVIPFDENDEYVQGLLGIKDSTHLKDPVGVALMIIDKMLAENRTALESFYNVTLESPDSYSVLEQIGRKCNFLQKKGEIDEMRTATKIIGDWQNGLLLV

SEQ ID NO: 7486 - protein, 283 aa, Listeria monocytogenes str. 4b F2365
MKTVKLNNGVEVPILGFGTYQITDAAEAEQAVKDAIKTGYRHIDTAQSYMNEEAVGRGIAASGVDRKELFITTKIWVENVSYKGVMSSFDRSLKRLGLDYIDLLLIHQPFNDVYGAWIAMEELQASGKIRAIGVSNFSPDRVIDLAAFNEVTPQVNQIEVNPFQQQAANLAVLRKEGVTIEAWAPFAEGKNDIFNNPVLTKIGAKYGKSAAQVILRWLVEQDIIVLAKSVKPERMAQNLAIFDFELTEADKGEIASLDQGESQFFSHADPEMVKWMASRKLNV

SEQ ID NO: 7487 - protein, 509 aa, Streptomyces avermitilis MA-4680
MAGQQARQAGQTQRTIHVGGEWREADSRATREILDPADAKPFAVVAEGDERDADAAVAAARRAFDSGEWPHTPVAERAALLRRVADLLVRDRESLGLLESRDAGKTLEEGRVDIDCVADAFRYFADLVVGEGGGRVVDAGSPDIHSVVVHEPVGVCAMITPWNYPLLQASWKIAPALAAGNTFVIKPSEITPLTTAALVDLLVEAGAPAGVANIVTGPGHTVGARLAEHPDVDLISFTGGLASGTKVAQAAAVSVKKVALELGGKNPNVVFADACATDEDFDTAVDQALNAAFIHSGQVCSAGGRLIVEESVRERFVAELVRRAGRIRLGRGTEDGVECGPLVSEQQRDKVEGYVASALSEGAVLRTGGRRPEPSDVRPAAGYFFEPTVLDQCHRGMKVVREEVFGPVLTVETFRTEDEAVALANDTEYGLAGAVWTSDAGRARRVAGRLRHGTVWINDFHPYLPQAEWGGFGKSGVGRELGPAGLAEYRETKHVYQNLAPKPVRWFAG

SEQ ID NO: 7488 - protein, 88 aa, Brassica napus
  unsure (1)..(88): unsure at all Xaa locations
RGRIKFLLEGDWGVVDYKDFYVVVMRAAQKSFFFXLEKLKKKCFDGLKEGVLGIEKLVFVNGLCKGVLKVIGAXDRVQIKKTNLPVLI

SEQ ID NO: 7489 - protein, 596 aa, Zea mays
MATMKLGSKPEIFVLQDLTWLCTTELESDVVVEVGEMSFYLHKFPLLSRSGVLQRMISEYQAPADGGGMCTLQLDDIPGGAKAFELAAKFCYDVKIELNALNVVCLRCAAEYLRMTDDYAEGNLITQAECFLVDVLANWKDSIKALETCEGVLPTAEDLHLVSRCITALASKACGSDAAAPVVRNASVDKDALWNGIRSGDTTSSAAAAAAAAGMDWWYEDVSFLSLPMFKRLIQAMEAKGMRDESIAGAIMFYAGRFLPGLKRNRNITPRAASVSAPSEGDQRYFLEEIVALLPTKKGVASTKFLLGMLRTAMLLHASPLCRENLERRIGAQLEDASLDDLLVPNLGYHVETLYDIDCVQRILDYFMSSTDGIGTGYTSPALAEEGGGSLGIPQGATPSSSLSPITMVAKLMDGFLAEVAPDTNLKLPKFQALAAVVPDYARPVDDGIYRAIDIYLKSHPWLSESEREQLCRLLNCQKLSLEACTHAAQNERLPLRVVVQVLFFEQLRLRTSIAGWFFVSDNAAGGDGARPHAGGAIVPKGTDVKARVSDLEKECKSMKQEIRRLGKPRRSWSLLTRKCGFGAKVQQAQTAMSGK

SEQ ID NO: 7490 - protein, 141 aa, Triticum aestivum
  unsure (1)..(141): unsure at all Xaa locations
MSEAVGTPESGGAKEQERFLPIANIGRIMRRGVPENGKIAKDAKESIQECVSEFISFITSEASDKCMKEKRKTINGDDLIWSMGXTLGFEDYVEPLKLYLKLYREMEGDTSKGSKSEQAGKKVGALNGQPGSSFNGMYGGE

SEQ ID NO: 7491 - protein, 394 aa, Vibrio parahaemolyticus RIMD 2210633
MLSNQTIEIVKATAPLIAETGPKLTAHFYDRMFTHNPELKDIFNMSNQRNGDQREALFNAICAYAANIENLPALLGAVEKIAHKHTSFLITKDQYQIVGKHLIATIDELFNPGQEVLDAWAEAYGVLANVFIQREEQIYQANASQEGGWRGLREFELVGKQLESEHICSFVFKPTDGSKVTKYKPGQYLGIYINSDKFENQEIRQYSLSSSVQENTYRISVKREQGGKVSNYLHDELNIGDKVKLAAPAGDFFMDVDTNTPVVLISAGVGLTPTLSMLESLTEHHAPVTWVHATENSKHHAFKEHVNQLVTAKENMNALIWYNQPTAEDKIGEDFHFTGFVNLHEIEAALKQDNVQVYFCGPVGFMQHVAKQLQELGVPQEQFHYECFGPHKVV

SEQ ID NO: 7492 - protein, 129 aa, Thermoplasma volcanium GSS1
MSWQEAEVRELKVGRYILIDDVPCKIVEITMSKPGKHGEAKGRIVAIGVFDNQKRSVVYPVKHKVKIPIIEKKNAQVLSVMNNEAQLMDSETFETFVLPLDPEIADKVKPGMEVPYWEAMGVRKIMLQN

SEQ ID NO: 7493 - protein, 167 aa, Solanum demissum
MVDPVDRIRKACPKFHFPKRSLVFRVYISVAGCRCSPWSSPYSGLTLVEVTEVSSIIMKRLGMTEQPTVGVMKAGAAELAAAMKGPEAAKEEKKPEKTVFELKLESFESAQKIKIIKEVRSSTDLGLKEAKDLVEKTPAVFKKGVSKEKAEQIIDKMKAVGAKVVME

SEQ ID NO: 7494 - protein, 181 aa, Zea mays
  unsure (1)..(181): unsure at all Xaa locations
MASVRLSSATMTSSLAHATMVAPFIGLKSSAAFPVTCKANTEITSITSNGGRINCMKVWPPVGKKKFETLSYLPGLTDVEIAQEIDYLIRNKWTPCIEFEXEHGFVYREHGNIPGYYDGRYWTMWNLPLFGCTDPPQVLKEVQQCKREYPNAFIRIIGSDNNRQAQCISFIPHKPPSFTDA

SEQ ID NO: 7495 - protein, 576 aa, Glycine max
  unsure (1)..(576): unsure at all Xaa locations
MAASLFMPSSIVDEEARFEAEVAEVQAWWNSERFRLTKRPYTARDVVSLRGNLRQTYASNEMAKKLWCLLKNHQANGTASRTFGALDPVQVTQMAKHLDTIYVSRWQCSATHTTSNEPGPXTLQSYPYDILADVAXHLLFGQEYHDRKQREDRMRMRREKRGKTPYVDYLRPIIADGDTGFGGTTATVKLCKLFVERGAAGIHIEDQSSVTKKCGHMAESAXLLLSEHINRLVAARLQFDVMGVETVLVARTDAEAHNLIQSNIDTRDPQFYVGXVTNPNMQQGMAAGKNGAELQALEDEWLSKAQLKTLSEAVVEAIERQNNIGEEEKRRKLNEWMHHSSYERCLSNEEGREIAEKLGVRNLFWDWDLPRTREGFYRFKGSVTASVVRGCAFSPHADVIWMETASPNVVECTEFSEGVRSKHPQMMLGYNLSPSFNWDASGMSDEQMSMSDEQMRDFIPKIAKLGYVWQFITVGGLHSNALITSTFARDFANRGMLAYVERIQREERNNGVDTLAHQKWAGANYYDRYLKTVQGGVASTAAMGKGVTEEQFKESWTRPGAVEIDRGSIVVAKARM

SEQ ID NO: 7496 - protein, 462 aa, Gloeobacter violaceus PCC 7421
MTRITPNSSFSLTLRLHLPNQPGMLAKATAAIGEAGGNIGDIELIEQERAYTVRDLIVDATSEEHAHAIAERVSAIPELKLLQVDDRTFQIHQGGKIQIVSKIPLRTRSDLAMAYTPGVGRICMAIARNPERVYELTIKRNTVAVLTDGSAVLGLGDIGPAGALPVMEGKALLFKEFANIDAFPVCLSTQNVDEIVETAVRISTVFGGINLEDISAPRCFEVERLLQERLDIPVFHDDQHGTAIVVLAALENALKLVDKSLASVRIVINGAGAAGIAIHQLLTAAGARAIVMCDSHGIVSAGRADLNAEKRAVAVEQTGALADAMAGADVFLGVSKGGVLSRAMVQSMATDPVVFAMANPVPEILPEEAEGVVAVMATGRSDYPNQINNVLAFPGIFRGALDCRARRVNLEMKMAAARAIAALVSPDEIAPESIIPSVFDRRVVVAVSAAVQQAARATGVAR

SEQ ID NO: 7497 - protein, 280 aa, Listeria monocytogenes EGD-e
MTLSFSDTYRLNNGIEMPRHGFGVYKLTDEARMRTALETAVDVGYRLFDTASFYHNEKELGDFFASSGLKRDEFFVTTKMWNTEQGYDETLRAFEKSQKKLQLDQIDLYLVHWPKQDTFFDTWRAVEKLYDEGLVRAIGVSNFEAHHLDRLRTSANVLPVVDQLETHPHFPNHLLHRYLEELHIVHQAWSPLGRGGVLQEQILIDLAEKHGKSPAQIVLRWHLQNNISIIPKSETPSRIRENAAIYDFELSEADMRQVERLNTGERVSHAPDVMYVRSEI

SEQ ID NO: 7498 - protein, 123 aa, Clostridium acetobutylicum ATCC 824
MTREEIIEAIKGMSVLELNELVKACEEEFGVSAAAPVAVAGAAGAAGAAAGEEKTEFDVVLAEAGAKKLQVIKVVRELTGLGLKDAKALVDGAPKTIKEGVAKEEAESMKAKIEEAGGKVELK

SEQ ID NO: 7499 - protein, 338 aa, Pseudomonas fluorescens PfO-1
MNIKKTLAASLLALSIGNAFAAESTGVEHNTQAFLDALAAGGGKPLEQLSPKDARAVLTGAQASVKVDLSGVEVSDKAIKVDGQTINLKVVRPAKVKGELPVFMFFHGGGWVLGDFPTHQRLIRDLVVGSGAVAVYVDYTPSPEAQYPTAINQAYAATKWVAEHGKDIGVDGKRLAVAGNSVGGNMAAVVALMAKEQKTPALRFQLLMWPVTNAGFDNGSYQQFAEGHFLTKGMMQWFWDNYTTNPAERAQIHASPLNASAEQLKGLPAALVQTAEFDVLRDEGEGYARHLDAAGVPVTSVRYNGMIHDFGLLNPLNGIPEVKAAVRQAAAELKTHLN

SEQ ID NO: 7500 - protein, 480 aa, Arabidopsis thaliana
MASRTTPSRSTPSRSTPSGSSSGGRTRVGKYELGRTLGEGTFAKVKFARNVENGDNVAIKVIDKEKVLKNKMIAQIKREISTMKLIKHPNVIRMFEVMASKTKIYFVLEFVTGGELFDKISSNGRLKEDEARKYFQQLINAVDYCHSRGVYHRDLKPENLLLDANGALKVSDFGLSALPQQEDGLLHTTCGTPNYVAPEVINNKGYDGAKADLWSCGVILFVLMAGYLPFEDSNLTSLYKKIFKAEFTCPPWFSASAKKLIKRILDPNPATRITFAEVIENEWFKKGYKAPKFENADVSLDDVDAIFDDSGESKNLVVERREEGLKTPVTMNAFELISTSQGLNLGSLFEKQMGLVKRKTRFTSKSSANEIVTKIEAAAAPMGFDVKTNNYKMKLTGEKSGRKGQLAVATEVFQVAPSLYMVEMRKSGGDTLEFHKFYKNLTTGLKDIVWKTIDEEKEEGTDGGGTNGAMANRTIAKQST

SEQ ID NO: 7501 - protein, 115 aa, Citrus sinensis
MAALKLVSALVLCMLVTGPLSAQAITCGQVSGSLAPCIGFLRSGGPIPMPCCNGVRSLNAAARTTPDRQTACNCLKQAAGSIPNLNLNNAAGLPGACGVSIPYKISTSTDCSKVR

SEQ ID NO: 7502 - protein, 505 aa, Ralstonia eutropha JMP134
MKAQEIAACWQSMGLPRPWSDGTPAGTVIVRSPVDGEAFGHVPACTPAEADARIVRAHAAQSSWALVPAPVRGDIVRRFGEVLREHKTALGRLVSLESGKIQQEGLGEVQEMIDICDFAVGLSRQLHGLTIASERPQHAMRETWHPYGLCGVISAFNFPVAVWAWNAALALVCGNAVLWKPSEKTTLCALAAHGLLERVLAATAPHYVGISAVLPGGRMVGTHLVGHPAVRLVSATGSTRMGREVGIACAQHFKRSILELGGNNAAIVTPSADIELAVRAITFAAAGTAGQRCTTLRRCFVHADLMDTMASRLVTVFDRLPVGDPLEDGTLLGPLIDTGAADAMANALASCRAQGNIVTGGERLLADRFPHASYVRPALVMTDEQHDTMLTETFAPILYLMPYTSLDEAISLNNAAAHGLSSCIFTESLREAERFLSSAGSDCGIANVNIGTSGAEIGGAFGGEKATGGGRESGSDAWKGYMRRATNTINYGDTLPLAQGIRFEI

SEQ ID NO: 7503 - protein, 158 aa, Oceanobacillus iheyensis HTE831
MSVHDFTVTTIEGEEKRLSDYKGKVILIVNTASQCGFTPQLEDLQKLYKQYQDNDFEILGFPCNQFGNQDPGASEEISAFCQKNYGVTFQMFKKVDVKGKEAHPLYKHLTEEKKGILGGQIKWNFTKFLIDQNGNVIERFSPQKNPNTLNKDIEVLLR

SEQ ID NO: 7504 - protein, 463 aa, Oryza sativa (japonica cultivar-group)
MESEVCWLLCAALAAAMACYYLTGTMRRRSRRLPPGPTPLPVIGNVLSLRGNMHHALARLAGEHGPVMALKLGLVTTVVVSSAGAAREAFTKHDRRLAARAVPDTTRARGFASRSMIWLPSSDPRWKTLRGVAATHVFSPRSLAAARGVRERKVRDIVGHLAGHAGEVVDVGKVVYGGVLNLRRLDLQGWRRWAEKRYDKVFGIFDSVINSRLADASTGKHADAGAGDFLDSLLDLMSAGTIARDDVTSIMYDLFGAGTDTIAITVEWAMAELLRNPSVMAKARAEMNHVLAGKVKATEMEENDVEKLPYLQAVVKEVMRLHPAAPILVPHRAEEDDAEIGGYAVPKGSTVIFNVWAIMRDPVAWERPEEFMPERFLDMAEEVDFRGKDHKFMPFGTGRRLCPGLSMAKRVVPFILASLLHAFEWRLPAGVTAEALDLSEKFTTVNVLVTPIKAIPILASDQI

SEQ ID NO: 7505 - protein, 214 aa, Physcomitrella patens
LSDIHCTQCLPIRLSLVLSSALSKFRESVAMASAVVSTVVAPVALGGASSCVGAPSESSSVKAFSGLKSATLFSGKTQKLSSVQNGSRVQCMQVWNPIGQPKFETFSYLPPLTDDQIAKQVDYMIQQNLIPCIEFDTVGSVSRTNFSGAGSSGYYDGRYWTMWKLPMFGCTDSSQVLREIQECKSQFPSCWVRVLGFDSKKQVQICGFLVSRPN

SEQ ID NO: 7506 - protein, 357 aa, Azoarcus sp. EbN1
MTTMKAAVFKAPGRIELVDKPLPQVGPNDALVRITTTTICGTDVHILKGEYPVATGLTIGHEPVGVIEQLGSNVQGYVEGQRVIAGAICPSFTSYGCQDGVPSQDGGHVGHGYKPMGGWRFGNTIDGTQADYVLVPDAIANLAPVPDGLTDEQVLMCPDIMSTGFAGAEAANIRIGDIVAVFAQGPIGLCATAGAKLRGASLIIAVDGVDERLRISRNMGADVTLNFREVDVVSEILRITGGRGVDAAVEALGLQSTFESALRVLKPGGTLSSLGVYSSDLTIPLGAFHAGLGDNKIVTSLCPGGKERMRRLMNVVASGRDDFGALVTHTYKLDDIVAAYDLFANQRDGVLKIAIKP

SEQ ID NO: 7507 - protein, 582 aa, Glycine max
  unsure (1)..(582): unsure at all Xaa locations
FEQQYDRFMNSFRSLENNTQGQPDKVVSLAKWRILNRLHDRNETLYYRVLIDNIKEFAPIIYTPTVGLVCQNYSGLFRRPRGMYFSAKDKGEMMSMIYNWPAHEVDMIVLTDGSRILGLGDLGVQGIGIPIGKLDVYVAAAGINPQRILPVMLDVGTNNQKLLEDRLYLGLRQPRLEGEEYLSIVDEFMEAVHARWPKAIVQFEDFQMKWAFETLKRYQKRFCMFNDDIQGTAGVALAGILGTVRAQGRPLTDFVNQKXIVVVGAXGGLGVLKMAIQTVAKISGCSELAAKSQFYLIDKDGLVTTERNSLDPAAAPFAKNPRDIXGLTEGASIIEVVKKIRPHVLLGLSGVGGIFNEEVLKAMRESVSTKPAIFAMSNPTMNAECTSIDAFKHAGENIVFASGSPFENVDLGNGKVGHVNQANNMYLFPGIGLGTLLSGAHLITAGMLQAASECLASYMAEEDILKGILYPSVDFYMYMGTAECTAIDAFKHAGENMVFASGSPFENVDLGNGIVGHVNQANNMYLFPGIGLGTLLSGAHLITDGMLQAAAEWYDVNLENCFFFINQKPLELALMEVWQDVF

SEQ ID NO: 7508 - protein, 126 aa, Brassica napus
  unsure (1)..(126): unsure at all Xaa locations
PIDPDAGLQSEIESLMKKSXSDFSVVISQMNGQDYASRSHVLTIGKTRIKLSRGWITKAREIYSTSMQLCGVRGNIKAPAKALFWQPRKSLTFTLTFESEQERNTAISLARKYAFDCNVTLLGPDD

SEQ ID NO: 7509 - protein, 204 aa, Triticum aestivum
HEAFPTPPRSANHRLLLPPPFSPLRSSPPARAFFIRVSGRGMADDDSGSPRGGGGVREQDRFLPIANISRIMKKAVPANGKIAKDAKETLQECVSEFISFVTSEASDKCQKEKRKTINGDDLLWAMATLGFEEYVDPLKIYLQKYRDMEGDSKLTSKSGEGSVKKDIIGAHSGATSSNAQAMVQHGAYAQGMGYMQPQYHNGDT

SEQ ID NO: 7510 - protein, 145 aa, Zea mays
  unsure (1)..(145): unsure at all Xaa locations
RIDGRTHASADTCDDYSAVAMDSESQGVERLPMRTXMSPSEYHYASLQAYMLMLKLIHLKLRFYDQHRGLSALGPYMGTCIWQCIFGRFDPQTDLATSDSIXLRRHIGIDLSRHAADREHSRYYAELLIRSGVVSNSELHNLTSH

SEQ ID NO: 7511 - protein, 290 aa, Glycine max
SWSISVFEQVKWIRVLYADFTAFIRDQEKLIFAEKAFDYVEGFVIINRTGLLNNWSSSFNPQDPVQASEFKSDGRTLFCLELAKYYNLEETLLVNQEVEKHLSRLNYIPSTLFLTEVTYVDFLDRVHTSEVKLRSKGLWDVPHPWLNLFIPKTKIHHFAEVVFGNIVKETSNGPVLIYPVNKSKWDNRTSVVIPEEDIFYLVAFLASAVPSSNGPDGLEHILSRNKKILEYCERANLGVKQYLPHYSTQEEWTAHFGSQWEIFKKRKSLYDPLAILAPGQGIFQKSITFS

SEQ ID NO: 7512 - protein, 113 aa, Bartonella sp. Rn1691yn
ANEACLKMLQEIDSVKRIPKFIARAKDKNDPFRLMGFGHRVYKNYDPRAKIMQQTCHEVLKELNIQDDPLLDIAIELEKIALNDEYFVEKKLYPNVDFYSGITLKALGFPTEM

SEQ ID NO: 7513 - protein, 280 aa, Zea mays
MDAPAPAVEIREVWASNLEEEFEVIRDVVDAYPYVGMDTEFPGFVVQPIAEYRFTCDRIYAGLEGNVNVLKLIQLGLTFSNEAGTLPPCGTGGQCCIWQFNFRGFNPHTDPYSPDSIDLLRRSGIDFDLFAVEGVDSTRFAELMMSSGIVLNDDVQWVTFHGSHDFGYLLRLLTGREMPNTLDEFLKLTKIFFPVMYDVKHLMKFCGPGLYGGLSRLGKLLKVERVGTGHQAGSDCLLTLQCFMKLKQLYLKESVKLYDGLLFGLIPGEVEIKTAPPPIG

SEQ ID NO: 7514 - protein, 502 aa, Pseudomonas aeruginosa
MEKTTTSPVGATYWRSRAENVEFEGRCLIDGKLIEAHSGQTFDCVSPVDGRVLTKVAEGGEADINKAVAAARAAFQDRRWAGQSPIFRKRTLQAFAALIRLHRDELALLETLDMGKPISASRSVDVEAVANCFDWYAEAIDKLYEQIAPTAENDLALITREPLGVVGAIVPWNFPMLTTAWKVAPALATGNSVVLKPAEQSPLTAIRLGQLALEAGIPEGVFNVVPGFGRSAGKALACHMDVDGIFFTGSTATGRLLTEYAAKTNLKRVCLELGGKSPNIILASYGDIEKAAVTAAESMFNNQGEVCIAPSRLIVERSIHKQVVEIVAEIARQRQPGDPLDPATRIGALVNAQHADRVMGFIERAKTDGATLAAGGTRALTETGGSYVVPTVFDNVSNDMEIAREEIFGPVLSVIPVSSVDEAVSVANDSPYGLGAGVWTDSLSDAHKISRKLRAGVVYVNCYNDCDITTPFGGVKQSGNGRDKSLYALDEYTELKTTWIRL

SEQ ID NO: 7515 - protein, 115 aa, Brassica napus
MALALRFFTCLVLTVCIVASVDAAVSCGTVTSSLAPCANYLSKGGDVPPPCCAGVTKLNGMAQTTPDRQQACKCLQSAAKTVSGLDPSLAAGLPGKCGVSIPYPISMSTNCDNVK

SEQ ID NO: 7516 - protein, 360 aa, Candida albicans SC5314
MTNPSLVLNKIDDISFEDYESPEITSPRDVIVEVKKTGICGSDIHYYAHGSIGPFVLRKPMVLGHESAGVVVAVGDDVTNLKVGDKVAIEPGVPSRYSDEYKSGNYHLCPHMAFAATPPVNPDEPNPPGTLCKYYKAPADFLFKLPDHVSLELGAMVEPLTVGVHACKLANLKFGENVVVFGAGPVGLLTAAVAKTIGAKNIMVVDIFDNKLQMAKDMGAATHTFNSKTGDDLVKAFDGIEPSVVLECSGAKQCIYTGVKILKAGGRFVQVGNAGGDVNFPIADFSTRELTLYGSFRYGYGDYQTSIDILDKNYINGKENAPINFELLITHRFKFKDAIKAYDLVRGGNGAVKCLIDGPE

SEQ ID NO: 7517 - protein, 249 aa, Magnaporthe grisea 70-15
MGMGDSDTANGTVRTSVPGVPVTIERKPFVQDEHEDQRLPNAGTARVNTAASYEHPNGTTEDGYARRHSHQTVLQQHCDFFDRDQDGVIWPQDTFVGFYRLGFGVILSLISVFIIHGNFSYPTSPSWIPDAFFRIHLDRIHKDKHGSDTGTYDTEGRFVPQKFEDIFAKYAPGQDSLTWRDVMQVLHGQRLYADPIGWFAAVFEWLATYILLWPEDGHMKKDDIRGVYDGSIFYTIAARREERVRQKSS

SEQ ID NO: 7518 - protein, 77 aa, Triticum aestivum
PHVGPQDYQLIAITDDGYVRLLTESGPPKDDLKLPPDDVLLGPIQTGFADGQDLILFVMSPLGEEPICPVKEIGGGQ

SEQ ID NO: 7519 - protein, 325 aa, Zea mays
CIASAVGVNEKKRTPSSRTHSIRCLFEAFLKKKSGEAHPSSTLLSTKDFLERPLAGSQVQLCLLETNTLNSWSRIDPGTFRVRGANYFRDKKKELAPNYAAYYPFGVDVYLSPQKLNHISRFVQLPDIQLSSKLPPLLVVNVQVPLYPASLFQNETDGEGMSFVLYFRLSDGYSKELPHSFIESIRRLVDDHVEKIKAFPMETTIPFRERLKILGRVANLEDLPLSAAERKLMHAYNEKPVLSRPQHEFYLSDNYFEIDIDMHRFSYISRKGFETFLDRLKACVLDVGLTIQGNKAEELPEQILCCVRLNGIDYTKYQPLLTHGA

SEQ ID NO: 7520 - protein, 488 aa, Leptospira interrogans serovar Copenhageni str. Fiocruz L1-130
MSEKTKIAIAYGDGIGPEIMDATLKILNAAGAKIEPIEIEIGEKVYKEGHSSGIKPEAWDILRQTKVFLKAPITTPQGGGYKSLNVTVRTTLGLFANVRPCFSLYPYVETKHPSLDIVIIRENEEDLYTGIEHRQTNDTVQCLKLISHPGSEKIIRYAFEYARAYGRKKVTAMVKDNIMKQTDGLFHDIFKEVAKEYPELEVNSQIIDIGAANLADRPQNFDVVVTLNLYGDIISDIVAQIAGSVGMAGSSNIGEIVSMFEAIHGSAPDIAGKNLANPSGLLNAAVMMLVHIGQPDIAAKINNAWLLTIEEGIHTGDIFKPGVSRIKVGTKEFSDAVIGNLGHLPGKFKPVSFGKAKKIIIPEYKRNIQKKDLVGVDIFLDWVGKDPNELGNKLKSVSDELMLKIITNRGVKVYPDGQPETFLIDHWRCRFVSKNALIKQEDPSYHPISHKQVAELLLKLDLAGFDTIKTENLYYFNGKRAFSLGQGE

SEQ ID NO: 7521 - protein, 127 aa, Pinus radiata
MAEKKSRSVSGAVICVCIWACMGVFLHQPASAALDCNTIIQQITSCATYLTTGTPVPQEESSCCQGVQSLYGDATTTEEIQQICTCLKNEAINYNLNDRALQSLPSNCGLQLSFTITRDIDCSSISL

SEQ ID NO: 7522 - protein, 487 aa, Sinorhizobium meliloti 1021
MNPETTAVPYERLGILIDGRWIYEAERSTEVVDPATGQTIARLPFAADGEIAEAVASSQRAFESWKDRSPLERGRILRRFADLARKHADEIARNMTRDQGKPLSEAIGEIRFAADHADWHAEEARRIYGRVIPARDPRVQQMVLREPVGVCIAFTPWNFPFSQALRKVVAALASGCTIILKGPGESPSSTVAIGRLMQEAGLPDGCLNILWGDPAHLSETLLAAPEVRKISFTGSVEVGKHLASLAGRHMKRSTMELGGHAPVILFDDADIEAAADALAGQKVRNAGQVCISPTRFYVQAKGHDRFLARFAEKIASTRVGNGFQESVQMGPLCHGRRVAAMEGFIQDAREQGAEIVTGGERVGNAGFFYAPTVVAAGTDELRLMKEEPFGPIAVVTPFGDFDEVIRRANSLPFGLASYVFTGSSSRAQNAARALAAGMVSVNHFGLALPETPFGGINDSGYGSEGGSETFDGYLNTKFVTRFDQIPQ

SEQ ID NO: 7523 - protein, 461 aa, Sinorhizobium meliloti 1021
MNDRPNSLHALDKQSLVHPYTNLAVHQETGPHVITGGDGIYVVDDEGKRYIEGLAGLFCAGLGFSEQRLVEAATRQLKTMPFYHSFAHKSTEPGIRLAEKLLSIAPVPMSKVFFAGSGSEANDTAIKLIWYYNNALGRPEKKKIISRRKAYHGVTVATASLTGLPFNHRDFDLPIANILHTDCPHYWRFAETGETEEDFATRMANNLEAIILEEGPETIAAFFAEPVMVSGGVITPPKTYFEKVQAVLRKYDILLIADEVICGFGRTGNMFGSETYGLKPDMISCAKQLSAAYMPISALMINAKIADALVDQSRKIGTFSHGFTYGGHPVAAAVALEALTIYEEIDIVGHVRSVAPAFQDRVRKLGEHPLIGEARGVGLVAGLEFVKDKATRENFPPAWQVANQAGKFATARGVLTRGLGDMVSLCPAMIIDDEQIDDLMTRMGLALDDTLAWARAQGHVG

SEQ ID NO: 7524 - protein, 400 aa, Psychrobacter sp. Ant300
MTIKLASTDRIDNDIREENGTQENRLTVKQKVLSYNPLTTCQPHTLHYAMKGVGYLPTPLLESLVGYLKGPSSKQYLHADAHLRLILAVNSKLVHWEDKVIANADDGDMTIRCYQSDASSHGLGFKKADTHNSDETVLLYFHGGGFCIGDVNTHHEFCHAVCEQTGWPIVSVDYRLAPEHPAPAALKDCITAYAWLAEHCHTLGALPSRIVLAGDSAGGGLSTLIAQQLSAPSQVAWSDLGSAGQKMFDLLERLPKPLAQMPLYPVTDIETDYPSWELYGEGLLLDHADVAVFDAACLDNSPLPRQHILNCPMLGDNSKVCPTYIVAAELDVLRDEAFAYAKQLKVHGIAVKTHTILGAPHGFIHFMSIHQGIGQKTGDIIKGFASFVRDVINTQSQLAA

SEQ ID NO: 7525 - protein, 363 aa, Zea mays
MTASQSSMSGGGEPGVRTVVWFRRDLRVEDNPALAAAARTAGEVVPAYVWSPEEDGPYYPGRVSRWWLSQSLKHLDASLRRLGACRLVTRRSSDAVVALIDLVRSTGATHLFFNRLYDPLSLVRDHRVKEQLSAEGITVQSFNADLLYEPWEVLDDDGFPFTMFAPFWNRCLCMPDPAAPLLPPKRINSGIRDLSRCPWDELIFEDESEKGSNALLARAWSPGWQNADKALTAFLDGPLVDYSANHKKADSASTSLLSSYLHFGELSVRKVFHQVRMKQLMWSNDGDRAGEESCTLFLCSIGPRRRGELHPVPLLHRPAGVLEGGEAGEEYAGAVGEPWRRIWRSPKRKKGKSWTLMWRVSLV

SEQ ID NO: 7526 - protein, 495 aa, Shigella flexneri 2a str. 301
MNFHHLAYWQDKALSLAIENRLFINGEYTAAAENETFETVDPVTQAPLAKIARGKSVDIDRAVSAARGVFERGDWSLSSPAKRKAVLNKLADLMEAHAEELALLETLDTGKPIRHSLRDDIPGAARAIRWYAEAIDKVYGEVATTSSHELAMIVREPVGVIAAIVPWNFPLLLTCWKLGPALAAGNSVILKPSEKSPLSAIRLAGLAKEAGLPDGVLNVVTGFGHEAGQALSRHNDIDAIAFTGSTRTGKQLLKDAGDSNMKRVWLEAGGKSANIVFADCPDLQKAASATAAGIFYNQGQVRIAGTRLLLEESIADEFLALLKQQAQNWQPGHPLDPATTMGTLIDSAHADSVHTFIREGEGKGQLLLDGRNAGLAAAIGPTIFVDVDPNASLSREEIFGPVLVVTRFTSEDQALQLANDSQYGLGAAVWTRDLSRAHRMSRRLKAGSVFVNNYNDGDMTVPFGGYKQSGNGRDKSLHALEKFTELKTIWISLEA

SEQ ID NO: 7527 - protein, 220 aa, Brassica napus
MVLEATMICIDNSEWMRNGDYSPSRLQAQTEAVNLLCGAKTQSNPENTVGILTMAGKGVRVLTTPTSDLGKILACMHGLDVGGEINLTAAIQIAQLALKHRQNKNQRQRIIVFAGSPIKYEKKALEVVGKRLKKNSVSLDIVNFGDDDDEEKPQKLEALLAAVNNNDGSHIVHVPSGANALSDVLVSTPVFTGDEGASGYVSDATAETATDGDCDFGVDP

SEQ ID NO: 7528 - protein, 374 aa, Ralstonia eutropha JMP134
MDEACARLGVRPQTVYAYVSRGKIEVMSDPVDTRRSLYRAEDVATLAKRKQAGRKHETLATNTLFGAEPSIPTAISTFLRERLYYRGRDAVVLAETATLEEAAQLLWDSAQPVNFSSSTKVAKPGRVAAFKALAELAATGHSTHGRMTRVLHAEGQGLVGQMANAFGAQPGQQALHMRFAQGWGLKPAGAELLRMAMVLLVDHELTSSAFASRIAASNGASLPACLLSGLATLSGPLHGDASGRVKALFNDVERQGEDQVITHYLSTGQALAGFGHHLYPEGDPRAAALLSRFEPPPVIARFIAQATRLTGLQPNIDVALAALVIHCGLPDDAAFGMFATARSIGLLAHSLEQLGVGQVIRPRGRYVGVVPERV

SEQ ID NO: 7529 - protein, 385 aa, Lycopersicon esculentum
MGSQIKKQWLQFACLLTFFLIATCSMAYSPYNSYESSDSTYNKVPTTVVKSEDFKVPSESEKEYKSSFLPKNDYYKKPSISEDNYKKVSFVPEHESFLPKNDYYKKPLFSEDNYKKESYVQEVPSKAKPEYKESFFSKFDYFKKPSFFEDNYKKTSYVPKVPSMAKPEYKESFFPKFDYFKKPSVSEDNYKKTSYVSEVPSMAKPEYKESFFPKFDYFKKSLAPEDKYKKAPYVPEVSTEPKPEYKVPSLPKNDYYKKPTIPEDNYKKVSYVSKVPSVPKEEYKAPTLPKNDYYKKPSVQEENYKKVPLISKLPSVPKEEYKVPSLSKKDYYKKPLVSEDNYKKVSYVPKVPSVPKEEYKAPSLSKNDYYKKSSPSPSPPPPPYY

SEQ ID NO: 7530 - protein, 312 aa, Pseudomonas aeruginosa
MTDTAKRPLYVPHAGPSLLEMPLLNKGSAFSTQERIDFNLQGLLPHNIETIEEQTERAYSQYNLCNTDLDRHIFLRSIQYNNETMFFRLLEEHLEEMMPIIYTPTVGQACQEFSKIYRTHRGLFISYPDRERIDDILRSATKNNVKIVVVTDSERNLGLGDQGIGGMGIPIASCPCTCGGISPAYTLPVVLDVGTNKPDLLNDPMYMAWRHERVSGAQYEEFVDLFIQAIKRCWPNVLLQFEDFAQTNAMPLLERYKDELCCFNDDIQGTAAVAVGTLLAACKAKGEKLSEQTVTFVGWPPPVAASPNRSSR

SEQ ID NO: 7531 - protein, 291 aa, Saccharomyces cerevisiae
  unsure (1)..(291): unsure at all Xaa locations
XVHVASVEKGRSYEDFQKVYNAIALKLREDDEYDNYIGYGPVLVRLAWHISGTWDKHDNTGGSYGGTYRFKKEFNDPSNAGLQNGFKFLEPIHKEFPWISSGDLFSLGGVTAVQEMQGPKIPWRCGRVDTPEDTTPDNGRLPDADKDAGYVRTFFQRLNMNDREVVALKGAHALGKTHLKNSGYEGPWGAANNVFTNEFYLNLLNEDWKLEKNDANNEQWDSKSGYMMLPTDYSLIQDPKYLSIVKEYANDQDKFFKDFSKAFEKLLENGITFPKDAPSPFIFKTLEEQGL

SEQ ID NO: 7532 - protein, 207 aa, Arabidopsis thaliana
MASVSPLAKYKLVFLGDQSVGKTSIITRFMYDKFDTTYQATIGIDFLSKTMYLEDRTVRLQLWDTAGQERFRSLIPSYIRDSSVAVVVYDVANRLSFLNTSKWIEEVRNERAGDVIIVLVGNKTDLVEKRQVSIEEGDSKGREYGVMFIETSAKAGFNIKPLFRKIAAALPGMESYSNTKNEDMVDVNLKPTSNSSQGDQQGGACSC

SEQ ID NO: 7533 - protein, 291 aa, Saccharomyces cerevisiae
  unsure (1)..(291): unsure at all Xaa locations
XVHVASVEKGRSYEDFQKVYNAIALKLREDDEYDNYIGYGPVLVRLAWHISGTWDKHDNTGGSYGGTYRFKKEFNDPSNAGLQNGFKFLEPIHKEFPWISSGDLFSLGGVTAVQEMQGPKIPWRCGRVDTPEDTTPDNGRLPDADKDAGYVRTFFQRLNMNDREVVALMGAHALGKTHLKNSGYEGPWGAANNVFTNEFYLNLLNEDWKLEKNDANNEQWDSKSGYMHLPTDYSLIQDPKYLSIVKEYANDQDKFFKDFSKAFEKLLENGITFPKDAPSPFIFKTLEEQGL

SEQ ID NO: 7534 - protein, 339 aa, Ralstonia solanacearum GMI1000
MNRIAKFVAGSLLAVATGAALAAGSPGVERNTQAFLDALAAGGGKPLETLSPAEARAVLVGAQAAPKVPLPPADVSEKTINVDGKPIRLTIVRPAGAKGELPAFMFFHGGGWILGDFPTHERFVRDLVADSGAVAVFVNYTPSPEARYPVAINEAYAATRWVAENGAQINVDGTRLAVAGNSVGGNMAAVVALMAKTRGAPALRAQVLFWPVTNASFENASYDAFAEGHFLTRPMMKWFWDAYTANPAQRQEITASPLLATPGQLKGLPPTLVQTAEKDVLRDEGEAYARKLDAAGVTVVATRYNGMIHDFGLLNALSGLPATRAALHQASETLKLRLK

SEQ ID NO: 7535 - protein, 249 aa, Phytophthora infestans
MDRDSLVFLAKLAEQAERYDEMVDHMKAVANNHNVELTVEERNLLSVAYKNVIGSRRASWRVISSIENKGDSERSEHIKAYRQKIEGELVDICNDILTIIENNLIPNSSSEEGKVFYYKMKGDYHRYLAEFQVDDERKESSDKALESYKQASTIAMAELPPTHPIRLGLALNFSVFYYEILNSPDRACNLAKQAFDDAIAELDTLSEESYKDSTLIMQLLRDNLTLWTSDQEPDNADANQGDMNVQDVE

SEQ ID NO: 7536 - protein, 448 aa, Bacillus subtilis
MTHDLIEKSKKHLWLPFTQMKDYDENPLIIESGTGIKVQDINGKEYYDGFSSVWLNVHGHRKKELDNAIKKQLGKIAHSTLLGMTNVPATQLAETLIDISPKKLTRVFYSDSGAEAMEIALKMAFQYWKNIGKPEKQKFIAMKNGYHGDTIGAVSVGSIELFHHVYGPLMFESYKAPIPYVYRSESGDPDECCDQCLRELEQLLKEHHEEIAALSIESIVQGASGMIVMPEGYLAGVRELCTTYDVLMIVDEVATGFGRTGKMFACEHENVQPDLMAAGKGITGGYLPIAVTFATEDIYKAFYDDYENLKTFFHGHSYTGNQLGCAVALENLALFESENIVEQVAEKSKKLHFLLQDLHALPHVGDIRQLGFMCGAELVRSKETKEPYPADRRIGYKVSLKMRELGMLTRPLGDVIAFLPPLASTAEELTEMVAIMKQAIHEVTSLEN

SEQ ID NO: 7537 - protein, 120 aa, Onion yellows phytoplasma OY-M
MIQRESRLVVVDNSGAKEVLVIGILGGTRRSHVNIGDIVLVTVKSGSGTVKKHDVLKAVIVRTKKGLRRKNGSYIKFDDNAVVLLKEDLNIIGTRIFGPVVRELSDKKFSKIVSLAQLVL

SEQ ID NO: 7538 - protein, 125 aa, Triticum aestivum
  unsure (1)..(125): unsure at all Xaa locations
MAPTVMASSATSVAPFQGLKSTAGLPVSRRSNGASLGSVSNGGRIRCMQVWPIEGIKKXSKTLSXLPTLKQREGLLKARSELTLIRFKVGLPCLRSSTRVGFNFREQNATPGYYDGRXWXMWKXP

SEQ ID NO: 7539 - protein, 435 aa, Pseudomonas aeruginosa
MTALISSSNYPLPVVHHARGVFIYDDSGKSYIDGSGGAMTVSIGHGVPEVLSAMSRQAQQVCFTYRTHFTSTAAEELAKEIVALAPGDLNKVFFVNSGSEATELSMRTAIQYWQARGQPTKTKILGRAISYHGMTMGSLSMSGHAARRADYSNLLHQFAVAPPPYAYRFEVPNDGTFGASVWEKIIQEQGADTIAAVIVEPIVGAAGGALTPPIGYLKALREICDRHSILLISDEVITGMGRTGTWFGCEHDGIVPDIIATGKGMSSGYTPMGGVIIRDGIMEALGERVKLFGHTFSANPLSAATCLAVIRYMKEHAILDNVAARSVQLESGLKDLSVRYPWMADVRGRGLLWGFEFVKDATTKEPIDAARQPNLRFAQHCFDAGLIAYPAGIAPLNNSALLAPPLVISASETEELLSRLEIGLQRFGNEMGLPA

SEQ ID NO: 7540 - protein, 545 aa, Glycine max
RAIQATKVVFNHLYDPVSLVRDHNIKEKLVEQGISVQSYNGDLLYEPWEVNSESGRAFTTFNAFWKKCLHMQMDIVSVVPPWQLIPAEGKIEECSLEELGLENESEKPSNALLGRAWSPGWRNADKALREFVELHLLHYSKKRLKVGGESTSLLSPYLHFGELSARKVFQVTCMKQILWTNEGNSAGEESANLFLRAIGLREYSRYLCFNFPFTHERALLGHLKFFPWNPDPDIFKTWRQGRTGFPLVDAGMRELWATGWIHNRIRVIVSSFAVKMLLLPWKWGMKYFWDTLLDADLESDILGWQYISGGLPDGHELERLDNPEIQGAKFDPEGEYVRQWLPELARMPTEWIHHPWDAPLTVLRAAGVELGQNYPKPIIDIDLARERLTEAIFKMWESEAAAKAAGSEPRDEVVVDNSHTVENLDTQKVVVLGKAPCATISANDQKVPALQDSKNEPPTRKRPKHMIEEGQNQDHSQNHNKDTGLSSIDQDICSTADSSSCKKQCASTSSYSFSVPQQCSSSSNLKWPWQEKIDMEQSSSKDGAM

SEQ ID NO: 7541 - protein, 1098 aa, Magnaporthe grisea 70-15
MPPTDASRQREFVHPEAAHARKKTPPSPFVLQPITAFYFFLAANLIAAVFAPIQDCDETFNYWEPTHYLTHGYGLQTWEYSPEYSIRSWLYVSLHAIVANIRRILPQSTKVSEFYFVRYVLGFICALAQTLLYRSISLTISPRTGTWFVMVLVASPGNFHASAAYLPSSFAMYACMLGAAAFIHWRGGLKTSHGIFWFAVAGVIGWPFAAALCAPFLAEEGLLPLFGDGERRFDCFVRVGRGVVAALLLVVFDTCINTFFYRKMEVISWNIVKYNVFSSSGGPNLYGTEPWTFYFKNLALNFNIWFVLAMLSMPLFLMRNLIVPSGHELRSGWRTTVFLTPFYMWLGIFTAQPHKEERFMYPAYPFLALNAAVAFHIIVTALGNANPKTLIGMIPGKLKLAVLSIAVLLAFDVSLARVYGVYTAYSAPLSLYKPLGTGVLGEQGLGGSGDSVCFGKEWYRFPSSFFLPRKMRAKFIRSEFRGLLPGEFSEARTGFGIFGGTWLTPSGMNDRNEEDMGNGQRQLGGRTMYPILGCSEYELPRPGALGPSAVLYTGSHAEKVGLSLSFAKTEGFIKKSNISAGLYIASLYDYWHHRTRNFGVMQENLLLMELREQGAVVDFGSLHLGALKRIVTGGVAIPGDPGYEDAIRRWSALAVKQAGIVVFPTTAREVSGAIVYANGHSIPFTVCCGGHATSGSSSIGPDGMLIHLRLMQAISVDAQARTVTFGGGCLWRQVDAATSEYGMATPGGTISHTGVGGLILGGGFGWLSGRYGLCIDNLLEVEVVLGDGRIVTANAASEPDLFWAMRGAGHSFGVATRFTSRLYPQGDVWGGLLEFPHERLAEVTAVVNEMINKGDEDQCLMVTSTYATSKDSKSTVRAKVTTVCCFYNGTAEKAEGEIFKPLLSLRPHTSTAKQLPYAEMNRVLDEFLTYGSMMRQGGTNVLPHLTAQVLCGAANKLFDWVDEMLRKSDGRVDARDSIIAWELIPFDKTASVPGSATATGNRGRYYNVGMVVCNSSSDASQDDEMRAFKRELSASIATAGFKADMVGHGGVGHYVNYAEEQLSAEAGFGGNAKRLRELKTRYDPDNRFRKLWRLDTNV

SEQ ID NO: 7542 - protein, 294 aa, Listeria innocua Clip11262
MTKTLQDRMILPGNETIPYIGLGVFQVTEQEFIAGAVEKAIEVGYRLFDTAAVYNNEAIVGQAILDSAVPREELFISSKVWNGDLGYDETLFAFERTLRNLKLDYLDLYLIHWPVAGKYRDSWRAMERLHDEKLIKSIGVANFKQHHLSDLLVAANEKPVLNQVETHPLLPQNDLRKYLAEQNIAHAAWSPLAKGILMQNPVITEIAKKHQASVDQVILQWHLNRNTIIFPKSITSSRIEENSRLSYFQLDASDMEKIDRLETGKRVGPDPDDLEYFLSSIERERAYLTGGEKE

SEQ ID NO: 7543 - protein, 144 aa, Methylococcus capsulatus str. Bath
MTIGRNEPWSLLNQLQRELERSFEGRQGSDSAATAEWTPAVDIKEEADRYVLLADLPGVSTDNIDVSMEQGVLTLRGERNTEARTERSGYKRIERVYGSFYRRFSLPDTADADGISARYNNGVLEIVIPKKAAIQPRRIVVSAD

SEQ ID NO: 7544 - protein, 96 aa, Brassica napus
ESFHWRRKTIEPLTKCGLMKTSDEEIRHFFKNSSVQVIICPRSGGKGHHSFVKKTEVGTIYTHHQKTLIVDAEAAQGRRKIIAFVGGLDICKGRFD

SEQ ID NO: 7545 - protein, 207 aa, Zea mays
  unsure (1)..(207): unsure at all Xaa locations
MTKAATLYGSKTQSDALRPGPLRPANIIRNKFPTYKNGSNGIVIKLADGPEIPPLKEIVAKETADLLDRRQRLSVRELAMKFEKGLSTATLLSNEVKWRQVALMERDILLKNLKSVLESLRGQVTGKTKDEIEESISMVEILTVQLSKREAELVQQKEEVXKLAKSLKQMCFTLLYNLCKHVLVISGIKIYLLQIFQSSPCHHSVTK

SEQ ID NO: 7546 - protein, 266 aa, Photorhabdus luminescens
MNKKILILPGDGIGQEVCDAALPVFQALNLPVTLEIGDIGWTCWERDGDPVPASTWEKIASVDAVLLGAITSKGKEEAQQALPPHLRVKTRNYVSPVIQLRQRLGLYANIRPVRYVEGDRKPFRCCVIRENTEGLYAGFDFKGIPSTATTWLQHPNIDKYGPEEAAWTVRLQTRFGLERLFITAFEYAKENNYSRVTFADKPNVMRESGHFAKGIFDTVAAHYPEIKADIHNIDAVALWMVKKPHEFGVIVSENMFVIFCLIWQRA

SEQ ID NO: 7547 - protein, 171 aa, Glycine max
MAESDNESGGHTGNASGSNEFSGCREQDRFLPIANVSRIMKKALPANAKISKEAKETVQECVSEFISFITGEASDKCQKEKRKTINGDDLLWAMTTLGFEEYVEPLKVYLHKYRELEGEKTAMMGRPHERDEGYGHATPMMIMMGHQQQQHQGHVYGSGTTTGSASSARTR

SEQ ID NO: 7548 - protein, 350 aa, Agrobacterium tumefaciens str. C58
MKALVLEEKGKLSLRDFDIPGGAGSGELGPKDVRIRTHTVGICGSDVHYYTHGKIGHFVVNAPMVLGHEASGTVIETGSDVTHLKIGDRVCMEPGIPDPTSRASKLGIYNVDPAVRFWATPPIHGCLTPEVIHPAAFTYKLPDNVSFAEGAMVEPFAIGMQAALRARIQPGDIAVVTGAGPIGMMVALAALAGGCAKVIVADLAQPKLDIIAAYDGIETINIRERNLAEAVSAATDGWGCDIVFECSGAAPAILGMAKLARPGGAIVLVGMPVDPVPVDIVGLQAKELRVETVFRYANVYDRAVALIASGKVDLKPLISATIPFEDSIAGFDRAVEARETDVKLQIVMPQ

SEQ ID NO: 7549 - protein, 252 aa, Ustilago maydis 521
MFVNGGGKGEIPRKVDIDPYFDNTKLVFGEAGTKVPYTPQNTWKDPNGDRKDYLDRTKGLTTMQKHVAFFDGDCDGVIWPTDTFFAFLSLGFGFLLSAMAVAIIHGPFSYPTLPRKDNKLLDWLPDPFMRIYVANIHRCKHGSDSESYDRRGHFRQSQFETILDDYSTRHGKDALSFSDAMAMIRERRDLMDLFGCFAFMFEWGSTYMLLWPADGYMRKDDILGIFDGSIFVVLAHRHRNGQGGGAFKPKRA

SEQ ID NO: 7550 - protein, 509 aa, Brassica napus
  unsure (1)..(509): unsure at all Xaa locations
MGSSCEEYEFLSEIGLSSSHNLGNYVGGKWLGNGPLVSTLNPANNQPIAQVVEASLEDYETGLKACEEAAKAWMQVPAPKRGDIVRQIGDALRSKLDYLGRLLSLEMGKILAEGIGEVQEVIDMCDFAVGLSRQLNGSVIPSERPDHMMLEMWNPLGIVGVITAFVDPRVXGWNACIALVCGNCVVWKGAPTTPLITIAMTKLVAEVLEKNHLPGAIFTAXMCGGAEIGEAIAKDTRIPLVSFTGSSKVGLTVQQTVSARSGKTLLELSGNNAIIVMDDADIQLAARSVLFAAVGTAGQRCTTCRRLLLHESVYDKVLEQLLTSYKQVKIGDPLEKGTLLGPLHTPESKKNFEKGIEVIKSQGGKVLTGGKAVEGEGNFVEPTIIEISSDAAVVKEELFAPVLYALKFKTFEEAVAINNSVPQGLSSSIFTRSPENIFKWIGPMGSDCGIVNVNIPTNGAEIGGAFGGEKATGGGREAGSDSWKQYMRRSTCTINYGNELPLAQGINFG

SEQ ID NO: 7551 - protein, 486 aa, Delftia tsuruhatensis
MKEFLNFINGEYVRNASGKTFQDINPVNGSVIGNIYEAGQAEVDAAVAAARAALKGDWGRLSVAERCKLLDAVAGEINRRFDDFLQAEIADTGKPHHLASHVDIPRGAANFQIFIDTIKSTATESFNMRTPDGKTALSYGVRVPRGVIAVVCPWNLPLLLMTWKVGPALACGNTVVVKPSEETPATATLLGEVMNQVGMPKGVYNVVHGFGPGSAGEFLTQHPGVNGITFTGETRTGTAIMKAAADGVRPVSLEMGGKNAAVVFADCDFQVTIDTLTRSCFENAGQVCLGTERVYVERPIFEKVVAALKERAEAMKPGLPFDHDTKIGPLISKKHQAKVLGLYKTAKDEGATIVTGGGVPDMPDALKDGSWVQPTIWTGLPETATVVTEEIFGPCCHISPFDSEEEVLGKVNANRYGLATAIFTQDIARANRLAHQIEVGLCWINAWFLRDLRTPFGGSKQSGIGREGGVHSLEFYTELRNVMVKF

SEQ ID NO: 7552 - protein, 150 aa, Caulobacter crescentus CB15
MKRLRALLIAAAAVALTAGASDPSERLPDQAQEARARTLFKEVRCLVCQNESIDDSEAQLAGDLRQIVREQVKAGSSDAQIRDFLVERYGEFVLLKPRFSMGNAVLWLAPVVVLLVGGVLMAGLLRRRETPEPALSQDEEARVRRLLEGD

SEQ ID NO: 7553 - protein, 481 aa, Microbulbifer degradans 2-40
MKIHNMKNFINGEYIASQADGAIDVLSPSTGKKVGDIPAGCVEDAQLALDTANAAQKLWAKKTNRERAKILRVFAANIRAAADDLAKLLVSEQGKLLSVAQMEVEATATFIEYACDNALTIEGDILPSDNPNEKIYIHKVPRGVVVAITAWNFPLALAGRKIGPALVTGNAIVVKPTQETPLATLALGELANAAGIPAGVLNIVNGRGSVVGQHLCESPITRLITMTGSTPAGQRIYRTSADHLTPVMLELGGKAPFIVMEDANLESAVEAAFTTRYANCGQVCTCAERLYVHESIYPAFMDKLLEKVKAIKVGDPMAADTDMGPKVNQSEIENIDALVKKGIEQGATLLHGGKRAHVPGFEGGNWYEPTLLGDVQQSNILVHEETFGPILPVVKINSIEQAIEYTNDSEYGLSTYLFTQNLKYIHQYIAEVEAGEVYVNRGIGEQHQGFHNGWKLSGAGGEDGRYGLEQYLEKKTVYFAE

SEQ ID NO: 7554 - protein, 201 aa, Klebsiella aerogenes
MAQHDENVVWHAHPVTQQQREQHHGHRGVVLWFTGLSGSGKSTVAGALEEALHERGVSTYLLDGDNVRHGLCSDLGFSDEDRKENIRRVGEVARLMVDAGLVVLTAFISPHRAERQMVRERLGEGRFIEVFVDTPLAICEARDPKGLYKKARAGELRNFTGIDSVYEAPEKAEIHLDGEQLVTNLVHQLLDLLQQSDIIRS

SEQ ID NO: 7555 - protein, 236 aa, Oryza sativa (japonica cultivar-group)
MGMGTFTTDESDKHEESYLSLGLTVSQSKKNNTEYPKVLLLLAAYLDRSVQKNEDLLDSNKIKDSSTIFHGHRAPDLSIKLYAERIFKYSECSPSCFVLALIYMERYLQQPHVYMTSLSVHRLLITSVVVAAKFTDDAFFNNAFYARVGGISTVEMNRLELDLLFNLDFRLKVDLETFGSYCLQLEKETMVLVIDRPIQQVHGVNSTKDLSRNSSIDESCKSELMRYSSQALQGCS

SEQ ID NO: 7556 - protein, 168 aa, Magnaporthe grisea 70-15
MSEGQLQKVNLQSNDGQSIEVDRAVACRSRLIKDLIGDLGEEMVASTPIPIPNVSEAVLRKVLEWCEHHRNDPVQTSDEDSESRKKTTDIDEWDQKFMQVDQEMLFEIILASNYLDIKPLLDVGCKTVANMIKGKSPEEIRKTFNITNDFTPEEEEQIRRENEWAEDR

SEQ ID NO: 7557 - protein, 475 aa, Synechocystis sp. PCC 6803
MYEKLQPPSVGSKITFVAGKPVVPNDPIIPYIRGDGTGVDIWPATELVINAAIAKAYGGREEINWFKVYAGDEACELYGTYQIFPEDTLTAIKEYGVAIKGPLTTPVGGGIRSLNVALRQIFDLYTCVRPCRYYPGTPSPHKTPEKLDIIVYRENTEDIYLGIEWAEGTEGAKKLIAYLNDELIPTTPALGKKQIRLDSGIGIKPISKTGSQRLVRRAILHAKRLPKAKQMVTLVHKGNIMKFTEGPFRDWGYELATTEFRAECVTERESWICGNKESNPDLTIEANAHMIDPGYDTLTEEKQAVIKQEVEQVLNSIWESHGNGQWKEKVMVNDRIADSIFQQIQTRPDEYSILATMNLNGDYLSDAAAAVVGGLGMGPGANIGDSAAIFEATHGTAPKHAGLDRINPGSVILSGVMMLEFMGWQEAADLIKKGIGAAIANREVTYDLARLMEPKVDKPLKCSEFAQAIVSHFDD

SEQ ID NO: 7558 - protein, 72 aa, Triticum aestivum
  unsure (1)..(72): unsure at all Xaa locations
MASRSCTFLEILLAIILPPLGVFLHYGCCSMEFCICLLLTILXGYIPGIIYAVYVLVALGSEERDRDYDTLA

SEQ ID NO: 7559 - protein, 426 aa, Glycine max
MPSPSRYGFGISQITLRLMMLLFLFFARAASGLNLTALLSTVPELSQFTSLLASATPLAADLSDRSSLSILAVPNAYLAADDHLSRHHLSPAALADVLRYHVLLQFLSWSDLRALPPSGKLITTLLQTTGRATDNFGSVNLTRDSQSGVISIRSPAPYSPSNATILSLIKTLPYNVTIFAVNSLLIPYGLDLMASETRPNIVLNITNALVNGHNFNVAASMLAASGVVQEFEADEGGAGITLFVPVDDAFADLPPSVALQSLPADKKAVVLKFHVLHSYYPLGSLESVVNPFQPTLATEAMGAGSFTLNISRVNGSVAINTGIVQASITQTVFDQNPVAIFGVSKVLLPREIFGRNPIVSAKPLDNAPPPDDDALSPENSPGFDGQPSHLSSPPGFREDVRSHAGGSGGSLNFVVLLCCIGLYFVV

SEQ ID NO: 7560 - protein, 236 aa, Candida albicans SC5314
MRSIKSVVVGDGGVGKTCLLISYTTNTFPNDYIPTVFDNYSASVMIDGEPIKLGLWDTAGQSEYDRLRPLSYPQTEIFLCCFSVISPDSFQNVKSKWIPEILHHCPKDILILLIGTKVDLRDDLHVLDELTARNLSPVTFDQGNKLAREIGAIKYMECSAATQVGVKEIFDYAIRAVLDPPNANKGEYVTNDSVPGMGVNNSSGSKKHNEKNGSGTATAGTGKKRKIKRAKKCTIL

SEQ ID NO: 7561 - protein, 469 aa, Streptococcus pyogenes SSI-1
MVSVMWFRRDLRIDDQKALAHAIASQSPTLCVFQFNNEQLNLLHSRNQSSFITSVLAFRKLLKCEGIDLYLMYGDLMTCFEQLLTQLKDWTDVYFNYDESGYGRLRDQKAAQFFKKNGIAVHTYQDHYLHGSQEIINQSGQPYKVFTPYYRIWQNYPKETPIKVELSQGRWLNLETPDDVLRTVESFKDEKYQDVATFDEASKQLNRFIQDQLAAYHANRDFPAQLGTSRLSPFLRIGAIGIRTVYHAVRQAPNSLGQATFLKELAWRDFYNMVYVAYPDQKTQPIQKAFSQIEWVNNPDWFQLWKEGKTGYPIVDAAMLQLQKTGWMHNRLRMIVASFLTKDLLCDWRLGEQYFQQQLIDYDAASNIGGWQWAASTGTDAVPYFRIFNPVTQGKRFDPKGEFIKAYLPQLEHVPEKYLHEPWKMPKYLQESVSCIIGTDYPQPIVDHAKQREQAIAKYEWAKEKAKIE

SEQ ID NO: 7562 - protein, 343 aa, Candida albicans SC5314
MSTAAVATKPSVTSKPATKQVSNYTKEKKVGEGTYAVVYLGKQISTKRQIAIKEIKTGLFKDGLDMSALREVKYLQELKHPNVIELVDVFSATNNLNLVLEFLPCDLEVLIKDKSIVFKSADIKSWLLMTLRGIHHCHRNFILHRDLKPNNLLLAPDGQLKIADFGLARALVNPNEDLSSNVVTRWYRAPELLFGARHYTGAVDIWSIGIIFAELMLRIPYLPGKDDVDQLDVTFRAYGTPTEQIWPNVSSLPMYNALHVYPPPSRQELRNRFSAATEKALDLLISMTQLDPSRRCDSTLALLHDYFTESPRPTDPKKLPKKSSPEKRENEDEQNNGSKRRHV

SEQ ID NO: 7563 - protein, 276 aa, GIBBERELLA ZEAE PH-1
MASKTKYQTAPQSDPDDDYTHAPPAYAEGSAARDETQGLFGAPRDSEDNLPDDFKFGGSVAEATVDIRNQFVRKVYTILTVQLLATAGVSSLTFFSTGYKDWIQSHPGVVWASLFGSMIFMGLTYWKRKSYPTNLLFLSLFTLAEAYTISVIVSFYKTSIVLNAVVLTAGIFVFLTLFACQTKYDFTSWMPYLFGALWGLVIFGFMAMFFPYSSTGELIYGGLAALIFSGYILVDTQLVLRHHHVEEEIAAAISLYLDIINLFLAILRILNSQSNN

SEQ ID NO: 7564 - protein, 346 aa, Bacillus subtilis subsp. subtilis str. 168
MKAARWHNQKDIRIEHIEEPKTEPGKVKIKVKWCGICGSDLHEYLGGPIFIPVDKPHPLTNETAPVTMGHEFSGEVVEVGEGVENYKVGDRVVVEPIFATHGHQGAYNLDEQMGFLGLAGGGGGFSEYVSVDEELLFKLPDELSYEQGALVEPSAVALYAVRSSKLKAGDKAAVFGCGPIGLLVIEALKAAGATDIYAVELSPERQQKAEELGAIIVDPSKTDDVVAEIAERTGGGVDVAFEVTGVPVVLRQAIQSTTIAGETVIVSIWEKGAEIHPNDIVIKERTVKGIIGYRDIFPAVLSLMKEGYFSADKLVTKKIVLDDLIEEGFGALIKEKSQVKILVRPN

SEQ ID NO: 7565 - protein, 236 aa, Methanococcoides burtonii DSM 6242
MEGIFMKERNANASSSEKEAAGNAAASLVEDGMIIGLGTGSTTAFAIAEVGRRVREEGLNVLAVVTSYQAEMLAIEAGVPLTSLAEHPVLDLAIDGADQVDAKLNVIKGGGAAHTHEKVVAHSAKRFIVVVDESKISEELDHFVPIEVLPYARELAKKQFIELGGKPQIRLASRKDGPVISDNGNVIIDVEFGVIEDAAELSQKLSTCVGVVEHGIFLNTDEVYVGMKDGSVKIIN

SEQ ID NO: 7566 - protein, 276 aa, Arabidopsis thaliana
MKGEYREQKSNEMFSKLPHHQQQQQQQQQQHSLTSHFHLSSTVTPTVDDSSIEVVRRPRGRPPGSKNKPKPPVFVTRDTDPPMSPYILEVPSGNDVVEAINRFCRRKSIGVCVLSGSGSVANVTLRQPSPAALGSTITFHGKFDLLSVSATFLPPPPRTSLSPPVSNFFTVSLAGPQGQIIGGFVAGPLISAGTVYVIAASFNNPSYHRLPAEEEQKHSAGTGEREGQSPPVSGGGEESGQMAGSGGESCGVSMYSCHMGGSDVIWAPTARAPPPY

SEQ ID NO: 7567 - protein, 344 aa, Arabidopsis thaliana
MQPKTEFVKFLRKGAYGSVDLVKYIKRDDNALPLYAAVKTAECEDYNSLEREIQILSKLEGCRRIVQCYGNYTLEEDFDVGGFRVYKMVMEYAAAGSLFSFMDSYKDRKLPETMIKDFTRMILQGLVSVHRLGYVHCDLKPDNLLVFPCRQSYELKISDFGSSRKVGEYSDCWDVDLPFVGTPVYMSPESVRSGVAEKALDLWSLGCIVLEMYTGVIPWSEVEFEDLAPALSKGKAPEIPKSLPCDARKFLETCFSRNPKERGSASDLLSHQFLRGEVVSGFSLPPLKLKIKLAPEKPTNVSKKPLKLKIIPPKPPQFKKGGIKPLKLKIMPLKPPASSFVSVQ

SEQ ID NO: 7568 - protein, 308 aa, Sorghum bicolor
MEINIVDKYEKLEKVGEGTYGKVYKAQDKATGQLVALKKTRLEMDEEGIPPTALREISLLNLLSHSIYVVRLLAVEQAAKNGKPVLYLVFEFLDTDLKKYLDVYRRGPAARPLPATLIKNFLYQLCKGVAHCHGHGVLHRDLKPQNLLVDKDKGILKIADLGLGRAFTVPMKSYTHEIVTLWYRAPEVLLGATHYSTGVDMWSVGCIFAEMARRQALFPGDSELQQLLHIFRLLGTPSEEQWPGVSELRDWHEFPQWKPQSLARVVPTLEPEGVDLLSKMLQLDPSNRISAIAAMEHPYFDSLDKSQF

SEQ ID NO: 7569 - protein, 245 aa, Eucalyptus globulus
MGRGRVQLKRIENKINRQVTFSKRRCGLLKKAHEISVLCDADVALIVFSTKGKLFEYATDCCMERILERYERYSYAESQVLTNNAETNGNWTLEHAKLKARMEILQKNQKNLMGEELDSLSLKELQNLEHQLDTALKNIRSRKIQLMCESISELQRKDKALQEQNNMLAKKVKEKEKALAQQTQWDNPQDDGLTSSSVILSQSLQPLNIGGPYHPSGIEEGAALGPPQHRNATLFPSWMLSHLQE

SEQ ID NO: 7570 - protein, 178 aa, Clostridium perfringens str. 13
MLYDFKVKDIEGNEVSLGEYKGKVLLIVNTATGCGFTPQYEGLEVLYKKYHDKGFEILDFPCNQFFEQAPGSNEEIVGFCKLNYGTTFKTFAKVEVNGENACELYKFLKKEAPMAKEDETSLGFYDKLKGLGFTTEGEEIKWNFTKFLIDKNGEVVARFAPTFEPEKLDELIEELLEE

SEQ ID NO: 7571 - protein, 496 aa, Corynebacterium glutamicum ATCC 13032
MVKYPQSTLGDLVTATFAGIDATKHLIGGQWVEGNSDRISTNINPYDDSVIAESKQASIADVDAAYEAAKKAQAEWAATPAAERSAIIYRAAELLEEHREEIVEWLIKESGSTRSKANLEITLAGNITKESASFPGRVHGRISPSNTPGKENRVYRVAKGVVGVISPWNFPLNLSIRSVAPALAVGNAVVIKPASDTPVTGGVIPARIFEEAGVPAGVISTVAGAGSEIGDHFVTHAVPKLISFTGSTPVGRRVGELAINGGPMKTVALELGGNAPFVVLADADIDAAAQAAAVGAFLHQGQICMSINRVIVDAAVHDEFLEKFVEAVKNIPTGDPSAEGTLVGPVINDSQLSGLKEKIELAKKEGATVQVEGPIEGRLVHPHVFSDVTSDMEIAREEIFGPLISVLKADDEAHAAELANASDFGLSAAVWSKDIDRAAQFALQIDSGMVHINDLTVNDEPHVMFGGSKNSGLGRFNGDWAIEEFTTDRWIGIKRS

SEQ ID NO: 7572 - protein, 157 aa, Lactococcus lactis
MNFYDFSAVKMNGETVSMSDYKGKVVIVVNTASKCGFTPQFEGLEKLYETYKDQGLEILGFPCNQFANQDAGENTEINEFCQLNYGVTFTMFQKIKVNGKEAHPLYQFLKKEAKGALSGTIKWNFTKFLIDRDGQVIERFAPKTEPEEMEEEIKKLL

SEQ ID NO: 7573 - protein, 443 aa, Zea mays
  unsure (1)..(443): unsure at all Xaa locations
MEDAMAADGKSVLQGRYELGRVLGHGNFGRVHAARDLRTGRSVAVKVVAKDKLERAGMAEQIKREIAVMKMVSHPNIVELHEVMATRSKIYLALELVRGGELFSRIARAGRVREDVARCYFRQLVAAVDFCHGRGXFHRDLKLENLLLDEVGNLKVADFGLSALAGHARSDGLLHTACGTPSYVAPEVLGGKGYDGAKADLWSCGVILYVLLVGSLPFHEDNLMVMYRKMQRGEFLCPPWVSADARKLIGELLDPDPSTRITVARLVETPWYRKPLPVLPPLNLKEPTPDARRATSDKEEPEVLNAFHLISFSEGFDLSPLFDQGRGGGVGRSSAGGIRFVTREAASSVVSRLESLVTGRGANMRVTKSGSRGVRLEAVSRGRSGARLAVAAEIFSVAPSVLLVDVKKDGGDTMEYRSFCSEELRPALKDIVWASSQDTPGAA

SEQ ID NO: 7574 - protein, 122 aa, Psilotum nudum
MIQPQSYLKVTDNSGARKLMCIRILGTNNCKYANTGDTIIAVVKESVPNMPVKKSEIVRAVIVRTRKEMKRDNGIIIRFDDNAAVVINREGNLKGTRVHGPVDRELWKKNFTKIVSLAPEAF

SEQ ID NO: 7575 - protein, 319 aa, Phytophthora infestans
MDSRGEMKALDAQIDRLRRAENLTETEIYELCQKAKEILAGESNVQPVKCPVTVCGDIHGQFYDLLELFRIGGACPDTNYLFMGDYVDRGYYSLESVALLVALKVRHRERITILRGNHESRQITQVYGFYDECLRKYGNANVWKYFTDLFDHLPMTALIENRVFCMHGGLSPSIDTLDHARALDRVQEVPHEGPMCDLVWSDPDDRCGWGISPRGAGYTFGQDITEQFKRSNGLTFIARAHQLVMEGYQWTHNRGVVTIFSAPNYCYRCGNQAALMEIDEVMADRNGDKVYETCKFIQFDPAPRDSNFNEKKRTPDYFL

SEQ ID NO: 7576 - protein, 498 aa, Bordetella bronchiseptica RB50
MTLHDSAYWRAQAAALAPEGRAYIDGAYCDAADGATFAAHSPIDGRKLADVAACGAADVDRAVAAARRAFEAGVWSGLAPRERKHRLLRLAALITKHQEELALLETLDMGKPIRDALAFDLPETARCYAWYGEAIDKRYDEIAPTGADALATITREPLGVVAAVVPWNYPLMMAAWKVAPALAVGNSVILKPAEQASLSALRLAALAEQAGIPPGVFSVVPGLGAQAGQALGLHPDVDCIAFTGSTATGKRFMTYSGQSNLKRVWLECGGKSPHIVFADCPDLDRAAQVAALAIFSNQGEVCIAGSRLYVQHGIYDAFMEKVAAFAATLRPGNPLDPDSALGAMVDERQTQAVMARIAAGAQEGARLRLGGRQVLTNSGGYYIEPTIFDCPGQDNSLVREEIFGPVLAAQGFADEDEAVALANDSIYGLGAGLWTADLGRAHRLSRRLRAGLVWVNCYADGDITVPFGGVKQSGFGRDKSLHAMDKYSDLKTTWISLR

SEQ ID NO: 7577 - protein, 457 aa, Staphylococcus aureus subsp. aureus MRSA252
MAIAVLLNRMFRMEHNPLFEYIYQQKEDIDACYFIIPEEDMSSASDLKAQFYRGTLQRFYQSLHAEKLTPYVMSYDDIISFCKENNISEVVIAGDIMSYHLEEYDILHQRSLFNEARIAVTLIRGNHYFKASKTMNQQGEPYKVFTSFSKKWRPYLRHRDVYHYDLKSFEDFVIASPDDLVFDDIAFGSSQIIEQNKWQHFLDQDIQNYESGRDYLPEVLTSQLSVALAYGLLDIIEIFNDLLARYDEDEANYEAFIRELIFREFYYVLMTQYPETSYQAFKSKYRQIKWSQNEADFNAWCEGQTGFPIIDAAIMELTQTGFMHNRMRMVVSQFLTKDLFIDWTWGEKFFRKHLIDYDAASNIHGWQWSASTGTDAVPYFRMFNPIRQSERFDPKALYIKTYLPIFNQIDAKYLHDTQRNESNLFELGIELGRHYPRQMVDHQEKRTQVLAAFKALD

SEQ ID NO: 7578 - protein, 418 aa, Colletotrichum lagenarium
MGDLQGRKVFKVFNQDFIVDERYTVTKELGQGAYGIVCAAVNNQTQEGVAIKKVTNVFSKKILAKRALREIKLLQHFRGHRNITCLYDMDIPRPDNFNETYLYEELMECDLAAIIRSGQPLTDAHFQSFIYQILCGLKYIHSANVLHRDLKPGNLLVNADCELKICDFGLARGFSVDPEENAGYMTEYVATRWYRAPEIMLSFQSYTKAIDVWSVGCILAELLGGRPFFKGRDYVDQLNQILHILGTPNEETLSRIGSPRAQEYVRNLPFMPKKPFPQLFAQANPDALDLLDRMLAFDPSSRISVEQALEHPYLHIWHDASDEPDCPTTFNFDFEVVEDVGDMRKMILEEVYRFRQLVRTVPGSTQAGAQAAGQAGAGQVPIPSGNPGWTSSDPRPQEYVGQGGGLEADLAGGLDHRR

SEQ ID NO: 7579 - protein, 447 aa, Leptospira interrogans serovar Copenhageni str. Fiocruz L1-130
MKLSRSEFIKLGILTAAGISGLPGIKLSAQGTSSRKTVIVMGGGISGLYASYLLSKTGIKVQLIEATDRLGGRIRTVTDVSGNFLDLGAEWIQAEHRTAKSLIRELGLKTTDFEVQSDLFFGSYRKFGTWDISPKSQEILNKLVQMNSKINSTQQQELDRISFYNFLNYQGMSLEDLNILNFKYSLYYGDSLRSLSAQKVLSDLVNFPKYNTRVEGGMETLTRALVSSLENTEIIFSDPVVSVSQGEGKVIVTTVSGKKIEGNACISTLPANQLTTIQWDPELDKEKKLSALRIRYSRIYKTFLMLREAPWTRGSFSAYSDSVAGFIYDAGTKINSEDKILGMISTGDRYDVLASSTDAMKVEYIRLALESLGQGRELQVLRIQSSETSQSKFIPTGIATFPPGSYGSIISLLKPMDRIFFAGEHTAELNGTVEGALASAIRAVNQV

SEQ ID NO: 7580 - protein, 248 aa, GIBBERELLA ZEAE PH-1
MSDSPQSPPKEVDQGAPSPDDEAQMNEQQDPQSANAAGYEFEGVKEQDRWLPIANARSAVHIWIPLMSCDSSSKSPKASRASKADRADELDANIRNFAPVARIMKNALPDNAKIAKEAKECMQECVSEFISFITSEASEKCQQEKRKTVNGEDILFAMTSLGFENYAEALKVYLSKYREQQNQSNRERVNMDNGQWGSGTMMGDAKAESGAVGDFGHDGNSVESGADPNYMYGSQPGHNGNAPEARER

SEQ ID NO: 7581 - protein, 359 aa, Lycopersicon esculentum
MVFPLDSQLQNPISALLDGLYCEEDRFLDDDLGEWSSLDVGNENVKKTLPLLECDMFWEHDELATLLSKENEFHLGFQSLISDGSLMGARKEALDWMLRVIAYYGFTATTAVLAVNYFDRFVSGWCFQKDKPWMSQLAAVACLSIAAKVEETQVPLLLDLQVADSRFVFEAKTIQRMELLVLSTLKWKMNLVTPLSFIDHIMRRFGFMSNLHMDFLKKCERLILDIITDSRLLHYPPSVIATASMFYVINDIEPSNAMEYQNQLMSVLKVRKDIFEECHDLILELMDTACYKLCQSLKRKHHSVPGSPSGVIDAYFSSESSNESWSVASSISSSPEPQYKRNKTQDQRMTLAPLGSNLH

SEQ ID NO: 7582 - protein, 283 aa, Enterococcus faecium
MNSLTSTYRLSNGYEIPVVGFGTWQTPDGDVAVSSVKEALAAGYRHIDTAQGYKNEESVGQAIKESGIPREEIFLTTKLWNANHSYELVMSSFEESLKKLQTDYLDLFLIHWPNPVAFRDNWEQANADTWRAFEELYEAGKIKAIGVSNFLPHHLDTLAKTAKIMPMVNQVFLAPGELQTTVVEYAKKHDMILEAYSPLGTGKIFDVPEMKQIAEAHDKTIAQVALRWSLQHEFLPLPKSVTPSRIKENTELFDFELTEEEMKQIDQLDGVVGKAKDPDTTQF

SEQ ID NO: 7583 - protein, 506 aa, GIBBERELLA ZEAE PH-1
MSRPRRRGHKDGGYGGQATTLSSVVNLLNTSFQVVGAGTLAMPSVMSHMGIMLGVILIIWSGLTAAFGLYLQSRCARYLERGTASFFALSQITYPNAAVIFDAAIAIKCFGVGVSYMIIIGDLMPGVVLGFLSNANSAPYLVDRNFWITAFMLLIIPLSFLRRLDSLKYTSIVALVSIGYLIVLVIYHFASDKHADPGSIRVIQWGGAIETLSALPVVVFAYTCHQNMFSILNELKDNSPRSVVGVIGTSIGSASSIYIVVAITGYLTFGNAVVGNIVSMYPTGAASTIGKAAIVVLVTFSVPLQVHPCRASLDAVLKWRPNRNSSNNGRTATPLLPASPPGDHGSTAPMSDLRFAVITTFILTFAYMTALSVTSLDRVLAFVGSTGSTSISFILPGLFYYKISNPDSTYHQRLVKEDDDIDEDSSTSDVEESAALAQSTTSVRSGVSVVSNASTRSNRNSWRWRRKWRWDLEHIEHHHLRRMALALAIYGAVVMSTWYWVALQYK

SEQ ID NO: 7584 - protein, 196 aa, Glycine max
  unsure (1)..(196): unsure at all Xaa locations
MVLEATMICIDNSEWMRNGDYSPSRFQAQADAANLICGAKTQSNPENTVGVLTMAGKGVRVLVTPTSDLGKILACMHGLEIGGEMNLAAGIQVAQLALKHRQNKKQQQRIIVFAGGPVNHEKKMLEMIGRKLKKNSVALDVVNFGEEDEGMTCXLEALLSAVINNDTSLIVHVPSCPNALSDVLISTFIFTGEGWG

SEQ ID NO: 7585 - protein, 341 aa, Streptomyces avermitilis MA-4680
MRIGVLTAGGDCPGLNAVIRSVVHRAVTMYGDEVIGFEDGYAGLLDGRYRALDLNAVSGILARGGTILGSSRLQRDRLREACENAQDMAREFGIDALIPIGGEGTLTAARMLSDAGLPVVGVPKTIDNDISATDRTFGFDTAVGVATEAMDRLKTTAESHQRVMVVEVMGRHAGWIALESGMAAGAHGICLPERPFDPAHLVKMVEERFARGKKFAVLCVAEGAHPVVGSMDYSHGAIDQFGHERFQGIGTALAAELEHRLGKEAKPVILGHIQRGGTPTAYDRVLATRFGWHAVEAAHRGDFGRMTALRGTDVQMVPLAEAVTELKTVPKDRMDEAESVF

SEQ ID NO: 7586 - protein, 164 aa, Triticum aestivum
  unsure (1)..(164): unsure at all Xaa locations
GLNALAGRLKYDDPLEAAQLHGGCGAWGIIFTALFAKKQYVEEIYGAGRPYGLFLGGGGRLLAAHIVQILVIAGFVSCTMGPLFFALKKLGLLRISAEDEXXGMDLTRHGGFAYVYHDDERARQVGWRASCSSRGHTRVEAGQAGGPTRPALTKSNPGVRLQEK

SEQ ID NO: 7587 - protein, 496 aa, Pseudomonas aeruginosa UCBPP-PA14
MFELSDWQRRAATQRFIDQALIGGRQRPAASGATFDAIDPASNRLLARVAACDAADVDAAVAAARRAFDEGPWARLAPVERKRVLLRLAELMLAHREELALLDSLNMGKPVMDAWNIDVPGAAHVFAWYAESLDKLYDQVAPTAQQALATITRVPLGVIGAVVPWNFPLDMAAWKLAPALAAGNSVVLKPAEQSPFSALRLAELALEAGVPEGVLNVVPGLGEQAGKALGLHPEVDALVFTGSTEVGKYFMQYSAQSNLKQVWLECGGKSPNLVFADCRDLDLAAEKAAFGIFFNQGEVCSANSRLLVERSIHDEFVERLLAKARDWQPGDPLDPASRAGAIVDRRQTAGILAAIERAQGEGATLLGGGRQLTINGSDNFIEPTLFGDVRPDMQLAREEIFGPVLAISAFDSEDEAIRLANDSRYGLAASLWSDDLHRAHRVARRLNAGTVSVNTVDALDVAVPFGGGKQSGFGRDLSLHSFDKYTQLKTTWFQLR

SEQ ID NO: 7588 - protein, 285 aa, Salmonella enterica subsp. enterica serovar Typhi Ty2
MKSVKNVTFCGQVTLPAIGQGTWYMGERADQRQREVSALRAGLDLGLRLIDTAEMYADGGAEKVVGEALAGRRDEAFLVSKVYPWNAGGQKIVAACEESLRRLKTDYLDLYLLHWAGGFSFEETVEGMERLIAQGKIRRWGVSNLDYDDMQALWRIPGGQQCATNQVLYHLASRGIEYDLLPWCQQQRMPVMAYSPLAQAGRLRSGLLNHPVVNEIAQAHNATAAQILLTWVIAHPGVMAIPKAGSTEHVKQNAAALEITLSANELALLDNAWPAPKGKTALDMV

SEQ ID NO: 7589 - protein, 201 aa, Helicobacter hepaticus ATCC 51449
MQNQSIQSKQTSQQDNQQTSTMCSKQQGAVIWICGLAGAGKTTIAKEIFTLLEQKYSNVIFLDGDEFREIFGRSGFSKEERLEVARLIAKLCVFLSKSGLIVVCATISLFDEIYAFNRSHIARYFEVFVECSMEELLRRDKKALYSQALKGDIKDVIGIDLTYDTPKAHYVLQNNTADKLDSKVKELYNAVEKFLIQKGAK

SEQ ID NO: 7590 - protein, 214 aa, Saccharomyces cerevisiae
MSFNSPFFDFFDNINNEVDAFNRLLGEGGLRGYAPRRQLANTPAKDSTGKEVARPNNYAGALYDPRDETLDDWFDNDLSLFPSGFGFPRSVAVPVDILDHDNNYELKVVVPGVKSKKDIDIEYHQNKNQILVSGEIPSTLNEESKDKVKVKESSSGKFKRVITLPDYPGVDADNIKADYANGVLTLTVPKLKPQKDGKNHVKKIEVSSQESGGN

SEQ ID NO: 7591 - protein, 266 aa, Zea mays
  unsure (1)..(266): unsure at all Xaa locations
PRGRPHEAAISLVHYFKLLVLLALARLTMHVPDEDVLLSLGALRLDGHFSFHDVSAMARDFGNQCSFLPAAVLHPGSVSDIAATVRHVFSLGEGSPLTVAARGHGHSLMGQSQAAQGIVVRMESLRGPRLQVNDAGVSPPSVDAPGGELWINVLRETLKHGLAPKSWTDYLHLTVGGTLSNAGVSGQAFRHGPXGRGDAVTCSPDDNADLFYAALGGLGQFGIITRARIALEPAPKMXRWIRVLYSDFEXFTEDQRXLIMAENSFD

SEQ ID NO: 7592 - protein, 323 aa, Candida albicans SC5314
MSSNSLEQLKATGTTIVTDTGEFEQIAKYKPQDATTNPSLILAATKNPEYASVIDVAIEYAKDKGSSPKEKAEIALDRLLIEFGKNILDIVPGRVSTEVDARLSFDKEATVKKALELIDLYKQQGIEKDRILIKIASTWEGIQAARELESKHGIHCNLTLLFSFAQAVACAEAGVTLISPFVGRILDWYKASTGEEYTAETDPGVQSVKAIYNYYKKYGYKTIVMGASFRNTGEIKALAGCDFLTISPKLLEQLYNSTEEVPKQLDAATAKDEDVEKVTYVDDESAFRFALNEDAMATEKLSQGIRQFGKDAVTLLTELESRF

SEQ ID NO: 7593 - protein, 162 aa, Pseudomonas putida KT2440
MAATMLNIPCVTLGGEHKTLGDFPGKVLLVVNTASQCGFTPQYKGLEQLWQAYRDRGLVVLGFPCNQFGKQEPGDAREIAQFCERNFGVSFPLFRKVEVNGPGAHPLFVELKQRAPGILGSQKIKWNFTKFLVDPASGQVKRYAPTTKPQALEADIERLLSR

SEQ ID NO: 7594 - protein, 340 aa, Zea mays
DGEVGNKLRGTAPPRGTRGRHHHGGRSHAHRREGGHRAANVSIAAVAAAKGGRFRHAAPAFATAPAATGSDAAPLVSASGGEVPPAAAQWAASWELDDWEFADCGDVAPAAVVAEREATAAAAKPRLVFAPPSREEAEEATTELRDAIGRAYFNESPVEVVKEQDKEFNKLATDAIIPSMPGHVVQAFTLLKSSTEAQSVVASLASDRNVWDAVLKNEKVMEFYKTHQTTPVQTFPEEAATAESPGKFEDATSENASNSELPTGSGASFADFVDNAKKKVMDVVHNITDFFRDLFNDSAEAQTGAGPSAEKGFSATEMAVGGSFMALTIAVILVVLFKRA

SEQ ID NO: 7595 - protein, 157 aa, Glycine max
  unsure (1)..(157): unsure at all Xaa locations
GIRHEAGAGMVAPFTGLKSMAGFPTRKTNNDITSIASNGGRVQCMQVWPPVGKKKFETLSYLPDLDDAQLAKEVEYLLRKGWIPCLEFHLEHGFVFREHNRSPXYYHGRYWTMWKLPMCGRTVASQVVKELKEDKTECXSGFIRVIGCTTAPSAVFE

SEQ ID NO: 7596 - protein, 457 aa, Bordetella bronchiseptica RB50
MSKSPEQMTPYDQFNIEVPEDHFPVEGMSARAAQALVLSDEWTDTNPMLNMSSFVTTFAEPEAVRIAEKNMYKNYIDHDMYPQLFAMEQRMVRWLHQLWNGPKDAEPYGTATVGSSEACMLAGLAHKWNWRQRREREGKDATRPNMVTGGNVQIVWKKFLRYFDVEPRIVPLKPGQYCLTAEDLDKYVDENTIAVVAIAGQTFTGEDDDIQGIHDWLDAYEKKTGVSVPMHIDGASGGFVNPFLYPDYKWDFRLPRVQSINASGHKYGLTPPGLGWVIFRERKVFNEDLVFYVNYLGGEMPTATLNFSRNSFQVAVQYYQFLRLGFDGFKRVMQRTLDNAIALRQHLVDSGYFTIMNDTQRIPVVAVTLDPKVKKFNEFDVSNKVRERGWVISAYTMPPDAESVRSLRVVVRPHINRNVALLLAEDIVKACKYLEQHGGTATPPALHDTHKSSPAKC

SEQ ID NO: 7597 - protein, 293 aa, Magnetospirillum magnetotacticum MS-1
MVRNMTIASELGYLHVPEGVLIDLKKVDSLRDDEIVLMCTGSQGEPMAALSRMANGDHKVQVGHGDTVILASSLIPGNENAVFRIINGLTRLGARVVHGGNAKVHVSGHASAGELLYCYNVLKPKNVMPVHGEVRHLVANGALAVRTGVPADRVVLAEDGVVVDLVDGRASVVGAVPCGYVYVDGSSVGEITDAELKDRRILGEEGFVSVFAVVDSATGKVLAGPQILARGFAEDDKVFQDIQPEVVKALEDAIAGGATDTHQLQQVMRRVIGRWVSNRLRRRPMIVPVVVEA

SEQ ID NO: 7598 - protein, 279 aa, Staphylococcus aureus subsp. aureus MRSA252
MLNEIQILNNGYPMPSVGLGVYKISDEDMTKVVNAAIDAGYRAFDTAYFYDNEASLGRALKDNGVDREDLFITTKLWNDYQGYEKTFEYFNKSIENLQTDYLDLFLIHWPCEADGLFLETYKAMEELYEQGKVKAIGVCNFNVHHLEKLMAQSSIKPMVNQIEVHPYFNQQELQEFCDRHDIKVTAWMPLMRNRGLLDDPVIVKIAEKYHKTPAQVVLRWHLAHNRIIIPKSQTPKRIQENIDILDFNLELTEVAEIDALNRNARQGKNPDDVKIGDLK

SEQ ID NO: 7599 - protein, 214 aa, Listeria monocytogenes EGD-e
MRFFIDTANVEEIKKANRMGFISGVTTNPSLVAKEGRDFNEVIQEITSIVDGPISGEVVSLEADEMIAEGRVIAKIHPNMVVKIPMTGEGLAAVKVLTEEGIKTNVTLVFSATQALLAARAGATYVSPFLGRLDDIGDDGLVLIRDIADIFEIHGIPTEIISASVRHPIHVIECAKAGADIATVPFKVFEQMLKHPLTDSGIDKFLADWEAAKK

SEQ ID NO: 7600 - protein, 617 aa, Triticum aestivum
  unsure (1)..(617): unsure at all Xaa locations
MDSDYGVPRELSEVQQKRTLYQPELPPCLQGTTVRVEYGDVAIAADPAGAHVISHAYPHTYGQPLAHFLRKAANVPDAKVISEHPAVRVGIVFCGRQSPGGHNVIWGLHEAIKAHNVNSKLIGFLGGTDGLLAQKTLEITNEVLSSYKNQGGYDMLGRTKDQIRTTEQVNGAMATCQALKLDALVIIGGVTSNTDAAQLAETFAEAKCATKVVGVPVTLNGDLKNQFVETTVGFDTICKVNSQLISNMCTDALSAEKYYYFIRMMGRKASHVALECALQSHPNMVILGEEVAASKLTIFDITKQICDAVQARXAEKDKNHGVILIPEGLVESIPELYALLQEINGLHGKGVSVENISSQLSPWASALFEFLPQFIRQQLLLRPESDDSAQLSQIETEKLLAQLVETEMNKRLKEGTYKGKNFNAICHFFGYQARGAMPSKFDCDYAYVLGHVCYHILAAGLNGYMATVTNLKSPLNKWRCGAAPISSMMTVKGWSRGPATTQIGKPAVHMASVDLRGKAYEMLRQNSSSCLLEDIYRNPGPLQFEGPGADAKPISLCVEDQDYMGRIKKLQEYLEKVKSIVKPGCSQDVLKAALSAMSSVTETLAIMTSSSTGQPPL

SEQ ID NO: 7601 - protein, 502 aa, GIBBERELLA ZEAE PH-1
MSPPSIPLIAPNGVKWSQPTGLFINNEFVSSSSSRTLTSIDPATENEIATVQAADAQDIDKAVKAAKAALRHPSWKDLPASDRGQLMARLADLIEAKRELFATIDAWDNGKTYIETLENDLVEAVGVIRYYSGWADKTFGQTINTTPQKFAYTIRQPIGVIAQIIPWNYPLSMATWKLGPALACGNAVVIKAAEQTPLSLLVLGELIKEAGFPPGVVNIVNGLGKDTGAALVQHPLVDKIAFTGSTATAANIMGVAAKTLKNITLETGGKSPLIVFDDAEMDQAVKWSHFGIMSNQGQICTATSRILVQETIYEEFIKKFIDTLNTVSKVGDQWDKTTYQGPQVSKVQYERILEYIEIGKKEGATLAAGGGPLKINGSDKGFYISPTVFTDVKPSMRVFREEIFGPVVVVSTFKTEEEAIELANDTTYGLGAAAFTTNLEKAHRVAAAIEAGMVWINSSQDCDPRVPFGGVKQSGIGRELGEAGLEAYTQIKSVHINMGNRL

SEQ ID NO: 7602 - protein, 171 aa, Glycine max
MADGPASPGGGSHESGEHSPRSNVREQDRYLPIANISRIMKKALPANGKIAKDAKETVQECVSEFISFITSEASDKCQREKRKTINGDDLLWAMATLGFEDYIDPLKIYLTRYREMEGDTKGSAKGGDSSSKKDVQPSPNAQLAHQGSFSQGVSYTISQGQHMMVPMQGPE

SEQ ID NO: 7603 - protein, 460 aa, Pseudomonas aeruginosa UCBPP-PA14
MTAQLNPQRDTRDYQQLDAAHHIHAFLDQKALNREGPRVMVRGDGLQLWDNDGKRYLDGMSGLWCTNLGYGRQDLAAAASRQLEQLPYYNMFFHTTHPAVVELSEMLFSLLPDHYSHAIYTNSGSEANEVLIRTVRRYWQILGKPQKKIMIGRWNGYHGSTLGSTALGGMKFMHEMGGMLPDFAHIDEPYWYANGGELSPAEFGRRAALQLEEKILELGAENVAAFVAEPFQGAGGMIFPPQSYWPEIQRICRQYDVLLCADEVIGGFGRTGEWFAHEHFGFQPDTLSIAKGLTSGYIPMGGLVLGKRIAEVLVEQGGVFAHGLTYSGHPVAAAVAIANLKALRDEGVVTRVREETGPYLQRCLREVFGDHPLVGEVQGAGFVAALQFAEDKATRKRFANENDLAWRCRTIGFEEGVIIRSTLGRMIMAPALVAGRAEIDELIDKTRIAVDRTAREIGVL

SEQ ID NO: 7604 - protein, 390 aa, Oryza sativa (japonica cultivar-group)
MGNRLCCHDAADDEKPAAAAVSGGGGGGGREEYRRWPIAAESGGGETGRVLDMPRLRVFTLAELRAVTRGFKPEMVLGEGGFGTVYKGWADERTLNPAKSSAGVVVAVKKLNPESVQGLHEWQSEVNFLGRLVHPNLVKLLGYCKEERELLLVYEFMPKGSLENHLFRRGAFDPLSWSLRLKIAIGAARGLAFLHSSERQIIYRDFKASNILLDVDYTPKLSDFGLAKNGPVAGRSHVTTRIIGTYGYAAPEYVATGHLYVKSDVYCFGVVLLELLTGLRAHDLNRPSHQQNLVEWARPYIAGGKKLAGLMDPRLAGDYPAKAAARAAKLADKCLCGDPKSRPSMDDVVVALQEIESVGTARPAAAKLPPRAPPPAAHRSPHRNPYSKPR

SEQ ID NO: 7605 - protein, 427 aa, Escherichia coli K12
MADTKAKLTLNGDTAVELDVLKGTLGQDVIDIRTLGSKGVFTFDPGFTSTASCESKITFIDGDEGILLHRGFPIDQLATDSNYLEVCYILLNGEKPTQEQYDEFKTTVTRHTMIHEQITRLFHAFRRDSHPMAVMCGITGALAAFYHDSLDVNNPRHREIAAFRLLSKMPTMAAMCYKYSIGQPFVYPRNDLSYAGNFLNMMFSTPCEPYEVNPILERAMDRILILHADHEQNASTSTVRTAGSSGANPFACIAAGIASLWGPAHGGANEAALKMLEEISSVKHIPEFFRRAKDKNDSFRLMGFGHRVYKNYDPRATVMRETCHEVLKELGTKDDLLEVAMELENIALNDPYFIEKKLYPNVDFYSGIILKAMGIPSSMFTVIFAMARTVGWIAHWSEMHSDGMKIARPRQLYTGYEKRDFKSDIKR

SEQ ID NO: 7606 - protein, 212 aa, Triticum aestivum
  unsure (1)..(212): unsure at all Xaa locations
MAPTVMASSATSVAPFQGLKSTAGLPVSRRSNGASLGSVSNGGRIRCMQVWPIEGIKKSETLSYLPPLXSTEALLXKQVDYLXIRSKWVPCLEFSKVGFIFXREHNASPGYYDGRYWXTMWKLPMSGCTDATQVVNEVEEXKKEYPDPYSAHRVHNIASASSAHRLNQPAARSGRLNTHHDSILNANLQMLGFHYFYCPKRFLGLSMAKQPL

SEQ ID NO: 7607 - protein, 168 aa, Bacillus subtilis subsp. subtilis str. 168
MNIYVEANPYLHDKYSKYADEKYKREGNPFVSFPIHFDDIPSGAKTLALTFIDHDAIPVCGFSWIHWTAANIPAYIGELPEHASEERQDLMIQGQNSFASPLAGSNDPKVIHQYCGPTPPDKDHAYTLTVYALDAELNLQPGFYLNELYQEMKEHILAETSIELLARV

SEQ ID NO: 7608 - protein, 123 aa, Zea mays
  unsure (1)..(123): unsure at all Xaa locations
THASERLQDRPSIICVFLHLICHMHVYVSELRVGKHSLPLYELPTHATRCYYLGMFLRGAYHDALSRLHNLFGLPSMVRVSQCDXPHCFSVTLADKIPSCANMLQAIQYEPLVMYYVLKHYTY

SEQ ID NO: 7609 - protein, 331 aa, Saccharomyces cerevisiae
MRSIKCVIIGDGAVGKTSLLISYTTNSFPTDYVPTVFDNYSTTIAIPNGTASSPLELDNGNDKRGSLSSASSSPSTDRKLYKINLWDTAGQEDYDRLRPLCYPQTDIFLICFSVSEHASFANVTEKWLPELKQTSNIEGTSLYTKLGKYPILLVGTKSDLRDDPATQKKLQEANSDYVSQEEIDELVQRCGFMGYTECSAATQAGVREVFEQAVRYAIYEPESPNQKSANHTLTDELTTATTNTNGDKNIREQKQQPHHNNSTDSTLPKGSLQQEKEALNIKPTKKGQKDKIHEQSKSKGSKIASNNHHNKQAKPKTRNDKKKKKSKCVIL

SEQ ID NO: 7610 - protein, 413 aa, Cucumis sativus
GDDVEDVRREVQIMHHLTGHPHIVELKEVYEDRHYVNLIMELCAGGELFDRIIAKGHYSECTAASLCRQIVTVVHNCHSMGVMHRDLKPENFLFLSADENSPLKATDFGLSVFFKPGDVFKDLVGSAYYVAPEVLRRRYGPEAAVWSAGVILYILLSGVPPFWAENDQGIFDAVLRGHIDFSSDPWPSISSGAKDLIRKLLHSDPKERLSAIEALNHPWMKEDGEASDKPLDIAVLTRMKQFRAMNKLKKVALKVIAENLSEEEIVGLKEMFKSMDTDNSGTITFEELKAGLPKLGTKLSESEVRQLMEAADVDGNGSIDYIEFITAAMHMNRVEREDHLFKAFEYFDKDKSGYITMEELETALKKYNMGDETTIKEIIAEVDTDNDGRINYDEVVAMMRKGNQELTTTSRQK

SEQ ID NO: 7611 - protein, 131 aa, Flaveria ramosissima
SNGGRVQCMKVWPPLGKKKYETLSYLPDLTEAQLAKEVDYLLRNKWVPCLEFELEHGFVYRENARSPGYYDGRYWTMWKLPMFGCTDSAQVMKELQECKKEYPQAWIRIIGFDNVRQVQCISFIASKPDGF

SEQ ID NO: 7612 - protein, 136 aa, Zea mays
MDARMFGLENPLVAALHHLLDARAMAATPADVKELAGAYAFVVDMPGLSTGDIRVQVEDERVLVISGERRREEREDAKYLRMERRMGKFMRKFVLPDNADVDKVAAVCRDGVLTVTVEKLPPPEPKKPKTIEIKVA

SEQ ID NO: 7613 - protein, 151 aa, Desulfitobacterium hafniense DCB-2
MWCETGKPDLEFARKFAEAIHAQFPGKLLAYNCSPSFNWKKNLDDATIAKFQKEIASYGYKFQFITLAGFHSLNYGMFNLAHGYARRQMSAFVELQEAEFAAAEKGFTAVKHQREVGTGYFDAVTQTIQGGQSSTVALKGSTEEDSSTSRK

SEQ ID NO: 7614 - protein, 131 aa, Flaveria palmeri
SNGGRVQCMKVWPPVGKKKYETLSYLPELTEAQLAKEVDYLIRNKWVPCLEFELEHGFVYRENASSPGYYDGRYWTMWKLPMFGCTDSAQVMKELQECKKEYPQAWIRIIGFDNVRQVQCVSFISPKPTGF

SEQ ID NO: 7615 - protein, 141 aa, Brassica napus
  unsure (1)..(141): unsure at all Xaa locations
RLTPGSEMPNLELNLWDFNTKQXEXXLGXTLAGKPXAPKLEMVCXASQDMSENFLFCPMVNNDREPSGFWSLLSPDENRVHAPVESCPLSLSFSPVQQHTSVGPPPQSTTGFTMGSSMQPNMLXSRPWMAVSAPFXQTHYL

SEQ ID NO: 7616 - protein, 381 aa, Triticum turgidum
VAATSAIAQMETSHIPSLEKPLQQQPLPLQQILWYQQQQPIQQQPQPFPQQPPCSQQQQPPLLQQQQPPFSQQQPPFSQQQQPVLPQQPPFSQHQQPPFSQQPPFSQQQQPLLPQQQQPIQQQPQPFPQQPPHFIQQQQQPFLQQQQWSFQQQQPLFQQQQPPVFQQQPPFSQQQQPVLPQQPPFSQHQQPVLPQQQIPSVQPSSLQQLNPCKVFLQQQCSPVAMPQSLARSQMLWQSSCHVMQQQCCRQLPQIPEQSRYDAIRAIIYSIVLQEQQHGQGFEQPQQQQPQQSVQGVSQPQQQQKQLGQCSFQQPQQQQLGQWPQQQQVPQGTLLQPHQIAQLEVMTSIALRTLPTMCSVNVPVYGTTTIVPFGVGTGVGAY

SEQ ID NO: 7617 - protein, 335 aa, Streptococcus pneumoniae TIGR4
MKRIAVLTSGGDAPGMNAAIRAVVRQAISEGMEVFGIYDGYAGMVAGEIHPLDAASVGDIISRGGTFLHSARYPEFAQLEGQLKGIEQLKKHGIEGVVVIGGDGSYHGAMRLTEHGFPAIGLPGTIDNDIVGTDFTIGFDTAVTTAMDAIDKIRDTSSSHRRTFVIEVMGRNAGDIALWAGIATGADEIIIPEAGFKMEDIVASIKAGYECGKKHNIIVLAEGVMSAAEFGQKLKEAGDTSDLRVTELGHIQRGGSPTARDRVLASRMGAHAVKLLKEGIGGVAVGIRNEKMVENPILGTAEEGALFSLTAEGKIVVNNPHKADIELSSLNKSLS

SEQ ID NO: 7618 - protein, 483 aa, Rhodopseudomonas palustris CGA009
MLMPSDPGLLAERCLIGGKWCGEPVDAVFNPATGERIGAVPRFGTDEAEEAVRAAEIAFRQWSKLLAKQRATMLRAWFDQIIANRDDLALLLTREQGKPLAEALGEIDYAASFVEFYAEEARRIYGETIPSHRADARTMVIRQPVGVVAAITPWNFPAAMITRKVAPALAAGCTVVIKPAPETPLTALALGVLAQRAGFPPGVLNIITGDAPAIGKAWTEHPTVRAISFTGSTEVGKILMRQAASTVKKVALELGGNAPFIVFDDADLDAAVEGVIASKFRNMGQTCVCANRIYAQDGIYDAFVEKLTAKVATLQVGNGVDAGVTQGPLITTEAIAKVERHVSDAVAKGAKVVLGGKRHKLGRTFFEPTVLAGVTTAMLITREETFGPVAPVYRFTDEADVIAQANDSPFGLASYFYARDLGRVFRVAEALESGMVGVNSALLGADVVPFGGVKQSGLGREGSRHGIEEYVETKYILLGGLDR

SEQ ID NO: 7619 - protein, 231 aa, Zea mays
MEYAAVGYGYGYGYDERQEPAESADGGGGGDDEYATVLSAPPKRPAGRTKFRETRHPVYRGVRRRGPAGRWVCEVREPNKKSRIWLGTFATPEAAARAHDVAALALRGRAACLNFADSARLLQVDPATLATPDDIRRAAIQLADAASQQDETAAVAADVVAPSQADDVAAAAAAAAAAAMYGGGMEFDHSYCYDDGMVSGSSDCWQSGGGGWHSSVDGDDDGAGDMTLWSY

SEQ ID NO: 7620 - protein, 174 aa, Griffithsia japonica
MSTNTATLQSGAKMPLNGFGTWKASVEETEQAVTAALRAGYRHIDCAAVYWNEAAVGTAISKAISGGVVKREDLFITSKVWNTCHATDKVVDSCRQSLKDHQVDYFDLFLVRDIGVSNYSVALLVDTLNYARIKPSVNQCEAHVYFARPQLRDVCREFGVHLPCTPSSQRPKGR

SEQ ID NO: 7621 - protein, 152 aa, Triticum aestivum
MASAEDVKQRQVVEDRARNISHNVRCTECGSQSIEDSQADVAVLLRRLIRDEIKSGKSDKEIYKKLEEDFGETVLYAPKFDLQTAAIWLSPVIVGGVAAGVWAYQKHRQRTNVHIMALNLVRGVPLTPREKETMIDILTPPPPARRWWWPLK

SEQ ID NO: 7622 - protein, 535 aa, Zea mays
MGNCCAAPSTEGSGKTRPKKQKENPYNVAYNRGAAAPPPPPARPGLVVLRDPTGRDLGAEYELGGELGRGEFGVTYLCTEPATGARYACKSISKRKLRTPVDVEDVRREVDIMRHMPPHPNIVSLRAAYEDEDAVHLVMELCEGGELFDRIVARGHYTERAAAAVTRTIVEVVQMCHRHGVMHRDLKPENFLYANKKESSPLKAIDFGLSVFFRPGERFTEIVGSPYYMAPEVLKRNYGPEVDVWSAGVILYILLCGVPPFWAETEQGVAQAIIRSVVDFKREPWPRVSEPAKDLVRRMLDPNPLTRFTAAQVLEHPWLHDSKNTPDVSLGDTVRARLQQFAAMNKLKKKALRVIAEHLSAEEVADIKQMFDKMDVNKNGKLTFEEFKAGLRKLGNQMHDSDFQILMDAGDVDRNGTLDYEEFVTVSVHVRKIGNDEHIQKAFAYFDRNKSGYIEIEELREALADELDGSDEDIIGGVIRDVDTDKDGKIGYDEFAAMMKAGTDWRKASRQYSRQRFSNLSLKLQKDGSLGADTR

SEQ ID NO: 7623 - protein, 282 aa, Ralstonia eutropha JMP134
MSEINQAMDPGQQLSQDWWRTEIIDMRPGEIRYRGYPIEQLIGQVSFAQMIWLMLRGELPGPGQGELLDAALMAAVDHGPQAPSIAIARMAATCGVGLNNAMASAVNVLGDVHGGAGEQAVELYQDIAGRIDEGAALDQAVSAGLAHYRDLHGRFVSGFGHRFHPVDPRAPRLLALVDQAAEKSVVNGRFAAIARAVERALGEGRSKPVPMNIDGATAVIYAELGFPAPLARGLFCLSRSVGILAHAWEQTQQGGRNKGPIPRQFLWTYDGTPQRDVPAQGD

SEQ ID NO: 7624 - protein, 290 aa, Triticum aestivum
MAGLSMEHPWAFAFGLLGNVISFSSLLAPIPTFYRIFKSKSTEGFQSVPYVVALFSAMLWIFYALVKTGEGLLISINAAGCVIETVYIVMYLVYAPRKAKIFTAKIVLLLNIAGFGLIFLLTVFAFQGETRVVSLGWICVGFSVWVFVAPLSIIGRVIKTKSVEYMPFTLSLTLTLSAIVWFLYGLLIKDKYVALPNILGFTFGVIQMVLYVFYMNKTPVASEVKEGKEAWKVPAEDHVVVINVGKADKSSCAEVRPVTEMAGAVDVPRRCAAEAAAAPGMDFARSVDVV

SEQ ID NO: 7625 - protein, 291 aa, Saccharomyces cerevisiae
  unsure (1)..(291): unsure at all Xaa locations
XVHVASVEKGRSYEDFQKVYNAIALKLREDDEYDNYIGYGPVLVRLAWHISGTWDKHDNTGGSYGGTYRFKKEFNDPSNAGLQNGFKFLEPIHKEFPWISSGDLFSLGGVTAVQEMQGPKIPWRCGRVDTPEDTTPDNGRLPDADKDAGYVRTFFQRLNMNDREVVALMGAGALGKTHLKNSGYEGPWGAANNVFTNEFYLNLLNEDWKLEKNDANNEQWDSKSGYMMLPTDYSLIQDPKYLSIVKEYANDQDKFFKDFSKAFEKLLENGITFPKDAPSPFIFKTLEEQGL

SEQ ID NO: 7626 - protein, 458 aa, Sinorhizobium meliloti 1021
MLERSNELTAWDRDHFFHPSTHMGMHARGETPTRVIGGGEGVYITDISGKRSLDAFAGLYCVNVGYGRQKIADAIAEQAKNLAYYHAYVGHGTEASIRLSKMIIDRAPEGMSRVYFGLSGSDANETNIKLIWYYNNILGRPEKKKIISRWRGYHGSGVMTGSLTGLHLFHNAFDLPRAPILHTEAPYYFRRPDRSMSEEQFSQYCADKLEEMILAEGPDTVAAFIGEPILGTGGIVPPPKGYWEKIQAVLQKYDILLVADEVVTGFGRLGTMFGSDHYGIKPDLITIAKGLTSAYAPLSGTIVSDKLWQVLVKGSDELGAIGHGWTYSAHPICAAAGIANLELIDELGIVENAGSTGAYFRAELQKAVGDHRHVGEVRGDGLMAAIEFVEDRDDRAFFDPGRKVGPQVAAALLERGVIGRAMPQGDILGFAPPLCLTRDEADIVVKAAADTIQSVLGR

SEQ ID NO: 7627 - protein, 498 aa, Sinorhizobium meliloti 1021
MTAVFARTAFHDALKNLSDRQLLRELAYVGGRWVAGRDGTCLEVSDPASGAALAFVASLDAAQTSEAIDAAQKAFRSWHNMLPQARAAILRKWHDLMLEAREDLALLMTLEQGKPLAESRGEIDYAASFIEWYAEEGKRLNAESVTSHLAGAEMIVRREALGVVGIVTPWNFPSAMITRKAAAALAAGCTVVAHPSSETPLSALALAELGERAGLPAGVFNVVTGKAATIVGRMCEDARVRAMSFTGSTEIGRLIASQCAPTMKRLVMELGGHAPLIVFADANVEKAADIAIAAKFATSGQDCLAANRIYVERPALKAFQEAFAARIAGLKVGSGMEPDTDIGPLMHERAVAKVEEQVADALKLGARLAVGGKRHAAGPLFFQPTLLTDVPDDALIMREETFGPVAAVTAFDSEEEVVARANDTEYGLVAYVVTENGARQMRLARALEYGMVAVNRVKITGGPIPFGGWKQSGLGREGSRHGMEAFTELKYLCIDTAA

SEQ ID NO: 7628 - protein, 196 aa, Zea mays
  unsure (1)..(196): unsure at all Xaa locations
MASPFSVPSLIMEEEGRFEAEVAEVESWWGTERFRLTKRPYTARDVVLLRGTLRQSYASGEMAKKLWRTLKAHQAGGTASRTFGALDPVQVTMMTKHLDTIYVSGWQCSSTHTSTNEPGPDLADYPYYTVPNKVEYLFFPHIYHYRDQLQARMXLARADCARVPYLNFFDPICDQGDTALVSCPHLRTALEALILP

SEQ ID NO: 7629 - protein, 289 aa, Zea mays
MVIRSFATTSLIAAFFAIAHLAAWVTPPQAAATAAPPSSPDTASFLRCLGAHLPPQAVYTNASRSYTSVLESSIKNLLFVTPATPTPAAVRCGARHGVGVRPRSGGHDYEGLSYRSLSARRPFAVVDLARLRAVSVDARNRTAWVGSGATLGELYYAIASRSARLGFPGGVGPTVGVGGHLSGGGFGLLLRKHGLAADHVVDAVVVDAAGSLRDRAAMGEDLFWAIRGGGGGSFGVVLSWKLRLVRVPPVVAVSTVHRPRNQSASALLARWQHVAPALPRDAILRVVLQ

SEQ ID NO: 7630 - protein, 87 aa, Brassica napus
MPRSLEPLDLGLQIPYHFRCPISLELMRDPVTVCTGQTYDRTSIESWVSTGNNNTTCPVTRAPLSDHTLIPNHTLRRLIQEWCVANR

SEQ ID NO: 7631 - protein, 179 aa, Fritillaria agrestis
MAASSTMLSSVATAACAAPAQASMVAPFVGLKSTSAFPVTQKPATGLSTLPSNGGRVQCMKVWPIVGLKKFETLSYLPTLSVESLLKQIEYLIRNGWVPCLEFSLEGFVSRDNNKSPGYYDGRYWTMWKLPMFGCTDAAQVVKEAAECKKEYPAAFIRVIGFDNVRQVQCVSFIVERPE

SEQ ID NO: 7632 - protein, 148 aa, Pseudomonas syringae pv. phaseolicola
DVIDVRGLTATGRFTFDPGFMSTASCDSKITYIDGDNGILLHRGYPIEQLAEQSDYLETSYLLLNGELPTAEQKAQFVAVVKNHTMVHEQLKTFFNGFRRDAHPMAVMCGVVGALSAFYHDSLDINNPQHREISAVRLVAKMPTLAAM

SEQ ID NO: 7633 - protein, 131 aa, Flaveria palmeri
SNGGRVQCMKVWPPVGKKKYETLSYLPELTEAQLAKEVDYLHRNKWVPCLEFELEHGFVYRENASSPGYYDGRYWTMWKLPMFGCTDSAQVMKELQECKKEYPQAWIRIIGFDNVRQVQCVSFIASKPTGF

SEQ ID NO: 7634 - protein, 354 aa, Schizosaccharomyces pombe
MYCNLAKMYEVEPSEKEDNVERQTKKYNFEIDEPEEQEKKDEKEDDKEESPSKSLEEISQSVSPVEEEPRDVRFKELSTPFSYPINDPPEGRPVRVYADGVFDLFHIGHMRQLEQAKKVFPNVHLIVGLPNDQLTHRLKGLTVMNDKERAEALRHCKWVDEVLENAPWVITPEFLEEHKIDFVAHDDIPYASDDSGDIYLPVKKVGKFIPTKRTEGVSTSDLITRIIRDYDQYVMRNLARGVNRKELNVSLFKKNELDLRHHIKVLRDTLRNHWVSTTRDLKADIKSFLSMATTDYQLQKNPLHGSSEPSSPGPTGFLGGINRWMQRRSSSHYDLPRVGNEIAASSSSATEENH

SEQ ID NO: 7635 - protein, 179 aa, Fritillaria agrestis
MASSATMLSSVATAACAAPAQASMVAPFVGLKSASAFPVTQKTATGLSTLPSNGGRVQCMKVWPIVGLKKFETLSYLPTLSVESLLKQIEYLIRNGWVPCLEFSLEGFVSRDNNKSPGYYDGRYWTMWKLPMFGCTGAAQVVKEAAECKKEYPAAFIRVIGFDNVRQVQCVSFIVEKPE

SEQ ID NO: 7636 - protein, 467 aa, Streptomyces aureofaciens
MPTPEAGSASGREAVRFPVVDPATGETFDEAPDQQPGELDDVVARAQRAWHGWRADPAARTAALRGAADAVETAGDDLARLLTREQGKPLAESYAEIARTAARLRYFADLAPRTRRIDDGRPVHSEVRWRPLGPVAAIVPWNFPLQLAAAKFAPALAAGNTVVLKPSPFTPLATRMLGSVLATALPEDVLTVVTGREPLGARLASHPGIRHVTFTGSVPTGRAVAGAAAASLARVTLELGGNDAALLLDDVDVDRIADRLFWAAFRNCGQVCMAVKRVYVPARLHAEVVEALAQRAKTVAVGPGLDPGTRLGPVNNARQLARVEQVTEQALADGARAAWGGHRLDGPGYFFAPTILTDVLPGSPVVTEEQFGPVLPVLPYRSLDEAVDAANSTGFGLGGSVWGTDLDQAETVADRLECGTAWINHHAELSLAQPFAGVKDSGVGVAGGPWGLYGNLRPFVVHRPQEV

SEQ ID NO: 7637 - protein, 131 aa, Flaveria palmeri
SNGGRVQCMKVWPPVGKKKYETLSYLPELTEAQLAKEVDYLIRNKWVPCLEFELEHGFVYRENASSPGYYDGRYWTMWKLPMFGCTDSAQVMKELQECKKEYPQAWIRIIGFDNVRQVQCVSFIASKPTGF

SEQ ID NO: 7638 - protein, 436 aa, Glycine max
MSGKQAVRPRTRVGKYELGKTIGEGSFAKVKFAKNVENGNHVAIKILDRNHVLRHKMMEQLKKEISAMKMINHPNVVKIYEVMASKTKIYIVLELVNGGELFNKIAKNGKLKEDEARRYFHQLINAVDYCHSRGVYLKPENLLLDSNAILKVTDFGLSTYAQQEDELLRTACGTPNYVAPEVLNDRGYVGSTSDIWSCGVILFVLMAGYLPFDEPNHATLYQKIGRAQFTCPSWFSPEAKKLLKRILDPNPLTRIKIPELLEDEWFKKGYKPTTFVEEEDVNVDDVAAAFNDSKENLVTERKEKPVSMNAFELISRSQSFNLENLFEKQTQGIVKRETHFTSQRPANEIMSKIEEAAKPLGFNVHKRNYKMKLQGDKSGRKGHLSVATEVFEVAPSLHMVELRKTGGDTLEFHKFYKSFSSSSGLQDIVWHSEAKQ

SEQ ID NO: 7639 - protein, 157 aa, Triticum aestivum
  unsure (1)..(157): unsure at all Xaa locations
MAPTVMASSATSVAPFQGLKSTAGLPVSRRSNGASLGSVSNGGRIRCMQVWPIEGIKKFETLSYLPPLKHGGLLKQVDYLIRXKWVPCLRFSKLXYLXVRQRTPGYYDGXYWDMWXCLVRCTDXPGXNEVEESRRIPDPIPHQVNIACLSHGLDPAK

SEQ ID NO: 7640 - protein, 331 aa, Streptomyces avermitilis MA-4680
MQLRELVFGAACAAAVRAAAKLGVADALGEKPATAEELAAVLGTEPRPLLRLLRALSCYGIFAQNDDGRFVHTSMSRLLREDDPHSLRYISLWCTEPWTWDAWPRLDEAVRSGGSVFHELYGKGFFDYLHEDAHDSAQVFNQAMTTSSEQSARDVAELLDLTGVSTVADIGGGQGHVLASLLEKHPDIRGTLLDLPRVVEKADPRLRDGGPLAARARIVGADCREEIPVEADLYIIKNILEWDDDSTRRTLRNVMTKARPGARVVIIENLVDDTPSMKFTTSMDLMLLLNVGGAKHTKESLVTRMTEAGLTVGEIRPVNAYLHAFECTVPA

SEQ ID NO: 7641 - protein, 369 aa, Oryza sativa (japonica cultivar-group)
MGKGGKGAEAAAAAVAGAGEEENMAAWLVAKNTLKIMPFKLPPVGPYDVRVRMKAVGICGSDVHYLREMRIAHFVVKEPMVIGHECAGVIEEVGSGVTHLAVGDRVALEPGISCWRCRHCKGGRYNLCEDMKFFATPPVHGSLANQIVHPGDLCFKLPENVSLEEGAMCEPLSVGVHACRRADVGPETGVLIMGAGPIGLVTLLAARAFGATRVVIVDVDEHRLSVARSLGADAAVRVSARAEDVGEEVERIRAAMGGDIDVSLDCAGFSKTVATALEATRGGGKVCLVGMGHNEMTVPLTSAAIREVDVVGIFRYKDTWPLCIEFLRSGKIDVKPLITHRFGFSQEDVEEAFEVSARGRDAIKVMFNL

SEQ ID NO: 7642 - protein, 148 aa, Pseudomonas syringae pv. pisi
DVIDVRGLTATGRFTFDPGFMSTASCDSKITYIDGDNGILLHRGYPIEQLAEQSDYLETCYLLLNGELPTAEQKAQFVAVVKNHTMVHEQLKTFFNGFRRDAHPMAVMCGVVGALSAFYHDSLDINNPQHREISAIRLVAKMPTLAAM

SEQ ID NO: 7643 - protein, 378 aa, Antarctic bacterium DS2-3R
TEPTIHKGLAGVTADVTAISKVNSDTNSLLYRGYPVQELAAKCSFEQVAYLLWNSELPNDSELKAFVNFERSHRKLDENVKGAIDLLSTACHPMDVARTAVSVLGANHARAQDSSPEANLEKAMSLLATFPSVVAYDQRRRRGEELIEPREDLDYSANFLWMTFGEEAAPEVVEAFNVSMILYAEHSFNASTFTARVITSTLADLHSAVTGAIGALKGPLHGGANEAVMHTFEEIGIRKDESLDEAATRSKAWMVDALAQKKKVMGFGHRVYKNGDSRVPTMKSALDAMIKHYDRPEMLGLYNGLEAAMEEAKQIKPNLDYPAGPTYNLMGFDTEMFTPLFIAARITGWTAHIMEQVADNALIRPLSEYNGPEQRQVP

SEQ ID NO: 7644 - protein, 500 aa, Triticum aestivum
  unsure (1)..(500): unsure at all Xaa locations
MGRSERTVVWFRRDLRIDDNPALAAAARDGAVLPVFIWCPAEEGRFYPGRCSRWWLKESLAHLARSLEALGCPLVLIPAQTTLAAXLQCVDSIGATXVVXNIYXPISLVRDDKIKNELLGLGISMQSFNGDLLYEPWEVYDENGLAFTTFNKYWEKCMKLPIEISPFLAPWXIENICSSSIDNLGLESSKDEESSNALLSRAWSPGWRNAEKTLEDFVSHGLLDYSKDRMKVTGTTTSLLSPYLHYGEVXLLGNLKHYPWRADEDRFKSWRQGMTGYPLVDAGMRELWATGWTHNRIRIFGWQYIXSGSLPDGHELGRLDNPEVQGQKYDPDGEYVRTWIPELARMPGEWIHHPWDAPSSILEVAGVELGFNYPMPIVELHTARECLDDAISTMWQLDTAEKLAELDGEVVEDNLSHIKSFDVPKVVLKELSPHCDREVPTDDGRNLELQPKELKGTNKQTICVDVIKASKMEDTGSIANSPISRKRSSSGSVFNVPSYV

SEQ ID NO: 7645 - protein, 340 aa, Zea mays
  unsure (1)..(340): unsure at all Xaa locations
CSHPPSACSCSLKSKQLIRWREQQARETSARAHYTRTDQTPAMATLATAAAAWTREEDKAFENAVAAAAAPPADGXPDDGWFTALVASVPARTVEEVRRHYEALVEDVAAIEAGRIPLPRYAGEESSAATPEGSGSAASAPKDAGGGGGGGGGHRREERKSGVGVDVGKSSSKAEQERRKGIPWTEEEHRLFLLGLDKFGKGDWRSISRNFVISRTPTQVASHAQKYFIRLNSMNRDRRRSSIHDITSVSAGEVAAAGAPITGGPTTAGAMPMGPAGMKHHHHHPAPPMGMYGHAPMGHPVSGHMVAPAXRRTPVMFPXGHHSPYVMPVGYPAPXGQMHP

SEQ ID NO: 7646 - protein, 497 aa, Magnaporthe grisea 70-15
MNIQLSAPNGKKWIQPTGLFINNEFVKSSNGQKLTTVNAATEEDITSVYSATEEDIDKAVKAARAAFKHPSWRNLSGTERGEMMHKLADLVVKNAETLATIEALDGGKPYSVALGEDVVEFEKTIRYYAGFADKNFGQTIDVGPNKFAYTIKEPIGVCGQIIPWNYPLCMAAWKLGPALACGNTVVLKLAEQTPLSMLYVATLIKEAGFPAGVVNVINGLGGEAGAAIVQHPDIDKVAFTGSTATGKQIMKACAGTMKNITLETGGKSPLLVFDDADLDLAAEWSHIGIMSNQGQICTATSRILVHESVYDKFVGRFKDTVEKVSIVGDPFDEKTFQGPQVTKAQYEKVLGYIKLAQEEGATIATGGKPAPQNGKGFYVAPTVFTNVKTSMRVYKEEIFGPCVSIISFKDEEEAVELANDTTYGLGAAVFTRNLTRAHRVAREIQSGMVWINSSNDSDCRVPFGGVKQSGIGRELGEAGLASYCNIKSVHVNMAAHL

SEQ ID NO: 7647 - protein, 250 aa, Fragaria x ananassa
MGKCYPTVSEEYKKAIDKAKRKLRGLIAEKNCAPLMLRLAWHSAGTYDVKTKTGGPFGTMKQSAELAHGANNGLDIAVRLLEPIKEQFPILSYADFYQLAGVVAVEVTGGPDVPFHPGREDKPEPPPEGRLPDAGKGSDHLREVFGKTMGLSDQDIVALSGGHTLGRAHKERSGFEGPWTPNPLIFDNSYFTVLLSGEKEGLLQLPTDKALLSDPVFRPLVEKYAADEDAFFADYALAHQRLSELGFAEA

SEQ ID NO: 7648 - protein, 161 aa, Vibrio parahaemolyticus RIMD 2210633
MRKVILAVFAALTFSLAAHAAIEVYEFDNLEQEQQFKELGHTLRCPKCQNNTISDSNAELAQDLRHKVYEMTKEGKSKEEIVDYMIARYGNFVTYNPPFTMSTAILWLGPLAVVLGGFGLIVLRSRKSKAKVTANNDEKWDEQKEARLKALLEEENNGDNK

SEQ ID NO: 7649 - protein, 121 aa, Setaria italica
MAPMRKMQAVFALAMVFAAAALVASAAAAITCGQVASSLAPCIPYATGNANVMPSGCCGGVRSLNNAARTSADRQAACRCLKSLAGTIKKLNMGTVAGIPGKCGVSVPFRISMSTDCNKVS

SEQ ID NO: 7650 - protein, 397 aa, Candida albicans SC5314
MRGIKGLVWEGSVLDPIEGIRFRGRTIPDIQKELPKAPGGEEPLPEALFWLLLTGEVPTDAQTKALSEEFAARSALPKHVEELIDRSPSHLHPMAQFSIAVTALESESQFAQAYAKGANKSEYWKYTYEDSIDLLAKLPTIAAKIYRNVFHDGKLPAAIDSKLDYGANLASLLGFGDNKEFVELMRLYLTIHSDHEGGNVSAHTTHLVGSALSSPFLSLAAGLNGLAGPLHGRANQEVLEWLFKLREELNGDYSKEAIEKYLWETLNSGRVVPGYGHAVLRKTDPRYTAQREFALKHMPDYELFKLVSNIYEVAPGVLTKHGKTKNPWPNVDSHSGVLLQYYGLTEQSFYTVLFGVSRAFGVLPQLILDRGIGMPIERPKSFSTEKYIELVKNINKA

SEQ ID NO: 7651 - protein, 1611 aa, Schizosaccharomyces pombe
MSSFPTRVVALYPYRSSFSDDLEFDPGQVIDVVSNLDGDWYTGTYVDSDGNRKIGSFPKDFTEPAEDAVFVERASEMALHQPTPTSAVHSRNSSLGYAPSITRSIKSISNNTEHLGADTESYLSANDFIDSTSEALTKIVDVDTLSAPFGNDSNSRPHSLKNVEKLHTFSAPYTISEETPSCSTENDSLPLTATHTITGGEDAATGAAVTNTTTTHITTSTNTSTVIPSNPNSVFLVDCTHSQCPTDLPNIATTQHSLRYLDNASASAITVLERTHPAASSTMATESSHQSPSADSQAEELSKSQRVAKDDDPFVVSNTANSDEPASSSKPAKPLTDLNRAFSQRLNLDPQKPGKSQGEISEQEEDEYDDAESDEMHSPYSTHEPESEPEDQDEPSEKDDENKDVEEEQEQEQEEEQIDPEEAKRIALRERMAKMSGGIGMHVFGLPGLAAPIGRKNTLRRTPAKSSEEAKSTTNDSSPPKDSSSTSTQPTEQSNAQQAPSPKEEERPLPSEPSQNQPAEYRDTPDTPRNIMPLPGLMSADQPIKVTEPSNDADKAIVAEGPNNEEETKGPVIPETQETSEQQVHKTPSPEKQKVLSPPPIITNFDKETLASNEAHEAVPQKPSAPQVTRLMAPQDSSSVVTPSPTSLLDPARAVRKVIDGIDPPKEAGAGATADVESAANSPITPPRTWHSPDFTSKSFEPIERKLPSRISEVTEDSIDEDKQNEVDPSTSARALPPPGLRFGKVDTLASLAHDDLDDLPAVPRIFSPPPLPKTPSGEFGDNEFMFPKKSNRVRGHQSRPSTGSQLRNVVPVSIVTSGGRPALPDEMASPSSSIGHPLPSPPPADFNSLNVDFYEPHSYLESPAPEPQPSYEEESFNATVIHAPTPSTATFQGHPTISNVATPPLKQDVTESKASPVADASATHQSSTGLTQEITQLGSNMRLPTKLTRPSNDGRKASGPRPAAPPSIPPPLPVSNILSSPTSEPPKDHPPSAPLSKPVSTSPAAPLARVPPVPKLSSKAPPVPLPSADAPPIPVPSTAPPVPIPTSTPPVPKSSSGAPSAPPPVPAPSSEIPSIPAPSGAPPVPAPSGIPPVPKPSVAAPPVPKPSVAVPPVPAPSGAPPVPKPSVAAPPVPVPSGAPPVPKPSVAAPPVPAPSGAPPVPKPSVAAPPVPAPSSGIPPVPKPAAGVPPVPPPSEAPPVPKPSVGVPPVPPPSTAPPVPTPSAGLPPVPVPTAKAPPVPAPSSEAPSVSTPRSSVPSPHSNASPSPTSSSMASAAPARTSVSRSKSKAERHETSTSSRKSSKSGEHHHHHNEGHADSSSTRTSLAHQDSRKSLHRHLSRSSSRASKKPSIVSTTGPFNESFSAKPVEPCASEKWWLNSTAVPKSVVQMNDSVLYMIKEGITGQDKKYKSVHILFPDYSQTVLTATFNPHNQNITQLSQLQLAPPAQPSKARLDEEYACYGSTILKKARAYQGSMVGDGSAFTFVNSVMSILAHNLEPINKQTFGGVIYKNVGNVTVQQIGEIRPGDIVTFDKAKFSGQKGTLRSKYSLEVGKPMHYGIISEWDVSKLKIRVLEQGRESKKVSVASYKFGDLKSGEVTVWRVMRRSWLGWN

SEQ ID NO: 7652 - protein, 151 aa, Triticum aestivum
MASAEDVKQRQVVEARARNISHNVRCTECGSQSIEDSQADVAVLLRRLIRDEIKSGKSDKEIYKKLEEDFGETVLYAPKFDLQTAAIWLSPVIVGGVAAGVWAYQKHRQRTNVHIMALNLVRRVPLTPREKETMIDILTPPPPARSWWWLK

SEQ ID NO: 7653 - protein, 154 aa, Brassica napus
AMWKPRKFKSIYLMATLYVFTLTLPSASAVYWAFGDQLLNHSNAFSLLPKTRFRDAAVILMLIHQFITFGFACTPLYFVWEKAIGMHHTKSICLRAIVRLPVVVPIWFLAIIFPFFGPINSAVGALLVSFTVYIIPALAHMLTYRTASARRNAA

SEQ ID NO: 7654 - protein, 465 aa, GIBBERELLA ZEAE PH-1
MIATTLFSELKAHLANTQAKTYAPDAPDYKKIEQCFIETPVQTLGVVRLQNGDDVASVVRFCVERNVEFSIRGGGHDCASRTLVDGALVIDMRDIKHVVVSQDKKTARVGGGILSGDLARALGNDGLGTPTATVASVGYTGWATLGGYGLLTSHYGLGVDQIIGAKIVNARGELQDANEELLVGIRGGGGSLGVIVELTIKVYPIDKILSSTIIYDSTDLTAALTSYTQHYEKLLESGQLPVYLQLQPMIAQMPGQPVILMIIATWHGEDKDEGRSWIKNIAGAADCVMEDTKEITIAEMLENNEKLVTWPSYGRVYTLNAKRMTETALKIVGKHCVNAPGGSLIFSYHTLLSSQEPEQKSVFGTRARHHMFEIYSILADKDIAEERVRWAAQVKADLQAEDADNILEGSYISLGSHEDVDLKKVYGKHYETLAALKRKYDLGNVFKHSVPRLVLTGEENGIMEA

SEQ ID NO: 7655 - protein, 308 aa, Datura stramonium
MEEANNKESPYISSILPGWFSEISPLWPGEAHSLKVEKILFQGKSDYQNVMVFQSSTYGKVLILDGVIQLTERDECAYQEMITHLPLCSIPNPKKVLVIGGGDGGVLREVSRHSSVEQIDICEIDKMVIDVSKQFFPNVAIGYEDPRVKLHVGDGVAFLKFVAEGTYDAVIVDSSDPIGPAQELFEKPFFESVARALRPGGVVCTQAESIWLHMHIIEDIVANCRQIFKGSVNYAWTTVPTYPSGVIGFMLCSTEGPAVDFKNPINPVDADDSHTKTRGPLKFYNSEIHSASFCLPSFAKRVIESKGK

SEQ ID NO: 7656 - protein, 317 aa, Datura stramonium
MEVANHNNNNNGCTNDKESPCISSVLPGWFSEISPLWPGEAHSLKVEKILFQGKSDYQDVMVFQSTTYGKVLVLDGVIQLTERDECAYQEMITHLPLCSIPNPKKVLVIGGGDGGVLREVSRHSSVEQIDICEIDKMVVEVAKQFFPDVAVGYEDPRVNLHIGDGVAFLKNVPAGTYDAVIVDSSDPIGPAQELFEKPFFETIARALRPGGVVSTQAESIWLHMHIIEEIVANCREIFKGSVNYAWTTVPTYPSGMIGFMLCSTEGPAVDFKNPINPIDDESHGQTIGPLKFYNSEIHQASFCLPSFAKRVIETKGK

SEQ ID NO: 7657 - protein, 44 aa, Triticum aestivum
VLTLAHHGSLAAAAGGGPRVIIVGAGLSGISAGKRLSEAGITDL

SEQ ID NO: 7658 - protein, 511 aa, Gerbera hybrid cultivar
MNTLQLIFLLFFFPTLLFLYCLPYKRNQNHRRLPPSPPSFPIIGHLHHLGPLIHQSFHALSTRYGSLIHLRLGSVPCVVVSTPDLAKDFLKTNELAFSSRKHSLAIDHITYGVAFAFAPYGTYWKFIKKLFTVELLGTQNLSHFLPIRTHEIRELLRTLMVKSRAKERVNLTEELLKLTNNVISQMMMSIRCSGTNSEADEAKNLVREVTKIFGQFNVSDFIWFCKNIDLQGFKKRYEGTHRRYDALLERIIMGREENRRRGKIKDGEGKDFLDMLLDVLEDGKAEIKITRDHIKALILDFLTAGTDTTAIAIEWALVELINNPNALEKARQEIDQVIGDERLVQESDTPNLPYIQAIIKEALRLHPPIPMLIRKSTENVIVQGYDIPAGTLLFVNIWSIGRNPQCWETPLEFKPHRFLDGGDLKSSLDIKGHNFQLLPFGTGRRGCPGVNLAMRELSVVIANLIQCFDWDVVGERLLNTDERAGLTAPRAVDFVCVPLERGNTLKILGSN

SEQ ID NO: 7659 - protein, 286 aa, Clostridium acetobutylicum ATCC 824
MLDLWYSESHADDTKFSIRVKEHLYSEKTPFQQIDFFKSETFGTFFTLDGYIMMTEKDEFIYHEMITHVPMAVNPKIKKVLIVGGGDGGTSREILRYNTIEKVDMVEIDERVVRLCQKYLTQTSCKLDNDSRLTMHFEDGKEFVKRAETGFYDLILVDSTDPIGPGEGLFTNEFYRDCERILSDDGILINQHESPYYKDYCHEMKRAHSKIKDKFPISMVYQFHMPTYASGHWLFGFASKKYHPLNNLNADSWNSLGLKTKYYNTNLHKGAFALPNYVIDELEKTE

SEQ ID NO: 7660 - protein, 510 aa, Xanthomonas axonopodis pv. citri str. 306
MSADLLKALDLAASNSGTYLGEATWSQATGAGVLQPLNPTTNAVIAEVQATTPEDYELIVQRAQAAFKVWRTTPAPRRGEAVRLCGEALRAHKDALGSLVALEMGKSKPEGDGEVQEMIDIADFAVGQSRMLYGYTMHSERPGHRMYEQYQPLGLVGIISAFNFPVAVWAWNAFLAAICGDICIWKPSNKTPLTAIATMKICNAALKDAGFPDIFFLINDAGTALSEKLVEDTRVPLISFTGSTQIGRVVAEKVARRLGRCLLELGGNNAIILDETADLKLAIPGIVFGAVGTAGQRCTTTRRLIVHASIYDTVLATLVKAYKQLDSKIGDPTDPANLMGPLNSQGAVAQFLDSIAKAKAAGGTVEVGGTAIDRPGNFVLPAIVTGLQNSDAVVQHETFAPILYVMKYSTLDEAIELQNGVPQGLSSSIFTQNLKAAEKFLSAAGSDCGIANVNIGTSGAEIGGAFGGEKETGGGRESGSDAWKVYMRRQTNTINYSDSLPLAQGIKFDL

SEQ ID NO: 7661 - protein, 351 aa, Saccharomyces bayanus
MSSQAIPESQKAIVFYETNGKLEYKDIAVPEPKANEILVHVKYSGVCHSDLHAWRGDWPFQLKFPLIGGHEGAGVVVKLGSNVKGWKVGDLAGIKWLNGTCMSCEYCEVGNESQCPHLDGTGFTHDGTFQEYATADAVQAAHLPENVDLAEVAPILCAGVTVYKALKRANLIPGQWVTISGACGGLGSLAIQYATAMGYRVIGIDEGETKKQLFEGLGGEVFIDFTKEKDIVGAVIKATDGGSHGVINVSVSEAAIEASTRYCRPNGTVVLVGMPAHAYCKSDVFNQVVKSISIVGSCVGNRADTREALDFFARGLIKSPIHLASLSDVPEIFEKMEKGEIVGRYVIDTSK

SEQ ID NO: 7662 - protein, 500 aa, Escherichia coli K12
MMTEPHVAVLSQVQQFLDRQHGLYIDGRPGPAQSEKRLAIFDPATGQEIASTADANEADVDNAVMSAWRAFVSRRWAGRLPAERERILLRFADLVEQHSEELAQLETLEQGKSIAISRAFEVGCTLNWMRYTAGLTTKIAGKTLDLSIPLPQGARYQAWTRKEPVGVVAGIVPWNFPLMIGMWKVMPALAAGCSIVIKPSETTPLTMLRVAELASEAGIPDGVFNVVTGSGAVCGAALTSHPHVAKISFTGSTATGKGIARTAADHLTRVTLELGGKNPAIVLKDADPQWVIEGLMTGSFLNQGQVCAASSRIYIEAPLFDTLVSGFEQAVKSLQVGPGMSPVAQINPLVSRAHCDKVCSFLDDAQAQQAELIRGSNGPAGEGYYVAPTLVVNPDAKLRLTREEVFGPVVNLVRVADGEEALQLANDTEYGLTASVWTQNLSQALEYSDRLQAGTVWVNSHTLIDANLPFGGMKQSGTGRDFGPDWLDGWCETKSVCVRY

SEQ ID NO: 7663 - protein, 463 aa, Triticum aestivum
  unsure (1)..(463): unsure at all Xaa locations
MAASVREGAAAAAAAGHAVDDYDVSDGEMDVDVDVEAGSELQHAGGAGDDGRRDGDGDDEYALLTRITDTSAAEARAGKDIQGIPWERLQITRQDYRKARLEQYKNYENFPQSGELMDKLCKQVESSSKYYEFQYNTRIVKPSILHFQLRNLLWATSKHDVYFMSNSTVGHWSSLSHKMTDVLDFSGHVAPAKKHPGCALEGFTGVQVSTLAVNEGLLVAGGFQGELVCKSLGERDVKFCTRTTLSDNAITNAMDIHRSTSGSLRITVSNNDSGVREFDMERFQLLNHFRFNWPVNHTSVSPDKKLLAVVGDDRDALLVDSRNGKVTSTLVGHLDYSFASAWHPDGVTFATGNQDKTCRVWDIXRNPSTSLAVLRGNIGAIRCIRYSSDGRFLLFSEPADFVHVYSAAECYRKRQEIDFFGEISGISLSPDDESLFVGVCDRVYASLLNYRMVHANGYLDSYM

SEQ ID NO: 7664 - protein, 169 aa, Lycopersicon esculentum
MATQTSNPQSVYDFTVKDAKGKDVDLSIYKGKVLIIVNVASQCGLTNSNYTDMTELYKKYKDQGLEILAFPCNQFGGQEPGNIEDIQQMVCTRFKAEYPIFDKVDVNGDNAAPLYRFLKSSKGGFFGDGIKWNFSKFLIDKEGHVVDRYSPTTSPASMEKDIKKLLGVA

SEQ ID NO: 7665 - protein, 101 aa, Phaseolus vulgaris
MASSMISSPAVTTVNRAGAGAGMVAPFTGLKSLGGFPSRKMNNDITSVANNGGRVQCIQVWPTVGKKKFETLSYLPPLTKQQLAKEVDYLLRKGWVPCLEF

SEQ ID NO: 7666 - protein, 277 aa, Corynebacterium sp.
TVPSIVLNDGNSIPQLGYGVFKVPPADTQRAVEEALEVGYRHIDTAAIYGNEEGVGAAIAASGIARDDLFITTKLWNDRHDGDEPAAAIAESLAKLALDQVDLYLVHWPTPAADNYVHAWEKMIELRAAGLTRSIGVSNHLVPHLERIVAATGVVPAVNQIELHPAYQQREITDWAAAHDVKIESWGPLGQGKYDLFGAEPVTAAAAAHGKTPAQAVLRWHLQKGFVVFPKSVRRERLEENLDVFDFDLTDTEIAAIDAMDPGDGSGRVSAHPDEVD

SEQ ID NO: 7667 - protein, 441 aa, Arabidopsis thaliana
MGKDRISELPDALLIKILSFLPTKIVVATSVFSKQWRPLWKLVPNLEFDSEDYDDKEQYTFSEIVCKSFLSHKAPVLESFRLEFESEKVDPVDIGLWVGIAFSRHLRELVLVAADTGTGTAFKFPSSLCTCNTLETLRLVLLILVDISSPVVMKSLRTLHLELVSYKDESSIRNLLSGCPILEELLVIRGEDSDIEVFTIDEVPSLKRLTINDDHDGQEFWGYVINAPSLKYLLIEDLRCPGFCLNAPELMEANIFDGTSITNDNFLGYLTSVKRLLLNLSPWKITYPTGSIFYQLVSLEMYTREIDWWDLLTLMLEHSPKLQVLKLTDNCVKFHKNGLPGGKWNEPKYVPECLLSHLETFVWRRFDWGREEEKEIATYILKNARRLNKATFSTNPVNSEELDKLKERRKVHNELDGVVRASNSCQFVFKFDTSYHVSDSS

SEQ ID NO: 7668 - protein, 122 aa, Selenomonas ruminantium
MTKEEIMEAIENMTVLELSELVKAMEEKFGVSAAAPVAVAAVGGAAAGAAEEKSEFTVMLASAGDKKINVIKAVREATGLGLKEAKALVDGAPAAVKENVAKAEAEELKAKLEEAGATVELK

SEQ ID NO: 7669 - protein, 439 aa, Triticum aestivum
  unsure (1)..(439): unsure at all Xaa locations
VDMIVVTDGSRILGLGDLGVQGIGIPIGKLDVYVAAAGTSPQKVLPIMLDVGNKXNEELLEDKLYLGLRQPRLEGEEYLAVVDEFMEAVHARWPKAIVQFEDFQMKWAFETLQRYRSRFCMFNDDVQGTAGVALAGLLGAVRAQGRPLADFTKQKIVVVGAGSAGIGVLNMAKHAMLRMPGTHKIGELGEGHNQFWVLDKDGLITKSRKDLDPAVARFARGYGPEEVEDLHEGASLVEVVKKVKPHVLLGLSGVGGIFNEEVLKAMKESDSPCPAIFAMSNPTTKAECTPEDVFQHVGENAVFASGSPFSNVTLSNGRKGYANQANNMYLFPGGGGAALLSGARHISDGMLHAAAECLASYITDDAIRKGILFPSISSIRHITARVGAAVARAAVDEDLAEGCPDLDPRDLRSMSESDTVDYVARKMWYPVYSPLVNDK

SEQ ID NO: 7670 - protein, 85 aa, Triticum aestivum
WLSSATCVAPFQGLKCTGVLRVSRRSNGASLGSVSIGGRIRCMHVWSFEGIKKFETLSYLPPLSTVALLKQVDYLMRSKRVPWLE

SEQ ID NO: 7671 - protein, 286 aa, Streptococcus pneumoniae TIGR4
MDLWFSEVHTPDVKLSLRTAKQLYAGKSEWQDIEVLDTPAFGKILILNGHVLFSDADDFVYNEMTVHVPMAVHPNPKKVLVIGGGDGGVAQVLTLYPELEQIDIVEPDEMLVEVCREYFPDFAAGLDDPRVTIYYQNGLRFLRNCEDDYDIIINDATDPFGHTEGLFTKEFYGNSYRALKEDGIMIYQHGSPFFDEDESACRSMHRKVNQAFPISRVYQAHIPTSPAGYWLFGFASKKYHPVKDFDKEGWKKRQLFTEYYTANLHVGAFMLPKYVEDILEEEEGKK

SEQ ID NO: 7672 - protein, 156 aa, Prunus dulcis
MDVRIAGLDSPLFSTLQHIMDFTDEPDKSFNAPTRTYVRDAKAMASTPADVKEYPNSYVFVVDMPGLKSGDIKVQVEDDNVLLITGERKREEEKEGAKYVRMERRVGKFMRKFVLPENANVEAISAVCQDGVLTVTVEKLPPPEPKKSKTIEVKIA

SEQ ID NO: 7673 - protein, 86 aa, Brassica napus
  unsure (1)..(86): unsure at all Xaa locations
KRRQEVXVYSMXSSXAVVTSPXQATMVAPFTGLXSSSAFPXTRKANNDITSIVXNGGRVNCMQGWXPPXEKKKFETLSYLPDLTXS

SEQ ID NO: 7674 - protein, 140 aa, Campylobacter jejuni subsp. jejuni NCTC 11168
MTKEQIQIIKDCVPILQKNGEDLTNEFYKIMFNDYPEVKPMFNMEKQISGEQPKALAMAILMAAKNIENLENMRSFVDKVAITHVNLGVKEEHYPIVGACLLKAIKNLLNPDEATLKAWEVAYGKIAKFYIDIEKKLYDK

SEQ ID NO: 7675 - protein, 184 aa, Zea mays
LTKEEAAFSPSHPAMQRHVASGRPSGTDGSDFSYRMVVESRYQRVAEGRSRLARLILVQALHLVAGGLLLLLSLSKGAAVNKFAVLSMAAGFLAIVVGELGRMRTMSVLLRLYTSLSSIAVAFSVTCIIRSELFLKVMKQNTEAITSYEMLDAVRVALGILLQMVVIATTTRLLQNMSPPKRAS

SEQ ID NO: 7676 - protein, 435 aa, Aeropyrum pernix K1
MQVMASPPCTTEELSPPPGGSLVEYSGGSLRVPDNPVVAFIRGDGVGPEVVESALKVVDAAVKKVYGGSRRIVWWELLAGHLAREKCGELLPKATLEGIRLARVALKGPLETPVGTGYRSLNVAIRQALDLYANIRPVRYYGQPAPHKYADRVDMVIFRENTEDVYAGIEWPHDSPEAARIRRFLAEEFGISIREDAGIGVKPISRFATRRLMERALEWALRNGNTVVTIMHKGNIMKYTEGAFMRWAYEVALEKFREHVVTEQEVQEKYGGVRPEGKILVNDRIADNMLQQIITRPWDYQVIVAPNLNGDYISDAASALVGGIGMAAGMNMGDGIAVAEPVHGTAPKYAGKDLINPSAEILSASLLIGEFMGWREVKSIVEYAIRKAVQSKKVTQDLARHMPGVQPLRTSEYTETLIAYIDEADLNEVLAGKRG

SEQ ID NO: 7677 - protein, 321 aa, Pseudomonas aeruginosa
MALNPDIAAYLELVGNGRSSGKSLPMHQLTVQQAREQFDQSSALMDPGLDEPLPRVETLFVPARDGTPLPARLYSPQGLSASPPLPGVLYLHGGGYVVGSLDSHDALCASLAERAGCVVLSLAYRLAPEWRFPTAAEDAEDAWCWLAAEAARLGIDPQRLAVAGDSVGGSLCAVLSHRLALRGDASQPRLQVLIYPVTDASRTRQSIERYAVGHLLERDSLEWFYQHYQRSPEDRQDPRFSPLLGVVPADLAPTLLLVAECDPLHDEGIAYAEHLRQGGARVELCVYPGMTHDFLRMGAIVDEADEAKDMIADALVAALAP

SEQ ID NO: 7678 - protein, 309 aa, Mycobacterium tuberculosis CDC1551
MLSTSRIFGVDGLAVDDDIVASRAHMRAICEAMPGPQIHVDVTDLSIPGPAGEIPARHYRPSGGGATPLLVFYHGGGWTLGDLDTHDALCRLTCRDADIQVLSIDYRLAPEHPAPAAVEDAYAAFVWAHEHASDEFGALPGRVAVGGDSAGGNLSAVVCQLARDKARYEGGPTPVLQWLLYPRTDFTAQTRSMGLFGNGFLLTKRDIDWFHTQYLRDSDVDPADPRLSPLLAESLSGLAPALIAVAGFDPLRDEGESYAKALRAAGTAVDLRYLGSLTHGFLNLFQLGGGSAAGTNELISALRAHLSRV

SEQ ID NO: 7679 - protein, 321 aa, Parasitella parasitica
MVVDYLTLDRTEDKMPLRGFGCWKIEKKDAENTIYQAIKIGYRLFDGACDYGNEVEVGRGINKAIKEGLVKREELFIVTKLWNTFHSKQHVRTAFDRQLKDWGLEYFDLYLIHFPIPLQYVDPAVSYPPEWYVPHADKLNFERSPIHECWAEMEKLVQAKLTRNIGVANFNCQAILDLLSYAKIKPAVLQIEIHPLLPQERLVKWVQEQGIQVTAYSSFGPTSYVDLCESGKTYSSLLANADVKSIANKHNANTGQILLRYALDRNIAVIPKSVHEDRMKSNLDILNIQLDQDDRKILNSLKTNQRFNDPMIFGFGLPLFD

SEQ ID NO: 7680 - protein, 190 aa, Glomerella cingulata
MVVATIKCVVVGDGAVGKTCLLISYTTNKFPSEYVPTVFDNYAVTVMIGDEPYTLGLFDTAGQEDYDRLRPLSYPQTDVFLVCFSVTSPASFENVARSGSRGTSPLPGVLLIVAPVTERGSSVREKLSKQKMSPVRKEDGERMAKDLGAVKYVECSALTQFKLKDVFDEAIVAALEPPAPKKKSHKCLVL

SEQ ID NO: 7681 - protein, 506 aa, Brassica napus
MTSINVKLLYHYVITNLFNLCFFPLTAIVAGKAYRLTIDDLHHLYYSYLQHNLITIAPLFAFTVFGSVLYIATRPKPVYLVEYSCYLPPTHCRSSISKVMDIFYQVRKADPSRNGTCDDSSWLDFLRKIQERSGLGDETHGPEGLLQVPPRKTFAAAREETEQVIIGALENLFKNTNVNPKDIGILVVNSSMFNPTPSLSAMVVNTFKLRSNVRSFNLGGMGCSAGVIAIDLAKDLLHVHKNTYALVVSTENITYNIYAGDNRSMMVSNCLFRVGGAAILLSNKPGDRRRSKYELVHTVRTHTGADDKSFRCVQQGDDENGKIGVSLSKDITDVAGRTVKKNIATLGPLILPLSEKLLFFVTFMGKKLFKDKIKHYYVPDFKLAIDHFCIHAGGRAVIDVLEKNLALAPIDVEASRSTLHRFGNTSSSSIWYELAYIEAKGRMKKGNKVWQIALGSGFKCNSAVWVALNNVKASTNSPWEHCIDRYPVKIDSDSGKSETRVQNGRS

SEQ ID NO: 7682 - protein, 118 aa, Ambrosia artemisiifolia
MDCIRILWSVAVGLLLVSWRPTMFAASPTCDTVQNILAPCAGFLTGQEPSKACCTGVNNLNNSRKTKADRVAVCNCIKELTKSIAYDPKRMPLLSTKCGVKPDFPAVDKNLDCSKLPV

SEQ ID NO: 7683 - protein, 222 aa, Saccharomyces cerevisiae
AYSSRFQTPFRRRREGKTDYYQRKRLVTQHKAKYNTPKYRLVVRFTNKDIICQIISSTITGDVVLAAAYSHELPRYGITHGLTNWAAAYATGLLIARRTLQRLGLDETYKGVEEVEGEYELTEAVEDGPRPFKVFLDIGLQRTTTGARVFGALKGASDGGLYVPHSENRFPGWDFETEEIDPELLRSYIFGGHVSQYMEELADDDEERFSELFKGYLADDID

SEQ ID NO: 7684 - protein, 360 aa, Arabidopsis thaliana
MAKISDLSDELLVKILSFLPTKEAVSTSVCRNNGSFFGCGCPNSSSTLVMDLKSWVRIAVSRCVRELSISLHDTTAAVSLPSSLYTCKSLVTLKLYGKKVLLDVPRTVFLPSLKTLQLERLRYSDEDSLRLLLSYCPVLEDLSIVREDYDNLRALVVIVPSLQRLSLEIPGNCSSDGYVIVTPSLKYFKVVDYRESMSYLIEQMPELEEADIVVLQYPEKLLESVTFFKRLSIRVIFNTYTETVYRDGIVFNRLENLKLCICNGDWSKLLIQFLKDSPNLRVLNLLVDDYPSSLGDYEPVRWKNNKSSVPKCLLESLETFEFAGYIGTPEERDFLSYIFKHARCLKSSSILSRPERYHGI

SEQ ID NO: 7685 - protein, 400 aa, Glycine max
  unsure (1)..(400): unsure at all Xaa locations
MVLEATMICIDNSEWMRNGDYSPSRFQAQTDAVNLICGAKTQSNPENTVGVLTMAGKGVRVLVTPTSDLGKILACMHGLEIGGEMNLAAGIQVAQLALKHRQNKKQQQRIIVFAGGPVKHEKKMLEMIGRKLKKNSVALDIVNFGEEDEGKTEKLEALLSAVNNNDTSHIVHVPSGPNALSDVLISTSIFTGDGEGVSGXFCSISCNAINFLIVLFIQPQQKNDAKPIKRGGEEVIFETPFALXGFIFLVAFFAAVTNRGNYLRMFQCVSLHFNWNQCYVPVIEYWMIFXLPMQVIAMSMDDSAISHDVKDTDMSEASASDPDLALALQLSITDSAKDQSSQSDMSKLLADQSFVSSILASLPGVDPNDPSVKDLLASMQNQSEPQQKNDDKPSNEEEKK

SEQ ID NO: 7686 - protein, 308 aa, Pseudomonas sp. B11-1
MPLDKQIAAVLQQFSELPAPDFSQLDAAQYRQFCDNLLPAIPGDPMIEVRNLRVAAAAGELDARLYRPLEEDNLPLLVFFHGGGFVMGNLDTHDNLCRSLASQTEAVVVSVAYRLAPENHFPAAPLDCYAATCWLVEHAAELGVDGRRLALAGDSAGGNLALAVSRLAAQRQGPKISYQCLFYPVTDARCDSQSYEEFAEGYFLTGAMMYWFWQQYLQDTGQGDDPLASPLRAETLADLPPTTLITAEFDPLRDEGEAFALRLQQAGVSVRVQRCEGMIHGFISMAPFVERAAHALSDAAADLRRALN

SEQ ID NO: 7687 - protein, 489 aa, Cucumis sativus
MLGQKQAEEAIVPTTANEVEHGGGKEEGEEADGGEQPQNSVFQMKNLLWHGGSAWDAWFSCASNQVAQVLLTLPYSFAQFGMLSGIIFQIFYGLIGSWTAYLISVLYIEYRSRKEKENVNFKNHVIQWFEVLDGLLGPHWKALGLAFNCTFLLFGSVIQLIGCASNIYYINDHLDKRTWTYIFGACCATTVFIPSFHNYRIWSFLGLGMTTYTAWYLAARALIHGQTEGVTHSGPTKLVLYFTGATNILYTFGGHAVTVTVEIMQSDVETQKFKYIYLMATLYVFTLTLPSASAVYWAFGDELLNHSNAFSLLPKNRFRDAAVILMLIHQFITFGFACTPLYFVWEKVIGMHDTKSLCLRALVRLPVVVPIWFLAIIFPFLGPINSAVGALLVSFTVYIIPAAAHMLTYRKASAKQNAAEKPPFFLPSWTAMYVLNSFIVVWIFVFGFGFGGWATITNFVRQINSFGLFAKCYQCKPSHPPAPPPTHRH

SEQ ID NO: 7688 - protein, 533 aa, Glycine max
MKSLRSILATFVVLLSISLTISLPIEEAFNHCLTQHSQTPNQFPSSIYTYTNGSFTSILESTAQNLRYLLPSVPKPDFIFTPLDDSQVQAAVVCAKKLGIHMRVRSGGHDYEGLSYVSLIEKPFMILDLAKLRAVNVDIARNTAWIQAGATIGEVYYRISEKSAVHGFPAGLCTTLGIGGHITGGAYGSMMRKYGLGADNVLDARIVDANGKVLDRKAMGEDLFWAIRGGGGGSFGVILWWKIKLVPVPQTVTVFTVTKTLEQGGSKLLHRWQQVAPHIDENLFIRVIIQPGNGTVPGKRTVTTSYNALFLGGANRLLQVMKHGFPELGLTRKDCVETSWIESVLYIAGYPDGTAPEVLLQGKSTTKAYFKAKSDFVREVITEKSLNALWKIFLQDDGPLMIWNPYGGKMSRIAESATPFPHRKGVLYKIQHVTGWLDGEKSMAKHMNWMRKFYFYMAPYVSKYPRETYVNYRDLDIGMNQKNNTSLLKASSWGYRYFKGNFNRLVKVKTKVDPSNFFRHEQSIPLLPTGKKE

SEQ ID NO: 7689 - protein, 314 aa, Shigella flexneri 2a str. 301
MLTSGGDAPGMNAAIRGVVRSALTEGLEVMGIYDGYLGLYEDRMVQLDRYSVSDMINRGGTFLGSARFPEFRDENIRAVAIENLKKRGIDALVVIGGDGSYMGAMRLTEMGFPCIGLPGTIDNDIKGTDYTIGFFTALSTVVEAIDRLRDTSSSHQRISVVEVMGRYCGDLTLAAAIAGGCEFVVVPEVEFSREDLVNEIKAGIAKGKKHAIVAITEHMCDVDELAHFIEKETGRETRATVLGHIQRGGSPVPYDRILASRMGAYAIDLLLAGYGGRCVGIQNEQLVHHDIIDAIENMKRPFKGDWLDCAKKLY

SEQ ID NO: 7690 - protein, 354 aa, Ammi majus
MAEMKTSPSQDEEAGVVAMQLATSTVLPMILKSAIELDLLNTIAKAGPGNYLSPSDLASKLLLSNPDAPVMLARILRVLATYKVLGCKRGEVEWLYCWTPVCKYLSNNEDGASIAPILLVHQDKVTIKSWYHLTDAVRDGGTAFNKAHDMSIFEYASQDPQFNKAFNRSMRGHSTITMKKILETYKGFEGLKSIVDVGGGTGATLNMIISKYPTIKGINFDLPHVVGDAPSLPGVEHVGGNMFASVPKGDAIFLKWIFHSWGDEECLKILKKCHQALGDNKKVIVAEFILPEDPGGSDSATKSAVHLDAIMLAYVPGGKERTEKEFESLAKRAGFKSFTKVCCAFNTWIMEFSK

SEQ ID NO: 7691 - protein, 463 aa, Streptomyces avermitilis MA-4680
MRPHVSHPHELVVLDPATEEVVATVPAATPQDVDAAVVRASKAQVRWAALAPGERARLLRRFAVVVDEHLEELARLEVREAGHVIGNARWEAGNVRDLLDYAAGGVERLTGRQIPVPGGLDITILEPLGVVGVIAPWNFPMPIAAWGTAPALAAGNAVILKPAETTPLTALRLAELALEAGLPEHLFQVLPGAGPVAGNALVEHPGVAKIVFTGSTAVGKQVWAKGSALLKRVTLELGGKSPNIVFADADVEAAAAAAPMAFLDNSGQDCCARTRILVQRSVYDRFLALLAPAVESVAVGDPLDERTAMGPLISKVQLERVRSYVPAGAPALRGKAPEGPGFWFPPTVLTDVDPHAPVAVEEVFGPVAVVLPFEDEADAVRLANATEYGLAGSIWTRDVGRALRVSGAVRAGNLSVNSHSSVRYWTPFGGFKQSGIGRELGPDALTAFTETKNVFISTEGPAQ

SEQ ID NO: 7692 - protein, 420 aa, Saccharomyces cerevisiae
MSIKGDSPSSTNASSSPKSTYSIQSDDKANLGSGNVDIRTDNSQQDSNNRRDIVVVTRVASEETLESQSSTSSMGIRPESSFNYEDASNQARVEMNNRVHGSNMNTINKYYPVRFPKNNERQLSDTNNLNEKVQGTHTVQSSTQEDKILDGDTSNSQVTPSLNIAEFPTDKLLKMLTALLTKIIKSNDRTAATNPSLTQEIENGRCLALSDNEKKYLSPVLGFRGKHVPQIGLDQYFQRIQKYCPTTNDVFLSLLVYFDRISKRCNSVTTTPKTNTAKHESPSNESSLDKANRGADKMSACNSNENNENDDSDDENTGVQRDSRAHPQMFVMDSHNIHRLIIAGITVSTKFLSDFFYSNSRYSRVGGISLQELNHLELQFLVLCDFELLISVNELQRYADLLYRFWNNAKAQSQALVTGM

SEQ ID NO: 7693 - protein, 568 aa, Zea mays
NSRVDPRVRLYEPWEVVDDEGQPFTMFDPFWNRCLSMPYDPPAPLLPPKRINSGDLSMCPSEDLIFEDESERGSNALLARAWTPGWQNADKALTAFLNGPLADYSVNRKKADSASTSLLSPHLHFGELSVRKVFHLVRMKQLVWSNEGNHAAEESCTLFLRSIGLREYSRYLSFNHPSSHERPLLAHLRFFPWVVDESYFKIWRQGRTGYPLVDAGMRELWATGWLHDRIRVVVASFFVKVLQLPWRWGMKYFWDTLLDADLESDALGWQYITGSLPDGRELDRIDNPQFEGYKFDPHGEYVRRWIPELARLPTEWIHHPWDAPVSVLQAAGIELGSNYPLPIVELDAAKGRLQAALSEMWQLEAASRATMNNGTEEGLGDSSEVLFPQELQMEVDRQPAPAEAAANVHVHVHVPMPARRRGDQMVPTMTTSSLNRAGTEVSADLVVANSEEEDTRAQVPFHAHLHLHPRAEAPPAARRTNNGARQHDAFQQPRNHRRDALLAPSASEASSSWTGREGAVVPVWSPPAASGHSDAFAADEADVSSRSYLGRHPQSHRLMNWSQLSQSS

SEQ ID NO: 7694 - protein, 136 aa, Triticum aestivum
  unsure (1)..(136): unsure at all Xaa locations
MAPAVMASSATTVAPFQGLKSTAGLPVGRRSSGSXQQASSNGGRIRCMQVWPIEGIKXKFENLSYLATLSKXGLLKQVHYLIRSXKWVAXLXFNKXGFXXRXXNXSPGYXEGRYWAMXELPMFRCTDPNKVLXEGE

SEQ ID NO: 7695 - protein, 513 aa, Vicia sativa
MELETLISWLLFSTSLFWFLFLATKTKSKPPKTPSSTTNTPIPKSYPIFGSAFSLLANFHRRIQWTSDILQTIPSSTFVLHRPFGARQVFTAQPAVVQHILRTNFTCYGKGLTFYQSINDFLGDGIFNADGESWKFQRQISSHEFNTRSLRKFVETVVDVELSDRLVPVLSQASNSQTTLDFQDILQRLTFDNICMIAFGYDPEYLLPSLPEIPFAKAFDESSQLSIERLNALIPLLWKVKRFLNIGVERQLKEAVAEVRGLATKIVKNKKKELKEKALQSESESVDLLSRFLSSGHSDESFVTDMVISIILAGRDTTSAALTWFFWLLSKHSHVENEILKEITGKSETVGYDEVKDMVYTHAALCESMRLYPPLPVDTKVAVHDDVLPDGTLVKKGWRVTYHIYAMGRSEKIWGPDWAEFRPERWLSRDEVGKWSFVGIDYYSYPVFQAGPRVCIGKEMAFLQMKRVVAGIMGRFRVVPAMVEGIEPEYTAHFTSVMKGGFPVKIEKRSPLV

SEQ ID NO: 7696 - protein, 272 aa, Griffithsia japonica
RFVQACTRRLMSDVPVGVFISGGLDSSLVASIAKKHLPDGYVFHSFSCGLEGSPDVRAAQKVADYLGTKHHVLTFTVEDGISALRDVIYHLETYDVTTIRASTPMYLLSRLCKQYVKVVLSGEGADEVYGGYLYFHNAETERDFHEETVRRVKLLYTSDVLRGDRSTAAQSLELRVPFLDRDFLDVSMSFSAQDKVTQKGKRIEKWPMRQAFAKEFCGEEFLPDDILWRSKEQFSDGVGYNWIDGLKEFCDKEVSDKLLANASDKFPHQPPK

SEQ ID NO: 7697 - protein, 222 aa, Mesembryanthemum crystallinum
WLVDSKGLIVSSRKNSLQEFKKPWAHEHEPLGDLSSAVKAIKPTVLIGSSGVGRTFTKEVIEAMASFNEKPLIMALSNPTTQSECTAEEAYTWSKGRAIFASGSPFNSVEYEGKTFVPGQSNNAYIFPGFGLGLVISGAIRVHEDMLLAASEALAGQVTQENYDKGMIYPPFSNIRKISAAIAANVAAKAYDLGLATRLPRPENLVKYAENCMYSPVYRSFR

SEQ ID NO: 7698 - protein, 238 aa, Prunus tomentosa
AHYKSEADVGNAIAEAIQSGLVKREELFITSKASNHGHVVEACKSSLKKLQLDYLDLYLVHYPLATKHSGVGTTASLLDENKVLDIDVTVSLETTWHDMEKTVDLGLVRSIGLSNYELFLTRDCLSYAKIKPQVSQFETHPYFQRESLVRFCKKHGVVPMAHTPLGGATANVKAFGSISPLEDPVLIGLAKKYQKSVAQIALRWNIERGTPVIPKSSKVERLKENLEILNFKLEKEDI

SEQ ID NO: 7699 - protein, 252 aa, Prunus padus
AHYKSEADVGNAIAEAIQSGLVKREELFITSKASNHGHVVEACKNSLKKLQLDYLDLYLVHYPLATKHNGVGTTASLLDENKVLDIDVTVSLETTWHDMEKTVSLGLVRSIGLSNYELFLTRDCLSYAKIKPQVSQFETHPYFQRESLVRFCKKHGVIPMAHTPLGGATANVKAFGSISPLEDPVLLGLAKKYQKSVAQIALRWNIERGTPVIPKSSKVERLKENLEVLNFKLEKEDIELIDTIDKKSRTTL

SEQ ID NO: 7700 - protein, 347 aa, Magnaporthe grisea 70-15
MSDLPKTMKALQYSKPKEFAVVDVPLPELRDDDVLVKVKACGVCGTDLHIHEGEFIAKFPLIPGHETVGVVAAVGKDVKDFKVGDRVSADNAELCGHCFYCRRGESLLCENWAGHGTTLSGGFAEYCAYPQGKVFKFNNMTDVEATLIEPASCACHGLDKIKPRLGSSVLMFGAGPTGLMLAQLLRQNGCSQVTIAAPAGLKMDLARSLDAADTYVDLSREDSGPQLEQLKKDNPYGFDIVIEATGSVKILEDSINYCRRGGTLVVYGVYGDQDKVSWKPTKIFGDEIRIIGSFSEVFMFPQTIDYLDNGKVKTKGIVNKTFKLEQFGEALESIKNKSAIKAAIVFD

SEQ ID NO: 7701 - protein, 413 aa, Burkholderia cepacia R1808
MPIYKGTMGPDVIDIRKLYGQTGKFTYDPGFMSTASCNSAITYIDGDKGELLYRGYPIDNLAQNADFLESCYLLLKGELPNAAQKKEFVDTVTKHTMVHEQMHFFFRGFRRDAHPMAILVAAVGALSAFYHDSLDINDPRHREVSAIRMIAKLPTLVAMAYKYSIGQPFVYPKNSLSYSANFMHMMFSNPCEEYKVNDVLVRALDRILILHADHEQNASTSTVRLAGSSGANPFACIAAGIACLWGPAHGGANEAALNMLEQIGSPDNIPEFIKQVKDKNSGVKLMGFGHRVYKNYDPRAKLMRETCYEVLNELGLHDDPLFKLAMQLEKIALEDEYFVSRKLYPNVDFYSGIVQRALGIPTSMFTCIFAMARTVGWIAQWNEMIADPEQKIGRPRQLFIGDTPREAKPLNAR

SEQ ID NO: 7702 - protein, 252 aa, Prunus caroliniana
AHYKSEADVGNALAEAFETGLVKREELFIISKASNHGHVVEACKDSLKKLQLDYLDLYLVHYPLATKHSGVGTTASLLDKNKVLDIDVTVSLESTWHDMEKTVSLGLVRSIGLSNYELFLTRDCLSYAKIKPQVSQFETHPYFQRETLVRFCRKHGVCPMAHTPLGGATANVKAFGSMSPLEDPVLHGLAKKYKKSVAQIALRWNIERDTPVIPKSSKVERLKENLEVLNFKLEKEDIELINTIDKKSRTTL

SEQ ID NO: 7703 - protein, 299 aa, Corynebacterium glutamicum ATCC 13032
MLLHPDAQFYIDTLPTLSAEEQVSFGKDAPVSEADATHVATDQDIAGVPVRVYTPLSGAGDLPCLVYFHGGGWSGGTLNMIDATVHSLVVGLPIIAISVDYRLAPAHPFPAAIDDAFAVVSAVLDGVSGLSIDTSRVAIGGDSAGGNIAAVTAQQLRERAVGSTPVLAHQVLIFPVTDVSTTSTPSYLTFGKDCYLTKDAMERYIEQYADGHDRTDPRLSPLLASDLSDLPPTTIVYGECDVLAHEVRAYGQALLEAGNSVTMTEFKGQIHAFINLGGISSDARAARRLIRAELEAALC

SEQ ID NO: 7704 - protein, 305 aa, GIBBERELLA ZEAE PH-1
MKLSAVTLLTLATGIIAAPVADVSKEVRSYASYEPPKDTYEQPKTPKQEKPKKPEYNQPKAPKPHHEKPKAPKPHHDKPKHYAPPHHEKPKAPKPHHEKPKTPSYEKPKAPKPHHEKPKKPETPKKPEYNQPKAPKPHHEKPKKPETPKKPAYEQPKAPKPHHEKPKKPETPKKPEYNQPKAPKPHHEKPKKPETPKKPEYNQPKAPKPHHEKPKKPETPKGPSYEQPKAPKPHHEKPKKPETPKKPEYNQPKAPKPHHETPKAPKPHHETPKKPSYEQPKPKQEQPKKPSYEAPKQPAYEAPHY

SEQ ID NO: 7705 - protein, 468 aa, Glycine max
  unsure (1)..(468): unsure at all Xaa locations
MGACVXTPQGCVGGRLSSSKKKTKKRRREGLRRRVTSRLWLPDCSFANPTFQGSIEEAWFDSIAVFDSDCDDDYQSVPDDVVSLSGIEGGSVSSFPSSRDATRGVSTDQVQKQKELLAGSEAARNVIDSQREPVFLDEISSVDANSNKDDGLLDNCGILPNNCLPKPTTKLSFKWKEGHGNATLFSSKMLLQRPIAGSQVPFCPIEKKMLDCWSQIDASTFKVRGVNYFKDKKKDFAPNYPAYYPFGVDVFLSPRKVDHIARFVELPVMSSSAKFPPILVVNVQVPLYPATLFQGETDGEGMSIVLYFKLSESYSKELPQTFQESIRRLMDDEVEKVKGFPVDTIAPFRERLKILGRVINLEDLHLSAAERKLMQAYNEKPVLSRPQHEFYMGENYFEIDLDMHRFSYISRKGFEAFLDRLKVCTLDVGLTIQGNKQEELPEHVLCCIRLNGIDYMNYQQLGLTQDPL

SEQ ID NO: 7706 - protein, 223 aa, Prunus caroliniana
  unsure (1)..(223): unsure at all Xaa locations
GLVKREELFITSKASNHGHVVEACKNSLKKLQLDYLDLYLVHYPLATKHSGVGTTASLLDXNKVLDIDVTVSLETTWHDMEKTVSLGLVRSIGLSNYELFLTRDCLSYAKIKPQVSQFETHPYFQRESLVKFCKKHGVTPMAHTPLGGATANVKSFGSISPLEDPVLLGLAKKYKKSVAQIALRWNIXRDTPVIPKSSKVERLKENLEVLNFKLGKEDIELIN

SEQ ID NO: 7707 - protein, 122 aa, Rickettsia prowazekii str. Madrid E
MIQMQSILEVADNSGAKKVMCIKVLGGSHHMMAKLGDVIVVSIKEAIPGGKVKKGDVYKGVIVRTKTGVVRSDGSTIKFDKNALVLLNKQDEPIGTRVFGPVTRELRAKKYVRIMSLAEEVL

SEQ ID NO: 7708 - protein, 251 aa, Prunus laurocerasus
AHYKSEADVGNAIAEAIQRGLVKREELFITSKASNHGHVVEACKNSLKKLRLDYLDLYLVHYPLATKHSGVGTTASLLDENKVLDIDVTVSLESTWHDMEKTVSLGLVRSIGLSNYELFLTRDCLSYAKIKPQVSQFETHPYFQRETLVRFCRKHGVCPMAHTPLGGATANVKAFGSISPLEDPVLRALAKKYKKSVAQIALRWNLDRNTPVIPKSSKIERLKENLEVLNFKLEKEDIELINSIDKNPGPL

SEQ ID NO: 7709 - protein, 131 aa, Zea mays
AGSGPYPPPPAFRLQTEDLRYHHQLSRHIAQLGRIEAMASRLLAAASSSSASSSPLARLISSRRMAGAADHHGSTKVNMWQEPLNPGNWKEEHFVLASLAMWGAIIYGGLKAFGGKKEVKTEAGPAAAPAH

SEQ ID NO: 7710 - protein, 225 aa, Glycine max
MGDVMGPDLISDLPQSIIESILVQLPIRDAVRTSILSSKWRYKWASITQLVFDDKCVPFSNDREAVEKSVVKFITRVLFLHQGPIHKFQITNSKLQSCPEIDQWILFLSRNDIKELVMELGEGEFFRIPSSLFNCGKLTRLDLSRCEFDPPHSFKGFVCLRSLNLHQVLISPDAIESLISRCPLLESLSLSYFDNLALTICAPNLKYLYLEGEFKDICLEDTPLL

SEQ ID NO: 7711 - protein, 370 aa, Agrobacterium tumefaciens
MTVRSVFLLPGDGIGPEAMTEVRKLIEYMNSAHNAGFTVSEGLVGGSAYDAHGVAISDADMEKALAADAILFGAVGGPKWDGVPYEHRPEAGLLRLRKDLELFANLRPAICYPALAAASSLKPELVEGLDILIVRELTGGVYFGEPKQIIDLGNGQKRGIDTQIYDTFEIERIASVAFELARSRDNRVCSMEKRNVMKSGVLWNQVVTETHAAKYKDVQLEHMLADAGGMQLVRKPKQFDVIVTDNLFGDMLSDVAAMLTGSLGMLPSASLGAPDAKTGKRKAMYEPVHGSAPDIAGKSIANPIAMIASFAMCLRYSFNMVDEATKLEAAIANVLDKGIRTADIMADGCRQVGTSDMGDAVLAEFKALSA

SEQ ID NO: 7712 - protein, 319 aa, Wolinella succinogenes
MRIGLVCSGGDCAGMNPATKKFVEYSLELGYEPYFIREGLEGLIEGKIEPATLKEVSGILHKGGTILQSSRSKRFFDPAFRLQAYQNLQRHSIEALVTLGGDGSFRAMEVLAKEHSLLYAGIPATIDNDIRASDYALGVDSALNVILESTDRLRDTAESFRRAFVVEVMGRDCGYLALASAIACGAEVCIIPEMGYSLQSLGARLKEELGTGKRRYVLAIVSEGAKASSEVVSWLKEEVGIETRITILGHVQRGGSPSVYDRLMGFRFMQKALDSLSLGKSGVVVLREGRVEFLSSQEASSAPASLPLDMVRLASRLMF

SEQ ID NO: 7713 - protein, 178 aa, Triticum aestivum
  unsure (1)..(178): unsure at all Xaa locations
MAPTVMASSATSVAPFQGLKSTAGLPVSRRSNGASLGSVSNGGRIRCMQVWPIEGIKKFETLSYLXPPLSTEAXLLKQVDYLIRSKWVPCLEFSKVGFIFREHNASPGYYDGRYWTMWKLPMFGCTDATQVINEVEEVKKEYPDAYVPHXSGFDNMRQVQCVSFIAFKPPGCEESGKA

SEQ ID NO: 7714 - protein, 148 aa, Zea mays
EAGGAGSGLNGAVQAKGTGADDGSAKRLPPCCVKARAAAPESEARCHATVVSGWFTEPRSRCGEANSLKVEKILYQGKSLYQEVLVFESSTYGKVLVLDGIVQLTDKDECAYQEMITHLPLCSIPSPKKVCLLISKIGLIVKLVCRHA

SEQ ID NO: 7715 - protein, 147 aa, Triticum aestivum
  unsure (1)..(147): unsure at all Xaa locations
MGERVKGTVKWFNVTKGFGFISPEDGSEDLFVHQSAIKSDGYRSLNENDTVEFEVITGDDGRTKASDVTAPGGGALSGGSRPGDGGGDRGGRGGYGGGGYGGGGGGGGYGGGGGGYGGGGGGYGGGGGGXGCYNAQEAISDCQRVGR

SEQ ID NO: 7716 - protein, 169 aa, Zea mays
LEIGGEANLTAAIQVAQFALKNRQNKQLRQRIIVFVGSPVIDEKNWLEPEKLEALVAAVNSGGNSHIIHIPAGRDLSDALFSDSAAAARGASGFEFDVDPNVDPELALVLLISMEEERLRQEAAAKKAREESSKTENEGQSSTSNGDIVMADAEPEPNSYTEDKGLHCK

SEQ ID NO: 7717 - protein, 427 aa, Coxiella burnetii
MTELTGVSIVTYQHIKVPSQGEKITVNKAVLEVPDRPIIPFIEGDGIGIDIAPVMKNVVDAAVEKSYAGKRKIEWMEIYAGEKATKVYGKDNWLPDETLEAIKGYQVAIKGPLTTPVGGGIRSLNVALRQQLDLYVCLRPVRYFTGVPSPVKTPEKVNMVIFRENSEDIYAGIEWPAGSPEAVKLINFLQNEMGVKKIRFPETAGIGIKPVSKEGTSRLVRRAIQYAIDNDRDSVTLVHKGNIMKFTEGAFKDWGYEVAVKEFGAKPLDGGPWHVFENPKTGQKITIKDVIADAFLQQILLRPAEYSVIATLNLNGDYISDALAAEVGGIGIAPGANLSDTVGLFEATHGTAPKYAGQDKVNPGSLILSAEMMLRYLGWKEAADLVVQGIEGAIESKTVTYDFARLMTGAKEVSTSQFGKAIIKHIL

SEQ ID NO: 7718 - protein, 444 aa, Desulfitobacterium hafniense DCB-2
MYDIQIINAKIQTEQGQIEGNITINNGKIEAISSSPLANVKQTIDAEGLLVLPGFIDQHVHFMDPTETDREDFIHGTTAAAMAGVTTVIEHTHSRPILTVEDFLKYKSYIEERSLVDFGFAAHIWPGQYDQLEKLWQEGIAYFKVFTCTTHGVPGQNSASLHGAFTKVASFGGRVLVHCEDDSLTAENEKVLKGNNRDDGHVIQEWRSKAAEAISVANVCFIAKETGAHVTIAHLSHPDVVGIVQEAKEAGAKVLAEICPQYLYLEENTLAARGSFGKFTPPSRSARESQELMELVGKGELDILASDHAPSTKRHKDSGSIWTSPFGLPGIDTTSSVMLTAVNNNKLSLAGFVRMYAENPAKALGLYPKKGCIRVGADADLVLVDMKKKWTIQDDGICSKAKWSPFNGFQCTGKPVMTLLRGQIIMSEGKLLGKPGDGNYVKRA

SEQ ID NO: 7719 - protein, 387 aa, Zea mays
MAGGAGNGSNEAVQAKGSGGDGSAAKPLPPCCVKARSAAPESEAKCHATVVSGWFTEPRSHCGKATKVQYYNNPMWPGEAHSLKVENILYQGKSPYQEVLVFESSTYGKVLVLDGIVQLTDKDECAYQEMITHLPLCSIPSPKKVLVIGGGDGGVLREISRHSSVESIDICEIDQLVIDICKEFFPHLSVGFEDPRVQLHVGDAVEFLRNAPEGTYDAIIVDSSDPIGPAQELVEKPFFETIARALRPGGVLCNQAESMWLHTHLIQDMLSICRETFKGSVRYAWASVPTYPSGVIGFLLCAKDGPPVNFLTPVNPIEEVEGATKAGREIRFYNSEMHMAAFVLPTFAKRELEAYCASTETEQAEEVAATAPQKLTAAPKRGITTAS

SEQ ID NO: 7720 - protein, 427 aa, Coxiella burnetii
MTELTGVSIVTYQHIKVPSQGEKITVNKAVLEVPDRPIIPFIEGDGIGIDIAPVMKNVVDAAVEKSYAGKRKIEWMEIYAGEKATKVYGKDNWLPDETLGAIKEYQVAIKGPLTTPVGGGIRSLNVALRQQLDLYVCLRPVRYFTGVPSPVKTPEKVNMVIFRENSEDIYAGIEWPAGSPEAVKLINFLQNEMGVKKIRFPETAGIGIKPVSKEGTSRLVRRAIQYAIDNDRDSVTLVHKGNIMKFTEGAFKDWGYEVAVKEFGAKPLDGGPWHVFENPKTGQKITIKDVIADAFLQQILLRPAEYSVIATLNLNGDYISDALAAEVGGIGIAPGANLSDTVGLFEATHGTAPKYAGQDKVNPGSLILSAEMMLRYLGWKEAADLVVQGIEGAIESKTVTYDFARLMTGAKEVSTSQFGKAIIKHIL

SEQ ID NO: 7721 - protein, 414 aa, Arabidopsis thaliana
MGLCWGSPSDSPPTTTPSSTGNISSVGTFKSSNNTTTTGTSRGSNISSKSGFSVASGEDAYPDGQILPIPNLRIFSLAELRASTRNFRSENVLGEGGFGKVFKGWLEDKTPGKQSNGTVIAVKKLNAESFQGFEEWQCEVNFLGRVSHPNLVKLLGYCLEGEELLLVYEYMQKGSLENHLFRKGSAVQPLSWEIRLKIAIGAAKGLAFLHASEKQVIYRDFKASNILLDGSYNAKISDFGLAKLGPSASQSHITTRVMGTHGYAAPEYVATGHLYVKSDVYGFGVVLAEILTGLHALDPTRPTGQHNLTEWIKPHLSEKRKLRSIMDPRLEGKYPFKSAFRVAQLALKCLGPEPKNRPSMKEVVESLELIEAANEKPLERRTTRASPSIRQQQGHYRPQQLSSFRPRHTVSRAH

SEQ ID NO: 7722 - protein, 441 aa, Glycine max
MSQPKIKRRVGKYEVGRTIGEGTFAKVKFARNSETGEPVALKILDKEKVLKHKMAEQIRREVATMKLIKHPNVVRLCEVMGSKTKIYIVLEFVTGGELFDKIVNHGRMSENEARRYFQQLINAVDYCHSRGVYHRDLKPENLLLDAYGNLKVSDFGLSALSQQVRDDGLLHTTCGTPNYVAPEVLNDRGYDGVTADLWSCGVILFVLVAGYLPFDDPNLMNLYKKISVAEFTCPPWLSFSARKLITRILDPDPTTRITIPEILDDEWFKKDYKPPVFEENGETNLDDVEAVFKDSEEHHVTEKKEEQPTAMNAFELISMSKGLNLENLFDTEQGFKRETRFTSKSPADEIINKIEEAAKPLGFDVQKKNYKMRLANVKAGRKGNLNVATEIFQVAPSLHMVEVRKAKGDTLEFHKFYKKLSTSLDDVVWKTEDDMQMRETK

SEQ ID NO: 7723 - protein, 427 aa, Coxiella burnetii
MTELTGVSIVTYQHIKVPSQGEKITVNKAVLEVPDRPIIPFIEGDGIGIDIAPVMKNVVDAAVEKSYAGKRKIEWMEIYAGEKATKVYGKDNWLPDETLEAIKEYQVAIKGPLTTPVGGGIRSLNVALRQQLDLYVCLRPVRYFTGVPSPVKTPEKVNMVIFRENSEDIYAGIEWPAGSPEAVKLINFLQNEMGVKKIRFPETAGIGIKPVSKEGTSRLVRRAIQYAIDNDRDSVTLVHKGNIMKFTEGAFKDWGYEVAVKEFGAKPLDGRPWHVFENPKTGQKITIKDVIADAFLQQILLRPAECSVIATLNLNGDYISDALAAEVGGIGIAPGANLSDTVGLFEATHGTAPKYAGQDKVNPGSLILSAEMMLRYLGWKEAADLVVQGIEGAIESKTVTYDFARLMTGAKEVSTSQFGKAIIKHIL

SEQ ID NO: 7724 - protein, 275 aa, Bacillus cereus ATCC 10987
MHIPTTTLHNGVKMPMIGLGVYKAKEGDEVKQAVKTALEVGYRSIDTATVYENESGVGEAVRESGIPREEIFITTKVWNDDQGYEETLEAFEKSLKKLQMDYVDLYLIHWPIRGKYVDTYRALEKLYEEGKVRAIGVSNFHKHHLELLLPNCKVKPMVNQVELHPMLTQFELRNFCQGEQIQMEAWSPLMRGGEVFQHPIIQAIATKYEKTPAQVILRWDIQSGVVTIPKSVTPSRIQENFSIFDFSLTEEEMTQINTLNRNLHVGTNPDKYDTL

SEQ ID NO: 7725 - protein, 114 aa, Triticum aestivum
  unsure (1)..(114): unsure at all Xaa locations
MSMPSTREDTIKMKCRVLQENVGFAHRYGKRGHSKSHFGDIDIFDGKXLVDMVPXYKKGDRPHGDRLTYQLIEITEDGYVRLITRXGNTEDDLKLCKEDVLLGQIKTGFDDGKD

SEQ ID NO: 7726 - protein, 494 aa, Zea mays
MTRASTIDFGRRKQSELFGSGPLRPANIIRNKFPTYKNGSNGIVIKLADGPEMPSLKEAVAKEATDLLDRCQRPSVRELTMKFEKGFNTATLLSNEAKWRHAALLERDILLKDLKSVLESLRGRVGGKNKDEIEESLSMVDILAIELSKREDELLRQKTEVTKIADTLKLASTDAKRIIDEERANARLEIESAKASVQKIQSALKEQEIFSQRTGKQDADELKEEVQEARRVKMLHCPSKAMDIENEIQVLRDQLAEKSSDSLRLLKELELHRSYGENDMPLYELKGLETLGSTLHIVVHDCASVDFSNSSIQWFRIQPEGSKKEIISGATKPVYAPEPHDVGRYIQAEVKSGGQISVAKTAGSIDPAAGLVEYVETLVMNPETDYNVVILQVNGVAQAADSVHVLCIGRLRMRLAKEKTVVAKEFYSSSMQLCGVRGGGDAAPQAIFWQPRKGLSFVLAFETTRERNSALMLARRFAIDCNIILGGPGDKTSW

SEQ ID NO: 7727 - protein, 98 aa, Triticum aestivum
  unsure (1)..(98): unsure at all Xaa locations
MSAXXLTNVAVLXNPTSFVNPFXFEXSYECLVALEDDLEWKLIXVGSAEXENXDXXLDSXXXXPXXXXXPYRCSGGPDFQRSARRTIGTACIHNFPQV

SEQ ID NO: 7728 - protein, 254 aa, Oemleria cerasiformis
SEADVGQAFAEAFKTGLVKREELFITSKANHGHVVEACKNSLKKLQLDYLDLYLVHYPLATKHSGVGTTASLLDENKVLDIDVTVSLEETWRGMEKAVSLGLTRSIGLSNYELFLTRDCLSYAKIKPAVSQFETHPYFQRESLVRFCQKHGVVATAHTPLGGATANTKYFGSISPLGDPVLHDVAKKYQKSVAQICLRWNIERNTPVIPKSSKVERLKENLQVLEFKLEKEDIELINGIDKKSRSTLPSLSWGL

SEQ ID NO: 7729 - protein, 160 aa, Griffithsia japonica
PIVRLPIHPTPNSRRPQPLSTAPPSPASRLSFPPRRRRLCPPAIGAAASASVYDLSAFKNGRPYPFSPLSGKLTLFVNVASYCALTPQYEGLVALHTAYQPKGFEVVASPCNQFGRQEPQPDDEICAFVKERFGARFVLLDKLVVNERPADGRSPRSTVS

SEQ ID NO: 7730 - protein, 264 aa, Sorbus aucuparia
AHYKSEADVGEALTEAFKTGLVKREELFITTKIWNSDHGHVVEACKNSLEKLQLDYLDLYLVHYPMPTRHNAIGKTASLLGEDKVLDIDVTVSLQQTWEGMEKAVSLGLVRSIGLSNYDLFLTRDCLAYSKIKPAVSQFETHPYFQRDSLIKFCIKHGVLPTAHTPLGGAAANKDMFGSVSPLDDPVLNDVAKKYGKSVAQICLRWGIQRKTAVIPKSSKIQRLKENLEVLEFQLSDEDMQLIYSIDRKYRTSLPSKTWGLDVS

SEQ ID NO: 7731 - protein, 242 aa, Triticum aestivum
MASLVFLVALLLSCSSMSSAARYLEEVVPKKEYPPHPIVPELPKPELPPHPAVPELPKPEPPHPLVPEVPHPMVPETPKEPEVSHPVVPEVPKHELPPHPAMPELPKPELPHPVVPEVPKETEAPHPIVPKVPKDHDLPHPAVPETPKEPEVPHPVVPEVPKEHELPHPPVPEVPTEPHVPHPEVPKEPELPHPVVPEVPKHEMPPFPKAELPPKPEVHFPGASGQAMIGLATSAHCPLSKY

SEQ ID NO: 7732 - protein, 438 aa, Oryza sativa (japonica cultivar-group)
MAHDLHDDLEFVSGDDDDYYLEFDHDPGHGFHTSAATSASQTLIGALYFRTSRWTIPWERLNYSRNQYREMRLRQYKNYENLTMPRDGLEKECKQVERKDTFYDFHLNTRLVKSTIVHFQLRNLLWATSKHDVYLMQNYSVMHWSSLLQRGKEVLNVAGQLAPSQNVRGAMPLSRVQISTMAVKGNLMVAGGFQGELICKYVDKPGVAFCTNLTGNNNSITNAVDIYQAPNGGTRITTANNDCVVRTFDTERFSLISHFAFPWSVNNTSVSPDGKLLAVLGDSSDCLIADSQSGKEMARLKGHLDYSFSSAWHPDGRVVATGNQDRTCRVWDVRNMSRSVAVLEGRIGAVRGLRYSPDGRFLAASEPADFVHVYDAAAGYADAQEIDLFGEIAGVAFSPAGNNGGGGEALFVSIADRTYGSLLEFHRRRRHGYLDCYV

SEQ ID NO: 7733 - protein, 279 aa, GIBBERELLA ZEAE PH-1
MSVVSLLGVNVLNNPAKFVDKYEFEITFECLEQLEKDLEWKLTYVGSATSDQYDQELDSLLVGPIPVGVNKFIFEADAPNISRIPDAEILGVTVILLTCAYDGREFIRVGYYVNNEYDSEELNAEPPVKPIIERVKRNVLAEKPRVTRFAIKWDSEASAPAEYPPEQPEADLVADGDEYGAEEADEEAAEEAEEEAKSKGKASSGEDAEMAGVEHEGENAADEDELSDDGSVDIEGESEDDLEEEEEGEGEGEADGDAMEVDSAEKPATSTAKPVSVAS

SEQ ID NO: 7734 - protein, 265 aa, Kageneckia oblonga
AHYKSEADVGEALAEAFKSGLVKREELFITTKIWNSDHRYVAEACKNSLEKLQLQYLDLYLVHYPLPTRHNAIGKTASLLGEDKVLDIDVTIPLQQTWEGMEKTVALGLVRSIGLSNYDLFLTRDCLAYSKIKPAVSQFETHPYFQRDSLVKFCMKHGVLPTAHTPLGGAAANKDMFGSVSPLDDPVLNDVAKKYGKSVAQICLRWGIQRKTAVIPKSSKIQRLKENLEVLEFQLSDEDMQLIYSIDKKYRTSLPSKTWGLDVYA

SEQ ID NO: 7735 - protein, 307 aa, Triticum aestivum
MKTLLILTILAMAITISTANMQVDPSGQVQWPQQQLVPQPQQPLSQQPQQAFPQPQQTFPHQPQQQQPQQPFPQQPQQPFPQTQQPQQPFPQQPQQPFPQTQQPQQPFPQFQQPHQPFPQPQQQFPQPQQPQQSFPQQQRPFIQPSLQQRLNPCKNILLQQCKPASLVSSLWSIIWPQSDCQVMQQQCCQELAQIPQQLQCAAIHSVVHSIIQQQQQQQQQQGMHILLPLSQQQQLGQGTLVQGQGIIQPQQLAQLEAIRSLVLQTLPTMCNVYVPPECSIHQGTICQHQGIIRAPFASIVAGIGGQ

SEQ ID NO: 7736 - protein, 265 aa, Vauquelinia californica
AHYKSEADVGEALAEAFKTGLVKREELFITTKIWNSDHGHVVEACKNSLEKLQLDYLDLYLVHYPMPTRHNAIGKTASLLGEDKVLDIDVTISLHTTWEGMKKAVSLGLVRSIGLSNYDLFLTRDCLAYSKIKPAVSQFETHPYFQRDSLVKFCMKHGVLPTAHTPLGGAAANKDMFGSVSPLDDPVLNDVAKKYGKSVAQICLRWGIQRKTAVIPKSSKIQRLKENLEVLKFQLSDEDMQLIHGIDRKYRTSLPSKTWGLDVYA

SEQ ID NO: 7737 - protein, 497 aa, Pseudomonas aeruginosa PAO1
MTTLTRADWEARAKDLKIEGRAFVNGEYSNAASGETFDCLSPVDGRFLAKVASCDLADAEQAVKVARNAFDSGAWSRLAPAKRKQTMIRFADLLLENAEELALLETLDMGKPISDSLHIDVASAANSLRWSAEAIDKIYDEVAATPHAELGLVTREPVGVVAAIVPWNFPLLMSCWKLGPALATGNSVILKPSEKSPLTAIRIAQLAVEAGIPKGVFNVLPGYGHTVGKALALHMDVDTLVFTGSTKIAKQLMVYAGESNMKRVWLEAGGKSPNIVFADAPDLKAAAEAAAGAIAFNQGEVCTAGSRLLVERSIKDKFLPLVIEALKGWKPGNPLDPETNVGALVDTQQMNTVLSYIEAGHNDGAKLVAGGKRTLEETGGTYVEPTIFDGVTNAMKIAREEIFGPVLSVIEFEDAEEAVRIANDTPYGLAAAVWTSNLSKAHLTAKALRAGSVWVNQYDGGDMTAPFGGFKQSGNGRDKSLHAFDKYTELKATWIKL

SEQ ID NO: 7738 - protein, 112 aa, Bartonella sp. tm6313nv
ANEACLKMLQEIGSVKRIPEFIARAKDKNDPFRLMGFGHRVYKNYDPRAKIMQQTCHEVLKELNIQDDPLLDIAIELEKIALNDEYFVEKRLYPNVDFYSGITLKALGFPTE

SEQ ID NO: 7739 - protein, 444 aa, Pseudomonas aeruginosa PAO1
MTMNDEPQSSSLDNFWMPFTANRQFKARPRLLESAEGIHYIAQGGRRILDGTAGLWCCNAGHGRREISEAVARQIATLDYAPPFQMGHPLPFELAARLTEIAPPSLNKVFFTNSGSESADTALKIALAYQRAIGQGTRTRLIGRELGYHGVGFGGLSVGGMVNNRKAFSANLLPGVDHLPHTLDVARNAFTVGLPEHGVEKAEELERLVTLHGAENIAAVIVEPMSGSAGVVLPPKGYLQRLREITRKHGILLIFDEVITGFGRVGEAFAAQRWGVVPDLLTCAKGLTNGSIPMGAVFVDEKIHAAFMQGPQGAIEFFHGYTYSGHPVACAAALATLDIYRRDDLFQRAVELEGYWQDALFSLRDLPNVVDIRAVGLVGGVQLAPHADGPGKRGYDVFERCFWEHDLMVRVTGDIIAMSPPLIIDKPHIDQIVERLAQAIRASV

SEQ ID NO: 7740 - protein, 483 aa, Pseudomonas fluorescens
MKTKLFINNAWIDSSDQQTFEGKDPVNSEVMTERANATVTDAIKAAQVAEEAFKTWKDVGPSECRRLLLKVADVMESKTPKFIEVMAMEVGASALWAGFNVHASANVFREAASLATQIQGETIPTDKAETLSMTLRQPVGPILSIVPWNGTAVLAARAIAYPLVCGNTVVFKGSEFIPATHALITQCVQEAGMPAGVLNYLNSSPDRSPEIADALISAKEIRRINFTGSTRVGSIIAQKAAQHLKRCLLELGGKSPLIVLDDANIDAAVKAAVFGSFLFQGQICMYTERLVVDEKIADEFVSKFVEKTKRLSAGDLCVTGDCIIGPMVSLNSGYRINGLFKDAIDKGSKVVCGGMVQGAVMPSTILDHVKSDMRIYDEETFGPITVVIRCKGEAEAIRIANDSVYGLSSGVFGRDINRALRVGMSIEYGCVHINGSTVQNEVQAPYGGTKNTGYGRFDGRAVVDEFTELKWLTIEPFEQQYPF

SEQ ID NO: 7741 - protein, 284 aa, Crocosphaera watsonii WH 8501
MDYSQDNNGTGSPTDQGLLDDPAYTIEQALNNLQQTDDPSARYYAAWWIGRFRVNEPVAIQGLLTALEDNSDRSPDGGYPLRRNAAKALGKSGDVSVVPALIEALQCPDYYVRESAAQSLEMLGDQQAIPGLISLLNGGVAAAQQVEGKPHLIQPYEAILEALGTLQAKNAISLIEPFVEHFVPKVKFAAARALYQLTNDPVYGEILVTALQETTLQVRRSALMDLGAIGYLGGVDAIGNTLAENSLKLISLKGILEHHLSQQEMPQELNDDLVHLMNVMDSLL

SEQ ID NO: 7742 - protein, 265 aa, Amelanchier alnifolia
AHYKSEADVGEALAEAFNTGLVKREELFITTKIWNSDHGHVVEACKNSLEKLQLDYLDLYLVHYPMPTRHNAIGKTASLLGEDKVLDIDVTISLQQTWEGMEKAVTLGLVRNMGLSNYDLFLTRDCLAYSKIKPAVSQFETHPYFQRDSLVKFCIKHGVLPTAHTPLGGAAANKDMFGSVSPLDDPVLNDVAKKYGKSVAQICLRWGIQRKTAVIPKSSKIQRLKENLEVLEFQLSNEDMQLINGIDRKYRTSLPSKTWGLDVYA

SEQ ID NO: 7743 - protein, 315 aa, Actinobacillus pleuropneumoniae serovar 1 str. 4074
MSQLDALREMTVVVADTGDIEAIKQYQPQDATTNPSLILSASALPQYASLIDDAVAYAKARSDDKAQQLIDAEDKLAVNIGLEILKIVPGRISTEVDARLSYDTKATIEKARQIMKLYNDAGISNDRILIKIASTWQGIRAAEVLEKEGINCNLTLLFSQAQARACAEAGVYLISPFVGRILDWYKAAEKKEYAPAEDPGVISVTNIYNYYKQYGYQTVVMGASFRNVGEITEIAGCDRLTIAPPLLKELAESNAPLVRKLEYKGEVKTRPAPLTEAEFYWQHNQDPMAVEKLAEGIRKFAVDIEKLEAMLAAKL

SEQ ID NO: 7744 - protein, 175 aa, Triticum aestivum
MAPAVMASSATSVAPFQGLKSTAGLPVSRRSSSAGLSSVSNGGRIRCMQVWPIEGIKKFETLSYLPPLSTEALLKQVDYLIRSKWVPCLEFSKVGFVFREHNSSPGYYDGRYWTMWKLPMFGCTDATQVLNEVEEVKKEYPDAYVRVIGFDNLRQVQCVSFIAFRPPGCEESGKA

SEQ ID NO: 7745 - protein, 175 aa, Zea mays
QMEVDRQPAPAEAAANVHVHVPMPARRRGDQMVPTMTTSSLNRAGTEVSADLVVANSEEEDTRAQVPFHAHLHLHPRAEAPPAARRTNNGARQHDVFQQRRNHRRDALLAPSASEASSSWTGREGAVVPVWSPPAASGHSDAFAADEADVSSRSYLGRHPQSHRLMNWSQLSQSS

SEQ ID NO: 7746 - protein, 464 aa, Glycine max
  unsure (1)..(464): unsure at all Xaa locations
MDRRSHPTGTVSTRNILFNKYEIGKLLGQGNFAKVYHGRNLSTNESVAIKVIKKERLQKERLVKQIKREVSVMRLXVRHPHIVELKEVMANKAKIFMVVEYVKGGELFAKVAKGKMKEDVARKYFQQLISAXVDFCHSXRGVTHRDLKPENLLLDENEDLKVSDFGLSALPDQRRSDGMLLTPCGTPAYVAPEVLKKKGYDGSKADIWSCGVILFALLSGYLPFQGENVMRIYSKSFKADYAFPEWISPAAKNLISNLLVVDPQKRYSIPDIMKDPWFQIGFLRPIAFSMKESALEDNIDFSGDDVPSPGSDDGNSSSNNEDGELTGAKPARPSYNAFEIISSLSHGFDLRNLFETRKRSPSMFISKFSASAVMAKLEGVAKKLNFRVTGKKEFMVRMQGATEGRKGKLAMTVEVFEVAPEVAVVEFSKSAGDTLEYLNFCEDQVRPSLRDIVWSWQGDANCHQ

SEQ ID NO: 7747 - protein, 427 aa, Coxiella burnetii
MTELTGVSIVTYQHIKVPSQGEKITVNKAVLEVPDRPIIPFIEGDGIGIDITPVMKNVVDAAAEKSYAGKRKIEWMEIYAGEKATKVYGKDNWLPDETLEAIKEYQVAIKGPLTTPVGGGIRSLNVALRQQLDLYVCLRPVRYFTGVPSPVKTPEKVNMVIFRENSEDIYAGIEWPAGSPEAVKLINFLQNEMGVKKIRFPETAGIGIKPVSKEGTSRLVRRAIQYAIDNDRDSVTLVHKGNIMKFTEGAFKDWGYEVAVKEFGAKPLDGGPWHVFENPKTGQKITIKDVIADAFLQQILLRPAEYSVIATLNLNGDYISDALAAEVGGIGIAPGANLSDTVGLFEATHGTAPKYAGQDKVNPGSLILSAEMMLRYLGWKEAADLVVQGIEGAIESKTVTYDFARLMTGAKEVSTSQFGKAIIKHIL

SEQ ID NO: 7748 - protein, 140 aa, Triticum aestivum
  unsure (1)..(140): unsure at all Xaa locations
MAPTVMASSATSVAPFQGLKSTAGLPVSRRSNGASLGSVSNGGRIRCMQVWPIEGIKKFETLSYLPPLSTEALLKQVDYLIRSKWVPCLEFSKVGFIFREHNASPGYYDGRYWTMWKLPXFGCTDATXVXNEVEESRRST

SEQ ID NO: 7749 - protein, 427 aa, Coxiella burnetii
MTELTGVSIVTYQHIKVPSQGEKITVNKAVLEVPDRPIIPFIEGDGIGIDITPVMKNVVDAAVEKSYAGKRKIEWMEIYAGEKATKVYGKDNWLPDETLEAIKEYQVAIKGPLTTPVGGGIRSLNVALRQQLDLYVCLRPVRYFTGVPSPVKTPEKVNMVIFRENSEDIYAGIEWPAGSPEAVKLINFLQNEMGVKKIRFPETAGIGIKPVSKEGTSRLVRRAIQYAIDNDRDSVTLVHKGNIMKFTEGAFKDWGYEVAVKEFGAKPLDGGPWHVFENPKTGQKITIKDVIADAFLQQILLRPAEYSVIATLNLNGDYISDALAAEVGGIGIAPGANLSDTVGLFEATHGTAPKYAGQDKVNPGSLILSAEMMLRYLGWKEAADLVVQGIEGAIESKTVTYDFARLMTGAKEVSTSQFGKAIIKHIL

SEQ ID NO: 7750 - protein, 345 aa, Sulfolobus solfataricus P2
MVEGFSPMKSVIMENGKAVIKELPLPKLQQGDVLVKMKACGLCGTDIEKICGQYTASQPILGHEPTGIIQESTVDWLKPGDRVFAHHHVPCYECYYCKKGSPTMCPYYRKTNLDPGGFSEYFRVPAWNVARGGVLKLPDNVSFEEGAFIEPLATVIRAQKRVAIDNGDTVFIVGIGPMGLLHAMMAKVNKAGVIIASDVSDFRTEFGYKVGINYSLNAKKVNVVDEVKRLTDGRGADVTIIASGSPSAIVSGLNATRKGGRVLLFGVPYKGTILNYDISDLLNNEISIIPSNAAVEEDTKEALAIIANKKIDVTKLITHRFSLDEFNEAVRIGKEGNAIKVIIYS

SEQ ID NO: 7751 - protein, 359 aa, Candida rugosa
MSKSIVLLPGDHVGTEVVAEAVKVLKAIERTTPGTSFSFSTHLIGGAAIDATGVPLPDEALEAAKASDAVLLGAVGGPKWGTGDVRPEQGLLKIRKELGLYANLRPCSFASSKLVDLSPLKREIVEGTDFVVVRELVGGIYFGERKEDDGSGVASDTETYSVPEVERITRMAAFLALQHNPPQTVWSLDKANVLASSRLWRKTVTRVMTEEFPTVPFQHQLIDSAAMILVQKPTKLNGVVLTSNMFGDIISDEASVIPGSLGLLPSASLASLPDTNTAFGLYEPCHGSAPDLPAGKVNPLACILSAAMMLRLSLDNAAAADRIEQAVREVIDSGVATADLGGSSSTGEVGDAIVKALEK

SEQ ID NO: 7752 - protein, 427 aa, Coxiella burnetii
MTELTGVSIVTYQHIKVPSQGEKITVNKAVLEVPDRPIIPFIEGDGIGIDITPVMKNVVDAAVEKSYAGKRKIEWMEIYAGEKATKVYGKDNWLPDETLEAIKEYQVAIKGPLTTPVGGGIRSLNVALRQQLDLYVCLRPVRYFTGVPSPVKTPEKVNMVIFRENSEDIYAGIEWPAGSPEAMKLINFLQNEMGVKKIRFPETAGIGIKPVSKEGTSRLVRRAIQYAIDNDRDSVTLVHKGNIMKFTEGAFKDWGYEVAVKEFGAKPLDGGPWHVFENPKTGQKITIKDVIADAFLQQILLRPAEYSVIATLNLNGDYISDALAAEVGGIGIAPGANLSDTVGLFEATHGTAPKYAGQDKVNPGSLILSAEMMLRYLGWKEAADLVVQGIEGAIESKTVTYDFARLMTGAKEVSTSQFGKAIIKHIL

SEQ ID NO: 7753 - protein, 427 aa, Coxiella burnetii
MTELTGVSIVTYQHIKVPSEGEKITVNKAVLEAPDRPIIPFIEGDGIGIDITPVMKNVVDAAVEKSYAGKRKIEWMEIYAGEKATKVYGKDNWLPDETLEAIKEYQVAIKGPLTTPVGGGIRSLNVALRQQLDLYVCLRPVRYFTGVPSPVKTPEKVNMVIFRENSEDIYAGIEWPAGSPEAVKLINFLQNEMGVKKIRFPETAGIGIKPVSKEGTSRLVRRAIQYAIDNDRDSVTLVHKGNIMKFTEGAFKDWGYEVAVKEFGAKPLDGGPWHVFENPKTGQKITIKDVIADAFLQQILLRPAEYSVIATLNLNGDYISDALAAEVGGIGIAPGANLSDTVGLFEATHGTAPKYAGQDKVNPGSLILSAEMMLRYLGWKEAADLVVQGIEGAIESKTVTYDFARLMTGAKEVSASQFAKAIIKHIL

SEQ ID NO: 7754 - protein, 427 aa, Coxiella burnetii
MTELTGVSIVTYQHIKVPSEGEKITVNKAVLEVPDRPIIPFIEGDGIGIDITPVMKNVVDAAVEKSYAGKRKIEWMEIYAGEKATKAYGKDNWLPDETLEAIKEYQVAIKGPLTTPVGGGIRSLNVALRQQLDLYVCLRPVRYFTGVPSPVKTPEKVNMVIFRENSEDIYAGIEWPAGSPEAVKLINFLQNEMGVKKIRFPETAGIGIKPVSKEGTSRLVRRAIQYAIDNDRDSVTLVHKGNIMKFTEGAFKDWGYEVAVKEFGAKPLDGGPWHVFENPKTGQKITIKDVIADAFLQQILLRPAEYSVIATLNLNGDYISDALAAEVGGIGIAPGANLSDTVGLFEATHGTAPKYAGQDKVNPGSLILSAEMMLRYLGWKEAADLVVQGIEGAIESKTVTYDFARLMTGAKEVSASQFAKAIIKHIL

SEQ ID NO: 7755 - protein, 227 aa, Camellia sinensis
GDHILDAQQKGEINEDNVLYIVENINVAAIETTLWSIEWGIAELVNHPQIQKKLRHELDTMLGLGVQITEPDTYKLPYLQAVVKETLRLRMAIPLLVPHMNLHDAKLSGYDIPAESKILVNAWWLANNPDNWKNPEEFRPERFLEEEAKVEANGNDFRYLPFGVGRRSCPGIILALPILGITLGRLVQNFELLPPPGQAKIDTAEKGGQFSLHILKHSTIVLKPRSF

SEQ ID NO: 7756 - protein, 112 aa, Bartonella weissi
ANEACLKMLQEIGSTEKIPEFIERAKDKNDPFRLMGFGHRVYKNYDPRAKLMQKTCHEVLKELNIQDDPLLDIAMELEKIALNDEYFIEKKLYPNVDFYSGITLKALGFPTE

SEQ ID NO: 7757 - protein, 297 aa, Saccharomyces cerevisiae
MSGPPPPYEEQSSHLYGQPASSQDGNAFIPEDFKYSTVVISCEPIIRQRFMHKVYSLLSCQLLASLSFCYWASVSTSLQNFIMAHIALFYICMVVSLVSCIWLAVSPRPEDYEASVPEPLLTGSSEEPAQEQRRLPWYVLSSYKQKLTLLSIFTLSEAYCLSLVTLAYDKDTVLSALLITTIVVVGVSLTALSERFENVLNSATSIYYWLNWGLWIMIGMGLTALLFGWNTHSSKFNLLYGWLGAILFTAYLFIDTQLIFRKVYPDEEVRCAMMLYLDIVNLFLSILRILANSNDDN

SEQ ID NO: 7758 - protein, 265 aa, Amelanchier alnifolia
AHYKSEADVGEALAEAFNTGLVKREELFITTKIWNSDHGHVVEACKNSLEKLQLDYLDLYLVHYPMPTRHNAIGKTASLLGEDKVLDIDVTNFLQQTWEGMEKAATLGLIRNIGLSNYDLFLIRDCLAYSKIKPAVSQFETHPYFQRDSLVKFCIKHGVLPTAHTPLGGAAANKDMFGSVSPLDDPVLNDVAKKYGKSVAQICLRWGIQRKTAVIPKSSKIQRLKENLEVLEFQLSNEDMQLINGIDRKYRTSLPSKTWGLDVYA

SEQ ID NO: 7759 - protein, 170 aa, Glycine max
SPSVRGSLSDLTCDSDGKIDKFINGESSLPLHEREGGRTYYLGMFLGGAYEEALGGVHNLFGGPSVIRVSQSDGPHSFAVTRAVPGPSCGDVLRVMQHQPELMFETLKHRAQEYVSHDNAAAVLAAGLARTFDRMPYLLPLSSFVADDVAAAAAVPAGEDDEEQWSYICA

SEQ ID NO: 7760 - protein, 265 aa, Gillenia stipulata
AHYKSEADVGEVLAEAFKTGLVKREELFITTKIWNSDHGHVVEACKNSLEKLQLDYLDLYLVHYPMPTKHNGVGKTASLLGEDKVLDIDVTISLQQTWEGMEKTVSLGLVRSIGLSNYELFLTRDCLAYSKIKPAVSQFETHPYFQRDSLVKFCLKHGVLPTAHTPLGGAAANKDMFGSVSPLDDPVLNDVANKYGKSVAQICLRWGIQRKTAVIPKSSKIQRLKENLEVLEFQLSEEDMQLIYSIDRKYRISLPSKTWGLDVYA

SEQ ID NO: 7761 - protein, 160 aa, Manihot esculenta
  unsure (1)..(160): unsure at all Xaa locations
MSDEEHHFESKADAGASKTFPQQAGTIRKNGYIVIKNRPCKVMEVSTSKTGXHGHAKCHFVGIDIFNGKKLEDIVPSSHNCDVPHVNRTDYQLIDISEDGFVSLLTETGNTKDDLRLPTDENLLSQIKDGFAEGKDLVVSVMSAMGEERICSLKDIGPKN

SEQ ID NO: 7762 - protein, 398 aa, Pneumocystis carinii
MQSEAYQTNLQCSGETSHKLGIKEAKSTSKTSLIDQIPILTLSIPSRRSIPHIFDATRITDNSDNSHNENQDFKGILEENGSPDPFSYNRSYFTKIMLDEVWQRSAHSDEIIELEKLGEGISGSVSKCILKNTGTLFALKTILVDTNPEIQQQILRELSINRTCSSEYIVQYYGTFVDEASSNISMAMEYCAGGSLDRLYKKVRANGARIGEYPILKIAENALKGLNYLHTRKIIHRDIKPSNILMTLEGQAKLCDFGVSGELVSSMAKTFTGTSYYMAPERIKGETYSITSDIWSLGLTLMEISQNRFPFPPEGPPLVPIELLNYIVNISNFELVDEPDNKIKWSEDFKHFLKTCLERDGAKRPNSQRMLEHPWVMKHSIIKIDMAKWIKQILELPL

SEQ ID NO: 7763 - protein, 379 aa, Nicotiana tabacum
MGEALNVMESVRSIVFKESENLEGSATKIEGYDFNKGVNYAELFKSMASTGFQAANLGDAIQIVNQMLDWRLSHEQPMEDCSEEERDVAYRESVTCKIFLGFTSNLVSSGVRDTIRYLVQHRMVDVVVTTAGGIEEDLIKCLAPTYKGDFSLPGAVLRSKGLNRIGNLLVPNDNYCKFENWIIPIFDQMYEEQIKEKVLWTPSKVIARLAKEINDETSYLYWAYKNRIPVFCPGLTDGSLGDMLYFHSFKKGDPDNPDLNPGLIIDIVGDIRAMNSEAVHAGSRKTGMIILGGGLPKHHVCNANMMRNGADFAVYINTAQEFDGSDSGARPDEAVSWGKIRGGAKTVKVHCDATIAFPILVAETFAAKRKELSHIRCQV

SEQ ID NO: 7764 - protein, 166 aa, Triticum aestivum
  unsure (1)..(166): unsure at all Xaa locations
MAPTVMASSATSVAPFQGLKSTAGLPVSRRSNGASLGSVSNGGRIRCMQVWPIEGIKKFETLSYLPPLSTEALLKQVDYLIRSKWVPCLEFXSKVGFIFREXHNASPGYYDGRYWXTMWKLPMFGCTDATQVINEVEEVKKEYPDXYXRIIGFDNIRQVQCVSSSP

SEQ ID NO: 7765 - protein, 227 aa, Spiraea cantoniensis
HGHEVEACKNSLQKLQLDYLDLYLVHYPLATRHRVGTTASLLDENKVLDIDVTVSLESTWRGMEKAVELGLVRSIGLSNYELFLTRDCLSYAKIKPAVSQFETHPYYQRESLVRFCQKHGICATAHTPLGGGTANTKYFGSTSPLGDPVLNEVAKKYKKSVAQICLRWNIDRCTAVIPKSSKVERLKENLQVLDFKLEKEDIELIBTIVRKRRTTLPSLSWGLDVYA

SEQ ID NO: 7766 - protein, 151 aa, Ralstonia metallidurans CH34
MILWRVALFFFLFTAPVWASDQAAEDRMLGIASELRCLVCQNESIAASQADLAADLRQQIREQIRAGKSDDDIRTYMVERYGDFVLYRPPLKPTTMLLWFGPFVVLALGIVVLVMNLRSRNRKPKHAALNEEERRHADALLAPPHNVLDET

SEQ ID NO: 7767 - protein, 219 aa, Holodiscus microphyllus
WNSDHGHVVEACKNSLKKLQLDYLDLYLVHYPLATKHSVGNTASLLDENKVLDIDVTVSLESTWHAMEKAVKLGLVRSIGLSNYELFLTRDCLSYAKIKPAVSQFETHPYYQRDSLVKFCQKHGVCATAHTPLGGATANTKYFGSVSPLGDPVLNEVAKKYQKSVAQICLRWGIERKTAVIPKSSKPERLKENLQVLEFKLEREDIELINSIDRKYRTS

SEQ ID NO: 7768 - protein, 389 aa, Lactobacillus plantarum
MTMQHVFPTYQRFPFAITDGQGVHLTDNHGKTYLDFTAGIGVCNFGYHQPQIQAAVTQQLTHIWHTSNLYENELQDAVAGLLANGEERLVYFANSGTEANEAALKLARKYTGKTGILAFQHSFHGRTYGAMSMTGNPHIQAGYAPLVPGITFATYNDDAALDKITPELAAVILEVVQGEGGVFAGQTAWLQAVNAKCQATGVLLIIDEVQTGIGRTGYRMAYEGYGLDPDIYTVAKGLANGLPVGAMVGRRQLATAFGPGSHGSTFAGNAVAMAAAKRVLTQLTPALLTTVRAHAKLVWQSLATQVEPIPVVKQITGKGLMIGIHLDEQIPVNQVITRLQVEGLLTLSAGDNTLRLLPPIVMQPADLLAGIALIAKVLTTLTTEVTTNE

SEQ ID NO: 7769 - protein, 250 aa, Glycine max
KSLGVKMVISGEGSDEIFGGYLYFHKAPNKEEFHQETCRKIKALHKYDCLRANKSTFAWGLEARVPFLDKEFIRVAMNIDPECKMIKKEEGRIEKWALRRAFDDEEHPYLPKHILYRQKEQFSDGVGYGWIDGLKAHAEKHVTDRMMLNAANIFPFNTPTTKEAYHYRMIFERFFPQNSARLTVPGGASVACSTAKAVEWDAAWSNNLDPSGRAALGVHISAYENQNNKGVEIEKIIPMDAAPLGVAIQG

SEQ ID NO: 7770 - protein, 278 aa, Silene vulgaris
EAHSLKVEKILFQGKSKLQDVMVFQSSTYGKVLILDGVIQLTERDECAYQEMISHLPLCSIPNPKKVLVIGGGDGGVLREVARHSSVEHIDICEIDEMVVTVSKEFFPEVAVGYDDPRVNLHIGDGVAFLKAATEGSYDAVIVDSSDPIGPAKELFEKPFFESVAKALRPGGVVCTQAESIWLHMHIIEDIVSNCREIFKGSVNYAWTTVPTYPSGVIGFMVCSTEGPAVDFRNPVNPIDKMEDEKRPLKFYNAEIHSAAFCLPSFAKRIIEAKANST

SEQ ID NO: 7771 - protein, 624 aa, Triticum aestivum
  unsure (1)..(624): unsure at all Xaa locations
MRGLRRSSLARIASTTRAASARQCSSSILGGARAAPYCTMAGRSGEEADAAMAGVATGGVEDAYGEDRATEDQPVTPWAVCIASGHSLLRDPRHNKGLSFTEKERDAHYLRGLLPPVVLSQELQEKRLLQNVRQLDVPLQRYMFLMDLQERNERLFYKLMIDNVEELLPVVYTPTVGEACQKYGSIFRRSQGLYISLKDKGRVLEVLRNWPEKSIQVIVVTDGERILGLGDLGCQGMGIPVGKLALYTALGGVRPSACLPITIDVGTNNEELLNDEFYIGLRQKRATGQEYTELLDEFMVAVKQNYGQKVLVQFEDFANHNAFTLLEKYKATHLVFNDDIQGTAAVVLAGLMAGLKFAGGTLADHTFLFFGAGEAGTGIAELVALEISMQSKTSQEEARKNIWLVDSKGLIVSSRKDSIQPFKKLYAHEHEPVKDLLSAIKDIKPTALIGSAGVGQSFTKEVIEAMSSINKRPIILALSNPTSKSECTAEQAYSWSQGRAIFGSGSPFDPVKYNDKLFVPAQANNAYIFPGFGLGVVTSGAIRVKDDMVLAAAEALAEQVTAEHFDKGLIYPPFSSIRKISANIAARVGXKAYDLGLASHLPRPKDLVKYAESCMYSPIYRSYR

SEQ ID NO: 7772 - protein, 106 aa, Glycine max
  unsure (1)..(106): unsure at all Xaa locations
NEEGREIAEKLGVRNLFWDWDLPRTREGFCGFKGSMTASVVRGCAFCPHADDIWMVTASPYVVERPXLFNGVMSKHAHMMLEYYLSSCLNWDAFVMSGEHIKGSIP

SEQ ID NO: 7773 - protein, 278 aa, Silene latifolia
EAHSLKVEKILFQGKSKYQDVMVFQSSTYGKVLILDGVIQLTERDECAYQEMISHLPLCSIPNPKKVLVIGGGDGGVLREVARHSSVEHIDICEIDEMVVTVSKEFFPEVAVGYDDPRVNLHIGDGVAFLKAATEGSYDAVIVDSSDPIGPAKELFEKPFFESVAKALRPGGVVCTQAESIWLHMHIIEDIVSNCREIFKGSVNYAWTTVPTYPSGVIGFMVCSTEGPAVDFKNPVNPIDKTEDEKRPLKFYNAEIHSAAFCLPSFAKRIIEAKANST

SEQ ID NO: 7774 - protein, 427 aa, Coxiella burnetii
MTELTGVSIVTYQHIKVPSEGEKITVNKAVLEVPDRPIIPFIEGDGIGIDITPVMKNVVDAAVEKSYAGKRKIEWMEIYAGEKATKVYGKDNWLPDETLEAIKEYQVAIKGPLTTPVGGGIRSLNVALRQQLDLYVCLRPVRYFTGVPSPVKTPEKVNMVIFRENSEDIYAGIEWPAGSPEAVKLINFLQNEMGVKKIRFPETAGIGIKPVSKEGTSRLVRRAIQYAIDNDRDSVTLVHKGNIMKFTEGAFKDWGYEVAVKEFGAKPLDGGPWHVFENPKTGQKITIKDVIADAFLQQILLRPAEYSVIATLNLNGDYISDALAAEVGGIGIAPGANLSDTVGLFEATHGTAPKYAGQDKVNPGSLILSAEMMLRYLGWKEAADLVVQGIEGAIESKTVTYDFARLMTGAKEVSASQFAKAIIKHIL

SEQ ID NO: 7775 - protein, 238 aa, Zea mays
  unsure (1)..(238): unsure at all Xaa locations
IIDKSIHTAYVRAIRSAQHFIYIENQYFLGSSYEWPSYVNSGADNLIPMELALKIATKIRAGERFAVYVVIPMWPEGVPTSASVQEILFFQAQTMEMMYGVIARELKAMNIEDAHLQDYLNXYCLGNREEPSTDGSPESDKSTDKSAAGLARKHRRFMIYVHAKGMIVDDEYVILGSANINQRSLAGSRDTEIAMGAYQPHHAWSSKKGHPHGQVYGYRNSLWAEHLXMVDDHFKEPS

SEQ ID NO: 7776 - protein, 227 aa, Arabidopsis thaliana
MPVHDEQEHEVYGGDIPEEEEGEMDTEEYEEHGGEEGAAAGDEELEPGSSSRDLEDMKKRIKEIEEEAGALREMQAKAEKDMGASQDPSGGVSAAEKEEVDSRSIYVGNVDYACTPEEVQQHFQSCGTVNRVTILTDKFGQPKGFAYVEFVEVEAVQNSLILNESELHGRQIKVSAKRTNVPGMRQFRGRGRPFRPMRGFMPGVPFYPPYAYGRVPRFRRPMRYRPY

SEQ ID NO: 7777 - protein, 353 aa, Triticum aestivum
MGSISDDEAACIYAMQLAAAAVLPMTLKNAIELGMIEILVGAGGKMLSPSEVAAQLPSTANAEAPAIVDRMLRLLASHNVVSCEVEEGKDGRLARRYGTAPVCKWLSPDEDGVSLAPMVLLNDKVMLESWYHLKDTVLNGGLPFEKAYGMTAFDYQGTDPRFNRVFNEAMKTHSMIITKKLLEFYKGFDGVGTLVDVGGGVGATIHTILCRYPSIEGVNFDLPHVISEAPSFAGVHHIGGDMFKKVPSGDAILMKWILHDWNDEHCTTLLSNCYDALPAHGKVVIVEYILPVKPDETATAQRSFEADMIMLTHTPGGKERYLREYEELARSAGFASVKATYVYSNIWVIELNK

SEQ ID NO: 7778 - protein, 509 aa, Glycine max
  unsure (1)..(509): unsure at all Xaa locations
MGSDNHQNLEFLKEIGLGSSNIGSYINGQWKATGSSVTSVNPSNNQSIAQVTEATLQDFEEGLQACSEAAKTWMTIPAPKRGEIVRQIGEALRAKLDPLGRLVSLEMGKILPEGIGEVQEIIDMCDYCVGLSRQLNGSIIPSERPDHMMFEVWNPLGIVGVITAFNFPCAVLGWNACIALVCGNCVVWKGAPTTPLITIAVTKLVAEVLERNKLPGAIFTSFCGGADIGQAIAKDTRIPLVSFTGSSKVGLMVQQTVNERFGKCLLELSGNNAIIVMDDADXSNWLYXYFVCSCGXAGQRCTTCRRLFLHESIYADVLDQLIGVYKQVKIGNPLEKGTLVGSLHTPTSVENFQKGISVIKSQGGKILTGGSVLESAGNFVQPTIVEISPDAPVVKEELFGPVLYVMKFQTLEEAIALNNSVPQGLSSSIFTQRPGTIFKWIGPRGSDCGIVNANIPTNGAEIGGAFGGEKATGGGREAGSDSWKQYMRRSTCTINYGSELPLAQGINFG

SEQ ID NO: 7779 - protein, 225 aa, Zea mays
  unsure (1)..(225): unsure at all Xaa locations
MAISTDSRGEEKPSQHSQEEKRWVLSDFDVGKALGRGKFGHVYLAREKRSSHIVALKVLFKSQLKQSQVEHQLRREVEIQSHLRHPNILRLYGYFYDQTRVYLILEHAAKGELYKELQRCKHFSERRSATYIASLARALIYLHGKHVIHRDIKPENLLVGLQGELKIADFGWSVHTFNRRRTMCGTLYYLPPEMVEKTEHHYHXVDICELGHPMLLDFLYGLPTF

SEQ ID NO: 7780 - protein, 527 aa, Zea mays
MAMAMMAMRRAVALGARHIPAAAASSFRVVSLRHMSADAGAAMEKIRAAGLLRTQGLIAGQWVDAYDGKTIEVQNPATGEVLANVSCMGSRETSDAIASAHSTFYSWSKFTASERSKALRKWYDLIISHKEELALLMTLEQGKPMKEALGEVNYGASFIEYFAEEAKRIYGDIIPPTLSDRRLLVLKQPVGVVGAITPWNFPLAMITRKVGPALACGCTVVVKPSEFTPLTALAAADLALQAGIPAGALNVVMGNAAEIGDALLQSTQVRKITFTGSTAVGKKLMAGSANTVKKVSLELGGNAPCIVFDDADIDVAVKGSLAAKFRNSGQTCVCANRILVQEGIYEKFAKAFIQAVQSLKVGNGLEESTSQGPLINEAAVQKVEKFINDATSKGANVMLGGKRHSLGMSFYEPTVVGNVSNDMLLFREEVFGPVAPLIPFKTEEEAVHMANDTNAGLAAYIFTKSIPRSWRVSESLEYGLVGVNEGIISTEVAPFGGVKQSGLGREGSKYGIDEYLELKYICMGNLG

SEQ ID NO: 7781 - protein, 462 aa, Bacillus cereus ATCC 10987
MTFSKSTTDKPSYTYEELSEKNKAYVWHPFTQMKDYLEEDPVIIERGEGRKLYDVNGNEYWDGVSSIWLNVHGHQVPELDEAIREQLNKISHSTMLGLANVPSILLAEKIIEVVPEGLKKVFYSDSGSSAVEIAIKMAFQYWQHKGKPKKQRFVTLKEAYHGDTIGAVSVGAIDLFHQVYSSLLFEAIKMPYPYTYRSPYGNNKEEIVKKHLEEMEELLKDKHEEIAAIIVEPLMQGAGGMITMPKGYLKGLRNLCTKYNVLFITDEVATGFGRTGKMFACEHENVTPDILTAGKGLTGGYLPVAITVTTDEIYNAFLGGYEEQKTFFHGHSYTGNPLGCAVAIANLELYEKTNLIEEVARKTEYVATQLEDLFAYKHVGDIRQCGLMVGIELVKNKETKEAFEWTERVGVQVCKRSRELGMILRPLGNTIVFMPPLASTIDEIDDMLRILYKAISDVTEGE

SEQ ID NO: 7782 - protein, 444 aa, Thermococcus kodakaraensis
MIRVYTISGYEEVGKNMTAVGYSDGRKEEVVIIDMGIRLDRVLIHEDVNIQQFPTKELQRLGAIPDDSILRNKKVVAITFTHGHLDHIGAVGKIAPHYPDVPIYGTPYTIKLAKSEVKSEQYFEVKNPMYETEFGEIVQVSENLAIEFVRITHSIPQAAMVVVHTPEGAVVHTGDFKFDNNNPLGERPDYKRLKELGKEGVKVLIAESTRVAEPTKTPSEAVAQMLLEDFFLYEGMDEKGLIATTFASHIARLQELIWIANKMGRQAVFVGRSLAKYTGIAKQLGLIKMKGARAVRSPNAIKKVLAEVSGARENYLLVVTGHQGEPGAVLTRMANGELYDIGKQDTVVFSAGTIPNPLNRAQRYILETKLKMKGVRMIKDLHVSGHASREDHRYLLRMLNPENIVPAHGEFRMLTHYAELAEEEGYLIGRDVFVSRNGYTVEIE

SEQ ID NO: 7783 - protein, 325 aa, Schizosaccharomyces pombe
MSIKEFAKNAREAYFTLPNGDKIPSIGLGTWRSGKDETKNAVCAALKAGYRHIDTAHIYGNEKEIGEGIRESGVPRTDIWVTSKLWCNAHRAGLVPLALEKTLQDLNLEYIDAYLIHWPFALLSGPEELPRNEKGELIYEDVPIEETWQAMEELLETGKVRYIGISNFNNEYLDRVLKIAKVKPTIHQMELHPYLPQTEYLEKHKKLQIHVSAYSPLANQNDAYNSDISKLIEHKTLVDIANARGEGITPANIAISWAVKRGTSVLPKSVNESRIVSNFLYIPLTDKEMEAINNIGVVRRFSHGKFAPKPMFVGLQDGTPKQTHA

SEQ ID NO: 7784 - protein, 172 aa, Burkholderia cepacia R1808
MATFATAPARAEGPFTVTSTDLAPGGRVGAAQLFDRGECNGENRSPQLSWRNPPPGTRGYAVTIFDPDAPGHGWWHWAVADLPATVTSLPANASASGFLRRIGASEARNDFGTDGYGGPCPPPGKPHRYVITVYALKGTDLRVAQGRPAPMFEHEIGTLTIGTAQLTVTYGR

SEQ ID NO: 7785 - protein, 503 aa, Nierembergia sp. NB17
MMQLSTELAIAAIIFLLAHILISKTSGRRLPPGPRGWPVIGALPLLGDMPHVSLAKMAKKYGPIMYLKVGTCGMAVASTPHAAKAFLKTLDINFSNRPPNAGATHFAYNAQDMVFAPYGPRWKLLRKLSNLHMLGGKALEDWSNVRANELGHMLKSMLDLSREGQRVVIADMLTFAMANMIGQVILSKRVFVDKGVEVNEFKNMVVELMTVAGYFNIGDYIPCLAWLDLQGIEKGMKILHKKFDVLLTKMFDEHKTTSHEREGKSDFLDMVMANRDNSEGERLSTTNIKALLLNLFTAGTDTSSSVIEWALTEMLKNPSILKKAQVEMDQVIGKNRRLLESDISNLPYLRAICKETFRKHPSTPLNLPRISSESCEVDGYYIPKNTRLSVNIWAIGRDPDVWENPLKFNPERFLSGKYAKIDPRGNDFELIPFGAGRRICAGTRMGIVMVEYILGTLVHSFDWKLPSDVIELNMEEVFGLALQKAVPLEAMVTPRLPLNVYAP

SEQ ID NO: 7786 - protein, 185 aa, Zea mays
  unsure (1)..(185): unsure at all Xaa locations
MTKAATIYGSKTQSDALRPGPLRPENIFRNKFPTYKNGSNGIVIKLADGPEIPPLKEIVAKETAYLLDRRQRLSVRELAMKFEKGLSTATLLSNEVKWRQVVLMERDILLKNLKSVLESLRGQVTGKTKDEIEESISMVEILTVQLSKREAELVQQKEEVXKLAKSLKQMCFTLLYNLCKHVLVI

SEQ ID NO: 7787 - protein, 250 aa, Suaeda maritima subsp. salsa
MGKSYPTVSEENQKSIEKAKKKLRGLISEKHCAPIMLRLAWHSAGTFDVQSKTPGPFGTMRHQAELAHGANNGLDIALRLLEPIKEQFPEISFADFYQLAGVVAVEVTGGPEIPFHPGREDKPEPPQEGRLPDATKGCDHLRDVFIKQMGLTDQDIVALSGGHTLGRCHKDRSGFEGPWTPNPLVFDNSLLKELLSGEKDGLLQLPSDKALLADPVFRPLVEKYAADEDAFFADYSDAHLKLSELGFADA

SEQ ID NO: 7788 - protein, 154 aa, Sorbaria sorbifolia
SIGLSNYELFLTRDCLSYAKIKPAVSQFETHPYYQRETIVRFCQKHGVVPVAHTPLGGATANTKYFGSVSPLGDPVLNELAKKYQKSVAQICLRWNIERNTPVVPKSTKVERLKENFQALDFKLEKEDIDLINTIDRKSRTTLPSLSWGLDVYA

SEQ ID NO: 7789 - protein, 347 aa, Escherichia coli CFT073
MKNSKAILQVPGTMKIISAEIPVPKEDEVLIKVEYVGICGSDVHGFESGPFIPPKDPNQEIGLGHECAGTVVAVGSRVRKFKPGDRVNIEPGVPCGHCRYCLEGKYNICPDVDFMATQPNYRGALTHYLCHPESFTYKLPDNMDTMEGALVEPAAVGMHAAMLADVKPGKKIIILGAGCIGLMTLQACKCLGATEIAVVDVLEKRLTMAEQLGATVVINGAKEDTIARCQQFTEDMGADIVFETAGSAVTVKQAPYLVMRGGKIMIVGTVPGDSAINFLKINREVTIQTVFRYANRYPVTIEAISSGRFDVKSMVTHIYDYRDVQQAFEESVNNKRDIIKGVIKISD

SEQ ID NO: 7790 - protein, 222 aa, Arabidopsis thaliana
MDSLAISPRKLRSDLYSYSYQDDSNTVPLVISVLSSLIERTLARNERISRSYGGFGKTRVFDCREIPDMTIQSYLERIFRYTKAGPSVYVVAYVYIDRFCQNNQGFRISLTNVHRLLITTIMIASKYVEDMNYKNSYFAKVGGLETEDLNNLELEFLFLMGFKLHVNVSVFESYCCHLEREVSIGGGYQIEKALRCAEEIKSRQIVQDPKHHHHHQFSRIML

SEQ ID NO: 7791 - protein, 394 aa, Burkholderia cepacia R18194
MARVKATAPVLAVHGATITKHFYQRMFARHPELKNLFNQTHQKTGSQPETLAKAVYAYAANIDNLGALGGAVTKIAHKHASLNIRPEHYPIVGENLLASIVEVLGDAVDAETLEAWRVAYGQLAQILIGVEADLYAGAAWSGFRPFKVERKVRESDEITSFYLTPADGGAAPTFEPGQYITVKRFVGDLGVDQPRQYSLSDAPHGKWLRISVKREAGKPEVIPAGKVSTLMHDGVEEGAIVEVTAPMGEFSLKRGVETPVVLISGGVGITPMMSMASTLIAEGSQREVRFVHACRSGAVHAFRDWLNDTVRDHANVKRTVLYELVGPNDRAGIDYDLEGRLTPERVQQYALVPDADYYICGPIGFMKAQRDALVALGVAPERVNTEIFGSGALE

SEQ ID NO: 7792 - protein, 149 aa, Chamaebatiaria millefolium
NYELFLTRDCLSYAKIKPAVSQFETHPYYQRETIVRFCQKHGVCPVAHTPLGGATANTKYFGSVSPLGDPVLNEVAKKYQKSVAQICLRWNIERNTAVVPKSTKVERLKENFQVLDFKLEKEDIDLINTIDRKSRTTLPSLSWGLDVYA

SEQ ID NO: 7793 - protein, 54 aa, Triticum aestivum
MGSETFVEILLAILLPPVGVFLRYGIGVEFWICLLLTVLGYIPGIIYAIFVLVA

SEQ ID NO: 7794 - protein, 293 aa, GIBBERELLA ZEAE PH-1
MAPDVCTFTLNTGDEMPAVGFGTWNIPRSQAAKAVETALRAGYRHIDTALAYGNEKEVGAGIRASGVPREEIWVSGKLRNNWHKHARKCLQTSLKNLGVGYLDLYLIHWPCSRDADNPAICYEDWDYVDTWMEMEELLDEGKVLNIGVSNFGIQQLERLLTSTEIVPAVNQIELHPCNPSPKLVAYCNNRGIHSEGYSCLGSGHSALHRNKTLRDIADAKEKTVQQVLLQWGIEKGWGVVCKSVTPSRIKSNFELSGWELTDDDMEAIDGIKKRFKAVGDGFLPHRVFFGDDE

SEQ ID NO: 7795 - protein, 358 aa, Escherichia coli CFT073
MKALARFGKAFGGYKMIDVPQPICGPEDVVIEIKAAAICGADMKHYNVDSGSDEFNSIRGHEFAGCIAQVGEKVKDWKVGQRVVSDNSGHVCGVCPACEQGDFLCCTEKVNLGLDNNTWGGGFSKYCLVPGEILKIHRHALWEIPDGVDYEDAAVLDPICNAYKSIAQQSKFLPGQDVVVIGTGPLGLFSVQMARIMGAVNIVVVGLQEDVAVRFPVAKELGATAVVNGSTEDVVARCQQICGKDNLGLVIECSGANIALKQAIEMLRPNGEVVRVGMGFKPLDFSINDITAWNKSIIGHMAYDSTSWRNAIRLLASGAIKVKPMITHRIGLSQWREGFDAMVDKTAIKVIMTYDFDE

SEQ ID NO: 7796 - protein, 149 aa, Exochorda racemosa
NYELFLTRDCLSYAKIKPAVSQFETHPYYQRESLVRFCQKHGVVAAAHTPLGGATANTKYFGSTSPLGDPVLHDVAKKYQKSVAQICLRWNIERNTPVIPKSSKVERMKENLQVLDFNLEKEDIELINGIDRKSRTTLPSLSWGLDVYA

SEQ ID NO: 7797 - protein, 503 aa, Panax ginseng
MAIRIPTRQLFIDGEWREPAKKNRIAIINPATEQIIGNIPAATSEDVDIAVEAARRALARNGGSDWASASGAYRAKYLRAIAAKITERKSELAKLETLDCGKPLEEAAWDIDDVAACFEYNADLAEALDGKQKSPISLPMETFKSYILKEPIGVVGLITPWNYPMLMATWKVAPALAAGCAAILKPSELASVTCLELGEVCKEVGLPPGILNILTGLGPEAGAPLASHPHVDKIAFTGSTATGSKIMTAAAQQVKPVTLELGGKSPILVFEDVDLDKAAEWTIFGCFWTNGQICSATSRLLVHESIAAEFLDKLMKWTKNIKISDPLEEGCRLGPVVSGGQYEKVMESISTAKKEGATILCGGARPKHLEKGFFIEPTIISDVTTSMQIWREEVFGPVLCVKTFRTEDEAIELANDTRYGLGGAVISNDLERCERVTKALQSGIVWINCSQPCFCQAPWGGKKRSGFGRELGEWGLDNYLSVKQVTQYVSDEPWGWYQSPSKL

SEQ ID NO: 7798 - protein, 204 aa, Zea mays
  unsure (1)..(204): unsure at all Xaa locations
MAAAAAGATRRAASSLASRCLLSRPAASPAAVPSALRRADGARGLLPGLLQRFGTAAAAEEPISPSVQVGETQLLINGKFVDAASGKTFPTLDPRTGEVIARVSEGDAEXVDRAVVAARKAFDEGPWPKMTAYERSRILLRFADLIEKHNDEIAALETWDNGKPYEQVPHIEVPMLARLMRYYAGWTDKIHGLIVPADGPSYLQ

SEQ ID NO: 7799 - protein, 153 aa, Nicotiana clevelandii
MKMIVLRSSDGETFEVEESVALESQTIKHMIEDDCADTSIPLPNVTSKILAKVIEYCKRHVDAASKTEDKAVEDDLKAFDADFVKVDQSTLFDLILAANYLNIKSLLDLTCQTVADMIKGKTPEEIRKTFNIKNDFTPEEEEEVRRENAWAFE

SEQ ID NO: 7800 - protein, 297 aa, Glycine max
  unsure (1)..(297): unsure at all Xaa locations
MLLLERQRILLRAADLLEKHNDELAALETWDNGKPYEQAAKIEVPMLVRLIRYYAGWADKIHGLTVPADGPYHVQTLHEPIGVAGQIIPWNFPFLMFCCCVGSRTFVHESVSXVVEKAKARAFKRVVGDPFKGGIEQGPQIDSDQFEKILRYIRSGVESGATLETGGDKLGNKGFYIQPTVFSNVKDGMLIARDEIFGPVQSILKFKDLGEVVQRANNTRYGLAAGVFTTNMDTAYTLTRALRVGTVWINCFDTFDAAIPFGGYKMSGQGREKGEYSLKNYLQVKAVVNPLKNPAWL

SEQ ID NO: 7801 - protein, 278 aa, Silene latifolia
EAHSLKVEKILFQGKSKYQDVIVFQSSTYGKVLILDGVIQLTERDECAYQEMISHLPLCSIPNPKKVLVIGGGDGGVLREVARHSSVEHIDICEIDEMVVTVSKEFFPEVAVGYDDPRVNLHIGDGVAFLKVAPEGSYDTVIVDSSGPIGPAKELFEKPFFESVAKALRPGGVVCTQAESIWLHMHIIENIVSSCREIFKGSVNYAWTTVPTYPSGVIGFMVCSTEGPAVDFKNPVNPIDKTEDEKRPLKFYNAEIHSAAFCLPSFAKRVIEAKAKST

SEQ ID NO: 7802 - protein, 118 aa, Brassica napus
MYYQLTKSSYMDSLKILEADIEHANGLAAEIPMGKSGVRLQVKLVCSNLAPFFIFLLQWMDFSCLLPRYFDFFHILIYKVRADGRWNRSRYGRKATIREFYCKFNTFVCVVYTIGLVL

SEQ ID NO: 7803 - protein, 430 aa, Zea mays
MAYAAGRKKRVGRYEVGRTIGQGTFAKVKFAVDADTGAPVAMKVLDKETIFAHRMLHQIKREISIMKIVRHPNIVRLNEVLAGKTKIYIILELVTGGELFDKIPRYGKLRENEARKYFQQLIDAIDYCHSKGVYHRDLKPQNLLLDSRGNLKLSDFGLSTLSQNGVGLVHTTCGTPNYVAPEVLSSNGYDGSAADIWSCGVILYVLMAGYLPFEENDLPHLYEKITAAQYSCPYWFSPGAKSLIQRILDPNPRTRITIEEIREDPWFKKNYVTIRCGEDENVSLDDVQAIFDNIEDKYVSDEVTHKDGGPLMMNAFEMIALSQGLDLSALFDRQQEFVKRQTRFVSRKPAKTVVATIEVVAESMGLKVHSRNYKVFEVAPSLFMVDVRKVAGDTPEYHRFYENLCSKLCSIIWRPTEVSAKSTPLRTTTC

SEQ ID NO: 7804 - protein, 150 aa, Silene latifolia
FLKVAPEGSYDTVIVDSSGPIGPAKELFEKPFFESVAKALRPGGVVCTQAESIWLHMHIIENIVSSCREIFKGSVNYAWTTVPTYPSGVIGFMVCSTEGPAVDFKNPVNPIDKTEDEKRPLKFYNAEIHSAAFCLPSFAKRVIEAKAKST

SEQ ID NO: 7805 - protein, 443 aa, Zea mays
MESTGKILMERYEVGRLLGKGTFGKVHYAKNLESNESVAIKMMDKDKVLKAGLSEQIRREITTMRLVAHKNIVELHEVMATRNNIYFVMEYVKGGELFDKIGKSGKLTEAAAHKYFQQLIGAVDYCHSRGVYHRDLKPENLLLDENENLKVSDFGLSALSESKGQDGLLHTTCGTPAYVAPEVISKTGYDGAKSDIWSCGVVLFVLVAGYLPFRAPNMMEMYRKIQNGDFRCPSWFSHKLKKLLYKILDPSPDTRISVQKIKESTWFRKGPVETRTVKEKILSENDTTNAAPAVAMRRKKNVHEDVKPPTVTSLNAFEIISFSTGLDLSGLFIRKECKKETRFTSDKGAVSIISKLEDVAKALNLRVRKKDNGVVKIQGRKVGRKGVLEFDTEIFEITASYHLIEMKQTGGDSLEYKKLLEEDIRPALKDIVWAWHGDDQQQK

SEQ ID NO: 7806 - protein, 304 aa, Oryza sativa (japonica cultivar-group)
MGGFVKTQKTHAYFKRFQVKFKRRRQGKTDYRARIRLTNQDKNKYNTPKYRFVVRFTNKDITAQIVYATIAGDIVMAAAYSHELPRYGLEVGLTNYAAAYCTGLLLARRVLTLRGLDQEYEGNVEATGEDYYVEPADERRPFRALLDVGLIRTTTGNRVFGALKGALDGGLDIPHSDKRFAGFKKDEKQLDSDIHRKYIYGGHVADYMRSMAEEEPEKFQAHFSEYLKKGIDADGMESLYKKVHAAIRADPTMAKSTKKEPATHKRYNLKKLTYEQRKASLVERLNALNSSAGADDDDEEEDDE

SEQ ID NO: 7807 - protein, 304 aa, Oryza sativa (japonica cultivar-group)
MGGFVKTQKTNAYHKRFQVKFKRRRQGKTDYRARIRLTNQDKNKYNTPKYRFVVRFTNKDITAQIVYATIAGDIVMAAAYSHELPRYGLEVGLTNYAAAYCTGLLLARRVLKLRGLDQEYEGNIEATGEDYYVEPADERRPFRALLDVGLIRTTTGNRVFGALKGALDGGLDIPHSDKRFAGFKKDEKQLDSDIHRKYIYGGHVADYMRSMAEEEPEKFQAHFSEYLKKGIDADGMEALYKKVHAAIRADPTMAKSTKKEPATHKRYNLKKLTYEQRKASLVERLNALNSSAGADDDDEEEDDE

SEQ ID NO: 7808 - protein, 205 aa, Arabidopsis thaliana
MAEGSMRPPEFNQPNKTSNGGEEECTVREQDRFMPIANVIRIMRRILPAHARISDDSKETIQECVSEYISFITGEANERCQREQRKTITAEDVLWAMSKLGFDDYIEPLTLYLHRYRELEGERGVSCSAGSVSMTNGLVVKRPNGTMTEYGAYGPVPGIHMAQYHYRHQNGFVFSGNEPNSKMSGSSSGASGARVEVFPTQQHKY

SEQ ID NO: 7809 - protein, 309 aa, Triticum aestivum
  unsure (1)..(309): unsure at all Xaa locations
MAFLNMEQHTWAFTFGILGNIISLMVFLSPLPTFYRVYRKKSTEGFQSTPYLVTLFSCLLWMYYAFLKSGSELLLTINAVGCVIESLYIAMYLVYAPKSARXLTAKLFIGLDVGLFGLIALVTMLASHGPLRVQVVGWICVAVALGVFAAPLSIIRLVIRTKSVEFMPFSLSFFLVLSAVIWFAYGALKKDIFVAMPNVLGFLFGVAQMALYMAYRNKKPATVVLVHEEMKLPEHVKEVAGGAKPQGGAPTEGRISCGAEVHPIDVLPAVADEQAAAAADEDVIRDDQNMLRPEQPAVIKPDVAIVVQA

SEQ ID NO: 7810 - protein, 177 aa, Triticum aestivum
  unsure (1)..(177): unsure at all Xaa locations
MSDTDEHHFESKADSGASKTYPQQAGAIRKGGHIVIKARPCKVVEVSTSKTGXKHGHAKCHFVAIXDIFNGKXSLEDIVPSSHNCDVPHVXRQRYQLXIDITGWMDMSTLPTGEWATPKDDLELPNRMISAWGSXDGFADGKDWILSVIPPWGERTSLPVKETVVASNTSAWPTAIL

SEQ ID NO: 7811 - protein, 349 aa, Mesorhizobium sp. BNC1
MVKPTSRLGRTIFVNESNLLKNGSGTLCPIDPEISLFLERLREGWSRHPPLSAVSSAEARWIAEIVREPFRQGGPVMAETLELLIPTRHGDMRARLYDPGLGEDAPVLIYLHGGGFTLFSINTHDRLMREYAHAARVKVLGLDYYLAPEHKYPVALDQVEDTLEWIGSANLGVDMQRLALGGDSAGGNLSLAAAIRMRDKGRPAAVKGLLFNYAGFATDCSDEAEALHGGPGSVMDRDEVRSFIRNYTRSPEDMKNPEVNLLDANVDHLPPSFFVIADRDIIAENSLAMAGKLRAAGNAMTCKIYRGATHSFLEAMSMSALARQAIADGADFIARILNTDAKYGLRAAS

SEQ ID NO: 7812 - protein, 364 aa, Nicotiana tabacum
MESSTKSQIPTQSEEERNCTYAMQLLSSSVLPFVLHSTIQLEVFEILAKSNDTKLSASQIVSQIPNCTKPEAPTMLNRMLYVLASYSLFTCSIVEDEKNNGGQKRVYGLSQVGKFFVKNENGASMGPLLALLQNKVFINSWFELKDAVLEGGVPFDRVHGVHAFEYPKSDPKFNDVFNKAMINHTTVVMKKILENYKGFENLKTLVDVGGGLGVNLKMITSKYPTIKGTNFDLPHVVQHAPSYPGVEHVGGDMFESVPEGDAIFMKWILHDWSDSHNLKLLKNCYKALPDNGKVIVVEAILPVKPDIDTAVVGVSQCDLIMMAQNPGGKERSEEEFRALATEAGFKGVNLICCVCNFWVMEFCK

SEQ ID NO: 7813 - protein, 495 aa, Bradyrhizobium japonicum USDA 110
MMSVAYDFAHSPASEFMARPQHLLIDGRRVPASSGRTFKSLNPATGQVIATVAEGNEADVDHAVAAARRAFEGPWRTMRASERGQILLRWAELLKANAEEIIELESIDAGKPISATLRQDFPAAVDTLIYYAGWADKISGDVVPVRDDALTYTVREPVGVVAAIVPWNFPLMIGMWKLAPALACGCTIVMKPAELTSLSALRIAELALQAGLPAGVFNVVTGPGRVVGDALVNHPDVDKVTFTGSPGVGRGIMKGAAGNFKRVSLELGGKSANVIFDDADLEAASKAAASGIFFNAGQVCSAGSRVLVQEKAYDEVVERLAARAKSLKIGDPLDRKTALGPVISEKQMKSILDYVDIGQKEGASLVTGGTRVGERGYFISPAVFANVEHEMRISQEEIFGPVVSIIKFRDEADALRIANGTAYSLAAGVWSRDIGKLQRFAKRARAGTVWMNTYGYTDVRLPWGGERDSGLGREHGTAALDNFTEPKAVWMNLAV

SEQ ID NO: 7814 - protein, 450 aa, Zea mays
  unsure (1)..(450): unsure at all Xaa locations
MDIKDMKTRGKTLTERYEMGKLLGKGAFGKVHYARDLESNQGVAIKIMDKDRVLKAGLSEQVKREITTMRLVEHKNIVRLHEVMATRNKIYIIMEYAKGGELLDKVKRSGRLTEADTHRYFQQLIGALDHCHSRGVYHRDLKPENLLLDENGDLKVSDFGLSAFSESRRTDGLLHTVCGTPVYIAPEVIKKTGYDGAKSDIWSCGVVLFVLAAGYLPFQGPNXMEIYRKIHDRDFRCPXWFSHKLKRLLYKILNPNPSMRPSIQEIKESTWFRKGPREISAVNEKVLSENATTTNAAPVLAARRKEIAHEDMKSLVATNLNAFEIIALSAGLDLSGLFIKECRKETRFTSDKPALAIIAKLEDVAKALNLRIRKKDNNTVSIQGRKEGGNGVLKFDTQIFEITPSCHLVQIKQTSGDLLEYEKLLEEGIRPGLKDVVSAWHGDDLQQKQK

SEQ ID NO: 7815 - protein, 1575 aa, Streptococcus gordonii
MNKRKEVFGFRKSKVAKTLCGAVLGAALIAIADQQVLADEVTETNSTANVAVTTTGNPATNLPEAQGEATEAASQSQAQAGSKEGALPVEVSADDLNQAVTDAKAAGVNVVQDQTSDKGTATTAAENAQKQAEIKSDYAKQAEEIKKTTEAYKKEVEAHQAETDKINAENKAAEDKYQEDLKAHQAEVEKINTANATAKAEYEAKLAQYQKDLAAVQKANEDSQLDYQNKLSAYQAELARVQKANAEAKEAYEKAVKENTAKNAALQAENEAIKQRNETAKANYDAAMKQYEADLAAIKKAKEDNDADYQAKLAAYQAELARVQKANADAKAAYEKAVEENTAKNTAIQAENEAIKQRNAAAKATYEAALKQYEADLAAAKKANEDSDADYQAKLAAYQTELARVQKANADAKAAYEKAVEDNKAKNAALQAENEEIKQRNAAAKTDYEAKLAKYEADLAKYKKELAEYPAKLKAYEDEQAQIKAALVELEKNKNQDGYLSKPSAQSLVYDSEPNAQLSLTTNGKMLKASAVDEAFSHDTAQYSKKILQPDNLNVSYLQQADDVTSSMELYGNFGDKAGWTTTVGNNTEVKFASVLLERGQSVTATYTNLEKSYYNGKKISKAVFKYSLDSDSKFKNVDKAWLGVLPDPTLGVFASAYTGQEEKDTSIFIKNEFTFYDENDQPINFDNALLSVASLNRENNSIEMAKDYSGTFVKISGSSVGEKDGKIYATETLNFKQGQGGSRWTMYKNSQPGSGWDSSDAPNSWYGAGAISMSGPTNHVTVGAISATQVVPSDPVMAVATGKRPNIWYSLNGKIRAVNVPKITKEKPTPPVAPTEPQAPTYEVEKPLEPAPVAPTYENEPTPPVKTPDQPEPSKPEEPTYETEKPLEPAPVVPTYENEPTPPVKTPDQPEPSKPEEPTYETEKPLEPAPVAPTYENEPTPPVKTPDQPEPSKPEEPTYDPLPTPPVAPTPKQLPTPPVVPTVHFHYSSLLAQPQINKEIKNEDGVDIDRTLVAKQSIVKFELKTEALTAGRPKTTSFVLVDPLPTGYKFDLDATKAASTGFDTTYDEASHTVTFKATDETLATYNADLTKPVETLHPTVVGRVLNDGATYINNFTLTVNDAYGIKSNVVRVTTPGKPNDPDNPNNNYIKPTKVNKNKEGLNIDGKEVLAGSTNYYELTWDLDQYKGDKSSKEAIQNGFYYVDDYPEEALDVRPDLVKVADEKGNQVSGVSVQQYDSLEAAPKKVQDLLKKANITVKGAFQLFSADNPEEFYKQYVSTGTSLVITDPMTVKSEFGKTGGKYENKAYQIDFGNGYATEVVVNNVPKITPKKDVTVSLDPTSENLDGQTVQLYQTFNYRLIGGFIPQNHSEELEDYSFVDDYDQAGDQYTGNYKTFSSLNLTMKDGSVIKAGTDLTSQTTAETDAANGIVTVRSKEDSLQKISLDSPFQAETYLQMRRIAIGTFENTYVNTVNKVAYASNTVRTTTPIPRTPDKPTPIPTPKPKDPDKPETPKEPKVPSPKVEDPSAPIPVSVGKELTTLPKTGTNDSSYMPYLGLAALVGVLGLGQLKRKEDESN

SEQ ID NO: 7816 - protein, 315 aa, Azotobacter vinelandii
MRQHSIVVADTGDLEAIRRFAPEDATTNPSLILKAVQSGQYDGLVARVLGEVGGARSPEAAVDDACDRLVVALGERILASVPGRVSTEVNARLSFDREASIAKARRLVGLYEAAGIGRERILIKLAATWEGIRAAEVLEKEGIPCNLTLIFGFAQARACAEAGVHLISPFVGRILDWYRQADPATAYAPAEEPGVRSVRRIFDYFRRHAYPTVVMGASFRNVGEILALAGCDRLTISPALLEELAASEGVLAPALADTGEREARPAQRLGEAEFRWQMNEDAMATEKLAEGIRGFEADQLKLEALLRARLAGGVA

SEQ ID NO: 7817 - protein, 450 aa, Bacillus cereus ATCC 14579
MMKTKQTDELLAKDEQYVWHGMRPFSPNSTMVGAKAEGCWVEDIQGKRYLDGMSGLWCVNSGYGRKELAEAAYKQLQTLSYFPMSQSHEPAIKLAEKLNEWLGGEYVIFFSNSGSEANETAFKIARQYYAQKGEPHRYKFMSRYRGYHGNTMATMAATGQAQRRYQYEPFASGFLHVTPPDCYRMPEIEGQHIYDVECVKEVDRVMTWELSETIAAFIMEPIITGGGILMPPQDYMKAVHEMCQKHGALLISDEVICGFGRTGKAFGFMNYDVKPDIITMAKGITSAYLPLSATAVKKEIYEAFKGKGEYEFFRHINTFGGNPAACALALKNLEIMENENLIERSAQMGSLLLEQLKDEIGEHPLVGNIRGKGLLVGIELVNDKETKEPIDNDKIASVVNACKEKGLIIGRNGMTTAGYNNVLTLAPPLVISSEEIAFVVGTLKTAMERI

SEQ ID NO: 7818 - protein, 117 aa, Brassica napus
LEAGSKPEILLAMSCLCKGNNEAFLICNGFKDAEYVSLALLGRKLALNTVIVLEQEEELDLVIDLSHKMNVRPVIGLRAKLRTKHSGHFGSTSGEKGKFGLTTTQIVRVVRKLSEAC

SEQ ID NO: 7819 - protein, 500 aa, GIBBERELLA ZEAE PH-1
MSDLYVNLEAPNGVKYRQPTGLFINNEFVPGSSTQKITSIDPATEKEIATVHAANADDVDKAVKAAYDAFRNPSWKKLPPPQRGVLMNKLADYIEERTKIFATSEAWDNGKVYTDAEGGDVVEVINTIRYYAGWADKITGQTITANPNKLAYTLRQPLGVVAQIIPWNYPLAMAAWKIGPALACGNTIVMKAAEQTPLSILLLGEAIKAVGFPPGVFNALNGYGSEAGPALVEHPLVDKVAFTGSTATGARIMEMASKTLKNITLETGGKSPLLVFSDSDIDEAVKWSHMGIMSNQGQICTATSRLLVQDKVYDEFVQRFIETTKTVSKVGHQWDSETYQGPQVSKQQYDRILEYIQIGKSEGATLLAGGQPVDSSKKGFFIQPTVFGDVHHQMRVFREEIFGPVVVITKFSDEAEALKLANDTTYGLGAAVFTKDVERAHRVAAEIEAGMVWINSTQDSEPYIPFGGVKQSGIGRELGEAGLEAYSNTKSIHVNLGSRL

SEQ ID NO: 7820 - protein, 316 aa, Vibrio parahaemolyticus RIMD 2210633
MSNKLEQLRKLTTVVADTGEIDAIKKYQPEDATTNPSLILKAAQIAEYAPLIDASIEYAKAQSNDKAQQVQDTCDMLAVNIGKEILKTIPGRISTEVDARLSYDMEGSVAKARQLVKMYNDAGITNDRILIKLASTWEGIRAAEILEKEGINCNLTLLFSFAQARACAEAGVFLISPFVGRIMDWYKAKEGRDFEASEDPGVLSVTKIYNYYKEYGYKTVVMGASFRNIGEILELAGCDRLTIAPALLAELEAAEGEVVEKLVDSKGAAERPAPMTHAEFLWEHNQDPMAVEKLAEGIRNFAVDQGKLEAMIEAKL

SEQ ID NO: 7821 - protein, 215 aa, Streptococcus agalactiae NEM316
MKYFLDTADVSEIRRLNRLGIVDGVTTNPTIISREGRDFKEVINEICQIVDGPVSAEVTGLTCDEMVTEAREIAKWSPNVVVKIPMTEEGLAAVSQLSKEGIKTNVTLIFTVAQGLSAMKAGATFISPFVGRLEDIGTDAYALIRDLRHIIDFYGFQSEIIAASIRGLAHVEGVAKCGAHIATIPDKTFASLFTHPLTDKGIETFLKDWDSFKKK

SEQ ID NO: 7822 - protein, 168 aa, Avena clauda
VMASSATSVAPFQGLKSTAGLAVSRRSNAGLGSVSNGGRIRCMQVWPIEGIKKFETLSYLPPLSEEALLKQIDFLIRSKWVPCLEFSKVGFIFRVHGSTPGYYDGRYWTMWKLPMFGCTDASQVIKEVEEVKKEYPDAYVRIIGFDNIRQVQCVSFIAFKPPGCEESG

SEQ ID NO: 7823 - protein, 494 aa, GIBBERELLA ZEAE PH-1
MAENYHKEVISGLKNKSLFIQDAFINGQWVAKENKFDVFEPSTATVLGQVANCALEDFQTAIKSADVAQTKYFDSTTGASRGAMLRKWYDLVLANQEDLAKILSLENGKTYSEALGEVIYSASFISWFAEEATRSYGVTIPSSAPHTTLMTIREPVGVCGIITPWNFPAAMITRKIAPALAAGCSVVIKPPSETPYSALAFTKLAIEAGLPPATIQVLPTRDRQAATELATNPLVKKISFTGSTGVGKYLAKLAAGTLKKLSLELGGNAPFIVFEDADLDLAAEGAMFCKFRCSGQTCVCANRLYVQKSVAKEFTAKLVEKVNALKMGGGLDKTTTQGPLVNKSAIDKVKEHIADATSKGAKIATGGSTPDSPGFFHQPTVLTGVTQEMAVAKDETFGPLAPVFEFDTEEDAIRLANDTEFGLAGYFFSKDISRVMRVAHKMQVGMVGANTGKISAAEAPFGGVKESGYGKEGSLYGMAEYQNIKSITIGNLNN

SEQ ID NO: 7824 - protein, 296 aa, Zea mays
MAVATESRGSEDRASAHANQEKRWVLSDFEVGKPLGRGKFGHVYLAREKRSSEIVALKVLFKSQLKQSQVEHQLRREVEIQSHLRHPNILRLYGYFYDQTRVYLILEYAAKGELYKELTRCKHFSERRTATYVASLARALIYLHGKHVIHRDIKPENLLVGVQGEIKIADFGWSVHTFNRRRTMCGTLDYLPPEMVEKAEHDYHVDIWSLGVLCYEFLYGVPPFEAKEHSETYRRIVKVDLKFPLKPFVSPAAKDLISQMLVKSSAQRLPLHKVLEHPWIVQNADPSGVYREGRSI

SEQ ID NO: 7825 - protein, 182 aa, Triticum aestivum
MAGVGRNMVAPLLVLNLIMYIIVIGFASWNLNHFINGLTNRPGVGGNGATFYFLVFAILAGVVGAASKLAGVHHVRTWRGDSLATSASSALVAWAITALAFGLACKEIHIGGYRGWRLRVLEAFVIILMFTQLLYVLALHSGLFGNQFGNHAGAGGYGAEHGAYGAGDPHNKGMGTGGVARV

SEQ ID NO: 7826 - protein, 350 aa, Azotobacter vinelandii
MKAVMAYAPGDYRLEEVAVPKAGPGEIIAKVEACGICAGDIKSFGGAPSFWGDETQPAYIKAPMIPGHEFIAHIVELGKGVEGYELGDRVISEQIVPCWNCRFCKRGHYWMCQKHDLYGFQNNVNGAMAEYIRFTKESINYKVPRDLPIEKAVLIEPYACSMHAVQRAQIQFGDVVVLAGAGTLGLGMIGAAKKAGPGKLVVMDLFEDRLELAKKFGADLVINPAKEDPVARIKEITDGYGCDVYIEATGHPKSVEQGLSMIRNLGRFVEFSVFKDPVTVDWSIISDRKELDVLGAHLGPYCYPLVIEGIADGSLPTEGVVTHNFPLERFMDGFKLAMSGKDSLKVILTP

SEQ ID NO: 7827 - protein, 317 aa, Methanosarcina thermophila
MDFEASAKILTTPVKGAKIVSNMTVDELVREYAGCAFGAGRLAKAVDIYYEMLASEKTTKFFGLAGAMTPAGMRNIIADLIRDGYIDVLVTTGANMVHDTVEALGLHHYKGSDCTNDIQLRHECIDRIYDVYLPDQHFTDLEEFLQGVYAGLPQEKLSIRQVLTEIGKNLDDDSSILKTAAEMGVPVYCPALQDSVIGLQAWLYKEGNPLHVDAFADMHEFMEICFETESAGAMLLGGGVPKNYILQSMLVTPRSFDYAIQLTMDHPETGGLSGATLDEAQSWGKVGENAKSVTVYADSTITLPLIVSAVRTRLSKR

SEQ ID NO: 7828 - protein, 1008 aa, Chlamydomonas reinhardtii
MPHEFKTAVVWFRRDLRVDDNPALVAALAAAPNVIPVFIWAPEEEGQFQPGRCSRWWSKHSLVDLQQALAALGSRLVIRRSTDSTAALLQLVTELGAEAVFFNHLYDPISLMRDHDCKRGLTAAGVAHRTFNGDMLYEPWDVLDPNKQPYSTFDDFWNSVRAMPVPPPFPVSAPASMPAVPAAVPSMTVAEVDWFFTPEQEASSDQLKFKWKPGVGGAISELEHFLAERLTEFEHDRAKVDRDSTSRLSPWIHIGSISVRYIFYRVRQCQAEWLAAGTDRAQSCDDFLQQMGYREYSRYLAFHFPFIHERSLLGHLRACPWRIDQHAFKAWRQGQTGYPIVDAAMRQLWSSGWCHNRGRVVAASFLVKDLLLPWQWGLKHYWDAQIDADLECDALGWQYVSGGMSDAHPFSYMMDLEKEARRFDPDGEYVRRWLPALSRLPTEYIHAPWKAPASVLAAADVELGCNYPLPIITRSDAKANVDYACGVLEKSAVAPTGSESSGRYPYRAPTYPNAGGGGGASGGVDGAGSSGGNPTAAMGASGGAGPSSGTGTGGQGGAFRGRGDGGGSAPVSQQGGMLPPGVAVCVTAGTGGTQPDSRTVSGAHAGVSNSAGGVACDMPPPSHSHPRGGSSGVAAAGVGGVSGGPSSGGAAAPGATRKATAPGGAVFYHPGEASGEGHALLERILQQQRRQRGAANRQDGSGTNQPPPPVSMPGMLDAAGAAGGGGGGGGGLAGLPGVLQGLHGGAGATAAPAVAWAGRVAAGGVDDMDAVALWQQQQQLLQGGAAAFAFEQAMELLLARRRAGDGVSGFCGGDAPGRGGGDADEADGLMLEEDSEEVVSNTVDLHLSAFTGASCHRQSGTARGARAAERRLKKEAGSPEVTDGGGSAGAGCGEEDAMQCEDEEHGERGSPARRTADEEAQPPAEEGGAGSEDAGAAASEGDEAEGYGSESASEDNGGATPVEEADQMVVDGGGGGGGGGGGGGGRGGGQHKRRRSQLEGEQGDAAWE

SEQ ID NO: 7829 - protein, 101 aa, Triticum aestivum
  unsure (1)..(101): unsure at all Xaa locations
MAPTVMASSATSVAPFQGLKSTAGLPVSRRSNGASLGSVSNGGRIRCMQVWPIEGIKKFETLSYLPPLSTXALLKQVDYLIXRXKWVPCLEVQAKVGFIFR

SEQ ID NO: 7830 - protein, 414 aa, Vibrio vulnificus YJ016
MERYIMELTTTVSELRYALDTFFFLISGALVMWMAAGFAMLEAGLVRSKNTTEILTKNFCLYAIACTTYLVVGYNIMYVDNSEGGWLPSIGALIGSQAEGADHSLESDFFFQVVFVATAMSVVSGAVAERMKLWSFLLFSAILTAFIYPVEGYWTWGGGFLSAAGFSDFAGSGIVHMAGASAALAGVLLLGARKGKYGKNGEVYPIPGSNMPLATLGTFILWFGWFGFNGGSQLMVSDFENATAVGQIFLNTNAAAAAGAITALFVCKTTWGKADLTMILNGALAGLVAITADPLSPSPLYSVAIGAVAGALVVFSIVGLDKLKIDDPVGAISVHGVCGFFGLMVVPISNGDASFLSQLFGAVVIFAWVFGASLAVWAVLKATIGIRVSEEEEMEGMDMHDCGVGAYPEFVTVK

SEQ ID NO: 7831 - protein, 109 aa, Zea mays
QRTKARDNRCVNESIAMASRLVAAAASSSSLSSASPLARLISRRGLAGAADGHGSAKVPLWKDPLSPSKWKEEHFVLASLSMWGVIFYGGYKLFSGKKEAKTEAGSPQA

SEQ ID NO: 7832 - protein, 207 aa, Avicennia marina
MLRVMKKSFKDSLKALEADIQHANTLASDYPTEHDGACLQMRLSYSPCAHLFLFLVQWADCHLAGVLGLIRILIYKAYEDGKTTRSICERKASLREFYGVIFPSLLQLHRGITDVEERKQRVIIPQLNTRRRDEMAKGKLSEIEIEREEECAICMEMNSKVVLPSCSHSMCMKCYRNWRARFSVVPVLSRQSKEDEFWGALDLHKPL

SEQ ID NO: 7833 - protein, 139 aa, Glycine max
  unsure (1)..(139): unsure at all Xaa locations
VQIYHLNLTIWTFVPDSLSINHVCPIIHIHPMKQKPSKRDLLSDLTCDSHLKIDMFINRQSNLPLHEMXRGSYYLKMLLPSAYEEAXGGAHNIFGNLSLITVTHSDGSHSFMLTRAVLVPSYGDVLTVMQHQTRLMFKT

SEQ ID NO: 7834 - protein, 479 aa, Erwinia carotovora subsp. atroseptica SCRI1043
MSTTQKRMYINGEFVENRSGKWIDVVNPATEQVISQVPEGSADDAKRAIDAAEAAQPSWEALPAVERGVWLHKIAAGIREREAELTDTIIAEGGKTHGLAQTEVLFTADYLDYMAEWARRYEGEIIQSDRPNENIFVFRKAIGVTTGILPWNFPFFLIARKAAPALITGNTIVIKPSEITPNNAVIFAEIIHKIGLPKGVINFVTGYGPTVGQELAGNPKVGMVSLTGSVAAGIATMTAAAQNVTKVSLELGGKAPAIVMDDADLDLAVKAIVSSRVINSGQVCNCAERVYVQKGIYDEFIIRIKAAMEQVTFGNTAEKKTLDMGPLISAAALQRVEDKVAKAVSQGAKVLLGGKSESGTGYFYPPTLLVNVTQEMPIMHEEVFGPVLPVATFDTLEDAIAMANDSEYGLTSSIYTQNINTAMKALKGLKFGETYINRENFEAMQGFHAGWRKSGVGGADGKHGLQEYLQTHVAYLQFH

SEQ ID NO: 7835 - protein, 139 aa, Brassica napus
  unsure (1)..(139): unsure at all Xaa locations
MASSMLXSXXGXTSPXXXTMXXPFSGLKXSAAFXXXXXGNNDITXXXXXGXXVXCMKXXXPXXKXKFETLSYLPDLTEVELXKEXXXLLRXKWIPCVEFEXQHGFAYREHXSTPXYYXXRXXTMWKXPLFXCXDSAQVL

SEQ ID NO: 7836 - protein, 166 aa, Glycine max
  unsure (1)..(166): unsure at all Xaa locations
MRTKKKEVAYSMISCPVVTTRQRAHGDRYWTVPFTGLKSMAGFPTRKTNNDITXIASNGGRVQCMQVXWPPIGKKKIETLSYLPDLDDAQLAKEVEYLIRKGWIPXLEFELEHGFEYREHNGSPGYYQGLYWTXWKLPMSGCTDASQVLKEHQEAKTAYPNGFIRI

SEQ ID NO: 7837 - protein, 335 aa, Bacillus cereus G9241
MKQTKLTGRIVVPSDPDYDVARMNLNLSIPKLPCIIVFCQNKNDVCNALKWARERHVPFRLRSGRHSYENFSLLNRGLIIDVSEMHRITVHTDKLTATIEAGANLGIVYKELWNYGVTIPAGTSASVGIVGLALGGGIGMLSRLFGLTCDQLIEVEMVQACGKFGAKIIRASEHENHNLFWACRGGGGGNFGIITSLTFRVHPIKNVSIFSITWEWEDFITAFQAWQNWAPYVDERLTSSIELFTKQQNKIEAQGEFVGSPSELHSLLSPLLETGTPSLFIDEVPYIKAVEFFNSGNIPENFKRSGSYVYKPIPLKGIQIMQYFLSHAPNKDASI

SEQ ID NO: 7838 - protein, 175 aa, Glycine max
PCSCLQEMFIFSFKNVFPLCLFVFFVENAYLALISGGDMTNGESKRVKLNRMKHLREAMEVLKDMFGPNIPDATDILVPRWWNNRFQRGSYSNYPVISNLQVVRDVKAPVGRIFFTGEHTSERFSGYVHGAYLAGINSSKELLEEMRKDNKRKNKSQSRVLEPLSALTECNIPRQ

SEQ ID NO: 7839 - protein, 316 aa, Glycine max
MALPYPFSYLLFLLLILLSSLPNISQATSRAPNRMLALVQNQPLVLKYHKGPLLKGNITLHLLWYGTFTPTQRSIVIDFLESLTSTSAPGAPSVSTWWQTTESYRGGPCTLVVGNQILDETYSLGKSLKNDHLVALASNPKLNSAPGDRVIHVILTAADVAVEDFCMNQCGTHGRGKNGNSEKIAYAWVGNSVTQCPGQCAWPFHQPLYGPQTAPLVAPNGDVGVDGMVINLATVLAGAVTNPFEDGYYQGPASAPLEAVSACTGIFGKGAYPGYAGNVLAENATGASYNAVGVRGRKFLLPAMWDPLTSTCKTLV

SEQ ID NO: 7840 - protein, 233 aa, Magnaporthe grisea 70-15
MADVDMTDAPGGAGPVAKKKGGDGAAGEGKKRFEVKKWNAVALWAWDIVVDNCAICRNHIMDLCIECQANQASATSEECTVAWGICNHAFHFHCISRWLKARQIPPPKSHDHHRSAFSSITMFCDVCSGFDPPPTGSHLTGWRLKNGQGGRTRANAEPLISLAYNNVAAQSPSLRQLNAIVGSKTGPDPTLGLSGLRSLPHKTSGCINSPLSLDSSRRKSCSIKIYKDLRRVW

SEQ ID NO: 7841 - protein, 334 aa, Bradyrhizobium japonicum USDA 110
MTSNPWLTLLGLINGFQVTQAIHVASTLRIADHLKGDSRSAEELAPLTQSHPGALYRLLRALAAVGVFEEDEDRRFALTPMGDCLRTDSATPIGAWAECVGSPYVWSTWGHLLHSIRTGENAFQSLNGKDIWNYRAERPEESAVFDRAMTEFSRGGAEAVIGAYDFSAFHHVVDVGGGRGLMLAAILTAHPRMQGTLFDQPGVIAGAEAVLEAHGVVDRCRMVSGSFFESVPEGGDAYVMRVVIHDWDDDEAIAILKACRRAMRETAKLVLIERIIAPANEVPATKFMDLHMLALPGGRERTRDEFSDLLAKSGFELTRVVPAGRINVIEARPY

SEQ ID NO: 7842 - protein, 279 aa, Bacillus cereus ATCC 14579
MKNLQSKAVLNNGVEMPWFGLGVFKVEEGPELVEAVKSAIKAGYRSIDTAAIYGNEKAVGEGIRAGIEATGIAREELFITSKVWNADQGYETTIAAYEESLKKLGLDYLDLYLVHWPSEGKYKDTWRALETLYKEKRVRAIGVSNFQIHHLQDVMKDAEIKPMINQVEYHPRLTQKELQAFCKEQGIQMEAWSPLMQGQLLDNETLQEIAEKHGKTTAQVILRWDLQNGVITIPKSTKEHRIIANADVFNFELTKEDMEKIDALNQNHRVGPDPDNFDF

SEQ ID NO: 7843 - protein, 169 aa, Oryza sativa
MASSATTVAPFQGLKSTAGMPVARRSNSSFGNVSNGGRIRCMQVWPIEGIKKFETLSYLPPLTVEDLLKQIEYLLRSKWVPCLEFSKVGFVYRENHKSPGYYDGRYWTMWKLPMFGCTDATQVLKELEEAKKAYPDAFVRIIGFDNVRQVQLISFIAYKPPGCEESGGN

SEQ ID NO: 7844 - protein, 153 aa, Glycine max
  unsure (1)..(153): unsure at all Xaa locations
NFLYQWAFAIAAAGITSGSIAERTQFVAYLIYSSFLTGFVYPVVSHWFWSADGWASAISSADHVFSPGDRLLSTGVIDFAGSGVVHMVGGVAGFWGALIEGPRIGRFDHGGXRAXALRGHSASLVVLGTFMLWFGWYGFNPGSINKILVSYGN

SEQ ID NO: 7845 - protein, 278 aa, Corynebacterium sp.
MTVPSIVLNDGNSIPQLGYGVFKVPPADTQRAVEEALEVGYRHIDTAAIYGNEEGVGAAIAASGIARDDLFITTKLWNDRHDGDEPAAAIAESLAKLALDQVDLYLVHWPTPAADNYVHAWEKMIELRAAGLTRSIGVSNHLVPHLERIVAATGVVPAVNQIELHPAYQQREITDWAAAHDVKIESWGPLGQGKYDLFGAEPVTAAAAAHGKTPAQAVLRWHLQKGFVVFPKSVRRERLEENLDVFDFDLTDTEIAAIDAMDPGDGSGRVSAHPDEVD

SEQ ID NO: 7846 - protein, 161 aa, Oryza sativa (japonica cultivar-group)
MSDSEEHHFESKADAGASKTYPQQAGTIRKNGHIVIKNRPCKVVEVSTSKTGKHGHAKCHFVAIDIFNGKKLEDIVPSSHNCDVPHVNRTDYQLIDISEDGFVSLLTESGGTKDDLRLPSDEALLTQIKDGFAEGKDLIVTVMSAMGEEQICALKDIGPKN

SEQ ID NO: 7847 - protein, 355 aa, Trichoderma atroviride
MSRSTAPNASASRKISFNVSEQYDIQDVVGEGAYGVVCSAIHKPSGQKVAIKKITPFDHSMFCLRTLREMKLLRYFNHENIISILDIQKPRSYDSFNEVYLIQELMETDMHRVIRTQDLSDDHCQYFIYQTLRALKAMHSANVLHRDLKPSNLLLNANCDLKVCDFGLARSAASQEDNSGFMTEYVATRWYRAPEIMLTFKEYTKAIDVWSVGCILAEMLSGKPLFPGKDYHHQLTLILDVLGTPTMEDYYGIKSRRAREYIRSLPFKKKVPFRTLFPKTSDLALDLLEKLLAFNPVKRITVEDALKHPYLEPYHDPEDEPTAPPIPEEFFDFDKHKDTLSKEQLKQLIYQEIMR

SEQ ID NO: 7848 - protein, 135 aa, Brassica napus
  unsure (1)..(135): unsure at all Xaa locations
MXSSMLSSAAVXTSPAQATMVAPFTXXXSSAAXPVTRKANNDXTXIASXXGRVSXMKXXXPXAXKKXETLXXXPDLTEXXLXXEXDYLLRNKXIPCVEXXLEHXLVXXXHGSTPGYYDGRDXTMXKLPLXFGXXD

SEQ ID NO: 7849 - protein, 230 aa, Oryza sativa (japonica cultivar-group)
MDSLYDISCFAAGLAGNIFALALFLSPVTTFKRILKAKSTERFDGLPYLFSLLNCLICLWYGLPWVADGRLLVATVNGIGAVFQLAYICLFIFYADSRKTRMKIIGLLVLVVCGFALVSHASVFFFDQPLRQQFVGAVSMASLISMFASPLAVMGVVIRSESVEFMPFYLSLSTFLMSASFALYGLLLRDFFIYFPNGLGLILGAMQLALYAYYSRKWRGQDSSAPLLLA

SEQ ID NO: 7850 - protein, 295 aa, Oryza sativa (japonica cultivar-group)
MPMSDPTAAVIPKPGGIGVGGGGGDDEEPVEIREVWADNLEEEFALIRDVVDEFPFVAMDTEFPGIVCRPVGAFRSPADYNYATLKANVDMLHLIQLGLTFSSPRGELPALGPGRRRCVWQFNFREFDDARDIFASDSIELLRRSGIDFRRNSERGVDARRFAELLMSSGVVLNDSVYWVTFHAGYDFGYLLKILTCSSLPDTQAGFFKLMKIYFPTVYDIKHLMKFCNSLHGGLNKLAELLDVERVGESHQAGSDSLVTSCAFWKLKDSFFAGSTEKYAGVLYGLNAENVVSAH

SEQ ID NO: 7851 - protein, 73 aa, Zea mays
  unsure (1)..(73): unsure at all Xaa locations
MADGRCCTFLEILFAIILPPLGVFLRFGCCRIEFCICLLLTILGYVPGIIYAIYVLVAXLDSDQHEREYYTLA

SEQ ID NO: 7852 - protein, 342 aa, Parachlamydia sp. UWE25
MKGLVKKISAPGLWMENLPIPSHVKDDEVLIKTIKTSICGTDVHIYKWDAWAQKNVPVPLVIGHEFIGEIAEFGKNVKGFKIGERVCGEGHIVCNQCPNCRMGRKHVCMHTKGLGYHISGCFAEYFVLPAENVFSLPPSISDDLGAIFDPYGNAVHTTLAFNLIGEDVLITGAGPIGIMAAAIAKQAGARHIVITDVNDYRLDLARTMGVSHAINVNRESLDNFMQSLGIKYGFTVGLEMSGHPDGLKTLTEKIRHGGNIALLGILPPATSIDWNLVIFKMLTLKGIYGREIFSTWYQMVHLLEIGLNLAPIITHHFSVDNFEKGFEVMLSGQSGKVILDWV

SEQ ID NO: 7853 - protein, 302 aa, Zea mays
  unsure (1)..(302): unsure at all Xaa locations
MDPMDIVGKSKEDVSLPKXTTMFKIIKEMLPPDVRVARDAQDLLVECCVEFINLLSSESNEVCSREEKKTIAPEHVIKALSDLGFREYIEEVYAAYEQHKLDTLDSPKAGKFTGIEMTEEEAVAEQQRMFAEARARMNNGAPKPKETEQEPPQQPQAQPQLQLHTEPQQPVQSQVQLHSPTQHSLQPQVQLHPQPQQLPQVQVHSQTQLHPQPQQPQVQVHPQLQQLPQLXAHSQPPQPQVQIHPQPQQPPQVQLQSSVQQTSQPQPQVHLYNHRGGSQAQLQPQLPGQLQTQGQTGPGIDS

SEQ ID NO: 7854 - protein, 369 aa, Triticum aestivum
  unsure (1)..(369): unsure at all Xaa locations
MDRVLLPVRVKEEWPPPPPEEEEELEHGGLAPRPMEGLHETGPPPFLTKTFDLVADPATDGVVSWGRAGNSFVVWDPHLFAAVLLPRFFKHSNFSSFVRQLNTYGFRKIDPDRWEFANEGFIRGQRQLLKMIKRRRPLSYLPSPQHQALGSCLEVGQFGLDEEIEVLKRDKNALLEEVVKLRQEQQSSRADMRAMEERLHRVEQKQLQMMGFLARAIQNPDFFLQLIQQQDKLKDLEDAYSNKRRRSIDVMPFLGPEETSQSEPLESTFIFEDREFSELENLAMNIQGIRKGMEGDRGGRDQGCGEAELTDDFWEELLSEGMRDEAEMVELERRRSRYVDAXAPSMGHLSYSDPKSTRIHNHLIYIPLY

SEQ ID NO: 7855 - protein, 121 aa, Zea mays
KLAGCSGVRDHRRGTKARDNRCVNESIAMASRLVAAAASSSSLSSASPLARLISRRGLAGAADGHGSAKVPLWKDPLSPSKWKEEHFVLASLSMWGVIFYGGYKLFSGKKETKTEAASPQA

SEQ ID NO: 7856 - protein, 348 aa, Pyrococcus abyssi GE5
MSEKMVAIMKTKPAYGAELVEVDVPKPGPGEVLIKVIATSICGTDLHIYEWNEWAQSRIKPPQIMGHEVAGEVVEVGPGVEGIEVGDYVSVETHIVCGKCYACRRGQYHVCQNTKIFGVDTDGVFAEYAVVPAQNVWKNPKSIPPEYATLQEPLGNAVDTVLAGPISGKSVLITGAGPLGLLGIAVAKASGAYPVIVSEPSDFRRELAKKVGADYVINPFEEDVVKEVMDITDGNGVDVFLEFSGAPKALEQGLQAVTPAGRVSLLGLYPGKVSIDFNNLIIFKALTVYGITGRHLWETWYTVSRLLQSGKLNLDPIITHKYKGFDKYEEAFELMRAGKTGKVVFMLK

SEQ ID NO: 7857 - protein, 162 aa, Zea mays
MCPIKRETTSAESGSPCSSSTSTSSSSEHHQTAWASPPKKRPAGRTKFRETRHPVFRGVRRRGRAGRWVCEVRVPGRRGCRLWLGTFDTAEAAARAHDAAMLAVAAGAARLNFADSAWLLAVPTASYASLADVRRAVAEAVESCPVPQFGNCTKVTAASINE

SEQ ID NO: 7858 - protein, 296 aa, Methylobacillus flagellatus KT
MTSARKKAEETMEFTDVVIEVLDARVPEASHNPMIEELRLHRQRPSLKILNKADLADPAVTQAWLNHFNRQDGIKAVALSCKKPGDAKKIPDLCRSLAPHRGSHLKPLRMMIMGIPNVGKSTLMNALLNRRIAKVGDEPAVTKSQQRFELSPQLTITDTPGMMWPKIKYDSDGYMLAASHAIGRNAVIDEEVAEFLAGILLERYPALLQSRYKIDVSNMDAIDLLEAIGKRRGYLLKGGALDMEKTAMAFLVDYRSGTLGRISLETPESRAAMMTEALARQKAREESQEEKTKTEP

SEQ ID NO: 7859 - protein, 473 aa, ASPERGILLUS NIDULANS FGSC A4
MSMPPAALSSLRTALTSSLVFTPGDEGYLDSLRRWSDTGRKEAGIVIQPTETADIQTALKWVQEHQIDLAVKCGGHSVSGTSSSAGGLVIDLSRMNGVSVDIQKKTVTVGGGAVWKDVDEAAAAYGLAAVGGTVNHTGVGGLTLGGGYGWLSGQYGLTIDNLVSATVILANGETVIASETENSDLFWALRGAGYNFGVVTSFTFQAHEQPEPVYAGILAYTPDKVERVVEILNALLLDKPDPRSGAICIFAEPPGAPTPMVNVLVFYNGTQAEGEARFADLLGLSPIANTVSMIPYSQMNSLQNPMATYGDRKSFKGVFFNPPLSPQFAKTMLEEFTAKVKSDPDLAASALLLEFYDMTKTVSVPRAATAFASRGTTQNGIITLRWSDATKDLEHRAWAREVQERWKDVLEKETDANLDAAGKAGVPQYINYAEPGDAVVGNIYGENLPRLKALKAKYDPTNVFRKMHPITLD

SEQ ID NO: 7860 - protein, 384 aa, Arabidopsis thaliana
MRNQGFTKEDRMNQLPEDLILRILSFLPTELVIATSVLSKQWRSLWKLVPNLEFDSDDYEINPVDIGLWIGIAFARHLRELVLYVAPKQTFTFPSSLCICNTLETLKLILGIHVDIPCPVLLKSLRTLHLDSVSYKDEESIRNLLSSCPILENLVVYEYWYNVVNFDIEVPSLKRLEICDVLHKKEFRRYTINVPCLKYLRIEGLNKDFELCLNAPELVEAYFTKGSLIIADKFLGSLKSAKRLSLDILALKMHTRREEWWNLLTVMLDSSPKLQVLKLIDHTQDVSKDNVVSEKWNEPKYVPECLLSHLETFVWIRYDWEREEEKEVATYILRNARWLKKGTISTNPIESKDLEKLEERRKMLNELDSVVRASNSCNLVFEFE

SEQ ID NO: 7861 - protein, 451 aa, Arabidopsis thaliana
MEQGESLRIRVVMGKDRISELPDGLLLKILSSLPTNIVVATSVLSKQWRSLWKLVPNLEFDSDDYESEHYTFSEIVCKSFLSHKAPVLESFRLKFVNFNPVDIGLWVGIAFSRHLRELVLDFYPAELGKGVTFTFPSSLCTCNTLETLKLVLCILVDIPSPVLMKSLRTLHLEFVRYKDESSVRNLLSGCPGLEELRLYRGDDSDIKVFTIEVPSLQRLTIHDNNDGPEFWGYVINAPFLKYLLIEELRCPEFCLNAPELVEANIAEVTSITIEKFLGSFTSVSRLLLNLSPLKITYPTGSMFYQLVSLEMYTREAEWWNLLTLMLENSPKLQVLKLTDRSQNFHKDGLVSGKWNEPKDVPECLLSQLETFVWRRFDWGREEEKEIATYILKNGRRLKKATFSTNPIESEELNKLKERRKVLNGLDGVVRASNSCQLVFKFDPSYLGSDSP

SEQ ID NO: 7862 - protein, 428 aa, Tropheryma whipplei TW08/27
MTRQSFFIKNVTLPGLGARTLFLSGGLIQEIICKDIEEHQFLSTKNTDKASCRVIDAEGFIALPGLVDLHTHLRNSRDGSIRDVTSAAIAGGYTTVSSMPNMHPVQDSPEAVNILKAIAKEDAVCDIRPVGAVTKGLRGNEITDMHSLLDAGVNIFSDDGNCVYDPGIIHQALSFAGRNNCVIAQHAQDPTLTKSAQGDTQGPIVAPKSLWPSIAESTIVARDILLARAANARLHVCHVSSQESVYAIAWGKSLGVQVTAEVTPHHLLFYDSLVMTGDTRFKVNPPLRSKESVECLRDALIRGVIDVVATDHAPHRNKSPFWHSAPNGMTGLEFSVSVIQKIFVNSGHLTWPEVVRIMSNKPAEILGMTPNTVKEGSAANFFLYNPDVTRFVTFDDSLGPSVNSPYAGMNLPGKVMYTFYEGRLVFEN

SEQ ID NO: 7863 - protein, 355 aa, Glycine max
GVLVCAAGQEFRGDVALCTVPLGVLKKGDIEFVPELPQRKKDAIHRLGFGLLNKVAILFPYNFWGGDIDTFGHLTEDLSMRGEFFLFYSYSSVSGGPLLVALVAGEAAIRFEMMLPVESVKRVLDILKDIFNPKGIVVPDPVQAVCTRWGKDHFAYGSYSYVAVGSSGDDYDILAESVGDGRVFFAGEATSKQYPATMHGAFLSGMREAANILRVAKRRSSMTIDTTKSVNQENDDLNKLFVKPDLTFGSFSALFDLNLNDHDSSSLLRVKIGGVVLDSGSLYLYAWLSKKRVIELSQVEGDENRMRMLNRNFGVSLVGRKGLSSAAESLIANIKLSRPNFNETENGLMAEKENS

SEQ ID NO: 7864 - protein, 427 aa, Arabidopsis thaliana
HREGIYLNDFAKFIVPINENGTTESERKRGVVREDLISELPEDLLLLILSYLPTKKVITTKNVGRSLFLHKAPVLESFHLKVCDINDDRPACDDIDIGIWIGIAFERHVRELVLDLCLQKSVRFPISSMFSTLETLILKYLALVDVPSPVCMKSLRTLHLDCVNFKHNESFSNLISGCPNLEDLFMYQYYPLDVVMNFIIVAPSLKRLVIIDYREAGGYVINAPTLKYLKIKGLSHCGFCLIENAPVLVEAKIRNLFYIYKEKILGSLKSAKRLSLDLSPLECPIDSIFYQLVHLEIYTCKEEWWNLLKLMLDSSPKLQVLKLIGKNLDFKKVGMVGGKWNEPKNVPECLLSQLKMFVWTSYHWESEVEKEVATYILKNARQLKNVSFSTRPIHSKEHNKLEEKCKMLKELDGVVRASSSCHLVFIE

SEQ ID NO: 7865 - protein, 247 aa, Brassica napus
  unsure (1)..(247): unsure at all Xaa locations
VGFKSNLKAVSLELGGKSPFIVCEDADVDQAVEMAHFALFFNQGQCCCAGSRTFVHERVYDEFVEKAKARAINRAVGDPFKSGIEQGPQVDSEQFEKILKYIRHGVDSGATLQAGGDRHGSKGYYIQPTVFSDVKDDMLIAKDEIFGPVQTILKFKNLDEVIARANNSRYGLAAGVFTQNLDTANRLMRALRVGSVWINCFDVFDATIPFGGYKMSGIGREKGIYSLNNYLQVKXAVVTSIKNPAWL

SEQ ID NO: 7866 - protein, 165 aa, Capsicum annuum
MASQREENVYMAKLAEQAERYEEMVEFMEKVVAALDGGDELTVEERNLLSVAYKNVIGARRASWRIISSIEQKEESRGNEDHVTSIKNYRSKIEIELTSICNGILKLLDSKLIGSAATGDSKVFYLKMKGDYYRYLAEFKTGAERKEAAENTLSLISLLRILLMP

SEQ ID NO: 7867 - protein, 307 aa, Staphylococcus aureus subsp. aureus Mu50
MNAAVRAVVRTAIYNEIEVYGVYHGYQGLLNDDIHKLELGSVGDTIQRGGTFLYSARCPEFKEQEVRKVAIENLRKRGIEGLVVIGGDGSYRGAQRISEECKEIQTIGIPGTIDNDINGTDFTIGFDTALNTIIGLVDKIRDTASSHARTFIIEAMGRDCGDLALWAGLSVGAETIVVPEVKTDIKEIADKIEQGIKRGKKHSIVLVAEGCMTAQDCQKELSQYINVDNRVSVLGHVQRGGSPTGADRVLASRLGGYAVDLLMQGETAKGVGIKNNKIVATSFDEIFDGKDHKFDYSLYELANKLSI

SEQ ID NO: 7868 - protein, 111 aa, Bartonella tribocorum
ANEACLKMLQEIGSIKRIPEFIARAKDKNDPFRLMGFGHRVYKNYDPRAKILQKTCHEVLKELNIQDDPLLDIAIELEKIALNDEYFIEKKLYPNVDFYSGITLKALGFPT

SEQ ID NO: 7869 - protein, 503 aa, Arabidopsis thaliana
MGNCCRSPAAVAREDVKSNYSGHDHARKDAAGGKKSAPIRVLSDVPKENIEDRYLLDRELGRGEFGVTYLCIERSSRDLLACKSISKRKLRTAVDIEDVKREVAIMKHLPKSSSIVTLKEACEDDNAVHLVMELCEGGELFDRIVARGHYTERAAAGVTKTIVEVVQLCHKHGVIHRDLKPENFLFANKKENSPLKAIDFGLSIFFKPGEKFSEIVGSPYYMAPEVLKRNYGPEIDIWSAGVILYILLCGVPPFWAESEQGVAQAILRGVIDFKREPWPNISETAKNLVRQMLEPDPKRRLTAKQVLEHPWIQNAKKAPNVPLGDVVKSRLKQFSVMNRFKRKALRVIAEFLSTEEVEDIKVMFNKMDTDNDGIVSIEELKAGLRDFSTQLAESEVQMLIEAVDTKGKGTLDYGEFVAVSLHLQKELCDALKEDGGDDCVDVANDIFQEVDTDKDGRISYEEFAAMMKTGTDWRKASRHYSRGRFNSLSIKLMKDGSLNLGNE

SEQ ID NO: 7870 - protein, 174 aa, Triticum aestivum
  unsure (1)..(174): unsure at all Xaa locations
MAPTVMASSATSVAPFQGLKSTAGLPVSRRSNGASLGSVSNGGRIRCMQVWPIEGIKKFETLSYLPPLSTEALLKQVDYLIRSKWVPCLEFSKVGFIFREHNASPGYYDGRYWTMWKLPMFGCTDATQVINEVEEVKKEYPDAYVRIIGFDNMRQVQVRQLHRFKPPGCEESXG

SEQ ID NO: 7871 - protein, 385 aa, Cupriavidus necator
MSEAQPLVTPKPKKSVALSGVTAGNTALCTVGRTGNDLHYRGYDILDIAETCEFEEIAHLLVHGKLPTKSELAAYKAKLKSLRGLPANVKAALEWVPASAHPMDVMRTGVSVLGTVLPEKEDHNTPGARDIADRLMASLGSMLLYWYHYSHNGRRIEVETDDDSIGGHFLHLLHGEKPSALWERAMNTSLNLYAEHEFNASTFTARVIAGTGSDMYSSISGAIGALRGPKHGGANEVAFEIQKRYDNPDEAQADITRRVENKEVVIGFGHPVYTTGDPRNQVIKEVAKKLSKDAGSMKMFDIAEALETVMWDIKKMFPNLDWFSAVSYHMMGVPTAMFTALFVIARTSGWAAHIIEQRIDNKIIRQSANYTGPENLKFVPLKDRK

SEQ ID NO: 7872 - protein, 355 aa, Pyrococcus abyssi GE5
MKQKKAWRIVKEVIGEADIVVEVVDARDPIGTRNRKLERMVIESGKKLLIVMNKADLVPKEWAEEYKKRSEIPVIFISARERKGTGILRKELKKMAKTIDKDKVKVALIGYPNVGKSTIINVLKGKHAVGTAPIPGYTKGKHLIRLTKRLWLLDTPGVVPIDDFDELVIKGGFPADKIEEPVKPALKLIRRILETRKEALTEKFDIREFRDEEDILRKIGERRGIIREGGEVDIEETARWFLREWQTGRFTLFSNDEEKKEEYIESFGEILEVIKQENLTEPRIILWKFRDLLEEYVGSEKRFGAIEVGDFTVAIATGFKKCPNAIKFIERITGKNVITSECFGKKWKGVVAILD

SEQ ID NO: 7873 - protein, 494 aa, Bacillus cereus ATCC 10987
MSQLAVNLHEKVEKFLQGTKKLYVNGSFIESASGKTFNTPNPATGETLAVVSEAGREDIHKAVVAARMAFDEGPWSRMSTAERSRLMYKLADLMEEHKEELAQLETLDNGKPIRETMAADIPLAIEHMRYYAGWATKIVGQTIPVSGDYFNYTRHEAVGVVGQIIPWNFPLLMAMWKMGAALATGCTIVLKPAEQTPLSALYLAELIEEAGFPKGVINIVPGFGESAGQALVNHPLVDKIAFTGSTPVGKQIMRQASETLKRVTLELGGKSPNIILPDADLSRAIPGALSGVMFNQGQVCSAGSRLFVPKKMYDNVMADLVLYSKKLNQGAGLSPETTIGPLVSEEQQKRVMGYIEKGIEEGAEVLCGGSNPFDRGYFVSPTVFADVNDEMTIAKEEIFGPVISAIPFNDIDEVIERANKSQFGLAAGVWTENVKTAHYVASKVRAGTVWVNCYNVFDAASPFGGFKQSGLGREMGSYALNNYTEVKSVWLNLN

SEQ ID NO: 7874 - protein, 447 aa, Zea mays
  unsure (1)..(447): unsure at all Xaa locations
MSAAATKVKRRVGKYELGRTIGEGTFAKVRFAKNTETGEPVAVKILDKEKVLRHKMAEQIKREISTMKLIKHPNVVRIYEVMGSKTKVYIVLEYVTGGELFDTIANQGRMREGEARSYFQQLINAVDYCHSRGVYHRDLKXNLLLDSYGNLNVSDFGLSALSQQIKDDGLLHTTCGTPNYVAPEVLEDQGYDGAMADLWSCGVILFVLLAGYLPFEDSNLMTLYKKISNAEYTFPPWTSFPAKRLNLLTRLVEQSXENSCDFRITIPEILEDEWFKKGYKRPEFDEKYDTPLDDVDAVFNDSEEHHVTEKKEEEPVALNAFELISRSAGLNLGNLFDSEQEFKRETRFTSKCPPKEIIRKIEEAAKPLGFGVQKKNYKLRLEKVKAGRKGNLNVATEILQVAPSLHMVQVRKAKGDTLEFQKFYKNLSKTLKDVVWKSEDLQMRAAS

SEQ ID NO: 7875 - protein, 148 aa, Glycine max
  unsure (1)..(148): unsure at all Xaa locations
IKYEKKALEVVGKRLKKNSVSLDVVNFGDDDDXDKPLKLEALLSSVNNNDGSHIVHVPSGPNALSDVLLSTPVFTGDEGASGYVSAAAAAAAAGGDFDFGVDPNIDPELALALRVSMEEERARQEAAAKKAADEAGQKXQDGXSAXXS

SEQ ID NO: 7876 - protein, 489 aa, Mesorhizobium loti MAFF303099
MLGIRAGDGDERAVFQQGKGHGEDKRLILQNGWPLRKPLTLPPQESMAMTYDLILTGGTVVNHDGEGARDIGVKNGRIAAIGDLRQASADETIDCRGLHILPGVVDSQVHFREPGLEHKEDLETGSRAAVLGGVTAVFEMPNTNPLTTSEATLADKVRRGSGRMHCDFAFWVGGTRDNARDVGELERLPGAAGIKVFMGSSTGDLLVEDDEGVASILRNTRRRAAFHSEDEFRLRERLGERIEGDPSSHPVWRDEIAALRCTERLVRIARDVRARIHVLHISTAEEILFLEQHKDVATCEATPHHLTLSADDYLRLGTLIQMNPPVRASRHRDGVWHGIAQGIVDVLGSDHAPHTLAEKAKPYPASPSGMTGVQTLVPIMLDHVNAGRLTLQRFVDLSSHGPQRIFGMARKGRIAAGYDADFTVVDMKRRETITNAQAGSKAGWTPYDGKEVTGWPVGTVIRGRRVMWEGEIVTPGQGRAVEFSEALPA

SEQ ID NO: 7877 - protein, 506 aa, Ralstonia eutropha JMP134
MNMAEIAQLGVTNPYKQQYENYIGGAWVPPAGGEYFEAITPITGKPFTRVPRSKQEDVDAALDAAHAAKAAWGRTSTTERANILNRIADRIEANLTLLAVAETIDNGKPVRETMAADLPLAVDHFRYFAGCIRAQEGGISEIDAETIAYHFHEPLGVVGQIIPWNFPLLMATWKLAPALAAGNCVVLKPAEQTPASILALMEVIGDLLPPGVVNVINGFGLEAGKPLASSPRISKVAFTGETTTGRLIMQYASQNLIPVTLELGGKSPNIFFEDVLAADDAYFDKALEGFAMFALNQGEVCTCPSRALIQESIYDRFMERALKRVAAIRQGHPLDKGTMIGAQASAEQLEKILSYIDLGRKEGAQCLAGGERNQFDGDLAGGYYVKPTVFKGHNKMRIFQEEIFGPVVSVTTFKDEEEALAIANDTLYGLGAGVWTRDGARAFRMGRGIQAGRVWTNCYHAYPAHAAFGGYKQSGIGRENHRMMLDHYQQTKNLLVSYSPNALGFF

SEQ ID NO: 7878 - protein, 147 aa, Myxococcus xanthus
MQTRNPFNSAVVVNPLMRDVDALFRELTQPMWRQAPRERTPAADITESESGLTLHLDMPGLEAKAIQVTVEKDILTVQSERKAEPRAEGVNVRRQERAFGTFARSFALPDTVDASRVEARYEQGVLTLTLPRREESKPRVIEVKVQG

SEQ ID NO: 7879 - protein, 490 aa, Pseudomonas aeruginosa PAO1
MARFEEQKLYIGGRYVEASSGATFETINPANGEVLAKVQRASREDVERAVQSAVEGQKVWAAMTAMQRSRILRRAVDILRERNDELAALETLDTGKPLAETRSVDIVTGADVLEYYAGLVPAIEGEQIPLRETSFVYTRREPLGVVAGIGAWNYPVQIALWKSAPALAAGNAMIFKPSEVTPLTALKLAEIYTEAGVPDGVFNVLTGSGREVGQWLTEHPLIEKISFTGGTSTGKKVMASASSSSLKEVTMELGGKSPLIIFPDADLDRAADIAVMANFFSSGQVCTNGTRVFIHRSQQARFEAKVLERVQRIRLGDPQDENTNFGPLVSFPHMESVLGYIESGKAQKARLLCGGERVTDGAFGKGAYVAPTVFTDCRDDMTIVREEIFGPVMSILVYDDEDEAIRRANDTEYGLAAGVVTQDLARAHRAIHRLEAGICWINTWGESPAEMPVGGYKQSGVGRENGLTTLAHYTRIKSVQVELGDYASVF

SEQ ID NO: 7880 - protein, 534 aa, Glycine max
MGNCCATPSTDETANKKGKKGKKENPFAIDYGFNATAANGSKLTVLKSPTGREIEARYELGRELGRGEFGITYLCTDKGTGEELACKSISKKKLRTAIDIEDVRREVEIMRHLPQHANIVTLKDTYEDDNAVHLVMELCEGGELFDRIVARGHYTERAAAAVTKTIVEVVQMCHKQGVMHRDLKPENFLFANKKETAALKAIDFGLSVFFKPGEKFNEIVGSPYYMAPEVLKRNYGPEVDIWSAGVILYILLCGVPPFWAETEQGVAQAIIRSVVDFKRDPWPKVSDNAKDLVKKMLDPDPKRRLTAQDVLDHPWLQNAKKAPNVSLGETVRARLKQFSVMNKLKKRALRVIAEHLTVEEAAGLKEGFQVMDTNNRGKINIDELRVGLHKLGHQVPESDVQALMDAGDVDGDGHLDYGEFVAISVHLRKMGNDEHLRKAFQFFDQNKSEYIEIEELSSALSDDLDTNSEEVVNAIMHDVDTDKDGRISYDEFSTMMKAGTDWRKASRQYSRERFASLSLTLMRDGSLHLNNEKQ

SEQ ID NO: 7881 - protein, 194 aa, Magnaporthe grisea
MVVATIKCVVVGDGAVGKTCLLISYTTNKFPSEYVPTVFDNYAVTVMIGDEPYTLGLFDTAGQEDYDRLRPLSYPQTDVFLVCFSVTSPASFENVREKWFPEVHHHCPGVPCLIVGTQVDLRDDPSVREKLSKQKMQPVRREDGERMAKELGAVKYVECSALTQYKLKDVFDEAIVAALEPPTPKRKSKKCLIL

SEQ ID NO: 7882 - protein, 374 aa, Zea mays
MVLEATMICVDNSEWMRNGDYPPSRFAAQAHAFAVLSGAKTEANLESTVGLVAMAGKGVSVLVPPTNDFGKVLSGMNGLEIGGEANLTAAIQVAQFALKNRQNKQLRQRIIVFVGSPVIDEKNWLEVIGKNLKKNNVALDVVNFGESDNEKPEKLEALVAAVNSGGNSHIIHIPAGRDLSDALFSSPIILSEDRGSDSAAAARGASGFEFDVDPNVDPELALVLLISMEEERLRQEAAAKKAREESSKTENEGQSSTSNGDIVMADAEPEPNSYTEDKGLHCKDEGQLLEKARKIRIEDYISFEELFDGVTSDTMSAFQEEETCTQSDAGKDFGHQPFEPSPKKRHKKYKRRHHQKKPKKKREKKEDEAEGDKL

SEQ ID NO: 7883 - protein, 301 aa, Arabidopsis thaliana [sequence omitted]

SEQ ID NO: 7884 - protein, 378 aa, Glycine max
SARDFVMEYAKGGELFKKVAKGKLKEEVAHKYFRQLVSAVDFCHSRGVYHRDIKPENILLDENENLKVSDFGLSALAESKRQDGLLHTTCGTPAYVAPEVIKRKGYDGAKADIWSCGVVLFVLLAGYFPFHDPNMMEMYRKISKAEFKFPSWFPQGVQRLLRKMLDPNPETRISIDKVKQCSWFRKGPNGRQKTQEGENLCVSPSVTNHSEQCGDESDDLAAEAREEQVVPVSINAFDIISLSPGFNLCGFFEDSIQKREARFTSRQPASVIISRLEEIAKQMRMKKKKRAAGLLKLEGLHEGRKGILSIDTEIFEVTPLLHLVEVKKSNGDTLEYEKILKEDIRPALKDVVWVWQGDQQEQSQQLEQQKQQQQLPQS

SEQ ID NO: 7885 - protein, 301 aa, Arabidopsis thaliana
MVFVKSSKSNAYFKRYQVKFRRRRDGKTDYRARIRLINQDKNKYNTPKYRFVVRFTNKDIVAQIVSASIAGDIVKASAYAHELPQYGLTVGLTNYAAAYCTGLLLARRVLKMLEMDDEYEGNVEATGEDFSVEPTDSRRPFRALLDVGLIRTTTGNRVFGALKGALDGGLDIPHSDKRFAGFHKENKQLDAEIHRNYIYGGHVSNYMKLLGEDEPEKLQTHFSAYIKKGVEAESIEEMYKKVHAAIRAEPNHKKTEKSAPKEHKRYNLKKLTYEERKNKLIERVKALNGAGGDDDDEDDEE

SEQ ID NO: 7886 - protein, 328 aa, Glycine max
SPRAEFGTRPRADLVPIRHEATIVFPNSSAQQRMPVVGMGSAPDFTCKKDTKEAIIEAVKQGYRHFDTAAAYGSEQALGEALKEAIHLGLVSRQDLFVTSKLWVTENHPHLVLPALRKSLKTLQLEYLDLYLIHWPLSSQPGKFSFPIEVEDLLPFDVKGVWESMEECQKLGLTKAIGVSNFSVKKLQNLLSVATIRPVVDQVEMNLAWQQKKLREFCKENGIILTAFSPLRKGASKGPNEVMENDVLKEIAEAHGKSIAQVSLRWLYEQGVTFVPKSYDKERMNQNLQIFDWALTEEDHHKIDEIYQSRLISGPTKPQVTDLWDDEI

SEQ ID NO: 7887 - protein, 497 aa, Chromobacterium violaceum ATCC 12472
MSTGTINWQKKAEQLHFEGRAYIDGAYRKALSGKEFTTINPATGKVLASIEWCGKEDVELAVCAARRAFDGGAWSELATRSRMEILKRFASLIQDNIEELALLESLDVGKPIANSLSVDISNTAYCISWFAELIDKAPGEVVPVDPALLGMVTREPVGVVAAIVPWNFPLMMASWKFAPALAAGNAVILKPSEKSPLTAIRVAALAEAAGIPPGIFQVLPGAGDVGQALASHLDVDCVAFTGSTAVGKQIANYAAQSNLKRVWLELGGKSPNIILADCKDLKEAAKAAAGAICYNAGQMCTAGSRVLVAREIREAFLSELKVAMADYRPGDPLSPETNLGAVVDQRQFDKILSYITQGQNEGAKLLQGGAAVQTVHPNGLFIEPAIFDCPQPNLTICREEIFGPVLSVITFDDVDEAVRIANDSQYGLGAAVWTQNVSTAHKVARRLRAGTVWVNCYEEGGDMNLPFGGYKQSGNGRDKSLHALEKYTELKSTLIKL

SEQ ID NO: 7888 - protein, 332 aa, Triticum aestivum
  unsure (1)..(332): unsure at all Xaa locations
MKTLLILTIIAVALTTTTANIQVDPSXGQVQWPQQQQPFPQPQQPQQIFPQPQQTFPHQPXQQAFPQPQQTFPHQPQQQFPQPQQPQQPFPQQPQQQFPQPQQPQQPFPQQPQQQFPQPQQPQQPFPQPQQPQLPFPQQPQQPFPQPQQPQQPFPQLQQPQQPLPQPQQPQQPFPQQQQPLIQPYXLQQQMNPCKNYLLQQCNPVSLVSSLVSMILPRSDCKVMRQQCCQQLAQIPQQLQCAAIHGVVHSIIMQQEQQQQQQQQQQGIQIMRPLFQLVQGQGIIQPQQPAQLEVIRSLVLGTLPTMCNVFVPPECSTTKAPFASIVADIGGQ

SEQ ID NO: 7889 - protein, 264 aa, Brassica napus
RFLWLCWSSGDIHGQYQDLLRLFEYGGYPPSANFLFLGDYVDRGKQSLETICLLLAYKIRYPSKIYLLRGNHEDAKINRIYGFYDECKRRFNVRLWKIFTDCFNCLPVAALIDDKILCMHGGLSPELDNLNQIREIQRPTEIPDSGLLCDLLWSDPDQKIEGWADSDRGISCTFGADKVAEFLDKNDLDLICRGHQVVEDGYEFFAKRRLVTIFSAPNYGGEFDNAGALLSVDESLVCSFEIMKPALASSSGHPLKKVPKMGKS

SEQ ID NO: 7890 - protein, 201 aa, Triticum aestivum
  unsure (1)..(201): unsure at all Xaa locations
SRPGVCAIRQLFPIIPSQRLQERPAVDGVLSDLTCDSDGKVDQFIGGRSSLPLHELPAHGTRGYYLGMFLGGAYQEALGGLHNLFGGPSVVRVSQSDGPHCFAGTPAAPGPSCADGLRAMEPARAATREVLKQRTTDDGATAAALARAFGSMPYLSFDAEEAVAMSGAESSGXMSSDSEGSAAGAAEDDDEEWEFMRGLTV

SEQ ID NO: 7891 - protein, 403 aa, Oryza sativa (japonica cultivar-group)
MKDLFGDGIFATDGDMWRHQRKLASYEFSTKVLRDFSSDTFRRNAAKLAEKISCAAANRISINIQDLLMRATMDSIFKVGFGFELNTLSGSDESGIQFSKAFDEANSLVYYRFVDIMWKLKRYLNIGSEAKLKRNIQIIDSFVMKLIHQKREQMKIAADYKTKEDILSRFVLASEQDPGTMDDRYLRDIVLNFLIAGKDTTGNTLTWFFYLLCKNPIVQDKVALEIREFVEWSKEDNTIESFTKRLDEGAISKMHYLQATISETLRLYPAVPVDAKMADEDDVLPNGYRVVKGDGINYMIYAMGRMTYLWGEDAQEFRPERWLVNGVYQQESPFKFVSFNAGPRICLGKEFAHRQMKIMAATLIHFFKFRLEDESKEPIYKTMFTLHIDNGLHLLANPREISP

SEQ ID NO: 7892 - protein, 482 aa, Oryza sativa (japonica cultivar-group)
MVPAGDQAEEAIVADAGKEEAEVRAAMGVEQDGKFSMTSLLWHGGSVWDAWFSCASNQVAQVLLTLPYSFSQLGMLSGLLLQVFYGLMGSWTAYLISVLYVEYRARKEKEGVSFKNHVIQWFEVLDGLLGPYWKAAGLAFNCTFLLFGSVIQLIACASNIYYINDRLDKRTWTYIFGACCSTTVFIPSFHNYRIWSFLGLGMTTYTAWYLAIAAAVHGQVDGVTHSGPSKMVLYFTGATNILYTFGGHAVTVEIMHAMWKPQKFKYIYLVATLYVFTLTLPSASAMYWAFGDALLTHSNAFSLLPRSGWRDAAVILMLIHQFITFGFACTPLYFVWEKAIGMHGTRSVLTRALARLPIVVPIWFLAIIFPFFGPINSAVGALLVSFTVYIIPSLSHILTYRSASARLNAAEKPPPFLPSWSGMFVVNVFVVAWVLVVGFGLGGWASVTNFIKQIDTFGLFAKCYQCPPRAHAGAPLPAPPRH

SEQ ID NO: 7893 - protein, 267 aa, Bordetella parapertussis 12822
MTIPSFGVGTFRLTGQTVIDSVRNAIDLGYRAVDTAQIYGNETEVGQAIAESGVARSELFVTTKIWTDNYARAKLLPSLRASLEKLRTDYVDLTLIHWPAPGNGVALPEYMEALAEAKALGLTRRIGISNFNIALTRQAIAAVGQGEIATNQIELSPYLQSARLTAFLREQGIAVTSYMTLAYGKVLKDPVLARIADKHRSTVAQVALAWALQQGYAVIPSSTKRENLASNLLARGLALDADDMARIAALERNGREVDPEGLAPAWD

SEQ ID NO: 7894 - protein, 386 aa, Arabidopsis thaliana
MVLEATMICIDNSEWMRNGDYSPSRLQAQTEAVNLLCGAKTQSNPENTVGILTMAGKGVRVLTTPTSDLGKILACMHGLDVGGEINLTAAIQIAQLALKHRQNKNQRQRIIVFAGSPIKYEKKALEIVGKRLKKNSVSLDIVNFGEDDDEEKPQKLEALLTAVNNNDGSHIVHVPSGANALSDVLLSTPVFTGDEGASGYVSAAAAAAAAGGDFDFGVDPNIDPELALALRVSMEEERARQEAAAKKAADEACQKDKDGDTASASQETVARTTDKNAEPMDEDSALLDQAIAMSVGDVNMSEAADEDQDLALALQMSMSGEESSEATGAGNNLLGNQAFISSVLSSLPGVDPNDPAVKELLASLPDESKRHEEEESSSKKGEDEKK

SEQ ID NO: 7895 - protein, 122 aa, Arabidopsis thaliana
MEHGSFTNVSHASFTLSEEDHTLANAVRFVLNQDPRVTVAAYTIPHPSLEQVNIRVQTTGDPAREVFKDACQELMQMNRHVRSVFDKAVAEYKDEQKRKEEAEEEELKRQRDMFGSMDIENN

SEQ ID NO: 7896 - protein, 443 aa, Glycine max
MREAQNDIVATEFATTTNDEEVPSGVVLFGKYELRRLLGVGAFAKVYHATSVDDTHQSVALKAVSKNKVLNGGFAANVEREISIMRRLHHPNIINLFEVLATKTKIYFVMEFAAGGELFHEVAGKGRLTEETARFYFRQLISAVKHCHSRGVFHRDLKLDNLLLDEDGNLKVSDFGLSAVTGQIRPDGLLHTVCGTPTYVAPEILAKRGYDGAKVDLWSCGVVLFALIAGYLPFNDYNPSVLYRKIYRGQFRFPRWISHDLRFLLSRLLDTNPKTRITVDEIYKDTWFNADGEYRFNRVLVKESECEKQLGRTGFKSLNAFDLISFSTGLDMSGLFEDPTGSNSVERVVSTVVPEKIMERVEAMTEEGRVVVRREKNGGGAKLEGQDGNLIGIVVVYQLTDELVVVEMKRSEKGGGFGGQFWKDKLRPLLLELASELEEPVSR

SEQ ID NO: 7897 - protein, 284 aa, Lactobacillus plantarum WCFS1
MANIQWYPGHMAKAIHQIQDNLHLVDIVFELVDARIPVASRNPEIEKTVQQKPHLLIMTKKDLADPQATADWVKYYEDQGQVAIAVDSRSRTIGKQMTQAASDMLADKLAKIAARGITNRPIRAVCVGIPNVGKSTLLNHIVNKKIAKVGDRPGVTKGQQWLKASNKLELLDTPGILWPKFEDQVVGTKLAVTGAIKENIYPNDDVALFALDFFKQHYAARLVDRYHLTAEQLTLPNPELLIAMTKNAGMRDDWERFCVAFLLDIRKGRLGRFTLDLTGDQPDA

SEQ ID NO: 7898 - protein, 258 aa, Triticum aestivum
LANVGAELAHQVPGRVSTEIDARLAYDTQGIIHRVHELLNLYNQHDVSTDRLLFKIPATWQGIEASRLLESEGVQTHLTFVYSFAQAAAAAQAGASVVQIFVGRLRDWARNHSGDPEIDEALKKGEDAGLALAKKVYAYIHRNGYKTKLMVAAIRNKQDVFSLLGIDYIIAPLKILQSLEESVTDPDVKYGYVPKLTPAIGKTYNFTEEELVKWDQLSLSAAMGPAAEELLASGLEGYVNQARRVEELFGKIWPPPNV

SEQ ID NO: 7899 - protein, 233 aa, Thermoplasma acidophilum
MGLKESKKENLNLNSGWLTLSIILLWVGWFGFNPGSELAFTTETVIVVITTFLAAASAMVSTMLTKFLVSKQDPGLIYAVNGVLMGLIVITPLAGYVSPGSAIILGLISGPIFVSAESIFSKHKWYSDPIGVLPGHMVGGIFGLLMIAFFTQTPFADASGASNLPNGILFGGGIMALHQLGLEAMAVVVVGAFVFTVSYASVYAISLLLNGILRDSEYSPARPANRLAKDTGA

SEQ ID NO: 7900 - protein, 133 aa, Zea mays
MSYYGDRRAESSIVEAFTLSPLPYPVILVLLMVTLLLGASWFFTYDDFIEEASQQLSWALLGVPIALVLLIRWISSVDSFEGYLGFYPRESRWKGRYERGPAEGSSPWGVALLVLLLLVLASFHSTIHDMWGP

SEQ ID NO: 7901 - protein, 171 aa, Brassica napus
  unsure (1)..(171): unsure at all Xaa locations
MSAMTVPNLAVGSDHHLMPVIGFGTAASPPPEPLLLKQAVIDAIKLGYRPFDTSPRYLTEEPLGEALAEAVSLGLIGSRSELFVTSKLWCADAHGGXLVVPAIQRSLKNLKLDYLDLYLIHWPVSSKPGKYKFPIEEDDFLPMDYGAVCSEMEECKRLGLAKSRGLSXPHP

SEQ ID NO: 7902 - protein, 331 aa, Pseudomonas aeruginosa PAO1
MAAKYPLSPAMWRFVEHSRAFASDSPRLDAQRAAYARMCQAFAPPRPAGLRVLDSCLPAAPPVRVRRYRPDRPAPPGGWPALLYLHGGGWMLGGLDSHDFICADLAARLGLLVLAVDYRLAPEHPFPAALQDCLRAWQALSLGELDEALDGRRLLVAGDSAGGNLAAALCLALRDGGAPSPAAQILLYPLLSAAPSPSRIDCADAPLLGLGDVQACLDAYLPLAALHRQPLALPLEAADFTGLPPAFVAVAEFDPLRDDGERYGAALRAAGGEAGFYPGSGLVHGCLRGHGIDEVEALHEALRRAVQGFLAEDSGERQAGEESTAEHQPGE

SEQ ID NO: 7903 - protein, 496 aa, Nostoc sp. PCC 7120
MRSTVAEPPVLDKIIKNVRVVRPHNDAVELLDIGIKDGKFAQIAPNITPDTGQEIFDAKNLLGFPGVVDAHMHIGIYQPLDKDAVTESKAAAMGGVTTSLNYIRTGQYYLNKGGSYRDFFPEVLALSAGNFFVDYSYHVAPIASQHIDEIPLLFEEHGVTSFKIFMFYGGYGLHGLSDQQNLFLMINKEERYDFAHFEFIMRGVTRLMAEYPEARDYISLSLHCEVAEILNAYTKIVENDSSLSGLHAYSAARPPHSEGLAISIAAYLAHETNCANINLLHLSSRKAMEAALIMQTAFPHINFRREVTVGHLLLDVDTPNGTWAKVNPPIRPRADVEYLWQAVLNHQVDWIVSDHACCSAEQKRSAKDPNNIWLAKSGFGGTEYLLSGVVSEGSKRGMSYNHMAKLLSWNPSRRFGLLTKGDIAIGYDADLVLVDPNESFVVRAAESESQQGYTPFEGMELTGRVKSTFLRGSLIYHNGQVLGSPNGRYVRRSLGG

SEQ ID NO: 7904 - protein, 504 aa, Glycine max
MSALSNSSSSHGNSFLKMPAIKFTKLFINGDFVDSISGRTFETIDPRKEEVIARVSEGDKEDIDIAVKAARQAFDSGPWPRLPGSERAKIMMKWADLVDENIEELAALDTIDAGKLYYINKVAEIPSATNALRYYAGAADKIHGDVLKMNGDFHAYTLLEPIGVVGHIIPWNAPSLSFFIKVSPSLAAGCTMVLKPAEQTPLSALFYAHLAKLAGIPDGVLNIVPGFGPTAGAAISSHMDIDAVSFTGSIEVGREVLQAAAWSNLKPVSLELGGKSPLIIFNDADIDKASELALFGIMSNKGEICVAGSRVFVQEEIYDEFEKKLVEKAKSWVVGDPFDPKSLQGPQADRNQLEKILSYIEHGKREGATLLTGGNTVGNKGYYIEPTIFCNVKEDMLIARDEIFGPVLALMKFKTMEEAIKSANNTKYGLAAGIVTKNLDTANTMSRSIRAGIVWINCYLTVGSDVPFGGYKMSGFGRDLGLQALHKYLQVKSVVTPIHNSPWL

SEQ ID NO: 7905 - protein, 153 aa, Triticum aestivum
  unsure (1)..(153): unsure at all Xaa locations
MAPTVMASSATSVAPFQGLKSTAGLPVSRRSNGASLGSVSNGGRIRCMQVWPIEGIKKFETLSYLPPLSTEALLKQVDYLIRSKWVPCLEFSKVGFIFREHNASPGYYDGRYWTMWELPXMFGCTDATKVINXWRSQXEYLTRIRIIXFENPQ

SEQ ID NO: 7906 - protein, 421 aa, Oryza sativa (japonica cultivar-group)
MQERCRVLLRFADLIEQHADEIAALETWDGGKTLEQTTGTEVPMVARYMRYYGGWADKIHGLVVPADGPHHVQVLHEPIGVAGQIIPWNFPLLMFAWKVGPALACGNAVVLKTAEQTPLSALFVASLLHEAGLPDGVLNVVSGFGPTAGAALSSHMGVDKLAFTGSTGTGKIVLELAARSNLKPVTLELGGKSPFIVMDDADVDQAVELAHRALFFNQGQCCCAGSRTFVHERVYDEFVEKARARALQRVVGDPFRTGVEQGPQIDGEQFKKILQYVKSGVDSGATLVAGGDRAGSRGFYIQPTVFADVEDEMKIAQEEIFGPVQSILKFSTVEEVVRRANATPYGLAAGVFTQRLDAANTLARALRVGTVWVNTYDVFDAAVPFGGYKMSGVGREKGVYSLRNYLQTKAVVTPIKDAAWL

SEQ ID NO: 7907 - protein, 344 aa, Sinorhizobium meliloti
MTNMMKALVKTKPEVGLWMERVPVPEIGPNDVLIRVRKSAICGTDVHIWNWDQWAEKTIPVPMVVGHEFMGEVVEVGPAVSKHHVGERVSGEGHIVCGKCRNCRAGRGHLCRNTLGVGVNRPGSFAEFVCLPEYNVVSIPDDVPDEIAAIFDPFGNAVHTALSFDLVGEDVLVTGAGPIGIMGAMVAKRCGARKVVITDINPVRLDLARKLGIDHVVDASKEKLADVMRVIGMTEGFDVGLEMSGAAPAFRDMIDKMNNGGKIAILGIAPAGFEIDWNKVIFKMLNLKGIYGREMFETWYKMIAFVQGGLDLSPIITHRIGIDDFRDGFEAMRSGNSGKVVMDW

SEQ ID NO: 7908 - protein, 231 aa, Brassica napus
  unsure (1)..(231): unsure at all Xaa locations
MEGIQNPVVSRSVEEVFGDFRGRRAGLLKALSTDVRKFYHECDPDKENLCLYGLPNETWEVNLPVDEVPPELPEPALGINFARDGMPEKDWISLGAVHSDSWLISVAFYFGARFGFGKNERKRLFQMINDLPTIFEVITGNAKQTKDQSANNHNSSRTKPSGVKASKTSPPPREDDDSGEDEEDDEQGAVCGACGDNHDDFWICCDACEKWFHGKCVKITPXKAEHIKHYN

SEQ ID NO: 7909 - protein, 201 aa, Thermococcus kodakaraensis
MAHGPRYRVPFRRRREGKTNYHKRLKLLKSKKPRLVVRKTLNHHIAQIVVYDPKGDKTLVSAHTMELMRDFGWKGHGGNTPSAYLLGLLIGYKAKQAGIEEAILDIGLHPPTRGSSIFAVLKGAVDAGLNVPHSEEIYPEDYRINGEHIANYAKALKEEDEALYRKQFSGYLVKGLEPEKLPEHFEEVKAKIIEKFEGARE

SEQ ID NO: 7910 - protein, 311 aa, Uncultured archaeon
MPLDPQIKPILERIRALSIAASPQELRRQVEEQSRLLTAAVQEPIAETRDVHIPVSGGSIRARVYFPKKAAGLPAVLYYHGGGFVFGSIETHDHICRRLSRLSDSVVVSVDYRLAPEYKFPTAVEDAYAALKWVADRADELGVDPDRIAVAGDSAGGNLAAVVSILDRNSGEKLVKKQVLIYPVVNMTGVPTASLVEFGVAETTSLPIELMVWFGRQYLKRPEEAYDFKASPLLADLGGLPPALVVTAEYDPLRDEGELYAYKMKASGSRAVAVRFAGMVHGFVSFYPFVDAGREALDLAAASIRSGLQPS

SEQ ID NO: 7911 - protein, 267 aa, Picrophilus torridus DSM 9790
MIGMLTKDDVISVILEARDIIKSMENGPFLEPVNADRVLFVGDTHCAVDVTETVFRNYSDFDKIVFLGDYVDRGNTGIENLITILSMMINDPDKIIVLRGNHESPITNENYGFYNEITEKYDRETYYYAADLFSVMPYATVVNDYFCVHGGLASGLNYIDEIKELPLYDVVPDNQTAFELMWNDPREMINGFIPSPRGDNIFYFGEDIVDDFLNKNNLKGIIRGHETADGFRDDMNGKVRTVFSSRYHRLRAGVLRMENGEFFKDYI

SEQ ID NO: 7912 - protein, 124 aa, Glycine max
  unsure (1)..(124): unsure at all Xaa locations
MEPMDIVGKAKEDASLPKATMTKIIKEMLPPDVRVARDAQDLLIECCVXLGFGEYIEEVYAAYEQHKLEFMQDSLKGAKWSNRAEMTEEEALAEQQRMFAEARARMNGGAIQSKEPEADQSLES

SEQ ID NO: 7913 - protein, 357 aa, Chlamydomonas reinhardtii
MAAANQKPGPAGRPEPLIGHPRYEKIKDLNSGTFGFVQLARDKLTGETWAVKFIERGDKITKYVEREIINHRCLVHPHIVQFREVFLTPTHLCIVMEFAPGGDMFEYVVRKNGLREDEARWFFQQLIVGLDYCHRMGVVNRDIKLENTLLDSSPRPLVKICDFGYSKHEKFQSAPGSRVGTPAYLAPEVILTTKGKTYDGKIADIWSCGVMLYVMLVGAYPFERPEDKHDNQKLQKMIQRILHVDYHIPPHVRASEDCKDLLAKILVADPHKRITVDGIYNHKWYLKGLPPGVREMNDRVQPPPEGLQSVEEIKRLIEEARHVGVGAPGYVNPVETDEYIDDAMDNMYDEGSLDYND

SEQ ID NO: 7914 - protein, 362 aa, Sorghum bicolor
MGSTAEDVAAVADEEACMYAMQLASSSILPMTLKNALELGLLEVLQKDAGKALAAEEVVARLPVAPTNPAAADMVDRILRLLASYDVVKCQMEDKDGKYERRYSAAPVGKWLTPNEDGVSMAALALMNQDKVLMESWYYLKDAVLDGGIPFNKAYGMTAFEYHGTDPRFNRVFNEGMKNHSVIITKKLLEFYTGFDESVSTLVDVGGGIGATLHAITSHHSHIRGVNFDLPHVISEAPPFPGVQHVGGDMFKSVPAGDAILMKWILHDWSDAHCATLLKNCYDALPEKGGKVIVVECVLPVTTDAVPKAQGVFHVDMIMLAHNPGGRERYEREFRDLAKAAGFSGFKATYIYANAWAIEFIK

SEQ ID NO: 7915 - protein, 197 aa, Medicago sativa
  unsure (1)..(197): unsure at all Xaa locations
MSASRFIKCVTVGDGAVGKTCLLISYTSNTFPTDYVPTVFDNFSANVVVNGSIVNLGLWDTAGQEDYNRLRPLSYRGXDVFILAFSLISKASYENVSKKWIPELKHYAPXVPIILVGTKLDLRDDKQFCIDHPGAVPITTAQGEELRKLINAPAYIECSSKSQENVKAVFDAAIRVVLQPPKQKKKKNKAQKACSIL

SEQ ID NO: 7916 - protein, 358 aa, Aspergillus oryzae
MGAPPKTAQNLSFVLEGIHKVKFEDRPIPQLRDAHDVLVDVRFTGICGSDVHYWEHGSIGQFVVKDPMVLGHESSGVISKVGSAVTTLKVGDHVAMEPGIPCRRCEPCKEGKYNLCEKMAFAATPPYDGTLAKYYVLPEDFCYKLPENINLQEAAVMEPLSVAVHIVKQANVAPGQSVVVFGAGPVGLLCCAVARAFGSPKVIAVDIQKGRLEFAKKYAATAIFEPSKVSALENAERIVNENDLGRGADIVIDASGAEPSVHTGIHVLRPGGTYVQGGMGRNEITFPIMAACTKELNVRGSFRYGSGDYKLAVNLVASGKVSVKELITGVVSFEDAEQAFHEVKAGKGIKTLIAGVDV

SEQ ID NO: 7917 - protein, 322 aa, Candida tenuis
MSASIPDIKLSSGHLMPSIGFGCWKLANATAGEQVYQAIKAGYRLFDGAEDYGNEKEVGDGVKRAIDEGLVKREEIFLTSKLWNNYHDPKNVETALNKTLADLKVDYVDLFLIHFPIAFKFVPIEEKYPPGFYCGDGNNFVYEDVPILETWKALEKLVAAGKIKSIGVSNFPGALLLDLLRGATIKPAVLQVEHHPYLQQPKLIEFAQKAGVTITAYSSFGPQSFVEMNQGRALNTPTLFAHDTIKAIAAKYNKTPAEVLLRWAAQRGIAVIPRSNLPERLVQNRSFNTFDLTKEDFEEIAKLDIGLRFNDPWDWDNIPIFV

SEQ ID NO: 7918 - protein, 285 aa, Xylella fastidiosa Ann-1
MTTNDTWFTEHFQATGSAIGFRVTGKLDEVQSPFQKIEIYNSTDWGKLMVIDGALMLTSRDNFLYHEMISHPALFTHTAPKCVVIIGGGDCGTLREVLKHPDIEQVTQCDIDEQVTRMAEKHFPELCTSNNDPRATLLFSDGVAYMADCPTNSVDVIIVDSTDPVGPAKGLFNRTFYESCFRALKNDGLLIQQSESPLALLELIKEMRHEMSKAGFKAFKTLPFPQPCYPTGWWSVTLSSKQPNANFAFRQTDAQTKPFDTLYYNAHLHHGVLVPPPFIAHALGE

SEQ ID NO: 7919 - protein, 384 aa, Bacillus anthracis str. A2012
MHEDLLGLEEIMMKAEEKFSPGLDGIVAAETKISFLDTVKGEIVIQGYDLIELSKTKEYLDIVHLLLEEHLPNEDEKATLEKKLKEEYAVPEGVFNVLKALPKETHPMDGLRTGVSALAGYDNDIENRSLEVNKSRGYKLLSKVPNIVANSYHILNNEEPIEPLKELSYSANFFYMLTGKKPTELEEKIFDRSLVLYSEHEMPNSTFTARVIASTQSDLYGALTGAVASLKGSLHGGANEAVMYMLLEAGNVEKFEELLQKKLYNKEKIMGFGHRVYMKKMDPRALMMKEALKQLCDVKGDYTLYEMCEAGEKIMEKEKGIYPNLDYYAAPVYWMLGIPIQLYTPIFFSSRTVGLCAHVIEQHTNNRLFRPRVNYIGERHVLSK

SEQ ID NO: 7920 - protein, 506 aa, Ruta graveolens
MDLLLLEKALLGLFAAAVVAIAVSKLRGKRFKLPPGPLGFPVFGNWLQVGDDLNQRKLANLSKKFGDVYLLRMGQRNLVVVSSPEMAKEVLHTQGVEFGSRTRNVVFDIFTGKGQDMVFTVYSEHWRKMRRIMTVPFFTNKVVQQQRFNWEDEAARVVEDVKKDPQAATTGIVLRRRLQLLMYNNMYRIMFDRRFESVDDPLFNKLKALNGERSRLAQSFEYNYGDFIPILRPFLRGYLKLVKEVKERRLKLFKDYFVEERKKLTSTKSMTEENFKCAIDHVLDAQQKGEINEDNVLYIVENINVAAIETTLWSIEWGIAELVNHPDIQKKLRAEIDRVLGPDHQITEPDTHKLPYLQAVIKETLRLRMAIPLLVPHMNLNDAKLAGYDIPAESKILVNAWWLANNPAHWKDPQVFRPERFLEEESGVEANGNDFRYIPFGVGRRSCPGIILALPILGITIGRMVQNFELLPPPGQSKIDTSEKGGQFSLFILNHSTIVLKPRSSV

SEQ ID NO: 7921 - protein, 465 aa, Oryza sativa (japonica cultivar-group)
MDDDGETPMPSLELHKLPTLAGAAIPNPIARHPLYHPSPSFFISPTDVVLRDILFDASPASAAGERRRRHVAAYHRAGPRREVAFDPATVRAAIFTCGGLCPGTNTVVRELVVGLSELYGVRGGVFGVRNGYRGFYSDEVVPLDPAAVEHWHKAGGAALGTSRGGFDLARIVDAIERHGFNQVYAVGGDGTMRGAARIHREVRRRGRLAVAVAGIPKTVDNDVGVVDRSFGFHTAVEAAQQAIAAGHVEAESAANGVGLVKLMGRSAGHIALHATLSSRDVDCCLIPEEDFYLRGAGGLFDFLYRRIKDNGHAVVVVAEGAGQRLIPRTTTTSASGACAGADESGNETFLDVGAWLKAEMRAWWEEEHAGEVFTVKYIDPTYMIRAVPANAGDNLYCTLLAHAAIHGAMAGYTGFVSGTINGNYAYIPMDEVAEAKNPVDTKDHKWAWVRSITNQPDFIRAGPTS

SEQ ID NO: 7922 - protein, 412 aa, Arabidopsis thaliana
MLLSKRFKSQWLLVPKLEFDDSTHLPETWGYQEPDYGNFRRFVDRSLLSREGRVLQTLFLKLGRQCSYDDIAIWVGIAVKRGLMELKLKYTDSYYPKRSSLPRSLYTCETLVVLKLKKGYLDVPDLVCLRSLKTLSLRDMNYSNASCLLRLLASCPVLEELFIQQGYYDSCALSFKIILPCLKKLSYLPKRKKKYSGIDRSEVSGGISGLVLDAPSLKYLHIVDRSGLFSVSEIININAVVKATLEVNASRPEKLLYSLVSVEHIRLCLSATEVVYPVGLGSSFHKLKRLEVCTCKSEWLDLFIHLLEDSPSLQDIKINQCHPVTNPRPQWNQPGSVPRCLSSSLETLEWVEYGGTHEEKELSTYLFKTAVCFKKASFTAKWSGGDANKKLQMLQELALSPRVSPTCELVFN

SEQ ID NO: 7923 - protein, 428 aa, Arabidopsis thaliana
MDKISQLHDELLLGILSLLPNAKDVVATMVLSKRWRYLWMMVPSLVYDDSYQDIDYGRFSRFVDRSLALHKAPVIDTLHFKLGHICGSGDTLIGAAEKCCVRKLIIKIDDTSSRSSKTDQVILPMSLCSGVHIMLADLKLQNVVLVDVSTPVSFPSLKRLRLKSVKYPGNEFVNNLISSCPVLEDLVVKQCSDDNVTILTVRVPSLKRLSLIQRAELEIDVPHDFVIDTPSLEHLKIVDYTYGSRVVKSTMNRIITASMDVFSPQTKEILGSLTSTKRLFLCLPTSKDAYPVGNIFGSLIHLTICTCETEWLNVLIRVLRDSPNLKTLKIEQYHNLRDEDPRPCWNETSLVPEYLLPSLETFEWVDYEGTKTEKQVVAFILRIASCLKQATIVSFKYIDHDKKLEMLNDFPVSSRRSPACMLAFSWNL

SEQ ID NO: 7924 - protein, 450 aa, Arabidopsis thaliana
MNLIRFLLVFQGKIQMNESRKKLNCQSRQFNVDKISDLPEDLLVHILSLLPTTNDIVATSGVSKRWESLWTKVHKLRFNDRIYDGKRYDSFLHFVEKSLILHKAPTLVSLRLSVGPKCTADDIGLWIKLALDRNICELIIKHYPDHGHIRLSRRLCDSKTLVSLKLKNAILGAIWLPTCFISLKTLHLRYVKYSGDESVRTLISSCPSLRNLVVKRHNEDNVKRFAIIVRYLQSLTVYLSPLHGVADSDAYVINTPNLKYLNIKDHYTDLCSFEDMPYLDEANLDVAFTHTENFFESLTSVKKLSLCLKKSNYPEGIIFSQLDHLELCTCDDSKWLNILAMLLPDSPKLRVLKLNDKYHPLRAKEPRPRWNEPSSVPECILYSLETFKWVHYEGMEEEKELVGFIFRNGSLLKKATIIPPNSIDSDTKLEMLMELSLSSRRSPICQLEFS

SEQ ID NO: 7925 - protein, 250 aa, Brassica napus
MNSVSTFSELLGSENESPVGSDYCPMLAASCPKKPAGRKKFRETRHPIYRGVRLRKSGKWVCEVREPNKKSRIWLGTFKTAEIAARAHDVAALALRGRGACLNFADSAWRLRIPETTCAKDIQKAAAEAALAFEAEKSDTTTNDHGMNMASQVEVNDTTDHDLDMEETIVEAVFREEQREGFYMAEETTVVGVVPEEQMSKGFYMDEEWMFGMPTLLADMAAGMLLPLPSVQWGHNDDFEGVADINLWSY

SEQ ID NO: 7926 - protein, 1305 aa, Neurospora crassa
MATTTALPTLATAVTTAVSTASISGSVLSTISSALASTITTSASLTSSSSSTSSRVLTTTTSVPPKQVPNTDAAGSAQKFGGISLVAFLTALATSLVVFGVQMGLFLLLRHKLARIFKPKTYLVPERERTEPPPASPWNLLSTVLRYNDREIIKKCGLDAYFFLRYLQTLLVLFIPIAIVVIPILIPINYVGGLGHQVVDTNTTDTDDSDVPTGLDTLAWGNVRPEHYRRRWAHLILALLVIIWVCGVFFAELRVYVKIRQDYLTSAEHRLRASANTVLVSSIPDKWLTEDALRGLFDVFPGGIRNVWLTRDFTKLLEKIHRRDAIHVQLEEAETELIREAKRRQLKQRSLEEKRIRKAHQVKAESKKERKHRAKAEDDEAKRRAEDNGGLSVGDDDAVPHDVATAVHGGEKLEGKGLGDIQEGESEGSPHHGPRGGNGLFKVGENLGRGLRKGVGFVEETGHNILVLPKALQHNVEGELERTGGFDFIKDGAQSSPTSSTSSEYDSKLHPGDDDAQPKPSFASETPLQASQARHAHTLSEATQASTVQKGPDTRTIGNTTRKVSNVNDMYVTEKTRWYEFWKPPSGGYVSPVPQGYEREDYPWKVERTKWQKFKAAIPFYHSDIEDVEYPPAFTKDYTTEKEEGAEWQKWLSAKDRPHHRLALFDWTPGWLPALPLLNKKVDTIYWCRAELAKLNLEIEEDQQHPERYPIMNSAFIQFNHQVAAHMACQSVTYHIPKQMAPRTVEISPNDVIWDNMAIKWWHEWARSALVFAVVTGMLVLWAFPVAWTASLAQLDALVEKYSWLHWLVENKTIHNVIKGVAGVLPAAVLAILLILVPIALDWLATFQGAKTGSQTTETVQTYYFAFLFVQVFLVVSITSSTFQTIANITQDITSTPEVLAENLPKAANYFFSYMILQALSTSSGTLLQIGTLFMWYIMARILDNTARAKWTRNTQLPSVTWGSFFPVYTNFACIALIYSVVAPLISIFAIITFALLWCAHRYNMLYVTRFRTDTGGVLYPRAINQTFTGLYVMELCLIGLFFLAVDENDQVACVPQAIIMIIALIFTILYQYLLNRSFGPLLRYLPITFEDEAVIRDEAFQRAQERRLGIIRDDDEATALNRSGPGASDGKDIELRNLHKRTKSEADSLSRLGKLNPVRGIVQAGSWAARGGRQVRQAAFGKAEENLRTATIYRNERRQKDIEAQRAIGDALFGGYHDEIEDLTPEERDVLVRKAFQHYALRARRPTVWIPRDDIGVSDDEIKRTQEFSKYIWISNEGTALDSKVRVVYGRNPPDFSEVDIINL

SEQ ID NO: 7927 - protein, 159 aa, Medicago sativa
MSDEEHHFEPAADAGASKTYPQQAGTIRKNGYIVIKSRPCKVVEVSTSKTGKHGHAKCHFVAIDIFNGKKLEDIVPSSHNCDVPHVNRTDYQLIDISEDGFVSLLTDNGSTKDDLKLPTDDSLLTQIKDGFADGKDLVVSVMSAMGEEQICALKDIGPK

SEQ ID NO: 7928 - protein, 294 aa, Glycine max
MSEALEEVVPSMKGGCEEEGLNLEATELRLGLPGCESPEREGVFKSVVVSGAKRGFSDAIDGNWNGGGSEKDAAALFSPTSRGAVSVSVSAAKSLTLTATDCTNQPTALGASVLKETVPHSPKPLHENKPQISAPAAKAQVVGWPPIRSFRKNSMASQPQKNDAAADAEAKSGCLYVKVSMEGAPYLRKVDLNSFTTYKDLSLALEKMFSCFTLSQCGSYGVSSRENLSESRLMDLLHGSEYVLTYEDKDGDWMLVGDVPWEMFTESCKRLRIMKSSEAIGLAPRAMEKCKSRY

SEQ ID NO: 7929 - protein, 160 aa, Azotobacter vinelandii
MSAFHDLTLRGLDGQDLPLAQFRDKVVLVVNVASKCGLTPQYAGLEKLHLQYRERGFSVLGLPCNQFAGQEPDNEAQIREFCSLNYGVTFPLAAKLEVNGSGRHSLYRLLAGEGAEFPGDITWNFEKFLVGRDGRVLARFSPRTAPDDPALLQAIEKALG

SEQ ID NO: 7930 - protein, 151 aa, Rhodobacter sphaeroides
MRLAALLLAALLATPAFAVQPDEILPDPALEARARDISQGLRCLVCRNENIDDSNAQLARDLRLLVRERLAAGDSDAEVVEFVVDRYGEYVLLNPTTGGANLILWIAGPAMLAGGLGLAALYLRRRRTAPDAASAALSDEEQARLPEILKD

SEQ ID NO: 7931 - protein, 402 aa, Bacillus cereus G9241
MPKHRKQSKIKIYRITSYKKDKRSELDSDKFELEQQEIENKQDKHGKQGKQDKHDKQDKQDKQDKQDEQDKQDKQDEQDEQDEQDKQDKQDKQVQTENVVIVPTDSHNLDIWDEISLKEIQAGEHTSLLNEKSNYQNINLVQVSDIRLYLDNQLQFSSVDEQIYHEALVHPIMAKVIDPKRVLILGGGDGLALREVLKYETVLHVDLVDLDEAMINMARNVPEIVSLNKNAFFDNRVNVHVCDAKEFLNSPSSLYDVIIIDFPDPATEVLSTLYTSELFARIATFLTEDGAFVCQSNSPADAPLVYWSIGNTIENAGLIVKSYHIIVPSFGTDWGFHIAANSSHILDQIEQLYVVPTPRTLPSLLFPLFQFKEEYLEQCNHALINSESNLILHQCYKQEMEF

SEQ ID NO: 7932 - protein, 319 aa, Lactobacillus sakei
MKRIGILTSGGDAPGMNAAVRAVARKAMHEGLEVYGINYGYAGLVAGDIFKMDPITVGDKIQRGGTFLYSARYPEFAQVEGQLKGIEQLNKFGIEALVVIGGDGSYHGALRLTEHGYNAIGLPGTIDNDIPFTDQTIGFDTAVNTVLESIDRIRDTAASHERTFVVEVMGRGAGDIALWAGVAGGAQDIIIPERDFDVKAVAEKLRASREHGQKHAIIVLAEGVMHADEFSEKLSEYGDFHLRSTVLGHVVRGGSPTASDRVLASRLGSKAVELLLEGKGGVALGIEKNEIIAHDMLDLFNHKHHAMLDLYDLNEDLAY

SEQ ID NO: 7933 - protein, 186 aa, Zea mays
MASLGLPGPSSYHDLCCYGAGIAGNIFAFVLFISPLPTFRRIVRNGSTEQFSATPYIYSLLNCLVCMWYALPFVSYGVVLVATVNTIGAAFQLAYTAVFIAYADAKKRLKVSVLLAGVFCVFGLIVYVSMALFDPKPRRTFVGYLSVASLIFMFASPLSIINLVIRTKSVEYMPFYLSLSMSLMSM

SEQ ID NO: 7934 - protein, 428 aa, Bacillus halodurans C-125
MKTLIKNGSIVTKEGTVKTQDVLLHDGVISAIGLNLEETDAHVIEANGKLVTPGLVDLHVHLREPGGEAKETIETGTKAAAKGGFTTVAAMPNTRPVPDSAEQMSWLTGRIDETGVVRVLPYAAITTRQLGRELTDFAKLKEAGAFAFTDDGVGVQSAAMMLEAMKEAAKLEMAIVAHCEENTLIQNGSVHEGVFSKKHGIAGIPSVCESVHIARDVLLAEAAGVHYHVCHISTKESVRVVRDAKRAGIRVTAEVTPHHLLLCDEDIPGLDAHYKMNPPLRGKEDREALIEGLLDGTIDFIATDHAPHTEEEKGQGMERAPFGIVGLETAFPLLYTHFVKKGTFTLKQLVDWLTIDPAETFQLPYGRLEEGAPADVTIIDLEAERAIDPAHFASKGRNTPFAGWTCQGWPVATLVGGKLVWEEKEVAR

SEQ ID NO: 7935 - protein, 154 aa, Oryza sativa (japonica cultivar-group)
MAEEQRWQEGCHRLCANNCGFFGSPATLDLCSKCYRDRQGRESTAPVVVAAAASACPATHPSSPSSSSCPAFLPSSTAAEAGVVVAAVAKASRCASCRKRVGLTGFACRCGGTFCGAHRYPERHACGFDFKAAGRDAIARANPLIKGDKLKDKI

SEQ ID NO: 7936 - protein, 157 aa, Zea mays
  unsure (1)..(157): unsure at all Xaa locations
MAASSTATSVHDFIVKDASGKDVDLSTYXKGKVLLIVNVASQCGLTNSNYTELAQLYEKYKDQGFEXPGTNEEIVQFACTRFKAEYPIFDKVDVNGNNXAPIYKFLKSSKGGLFGDSIKWNFSKFLVDKEGRVVDRYAPTTSPLSIEKDIKKLLGSS

SEQ ID NO: 7937 - protein, 496 aa, Pseudomonas fluorescens PfO-1
MTTTRNDWEQRFQSLTLESRAFINGEYRPAISGETFECLSPVDGRFLASVASTDEADANLAVEAARQSFNAGVWANKAPAERKRILIRFADLILQHQEELALLETLDMGKPISDSMSIDIPATANAIRWSAEAIDKIYDEVAATPHDQLGLVTREPSGVVAAIVPWNFPLIMASWKFAPALAAGNSFILKPSEKSPLTAIRIAQLALDAGIPKGVFNVLPGFGHTVGKALALHMDVDVLAFTGSTAIAKQLMIYAGQSNMKRVWLEAGGKSPNVVFADAPDLRAAAQAAAGAIAFNQGEVCTAGSRLLVERSIREQFIPLLVEALQAWKPGHALDPATTVGAVVDQRQLDNVLRYISIGREQGAELIAGGRRTLEDTGGTYIEPTIFDGVTNAMTIAKEEIFGPVLSLITFDTVEEALHIANDSIFGLAAGVWTSNLSKAHTFARGLRAGSVWVNQYDGGDMTAPFGGFKQSGNGRDKSLHAFDKYTELKATWIKL

SEQ ID NO: 7938 - protein, 361 aa, Erwinia carotovora subsp. atroseptica SCRI1043
MKALAKLRPEEGIWMMDAPMPELGHNDIMIKIRKSAICGTDVHIYNWDEWSQKTIPVPMVVGHEYVGEIVAIGQEVNGFHIGDRVSGEGHITCGYCRNCRAGRRHLCRNAIGVGVNRPGSFAEYLVIPAYNAFRIPDNISDELAAIFDPFGNAVHTALSFDLVGEDVLITGAGPIGMMAAAVCRHVGARNVVITDVNAYRLELASKMGATRAVNVAEEKLTDVMIELGMTEGFDIGLEMSGAPSAFRAMLKAMNHGGRIAMLGIPHEPMSIDWGEVIFKGLFIKGIYGREMFETWYKMSALIQSGLDLSPIITHRFHIDEFQKGFDAMRSGQSGKVILNWDEAYTRHTSSCMCVDCATRHT

SEQ ID NO: 7939 - protein, 1569 aa, Streptococcus gordonii
KSKVAKTLCGAVLGAALIAIADQQVLADEVTETNSTANVAVTTTGNPATNLPEAQGEATEAASQSQAQAGSKDGALPVEVSADDLKKVTDAKAAGVNVEQDQTSDKGIATTAAENAQKQAEIKSDYAKQAEEIKKTTEAYKKEVEAHQAETDKINAENKAAEDKYQEDLKAHQAEVEKINTANATAKAEYEAKLAQYQKDLAAVQKANEDSQLDYQNKLSAYQAELARVQKANAEAKEAYEKAVKENTAKNAALQAENEAIKQRNATAKANYDAAMKQYEADLAAIKKAKEDNDADYQAKLAAYQAELARVQKANADAKAAYEKAVEENTAKNTAIQAENEAIKQRNAAAKATYEAALKQYEADLAAVKKANEDSEADYQTKLAEYQTELARVQKANADAKAAYEKAVEDNKAKNAALQAENEEIKQRNAAAKTDYEAKLAKYEADLAKYKKKLAEYPAKLKAYEDEQAQIKAALVELEKNKDQDGYLSKPSAQSLVYDLEPNAQLDLKTEGKLLTAAAVDEAFKKDTDQYGKKNLQLDNLNVKNLENGATTSSVELYGNINNKSDWTTNVGNKTEVKWGSVLLERGQSVTATYTNLQNSYYNGKKISKIVYKYTVDPSSQFKNPSGKVWLGIFTDPTLGVFASAYTGQVEKDTSLFIKNEFTFYDENDQPINFDNALLSVASLNREHNSIEMAKDYSGKFVKISGSSIGEKNGMIYATETLNFRQGQGGSRWTMYPRANEPGSGWDSSDAPNSWYGAGAISMSGPNNYVTVGATSATNVMPVAEMPQVPGRDNTEGKRPNIWYSLNGKIRAVNVPKITKEKPTPPVAPTEPQAPTYEVEKPLEPAPVVPTYENEPTPPVKTPDQPEPSKPEEPTYETEKPLEPAPVAPTYENEPTPPVKTPDQPEPSKPEEPTYETEKPLEPAPVAPSYENEPTPPVKIPDQPEPSKPEEPTYDPLPTPPLAPTPKQLPTPPVVPTVHFHYSSLLAQPQINKEIKNEDGVDIDRTLVAKQSIVKFELKTEALTAGRPKTTSFVLVDPLPTGYKFDLDATKAASTGFDTTYDEASHTVTFKATDETLATYNADLTKPVETLHPTVVGRVLNDGATYTNNFTLTVNDAYGIKSNVVRVTTPGKPNDPDNPNNNYIKPTKVNKNKEGLNIDGKEVLAGSTNYYELTWDLDQYKGDKSSKEAIQNGFYYVDDYPEEALDVRPDLVKVADEKGNQVSGVSVQQYDSLEAAPKKVQDLLKKANITVKGAFQLFSADNPEEFYKQYVATGTSLVITDPMTVKSEFGKTGGKYENKAYQIDFGNGYATEVVVNNVPKITPKKDVTVSLDPTSENLDGQTVQLYQTFNYRLIGGLIPQNHSEELEDYSFVDDYDQAGDQYTGNYKTFSSLNLTMKDGSVIKAGTDLTSQTTAETDATNGIVTVRFKEDFLQKISLDSPFQAETYLQMRRIAIGTFENTYVNTVNKVAYASNTVRTTTPIPRTPDKPTPIPTPKPKDPDKPETPKEPKVPSPKVEDPSAPIPVSVGKELTTLPKTGTNDSSYMPYLGLAALVGVLGLGQLKRKEDESK

SEQ ID NO: 7940 - protein, 503 aa, Arabidopsis thaliana
MDKITGFSDDELLVKILSFLPTKAAVTTSILSKQWKFLWMRLPKLEYHDDIKIYILYMRGGSRSRTDSILLEKSQRMWRFIDKNLPLHSSPVIESLRLTIYNELFQPESINLWVEIAVSRCVKELSVRFSPFKGKRDALLPTTLYTCKSLVTLKLRENILVDVPHVFCLPSLKTLHLSHVTYADEESLQRLLSNCFVLEDLVVERRVGDNVRNFAVIIPSLLSLSFEILGQCSSEEYVIHTPSLKYFKARDFGECSTCLILNMPKLEEVFVSTAGHNIKKLLESVTYVKRLSLFIPDNNAEAFTALYGDVIVFNQLEHLTFIIWEAYCSKLLYWLLIASPKLRNLEFNDQFSSDGMDTLVFWEQMITSVPQCLLSSLQTFKWLGNGDSIEGKDLATFILRNSCQLKTATISIGQGQNKLEIEKELLLHQNMDKISGISDDVLLVKILSFRPTKVAVSTSVLSKQWKYLRKRVLKLEYDDTECKTKPSKSSHKRFRCFVKRFCK

SEQ ID NO: 7941 - protein, 268 aa, Zea mays
  unsure (1)..(268): unsure at all Xaa locations
MFGYRKAGPDLEAGGSSLLYPGMTESPELRWAFVRKIYVILAVQLAMTAAVSAFVVKVPAVSNFFVSSNAGVALYIFLIILPFLGKPGSPVFWGIFSPXAEIGCNLLRAVLCPLRYYHQKHPVNLLLLGLFTVAISFAVGMTCAFTSGKIILEAAILTAVAGISLTAYTFWAAKRGHDFNFLGPFLFAAIMVLMVFSLIQIFFPLGKISVMIYGGLASLIFCGYIIYDTDNVIKRYTYDEYIWAAVSLYLDVINLFLSLLQLLRAADS

SEQ ID NO: 7942 - protein, 422 aa, Arabidopsis thaliana
MVSYRDRLSQLPDDFLLQILSWLPTKDVLVTSLLSKRWRFLWTLVPRLNYDLRLHDNTCPRFSQFVDRSLLLHKAPTLESLNIKIGSICFTAEKDVGVWVRIGVDRFVRELSVSYCSGEEPIRLPKCLFTCSTLAVLKLENITLEDASCYVCFQSLKTLHLLDVKYLDDQSLPRIISSCSSLEDLVVQRCPGDNVKVVTVTAPSLKTLSLHKSSQAFEGDDDGFLIDTPKLKRVDIEDYWGGFCYIENMPEVVEANVDVIYKNTEKLLGSITSVKRLALCLITSDAAYPAGTIFSQLVHLELCTCAPRWWDLLTRLIEDSPKLRVLKLRQKHIRRAPSPRASWKQPALPKCLLFHLETFKWELYEGSQKQKEVATFILKHAIRLKTAIISPKPTSTLLEKHEMLKDLSSSPRGSSTCELLFD

SEQ ID NO: 7943 - protein, 482 aa, Ehrlichia canis str. Jake
MSIPITVAYGDGIGPEIMEAVLLILSEAESGLVIETIEVGHNLYKKEWSSGIAPSSWDSIFRTKVLLKSPTMTPQGQGHKSLNVTLRKKLGLYANIRPCISYHPVIKTKYPNLNIVIIRENEEDTYTGIEHRLTSDTYQCSKVITRSGSERICNYAFHYATVHNRKKVTCLIKDNIMKMTDGIFHKSFSKIAENYPSITSDHYIVDIGMAKVAANPENFDVIVTTNLYGDIVSDIVAELSGSIGLAGSANIGDNYAMFEAVHGSAPDIAGKNIANPSGLLNAAIQMLIYLKKFDKAELIYNALLKTLEDGMHTADIYQSQVSKGKVSTMGFAKAIIDNFGQSPTQFPKSIFQNSAGESGISYTYKPSYATKVLVGVDLSISCDSADLNLKQLISNIQGVTHDKLELVLIHSKGLEIWPDESSNANLSYMDQICCRFYMKGQSDKIVNEHVNQLLFDMSKKKIDVVKMEKLYLYDNQPGFFTM

SEQ ID NO: 7944 - protein, 322 aa, uncultured crenarchaeote DeepAnt-EC39
  unsure (1)..(322): unsure at all Xaa locations
MDHHHFKGNDIPHIKLDPDMSIEDLVKIYSESGFNGRKLGEAAKVYAKMIKEDATICLTASGALTPVGFGGIFKTLIERGFVDWIITTGANVYHEDHFAWGLPVKQGDFQVDDMKLYDMEIVRIRDVFIKFYETLEAQDQVIQKTFKNNFVDKPFTTAEFCNFLGKISSENSKYPEKSFVTTAYNYDVPVYISTLKDSSLALNLAIHRLREKTYNLDFVREILEQASILYNSKKSGIVELGGGVPKNAAQQTGPLLDQILRQNVGGQDYIIQITDARPDTGGLSGATLQEGKSWGKVQDAHHDMITVYADATIGXFLFLHCM

SEQ ID NO: 7945 - protein, 535 aa, Glycine max
MSVIAVLPFLLHVLMAASESEPFQDSILQCLSLYSDPSLPNPISAVTYFPNSPSYPPILDSYIRNLRFSSSTTPKPSFIVAPTHVSHIQASIICCKSFNLEIRIRSGGHDYDGLSYVSEAPFVILDMFMLRSVKVNLDDDDDTAWVDSGSTIGELYHAIAERSKIHAFPAGVCHSVGVGGHFSGGGYGNMMRMFGLSVDHVLDAIIVDAQGRVLDRKLMGEDLFWAIRGGGGASFGVVVSWKIRLVPVPEVVTVFRVERTLEQGATDVVHKWQYVADKLHDGLFIRVVLSSVKRKGVKTIRAKFNALFLGNSQELLGVMNKSFPELGLVAEQCIEMSWIDSVLFWDNYPVGTSVDVLLQRHNTQEKYLKKKSDYVQQPISKTGLEGIWNKMMELEKPALALNPYGGKMGEISEVETPFPHRAGNIYKIQYSVTWKEEGEDVANRYLDRIRRLYDYMTPYVSSSPRSSYINYRDVDIGVNGPGNASYAEARVWGEKYFKRNYDRLVEVKTKVDPSNFFRYEQSIPSLASGLSIMSE

SEQ ID NO: 7946 - protein, 430 aa, Arabidopsis thaliana
MDRISLLPDDVVFKILSFVPTKVVVSTNLLSKRWRYLWKHVPKLDYRDPSLVDTEHWRASRFVDKFLLLHEAPVLETLHLSLSRNCPPSDIETWISVAISRRVRNLHIYRYIPSTGPIRLPRSLYTCETLVSLYLLLDFTVDDAPFMFCFRSLKVLVLLFAKFSSDEIVNRLLSGCPVLEGLILIRRNDNVKNFTIAAPSLQRLIAIDCRSQVPGDDVGFVIKAPSLKSLTLLNFSPHSGFRSLVKMPDLVKASIKVRHGDSKMFMGCLTSTKRLALCLQPPLDSCPIGVFNQLVSLSLCTCSLGWCRLILNHTPKLRVLRFEQRQAKFYQLLDPLKRCCSSSVDVQTQWEQPSSVPKCLISSLETVEWIDYKGREVEKKVVMYLLENSRQLKTMAIRSLKSTNDNEKLKMLQELSSIHRICTKCGLSFT

SEQ ID NO: 7947 - protein, 396 aa, Gossypium hirsutum
  unsure (1)..(396): unsure at all Xaa locations
MSLSLQSSPSSFLSSSLPKLRLGFANGCPSSSLLFKFNASFPAIRASSGFSSSLDTGLRTELDAVSTFSEIVPDTVIFDDFEKFPPTAATVSSSLLLGILSLPDTIFRNAVDLALADSTCSRLDNPELRLACFFNKALVNVGGDLAKLVPGRVSTEVDARLAYDTHGIIRRVHDLLKLYNEIDVPPERLLFKIPXTWQGIEASRLLESEGIQTHLTFVYSFAQAAAAAQAGASVIQIFVGRVRDWARNHSGDPEIEAAIQRGEDPGLGLVTKAYNYIHKYGHKXKAYGLQQFETKQDLFSXLGVDYIIAPLKILQSLKESITAPDEKYSYIRRLSPQSAANHDFTAEELTKWDQLSLASAMGPASMQLLAAGLEGYVNQANRVEELLDKIWPPPNV

SEQ ID NO: 7948 - protein, 329 aa, Zea mays
  unsure (1)..(329): unsure at all Xaa locations
MAAKCYPTVSDEYLAAVAKARRKLRGLIAEKNCAPLMLRLAWHSAGTFDVATKTGGPFGTMKCPAELAHGANAGLDIAVRLLEPIKEQFPILSYADFYQLAGVVAVEVTGGPEVPFHPGRQDKPEPPPEGRLPDATQGSDHLRQVFSTQMGLSDQDIVALSGGHTLGRCHKERSGFEGAWTAXNPLIFDNSYFTELLSGEKEGLLQLPTDKTLLTDPGLSAHLWDKYAADVDALRVADYGXRHNQASQLGFLRGAWSSNPSILRQLLLQGETERTKKKEGLLQLPSDKALLSDPSFRPLVDKYAADEDAFFADYAEAHLKLSELGFAEA

SEQ ID NO: 7949 - protein, 204 aa, Rubrivivax gelatinosus PM1
MMVLYSGTTDPYSHRCRFVLFEKGMDFEIRDVDLFAKPEDIALMNPYNEVPILVERDLILYESHIINEYIDERFPHPQLMPGDPVARARVRLFLFNFEKELFAHVNLLEGRSGVKATDKQLEKARSQIRDRLTQLAPIFLKNKYMLGDDFSMLDVAIAPLLWRLDYYAIDLSKNALPLLKYAERIFSRPAYIEALTPSEKVMRK

SEQ ID NO: 7950 - protein, 427 aa, Oryza sativa (japonica cultivar-group)
MRGGAGALPVPGGLALGVVLLLVLAVLPSRAAGVNVTAALAAFPSFADFARLLESSPVAGELAARSSLTLLAVPNNNLPRSPSAFAAASGADIADVLRYHVLLEYLSPSDLARLPASGKLVTTLFQTTGRAPSDLGAVNLTVGGNSTVVVRSPAPFPGSSATVLGAVTAVPYNLSVLAVGGLIVPSGLDVAASDSRPAGGVNITHVLADARGFNVAASMLEASGVADEFTADERGAGITVFVPTDDAFADLPATDRLQSLPADRKATVLRFHVLHSYYPLGSLESIVNPVQPTLATERFEAGQFTLNITRVNGSVAIDTGIVQASITRTVFDQNPVAVFAVSKVLLPKEMFGRGGADSDVMAPPPDAMAPDAAENVRTPPTRLSSPPALRGGADSESSSALSTARAVNWWCIRLVLLNLHLLLLPLV

SEQ ID NO: 7951 - protein, 356 aa, Tropheryma whipplei TW08/27
MRMKALVYHGPGKRSLDTVDDPTIKLGTDVILEMETTTICGSDLHILKGDVAAVKPGTVLGHEGIGKIVEVGKDVKSHSVGDRVIVSPMSSCGVCRFCRANNNGHCLGDSEGPGGWRLGGLINGVQAQFARIPLADNSLHKLPSGLDPKVGILVSDVLPTGHEVGAQAGQVTLGSVVAVIGCGPVGLGAIVTSLLYSPSKVIAVDADSNRLELARKLGATDTVRVNRERPLDAIEDVKKLTEGGFGVDVAIEAVGVPVTFSMALGIAAPGGRVANIGVHGAPVDFPLQDLWDKNIAVTLGIVSTHTIPLLLAALSEGKIDASQFVTHEFDLSDLERAYDVFSAAAQHNVVKVAIRA

SEQ ID NO: 7952 - protein, 472 aa, Mesorhizobium loti MAFF303099
MAAVRDLKATEMAASGGDDAIELGKRHLIQPWPYAGSVGAEARALIGEGDGIYITDNTGKRLIDGPAGMWCVNVGHRREELARVMYDQAMALSYNTPWYTMNAPSAELAMRIAGHAPDDLSHVFYTTGGSSAVETALRFMQFYNNVRGRPEKKLILSRGGAYHGSTYLSASLNGRPRDRDWMDGADELVIKLSSPDPFRRPQGMSLAAFTDFLVDQFRDTVARVGADKIGAFVGEPVQASGGVVIPPDGYLKRIREICRVNDILYVSDEVVTGFGRLGHVFASGDVFGIDPDMITFAKGVTSGYFPLGGVIISERLLQELRRSNHPDAMFGHGLTYTSHPVGCAVALKNLDLLEESVLAHTQAVAPYFQAQLKTLEELPLVGEVRGAGLMGCVECVADRESKNPLQLDKDVGKRIDAHCHELGLLVRPLINMCVMSPPLIITREQIDDMVGILREGISRTMDDLWKEGVWRG

SEQ ID NO: 7953 - protein, 225 aa, Halobacterium sp. NRC-1
MKQAGGSAEQKRRAGEAAVAEEVTEGAVVGLGTGSTVAHAIRALGAEASDVSGVATSFESRRRAVDAGVTVTSLEAASVDVAIDGADQVADGVLVKGGGAAHTREKYVAASADRFVVVADPSKESDVVDVPVPVAVVPDAWPVVVDRVEALGGTATLRDAERKDGPVVTDTGSLVVDCDFGAIETPEAVAASLSAVPGVVEHGLFVGMADAVYVGTDDGVRVRDP

SEQ ID NO: 7954 - protein, 508 aa, Burkholderia cepacia R1808
MNPFDLKQLGLDVEYPYRQQYDNYIGGKWVPPVKGDYFENVSPINGKPFCRVPRSGAEDIEAALDAAHAARRKWAKTSVTERANLLLAAADRMEKNLKLLAVAETIDNGKPLRETMAADLPLAVDHFRYFAGCIRAQEGGISEIDDNTVAYHFHEPLGVVGQIIPWNFPLLMAAWKLAPALAAGCCVVMKPAEQTPASVLVLMELIGDLFPAGTINIVNGFGKEAGEALATSKRIAKIAFTGSTPVGKHILRAAAESLIPSTVELGGKSPNIFFADVLDQDDAFLDKTLEGLAMFALNQGEVCTCPSRILIQESIYERFIEKAVARVERIKAGHPLDLQTMIGAQASQQQLDKILSYIDIGRGEGAQCLTGGERTAPAADLGAGYYVKPTMLLGNNKMRVFQEEIFGPVASVMTFKDEQEAIELANDTFFGLGAGVWTRNGTRAYRMGREIEAGRVWTNCYHLYPAHAAFGGYKQSGIGRETHKMALSNYQQTKCLLVSYQAEALGFF

SEQ ID NO: 7955 - protein, 277 aa, Corynebacterium sp.
MPNIPTISLNDGRPFAEPGLGTYNLRGDEGVAAMVAAIDSGYRLLDTAVNYENESEVGRAVRASSVDRDELIVASKIPGRQHGRAEAVDSIRGSLDRLGLDVIDLQLIHWPNPSVGRWLDTWRGMIDAREAGLVRSIGVSNFTEPMLKTLIDETGVTPAVNQVELHPYFPQAALRAFHDEHGIRTESWSPLARRSELLTEQLLQELAVVYGVTPTQVVLRWHVQLGSTPIPKSADPDRQRENADVFGFALTADQVDAISGLERGRLWDGDPDTHEEM

SEQ ID NO: 7956 - protein, 205 aa, Triticum aestivum
MASGNRALPIENGEVLPAAGGNGEGGNGGSGDGFNRNRSSVDQQIDDMRRRLRELEETEREMLAAAAAATHEDPAAAVTALEKAEVDARSIYVGNVDYGCLPEEVQEHFQDCGTINRVTILTDFYGNPKGYAYVEFHEAEAVQNALQLNDTELHGRPLKVCPKRTNVPGMSHHRGRHPFQPYYPPYPAFGRSPRFRRSPRFYPYY

SEQ ID NO: 7957 - protein, 277 aa, Staphylococcus aureus subsp. aureus MSSA476
MEVKTFYNGNTMPQIGLGTFRVENDENCMESVKYAIEQGYRSIDTAKVYGNEEQVGAGIRAGLESTGIAREDLFITSKLYFEDFGRENVAAAYEASLSRLGLKYLDLYLVHWPGTNEAVMVDTWKGMEDLYKNNKVKNIGVSNFEPEHLEALLAQVSIKPVINQVEYHPYLTQHKLKLYLAAQHIVMESWSPLMNAQILNDETIKDIAQELGKSPAQVVLRWNVQHGVVTIPKSVTPNRISENFQIFDFELSDEQMTRIDGLNQDKRIGPDPKTFEG

SEQ ID NO: 7958 - protein, 158 aa, Brucella melitensis biovar Abortus
MKKNNLFRALLISATFALQATAALAVNPDEVLSDPKLEKRAREISAELRCMVCQNESIDDSNADLARDLRILVRERLTKGDTDGQVIDFVVDRYGEFVLLKPRFNAQTALLWGFPVIILLIGGGALLVAFRRAARCWHSPTAPSESEKAELSRLLDGK

SEQ ID NO: 7959 - protein, 353 aa, Podospora anserina
MSNAQARGGARKISFNVSEQYDIQDVVGEGAYGVVCSAIHKPSGQKVAIKKITPFDHSMFCLRTLREMKLLRYFNHENIISILDIQKPRSYESFNEVYLIQELMETDMHRVIRTQELSDDHCQYFIYQTLRALKAMHSANVLHRDLKPSNLLLNANCDLKVCDFGLARSAASQEDNSGFMTEYVATRWYRAPEIMLTFKEYTKAIDVWSVGCILAEMLSGKPLFPGKDYHHQLTLILDVLGTPTMEDYYGIKSRRAREYIRSLPFKKKVPFRTLFPNTSDMALDLLEKLLAFNPVKRITVEEALKHPYLEPYHDPEDEPTAPPIPEEFFDFDKHKDNLSKEQLKQLIYQEIMR

SEQ ID NO: 7960 - protein, 443 aa, Arabidopsis thaliana
MGSGRDRDDPLSFTSNPSTASSPVTVSDYLDNFLGEPTSRSGSFQSESLLGGGGGESINDADFGFARPDFRSEQLAGTVQFYERHVFLCYKKPSVWPARIEAAEFDRLPRLLSAAVSARKGSMKKETRLTICEGHDGTETSNGDVLIFPDMIRYRRLTHFDVETFVEEVLVKDGEWLPGNPELLKGSYVFVCSHGSRDRRCGVCGPSLVSRFREELEFHGLQGKVSISPCSHIGGHKYAGNVIIYRSNINREVTGHWYGYVTPEDVPILLEQHINKGEIVDRLWRGEMGLSEEDQKKTQEGRFQLNGTVHSVKINGKVSQESSVHNADVSCCQSRAAEPNGCCQQNGNSSSCCQDDTTLMLSLGTSEDNQLESENNTEKLTPGRKIAEKTFFRINSDKGSSTRKVCGIPTWLESWEREDTYAALAVVCAAASVAVAYTCYKQL

SEQ ID NO: 7961 - protein, 112 aa, Bartonella sp. RN10617LA
ANEACLKMLQEIGSIQRIPEFIARAKDKNDPFRLMGFGHRVYKNYDPRAKIMQKTCHEVLKELNIQDDPLLDIAIELEKIALSDEYFIEKKLYPNVDFYSGIILKALGFPTE

SEQ ID NO: 7962 - protein, 205 aa, Juglans regia
KRRNGLLKKAYELSVLCDAEVALIVFSSRGRLYEYANNSVKSTIDRYKKARADSSNTGSVSEANTQFYQREAATLRQQINSVQESNRKMLGESLSGMAFRDLKSLESKLESGIRRIRSKKNELLFAEIEYMQKREVDLHNNNQLLRAKIAENERNQQNLNVMPGGGNLELMHSQPFDSRNYFQVDALQPNHDQYPRQDQMALQLV

SEQ ID NO: 7963 - protein, 262 aa, Rickettsia sp. ARANHA
LAAVGSLSAFYPDLLNFKEADYELTAIRMIAKIPTIAAMSYKYSIGQPFIYPDNSLDFTENFLHMMFATPCTKYKVNPIIKNALNKIFILHADHEQNASTSTVRIAGSSGANPFACISTGIASLWGPAHGGANEAVINMLKEIGSSEYIPKYIAKAKDKNDPFRLMGFGHRVYKNYDPRAAVLKETCKEVLKELGQLDNNPLLQIAIELEAIALKDEYFIERKLYPNVDFYSGIIYKAMGIPSQMFTVLFAIARTVGWMAQW

SEQ ID NO: 7964 - protein, 112 aa, Bartonella sp. RN10627LA
ANEACLKMLQEIGSIKRIPEFIARAKDKNDPCRLMGFGHRVYKNYDPRAKIMQKTCHEVLKELNIQDDPLLDIAIELEKIALSDEYFIEKKLYPNVDFYSGITLKALGFPTE

SEQ ID NO: 7965 - protein, 157 aa, Glycine max
  unsure (1)..(157): unsure at all Xaa locations
MSSAKKITLKSSDGEAFEVEEAVAXLESQTIKHMIEDDCADSGIPLPNVTSKILAKVIEYCKKHVEAANPEDKPSEDDLKAWDAEFVKVDQATLFDLILAANYLNIKSLLDLTCQTVADMIKGKTPEEIRKTFNIKNDFTPEEXEEEVRRENQWAFE

SEQ ID NO: 7966 - protein, 2376 aa, ASPERGILLUS NIDULANS FGSC A4
MSNETFYLLPLNDDGSPDVPGGFIYLPPPDHPKYSLRFLIEGSSSICRDGTLWINIPEIGKSFDRQSFRPFKLYPDFSRNIQIDVPVTCPGSFAYYVTYSPLPEFTITSSAPVKPARTPTHYIDVSPRLSLAGEGIPLNALSIFSVNSKFMGKYPEDWNQYLNSISRRKYNMVHFTPLMKRGASNSPYSIFDQLQFDDIAFPNGENDVQKLIKDMEEKHSLLSLADVVWNHTANNSKWLEEHPEAGYSVETAPWLEAALELDTALLKFSHELQKRGLPTDFKTVDDLTLVMNEVKNHVIEDLCLWEFYVLDVKSNARRVIDEWKVSTNSDIERGRWAQLDLGAYKAWSLEDQASLIRQKGVPTAGQILGRYSREIDTQLGVAIATALFGNFDATSSDLTAVENTLRKLLDVVNVPFYKEYNSDVTEIMSQLFNRIKYLRIDDHGPKLGPVTDQNPLIESYFTRLPLNEITKKHSPKALALANNGWIWNADAMRDNAGPNSRAYLRREVIVWGDCVKLRYGDGPEDNPFLWDFMARYTRLMAKYFSGFRIDNCHSTPLVVAEYLIDEARKIRPDLAIFAELFTGSEEADYIFVKRLGINALIREAMQAWSAGELSRLVHRHGGRPIGSFELDLPSPGLDLSKSQVSGSEREIIRSIRPIPVPALFMDCTHDNEMPAQKRTATDTLPNAALVAMCDSAIGSVMGYDEVYPKIVDLVHETRLYSFFDLPESPTLDELVNLKGISGLKRLLNELHTMMGQMGYDETFIHHDGEYITVHRVHPQTRKGIFLIAHTAFPGQNSGALLAPIHLAATRAKPIGSWLLKVQELSDDKERALSDKVYLQGLPSEVLKIEGARIEETDRETIISVLDPFIPGSIALFETSIPSLEHADELSNDAITDGAVEAFSELSLIDLNFVLYRCDAEERDSSGGQDGVYDIPNHGPLVYAGLQGWWSILEGIIRYNELGHPLCDHLRQGQWALDYIVNRLMKATKNPQYAALRRPAEWLEAKFQIVRGLPSFLLPRYFAIIVQTAYVAAWNRGIQLLGDDVRVGQAFTQQLAMVSVQQTGFVNSASLWPKKSVPSLAAGSGKLPRYNSRDSIWFLLQAIQDYTKMAPDGLELLQDKTPRRFLPYDDTWFPFDDPKAYSQTSTIVDIIQEVFQRHAQGISFREYNAGPELDVQMKSEGFNIDIRVNWETGLIFGGSQHNCGTWQDKMGESEKAGNKGVPGTPRDGAAIEITGLLYSALKWVTELNKQGLFPYDKVDIGNGKSITFEGWAAKVKTNFERCYYIPLDPNDDDQYDIDSGIVNRRGIYKDLYRSGKPYEDYQLRSNFPIAMVVSPELFDPSKALGALAIADSVLAGPLGMATLDPSDLNYRPDYNNAEDSTDFATSKGRNYHQGPEWVWLRGYFLRALLYFDLARRKTADERTEAFQQVTRRLAGCKKALRESPWKGLTELTNRNGNHCADSRPSIVKTNCRYSLASKTRSPLQGGLREYHVWYCYRSLALDKPDCSSTVVRLEKQHSASQCFNNGANPSTHLRRQEPPLHKAMSLTESVAAMATAITVANHHGTNNGTDDDGPGRKWDDQLKGDLYTQLVISLALGITAFLSFCFLRPKWTELYAARRRQRRAALYLPELPDSFFGWIPVLWKITEEQVLQSAGLDAFVFLSFFRFAIRFTSTVFILAFVVLLPIHYSYTKKLGIPDWDKSIDVGEDGKKKFIDDPPYLWTYVVFTYIFTGLAIFMLFQETKKIIQTRQKYLGSQTSTTDRTIRLSGIPAEMGSEENIREFIEGLHIGEVESITLCRNWSSLDHLIEERLKVLRNLETSWVQYLGYKRVRKSGDTLPLRRQPIDSSIFSEDDERMRLLLENGQDDAFDRSRKRPMVRLWYGPLKLRYRKVDAIDYYEERLRRLDEEIQSARQKEYPPTELAFVTMKSIAAAQMLVQAILDPHPMKLLARLAPAPADVIWKNTYLPRARRMFQSWSITVLICFLSVFWSVLLVPVGTLLKWETLHKVLPQLADALARHPLVKSLVTTGLPTLAFSLLTVAVPYLYNWLSNHQGMMSRGDIELSVISKNFFFSFFNLFVIFTVIGTATNFYGLWEHLRDSFKDATTIATALANSLENLAPFYMNVFVLQGLGLFPLKLLEVGSVFLYPINYLMAKTPRDYAELSTTATFSYGYSIPQSILILVICVIYGVFPASWLICFFGLVYFTIGNFIYKYQLLYAMDHRQHSTGRAWPMICNRVLVGLVVFQLAMAGTLGLRKAITLALLIVPLIGATVWFSYFYSQSYEPLTKFIALKSIYRDTPTSGDISPSTTSTFSPPLALDRDAFPIRLGGQVLGLKLKRYVNPSLILPLDSAWLPGRNPMPELQEDFEYYEDQNHVSV

SEQ ID NO: 7967 - protein, 477 aa, Burkholderia fungorum LB400
MSQYRSFINGEWLGTTSTLPNLNPSDLSDVVGEALLADDALVADAIAAARHAFRSWSLTTPQQRADILDAAGTRILQRKEELGTLLAREEGKRLPEAIGEVGRAGNIFKFFAGEALRIGGEVVSSVRPGMTVEVTREPLGVIGMITPWNFPIAIPAWKIAPALAYGNTVVIKPAEAVPACATELVKILEESGLPAGVVNLLLGPGRVVGEALVASPDIDAISFTGSESTGRAIAVKCVTSGKKVQLEMGGKNPLVVIDDADLDVAVEAALDGSFFSTGQRCTASSRLIVTSAIHGQFVAALQRKASELVVGHALDKATQIGPVLDDRQLQQNLKYLKIAAEEGGQVLGGERVERPTRGYFMRPALVIGTDNTMRINREEVFGPVASVIKVADYEEALAVSNDTPYGLAAGICTTSLKYASHFRRHAEAGMVMVNAPTAGVDYHVPFGGRKRSSYGPREQGTYAREFYTVVKTAYVKA

SEQ ID NO: 7968 - protein, 484 aa, Rubrobacter xylanophilus DSM 9941
MSGAAEHRMYVAGRWTGSASGARMEASSPATGERLGTVPEGTREDVRRAVAAAGKAATLWAGRSAFERAAAMERVAGIIEERREELSRTLVLDQGKTLAEARDEVEELALYFRMAAADAPRLEGSAPPSVDAGKRVLVYRVPRGVVGVISPWNWPYTMPAELIAPALACGNAVVWVPAPSTSVCAVALAGCLADAGLPAGVFNMVTGPGPVVGDEVAANPGTHAVGFIGSVETGRRVAARAAGKALLLEMGGNGPVVILDDADLDAAVEASISSAFMCAGQSCTAGELFMVHERVREAFLERLLAKVERGVRLGDPFSPETTMGPLNNEPTAQKVDRHVRDALERGARLLAGGSRAEGFPTRLYYEPTVLDGVTPQMQIFREETFGPVIPVAGIRDESEALSAVNASPYGLLSAVFTRDLERGLRFAEAVRTGWVNVNASSNHWESHLPFGGRSGSASGVGRVGGRYPMEAFTEPKTVILDLGR

SEQ ID NO: 7969 - protein, 315 aa, uncultured crenarchaeote DeepAnt-EC39
MNEPIKNIRLLLEEITIKCDASWIAFSGGLDSSILAEIKKEQNLNAITIISKDFLATDLSYSQITAKHIDIPLEIKYVSIDQMLGAIESTIKILKNFNDIEIRNSIVPYLYMNALKEKNITNVITGDGADEIFAGYNFLLKKDHNELKNELKRIKKIMHFTSQKIANKLGMSIQMPFIDEKIIELVETLPINLLINQKNGIKFGKWVLRKAFENTLPTNVIWRKKTAMQDGSGTTNLTKLFDSIITDDIFTKKVKKIKSECNIKIRTKESLYYYELFKENFIIPECEDKKNICPDCNAEIVSNSKFCRMCGKFPI

SEQ ID NO: 7970 - protein, 369 aa, Neurospora crassa
MSPNPEHGASAPTDPPAADAEQKSDSSAPATPPPAPVPSADPKLFRQITQSHTGESDQDVDDIYKVSPLAALKLLSAGIETLVSFTGDIPPTPPPRSPTIPHMRGMDAEKQSIVRSNSEKNLARLLQQKSATNSPRRPFSPAPQRHPHPPPSREGHKQSQSIDGVQLRTPNPTPPPGLSSSDAKSALEPYIIVGENSQPLNTQHSAITRKFYSRLPPPISITDYLLRIHQYCPMSTAVYLAASLYIHRLAIIERAIVVTKRNAHRLLLAGIRVAMKALEDLSYPHSKFAKVGGVSETELARLEISFCFLVGFELRVDEEALRGQWEMLKSGVEAWEGVEHDFYGKREVITLRNPPPGREGMQAEAAAEA

SEQ ID NO: 7971 - protein, 247 aa, Petunia integrifolia subsp. inflata
MVFPNQEFESSSSQRKSGRGKIEIKRIENTTNRQVTFCKRRNGLLKKAYELSVLCDAEVALIVFSSRGRLYEYANNSVRATIDRYKKHHADSTSTGSVSEANTQYYQQEAAKLRRQIRDIQTYNRQIVGEALSSLSPRDLKNLEGKLEKAIGRVRSKKNELLFSEIELMQKREIEMQNANMYLRAKIAEVERATQQMNLMPGGGSEYQQQPMSSTSQPYDARNFLPVNLLEPNPHYSRQDQTALQLV

SEQ ID NO: 7972 - protein, 156 aa, Brassica napus
IETSLVAEMAAALASRLTKGRSLLGGLTNAFSGLMSSSSGSILSQQQQRTFIQMGTTLKVVDNSGGKEVTCIQSLRGKKGARLGDIVIGSVKEAAHKVDVKKGKDAIQKGKVKKGNVVYGVVVRAAMQKGRVDGSQVRFDDNAIVILGIKEKKKDE

SEQ ID NO: 7973 - protein, 286 aa, Triticum aestivum
  unsure (1)..(286): unsure at all Xaa locations
REQKLELHRGGGRSRTSGSPGLQEFGTRATTMATXNMQVDPSGQVQWPQQQPFPQPQQPFWQQPQRTIPQPHQTFHHQPQQTFPQPQQTYPHQPQQQFPQTQQPQQPFPQPQQTXPQQPQLPFSQQPQQPFPQPQQPQQPFAQSQQPQQPFPXPQQQFPQAQQPQQSFPQQQQPAIQSFLQQQMNPCKNFLLQQCNHVSLVXSLVSIILPRSDCQVMQQQWCQQLXAQIPQQXRCAAIHXVAHSIIMQQEQQQGVPILRPLFQLAQGLGIIQPQQPGPPSTYHMPT

SEQ ID NO: 7974 - protein, 119 aa, Zea mays
  unsure (1)..(119): unsure at all Xaa locations
MDRRPPARRRPGDPHRRGAAMHGAVEQQKQHRGRRSPQGTVPPQQPPPAGYFTAELLLAFVFVAASLAFLPXLVLPPLSPPAXLLLLVPVGLLAVLLALAFVPLDAHSHLVVVGSGSSR

SEQ ID NO: 7975 - protein, 147 aa, ASPERGILLUS NIDULANS FGSC A4
MSDREFSSNDDLSLPKVTATVQKIITEILPPSSGQSFSKDARDLLMECCVEFITLISSEANDISEKEAKKTIACEHVERALRDLGFGDYVPDVLAVAEEHKEQLKSREKKQSKMEQSGLSEEELLRQQQELFRSATEKYHAAPEGTE

SEQ ID NO: 7976 - protein, 196 aa, Zea mays
HRVKKKKKEKKIEGPLKKYKKVHGNVDMAAAGDDATKLQELDEMKRRLKEMEEEAAALRDMQAKVAKEMQGGDPSASTAEAKEQVDARSVYVGNVDYACTPEEVQQHFQACGTVNRVTILTDKFGQPKGFAYVEFLEQEAVQEAINLNESELHGRQIKVAPKRTNVPGMKQRPPRGYNSYHGYPYRSFGAPSFPPL

SEQ ID NO: 7977 - protein, 278 aa, Zea mays
MASSSRSTVFSLLLLVALLLSCSGMSSAARLLEEAPPKEEHPHPAVPELPEPELPPHPTDVVPPELPKPELPPHPAVVPELPKPEVPHQVPEQPKPELPPHPTAVPELPKPEVPHPVPELPKPEVPPHPTAVPELPKPEVPHPVPELPKPELTPHPAAVPELPKSEVPHPVPELPKPEVPPQPTAVPELPKPEVPHPVPELPKPELPPHPAVPELPKPEVPHQVAPELPKPELPPHPTVPKLPHPEVPEVPNHELPPLPKAELPPKPEGHYPEPEAKP

SEQ ID NO: 7978 - protein, 384 aa, Mycobacterium tuberculosis H37Rv
MRAVVIDGAGSVRVNTQPDPALPGPDGVVVAVTAAGICGSDLHFYEGEYPFTEPVALGHEAVGTIVEAGPQVRTVGVGDLVMVSSVAGCGVCPGCETHDPVMCFSGPMIFGAGVLGGAQADLLAVPAADFQVLKIPEGITTEQALLLTDNLATGWAAAQRADISFGSAVAVIGLGAVGLCALRSAFIHGAATVFAVDRVKGRLQRAATWGATPIPSPAAETILAATRGRGADSVIDAVGTDASMSDALNAVRPGGTVSVVGVHDLQPFPVPALTCLLRSITLRMTMAPVQRTWPELIPLLQSGRLDVDGIFTTTLPLDEAAKGYATARARSGEELRFCLRPDSRDVLGAHETVDLYVHVRRCQSVADLQLEGAADGVDGPSMLN

SEQ ID NO: 7979 - protein, 320 aa, Lactobacillus plantarum WCFS1
MKRIGILTSGGDAPGMNAAVRAVAGKAMAEGLEAYGINYGFAGLVAGDIHKIEAADLDGVIQRGGTLLYSARYPEFAHEEGQLKGIEQLKRFGIDALVVIGGDGSYHGALRLTEHGYNTIGLPGTIDNDIPYTDFTIGFDTAVNTNVQALDRIYDTAHSHDRTFVVEVMGRGAGDVALWSGVSIGATAIVVPEVDWDMEEIANKIKHNRANGHRSNLIVLAEGVMGAQEFVEKLSEYGDFDARGNTIAHMQRGGNPTAKDRVMASKMGAYAVELLLAGKGGLAVGIQNNQLVNHNILDLFESKHDVEVSLDKLNEEISFK

SEQ ID NO: 7980 - protein, 185 aa, Oryza sativa (japonica cultivar-group)
MAAGTACRRYIGPLLCVNLVMHAAVLGLAGWSLNKFIDGETHHHLGGNTSSGYLLVFSLMAGVVGVCSVLPRLLHVRAWRGETLAAAASTGLVSWALTALSFGLACKHITLGNRGRRLRTLEAFIAILTLTQLLYLILLHTGSLGSSMTLGLSRRNCDDDEELRCDEIPREELYTNKKPAIVAGA

SEQ ID NO: 7981 - protein, 338 aa, Methanococcus maripaludis S2
MIFMSDPKNVVFKESEELNGVFIEGPDFDETIDLKDVLTDYYEKIGFQATHLGKAVKIWKQIEEVRKNEEVVVFMGYTSNMVSSGLREIISYLVKHKKVDVLVTTAGGIEEDFIKCIKPFVLGEWDMAGSDLREKGINRIGNVYVPNDRYIEFETYMTKFFETLLKKQQDENKIISASEFCFELGRFMDENLGQEKEKSIIYWAYVNKIPIFCPAITDGSIGDMLYFFKKNEKGTDLKIDVASDIVRLNDMAIDANKTACIVLGGSLPKHSIINANLFREGTDYAIYITTAVPWDGSLSGAPPEEGVSWGKIQEKADFVEIWADATIVFPMLVYGVFK

SEQ ID NO: 7982 - protein, 242 aa, Glycine max
  unsure (1)..(242): unsure at all Xaa locations
ALFRLERATGQEXAELLEEFMPAVKQNYGEKVLVQFEDFANHNAFDLLEKYSSSHLVFNDEVRGTASVVLAGLLASLKLVGGTLADHTFLFLGAGEAGTGIAELIALEISKQTKAPVEKTRKKIWLVDSKVKMPQGLIVSSRLESLQHFKKPWAHEHEPVKTLLDAVKAIKPTVLIGSSGAGKTFTKEVVETMASLNEKPLILALSNPTSQSECTAEEAYTXWSKGKSNPLLVGSPFDPWWI

SEQ ID NO: 7983 - protein, 209 aa, Triticum aestivum
MEDEEHEVYGQEIPVDGEDVDMGAGGDDAAKLHELDEMKRRLKEMEEEAAALREMQAKVAKEMQGGDPNATTSEAKEEMDSRSVFVGNVDYACTPEEVQQHFNSCGTVNRVTILTDKFGQPKGFAYVEFVEAEAIQEAVKLSESELHGRQIKVAPKRTNVPGLKQPRGGRGFNPYGGHPYMRPYPPPFYNPYGGYGRAPRFRRPRRPFY

SEQ ID NO: 7984 - protein, 409 aa, Arabidopsis thaliana
MDRISGLPDEVLVKILSFVPTKVAVSTSILSKRWEFLWMWLTKLKFGSKRYSESEFKRLQCFLDRNLPLHRAPVIESFRLVLSDSHFKPEDIRMWVVVAVSRYIRELKIYSSHYGEKQNILPSSLYTCKSLVILKLDGGVLLDVPRMVCLPSLKTLELKGVRYFKQGSLQRLLCNCPVLEDLVVNLSHHDNMGKLTVIVPSLQRLSLSTPSSREFVIDTPSLLSFQLVDRNDNSHTFLIENMPKLREAYINVPFADIKSLIGSITSVKRLAISSEVGYGEGFIFNHLEELTLWNKYSSNLLVWFLKNSPNLRELMLVSETDDHENLGMLSWNQPSIVPECMLSSLQKFTWFKYLGRPQDRDIAVYILKNACRLRTATIKSDTRLFTKLEMITELRLSSQASSTCELNFS

SEQ ID NO: 7985 - protein, 142 aa, Glycine max
  unsure (1)..(142): unsure at all Xaa locations
FSFGIDAIEDVLYHIETYDVTTIXACTPICLMSRLIKSLGVKWVIPREGSSEIFGGYLYLHKAPYKEEFLREPCLWIKALDHYDRLRANRSTFGWGLEARVPFWDKACINAAXEFSPEWNMMKRDXGRIEKWVLRRAFDDEE

SEQ ID NO: 7986 - protein, 1037 aa, Saccharomyces cerevisiae
MTVANTETHSAAKPSSTIGPWKLGETLGFGSTGKVQLAQHERTGHRTAVKVISKSIFNNNGNHSNDDSVLPYNIEREIVIMKLLSHPNVLSLYDVWETNNNLYLILEYAEKGELFNLLVDHGPLPEREAINCFRQIIIGISYCHALGIVHRDLKPENLLLDSFYNIKIADFGMAALQTDADLLETSCGSPHYAAPEIVSGLPYEGFASDVWSCGVILFALLTGRLPFDEENGNVRDLLLKVQKGQFEMPNDTEISRDAQDLIGKILVVDPRQRIKIRDILSHPLLKKYQTIKDSKSIKDLPRENTYLYPLADSNNHTSASIDDSILQNLVVLWHGRHADDIVSKLKENGTNKEKILYALLYRFKLDSVRGSNKKNRNKIKKTKKNKRSSTLSSSSSLLLNNRSIQSTPRRRTSKRHSREFSSSRKRSSFLLSSNPTDSSPIPLRSSKRITHINVASANTQATPSGVPNPHKRNSKKRSSKRLSYMPNTKRSSLTSKSLSNFTNLIDDDDWEYIEKDAKRTSSNFATLIDEIFEPEKFELAKREKAELQRKVQEAKRQSVNAQKINEDEFGSEVSDGMKELKKINDKVSSPLINYEFSQQELLQDIDTLLTNRYQLSSYTRPISRLDPGLTPVTETLPNNLKEKTALLQDTEKKIIETIRRSKFLGSLLNVRGGLSPGKSELAPIEESPIVSTTPLIYNDRMEPRRISDVEVPHFTRKSKHFTTANNRRSVLSLYAKDSIKDLNEFLIKEDPDLPPQGSTDNESRSEDPEIAESITDSRNIQYDEDDSKDGDNVNNDNILSDFPQGVGISQEYDMKDKNPNQSPISKSAEPTLVVKLPSLSSFQGKNASGLGLYQREPSKVTLPSLTSNNSSVGENIEDGAEKGTESEKIAASLSDDDLKEDNDKKDNDTVNAPTTVKKPPNSVLLKKFSKGKILELEIHAKIPEKRLYEGLHKLLEGWKQYGLKNLVFNITNMIITGKLVNDSILFLRSTLFEIMVLPNGDGRSLIKFNKKTGSTKTLTKLATEIQIILQKEGVLDK

SEQ ID NO: 7987 - protein, 153 aa, Lactobacillus gasseri
MIDAQRFGLIRSVGVSNFEPEHIEYLYRETGVMPAVNQVELHPYWSSKKVREYDNQHHIITEAWSPLQRGGEAFQEKEIIELAQKYHKSPAQIILRWETQINVVPIPKASSYEHQLSNLDIFDFKLAPEEVQSLINLDKESARRFDPNEHEEF

SEQ ID NO: 7988 - protein, 411 aa, Anaplasma platys
MKENAVLMCGDKKVSLPMLSGTDGIQLIDITTLYRDHKVLTYDPGFMSTAACSSEITFIDGEKGILRHRGLDIADLIGIKGGFCSVAHLLLYGVLPSDTVFEQFSAAIGAQHALSSDVLGVISSFRRDAHPMAILMACFSTLAAKYHGDNRGNEELAVLAIAQVPSLVAAIYRHRMGLELVSPDTSLSYTGNFVKMMFGALEKTRADAIEEALDAIFIMHADHEQNASTATVRMAGSAGTELFACLAAGTATLWGPAHGGANEAVIRMLESIGSPDKVEEFIGFVKDNNSKVRLMGFGHRVYKSYDPRAKILGQISRSVLDNLGCSDELLGVAEELERCALQDEYFVERKLYPNVDFYSGIVLRAMGVPVEMYTTFFALARTAGWVSQWCELLRGSESLKICRPRQLYAGK

SEQ ID NO: 7989 - protein, 100 aa, Triticum aestivum
MCGILAVLGCGDESQGKRVHVLELSRRLKHRGPDWSGLHQVADNYLCHQRLAIIDPASGDQPLYNEDKSIAVAVNGEVYNHEELRARLSFFFFFLSNHPV

SEQ ID NO: 7990 - protein, 203 aa, Capsicum annuum
MNPEYDYLFKLLLIGDSGVGKSCLLLRFADDSYLDSYISTIGVDFKIRTVEQDGKTIKLQIWDTAGQERFRTITSSYYRGAHGIIIVYDITDQESFNNVKQWLSEIDRYASENVNKLLVGNKSDLNDNRAVSYDTAKAFADEIGIPFMEASAKSATNVEQAFMAMAAEIKNRMATQPASNNAKPPTVQIRGQPVNQKSGCCSS

SEQ ID NO: 7991 - protein, 399 aa, Pseudomonas syringae pv. syringae B728a
MSGNRGVVYLGAGKVEVQSIPFPKMEDPRGKRIEHGVILRVVSTNICGSDQHMVRGRTTAQTGLVLGHEITGEVLEAGRDVEHLKVGDLVSVPFNVACGRCRSCKEQNTGVCLTVNPARPGGAYGYVDMGDWVGGQAEYVLVPYADFNLLKLPDRDAAMEKIRDLTCLSDILPTGYHGAVTAGVGPGSTVYVAGAGPVGLAAAASARLLGAAVVIVGDVNPTRLVHAKAQGFEIADLSQDTPLHEQIAALLGEPEVDCAIDAVGFEARGHGHAGAQAEAPATVLNSLMGVVRVAGKIGIPGLYVTEDPGAVDAAAKMGSLSIRFGLGWAKSHSFHTGQTPVMKYNRQLMQAIMWDRIKIADIVGVEVISLDDAPRGYGEFDSGVPKKFVIDPHGLFGAA

SEQ ID NO: 7992 - protein, 283 aa, Ralstonia solanacearum
MRRIQHRTQGNAMNDTFTMPAFGLGTFRLTGEAAIDSVRTALELGYRAIDTAQIYANEAEVGQAIAASGVPRRDLFLTTKIWVDNLAADRLIPSLKASLARLRTEQVDLALIHWPSPGGAVPMAEYLGALDEARREGLTRALGVSNFTVALLREAIETVGAAQIATNQIELHPYLQNRKVAAFAQSQGIHVTSYMTLGVGRVLADPVLADIARAHGATPAQVVLAWAMQLGCSVIPSSTRRANLQSNLAARDLRLTGDDMARIGALDRGERIADPAGIAPDWD

SEQ ID NO: 7993 - protein, 478 aa, Burkholderia cepacia R18194
MKIYDQFYIDGAWRKPAGTGTIDVIDSGTEAVIGRIPEGVASDAQDAIRAARAAFDAWAATPPATRAGYLRKIVEHLLARSEELAQSITGEVGMPIKLSRAIQVGGPIYNWKAYAKLAESFEFEAQVGNSLVVREPVGVVAAITPWNYPLNQVTLKVAPALAAGCTVVLKPSEVAPLNAFMLAEAIHEAGLPAGVFNLVCGYGPVVGEVLATDPDVDMVSFTGSTRAGKRVAELAAAGVKRVALELGGKSASVILDDADFATAVKGTVNACYLNAGQTCSAHTRMLVPEARYDEARAIAKAAAETYVAGDPRQDATRLGALASAVQQQRVQDYIQRGIDEGAELVTGGTGLPEGLDKGFFVKPTVFGRVDPKSTIAQEEIFGPVLSIITYRDEDEAVRIANDSPYGLGGAVWAGSDERAMGIARRIRTGQVDINGGAWNMAAPFGGYKQSGHGRENGVYGLEEYLEYKSMQLKPAKPA

SEQ ID NO: 7994 - protein, 330 aa, Halobacterium sp. NRC-1
MTGDDADETHENVVPGSDEDLDTPDVRGYDFSGEFDFFELLDSYATTGFQASHLADAVDITREMREDDATIYLTLTSNIVSSGLREVVAHLVRENYVDVIITTSGSLTEDIIKTAKPFKMGEWDVDEAALREEGINRLGNIFVPSDRYVWLEEYLYDFFEEFFADQKVRTPTAFARELGATLDDEDSILKNAADNDIPVFCPALTDAEIGNFLYYYRQGYDSEVGIEILDDYDALIEEGLLADTTGLICVGAGVPKHHAIMTNLFRGGADYAVYISTGMEGDGSLSGAPPEEAVSWGKIKDEDAEPNYALIEAEATLVFPLLVAGAFENP

SEQ ID NO: 7995 - protein, 367 aa, Buchnera aphidicola (Tetraneura caerulescens)
MIKKFKLAILAGDGIGPEVMEEGIKILEVIKKKFMLKLDIKEYLVGGVAIDKFGTALPKSTIDGCLNADAVLFGSVGGDKWKHLPVEQQPERAALLPLRKILNLFVNIRSSKLYSSLSHLSPLKSKIVNNGFDILCVRELIGGIYYGIPKGQKMDNYKRRYAVDTSIYYEEEITRIANFAFEIATFRRKKVTSVDKANVLETSILWREVVNKVAKKYPEISLNHLYVDNASMQIIKNPMDFDVILCPNLFGDILSDECGMITGSIGMLPSASLNKSKFGLYEPAGGSAPDISGKNIANPIALILSISMLFKYSFEQLNIADAIESSVINVLKDGYRTFDILTTNTNEKLLSTSSMGSKISDYLKHEE

SEQ ID NO: 7996 - protein, 126 aa, Glycine max
YFVVGKGEVVTCSGNRNADLFYGVLGGLGQFGIITRARISLEPAPMMVKWIRVLYSEFSTFTMDQEYLISLNNTFDYIEGFVIINRTGILNNWRSSFDPKNPLQASQFSSDGKTLHCLEMAKYFNP

SEQ ID NO: 7997 - protein, 300 aa, Aegilops longissima
GTANMQVDPSGQVQWTQQQPVPLPQQPFSQQPQQTFPQPQQTFPHQPQQQIPQPQQPQQQFLQPQQPFPQQPQQPYPQQPQQPFPQTQQPQQLFPQSQQPQQPYPQQPQQPFPQTQQPQQQFPQSQQPQQPFPQPQQPQQSFPQQQPPFIQPSLQQQLNPCKNLLLQQCRPMSLVSSLWSMIWPQSDCQVMRQQCCQQLAQIPQQLQCAAIHSVVHSIIMQQEQQQQQQQQQQQQQGLRIPLPLYQQQQVGQGTLVQGQGIIQPQQPAQLEAIRSLVLQTLPTMCNVYVPPECSIIKAPL

SEQ ID NO: 7998 - protein, 320 aa, Chloroflexus aurantiacus
MQQVIDSAEAYGRKVMLAGRSMETNARIAFELGYLRADESTIIRPHEMSAYPDEEIAIVCTGSQGEPMSALNRMANRDYPNVKIKPGDTVVLSATPIPGNEVSVNKVINNLFKLGADVIYGPEARVHVSGHAAQEELKLVLALLRPSYIVPFHGDYRHLMLYRKLATTIGAVPDSERVLLAEGGTIMEFSPGFGKITGKAPVGYIYVDGTTVGDVGNVVVRDRQLLAKDGMLIVVVSIDSATGQLVAGPDVVSRGFVYMRQSQDLIEATKETVRAALANRNGSNPVDAAYINRKIRDVVSEFLYRETRRRPMVLPMVMEV

SEQ ID NO: 7999 - protein, 186 aa, Zea mays
  unsure (1)..(186): unsure at all Xaa locations
MAPTVMMASSATAVAPFQGLKSTASLPVARRSSRSLGNVSNGGRIRCMQVWPAYGNKKFETLSYLPPLSTDDXLLKQVDYLLRNGWXIPCLEFSKVGFVYRENSTSPVLXDGRYWTMWKLPMFGXCTTPTQVYKELQEAIKSYPDAFHRVIGFDNIKQTQCVSFIAYKPPGQRLDRAAPAAPPPAS

SEQ ID NO: 8000 - protein, 486 aa, Pichia angusta
MEMAYTQINIDQEERDFQKEVEEIKKWWAEPRLEGHQESLSGRGDCEKTVHHQKPQRFRHDGKEGVQVARGAPKNKTVSFTFGALDPIHVTQMAKYLDTIYVSGWQCSATASTSTSLHQILPLPYGHCSNKVQHSVFVFAQLFHDRKQRHERFSLSKEERAKLPYIDFMRPIIADADTGHGGITAIVKLTKLFIEAGAAGIHIEDQAAGTKKCGHMAGKVLVPIQEHINRLIAIRTSADIFGSDLLCVARTDSEAATLITSTIDTRDHYFIIGATNPDVEPLVEVMNRAEQEGAYGAELEEIEKQWTEKAGLKLFHEAVIDEIKASDIKNKDEAIKKFTSTVTPLSGHSHRQARELAKSILGKDIFFDWDAPRVREGYYRYQGGTQCAINRARAVRSVRRHCCGWRRSYQSTKQAKEFAEGVLAKYPEKWLAYNLSPSFNWNAAMSPADQETYIKKLADLGFICNSFSCWFHTTVPAVQRRGVPLL

SEQ ID NO: 8001 - protein, 294 aa, Aegilops longissima
GTANMQVDPSGQVQWPQQQPVPLPQQPFSQKPQQTFPQPQQTFPFPHQPQQQFPQPQQPQQQFLQPQQPQQPYPQQPQQTFPQTQQPQQLFPQSQQPQQPYPQQPQQPLSQTQQPQQQFPQSQQPQQPFPQPQQPQQSFPQQQPPFIQPSLQQQLNPCKNLLLQQCRPVSLVSSLWSMIWPQSDCQVMRQQCCQQLAQIPQQLQCAAIHSVVHSIIMQQEQQQQQQQQQQGLRIPLPLYQQQQVGQGTLVQGQGIIQPQQPAQLEAIRSLVLQTLPTMCNVYVPPECSIIKAPL

SEQ ID NO: 8002 - protein, 340 aa, Cordyceps bassiana
MSRANPPNNASASRKISFNVSEQYDIQDVVGEGAYGVVCSAIHKPSGQKVAIKKITPFDHSMFCLRTLREMKLLRYFNHENIISILDIQKPRGFDSFNEVYLIQELMETDMHRVIRTQVLSDDHCQYFIYQTLRALKAMHSANVLHRDLKPSNLLLNANCDLKVCDFGLARSAASQEDNSGFMTEYVATRWYRAPEIMLTFKEYTKAIDVWSVGCILAEMLSGKPLFPGKDYHHQLTLILDVLGTPTMEDYYGIKSRRAREYIRSLPFKKKVLFRTLFADTSDLALDLLEKLLAFNPVKRITVEEALKHPYLEPYHDPEDEPTAPPIPEEFFDFDKHKDN

SEQ ID NO: 8003 - protein, 502 aa, Sinorhizobium meliloti
MLHQKIVENPYKQKYGNFIGGEWREPVAGRYFDNTTPITGGTLCEVARSDAADIEIALDAAHAAREKWGRTSTTERSNILMKIAARMEDNLELLARAETWDNGKPIRETMAADIPLAIDHFRYFAACIRAQEGSIGEIDHDTVAYHFHEPLGVVGQIIPWNFPILMAAWKLAPALAAGNCVVLKPAEQTPGSILVWAELIGDLLPPGVLNIVNGFGLEAGKPLATSPRIAKIAFTGETTTGRLIMQYASQNLIPVTLELGGKSPNIFFADVASEDDDFFDKALEGFAMFALNQGEVCTCPSRALVQESIYDRFMERAVKRVEAIRQGNPLDEATMIGAQASSEQLEKILAYIEIGKEEGAEVLTGGGRNVLEGDLSGGYYVKPTVFHGHNRMRIFQEEIFGPVVSVTTFKTEAEALEIANDTLYGLGAGVWSRDANRCYRFGRAIEAGRVWTNCYHAYPAHAAFGGYKQSGIGRETHKMMLDHYQQTKNMLVSYSPKALGFF

SEQ ID NO: 8004 - protein, 304 aa, Brassica napus
MAARSRVSSLLSRSFSASSPFLSRSQGKNLNNGSRIVRRFGTSSAAEEVISPSVQVSYTKLLIDGNFVDAASGKTFPTLDPRTGEVIAHVAEGDAEDINRAVKAARKAFDEGPWPKMTAYERSRVMLRFADLVEKHSEELAALESWDNGKTYEQALTAEIPMVARLFRYYAGWADKIHGLTVPADGNYHVQTLHEPIGVAGQIIPWNFPLLMFAWKVGPALACGNTIVLKTAEQTPLTAFYVGKLFLEAGLPPGVLNIVSGFGATAGASLASHMDVDKLAFTGSTDTGKVILGLAANSNLKPVT

SEQ ID NO: 8005 - protein, 219 aa, Rhodobacter sphaeroides 2.4.1
MKFFVDSADVAAIAELNALGMVDGVTTNPSLILKSGRNILEVTKEICNLVSGPVSAEVVAAKAEDMIEEGRHLAEIAPNIAVKVPLTWDGLRACKVLSDEGRMVNVTLCFSVNQALLAAKAGATFISPFIGRLDDINLDGMELIADIRQVYDNYDFKTEVLAASVRTPNHVADCARIGADVITAPPAVIKALANHVLTDKGLDMFNADWAKTGQSILLK

SEQ ID NO: 8006 - protein, 338 aa, Agrobacterium tumefaciens str. C58
MTMHAIQFVEKGRAVLAELPVADLPPGHALVRVKASGLCHTDIDVLHARYGDGAFPVIPGHEYAGEVAAVASDVTVFKAGDRVVVDPNLPCGTCASCRKGLTNLCSTLKAYGVSHNGGFAEFSVVRADHLHGIGSMPYHVAALAEPLACVVNGMQSAGIGESGVVPENALVFGAGPIGLLLALSLKSRGIATVTMADINESRLAFAQDLGLQTAVSGSEALSRQRKEFDFVADATGIAPVAEAMIPLVADGGTALFFGVCAPDARISVAPFEIFRRQLKLVGSHSLNRNIPQALAILETDGEVMARLVSHRLPLSEMLPFFTKKPSDPATMKVQFAAE

SEQ ID NO: 8007 - protein, 373 aa, Pichia stipitis
MSTVTKTITVLPGDHVGTEICNEAIKVLEAIEQATPYQKIHFEFKHHLIGGAAIDSTGVPLPDDSLAAAKLSDAVLLGAVGGPKWGTGAVRPEQGLLKIRKELNLYANLRPCNFASDALLELSPLKSEIVKGTNFTVVRELVGGIYFGERQEQEESADGESAWDTEKYSVAEVTRITRMAAFMALQHNPPLPIWSLDKANVLASSRLWRKTVDKVMKEEFPQLTIQHQLIDSAAMILVQSPTKLNGIVITSNMFGYIISDEASVIPGSLGLLPSASLASLPDTNSAFGLYEPCHGSAPDLPENKVNPIATILSVAMMLRLSLDSLKEAEALEEAVRQVLDSGVRTADLRGTNSTKEVGEAVVAGVTKILKDAA

SEQ ID NO: 8008 - protein, 297 aa, Sulfolobus tokodaii str. 7
MVIILFFSMSEEYSKVLELMEEAKEIFKIQGPFAGEYKARRIAFVGDTHGAVDVTQYVFNEIFDKVDLLVFLGDYVDRYPPSGVENLMIILEKFLQNKDKVVILRGNHESPITNLYYGFYEEVALKFGDEKVYEKFKDFFSYIPYVAIVNNYFCVHGGLPGKDNGGEMKLGIHSVDEIKSLPYPDINPDDPIAFQLLWNDPREGLDDFGFLPNIRGEGTFYFGEKIVKEFLDSTGYSGIIRGHEAVDGFRIDINGKVITVFSSRYHGQSAGVLLMDEGKIKRVYLYQDGSVKAFEGL

SEQ ID NO: 8009 - protein, 70 aa, Zea mays
MATPAVEKPEDVQIRDARTDNLETEIAVIRDIVYDYPYVAMHTEFPIVVSRPLGTHKSVIDFNYATLKAN

SEQ ID NO: 8010 - protein, 208 aa, Synechococcus elongatus PCC 6301
MIADPASRNVVWHDATITRSDRERLNGHRGVILWFTGLSGSGKSTLAHAVEAQLFERGCRTFVLDGDNVRHGLCADLGFSDSDRQENIRRIGEVAKLFMEAGVITLAAFVSPFRADRDRVRALVADGEYIEVYCQASLDICEQRDVKGLYAKARAGQIPEFTGISSPYEAPEAAELQIDTGSRSLEDCVAQVLDYLASQGIIPASDRA

SEQ ID NO: 8011 - protein, 294 aa, Glycine max
MLVLFLFLIFLQEHILTGGHGLMVQGYDPVVKALANDLDIRLNHRVTKISDGYNMVMVTVEDGRNFVADAVIVTVPIGILKANLIEFSPKLPHWKAEAIKDIGMGNENKIALRFDAVFWPNVEVLGIVAPTSYACGYFLNLHKATGHPILVYMAAGKFAYDLEKLSDESAANFAMQQLKKMFPDASKPVQYLVSHWGTDPNSLGCYACDLVGMPDDVYERLRAPVGNLFFGGEAVSMDDHQGSVHGAYSSGVMAAENCQRHLLQKQGHMESLPLVPSVRHEIFETTIPPQISRI

SEQ ID NO: 8012 - protein, 181 aa, Brassica napus
NVLVMGAGPIGLVTMLAARAFGVPKIVIVDVDDNRLSVAKRLGADGIVKVTTSLEDVGSEVEQIKKAIGSNIDVTFDCAGFNKTMSTALAATRCGGKVCLVGMGHGIMTVPLTPAAAREVDVVGVFRYKNTWPLCLEFLTSGKIDVKPLITHRFGFSQKEVEDAFETSARGSNAIKVMFNL

SEQ ID NO: 8013 - protein, 1063 aa, Saccharomyces cerevisiae
MDDYHVNTAFSMGRGNQQDDGNSERNSMHTQPSTMAPATLRMMGKSPQQQQQQNTPLMPPADIKYANNGNSHQAEQKERQVELEGKSRENAPKPNTTSQSRVSSSQGMPKQFHRKSLGDWEFVETVGAGSMGKVKLAKHRYTNEVCAVKIVNRATKAFLHKEQMLPPPKNEQDVLERQKKLEKEISRDKRTIREASLGQILYHPHICRLFEMCTLSNHFYMLFEYVSGGQLLDYIIQHGSIREHQARKFARGIASALIYLHANNIVHRDLKIENIMISDSSEIKIIDFGLSNIYDSRKQLHTFCGSLYFAAPELLKANPYTGPEVDVWSFGVVLFVLVCGKVPFDDENSSVLHEKIKQGKVEYPQHLSIEVISLLSKMLVVDPKRRATLKQVVEHHWMVRGFNGPPPSYLPKRVPLTIEMLDINVLKEMYRLEFIDDVEETRSVLVSIITDPHYGLLSRQYWTLAAKMNAESSDNGNAPNITESFEDPTRAYHPMISIYYLTSEMLDRKHAKIRNQQQRQSHENIEKLSEIPESVKQRDVEVNTTAMKSEPEATLATKDTSVPFTPKNSDGTEPPLHVLIPPRLAMPEQAHTSPTSRKSSDNQRREMEYALSPTPQGNDYQQFRVPSTTGDPSEKAKFGNIFRKLSQRRKKTIEQTSVNSNNSINKPVQKTHSRAVSDFVPGFAKPSYDSNYTMNEPVKTNDSRGGNKGDFPALPADRENMVEKQREKQIEEDIMKLHDINKQNNEVAKGSGREAYAAQKFEGSDDDENHPLPPLNVAKGRKLHPSARAKSVGHARRESLKYMRPPMPSSAYPQQELIDTGFLESSDDNKSDSLGNVTSQTNDSVSVHSVNAHINSPSVEKELTDEEILQEASRAPAGSMPSIDFPRSLFLKGFFSVQTTSSKPLPIVRYKIMFVLRKMINEFKEVKGGFVCMQRFSSNNVAAKREGTPRSIMPLSHHESIRRQGSNKYSPSSPLATNTHQRNSSITETYGDDKHSGTSLENIHQQGDGSEGMTTTEKEPIKFEIHIVKVRIVGLAGVHFKKISGNTWLYKELASSILKELKL

SEQ ID NO: 8014 - protein, 169 aa, Paracoccidioides brasiliensis
MSAPENSKITLIPSDEPEDGRGIEVERVIIERSILIKNMLEDLGDSGEPIPIPNVNKAVLEKVIEWCEHHRNDPPTTNDEDYDSRRKTTDIDEWDQKFMLVDQEMLFEIILAANYLDIKALLDVGCKTVANLIKGKSPDDIRKTFNIQNDFSEQEEAQIRAENEWAEDR

SEQ ID NO: 8015 - protein, 1153 aa, Saccharomyces cerevisiae
MPNPNTADYLVNPNFRTSKGGSLSPTPEAFNDTRVAAPATLRMMGKQSGPRNDQQQAPLMPPADIKQGKEQAAQRQNDASRPNGAVELRQFHRRSLGDWEFLETVGAGSMGKVKLVKHRQTKEICVIKIVNRASKAYLHKQHSLPSPKNESEILERQKRLEKEIARDKRTVREASLGQILYHPHICRLFEMCTMSNHFYMLFEYVSGGQLLDYIIHDGSLKEHHARKFARGIASALQYLHANNIVHRDLKIENIMISSSGEIKIIDFGLSNIFDYRKQLHTFCGSLYFAAPELLKAQPYTGPEVDIWSFGIVLYVLVCGKVPFDDENSSILHEKIKKGKVDYPSHLSIEVISLLTRMIVVDPLRRATLKNVVEHPWMNRGYDFKAPSYVPNRVPLTPEMIDSQVLKEMYRLEFIDDIEDTRRSLIRLVTEKEYIQLSQEYWDKLSNAKGLSSSLNNNYLNSTAQQTLIQNHITSNPSQSGYNEPDSNFEDPTLAYHPLLSIYHLVSEMVARKLAKLQRRQALALQAQAQQRQQQQQVALGTKVALNNNSPDIMTKMRSPQKEVVPNPGIFQVPAIGTSGTSNNTNTSNKPPLHVMVPPKLTIPEQAHTSPTSRKSSDIHTELNGVLKSTPVPVSGEYQQRSASPVVGEHQEKNTIGGIFRRISQSGQSQHPTRQSGTYSSKENLQHICQNQMKFPSKYRKAIVVLYQTYIPSARRYPSYVPNSVDVKQKPAKNTTIAPPIRSVSQKQNSDLPALPQKRQLIVQKQRQKLLQENLDKLQINDNDNNNVNAVVDGINNDNSDHYLSVPLSVPKGRKLHPSARAKSVGHARRESLKFTRPPIPAALPPSDMTNDNGFLGEANKERYNPVSSNFSTVPEDSTTYSNDTNNRLTSVYSQELTEKQILEEASKAPPGSMPSIDYPKSMFLKGFFSVQTTSSKPLPIVRHNIISVLTRMNIDFKEVKGGFICVQQRPSIETAAVPVITTTGVGLDSGKAMDLQNSLDSQLSSSYHSTASSASRNSSIKRQGSYKRGQNNIPLTPLTTNSIHQRKTSIPMSPNYGNQSNGTSGELSSMSLDYVQQQDDILTTSRAQNINNVNGQTEQTNTSGIKERPPIKFEIHIVKVRIVGLAGVHFKKVSGNTWLYKELASYILKELNL

SEQ ID NO: 8016 - protein, 176 aa, Glycine max
  unsure (1)..(176): unsure at all Xaa locations
MVLEATMICIDNSEWMRNGDYSPSRFQAQADAVNLICGAKTQSNPXNTVGVLTMAGKGVRVFVTPTSDLGKILACMHGLDIXGEMKLAAXIXVAQLASKHPQNKNXQQRFMAFVXNPVKHEKKMLELLEKVKKKKGPLELEFWEKNRGKKKIGTPPPCLKKRTPPLFVVPRGQRRF

SEQ ID NO: 8017 - protein, 457 aa, Mesorhizobium loti MAFF303099
MLANSLIELDRAHLIHPVSSYRGHEALGVRVLKSAKGATVTEASGRQLVDGFAGLWCVNAGYGHDSIVEAAARQMRELPYATAYFDLGAEPAIRLASELAERAPGDLNHVFFTLGGSDAVDSTVRFVRYYWNARGAPKRDQFISIEQGYHGSSVVGAGLTALPAFHAGFGIPFEWQHKIPSPYPYRNPVGEDANAIIAASLAALKAKIEELGPERVAAFYAEPIQGSGGVIVPPKGWIKAMRELCREYGILFIADEVITGFGRTGPLFACTDEEIVPDFMTTAKGLTSGYVPMGAVFMADHVYDVIADGAGASSVGHGYTYSAHPVSAAVALEVLKLYEDGLLENGIKAGARLMAGLSGLSDHPLVGDVRGRGMLAAIELVVDKEKKTPLPASAMPARRIFDRAWDNGLIIRAFANGVLGYAPPLCCTDADIDAIIERTRRTLDQTLADPDVRQALA

SEQ ID NO: 8018 - protein, 143 aa, Zea mays
MAMAYKMATEGMDVKEECQRWFMEMKWKKVHRFVVYRIDERSRAVLVDRVGGPGEGYEELVAALPGDDCRYAVFDFDFVTVDNCQKSKIFFIAWSPAASRIRAKILYATSKQGLRRLLDGVHYEVQATDPSEMGFDVIRGRAQ

SEQ ID NO: 8019 - protein, 321 aa, Zea mays
KCGHMAGKVLVAVSEHVNRLVAARLQFDVMGVETVLVARTDAVAATLIQTNVDARDHQFIVGATNPGLRGQSLAAVLSAGMSAGKSGRELQGIEDEWLAAAQLKTFSECVRDAIAGLGVAAQEKQRRLQEWDRATGGYDRCVSNDQARDIAASLGVTSVFWDWDLPRTREGFYRFRGSVAAAVVRGRAFAPHADVLWMETSSPNVGECTAFAEGVKAACPEAMLAYNLSPSFNWDASGMTDAEMAAFIPSVARLGYVWQFITLAGFHADALVTDTFARDFARRGMLAYVERIQREERINGVETLEHQKWAGANFYDRVLKA

SEQ ID NO: 8020 - protein, 537 aa, Zea mays
  unsure (1)..(537): unsure at all Xaa locations
MMAAVLKTSGSFCSTQQQHFQQSRRDQFLHGSYSYFKHCKSKKIIKPAPLCARVTSSKVELDVKDPYWKQKFQEDWENRFDLPSITDIYDXNQGRCSTICCCPSRTLTGDENVDMWNGYVNNDDRALLKVIKYSSPTSAGAECVDLDCSWVEQWVHRAGPRKEIYYEPEEVKAAIVTCGGLCPGLNDVIRQIVFTLETYGVKNIVGIPFGYRGFFEKGLKEMPLSRGLVENINLNGGSFLGVSRGGAKTSEIVDSIQARRIDMLFVLGGNGTHAGANAIHEECRKRKLKVSVVAVPKTIDNDILLMDKTFGFDTAVEEAQRAINSAYIEARSAYHGIGLVKLMGRSSGFIAMHASLSSGQVDVCLIPEVPFTLDGEFGVLRQLEHLLKSKGFCVVCVAEAAGQXYAKIHSCLDLLQESGATDASGNVILSDIGVHMQQKIKMHFKDIGVPADVKYIDPTYMVRACRANASDAILCTVLGQNAVHGAFAGFSGITSCICNTHYVYLPITEVITAPKRVNPNSRMWHRCLTSTGQPDFH

SEQ ID NO: 8021 - protein, 427 aa, Erwinia carotovora subsp. atroseptica SCRI1043
MTVRTSTLTAEGQASIALEMRSGVLGKTAVDIRPLGEHGLCSYDPGFANTAGCESAITYIDAANSVLLHRGFPVEQLAEQCDFTEVCYILLHGDAPSPEAYAKFADNITRHTLVHEQITRMFSGFRRDSHPMALMCAVVGALAAFYHDVLDINNAEHRELAAVRLLSKMPTLAAMCYKYSVEQPSVYPRNSLSYTGNFLHMLFSIPAEKYEVNPVLERAMNRILILHADHGQCPSTMAVRASGSSGANPFACIAAGLASMWGPLHGGANEACMRMLEEIKTVDRVPEFVRRAKDRCDSFRLMGFGNSVYQHFDPRAAILRKTCYEVLNELGMEDSLLQVAMELEHIAMTDAYFLENKLYPSVDFYTSVILKAMGLPSSMFTVISTVGRTIGWIAHWDEMHKQQEISIYRPRQIYTGQPQRDYVSLKG

SEQ ID NO: 8022 - protein, 526 aa, Triticum aestivum
  unsure (1)..(526): unsure at all Xaa locations
LSPPSLITPSPARPLRSLHSPNLPGQGGAAATCAACPAALRGAAGATATNSPCYRCTGSTAAVASTDPTFSAFPAFRVSARLLPFSTPCAASARXTMNIMIINVLKRARRRRPSALLXLFRFPFAFRSNGFVGKDFFGLRDMAQPGFDYGFFFFXLWAVVRAPDGMTYGVLLSVKXHLICDLIIGRCFPGTVXPMLCRSCVRWQDCKIGTQVRGASLLXSVIDYTRSGVVHIVGMVTCWWGVFTLGTRIDRFDHACRSVALKGHSASLVVLGTFLLWFGWYGFNPGSFVTILKSYGPPGSINGQWSGVGRTAVTTTLAGSVAALTTLFGKRLQTGHWNVVDVCNGLLGGFAAITAGCSVVDPWAAVICGFVSAWVLIGLNALAGRLKYDDPLEAAQLHGGCGAWGIIFTALFAKKQYVEEIYGAXGRPYGLFLGGGGRLLAAHIVQILVIAGFVSCTMGPLFLALKKLGLLRISAEDEMAGMDLTRHGGFAYVYHDDDEHDKSVGGFMLRSAQTRVEPAAAANSQV

SEQ ID NO: 8023 - protein, 485 aa, Mesorhizobium loti MAFF303099
MKTLKDKNLFREAGLIGGEWVAAGSGKTVDVIDPATQAAIGTVPDMAGSDTRAAIDAAASAYGDWKKKTNAERADLLEAWHGLMLAHLDDLALILTTEQGKPLDEAKGEIRYGASFVKWFAEEARRINGHTIPSPTQDRRIIVLKEPVGVCGIITPWNFPNAMITRKVAPALAAGCTVVIKPSEFTPYSALALGVLAERAGIPAGVINIVTGMPAEIGNEIMANETVRKISFTGSTRVGSLLMRGAADSVKRLSLELGGNAPFIVFDDADLDLAVEGALVSKFRNGGQTCVCANRILVQAGVYEAFAAKLSARVNAMTVGPGTQPGVAIGPMINMAAVEKINRHVEDALAKGAAIITEKPALPEGPQYVAPLVLSGATKDMQLAGEETFGPVAPLFRFETEEEAIALANGTPYGLASYFYTENLKRAWRVGEALEFGMVGLNTGSVSMEVAPFGGIKQSGLGREGAQAGIEEYLEMKSFHIGGLG

SEQ ID NO: 8024 - protein, 141 aa, Triticum aestivum
  unsure (1)..(141): unsure at all Xaa locations
LVETVARPSRSDAVCQQIRTFIQMRTNLKXVVDNSGAKRVMCIQSLRGKKGARLGDMIIGSVKEAQPRGKVKKGDVVYGVVVRAAMKKGRSDGSEVQFDDNAIVIVNNKGELIGTRVFGPVPHELRKKKHLKILALAEHIV

SEQ ID NO: 8025 - protein, 490 aa, Xanthomonas axonopodis pv. citri str. 306
MPRFPDQLLYIGGRYVPARGGHTLEVVNPATGEVLANVHNAGVDDLDAAVDSAKAGQQRWAALTTVERSRILLRAVALLRERNDALAQLETLNTGKPLSETRSVDVVTGADVLEYYAGVAQALQGAQVPLREGSFFYTRHEPLGVVGAIGAWNYPIQIALWKAAPALAAGNAMIFKPSEVTPLTALKLAEIFTEAGLPDGVFNVLPGDGASVGTALTEHPQIEKISFTGGTATGRKVMASASSSSLKEVTMELGGKSPLIVCADADLDVAADIAMMANFYSSGQVCTNGTRVFVPRALRHAFEARLLARVQRIHIGDPLDERTTFGPLASAAHMQRVLEHIEQGKAEGARLLCGGERLQDGALVQGYYVAPTIFSDCTDVMTIVREEIFGPVLSLLTYDDEDEAVTRANATTYGLAAGVVTPDLARAHRLIHRLEAGICWVNTWGESPAPMPVGGYKQSGVGRENGLATLQAYTRTKSVQIELERYASVF

SEQ ID NO: 8026 - protein, 487 aa, Mesorhizobium loti MAFF303099
MGLSFDPDTVSLPVGHFIGGELIAAEGAIEMRRPSDGKAYAASPVADVDMVDRAVASAKAALKASNWGGVRPRERTKALQAWADLIEAEAEALAKIEALCSTRPVGQLVAGDIAITAEQIRFFAEFADKEGSELVPTDDSSLGMIMSEPYGVVGAITPWNFPISMAGWKLGPALAAGNAVVLKPSEMTPFSAVYMAQLALRAGLPAGLVNVVLGDGPTTGTALTGHSEIAKVSFTGSTRAGSAIMENVARTGVKPMTLELGGKSPQIVFADADLDKAATAIAGSVTFNAGQACVAGTRLIAEKSVADRLTATILEKMKAARPGPTWDDATQYSPIISERQRARVDGIVRAAVEAGGECLTGGHTMDGPGYFYEPTLITDVDQANPAIVEEIFGPVLTVQTFETEEEALALSTHPTYGLASGLFTADLSRTIRFARKLEAGTVWVNRYSRSRDHILPTGGYKRSGIGKDLGREAYLANRRSKSVLISL

SEQ ID NO: 8027 - protein, 124 aa, Brassica napus
MSGVWVFNKNGVMRLVENPYNQSGGDWSESSSSGGSQQQRMRRKILVHLPTSEVVSSYKSLERILKCLGWERYYNGDNADHLLQFHKRTSIDLISLPRDFSKFNSIHMYDIVVKNPNVFHVRDM

SEQ ID NO: 8028 - protein, 363 aa, Buchnera aphidicola (Chaitophorus populeti)
MHKKYKIAILPGDGIGPEVMQETYKIIEIIKKKLLINIQTSEYDIGGISIDKHGIALPKKTLIGCEKSDAILLGSIGGPKWDILPPKERPEIASLLPIRKHFNLFANLRPSILHKKLNYLSPLKKNNIKDGFDILCVRELTGGIYFGKPRIEINKKNMHYAIDTSIYHKYEIQRIAEIAFQESLKRRCKVTSIDKANVLYTSKLWRKTVNKISKKYPKVHLSHLYFDNAVMQIIKNPNQFDVILCPNLIGDVISDECGSLTGSIGMLPSASLNTKNFGLYEPAGGAAPDTQGKNIANPIAQILSLSMLIKHSLKMNHISNLINTAVYKTLLKGFRTHDISHDKNFVTTKEMGNEIVKSFIEEL

SEQ ID NO: 8029 - protein, 175 aa, Triticum aestivum
MAPTVMASSATSVAPFQGLKSTAGLPISRRSSSAGLSSVSNGGRIRCMQVWPIEGIKKFETLSYLPPLSTEALLKQVDYLIRSKWVPCLEFSKVGFVFREHNSSPGYYDGRYWTMWKLPMFGCTDATQVLNEVEEVKKEYPDAYVRVIGFDNLRQVQCVSFIAFRPPGCEESGKA

SEQ ID NO: 8030 - protein, 367 aa, Mycobacterium tuberculosis H37Rv
MAIAETDTEVHTPFEQDFEKDVAATQRYFDSSRFAGIIRLYTARQVVEQRGTIPVDHIVAREAAGAFYERLRELFAARKSITTFGPYSPGQAVSMKRMGIEAIYLGGWATSAKGSSTEDPGPDLASYPLSQVPDDAAVLVRALLTADRNQHYLRLQMSERQRAATPAYDFRPFIIADAGTGHGGDPHVRNLIRRFVEVGVPGYHIEDQRPGTKKCGHQGGKVLVPSDEQIKRLNAARFQLDIMRVPGIIVARTDAEAANLIDSRADERDQPFLLGATKLDVPSYKSCFLAMVRRFTNWASRSSMVIFSMRLATASTRRPAVGLSAKAFSAWSPTRSTRGGRTASSRSTAFSTRSSRGSWRPGRTTRA

SEQ ID NO: 8031 - protein, 398 aa, Mycobacterium tuberculosis H37Rv
MTYGEAVADVLEFGQSEGEPIGMAPEEWRAFAARASLHAARAKAKELGADPPWDCELAKTPEGYYQIRGGIPYAIAKSLAAAPFADILWMETKTADLADARQFAEAIHAEFPDQMLAYNLSPSFNWDTTGMTDEEMRRFPEELGKMGFVFNFITYGGHQIDGVAAEEFATALRQDGMLALARLQRKMRLVESPYRTPQTLVGGPRSDAALAASSGRTATTKAMGKGSTQHQHLVQTEVPRKLLEEWLAMWSGHYQLKDKLRVQLRPQRAGSEVLELGIHGESDDKLANVIFQPIQDRRGRTILLVRDQNTFGAELRQKRLMTLIHLWLVHRFKAQAVHYVTPTDDNLYQTSKMKSHGIFTEVNQEVGEIIVAEVNHPRIAELLTPDRVALRKLITKEA

SEQ ID NO: 8032 - protein, 77 aa, Glycine max
MGLWTLLEGFLLLANALAILNEDRFLTPRGWGLSDFSAGQTKSFKGQLIGLIYATQYLRFPLLLLNSVFIIVKLVSG

SEQ ID NO: 8033 - protein, 641 aa, Zea mays
GDGIIFHTGDWKIDESPVDGKNFDRQALEELSKEGVTLMMSDSTNVLSPGRSISESVVAGSLLRHISEAKGRVITTQFASNIHRIGSIKAAADLTGRKMVFVGMSLRTYLEAAFKDGKAPLDPSTLIKVEDMDAYAPKDLLVVTTGSQGEPRAALNLASYGGSHALKLSKEDVLLYSAKVIPGNETRVMKMMNRLTDLGPKIIMGKDSGLHTSGHAYREELEEVLRIVKPQHFLPVHGELLFLKEHESLGRSTGIRHTTVIKNGEMLGVSHLRNRRVLSNGFVSLGKEDLQLMYSDGDKAFGTSTDLCIDERLRIASDGIIFVSMEIFRPQKEHGLAQSGLKGKFKITTRCLWLDNGRLLDALYKAAHAALSSCPVNCPHSHMERMVAEILRKMVRKYSGKRPDVIAVATENTTAGFSEHLDTKASGNFGPSSATSHLSRSPATSLEGSYKTHPDNPEVDAEEILPETVRTTPDDATTSSNGEALFSSDLHQPKTLEHFWESFKSPTAVKIARIVNGGNKQNFGKIGIMGQDSLIQSAPAPVKSSKRNKWKPEEIKSLIQMRGEMNEKFQSVKGRMVLWKEISDTMLNQGVSRTPAQCKSLWTSLVQKYEESKDTESMKTWPYFSAMDKILSQQGEMATKG

SEQ ID NO: 8034 - protein, 435 aa, Saccharomyces cerevisiae
MTTNEEFIGTQIFGTVFEITNRYNDLNPVGMGAFGLVCSATDTLTSQPVAIKKIMKPFSTAVLAKRTYRELKLLKHLRHENLICLQDIFLSPLEDIYFVTELQGTDLHRLLQTRPLEKQFVQYFLYQILRGLKYVHSAGVIHRDLKPSNILINENCDLKICDFGLARIQDPQMTGYVSTRYYRAPEIMLTWQKYDVEVDIWSAGCIFAEMIEGKPLFPGKDHVHQFSIITDLLGSPPKDVINTICSENTLKFVTSLPHRDPIPFSERFKTVEPDAVDLLEKMLVFDPKKRITAADALAHPYSAPYHDPTDEPVADAKFDWHFNDADLPVDTWRVMMYSEILDFHKIGGSDGQIDISATFDDQVAAATAAAAQAQAQAQAQVQLNMAAHSHNGAGTTGNDHSDIAGGNKVSDHVAANDTITDYGNQAIQYANEFQQ

SEQ ID NO: 8035 - protein, 150 aa, Brassica napus
MSGGDGNNGGGRRKGSVKWFDTQKGFGFITPDDGGEDLFVHQSSIRSEGYRSLAPEESVEFEVEVDNSGRTKAIEVSGPDGAPVLGNSGGSSGGRGGFGGGGRGGGRGGGGRGYGGGDSYGGGGYGGGGGYGGGGYGGRGGGGGDGACYK

SEQ ID NO: 8036 - protein, 284 aa, Zea mays
MTAVALALPTDDDKDGGRRGVDHSPTAPAPPPPPPPPQELVMVARAVQRLVARNDAVVPPAPDGRGGGRRLGMRAFEAAEGAAAPRIGVPEYLERVHRYAALDPECYVVAYAYVDMAAHRRPAAAVASRNVHRLLLASLLVASKVLDDFHHSNAFFARVGGVSNAEMNRLELELLDVLDFAVAVDHRVYRRYREHLEKETTLMMLRRDDGHGPPVPVPVPGSGAAPTKSRTAASSVVKPPLTEDRRRPAEAGDADGGGEHDDRRKLPNSATAAASLRELWAFDY

SEQ ID NO: 8037 - protein, 186 aa, Brassica rapa subsp. pekinensis
YIGLKQRRATGQEYAEFLHEFMCAVKQNYGEKVLVQFEDFANHNAFDLLSRYMDSHLVFNDDIQGTASVVLAGLIAAQKVLGKSLADHTFLFLGAGEAGTGIAELIALKISKETGAPIEETRKKIWLVDSKGLIVSSRKESLQHFKQPWAHEYEPVKDLIGAVNAIKPTVLIGTSGVGQTFTKEVV

SEQ ID NO: 8038 - protein, 344 aa, Zea mays
  unsure (1)..(344): unsure at all Xaa locations
MPFGLLAFLVQISSATLLFGTCRSYSLCIYIYASTGFTSFQIYKRFYFHTIFNYEHVCNICLMFGRAWEELKKEVREARRIKMLHQPSKAMDLENEIRILRNTFAEKSKDCVSLLKEWETHKRLKENGTIPSFDLEGLQCLGSMLRIVGLSGTHMDLSNISIQWFRIHPKESNKEIISGATRPVYALEPHDVGRYLQAEIDVGGEIAVAKTAGPVDPDAGLVDYVETLVRKPETEFNVVVLQSNGVDQPKESVHVLNVGRLRMRLTKGKSVVAKEFYSSSMQLCGVRGGGEAASQAMFWRPRNDLXLVLAFESTRERNTAIMLARRFAVDCNIILAGPGDKTPW

SEQ ID NO: 8039 - protein, 94 aa, Brassica napus
MSLFLKDDSIQIREVWNDNLLEEMDLIRQVVDDFPYVAMDTEFPGIVVRPVGTFKSNADYHYETLKLNVNILSIIQLGLTFSNEQGNLPTCGTD

SEQ ID NO: 8040 - protein, 407 aa, Yersinia pestis KIM
MEIILGVVMFTLIVLALTVMILFAKSKLVNTGDITVEINEDEDKSFTAPAGDKLLNMLSSHGIFVSSACGGGGSCGQCRVTIKEGGGDILPTELSHISKREAKEGCRLACQVNVKQNLKIELPEEIFGVKKWTCEVISNDNKATFIKELKLKIPDGDVVPFRAGGFIQIEAEPHTVKYADFDVPTEYRGDWDKFNLFRFESVVTEPTVRAYSMANYPEEHGIILLNVRIATPPPSVPDAPPGIMSSYIWSLKPGDKVVISGPFGEFFAKDTDAEMVFIGGGAGMAPMRSHIFDQLKRLHSKRKISFWYGARSRREMFYEEDFDQLQAENDNFRWHVALSDPQPEDNWTGYTGFIHNVLLENYLKDHPAPEDCEFYMCGPPMMNAAVIKMLKDLGVEDENIMLDDFGG

SEQ ID NO: 8041 - protein, 77 aa, Glycine max
MASLMLSSPAVTTDNRAGAGMVAPFTGLKSMAGFPTRKTINDITSIASTGGRVLCMQVRPPLGKKTFETLSYLPDLD

SEQ ID NO: 8042 - protein, 120 aa, Zea mays
ESGVSMLLHGDLDIQIIEAKCLPNMDLMTERMRKCFTGYGACSNDCGKSEPPHPDMRKIITSDPYVSVCLSGATVAQTRVIANSENPKWDEHFYVQVAHSVSRVEFHVKDNDVFGAELIG

SEQ ID NO: 8043 - protein, 506 aa, Oryza sativa (japonica cultivar-group)
MESPLSHPAMVALSLLLLVALYLARRAVLGKKRRYPPVAGTMFHQLLNFGRLLEYHTELSRKYRTFRMLTPTCNYVYTVEPANVEHILKTNFANYGKGPMTHDVLEDLLGDGIFNVDGGMWRQQRKVASLEFSTRVLRDYSSAVFRDTAAELAGILERGPAAKGRERVDMQDLLMRATLDSFFRVGFGVNLGVLSGSSKEGLVFARAFDDASEQVLFRFFDLLWKVKRFLNISSEATMKQSIRTINDFVYSIIDRKIEQMSREQHEFAKKEDILSRFLLEREKDPGCFDNKYIRDIILNFVIAGRDTTAGTLSWFLYAVCKNQRVQDKIAREVRDATTGDRDVGVQDFSSFLTEDAINKMQYLHAALTETLRLYPGVPLDVKYCFSDDTLPDGHAVKKGDMVNYQPYPMGRMKFLWGDNAEEFKPERWLDDSGMFVAESPFKFTAFQAGPRICLGKEFAYRQMKIVSAVLLYFFRFEMWDDDATVGYRPMLTLKMDGPFYLRALAR

SEQ ID NO: 8044 - protein, 206 aa, ASPERGILLUS NIDULANS FGSC A4
MATNITHHAGITRNERNQLRKQKGLTIWLTGLSASGKSTIAVELEHQLLQRGLHAYRLDGDNVRFGLNKDLGFSDADRNENIRRIAEVAKLFADSSSIAITSFISPFRADRDTARKLHEVPTPNDSTGLPFVEVFVDVPIEVAEKRDPKGLYKKAREGIIKEFTGISSPYEAPENPEVHVKNVDLPIQEAVKQIIDYLDSKKLLDA

SEQ ID NO: 8045 - protein, 438 aa, Zea mays
  unsure (1)..(438): unsure at all Xaa locations
GSRKLLGQGTFAKVYHARNTATSESVAIKVIDKEKVMKVGLIDQIQREISVMKLVRHPNIVQLYEVMATKTKIYFVLEHVKGGELFNKIQRGRLKEDAARKYFQQLICAVDFCHSRGVYHRDLKPENLLLDENSNLKVSDFGLSALAECHRQDGLLHTTCGTPAYVAPEVINRKGYDGAKADIWSCGVILFVLLAGYLPFHDKNLMDMYKKIEKADFKCPSWFSTDVRRLLQRILDPNPSRRISVEKIMEXPWFRKGLGAKLLRYDLQNKNAPHVDKNADFDSLSTNVTTESKQHEEKKPTNMNAFDIISLSTGLDLSGLFEESNKKRESKFTSTNTSSTIISKIEDIAKNLRLNLTKKDGGLLKMEASKPGRKGVMGIDAEVFEVSPNFHLVEIKKTNGDTLEYQKVLNQEMRPALKEIVWAWQGEQSKQKQEQQSC

SEQ ID NO: 8046 - protein, 347 aa, Clostridium thermocellum ATCC 27405
MKGKMKVCVLTGKEKLEWVERDIPQPGRGELQIKLKHVGVCGSDLHFYKEGRLANWELDGPLALGHEPGGIVSAIGEGVEGFEIGDKVALEPGVPCGECEDCRKGHYNLCKHIKFMAIPHEKDGVFAEYCVHSASMCYKLPENVDTMEGGLMEPLSVALHATELSNAKIGETAIVLGSGCIGLCTVMALKARGVSEIYVTDVVDKRLEKALEVGATRVFNSQREDIVEFAKTLPGGGADQVYECAGSRVTTLQTCKLIKRAGKVTLVGVSPEPVLELDIATLNAMEGTVYSVYRYRNMYPIAIAAVSSGVIPLKKIVSHVFDFKDCIEAIEYSTNHKDEVIKSVIKF

SEQ ID NO: 8047 - protein, 279 aa, Glycine max
  unsure (1)..(279): unsure at all Xaa locations
MGVFSEDPNPNPNPIVIREVWASNLESEFELIRELIDRYPFISMDTEFPGVIFRPHVDPTKPFNHRNRPSDHYRLLKSNVDALNLIQVGLTLTDAAGNLPDLAGNRSIWEFNFRDFDVARDAYAPDSIDLLRRQGIDFARNTADGVDSTCFAELMMSSGLXVCNDAVSWVTFHSAYDFGYLVKILTRRNLPTRLEEFLKTVKVFFGDNVYDVKHMMRFCDTLYGGLDRVARTLNVDRAVGKCHQAGSDSLLTWHAFQKIVDIYFVKEEHRKHAGVLFGL

SEQ ID NO: 8048 - protein, 503 aa, Oryza sativa (japonica cultivar-group)
MATAIPQRQLFVAGEWRAPALGRRLPVVNPATESPIGEIPAGTAEDVDAAVAAAREALKRNRGRDWARAPGAVRAKYLRAIAAKIIERKSELARLETLDCGKPLDEAAWDMDDVAGCFEYFADLAESLDKRQNAPVSLPMENFKCYLRKEPIGVVGLITPWNYPLLMATWKVAPALAAGCTAVLKPSELASVTCLELADVCKEVGLPSGVLNIVTGLGSEAGAPLSSHPGVDKVAFTGSYETGKKIMASAAPMVKPVSLELGGKSPIVVFDDVDVEKAVEWTLFGCFWTNGQICSATSRLILHKKIAKEFQERMVAWAKNIKVSDPLEEGCRLGPVVSEGQYEKIKQFVSTAKSQGATILTGGVRPKHLEKGFYIEPTIITDVDTSMQIWREEVFGPVLCVKEFSTEEEAIELANDTHYGLAGAVLSGDRERCQRLTEEIDAGIIWVNCSQPCFCQAPWGGNKRSGFGRELGEGGIDNYLSVKQVTEYASDEPWGWYKSPSKL

SEQ ID NO: 8049 - protein, 362 aa, Saccharum hybrid cultivar
MGSTAEDVAAVADEEACMYAMQLASASILPMTLKNALELGLLEVLQAEAPAGKALAPEEVVARLPVAPTNPDAADMVDRMLRLLASYDVVKCQMEDKDGKYERRYSAAPVGKWLTPNEDGVSMAALTLMNQDKVLMESWYYLKDAVLDGGIPFNKAYGMTAFEYHGTDPRFNRVFNEGMKNHSVIITKKLLEFYTGFEGVSTLVDVGGGIGATLHAITSHHPQIKGINFDLPHVISEAPPFPGVQHVGGDMFKSVPAGDAILMKWILHDWSDAHCATLLKNCYDALPENGKVIVVECVLPVNTEAVPKAQGVFHVDMIMLAHNPGGRERYEREFHDLAKGAGFSGFKATYIYANAWAIEFIK

SEQ ID NO: 8050 - protein, 512 aa, ASPERGILLUS NIDULANS FGSC A4
MALLGLLETYRDPLAFVAALSAVFYLLSCLHRRWRRYQFAKENGCEPVVGKIPSYDPFLSLDRLYRLTKLARNRKLLENNVQRFKEFGNTHRAKRITTPMIVTRDPQNIKAILSLKFGDYSMGDRIRIFGPLLGHGIFTSDGEDWARSRHMIRPNFVKEQVAHLEIFEELMDDLFALIPTDGSTVDLQELFFGFTIDSATEFLCGHNVHSLKKRRSGVIDDEPDFAEAFNYSLDNISKNGRFGPLMFLNRDPKAVESHRICHESMDQFVDKAIRMRERYNEEKIVDEAAERRYMFLYGLAQQTGDRRRIRDEVLNILLAGRDTTASLLSNMFFLLAKHPSTWAKLQEEVATLEGRAPTYEQLRNMKYLKYCLNETLRLFPVVPVNSRTAIRDTVLPVGGGPDGQSPAFVPKGTMVAYSVYAMHRREDYYGADAEEFRPERWADLRPGWEYLPFNGGPRICVGQQYALTEAAYVTTRLAQRYSILESRDPGPWEEKLTLTLCSYNGTQVSLRH

SEQ ID NO: 8051 - protein, 335 aa, Triticum aestivum
YQVYKQVDEGSPECGIIVNRHRRWLRNLLWATSKHDVYVTQNYSVMHWSSLLRRGKEVPNVAGPNQDMRGGRPLSRVQISTMTVKDNLLAAGGFHGELICKYVDQPGVAFCTNLAGNKKSITNAVEIYESPNGSTRVVAANNDCVVRTFDTEKYSLLTQFPFAWSVNNMSVSPDGKLLAVVGDSSDCLIADSGSGKEIASLRGHADYSFASAWHPDGRVLATGSQDRTCRLWDVRNPSDAFAVLEGRIGAVRGLRFSPDGRFLAAAEPADFVRVYDVAAGYARAQEIDLFGEIAGVSFSPDDGAEALFVGVADRTYGSLLEFRRRHRHAYLDCYL

SEQ ID NO: 8052 - protein, 293 aa, Saccharomyces cerevisiae; identical to SEQ ID NO: 315

SEQ ID NO: 8053 - protein, 52 aa, Triticum aestivum
DGSSKDDLKLPTDDAILTQLKGGFDEGKDLAMTVMSAMGEEQICAVKKVGPR

SEQ ID NO: 8054 - protein, 504 aa, Mesorhizobium loti MAFF303099
MTIAKETAELLAKLGVAKDALVGGDLIVRSPVTGEQIAALKTISPADAAKTIDAAHKAFQSWRLVPGPKRGELVRLLGEELRAHKAELGRLVSIEVGKIPSEGLGEVQEMIDICDFAVGLSRQLYGLTIATERPGHRMMETWHPLGVVGVISAFNFPVAVWSWNAALALVCGDAVVWKPSEKTPLTALACEAIFKRAVKRFGADAPQGLAPVLIGDRAVGEILVDHPKVPLVSATGSTRMGRDVGPRLAKRFARAVLELGGNNAGIVCPTADLDMALRAIAFGAMGTAGQRCTTLRRLFVHESVYDALVPRLKKAYQSVSVGNPLETSSLVGPLIDKAAFDAMQKALTEAAAHGGKVAGGARVENGHPDAYYVHPALVEMPKQVSPVTEETFAPILYVMKYSDFDAVLDEHNAVGAGLSSSIFTRDLQESERFLGVDGSDCGIANVNIGTSGAEIGGAFGGEKETGGGRESGSDAWKAYMRRATNTVNYSKALPLAQGVSFDID

SEQ ID NO: 8055 - protein, 105 aa, Triticum aestivum
MWTERRARRSGSMAGGGGGRARGAEGKRAAPQGQRAPAATAGYFTAELAALFLCLTALLVFLPLVLPPLPPPPSLLLLVPVGLMAVLVALAFVPSDSRSMASSCH

SEQ ID NO: 8056 - protein, 665 aa, Glycine max
KSRRQLALFPPSSGAYFFHGFVTSVYSVFVSIFMNTLGKSCLCKSDVQLSLSCRTEGINSRTNSNGTFRKLEKLSRATVIAKSSRLWGFFIACQWVSIVTFPVLWRSYKQLSWLGAKSSPYYQPMHEQFAIVVRDIPHVPQGQTRKEQVDSYFRDIYPETFYRSMIVTDNKVVNKIWESLEKYTKKLARAEAVYAGSKTTAKPEGTRPTNKTGFLGLVGKKVDTIEYCNEKINELEARLESEQKVTLREKQQDAAVVFFSSRVVAASASPNLHAQIPNMELIFRAYIPPRLRWEKIDDDRVEDALSQCSRTAPVGCNYLNFNLFLRVRCSLVEILLDVLLIVHIKPIVNIKALKTVLEAYLPQLALIIFLALLPKLLLFLSKFEGIPTESHAVRAASGKYFYFTVLNVFIGVTIGGTLFKAFKRIREHPTLDEISSLLAESLPGNATFFLTYVALKFFIGYGLELSRIVPLIIYHLKRKYLCKTEAELKEAWRPGDLGYGTRVPGDMLIVTIVFCYSVIAPVIIPFGALYFGLGWLVLRNQALKVYVPTFESYGRMWPHIHNRILASLILYQITMFGYFGTQKFYYTPLVLPLPILSLVFGFVCAKKFYPAFQHPALEVAANTLKEVPNMELIFGAYIPPSLRSEKIDGDRVEDALSQASRTTPV

SEQ ID NO: 8057 - protein, 422 aa, Streptococcus pyogenes M1 GAS
MILIKNGRVMDPKSQRDQVADVLIDGKQIVKIASAIECQEAQVIDASGLIVAPGLVDIHVHFREPGQTHKEDIHTGALAAAAGGVTTVVMMANTNPVISDVETLQEVLASAAKEKIHIYTNASVTQAFNGKDVTDFKALLEAGAVSFSDDGIPLESSKVLKEAFDLANANQTFISLHEEDPQLNGVLGFNEGIAEEHFHFCGATGVAEYSMIARDVMIAYDRQAHVHIQHLSKAESVQVVAFAQQLGAKVTAEVSPQHFSTTEDLLLIAGTSAKMNPPLRTQRDRLAVIEGLKSGVITVIATDHAPHHKDEKTVDDMTKAPSGMTGLETSLSLGLTHLVEPGHLTLMSLLEKMTLNPALLYGFDAGYLAENGPADLVIFADKQERLITENFASKASNSPFIGNKLKGVVKYTIADGEVVYPN

SEQ ID NO: 8058 - protein, 432 aa, Myxococcus xanthus
  unsure (1)..(432): unsure at all Xaa locations
MAPPSSGEKISLQSGKLSVPDNPIIPFIEGDGTGRDIWRASQAVFDAAVEKAYKGKKKIAWYEVLAGEKSFKAVNNWLPEETVEAFRTYLVGIKGPLTTPVGGGIRSLNVALRQMLDLYVCLRPVRYFKGVPSPVKMPDKVDMTIFRENTEDIYAGIEFEAGTAAAEKFLGLLKQEFPKEFGKIRFPSDVGLGIKPVSHEGSDRLIRAAIQYAVDHKRKSVTLVHKGNIMKFTEGAFRKWGYELAAREFGDKVYTWDQWEATKAXKGEDAANAEQKAALAAGKILIKDSIADITLQQVLTRPDEFDVIATLNLNGDYLSDALXAQVGGIGIAPGGNINYVTGHAVFEATHGTAPKYADQDKVNPGSVILSGEMMFRHLGWYEAADLMIQGMDRAIASKTVTYDFARLMKQEGQSGVSEVKCSEFGQAIIKNM

SEQ ID NO: 8059 - protein, 447 aa, Arabidopsis thaliana
MSGSRRKATPASRTRVGNYEMGRTLGEGSFAKAKYAKNTVTGDQAAIKILDREKVFRHKMVEQLKREISTMKLIKHPNVVEIIEVMASKTKIYIVLELVNGGELFDKIAQQGRLKEDEARRYFQQLINAVDYCHSRGVYHRDLKPENLILDANGVLKVSDFGLSAFSRQVREDGLLHTACGTPNYVAPEVLSDKGYDGAAADVWSCGVILFVLMAGYLPFDEPNLMTLYKRICKAEFSCPPWFSQGAKRVIKRILEPNPITRISIAELLEDEWFKKGYKPPSFDQDDEDITIDDVDAAFSNSKECLVTEKKEKPVSMNAFELISSSSEFSLENLFEKQAQLVKKETRFTSQRSASEIMSKMEETAKPLGFNVRKDNYKIKMKGDKSGRKGQLSVATEVFEVAPSLHVVELRKTGGDTLEFHKFYKNFSSGLKDVVWNTDAAAEEQKQ

SEQ ID NO: 8060 - protein, 117 aa, Zea mays
LQAVIKRLMTDVPFGVLLSGGLDSSLVASVASRHLNETKVDRQWGNKLHTFCIGLKGSPDLKAAREVADYLSTVHHEFHFTVQMVISGEGSDEIFGGYLYFHKAPNKKEFHEETCRK

SEQ ID NO: 8061 - protein, 112 aa, Bartonella sp. RR13863PO
ANEACLKMLQEIGSIKRIPEFIARAKDKNDPFRLMGFGHRVYKNYDPRAKILQKTCHEVLKELNIQDDPLLDIAIELEKIALNDEYFIEKKLYPNVDFYSGITLKALGFPTE

SEQ ID NO: 8062 - protein, 320 aa, Emericella nidulans
MDKSQQPSSFQQLEKLGEGTYATVFKGRNRQTGELVALKEIHLDSEEGTPSTAIREISLMKELKHESIVSLYDVIHTENKLMLVFEYMDKDLKKYMDTRGDRGQLDQATIKSFMHQLMSGIAFCHDNRVLHRDLKPQNLLINKKGQLKLGDFGLARAFGIPVNTFSNEVVTLWYRAPDVLLGSRTYNTSIDIWSAGCIMAELYTGRPLFPGTTNEDQLQKIFRLMGTPSERSWPGISQLPEYRANFHVYATQDLGLILPQIDPLGLDLLNRMLQLRPEMRIDAHGALQHPWFHDLPQLQAQLQQQQMAGYGGMMPPQQAY

SEQ ID NO: 8063 - protein, 155 aa, Codonopsis lanceolata
MALIPSIFGGRRSNVFDPFSHDIWDPFQGLSSALANARDQETAAIANTRIDWKETPEAHVFKADLPGLKKEEIKVEVEDGRVLQISGERSKEQEEKTDTWHRVERSVGKFHRRFRLPENAKVDQVTASMENGVLTVTVPKKEEKEPEVKAIDISG

SEQ ID NO: 8064 - protein, 112 aa, Bartonella sp. MM5136CA
ANEACLKMLQEIGSIERIPEFIARAKDKNDPFRLMGFGHRVYKNYDPRAKIMQKTCHEVLKELNIQDDPLLDIAIELEKIALSDEYFIEKKLYPNVDFYSGITLKALGFPTE

SEQ ID NO: 8065 - protein, 433 aa, Oryza sativa (japonica cultivar-group)
MERYKVIREIGDGTCGNVFRAYNTETNEIVAVKKMKRKFFQWEECISLREVKALQKLNHPNIVKLKEVTMENHELFFIFENMECNLYDVIRERQAAFSEEEIRNFMVQILQGLAYMHNNGYFHRDLKPENLLVTDGTVKIADFGLAREVSSSPPYTDYVSTRWYRAPEVLLQSSAYTPAIDMWAVGAILAELFTLSPLFPGGSETDQLYKICAVLGTPDHTVWPEGMNLPRSSSFNFFQIPPRNLWELIPNATLEAIDLIQQLCSWDPRRRPTAEQSLQHPFFNVGNWVPRPLHASHTKTIETRPNPRLELNLWDFGTEPEDNYLDLTLSLKPSFPGTDFSNNVPEHTKEEILLYPGFENPPVQSGFWPLVASDRPMGDVPAMSSWPQAYVVDGQATLPAVGFSGSPFGLSPLQPNLFENRSFATPIRQVNFF

SEQ ID NO: 8066 - protein, 206 aa, Bartonella taylorii
AYKYSIGQAFVYPRNDLSYAANFLRMCFCVPCEEYKVNSVLTRAMDRIFILHADHEQNASTSTVRLAGSSGANPFACIAAGVACLWGPAHGGANEACLKMLQEIGSVERIPEFIARAKDKNDPFRLMGFGHRVYKNYDPRAKIMQKTCHEVLKELNIQDDPLLDIAIELEKIALNDEYFVEKKLYPNVDFYSGITLKALGFPTESL

SEQ ID NO: 8067 - protein, 367 aa, Triticum aestivum
  unsure (1)..(367): unsure at all Xaa locations
MGSTATDMAASADEEACMYALQLVSSSILPMTLKNAIELGLLETLVAAGGKLLTXSTWCRARWRRARMGACPGGTAPRPCASSSPXTRTASPWAXHALMNMLRLLXSYNVVSCTMEEGKDGRLSRRYGAAPVCKFLTPNEDGVSMAALALMNQDKVLMESWYYLKDAVLDGGIPFNKAYGMSAFEYHGTDPRFNRVFNEGMKNHSIIITKKLLEVYKGFEGLGTIVDVGGGXVGATVGAIVAAYPAIKGINFXLPHVISEAPPFPGVTHVGGDWSDEHCATLLKNCYDALPAHGKXVVLVECILPVNPEATPKAQGVFHVDMIMLAHNPGGRERYEREFEALAKGAGFKAIKTTYIYANAFAIEFTK

SEQ ID NO: 8068 - protein, 205 aa, Triticum aestivum
  unsure (1)..(205): unsure at all Xaa locations
MKTFLIFVLLAMAMNIATAARQLNPSNXELQSPQESFSHQQQPFPQQPXAAFSQPQDSFPWQPHQPFPQTQQSFPLQPQQPFPQQPQQSFPQPQPQQPQQPFPQQPQQPFPLRPQQPFPQQPQQSQQSFPQPQPQXPQQPSILQPQQPLPQQPQQPFQQPQQQLSQQPEQTISQQPQQPFPXHQPQQPYPQQQPYGSSLTSIGGQ

SEQ ID NO: 8069 - protein, 157 aa, Brassica napus
MMDGVTGGDSKSGEATTAPPLRNPHPATLLGANALPPPFLSKTYDMVEDPASDAIVSWSPANNSFVVWDPPEFSRSLLPRYFKHNNFSSFVRQLNTYGFRKVDPDRWEFANEGFLRGQKHLLKTISRRKSTHGHGTSSSNTQSHQGSHGFVIFMRRG

SEQ ID NO: 8070 - protein, 484 aa, Mycobacterium avium subsp. paratuberculosis str. k10
MSRDDWISADEGPRRTVSTTIPVFNPSTEEQIAEVPDSDQAAVDAAVARARETFELGVWRKAPASHRANVLFRAARIIEERKDELAALESQDNGMNLTAAGHIIPVSVDMLKYYAGWVGKIHGESANLVSDGLLGTWETYHTFTQLEPVGVVGLIIPWNGPFFVAMLKVAPALAAGCSAVLKPAEETPLTALKLEEIFREAGLPDGVLNVITGYGETTGAALTAHPDVDKISFTGSTEVGRLIVKAAAGNLKRLTLELGGKSPLIMFDDANLDKAIMGAGMGLLAGSGQNCSCTSRIYVQRGIYDQVVEGLAEFAKMLPMGGSDDPNSVLGPLISEKQRQRVEGIVNDGVAAGAKVITGGKPMDRKGYFYEATIITNTTPDMRLIREEIFGPVGCVIPFDDEDEVIAAANDTHYGLAGAIWTENLSRAHRVVNELRAGQIWVNSALAADPSMPISGHKQSGWGGERGRKGIEAYFNTKAVYIGL

SEQ ID NO: 8071 - protein, 285 aa, Lactobacillus gasseri
MNFHSIEDTYTLNNGVEIPIIGFGTWQTPDGDIAKHAVEVALNAGYRHIDTAAAYGNEKSVGQAIKKSGINRHDLFITTKLWNADHGYQSTKAAIDRSLQNLKVDYLDLYLIHWPNPVAMRDHWAEANAESWRAMEEAVQAGKIRAIGVSNFRKRHLDELLKTAEIKPVVNQIMLNPSDLQSDVVKVNNKLGLLSEAYSPLGTGGLLGNETVKEIASEVGKSPAQVLIRWSLEHGFLPLPKSVHDKYIQANVEVFDFNLNSEQMNKLDSLHGVSGLATDPDTANF

SEQ ID NO: 8072 - protein, 433 aa, Neisseria meningitidis Z2491
MPSETARPLYADTCAAHTLVWFRQNLRIRDNAALCAAVAEGLPVIGIWIDDAETDNPRRAAFYRQSAAELAQGLAGRGIPLYTAASPAELVRLAVRLNIRAVIADESHTFADKLADNALWHELNKHGIALTFVNDRAVFGKTDLIPDGGTAHTDFDRYREVWLDRFSKQPPAGPDLFAAYRQPFPENLSAPPPAALSDGIFLPQNSGETAAWRQWRRFLEQADSYSVLKDFPSRKHTSLMGAYLSAGCISPRLLARESLERRLNAWADNIIRRDFFLQLALQHTDDDPSDGNPEHTLRLTLWQQGRTGIPIIDAAMRCLHKTGSLHPALRRLSADFFCHVLNLPRREGEIWFARQLTDFDAAINQGNWRLAASRHTCPDIAAAAHKTDPDGTFVRRHIPELAHLSADTVHTPWRFACSVDTHGYPAHPVAGIP

SEQ ID NO: 8073 - protein, 490 aa, Escherichia coli K12
MSRMAEQQLYIHGGYTSATSGRTFETINPANGNVLATVQAAGREDVDRAVKSAQQGQKIWASMTAMERSRILRRAVDILRERNDELAKLETLDTGKAYSETSTVDIVTGADVLEYYAGLIPALEGSQIPLRETSFVYTRREPLGVVAGIGAWNYPIQIALWKSAPALAAGNAMIFKPSEVTPLTALKLAEIYSEAGLPDGVFNVLPGVGAETGQYLTEHPGIAKVSFTGGVASGKKVMANSAASSLKEVTMELGGKSPLIVFDDADLDLAADIAMMANFFSSGQVCTNGTRVFVPAKCKAAFEQKILARVERIRAGDVFDPQTNFGPLVSFPHRDNVLRYIAKGKEEGARVLCGGDVLKGDGFDNGAWVAPTVFTDCSDDMTIVREEIFGPVMSILTYESEDEVIRRANDTDYGLAAGIVTADLNRAHRVIHQLEAGICWINTWGESPAEMPVGGYKHSGIGRENGVMTLQSYTQVKSIQVEMAKFQSIF

SEQ ID NO: 8074 - protein, 320 aa, Solanum chacoense
MEKNQEAEVMWKRGRTLGQGGFGFVSLACTTHSDDSPLIPSLIAVKSCMLSHSESLEDEIEFLRMCQDCPHVIRSFGVKVTQEDDILLYNLLLEYASAGSLADRLLNNDQLGLPEFQVQNHTKSVLLGLRFIHRKGIIHCDIKPHNILLTSTDDDDAEEVAKIADFGLSLTLEQSWTQTQGMRGTKRYMAPESLLKQEYGPEADIWALGCTVYELITGTPLWESSNSDPEFDDVLHRIMYEEPNLENDKLSTEAKDFMSYCLIKNPKSRWSAGLLLNHSFLKSADSVLPPKKRKRQQVTCPGYRGERKHSGHSHTFVIWL

SEQ ID NO: 8075 - protein, 304 aa, Solanum chacoense
MASIRWSRGRTIGKGAEGTVTLATTHNNFSIAVKSSLFSCSKSLQKEREFLNEFQDCSQIIRCFGADVTEEDNNILYNILLEYAIGGSLAHRIGKKSGLPDFEVKKYSKPILLGLRVVHGKGFVHGDIKPHNILLVGTEKRAKIADFGFASKVGIGSKKRKLRGTPMYMAPESVLDDEYGTPADIWAFGCTVFEMITGKKVWDCTGINDPLHLLCKIGMQSPDLHDDKMSKQAEDFLNKCVDRDPHSRWTADLLLNHPFLSSDNNDVHQRKRKELNLVDLCNSTELKPMKLLTNKRRRKLVERC

SEQ ID NO: 8076 - protein, 213 aa, Volvox carteri f. nagariensis
MSYAYLFKYIIIGDTGVGKSCLLLQFTDKRFQPVHDLTIGVEFGARMINIDGKQIKLQIWDTAGQESFRSITRSYYRGAAGALLVYDITRRETFNHLASWLEDARQHANPNMTIMLIGNKCDLTHRRAVTTEEGEQFAKEHGLIFLETSARTAHNVEEAFINTAKEIYKKIQDGVFDVSNESYGIKVGYGAGNAGPQAAKPGEGDARKSSSCC

SEQ ID NO: 8077 - protein, 436 aa, Triticum aestivum
MPSASSAVPSAAAPGDESQSLAAPKLLLGRYELGGLLGRGASAKVYRARDILTGRDVAIKSFPNPRAGAREGEGSAGSAAIEREAAILSRLRHRHVVRLHEILGTRKKVHFVLDLAAGGELFSLVDSDGRMTEDLARHYFRQLVSAVRYCHSRGVYHRDIKPENLLLDGDGDLKVADFGLGAIADESLHHTLCGTPAYVAPEILSKQGYHPAKVDIWSCGVVLFVLAAGYLPFNDASLINMYRKIYAGRFRCPNWFSPALRHLLRRILDPNPSTRIDTDGIMEHPWFRHGASGDGELEELMRGHEEEAWFKTEFKEDMARDMTAFDILAFSPGSDLSGLFGAGPGTERVFVGEPAAAVLARVEDAGKKQGHRVRREGKGRAGPVYVEAEAGGIVAKVTVFRIADAVSVVEVVKGHGAEAAAFWSDWLEPAVKPQAV

SEQ ID NO: 8078 - protein, 333 aa, Saccharomyces cerevisiae
MSEPSEKKQKVATSSLEQLKKAGTHVVADSGDFEAISKYEPQDSTTNPSLILAASKLEKYARFIDAAVEYGRKHGKTDHEKIENAMDKILVEFGTQILKVVPGRVSTEVDARLSFDKKATVKKALHIIKLYKDAGVPKERVLIKIASTWEGIQAARELEVKHGIHCNMTLLFSFTQAVACAEANVTLISPFVGRIMDFYKALSGKDYTAETDPGVLSVKKIYSYYKRHGYATEVMAASFRNLDELKALAGIDNMTLPLNLLEQLYESTDPIENKLNSESAKEEGVEKVSFINDEPHFRYVLNEDQMATEKLSDGIRKFSADIEALYKLVEEKM

SEQ ID NO: 8079 - protein, 381 aa, Staphylococcus epidermidis ATCC 12228
MLTEKEQDIIKQTVPLLQDKGTEITSIFYPKMFEANPELLNMFNQTNQKKGMQSAALAQAVLAAAMNINNLGAIKPAIMPVAHKHCALQVYPEHYPIVGENLLAAIQDVTGLESDDPVIQTWAKAYGEIADVFIKLEQEIYNHMLWKGFKPFKITNITQETSDIKSFTVESEEYDLSQFEPGQYITVDVSSEKLPYRAKRHYSIIDGDENHLVFGVKRDVTTEHEGEVSTILHDEISEGDMINLSAPVGGFSIENTERPQLFIGSGVGMTPLVSMFKKAASLNVPTQMIQAVVTEDERPFAQKLDSITDNYEQAQLHLHVKDKEGYLEAKELEQYLSEQPEIYICGGTKFLHSIINSLKELNYDMNHVHFETFIPRLSVQV

SEQ ID NO: 8080 - protein, 358 aa, Cordyceps bassiana
MAEFVRAQIFGTTFEITSRYSDLQPVGMGAFGLVCSARDQLTNQNVAVKKIMKPFSTPVLAKRTYRELKLLKHLRHENVISLSDIFISPLEDIYFVTELLGTDLHRLLTSRPLEKQFIQYFLYQIMRGLKYVHSAGVVHRDLKPSNILVNENCDLKICDFGLARIQDPQMTGYVSTRYYRAPEIMLTWQKYDVEVDIWSAGCIFAEMLDGKPLFPGKDHVNQFSIITELLGTPPDDVINTIASENTLRFVKSLPKRERQPLRNKFRNADDSAIDLMERMLVFDPKKRITAAEALSHDYLAPYHDPTDEPVAEEKFDWSFNDADLPVDTWKIMMYSEILDYHNVEAGASGLEDGSVPAQ

SEQ ID NO: 8081 - protein, 467 aa, Listeria monocytogenes str. 1/2a F6854
MLYSEDDKRKQESYRIPLFGSEEESTSIPKYVLKKEPMEPRIAYQLVKDQLMDEGNARQNLATFCQTYMEKEAEILMAETLEKNAIDKSEYPQTAELENRCVNILADLWNAPKDMSYLGTSTVGSSEACMLGGLAMKFRWRNNAEKRGLDIQAKRPNLIISSGYQVCWEKFCVYWDVDMRVVPMDKNHLSLDVDKVFDLVDEYTIGVVGILGITYTGKFDDIQLLDEKVEAYNATNEHQLVIHIDGASGAMFTPFVNPELPWDFRLKNVVSINTSGHKYGLVYPGVGWILWKDKEYLPKELIFEVSYLGGSMPTMAINFSRSASQIIGQYYNFLRYGFEGYREIHEKTKKTALYLAKTVEKSGYFEIINDGANLPIVCYKMKEGLDVEWTLYDLADQLLMKGWQVPAYPLPADLSDTIIQRFVCRADLGYNVAEEFAADFADAIHNLEHARVLYHDKERNDSYGFTH

SEQ ID NO: 8082 - protein, 289 aa, Arabidopsis thaliana
MDKINGLPDDLLVKILSYVPTDIAVSTSILSKRWEFLWMWLPNLDYTSRWCRKPGDVGLRDFIHKNLPLHRAPVIESLRFHSNSPDIKPEDIRRWIEIAVSRHVHDLDIDHFSENENIFLSSFFACKSLVTLKLRSVTLRDIPSMVCLPSLKTLLLDNVSFVEGKSLQELLSICPVLEDLSVYCDDYENTKELTIVVPSLLSLSLYIPDEWLLDGYWIDTPSLEYLKLEDWNSCDHLSLIKNMPKLREAYVDAKCFLPKSVIESITSVKHLTICSKVPFLSTAGCQSKL

SEQ ID NO: 8083 - protein, 298 aa, Arabidopsis thaliana
MGKEVMVSDYGDDDGEDAGGGDEYRIPEWEIGLPNGDDLTPLSQSLVPSILALAFSMIPERSRTIHDVNRASQITLSSLRSSTNASSVMEEVVDRVESSVPGSDPKKQKKSDGGEAAAVEDSTAEEGDSGPEDASGKTSKRPRLVWTPQLHKRFVDVVAHLGIKNAVPKTIMQLMNVEGLTRENVASHLQKYRLYLKRIQGLTTEEDPYSSSDQLFSSTPVPPQSFQDGGGSNGKLGVPVPVPSMVPIPGYGNQMGMQGYYQQYSNHGNESNQYMMQQNKFGKMVTYPSVGGGDVNDK

SEQ ID NO: 8084 - protein, 193 aa, Streptomyces coelicolor A3(2)
MRARPRDPGKIQTAPPSILCMTSAPNTRNDDNLPLDVEIGALQGGAADLSQYAGRVVLVVNVASKCGLTPQYAGLERLHERYAEQGFTVLGVPCNQFMGQEPGSADEIAEFCSATYGVTFPMTGKAEVNGEGRHPLYDRLTGFADAEGHSGDIRWNFEKFLIGRDGKVAARFSPQTEPEAAEVVAAVEERLAG

SEQ ID NO: 8085 - protein, 147 aa, Glycine max
MGDNNIGKVLEREGFKYNFTAAASDTSAQDEVIKEQDRLLPIANVGRIMKQILPPNAKISKEAKETMQECVSEFISFVTGEASDKCHKEKRKTVNGDDICWALATLGFDDYSEPLKRYLHKYREFEGERANQNKGNNNTYENNIANI

SEQ ID NO: 8086 - protein, 494 aa, Neurospora crassa
MAPKLKDPSLFKKDVCYVNGEWVKAHSGKTFEVNATGKLIGTCPEFDAQDTKKAIDAAETAFETFRHKTGRERSKLLRKWYDLMVENHDDLTTLITLENGKPLADAKGEVTYAANFFEWFSEEAPRIYGDTIPSSVPGNRVWTIKEPVGVCGLITPWNFPAAMITRKVGPALAVGCTVVCKAPGETPFTALAIAELAHRAGIPPGVVNVITALENTPEVGSTLTTDPVVRKISFTGSTAVGKLLMKQCSGTLKKLSLELGGNAPFIVFDDADVDAAVTGAIASKFRSSGQTCVCANRIYVQRGIYDEFSQKFAEQVKNNFRVGNGFEEGVTHGPLIHHRAIEKVEQHVRDAEKKGAKVVVGGHRLESLGPNFYEPTVITGMTPDMAMASEETFGPVAGLFPFDTEDEVVKLANATQVGLAGYFFSRDIHRCVRVAEHLEVGMVGINTGLISDPASPFGGVKESGFGREGSLYGIGEYQVTKMVTVGGMGQPLQK

SEQ ID NO: 8087 - protein, 451 aa, Burkholderia cepacia R18194
MTDITTAQQDETNLRTDAAWLDAHWMPFTANRQFKADPRMIVSGKGAYYTDGEGRKIFDGLSGLWCTGLGHGRTEIVEAVSRQVAQLDYAPAFQFGHPKSFELANKIKDLTPAGLDYVFFTGSGSEAADTSLKLARAYWRAKGKGTKTRLIGREKGYHGVNFGGISVGGIGPNRKLFGQGLDADFLPHTQLAENKFSRGMPEHGAELADRLLELIALHDASNIAAVIVEPFSGSAGVVVPPKGYLKRLRDICTAHDILLIFDEVITGFGRAGAMTGADAFGVVPDIMNFAKQVTNGVQPLGGVIATKEIYDTFMAAGGPEYMLEFPHGYTYSAHPVACAAGVAALDLLVKEDAVARVRDLAPHFEAAVHGLKGQRHITDIRNYGLAAGLTIAALPGEPARRPYEIAMRCWAKGFYVRYGGDTIQLAPPFISEKREIDNLVNALSDALNEVD

SEQ ID NO: 8088 - protein, 323 aa, Zea mays
MAAAARQRGTVKWFNDTKGFGFISPEDGSEDLFVHQSSIKSEGFRSLAEGEEVEFSVSEGDDGRTKAVDVTGPDGSFVRGGGGGGGGGGGGYGSRGGGGSGGGGRSYGGSWGGGRRSAPDAAFGSVLSGTAGDAAPSDQWFVDALNAPAPHPIERVRSESSSIVSDVPDYLFSLDSPSDDPSPGPSAARAKSDPAETPHHHGDDVPPSARQIPHVAGGASSWPAPPPPYMAQPMYYFPVPPPVHYLDQSAQSGYMPRPIYHIVGGGGSEAPGGDLHAAGGVYGVSHHMQGFPPMMYAPPRAVIYNYKSEGMPSLPPEGGAHSS

SEQ ID NO: 8089 - protein, 461 aa, Vibrio parahaemolyticus RIMD 2210633
MKSLENTTIEHFKSHFQGDVVLPTDSNYDEVRQIWNGMIDRKPSLIARCKSADDVVMAVNFARDNGQLLSVRGGGHNIAGNAVCDNGVMIDLSLLTQVRVDENAKRAFVEPGCTLGDLDEASQKHGLATPVGINSTTGIAGLTLGGGFGWLSRKYGMTIDNLVSANVVTADGRQLLASETENEDLFWALRGGGGNFGIVTQFEFQLHPVGPEVLSGLIVFPFDQAKSVITQFAKFTESAPEELSVWMVSRKAPPLPFLPESVHGKEVVVLAICYAGDPSEGEKLIAPLRDFGDAHGEHVGVQPFAAWQQAFDPLLTPGARNYWKSHNFNSLSEGVIDAAIEYAGKLPSPQCEIFIASLGCAASRPDPESMAYSSRDANYVLNVHGRWDSAEDDQACIAWARDFFTKTKPYASGGAYINFLTQDEAERTESAYGPTFARLQEVKKKFDPNNLFRMNQNIKPE

SEQ ID NO: 8090 - protein, 512 aa, Oryza sativa
MGLCSSSSARRDAGTPGGGNGAGNKDNAGRKGIVACGKRTDFGYDKDFEARYALGKLLGHGQFGYTFAAVDRRSSERVAVKRIDKNKMVLPVAVEDVKREVKILKALQGHENVVHFYNAFEDDNYVYIVMELCEGGELLDRILAKKDSRYSEKDAAVVVRQMLKVAAECHLHGLVHRDMKPENFLFKSTKEDSSLKATDFGLSDFIRPGKHFRDIVGSAYYVAPEVLKRKSGPESDVWSIGVITYILLCGRRPFWDKTEDGIFKEVLKNKPDFRRKPWPNITPCAKDFVQKLLVKDPRARLTAAQALSHEWVREGGQASDIPLDISVLHNMRQFVKYSRFKQFALRALASTLNAEELSDLRDQFNAIDVDKNGTISLEELKQALAKDVPWRLKGPRVLEIVEAIDSNTDGLVDFEEFVAATLHVHQLVEHDTEKWKSLSQAAFDKFDVDGDGYITSDELRMQTGLKGSIDPLLEEADIDRDGKISLDEFRRLLKTASMSSRNVQTPRSVHRS

SEQ ID NO: 8091 - protein, 168 aa, Triticum aestivum
MAAASSATSVHDFTVKDASGKDVDLSVYKGKVLLIVNVASQCGLTNSNYTELSQLYPKYKDQGFEILAFPCNQFGGQEPGTNDEIVQFACTRFKAEYPIFDKVDVNGNNVSPLYKFLKSSKGGLFGDSIKWNFSKFLVDKEGRVVDRYAPTTSPLSIEKDIKKLLGSS

SEQ ID NO: 8092 - protein, 171 aa, Triticum aestivum
  unsure (1)..(171): unsure at all Xaa locations
TRPPKSVNDIHKRGGTVLGSSRGGHDTHKIVDNIQDRGINQVYIIGGDGTQKGAYEIFKEIRRRGLKVAVAGIPKTIDNDIXDKSFGFDTAVEEAQRAIDAAHVEASSAENGIGLVKLMGRYSGFIAMYATLASRDVDCCLIPESPFFLEGEGGLFEYIERRLKENQPHGH

SEQ ID NO: 8093 - protein, 378 aa, Zea mays
SESEAASGRQGEMGKGAQGSDAAAAGGEVEENMAAWLVAKNTLKIMPFKLPPVGPYDVRVRMKAVGICGSDVHYLREMRIAHFVVKEPMVIGHECAGVVEEVGAGVTHLSVGDRVALEPGVSCWRCRHCKGGRYNLCEDMKFFATPPVHGSLANQVVHPADLCFKLPDGVSLEEGAMCEPLSVGVHACRRAGVGPETGVLVVGAGPIGLVSLLAARAFGAPRVVVVDVDDHRLAVARSLGADAAVRVSPRAEDLADEVERIRAAMGSDIDVSLDCAGFSKTMSTALEATRPGGKVCLVGMGHNEMTLPLTAAAAREVDVVGVFRYKDTWPLCIDFLRSGKVDVKPLITHRFGFSQRDVEEAFEVSARGRDAIKVMFNL

SEQ ID NO: 8094 - protein, 238 aa, Glycine max
MTSASELFHTRRHRLGRNALDLGLDTELHAADSLRQLRLRHYYLRRHHPERASDRIDGRYRRSFVSESVDSEENVRSSLRGSSSERLPVGVVLARARLLQRLRGEPLSTNRQYDRDSFGEDRESESSNEDPSGASLVTELTSQMARSQFLQELNTKPPGLTQEALDCLHQEVFSSSGNEIGLESRVLQDCSICLESFTDGDELIRLPCGHKFHSVCLDPWIRCCGDCPYCRRSIVVIN

SEQ ID NO: 8095 - protein, 348 aa, Chloroflexus aurantiacus
MRAVYYEAFGQMPWIATLPDPAPTPDGVVLAVRATGLCRSDWHGWMGHDPDIKLPHVPGHELAGEIVAVGSQVRRWRIGDRVTVPFVCACGFCPQCQAGQQQVCDNQFQPGFTHWGSFAEYVAIDRADLNLVRLPADMSFTTAASLGCRFATAFRAVVDLGQVRGGEWVAVYGCGGVGLSAIMLASALGGQVIGIDINLERLALARAVGATAVIDATTEPDVVSVVRDLSRGGVHLAIDALGSPMTCANAIASLRKRGRHVQVGLLLADQRMPPLPMDIVVARELTIMGSHGMQAYRYDAMLDLIQSGKVQPQRLIGRTISLSEAPAALVDLDSFRGSGVTVITEFQG

SEQ ID NO: 8096 - protein, 408 aa, Bacillus halodurans C-125
MKAIQFDLSIPKYALSKAMGKMNSSLYVESPFSCLQLRDVEKPALPNDHWVEIKVKYGGICGSDLNLIFLNDSPATSPFVSFPFTLGHEMVGTISKARKSVTNLQVGQRVVIDPLLSCEVRGITPVCSECANGNYNLCHHMNDGDIAPGLLTGTCKDTGGSWGRYLVAHQSQVISLPSSVDDDNGVLVEPFACALHAVLQNRPKPSDTVFVIGSGVIGICVIAAIRALEIPCKIVTLAKHPFQAELAKQFGADEIVFLSRKRDYVTAVAESFNANVLHPVFGEPIVHGGADIVYECVGNRKSLHDSLRFARKGGKVVLIGLASFIDNLDMTMIWLNELEVKGSFTYGMEDWQGGKKRTLQIAVDLIADGKVDLSPLITHRFPLEAYREALATAANKKKGQTMKVVFEP

SEQ ID NO: 8097 - protein, 220 aa, Triticum aestivum
  unsure (1)..(220): unsure at all Xaa locations
PVPDFPEILKPRFREWGPGALYWVEGYEKPRGPPPSRLYTYIAQPWAPTVMASSATSVAPFQGLKSTAGLPVSRRSNGASLGSVSNGGRIRCMQVWPIEGIKKFETLSYLPPLSTEALLKQVDYLIRSKWVPCLEFSKVGFIFREHNASPGYYDGRYWTMXKLPMFGCTDATQVINEVEEVKKEYPDAYVRIIGFDNMRQVQCVSFIAFKPPGCEESGKA

SEQ ID NO: 8098 - protein, 394 aa, Vibrio cholerae O1 biovar eltor str. N16961
MLTQEHINIIKSTIPLLESAGPALTQHFYQRMFSHNPELKHIFNMTHQKTGRQSVALFEAIAAYAKHIDNLAALTSAVERIAHKHTSFNIQPEHYQIVGHHLLETLRELAPDAFTQPVEEAWTAAYFFLAQVFIDREGALYLERKQALGGWRDGRTFVVREKQVESAYVTSFVLVPADGGAVLDYQPGQYIGIEVTPEGSDYREIRQYSLSHASNGREYRISVKREGVGSDNPGLVSHYLHNNVKVGDSVKLYAPAGDFFYVERERPVVLISAGVGATPMQAILHTLAKQNKSGVTYLYACNSAKEHTFAQETAQLIAQQGWMQQVWYRDESADDVLQGEMQLAELILPIEDGDFYLCGPIGFMQYVVKQLLALGVDKARIHYEVFGPHAQLAA

SEQ ID NO: 8099 - protein, 143 aa, Brassica napus
MSSKKVEGSSAPANRRDPYEVLSVARDATDQEIKSAYRKLALKYHPDKNANNPEASDLFKEVAFSYSILSDPEKRRQYDNAGFEALDADGMEMEIDLSNLGTVNTMFAALFSKLGVPIKTTVSANVLEEAMSRPGPPMFLRRL

SEQ ID NO: 8100 - protein, 227 aa, Eucalyptus occidentalis
MAREKIQIKKITNATARQVTFSKRRRGLFKKAEELSVLCDADVALIVFSSSGKLFEYCSSSMKEILERHHSHSENLGKLDQPSLKLQLVENGDYSRLSKEVAEKGHQLRQMRGEELQGLNIDELQQLEKSLEAGLNRVIEKKGEKIMKEITDLQQKGAKLMEENKRLKQQVTEISGRKTTATDSETIINEEGLSSESITNVCSSSSGPPQEDDSSDISLKLGLPYNG

SEQ ID NO: 8101 - protein, 209 aa, Triticum aestivum
MKTLLILTILAMATTIATANMQVDPSSRVQWPQEQPPPQSQQPFSQQPQQIFPQPQQTFPHQPQQAFLQPQQTFPRRPQQQFPQPQQPQQPFPQPQQPQLPFPQQPQQPFPQPQQPQQPFPQSQQPQQPFPQPQQQFPQPQQPQQSFPQQQQWMIQSFLQQQMNPCKNFLLQQCNPVSLVSSLVSIILPRSDCQLMQATMVANNLAQIP

SEQ ID NO: 8102 - protein, 307 aa, Mycobacterium avium subsp. paratuberculosis str. k10
MSLEPQIAAIIEQLDSGFPPVQQMSGAEARALIRSRLVPPAQPEPVAEVADRLVEGPGGPLRIRVYRPEAAAPLPVVVYAHGGGFVFCDLDSHDGLCRNLANLVPAVVVSVDYRLAPENAWPAAAEDVYAVTCWARDHADALGADPARLVVGGDSAGGNLAAVTTVMCRDRGGPAPAAQLLIYPVIAADFDTESYRLFGQGYYNPAPALRWYWDCYVPSTRDRAHPYATPLNADLRGLPPAVVVVAGHDPLRDEGLAFGAALEAAGVPTVQLRYEGGIHGFMTMPMLDIAHRARNEAAAALADLLQW

SEQ ID NO: 8103 - protein, 489 aa, Bordetella parapertussis 12822
MTQLTQPLSRAELLRDACYIDGKWVGAGNGPSIPVDNPSTGKTIISVPKLGRKEAEQAIDAAEAALPAWSARTGKERAAILLKWAQLTMENQQDLAVIMTSEQGKPVAEAAGEIAYAASFLEWFAEEAKRIDGDILQSPKGGQRLMVLKQPIGVTAAITPWNFPAAMITRKVGPALAAGCTMVVKPAQQTPLTALALAVLAEQAGVPAGVFQVVTGSSREIGAALCESEVVRKLSFTGSTEVGRTLMEQCAPTIKKLSLELGGNAPFIVFDDADLDRAIDGILASKYRNAGQTCVCANRIYVQAGVYEEVAKRLVEKVNAMKVGDGFEQGVTQGPLIDTAAVAKVQEHIADATAHGAKVIAGGQPHALGGSFFQPTVVRDVTQSMRFAVEETFGPVAPLFKFESEDEVIGMANNTIFGLAAYFYTRDYARIWRVSEALEYGIVGINTGIISNEVGPFGGVKQSGLGREGSKYGIEDYLELKYLCVDLGA

SEQ ID NO: 8104 - protein, 183 aa, Zea mays
GVKQEGEYQPEEHPEPGSDYIRAQEARRFMIYVHAKMLIVDDEYIIIGSANINQRSMDGARDSEIAMGAYQPYHLATRQPARGQIHGFRMSLWYEHLGMLDDVFQRPESVECVQKVNKIAEKYWDLYSSDDLEQDLPGHLLSYPIGVTADGTVTELPGMENFPDTRARVLGNKSDYLPPILTT

SEQ ID NO: 8105 - protein, 423 aa, Ehrlichia canis str. Jake
MYINTCAWFNKGYQNIWMPYTQMKNSPLPLSVKSASGCYIILEDGKRLLDGISSWWSVCHGYSHPHIVQKVQDQVAKLSHVMFSGLAHEQSYVLASRLVKISPEQKKVFFSDSGSTAVEVAMKMAVQYHQNLGNKNKYNFVSFVNGYHGDTMGCMSISDPTKIHGTKFKKYHPSQFILPLPSTEEEIKNFANTIYSIRDQVAAVILEPILQAAGGMLIHSANILKKIYDIAKANNILFIADEVATGFGRTGTMFGCNQANIVPDIIVIGKALTGGFCTLAATLTTQEVYDAFLSDNIDDAFMHGPTFMANALACAAANASLDIFESQDLIRNIGLIENQLKSELGVFKQLDCVTDIRVKGATGVIELKDGLIDKHDIINKGVELNIWIRPLNNVIYVMPPFIINSNELTQLITSIYKILKSNI

SEQ ID NO: 8106 - protein, 160 aa, Xylella fastidiosa Ann-1
MNVVRYTPWPGQAVLQNEIKQVFDRFFEHNGDTDESAVVTAQWVPRVDIKEEPNQFVLYADLPGIDPADIEVQMDKGILSIKGERKTESSSQTEHFSRIERRYGSFHRRFALPDSADADGITASGSHGVLRILIPKQAATTPRRIQVGNAVSSDVALQSM

SEQ ID NO: 8107 - protein, 239 aa, Leuconostoc mesenteroides subsp. mesenteroides ATCC 8293
MDNFNMNARRDVTGVDEGMRAFFKQTYSFMGIAVLLTAVTGFIVQNFFLEQVAKLLVGNVIGLLALLGIQMLIITMIGRATFKNPARAFGLLMAFAVVEGLTLGVLLAVYTGASVVMAFVSASAVFGGMAAYGVFTKRDLTGLGSILFGLLIGLLIASIANMFFYSGIVSLLLSWASVVVFSLFTAYDNQNLKVMYSQFAGQADTTGLAVNGALRLYLDFVNIFFALLRIFGVVSGSRD

SEQ ID NO: 8108 - protein, 379 aa, Methanococcoides burtonii DSM 6242
MEENGKTKEEILLFLKKAKSADASYERVLSSMCTYPHEIAVLAHTQFIESNMGDPGLFPGTFNLEKQVLAMFGKMLHHKNSPEKAGYLTTGGTESNIQAIRSMHNFRHDISRPNIVMPESAHFSFDKVANLSGIEIRKASLDKLLKVDLDSVRSLIDKNTIGLVGIAGTTEFGQLDPINELSKIAIEKGIFLHIDAAFGGFVIPFMDIDYTYDFRLEGVTSMTIDPHKMALSTIPSGGLLFKEPEYFECLEIHTPYLSVNKQYSLTGTRSGAGVASTYAVMKHLGRKGYKKVVSDCMSVTKKLVDGAEKLGINTVIDPVLNIVALDVPEADLVRKKLLDEYGWHVSITRNPRALRIVIMPHIKNETIELFLKDLAKVIK

SEQ ID NO: 8109 - protein, 419 aa, Thermotoga maritima MSB8
MAERLGILVGGGPAPGINSVISSVTIEAINNGLEVIGIYDGFKHLVEGKTNMVKKLSIEDVSRIHIEGGSILRTSRVNPAKSEETLEKTVQTLKKLGIKYLVTIGGDDTAFSASKVCERSKGEIKVVHVPKTIDNDLPLPENMPTFGFETARHVATELVYNLMQDSRTTNRWYFVAMMGREAGHLALGVGKAASATITIIPEEFKEGVTLEEVCDVLDGAILKRKLMGRDDGVAVIGEGIAEKMDPEELANIPGVIVEKDPHGHLRLAEIPLATILKRAIERRYAERGERIHIVDVTIGYELRSARPIPFDIVYTRTLGYGAVRFLLGDYSDLPGGMVCVVGGRIKILPFDAFMDPKTGRTKVRVVDVRSEDYRVARKYMIRLEKKDLEDPETLEKLAKLAKMEPEEFKKKYWHTTELP

SEQ ID NO: 8110 - protein, 367 aa, Thermotoga maritima MSB8
MIQKGLEGVKICESSICYLDGINGRLYYRGIPVEELAEKSTFEETAYFLWYGKLPTKSELEEFKRKMADYRELPAEALGILYHLPKNLHYIDVLKIFLSIHGSMDGNDEDLREKAIRVASVFPTILAYYYRYSKGKELIRPRKDLSHVENFYYMMFGERNEKIRLLESAFILLMEQDINASTFAALVIASTLSDLYSCIVGALGALKGPLHGGASEKVPPMLEEIGSEDRVEEFVQKCLKEKRKIMGFGHRVYKTYDPRAVFLKRVLQEHFPDSKLFRIASKLEEYIVSNKIKNIYPNVDLYSSVLFEELGFPRNMFTALFATARVVGWTAHVIEYVSDNKLIRPTSEYVGPMDVEYIPIERRDENG

SEQ ID NO: 8111 - protein, 496 aa, Nicotiana tabacum
MVLSKTASESDVSIHSTFASRYVRTSLPRFKMPENSIPKEAAYQIINDELMLDGNPRLNLASFVTTWMEPECNKLMMDSINKNYVDMDEYPVTTELQNRCVNMIAHLFNAPLGDGETAVGVGTVGSSEAIMLAGLAFKRKWQNKMKAQGKPCDKPNIVTGANVQVCWEKFARYFEVELKEVKLSDGYYVMDPEKAVEMVDENTICVAAILGSTLNGEFEDVKRLNDLLIEKNKETGWDTPIHVDAASGEFIAPFLYPELEWDFRLPLVKSINVSGHKYGLVYAGIGWAIWRNKEDLPDELIFHINYLGADQPTFTLNFSKGSSQVIAQYYQLIRLGFEGYKNVMENCQENARVLREGLEKSGRFNIISKEIGVPLVAFSLKDNSQHNEFEISETLRRFGWIIPAYTMPPNAQHVTVLRVVIREDFSRTLAERLVIDIEKVLHELDTLPARVNAKLAVAEANGSGVHKKTDREVQLEITTAWKKFVADKKKKTNGVC

SEQ ID NO: 8112 - protein, 279 aa, Caulobacter crescentus CB15
MSKLVPAVRSGDVLMPALGFGTWQLENGTAVPLVEKALEIGYRHIDTAQIYGNERDVGAAIRNSGVKRDEIFLTTKVWIDQFADGDLQRSAEKSLEKLGVDQVDLLLLHWPKPEVPLAETLKALNAVRAKGWTRAIGLSNFPSAQLEEAAKLSEAPIATDQVEYHPYLSLKTLKAKADQLGVSITAWSPLAQGKVAQDPVLIEIGRAHGKTPGQVTLRWIIQQGIIAIPRTSNPKRIEENFDILDFELSEKEMAQIHGLARPDGRIGDWIDRAYAWDAE

SEQ ID NO: 8113 - protein, 519 aa, Triticum aestivum
  unsure (1)..(519): unsure at all Xaa locations
MGNRTSRHRRAAADQPATAPPPTAQPKPQPPPKPQTAPAPAPTPEAGQVAMGRVLGRPMEDVRATYTFGRELGRGQFGVTYLVTHKATGQRFACKSIATRKLVHRDDIEDVQREVQIMHHLTGHRNIVELRGAYEDRHSXVNLIMELCEGGELFDRIIARGHYSERAAALLCREMVSVVHSCHSMGVFHRDLKPENFLFLNNKEDSPLKATDFGLSVFFKHGEQFKDLVGSAYYVAPEVLKRHYGAEADIWSAGIILYILLSGVPPFWADNEDGIFEAVLLGHIDFSSDPWPSISNGAKDLVKKMLRQDPKERLTAAEILNHPWIREDGEAPDKPLDITVISRMKQFRAMNKLKKVALKIVAESLSEEEIAGLREMFRSLDTDNSGTITLEELRSGLPKLGTKISESEITQLMEAADVDGNGTIDYSEFVSATMHMNRLEKEDHILKAFEYFDKDHSGYITVDELEEALKKYDMGDDKTIKDIIAEVDTDHDGRINYQEFVAMMRNNSPEIVPNRRRMF

SEQ ID NO: 8114 - protein, 514 aa, Glycine max
  unsure (1)..(514): unsure at all Xaa locations
MLSQKQGEDAIITNLNHTEHEDGSKISRDEEEQDHSMFNFKSLLWHGGSVWDAWFSCASNQVAQVLLTLPCSFSSSRIGXAQLGMVSGXILLQIFYGLIGSWTAYLVSVLYIEYRTRKEKENVSFKNHVIQWFEVLDGLLGRYWKAVGLAFNCTFLLFGSVIQLIACASNIYYINDKLYKRTWTYIFGACCAFTVFIPSFHNYRIWSFLGLGMTTYTAWYLAIAAILHGQVENVTHSGPTKLILYFTGATNILYTFGGHAVTVEIMHAMWQPRKFKSIYFLATLYVFTLTIPSAXAVYWSFGDQLLDHSNAFSLLPKNVFRDAAVILMLIHQFITFGFACTPLYFVWEKVIGMHDTKSIWLRALARFPVVLPIWFLAIIFPFFGPINSAVGSLLVSFTVYIIPALAHMLTYRNASARQNAAEKPPFFMPSWTAMYVFNAFIIGWVLVVGFGLGGWASMINLINQIDTFGLFAKCYQCPEPPPPAGAPPPLTHPVVEGGVDLVEPWAPPNLLKII

SEQ ID NO: 8115 - protein, 352 aa, Acinetobacter sp. NCIMB9871
MHCYCVTHHGQPLEDVEKEIPQPKGTEVLLHVKAAGLCHTDLHLWEGYYDLGGGKRLSLADRGLKPPLTLSHEITGQVVAVGPDAESVKVGMVSLVHPWIGCGECNYCKRGEENLCAKPQQLGIAKPGGFAEYIIVPHPRYLVDIAGLDLAEAAPLACAGVTTYSALKKFGDLIQSEPVVIIGAGGLGLMALELLKAMQAKGAIVVDIDDSKLEAARAAGALSVINSRSEDAAQQLIQATDGGARLILDLVGSNPTLSLALASAARGGHIVICGLMGGEIKLSIPVIPMRPLTIQGSYVGTVEELRELVELVKETHMSAIPVKKLPISQINSAFGDLKDGNVIGRIVLMHEN

SEQ ID NO: 8116 - protein, 280 aa, Triticum aestivum
MENDGVPNGPAAPAPTQGTPVVREQDRLMPIANVIRIMRRALPAHAKISDDAKEAIQECVSEFISFVTGEANERCRMQHRKTVNAEDIVWALNRLGFDDYVVPLSVFLHRMRDPEAGTGGAAAGDSRAVTSAPPRAAPPVIHAVPLQAQRPMYAPPAPLQVENQMQRPVYAPPAPVQVQMQRGIYGPRAPVHGYAVGMAPVRANVGGQYQVFGGEGVMAQQYYGYGYEEGAYGAGSSNGGAAIGDEESSSNGVPAPGEGMGEPEPEPAAEESHDKPVQSG

SEQ ID NO: 8117 - protein, 365 aa, Prunus dulcis
MGSTGETQMTPTQVSDEEANLFAMQLASASVLPMVLKAAIELDLLEIMAKAGPGVFLSPTDIASQLPTKNPDAPVMLDRMLRLLASYSILTYSLRTLADGKVERLYGLGPVCKFLTKNEEGVSIAPLCLMNQDKVLLESWYHLKDAVLEGGIPFNKAYGMTAFEYHGTDPRFNKVFNRGMADHSTITMKKILETYKGFEGLTSVVDVGGGTGAVLNMIVSKYPSIKGINFDLPHVIEDAPQYPGVEHVGGDMFVSVPKGDAIFMKWICHDWSDEHCLKFLKNCYAALPDNGKVILGECILPVAPDSSLATKGVVHIDVIMLAHNPGGKERTEQEFQALAKGAGFQGFNVACSAFNTYVIEFLKKN

SEQ ID NO: 8118 - protein, 416 aa, Zea mays
MGNICGGSGKDRVAEDFRPSSPGTTMTSKTSGSITTSLSTTGKLSSVGSSFMASAGSRSTSGGFDEGAKYSDGQILEAPNLRTFTFIELKTATKSFRPDSVLGEGGFGRVYKGWVDEKTMAPTRNGTGMVVAVKKLNSESMQGFEEWQSEINFLGRLSHPNLVKLLGYCWEDRELLLVYEFMAKGSLENHLFRRGCAPLSWELRLKIAIGAARGLAFLHASEKQVIYRDFKASNILLDANYNAKLSDFGLAKLGPTGSKSHITTRVMGTYGYAAPEYVATGHLYVKSDVYGFGVVMLEMLSGQRALDPNRPNGQLSLADWAKPFLADRRRLARLMDPRFEGQYNSKQAFQAAQLTLNCLAGEPRSRPSMKEVVETLEQIESVKSRAREARGGSSRDRHHGRAGAAHQRSPRAGGEP

SEQ ID NO: 8119 - protein, 411 aa, Oryza sativa (japonica cultivar-group)
MLACIACSTKDGGEGGHRSATATPNSGKSLTSQLKDMVLKFSGSGRHQYKSGGSPSLRTSRFHRSSRLAAYPGIIDESGFTSDGAGEAYTYMRTTTASAGARAAPSTWDLPPKVNHRSFQPRVIRSPSASGVPSIGEEDYDDDDDDDDEETVLLEEDRVPREWTAQVEPGVQITFVSIPGGAGNDLKRIRFSREMFNKWEAQRWWGENYDRVVELYNVQTFSRQQGFSTPTSSVDEAMQRDSFYSRVGSTRESPAMMMPPPPPLPSSGAGREHPISRTASSKAQLSSSSSVAAARPPFYPSTAVPDPSDHVWAHHFNLLNSAAAGPAAPYDPSRGTTSSRDEASVSISNASDLEATEWVEQDEPGVSITIREFGDGTRELRRVRFSRERFGEERAKVWWEQNRDRIHAQYL

SEQ ID NO: 8120 - protein, 368 aa, Nostoc punctiforme PCC 73102
MTTNVTSSIVERGKTNVKAQVFRGVNQLSYEDIPVPTVEPDEVLVQVRVVGLCQSDIKKIRYPLYEPPRIFGHETAGTIAAIGNNVKGWQVGQRVAVMHHIPCMRCAYCLNDNFSMCDVYKNISTTAGFNASGGGFADYVKVPGHIVENGGLIPIPDNISFEEASFVEPTNCCLKAVRKAQIAPGQTVLVTGAGPIGLMFIMLVKYFGAKAIATDLLPSRIDKALSVGAEAAFDARDPDLPAKISALTGGLGVDVTLLAVPSEKAFFQALDSTRKGGKILFFAEFPDEVEIPINPNILYRREIDLIGSYSSSYRLQNLSADIVFNQRIDVKALISDRYPLKDLSAAVEQAIAPTPDTYKILIYPQKED

SEQ ID NO: 8121 - protein, 122 aa, Triticum aestivum
  unsure (1)..(122): unsure at all Xaa locations
MAPTVMASSATSVAPFQGLKSTAGLPVSRRSNGASLGSVSNGGRIRCMQVWPIEGIKKFETLSYLPTXSTTEALLKQVXYLIRSKWVPCLXFNKVGFIFREHNASPWVLXWPYWXMWKLLSG

SEQ ID NO: 8122 - protein, 484 aa, Medicago truncatula
MLPQKQGEEAIVSSFNETDQQEGVVGREEEVEDHSFSVKNFLWHGGSVWDAWFSCASNQVAQVLLTLPYSFSQLGMLSGILLQVFYGILGSWTAYLISVLYVEYRSRKEKENVNFKNHVIQWFEVLDGLLGPYWKALGLAFNCTFLLFGSVIQLIACASNIYYINDNLDKRTWTYIFGACCATTVFIPSFHNYRIWSFLGLGMTTYTAWYLTIASIVHGQAENVTHTGPKKLVLYFTGATNILYTFGGHAVTVEIMHAMWKPQKFKYIYLMATLYVFTLTIPSATAVYWAFGDELLNHSNAFSLLPKNGWRDGAVILMLIHQFITFGFACTPLYFVWEKVIGMHDTRSICLRALARLPVVIPIWFLAIIFPFFGPINSAVGALLVSFTVYIIPSAAHMLTYRKASARKNAAEKPPFFMPSWTAMYIFNAFIVIWVLVVGFGFGGWASMTNFIRQIDTFGLFAKCYQCKPPPVMAAAPPPHALHH

SEQ ID NO: 8123 - protein, 446 aa, Fusobacterium nucleatum subsp. vincentii ATCC 49256
MISNLSELQKKDLKYVFHPCAQMKDFEENPPLVITKGDGIYLIDENGNRYMDCISSWWVNLFGHCNKRINKVITEQVNTLEHVIFANFAHEPAAELCEELTKVLPKGINKFLFSDNGSSCIEMALKLSFQYHLQTGNPQKTKFISLENAYHGETIGALGVGDVDIFTETYRPLIKEGRKVRVPYINSKLSDEEFTKLEDECIKELEDLIKKKHNEIACMIVEPMVQGAAGIKIYSARFLKAARDLTKKYNIHLIDDEIAMGFGRTGKMFACEHAGIEPDMMCIAKGLSSGYYPIAMLCITTDIFNAFYADYKEGKSFLHSHTYSGNPLGCRIALEVLKIFKDDDVLRTINKKGTHLKNKMEEIFKDKSYIKDIRNIGLIGAIELKDNLLPNVRIGREIYNLALKKGIFVRPIANSVYFMPPYIITYEEINKMLQVCKESIEEILKI

SEQ ID NO: 8124 - protein, 289 aa, Arabidopsis thaliana
MSLFNTENTWAFVFGLLGNLISFAVFLSPVPTFYRIWKKKTTEGFQSIPYVVALFSATLWLYYATQKKDVFLLVTINAFGCFIETIYISMFLAYAPKPARMLTVKMLLLMNFGGFCAILLLCQFLVKGATRAKIIGGICVGFSVCVFAAPLSIIRTVIKTRSVEYMPFSLSLTLTISAVIWLLYGLALKDIYVAFPNVLGFALGALQMILYVVYKYCKTSPHLGEKEVEAAKLPEVSLDMLKLGTVSSPEPISVVRQANKCTCGNDRRAEIEDGQTPKHGKQSSSAAAT

SEQ ID NO: 8125 - protein, 147 aa, Funaria hygrometrica
MDFPLFQILSFPDELEKSLNPQSQKYVRDTKAMVSTAVDVKELPDAYIFVADMPGLKSADVKVQLENDNVLVIGGTRKREEPDPKVKYIRMERNSGSFMRKFTLPQNSNLDKIAASCVNGILTVTVPKIPPPEPAKPRTIEVTMGNQ

SEQ ID NO: 8126 - protein, 161 aa, Funaria hygrometrica
MDFVVFDTDPFLTTLHQLVHEPGSDLERKIKRQRRNHHDEPRHVTIATPVDVKEIKDAYLFVADVPGLQKTDIEVQVENENVLTMRGKRKLDEKVNEKEEDTKFIRMERSPVKLLRKFTLPSDANADAITANCVDGVLTVTVPKIPPPEPAKSKTVQIAVD

SEQ ID NO: 8127 - protein, 482 aa, Medicago truncatula
MLSQNQAEEAIVTNMNETEQEGGSSLEEIAEDQSMFNFKSFLWHGGSVWDAWFSCASNQVAQVLLTLPYSFSQLGMVSGIVFQIFYGLIGSWTAYLISVLYVEYRARKEKENVNFKNHVIQWFEVLDGLLGRYWKALGLAFNCTFLLFGSVIQLIACASNIYYINDKLDKRTWTYIFGACCATTVFIPSFHNYRIWSFLGLGMTTYTAWYMAIAAIVNGQIENVVHSGPTKLVLYFTGATNILYTFGGHAVTVEIMHAMWKPQKFKYIYFLATLYVFTLTIPSAVAVYWAFGDELLNHSNAFSLLPKNGFRDAAVILMLIHQFITFGFACTPLYFVWEKVIGMHDTKSICLRALVRLPVVIPIWFLAIIFPFFGPINSAVGALLVTFTVYIIPALAHMLTYRTASARKNAVEKPPSFLPSWTAVYVLNAFIVVWVLVVGFGFGGWASMTNFIRQIDTFGLFAKCYQCKPPTPPQAPSPHARH

SEQ ID NO: 8128 - protein, 113 aa, Zea mays
RVHDFASSSREKAEIEELRKEVREARRIKMLHQPSKVMDMEFELQALRTLISEKTQLCNQLKKELAMIKRLEDDSSGLFELEGSNTLGSQLCIIPRVDGASNRWPKRPKHLMK

SEQ ID NO: 8129 - protein, 434 aa, Nostoc punctiforme PCC 73102
MTELLQKVRVIDPVSEIDEIFDVLIADGHIKEVASHIADIHPNTQIRDCQGLVLGPGLVDLYSHSGEPGFEERETLLSFLQAATAGGFTRVSILPDTSPAIDNPALVAQLQQKRAEGQRGRGVEENLSPLLPCSPAPLLHIWGAITLDVAGNQMTELADLASAGVVGFSDGKPFENLALVRRVLEYLQPLGKPVAFWPSDRQLTANGVMREGPDALRFGLPPIPASAETTAIAAMLELVAAIGTPVHIMRVSTSRSVELIASAKAAGLPITASTTWMHLLLDTKAVKSYHTSLHLDPPLGNPRDVAALRAGVRAGAIDAIAIDHTPYSYEEKVQAFAEAPPGAIGLELALPLLWQYLVETEEFTALELWRALSIRPAKCLGQEVSAIVPHQPAELTLFDPQKIWNVERKSLYTLSQNTPWLGQQLKGHVVQTWC

SEQ ID NO: 8130 - protein, 379 aa, Neurospora crassa
MLALRSIAAPAQRQAFRAAPRAVSVSFQNRFYSSRVAQFTGQKDASGKYTVSLIEGDGIGPEIAVAVKDIFAAAQTPINWEPINVDPILKDGKTAIPDAAIESIRRNKIALKGPLATPIGKGHVSLNLTLRRTFNLFANLRPCRSVAGFKTPYDGVDTVLIRENTEGEYSGIEHVVVDGVVQSIKLITREASERVLRYAFEQARAINRKKVRVVHKATIMKMSDGLFLNTAREVAQDFPDIEFDAELLDNTCLKMTTDPTPYNDKVLVMPNLYGDILSDMCAGLIGGLGLTPSGNIGDECSIFEAVHGSAPDIAGKGLANPTALLLSSMMMLRHMGLNEYADKIEKAAFDTLAEGKVLTGDLGGKASTKDFTSAIIDRL

SEQ ID NO: 8131 - protein, 253 aa, Haloarcula marismortui ATCC 43049
MDLPPVGLGTMGIEDEAVVRTAIDCGYRHLDTAQIYDNESTVGAGIAAADTDRADLTVATKLWIDALEATAVRPATEASLDRLGLDAVDLLYVHRPRGDYDPETTLPAVEAVREAGLTAHVGLSNFDPDQLVVAREFLDKIAAHQVEFHPLFWRESLLTDAQKHDYPLVAYAPLAGGRVFEEPTILNIAAQHETTPAAVSIAWVTSYENVVTIPKASSQSHLEANLAAADLELTDAEIARIEAIEREEELFPE

SEQ ID NO: 8132 - protein, 117 aa, Legionella pneumophila
MLDFSLNRDPQTGELYIETSLCGKPLLTTPQLNKGTAFTQEERKDFGLLGKLPHRVETLDEQVKRAYLQYSSYTTRLQQHIYLNNLHDKNQIVFYKLLSRHLGEMLPIIYTPIVGAA

SEQ ID NO: 8133 - protein, 295 aa, Brassica napus
  unsure (1)..(295): unsure at all Xaa locations
MNRGIEVMSPATYLETSPNWLFQENRGTKWTAEENKKFENALAFYDKDTPDRWFKVAAMLPGKTVGDVIKQYRELEEDVSDIEAGLIPIPGYASDSFTLDWGGYDADNMNGYYFAAVGGKRGSAARAAEHERKKGVPWTEEEHRQFLMGLKKKGKGGRRNIARNFVTTRTPTQVASHAQKYFIRQVNGGKDKRRXSSIHDITTVNIPDSFDAAAADTAITNAPCSPPSLGGSQREGSGQWDGQTINDETAGTFYNPNAFQETLLGMSSTPYMAKLQEQSFLNASQFESYNAYLQM

SEQ ID NO: 8134 - protein, 223 aa, Zea mays
  unsure (1)..(223): unsure at all Xaa locations
NIPVILTGGFPCVHYRQEGIAHEVLQGYLCPMEGWFAPDANSIXLQGWDQEVLFPGGHGLMVRGYRPVINTLAKGLDIRLNHKVLEIVRHRNRVEVTVSSGQTFVADAAVVTVPLGVLKVKTIRFEPRLPEWKEEAIRELTVGVENKIVLHFGQVFWPNVEFLGVVSSSTYGCSYFLNLHKATGPPVLVYMPAGRLARDIEKMSDEAAAQFAFSQLKKILPTA

SEQ ID NO: 8135 - protein, 275 aa, Bacillus subtilis
SELWYTEKQTKNFGITMKVNKTLHTEQTEFQHLEMVETEEFGNMLFLDGMVMTSEKDEFVYHEMVAHVPLFTHPNPEHVLVVGGGDGGVIREILKHPSVKKATLVDIDGKVIEYSKKFLPSIAGKLDDPRVDVQVDDGFMHIAKSENQYDVIMVDSTEPVGPAVNLFTKGFYAGIAKALKEDGIFVAQTDNPWFTPELITNVQRDVKEIFPITKLYTANIPTYPSGLWTFTIGSKKYDPLAVEDSRFFDIETKYYTKDIHKAAFVLPKFVSDLIK

SEQ ID NO: 8136 - protein, 218 aa, Thermotoga maritima MSB8
MKIFLDTANLEEIKKGVEWGIVDGVTTNPTLISKEGAEFKQRVKEICDLVKGPVSAEVVSLDYEGMVREARELAQISEYVVIKIPMTPDGIKAVKTLSAEGIKTNVTLVFSPAQAILAAKAGATYVSPFVGRMDDLSNDGMRMLGEIVEIYNNYGFETEIIAASIRHPMHVVEAALMGVDIVTMPFAVLEKLFKHPMTDLGIERFMEDWKKYLENLKK

SEQ ID NO: 8137 - protein, 441 aa, Geobacter sulfurreducens PCA
MALKETLKQKIEEHRPRTTRLVKEFGKVIIDQVTIDQCIGGARDIRCLVTDISYLDPQEGIRFRGKTIPETFEALPKAAGSDYPTVESFWYFLLTGEVPTQAQVDEVVAEWKVRQEVPQYVFDAIRALPRDSHPMVMLSVGILALQKDSKFAGFYNSGKFNKMTAWEYVYEDAYDLVARIPVIAAFIYNLKYKGDKQLPIDPSADCGANFARMIGQCKEYEDVARMYFILHSDHESGNVSAHTTHLVHSALSDPYYAYSAGLNGLAGPLHGLANQEVLDWTIKFQEKYCKDVEPTKELVTKALWDTLNAGQVVPGYGHAVLRKTDPRYTSQREFCLKTPGLKDDPLFKLVAMIFETAPGVLMEHGKAKNPWPNVDAQSGVIQWYYGLREWDFYTVLFGVGRALGCMANITWDRGLGYAIERPKSVTTPMLEKWAEEGGRKF

SEQ ID NO: 8138 - protein, 128 aa, Glycine max
  unsure (1)..(128): unsure at all Xaa locations
MGERVKGTVKWFXVTKGFGFISPEDGSEDLFVHQSAIKSDGYRSLNENDTVEFEVITGDDGRTXASDVTAPGGGALSGGSRPGDGGGDRGGRGGYGGGGYGGGGGGGGYGGGGGGYXXGGGGYGGGGG

SEQ ID NO: 8139 - protein, 205 aa, Triticum aestivum
  unsure (1)..(205): unsure at all Xaa locations
MPESDNDSGGPSNTGGEGELSSPREQDRFLPIANVSRIMKKALPANAKISKDAKETVQECVSEFISFITGEASDKCQREKRKTXNGDHASXLLWAMTTLGFEDYVDPLKHYLHKFREIEGERAAATSTSTSTTPDMPRNNNNNATGYADAPGGMMMMGQPMYGSPPPPQQQQQHQHQIAMGGRAGFPYLGGGGGSSSSSGFGRKE

SEQ ID NO: 8140 - protein, 193 aa, Monacrosporium haptotylum
MADIRRKLVIVGDGACGKTCLLIVFSKGTFPEVYVPTVFENYVADVEVDGEHVELALWDTAGQEDYDRLRPLSYPDSHVILICFAIDSPDSLDNVQEKWISEVLHFCQGLPIILVGCKKDLRFDSKTMEELRKTSQKPVTPEEGEQVRGKIGAAKYLECSAKTNDGVREVFEHATRAALTTFKKKKSSKCSIL

SEQ ID NO: 8141 - protein, 134 aa, Zea mays
  unsure (1)..(134): unsure at all Xaa locations
TLPRPLGTRKRFLFLNRRAITXTGVLNAWAGYFGNKGIKVVFSNGQLALVPMKLGGMAKSVPFVATPKGRGRGLFPRPVRAGIVGFPNVGKFSLINRLLKRKMCPAEPXRPGLTGKLKWFRFGTDLKLLDSPGI

SEQ ID NO: 8142 - protein, 194 aa, Monacrosporium haptotylum
MTTQSLKCVVTGDGAVGKTCLLISYTTNAFPGEYIPTVFDNYSASVMVDGKPISLGLWDTAGQEDYDRLRPLSYPQTDVFLICFSLVSPPSFENVKTKWFPEISHHAPNVPIILVGTKLDLRDDPKIQQSLKDKKMAPIQFTNGVAIAKDIGAVKYLECSALTQKGLKNVFDEAIRAVLSPPPKPTKSKKCTIL

SEQ ID NO: 8143 - protein, 357 aa, Lycopersicon esculentum
MKKGSFAPNLKLSLPPPDEVALSKFLTESGTFKDGDLLVNRDGVRIVSQSEVAAPSVIQPSDNQLCLADFEAVKVIGKGNGGIVRLVQHKWTGQFFALKVIQMNIDESMRKHIAQELRINQSSQCPYVVICYQSFFDNGAISLILEYMDGGSLADFLKKVKTIPERFLAVICKQVLKGLWYLHHEKHIIHRDLKPSNLLINHRGDVKITDFGVSAVLASTSGLANTFVGTYNYMSPERISGGAYDYKSDIWSLGLVLLECATGHFPYKPPEGDEGWVNVYELMETIVDQPEPCAPPDQFSPQFCSFISACVQKHQKDRLSANDLMSHPFITMYDDQDIDLGSYFTSAGPPLATLTEL

SEQ ID NO: 8144 - protein, 62 aa, Glycine max
  unsure (1)..(62): unsure at all Xaa locations
GSVWISSXLKGLNDDCEHFXCFPPVHLFXSYKEGFLHSTIPPWFYNATPYTPYYPLLLIHTF

SEQ ID NO: 8145 - protein, 450 aa, Bacillus anthracis str. Ames 0581
MMKTKQTDELLAKDEQYVWHGMRPFSPNSTMVGAKAEGCWVEDIQGKRYLDGMSGLWCVNSGYGRKELAEAAYKQLQTLSYFPMSQSHEPAIKLAEKLNEWLGGEYVIFFSNSGSEANETAFKIARQYYAQKGEPHRYKFMSRYRGYHGNTMATMAATGQAQRRYQYEPFASGFLHVTPPDCYRMPGIERENIYDVECVKEVDRVMTWELSETIAAFIMEPIITGGGILMPPQDYMKAVHETCQKHGALLISDEVICGFGRTGKAFGFMNYDVKPDIITMAKGITSAYLPLSATAVKREIYEAFKGKGEYEFFRHINTFGGNPAACALALKNLEIIENENLIERSAQMGSLLLEQLKEEIGEHPLVGDIRGKGLLVGIELVNDKETKEPIDNDKIASVVNACKEKGLIIGRNGMTTAGYNNILTLAPPLVISSEEIAFVIGTLKTAMERI

SEQ ID NO: 8146 - protein, 320 aa, Vibrio parahaemolyticus RIMD 2210633
MIKKIGVLTSGGDAPGMNAAIRGVVRTALSEGLEVFGVYDGYLGLYEGRIEKLDRSSVSDVINKGGTFLGSARFPEFKQVEVREKAIENLKKHGIDALVVIGGDGSYMGAKKLTEMGYPCIGLPGTIDNDIAGTDYTVGYLSALNTVIDAIDRLRDTSSSHQRISIVEIMGRHCGDLTLMSAIAGGCEYIITPETGLDKDKLISNIQDGIAKGKKHAIIALTELMMDANELARDIEAATGRETRATVLGHIQRGGRPTAFDRVLASRMGNYAVHLLLEGHGGRCVGIVKEQLVHHDIIDAIENMKRPVRNDLYKVAEELF

SEQ ID NO: 8147 - protein, 130 aa, Cyanidium caldarium
MDKIDEIVEKIKLLSLLEASELVKRIEDTFQVNVSNIQPVTGLSSNLTTTQQTPESAEVKEKWDVILENVPADKKIAILKVVRSITGLGLKEAKEFVESVPKIIKQSISQADAEHIKQQIEDAGASVVLK

SEQ ID NO: 8148 - protein, 512 aa, Ralstonia eutropha JMP134
MQGADTPAHARPPYRIDHQFDRGLVWFRRDLRSTDHAALHYALKHCREVWCVFVFDRDILDPLLARGLKGDRRVDFIRASLIELDATLRAAGGGLIVMNDSAASAIPALARELGVQAVFANHDYEPDAVARDAAVRDSLAGDARVLFTFKDQVIFERDEILTSQGKPFAVFTPYKNAWLKTIQPFDLRPYPIEPYLHALAPLPSKRLVPLPSLEDLGFAPSNLAEVAMPTGSSGGQALFEEFTSRMGDYGRRRDYPALRGPSYLSVHLRFGTVSIRTLARAAHGAVLRGGADSAGAATWLSELVWRDFYFMILHHHPRVAAGEAFHPAYDIIRWRDGETGDRYFESWRDAATGYPLVDAAMLQIRQSGYMHNRLRMVTASFLVKDLGVDWRRGEHYFADQLNDFDFAANNGGWQWAASTGCDAQPWFRIFNPVTQSEKFDPQGRFIRKYLPQLAALPDKYVHAPWTAPQDVLLAAGVRLGENYPRPLVQHDVARKETLERYAVVKEWRRPEG

SEQ ID NO: 8149 - protein, 326 aa, Glycine max
MDQALLDDIINRLLEVRSRPGKQVQLSESEIRHLCAASREIFLQQPNLLELEAPIKICGDVHGQYSDLLRLFEYGGLPPEANYLFLGDYVDRGKQSLETICLLLAYKIKYPENFFLLRGNHECASINRIYGFYDECKRRFNVRLWKTFTECFNCLPVAALIDEKILCMHGGLSPDILNLDQIRNLQRPTDVPDTGLLCDLLWSDPSKEVQGWGMNDRGVSYTFGADKVSEFLQKHDLDLICRAHQVVEDGYEFFANRQLVTIFSAPNYCGEFDNAGAMMSVDETLMCSFQILKPADKKAKLNFGSTTTTKPGNSPAGIKSFLGTKV

SEQ ID NO: 8150 - protein, 1112 aa, GIBBERELLA ZEAE PH-1
MADIMIPNVRSPLSEASNRINSNHPPQEAHRYKPRHDRPPASTNNPPRASYGHPAAYFSGRPPPTQPQSTGPKPQGNPTLKPPTDMDDDRRHSGASYDSSGSGHSKKNYKTHIGPWQLGKTLGKGSSARVRLCRHNVTHQLAAVKIVNRRMAYLVQDSSLAALSKWDNNLPEQIDGEIRVPMAIEREVAILKLIEHPHIMKIYDIWENRSEVYLILEYIDQGDLFTFINMKGRLSEEVSVYFFRQIISAISYCHSFNICHRDLKPENILISANLKIKIADFGMAALHQTDTHRLNTACGSPHYAAPELLKNRQYRGDKADLWSMGVILFAMLTATLPFDDPDIRVMMSKTKKGQYEMPDYLSPEAEDLIRRMLQVNPDRRITLKEIWRHPLVKKYAYLDNLDDLNSQPPDIRKGFQYTPVPAQDVDSQLVRQLRSMWHTFSENDLKLKLTCDEPNDQKAFYWLLYQYREQQLEDFKPEIAHSTSDYHHMKPGTWKKHPQAASLSKKTTMALTPGNQKGFEVDQVRAVDVEHQLEPPPQDAYYHREARCRPCTAVDKARRMHATRATNEESTSRMSGSVPPYVTEQGSTYQLEMARPFTPDVSELPSTVLPKTKDRHEAQVNTKRASGQAMRIALGSRYASEIFKEELRHFSSNIAKDCDEAFKSSLIEEDSIAGSLTEPDRTQYESTPISFTIDAPDESAPDILDLTAKSFSNRPLPPLPTPLQGHDERSLAPTPIGSRPTTGDSHLEELRAEQVKVAQPVILTRHAERRVVSAPAYHQKSKMNPALPSINETGAISNDKARIVSAPPHTPTKRGVDRIRGIEYLSQVENSIRVVNSPGDESPVKMPKPLNVRKKFCDSEEEEEDVMVKRASKVESTHGRESVDWQDCNSYLTSSDGKRSDSTTTDAPSKKKTFNFNFWKSNKQRDSIMSITKEPDDKEERPSVELSVVGKTNTSTKVSQSRWHESNSGPVRNIEVKQNWLARLFRVKPATDHICMTISRRRARQEVTILLREWRKYGIRDIQVDKQRNIVFARVADKNFLNLKEVSFAAEVITVIEHGKKQPLSIIRFTQERGAASSFYRVVDTMRMMFETRALVISDKNKQKMMIKTLNS

SEQ ID NO: 8151 - protein, 447 aa, Zea mays
  unsure (1)..(447): unsure at all Xaa locations
MSNYYDDYDDIDGMEDDYDMDDPIDDMVDEQQGIRDSDVEDNDYGQPNDKIPDTSSADARKGRDIQGIPWEQINITRKKYRQSRLEQYKNYENVPNSGEEAMKDCKPTEKGGIYYEFRRNTRSVKSTILHFQLRNLVWATSKHDIYLVSXYSIRHWSALRGVDTXVAPSEKHSGSLSEGSIYXYKISTLAVKXDLLTAWAGLHGAVMCKNLAGECYFILXEINFCCRSTYDYNAITNXVGVFNSSRGAVHFMASINYSGVRYYDMERFQLFKHFQFEWPVNHASLSPDRKVVVIVGDDPDGLLIDANSGKTVHSIKGHRDYSFASAWSPDGRTFATGNQDKTCRIWDVRNLSKSVHVLRGNLGAIRSIRFTSDGQFMSMAEPADFVHIYDVKSDYNKRQELDFFGEISGTSFSPDTDTLFVGVWDRMYGSLLQFGRLYNYSYLDSLF

SEQ ID NO: 8152 - protein, 375 aa, Capsicum annuum
MVDANMGAAGGQFPEFPNIVTHGGQYVQYDIFGNFFEITTKYRPPIMPIGRGAYGIVCSVFNAELNEMVAVKKIANAFDNYMDAKRTLREIKLLRHLDHENVIGLRDVIPPPLRREFSDVYIATELMDTDLHQIIRSNQGLSEDHCQYFMYQLLRGLKYIHSANVIHRDLKPSNLLLNANCDLKICDFGLARPNLENENMTEYVVTRWYRAPELLLNSSDYTEAIDVWSVGCIFMELMNRKPLFAGKDHVHQIRLLTELLGTPTESDLSFLRNEDAKRYIRQLPQHPRQQLAKVFPHVNSLAIELVDKMLTLNPTGRITVEEALAHPYLAKLHDAADEPVCPVPFSFDFEQQGIGEEQIKDMIYQEALVLNPEYA

SEQ ID NO: 8153 - protein, 457 aa, Staphylococcus epidermidis ATCC 12228
MAIGVILNRVFRLNNNPLFDYIYSNKESINHCYFIIPTEEFEEEAKKKAQYYYGSIQKFMYELQRYDIEPFLMSYDKLIDFCKKQAIDKVVVAGDIMSYHHEEYDILHQRKRFKQANIQVISLRANHYFNPRKTYNKQGEPYKVFTSFYRKWRPYLMIRDEYDYHLEDISKVVVKSQHKIKEDYHSYGISERDVQNRWSEFLSQDIENYKENREYLPEVLTSQLSIYLAYGMIDIIQVFNDLLQNYDKNEQNYETFIRELIFREFYYVLMTNYPETAHVAFKEKYQQLKWSYNEENFKLWKDGNTGFPIIDAAMEELKTTGFMHNRMRMVVSQFLTKDLFIDWIWGESFFKQKLIDYYAASNVHGWQWSASTGTDAVPYFRMFNPIRQSERFDNNARYIKTYIPRLNQVDAKYLHDTHKFEQQIKGQGVEIGKDYPKQMIDHKESRQRVMSEFKALD

SEQ ID NO: 8154 - protein, 1367 aa, Neurospora crassa
MASELSPRAVRFSQTDDEPIARLDKHKTVSRPNPRANDSDNSNPSTDAHDDLHVREQIDELGSLSRYVESHSGSVPSLVPGSLTSSLPLANGSSSRRGASSETYANGTPSRPQRPTAPARTPSNTYQPYNQRRPPQGQPSSYMANNPHARDGSRPRPLAGTSTFRAQEREYVRRLRQQDYNNDYFDAYGSGEQYDSDSEGETPSSEGAFDSYDDAHIMFASNEDIQITEEDLRDPESRERLEWHGMLEAVLTGDVVRQEKKRLIGSNDEAFGKSAHNVELWLGIRARLCGRHLPVQKRVVEDARAALDRSINDIINFAIAGESEAGKPPFEQVRDVVNKIERIESLYPSSRELMTALKPGVYSAYQETCDAVISWYNVNEMINTELSILKKWVGNDALDFSRTKEKSPSGNGLSDESSFLDRLMKEEGLKSLHEDKGSEPKSLKKKSRLDGISRVITKAKDTLIQNAEGFQKRHLPPYIEELLTLISFPSRLIEEIIKMRLAYAKKMKDSAQQNPMMQDQMISQFQVLLKLAIKIKREYMEIARPEPGWDLPPCIDEDFDRVILEALKYYFKLLNWKLSGNKNTFKEAELLFQEWGFGNEIGRYLAHGDVEVAEQFSSLTYKAWNRLSQTFEKEVQRRPKESVPEMTKRYKQILDSVRVRQRMLQRFSRMLNDNYENACDYTIAFEQPQMLHQLYDRLIETGHFQVYSASPEHKDILIIASPTLHNRDDEIQVLMGTFTYEAAIEDPSDPYLLIIKAEDPPQWLGPVHTLRVRNEPLDIKLGHMRLIAGGCQPRLLNARKAFVDRIDMQVDPVVEQRSNLQKVNFRLMEIRKVAFKLSNAFMDSVEAIRRQTRGLNCQELIQTCFIFATEFGQRSLLYMDNNRRTMNNLKLTKLALDWVSFICDDCISSDRKTFRWAVQALEFAMGMTRGRHILGLGEDEYARLRAKVAGCMALLISHFDIMGARSSVAAQAEKKRLEGLVNQIKRLNKGQMLDDNEAAKYYQEHRLEELAKVDNYRKEILLQQSAMGRVLEASNEVDRSLAWLSSTATNFTMRWQQGHFVGGGTFGNVYAAVNLDTGQLMAVKEIRLQDPKLIPTIAGQIRDEMRVLETVDHPNVVSYYGIEVHRDRVYMFMEFCSGGSLANLLEHGRIEDEQVIMVYALQLLEGLAYLHELKIAHRDIKPENILLDHNGIIKYVDFGAAKLIARQGRTLVQDVASTKPNKSMTGTPMYMSPEVIKGENAGHFGAVDIWSLGCVILEMATGRRPWANLDNEWAIMYNIAQGNPPQLPSQDQLSPEGIDFLRRCFMRDSTKRATAMELLQHEWIMTIRNRVVEPATPSSDAGSSTTSQGALNPGNSSRGGFPGDGMY

SEQ ID NO: 8155 - protein, 394 aa, Capsicum annuum
MDGPAQQTDTVMAEAAAAQQPAPPSQPVAGIDNIPATLSHGGRFIQYNIFGNVFEVTAKYKPPIMPIGKGAYGIVCSALNSETNEHVATKKIANAFDNKIDAKRTLREIKLLRHMDHENIVAIRDIIPPPQREAFNDVYIAYELMDTDLHQIIRSNQGLSEEHCQYFLYQILRGLKYIHSANVLHRDLKPRNLLLNANCDLKICDFGLARVTSETDFMTEYVVTRWYRPPELLLNSSDYTAAIDVWSVGCIFMELMDRKPLFPGRDHVQQLRLLMELIGTPSEAEMEFLNENAKRYIRQLPLYRRQSFVEKFPHVNPAAIDLVEKMLTFDPRRRLTVEDALAHPYLTSLHDISDEPVCTTPFSFDFEQHALTEEQMKELIYREGLAFNPEYQHM

SEQ ID NO: 8156 - protein, 448 aa, Glycine max
MVIINLVKKKKKSEREGMRLGKYELGRTLGEGNFGKVKFARNTDSGQAFAVKIIEKNKIVDLNITNQIKREIATLKLLRHPNVVRLYEVLASKTKIYMVLEYVNGGELFDIIASKGKLTEGECRKLFQQLIDGVSYCHTKGVFHRDLKLENVLVDNKGNIKITDFGLSALPQHLREDGLLHTTCGSPNYVAPEVLANKGYDGATSDTWSCGVILYVSLTGHLPFDDRNLVVLYQKIFKGDAQIPKWLSPGAQNMIRRILDPNPETRITMAGIKEDPWFKKGYIPANPEDEDVHVDNEAFSSHEEPNEAEQRNSGSPTLINAFQLIGMSSCLDLSGFFEKEDVSERKIRFASILSVKDLIDRIEDTVTEMEFRVEKKNGKLKVMRENKVHKTLGCLSVVVEVFEISPSLYVVELRKSYGDGSVYKQLCKKLLNDLGVPPKQGLVRSAAN

SEQ ID NO: 8157 - protein, 379 aa, Cercospora zeae-maydis
MATEQIPDKGLAGVCVNEGPDFKVEVQEVDIPEPSKQNCWTISVNSSLTERWPESGELLIRLNCTGLCMSDIHFMVNDWAVPPMSQFGTKCAGHEGAGVVVKLGPNVSGWEVGDRAGIKPLWDVCHNCEHCWNGRENYCQHGVYTGLVAEGTYRQYLTSPAIYTSRIPEGVPDEVAGPIMCSASTMHRALVDSGLKAGDFVVFPGGGGGVGIQGVQLAKAMGMRPIVIDSGEAKSKLSKELGAEEFIDFKEHEDVAARVKEVAGGIGAHGVLVTAYQAYKDSFSYLGNRIGGRIMCIALPPAGTVNMGTDPNFIVFKNVRVIGTLVGTMQDTAAALEYARRGLLKGIAKVQGVSRFDKSVQALQRGKVAGRIVIDFNKK

SEQ ID NO: 8158 - protein, 168 aa, Avena agadiriana
VMASSATTVAPFQGLKSTAGLPVSRRSSGSLGSVSNGGRIRCMQVWPIEGIKKFETLSYLPPLSEEALLKQIEFLIRSKWVPCLEFSKVGFIFREHGSTPGYYDGRYWTMWKLPMFGCTDASQVIKEVEEVKKEYPDAYVRIIGLDNIRQVQCVSFIAFKPPGCEESG

SEQ ID NO: 8159 - protein, 399 aa, Bacillus subtilis subsp. subtilis str. 168
MLDNKTIEIIKSTVPVLQQHGETITGRFYDRMFQDHPELLNIFNQTNQKKKTQRTALANAVIAAAANIDQLGNIIPVVKQIGHKHRSIGIKPEHYPIVGKYLLIAIKDVLGDAATPDIMQAWEKAYGVIADAFIGIEKDMYEQAEEQAGGWKEYKPFVIAKKERESKEITSFYLKPEDSKPLPEFQAGQYISIKVRIPDSEYTHIRQYSLSDMPGKDYYRISVKKDGVVSSYLHDGLQEGDSIEISAPAGDFVLDHASQKDLVLISAGVGITPMISMLKTSVSKQPERQILFIHAAKNSEYHALRHEVEEAAKHSAVKTAFVYREPTEEDRAGDLHFHEGQIDQQFLKELIANTDADYYICGSPSFITAMHKLVSELGSAPESIHYELFGPQLSLAQSV

SEQ ID NO: 8160 - protein, 492 aa, Burkholderia fungorum LB400
MDSFNPDDVAIRSGHYIGGEYVEAGGRRIEVARPSDGVVYATVPLADAGMVDRAVENAWQAFRHSGWARMAPRERAKILRRFAELVEADAPTLGRLEALGSTRPIAQAIGWDVPFTAEGIRFYAEFADKLGGDVAATDHDHLGMTIAEPYGVIGAIAPWNFPLVMASWKIAPALAAGNAVVLKPSEMTPFSVLRLAELAVQAGVPAGIFNVIQGDGRVTGDELVRHPKISKVTFTGSTRTGASIMAACANSGTRPVTLELGGKSPQIVFADAPRLDDVARRIAGAITGNAGQVCVAGSRLLVERSLAEPLAERIGKIFAELKPGATWAAGTTLSPIISAPQAARIEGIVGRTLEAGATLRYGGVRADVGSNGAFYTPTLLTNVTAHSEAVREEIFGPVLTLQTFDTEEEALALAQHPEYGLAAGVHTADLGRALRFVRGLEAGTVWVNRYGRTSDFMIPTGGYKRSGIGKDLGRQAYEANLRFKSVLIDLRP

SEQ ID NO: 8161 - protein, 327 aa, Haloarcula marismortui ATCC 43049
MTHEIAVIPGDGIGQEVTPAAVEVLEAIDGVDFDFVEGEAGDAVKEETGDALPEETRELAADADATLFGAAGETAADVILPLRQVVGSFANVRPARSYPGLDAVQPDTDIVFIRENTEGVYKGIESEISEGVTTCTRVITEDASEKIAEYGFSYAKQNSYDDVTIAHKANVMRTTDGLFLDAASAVGEDRDASYDTALMDALAMHLVMNPQDYGVVICPNLAGDMLSDLAAGLVGGLGLLPSANIGEENALFEPVHGSAPDIAGEGIANPSAMILSAAMLLDHLGYDEQGDAVRTAVESVLDSGPRTPDLGGDASTEDVTAAVIDEL

SEQ ID NO: 8162 - protein, 168 aa, Avena strigosa
VMASSATSVAPFQGLKSTAGLPVSRRSNAGLGSVSNGGRIRCMQVWPIEGIKKFETLSYLPPLSEEALLKQIDFLIRSKWVPCLEFSKVGFIFREHGSTPGYYDGRYWTMWKLPMFGCTDASQVIKEVEDVKKKYPDAYVRIIGFVNIRQVQCVSFIAFKPPGCEESG

SEQ ID NO: 8163 - protein, 168 aa, Avena clauda
VMASSATTVAPFQGLKSTAGLPVSRRSSASLGSVSNGGRIRCMQVWPIEGIKKFETLSYLPPLSEEALLKQIDFLIRSKWVPCLEFSKVGFIFREHGSTPGYYDGRYWTMWKLPMFGCTDASQVIKEVEEVKKEYPDAYVRIIGFDNIRQVQCVSFIAFKPPGCEESG

SEQ ID NO: 8164 - protein, 455 aa, Triticum aestivum
MARDEPSAAAVDVADGDSPSSSPTLTRLREALAALSKAFESGDTASSDAAAALVAEILSPSDADASAALSEQMLREVHAFLSRPSSNQMAIDALSLELPKPVAKLGARMGNCRDIARTIIEFFVSNCSPRDMLCILCEALDTPVALNGSAYLVILLDGLASTLILIQRRHIEQVKVVLPAILRVMHANLSECDGEHGMSAVDLFSAALRIGNAIQEMCKTMVNHRKEELCSILGLYALQNIALVSSESKHQNIQSTCGSVVLQYSKLLMFCGFTYLGLLTGNDVTSATTKLSKEEDDNFLDCFSSAMDGASLVVVWTSMHDDMSKYAGAEFESALKEVQDNCIRKWEAINMFRYVLSSVNYSWAIKSHSLDLLLTLVDDKCSEETNDHVHFPYSTQIFATLNAIERVMIAAPDTLMRKKAFSALKRVISAVPSTQRFDILQALIENSMFPSLTAI

SEQ ID NO: 8165 - protein, 369 aa, Ustilago maydis 521
MTASTVPIIVNAASQLEIDVDTLDVALTQQLASVGVQPNDMTSNQFIVADALRLAQNEALLDDVVRGSGAGDWLAILDRVSVRLCAQNLANISGRALLQVSPTHAYDTEQIVEHALAYDREFSALGIGKHRYCIKILATPAGVKAAWILESQHAIRTLATGVFSVAQALAAAQAGCLYISPYYNEILAHFTAPDERAVYDDPVSQHPMSPRMAHIYQAYRELTLANPAARPPVIKSASFIGINEVLAMPQLGAQQATILAPILSEMIQRTGMRATTKPYRPSKTYDVALPDSTLALLKIDRLRADGVAQQFDLSVDYLSHNAQQLALAISNDPETQRRLNDAIRVFETAQLNAKTVIDAAIARVNAAHS

SEQ ID NO: 8166 - protein, 138 aa, Mycobacterium avium subsp. paratuberculosis str. k10
MRPVPTGKVKWYDADKGFGFLSQEDGEDVYVRSSALPAGVEGLKAGQRVEFGIASGRRGPQALSLKLIEPPPSLTKARREGPAEHKHSPDELHGMVEDMITLLESTVQPELRKGRYPDRKTARRVSEVVRAVARELDA

SEQ ID NO: 8167 - protein, 475 aa, Geobacter sulfurreducens PCA
MAKRYKVLVGGEWTGDDRPGIEVVNPYDDSVIGVVPEATNEDVDHAIRAAQAGFAEMSALPAYRRSDILDRTSELIKRDREEIAEIIAREAGKSWKFALAEADRSAETFRFASLEARNAHGEIVPMDASPVSAGRFGFYLRTPIGVIGAIAPFNFPLNLVAHKVAPAIAAGNAIVLKPATKTPLSSIKLAELMVEAGLPAGALNLVIGSGRTVGNRLVEDDRLAMVTFTGSPPVGVQIKERSGLKRVTLELGSNSPTIIEDDGDVDAAVARCVVGSFANSGQVCISVQRIFVHQRRYREFVDKFVAATQKLKVGDPMDRDCDIGPMISREELQRAVEWLGEATSLGARLETGGTVAGNCLTPAILSGVTPDMKVVCSEVFAPIVSVIPYETFDQALDMADDSIYGLQAGVYTSDINKAFKAIRRLDVGGVIINDIPTFRVDHMPYGGNKQSGLGREGIRYAMEEMTNIKFVCLNL

SEQ ID NO: 8168 - protein, 224 aa, Populus tomentosa
IMHAMWKPQKFKYIYLMATLYVFTLTIPSATAVYWAFGDDLLNHSNAFALLPKNGFRDAAVILMLIHQFITFGFACTPLYFVWEKVIGMHDTKSICLRALARLPVVIPIWFLAIIFPFFGPINSAVGALLVSFTVYIIPSLAHMLTYRKSSARQNAAEKPPFFLPSWTAMYVVNTFVVVWVLVVGFGFGGWASMTNFVRQVDTFGLFAKCYQCKPAGAAPPRPH

SEQ ID NO: 8169 - protein, 334 aa, Nostoc punctiforme PCC 73102
MSKNLLEQLREVTVVVADTGDIQAIEKFKPQDATTNPSLITAAAQMPEYQGIVDQTLLQAKKDAGDGATQAQIVSLAFDRLAVAFGLKILQIIPGRVSTEVDARLSYDTEATLTKARDLIAQYKAAGIGRDRVLIKIASTWEGIRAAEILEKEGIHCNLTLLFGLHQAIACAEAGVTLISPFVGRILDWYKKDTGRDSYPATEDPGVLSVTKIYNYYKKFGYKTEVMGASFRNLGEITELAGSDLLTISPSLLAELQSTVAELPRKLDPAKAASLSIEKISIDKASYDKMHAADRMATDKLDEGIKGFTKALEDLEKLLADRLVRLEGEVVASH

SEQ ID NO: 8170 - protein, 58 aa, Glycine max
  unsure (1)..(58): unsure at all Xaa locations
QNGRQSRTSCLDMLLDIILPPVGVFLKHCCKVXIWIRMVLTLVGYISGIIYAVYAITK

SEQ ID NO: 8171 - protein, 115 aa, Brassica napus
  unsure (1)..(115): unsure at all Xaa locations
MSAINITNVTALDNPAPFVSPFQFEISYECLTSLKDDLEWKLIYVGSAEDETYDQTLESVLVGPVNVGNYRFVLQADPPDPSKIREEDIIGVTVLLLTCSYMGQEFLRVGYYVXN

SEQ ID NO: 8172 - protein, 419 aa, Neurospora crassa
MPALTGIAVSAALAVTTRRTHLGVGTVVMGIEGFNVESSLRIPMTSREAFHKFLRSASPSSSQSPRSLSPAAQGTNRVARAPYLLRSQAVLVTTLTPPSFGVTQPKVLENPPIPISPSKRTWRRRDGTAAEGQTTFFASTRAPSFSPIVPSSAPSHHATNTFFLATSFSRLYKKAVLSRSTKRVDRIARDTIATSSSSINHTSNMSSVVNEGEKPQEAAQEQQEEQQQQQQQQEQQNAGDDVNDDEEEISAMKRRVAEMEEEAAKLREMQASLDQQHHELTENKEDIDSRSIFVGNVDYSASPEEIQAHFQSCGSINRVTILLDKFTGQPKGYAYVEFTEPSLVAQALVLNESVFKGRNIKVVPKRTNIPGMSRGGRGGRGSFRGGGRGGYFGGRGGFPPRGGYRGGYRGRGRGGYAPY

SEQ ID NO: 8173 - protein, 247 aa, Gerbera hybrid cultivar
MGRGRVELKRIENKINRQVTFSKRRNGLLKKAYELSVLCDAEVGLIIFSSRDKLYEFGSVGVMKTLERYQRCCFNPQDNNNERETQSWYQEVSKLKAKFESLQRTQRHLLGEDLGPLSVKELHNLEKQLEGALTQARQRKTQIMVEQMEELRRKERELGDMNKHLKIKVSHELSTFDAEGQGYRAQLPCPWNSGTNNTFTMHPSQSNPMDCQQEPILQIGYNQFMHGEGSSVQRNMVGENGIHGWVL

SEQ ID NO: 8174 - protein, 1021 aa, Candida albicans SC5314
MEAMKKRMTTHSPKPESPKPATSPDSDSLEGLSPELVPIVTLLSSQAHRRYNEGIFMLYYDLNGDGKPADREWREVYGILTGNQLAYWDAANLAQFKNNPSALLETSSKPNYINFTDSVYNAMKTLPAAKQNLDNVIIVSTTLKNRYLLQFKSYKDLTVWYAALRLSNFEYSSLQEAYTGALLSARGSRLSDIRTILAEKRFDHEDWVSIRYGSGMAWKRCFAVVEPSTLKKKVFTPGRILFYENEQKKKKQLMAVVTNATAVAAIYPQSHLLIDHSTMLKMEGYINFTSPSLSTKVSKKSASDFKHTSLFLMPEQHSSVPGFDTLIRFLVPLLDSFGLYGRPKRLKANRNDTDSLLFGLPTLPHVHYLELNDVLDLTRGDFLSWDLKTWTDNIKGILKTKIDRGYEGCGSQRGIKGAVTSLSSPVTSTGSPRFASGQGFSSRSTSSSSSQPRQNQQTPQQRKPPPPGPELKPAGKSFDKNVNDLHIGVSNDNLLSADKMKNNHKSVQLAEIYQKYSDLKTPSDNYTDRNILLNGSHEHLMEDELPAGIQQMKLHDNIYPKDDDGLFSDDDDDDDLAKVDVRKIGMNNDGSSQSLDPTLGALKVPYSDDRAGSYSSVISPMSQFNNLKESYQNVDRRAPYPNNSDNESDDDSPPPPVPSHDQKYQTGLQGKSSAFSQGAATSRGAGGMINGSSSESRSQGQQKPKYISSPNSSQNHIHRIHSPEKGSPLGRANVQYPISPERLTDVHKSSDNLADAIKLPVLPAINKVPPQEEQRQPQKYPQPQPQPQSQPHPYQQQQQQQQPRQQQLYSPQQVQQQKYHQQQQQQLQQQQQQYYQQQKFQQSQQPQRPLQQQQQQPPQQQHYQKQPQQQPQQQPHRVPPPQQQPQQQLSQAYRAAPPTQQKQPPPQQQLYGRSQPQSFPREPPNGHPQGSGFMQNRGVIPRNNGQAPPPQPQNGARGFVSQQQQQQQQQYQYSYLPSGASGQPKQQQQQQPQQQPQPHRGHHPYGAQYTSQNPNGQARYY

SEQ ID NO: 8175 - protein, 354 aa, Petroselinum crispum
MKKGNLGPGLKLSLPPPDEDSLTKFLTQSGTFMDGDLLVNRDGVRIVSQTDVQAAPPIQATDNQLSLADFDAIKVVGKGSGGIVRLVQHKWTGQFFALKVIQMNIQESARKQIAQELKINQSSQCLNVVVCYQSFYDNGAISIILEYMDGGSLADFLKIVKNIPEPYLAAIFKQVLKGLWYLHHEKHIIHRDLKPSNLLINHRGEVKITDFGVSAILATTSGQANTFVGTYNYMSPERISGGQHGYSSDIWSLGLVLLECATGYFPYSPPEQDEGWSNVFELMDTIVNQAPPCAPPDEFSPEFCSFVSACVQKDPRKRPSANELLRHPFINMYEHLNIDLAGYFTEAGSPLATL

SEQ ID NO: 8176 - protein, 116 aa, Glycine max
MASSMISSPAATTDNRAGAAMGASFTGLKPMAGYPTRKTSSDITYIASNGGRVHCLLVWPPGGLKKYVTLSYLPDLDDAQLAKAVEYLITMGRIPCSAFEMERCFQHREHTREPGY

SEQ ID NO: 8177 - protein, 347 aa, Thermoanaerobacter tengcongensis
MDGLMTAVVKQYHKEGADIVKKEIPKIGPDEVLIKVKATSICGTDVHIYVWNEWAKSRIKPPKTMGHEFVGEVVEIGENVTSVKVGDLVSAETHIVCGKCRACRTGNAHICENTLILGVDTDGAFAEYIKVPESNVWINDKNIPLEILSIQEPLGNAVHTVFSGDVVGKSVAVIGCGPIGMMAIPLLKRTGAAAIFAIEPADYRRELAHKLGATRVINPLREDVVSIIKSETEGYGADVVLDFSGNPTAIRQGLEYIAKGGRMSILGLPDNEVPIDITNNVVFKGITIQGITGRRMYDTWYTVKGLLKSGLAEDLKPIITHTFPLTEYQKGMELMIKGQCGKVVLYP

SEQ ID NO: 8178 - protein, 299 aa, Glycine max
MVYVKSQKSKAYFKRYQVKFKRRREGKTDYRARIRLINQDKNKYNTPKYRFVVRFSNKDIVAQIISASIAGDIVLAAAYAHELPRYGLEVGLTNYAAAYCTGLLLARRVLKTLEMDEEYEGNVEATGEDYSVEPAESRRPFRALLDVGLIRTTTGNRVFGALKGALDGGLDIPHSDKRFAGFDKEKKELDAEVHRKYVFGGHTTFFFLQILAEDEPEKYQSHFSEYIKRGIEADGIEALYKKVHAAIRADPSLKKSEKQPPKEHKRYNLKKLTYEERKAKLIARVAAINSAADNDEDDE

SEQ ID NO: 8179 - protein, 526 aa, Triticum aestivum
  unsure (1)..(526): unsure at all Xaa locations
MAAIKPPPPDRPPQAARLPSPSSSSSAAAAAKRGGTGSRGLLMGRYELGRVLGKGTFAKVYHARHVQTGESVAIKVLDREKAVRSGLVSHIKREIAVLRRVRHPNIVHLFEVMATKTKIYFVMELVLGMEVVRGGELISRVSKGSVQEDFARRYFQHVFSAAGGCHTRGVFHRDLKPDEAGNLKVSDFGLSAVAEPFQPEGLLHTFCGTPAYVAPEVLARRGYEGAKADIWSCGVILFVLMAGYLPFHDQNLMAMYRKVYKGEFRCPRWFSKDLTSLIMRFLDTNPSTRITLPEVMESRWFKKGFRPVKFYIEDDQLYNVIDAENDMLDLGLPDPLPQPLPPPPPSPSPQQVDGDDSGSESDASVVSCPATSSFEERHRLRGPLPRPASLNAFDIISFSRGFNLSGLFEEKGDEVRFISGEPMPDIITKLEEIANVKSFAVRKKDWRVSLEGTREGVKGPLTICAEIFELTPSLVVVEVKKKAGDKEEYDDFCNKELKPGMQHLVHQMAPVPITPTISEXAERPSR

SEQ ID NO: 8180 - protein, 384 aa, Arabidopsis thaliana
MLTCIARSKRAGDESSGQPDDPDSKNAKSLTSQLKDMALKASGAYRHCTPCTAAQGQGQGQGPIKNNPSSSSVKSDFESDQRFKMLYGRSNSSITATAAVAATQQQQPRVWGKEMEARLKGISSGEATPKSASGRNRVDPIVFVEEKEPKEWVAQVEPGVLITFVSLPGGGNDLKRIRFSRDMFNKLQAQRWWADNYDKVMELYNVQKLSRQAFPLPTPPRSEDENAKVEYHPEDTPATPPLNKERLPRTIHRPPGLAAYSSSDSLDHNSMQSQQFYDSGLLNSTPKVSSISVAKTETSSIDASIRSSSSRDADRSEEMSVSNASDVDNEWVEQDEPGVYITIKVLPGGKRELRRVRFSRERFGEMHARLWWEENRARIHEQYL

SEQ ID NO: 8181 - protein, 219 aa, Arabidopsis thaliana
MADQIEIQRMNQDLQEPLAEIMPSVLTAMSYLLQRVSETNDNLSQKQKPSSFTGVTKPSISIRSYLERIFEYANCSYSCYIVAYIYLDRFVKKQPFLPINSFNVHRLIITSVLVSAKFMDDLSYNNEYYAKVGGISREEMNMLELDFLFGIGFELNVTVSTFNNYCCFLQREMAMLMKMKSLFLEPSSFKISSKTKLVMYPHEEDSLSTHHNKKQLAAA

SEQ ID NO: 8182 - protein, 145 aa, Monacrosporium haptotylum
MSRSGVRVQPECTTAFDELKLGKKFKYIIYGLTNGNTEIEVVKAAPAAGSSEEEAYEDFMAQFPENGCLWAIYDFAFKTAEGAPRNKIVFYAWSPDGAPIKAKMVSASSKESLRKSMSGIAVEVQGTDFDEVSFDTVLEKCMKGR

SEQ ID NO: 8183 - protein, 341 aa, Rhodobacter sphaeroides 2.4.1
MRALVKAKAEPGLWMEERPVPEIGPDEVLIRVRKTGICGTDVHIWNWDDWAAKTVPVPLVTGHEFAGEIVEVGRDVRDLSPGQRCSGEGHLIGHHSRQVRAGRFHLDPETRGIGVNVPGAFADYLRLPAFNVVPLPDAIDDEVGAILDPLGNAVHTALSFDLVGEDVLVTGAGPIGIMAAAVARHVGARHVVITDVNADRLRLSTEVADVVPVNVATEDLRSVMGRLKIVQGFDVGMEMSGAPAGFDQMVEAMVMGGRIAMLGIPPGRSPVDWSRIVFKALTIKGVYGREIFETWYKMIAMLENGLDIRRVITHRFPVADFAEGFAAMRSGASGKVVLDWG

SEQ ID NO: 8184 - protein, 222 aa, Solanum macrocarpon
MVRQKIQIKKIDNLTARQVTFSKRRRGLFKKAQELSTLCDADIGLIVFSATGKLFEYSSSSMMQLIEKHKTQSERDNMNGSEQLKSSNLQSEKKTYAMLSRELVEKNRELRQLHGEELQGLGLDELMKLEKLVEGGISRVLKIKSDKFTREISSLKKKEAQLQEENSQLKHQSQARLNEEGQNAIEQGHSADSITNNRSLVSSHQDYDDSDTSLKLGLGFPY

SEQ ID NO: 8185 - protein, 429 aa, Caldococcus noboribetus
MVSHPCTADEAKPPSEGQLARFENGKLIVPDNLIVAYFKGDGIGPEIVESAKKVLDAAVDKAYGGTRRIVWWEVTAGEEAQKECGSLLPDGTLQAFKLARVNLKGPLTTPVGGGFRSLNVTLRMVLDLYSNVRPVKWYGQPTPHCHPENIDWVIFRENTEDVYAGIEWPFDSPEAQKIRDFLKKEFGIELTPDTGIGIKPISKWRTQRHVRRAMEWAIRNGYKHVTIMHKGNIMKYTEGAFRQWAYDLILSEFRDYVVTEEEVNTKYGGKAPEGKIIVNDRIADNMLQQIITRPGEYNVIVTPNLNGDYISDEANALVGGIGMAAGLDMGDGIAVAEPVHGSAPKYAGKNVINPTAEILSGMYLLSDFVGWPEVKLLVEYAVKQAIAHKQVTYDLAREMGGVTPISTTEYTDVLVDYIRHADLKALKGQ

SEQ ID NO: 8186 - protein, 100 aa, Triticum aestivum
  unsure (1)..(100): unsure at all Xaa locations
SSATTAAPFQGLKSTAGLPVSRRSCSAGLSSVSNGGRIXRCMQVWPIEGIKKFETLSYLPPLSKEALXKXVDYXIRSSXVPASNXTKXGXSSGEQXXSPR

SEQ ID NO: 8187 - protein, 119 aa, Brassica napus
MFFTSRLLSLPRRNMVLSRTSIDSNDTVSSTFGSRYDLIALPTYHIGDSSILVDAAYHIIKYDLMRASNPRLNLVSFVTTCMESTCDKLIMDFINRSYVDMDQYPVITELNKRCLNMIT

SEQ ID NO: 8188 - protein, 279 aa, Staphylococcus epidermidis ATCC 12228
MTNDVQILNNGYPMPAVGLGVYKIADEQMEEVVRTALDAGYRAFDTAYFYGNEKALGSALKHSNVERDELFITSKLWNDYQGYDQTIEYFNKSLDNLGLDYLDLFLIHWPCENDQLYIESYKALEHLYEEGKIKAIGVCNFKIHHLEKLMKETKITPQVNQIELHPYFNQQDVQDFCDEHDIKVTAWMPLMRNKGLLDDPVITDIAHRYDKTPAQIVLRWHLAHNRIIIPKSQTPKRIKENFDIFDFNLELTDVAEIDSLNKNARQGKDPDDVSIGDLK

SEQ ID NO: 8189 - protein, 161 aa, Lactobacillus salivarius subsp. salivarius
LLNQSKDTIIYLCVLKKQHLFQSDKPESIETTLKNAADGRDIRLIVVTDAEGILGIGDWGVDGVDIAIGKLMVYTAAAGINPAQVLPVSIDAGTNNKELLNDPLYLGNKHKRVYGEKYNELIDKFVAAVQKLFPESMLHFEDFGRSNADVILNKYKDKILT

SEQ ID NO: 8190 - protein, 507 aa, Burkholderia fungorum LB400
MLLGHPVLFKSLCYVDGRWVHSASAASVAVHNPADQQVLGHVPMLDAAQITEAVGAAQRAFSTWRWLPVSQRSALLLRWHELILRHQHDLAAILSLEQGKPLAEARGEIAYGASFVEWFAHEVRRLNGRTIPTHIDGAHLGTMIEPVGVAALITPWNFPCAMITRKAAAALAAGCTVVVKPAHETPFSALALAQLAEEAGFPAGVFNVVLGEPQMAMERLVGDSRVRSVSFTGSTRVGALVMQAAARAGIKKTALELGGNAPFIVTGDADLDQAVRVAVAAKFQTSGQDCCAANRIFVARPLYEAFVAQYSDAVKALKVGAAFEANVDVGPLMHQAAFDSTAQRVADAKARGARITAGGGAHERGGWFFEPTVVADAAPGMRIYDEENFAPISAVSPFDSLDEVVERANDTEYGLAAYVCARDLNTVFQLIRRLDFAMVSVNGAKFTGAPIPFGGIKSSGLGREGGAEGFEPFVETRYFCLGQLGLPVTESLPAHRLAAATGAAATA

SEQ ID NO: 8191 - protein, 162 aa, Lactobacillus rhamnosus
VVADSIEQYNELFLDPQNAAFVSVDAPEDIEATLKNAADGRDIRLVVVTDAEGILGMGDWGVNGVDIAIGKLMVYTAAAGIDPSQVLPVSIDAGTNNQKLLDDPLYLGNRHKRVSGEQYYDVIDKFVAAEQQLFPDSLLHFEDFGRDNAQVILDKYKDQIAT

SEQ ID NO: 8192 - protein, 380 aa, Lactococcus lactis subsp. lactis Il1403
MVDFNKVLDLHELHTGVLDIQADIDVKKPSDLAEAYTPGVAELSKLIQSDPEAKRKYTMSGKLVAVVTDGTAVLGLGNMGPAGGLPIVEGKALLYKELAGVDAIPIAVEQIGAEKIIETIKNISQSFAGIHLEDISAPQCFEIEERLSKNLNIPVYHDDQAGTAIVVLAGLMNAAKLVNKKLEDLKIVINGVGAAGVATGRLFAEVGIKNVTLIDIEGKVNDKVKSYNRYQLELAKRFNQVAGTTLDEVIDGQDVFIGLSDAKVLTGTQVERMAKDAIIFALANPVPEILPEEALKHGAAVVATGSNQWPNQVNNVLVFPGLFKGLLSANVQHVDYKLQANIATAIADVIKNPDRNHIVPGVFDAGVVESVTKAVKDSAK

SEQ ID NO: 8193 - protein, 236 aa, Streptomyces coelicolor
MKAVQVVGYGKNLEMAEVPAPEVTGPYDVIVRIGGAGVCRTDLHILEGQWAEKSGVELPYTIGHENAGWVHAVGSAVTNVSEGDKVIVHPLITCGLCRACRAGDDVHCENNRFPGIDTAGGYAEYLKTSARSVVRLDDSLEPADVAALADAGLTAYHAAAKAARRLRPGDRCVVIGAGGLGHIGIQVLGALTAAEIVVVDRNPDAVDLAVSVGADHGVLADGGHVDRVRELTGGHG

SEQ ID NO: 8194 - protein, 238 aa, Glycine max
MEYTYSAGVEAETHTSSSTTPSRSKKRNNNTRRFSDEQIKSLETMFESESRLEPRKKLQLARELGLQPRQVAIWFQNKRARWKSKQLERDYGILQSNYNSLASRFEALKKENQTLLIQLQKLNHLMQKPMEPGQRCTQVEAANSMDSESENGGTMKCEAEGKPSPSMEISEHLLGVLSDDDTSIKVEDFGLEDEHGLLNFAKHVDGSLTSPEDWNAFESNDLLGQSTTDDYQWWDFWS

SEQ ID NO: 8195 - protein, 178 aa, Lactobacillus brevis
NPVVYDPTVADSIEQYSHLFTDPQNAAFISVDAPEDIEATLKNAAGDRDIRLVVVTDPKNFGYGPTGVLTGLDIAVGKLMVYTAAAGMIQHKSCQLALMAGTNNQTLLNDRYYLGNHHERVYGDKYHAVIDQFVAAEQKLFPESLLHWEDFGRSNAQVILDKYKDKIATFNDDIQGTG

SEQ ID NO: 8196 - protein, 77 aa, Glycine max
  unsure (1)..(77): unsure at all Xaa locations
MVSSFTCLKSMAGFPTRKTNNDITSIACNRLRVQCIHVSPPIVKKKFDTFSYLPYLYYSQLSNEVXYLLTKGLIPFF

SEQ ID NO: 8197 - protein, 210 aa, Brassica juncea
MLCSEYESPVTLGGEYCPKLASSCPKKPAGRKKFRETRHPVYRGVRLRKSGKWVCEVREPNKKSRIWLGTFLTAEIAARAHDVAAIALRGKSACLNFADSAWRLRIPETTCPKEIQKAAAEAAVAFQAELNDTTADHGLDVEETIVEAIFTEESSEGFYMDEEFMFGMPTLWASMAEGMLLPPRPYNSDLTMTSTEMLTCPFGVMSTCNH

SEQ ID NO: 8198 - protein, 180 aa, Lactobacillus fructivorans
NSVVYDPTIADSIENYSRLYVNPQNAAFLSIDHDDPETIRESLKNTAAGRNIKLIVVTDGEGILGIGDWGTQGIDIPVGKLMVYSAAAGIDPSEVLPVVMDVGTTNKSLLDNPLYLGNHQDRDYGQKYYDFVDKFVKEAEDLFPNLYLHFEDFGRRNASNILDKYKDDYLVFNDDIQGTG

SEQ ID NO: 8199 - protein, 112 aa, Bartonella sp. strain Pm650nm
GANEACLKMLQEIGSVKRIPEFIARAKDKNDPFRLMGFGHRVYKNYDPRAKIMQKTCHEVLKELNIQDDPLLDIAIELEKIALNDEYFVEKKLYPNVDFYSGITLKALGFPT

SEQ ID NO: 8200 - protein, 112 aa, Bartonella sp. strain Pm662wy
ANEACLKMLQEIGSVKRIPEFIARAKDKNDPFRLMGFGHRVYKNYDPRAKIMQKTCHEVLKELNIQDDPLLDIAIELEKIALNDEYFVEKKLYPNVDFYSGITLKALGFPTE

SEQ ID NO: 8201 - protein, 276 aa, Anabaena variabilis ATCC 29413
MIEPSVEEFPADNGPQLTPELAIANLQSSDLSLRYYAAWWIGKYRVKEGAAVDGLIAALEDEADRTELGGYPLRRNAARALGKLGDRKAVPGLIKCLDCPDFYVREAAAQSLEMLKDKAAAPALIKLLDGGVAQAVQVTGRPHLVQPYEAVLEALGAIGATDAIPLIQPFLKHPVSRVQCAAARAMYQLTQEPVYGELLVKVLEGNDLNLRRVALGDLGAIGYLAAAEAIANAKAENSFKLIALKGLLEHQMSAESNALSISDQAIRVMKLMDSLL

SEQ ID NO: 8202 - protein, 283 aa, Listeria monocytogenes str. 4b H7858
MKTVKLNNGVEVPILGFGTYQITDAAEAEQAVKDAIETGYRHIDTAQSYMNEEAVGRGIVASGVDRKELFITTKIWVENVSYKGVMSSFDRSLKRLGLDYIDLLLIHQPFNDVYGAWIAMEELQASGKIRAIGVSNFSPDRVIDLAAFNEVTPQVNQIEVNPFQQQAANLAVLRKEGVAIEAWAPFAEGKNDIFNNPVLTKIGAKYGKSAAQVILRWLVEQDIIVLAKSVKPERMAQNLAIFDFELTEADKGEIASLDQGESQFFSHADPEMVKWMASRKLNV

SEQ ID NO: 8203 - protein, 286 aa, Listeria monocytogenes str. 1/2a F6854
MILPGNGTIPYIGLGVFQVTEQEFIAGAVEKAIEVGYRLFDTAAVYNNEAIVGQAIASSAVSREELFISSKVWNGDLGYDETLFAFERTLRNLKLDYLDLYLIHWPVAGKYRDSWRAMERLHDEKLIKSIGVANFKQHHLSDLLVAANEKPVLNQVETHPLLPQNDLRKYLVEQNIAHAAWSPLAKGILMQNPVITEIAKKHQASVDQVILQWHLNRNTIIFPKSITSSRIEENSRLSYFQLDASDMEKIDRLETGKRVGPDPDDLEYFLSSIERERAYLASENEE

SEQ ID NO: 8204 - protein, 225 aa, Pisum sativum
MLQCLEGFKSLLASVLRCCDIDINQPRGLEDPELLARETVFSVSEIEALYELFKKISSAVIDDGLINKEEFQLALFKTNKKESLFADRVFDLFDTKHNGILGFEEFARALSVFHPNAPIDDKIEFSFQLYDLKQQGFIERQEVKQMVVATLAESGMNLSDDVIESIIDKTFEEADTKHDGKIDKEEWRNLVLRHPSLLKNMTLQYLKDITTTFPSFVFHSQVDDT

SEQ ID NO: 8205 - protein, 184 aa, Magnaporthe grisea 70-15
MHEHTFDSTDAGASTTYPMQCSALRKGGHVVIKGRPCKIVDMSTSKTGKHGHAKVHLVAIDIFTNKKLEDLSPSTHNMDVPNVTNETFELIDIEGDGFLQLMDSNGEMREDIKLPEGSDKAEEVAKEIRRLHELKQQDENKEVCRLLIQPSAAHSFDSDTDNMCAQLSSSPRLWVRRFLPRPSN

SEQ ID NO: 8206 - protein, 231 aa, Sinorhizobium meliloti
MDARQMKIKAAEAALEHVESGMRLGIGTGSTAEEFVRLLAEKVASGFQISGVPTSERTARLCLELGVPLKSLDELPELDLTIDGADEVDGKLRLIKGGGGALLREKIVASASTRMIVIADESKVVDVLGAFKLPIEINPFGQVATRLAIEKTASRLGLAGEIVVRSSGDGVFMTDGGHLILDASFGRIPDADALAVELNAIPGVVEHGLFIDVASMAIIAGPEGARTLTAS

SEQ ID NO: 8207 - protein, 503 aa, Pseudomonas putida KT2440
MRYPMKDSSDTHPNHLPDSCYGLFIDNQWVTAEYGETLDIINPANGKILTNIPNATAADVDRAVQAAQRAFVTWRTTSPAERANALLKIADLLEADADRFAVLETLDVGKPIRESRSVDIPLAIDHFRYFAGVIRSQSDEAVMLDEQTLSIALSEPLGVVGQVIPWNFPLLMAAWKIAPAIAAGNTVVIKPSELTPVTILELAKIFAKVLPAGVVNIVTGLGTTVGQALLDHPDLRKLAFTGSTRVGELVANAAAKKIIPATLELGGKSANIVFPDANWDKAVEGAVLAILWNQGQVCESGARLFVHESIYERFLAELKHKFEAVRVGDPLNPDTMMGAQVSKTQMERILGYVDIAKEEGAEVLIGGGRLTGADYDAGFFIQPTILVGVRNDMRVAYEEIFGPVLCVIPFKDEAEVIAMANDSEYGLAGAVWTQDINRALRVARAVETGRMWVNTYHEIPAHAPFGGYKKSGLGRETHKSMLEAYSQKKNIYVSLNEAPLGLF

SEQ ID NO: 8208 - protein, 352 aa, Amycolatopsis methanolica
MTSTTFRRSDQMRVGVLTGGGDCPGLNAVIRAVVRKGIEAHGWEIVGFRSGWRGPLTGDSRPLGLDDVEEILIRGGTILGSSRTNPYKEEGGVEKIRAVLADQGVDALIAIGGEDTLGVAKKLTDDGIGVVGVPKTIDNDLAATDYTFGFDTAVHIATEAIDRLRTTAESHYRAMVVEVMGRHAGWIALHAGLAGGANVILVPERPFSVEQVVEWVERRFEKMYAPIIVVAEGAVPEGGAEVLRTGEKDAFGHVQLGGVGTWLADEIAERTGKESRAVVLGHTQRGGTPTAYDRVLATRFGLHAVDAVADGDFGTMVALRGTDIVRVKLAEATAELKTVPPERYEEAEVFFG

SEQ ID NO: 8209 - protein, 222 aa, Physalis peruviana
MVRQKIQIKKIDNLTARQVTFSKRRRGLFKKAQELSTLCDADIGLIVFSATGKLFEYSSSSMMQLIEKHKMQSERDNMDSVEQLQSSNLQSEKKTHAMLSREFVDKNRELRQLHGEELQGLGLEELMKLEKLVEGGISRVLKIKGDKYMREISSLKKKEAQLQEENSQLIHQSQARLNEGGQNVIEQGHSADSIANNLSLVNSHQDYDDSDTSLKLGLAYPY

SEQ ID NO: 8210 - protein, 443 aa, Zea mays
MEDAMAADGKSVLQGRYELGRVLGHGNFGRVHAARDLRTGRSVAVKVVAKDKLERAGMAEQIKREIAVMKMVSHPNIVELHEVMATRSKIYLALELVRGGELFSRIARAGRVREDVARCYFRQLVAAVDFCHGRGVFHRDLKLENLLLDEVGNLKVADFGLSALAGHARSDGLLHTACGTPSYVAPEVLGGKGYDGAKADLWSCGVILYVLLVGSLPFHEDNLMVMYRKMQRGEFLCPPWVSADARKLIGELLDPDPSTRITVARLVETPWYRKPLPVLPPLNLKEPTPDARRATSDKEEPEVLNAFHLISFSEGFDLSPLFDQGRGGGVGRSSAGGIRFVTREAASSVVSRLESLVTGRGANMRVTKSGSRGVRLEAVSRGRSGARLAVAAEIFSVAPSVLLVDVKKDGGDTMEYRSFCSEELRPALKDIVWASSQDTPGAA

SEQ ID NO: 8211 - protein, 222 aa, Physalis peruviana
MVRQKIQIKKIDNLTARQVTFSKRRRGLFKKAQELSTLCDADIGLIVFSATGKLFEYSSSSMMQLIEKHKMQSERANMDSLEQLQSSNLQSEKKTHAMLSREFVDKNRELRQLHGEELQGLGLEELMKLEKLVEGGISRVLKIKGDKYMREISSLKKKEAQLQEENSQLIQQSQARLNEEGQNVIEQGHSADSIANNLSLVNSHQDYNDSDTSLKLGLAYPY

SEQ ID NO: 8212 - protein, 506 aa, Zea mays
MASPFSVPSLIMEEEGRFEAEVAEVESWWGTERFRLTKRPYTARDVVLLRGTLRQSYASGEMAKKLWRTLKAPARVYHDRKQREARMSLPRAERARAPYVDFLKPIIADGDTGFGGATATVKLCKLFVERGAAGVHLEDQSSVTKKCGHMAGKVLVAVSEHVNRLVAARLQFDVMGVETVLVARTDAVAATLIQTNVDARDHQFIVGATNPGLRGQSLAAVLSAGMSAGKSGRELQAIEDEWLAAAQLKTFSECVRDAIAGLGVAAQEKQRRLQEWDRATGGYDRCVSNDQARDIAASLGVTSVFWDWDLPRTREGFYRFRGSVAAAVVRGRAFAPHADVLWMETSSPNVAECTAFAEGVKAACPEAMLAYNLSPSFNWDASGMTDAEMAAFIPSVARLGYVWQFITLAGFHADALVTDTFARDFARRGMLAYVERIQREERINGVETLEHQKWSGANFYDRVLKAVQGGISSTAAMGKGVTEEQFKDPRPATGSSGLQVMAKSRI

SEQ ID NO: 8213 - protein, 239 aa, Solanum macrocarpon
MAREKIKIKKIDNITARQVTFSKRRRGLFKKAEELSVLCDADVALIIFSATGKLFDFASTSMKDILGKYKLQSASLEKVEQPSLDLQLENSLNMRLNKEIADKTRELRQMRGEELEGLSLEELQQIEKKLEAGFNRVLEIKSTRIMGEITNLQRKGAELMEENKQLKQKMEIMKKGKLPLVTEMVMEDGQSSESIITSNNVCSSNSGPPPDQDDSSKIGGNAVEDDCSITSLKLGLPFS

SEQ ID NO: 8214 - protein, 176 aa, Rhodobacter sphaeroides 2.4.1
MTVRPHLALAFACLAGPALAAGPPPVTFDSIDGGQIRLDELRTAGPVLVVNTASLCGFTPQYDDLQALWDRYRDAGLTVLAVPSNDFKQELDDAGAVRDFCATNFDLTLPMTTITPVTGAEAHPFYRWLAEEHGVEPRWNFHKVLIDRDGDLVASWSSPVRPTDREIVGRIEALLP

SEQ ID NO: 8215 - protein, 178 aa, Oenococcus oeni
PIVYDPTIADTIENYSELFVEPQGAAFLDINHPENIQSTLKNAANGRDIKLLVVSDAEGILGIGDWGVQGVDIAVGKLMVYTVAAGIDPSTVLAVVIDAGTNNEKLLKDPMYLGNKFNRVRGDKYYDFIDKFVNHAESLFPNLYLHWEDFGRSNASNILNSYKDKIATFNDDIQGTGI

SEQ ID NO: 8216 - protein, 420 aa, Thermus thermophilus HB27
MGPLLVWHRGDLRLHDHPALLEALARGPVVGLVVLDPNNLKTTPRRRAWFLENVRALREAYRARGGALWVLEGLPWEKVPEAARRLKAKAVYALTSYTPYGRYRDAKVQEALPVPLHLLPAPHLLPPDLPRAYRVYTPFARRFLGVEAPLPAPEALPKGPEEGEIPREDPGLPLPEPGEEAALAGLRAFLEAKLPRYAEERDRLDGEGGSRLSPYFALGVLSPRLAAWEAERRGGEGARKWVAELLWRDFSYHLLYHFPWMAERPLDPRFQALPWQEDEALFRAWYEGRTGVPLVDAAMRELHATGFLSNRARMNAAQFAVKHLLLPWKRCEEAFRHLLLDGDRAVNLQGWQWAGGLGVDAAPYFRVFNPVLQGERHDPEGRWLKRWAPEYPSYAPKDPVVDLEEARRRYLRLARDLARG

SEQ ID NO: 8217 - protein, 392 aa, Prochlorococcus marinus subsp. marinus str. CCMP1375
MEQKAIDNQNDPCNMVLKPGLEGVPVTQSAICDINGLKGELKYRGYSIAELAAKSSFLETTYLLIWGDLPSSKQLREFEDAIQMHRRLSFRVRDMMKCFPATGHPMDALQSSAASLGLFYSRRAIDNPQYIYDAVVRLIAKIPTMVAAFQLIRKGQDPIQPRDDLPYSANFLYMLTEREPDPLAARVFDRCLILHAEHSLNASTFSARVTASTLTDPYAVVASAVGTLAGPLHGGANEDVIAMLEEIGAPENARNYLKQAIDQKSKIMGFGHREYKVKDPRATLLQGFAEDLFARFGKDEMYDVARSVEEEASPLLGPRGIYPNVDFYSGLVYRKLGIPRDLFTPIFAISRVAGWLAHWREQLSANRIFRPTQIYTGKKTRAWCALEERNKN

SEQ ID NO: 8218 - protein, 178 aa, Lactobacillus hilgardii
PVVYDPTIADTIENYSHLFLDPQNAAFLSIDDQDDIEASLKNASAGCDIKLIVVTDGEGILGIGDWGVQGVDISVGKLMVYTAAAGVDPKSVLPVVLDVGTNRKELLADDLYMGNHTQRVTGDKYYNFVDKFVETAENLFPDMYLHFEDFGRSNAANILNKYKDNILTFNDDIQGTGI

SEQ ID NO: 8219 - protein, 323 aa, Oryza sativa (japonica cultivar-group); identical to SEQ ID NO: 347

SEQ ID NO: 8220 - protein, 178 aa, Leuconostoc mesenteroides subsp. mesenteroides
PVVYDPIVAESIEQYNEIYTNPQNAAFLSIDHPENIESSLKSVADGRDIELVVVTDAEGILGMGDWGVNGVDIAVGKLMVYTAAAGIDPATVLPVSIDAGTNNKILLENPLYLGNKHERIAGEKYLEFIDEFVTAEQKLFPASLLHWEDFGRSNAQVILDKYKDSIATFNDDIQGTGI

SEQ ID NO: 8221 - protein, 177 aa, Lactobacillus plantarum
NPVVYDPVVADSIEQYNELFLDPQNAAFVSVDAPEDIEATLKNARGRRDIRLVVVTDAEGILGMGDWGVNGVDIAIGKLMVYTAAAGIDPSQVLPVSIDAGTNNQKLLDDPLYLGNRHKRVSGEQYYDVIDKFVAAEQQLFPDSLLHFEDFGRDNAQVILDKYKDQIATFNDDIQGT

SEQ ID NO: 8222 - protein, 102 aa, Triticum aestivum
  unsure (1)..(102): unsure at all Xaa locations
MAPTVMASSATSVAPFQGLKSTAGLPVSRRSNXLALGSVSNGGRIRCMQVWXPSRGIKKFETLSYLPPLXAREGLLKQVDYLIRSKWXCPCLQFNKVGFIFP

SEQ ID NO: 8223 - protein, 201 aa, Prochlorococcus marinus subsp. marinus str. CCMP1375
MTAQASNIVWHKASVDRESIEKERGHKSVIIWFTGLSGSGKSTLANALNVALFKKGLATYVLDGDNIRHGLCNDLGFSDSDREENIRRIGEVAKLFLDAGVIVLTAFVSPFRSDREKARKLVKENDFLEIYCAANLDICETRDTKGLYAKARAGEIKDFTGISSPYEEPENPDLKIDTGLKDIDQCVEEVISKLIELNLVK

SEQ ID NO: 8224 - protein, 390 aa, Mycobacterium avium subsp. paratuberculosis str. k10
MLPAGSVRPRAGCENFPMTVVPENFVPGLEGVVAFTTEIAEPDKDGGALRYRGVDIEDLVSQQVTFGDVWALLVDGKFGHGLPPAEPFPLPIHTGDVRVDVQAGLAMLAPIWGYKPLLDTDDATARDQLARASVMALSYVAQSARGIYQPAVPQRVIDECETVTARFMTRWQGEPDPRHIEAIDAYWVSAAEHGMNASTFTARVIASTGADVAAALSGAIGAMSGPLHGGAPARVLPMIEEVERTGDARGLVKKILDSGDKLMGFGHRVYRAEDPRARVLRATAERLGAPRHEVAVALEQAALAELRERRPDRAIETNVEFWAAVILDFARVPANMMPAMFTCGRTAGWCAHILEQKRLGKLVRPSAIYVGPGPRSPESVEGWDRSLTNA

SEQ ID NO: 8225 - protein, 161 aa, Pediococcus parvulus
IADTIENYSDLFIQSQNAVFLSIDDPDSMKASLKNAADGRDIRLIVVTDAEGILGIGDWGTNGVDISVGKLMVYTAAAGIDPSQVMPVVLDVGTNNQDLLKNPMYLGNRHERITGDRYYKFVDQFVNTAEDLFPKLYLRFEDFGRDNAANILNKYKDQITT

SEQ ID NO: 8226 - protein, 431 aa, Mycobacterium avium subsp. paratuberculosis str. k10
MADTDDIATLKYPGGETDLEIVSATEGADGIALGSLLSKTGYTTFDNGFVNTASCKSAITYIDGDAGILRYRGYPIEQLAEKSTFLEVSYLLIYGELPDKDQLAEFTKRIQLHTMLHEDLKRFFDGFPRNAHPMPVLSSAVNALSAYYPDSLDPMDTEDVELSTIRLLAKLPTIAAYAYKKSVGQPFLYPDNKLSLVENFLRMTFGLPAEPYQADPEVVRALDMLLILHADHEQNCSTSTVRLVGSSQANLFTSISGGINALWGPLHGGANQAVLEMLEKIRQSDDDVSEFVRKVKNREAGVKLMGFGHRVYKNYDPRARIVKEQADKILAKLGGDDDLLDIAKQLEEAALTDEYFIERKLYPNVDFYTGLIYRALGFPTRMFTVLFALGRLPGWIAHWREMHDEGDSKIGRPRQIYTGYTERDYVTIDAR

SEQ ID NO: 8227 - protein, 378 aa, Weissella paramesenteroides
MNRVLKVHKSHTGVLDIKADISIKTPDDLSEAYTPGVSGIAKMIAEDEALKNVYTMSGKLIPIITDGSAVLGLGNIGPAAGLPIVEGKALIYKEFSGVNAIPMALNQVDVDEFVETIKTMAPSFAGIHLEDIAAPRVFEIEKRLNEELDIPVYHDDQTGTAVVVLAALINAAKVVNKPLKDLKVVINGMGAAGVATAKILLASGMKNLTLVDIHGVIRADDNDYNEYQRELATAVNQVDGRSLDDVIDNQDVFIGLSDANVLSKEQVTRMAQDAIVFALANPVPEILPEEAHEGGATITATGSSQWANQVNNVLVFPGLFKGLLATDIKKVELSLQVKLAEGLAQMVTTPTADHIVPRVFDDGVVDAVSNAVIAYAKA

SEQ ID NO: 8228 - protein, 128 aa, Brassica napus
  unsure (1)..(128): unsure at all Xaa locations
MADSDNDSGGHKDGGSASSREQDRFLPIANVSRIMKKALPANAKISKDAKETVQECVSEFISFVTGEASDKCQREKRKTINGDDLLWAMTTLGFEDYVEPLKVYLXKYREVEGERTTTGKQVDKEGGA

SEQ ID NO: 8229 - protein, 310 aa, Hordeum vulgare
MKTFLTFVLLAMVMSIVTTARQLNPSSQELQSPQQSYLQQPYPQNPYLPQQPFPVQQPFHTPQQYFPYLPEELSPQYQIPTPLQPQQPFPQQPQQPLPRPQQPFPWQPQQPFPQPQQPIPYQPQQPFNQQPQQIISQQPQQPFPQQPQQPFPQPQQPFPWQPQQPFPQPQQPFPLQPQQPFPWQPQQPFPQPQQPIAHQPQQPFSFSQQPQQPFPLQPQQPFPQQPQQPFPQQPQQIIFQQPQQSYPVQPQQPFPQPQPVPQQRPQQASPLQPQQPFPQGSEQIIPQQPQQPFPLQPHQPYTQQTIWSMV

SEQ ID NO: 8230 - protein, 335 aa, Glycine max
SSQLRRPPPEAEALTDEIEKESQYVEEVFRIKDIFLNYEEESDSVLFDSLRRLQLMELTVDLLKATEIGKAVNPLRKHGSRDICQLARTLIDGWKQMVDEWVKDTTAIAGSEGTPDSVNPSVVDDEEGLPSPPMDEGALFAAPTGSMELSQFFDGMDDDGNPQHSGEFIKNHEHGRRPSLNSQNTAKRKPQASNEANIIAKDSKGQQAKKNEAAVRPNKSVIADSGPSRPPKSTMQKKGNIEPKMQQNIVKSAIPRNPHIHQLDKPKCSDDAAVHVKLEATKRKLQERYQQAEKAKRQRTVQVMELHDLPKQGIGHRNPHVKPGNHKRQWGHGRR

SEQ ID NO: 8231 - protein, 120 aa, Triticum aestivum
  unsure (1)..(120): unsure at all Xaa locations
MAPTVMASSATSVAPFQGLKSTAGLPVSRRSNGASLGSVSNGGRIRCMQVWPIEGIKKFETLSYLPPLSTEXLLKQVDYLIRSKWXPCLDSASWXIFREHNALLGTTMAYWHVELPISVH

SEQ ID NO: 8232 - protein, 359 aa, ASPERGILLUS NIDULANS FGSC A4
MSSQTPTAQNLSFVLEGIHRVKFEDRPIPKLKSPHDVIVNVKYTGICGSDVHYWDHGAIGQFVVKEPMVLGHESSGIVTQIGSAVTSLKVGDHVAMEPGIPCRRCEPCKAGKYNLCEKMAFAATPPYDGTLAKYYTLPEDFCYKLPESISLPEGALMEPLGVAVHIVRQANVTPGQTVVVFGAGPVGLLCCAVAKAFGAIRIIAVDIQKPRLDFAKKFAATATFEPSKAPATENATRMIAENDLGRGADVAIDASGVEPSVHTGIHVLRPGGTYVQGGMGRSEMNFPIMAACTKELNIKGSFRYGSGDYKLAVQLVASGQINVKELITGIVKFEDAEQAFKDVKTGKGIKTLIAGPGAA

SEQ ID NO: 8233 - protein, 334 aa, Phytophthora infestans
MAASPNKKLREASQLDQLKQFTTVVADTGDFEQINKYKPQDATTNPSLLFKAAQMEQYSALVDDAVSYGKGLSADLSEKERLGYVIDKLSVNFGLEILKVVPGYVSTEVDARLSFDTESTIARAHRIIDLYEKAGIKKDRILIKIASTWEGIQACKHLQKEGISCNMTLLFGFAQAVGCAEAGATLISPFVGRILDWHKAKTGKSSYESHEDPGVVSVTKIYQYYKKYDYKTIVMGASFRNTGEITELAGCDRLTISPALLEELTKSTATLAKKLDAETAGKAYTGEKLSYDEKDFRLSMNEDAMATEKLAEGIRGFSADIVKLEQILKTKLGA

SEQ ID NO: 8234 - protein, 205 aa, Erwinia carotovora subsp. atroseptica SCRI1043
MSLRHSPTDDNVVWHAHNVTRESREKLRGHQGVVIWFTGLSGSGKSTLAGALEQALHQRGVSTYLLDGDNVRHGLCRDLGFTDDDRRENIRRVGEVAKLMVDAGLVVLTAFISPHRAERKMVQDLLGEGQFIEVFVDTPLATCEARDPKGLYKKARAGELRNFTGIDSAYEAPEAPDSHLDGEQFVTNLTDQLLDLLGKRAIIKL

SEQ ID NO: 8235 - protein, 511 aa, Zea mays
  unsure (1)..(511): unsure at all Xaa locations
MGAFAKEEHQFLAELGLAQRNPGAFACGAWGGSGPTVTSTSPTNNQVIAEVVEASVHDYEEGMRACFDAAKTWMAIPAPKRGEIVRQIGDALRAKLHHLGRLVSLEMGKILPEGIGEVQEIIDMCDYAVGLSRQLNGSIIPSERPNHMMMEVWNPLGVVGVITAFNFPCAVLGWNACIALVCGNCVVWKGAPTTPLITIAMTKIVASVLEKDNLPGAIFTSFCGGTEIGQAIALDIRIPLVSFTGSTRAGLMVQQQVSARFGKCLLELSGNNAIIVMDDVDIQLAVRSVLFAXAVGTAGQRCTTCRRLILHENIYQTFLDQLVEVYKQVRIGDPLEKGTLLGPLHTPASKENFLKGIQTIKSQGGKILFGGSAIESEGNFVQPTIVEITPSAPVVKEELFGPVLYVMKFQSLKEAIEINNSVPQGLSSSIFTKRPDIIFKWXGPHGSDCGIVNVNIPTNGAEIGGAFGGEKATGGGREAGSDSXWKQYMRRATCTINYGSELPLAQGINFG

SEQ ID NO: 8236 - protein, 170 aa, Zea mays
  unsure (1)..(170): unsure at all Xaa locations
MAPTVMMASSATAVAPFQXLKSAASLPVARRSTRSLGNVSNGGRIRCMQVWPAYGNKKFETLSYLXPLSTDDLLKQVDYLLRNGWIPCLEFSKLGFVYRENSTSPCYYDGRYWTMWKLPMFGCTDATQVYKELQEAIAAYPDAFHRVIGFDNVRQTQCVSFIAYKPPGSE

SEQ ID NO: 8237 - protein, 447 aa, Methanococcoides burtonii DSM 6242
MTDIGIIAVGGYNEMGRNMTAIRVDEDIIIVDMGLRLDRVQIHEDVEIDKMHSLELIEMGAIPDDTIMKQVNGNVAAIVCTHGHLDHIGAIPKLAHRYTAPIIGTPYTAALIKQQIESERKFGVKNKIIPIEAGGTYQINDDVSIELIRVQHSIIDAVFVAVHTPVGAVLYACDFKLDRTPTLGEAPDFERLRELGKEGVICMIVESTNANRKGKTPSEQIAHDMVRDVLLGTEESDVGMIVTTFASHIARINSIIQVAGEMGRIPVLMGRSMDKYVVTAKNMGYIDFPKNVEIYGKRKDIDRAFKKIMSEGKEKYLPIVTGHQGEPGAILSRVASGDTPFEVESGDRIIFSANIIPSPMTQANRYALETKLKMKGARIYDDVHVSGHAYREDHWELLRMINPEHVIPAHGNIGMHSAYIEMAEDAGYILGDTVHMLRNGEELYIEE

SEQ ID NO: 8238 - protein, 250 aa, Raphanus sativus
MTKNYPAVSEEYQKEIEKCKRKLRGLIAEKNCAPIMVRLAWHSAGTFDCASRTGGPFGTMRFDDELAHGANNGLHIALRLLEPIREQFPTISHADFHQLAGVVAVEVTGGPEIPFHPGREDKPQPPPEGRLPDATKACDHLRQVFLKQMGLTDQDIVALSGAHTLGRCHKDRSGFEGAWTSNPLIFDNSYFKELLSGEKEGLLQLPSDKALLDDPVFRPLVEKYAADEEAFFADYAEAHLKLSELGFADA

SEQ ID NO: 8239 - protein, 183 aa, Xanthomonas axonopodis pv. citri str. 306
MSQTLYDIPVTRIDGQPTTLADYRGKVLLVVNVASKCGLTPQYEGLEALYRDKRAQGLEVLAFPANDFNGQEPGSEAEIAQFCQLTYDVTFPMFAKIAVAGDQAHPLYGALTSTHPHTTGEGPMREKLAGYGIAPNPAPGVVWNFEKFLIGRDGKIIDRFAPDIPADDARLRAAIDAALATRS

SEQ ID NO: 8240 - protein, 249 aa, Physalis peruviana
MAREKIKIKKIDNITARQVTFSKRRRGLFKKAEELSILCDADVALIIFSSTGKLFDFSSSSMKDILGKYKLQSANLDKVDQPFLDLQLENSLNVRLRKQVADKTRELRQMKGEELEGLSLEELQQIEKRLEAGFNRVLEIKGTRIMDEIANLQRKGAELMEENKKLKQKMEMMKLGKLPLLTDMDCMVMEEGQSSDSIITTNNVCSSNTGPPPEDDSSNASLKLGCNNGLAPVDDDCSITSLKLGLPLS

SEQ ID NO: 8241 - protein, 464 aa, Deinococcus radiodurans R1
MPGKLSSLNEGRWPQRKTPPHGGRGGPDSHSRSDTMTPTPKTPAEILEKTWQTEERWQGIKRNYTAEDVVRLRGSLPIEYTLAKHGANKLWQQMKEMPFVNALGALTGNQAMQQVKAGLKAIYLSGWQVAGDANNAGQMYPDQSLYPASSVPDVVKRINNTLRRADQIQTSEGKNDIDYFVPIVADAEAGFGGPLNAFELMKAMIEAGAAGVHFEDQLASEKKCGHLGGKVLVPTSQFIRTLNAARLAADVSGVPTVLIARTDADAANLLTSDVDDNDKPFCTGERTPEGFFYVKPGIDQAISRALAYAPYADVIWCETSVPNLEDAKKFADAVHAQFPGKLLAYNCSPSFNWKKNLDDETIAKFQVELGKMGYKFQFITLAGFHALNMSMFDLAYGYARKQMSAFVELQEREFAAQERGFTAVRHQREVGTGYFDLVSQAAGGGQSSTTALAGSTEAEQFAHH

SEQ ID NO: 8242 - protein, 247 aa, Physalis peruviana
MAREKIKIKKIDNITARQVTFSKRRRGLFKKAEELSILCDADVALIIFSSTGKLFDFSSSSMKDILGKYKLQSANLDKVDQPFLDLQLENSLNVRLRKQVADKTRELRQMKGEELEGLSLEELQQIEKRLEAGFNRVLEIKGTRIMDEIANLQRKGAELMEENKKLKQKMEMMKLGKLPLITEMECMVMEEGQSSDSIITTNNVCSSNTGPPPEDDSSNASLKLSCNNGLAPVDDDCSITSLKLGLS

SEQ ID NO: 8243 - protein, 107 aa, Schizosaccharomyces pombe
MEDEMQIDKKEVEIEQKPPRFEIKKWNAVALWQWDIVVDNCAICRNHIMDLCIECQANTDSAAAQECTVAWGTCNHAFHFHCISRWLNTRNVCPLDNREWEFQRYGH

SEQ ID NO: 8244 - protein, 132 aa, Brassica napus
  unsure (1)..(132): unsure at all Xaa locations
WXSSMLSSAAXVTSPXQATMVAPFTGLKSSAXFPXHPAKXTTNITSXASNXRKELTCMKXXPPPXKXKVXNLSYXPDLTEIELXXEVEYPPPRGFPWVPWKGFPGSGKGLGFGKGENFPPFGRPQRGPKGKG

SEQ ID NO: 8245 - protein, 1401 aa, Schizosaccharomyces pombe
MGLEHTFYPAEDRFEPLLEHSEPVNFVPKENAKSYVRQGFASPHQSLMDNLVDSTESTKRSENFVSHIPLTPSHSGQSEKLMSTRTSHSPYISPTMSYTNHSPANLTRNSSFNHQHYSTTLRSPPSMRGRGIDVNSSHYPHISRPRTSSDSQKMYTRAPVDYYYIQENPYFNNIDQDSISDKSLPSTNQSLHHSEEDTESDNDFSESIHPEFDIDVFYKVSNILYDESDLQDPEKRERLEWHSMLSSVLKGDVMQTEKRRLRLTEPDGHSGTYISEVWLGLQAWLHGRLNADQAEVIRKSREGVEPVLREVIDFQIQDEETTKPPLEQVTEILEKVEQCKQFYISSREMEENVPLSASKEFNYKLNALISWSNVMESIQVETLVLQKWVGNDEFDLTMRTPQFNYDGVENTSSFVERIFRQSGLQRTFEQRTLTTLNRIIHQAKQTISENAQAFEEMKLPTYEDKLLPLVRFPIKLLEEALRLRLAYAKKIKGPNFLIVDSMLDDFKIALSVAVRIKREYIKIASPSPGWSLPTNVDEDYDNVLLDSLKFYFKLLTLKLSSGNKNLYFKEIDFLENEWAFLNEHIYWINGGDIHMAGQFSYLSNSLLLNVHRYVESHLNGPTERTAASLTNWYSTLLKNTQIRFRKILRFSETLNSRFENASDFVISEGHLPDLVNRLSTTGHFLAYTANLERDGVFVIADHTLSENPEALKALLFSKDISNLETIQQNCSYVLILCPVHPIVWKGRIEKVDVPDFSVDLKTNRVRIIASNKREHLQAAKSVFQSISGDLVTLAVECRSSITRVYKEFIRLSKLCMRISSTVVDCVSAVREACSGVNCHDLIYHVFSFAAEFGQRILRFLSFDSYWQTKLKRKITSLAVEWISFICDECDLMDRKTFRWGVGALEFLMLMIRGNNILLIDDAMFLKIREKVGKSMAFLLTHFDVLGAKSKVAAKLQRESTEVSSSPRLTSFGDVEEEALSIQLLQKETMLRIDELEIERNNTLLERLAIGHVLDDSVFRNRDFIKLASSFSNITIRWQQGHFVRSGMFGDVYTGVNMETGDLLAVKEIKLQDSRTFRSTVDQIHNEMTVLERLNHPNVVTYYGVEVHREKVYIFMEFCQGGSLADLLAHGRIEDENVLKVYVVQLLEGLAYIHSQHILHRDIKPANILLDHRGMIKYSDFGSALYVSPPTDPEVRYEDIQPELQHLAGTPMYMAPEIILGTKKGDFGAMDIWSLGCVILEMMTGSTPWSEMDNEWAIMYHVAAMHTPSIPQNEKISSLARDFIEQCFERDPEQRPRAVDLLTHPWITDFRKKTIITMPPATITKKTSLSHTITEEKTAQLLAGRHDDSKAETDSLAASYKEESALPVASNVGLRQPNELRIDSINLPPAIVTPDTINYSVD

SEQ ID NO: 8246 - protein, 229 aa, Oryza sativa (japonica cultivar-group)
MGSRLGRRVIHFANLPLKLMLPPAPLSSVQEFAVKTVPSASKVDIRRCLESMYGFSVAEVRTLNMEGKKLRRGPFLAAKPDYKKAYVTLRAPLPVSPDLFPIGLVLGERERKASAAAARRKAVEGAEVEGEGKGKHWMEDEKVGFSRAGRGKVVYGNPGRLGKKRNGGTKVKDRAGEEVGKFPWSGTRLATEKKPARKQQYAPKKKGIVLKQKSWKGSVHRQPKKKVEA

SEQ ID NO: 8247 - protein, 321 aa, Arabidopsis thaliana
MGEPKDSLALFLCHESESSLNEDDDETIERSDKQEPHFTTTIDDEDYVADLVLKENLRFETLPSKTTSSSDRLIAIDWILTVHKNKIWVPTSNSLHCNLILRSVSPQKIHRYETWAMRLLSVACLSLAAKMEERIVPGLSQYPQDHDFVFKPDVIRKTELLILSTLDWKMNLITPFHYFNYFLAKISQDNHSVSKDLVLLRSSDSLLALTKEISFTEYRQFVVAAVTTLLASSSTSSDIRLTREEIANKFGSISWWTSNENENVYLCYQRTLEIEERKHMTPPPEIAVSREPPASGSGAKRRLSFDDSDQSSPPAKRMRRL

SEQ ID NO: 8248 - protein, 455 aa, Glycine max
EKATGQEYACKYIAKRKLVTDDDVEDVRREIQIMHHLAGHPNVISIKGAYEDAMAVHVVMELCAGGELFDRIIQRGHYTERQAAELTRTIVGVVEACHSLGVMHRDLKPENFLFVNQHEDSLLKTIDFGLSVFFKPALKTDDLSLPGDIFNDVVGSPYYVAPDVLRKRYGPEADVWSAGVILYILLSGVPPFWAENEQGIFEQVLRGDLDFSSDPWPSISESAKDLVRKMLVRDPRRRLTAHQVLCHPWIQVDGVAPDKPLDSAVLSRLKQFSAMNKLKKMALIIIAESLSEEEIAGLKEMFKMIDADNSGQITFEELKAGLKRVGANLKESEIYDLMQAADVDNSGTIDYGEFLAATLHRNKIEREDNLFAAFSYFDKDGSGYITQEELQQACDEFGIKDVRLEEIIKEIDEDNDGRIDYNEFVAMMQKGNLPAVGKKGLENSFSIKFREALKL

SEQ ID NO: 8249 - protein, 146 aa, Pediococcus acidilactici
TIADTIENYSELYVQSQNATFLSIDDPDNMETALKNAADGRDIRLIVVTDAEGILGIGDWGTNGVDISVGKLMVYTAAAGIDPSQVLPVVLDVGTNNEKLLKDPMYLGNRHERIKGDRYFEFVDQFVQTAENLFPNMYLHFEDFGA

SEQ ID NO: 8250 - protein, 175 aa, Triticum aestivum
NSPDGTYDAIIVDSSDPIGPAQELVEKPFFETIARALRPGGVLCNQAESMWLHTHLIQDMLSICCETFKGSVHYAWASVPTYPSGAIGFLLCAKEGPPVNFLAPINPIEKLEGAMTAGRDIRFYNTEMHRAAFVLPTFAKRELEAYGGSTRRAQEEKSAEPAKVAVAPHSEILTA

SEQ ID NO: 8251 - protein, 204 aa, Burkholderia fungorum LB400
MAVVAPLTPGTDVPETLVPVSATVVPTAVMRLLAWVTMLPTGVEEVPEVPEVPEVPEVPEVPEVPEVPEVPEVPEVPEVPEVPEVPEVPEVPEVPEVPEVPEVPEVPEVPEVPEVPEVPEVPEVPEVPEVPEVPEVPEVPEVPEVPEVPEVPEVPEVPEVPEVPEVPEVPEVPEVPEVPEVPDPEVPPSPPPPILGVLRVDPQP

SEQ ID NO: 8252 - protein, 476 aa, Ralstonia eutropha JMP134
MQQRDKLFINGKWVSPHGTGLIDVIHSTTEAVMGRIPEGSARDAEDAIQAARAAFDGWAATPPAERAGYIRKIAEGLKARTEELAQLIAGEVGMPIKLARAIQVGGPVYNWGQAAKLLEGFDFEEEVGNSLVVREPVGVVAAITPWNYPLNQITLKVAPALAAGCTVVLKPSEVAPLNAFVLAEVIAEAGLPPGVLNLVTGYGPVVGEVLASHPEVDMVSFTGSTRAGKRVSELASQSVKRVALELGGKSASVILDDADLPAAVKGTINACFLNSGQTCSAHTRMLVPRSRYDEVKAIAAKVVEGFTVGDPLQETTRLGPLISAVQKDRVMGYIRRGLEEGAELVAGGPDAPAGLEKGFFVKPTVLGNVEPRATVAQEEIFGPVLSIICYNTEEDAVRIANDSIYGLGGGVWAGDEARAVRVARRIRTGQVDINGGPFNMSAPFGGYKQSGNGREAGKYGLEEFLEYKSLQFKKPA

SEQ ID NO: 8253 - protein, 129 aa, Glycine max
  unsure (1)..(129): unsure at all Xaa locations
FLQLSFIARLPDVLKNLLESLQSVIDYAIQSGGFEFYFQGTYSVKCIQDRFLVKDFEKFNSPFRLGLEAGSKPELLXGMSCLLKSNPDALLICNGFKDAXYILLALAANXLALKTVIVEEQDEEGALIR

SEQ ID NO: 8254 - protein, 63 aa, Brassica napus
  unsure (1)..(63): unsure at all Xaa locations
CSGQEIYQQFSRRKKECSSRRHLDLASRGLCLMPISASYPVAAAAASAAEMNXHLTSGILHSR

SEQ ID NO: 8255 - protein, 213 aa, Glycine max
MALEVAVKAAVGAPNVLGDCPFSQRVLLTLEEKKIPYKLHLIDLSSKPEWFLGVNPEGKVPVVLFDGKWVADSDVIVGILEEKYPEPSLVTPPEFASVGSKIFGSFVSFLKSKDTNDGTEQTLVAELSALDEHLKAHGPYIAGEKVTAVDLSLAPKLYHLVVALSHFKNWNIPESLTHVHNYTKLLFSRESFEKTKPPKVEYVISGWAPKVNA

SEQ ID NO: 8256 - protein, 160 aa, Citrullus lanatus
IIAKGHYTERAAASLLRTIVQIVHTCHSMGVIHRDLKPENFLLLSKDEDSPLKATDFGLSVFYKQGEVFKDIVGSAYYIAPEVLKRRYGPEVDIWSVGVMLYILLCGVPPFWAESEHGIFNAILRGHIDFTSDPWPTISPAAKDLVRKMLNSDPKQRLTA

SEQ ID NO: 8257 - protein, 263 aa, Triticum aestivum
  unsure (1)..(263): unsure at all Xaa locations
NPEGWAATWRRVWPNPKVLQRVPFVPMXTEFPGMVXRPLGAFRSPAEYKYATLKGQGGLLHLIQLGSPFSGPXGEVPALGAGPRRCVWQFNFREFDDERDIFATDSIELLRHSGIDFRRNAERGVDARRFAELLMSSGVVLNDAVYWVTFHAGYDFGYLLKILTCNSLPDTQAGFFKLMKIYFPTVYDIKHLMKFCNSLHGGLNKLAELLDVERVGESHQAGSDSLVTSCAFWKLKDSFFAGSTEKYAGVLYGLNAENGVSAH

SEQ ID NO: 8258 - protein, 467 aa, Listeria monocytogenes str. 1/2a F6854
MTSVMWFRRDLRVSDNKALYHACKEDDLLLLFQVNPAQFITGSPSHQAFFASVAHFKQEVDKTALLQIMFGEPVECLKQLKETLPSWDKVYFNRDETGYGAERDEAAKTFFDEQEIEVQAFHDSYLHSAEEVKKSPTEYYKIFTPYYKKWREEIKETPFKVTLKADNIRKENLFPKYEEQFAEMTCDLPILDSGEKTANTRLANFIKHDVADYDKARDFPELDKTSHLSRYLRTGEISVRTIWQALQENEATEGRAIFEKELCWRDFYNMIYVSFPNQKNEPIQENYRFIEWENNREFFKAWQDGKTGFPLVDAAMRQLKETGWMHNRLRMVTASFLTKDLLIDWRFGEKYFQQMLIDYDPASNIGGWQWAASTGTDAVPYFRIFNPTTQSQKFDPTGKFIRKYVKELANLPDKYIHQPEKMSEIEQKEYGLLLGKDYPFPLIDHKERRKLAIARYEFSKEHYRGNI

SEQ ID NO: 8259 - protein, 459 aa, Schizosaccharomyces pombe
MTETVTTTSSDKSEKKNYLFYTSPNHRPPTVVRAEGVYLYLEDGTRIMDATGGAAVACLGHGNKEVIDAMHKQSEKVCYIHSMGFSNEPADKLANLLVSEHPDVFARAYFANSGSEAVETCLKLILQYWQLVGEKQRCHIIARKQGYHGNTLFALSVGGMKPRKQPYEGVFSHTTSHVSPCFEYRYKENGETTEEYVARLAKELEDEILRVGPEKVAAFVAETVSGACTGCATPVPGYFKAMRKVCDKYGVIFYLDEVMSGIGRTGTMHAWEQEGVTPDIQSIAKCLGGGYQPISGALVGHRIMNVFEQKDAAMAGFFTYQAHPIACSAALAVQTILRRDHLVERAAEMGKYLSEKLHETFDSHPNVGNIRGRGLFWGLEIVKDKATKECFPPEYKVGSLANKIGCEHGVFVYPGMGTIDGTRGDHVLLAPPYIITREQIDELVEALSKTITSTVAALP

SEQ ID NO: 8260 - protein, 343 aa, Listeria monocytogenes str. 4b F2365
MKAVVKTNPGYDQMELRDVEEPQVYGDKVKIKVAFTGICGSDIHTFKGEYKNPTTPVTLGHEFSGVVVEVGPDVTSIKVGDRVTSETTFETCGECIYCKERDYNLCSNRRGIGTQANGSFAEFVLSREESCHVLDERISLEAAALTEPLACCVHSALEKTTIRPDDTVLVFGPGPIGLLLAQVVKAQGATVIMAGITKDSDRLRLAKELGMDRIVDTLKEDLAEVVLGMTDGYGAERVFDCSGAVPAVNQGLPLTKKKGDFVQVGLFAEKKNAIDEESIIQREIAYIGSRSQKPSSWILALDLLANGKINTDKMITKVYGLDDWREAFEAVMAGNEIKVLVKS

SEQ ID NO: 8261 - protein, 350 aa, Listeria monocytogenes str. 4b F2365
MRAAVLYENNVIKAEQIDEATCGKDQVRVEVKAVGICGSDIHKMQTRWKYPLPAVMGHEFAGVVTEIGSEVTNVAIGDRVAGIPLEPCMECNYCKAGDFALCDNYRMVGSHFHGGFAENVVMKADNVISIGDLDFEEGAMIEPLAVSMHGVLGIQPRLGDTVIVFGIGTIGILVVQCLLLAGVKDIIAVDISDKKLADAREFGCKYTINPKNEDLKERVFAYTNGLGADIALECAGSKITQEQCLLVTKKKGKVGYLGIAYADVLLHEEAFENIFRRELTLKGFWNSYSAPFPGEEWRTSIEFVKQGRIKLKPLISHRYKLEETKEAFDMILSREHDYNKVMILPQKGDD

SEQ ID NO: 8262 - protein, 328 aa, Magnaporthe grisea 70-15
MAKTSIKLNSGYEMPLVGFGIWKVPVDKTAQAVYDAIKLGYRQIDGAYDYTNSKEAGEGVRRAIEEGIVKREDLFITSKLWNNYHKHEHAIEMAKHEVDTWGIGYLDLFLIHFPISLEYISHSKMPYPCFWPDREKSRSTPLQYTPVAETWAALESLVKTDSNPDGILRSIGVANFRAQLLTDLWGSAKIKPAVNQIEHHPYLVQPQLLAFLKDHGIAITAYSSFGPQSFVELDHPRVSKVEPLFTHPTIKAIADKHGRTGAQVLLRWATQRDIVVIPKSNNVDRLKQNLDCVSFDLSDDEVKQISDLDCGVRFNDPADLSPPIYIFD

SEQ ID NO: 8263 - protein, 205 aa, Triticum aestivum
  unsure (1)..(205): unsure at all Xaa locations
IRHQIXXXHQTFHHQPQQTYPHQPQQQFPQTQQPQQPFPQPQQTFPQQPQLPFPQQPQQQFPQPQQIPQQQQIPQQPQQFPQXQIPQQRGPQQHQMPQQPQQFPQQQFPQQHQSPQQQFPQQQFPQQQQFPQQQQLTQQQFPRPQQSPEQQQFPQQQFPQQPPQQFPQQQFPIPYPPQQSQEPSPYQQYPQQQPSGSDVISISGL

SEQ ID NO: 8264 - protein, 1122 aa, Burkholderia cepacia R18194
MMIKVWPDETHPTGHAMCMKGKAAPELVHSPNRVLYPMRRTRPKGAADPGWKRIGWEEALSEIAERLAYFKRENGAESVAFGVTTPSGTPMSDSIDWVERFVWLFGSPNICYATEICNWHKDSAHVFTFGCGMPTADYQQADLIVLWGNNPANTWLAQADAIAKGRRRGAKLIVVDPRPTPLAREADLWLRVNPGTDGALAMAIARQMIAIGNVDEPFVRRWTNGPLLVRADTGRFLRERDIDPHASGNRYALWNQTLDRLELVEEEAGTALSDLSMTGTRHVGITDSAGRCTQVECTPAFDLYARALAAYTPELASTITGIDAADIMKAAQMLHPGQGIAYHAWSGVGMHTNATQTERAIATLYALTGAFDTRGSNREWAKQPANAVSSYAMLNPGQRAKALGLAERPLGPPSQGWVTARDVYRAILDAEPYRVRALFAFGTNMVLSQADGGIAHNALCALDFHVHCDLFETPSSRYADILLPVNTPWEREGLRLGFEINERAVELVQLRQRMVPPRGESRADYDIVFDLAVRLGMKDRFFGGSIEAGWNHVLEPLGMDVALLRTHPEGIARPLTQYERRYASATPDGVRGFNTETLRVELYSEKLHRHGYPAVPQYVPPQHGLGEGVNDRRRFPYTLTSMKNGYYCHSQHRGLPSLRRRAPYPVAELNDALAAEHGIVDDDWFLVETTNGSARFKARIVPELAHDVIVAEYGWWQACDEIGMDALAVEGRNHSNFNRLVSAARLDPVSGSSPLRSVRCRIRPDPSTDPSRRAWKGRRDFVVSAIHEEASGVRTVTFRASDRGALPDYLPGQHVTVHVPALGDGGTTRAYSLTGAASEDDRRTYSISVRHQKGRTGEGVPFEGAMSSYIHGSLKVGDPVLLGAPAGTFIVPPASKQPVVMFAGGIGITPFISYLESIRDRGAQAPESRLFYANQNSGTHAFRERIERLKQRLPKLEVVNCYNQPHDEVLGRDYQIRGYLTADVVSDDLIQRRARFYLCGPEPMMQAITAGLIERGVPPFDIFKEAFRSPSRPALDPSKRFVVQFTRSRRVSTWTPRDGSLLSFAESLGVVMPSGCRVGQCESCAVKVVSGEVAHLSGHGPDEPDVCLACQAIPATDVAIDA

SEQ ID NO: 8265 - protein, 424 aa, Hordeum vulgare
MVVTVAATGPDTAETLHSTTFASRYVRDQLPRYRMPENSIPKEAAYQIISDELMLDGNPRLNLASFVTTWMEPECGKLIMDSVNKNYVDMDEYPVTTELQVCWEKFARYFEVELKEVKLTEGYYVMDPKKAVEMVDENTICVAAILGSTLTGEYEDVKLLNDLLVEKNKETGWNVPIHVDAASGGFIAPFLQPELEWDFRLPLVKSINVSGHKYGLVYPGVGWVIWRSKDDLPEELIFHINYLGADQPTFTLNFSKGASQIIAQYYQLIRLGFEGYKHIMENCKLNAAVLKEGIDATGRFDVLSKADGVPLVAIRLKDSTNFSVFDISENLRRFGWIVPAYTMPADAEHVAVLRIVIREDFNRSLAQRLLADINKIIGELDAHAVHAIKLSTAAAGGDGASKSAVDAATEAFKDLAGKKKAGVC

SEQ ID NO: 8266 - protein, 318 aa, Zea mays
  unsure (1)..(318): unsure at all Xaa locations
MLHGRELGPVHGGSRARIRLEPAPRRXRWVPLAYTDVATFTKDQEFLISNRASQVGFDYVEGQVQLSRSLVEGPKSTPFFSGADVARLAGLASRTGPAAIYYIEGAMYYTKDTAISVDKKMKALLDQLSFEPGFAFTKDVTFVQFLDRVREEERVLRSAGAWEVPHPWLNLFVPRSRILDFDDGVFKALLKDSNPAGIILMYPMNKDRWDDRMTAMTPATNDDDVFYAVSFLWSALSADDVPQLERWNKAVLDFCDRSGIECKQYLPHYTSQDGWRRHFGAKWSRIAELKARYDPRALLSPGQRIFPVPVEASGIASA

SEQ ID NO: 8267 - protein, 439 aa, Escherichia coli CFT073
  unsure (1)..(439): unsure at all Xaa locations
MEHLHMKTRTQQIEELQKEWTQPRWEGITRPYSAEDVVKLRGSVNPECTLAQLGAAKMWRLLHGESKKGYINSLGALTGGQALQQAKAGIEAVYLSGWQVAADANLAASMYPDQSLYPANSVPAVVERINNTFRRADQIQWSAGIEPGDPRYVDYFLPIVADAEAGFGGVLNAFELMKAMIEAGAAAVHFEDQLASVKKCGHMGGKVLVPTQEAIQKLVAARLAADVTGVPTLLVARTDADAADLITSDCDPYDSEFITGERTSEGFFRTHAGIEQAISRGLAYAPYADLVWCETSTPDLELARRFAQAIHAKYPGKLLAYNCSPSFNWQKNLDDKTIASFQQQLSDMGYKFQFITLAGIHSMWFNMFDLANAYAQGEGMKHYVEKVQQPEFAXAKDGYTFVSHQQEVGTGYFDKVTTIIQGGTSSVTALTGSTEESQF

SEQ ID NO: 8268 - protein, 195 aa, Methanocaldococcus jannaschii DSM 2661
MATGPTYRVKFRRRREAKTDYRKRLKLLLSRKPRLVARRTLNHCIAQIVLYDEKGDKTVVSAHSRELIKLGYKGHTGNLPSAYLTGYLLGKKALAKGYTEAVLDIGLHRATKGNAIFAILKGALDAGMEIPHGEEILPSEERIRGEHIKAYAEMLKEQDEERYKKQFSKYLEKGLEPEKLPEHFEEIKAKIDSMF

SEQ ID NO: 8269 - protein, 135 aa, Triticum aestivum
  unsure (1)..(135): unsure at all Xaa locations
MRDDPEDVDSRSIFVGNVDYSSSPEEIQAHFQSCGSINRVTILLDKFTGHPKGYAYVEFTEPSFVAQALVLNESVFKGRNLKVVPKRTNIPGMTRGKXRGGPRGRGYGGRGXTHQEESGYRGGFRGSRGRGYSPY

SEQ ID NO: 8270 - protein, 409 aa, Vibrio vulnificus CMCP6
MELTTTVSELRYALDTFFFLISGALVMWMAAGFAMLEAGLVRSKNTTEILTKNFCLYAIACTTYLVVGYNIMYVDNSEGGWLPSIGALIGSQAEGADHSLESDFFFQVVFVATAMSVVSGAVAERMKLWSFLLFSAILTAFIYPVEGYWTWGGGFLSAAGFSDFAGSGIVHMAGAAAALAGVLLLGARKGKYGKNGEVYPIPGSNMPLATLGTFILWFGWFGFNGGSQLMVSDFENATAVGQIFLNTNAAAAAGAITALLVCKTTWGKADLTMILNGALAGLVAITADPLSPSPLYAVAIGAVAGALVVFSIVGLDKLKIDDPVGAISVHGVCGFFGLMVVPISNGDASFLSQLFGAAVIFAWVFGASLAVWAVLKATIGIRVSEDEEMEGMDMHDCGVGAYPEFVTVK

SEQ ID NO: 8271 - protein, 348 aa, Deinococcus radiodurans
MRALSKQQPGEGIWMIETEVPTPGPNDLLIRIRKGSICGTDVHIYKWDDWASQTVPVPMVVGHEYVGVVAGMGSEVRGFEIGDRVSGEGHVTCGHCRNCRAGRRHLCRNTQGVGVNRPGSFAEYLVLPAFNAFKLPDDIPDDVAAIFDPFGNAVHTALSFDLVGEDVLITGAGPIGCMAAAVARHVGARNVVITDVNDYRLDLARQMGVTRAVNVAREDLWTVATQELDMHEGFDVGMEMSGSGPAFAQMVSVMNNGGKVALLGIPSGEVQIDWNAVIFKMLTIKGIYGREMFETWYKMAALIQSGLDLTPVITHHYGIGDFQQGFDAMLSGQSGKVILDWETEEQSA

SEQ ID NO: 8272 - protein, 235 aa, Solanum tuberosum
MAREKIKIKKIDNITARQVTFSKRRRGLFKKAEELSVLCDADVALIIFSATGKLFDFASTSMKDILGKYKLQSASLEKVDEPSLDLQLENSLNMRLSKQVADKTRELRQMRGEELEGLSLEELQQIEKRLEAGFNRVLEIKGTRIMDEITNLQRKGAELMEENKQLKHKMEIMKKGKFPLLTDMVMEEGQSSESIITTNNPDQDDSSNASLKLGGTTAVEDECSITSLKLGLPFS

SEQ ID NO: 8273 - protein, 127 aa, Desulfovibrio desulfuricans G20
MSDITKEQVVEFIAGMTVLELSEFIKELEEKFGVSAAAPVAAMAAAPAEAAAPAEEEKTEFDVILKSPGANKIAVIKVVRALTGLGLKEAKEKVDGTPSTLKEAVSKDDAEEAAKQLKEAGAEVEVK

SEQ ID NO: 8274 - protein, 352 aa, Sinorhizobium meliloti 1021
MSGAPTRTRFARLYGPRDLRLEVADVPAPGDGEVLLKMAAGGICGSDLHYYQDGGFGPVRVREPIIPGHEASGRVAVLGAGVSGLAIDDLVAVNPSQPCGTCRFCGEGLPVHCLDMRFLGSAMRLPHTQGMFRDWLVVPAVQCHPAGSQVSPGEAACAEPLAVCLHAAAQAGEIRGKKVLVTGAGPIGALVVAAARHAGADEIVVTDLADAALDRAKAMGATRIVNVHRDPAGLAAYEADKGKFHVAFECSAAEPALRGAVAAVRPRGTIVQVGVTGEITLPLHALVGKELRLVGSQRFDGEFALAVALISDRRIDVRPIISHQFPVDEAVRAFEQAGDRSAACKVQLTFLS

SEQ ID NO: 8275 - protein, 295 aa, Zea mays
MAGLSLQHPWAFTFGLLGNVISFMTFLAPTPTFYRIYKSKSTEGFQSVPYVVALFSAMLWIFYALIKSNETFLITINAAGCVIETVYVVMYFVYATKKGRMFTAKIMLLLNVGAFGAILLLTLLLFKGDKRVVMLGWICVGFSVSVFVAPLSIMRRVIQTKSVEYMPFSLSLSLTLSAVVWFLYGLLIKDKYVALPNILGFTFGVVQMVLYVVYMNKTPLPVADGKAAGKLPSAADEHVVVNVTKLSPGRLPPVTQMAAVPTKSCATEAAAPATLPSRDVVDVLVNRHSPAVHVT

SEQ ID NO: 8276 - protein, 184 aa, Pseudomonas aeruginosa PAO1
MKPRVLLSVLALAGLPLSGWAADCPELLQGQLTKLRSKESIDLCQRYAGKPLVVVNTASHCGFTPQFKGLEALYQRYKGQGLEVLGVPSDDFKQEAADTAETAKICYGNYGVTFAMTQPQHVRGDEAIPLFRQLAEQSGQAPRWNFYKYVVDRQGRVVAQFSSKTTPDDPQLQAAIEKAIASQP

SEQ ID NO: 8277 - protein, 107 aa, Zea mays
RTRGFFLSYFSLYFPHHLFLGLSLLLSLHFFFFLLLFFFLSLKSIPSNLFTKHSFHFHYTPHHKNKLSLTSSQILSTVTNLKAITMLYCLQLLHSHIGSHIPTTSLL

SEQ ID NO: 8278 - protein, 119 aa, Bartonella sp. Bb6966bgl
GPAHGGANEACLKMLQEIGSIKRIPEFIARAKDKNDPFRLMGFGHRVYKNYDPRAKIMQKTCHEVLKELNIQDDPLLDIAIELEKIALSDEYFIEKKLYPNVDFYSGITLKALGFPTEM

SEQ ID NO: 8279 - protein, 113 aa, Bartonella sp. Bb7700bgl
GPAHGGANEACLKMLQEIGSIKRIPEFIARAKDKNDPFRLMGFGHRVYKNYDPRAKIMQKTCHEVLKELNIQDDPLLDIAIELEKIALSDEYFIEKKLYPNVDFYSGITLKAL

SEQ ID NO: 8280 - protein, 433 aa, Methylococcus capsulatus str. Bath
MPLIFGVCCLVVAAAHMVPAARAAAGEFFNGLLGKRMTKSADVLFVLLGAIMVLAMHAGFAFLEVGTVRRKNQVNALVKILSDFAMSTIAYFFIGYELAYGVDFFDSALALTVDNGYGLVKFFFLLTFAAAIPAIVSGGIAERSKFNPQLAATFLLVGFVYPLFEGIAWNSNLGFQGWLQTRFGAQFHDFAGSVVVHAVGGWIGLAAVLLLGPRRGRYHRDGMIAAHPPSSIPFLALGAWILTVGWFGFNVMSAQNLNGISGLVAVNSLMAMVGGTLAALLAGRNDPGFVHNGPLAGLVAVCAGSDLMHPIGALAVGAVAGFLFVYLFTLTQNRWKIDDVLGVWPLHGLCGAWGGIAAGIFGQSALGGIGGISFMAQVLGTGLGVAIALAGGLAVYGAAKTLIGLRLTPEEEFDGADLTLHRISSSPEKEAGW

SEQ ID NO: 8281 - protein, 110 aa, Bartonella sp. Rr7684bgl
GGPAHGGANEACLKMLQEIGSVKRIPEFIARAKDKNDPFRLMGFGHRVYKNYDPRAKIMQQTCHEVLKELNIQDDPLLDIAIELEKIALNDEYFVEKKLYPNVDFYSGIT

SEQ ID NO: 8282 - protein, 471 aa, Blumeria graminis
MPTFGFLKKRKKVSLGHRDLDSPASTLSQPASPITPSTSRGLGEPIDTTSSKITSPGQKLGSNITKDHRGTRTTVEDLPSMTDVSHLQQAYRNLSQGSTASKSNLLTIHNLINPPQHDGAGQSKVMPEKHMNNKTERPVQGKAAVAQVRQTKGKYSLSDFEILRTLGTGSFGRVHLVQSKHNQRFYAVKVLKKQQVVKMKQVEHTNDERSMLQEVKHPFLITLWGTFQDSKNLYMVMDFVEGGELFSLLRKSQRFPNPVAKFYAAEVTLALEYLHKKDIIYRDLKPENLLLDRHGHLKITDFGFAKKVTDITWTLCGTPDYLAPEVVSSKGYNKSVDWWSLGILIFEMLCGYTPFWDNGSPMKIYENILKGRVKYPPYIHPDAQDLIQRLITADLTKRLGNLHGGAEGIKSHQWFAEVTWERLAKKDIDAPYVPPVKAGSGDASQFDKYPEETERYGQTGPDEHGSLFENF

SEQ ID NO: 8283 - protein, 252 aa, Prunus microcarpa
AHYKSEADVGNAIAEAIQSGLVKREELFITSKASNHGHVVEACKNSLKKLQLDYLDLYLVHYPLATKHSGVGTTASLLDENKVLDIDVTVSLETTWHDMEKTVDLGLVRSIGLSNYELFLTRDCLSYAKIKPQVSQFETHPYFQRESLVRFCKKHGVIPMAHTPLGGATANVKAFGSISPLEDPVLIGLAKKYQKSVAQIALRWNLERGTPVIPKSSKVERLKENLEVLNFKLEKEDIELINTIDKKSRTTL

SEQ ID NO: 8284 - protein, 183 aa, Pseudomonas syringae pv. tomato str. DC3000
MKIRFVSIPLLLLSMSGAVMAADCPPLLQGELPKLRAKENIDLCKRFAGKPLVVVNTASFCGFAPQFKGLEELSQRYKGQGLEVLGLPSNDFKQEAKDGEETAKVCYVNYGVTFTMTEPQAVRGDDATHLFKVLAEQSSAPRWNFYKYVVDRQGKVVANFSSMTKPDDPELIAAIEKAIASKP

SEQ ID NO: 8285 - protein, 252 aa, Prunus lusitanica
AHYRSEADVGNALAEAFETGLVKREELFITSKASNHGHVVEACKNSLKKLQLDYLDLYLVHYPLATKHSGVGTTASLLDENKVLDIDVTVSLESTWHDMEKTVSLGLVRSIGLSNYELFLTRDCLSYAKIKPQVSQFETHPYFQRETLVRFCRKHGVCPMAHTPLGGATANVKAFGSISPLEDPVLRALAKKYKKSVAQIALRWNLDRNTPVIPKSSKIERLKENLEVLNFKLEKEDIELINTIDKKSRTTL

SEQ ID NO: 8286 - protein, 199 aa, Colletotrichum trifolii
MAQPGVQSLKCVVTGDGAVGKTCLLISYTTNAFPGEYIPTVFDNYSASVMVDGKPISLGLWDTAGQEDYDRLRPLSYPQTDVFLICFSIVSPPSFDNVKAKWYPEIDHHAPNIPIILVGTKLDLREDPNTLESLRQKRMEPVSYDQALICAKEIKAHKYLECSALTQRNLKSVFDEAIRAVLNPRPVAQQKKKSKCTIL

SEQ ID NO: 8287 - protein, 252 aa, Prunus virginiana
AHYKSEADVGNALAEAFDTGLVKREELFITSKASNHGHVVEACRNSLKKLQLDYLDLYLVHYPLATKHSGVGTTASLLDENKVLDIDVTVSLESTWHDMEKTVSLGLVRSIGLSNYELFLTRDCLSYAKIKPQVSQFETHPYFQRETLVRFCRKHGVCPMAHTPLGGSTANVKSFGSISPLEDPVLHGLAKKYKKSVAQIALRWNLDRNTPVIPKSSKIERLKENLEVLNFKLEKGDIELINTIDKKSRTTL

SEQ ID NO: 8288 - protein, 57 aa, Zea mays
MPFTASDICKILLAIILPPVGVFLERGCGADFLINILLTILGYIPGIIHALYIIFKF

SEQ ID NO: 8289 - protein, 295 aa, Onion yellows phytoplasma OY-M
MKAFNWFPGHMKKTFDQIKNNLSLVDIVLVILDARIPLSSLNSQIFSLINQRQKPLLILLNKFSLTDPCKINNFIANYHKKQIPVLTIDAIKSPKLQEIYQKALTTIKAKNPLFKSRRIATQTPNIKAMIVGTPNVGKSTLINSFAQKKVLKTANLAGTTKRIQWIDIAKPNIQFLDTPGVLWHNFSDPRISLALALAGCFKDSILPLEKLGIHALCYLIKHYGTNLQKRFNLDQNDLSNPNLVDIIGQKRNIYTKNQKVDQSRVYQMLLQEIRQGNLGKLNFDLDVLSLFEKLF

SEQ ID NO: 8290 - protein, 275 aa, Gibberella moniliformis
MLEDPAHQDVARWGKDGDTFVVVENEKFTRSILPKHFKHSNMASFVRQLNKYDFHKVRQTNDSGSAANGANTLEFKHPNFRVGSKDDLDNIRRKAPAPRRTQATEDFTTSHHISVMTEQLTATQQQVQQLQELFTEVSQTNRLLVNEVLTLQKMLNAQKQSQHEMLNYLSPSNNRHQQSMHLNVGTSPLDGSDDSAPELRRARELLSSVTPDQIADRELERLQGVYGSPADSAVVIPQASMPMMHDPMNDINRYPVYPVGQTVGIDPFHSDHIHK

SEQ ID NO: 8291 - protein, 458 aa, Streptococcus mutans UA159
MAYKTTYPYTNEVLKEFANNSDADLEKALVTGHALYKKWRAEGGLEERKAQLHKVADILRRDVDKYAEVMTKDMGKLFTEAKGEVELCAEIADYFADKAEEFLEPKAFEPIHGDAYYIKQAVGVLFMVEPWNFPFYQIMRVFAPNFMIGNPTVLKHASICPASAQAFENLVKEAGAPEGSFKNLFLTYDQVNKAIADPRIQGVALTGSERGGASIAAEAGANLKKSALELGGNDAFLILEDADFELLKDTIFFARLYNAGQVCTSSKRFIVVGEENYKKFLDMVVETFKTAKWGDPMDPETTLAPLSSAEAKEEVLGQIKLAADNGARVVYGNKPIDHPGNFVFPTVLTDITKENPIYNQEIFGPVASIYKVDTEEEAIALANDSSYGLGGTVFSKDLEHAKAVAAKIETGMTFINSGWSSYPEVPFGGIKNSGYGRELSNLGFDAFVNEHLVFIPKQ

SEQ ID NO: 8292 - protein, 539 aa, Glycine max
MASSLRISRLLSRSFLSASTTTPLFSRGGSGALGAGLSKFSTAAAIEEPIKPPLKVEHTQLLIDGKFVDAATGKTFPTLDPRTGDVISHVAEGDHEDVDRAVAAARKAFDRGPWPKMTAYERQRILLRAADLFEKHNDELAALETWDNGKPYEQSAQIEIPMLVRLFRYYAGWADKIHGLTVPADGPYHVQTLHEPIGVAGQIIPWNFPLVMFAWKVGPALACGNTIVLKTAEQTPLSALYASKLFHEAGLPAGVLNVISGFGPTAGAAIASHMDIDKLAFTGSTETGKIVLELAARSNLKPVTLELGGKSPFIVCEDADVDEAVELAHFALFFNQGQCCCAGSRTFVHERVYDEFIEKAKARALKRAVGDPFKGGIEQGPQIDSEQFQKILKYIRSGVESGATLETGGDRFGNSGFYIQPTVFSNVKDDMLIAKEEIFGPVQSILKFKDLDDVIQRANNTHYGLAAGVFTKNINTANTLTRALRAGTVWVNCFDTFDAAIPFGGYKMSGQGREKGEYSLKNYLQVKAVVTSLKNPAWL

SEQ ID NO: 8293 - protein, 187 aa, Zea mays
SARGLSIALVYPPPTGLRQSAMAAASSVHGFTVKDASGEDVHLSTFKGKVLLIVNVASQCGLTNSNYTELAQLHEMYKDQDFEILAFPCNQFGGQEPGTSEEIVQLVCARFKAKYPILHKVDVNGEDAAPIYKFLKSSKTGPMGEDIKWNFAKFLVDRQGHVAERYAPTTYPLSIQKDIKKLLGGSY

SEQ ID NO: 8294 - protein, 332 aa, Onion yellows phytoplasma OY-M
MKNENQKAKTKTKENKKIAVLTSGGDAPGMNAAIRALVFESAKQGFEVFGVKDGYLGLFNNQIEILNPQTFPRVLNVSGTFLGTSRFLDFQNNLDVRKQCAQNLKTLGIDKLVVIGGDGSYKGASKLHELGIKCVGLPATIDNDICATDFTIGFSTALNNIVDAIEKLRDTSVSHNRCSIIEVMGRHKGDLALFGGLAAGADVIVTRENLLSQKTICQKIKSLRQANQRHAIVVVTEHIFDVASLAKEVENYSGFETRAQVLGHIQRGGKPTAEDLVLAFRMGSYAVSLLQQNIFNCAVGTCGLNLHYTTFGDLFEKTYEKNELFNVVAKLL

SEQ ID NO: 8295 - protein, 363 aa, Neurospora crassa
MASSASKTNIGVFTNPQHDLWISEASPSLESVQKGEELKEGEVTVAVRSTGICGSDVHFWKHGCIGPMIVECDHVLGHESAGEVIAVHPSVKSIKVGDRVAIEPQVICNACEPCLTGRYNGCERVDFLSTPPVPGLLRRYVNHPAVWCHKIGNMSYENGAMLEPLSVALAGLQRAGVRLGDPVLICGAGPIGLITMLCAKAAGACPLVITDIDEGRLKFAKEICPEVVTHKVERLSAEESAKKIVESFGGIEPAVALECTGVESSIAAAIWAVKFGGKVFVIGVGKNEIQIPFMRASVREVDLQFQYRYCNTWPRAIRLVENGLVDLTRLVTHRFPLEDALKAFETASDPKTGAIKVQIQSLE

SEQ ID NO: 8296 - protein, 112 aa, Arabidopsis thaliana
MADTPSSPAGDGGESGGSVREQDRYLPIANISRIMKKALPPNGKIGKDAKDTVQECVSEFISFITSEASDKCQKEKRKTVNGDDLLWAMATLGFEDYLEPLKIYLARYREVW

SEQ ID NO: 8297 - protein, 322 aa, Arthrobacter nicotinovorans
MPVIPALQTLLDSLPATGLGDLTDLPAVRQAGLEGANALAALVAQEPLDVGSVHTAMVPVNGGEIKVRIYQPGTPGPHPIHVFYHGGGWMAGTIEETFVDNVCRERTALAGYVTVAVEYRLAPEFKFPIPLEDSYAALEWVVEHAADYDGDPENVTIGGGSAGGNLSAAIALKARNENGPHITFQVLEVPALDLTLASPSVEQYSGGEYPLPKAEIDLCVEGYLRSPEDARNPYASPLLADDVSGLPPALIISSEFDPLQMDGSRYAQRLQEVGVHAAFRLGEGHVHGSSQFTKLLPEAAAWRDQVIDALKTHAADHRRVTP

SEQ ID NO: 8298 - protein, 292 aa, Aeropyrum pernix K1
MECYRDIHGFMAGHLAEAVEVLREGLEASSVRVLTFTGNLVATGLRGVLAQLIDGGLFNVVFTTAGALDHDIARFMGGKYLKGRFEADDTELHRRGVHRLGNVFIPVESYGPLVERFVRTLAEQAAGVRGEWGVYELLRLAGSLMEGDRDSILAAAARRGVDVFVPGWPDGAFGTSLFMERQRGTSITVDYFRDMARLADIFFPQEGEAAALIVGGGISKHHAIWWSQFRGGLDYAVYVTTAVEYDGSLSGAHPREAVSWGKIKESSRRVVVYGDATITLPVIAYCLLHGCG

SEQ ID NO: 8299 - protein, 510 aa, Eustoma grandiflorum
MAVGNGVLLHIARSLMLFFHVQKLVQYLWMNSRRHRLPPGPIGWPVLGALPLLGTMPHVALANMAKKYGPVMYLKVGSCGLAVASTPEAAKAFLKTLDMNFSNRPPNAGATHLAYNAQDMVFADYGPRWKLLRKLSNIHILGGKALQGWEEVRKKELGYMLYAMAESGRHGQPVVVSEMLTYAMANMLGQVMLSKRVFGSQGSESNEFKDMVVELMTVAGYFNIGDFIPSIAWMDLQGIQGGMKRLHKKFDALLTRLLEEHTASAHERKGSPDFLDFVVANRDNSEGERLHTVNIKALLLNMFTAGTDTSSSVIEWALAELLKNPIILKRAQEEMDGVIGRDRRFLEADISKLPYLQAICKEAFRKHPSTPLNLPRIASQACEVNGHYIPKGTRLSVNIWAIGRDPSLWENPNEFNPDRFLERKNAKIDPRGNDFELIPFGAGRRICAGTRLGILLVEYILGTLVHSFDWELPSSVIELNMDEPFGLALQKAVPLAAMVTPRLPLHIYCP

SEQ ID NO: 8300 - protein, 436 aa, Streptococcus pneumoniae
MFASKNERKVHYSIRKFSIGVASVAVASLFMGSVVHATEKEVTTQVATSSNKANKSQTEHMKAAKQVDEYIEKMLSEIQLDRRKHTQNVGLLTKLGAIKTEYLRGLSVSKEKSTAELPSEIKEKLTAAFEQFKKDTLKSGKKVAEAQKKAKDQKEAKQEIEALIVKHKGREIDLDRKKAKAAVTEHLKKLLNDIEKNLKKEQHTHTVELIKNLKDIEKTYLHKLDESTQKAQLQKLIAESQSKLDEAFSKFKNGLSSSSNSGSSTKPETPQPETPKPEVKPELETPKPEVKPELETPKPEVKPELETPKPEVKPELETPKPEVKPELETPKPEVKPELETPKPEVKPELETPKPEVKPDNSKPQADDKKPSTPNNLSKDKQSSNQASTNENKKQGPATNKPKKSLPSTGSISNLALEIAGLLTLAGATILAKKRMK

SEQ ID NO: 8301 - protein, 340 aa, Burkholderia cepacia R18194
MENAAKQVLDTLFGRWRSRILYAGTRLGVFDAVTTDTPASSAALAAKLDVDEPLLYRLLRALASLGLLDEDTRRGFRATASGALLHADAPSTLRDFVLLQEGPEHYAIWAHLPDMVREGQQNGFVREFGAMAFDYAKDHERYRTDFKRAMSSFSTVQSEQVVDALRDVTFAPGTHACDIGGGQGHMLCSVLRRFQSLTGVVFDLPEVIDGDADDWAQRMGVSARCSKAGGNMFDAVPAADVYLLKLILHDWNDDECVAILKRARESARDGARVFVIERVVPAPGVAHFSKLYDIHMMCWGSGRERTRDEYDALLVAAGWRPAGVRPAPDGQIDVIEAVAA

SEQ ID NO: 8302 - protein, 442 aa, Synechocystis sp. PCC 6803
MKPKNFPLARYVLGAMLAFLFVGVAQAQTETTSIAEVTYAINNLFLLAAAVLVLFMQAGFAMLEAGLSSHKNTVNVLFKNTFDVCVGVLLYFLFGYSLMYGENPVLGGFFGWGGFGITNNLDNVEGLSPQVDWLFQAAFAATAATIVSGAVMGRMYFKAYLIYSAVITGLVYPISGHWKWGGGWLDKLGFHDFAGSLLVHSVGGFAALAAVVVMGPRIGRFEGNKINSLGYQGITSSSLGVFILWVGWYGFNPGSQLAFVGALNTNTTMLIAVNTTLSAAAGGLAALAFDWITENKRKPNLLVTLNGILGGLVGITAGCDTVSNWSAIAIGVVAGILSVLGTKLLDRLRIDDGVGAWPVHGLCGIWGGIAVGIFSTNVEHKLSAQIVGSLVIPFWAFITMFFLFYVMDLWGILRVKPSQEKVGLDIVEHGQTEKGVEIAFED

SEQ ID NO: 8303 - protein, 366 aa, Triticum aestivum
MKTLLILTILAMAITISTANMQVDPSGQVQWPQQQLVPQPQQPLSQQPQQAFPQPQQTFPHQPQQQVPQPQQPQQPFLQPQQAFPQQPQQPFPQTQQPQQPFPQQPQQPFPQTQQPQQPFPQQPQQPFPQQSQQPFPQTQQPQQPFPQQPQQPFPQTQQPQQPFPQFQQPHQPFPQPQQQFPQPQQPQQSFPQQQRPFIQPSLQQRLNPCKNILLQQCKPASLVSSLWSIIWPQSDCQVMQQQCCQELAQIPQQLQCAAIHSVVHSIIVQQQQQQQQHHPQPRPFQHTQGTHILLPLSQQQQLGQGTLVQGQGIIQPQQLAQLEAIRSLVLQTLPTMCNVYVPPECSIIRAPFASIRASSGHHLPA

SEQ ID NO: 8304 - protein, 121 aa, Bartonella sp. Rr7703bgl
GPAHGGANEACLKMLQEIGSVKRIPEFIARAKDKNDPFRLMGFGHRVYKNYDPRAKIMQQTCHEVLKELNIQDDPLLDIAIELEKIALNDEYFVEKKLYPNVDFYSGITFKALGFPTEMFT

SEQ ID NO: 8305 - protein, 177 aa, Synechocystis sp. PCC 6803
MQQRGVTIWLTGLSGAGKTTITHALEKKLRDSGYRLEVLDGDVVRTNLTKGLGFSKEDRDTNIRRIGFVSHLLTRNGVIVLVSAISPYAAIRQEVKHTIGDFLEVFVNAPLAVCEERDVKGLYAKARSGEIKGFTGIDDPYEPPTNPDVECRTDLEELDESVGKIWQKLVDLKYIEG

SEQ ID NO: 8306 - protein, 125 aa, Bartonella sp. Rr7624bgl
GPAHGGANEACLKMLQEIGSIQRIPEFIARAKDKNDPFRLMGFGHRVYKNYDPRAKILQKTCHEVLKELNIQDDPLLDIAVELEKIALSDEYFIEKKLYPNVDFYSGITLKALGFPTEMFTVLFA

SEQ ID NO: 8307 - protein, 364 aa, Nicotiana tabacum
MGSTSESQSNSLTHTEDEAFLFAMQLCSASVLPMVLKSAVELDLLELMAKAGPGAAISPSELAAQLSTQNPEAPVMLDRMLRLLASYSVLNCTLRTLPDSSVERLYSLAPVCKYLTKNADGVSVAPLLLMNQDKVLMESWYHLKDAVLDGGIPFNKAYGMTAFEYHGTDPRFNKVFNRGMSDHSTMSMKKILEDYKGFEGLNSIVDVGGGTGATVNMIVSKYPSIKGINFDLPHVIGDAPTYPGVEHVGGDMFASVPKADAIFMKWICHDWSDEHCLKFLKNCYEALPANGKVIIAECILPEAPDTSLATKNTVHVDIVMLAHNPGGKERTEKEFEALAKGAGFTGFARLVALTTLGSWNSTSN

SEQ ID NO: 8308 - protein, 110 aa, Bartonella sp. Pm6740co
GPAHGGANEACLKMLQEIGSVKRIPEFIARAKDKNDPFRLMGFGHRVYKNYDPRAKIMQKTCHEVLKELNIQDDPLLDIAIELEKIALNDEYFVEKKLYPNVDFYSGITP

SEQ ID NO: 8309 - protein, 343 aa, Chrysosplenium americanum
MLFAMQLASASVLPMVLKSAIELDLLEIIRGQDTCMSPTEIASHLPTTNPDAPAMVDRILRLLSCYSVVTCSVRSVDDQRVYGLAPVCKYLTKNQDGVSIAALCLMNQDKVLMESWYHLKDAVLDGGIPFNKAYGMSSFEYHGTDPRFNKVFNRGMSDHSTITMKKVFQAYQGFQGLTSLVDVGGGTGATLTMILSKYPTIRCINFDLPHVIEDAPEYPGIEHVGGDMFVSVPKGDAIFMKWICHDWSDEHCLKLLKNCYDALPNNGKVILAECILPEVPDSSLATKGVVHIDVITVAHNPGGKERTEKEFEALAKAAGFQGFQVFCNAFNTYIIEFSKQICN

SEQ ID NO: 8310 - protein, 159 aa, Streptococcus pyogenes SSI-1
MPNLYDFTVKAQDGSDISLVNYKEKVVLVVNTATKCGLTPQYQALQALYDTYHDKGFEVLDFPCNQFLNQTPGEAEEINRFCSLTYHTTFPRFAKIKVNGKDADPLFTWLKEEKSGPLGKRIEWNFTKFLIDQNGQVIKRYSSKTDPKLIEEDLKALLG

SEQ ID NO: 8311 - protein, 328 aa, Methanosarcina acetivorans C2A
MLDSGMLTRNAYRVKLPLSLEKKLLHRKYCRQADFEVSGKALKPLRTFFQGIYRGGSVTSANNHEKAKMKEELGLLLPKINDLLESEPAVLRIDPEPAESIMLIGDIHGDLDALDFVMGMREELGCKQMLFLGDYVDRGMQGTEVLVKLFRLKLEEPQNIFLLRGNHETVDMNLYYGFFEEIGFDRGFLLNISRTYDRLPVAAVISGQIFCVHGGINGIESIDTITKEGAFPYLWNDPSKHPGMSSSLRGSTVKEFGPDIVDGFLETNGLKRIVRGHTALRTGYEWWFDGKLLSLFSCPDYVGLGNAAAFAVIEKGEIKIITFKNRNR

SEQ ID NO: 8312 - protein, 119 aa, Bartonella sp. OH_CU1214
GPAHGGANEACLKMLQEIGSVKRIPEFIARAKDKNDPFRLMGFGHRVYKNYDPRAKIMQQTCHEVLKELNIQDDPLLDIAIELENIALNDEYFVEKRLYPNVDFYSGITLKALGFPTEM

SEQ ID NO: 8313 - protein, 252 aa, Prunus emarginata
AHYKSEADVGNALAEAFETGLVKREELFITSKASNHGHVVEACKNSLKKLRLDYLDLYLVHYPLATKHSGVGTTASLLDENKVLDIDVTVSLETTWHTMEKTVYLGLVRSIGLSNYEFFLTRDCLSYAKIKPQVSQFETHPYFQRESLVRFCKKHGVTPMAHTPLGGATANVKAFGSISPLEDPVLLGLAKKYKKSVAQIALRWNIERDTAVIPKSSKVERLKENLEVLNFKLEKEDIELINTIDKKSRTTL

SEQ ID NO: 8314 - protein, 252 aa, Prunus emarginata
AHYKSEADVGNAIAEAIQRGLVKREELFITSNASNHGHVVEACKNSLKKLRLDYLDLYLVHYPFATKHSGVGTTASLLDENKVLDIDVTVSLETTWHTMETTVYLGLVRSIGLSNYEFFLTRDCLSYAKIKPQVSQFETHPYFQRESLVRFCKKHGVTPMARTPLGGATANVKAFGSISPLEDPVLLGLAKKYKKSVAQIALRWNIERDTAVIPKSSKVERLKENLEVLNFKLEKEDIELINTIDKKSRTTL

SEQ ID NO: 8315 - protein, 466 aa, Shigella flexneri 2a str. 301
MDKKQVTDLRSELLDSRFGAKSISTIAESKRFPLHEMRDDVAFQIINDELYLDGNARQNLATFCQTWDDENVHKLMDLSINKNWIDKEEYPQSAAIDLRCVNMVADLWHAPAPKNGQAVGTNTIGSSEACMLGGMAMKWRWRKRMEAAGKPTDKPNLVCGPVQICWHKFARYWDVELREIPMRPGQLFMDPKRMIEACDENTIGVVPTFGVTYTGNYEFPQPLHDALDKFQADTGIDIDMHIDAASGGFLAPFVAPDIVWDFRLPRVKSISASGHKFGLAPLGCGWVIWRDEEALPQELVFNVDYLGGQIGTFAINFSRPAGQVIAQYYEFLRLGREGYTKVQNASYQVAAYLADEIAKLGPYEFICTGRPDEGIPAVCFKLKDGEDPGYTLYDLSERLRLRGWQVPAFTLGGEATDIVVMRIMCRRGFEMDFAELLLEDYKASLKYLSDHPKLQGIAQQNSFKHT

SEQ ID NO: 8316 - protein, 252 aa, Prunus emarginata
  unsure (1)..(252): unsure at all Xaa locations
AHYKSEADVGNALAEAFETGLVKREELFITSKARHHGHVVEACKNSLKKLQLDYLDLYLVHYPLATKHSGVGTTASLLDENKVLDIDVTVSLESTWHDMEKTVSLGLVRSIGLSNYELFLTRDCLSYAKIKPQVSQFETHPYFQRETLVRFCRKHGVCPMAHTPLGGATANVKAFGSISPLEDPVLRALAKKXKKSVAQIALRWNLDRNTPVIPKSSKIERLKENLEVLNFKLEKEDIELINTIDKKSRTTL

SEQ ID NO: 8317 - protein, 550 aa, Zea mays
  unsure (1)..(550): unsure at all Xaa locations
MARRAASSLVSRCLLARAPAGAPPAAPSAPRRTVPADGMHRLLPGVLQRFSTAAAVEEPITPSVHVNYTKLLINGNFVDSASGKTFPTLDPRTGEVIAHVAEGDAEDINRAVAAXARKAFDEGPWPKMTAYERSRILLRFADLIEKHNDELAALETWDNGKPYEQAAQIEVPMVARLMRYYAGWADKIHGLIVPADGPHHVQILHEPIGVAGQIIPWNFPLLMYAWKVGPALACGNTLVLKTAEQTPLSALYISKLLHEAGLPEGVVNVVSGFGPTAGAALASHMDVDKIAFTGSTDTGKIILELAAKSNLKTVTLELGGKSPFIIMDDADVDHAVELAHFALFFNQGQCCCAGSRTFVHERVYDEFVEKAKARALKRVVGDPFRKGVEQGPQIDDEQFNKILRYIRYGVDGGATLVTGGDRLGDKGFYIQPTIFSDVQDGMKIAQEEIFGPVQSILKFKDLNEVIKRANASQYGLAAGVFTNSLDTANTLTRALRAGTVWVNCFDVFDAAIPFGGYKMSGIGREKGVDSLKNYLQVKAVVTPIKNAAWL

SEQ ID NO: 8318 - protein, 251 aa, Prunus emarginata
AHYKSEADVGNAIAEAIQRGLVKREELFITSKANHGHVVEACKNSLKKLRLDYLDLYLVHYPLATKHSRVSTTASLLDENKVLDIDVTVSLETTWHTMEKTVYLGLVRSIGLSNYEFFLTRDCLSYAKIKPQVSQFETHPYFQRESLVRFCKKHGVTPMAHTPSGGATANVKAFGSNSPLEDPVLLGLAKKYKKSVAQIALRWNIERDTAVIPKSSKVERLKENLEVLNFKLEKEDIELINTIDKKSRTTL

SEQ ID NO: 8319 - protein, 287 aa, Prochlorococcus marinus subsp. marinus str. CCMP1375
MSTQIIQWYPGHIAKAEQQLSKSLEKVDLVVEVRDARIPLATGHPCLHKWIRNKKHLLVINRRDMISQKAFNSWDNWFKENGQEAWWCNAKDGNGTNKIKEAAIKLGNDLNNRRESRGMRKRAVRALILGFPNVGKSALINRLVNKKVVKSARRAGVTKSLQWVRVGQQLDLLDAPGVLPPQLEDQEAAVKLALCDDIGQASYDVESVAIKFLNILNQVKNESDFETSNQILEKRYGISWEESNNNVHLWLENAANYHTSGNTNRMSQRLLDDFRKRLIGTISLELP

SEQ ID NO: 8320 - protein, 364 aa, Glycine max
  unsure (1)..(364): unsure at all Xaa locations
MASQLLRRTFGSRILANPRAFSFSSAASTPIRATLFPGDGXSGPEIADSVKQIFQAADVPIEWEEHYVGTEIDPRTQSFLTWESLESVRKNKVGXKGPMATPIGKGHRSLNLTLKKELNSYVNFRPCYSLPGYKTRYDNVNLITIRENTEXGEYSGLEHQVVRGVVESLKIITRQASLRVAEYAFHYAKAHGKXKVSAIHKANIMQKTDGFFLKCCREVAEKYPEITYEEVVIDNCCMMLVKNPALFDVLVMPNLYGDIISDLCAGLIGGLGLTPSCNIGEGGIALAEXAVHGSAPDIAGKNLANPTALLLSGVTMLRHLDLHDKAEQIQKAILNTIAEGKYRTADLGGSSKTTEFTKAIIDHL

SEQ ID NO: 8321 - protein, 252 aa, Prunus emarginata
SSLQSEADVGNAIAEAIQSGLVKREELFITSKASNHGHVVEACKNSLKKLRLDYLDLYLVHYPLATKHSGVGTTASLLDENKVLDIDVTVSLETTWHDMEKTVSLGLVRSIGLSNYELFLTRDCLSYAKIKPQVSQFETHPYFQRESLVRFCKKHGVTPMAHTPLGGATANVKAFGSISPLEDPVLLGLAKKYKKGVAQIALRWNIERDTAVIPKSSKVERLKENLEVLNFKLEKEDIELINTIDKKSRTTL

SEQ ID NO: 8322 - protein, 189 aa, Lycopersicon esculentum
MESALKDLSTPTGGVEDVYGEDCATEDQVITPWTIAVSGYNLLRDPRYNKGLAFTERERDADYLRGLLPPVISSQELQEKKLMQSIRQYDVPLHKYVAMMELQERNERLFYKLLIDNVEELLPIVYTPTVGEACQKYGSLFKRPQGLYISLNEKGRILEVLKNWPEKSIQVIVVTDGERILGLGDLGCQ

SEQ ID NO: 8323 - protein, 1196 aa, ASPERGILLUS NIDULANS FGSC A4
MANDLGSALEHAGGKGQEREGISLKTFIASLAAALIIFAVEFLLFLVLKGKLTRIYQPRTYLVPDRERTEPSPPGLFKWISPIFRTSSSEFVQKCGLDAYFFLRYLRMLLKIFVPLGCIIVPTLITVNRVDGKNQTYKNGTDTGDRWNVTGLDQLAWGNVAPENTHRYWAHLVMAVILIVYVCFVFFDELRGYIRLRQAYLTSPHHRLRASATTVLVTTIPKKWLTVEALEGLYDVFPGGIRNIWINRNFDDLNEKVKERDRLALKLETAETELIIKCKKAQMKQAKAAAKKARRKGAEQKEQDVADTKASKPTIGAGISSGNPHQAHTLQEVLHRDTMASNDGRTHKRKYMNPLEPAVGLAGAVGQGVGKLGKSVLGTVKKHDHHGAPDEELPHQDNLSDANAADRSVWEGSAAMPAGESTEGDSSQPKRPFWRSRPSAMSKSSNRTEADELPLTAPESPVDVEDGEFSSSSGNSLTKARDENDIDITRNDGAEIEDDTYPVAYNENFEKEDLGEPLWKKYIRQEDRDTMRLPIFGISWMPSIWLLGKKVDTIDYCRKEVARLNLEIEIDQQHPERFPLMNSAFIQFNHQVAAHMACQAVSHHVPKQMAPRTVEISPDDVIWDNMSIKWWERYLRTFGVYAIVTGMVIGWAFPVAFTGLLSQLSYLEGAFTWLSWINRMPEWLISAVQGILPPLFLAILMALLPLMLRFLCRAQGLQTGMGIELTVQNYFFAFLFVQLFLVVAIASSFSTIIDNITNFTNWPELLAQNIPSSSNYFFSYMILQALSVSAGALVQIFSLVSWFILAPILDSTARRKWARTTNLNQMQWGTFFPVYTTLASIGLIYSVIAPLIMVFNVITFGLFWFVYRYNTLYVTKFRFDTGGLLFPRAINQLFTGIYVMELSLIGLFFLVRDTHGSVSCKGQAIIMIIMTILTVGFQILLNEAFGPLIRYLPITLEDDAVRRDEEFARVQRARLGLDDDNEEEAEEEQDTLEHRLKERERVEIQANEDSREIELKKIEGGISRRASGLRHKGQGLGPETAAKLGASRRPSWAVQTAQSPNRRSKYFGANSADAVPSIQRMREKLEKDAEAQGPVAGHSRSSALFAGIHDELEDLTPDERDQLVQRAFQHDALRSKRPVIWIPRDDLGVSDDEIYRTQRFSKHIWISNEYQALDGKCRTIFSRSPPDFSEVDLIQL

SEQ ID NO: 8324 - protein, 303 aa, Zea mays
MQIAGFNVHYRVGWFKKKKKKKKQAPQQLLRSSLSRVAPHRILRFEALCSQGTMAKNYPTVSAEYSEAVEKARRKLRALIAEKSCAPLMLRLAWHSAGTFDVSSRTGGPFGTMKCPAELAHGANAGLDIAVRLLEPIKEEFPTLSYADFYQLAGVVAVEVTGGPEIPFHPGREDKPQPPPEGRLPDATKGSDHLRQVFGKQMGLSDQDIVALSGGHTLGRCHKERSGFEGAWTTNPLVFDNSYFKELLSGDKEGLLQLPSDKALLSDPVFRPLVEKYAADEKAFFDDYKEAHLKLSELGYADA

SEQ ID NO: 8325 - protein, 314 aa, Triticum aestivum
  unsure (1)..(314): unsure at all Xaa locations
MPGRLLWATTKHVVCTAHTQSMTHWSSLNQISTELINGDDCIIPKQRGHGSQSVSMVQFTTMAVDNDFLXVVGGFHGELICKRLEDDGIVFSTRVTDDENAITNSLEIYQDPNGSRRLVVANNDCSVRIFDTKYFDLLNHYVFPWSVNSVSVNPDATLFAVLGDHEDGLVVDPKCGKPIGKVRGHLDYSFSSAWHPDGNILATGSQDTTCRLWDIRNLSQSLAVLGGRLGSIRCIKFSSDGRFLATAEPIDFVHIYDCFADYGKSHEIDFFGEIAGLSFSPDTEAFYIGVADQTYGGLMEFKRRHQHHYLNCLW

SEQ ID NO: 8326 - protein, 197 aa, Beta vulgaris subsp. vulgaris
MSASRFIKCVTVGDGAVGKTCLLISYTSNTFPTDYVPTVFDNFSANVVVNGATVNLGLWDTAGQEDYNRLRPLSYRGADVFILAFSLISKASYENVSKKWIPELKHYAPGVPIVLVGTKLDLRDDKQFFIDHPGAVPITTAQGEELRKLIGAPAYIECSSKTQQNVKAVFDAAIKVVLQPPKTKKKKSKAQKACSIL

SEQ ID NO: 8327 - protein, 395 aa, Dichomitus squalens
MAFKWSSILALVTLATLASAAPTQSTVTCSDGTVVPDSVCCEFIPLREALNDQVIQSDCGEDAHELLRLTFHDAIAISQSLGPSAGGGADGSMLLFPTVEPAFFANLGIADSVNNLIPFMSQFPNISPGDLVQFAGAVAITNCPGAPQLEFLAGRPNGTAPAIDGLIPEPQDSIDDILARFDDAGGFTPFEVVSLLASHTVARADHVDPTLDAAPFDSTPFTFDTQIFLEVLLKGTGFPGTDNNTGEVASPIPVTNGTDVGELRLQSDFGLAHDSRTACFWQGFVNQQDFMAQSFKAAMAKLAVLGHNAADLVNCSAVIPTPLPATGKPATFPATLGPDDLELSCTTEPFPSLTTDPGAQETLIPHCSDGSMDCESVQFDGPATNFGGDDDDDDS

SEQ ID NO: 8328 - protein, 235 aa, Zea mays
GRVGGRVGGRVGGRVGCAPLMLRLAWHSAGTFDVATKTGGPFGTMKNPAEQAHGANAGLEIAIRLLEPIKEQFPILSYADFYQLAGVVAVEVTGGPDVPFHPGRQDKPEPPPEGRLPDATQGSDHLRQVFSTQMGLSDQDIVALSGGHTLGRCHKDRSGFEGAWTSNPLIFDNSYFTELLSGEKEGLLQLPSDKALLSDPSFRPLVDKYAADEDAFFADYAEAHLKLSELGFAEA

SEQ ID NO: 8329 - protein, 482 aa, Brevibacterium flavum
MNANVRVFILNSLAMNDPQRPPTLLWFRDDLRLSDNAALKWAADHGPVIGLFIDETINRSIGAAARWWREQSLNALAQDLSFYGVPLLRRTGNPLEILPKIVSEMEVKAVTWNRRYHQPLCEVDATLKKNLRDQGIEVHSHPGFLLTEPWEVSTATGTPYKVFTPFSKAAWEVARGHAYETVKNNVTVPSHLTGPEGVELPIPEMEQPFWATTLVKECAPGEKNASEKLFDFLEHLQDYPQARDSLARSATSKLSAHLRFGEISIHRVWAETAAIDSEGTELFLKELLWRDFAWHRLYALPHMDTQNVRMQFNRFGWSWDPSEKDKLNTPSTPLIPTKADQFHEDLAAWRAGKTGIPLVDAGMRELWATGSMHNRVRMVVASFLTKNLQIHWRHGEEWFWETLVDADPASNAFNWQWAAGSGDDASPYFRIFNPVTQAKKFDPDETYIRRWVPEYGTPSYPDPIVDLKESRQIALDAYSAIK

SEQ ID NO: 8330 - protein, 390 aa, Dichomitus squalens
MAFKLWSMLPLVALATVAVAAPSRQTVCSDGTVVPDSVCCEFVPLAQALQKEVLMGDCGEDAHELLRLTFHDAIAISRSKGPSAGGGADGSMLIFPTVEPAFFANLGIADSVNNLIPFLSQFPKISAGDLVQFAGAVAVGNCPGAPQLEFRAGRPNATAPAIEGLIPEPQNNITEILERFDDAGGFSPFEVVSLLASHTVARADHVDPTLDAAPFDSTPFTFDTQIFLEVLLKGVGFPGTGNNTGEVSSPLPVSSGTDVGELRLQSDFGLAHDERTACFWQGFVNEQEFMAQSFKAAMAKLAVLGHNADDLVDCSAVVPKPKPATGKPASFPATKGPKDLELSCTSKKFPTLTTDHGAQETLIPHCSNGSMNCTTVQFDGPATNFDGDDS

SEQ ID NO: 8331 - protein, 402 aa, Triticum aestivum
  unsure (1)..(402): unsure at all Xaa locations
MSLRATRAALSPKVKRRDGLYKFGPTIGQGTFARVRFAKNTETLEPVAIKIXILLEYITGRELLDNIYTNXRLKEEEARKYFQQLINAVDYCHSRGVYHRDLKLENLLLDAAGNLKVSDFGLSALTEQVKADGLLHTTCGTPNYVAPEVIEDRGYDGAAADIWSCGVILFILLAGFLPFEDENIIALYKKISEAQFTCPSWFSTGAKKLITRILDPNPATRITIPQILEDPWFKKGFKPPVFDDKYETSFEDVYAAFGDSEDQHVKEETEHKPTSMNAFELISLNQGLNLDNLFEAKEEHKRETRFTSQCPPKEIISKIAEAARPLGFDIQKKNYKMRMENPKAGRKGNLNVATEVFQVAPSLHVVELKKAKGDTLEFQMFYRSLSTQLKDVVWKCGGRGRR

SEQ ID NO: 8332 - protein, 497 aa, Ustilago maydis 521
MPTLNLDLPNGIKSTIQADLFINNKFVPALDGKTFATINPSTGKEIGQVAEASAKDVDLAVKAAREAFETTWGENTPGDARGRLLIKLAELVEANIDELAAIESLDNGKAFSIAKSFDVAAVAANLRYYGGWADKNHGKVMEVDTKRLNYTRHEPIGVCGQIIPWNFPLLMFAWKLGPALATGNTIVLKTAEQTPLSAIKMCELIVEAGFPPGVVNVISGFGPVAGAAISQHMDIDKIAFTGSTLVGRNIMKAAASTNLKKVTLELGGKSPNIIFKDADLDQAVRWSAFGIMFNHGQCCCAGSRVYVEESIYDAFMEKMTAHCKALQVGDPFSANTFQGPQVSQLQYDRIMEYIESGKKDANLALGGVRKGNEGYFIEPTIFTDVPHDAKIAKEEIFGPVVVVSKFKDEKDLIRIANDSIYGLAAAVFSRDISRAIETAHKLKAGTVWVNCYNQLIPQVPFGGYKASGIGRELGEYALSNYTNIKAVHVNLSQPAPI

SEQ ID NO: 8333 - protein, 423 aa, Pseudomonas putida KT2440
MTISILGARVIDPNSGLDQVTDLHLDGGRIVAIGAAPAGFSASRTIQADGLVAAPGLVDLGVSLREPGYSRKGNIASETRAAVAGGVTSLCCPPQTKPVLDTSAVAELILDRAREAANSKVYPVGALTKGLEGEQLAELVALRDTGCVAFGNGLKEIPNNRTLARALEYAATFDLTVVFHSQDRDLAQGGLAHEGAMASFLGLPGIPESAETVALARNLLLVEQSGVRAHFSQITSARGARLIAQAQALGLPVTADVALYQLILTDESLREFSSLYHVQPPLRTAADRDGLREAVKSGVIQAISSHHQPHERDAKLAPFGATEPGISSVELLLPLAMTLVQDGLLDLPTLLARLSSGPAAALRLPAGELKVGGAADLVLFDPQASTVAGEQWFSRGENCPFIGHCLPGAVRYTLVDGHICHEA

SEQ ID NO: 8334 - protein, 198 aa, Candida albicans SC5314
MVNGPAELRRKLVIVGDGACGKTCLLIVFSKGTFPEVYVPTVFENYVADVEVDGRKVELALWDTAGQEDYDRLRPLSYPDSNVILICFSVDSPDSLDNVLEKWISEVLHFCQGVPIILVGCKSDLRDDPHTIEALRQQQQQPVSTSEGQQVAQRIGAADYLECSAKTGRGVREVFEAATRASLRVKEKKEKKKKCVVL

SEQ ID NO: 8335 - protein, 1313 aa, Ustilago maydis 521
MQPMNSVSGSASLVLAALLVQQAAAQDAANSGASTSTVISAIVLNAVIFAILFTVFLLARPRFKRVYAPRTYLVTPEEQIEPLPQSLFGWLPVWLKTPTSTILEKNGLDAYMFVEYLEMMLWIFIPIFLLSWIVLMPVYGAGTNGIGDGFNRFILSRVGKSPQQQKRYIAPLLIQWIFTFWLMWNIRSRVAKFIKLRQDFLVSPQHAASVQARTVLITGIPNELLSEKKLRALYSQLPGGVAKVWLNRNLKDLPDLFDEREKWCNKLEAAETSLIKTAYKLVKKGKAQDASGSLPETDVEINAEVADQYVPKKKRPTHKLGKIPCMGEKVDTIHWCREEIARLNKEIQTKRSEIAVDYKNYPAQSSAFILFNTQIAAHMAVKTQAHHQPYRMTNRYVEAHPDDVVWANMNMNPYERKIRTVVGWAITIGLIIFWAIPVAFVGIISNVKGLADNVPFLGWLNDIPNVVVGIIQGILPTVLLAVLNMLLPIFLRLLSRLSGTPTRSAIELDLQGRFAAFQIVQNFLFLTLVSGNAGQIAEYVQRVASQPTQFPGLLAEAIPKGSLFFLSFIALQGLSGAAGLFAQIAPLIVYYVKKFLLASTPRKVWHIDHDTSGPAWGTLFPSMTLITVIGTGYVVIAPILNGFVAFTFFLFFLGYKYLFLYVYDTKPSSETSGLFFGKAIRHIFAGLYVEMVMLTAIFFLAQSEDAAGQKKQSAIPEGAFMVVLIVIVVAFHYFLNDSFKALETALPLTLVAGNNAEVQLHGNPTRTSGETAYNEKKPLNEHAASSYDATPVSQGDLNGKGVQGAGVSGEKHQAVAGLSEEQESAFYHPSLTGEQKPIWLPNDKFGIGRAGVASARKAGLEATYEQTSVTEKGQVQTDAYEPPAFTEKWSVNCSARPRRRVEVEKLRTQQGGLLTIARGHAHAKGFAVYGDRSADDSDTRLAIMARCTHVFDWPPSILSAAVCEVPPVRNCKFSEARMMTGTCSNSSGVGRSGTFAQGNLPRFDDIPAVDGMPHGCAWNVWGQGDELGTLNLLTPEVVARSAAENIRTGERVQIDWGLDSVDVPANQRMHFQHDLIDLKPKLGVYATDDEMHLNTQTSSQWDGFNHFAHQATHMYYGGVKHDDLHSGKIDKQHRNSMHKWCLNGGIAGRGVLVDWVRWWEATRTEPLPAGNSSYAIPLSQIQEVLEWQKTELRTADILLLRTGVVRWFEHATDAEKVKGMIENDNFPGIEATEQVKRWLWDNHFAAVASDNMSFEFGPHGDLWLHEWILPMFGCPIGELFDLERLSTACQNHQRWTFFLTSAPLRASRTESLF

SEQ ID NO: 8336 - protein, 174 aa, Triticum aestivum
MAPAVMASSATTVAPFQGLKSTAGLPVSRRSSGSLGRVSNGGRIRCMQVWPIEGIKKFETLSYLPPLSTEALLKQVDYLIRSKWVPCLEFSKVGFVFREHNSSSGYYDGRYWTMWKLPMFGCTDATQVLNEVEEVKKEYPDAYVRVIGFDNLRQVQCVSFIAFRPPGCEESGKA

SEQ ID NO: 8337 - protein, 364 aa, Nicotiana tabacum
MGSTSQSQSKSLTHTEDEAFLFAMQLASASVLPMVLKSALELDLLELMAKAGPGAAISPSELAAQLSTQNPEAPVILDRMLRLLATYSVLNCTLRTLSDGSVERLYSLAPVCKFLTKNADGVSVAPLLLMNQDKVLMESWYHLKDAVLDGGIPFNKAYGMTAFEYHGTDPRFNKVFNRGMSDHSTMSMKKILEDYKGFEGLNSIVDVGGGTGATVNMIVSKHPSIKGINFDLPHVIGDAPAYPGVEHVGGDMFASVPKADAIFMKWICHDWSDEHCLKFLKNCYEALPANGKVIIAECILPEAPDTSLATKNTVHVDIVMLAHNPGGKERTEKEFEALAKGAGFTGFARLVALTTLGSWNSTNN

SEQ ID NO: 8338 - protein, 394 aa, Aeropyrum pernix K1
MSQQPECRVEGNYIIVPKGLVNVIVDETRISGVDPKGEATIYRGYTIEDIGEHASFYEAAHLILFGRLPCDEELKEIKSKIDKYRGQIPEKLFDAMKHVPVTHPMYYGIYGTALLGQYYAPEWRFDEDFLYDHALRLTAQLPVIFTTGWNLAHHGTFLRPDPSKDHAWDVLRMIVMREPSDIEARAFESTLVLYMDHGFNASTFTTRVIGSTLSDLYSAVAGGIAALKGPLHGGANEKAMEMFLDAMKKAEEKGVPLYDYIEEYIKEKLARKEKIMGFGHRIYKLHDPRTDVAAKFVAKLKDGEFWMKVLKKAEEVMWREKKIPANIDLYTAVLYYQLGIPIPMYTPIFAMGRVVGWSAHYIEQVLNNKLIRPTEKYVGPTGLKYQPIEERCRK

SEQ ID NO: 8339 - protein, 350 aa, Moorella thermoacetica ATCC 39073
MKALVLFGPNDVRLVEKPVPKPGPGEVLVRVAACGICGTDVKIITKGMPKMPPYGEFTFGHEWAGTIVALGETVDEFQVGDRVAIEAHKGCGRCENCIDGKYTACLNYGRLDKGHRAAGMTVDGGFAEYAVQHVNSVYKIPDNITFNEATYVTTAGCALYAIDKSGGYIAGDTVLVIGPGPIGLSVVQGARSLGAEKIILMGTREDRLVKGRELGATHTINIREVADPVAEVMAITGGKGCKRVFECAGNSQSFEYGIKAAKKGGVMVLVSFYKEPVMANLDYVVLNQISLLTVRGEGNQNCKRALSLMAQGKIDAKPIMTHAFPLEEFQKGLDYFVNRKDGAMKVVINP

SEQ ID NO: 8340 - protein, 295 aa, Glycine max
MVSHYYLASLLLLLLLNPHTTLGAQNLMLPYHNGALLKGTITVNLLWYGSFTPIQRSIILDFINSLSSTAGAPLPSVASWWKTTDKYRGGSTTIVLGKQILEQTYSLGNYLNGTQLVSLSSRFDHLNAINVVLTSSDVGVDGFCRSRCGTHGSITNGQKARIPYVWVGNSEAQCPGQCAWPFHQPAYGPQAPPLIAPNGDVGLDGMVINVATLLAGTVTNPFNEGFYQGPPTAPLEAVSACTGIFGSGAYPGYPGRVLVDKTTGASYNSYGAGNGRKYLLPAMWDPQTSACKTQV

SEQ ID NO: 8341 - protein, 418 aa, Triticum aestivum
  unsure (1)..(418): unsure at all Xaa locations
MIGGGGGGALRRVGKYEVGRTIGEGTFAKVKFAQNTETGESVAMKVLDRSSILKHKMVDQIKREISIMKLVRHPNVVRLHEVLASRKKIFIILEFITGGELFDKIIRHGRLSEADARKYFQQLIDGVDFCHSKGVYHRDLKPENLLLDSQGNLKISDFGLSAWPAQGAALLRTTCGTPNYVAPEVLSHKGYDGALADTWSCGVILYVLLAGYLPFDEVDLTTLYGKIESAEYSFPAVFPSGAKSLIRRILDPSPDTRIRIEEIRKDEWFKKDYEPVREVENEEVNLDDVNAAFDDPEEDNQHTFDDEAGPLTLNAFDLIILSQGLNLSALFDRRQDYGQLHNRFLSRKTSKCYIXSSMEVVAQSMGVKTHIRHYKMRVGGSKCEQDLAISQLCLKFLKLPHPPLWWELERSAGRFFRV

SEQ ID NO: 8342 - protein, 501 aa, Sphingomonas chungbukensis
MATQLKSTENDYGIKSEYGHYIGGEWIAGDSGKTIDLLNPSTGKVLTKIQAGNAKDIERAIAAAKAAFPKWSQSLPGERQEILIEIARRLKARQSHYATLETLNNGKPMRESMFFDMTQTIGQFELFAGAAYGLHGQTLDYPDAIGIVHREPLGVCAQIIPWNVPMLMMACKIAPALASGNTVVLKPAETVCLSVIEFFVEMADLLPPGVINVVTGYGADVGEALVTSPDVAKVAFTGSIATARRIIQYASANIIPQTLELGGKSAHIVCGDADIDAAVESATMSTVLNKGEVCLAGSRLFLHQSIQDEFLAKFKTALEGIRQGDPLDMATQLGAQASKMQFDKVESYLQLATEEGAEVLTGGTRADAANLAGGNFIKPTVFTNVKNTMRIAQEEIFRPVTTVISWNDQTHMMQQANATTYGLAGGVWTKDLARAHRIARQLETGTVWINRYYNLKANMPLGGYKQNGFGREFSHEVLNHYTQTKSVVVNLQEGRVGMFDQ

SEQ ID NO: 8343 - protein, 359 aa, Nostoc sp. PCC 7120
MSKSRRIGILTSGGDCSGLNAVIRAVVHCASGKGWEVFGIRQATLGLMARPPQVSKLEIDQVDPLLTSGGTMLGTTNKGDPFAFPMPDGSFCDRSSEIIAGYHQLDLDALIGIGGDGSLAILRRLAQQGAINLVGIPKTIDNDIGITEHAIGFDTAVNIATEALDRLHFTAASHSRVMILEVMGRDAGHIALAAGIAGGADVILIPEILYSMDDICYHIKHRQEEGKNYCLIIVSEAVRTQDGEILTLTNRLGQSRYGGIGEYLADQISDRIGAETRVTVLGHIQRGGIASPLDRLVASAFGVAAVNLIEAAKYDYMVAWQNRQVITVPIEEAIAQYKAVNPEDALVKTARGLGIYLGE

SEQ ID NO: 8344 - protein, 200 aa, Mesorhizobium loti
MGKYKDHREPRRHRHDDDAASFTERPSEPSYFQRPSIVTADPVDAEVVWFNTSKGFGFVKLPQGIQAYLHIRVLEAAGSRGVSEGTRLKVTTEESPRGGHQVAQVLEVGDQTARTQLHTRCAGESTAGTSAQLESEATVKWYNPEKGFGFIAPENGEKDIFVHATALTRSGLSMLMEGQKVFVQCGQGKKGLEVRSIRLA

SEQ ID NO: 8345 - protein, 267 aa, Pseudomonas fluorescens PfO-1
MSVPAFGLGTFRLQGQVVIDSVSTALELGYRVIDTAQIYENEADVGEAIAASGIARDKLFITSKIWIANFAKDRLIESLKASLQKLQTDYLDLTLIHWPSPEDQVPVEEFMGALLEAKRLGLTRQIGVSNFTIDLMKQAIAAVGAENIATNQIELHPYLQNRKVVEFAQSQGIQITSYMTLAYGEVLKDPLIVQIAERLQATPAQVTLAWAMQSGYAVIPSSTKRANLQGNLGAMALTLSDADMALIATLDRGHRLTSPKGIAPQWD

SEQ ID NO: 8346 - protein, 141 aa, Glycine max
MRGGLPSGGGWGSRVWGAPFFKGMAPGTFIGGTMVVCRLSKSKWDDGISSVTPAEEVFYAVSLLFSSVNNDLKRLEAQNQKILRFCDLAGIGYKEYLAHYTAHGDWVRHFGGKWQRFVEMKDKYDPKRLLSPGQDIFNLLL

SEQ ID NO: 8347 - protein, 478 aa, Brucella melitensis 16M
MDAVIIASSLPFAPSLRKPQCKGSQVPSEKQETPMAATFDTILKGATIVNHDGIGQRDIGIRNGRIAAIGSLAGNSAGEVIDCTGLHILPGVVDSQVHFREPGLEHKEDLETGSLAAVLGGVTAVFEMPNTKPLTTSAEMLEDKIRRGRHRMHCDFAFWVGGTRDNAKDVAELERLPGAAGIKVFMGSSTGDLLVEDDDGVRSILRNTRRRAAFHSEDEFRLKEREGLRVEGDPSSHPVWRDEIAALQCTQRLVRIARETGARIHVLHISTAEEIDFLKDYKDVATCEATPHHLTLSADDYKALGNLIQMNPPVRDKRHREGVWKGIDQGIVDVLGSDHAPHTLEEKQKSYPASPSGMTGVQTLVPIMLDHVNAGKLSLERFVDLSSHGPNRIFGMARKGRIAVGYDADLTIVDMKRRETITHEQAGSKAGWTPYHGKTVTGWPVGTFVRGIKVMWEAEIVNPHKGEPVEFLEALPRR

SEQ ID NO: 8348 - protein, 483 aa, Pseudomonas aeruginosa UCBPP-PA14
MQLKDAKLFRQQAYVDGAWVDADNGQTIKVNNPATGEIIGSVPKMGAAETRRAIEAADKALPAWRALTAKERANKLRRWFDLMIENQDDLARLMTIEQGKPLAEAKGEIAYAASFLEWFGEEAKRIYGDTIPGHQPDKRIIVIKQPIGVTAAITPWNFPSAMITRKAGPALAAGCTMVLKPASQTPYSALALAELAERAGIPKGVFSVVTGSAGEVGGELTSNPIVRKLTFTGSTEIGRQLMAECAQDIKKVSLELGGNAPFIVFDDADLDAAVEGALISKYRNNGQTCVCANRLYVQDGVYDAFVDKLKAAVAKLNIGNGLEAGVTTGPLIDAKAVTKVEEHIADAVSKGAKVVSGGKPHALGGTFFEPTILVDVPKNALVSKDETFGPLAPVFRFKDEAEVIAMSNDTEFGLASYFYARDLARVFRVAEQLEYGMVGINTGLISNEVAPFGGIKASGLGREGSKYGIEDYLEIKYLCLGGI

SEQ ID NO: 8349 - protein, 371 aa, Listeria monocytogenes EGD-e
MDYEKALAFIKSNSTLEQEEGTEVIFKQAQETARGNLDPFLLKDLKQHLGGTNDAIKEAPQEIQMPDFSNLEIATAAALQMRATMGSPNIDLSNGVTTEYRVVEGDYGDIPVRIYRHEEATKPVPAFIFYHGGGFVGGTPAVVENFCKGIAEKLPAVVINVDYHLAPEFPAPAAPKDCYRVLEWVVEQSNELGIDASKIGVSGDSAGGTLAAAVSYMDYEAETNYVGFQALLYPALTLVDEDNDKYQWDISKFGASEDTLPLVAPGIIGMNSSGELLRKAYVRDENPAAPIYSPLSAVDKSIYPPTLIASAEFDALRAFADVFAKELRASGVQTKAIVYQGMCHAFIDKYGIFPQAEDVADEIVQMMKEIF

SEQ ID NO: 8350 - protein, 136 aa, Triticum aestivum
MSEAVGTPESSGAKEQERFLPIANIGRIMRRGVPENGKIAKDAKESIQECVSEFISFITSEASDKCMKEKRKTINGDDLIWSMGTLGFEDYVEPLKLYLKLYREMEGDTSKGSISEQAAKKVGALNGQPGSSFNGM

SEQ ID NO: 8351 - protein, 439 aa, Methanosarcina mazei Go1
MVSDPDGGLNEKTEKNSEYNSQKASGQGTEKDIEPDDGTHASLYQESLAMHRRLGGVLEVASKVRLRTIHDLGVAYTPGVAEPCRKIRENRDLAYLYTLKKNTVAVVTDGSAVLGLGNIGPYAALPIMEGKAIIFKEFAGIDAFPICLGTQDTEEVIKAVKNMAPAFGGINLEDISAPRCFEIEARLREELEIPVLHDDQHGTAIVVFAGLLNALKIVKKDLAELKIVISGLGAAGVAILKFLVRAGANPAKILACDSQGIVYEGREKGMNTIKDEISRITNPERLKGELKEVFPGADLFIGVSVGGIVTGSMVRSMAKDAIVMAMANPVPEIMPEAAKRAGARIVATGRSDFPNQLNNCLSFPGIFKGALGTCARKITPEMEMAAAHALANVVTSGELSEDHIIPDPLDKHVVPAVAKAVASASLESCAARKRLEETF

SEQ ID NO: 8352 - protein, 479 aa, Chloroflexus aurantiacus
MYIHWFRRDLRLRDNTALMAAATAAGGAVVPVFIFDDAILRGRFASPARTQFLLDCLAALDAELRTFGLHLVVRRGDPLRTLFDVLRESGASGVTWNRDYTPYAVRRDTAIKQALREAGYEAHSFKDTVIFEMKEVATADGRPYTVYTPYAKRWRSRLAAEPVTVQDMPRLATIPLPVSEPLPHLTDLLPDAPATLPRFPAGEAVALEALERFVRGPLASYAQGRDLMAVAGTSRLSPYLRLGVLSPRQCVAAALAAPPGPGPESWIGELIWRDFYVQVLYHFPHALRGSFKPAYNRIDWPNDPVLFAAWQQGLTGYPIVDAAMRQLQREGWMHNRARMIVASFLTKDLLIDWRWGERHFMHLLIDGDPAANNGGWQWAAGTGTDAQPFFRIFNPVSQGQKFDPEGAYVRRYVPELVNVPTRYIHEPHKMSLAEQRKAGVLIGRDYPAPIVDHATQRTKALELYRAATRHNDSSAEQYA

SEQ ID NO: 8353 - protein, 301 aa, Neurospora crassa
MAFHKLVKNSAYYSRFQTKYKRRREGKTDYYARKRLITQAKNKYNAPKYRLVVRFTNRDIILQIVSSEITGDKVFASAYSHELKAYGIEHGLTNWAAAYATGLLLARRVLKKLGLDETFKGVEEADGEYKLTEAAETDDGERRPFKAFLDVGLARTSTGARVFGAMKGASDGGIFIPHSENRFPGYDMESEELDAETLKKYIFGGHVAEYMETLADDDEERYKSQFNRYIEDDLEADGLEDLYAEAHAAIREDPFKKAESEAPKKTKEEWKAESLKYKKSKLTREQRAAGVQERIAALRSE

SEQ ID NO: 8354 - protein, 224 aa, Bradyrhizobium japonicum USDA 110
MGSGVMGSSDGFESKKLGVPGQGTSPGRMTPGEHGSGRESGLSPFTGLGEASANLVEVHGVIKWFDASKGYGFIVPDNGWPDVLLHVTVLRRDGFQTAYEGARIVVECIQRAKGYQAFRVVSMDESTAIHPAQMLPPRTHVTVTPTSGLERAQVKWFNRLRGFGFLTCGEGTPDIFVHMETLRRFGMTELRPGQYVLVRFGPGSKGMMAAEIHPETGSPGPQSH

SEQ ID NO: 8355 - protein, 426 aa, Desulfovibrio desulfuricans G20
MSDHISGTLFVSGALLSGRTVDVTVSGGRIAAVSEHGAAPAPQHAETVEAAGKILFPSFIDCHVHLREPGFEYKEDIASGLAAAAHGGFGAVLPMANTSPVNDQGSVTELMLERARKAWPHGPRVHPVGAATKGLKGEELAPMGELAAAGCVAFSNDGLPVGGAEMFRRCMEYAADFGKIVIDHCEDPSLARGTHMNEGVTSGRLGVKGQSVVAESVQVARDILLAEYLGIPVHLAHISCRQSVELIAWAKQRGVRVTAETCPHYLLLDDLALEQYSTAAKVNPPLRTPDDVAAMRRAVADGTIDILVTDHAPHAAHEKDTPLDEAPNGISGLDTAVALTWRLVQEGLLTEADMVRLWCHAPGSLFRLPVNRFTAGDPADFFLFDPAHEWTVTPEAMHSKGKNTPFTGWKLTGKVTSHWMGGHRIA

SEQ ID NO: 8356 - protein, 429 aa, Buchnera aphidicola str. Bp (Baizongia pistaciae)
MQKNNLNFDKQHIWHPYASMIQPTPCILVKSAKGIILKLHNGKKLIDGMSSWWSTIHGYNHPRLNNALKNQINKMSHVMFGGITHYPAISLCKKLIEITPNSLTRIFLSDSGSVSIEIAIKMILQYWQSLGKNKVIFLTIKKSYHGDTFAAMSVCDPKNSFHQFYHNFLPINIFADNPKCSFDGLWNKKDIISFKKLIQKHKDVVAAVILEPIVQSVGGMKFYHPNYLKQVRFLCDLYKIPLILDEIATGFGRTGKFFAFEHSNIVPDVLCIGKAITGGTITLSATLTTDKIANVISNSASGCLMHGPTFMGNPLACAAAYENILILQENKWKIQVKNIETCLRTYLFPLKTHYEVYDVRVLGAIGVVECYHYINISMMQNYFVKNNVWIRPFRKLIYLVPAYIIDNASLKKLINVISNALNYENFFMK

SEQ ID NO: 8357 - protein, 280 aa, Listeria monocytogenes str. 4b F2365
MTLSFSDTYRLNNGIEMPRHGFGVYKLTDEARMRTALETAVDVGYRLFDTASFYHNEKELGDFFASSGLKRDEFFVTTKMWNTEQGYDETLRAFEKSQKKLQLDKIDLYLVHWPKQDTFFDTWRAVEKLYDEGLVRAIGVSNFEAHHLDRLRTSANVLPVVDQLETHPHFPNHLLHRYLEELHIVHQAWSPLGRGGVLQEQILIDLAEKYGKSPAQIVLRWHLQNNISIIPKSETPSRIRENAAIYDFELSEADMRQVERLNTGERVSHAPDVMYVRSEI

SEQ ID NO: 8358 - protein, 275 aa, Bacillus thuringiensis serovar konkukian str. 97-27
MHIPTTTLHNGVKMPLIGLGVYKAKEGDEVKQAVKTALEVGYRSIDTATVYENESGVGEAVRESGIPREDIFITTKVWNDDQGYEETLEAFEKSLKKLQMDYVDLYLIHWPIRGKYVDTYRALEKLYEEGKVRAIGVSNFHKHHLELLLPNCKIKPMVNQVELHPMLTQFELRNFCQGEQIQMEAWSPLMRGGEVFQHPIIQAIATKYEKTPAQVILRWDIQSGIVTIPKSVTPSRIQENFSIFDFSLTEEEMTEINTLNRNLHVGTNPDKYDTL

SEQ ID NO: 8359 - protein, 509 aa, Brassica rapa
MTSVNVKLLYHYVITNLFNLCFFPLTAIVAGKAYRFTIDDLHHLYYSYLQHNLITIASLFAFTVSGFGLYIARLPKPLYLVEYSCYLPPRHLKVSVSKIMDIFYQIKADTSSRNVACDDPSSLDFLRKIQERSGLGDETYSPEGLIHVPPRKSFAGSREETEKVIIGGIENLFENTKVKPKDIGILVVNSSKFNPTPSLSAMVVNTFKLRSNIKSFNLGGMGGSAGVIAIAIDLAKDLLHVHKNTYALVVSTEGITQGIYAEENRSMMFSNCLFRVGGAAILLSNKSGDRRRSKYELVHTVRTHTGADDKSFRCVQQGDDEDGKTGVCLSKDITNVAGTTLTKHIAICRPLILPLSEKFLFFATSVAMKLLKDKIKHYYVPDFKLAVDHFCIQPGGRAVIDELEKNLGLSPIDVEASRSTLHRFGNTSSSSIWYELAYIEPKERLKKGNKKGWQIALGLGFKGNSAVWVALNNVKASANSPWEHCIDRYPVKNDSDLSKSKHQVQNGRS

SEQ ID NO: 8360 - protein, 457 aa, Trichodesmium erythraeum IMS101
MIKLPGPKSPALTQILQWTAKPIKFMEKCAREYGDTFEVKLNYPIVFISHPKAIEEIFKANPKKFDCGSSNKLAQPLLGDYSLLLLDDIPHQRQRKLLMPPFHGKRMQAYGELICNVAQEVASKWEIGQVFSMREFTAEISLKVILQAVFGLYEGERYSKLEKLLGSLLESLSSPLKTSMLFFQFLQIDLGPWSPWGNFIKNREEIYELLCAEISERRQKLDPERSDILTMLLLARDEEGEGMSDIELRDELMTLLIAGHETTATSLSWAFYWIHHQPEIYQKLSRELETFGDDLNPMTVINLPYMNAVCSETLRIYPVVIIVSPRKTKLPITIMGQTYPAGTALTPCIYLTHHREDLYPEPKKFKPERFLERQYSSYEFLPFGGGNRRCIGAAFAMFEMKIVLATILRRYSLALAEKQEVKPLRRGLTLAPAGGVKMVMTGKLMQTEKKFPSVATV

SEQ ID NO: 8361 - protein, 503 aa, GIBBERELLA ZEAE PH-1
MFSLLFLQFFEQHFIATAILLLLPIPLRAIETYLRRWRLAQAQGCQDAASKVPVKDPIVGFDFLYKVFFGKAPERYLDSTWQAFKEMGTTYIERRWSWQCVYTCDPHNLKHILASACEDFDLPEFRTSVIGHVFGQGIFVLSGHTWKHARAVLRQSFRKGNPTPFLETLERNFQAFSKHVPTDGSAFDLQPLFLAFAMDVSTEFLMGHSTNMLSDKADHTREQQFVDDYMICSEEIIQQMQLGPLHRLKFNFAANRAKKRVYEYLDIFIEESLNSPRQGSKVSFLTDMMAIAGDRKGLSDHILHILLASRDTTSSLLSNLFFFLSKNPRIYNKLRDQVLNVAGHEPPTASQLKELTYLKWCVNESLRLHPVIPTNARVAVRDTTIPRGGGADGTSPLFISKGTALFYNVYAMHRNKDVFGPEPEEFIPERWEDLRPGWGYLPFNGGARACIGQQYALLETHYVVARMAQTYTLLESRDDGDWMEFLDWFQWSIWTEDLMGANR

SEQ ID NO: 8362 - protein, 192 aa, Schizophyllum commune
MQTIKCVVVGDGAVGKTCLLISYTTNKFPSEYVPTVFDNYAVTVMIGEDPYTLGLFDTAGQEDYDRLRPLSYPQTDVFLVCFSVTSPASFENVKEKWFPEVRHHCPGVPCLIVGTQIDLRDDSQVIEKLARQKQRPVTSDQGERLARELGAVKYVECSALTQKGLKNVFDEAIVAALEPPVVKKKGPKCVIL

SEQ ID NO: 8363 - protein, 216 aa, Arabidopsis thaliana
MAYQIDQKMIHDQEPMAEIMPNVITAMSSLLQRVSETNDDLSRPFREHKRISAFNAVTKPSISIRSYMERIFKYADCSDSCYIVAYIYLDRFIQKQPLLPIDSSNVHRLIITSVLVSAKFMDDLCYNNAFYAKVGGITTEEMNLLELDFLFGIGFQLNVTISTYNDYCSSLQREMVMRTMYSPLLEPAFLVRSFHKNLLKNLYDEDHRNSQVTSAV

SEQ ID NO: 8364 - protein, 122 aa, Vibrio parahaemolyticus RIMD 2210633
MSITNEQILDAVAEMSVMQVVELIEAMEEKFGVSAAAAVVAGGAAAGAAVEEQTEFDVILESAGGNKVAVIKAVRGATGLGLKEAKALVDGAPAPLKEGVDKAEADALKAQLEEAGATVAVK

SEQ ID NO: 8365 - protein, 174 aa, Glycine max
MSDAPASPSHESGGEQSPRGSLSGAAREQDRYLPIANISRIMKKALPPNGKIAKDAKDTMQECVSEFISFITSEASEKCQKEKRKTINGDDLLWAMATLGFEDYIEPLKVYLARYREAEGDTKGSARSGDGSATPDQVGLAGQNSQLVHQGSLNYIGLQVQPQHLVMPSMQSHE

SEQ ID NO: 8366 - protein, 235 aa, uncultured bacterium
GISHGIDALVVIGGDGSLTGAHLFYQEYGIPAIGLPGTIDNDLSGTDSTIGFDTACNTAIEAIDKIRDTATSHDRLFFVEVMGRDAGFIAINAGIGSAAAAILIPENKTPIETLVEKLKTRTKAKKTSNIFIVAEGGKSGSAQEIADKVKKHLPYYDIKVTILGHLQRGGAPTSFDRLLSFQMGVAAIEGLMAGKYDVMAGMINNKIVYTPIVKAIVDDKTVDEEDLRVANILST

SEQ ID NO: 8367 - protein, 211 aa, Zea mays
MDPMDIVGKSKEDVSLPKSTMTKIIKEMLPPDVRVARDTQDLLVECCVEFINLLSSESNDVCSRDDKKTIAPEHVIRALQDLGFKEYVEEVYAAYEQHKLETLDSPKATKFTGIEMTEEEAVAEQQRMFAEARARMNNGAAKPKEPALEPQNQPQQPPQPQLQLHPTAQQPPQPQSQLHHPQSQQPLHPQLQPYTQAAPQQPLHPQLQPYT

SEQ ID NO: 8368 - protein, 298 aa, Clostridium tetani E88
MGYVICYNKLTSERKINMDINWFPGHMAKTRRELKENLKMVDAIIEIRDARIVKSSANPEIENICGNKPRIILLNKSDLGEEKVTNEWIKALSGENTKVIAINSLKDSGMKKIKNAIDDLLKEKTEKLKAKGLKNIVNRVMVVGIPNVGKSTFINRMAKSSIAKTGDRPGVTKSRQWIKTKIGVELMDTPGILWPKFEDEKVGLNLAFTGAIKDEIMDIETLALNLIERLSEDYGENLKERYKLDKLEEIPLDNMENIAKKRGAILGRGEIDYNRVAIMILDEFRGGKLGRISLEKPE

SEQ ID NO: 8369 - protein, 254 aa, Zea mays
  unsure (1)..(254): unsure at all Xaa locations
MSSLYDVSCFAAGLAGNVFALALFLSPVPTFKRVLKAKSTEQFDGLPYLLSLLNCCICLWYGLPWVSDGGRALVATVNCTGALFQLAYISLFIFYADSRTTRLKVAGLLVLVVFAFALIAHASIAFFDQPLRQLFVGSVSMASLVSMFASPLAVMGVVVRTECVEFMPFYLSLSTFLMSASFAVYGLLLRDFFIXSRMGSESSWEQCSWCCTRTTAGDGKAATRQHRCLPDHVAEFVSPIARAVLSVVLCSAIL

SEQ ID NO: 8370 - protein, 128 aa, Glycine max
  unsure (1)..(128): unsure at all Xaa locations
ASSMISSPPVTTINRAXAGMAATFTGLTSMAGSPTRNTNNDITYIASNSGRVHCMHVWPPDDKKNFETISYLPDLDDAQLAKEVKYLLRKGWIPCLEFELEHGFVFREHNKSPEYYDGHYCTMWKPPI

SEQ ID NO: 8371 - protein, 441 aa, Azoarcus sp. EbN1
MVHVNISPFKFWRDIERPMNGLHLIADLYRCGTTAAALTEREALETLCVTQCREAGLTPLGSYFYQFRDESGAAAGVTGTVVLAESHLAIHTWPESGGVTLDVYVCNFSRDNGDRARMVYRAVIDALRPAEIVGHEVVRGRLPEKGVAGPMPLPAVEGVIFEQLNDNAGYFTRGGKLIEKGRSRYQEYEVWETPQFGRLFRLDGCFMTSERDEFHYHENLIQVPCIAHPAPARALILGGGDGGSAEELLKQPAMAKIVIAELDEKVIEIAREHLQAVHRGALDDPRIELRIGDGFRYVMEEAPAAAERFDLIVLDLTDPVGPAEALYSEDFFRGCRALLAPGGAISLHIGSPAFQPERLRTLVARLRDVFAIVRPYFLYVPLYGTLWGFATASDTLDPAALSAAEVDRRLAERRIGALQHYNGAVHCAQFALPNHLRTLLG

SEQ ID NO: 8372 - protein, 449 aa, Glycine max
  unsure (1)..(449): unsure at all Xaa locations
MEHFNNDDLEYVVDEYYDVPDFAVEDTSSDIVPELTSDVDSDFEDEFPTSNAKTDTTASEARNGKDIQGIPWERLNYSRDKYRETRLKQYKNYQNFSRSRHDLRKECLEVQKGETFYDFFFNTRLVRXTLAGPNIMLRNLLWATSKHDVYFMQNYSVMHWSALLRRGKEVLNVAKPIIPTLKRPGFLAQPVSRVQISTMTVKENLMVAGGFQGELICKNLKHPGVLFCGKITTDDNAITNAVDVYSNPAGSLRVITANNDFQVRVFDAENFASLGCFKYDWSVNNTSVSPDGKLLAVLGDSTECLIADANTGKITGSLKGHLDYSFSSAWHPDGQILATGNQDKTCRLWDIRNLSQSMAVLKGRMGAIRALRFTSDGRFLAMAEPADFVHIFDSHSGYEQGQEIDLFGEIAGISFSPDTEALFVGIADRTYGSLLEFNRKRHYNYLDSF

SEQ ID NO: 8373 - protein, 180 aa, Zea mays
MASSMLSSAAVGTSPAQATMVAPFTGLKSSAAFPVTRKANNDITSITSNGGRVSCMQVWPPIGKKKFETLSYLPDLTDAELAKEVDYLLRNKWIPCVEFELEHGFVYREHGNSPGYCDGRYWTMWKLPLFGCTDSAQVLKEVEECKKEYPNAFIRIIGFDNTRQVQCISFVAYKPPSFTG

SEQ ID NO: 8374 - protein, 57 aa, Glycine max
MAGDGAATCIDILLAIILPPLGVFLKYGCQVEFWICLVLTLFGYIPGIIYAVYAITK

SEQ ID NO: 8375 - protein, 490 aa, Lotus corniculatus var. japonicus
VALMILRKNLKKPDSIPNIPPGPWKLPIIGSIPHLVGSPPHRKLRDLAKKYGPLMHLQLGEVIFIIVSSAEYAKEVMKTHDVTFASRPRSLFTDIVFYGSTDIGFSPYGDYWRQVRKICNVELLSMKRVQSLWPIREEEVKNLIQRIASEEGSVVNLSQAIDSLIFTITSRSAFGKRYMEQEEFISCVREVMKLAGGFNIADLFPSAKWLENLTRMRSKFEYLHQKMDRILETIIDDHKANSRTKEGQVEGGEEDLIDVLLKYENSSTDQDFHLTIRNIKAILFDIFIAGSETSATTINWTMAEMMKDPILLKKAQDEVREIFQRRGKVDETCIYELKYLKAFINEVLRLHPPGPLVFRECRQACEINGYHIPAKSTVLVNTFAIGTDSKYWAEPERFCPERFIDSSIDYKGTNFEHLPFGAGRRICPGINYGMANVELVLALLLYHFDWTLPKGIKNEDLDLTEEFGVTVSKKEDLCLIPSISHPLPST

SEQ ID NO: 8376 - protein, 502 aa, Zea mays
LQLGGDVSGGRLSVDASDIAEASRDFGGLSRAEPMAVFQPRAAGDVAGLVRAAFGSARGFRVSARGHGHSISGQAQAPGGVVVDMGHGAVARAPPVYSPALGRHYVDVWGGELWVDVLNWTLSHGGLAPRSWTDYLYLSVGGTLSNAGISGQAFHHGPQISNVYELDVVTGKGEVVTCSETENPDLFFGVLGGLGQFGIITRARIALERAPQRVRWIRALYSNFTEFTADQERLISLGSRRFDYVEGFVVAAEGLINNWRSSFFSPQNPVKLSSLKHHSGVLYCLEVTKNYDDATAGSVEQDVDALLGELNFIPGTVFTTDLPYVDFLDRVHKAELKLRAKGMWEVPHPWLNLFVPASRIADFDRGVFRGVLGGGTAGAGGPILIYPMNKHRWDPRSSVVTPDEDVFYLVAFLRSALPGAPESLEALARQNRRVLDFCAEAGIGAKQYLPNHKAPGEWAEHFGAARWERFARLKAQFDPRAILAAGQGIFRPPGSPPLVADS

SEQ ID NO: 8377 - protein, 442 aa, Coxiella burnetii RSA 493
MLENDMQRLDSQHVWHPCSQMKDYEQFKPLIIKKAYGSYIELSNGQKIIDAISSWWCKSLGHNHPKLKEALKQQLEKFEHVIFANTTNEIIVALSQQLAALLPGLNKVFYAGDGSCAVEIAMKMSLHSRIIQGNKKRKKFIALKNSYHGETVGALSVSDVGLYRAPYSTMLFEPYFIESIPYVLNTQAPEWNDCSAHWDTVERLFEPHAETATAILVEPIVQGASGMKIYSQDFLARLFQWAKNNHIHFIADEIMTGIGRTGKMLACEHAGIIPDFVCLSKGLTSGYLPFSAVLTSDEIYQLFYDDYQTGKAFLHSHTYSGNALAAAVALATLKVFSEEKICARAHKLGKFMLEKMTQVAQETGQLENVRGIGALVAADLIPQPGRLRLGYEVYQEAVKQGVLLRPIGNTLYWLPPLNIDFDLIEVLQKVTKNAIKILSLGF

SEQ ID NO: 8378 - protein, 499 aa, Glycyrrhiza echinata
MEILSLLSYSVFYLALFFIFNIVIRARKFKNLPPGPPSLPIIGNLHHLKRPLHRTFKGLSEKYGHVFSLWFGSRLVVVVSSASEFQQCFTKNDVVLANRPRFLSGKYIFYNYTTLGSTSYGEHWRNLRRITALDVLSNHRINSFSGIRRDETQRLITRLADDSSTNFAEMELSSRLYDMTFNNIMRMISGKRYYGEDCDTSDLQEASQFRDMVSELLQLSGANNKTDFMPLLRFLDFENLEKRLKDISGKTDAFLRGLIEEHRTKKERANTMIDHLLNLQDSQPEYYTDQIIKGLALAMLLAGTDSSAVTLEWSMSNLLNHPEVLKKVKDELDTHVGQDRLVDESDLPKLTYLKNVINETLRLYTPAPLLLPHSTSDECNIGGYKVPQDTIVLINAWAIHRDPELWTEATTFKPERFEKKGELEKLIAFGMGRRACPGEGLAIRAISMTLALLIQCFDWKLINGDKIDLAERDGFTLTKLVPLKAMCKSRPVINKVFKQ

SEQ ID NO: 8379 - protein, 272 aa, Shigella flexneri 2a str. 301
MKPENKLPVLDLISAEMKTVVNTLQPDLPSWPATGTIAEQRQYYTLERRFWNAGAPEMATRAYMVPTKYGQVETRLFCPQPDSPATLFYLHGGGFILGNLDTHDRIMRLLASYSQCTVIGINYTLSPEARFPQAIEEIVAACCYFHQQAEDYQINMSRIGFAGDSAGAMLALASALWLRDKQIDCGKIAGVLLWYGLYGLRDSVTRRLLGGVWDGLTQQDLQMYEEAYLSNDADRESPYYCLFNNDLTREVPPCFIAGAEFDPLLDDSRLLY

SEQ ID NO: 8380 - protein, 238 aa, Oryza sativa (japonica cultivar-group)
MGEEAPEEYELGGGEDERVMEWEAGLPGADELTPLSQPLVPAGLAAAFRIPPEPGRTLLDVHRASAATVSRLRRASSSSSSSFPAFASKGAGAGADEAESGGGANGGNGNTNNNSSKRARLVWTPQLHKRFVEVVAHLGMKNAVPKTIMQLMNVEGLTRENVASHLQKYRLYVKRMQGLSNEGPSPSDHIFASTPVPHASLHDQVPSPYHPHPHHHSYNNAAYAATVSSYHHYHHANH

SEQ ID NO: 8381 - protein, 497 aa, Pseudomonas aeruginosa UCBPP-PA14
MTTLTRADWEARAKDLKIEGRAFVNGEYSNAASGETFDCLSPVDGRFLAKVASCDLADAEQAVKVARNAFDSGAWSRLAPAKRKQAMIRFADLLLENAEELALLETLDMGKPISDSLHIDVASAANSLRWSAEAIDKIYDEVAATPHAELGLVTREPVGVVAAIVPWNFPLLMSCWKLGPALATGNSVILKPSEKSPLTAIRIAQLAVEAGIPKGVFNVLPGYGHTVGKALALHMDVDTLVFTGSTKIAKQLMVYAGESNMKRVWLEAGGKSPNIVFADAPDLKAAAEAAAGAIAFNQGEVCTAGSRLLVERSIKDKFLPLVIEALKGWKPGNPLDPETNVGALVDTQQMNTVLSYIEAGHNDGAKLVAGGKRTLEETGGTYVEPTIFDGVTNAMKIAREEIFGPVLSVIEFEDAEEAVRIANDTPYGLAAAVWTSNLSKAHLTAKALRAGSVWVNQYDGGDMTAPFGGFKQSGNGRDKSLHAFDKYTELKATWIKL

SEQ ID NO: 8382 - protein, 478 aa, Buchnera aphidicola str. Bp (Baizongia pistaciae)
MNVNLMWFRNDLRLSDNSALHFSCRNNASTVLALFIATPKQWERHCLAPKKKMLIYKNIVALKKKITELGIIFYYYESTDYLESTNYIIEFCKIHKVTSIFFNLEYEFYERQRDKIIKKKLKKNNIIINCFHDSVLITPGSIKNSYGKMYKKFSYFKYKCIKQLQLNIPSCFPKPQNKNLHDHYSLDFTIPIFHTYLEKFDANIFPIGEDIVYEKLKFFIKYAFNKYNFDQEIFELNSTSMLSAHLSIGVISPRQCVTLLFKEYPDIIHKLEECKWINELLWREFYQHLLYFYPNIGQNQSLYHWENRIKWDNNLYYLNLWKQGNTGYPIIDAGMRQLKQLGWISNRLRMITASFLVKNLLIDWRKGEEYFMSQLIDGDFASNNGNWQWIASVGTDSMPYFRIFNPMLQSKKFDINAKFIRKYIPELSNVSTYNIHNPCDNNKTNKIHSKYPQPIINYYHSKKKTLLVFKHAKCSNKL

SEQ ID NO: 8383 - protein, 400 aa, ASPERGILLUS NIDULANS FGSC A4
MAPRTMKALNYVGPFNVKVQEVEMPCLEHPDDIIVKITSAAICGSDLHMYEGRTAAEAGITFGHENLGIVEELGDGVTLLKKGDRVVMPFNVADGRCRNCEDGKTAFCTGVNPGFAGGAYGYVAMGPYRGGQAQYLRVPYADFNALKLPPGTEHEADFILLADIFPTGWHGIEISGFQPGDSVAVFGAGPVGLMAAYSAQIRGASRVYVVDRVPERLRAAEKIGAVPIDFTAGDAVDQIIAANGGEMVDRSVDAVGYQAVSGTKDNATEVPNIVLENMIRVTRACGGLGIPGLYVPSDPGAGDTATAKGMISLSFGKLFEKGLTLGTGQCNVKAYNRQLRDLIIAGKARPSFVVSHEISLDEAEIAYDKFDKRIEGYTKVIIHPNGGFQDKRPPVVNSPL

SEQ ID NO: 8384 - protein, 487 aa, Eschscholzia californica
GTSTVALIAVIISSILYLLFGGSGHKNLPPGPKPWPIVGNLLQLGEKPHAQFAELAQTYGDIFTLKMGTETVVVASTSSAASEILKTHDRILSARYVFQSFRVKGHVENSIVWSDCTETWKNLRKVCRTELFTQKMIESQAHVREKKCEEMVEYLMKKQGEEVKIVEVIFGTLVNIFGNLIFSQNIFELGDPNSGSSEFKEYLWRMLELGNSTNPADYFPMLGKFDLFGQRKEVAECLKGIYAIWGAMLQERKLAKKVDGYKSKNDFVDVCLDSGLNDYQINALLMELFGAGTETSASTIEWAMTELTKNPKITAKIRSEIQTVVGERSVKESDFPNLPYLEATVKETLRLHPPTPLLLPRRALETCTILNYTIPKDCQIMVNAWGIGRDPKTWTDPLTFSPERFLNSSVDFRGNDFSLIPFGAGRRICPGLPIANQFIALLVATFVQNLDWCLPNGMSVDHLIVEEKFGLTLQKEPPLFIVPKSRV

SEQ ID NO: 8385 - protein, 364 aa, Zea mays
GRVGAEEAISLVEALAVQLTQREGELIYEKAEVKKLANFLKQATEDARKVAEEERALALAEIEKARAAIEKVEKAWHVHDFASSSREKAEIEELRKEVREARRIKMLHQPSKVMDMEFELQALRTLISEKTQLCNQLKKELAMIKRLEDDSSGLFELEGSNTLGSQLCIIPRVDGASNIANCPIQWYRVISGGTRELISGATKFMYAPEPFDVGRLLQAEIVLNADKIIVQTDGPVDNAAGLERYVDSLMKRTDIEFNVVVTQMNGKDYSSNSVHVFHIGKLRIKLRKGWSTKARESYSTTMKLCGSRGGGNAAARAVFWHPRKGSSYTLAFETDRDRNAAIMIARKFASNCNIALAGPGDQGT

SEQ ID NO: 8386 - protein, 411 aa, Chlamydomonas reinhardtii
MQIGFVSAESGQGRAKNVRNILLKNSVNIMLCAICWWAVGYAFAYGNSGGGFIGTSRFFSDGESFGSKPWFFTWTFCLSCVTIASGCLAERTHLFVYPVYTAVVSIAVHPVIAHWVWAPDSWLNSMTGSPCRFLDFAGGAVVHTVGGLTGLIGAMLCGPRLGRFEDGVGKDIPGHDVSSVSLGSLMLWFGWYGFNCGSTYIYMAQGGSEASAAVSRVALNMTLCASVAGMTSLVVSSIQTGTFDLAVCCNGLMAGLSASTSNVGFLTPWAACITGALAGLLYVGISRLLVRMGVDDPLDSSAIHCGSGILGVLVSGFLARPSYVMQMVGCNCGGVVYATNGGMQLGMQLLGLSCSMVWTAMWALLTFGILKKLQLLRVDQQTELAGIDNMEHGGPAYPEFLQRVQSTRPGY

SEQ ID NO: 8387 - protein, 170 aa, Triticum aestivum
MAAFLRSKCSSVGRTLMGSVGNNLYGGINSSAETVTRPSHCDAISQQIRTFIQMRTNLKVVDNSGAKRVMCIQSLRGKKGARLGDMIIGSVKEAQPRGKVKKGDVVYGVVVRAAMKKGRSDGSEVQFDDNAIVIVNNKGELIGTRVFGPVPHELRKKKHLKILALAEHIV

SEQ ID NO: 8388 - protein, 277 aa, Streptomyces coelicolor A3(2)
MSSKVPPIILNNGVEMPQLGFGVWQVPDDDAQTAVALALEAGYRSIDTAAIYGNEEGTGRAIAASGLAREDLFVTTKLWNSDQGYDSTLRAFDTSMAKLGLEYLDLYLIHWPMPAKERYVDTYKAFEKLLADGRVRAIGVSNFLPEHLERLTAETSVIPAVNQIELHPHLQQHAAREVHAEQGIATEAWSPLGSGKGILDIPAIVAIAQKHGRTPAQVVLRWHLQLGNVVIPKSVTPSRIKENIDVFGFSLDTEDLAAISALNEDRRLGSDPADVNS

SEQ ID NO: 8389 - protein, 159 aa, Triticum aestivum
MAGMVFGLENPMMTALQHLLDIPDGETGAPGGEKQGPTRAYVRDARAMAATPADVKELPGAYAFVVDMPGLGSGDIQVQVEDERVLVISGERRREEKEDTKYLRMERRMGKLMRKFVLPENADMEKISAVCRDGVLTVTVEKLPPPEPKKPKTIQVQVA

SEQ ID NO: 8390 - protein, 320 aa, Buchnera aphidicola str. Bp (Baizongia pistaciae)
MIKRIGVLTSGGDAPGMNAAIRGVVRTALSRNLEVFGIYDGYLGLYENRMILLDRYSVSDIINKGGTFLGSARFSNFFKKDIRSIAIKNMQQRNIDFLVVIGGDGSYVGAQKLTEMGFPCISIPGTIDNDVAGTDYTIGYFTALETVVEAIDRLRDTSSSHQRISIVEVMGRNCGDLTLSAAIAGGCEFIVLPEIEFTKEELVKEIKNGIKKGKKHAIVAITEYICNVEKLAKYIQRETCRETRATILGHIQRGGAPVVYDRILASRMGEYSVDILLQGFQGRCIGTINEKMVHHDISDALKNMKRPFKFDWLKTAKQLY

SEQ ID NO: 8391 - protein, 78 aa, Glycine max
  unsure (1)..(78): unsure at all Xaa locations
FERFFPQXSARLSVPGGPSVACSTAKAVEWDAAWSNNLDPSXRAALGVHASAYGNQVKAVEPEKXIHTMEVSPXGVAI

SEQ ID NO: 8392 - protein, 340 aa, Methylococcus capsulatus str. Bath
MHKITLIPGDGIGPSIVDAAVKVIEATGVQVQWDTQSAGMAAVEKFGTPLPDATLDSIRANRICFKGPLTTPVGGGYRSVNVTLRQAFNLYANVRPAISFEGTDTAFSDVNLVTVRENTEGLYAGIEHFIKVDEEKIAAESIAVVTRKGSERIIRYAFDYARRARRKKVTLVHKANILKCTSGLFLEIGREIAKEYPDIEFDDRIVDACSMQMVMQPQRFDVLVTTNLFGDILSDLAAGLIGGLGLTAGANIGTDAALFEAVHGSAPDIADKGIANPTAMIMAGAMMLEHIGEPDAARRIERAVREVIEDGRSVTPDLAKDSPCGTAQMAEAIVERVRQA

SEQ ID NO: 8393 - protein, 284 aa, GIBBERELLA ZEAE PH-1
MDTALTAASRLSLRNSTSIIPCIGFGSYKIRGETCAAAVLAALPAGYRHIDSAALYRNEVRVREAIEQSGVFREDLFLTTKVGSPRRKTEKTEAYEDVIEAVERIAGKDGYVDLLLMHVPGPSREHRHSLWEAMERAKREARARNIGVSNFRVRHLDEMKEYATEWPPSVNQIELHPWCQQKEVVKYCQDNEIIIEAYSPLATGARLEDPLVEGISTKHDKSHAQVLIRYSLQKGWVPLPKSSRPDRISENFNVFDFVLDEDDMETLDDLDKGSAGAIFKMNVG

SEQ ID NO: 8394 - protein, 654 aa, Zea mays
  unsure (1)..(654): unsure at all Xaa locations
MISARTAAASPASLWKRGGRSEGGGSCDGCRTYRNTLRRAAAAKVRALPSGAVEAVKMGSAAEVEQEEAEVAAAADGVVVEDHYGEDSATEELPIMPWAFSVASGYTLLRDPHHNKGLAFTEKERDAHHLRGLLPPAVVPQELQIKKIMHNLRQYQVPLQRYMAXMMDLQERNERLFYKLLIDNVEELLPVVYTPTVGEACXQKYGSIFRQPQGLYVSLRDKGKVLEVLRNWPHRNIQVICVTDGERILGLGDLGSQGMGIPVGKLALYTALGGVRPSACLPITIDVGTNNEKLLNDEFYIGLRQKXRATGEEYXMSLMEEFMAAVKQXIYGEKVLIQFEDFANHNAFNLLAKYSKSHLVFNDDIQGTASVVLCRFVSSTQRWLVGTLAEHTYLFLGAGEAXGTGIAELIALEISKQTSAPIEECRKKIWLVDSKGLIVDSRKNSVQSFKKPWAHEHEPLTTLYDAVQSIKPTVLIGTSGVGRTFTKEVVEAMASFNERPIIFSLSNPTSHSECTAEEAYNWTQXVVQYLASGSPFDPVEYDGKVFVPGQSNNAYIFPGFGLGLVISGAIRVHEDMLLAASEAXLAAQATQENFDKGSIFPPFTNIRKISARIAAAVAAKAYELGLATRLPPPRXDLVKYAQSCMYTPVYRNYR

SEQ ID NO: 8395 - protein, 189 aa, Triticum aestivum
  unsure (1)..(189): unsure at all Xaa locations
MAPTVMASSATSVAPFQGLKSTAGLPVSRRSNGASLGSVSNGGRIRCMQVWPIEGIKKFETLSXYLPPLSTXEALLKQVDYLIRSKWVPCLEFSKVGFIFREHNXSPGYYDGRYWTMWKLPMFGCTDATQVINEVEEVKKEYPXDAYVRIIGFDNMRQVQCVSFIAFKPPGXCEESGKALNSSLTTGHI

SEQ ID NO: 8396 - protein, 355 aa, Fusarium oxysporum f. sp. lycopersici
MSRSNPPNAAGSRKISFNVSEQYDIQDVVGEGAYGVVCSAIHKPSGQKVAIKKITPFDHSMFCLRTLREMKLLRYFNHENIISILDIQKPRNYESFNEVYLIQELMETDMHRVIRTQDLSDDHCQYFIYQTLRALKAMHSANVLHRDLKPSNLLLNANCDLKVCDFGLARSAASQEDNSGFMTEYVATRWYRAPEIMLTFKEYTKAIDVWSVGCILAEMLSGKPLFPGKDYHHQLTLILDVLGTPTMEDYYGIKSRRAREYIRSLPFKKKVPFRTLFPKTSDLALDLLEKLLAFNPVKRITVEEALKHPYLEPYHDPEDEPTAPPIPEEFFDFDKHKDNLSKEQLKQLIYQEIMR

SEQ ID NO: 8397 - protein, 214 aa, Bacillus subtilis subsp. subtilis str. 168
MQATVHESKQSIMQRILTVFVFTLLIATVGLFIGQFVPVALMLPLSILEVAMIILAFWMRRRKAVGYAFVYTFAFVSGITLFPIVSHYASIAGAYVVLEAFGSTFVIFAVLGTIGAKMKKDLSFLWSFLLVAVLALAVVGIFNIFSPLNSAAMMAYSVIGTIVFSLYILYDLNQIKHRHITEDLIPVMALSLYLDFINLFINLLRFFGILSSDD

SEQ ID NO: 8398 - protein, 165 aa, Leptospira interrogans serovar Copenhageni str. Fiocruz L1-130
MRFDMNDTLYDLTATLNNGKEQKLENYKGKVLLIVNTASECAFTPQYAGLQNLYSKYKTEGLEILGFPCDQFKHQEPGSDETIKNFCQKNYGVEFPIFKKIEVNGDNAHPVFRFLRNKASGFFGNSIKWNFTKFLVDKQGNVIKRYSPITTPENIEKEIQNLLKR

SEQ ID NO: 8399 - protein, 145 aa, Brassica napus
VFGALKGALDEGLDIPHSDKRFAGFNKENKQLDADIHRNYIYGGHVSNYMKMLNEDEPEKFQTHFSQYLKKGVDAETMEELYKKVHAAIRADPNPKKTEKPAPKAHKRYNLKKLTYEERKNKLIERVKALNGAAGGADDDEDDEE

SEQ ID NO: 8400 - protein, 252 aa, Zea mays
HASVYDAICQARRLIYIIGWSMFHTIHLVRDGHDDMALGDLLRRKSQEGVQVLLLVWDDPTSRRLLGIKMEGYMGTRDEETRRFFKHSSVQILLCPRSAGKRHSWVKQQETGTILTHHQKTVILDADAGNHRRKIVAFMGGLDLCGGRYDTPKHTLFRTLQTFHKEDYYNPNFAVEDARGPREPWHDLHSKIDGPEAYDVLKNFEERWLKASKRSAAKKLSKLSRSHNDSLLWINKIPDIIAIDDKIYSMTM

SEQ ID NO: 8401 - protein, 511 aa, Agrobacterium tumefaciens str. C58
MRREPIMHEPLTAAEYKAIASDLQFPANAFIDGAFRPAGSGKTFKTINPATGETLADISACDVSDVDYAVGKARAAFDDGRWRLLPPGERKAILLTFAKLLEQHRHELAVMESLDSGKPVSECQTVDIPDTIHTIRWHAELIDKLYDNTAPVGSNALALVVREPVGVVGCVLPWNFPLLMLAWKIGPALASGCSVIVKPAEETTLTTLRVAELAHEAGIPAGVFNVVPGGGKEVGEPIGMHMDVDMVAFTGSTPTGRRFLRYAADSNLKRIVLECGGKNPAVVLDDAEDLDLVAEQVVNGAFWNMGENCSASSRLIVHAKIKDELLQRIGAYMREWRMGDPLDPQNRVGALVSKAHFDKVHSFLEDVKAENLTIVHGGKTEKGIFIEPTVVDAVPPASRLFREEIFGPILSVTTFNTLAEAVALANDTNYGLAASVYTGSLRKAIKLSREIRAGVVTVNCFGEGDATTPFGGYKESGFGGRDKSIFAHDNYCELKTIWIDVSDRSVDETVR

SEQ ID NO: 8402 - protein, 1230 aa, Cryptococcus neoformans var. neoformans
MSSFTPAFRLHHTHSSSVSPTASNDVAPSSPTPNQPHQLAARSPLYATSPNCASKITKGSSLSSSTAHHGLKYVRPSTSPLLRSPKGESFSAYLGNWGSQELITFLNIHKCGQYLAIFQKNDINGKILLDLDMTALKSMGIGKISERVRLIGGIKDLRRCVADESIRAPFTQRSYPSERTLLPSLPSHSNVLLDKWDCSSSASRLGKRQITLRPPPLDLQGHMPPRLLSHASLGIATIDTHDIHTTNSKIEVYIQQNPPGQPQSMPTKRSDSLTLCAAPSRNVGRRSPSSRHFEGCKSQTDGLTTLNLTLDRQVPSSTMNNVTLREDCHLQREERLPLSHQVPHSRNAFASPHKTSLSGRCPLARGDTTSHQPSGPAIAEQDSPVNYRISNTVTNTKEISQGDLKQPFVMKSLESQSHLLAGVSDMSHDPVTDGFKPKGKASVPLTVMSSSDISAVNANPAALSLADLRRQLVKFINTEDDTIRTVNVMHVTSGVEILERALKKFGKFGTGIHGSPDVYGDEDGDGTLEIDGWEVYTESTPDESSKPLSEFNLLKTCTFHREGTAIQDKGLFLRKKQRMQKRKNIQDFFGETPPPSMSPTSPTLITGPHLSLVQGKSQPTSGSAFSSSSRLSTLTHKGRNRASMISVMSGLGVPIINTLPSPQGNGLRLTGSVHSHEKKSMYNFFGHRPPSELISNHLTDYFPSAKKSDVEKARHSLLRLSGGTVAYKKSGIYEGDSTPDHWSKPGDNQPPSLPPFEPSQDTLSDSLQAFASSTPVHLSRPKHTVALRRRRDSDSSSRSHTSMLMQTRRNRDHSDTTSLLTVDEITAEVENRRVSTIQRGDYIEETEDSSSIEGDTLPQDDESKGVLRAICSDSNKLVDSGKSYQGDSDIDQQHELEDEEEDKLDDDEEEEEEEEEEDNEQGKAFTSTGSKRIIKWIKGALIGAGSFGSVYLGMDAQSGLLMAVKQVELSAGSAKNEDRKRSMLSALEREIELLKELQHENIVQYLDSSVDANHLNIFLEYVPGGSVAALLNNYGAFEEALVRNFVRQILTGLNYLHMRGIVHRDIKGANILVDNKGGIKISDFGISKKVENSLITGLRTNRPSLQGSVFWMAPEVVKQTSYSPKADIWSVGCLVVEMLTGTHPWADLTQMQAIFRIGSLARPAPPSDISVQADEFLRKTFEIEHAKRPTAAQLLKHPFIGSPRVRTAASNFINGAIASETMEVQVVEES

SEQ ID NO: 8403 - protein, 488 aa, Eschscholzia californica
  unsure (1)..(488): unsure at all Xaa locations
MEVVTVALIAVIISSILYLLFGSSGHKNLPPGPKPWPIVGNLLQLGEKPHAQFAELAQTYGDIFTLKMGTETVVVASTSSAASEILKTHDRILSARYVFQSFRVKGHVENSIVWSDCTETWKNLRKVCRTELFTQKMIESQAHVREKKCEEMVEYLMKKQGEEVKIVEVIFGTLVNIFGNLIFSQNIFELGXPNSGSSEFKEYLWRMLELGNSTNPADYFPMLGKFDLFGQRKEVAECLKGIYAIWGAMLQERKLAKKVDGYQSKNDFVDVCLDSGLNDYQINALLMELFGAGTETSASTIEWAMTELTKNPKITAKLRSELQTVVGERSVKESDFPNLPYLEATVKETLRLHPPTPLLLPRRALETCTILNYTIPKDCQIMVNAWGIGRDPKTWIDPLTFSPERFLNSSVDFRGNDFSLIPFGAGRRICPGLPIANQFIALLVATFVQNLDWCLPNGMSVDHLIVEEKFGLTLQKEPPLFIVPKSRV

SEQ ID NO: 8404 - protein, 96 aa, Glycine max
MMMVHPRDQVGGETHKNLVEPNVAASKKARNCACMVSYSVLILALLTLSILLLPLVLPPLPPPPLLLLFVPVFILVVLFFLAFSPSTLPNMAVLTS

SEQ ID NO: 8405 - protein, 163 aa, Triticum aestivum
  unsure (1)..(163): unsure at all Xaa locations
MAPTVMASSATSVAPFQGLKSTAGLPVSRRSNGASLGSVSNGGRIRCMQVWPIXGIKKFETLSYLPPLXSTEALLKQVDYLIRSKWVPCLELTXLGYLXXEXNASPGXTKGRXGTMWKLPMFGCTDATXVXXEVEEVKKXYXPYVRIXXFXICXKVXCVSSSL

SEQ ID NO: 8406 - protein, 162 aa, Arabidopsis thaliana
MDPMDIVGKSKEDASLPKATMTKIIKEMLPADVRVARDAQDLLIECCVEFINLISSESNEVCNKEDKRTIAPEHVLKALQVLGFGEYVEEVYAAYEQHKYETMDSQRSVKMNSGAEMTEEEAAAEQQRMFAEARARMNGGVTVPQPEQLEEPQQQQQTSLQS

SEQ ID NO: 8407 - protein, 302 aa, Haloarcula marismortui ATCC 43049
MKRPQQSADMAPEQNGTTTVPTLGFGTYRTGGYKCYNAVKNALDCGYTHIDTAMAYENEAAVGRAIEQSSVDREDIFLTTKIKGYPEMVEYERLIEAAKGCLERLGTEYLDLLLVHWWNPLADMEETFNALNTLVDDGLVGQIGVSNFSIKELKQAMRLSDAPIATNQIEYHPYWGDEELVRFCQDNDVTVTAYSPLAEGRAVEDDVLRSIGDRYGKSAAQVSIRWLIQQENVVTIPKAATPKHIEANIDVFDFELTDRDMRRIRKLKPPFWYRENREGGSIYEARSVLGNFVPDSLYNRIA

SEQ ID NO: 8408 - protein, 512 aa, Sorghum bicolor
MDASLLLSVALAVVLIPLSLALLNRLRLGRLPPGPRPWPVLGNLRQIKPIRCRCFQEWAERYGPVISVWFGSGLTVVVSTSELAKEVLKENDQQLADRPRNRSTQRFSRNGQDLIWADYGPHYIKVRKLCNLELFTPKRLEALRPIREDEVTAMVESVYRAATAPGNEGKPMVVRNHLSMVAFNNITRLAFGKRFMNANGDIDEQGREFKTIVNNGIKIGASLSVAEFIWYLRWLCPLNEELYKTHNERRDRLTMKIIEEHAKSLKESGAKQHFVDALFTLKQQYDLSEDTVIGLLWDMITAGMDTTVISVEWAMAELVRNPRVQKKLQEELDRVVGRDRVMLETDFQNLPYLQAVVKESLRLHPPTPLMLPHKASTNVKIGGYDIPKGANVMVNVWAVARDPKVWSNPLEYRPERFLEENIDIKGSDFRVLPFGAGRRVCPGAQLGINLVASMIGHLLHHFEWSLPEGTRPEDVNMMESPGLVTFMGTPLQAVAKPRLEKEELYNRVPVEM

SEQ ID NO: 8409 - protein, 506 aa, Petroselinum crispum
MMDFVLLEKALLGLFIATIVAITISKLRGKKLKLPPGPIPVPVFGNWLQVGDDLNQRNLVDYAKKFGDLFMLRMGQRNLVVVSSPELAKDVLHTQGVEFGSRTRNVVFDIFTGKGQDMVFTVYSEHWRKMRRIMTVPFFTNKVVQQYRFGWEDEAARVVEDVKANPEAATNGIVLRNRLQLLMYNNMYRIMFDRRFESVDDPLFLKLKALNGERSRLAQSFEYHFGDFIPILRPFLRGYLKLCQEIKDKRLKLFKDYFVDERKKLESIKSVDNNSLKCAIDHIIEAQQKGEINEDNVLYIVENINVAAIETTLWSIEWGIAELVNNPEIQKKLRHELDTVLGAGVQICEPDVQKLPYLQAVIKETLRYRMAIPLLVPHMNLHDAKLAGYDIPAESKILVNAWWLANNPAHWNKPDEFRPERFLEEESKVEANGNDFKYIPFGVGRRSCPGIILALPILGIVIGRLVQNFELLPPPGQSKIDTAEKGGQFSLQILKHSTIVCKPRSL

SEQ ID NO: 8410 - protein, 210 aa, Triticum aestivum
MDEEEHEVYGQEIPVDGDMEGADVDMTAAGDDAAKELDEMKRRLKEMEEEAAALRDMQAKVAKEMQGGDANASTAEAKEQVDARSVYVGNVDYACTPEEVQQHFQACGTVNRVTILTDKFGQPKGFAYVEFLEQEAVQEALNLNESELHGRQIKVSPKRTNVPGMKQRPPRGFNPYHAYPYRSYGAPYFPPYGYGRVPRFRRPTRYRPYF

SEQ ID NO: 8411 - protein, 492 aa, Pseudomonas putida KT2440
MAVFASDSFGQLKVEKIMTAQWNHYINGEYVSPESEEYIHEFIPTTALPGDSIARGSAADVDKAVRAAAAAQPAWNARKPIERGRILLAIARLVRANAAAFCAKEAEETGKPLKMAAFEIEACAQYFEYYGGLATAIQGETINLGPSYHAYTTREPFGVVGVILPWNSPLNQAGRAIAPALVSGNTVVVKPSEFTSVTMLQFAELVVKEAGLPPGVLNVVTGTGKETGEPLVKHPLIRKVAFTGSVRAGREIGKLAADRIIPLSLELGGKSPNIVFEDADLDRAVAGSVFAFTVNTGQVCLAGTRCLVHESIFEKFSKKLAGAVEALQFSDGESFGLGPLTTKAQFEQVHRYNELAIQEGAHCLVGGEAPSDKTGWYVRPTVYTNVNNSMRIAREEIFGPVLVLIPFKDENEAVAIANDSDYGLAAGVWTTDLARAHRVSAQIEAGQVYVNEYPSGGVETPFGGFKQSGHGREKGIEALHHYTQTKTTIIRI

SEQ ID NO: 8412 - protein, 181 aa, Zea mays
  unsure (1)..(181): unsure at all Xaa locations
MASSMLSNAAVATTVVNRNAGAQASMVGLKSVAAFPLTKXKSTNDLSSLPTNGGRVQCMKVWPTQNMKRYETLSYLPPLTTDQLARQVDYLLNNKWVPCLEFETEHGFVYREHHNSPGYYDGRYWTMWKLPMFGCTDPAQVLNELEECKKEYPNAFIRIIGFDSNRQVQCVSFIAYKPEGY

SEQ ID NO: 8413 - protein, 505 aa, Populus kitakamiensis
MDLLLLEKTLLGSFVAVLVAILVSKLRGKRFKLPPGPLPVPVFGNWLQVGDDLNHRNLTDLAKKFGDIFLLRMGQRNLVVVSSPDLSKEVLHTQGVEFGSRTRNVVFDIFTGKGQDMVFTVYGEHWRKMRRIMTVPFFTNKVVQQYRYGWEEEAAQVVEDVKKNPEAATNGIVLRRRLQLMMYNNMYRIMFDRRFESEDDPLFNKLKALNGERSRLAQSFDYNYGDFIPILRPFLRGYLKICQEVKERRLQLFKDYFVDERKKLASTKNMSNEGLKCAIDHILDAQKKGEINEDNVLYIVENINVAAIETTLWSIEWGIAELVNHPEIQKKLRHELDTLLGPGHQITEPDTYKLPYLNAVVKETLRLRMAIPLLVPHMNLHDAKLGGFDIPAESKILVNAWWLANNPAHWKNPEEFRPERFLEEGAKVEANGNDFRYLPFGVGRRSCPGIILALPILGITLGRLVQNFELLPPPGQSKIDTSEKGGQFSLHILKHSTIVAKPRSF

SEQ ID NO: 8414 - protein, 189 aa, uncultured bacterium
MDIDFKKLAPWNWFKKEQEEQQSTASLPVQRNDLPVAGGPVSPILQLHREIDRLFDDAFRGFGFPTLAMPRWPSDWPGMLKPALDIQETDKQYKIALEVPGIEEKDIQITLDNDVLLVRGEKRQEQETKDGGFHRVERSYGSFQRALNLPADANQDTIKAAFKNGVLTITMDKREASTPKQGRSIPING

SEQ ID NO: 8415 - protein, 499 aa, GIBBERELLA ZEAE PH-1
MANPFQRPFQLENESLFHCTSLINGDFVSAKEGKTFNVVDPGSGKTWASCPDCTASDVDSAVASSYETFKTYSKTTPRFRAQTLMKWHNLILAAREDLARILVHETGKTLVEARGEIDYALTFVWWFSGEADRAHGTSMSCAIPGRRAVTIKQPIGVAAALVPWNFPIALALRKAAAALAAGCTMVVKPSPETPLTCVSIAHLALEAGFPRGALNVVTTSLENTPTVAEALCLDARVKKVSFTGSTRVGKIIASFCAPNLKKTTFELGGNCPFIVFDDADVGQAVSQLMPLKWRHAGQACITSNRVFVHSSIYDTFVEKVVQETRGLKLGHGMEEGSTMGALTTPRGLDKAEELYQDAISKGAKTVLGTGKREEGQGYFMAPTILTEMEDDMLMTHEEIFAPVLGFYRFESEEEVVQRANDTPLGLASYIFTKNVDRLWRLFENLDAGMIGLNAGNSSSAEAPFGGIKDSGHGKESGKDVAIDEFLITKTATLTIDGHY

SEQ ID NO: 8416 - protein, 431 aa, Methylococcus capsulatus str. Bath
MSGPRVLIEGGRIVDPASGFDGTGVVCVADGVIVGVGSRPDGFEADHRIDAGGRIVCPGFIDLCARLREPGQEHKGTIVSEGAAAVAGGITTLCCPPDTTPVIDTPAVVKLVTERAEQAGKARVLPIGALTRSLNGKDLSEMHALKRAGCLALSNADRPLANLLVLRRALEYAASFDLVVVFRPEDPWLCSQGCVHEGAVGSRLGLPGIPETAETVAVAQALPLIEQTGVRAHFGQLSSGRAVEMVAEATARGVHVSADVAVHHLHLTESSVDGFDALCHSRPPFRTTADRDALLAAVADGRISAVCSDHQPHEPDAKLDVFPETEPGLSSLQTLLPLMYALVAEGRLPLSAAIARLTVGPAAILGLESGRLAPGAPADVCVFDPAAVWVPAEGGWVSAGRNTPFWERALTGRVTATLLGGRLVYPGETAS

SEQ ID NO: 8417 - protein, 241 aa, Glycine max
IRLEKKVSLELGGNAPCIVFDDADLDVAVKGTLAAKFRNSGQTCVCANRIIVQEGIYEKFANALRDTVQNMKVGDGFSEGVAQGPLINEAAVKKVESLIHDATSKGAKVILGGKRHSLGFTFYEPTVISDVNSDMRISREEAFGPVAPLLRFKTEEDAIRIANDTNAGLGSYIFTNSIQRSWRVAEALEYGLVGVNEGVISTEVAPFGGFKQSGLGREGSKYGMDEYLEIKYVCLGNMHKA

SEQ ID NO: 8418 - protein, 223 aa, Thermoplasma volcanium GSS1
MKIFLDTANISEIKEGIDLGLVDGVTTNPTLISKEAGGSKKYAEIIKEILKIVDGPVSVEVVSTKSDGMVEEARKIHALGDNAVVKIPMTDEGLKAIRKLSQENIETNCTLVFNPIQALLAAKSGATYVSPFVGRLDDIGQDGMQIIDEIKTIFNNYIIKTQILVASVRNPIHVLRAAIIGADVVTIPFSVLKLLIKHPKTDEGLTRFLEDWKKVSPDGKFII

SEQ ID NO: 8419 - protein, 285 aa, Xanthomonas campestris pv. campestris str. ATCC 33913
MSTNDNWYIEHFQPTGSAIGYRISGKLDEVQSPFQKIEIYQTTDWGKLMIIDGAVMLTSRDNFFYHEMISHPALFTHAAPKRVVIIGGGDCGTLREVLKHPGVESATQCDIDEQVTRMSEKYFPELCDSNDDARAELLFDDGVAYMANCPAGSVDIVIVDSTDPVGPAEGLFNKSFYESCFKALKDDGILVQQSESPLALLDLIKEMRTEMGKAGFQSFKTLPFPQPCYPTGWWSVTMASKQANADFAFRQADAQAKGFDTLYYTAHLHTGVLVAPPFVAKALGE

SEQ ID NO: 8420 - protein, 437 aa, Saccharomyces cerevisiae
MLEHQLTQEDLEFDKKHIWHPYTSITTPLKVYPITKAEGSYLYLDNGTKVVDGMASWWCVQQGYNNHRLNAAAISQINKMSHVMFGGITHKAGIDFCKKLLALLPDTLECALLADSGSISVDIAMKMALRYHHSLGNTTKKRFLTIKKGYHGDAFGAVSVCDPVNSRHNTYNGFLAENIFCKAPEVRFDCREKDVEKLVEELDVKPFAEIIDKHHSEISGVVMESIVQGAGGLRMYHPYFLKRVRALCNDFNILLILDEVAVGLGRTGMLFGFEHAGIVPDIVCLGKTLTAGYLTLSATVTTREIGDQISSGPEGCFMHGQTYMANPLACAVASENLSILMEGKWKSQVRQIEVQLKKELVPLLEHPIVADVRILGAIGVVEVTKRVNVEVLQEKFIKAGAWIRPFGNIIYILPPYIITSEELTVLTEAIRSVLDFI

SEQ ID NO: 8421 - protein, 437 aa, Saccharomyces cerevisiae
MCEHQLTQEDLEFDKKHIWHPYTSITTPLKVYPVTKAEGSYLYLDNGTKVVDGMASWWCVQQGYNNHRLNAAAISQINKMSHVMFGGITHKAGIDFCKKLLALLPDTLECALLADSGSISVDIAMKMALRYHHSLGNTTKKRFLTIKKGYHGDAFGAVSVCDPVNSRHNTYNGFLAENIFCKAPEVRFDCREKDVEKLVEELDVKPFAEIIDKHHSEISGVVMESIVQGAGGLRMYHPYFLKRVRALCNDFNILLILDEVAVGLGRTGMLFGFEHAGIVPDIVCLGKTLTAGYLTLSATVTTREIGDQISSGPEGCFMHGQTYMANPLACAVASENLSILMEGKWKSQVRQIEVQLKKELVPLLEHPIVADVRILGAIGVVEVTKRVNVEVLQEQFIKAGAWIRPFGNIIYILPPYIITSEELTVLTEAIRSVLDFI

SEQ ID NO: 8422 - protein, 391 aa, Corynebacterium crenatum
MSTLETWPQVIINTYGTPPVELVSGKGATVTDEQGNVYIDLLAGIAVNALGHAHPAIIEAVTNQIGQLGHVSNLFASRPVVEVAEELIKRFSLDDATLAAQTRVFFCNSGAEANEAAFKIARLTGRSRILAAVHGFHGRTMGSLALTGQPDKREAFLPMPSGVEFYPYGDTDYLRKMVETNPTDVAAIFLEPIQGETGVVPAPEGFLRAVRELCDEYGILMITDEVQTGVGRTGDFFAHQHDGVVPDVVTMAKGLGGGLPIGACLATGRAAELMTPGKHGTTFGGNPVACAAAKAVLSVVDDAFCAEVTRKGELFKELLAKVDGVVDVRGRGLMLGMVLERDVAKQAVLDGFKHGVILNAPADNIIRLTPPLVITDEEIADAVKAIAETIA

SEQ ID NO: 8423 - protein, 464 aa, Listeria innocua Clip11262
MLYSKENKESYLEPVFGSSAEDRDIPKYTLAKEPLEPRIAYRLVKDELLDEGSARQNLATFCQTYMEDEATKLMSETLEKNAIDKSEYPRTAELENRCVNIIADLWHAPKDQKFMGTSTIGSSEACMLGGMAMKFAWRKRAEKLGLDIYAQKPNLVISSGYQVCWEKFCVYWDIDMRVVPMDKDHMQLNTDQVLDYVDEYTIGVVGILGITYTGRYDDIYALNEKLEEYNSKTDYKVYIHVDAASGGFFTPFVEPDIIWDFRLKNVISINTSGHKYGLVYPGIGWVLWKDESYLPEELIFKVSYLGGEMPTMQINFSRSASHIIGQYYNFLRYGFEGYRTIHQKTSDVAQYLAHAVEQTGYFDIYNDGSHLPIVCYKLKDDANVKWTLYDLADRLQMRGWQVPAYPLPKNLENIIIQRYVCRADLGFNMAEEFIQDFQASIQELNNAHILFHDTQQSGVHGFTH

SEQ ID NO: 8424 - protein, 339 aa, Pseudomonas syringae pv. tomato str. DC3000
MKTFSKVMTGTLLALSIGSAFAAGDPAIEHNTQAFLDALNSGTGKPIEQLSPKDARAVLVGAQAGVKLTLPQADVSEKTITVDGKPISLNIVRPAGVKGTLPVFMFFHGGGWVLGDFQTHERLVRDLVAGSGAVAVFVNYTPSPEAHYPTAINQAYAATQWVAEHGKEINVDGKRLAVAGNSVGGNMATVVALMAKDKGTPALRYQVLLWPVTDASFDNGSYNQYAEGHFLTRNMMKWFWDNYTTDAAQRNEIYASPLRATTEQLKGLPPALIQTASADVLRDEGEAYARKLDQAGVPVTAVRYNGMIHDYGLLNVVSQVPAVRSAILQASQELKEHLK

SEQ ID NO: 8425 - protein, 492 aa, Agrobacterium tumefaciens str. C58
MNGGSRPMTSPLQHLQQSGRLKKFYIDGKWVLPSGSDKVAVINPATELEFAEIALGNDEDVALAVAAARGAFAGWARTGPADRSELLNRVHQLMQQRLELLAQALTMEMGAAINYARSVQVPLAAEHIKVARDNAASYSFLSQRGHTAILREPIGVCGLITPWNWPLYQITAKVGPALAAGCTVVLKPSELSPLSALLFAEIIEDAGFPPGVFNLVNGEGTIVGAGLSAHPDVDMISITGSTRAGILVAQAAAPTVKRVAQELGGKSPNIILADADMTRAVPLGVAAAFRNLGQSCSAPTRMIVPRSHQKHIEELAAAAALEIVVGDPLSEHTTHGPVANHAQFDRIQRMISIGMDEGAKLVVGGTGRPDGLDTGFYVRPTIFSDVDPKMQIAQQEIFGPVLSIISYDTLEEAIEIANDTVYGLGAHVQGTDLQTVRIVAEQIRSGQVHLNYPAWDPNAPFGGYKQSGNGREYGTEGMEEYLEIKSILGFYP

SEQ ID NO: 8426 - protein, 279 aa, Triticum aestivum
MATPTVEKPDGVEIREVWAENLEAEFAVIREIVDDYPYVAMDTEFPGVVCRPLGTFKSNADFNYATLKANVDMLKLIQLGLTFSDERGGLPALGPAGRPCVWQFNFRGFDPRTDVAAADSIDLLRRSGIDFARHAAEGADSRRFAELLMSSGVVLNAEIHWVTFHSGYDFGYLLKLLTGSNLPDTSSGFFDLIRIYFPVIYDIKHLMRFCNSLHGGLNKLAELLDVERVGICHQAGSDSLLTALSFNKLKESYFGGLTEKYAGVLYGLGTEGGETTSVH

SEQ ID NO: 8427 - protein, 244 aa, Zea mays
  unsure (1)..(244): unsure at all Xaa locations
NGEPVAVKILDRXKVLRHKMAEQVMGSKTNVYIVLEYVTGGELFDTIANHGRMREGEARSYFQQLINAVDYCHSRGVYHRDLKPENLLLDSYGNLKVSDFGLSALSQQIKDDGLLHTTCGTPNYVAPEVLEDQGYDGAMADLWSCGVILFVLLAGYLPFEDSNLMTLYKKISNAEYTFPPWTSFPAKRLLTRILDPNPMTENSCDFRITIPEILEDEWVKKGYKRPEFVEEYDTPXDDVDAVFN

SEQ ID NO: 8428 - protein, 281 aa, Clostridium perfringens str. 13
MAINWFPGHMVKTKREIQNNLKLVDAVIEIRDARIPKSSKNPDIDTLCAGKPRVILLNKSDLTDPKVTKAWKDSLTNDETIVLEVNALKGEGLNAIKPALLKLLKEKHDRLKAKGLAKITTRAMVVGIPNVGKSTFINKMAKNNIAKTGDRPGVTKNKQWIKTKLGIELMDTPGVLWPKFEDEIVGLNLAFTGAIKDEIMDTEELALKLVERLQETNPEELMTRYKLTELHENPLDNLDAIARKRGAIMSGNQIDYNRIAGIILDEFRGGKIGKISLEKPE

SEQ ID NO: 8429 - protein, 326 aa, Coxiella burnetii RSA 493
MTEIKKLIVLTSGGDAPGMNAAIRAVVRTALHYQFEVYGATAGFAGLVNGQVVPLNSRAVANCIQRGGTILKTGRFENFRFKAVRDKAREFLKKLQIDAMIVLGGNGSFAGASKLYQEGGPQMIGIPCTIDNDIQGTDYCIGFDTACNTALQAIDKIRDTAFSHERNFLIEVMGRSSGFIAVNVGIAGGAEIIALPEFHVDIDTLTQKIKKQHGKKSASIIVAAEANQPGHSFEVAKQIKEKTGIEYRVCVLGHTQRGGTPTVKDRVLASLMGAQAIEALKKGLTEKMIAYQNGKIAVAPLPDPDNGTRYFADEALLRVNNIICAM

SEQ ID NO: 8430 - protein, 388 aa, Bdellovibrio bacteriovorus HD100
MAEYINPDYVPEPEKMNVKKGLDGVVMDTSSVSKVNPHTNSLIYRGYPVQDLAENCSFEEVAFLMYNGELPNAGQLAEFSKKERSYREISTTLLNVIKALPQKCHPMDSIRTAVSFLGAEDARIWDASPATNMDKAMMLLAKIPTMVAADYRFKKGLDFIPPKADLSIAENFFHMCFGKVPQKEVVKAFDVSLILYAEHSFNASTFTARVVTSTQSDIYSATVAGIGALKGPLHGGANEMVMHMMKEIADPAKAEQWMLDALAQKKKVMGFGHRVYRSGDSRVPTMKKYAQVMADVTGEQKWMQMYTALEKVMVDKKKIYPNLDFPAGPAYYMMGFEIDFFTPIFVMARTTGWSAHIMEQTADNRIIRPLSEYVGAEQRKVTPISERK

SEQ ID NO: 8431 - protein, 391 aa, ASPERGILLUS NIDULANS FGSC A4
MGANAKAQSWLHKLEEQGMLCAFHEEGTGSLTNQTMPVNVDVDAMDPDFIKSLPITPHDMTSNQIHVHGQISEPKNRQLLLDVAREYKDRSWVDVYTRVAVLLCKKNINLISGRVLLQILPSYAYDRDKVLSHARLYAKEFESVEITKDRFCIKIPSTGPALSVCSTLEAEGIRTLGTAVFSLPQAIAASQAGCLYISPYFNEIRANFNLSLWPNVEDPATQHTMSARLMQMLEMYRKLYKETGKTQPLIKNANFISPKEALAQGEFGVDSATVSAEVLSQLANIPYDVSVRPSGIVDIPKPQYPEHQNSVSSTPKRLQHLATTDPLAAADWDGSIASTDVDYLKHNGAELEKAIKADPIASARISDALDVFLKVEGESRELIEGVMKELA

SEQ ID NO: 8432 - protein, 147 aa, Geobacter sulfurreducens PCA
MAIVKYSPFRDMMNMQEQMNRLLDLAWSKQGGEELREGAWQPPVDIFEDENAVIIKAELPGIDQKDIEVRIEDNTLTIRGERKHEEEVRKENYHRVERYYGSFQRSFSIPATIDQEKVRASSDKGVLTITLPKREEVKPKQITVEVT

SEQ ID NO: 8433 - protein, 505 aa, Populus tremuloides
MDLLLLEKTLLGSFVAILVAILVSKLRGKRFKLPPGPLPVPVFGNWLQVGDDLNHRNLTDLAKKFGDILLLRMGQRNLVVVSSPELSKEVLHTQGVEFGSRTRNVVFDIFTGKGQDMVFTVYGEHWRKMRRIMTVPFFTNKVVQQYRYGWEEEAAQVVEDVKKNPGAATHGIVLRRRLQLMMYNNMYRIMFDRRFESEEDPLFNKLKALNGERSRLAQSFDYNYGDFIPILRPFLRGYLKICQEVKERRLQLFKDYFVDERKKLASTKNMCNEGLKCAIDHILDAQKKGEINEDNVLYIVENINVAAIETTLWSIEWGIAELVNHPEIQKKLRHELDTLLGPGHQITEPDTYKLPYLNAVVKETLRLRMAIPLLVPHMNLHDAKLGGFDIPAESKILVNAWWLANNPAHWKNPEEFRPERFLEEEAKVEANGNDFRYLPFGVGRRSCPGIILALPILGITLGRLVQNFELLPPPGQSKIDTSEKGGQFSLHILKHSTIVAKPRSF

SEQ ID NO: 8434 - protein, 1563 aa, ASPERGILLUS NIDULANS FGSC A4
MMDYGGHQYHQQQQPHPHPQSQQNAHLQQHHVQSPAIGAAAARQSANANANANANANAFASNSSLYRSQSQADMTGLSPSVRNMTTSSQSLLGLPAGTSYGSFSGQFQPTSTSNLLSRSSDSLGQLRSSYDSLQGVQRNMNPVTNYRHTSLNSQTLSPHAQGLSTSPQQSLDRMQQLQRQSPHTQSTSAPSNASPMLSHSQNQQYTQYQQSSPYQTQSAQYQQPVSQYQQPQKTQPTQYQQPQQYRQPQQAQYTPQTQSSPYLPQTQYPQYPSSQQPPYQQLQNYQQQQKSAQVPQSSQQSYPQQTQIPQTSQQNYQQASAQRAPQTSPVQQGYQQNSTSAQQAPQLSQQSYAPQAQKSAQGPQASPVKQSYQQPGQKPSHAGQQSYQHTAQSSAQQLPQSSQQSFLLSSAQVPQSSQQKGYQQASTQQVPQSSQPSYPQQVNKPAQLPQLSQQQSYLPGPTQVSQSSQQKSYQQAGQQGLQSSQQSYPQQAQTSAQAQSSPHVQQYQQHAQKSHHVLHPQAQQVQQNQKAARPSQPSQAQAKPSPLQSQQAQQVQVQANHTSASNAHPAQANPQPQRASQQVQAQQPAQSQKTSQQAQNQQTLPNQAYQQFYSQHAQQAQRSPYQTHMQNPQYPYTYQPQFAQQYMQSPQLRTSQATQQQYQSQQSQTSQSQSPQQSVMQKQPTTQLQQEQQPRSQAQAQPQKPPAQTNQLASKPPAKEPKKKKASKKEAKQKPAASQAVSQTASQPAPQARASQTAASQAPPQAKGSQVTAQSSASQPYASQTYGSQAPAYQFHAQASQPYAPQAHTQQNTFQTTTSQAHAAPTNSFQTNTSQSHGQAHSFQVPVSQPHASQMNTFQATPQANSLGAQGSQPTQIPSQPSTQPKVESLSQQSQPSQQVQPTTNGNGQASGTFITENPTQKKTKPGDPNHTPRKRGRPRKQPGEATKPRKPKRPRNPDGTVDLSAALPPNLAAIPGVGIPFSIAPNPPPAPPASTASSAPPAPVIGLDGNPIPQKRKRGRPRKSEADGTPRKPRPPRDPNRPKGTGRPRGRPRKVDVLARKKLEEEQAAAAAAAAHAADQNSQPGAGQPAATQAPPSQAQHGHMQAGHVQVKVNQTSQGQPSKGQGQIHQWQVNQANQSHVSQAQANQAPTNRAQVTHQTSQGQATQGQAQWQISQGKSGSGREQVGQGQFGQSVQAPSGQTNQYAQGTHPGHAHPSHGHPSQAPVQPQSQNQAARPQGQQQMQPQQHARHTHAQQAQPMQNQLRGSPMQSMQASPMQSMQASPLQNQIGQRQPVQRPPVQTSSQRPQSHLQAQVNAKPQMQVQPQKAQPQMQNHMQAKPVVHAQTTKTQGQTQQVQQAQQAQVQQAPAQGQPQKAQVQQLAQPLQMQRQAPSPMQTPAQRPHQPHLLGHGQSQLHHAQAQQGQIQGQAQTRSPTSQAQAQTHNLGKAHPHAQPTQQAHSSYPTHSTHSSHSTHSSHSAQSAQSASYPHSHPYQPQFQEQIPQLHMHSQLHHLNQQHPVYSQFSQRQQQPSMTLNPQTGQKRPSSVLDDDPRKRAYIMPHQL

SEQ ID NO: 8435 - protein, 432 aa, Ustilago maydis 521
MAIPETLQIASPSGKTLTVPTGLFINNKFVPSVDGETLETINPATGKSLGFVSAATASDVDIAVSSARTAFNTTWGRNSSPTQRASILFKLADLLEQHAVELSELESLDNGKPRWIAETMDIADTAGCFRYYAGLADKIEGKTIEQKEGEKLAFTKLEPLGVCGQIIPWNYPIGMLGWKVAPALAAGNCIVLKPAEQTPLSALRIAQLSVEAGLPEGVFNVVNGLGPIVGDAITGHMDVDKVAFTGSTAIGKRVMERAARSNLKKVTLELGGKSPVVVFDDADLDQAVNWAALGILFNQGQDCTAGSRLFVQEGIYDKFLPKLVAAFRAHTIGDPFSNSTFQGPQITQRHQQRILDYIESGKQQGATVEVGGGAWTDGQGEFANGFYVQPTIFSGCKKGMKIVDEEIFGPVLAVAKFKTEQEAQREYVHARR

SEQ ID NO: 8436 - protein, 306 aa, Aeropyrum pernix K1
MFLKWSWFLEWLTPDRATLKHIEDVIFQGRSRFQEIAVVRVSGEGKVLVLDGKTQSSESDEFMYHEALVHPAMILHGSPRKVLILGGGEGATLREVLKHRSVEKAVMVDIDETVVNVAREHLREWHRGAFDDPRAEVVIDDAWNYVASKAETGFDVVIADLVDPLEAGPATRLYSEEYYRMVKDVMNPGGVFVTQAVSISHLTEYHAIIRNTVARVFKHVESYGVYVPSFDSMWGFVVASDDKDPRILGDRGFFETRLSHQLQGAELRFLDYASMLHMLNIPKMYREAIAREKRYATLDNQVFLPA

SEQ ID NO: 8437 - protein, 317 aa, Pseudomonas putida KT2440
MQNWLELEISRREKATEAISVFELRHPNGEKLPAFTAGAHIDVKVRDGLVRQYSLSNDPVETDRYVIAVLNEPTSRGGSRAIHEQFLQGMKISVGEPRNHFPLLDADDHFVLVAGGIGVTPILAMARYLNRIGRSFEIHYCIRSRSTGAFLDVFQGPEFAGRVTLHVDDDPESTPLELARVLDKERARLYVCGPGGFMNWVLSTAEGCLSPERVHKESFSAEPIAAATDDGFEVEVASTGQVFFIPTERSITEVLEEAGVEVLVSCQQGICGSCITNVLEGEPDHRDSVLSESERKSGKVFTPCCSRSKSPRLVLDL

SEQ ID NO: 8438 - protein, 573 aa, Zea mays
PGLTGAPPRPPTCTGRPRSSPRTPSSRAPPTESRSHPQLRHRASPRPAWAHPCTGRAALLLLIPTDRKTPPLSSAASSQVSKLVKYIASAGSLQGGHSLSEPSARHYSSEPSLQATEENGFKGHSMLAPFTAGWQSTDVHPLVIERSEGSYVYDSNGKKYIDALAGLWCTALGGNEPRLVKAATEQLNKLPFYHSFWNRTTKPSLDLANDILSMFTAREMGKVFFTNSGSEANDSQVKLVWYYNNALGRPDKKKFIARSKSYHGSTLIAASLSGLPALHQKFDLPAPFVLHTDCPHYWRFRLPDETEEEFSTRLANNLENLVLKEGPETIAAFIAEPVMGAGGVILPPKTYFEKIQAVLKKYDILLIADEVITAFGRLGTMFGCDMYNIKPDLVSIAKALSSAYMPIGAILVSPEITDVIYSQSNKLGSFAHGFTYSGHPVSCAVAVETLKIYKERNIVEHVNKIAPRFQEGIKAFSGSPIVGEIRGLGLILGTEFVDNKSPNDPFPAEWGVGSIFGAECEKRGMLIRVAGDSIMLSPPLIMTPNEVEEIISKFGDALKATEERIVELKSRKN

SEQ ID NO: 8439 - protein, 136 aa, Pisum sativum
NTDITSNGERVKCMQVWPPIGKKKFETLSYLPPLTRDQLLKEVEYLLRKGWVPCLEFELLKGFVYGEHNKSPRYYDGRYWTMWKLPMFGTTDPAQVVKEVDEVVAAYPEAFVRVIGFNNVRQVQCISFIAHTPESY

SEQ ID NO: 8440 - protein, 323 aa, ASPERGILLUS NIDULANS FGSC A4
MENYQKIEKIGEGTYGVVYKARELTHPNRIVALKKIRLEAEDEGVPSTAIREISLLKEMNDPNIVRLLNIVHADGHKLYLVFEFLDLDLKKYMEALPVSEGGRGRALPDGSTLSRNLGLGDAMVKKFMAQLIEGIRFCHSHRVLHRDLKPQNLLIDRDGNLKLADFGLARAFGVPLRTYTHEVVTLWYRSPEILLGGRQYSTGVDMWSCGAIFAEMCTRKPLFPGDSEIDEIFKIFRILGTPDETIWPGVTSFPDFKPTFPKWKREDIQNVVPGLEEDGLDLLEALLEYDPARRISAKQACMHPYFQHGSSYYSGRARRNGFH

SEQ ID NO: 8441 - protein, 58 aa, Zea mays
MSEGTANCVDILIAIILPTLGVFLMYRCGHQLWIWLLLSFLGYILGIIYAIYAIIKNS

SEQ ID NO: 8442 - protein, 495 aa, Zea mays
  unsure (1)..(495): unsure at all Xaa locations
MAPGSSSSRKAKALKASYRLVADNFLAVLAMVSVVAVLFAAWPISIEDLACRLHAVRPLHVLTAAILTAALAKLRRMSRPSDVYLVEYGCFWPKPCFRAPFATCLEHVRLLPYLVNEDDISWGWRLLQRSGIGEETCVPYAYHYLPPDRSFRASLDETELVIFSAVDDVFARTTAVTPADIGVVIVNCSIFTPTPVFTDMIVNRYKLRADVRSVNLSXGMGCSAALISIGLARNMLQVAPPGTHALIVSTEILSSQYYVGMDRSMLLPNCLFRMGAAAMILSNTAARGARFRLARVVRTVASARDAAYRCVFQVEDEESNTGIRLSKDLVPTAAQTLKSNIVAFGPLVLPASEKLLVALSILRRRLVQSSRGRVYRPDFRTAFEHFCIHAGGRGVIDEVQRGLGLSDEDVEASRMTLHRFGNTSSSSVVYELAYIEAKGSMRKGDRVWMISFGAGFDCSSVAWECIEPAADAAGPWADCIHRYPVQLPKLMEALD

SEQ ID NO: 8443 - protein, 244 aa, Triticum aestivum
  unsure (1)..(244): unsure at all Xaa locations
MEGGGARNVSAAAAQTEGSGDDGSRKPLPPCCVKAQAAVAESEAKCHATVVSGWFTGTRSRSGKPSKAQYFNNPMWPGEAHSLKVEKILYQGKSPYQEVLVFESSTYGNVLVLDGIVQLTDKDECAYQEMVTHLALCSIPSPKNVLVVGGGDGGVLREIAKHDSVETIDICEIDQLVIDVCKDFFPRLYVGYKDPRVRLHVGDAVEFLRNSXEGKYDAIIXDSSDPIGPAQELVEKPFFQTIAR

SEQ ID NO: 8444 - protein, 143 aa, Brassica napus
MADTPSSPAGDGGESGGGSVREQDRYLPIANISRIMKKALPPNGKIGKDAKDTVQECVSEFISFITSEASDKCQKEKRKTVNGEDLLWAMATLGFEDYLEPLKVYLARYRELEGDNKGSGKSGDGSNRDAAAGGVPNEDMPSW

SEQ ID NO: 8445 - protein, 606 aa, Zea mays
  unsure (1)..(606): unsure at all Xaa locations
MATMKLGSKPEIFVLQDLTWRCTIELESDVVVEVGEMSFYLHKFPLLSRSGVLQRMISEYQAPADGGGMCTLQLDDIPGGAKAFELAAKFCYDVKIELNALNVVCLRCAAEYLRMTDDYAEGNLITQAECFLVDVLANWKDSIKALETCEGVLPTAEDLHLVSRCIRNGIRSGDTTSSAAAAAAAAGMDWWYEDVSFLSLPMFKRLIQAMEAKGMRDESIAGAIMFYAGRFLPGLKRNTSFSNALASYGADGSGGAGGGMSSRNITPRAASVSAPSEGDQRYFLEEIVALLPTKKGVASTKFLLGMLRTAMLLHASPLCRENLERRIGAQLEDASLDDLLVPNLGYHVETLYDIDCVQRILDYFMSSTDGIGTGYTSPALAEEGGGSLGIPQGATLRAPVDDGIYRAIDIYLKXAPVVPDYARPVDDGIYRAIDIYLKSHPWLSESERLPLRVVVQVLFFEQLRLRTSIAGWLIVWLPLRVVVQVLFFEQLRLRTSIAGWFFVSDNAAGGDGARPHAGGAIVPKGTAAIAGCPQADADSDVEGDAPDGKETITDVKARVSDLEKECKSMKQEIRRLGKPRRSWSLLTRKCGFGAKVQQAQTAMSGK

SEQ ID NO: 8446 - protein, 206 aa, Triticum aestivum
MGERVKGTVKWFNVTKGFGFISPEDGSEDLFVHQSAIKADGYRSLNENDVVEFEVITGDDGRTKAADVTAPGGGALAGGSRPGDGGGDRGGRGGGGYGGGGYGGGGGGGYGGGGGGYGSGGGSYGGGGGYGGGGGGGRYGGGGGGGRECYKCGEEGHISRDCPQGGGGGGGGYGGGGGRGGGGGGGGCFSCGESGHFSRECPNKTN

SEQ ID NO: 8447 - protein, 462 aa, Zea mays
MVSDGARGLLGAYELGRTLGEGNFGKVKQARHRGSGGQFAVKIMERARVLSQRADEQICREIATLKLLAHPNVVRLHEVAASKTKIYMVLELVNGGELLDRIAASEGKLPEQEARRLFQQLVDGVSYCHEKGVCHRDLKLENVLVDRKGNIKISDFGLSALPQHLGNDGLLHTTCGSPNYIAPEVLQNRGYDGSLSDIWSCGVILYVMLVGHLPFDDRNIVVLYQKIFKGDAQIPEWLSPGARNLLRRILEPDPAERIAMAEIKAHPWFQEHYVPVLPPYDDDDDHDSVKQIGAGSKTTHHINAFQLIGMASSLDLSGFFEEEDVSQRKIRFTSAQPPEDLFAEIERSATDMGFHVHRGHSKLRLTRNCDRSKNQKNPMSSSSSSFLVCTEVFELSPSLYVVELNKSHGDPALYRQLCQRICGDLGVLEMDQIFGTRPPVADDLAGLALALERRSATPLVAL

SEQ ID NO: 8448 - protein, 187 aa, Zea mays
  unsure (1)..(187): unsure at all Xaa locations
MVEVVPIYTAGSKYPSSTCSPEDNSDLFYAALGGLGQFGIITRARIALEXDFESFTEDQEMLIMAENSFDYIEGFVIINRTGILNNWRASFKPQDPVQASHFQSDGRVLYCLELTKNFNSXTLEFLDRVHTSELKLRAQSLWEVPHPWLNLLIPRSSIRRFATEVFGRILVGFLSSAPSLSGHGGRV

SEQ ID NO: 8449 - protein, 329 aa, Deinococcus radiodurans
MAYPNPAGIKRVAVLTSGGDAPGMNAAIRAVVRTGAQQGIEVVGVRRGFSGLHRGEVQLLGPRDVANTIQRGGTILLTARSHTWRSPEGRAKGAAVLREWGVDGLVVIGGDGSFHGGYFLQEEHGIPVIGVPGTIDNDLYGTDHTIGYFTAVETALEAVDKLRDTGASHERIFVIEVMGRHAGHIALDVAVAGGAEEVFIPEDKKPIGDVVNIVKDSIAKGKRGSIIIVAEGYDGGAEAVAQAIHAGTGLETRVSILGHIQRGGTPVSSDRILASRLGEAAVYALMDGKKGVMVGRIGGGIAYTPLHETWEKRKDVSRDLYRCAKMLSI

SEQ ID NO: 8450 - protein, 413 aa, Listeria monocytogenes EGD-e
MEMDPNTDLSSVTRPRATPVLTTFQFDSGKVGHIWTTFSEDQIDLNFACPEVLYKMIDVLMFYLEEGAEYVRLDAVGFMWKVPGTSSIHLEETHEIVKLFRDLVDIAAPGTIIITETNVPHVDNISYFGNGEKEAHMVYQFPLPPLVLHAIHHGNAKFLRNWAKNLELPEGKRTFFNFLASHDGIGLNPVRGIIPEAEILALVNDLEEEGALVSYKQNPDGSKSPYEINVTYMDALSKQADTDDLRLARFLVAHAVLMSIPGVPAVYVQSILGSRNDYLGVEATSHNRSINRKKYDLAEITAELEQRGSLRKATYDALTKLISTRKAESLFHPEIPMEVLESTAELFVVKRSSDAESIILIHNLSEKEVSYSLDSGVYTNLYKGSTVTGSDSIKLSGYEFCWLKTKNYREEQK

SEQ ID NO: 8451 - protein, 140 aa, Listeria monocytogenes EGD-e
MTNLRKRLSRLYAEDVVDSLAARIEARVQQTQQRKLTRKDQWDEKDIVLITYGDQFKEESQKTLTTFKKMYDSYLKSAFEIVHFLPFYPYSSDDGFSVIDYKAVNPELGDWKDIKEMEKSARLMFDFVCNHMSAKSDWFK

SEQ ID NO: 8452 - protein, 170 aa, Triticum turgidum subsp. durum
MASSATSVAPFQGLKSTDGLPISRRSSSAGLSSVSNGGRIRCMQVWPIEGIKKFETLSYLPPLSTEALLKQVDYLIRSKWVPCLEFSKVGFVFREHNSSPGYYDGRYWTMWKLPMFGCTDATQVLNEVEEVKKEYPDAYVRVIGFDNLRQVQCVSFIAFRPPGCEESGKA

SEQ ID NO: 8453 - protein, 327 aa, Chlamydophila pneumoniae TW-183
MSNQFDQLKKLSTIVCDSGDPELVKASGSQDATTNPSLILKVAQEPKFQELLNEAVVWGIRQNGDDLQTLSFILDKIQVNFALEIIKNIPGRISLEIDARLSFNVEAMVQRAVFLSQLFEAMGGDKKRLLVKIPGTWEGIRAVEFLEAKGIACNVTLIFNLVQAIAAAKAKATLISPFVGRIYDWWIAAYGDEGYSIDADPGVASVSNIYAYYKKFGIPTQIMAASFRTKEQVLALAGCDLLTISPKLLDELKKSQHPVKKELDPAEAKKLDVQPIELTESFFRFLMNEDAMATEKLAEGIRIFAGDTQILETAITEFIKQIAAEGA

SEQ ID NO: 8454 - protein, 169 aa, Triticum aestivum
  unsure (1)..(169): unsure at all Xaa locations
MAPTVMASXDTSVAPFQGFKSTAGLPVSRRSNGASLGSVSNGGRIRCMQVWPIEGIKKFETLSYLPPLSTEALLKQVDYLIRSKWVPCLEFSKVGFIFREHNASPGYYDGRYWTMWKLPMFGCTDATQVINEVEEVKKEYPDAYVRIIGFDNMRQVQCVSFIAFKPPGC

SEQ ID NO: 8455 - protein, 439 aa, Escherichia coli O157:H7 EDL933
  unsure (1)..(439): unsure at all Xaa locations
MEHLHMKTRTQQIEELQKEWTQPRWEGITRPYSAEDVVKLRGSVNPECTLAQLGAAKMWRLLHGESKKGYINSLGALTGGQALQQAKAGIEXVYLSGWQVAADANLAASMYPDQSLYPANSVPAVVERINNTFRRADQIQWSAGIEPGDPRYVDYFLPIVADAEAGFGGVLNAFELMKAMIEAGAAAVHFEDQLASVKKCGHMGGKVLVPTQEAIQKLVAARLAADVTGVPTLLVARTDADAADLITSDCDPYDSEFITGERTSEGFFRTHAGIEQAISRGLAYAPYADLVWCETSTPDLELARRFAEAIHAKYPGKLLAYNCSPSFNWQKNLDDNTIASFQQQLSDMGYKFQFITLAGIHSMWFNMFDLANAYAQGEGMKHYVEKVQQPEFAAAKDGYTFVSHQQEVGTGYFDKVTTIIQGGTSSVTALTGSTEESQF

SEQ ID NO: 8456 - protein, 232 aa, Lilium longiflorum
MGRGKIEIKRIENTTNRQVTFCKRRNGLLKKAYELSVLCDAEVALIVFSSRGRVYEYSNNSIKQTIDRYKKACDSSNSNSLIQVNSQQYFQQESAKLRHQIQILTNANRHLVGEALSSLTVKELKQLENRLERGLTRIRSKKHELLFAEIEFSQKREVELQSDNMYLRAKIAENERTQAAIVQARAEFDALPTFDSRNFYQVNNMLEAPPHYHHQDQTALHLGYEAKDDSVP

SEQ ID NO: 8457 - protein, 265 aa, Glycine max
MVYVKAQKSKAYFKRYQVKFKRRREGKTDYRARIRLINQDKNKYNTPKYRFVVRFSNKDIVAQIISASIAGDIVLAAAYAHELPRYGLEVGLTNYAAAYCTGLLLARRVLKTLEMDEEYEGNVEATGEDYSVEPAESRRPFRALLDVGLIRTTTGNRVFGALKGALDGGLDIPHSDKRFAGFDKEKKELDAEVHRKYVFGGHVAAYMKILAEDEPEKYQSHFSEYIKRGIEADGIEALYKNVHAAIRADPTLKKSDKQTPKEHKR

SEQ ID NO: 8458 - protein, 282 aa, Staphylococcus aureus subsp. aureus COL
MNHIEISKDVKIPVLGFGVFQIPQEQTAEAVKEAIKAGYRHIDTAQSYLNETEVGQGIEASGIDRSELFITTKVWIENVNYEDTIKSIERSLQRLNLDYLDLVLIHQPYNDVYGSWRALEELKENGKIKAIGVSNFGVDRIVDLGIHNQIQPQVNQIEINPFHQQEEQVAALQQENVVVEAWAPFAEGKNQLFQNQLLQAIADKYNKSIAQVILRWLVERDIVVLAKSVNPERMAQNLDIFDFELTEEDKQQIATLEESNSQFFSHADPEMIKALTSRELDV

SEQ ID NO: 8459 - protein, 122 aa, Nymphaea alba
MIQPQTLLNVADNSGARKLMCIRIIGASNYRYAHIGDVIVAVIKEAVPNMPLERSEVIRAVIVRTCKELKRDNGMIIRYDDNAAVVIDQEGNPKGTRVFGSIARELRQLNFTKIVSLAPEVL

SEQ ID NO: 8460 - protein, 216 aa, Triticum aestivum
  unsure (1)..(216): unsure at all Xaa locations
MAPTVMASSATSVAPFQGLKSTAGLPVSRRSNGASLGSVSNGGRIRCMQVWPIEGIKKFETLSYLPPLSTEALLKQVDYLIRSKWVPCLEFSKVGFIFREHNASPGYYDGRYWXTMWKLPMFGCTDATQVINEVEESRRSXPDAYXRIIGFDNMRQVQCVSSMPQATGCKIRKAKQSSQGQLSAFNFATRHSLGSSNCFYCPRIVSHVMYTCLSNH

SEQ ID NO: 8461 - protein, 161 aa, Pseudomonas syringae pv. tomato str. DC3000
MSENLLNIPVTTIKGEQKTLADFAGKAVLVVNTASKCGFTPQYKGLEKLWQDYKDQGLVVLGFPCNQFGKQEPGDEGAISGFCELNYGVSFPLFKKVDVNGDQAHPLFVQLKEQAPGLLGTERIKWNFTKFLIGQDGKLVKRFAPLTKPEELTDEIEALLR

SEQ ID NO: 8462 - protein, 124 aa, Zea mays
  unsure (1)..(124): unsure at all Xaa locations
MAGCCVFLRWPSASPSRIGYRSLVDAAADDAAPPSTVTVVVGKERRAFAVDRLVLDSYPLRLLLETAARREERRAGGRRRXAIFVDVDAILFEHILWLACDARSVSQILHLDLKEIIDFYAQDA

SEQ ID NO: 8463 - protein, 450 aa, Arthrobacter nicotinovorans
MLATLASATSEDAVAALEAACAAQTSWARTAPRVRAEILRRAFDLVTARSEDFALLMTLEMGKPLAEARGEVAYGAEFLRWFSEETVRDYGRYLTTPEGKNKILVQHKPVGPCLLITPWNFPLAMATRKVAPAVAAGCTMVLKPAKLTPLTSQLFAQTMMEAGLPAGVLNVVSSSSASGISGPLLKDSRLRKVSFTGSTPVGKRLMSDASRHVLRTSMELGGNAPFVVFEDADLDKAVEGAMAAKMRNMGEACTAANRFLVQESVAQEFTRKFAAAMGALSTGRGTDPASQVGPLINNGARDDIHALVTAAVDAGAVAVTGGAPVDGPGYFYQPTVLADVPNNAAILGQEIFGPVAPVTTFTTEQDAIKLANASEYGLAAYLYSRDFNRLLRVAEQIEFGMVGFNAGIISNAAAPFGGVKQSGLGREGGSEGIAEYTTTQYIGIADPYEN

SEQ ID NO: 8464 - protein, 484 aa, Agrobacterium tumefaciens str. C58
MPNRSCPAMFGGRGGVSAVAFMGVRSVMNEVSKPMSNLAAIDAAHHLHPFSDMGKLNAAGTRIIERAEGVFIYDSTGKKYLDAFAGLWCVNIGYGRREIADVVQRQMNELPYYNAFFGTTTPPATLLAQKIASRAGPKMNHVFFTNSGSEATDTWFRMARVYWKALGHPTKTRVIARRNGYHGSTVAGASLGGMKWMHEQGNLPIEGIAHIGQPYWYAEGGDLSPAEFGLKVARELDAKIDELGEENVAAFVAEPIQGAGGVIVPPETYWPEIARICKARNILLVSDEVICGFGRLGSWFGYQHFGVEPDLAPVAKGLSSGYLPIGGVIVSDRVAEVMLSEVGDFNHGFTYSGHPVCAAAALENLRIIEDEGLVERVRDDIGPYFSEGWKSLADHELVGEAVNVGLMGGLQLTADKATRRRFAKPDDIGTAVRNHCLANGLVMRATGDRMLASPALTVSRSEVDEIIETLRQGLNHLRDTREHF

SEQ ID NO: 8465 - protein, 490 aa, Corynebacterium glutamicum ATCC 13032
MTINVSELLAKVPTGLLIGDSWVEASDGGTFDVENPATGETIATLASATSEDALAALDAACAVQAEWARMPARERSNILRRGFELVAERAEEFATLMTLEMGKPLAEARGEVTYGNEFLRWFSEEAVRLYGRYGTTPEGNLRMLTALKPVGPCLLITPWNFPLAMATRKVAPAIAAGCVMVLKPARLTPLTSQYFAQTMLDAGLPAGVLNVVSGASASAISNPIMEDDRLRKVSFTGSTPVGQQLLKKAADKVLRTSMELGGNAPFIVFEDADLDLAIEGAMGAKMRNIGEACTAANRFLVHESVADEFGRRFAARLEEQVLGNGLDEGVTVGPLVEEKARDSVASLVDAAVAEGATVLTGGKAGTGAGYFYEPTVLTGVSTDAAILNEEIFGPVAPIVTFQTEEEALRLANSTEYGLASYVFTQDTSRIFRVSDGLEFGLVGVNSGVISNAAAPFGGVKQSGMGREGGLEGIEEYTSVQYIGIRDPYAG

SEQ ID NO: 8466 - protein, 321 aa, Glycine max
  unsure (1)..(321): unsure at all Xaa locations
MARRSLPLLKHLLSRRIPARSVTYMHRPGDGSPRPVTLIPGDGIGPMVTGAVEQVMEAMHAPVYFEKFEVHGNMKAVPPEVLDSIRKNKVCLKGGLVTPMGGGVSSLNVQLRKELDLYASLVNCFNLPGLPTRHDNVDIVVIRENTEGEYSGLEHDVVPGVVESLKVITKFCSXRIAKYAFEYAYLNNRKKVTAVHKANIMKLADGLFLESYREVTTMYPXINYNEIIVDNYYIQLISKPKXFNIIITPNLYRNLITNTXTSITRSTRXIPKXNMXTNHAICKQSTSARNXXNDEVVXQXKSNPVALLLSCTMMLXHLPFP

SEQ ID NO: 8467 - protein, 266 aa, Aeropyrum pernix K1
MGDIHGDYTTFSTIVERSLQTLEGGGYMFLLGDYIDRGTPEGQVLTIYRLCRLTKEYPGRVVMLRGNHEPPEGLEPMPHDYPLALQTVYGSDGRRLYSLSRKLFDSLPHAILVEGALLMLHGGPPTINLETASRDPALYLGSDGDPEVIAEILWNDPAELDIIRAPNPRGVGSLWGPGVTVHMARSLNIKRIVRGHEPAMRGYKLNHGGSVVTLFSRLGAPYFNSQAAFLNCKLESIVTDDIKEFLNECIATVQPEHGEHTGFVAW

SEQ ID NO: 8468 - protein, 84 aa, Glycine max
MEYQRQRSHQSQGRSRWVPASYFSFESLLLLSCLTASLLILPLLLPPLPPPPFLLLLLPIAILLVLIISAFMPSNVRDITHTYM

SEQ ID NO: 8469 - protein, 1343 aa, Salmonella enterica subsp. enterica serovar Typhi Ty2
MSQEYTEDKDVTLTKLSSGRRLLEALLILIALFAVWLMAALLSFNPSDPSWSQTAWHEPIHNLGGAPGAWLADTLFFIFGVMAYTIPVIIVGGCWFAWRHQSTDDYIDYFAVSLRLIGVLALILTSCGLAAINADDIWYFASGGVIGSLLSTTLQPLLHSSGGTIMLLCIWAAGLTLFTGWSWVSIAEKLGGWLLNILTFASNRTRRDDTWVDDEEYDDEYDEETDGVQRESRRARILRGALARRKRLAEKFSNPRGRQTDAALFSGKRMDDDEDIQYSARGVAADPDDVLFSGNRATQSEYDEYDPLLNGHSVTEPVAAAAAATAVTQTWAASADPIMQTPPMPGAEPVVAQPTVEWQPVPGPQTGEPVIAPAPEGYQPHPQYAQPQEAQSAPWQQPVPVASAPQYAATPATAAEYDSLAPQETQPQWQAPDAEQHWQPEPIAAEPSHMPPPVIEQPVATEPEPGIEETRPARPPLYYFEEVEEKRAREREQLAAWYQPIPEPVKENVPVKPTVSVAPSIPPVEAVAAAASLDTGIKSGALAAGAAAAAPAFSLATGGAPRPQVKEGIGPQLPRPNRVRVPTRRELASYGIKLPSQRIAEEKAREAERNQYETGAQLTDEEIDAMHQDELARQFAQSQQHRYGETYQHDTQQAEDDDTAAEAELARQFAASQQQRYSGEQPAGAQPFSLDDLDFSPMKVLVDEGPHEPLFTPGVMPESTPVQQPVAPQPQYQQPVAPQPQYQQPQQPVASQPQYQQPQQPVAPQPQYQQPQQPVAPQPQYQQPQQPVAPQPQYQQPQQPVAPQPQYQQPQQPVAPQPQYQQPQQPTAPQDSLIHPLLMRNGDSRPLQRPTTPLPSLDLLTPPPSEVEPVDTFALEQMARLVEARLADFRIKADVVNYSPGPVITRFELNLAPGVKAARISNLSRDLARSLSTVAVRVVEVIPGKPYVGLELPNKKRQTVYLREVLDNAKFRENPSPLTVVLGKDIAGDPVVADLAKMPHLLVAGTTGSGKSVGVNAMILSMLYKAQPEDVRFIMIDPKMLELSVYEGIPHLLTEVVTDMKDAANALRWSVNEMERRYKLMSALGVRNLAGYNEKIAEAARMGRPIPDPYWKPGDSMDVQHPVLEKLPYIVVLVDEFADLMMTVGKKVEELIARLAQKARAAGIHLVLATQRPSVDVITGLIKANIPTRIAFTVSSKIDSRTILDQGGAESLLGMGDMLYSGPNSTMPVRVHGAFVRDQEVHAVVQDWKARGRPQYVDGITSDSESEGGGGGFDGGEELDALFDQAVNFVTQKRKASISGVQRQFRIGYNRAARIIEQMEAQGIVSAQGHNGNREVLAPPPFE

SEQ ID NO: 8470 - protein, 363 aa, Buchnera aphidicola
MKKNYRIAVLSGDGIGPEVMQEACKILNVLKKYFFLSLEIQKFNIGGIAIEREGVALPKTTLLGCENSDSILLGSVGGKKWDNLPVEQRPERAALLPLRKYFNLFSNLRPAKLYPELKCLSPLRSDIVKNGFDILCVRELTGGIYFGEPKGFVNKNNTKYAFDTEIYHEYEIIRIAHLAFKLARSKKKKVCSIDKSNVLRSSILWGKVVESVSKKYPDVHLSHLYIDNAAMQIIKDPNQFDVLLCSNLFGDIISDECATITGSIGMLPSASFNEKNFGLYEPAGGSAPDIEGKNIANPIAQILSLSMLVRYGMNLNQIADKIDKAVNNVLKKGYRTSDISHDNNFLKTDEMGDLIVDSLINGK

SEQ ID NO: 8471 - protein, 490 aa, Pseudomonas aeruginosa UCBPP-PA14
MARFEEQKLYIGGRYVEASSGATFETINPANGEVLAKVQRASREDVERAVQSAVEGQKVWAAMTAMQRSRILRRAVDILRERNDELAALETLDTGKPLAETRSVDIVTGADVLEYYAGLVPAIEGEQIPLRETSFVYTRREPLGVVAGIGAWNYPVQIALWKSAPALAAGNAMIFKPSEVTPLTTLKLAEIYTEAGVPDGVFNVLTGSGREVGQWLTEHPLIEKISFTGGTSTGKKVMASASSSSLKEVTMELGGKSPLIIFPDADLDRAADIAVMANFFSSGQVCTNGTRVFIHRSQQARFEAKVLERVQRIRLGDPQDENTNFGPLVSFPHMESVLGYIESGKAQKARLLCGGERVTDGAFGNGAYVAPTVFTDCSDDMTIVREEIFGPVMSILVYDDEDEAIRRANDTEYGLAAGVVTQDLARAHRAIHRLEAGICWINTWGESPAEMPVGGYKQSGVGRENGLTTLAHYTRIKSVQVELGDYASVF

SEQ ID NO: 8472 - protein, 329 aa, Methylococcus capsulatus str. Bath
MSKNLLDQLREVTVVVADTGDIEAIEKFKPRDATTNPSLITAAAQMPQYQDIVDDTLKGARQTLGPGASAAQVANRAFDRLAVSFGLKILQIIEGRVSTEVDARLSYDTEGTIEKAREIIKQYEAAGVSKERVLIKIAATWEGIEAAAVLEKEGIHCNLTLLFGLHQAIACAENGITLISPFVGRILDWYKKDTGRESYAPHEDPGVLSVTQIYNYYKKFGYKTEVMGASFRNIGEITELAGCDLLTIAPSLLAELQATEGELPRKLDPAKAKDYPIEKIHVNKYTFDKMHAENRMATEKLEEGIQGFTKALEQLEKLLADRLAHLEAA

SEQ ID NO: 8473 - protein, 506 aa, Exiguobacterium sp. 255-15
MIYEIPNTQGSKVQYKDRYENFINGKWTAPVGGEYFDNVTPITGKVLCQVARSGKEDVELALDAAHAAKDAWGKTSVAERSNILNKIANRMEENLEMLAYAETLENGKAVRETLNADLPLAIDHFRYFAGVIRAQEGSIGELDNDTVAYHFHEPLGVVGQIIPWNFPILMAVWKLAPALAAGNCVVLKPAEQTPASILLMTELIEDLLPPGVLNIVNGFGLEAGKPLASSKRIAKIAFTGETTTGRLIMQYASQNIIPVTLELGGKSPNIFFADIMDADDAFFDKAIEGLLMFALNQGEVCTCPSRALIEESIYEPFMERVLERVKAIKLGNPLDADVMMGAQASSEQMEKILSYLEIGKSEGAECLIGGERNHLDGDLADGYYIQPTIFKGNNKMRIFQEEIFGPVLSVTTFKTEEEALQIANDTLYGLGAGVWTRDMNRAYRFGRAIEAGRVWTNCYHQYPAHAAFGGYKMSGIGRENHKMMLNHYQRTKNLLVSYSPDKLGFF

SEQ ID NO: 8474 - protein, 80 aa, Triticum aestivum
MQITGVVKWFNETKGFGFITPDDGSKDVFVHFTAIQSHGFKTLAEGQRVEFEIQDGQKGPSAVNVKPLEVEEDKRISSKL

SEQ ID NO: 8475 - protein, 444 aa, Saccharomyces cerevisiae
MQSMNVQPRVLAVGGEQFFSQRQASEQHQQQNMGPQVYSPKVNRARMFPQGMPVNTINGSVNQEMNNAYLLKQKNEPLLTQQQQQQQQQQQQQQQQQQQQQQQQQQQPFNIGTPVSVASLPPGLNVLQQQQQQQQQQGVGLNRPLASQLPKHLTNQSMPPIFLPPPNYLFVRDVWKSNLYSEFAVIRQLVSQYNHVSISTEFVGTLARPIGTFRSKVDYHYQTMRANVDFLNPIQLGLSLSDANGNKPDNGPSTWQFNFEFDPKKEIMSTESLELLRKSGINFEKHENSGIDVFEFSQLLMDSGLMMDDSVTWITYHAAYDLGFLINILMNDSMPNNKEDFEWWVHQYMPNFYDLNLVYKIIQEFKNPQLQQSSQQQQQQQYSLTTLADELGLPRFSIFTTTGGQSLLMLLSFCQLSKLSMHKFPNGTDFAKYQGVIYGIDGDQ

SEQ ID NO: 8476 - protein, 433 aa, Saccharomyces cerevisiae
MQSMNVQPRVLAVGGEQFFSQRQASEQHQQQNMGPQVYSPKVNRARMFPQGMPVNTINGSVNQEMNNAYLLKQKNEPLLTQQQQQQQQQQQPFNIGTPVSVASLPPGLNVLQQQQQQQQQQQQQQQGVGLNRPLASQLPKHLTNQSMPPIFLPPPNYLFVRDVWKSNLYSEFAVIRQLVSQYNHVSISTEFVGTLARPIGTFRSKVDYHYQTMRANVDFLNPIQLGLSLSDANGNKPDNGPSTWQFNFEFDPKKEIMSTESLELLRKSGINFEKHENLGIDVFEFSQLLMDSGLMMDDSVTWITYHAAYDLGFLINILMNDSMPNNKEDFEWWVHQYMPNFYDLNLVYKIIQEFKNPQLQQSSQQQQQQQYSLTTLADELGLPRFSIFTTTGGQSLLMLLSFCQLSKLSMHMFPNGTDFAKYQGVIYGIDGDQ

SEQ ID NO: 8477 - protein, 506 aa, Azoarcus sp. EbN1
MLYELPGQPAAKVRFKSRYDNFIGGKWVAPVRGEYFDNVTPITGKPFCQVARSTEEDITLALDAAHAAADRWGRTSAADRANLLLKIADRLEGNLELLAYAETVDNGKAIRETLNADIPLTIDHFRYFAGCLRAQEGSISEIDEHTVAYHFHEPLGVVGQIIPWNFPILMAAWKLAPAIGAGNCVVLKPAESTPVSILVLVELIADLLPPGVLNVVNGFGREAGMPLATSKRIAKIAFTGSTATGRVIAQAAATNLIPATLELGGKSPNIFFSDIAAADDAFFDKAVEGMVLFAFNQGEVCTCPSRALIQESIYDRFMERVLARVRAIRQGSPLDTDCMMGAQASAEQMNKILSYMDVGREEGAQLLIGGERAHLGGELAEGFYVQPTLFRGHNKMRIFQEEIFGPVLAVTTFKDEAEALEIANDTPYGLGAGVWSRDGSVAYRMGRAIKAGRVWTNCYHAYPAHATFGGYKESGIGRETHKMMLDHYQQTKNLLVSYSPNALGFF

SEQ ID NO: 8478 - protein, 267 aa, Triticum aestivum
MASERNGDGGKERAGENGNGGGSGVSLEMPEIRYTKLFINGAFVDAVSGKTFETRDPRTGDVIASIAEGDKKDVDLAVKAAREAFDHGKWPRMPGSERGRIMMKYADLVEGHADELTLLESLDAGKPCTVTRAVDMATAVRSLRYFAGAADKIHGETLKMSRQFQGHTLREPMGVAGLIIPWNFPAIMFFSKVAPALAAGCTMVVKPAEQTPLSALYFAHLAKQAGVPDGVINVITGFGPTAGAAIASHMDVDMVSFTGSTAVGRLI

SEQ ID NO: 8479 - protein, 170 aa, Zea mays
MAPTVMMASSATAVAPFQGLKSAASLPVARRSTRSLGNVSNGGRIRCMQVWPAYGNKKFETLSYLPPLSTDDLLKQVDYLLRNGWIPCLEFSKLGFVYRENSTSPCYYDGRYWTMWKLPMFGCTDATQVYKELQEAIAAYPDAFHRVIGFDNVRQTQCVSFIAYKPPGSD

SEQ ID NO: 8480 - protein, 398 aa, Zea mays
  unsure (1)..(398): unsure at all Xaa locations
METGTIFTHHQKTMILDADAGNHRRKIVAFVGGHDLCGSRYDTPKHTLFRTLQTFHKEDYYXPNFAVEDARGPREPWHDLHSKIDGPEAYDVLKNFEERWLKASKRSAAKKLSKLSRSHNDSLLWINKIPDIISIDDEIYSNDDDPERWDMQIFRSIDSNSVKGFPKDPREATSKNLVCGXNVLIDMSVHTTYVNAIRGAQHFIYIENQYFLGSSFNWDSHRDVGANNLIPTEIALKIANKIYSNERFSAYIVVPMWPEGNPTGTLTQRXLYWQKMTMQIMYEIIYKAMKEVGLDGTYEPQDYLNFFCLGNREAEDTTCTSSGPFSTTWISNQDQARNNRRFMVYVHSKGMIVDDEYVIIGSANINQRSMEGTRDTEIAMAAYQPQHTLANMLSAPRG

SEQ ID NO: 8481 - protein, 294 aa, Glycine max
  unsure (1)..(294): unsure at all Xaa locations
MSEALEEVVPSMKGGCEEEGLNLEATELRLGLPGCESPEREGVFKSVVVSGAKRGFSDAIDGNWNGGGSEKDAAALFSPTSRGAVSVSVSAAKSLTLTATDCTNQPTALGASVLKETVPHSPKPLHENKPQISAPAAKAQVVGWPPIRSFRKNSMASQPXXNDAAADAKSKSGCLYVKVSMEGAPYLRKVDLNSFTTYKDLSLALEKMFSCFTLSQCGSYGVSSRENLSESRLMDLLHGSEYVLTYEDKDGDWMLVGDVPWEMFTESCKRLRIMKSSEAIGLAPRAMEKCKSRY

SEQ ID NO: 8482 - protein, 122 aa, Brassica napus
KLVDSYLAEAAIDGGLTLPELISLAEALPSHARTTEDGLYRAIDTYLKAHPQVMKQERKELCRLIDSRKLSPEAALHAAQNDRLPVRSIIRVLFTEQTKLSRHTDWSPSGSHYSEPGSGPQC

SEQ ID NO: 8483 - protein, 174 aa, Triticum aestivum
  unsure (1)..(174): unsure at all Xaa locations
YTYIVHPWAPTVMASSATSVAPFQGLKSTAGLPVSRRSXGASLGSVSFCXRIRCMQVWGGEGIKKFETLSYLPPVSTEALLKQVDYLIRSKWVPCLEFSKVGFIFREHNASPGYYDGRYWTMWKLPMFGCTDATQVINEVEEVKKEYPDAFVRFIGFDNLRQVQGRRFLAFKPP

SEQ ID NO: 8484 - protein, 253 aa, Rumex acetosa
MEFSNELSRDMEDGSPQRKMGRGKIEIKRIENVTNRQVTFCKRRNGLLKKAYELSVLCDAEVALIVFSSRGRLYEYANHSVKATIERYKKTCSDSTGVTSVEEANAQQEAAKLRNQIRTLQNQTRNTSRNLMGEGLTSMNMKDLKNLETRLEKGISRVRAKKNELLFGEIEFMQKKEIELHNNNQFLRAKIAESERSQQSMNLMPGSSSGEQHYELMPQSQAGPFDSRNFFQVSDLQPDERYSCQNQTPLQLV

SEQ ID NO: 8485 - protein, 175 aa, Triticum aestivum
MAPTVMASSATSVAPFQGLKSTAGLPVSRRSNGASLGSVSNGGRIRCMQVWPIEGIKKFETLSYLPPLSTEALLKQVDYLIRSKWVPCLEFSKVGFIFREHNASPGYYDGRYWTMWKLPMFGCTDATQVINEVEEVKKEYPDAYVRIIGFDNMRQVQCVSFIAFKPPGCEESGHA

SEQ ID NO: 8486 - protein, 319 aa, Zea mays
  unsure (1)..(319): unsure at all Xaa locations
MRCPSLGPSSSAGRYLKPHQRPQGGIFAGPGFCSTRGRGVEAALPYQKADRGPRKEAGIRLCSATMSSLYDVSCFAAGLAGNVFALALFLSPVPTFKRVLKAKSTEQFDGLPYLLSLLNCCICLWYGLPWVSDGGRALVATVNCTGALFQLAYISLFIFYADSRTTRLKVAGLLVLVVFAFALIAHASIAFFDQPLRQLFVGSVSMASLVSMFASPLAVMGVVVRTECVEFMPFYLSLSTFLMSASFAVYGLLLRDFFIXSRMGSESSWEQCSWCCTRTTAGDGKAATRQHRCLPDHVAEFVSPIARAVLSVVLCSAIL

SEQ ID NO: 8487 - protein, 159 aa, Solanum tuberosum
MSDEEHQFESKADAGASKTYPQQAGTIRKSGYIVIKGRPCKVVEVSTSKTGKHGHAKCHFVAIDIFTGKKLEDIVPSSHNCDVPHVNRTDYQLIDISEDGFVSLLTDNGNTKDDLRLPTDDSLLSQIKDGFAEGKDLVVSVMSAMGEEQINALKDIGPK

SEQ ID NO: 8488 - protein, 321 aa, Pseudomonas aeruginosa UCBPP-PA14
MWRFVEHSRAFASDSPRLDAQRAAYARMCQAFAPPRPAGLRVLDSCLPAAPPVRVRRYRPDRPAPPGGWPALLYLHGGGWMLGGLDSHDFICADLAARLGLLVLAVDYRLAPEHPFPAALQDCLRAWQALSLGELDEALDGRRLLVAGDSAGGNLAAALCLALRDGGAPSPAAQILLYPLLSAAPSPSRIDCADAPLLGLGDVQACLDAYLPLAALHRQPLALPLEAADFTGLPPAFVAVAEFDPLRDDGERYGAALRAAGGEAGFYPGSGLVHGCLRGHGIDEVEALHEALRRAVQGFLAEDSGERQAGEESTAEHQPGE

SEQ ID NO: 8489 - protein, 159 aa, Solanum tuberosum
MSDEEHHFESKADAGASKTYPQQAGTIRKSGHIVIKNRPCKVVEVSTSKTGKHGHAKCHFVAIDIFTGKKLEDIVPSSHNCDVPHVNRTDYQLIDISEDGFVSLLTENGNTKDDLRLPTDDTLLAQVKDGFAEGKDLVLSVMSAMGEEQICGIKDIGPK

SEQ ID NO: 8490 - protein, 319 aa, Avena fatua
MASAKAMGQGEQDRFVLKSGHAIPAVGLGTWRAGSDTAHSVQTAITEAGYRHVDTAAQYGIEKEVDKGLKAAMEAGIDRKDLFVTSKIWRTNLAPERARPALENTLKDLQLDYIDLYLIHWPFRLKDGAHQPPEAGEVLEFDMEGVWKEMEKLVKDGLVKDIDVCNFTVTKLNRLLRSANIPPAVCQMEMHPGWKNDKIFEACKKHGIHVTAYSPLGSSEKNLVHDPVVEKVANKLNKTPGQVLIKWALQRGTSVIPKSSKDERIKENIQAFGWEIPEDDFQVLCSIKDEKRVLTGEELFVNKTHGPYKSASEVWDHEN

SEQ ID NO: 8491 - protein, 160 aa, Solanum tuberosum
MSDEEHHFESKADAGASKTYPQQAGTIRKSGYIVIKGRPCKVVEVSTSKTGKHGHAKCHFVAIDIFNGKKLEDIVPSSHNCDVPHVNRTDYQLIDISEDGFVSLLTENGNTKDDLRLPTDDALLNQVKGGFEEGKDLVLSVMSAMGEEQICAVKDIGTKS

SEQ ID NO: 8492 - protein, 282 aa, Mycobacterium bovis AF2122/97
MTGESGAAAAPSITLNDEHTMPVLGLGVAELSDDETERAVSAALEIGCRLIDTAYAYGNEAAVGRAIAASGVAREELFVTTKLATPDQGFTRSQEACRASLDRLGLDYVDLYLIHWPAPPVGKYVDAWGGMIQSRGEGHARSIGVSNFTAEHIENLIDLTFVTPAVNQIELHPLLNQDELRKANAQHTVVTQSYCPLALGRLLDNPTVTSIASEYVKTPAQVLLRWNLQLGNAVVVRSARPERIASNFDVFDFELAAEHMDALGGLNDGTRVREDPLTYAGT

SEQ ID NO: 8493 - protein, 459 aa, Mesorhizobium sp. BNC1
MHIDELRKAVRGAVTTRESAEYEAVRTGLLWNARKPDRFPEVVVKAMDAGDVQTAVKFAAANGMRVSARGGGHHFSTIALQDCVVIDLSAMNALEIDAVAGTARAQPAVTNGRLAAAAAEYGLAFPTGHCASVPLSGYLLGGGFGWNAGAWGIACHNVESVKVVLADGSLVTASEAENADIFWAARGAGPEFFGVVTEYRLRLHELPRAIRTSVWVYPIGEVDAVERWMSRTMRTVPRNVEFTAVLSSAPPPLAGKATKTVSAVATIFAYTEEEAQATLEKIAAGAPESALDIQLGMETPFEVLYLIMGQFFLEGRRYAADTNWSADPALQMAIMAEAIEAAPSAESFALGVVLPPPDGTMPDAAFSMVGPAFGCTYAIWQDDAQDQAALSWVRATSEKIAPISLGHYIGEADLDIAGRSHRSFSPEALERLRHLQRKYDQAGLFHRPEPDVEPLKRAG

SEQ ID NO: 8494 - protein, 429 aa, Xanthomonas campestris pv. campestris str. ATCC 33913
MSDLDQVTLNAGDTSVVLPVLKPTLGNDCVDISKLTKETGLFTYDSGFTATASCKSAITYIDGDNGVLLYRGYPIEQLAEKSSFLEVSYLLMNGELPTADEFKKFDHEVTHHTMMHESLKNFLGGFRHDAHPMAMLAGSVASLSAFYHDTLDLNDPEQRRQAAIRLIAKVPTLAAAAYRYSIGWPIRYPRNNLNYVDRFLHMMFEVPSEPLEINPVVAKALDLLFILHADHEQNASTSTVRLVGSTGANPYASVAAGITALWGPAHGGANEAVLKMLEEIGTADNVESAVAKAKDKNSSFRLMGFGHRVYKNFDPRAKIIREMTHKVLGELGVNDPLLEVALKLEEAALKDDYFVQRKLYPNVDFYSGLIYKALNIPVEMFTVMFAIARTAGWVSHWLEQQVDPEMKIGRPRQIYTGYDKRDYTDAGKR

SEQ ID NO: 8495 - protein, 482 aa, Acinetobacter sp. ADP1
MIQESLQYLLKHPDISFTAPTSGAVIEVNDAAKGTPLAWVKSHDRSGVEAAIQRSAQAQAKWKTQTALQRADVLWAWFHLINEHKENLAQILTAEQGKPLAEARGEIGYAASFIRWFAEQARRIDGEILPPTMAHQRLLVIKQAIGVTAAITPWNFPAAMITRKAAPAIAAGCSMLVKPAELTPLTAYALEVLALQAGLPQDILINISGDSVEVGKTLCESDVVRKLSFTGSTPVGRILMQQSAPSIKKLSLELGGNAPVLVFDDANLDQAVQGIMASKFRNSGQTCVCANRIYVQSGIYDALTTKLVDAVKALKVGDGREEGVTQGPLIDARAVAKVQSHIEDATSKGATLQTGGQLAAQGGTFFEPTVLSGVTQEMRVAKEETFGPLAALFRFETEEQAIAMANDTEFGLAAYLFTQSTARQWRVGEALEYGMVGVNTGAISNEVAPFGGVKQSGLGREGSQHGIEEYLEMKYLCVDLSE

SEQ ID NO: 8496 - protein, 332 aa, GIBBERELLA ZEAE PH-1
MSFGRTVTLNSGWKIPQIGYGTWQAAPGEVGNGVYEALKAGYRHLDLAKIYQNQREVGEGIKKALSEVPGLKREDIFITGKLWNNKHRPEEVAGALDDTLEELGLEYIDLWLIHWPVAFKNGNQLFPLKEGDDGKTALDQEVTLSQTWEAVTKLPKEKVRSIGVSNFNKEMLEQIIKDTGVTPAMNQIERHPRLPQPELVKYLQEKGIFLTAYSAFGNNSWGEPLLINTPEVKAIAERLSKSKGKEVTPAQVILAWSTLDNHVVIPKSVTPARIRSNFEEVELDEEAVKELSKFGEKPQRFNIPKTYKPDWDINVFDDEKEKSATHQVVLKL

SEQ ID NO: 8497 - protein, 505 aa, Burkholderia cepacia R1808
MTRSDLPHEARPVVVWFRDDQRLADNPALTHALDTGHPVVCVYVHDAAPKHGRAMGGAQRWWLHESLSKLDDALAAHGGSLILLRGNEHEAITGFAAAIGAAMVVWNRRYAKAQTGTDASIKRDLIDRGIAVSTFNGHLLREPWTVTTREGLPFQVFSAYWRAARRDDFFPPVPLPAPSHIRFFPVPAHATPHVCTLRELELQPSAPDWAGGLRETWQCGEQAASDQLEAFLENSLSDYPTLRDFPAARATSRLSPYLRFGNISVRQVWYATLSAADAMRSARIVRGVDSKDGPLSKFLSEIGWREFSYHLLYHFAPLHQVNFRRQFDSMPWRDDAKSLRKWQTGRTGYPLVDAGMRELWHTGWMHNRVRMVAASFLSKHLLIDWRQGEAWFWDTLVDADEASNPASWQWVSGSGADAAPYFRIFNPVLQAQKFDPHGDYTRRWVPELAQLSADTVHAPWAASREQLQRASVTLGRSYPMPIVDHQCARARALESVKRLDSESHA

SEQ ID NO: 8498 - protein, 314 aa, Aspergillus parasiticus
METPFAAPWHQFVEDLGQTPCLPGKDLDSILAGWGQLAGTLATRYGFPPPDESVTTEDVQLDGLWLRCYTPPNATGQEPVGLYFHGGGWVMGGVKEEDGFCRVISRQCQMRLVSVEYRKAPQTRYPGALNDGVSAALWVLSRYENQPLVLMGTSAGGNLAFGTALRLIDQDMVDKVSGVVALAPITVHPDAVPEYLKEQYTAYEENAELTVNSRAAMQVFFDCYKAPVDDVYTSCLLHPRLLALPKVYIAELGLDTLRDDARLMKGALDTAKVPVMYDAYPGYPHCLFMFPFKSLGEHQRPFLGGVAKAVRWMS

SEQ ID NO: 8499 - protein, 193 aa, Brucella melitensis 16M
MADKSVSDDQFHSQHASEELGEFIEVSGHIKWFDVAKGYGFIVPDQPGLTDILLHVTSLRRDGFQTALEGARIVCEVRHGDRGLQCFRVLSMDASTAIHPAQMPPQCTHVTVTPSSGLERVIVKWFNRTKGFGFLTRGEGTEDIFIHMETLRRFGMMELRPGQVVLIRFGTGEKGLMAAEIHPDIGTAIPVSH

SEQ ID NO: 8500 - protein, 506 aa, Corynebacterium glutamicum ATCC 13032
MTVYANPGTEGSIVNYEKRYENYIGGKWVPPVEGQYLENISPVTGEVFCEVARGTAADVELALDAAHAAADAWGKTSVAERALILHRIADRMEEHLEEIAVAETWENGKAVRETLAADIPLAIDHFRYFAGAIRAQEDRSSQIDHNTVAYHFNEPIGVVGQIIPWNFPILMATWKLAPALAAGNAIVMKPAEQTPASILYLINIIGDLIPEGVLNIVNGLGGEAGAALSGSNRIGKIAFTGSTEVGKLINRAASDKIIPVTLELGGKSPSIFFSDVLSQDDAFAEKAVEGFAMFALNQGEVCTCPSRALVHESIADEFLELGVKRVQNIKLGNPLDTETMMGAQASQEQMDKISSYLKIGPEEGAQTLTGGKVNKVDGMENGYYIEPTVFRGTNDMRIFREEIFGPVLSVATFSDFDEAIRIANDTNYGLGAGVWSRDQNTIYRAGRAIQAGRVWVNQYHNYPAHSAFGGYKESGIGRENHLMMLNHYQQTKNLLVSYDPNPTGLF

SEQ ID NO: 8501 - protein, 1275 aa, Schizosaccharomyces pombe
MRGRGIDVNSSHYPHISRPRTSSDSQKMYTRAPVDYYYIQENPYFNNIDQDSISDKSLPSTNQSLHHSEEDTESDNDFSESIHPEFDIDVFYKVSNILYDESDLQDPEKRERLEWHSMLSSVLKGDVMQTEKRRLRLTEPDGHSGTYISEVWLGLQAWLHGRLNADQAEVIRKSREGVEPVLREVIDFQIQDEETTKPPLEQVTEILEKVEQCKQFYISSREMEENVPLSASKEFNYKLNALISWSNVMESIQVETLVLQKWVGNDEFDLTMRTPQFNYDGVENTSSFVERIFRQSGLQRTFEQRTLTTLNRIIHQAKQTISENAQAFEEMKLPTYEDKLLPLVRFPIKLLEEALRLRLAYAKKIKGPNFLIVDSMLDDFKIALSVAVRIKREYIKIASPSPGWSLPTNVDEDYDNVLLDSLKFYFKLLTLKLSSGNKNLYFKEIDFLENEWAFLNEHIYWINGGDIHMAGQFSYLSNSLLLNVHRYVESHLNGPTERTAASLTNWYSTLLKNTQIRFRKILRFSETLNSRFENASDFVISEGHLPDLVNRLSTTGHFLAYTANLERDGVFVIADHTLSENPEALKALLFSKDISNLETIQQNCSYVLILCPVHPIVWKGRIEKVDVPDFSVDLKTNRVRIIASNKREHLQAAKSVFQSISGDLVTLAVECRSSITRVYKEFIRLSKLCMRISSTVVDCVSAVREACSGVNCHDLIYHVFSFAAEFGQRILRFLSFDSYWQTKLKRKITSLAVEWISFICDECDLMDRKTFRWGVGALEFLMLMIRGNNILLIDDAMFLKIREKVGKSMAFLLTHFDVLGAKSKVAAKLQRESTEVSSSPRLTSFGDVEEEALSIQLLQKETMLRIDELEIERNNTLLERLAIGHVLDDSVFRNRDFIKLASSFSNITIRWQQGHFVRSGMFGDVYTGVNMETGDLLAVKEIKLQDSRTFRSTVDQIHNEMTVLERLNHPNVVTYYGVEVHREKVYIFMEFCQGGSLADLLAHGRIEDENVLKVYVVQLLEGLAYIHSQHILHRDIKPANILLDHRGMIKYSDFGSALYVSPPTDPEVRYEDIQPELQHLAGTPMYMAPEIILGTKKGDFGAMDIWSLGCVILEMMTGSTPWSEMDNEWAIMYHVAAMHTPSIPQNEKISSLARDFIEQCFERDPEQRPRAVDLLTHPWITDFRKKTIITMPPATITKKTSLSHTITEEKTAQLLAGRHVDSKAETDSLAASYKEESALPVASNVGLRQPNELRIDSINLPPAIVTPDTINYSVD

SEQ ID NO: 8502 - protein, 213 aa, Oryza sativa (japonica cultivar-group)
MARTAWRCALVILTGVLLCAAVETAVAAKRVSIPDDLRDVVDDEEDDDWRHWGAAAPPRDDGQPPDLAGMDPAALQAELLRRHAGPSFGFVKLRLGVRRSQEEVMGIATRWTNVLRTGSVAAKFVAVDFGTLMFTMDTGQDILESSDNWVTLFKVKEFILSQPEAYEFKIGNQAFRRPGDPPLDEVVEMLQKQKSTMLSQDPGSQQYKSKVEL

SEQ ID NO: 8503 - protein, 390 aa, Phlebia radiata
MAFNFAAILAFVSLAAVTSAAPSKTTCSNGVVVPDAVCCDFVPLASALQSEVLMGDCGEDAHELVRLIFHDAIAISQSMGPSAGGGADGSMLIFPTVEPAFFPNLGIADSVNNLIPFLSQFPTISAGDLVQFAGAVAISNCPGAPQLEFLAGRPNATAPAIDGLIPEPQDDVTKILARFKDAGNFSPAEVVALLASHSIARADHVDPTLDAAPFDSTPFDFDTQIFLEVLLKGVGFPGLANNTGEVSSPLPVTDGTDVGELRLQSDFALARDERTACAWQSFVNEQEAMATAFKNAVKKLAVLGHNRNDLVDCSAVVPVPKPATGTPATFPASTGPQDLELTCTTEPFPTLSTAPGAQQTLIPHCSDGTMTCNSVQFDGPATNFGGADDS

SEQ ID NO: 8504 - protein, 492 aa, Arabidopsis thaliana
MSDFSSSVKLKYVKLGYQYLINNFLTLLLIPVIATVAIELLRMGPEEILSVLNSLHFELLHILCSSFLIIFVSTVYFMSKPRTVYLVDYSCYKPPVTCRVPFSSFMEHSRLILKDNPKSVEFQMRILERSGLGEETCLPPAIHYIPPTPTMESARNEAQMVIFTAMEDLFKNTGLKPKDIDILIVNCSLFSPTPSLSAMIINKYKLRSNIKSYNLSGMGCSASLISVDVARDLLQVHPNSNAIIISTEIITPNYYKGNERAMLLPNCLFRMGGAAILLSNRRSDRWRAKYKLCHLVRTHRGADDKSYNCVMEQEDKNGNVGINLSKDLMTIAGEALKANITTIGPLVLPASEQLLSLSSLIGRKIFNPKWKPYIPDFKQAFEHFCIHAGGRAVIDELQKNLQLSGEHVEASRMTLHRFGNTSSSSLWYELSYIEAQGRMKRNDRVWQIAFGSGFKCNSAVWKCNRTIKTPTDGAWSDCIERYPVFIPEVVKL

SEQ ID NO: 8505 - protein, 211 aa, Nicotiana tabacum
MSYAYLFKYIIIGDTGVGKSCLLLQFTDKRFQPVHDLTIGVEFGARMITIDNKPIKLQIWDTAGQESFRSITRSYYRGAAGALLVYDITRRETFNHLASWLEDARQHANANMTIMLIGNKCDLAHRRAVSTEEGEQFAKENGLIFMEASAKTAQNVEEAFIRTASTIYKKIQDGVFDVSNESYGIKVGYGGIPGPSGGRDGAASQGGGCCS

SEQ ID NO: 8506 - protein, 181 aa, Helianthus annuus
MSLQQVPTTETTTRKNRNEGRKRFTDKQISFLEYMFETQSRPELRMKHQLAHKLGLHPRQVAIWFQNKRARSKSRQIEQEYNALKHNYETLASKSESLKKENQALLNQLEVLRNVAEKHQEKTSSSGSGEESDDRFTNSPDVMFGQEMNVPFCDGFAYFEEGNSLLEIEEQLPDPQKWWEF

SEQ ID NO: 8507 - protein, 403 aa, Cupriavidus necator
MLTQKTKDIVKATAPVLAEHGYDIIKCFYQRMFEAHPELKNVFNMAHQEQGQQQQALARAVYAYAENIEDPNSLMAVLKNIANKHASLGVKPEQYPIVGEHLLAAIKEVLGNAATDDIISAWAQAYGNLADVLMGMESELYERSAEQPGGWKGWRTFVIREKRPESDVITSFILEPADGGPVVNFEPGQYTSVAIDVPALGLQQIRQYSLSDMPNGRSYRISVKREGGGPQPPGYVSNLLHDHVNVGDQVKLAAPYGSFHIDVDAKTPIVLISGGVGLTPMVSMLKVALQAPPRQVVFVHGARNSAVHAMRDRLREAAKTYENLDLFVFYDQPLPEDVQGRDYDYPGLVDVKQIEKSILLPDADYYICGPIPFMRMQHDALKNLGIHEARIHYEVFGPDLFAE

SEQ ID NO: 8508 - protein, 442 aa, Candida albicans
MVNLLKKLHITKSHQSNHSNSDSNSLNSNTSMDNHQQQQQLQQYQQQFQQPQQQLYPGEQIVHPAAAQTGQNTTNVTAVSSSNITQSATSSLHSQQLQHVDVSKSAAEEAIRRSLLPERSTVSKGKYSLTDFSIMRTLGTGSFGRVHLVRSVHNGRYYAIKVLKKHQVVKMKQVEHTNDERRMLKLVEHPFLIRMWGTFQDSKNLFMVMDYIEGGELFSLLRKSQRFPNPVAKFYAAEVTLALEYLHSHDIIYRDLKPENILLDRNGHIKITDFGFAKEVSTVTWTLCGTPDYIAPEVITTKPYNKSVDWWSLGVLIFEMLAGYTPFYDSTPMKTYEKILAGKIHYPSFFQPDVIDLLTKLITADLTRRLGNLINGPADIRNHPWFSEVVWEKLLAKDIETPYEPPITAGVGDSSLFDHYPEEQLDYGSQGEDPYASYFLDF

SEQ ID NO: 8509 - protein, 1923 aa, Ustilago maydis 521
MADLPERQINSNFQGLVSTCVIFAVVGSISAITYESLRQLRRLPRTRFSKFWRKDADLRHSPGGVQDNPAHARHKHTCEDWEMGHFYLSRVFHASTPSPMLPRWPFAWVKLAISFTDEWYADHTGMDTVVYVRFLRACLFWVLLHCFTTAPILLSIHITFSRGTSTTDMQRASLSYLVNTPAPDCTEQDRSKCKLLPNEKGSSLLWVHLVLLWYISITWVLALWWIGKGSLTLRKAQIAKTRNNVIQAKTQARSAPPNSTLASATPLHHDPHTNLTAAHGITSDNSDGWRQRSLMVMNLPATMRDEASIRRYFEEFLRPDDDDTLSTYAHTDYAPQTASHNPDTQHTSVSDAHHPSSCDEHRAAPPTAYSTHSDGPDGPQPDLHPNRYLKSPIQTVVLVRKMNELASMLSRRQEVLTQLEAAHVKLAQEVLVTVGRRTLKMRKQERSKAKEASYPNDHRPSSSRSSFFFNRLLRSRRQSNHSVQAASASSSGTTTPSEALDPDLEKLGTAHSSAGKALEEELARRLARFSPTNRGLHAKQTQTIQGDDRSNQHEMGETVWEALNELPRELLDPFQPATRLSALFRGQTVPTIDYLLTKLNLLTALVTEMRSRPPTSYEPTSTAFVTFRDPRQARMVWRELKDQIVVKVRLAPEVKDLDWDRLMKTSFTVDVVRGFGVSIVTWGFTIFWVIIINAIVLGIFSVDKLKQIPGLGNFFDNNPKLTGFVTITLPPLLVSLASMSVPELIFQVSKRAQGFVTFSALYDMCLARYWKFVICNVVIFFSVGSTVIVTVLTKVGNTGSILSTVASAFPSAAPFFVSYLILQLALQSGFEHMGFMIALLQHLGARKATTPRTRAIKTLPRNFNRYYWLPLHINIMAIVFIFALLNPLVIPFALVYLALALVIFKKNFAYHYYRRFNEMEGVVYFTRLLRYSLDAIVVMQAVLLIFFSVLKKKPVYIGMSAVLIPLTVITKLIATRLWKSQCRALDDEEAEALCGIDSRPLWQKVQRNDMGPSTAEEGSDSRGPLDALASGRYPAIVPPPPTDSAFQRVWQRLHDSFNANGLDGQSYLATAHAKGKAPTGAVSLGAKGIARTPRYIVKETAKHAFHYRHAAKNSLGMKVLVESPRASRDRPSVDRRRPVSGLPPTSQLHVHVLRNSHEVAAATDPAAAADDDDDVDRADGEMPNHRSSNPQRSKSTSHGQKGDHVIHRRRGSSRSEDRPFLSGFDAISTHAPLPSEDDYDLSFEDGDAPFLEHDEQGHLLRQSSRRSKRTASRHHGTLRRKPSQLATVADEELPQSADSATSSTQPEGATSTDPLSQHAAVKTDQTWGKSSQRSHYEDYDDSLKGRELVRPHPPVRWDDTPNNTARYNNPFYNQEMDDFLWLPRNPLAPIDLFDTIEWYGPALVSSQGGGGIMGEWDDDQDDVNYDTEDEEKLVMHHDEIPFGGEAATLARSQDLMLAGDEEILLPDRLARHLEETQGVEQVVDPAASIPKSMMDDYKRALGRNRDRRGSTTSRSQHSVSRSSLFRRGSNLSSPSAQGFAGGASLLQVPSHGSFCSSDGSQAAASATQMRSSQRPGTGDSEPLASVDEGGVVVPRRSSSRDRRSRDARAGGGEEGGEAYEHVEQGGGGGGVAEQTTDLTPAKRREATLSGVKRNMSRRTYRRDASGALSRVSGISGETAQKTVTLQAALRAEALEEERRLTLKERLVASKIRKKRNVKRDGSGHLAGLEEMNADEEDDDEEEGATSRRAANRSKIMERYEAQHRRREAQASEFGQLTPRKEGGMRRDVSQGSQLGGEVSQSGLDRSASVASGFGARRLRSAALGVLSLTRSPRLGQDGPLTIVTSVPMQELRGGRPTTRGSSRMDAESQASASRQGVAAATASNEDQRPQMVEASSTEPVLRAEASRTSALEESVISGGQGGS

SEQ ID NO: 8510 - protein, 248 aa, Triticum aestivum
MKGGGDVEAGGDIEAGTAAPKGAPYAGTTESPELRWALIRKIYVVLCLQLLLTAAVAAVFVTVTAIPHFFVSSYAGLGLYIFILVFPFIVLCPLHIYRQKHPINLLLLGVFTVAISFSVGLTCAFTSGKVILQAGILTIVVVLSLTAYTFWAARRGKDFSFLGPFLFASLMILLVFAFIQIFFPLGKLSHMIYGTLAALIFSGYIVYDTGSIIKRYKYDEYVWAAVTLYLDIINLFLGLLTLFRACDN

SEQ ID NO: 8511 - protein, 98 aa, Triticum aestivum
RPIQVTILNKFVQKSRLVPAPEFPGYRRPTRPDISIISYVSLLTESGNTKDDLKLPTDDVLLGQIKTGFADGKDLILSVMSAMGEEQICAVKEIGGGK

SEQ ID NO: 8512 - protein, 220 aa, Zea mays
  unsure (1)..(220): unsure at all Xaa locations
GRVGELRRTSSLLLCTSVSPADLARAMVAVDPDHPTGTEGRDPRGMSVLQQHVAFFDRDGDGVVYPWETFKGMRAIGCGFFTSLVLSFLINLVMSYPTQPGWLPSLLLSVHVKNIHKAKHGXSDSETYDTEGRFDPSKFDAIFSKYGRTHPDALTKDEMNSMLKANRNXYDFLGWIAAIGEWHLLYSVAKDKDGLLQREIVRGLFDASLFERLQDSKKSS

SEQ ID NO: 8513 - protein, 104 aa, Triticum aestivum
  unsure (1)..(104): unsure at all Xaa locations
MAPTVMASXAXFVXPXQGLKSTXXXPXSRXSNXASLXSXSNGGRIRCMQVWPIEGIKKFETLXYLPPLXXRRPFLKHVDYLIRSKWPXCLXFIPGSFFPLPFLL

SEQ ID NO: 8514 - protein, 118 aa, Oryza sativa (japonica cultivar-group)
MAAVNCKVVVAVIVVAMVVAAPGASAAITCGQVGSAIAPCISYVTGRSGLTQGCCNGVKGLNNAARTTADRQAACRCLKSLAGSIKSLNLGTVAGVPGKCGVNVGFPISLSTDCNKVS

SEQ ID NO: 8515 - protein, 150 aa, Zea mays
  unsure (1)..(150): unsure at all Xaa locations
SGKDVDLAXYRGKVLLIVNVASQCGLTNSNYTHQAQLYEKYKNQGFEILAFPCNQFGGQEPGTNEEIAQFACTRFKADYPIFDKVDVNGNNAAPIYKFLKSSKGGLFGDSIKWNFSKFLVDKEGRVVDRYAPTTSPLSIEKDIKKLLGSS

SEQ ID NO: 8516 - protein, 480 aa, Lactobacillus acidophilus
MKLQNKAILITYPDSLGHNLKDLDHVMDRYFNKTIGGIHLLPFFPSNGDRGFSPTRYDVVEPKFGSWEDVEKLSQKYYLMFDFMINHLSKKSSYFEDFEAKHDKSKYSDLFLSWDKFWPKGRPTKEDIDLIYKRKDKAPYQNIKFEDGTHEKMWNTFGPDQMDLDVRTKTTQDFIKHNLQNLSKHGASLIRLDAFAYAIKKLDTNDFFVEPEIWNLLEKVNDYLKDTPTTILPEIHEHYTMPFKVAEHGYFIYDFALPMVLLYSLYSGNSTQLAAWLKKCPMKQFTTLDTHDGLGVVDAKDILTDDQISYTTNELYKIGANVKKKYSSAEYHNLDIYQINTTYYSALGNDDKKYFIARLLQIFAPGIPQIYYVGLLAGENDIQLLEKTKEGRDINRHYYDLDEIAEQVQRPVVKSLIKLLEFRNSVPAFDLEGSIKVETPSEHEIIVTRSNKAGTEVASTYVDFKNLDYQVKYNDQVFNF

SEQ ID NO: 8517 - protein, 156 aa, Brassica napus
  unsure (1)..(156): unsure at all Xaa locations
RFMIYVHTKMMIVDDEYIIIGSANINQRSMDGARDSEIAMGGYQPYHLSIRQPARGHIHGFRMSLWYEHLGMLDETFLDPSSQECVQKVNRIADKYWDLYSSESLEHDLPGHLLRYPIGIASQGDITELPGCECFPDTKARILGTKSDYLPPILXT

SEQ ID NO: 8518 - protein, 403 aa, Burkholderia cepacia R1808
MLTQKTKDIVKATAPVLAQHGYDIITCFYRKLSDAHPELRNAFNMAHQEQGQQQQALARAVYAYAENIEDPGSLAAVLKNIANKHASLGVRPEHYPIVGENLLAAIKETLGDAATDDIVSAWAQAYGNLADLLMGMESTLYERSSERLGGWTGWRTFVVREKRPESSVITSFVLEPADGEPVANFEPGQYVSVAMDVPELGLQQIRQYSLSDMPNGRTYRISVKRESGGDYPPGYVSCLLHDYVEVGQTLALAAPYGSFHIDVEAKTPIVLISGGVGLTPMISMLTRAIQDSHRQVVFVHGARNSGVHAMRDRLRETASTHANFKLVVFYDDPLPQDVEGVDYDLKGLVDVNAIKDALLLPDADYYICGPVPFMRLQHDALKQLGVPETRIHYEVFGPDLFAE

SEQ ID NO: 8519 - protein, 127 aa, Zea mays
EDLAEEVEPIRGPMGSDMEVTLACAGFSKPILTALEATRPGGKVSLVGMGPNEMPLPLTAAAAREVDLVGVFRYKATWPLCIDFLRRGKVEVNPFFPPRLGFSQREGEEPFEVSPRGRDAIKVMFTL

SEQ ID NO: 8520 - protein, 131 aa, Triticum aestivum
MSYYDRRGESSVLEAFTLSPLPYPVILILMMVTLLLGASWFFSYEEFMEEASEQFSWFLLGVPIALVLLIRWISSVDTFEGYFGFYPTESRWRGYPAAPSEGSSPWGVAMVVVLLLVLASFHSTFQDMWKA

SEQ ID NO: 8521 - protein, 347 aa, Coccidioides immitis
AEKIAKFPGTKGPDGKYTVTLIEGDGIGPEISQSVKDIFSAAKVPIKWEPVDVTPILKDGKTAIPDEAINSVKKNYVALKGPLATPVGKGHVSLNLTLRRTFNLFANVRPCRSIAGYKTPYDNVNAVLIRENTEGEYSGIEHVVVDGVVQSIKLITREASERVLRFAFQYAQEVGKPKVRAVHKATIMKMSDGLFLRTAKEISKEFPDIEFDAELLDNTCLRMVTDPAPYNDKVLVMPNLYGDILSDMCAGLIGGLGLTPSGNIGNECSIFEAVHGSAPDIAGRALANPTALLLSSIMMLRHMGLNDHAKKIETAIFETLAEGKTLTGDLGGKAKTHEYAGAIIKRL

SEQ ID NO: 8522 - protein, 467 aa, Zea mays
MSTTKVKRRVGKYELGRTIGEGTFAKVRFARDTVTGEAVAIKILDKEKVLKHKMVEQIKREISTMKLIKHPNVVRIYEVMGSKTKVYIVLEFATGGELFDTIVNHGRMREDEARRYFQQLINAVDYCHSRGVYHRDLKPENLLLDSYGNLKVSDFGLSALSQQIKDDGLLHTTCGTPNYVAPEVLEDQGYDGAMADLWSCGVILFVLLAGYLPFEESNLMTLYKKISNAEFTFPPWTSFPAKRLLTRILDPNPMTRITIPEILEDEWFKKGYKRPEFDEQYDTTLDDVDAVFNDSEEHHVTEKKEEEPVALNAFELISMSAGLNLGNLFDSEQEFKRETRFTSKCPPKEIVRKIEEAAKPLGFDVQKKNYKLRLEKVKAGRKGNINVATEILQVAPSLNTIFFCKAFCDTLLFILIQILQVAPSLHMVEVRKAKGDTLEFHKFYKNLSKTLKDVVWKSDDLQTQHAS

SEQ ID NO: 8523 - protein, 124 aa, Pinus resinosa
MAVSKKMVEAVFLVGLVVTMMNVWGGVSVEGAISCNQVVSAMTPCATYLLGNAATPAAACCPSIRGLDSQVKATPDRQAVCNCFKTQARSYGVKLGKAANLPGLCKVTDLNVPISPNVDCSKVH

SEQ ID NO: 8524 - protein, 472 aa, Wolbachia endosymbiont of Drosophila melanogaster
MSTLITVAYGDGIGPEIMEAVLSILREAEAEISIDIIEIGERVYSKEWSHGISPSGWESIERTKILLKSPTTTPQGKGNKSLNVALRKNLGLYANIRPCISYHHVIENKFDKFDIVVIRENEEDVYTGIEHRLTGDSYQCTKIITRSGSEKICRYAFEYAKKHNRKKVTCLTKDNIMKMTDGTFHAAFDRIAKEYPDIKAEHYIVDIGMARVATEPENFDVIVTENLYGDILSDIVAQTSGSVGLAGSSNIGNEYAMFEAVHGSAPDIAGKNIANPSGLLNAAVHMLIYIGQVGTAKLIYDAWLKTLEDGIHTADLYKEKRSKQKVGTKEFAEAVIDNLGKKPKTLSELIIGSDPNSKVDKIQDNYEQDYKIKKLVGSDITLAWSKPADFDQIVKLFETSNPQIIAIYSKGLAIWPGSSKSSSDQITCRFIANNEITNSDVNNLLIKFEEHNFDVVRMDKLYLYDGKEGFFS

SEQ ID NO: 8525 - protein, 321 aa, Agrobacterium tumefaciens str. C58
MTSKLEQLRAITTVVADTGDIEAVARLKPVDCTTNPTIVLKALGTPAFADAVKEAVAWGRKQGGQSDAVVAAVADRLAISVGAALAGLVPGRVSTEVDADLSFDTQASITKARHIIASYKERGIERERILIKLASTWEGIKAAEVLQSEGIDCNLTLLFSQAQAIACAEAKAFLISPFVGRILDWYKKSTGETYTAETDPGVVSVRSIYNYYKANGIGTVVMGASFRNVGEIEALAGCDRLTISPALLEELDKDNGKLERKLSPDNVKAEALQSLDEKAFRWAMNEDAMATEKLSEGIRLFAKDLVTLREMVRKELTAAAA

SEQ ID NO: 8526 - protein, 435 aa, Streptomyces clavuligerus
IYNRDELLSVLPAGPAPEGDAELVLRLLERYDLHAFRLVNGRFATVVRTGDRVLLATDHAGSVPLYTCVAPGEVRASTEAKALAAHRDPKGFPLADARRVAGLTGVYQVPAGAVMDIDLGSGTAVTHRTWTPGLSRRILPEGEAVAAVRAALEKAVAQRVTPGDTPLVVLSGGIDSSGVAACAHRAAGELDTVSMGTDTSNEFREARAVVDHLRTRHREITIPTTELLAQLPYAVWASESVDPDIIEYLLPLTALYRALDGPERRILTGYGADIPLGGMHREDRLPALDTVLAHDMATFDGLNEMSPVLSTLAGHWTTHPYWDREVLDLLVSLEAGLKRRHGRDKWVLRAAMADALPAETVNRPKLGVHEGSGTTSSFSRLLLDHGVAEDRVHEAKRQVVRELFDLTVGGGRHPSEVDTDDVVRSVADRTARGAA

SEQ ID NO: 8527 - protein, 175 aa, Triticum aestivum
MAPAVMASSATTVAPFQGLKSTAGLPVSRRSGSASLSSVSNGGRIRCMQVWPIEGIKKFETLSYLPPLSTEALLKQVDYLIRSKWVPCLEFSKVGFVFREHNSSPGYYDGRYWTMWKLPMFGCTDATQVLNEVEEVKKEYPDAYVRVIGFDNMRQVQCVSFIAFRPPGCEESGKA

SEQ ID NO: 8528 - protein, 168 aa, Zea mays
SLPSLYITQEEFQLALFKNQRKENLFANRIFDLFDVKKRGAIDFGDFVRALNVFHPNIPMDEKIDFSFKLYDMDSTGFIERKEVKQMLIALLGESEMRLSDDIIETILDKTFSDADANQDGKIDRTEWENFVTRNPSLMKIMTLPYLKDITTTFPSFVFNSEVDDLVT

SEQ ID NO: 8529 - protein, 369 aa, Candida albicans SC5314
MFRQVTKSAPVIRTTQRLFARSYIAGQFTGSKGSDGKYTVTLIEGDGIGPEISQAVKDIYAAADVPIHWEPVDVTPLLIDGKTTLPQPAVDSVNKNLVALKGPLATPVGKGHTSMNLTLRRTFNLFANVRPCKSIVGYETPYENVDTVLIRENTEGEYSGIEHTIVPGVVQSIKLITKPASEKVIRYAFEYAKSINKPHVLVVHKASIMKLSDGLFVNTAKEVAQEYPDVSLDFELLDNTSLRLTADPSQYKNVVMVMPNLYGDIMSDLSSGLIGGLGLTPSGNMGNKVSIFEAVHGSAPDIAGKGLANPTALLLSSCMMLRHMSLNSDADRIENAVLKTIASGPENRTGDLKGTATTTRFTEEVIKNL

SEQ ID NO: 8530 - protein, 482 aa, Pseudomonas fluorescens
MLDVPLLIGGQSCPARDGRTFERRNPVTGELVSRVAAATLEDADAAVAAAQQAFPAWAALAPNERRSRLLKAAEQLQARSGEFIEAAGETGAMANWYGFNVRLAANMLREAASMTTQVNGEVIPSDVPGSFAMALRQPCGVVLGIAPWNAPVILATRAIAMPLACGNTVVLKASELSPAVHRLIGQVLQDAGLGDGVVNVISNAPADAAQIVERLIANPAVRRVNFTGSTHVGRIVGELSARHLKPALLELGGKAPLLVLDDADLEAAVQAAAFGAYFNQGQICMSTERLIVDAKVADAFVAQLAAKVETLRAGDPADPESVLGSLVDASAGTRIKALIDDAVAKGARLVIGGQLEGSILQPTLLDGVDASMRLYREESFGPVAVVLRGEGEEALLQLANDSEFGLSAAIFSRDTGRALALAQRVESGICHINGPTVHDEAQMPFGGVKSSGYGSFGGKASIEHFTQLRWVTLQNGPRHYPI

SEQ ID NO: 8531 - protein, 415 aa, Pasteurella multocida subsp. multocida str. Pm70
MQSKVVIPQGEKIQLDAKGALIVPDHPIIPFIEGDGIGVDVTPAMRTVIDAAVEKAYGGKRKISWMEIYAGGKANEVYGENTWLPDETMTFIRDYHVAIKGPLMTPVGGGIRSLNVAMRQGLDLYNCLRPIRYYDGTPSPVKHPELVDMVIFRENSEDIYAGVEWVAGSAEANKVIAFLQQEMGVKKIRFTEDCGIGIKPVSKQGTQRLVRAALQYVIDNDRKSLTLVHKGNIMKFTEGAFKEWGYQVAQEFGAELLDGGPWMTLKNPKTGREIIIKDSIADAFLQEILLHPTEYDVIATLNLNGDYISDALAAQVGGIGISPGANIGAEAAIFEATHGTAPKIAGQDKGNPGSLILSGEMMLRHLGWLEAADLVVKAVSKTIADKTVTFDFAEMLEGAKLRSTSEFAQDIVANM

SEQ ID NO: 8532 - protein, 480 aa, Lactobacillus acidophilus
MPIENKVMLITYPDSLGKNLKELDEILSEDLKGAVGGIHLLPFFPSTGDRGFAPTGYTEVDPKFGDWSDIEKIGKKYYLMFDFMINHISRQSKFYKDFKQKKDKSKYADLFLSWDKFWPEGRPTRKDIDLIYKRKDRAPYQEITFTDGSKEKLWNTFGEEQIDMDVRKEVTQKFIKDTLRALIDHGADIIRLDAFAYAVKKLDTNDFFVEPEIWDLLKQVQDDISDKGAMILPEIHEHYSMPFKISKHGYYIYDFALPMVTLYSLYSGKSNRLADWLKKCPMKQFTTLDTHDGIGVVDARDILSPDEIKYTSNELYKVGANVKKKYSSAEYHNLDIYQINTTYYSALGNDDKKYFIARLIQMFAPGIPQVYYVGMLAGKNDIELLEKTKEGRNINRHYYGREEVAEETKRPLVAALLKLFNFRNNEAAFDLDGSIEITTPNENVIQITRMNKDKTRKARAVINLKNLTYQVTVNNEVINF

SEQ ID NO: 8533 - protein, 442 aa, Picrophilus torridus DSM 9790
MIDDESRTLEYNEKALKLSEFYKGKVGIVPKVPVRSLDDFSVWYTPGVAAVARKIAENRDLSFELTGRWNSVAILTDGTRVLGLGNIGPEAAMPVMEGKSLIFNYLGGVNAVPIPVRAASEDDFIRVAMALEPSFGGFNLEDIESPKCFSILEKLQKTLEIPAWHDDQLGTASITLAGVINALRVVNKKIDDVRVVFNGAGAANIAAAYLFNEAGFKMKNMVMIDSSGILEPERPDMDRLMLNNPLKYKLAIDTNEDRLKGNLMDAVNGADIIISASKSQPGIIRPEHIKLMNRDPIVFALANPLPEIWPRDAINAGARIVATGRSDFNNQINNSLVFPGVFRGILDARARKVNFKVMVSASYEIANAVKNPDENHIVPDMSNWELYPRVAAAVASKCSELGFARKAGDYNTFLKRATDIIEENRRLYDTLIEKNIIKIAMR

SEQ ID NO: 8534 - protein, 189 aa, Methylobacillus flagellatus KT
MDIDFKKLAPWNWFKKEQEEQQSTVSLPVQRNDLPVAGGPVSPILQLHREIDRLFDDAFRGFGFPTLAMPRWPSEWPGLLKPALDIQETDKQYKISLEVPGVEEKDIQITLDNDVLLVRGEKRQEQESKDGGFHRVERSYGSFQRALNLPADANQDTIKAAFKNGVLTITMEKREASTPKQGRSIPING

SEQ ID NO: 8535 - protein, 429 aa, Leptospira interrogans serovar Copenhageni str. Fiocruz L1-130
MAEVAILKIDGKEYELPIVIGTEKEKAIDISKLRQQTGYVTLDNGYLNTGACTSAVTFLDGELGILRYRGIPIEQLAENSTFTEVAYLLIYGKIPSDSELKKWNDELTMHTLIHEDLKRLYNGFPKDGHPMAIMSSMIGSLSTYYQDSYDPENAEHRHISMIRLLAKFPTIAAFAYKKSIGQPTIHPLNSLDYCANFMNMMFSVPSEDYKIDPEIVKALNLLLILHADHEQNCSTSTVRLVGSSLANLYGAISAGICALWGPRHGGANQEVLEMLQEIQASGLPVKKIVEKAKDKNDSFRLSGFGHRVYKNFDPRAKIIKKACDSVLKRLGVQDSLLDIAKELEETALHDPYFVERKLYPNVDFYSGIIYRALGIPVNMFTVMFAMGRLPGWIAQWKEMIESPDMKIGRPRQIYTGSTETSYKEAKKKA

SEQ ID NO: 8536 - protein, 295 aa, Triticum aestivum
  unsure (1)..(295): unsure at all Xaa locations
MAGLSMEHPWAFAFGLLGNIISFTSLLAPIPTFYRIFKSKSTEGFQSVPYVVALFSAMLWIFYALVKTGEGLLITINAAGCVIETIYIVMYLVYAPRKAKIFTAKIVLLLNIAGFGLIFLLTVFAFQGETRVISLGWICVGFSVCVFVAPLSIIGRVIKTKSVEYMPFSLSLTLTLSAIVWFLYGLLIKDKYVALPNXLGFTFGMIQMVLYMFYMNATPVVTSDVKEVKEAWKVPAEDQVVVINVGKADKSSCAEVRPVTEMASAVDVPRRCAAEAAAPRQQVMAVDFARSVEVV

SEQ ID NO: 8537 - protein, 216 aa, Triticum aestivum
MGCIQSTPKRRQHPAGYEDPVHLASQSPAFSVSEVEALFELFKSISGSVIDDGLINKEEFQLALFKNTRKENLFANRIFDLFDVKKRGVIDFGDFVRALNVFHPNFPVEEKIDFSFKLYDMDGTGFIERKEVKQMLIALLGESEMRLSDEIVETILDKTFSDADTNQDGKIDRTEWENFVSRNPSLLKIMTLSYLKDITTTFPSFVFHSEVDDIVT

SEQ ID NO: 8538 - protein, 134 aa, Brassica napus
MTMMINPDVDLIDRGGSVVVREVWAYNLVSEFHLISAVVEDFPYISMDTEFPGVIFKAEPAILRRGNPGYLYKLLKSNVDVLSLIQVGITLSDADGNLPDLGGGVDGSRFIWEFNFRDFDVDRDAHAEDSIELL

SEQ ID NO: 8539 - protein, 197 aa, Zea mays
MSASRFIKCVTVGDGAVGKTCLLISYTSNTFPTDYVPTVFDNFSANVVVNGATVNLGLWDTAGQEDYNRLRPLSYRGADVFILAFSLISKASYENVSKKWIPELKHYAPGVPIVLVGTKLDLRDDKQFFIDHPGAVPITTAQGEELKKLIEAPAYIECSSKSQENVKGVFDAAIRVVLQPPKQKKKKSKAQKACSIL

SEQ ID NO: 8540 - protein, 214 aa, Triticum aestivum
  unsure (1)..(214): unsure at all Xaa locations
HQETCRKIKALHQYDCLRANKATSAWGLEVRVPFLDKEFINEAMSIDPEWKMIRPDLGRIEKWILRKAFDDEERPFLPKHILYRQKEQFSDGVGYSWIDGLKDHAASNVNEQFFYFKPPFMKKGXAVTRTFPXFFPQTISDLTGPGGPSVACSPAKAVEWDAQWSGNLDPSGRAALGVHLSAYEQEHLPATILTGTSKKPRMIEVAAPGVAIES

SEQ ID NO: 8541 - protein, 219 aa, Shewanella oneidensis MR-1
MTQQTLYSTSATTLEVNKLLKNTYLLLAMTLAFSALCAGLAMALNISPLMSLGLSIGGLVLLFVTLRKADSAAGIFWVFAFTGMEGASLGYMLNHYAGMTNGSELIMQAFGLTSVIFIALSAYAVTTKKDFSFMRGFLFAGLIVVIAAAIINIFVGNSVAFMAINAGLALLMTGFILFDTSRIVNGGETNYIRATISLYLDFLNLFIAILHLLGIGNDD

SEQ ID NO: 8542 - protein, 183 aa, Streptomyces avermitilis MA-4680
MTTTSRAQGATVWLAGLPSAGKTTIGRILAGRLRSQGHRVEVLDGDEIRRFLSAGLGFSRADRHTNAQRIGLVAEVLARNGVLAVVPVIAPYADSREAVRKRHEASGTPYLEVHVATPVEVCSERDVKGLYARQAAGRLKGLTGVDDPYEPPVDPALTLETQGQTPEESAGAVYAVLAARGLV

SEQ ID NO: 8543 - protein, 360 aa, Glycine max
MGESNVMTKTEDGACLSAMLLSTNLVYPAVLNAAIELNLFEIIAKATPAGSFMSSHEIASKLPTQHPDLPNRLDRMLRLLASYSVLTTSTRTTHHGATETVYGLSQVGQYFVPDGTRGYLASFTAFVCYPPLLQVWLNFKEAMVDADIDLFKKIHGVTMYQYMENDPKMNQIFNKSMANLCATEMSRILEIYTGFEGISTLVDVGGGNGQNLKMIISKYPLIKGINFDLPQVIENAPPLPGIEHVGGDMFARVPQGDAIILKAVYHNWSDEKCIEFLRNCHKALSPNGKVIVVEFILPEEPEPTEESQLVSTLDNLMFITVGGRERTQKQYETLCKLSGFSNFQVACRAFSSLGVMEFYK

SEQ ID NO: 8544 - protein, 162 aa, Cupriavidus necator
MRRRFGSLLSAVICGLALHAGAATLSDTELDARVHALSGQLRCLVCQNQTLADSNADLAVDLRRQIRERLRGGASDEAVKDYLVQRYGDFVLYKPPLRPLTWLLWFGPLLLVAGVTIAIIRARSRSVAAGLPLDAEAQRQLAALLDETSGQPASPPAEARQP

SEQ ID NO: 8545 - protein, 503 aa, Streptococcus pneumoniae
MFASKSERKVHYSIRKFSIGVASVAVASLVMGSVVHATENEGSTQAATSSNMANKSQTEQGEINIERDKAKTAVSEYKEKKVSEIYTKLERDRHKDTVDLVNKLQEIKNEYLNKIVESTSTIEIQGLITTSRSKLDEAVSKYKKAPSSSSSSGSSTKPETPQPETSKPEVKPEPETPKPEVKPEPETPKPEVKPEPETPKPEVKPELETPKPEVKPEPETPKPEVKPEPETPKPEVKPEPETPKPEVKPELETPKPEVKPELETPKPEVKPEPETPKPEVKPELETPKPEVKPEPETPKPEVKPELETPKPEVKPEPETPKPEVKPELETPKPEVKPEPETPKPEVKPEPETPKPEVKPEPETPKPEVKPEPETPKPEVKPEPETPKPEVKPEPETPKPEVKPEPETPKPEVKPEPETPKPEVKPDNSKPQADDKKPSTPNNLSKDKQSSNQASTNENKKQGPATNKPKKSLPSTGSISNLALEIAGLLTLAGATILAKKRMK

SEQ ID NO: 8546 - protein, 180 aa, Pisum sativum
MASMISSSAVTTVSRASTVQSAAVAPFGGLKSMTGFPVKKVNTDITSITSNGGRVKCMQVWPPIGKKKFETLSYLPPLTRDQLLKEVEYLLRKGWVPCLEFELEKGFVYREHNKSPGYYDGRYWTMWKLPMFGTTDASQVLKELDEVVAAYPQAFVRIIGFDNVRQVQCISFIAHTPESY

SEQ ID NO: 8547 - protein, 490 aa, Triticum aestivum
  unsure (1)..(490): unsure at all Xaa locations
MDPNSFKTGGLLLPTIERRCASPPSVIVIGGGISGIAAARVLSNSSFEVTVLESRDRIGGRVHTDYSFGCPIDMGASWLHGVSNENSLAPLISHLGLRLYHTSGDNSVLYDHDLESCSLFDKNGLAVPMETAAKVGVIFEKILKETVKLRDEQEHDMPLEQAISMVLERHPDLKLEGLDDRILQWCVCRLEAWFAADADEISLKNWDQEHVLTGGHGLMVDGYFPVIQALAQGLDIRLNQRVKKIARQQKGVTVTIEDGTQYSADACIITVPLGVLKANIIKFEPELPSWKSSAIADLGVGIENKVAMHFDKAFWPNVQVLGMVGPTPKTCGYFLNLHKATGHPVLVFMAAGRFAQDVEKLSDKEAVELVMCHLRKMIPDATEPTQYLVSRWGSDPNSLGSYSCDLVGKPSDVCQRFSAPVEXVLYFAREAASAEHSGAVHGAYSSGMDAAEECRRRLLMSKGVPDLIQVGAAACEEMADVVAPLQICRT

SEQ ID NO: 8548 - protein, 499 aa, Candida albicans SC5314
MFKKALPLVSKLTTPKGITYNQPLGLFINNEYVHPKQQKTFEVISPSTEEKITDVYEALEEDIDTAVEAAQAAYHNGWAQGPPEQRSKVLFKLADLIEENAELLAQIETWDNGKSLQNARGDVALTAAYFRSCGGWADKILGSQINTGNTHFNYTQRVPLVCGQIIPWNFPLLMASWKLGPVLATGSTTVLKTAESTPLSALYLSQLLVEAGMPKGVINIVSGFGATAGAAIAKHPKIEKVAFTGSTATGKIIMKLAAESNLKKVTLELGGKSPNIVFNDADLDKTIQNLIVSIFYNSGEVCCAGSRLLIQSGVYDQVVEKFKEAAESVKVGNPFDEDTFMGAQVSDVQLSKILKYVESGKSQGATVVTGGARADGKGYFVKPTIFADVKKDMDIVREEIFGPVVTLIKFDTVDEAVELANDSDYGLAAGIHSADVNKCIDVANRVKAGTVWVNTYNDFHPMVPFGGFSASGIGREMGEEVLHEYTQVRAVRMKINPPN

SEQ ID NO: 8549 - protein, 319 aa, Wigglesworthia glossinidia endosymbiont of Glossina brevipalpis
MNQLDYIKKFTNVVIDSGNIKYIKKYSPKDVTTNPSLILRESKSKHYYPLLMDAISYAKKKGGNLNSYIINANDKLLVNIGREILKIIDGRISIEIDVRLSFSYLDLIIRAKKIISLYNSYGIENNRILIKIAATWEGIQAAKFLEKSGINCNLTLIFSLVQAIACAESNVYLISPFVGRVNDWYIKNFKLNKNSKIDPGVKLVYKIFYFYQKYGYKTFVMGASFRNIDQIISIIGCDAITISPDFVNKLNNLKLKKIKNFIRVNLESKIKKNKLLEKEFRWKFNQNFMAVEKLSEGIRLFLRDQKKIDSFFLKKFKSG

SEQ ID NO: 8550 - protein, 356 aa, GIBBERELLA ZEAE PH-1
MAETNPSCLLYGPGDARFEDRPFPQIEDPHDVIVKIAYTGVCGSDVHFWTEGGFARKVSQQQPLVMGHEASGIIYKVGPAVSQLKPGDRVAIEPGFPCKSCNYCKSGRYNLCRKMKFAADPPFTHGTLSRFFKIPEDFTYKVPHSISLEEAVLVEPLGVAVHGVRLADIRPGQNVIVQGAGTVGCLTAATAKAYGAKTVVITDINPEKLSFAKGVVECYTFQPRLYATPEQEAARLKQEAGFDLGADTVLECTGVEISAHTGILALAPGGVFVQIGLGKPIQSLPLHSMCEKEMTMKTCFRYGPGDFEIALELLESCKVSVSSFISSIVPFEKAPEAWVRTMKGEGIKNLIKGVED

SEQ ID NO: 8551 - protein, 126 aa, Corynebacterium diphtheriae NCTC 13129
MAKLTKDELIEAFKEMTLIELSEFVKEFEEVFEVTAAAPVAVAAAGAAPAAAEEEKTEFDVVLEDAGAKKIGVIKAVRELVSGLGLKEAKELVEGAPKAILEGANKDDAEAAKAKLEEAGAKVTLK

SEQ ID NO: 8552 - protein, 169 aa, Triticum aestivum
  unsure (1)..(169): unsure at all Xaa locations
MAPTVMASXATSVAPFQGLKSTAGLPVSRRSNGASLGSVSNGGRIRCMQVWPIEGIKKFETLSYLPPLSTEALLKQVDYLIRSKWVPCLEFSKVGFIFREHNASPGYYDGRYWTMCKLPMFGCTDATQVINEVEEVKKEYPDAYVRIIGFDNMRQVQCVSLIAYKPPGC

SEQ ID NO: 8553 - protein, 434 aa, Bradyrhizobium japonicum
MDAKASNKTATLTVGNKNYDLPIHSGSVGPDVIDIGKLYGQSGLFTYDPGFTSTASCQSKITYIDGDAGVLEYRGYPIEQLAENGDFLETCYLLLYGNLPTAAQKKDFDDRVIHHTMVHEQMARFFQGFRRDAHPMAVMVASVGALAAFYHDSTDINDPKQRMIASMRMIAKIPTLAAMAYKYTIGQPFVYPKNSLKFAENFLHMCFAVSCEEYKINPVLADALDKIFILHADHEQNASTSTVRIAGSSGANPFACIAAGIACLWGPAHGGANEAALAMLGEIGSVDKIPEFIAKVKDKNSEVRLMGFGHRVYKNYDPRAKIMQKMCHAVLKETGHGDDPMLKVALELEKIALSDQYFIDRKLYPNVDFYSGITLKAMGFPVSMFTVLFAVARTVGWISQWSEMIEDPQQKIGRPRQLYTGVTRRDYVAIKDRK

SEQ ID NO: 8554 - protein, 201 aa, Glycine max
  unsure (1)..(201): unsure at all Xaa locations
MVLEATMICIDNSEWMRNGDYSPSRFQAQTDAVNLICGAKTQSNPENTVGVLTMAGKGVRVLVTPTSDLGKILACMHGLEIGGEMNLAAGIQVAQLALKHRQNKKQQQRIIVFAGGPVKHEKKMLEMIGRKLKKNSVALDVVNFGEEDEGKTEXLEALLSAVNNNDTSHIVHVPSGPNALSDVLISTPIFTGDXEGESGFA

SEQ ID NO: 8555 - protein, 136 aa, Triticum aestivum
  unsure (1)..(136): unsure at all Xaa locations
MSDSEEHHFESKADAGASKTYPQQAGTVRKNGFIVIKNRPCKVVEVSTSKTGXKHGHAKCHFVAIDIFNGKKSEDIVPSSHNCDIXPHVNRYWITTDWIYQEDGLVTFLLQNGNTKDDLXLPXLDEPLVAKFKEGF

SEQ ID NO: 8556 - protein, 146 aa, Azotobacter vinelandii
MGRSAFGSLMEPFGRAGREMASMPAVDIVDQDKAILISAELPGMDEQNIELKVCNGNLMLKGEKREEREENSQGLYLSERSYGAFQRSFALPDSVDADNIEAHFDKGVLTITLPKRPEAQQSERAIEIRRGEAAAQQQDTTQATTH

SEQ ID NO: 8557 - protein, 407 aa, Zygosaccharomyces rouxii
MATHEEFIRTQVFGTVFEITNRYTDLNPVGMGAFGLVCSATDTLAGQPVAIKKIMKPFSTAVLAKRTYRELKLLKHLRHENLICLQDIFLSPLEDIYFVTELQGTDLHRLLQTRPLEKQFVQYFLYQILRGLKYVHSAGVIHRDLKPSNILINENCDLKICDFGLARIQDPQMTGYVSTRYYRAPEIMLTWQKYDVEVDIWSAGCIFSEMIEGKPLFPGKVHVHQFSIITDLLGSPPRDVIITICSEDTLKFVTSLPHRDPVPFQERFKAVEPDAVDLLGRMLVFDPKKRITAADALVHPYLAPYHDPTDEPIAEAQFDWDFNDADLPVDTWRVMMYSEILDFHKIGGSDGQIDTNAAFDDQVAAATAGPMLPLWLNSNININNSHPVNIQVQLLRHQQPRITVVYQ

SEQ ID NO: 8558 - protein, 317 aa, Triticum aestivum
LNKFVQKSRLVPVRNSRDIVDPRVREAGLPEGVLNIVSGFGPTAGAALASHMDVDKIAFTGSTDTGKVILELSARSNLKPVTLELGGKSPFIVMDDADIDQAVELAHFALFFNQGQCCCAGSRTFVHERVYDEFVEKSKARALKRVVGDPFRKGVEQGPQIDDEQFKKILRYIKSGVDSGATLVTGGDKLGDKGYYIQPTIFSDVQDGMKIAQEEIFGPVQSIFKFNDLNEVIKRANASQYGLAAGVFTNNLDTANTLTRALRAGTVWVNCFDIFDAAIPFGGYKMSGIGREKGIDSLKNYLQVKAVVTALKNPAWL

SEQ ID NO: 8559 - protein, 103 aa, Dechloromonas aromatica RCB
MDVKEEGDSYLVHAELPGVKKEDIHVVVDGNQVSISAETKQEKEVKEGDRVLRSERYFGKVSRSFLLEQDLDDTKATAKFNDGVLELTLPKRTASPNKKLNIE

SEQ ID NO: 8560 - protein, 312 aa, Triticum aestivum
  unsure (1)..(312): unsure at all Xaa locations
MERYKVIREIGDGTCGNVFRAYNIETNEIVAVKKMKRKFYHXXECISLREVKALQKLNHPNIVQLKEVTMENHELFFIFEHMDCNLYDVIRERSAPFSEEEIRTFMLQILQGLVYMHNNGYFHRDLKPENLLVTNGIVKIADFGLAREVCSSPPYTDYVSTRWYRAPEVLLQASAYTPSIDMWAIGAILAELFTLSPLFPGETETDQLYKICAVLGTPDHSLWPEGMNLPRSSSFQFFQIPPRNLWELIPNASLEALDLIKQLCSWDPRRRPTAEQALQHPFFNVRKWVPRPLQDASYPKMNEPRATPRLEL

SEQ ID NO: 8561 - protein, 457 aa, Ralstonia eutropha JMP134
MSETVATALKANFRGQLIQPGDAAYDQARTVYNGMIDKRPAIIARCVDVADVVAAVNAARDSGMLLAVRGGAHNGAGLGTCDGGLVIDLSPMKGVFVDGGRKTLRVGGGCTWGDVDHAASAYGLATPSGFISTTGVGGLTLGGGIGYLSRAYGLTIDNLLSAEVVLADGRIVTASNEENADLFWALRGGGGNFGVVTSFEFKAHPVATVYGGPMLWPMEQARELMAWWRDFILNAPQQINGWFGFVTVPPAPPFPEEVHLQKMCAVVWCYTGPLDEADTHFRTIREAMPPVVDFAGPIPWPVLQSLFDGLYPAGLQWYWKADFVSDLSDKAIDLHIKYAQQLPSMHSTMHLYPINGAAHRAGCDDTAFSYRDANFASVIVGVDPDPANNDRIVQWAKDYWLALHPYSAGGGYINMMMDEGNDNVKASYRDNYARLAQIKRKYDPANLFRVNQNIKPA

SEQ ID NO: 8562 - protein, 360 aa, Azotobacter vinelandii
MSKQILVLPGDGIGPEIMAEAVKVLQLANEKYQLGFVLGYDELGGAAVDKYGVPLADETLERARRRCHPARRRRRSEMGRHRPGHPPGARPAENPFATGPVRQPAPGVLYPQLAEASTLRPEVVAGLDILIVRELTGGIYFGAPRESRLLANGERMAYDTLPYSESEIRRIAKVGFDMARVRGKKLCSVDKANVLASSQLWRAVVEEVAKDYPDVVLSHMYVDNAAMQLVRAPKQFDVIVTDNMFGDILSDEASMLTGSIGMLPSASLDADNKGMYEPCHGSRRPDIAGKGIANPLATILSVSMMLRYSFGQVEAANAIEQAVSKVLDQGLRTGDIWSEGCRKVGTAEMGDAVVAALATL

SEQ ID NO: 8563 - protein, 157 aa, Coccidioides posadasii
FMHWPAAFAPGDDMFPKDSQGNSKTVDIDYVDTYKAMEKLVKSGKTKAIGISNFSKGEMERLLESCSIVPAVMQMELHPWLQQNDFVEWLKSKGIHVTQYSSLGNQNEVYSGRERYGRLIEDPALAAIGTKYGKTGAQVALAWGINKGHSVFVKSKT

SEQ ID NO: 8564 - protein, 186 aa, Emericella nidulans
MSSTSPSKEPEVEQEPHSGEEHEQMDKEQDNQTQGQGEFEVKEQDRWLPIANVARIMKLALPENAKIAKEAKECMQECVSEFISFITSEASEKCQQEKRKTVNGEDILFAMTSLGFENYAEALKIYLSKYRETQSARGEHQNRPPSSGYAGGDPSAELPAALQSCVPGVLQLEAPSPKPLIMQAAL

SEQ ID NO: 8565 - protein, 483 aa, Bacillus cereus ATCC 10987
MDKKATFVNVEKKAMYINGEWITLQEQIEVNNPATKEIFATVPKGGVTEAKQAVDAAHEAFKSWSKLTAADRAVKLKKWFTLIDENKEEIAAIMTREQGKPFAEALGEVNYANSFVEWYAEEGKRVYGEMIPASHPNKRILVMKQPVGVMAAITPWNFPAAMITRKVAPALAAGCTAVVKPASQTPLTALKLAELAHEADIPKGVINIVTGSAKAIADTWMEDGRVRKVSFTGSTEIGKELMASAAQTMKKVSLELGGHAPFIVMNDADLDKVVEAVIGSKFRNAGQTCICTNRVFVQEEVYEVFAEKFQKSVGQLKVGDGFGDGTTVGPLIDENAVSKVQEHIADAIQKGGTVLYGGQKVAELDGHFMQPTVIGLANDTMLCMNEETFGPVAPVAKFKTVEEVIERANNTPYGLAAYIFTKDISQAFQISEALEYGIIGLNDGLPSVAQAPFGGFKESGIGREGGHFGIEEYLEIKYISLGL

SEQ ID NO: 8566 - protein, 265 aa, Petunia x hybrida
MAQLRADDLSFIFGLLGNIVSFMVFLAPVPTFYKIYKRKSSEGYQAIPYMVALFSAGLLLYYAYLRKNAYLIVSINGFGCAIELTYISLFLFYAPRKSKIFTGWLMLLELGALGMVMPITYLLAEGSHRVMIVGWICAAINVAVFAAPLSIMRQVIKTKSVEFMPFTLSLFLTLCATMWFFYGFFKKDFYIAFPNILGFLFGIVQMLLYFVYKDSKRIDDEKSDPVREATKSKEGVEIIINIEDDNSDNALQSMEKDFSRLRTSK

SEQ ID NO: 8567 - protein, 258 aa, Triticum aestivum
SESRPRQPWRRPTPLVSAEYQEAVEKARQKLRARRAEKDCSPLMLRLAWHSAGTFDVSSKTGGPFGTMKKPAEQAHAANAGLDIAVRMLEPIKEEIPTISYADLYQLAGVVAVEVSGGPVIPFHPGREDKPQPPPEGRLPDATKGSDHLRQVFGKQMGLSDQDIVALSGGHTLGRCHKERSGFEGPWTRNPLKFDNSYFTELLSGDKEGLLQLPSDKTLLTDPVFRPLVEKYAADEKAFFEDYKEAHLRLSELGYAEA

SEQ ID NO: 8568 - protein, 140 aa, Bordetella bronchiseptica RB50
MRRAAVLLGLWLLLGAPAAADIAQRELRLAHSLRCLVCQNQTLAESNAPLAHDMRALIRQQLADGRSDEEVMQFFEDRYGDFVRYEPPFKPATWLLWLGPFALLLAGFVVLWRALARRPGAAPLTDAQRARAERFLDEES

SEQ ID NO: 8569 - protein, 418 aa, Allium porrum
MFGRAPKKSDNTKYYEVLGVSKNATPEDLKKAYRKAAIKNHPDKGGDPEKFKEIGQAYEVLNDPEKREIYDQYGEEGLKEGMGGGGGVHDPFDIFQSFFGGGGFGGGGSSRGRRQRRGEDVVHPLKVSLEDLYNGTSKKLSLSRNVLCTKCKGKGSKSGASMNCASCQGSGMKVSIRQLGPGMIQQMQHPCNECKGTGEMISDKDRCPQCKGEKVVQQKKVLEVHVEKGMQNGQKITFPGEADEAPDTVTGDIVFVLQQKEHPKFKRKGDDLFYEHSLSLTEALCGFQFVLTHLDNRQLLIKSNPGEVIKPDQFKGINDEGMPMYQRPFMRGKLYIHFSVDFPDSLTPDQCKALESVLPSRNASRLTDMEIDECEETTMHDVNIEEEMRRKQHQQAQEAYDEDDEGHGGAQRVQCAQQ

SEQ ID NO: 8570 - protein, 238 aa, Arabidopsis thaliana
MEGVGARLGRSSTRYGPATVFTGPVRKWKKKWVHVSPSSKKDNNNSSSGSAAAAASVVNGGSNSDGSNGSHLLLYKWAPLSQNGNGNEDGKSESNSPSEDTVATVAEDPPRRRFKYVPIAVLEEQKKEITEIEEDDKIEEDDKIDEDNKVEQEDKVDEDKTVEESSEKKAEVEVEEKPDINDVPMEDIQQVEEKIVQDDEEKVVRQDLNESTVDLGLNLNANDADAENDPKEDKPLEE

SEQ ID NO: 8571 - protein, 309 aa, Apium graveolens
MAITLNSGFKMPVLGLGVWRMDRNEIKNLLLSAINLGYRHFDCAADYKNELEVGEAFKEAFDTDLVKREDLFITTKLWNSDHGHVIEACKNSLKKLQLEYLDLYLIHFPMASKHSGIGTTRSILDDEGVWEVDATISLEATWHEMEKLVEMGLVRSIGISNYDVYLTRDILSYSKIKPAVNQIETHPYFQRDSLIKFCQKYGIAITAHTPLGGALANTERFGSVSCLDDPVLKKLSDKHNKSPAQIVLRWGVQRNTIVIPKSSKTKRLEENINIFDFELSKEDMELIKTMERNQRSNTPAKAWGIDVYA

SEQ ID NO: 8572 - protein, 326 aa, Glycine max
MEQSVLDDIINRLLEVRTRPGKQVQLSESEIRQLCVVSREIFLQQPNLLELEAPIKICGDVHGQYSDLLRLFEYGGLPPEANYLFLGDYVDRGKQSLETICLLLAYKIKYPENFFLLRGNHECASINRIYGFYDECKRRFNVRLWKTFTDCFNCLPVAARVDEKILCMHGGLSPDLNNLDQIRNLQRPTDVPDTGLLCDLLWSDPSRDVQGWGMNDRGVSFTFGADKVSEFLQKHDLDLICRAHQVVEDGYEFFANRQLVTIFSAPNYCGEFDNAGAMMSVDETLMCSFQILKPADKKAKLNFGSTTTAKPGNSPAGVKCFLGAKV

SEQ ID NO: 8573 - protein, 510 aa, Triticum aestivum
  unsure (1)..(510): unsure at all Xaa locations
MASFARQEHQFLAELGLAPRNPGSFACGAWGGSGPVVTTTNPSNNEVIAEVVEASMDDYEKGMSACFDAAKTWMAVPAPKRGEIVRQIGDALRAKLHHLGRLLSLEMGKILPEGIGEVQEIIDMCDYAVGLSRQLNGSIIPSERPNHMMMEVWNPXLGVVGVITAFNFPCAVLGWNACIALVCGNCVVWKGAPTTPLITIAMTKIVASVFEKNNLPSAIFTAFCGGAEIGQAIALDTRIPLVSFTGSTKVGQMVQQQVSARFGKCLLELSGNNAIIVMDDADIPLAVRSVLFAAVGTAGQRCTTCRRLLLHESIYQTFLDQLVEVYKQVRIGDPMEKGTLLGPLHTTASKESFLKGIQNIRSQGGKILLGGSAIESEGNFVQPTIVEISPAAPVVREELFGPVLYAMKFQTLKEAIEINNSVPQGLSSSIFTRKPDAIFKWIGPHGSDCGIVNVNIPTNGAEIGGAFGGEKATGGGREAGSDSWKQYMRRATCTINYGSELPLAQGINFG

SEQ ID NO: 8574 - protein, 589 aa, Zea mays
  unsure (1)..(589): unsure at all Xaa locations
MCGILAVLGCSDCSQARRARILACSRRLKHRGPDWSGLYQHEGNFLAQQRLAIVSPLSGDQPLFNEDRTVVVVANGEIYNHKNVRKQFTGAHSFSTGSDCEVIIPLYEKYGENFVDMLDGVFAFVLYDTRDRTYVAARDAIGVNPLYIGWGSDGSVWMSSEMKALNEDCVRFEIFPPGHLYSSAGGGFRRWYTPHWFQEQVPRTPYQSLVLREAFEKAVIKRLMTDVPFGVLLSGGLDSSLVASVTKRHLVETDAAEKFGTELHSFVVGLEGSPDLKAAREVADYLGTTHHEFHFTVQDGIDAIEEVIYHDETYDVTTIRASTPMFLMARKIKSLGVKMVLSGEGSDELLGGYLYFHFAPNREELHRETCRKVKALHQYDCLRANKATSAWGLEVRVPFLDKEFVDVAMGMDPEWKMYDKNLGRIEKWVLRKAFDDEEHPYLPEHILYRQKEQFSDGVGYNWIDGLKSFTEQQVTDEMMNSAAQMFPYNTPVNKEAYYYRMIFERLFPQDSARETVPWGPSIACSTPAAIEWVEQWKASNDPSGRFISSHDSAATDRTXATSWRWPTAAGTXAANGTVNGNDVAVAIAV

SEQ ID NO: 8575 - protein, 467 aa, Listeria innocua Clip11262
MLYSENDKRKHESYRIPLFGSEEESTSIPKYVLKKEPMEPRIAYQLVKDQLMDEGNARQNLATFCQTYMEKEAEILMAETLEKNAIDKSEYPQTAELENRCVNILADLWNAPKEMSYLGTSTVGSSEACMLGGLAMKFRWRNNAEKRGLDIQAKRPNLIISSGYQVCWEKFCVYWDVDMRVVPMDKEHLSLDVEKVFELVDEYTIGIVGILGITYTGKFDDIALLDEKVEAYNEANEHQLVIHIDGASGAMFTPFVNPELPWDFRLKNVVSINTSGHKYGLVYPGVGWILWKDKEYLPKELIFEVSYLGGSMPTMAINFSRSASQIIGQYYNFLRYGFEGYREIHEKTKKTALYLSKTVEKSGYFEIINDGSNLPIVCYKLKDDLDVEWTLYDLADQLLMKGWQVPAYPLPADLSDTIIQRFVCRADLGYNVAEEFAADFADALHNLEHARVLYHDKERNDSYGFTH

SEQ ID NO: 8576 - protein, 431 aa, Exiguobacterium sp. 255-15
MKLEEMLVSVDTFYVLFATLLVFTMQIGFLLLETGMLRAKNAGHVAVKQLISFSVAALAFWAIGFGLTFGDGPGLIGTEGFFLHGGFSSLDWSNVTIDVKFLFQLSFVAVSLAIAWGGFAERAKLSVYLLFGTFFVAVIYPIIARSVWAGGFLGSLGMQDFAGSTVVHLQGGIAALVAALILKKRIGAEKTPLLGHNVIYSVVGAFILWLCWFGFNAGSTLTIADGFFSYVALTTLLATAAGALGALAISFWHRRVADIPSIINGVLAALVAITAACAFVEPWGAVVIGFLAGVITYATSILLARRVDDPLCAFSVHGVAGIWGTLATGFFASPRLVEITGIGQAGLFYGGGFTQLGVQALGVVFAVVVVSVLSYVFLKLLDVTIGLRITREDELRGLDVAEHGQASYDLPAPVSKESHPTYEEESTEKVN

SEQ ID NO: 8577 - protein, 430 aa, Lactobacillus plantarum WCFS1
MTTLIKNAQVWQAGQLQTTDILIAEGRIKAIGHQLHDQFGPADHVICADQHFVSPGFVDVHVHLRDPGQTAKETIATGTLAAAHGGFTTVGAMPNVDPVPDTPERVATMVARNQQEAHVHVAQYASITTGRTSEQLVDFAGIKAAGAFAVSNDGSGVQTAGTMFAAMQGAAKVGLPLAAHVEDDSLYHHGVMNAGPVADRLGLPGINNVSEAAQVARDVMLAEASGVHYHVCHVSTAESLRVIRNAKAAGINVTCEVSPHHLLLCDEDITMDNPMLKMNPPLRSAKDRAALVAGLLDGTIDMIATDHAPHTDAEKQGSMKTAAFGITGIETAFATLYTALVKTRLLTLGRLIELMSTRPAELFGLNTAGRLVVGAPADLTIIDLDHQYEIEAATMLSKGHNSPFIGWPVYGNVLMTLVDGKLAYGKETQA

SEQ ID NO: 8578 - protein, 121 aa, Oryza sativa (indica cultivar-group)
MAGARRTMALVALVAVVAAAVVAERASAAVSCGDVTSSIAPCLSYVMGRESSPSSSCCSGVRTLNGKASSSADRRTACSCLKNMASSFRNLNMGNAASIPSKCGVSVAFPISTSVDCSKIN

SEQ ID NO: 8579 - protein, 181 aa, Vibrio parahaemolyticus RIMD 2210633
MKGLLKLAAYLGFISMSSFVLASECPDILQGKQRMLNSTEEIELCEVFKGKTLLVVNTASQCGFTPQYEQLETLYQTYKDKNFAVIGFPSNDFRQDKGSEENTAKICYLDYGVTFPMMARSSVLGNDANPVFSEISTQAGVTPKWNFYKFLISKEGKVIATFPSSTSPTSTTLTNMIEQQL

SEQ ID NO: 8580 - protein, 348 aa, Pseudomonas putida
MLAIRKTKAGPGGLSVDDVAAPKEAHSTDVLVKVEAAGICGTDLLIYKWGEFAKRMKLPTILGHEVSGVIEQVGSDVKGLRPGMRVSLESHLPCGTCYTCRRGWAHVCPNTRYPGVDFDGGFASFVVVPESVCWPVPCGIPPLQAAMMEPFGLAVHASLEGSGVSGLNVLVSGCGPIGLMNIAAAKALGASKVIATDIHPLRLTAAAKMGADECINATEESVYKTVRSLLGERGVDVAIDYSGQAAALKELIQSITHGGELRLMGVPSHDILLNLEEWLFKGLIVRGLHGRRLFETWERSTSLLVTGRVDLSSLVSHRLPLSAAEDAFEMALNGQSLKILFEPNGTCI

SEQ ID NO: 8581 - protein, 120 aa, Oceanobacillus iheyensis HTE831
MTNEEMISAIKEMSVLELNDLVKAIEEEFGVTAAAPVAAAGAAGGAVEEEKTEFDVVLTSAGASKIKVVKAVREITGLGLKDAKDLVDNAPKPIKEGVSKEEAEEVQGKLEEAGASVEVK

SEQ ID NO: 8582 - protein, 426 aa, Novosphingobium aromaticivorans DSM 12444
MSDPQWYSTGRDHVWLPYTQMKTARPPLPVASAEGVKLRLADGRELVDGISSWWATVHGYRHPHIEEAIRRQLETLPHVMLGGLAHEQAYTLARRLAGMLPGDLDHVFFSDSGSVAVEVAMKMAAQFWLNQGHRRVKFLCFRGGYHGDTFATMSVCDPDEGMHSLFRGALLEQVVVDLPRDAEGEAALGALIEQHRGELAGIVVEPLVQGAGGMVFHDPFTLQALRRLADEHELLLIFDEIFVGLGRLGDAMFACQIAGVQPDIVTLSKALTGGNLPLAATIASGRIYDAFLSDDPMHALMHGPTYMGNALGCAAANASLDLFESEPRLEQAQAIGRGLEQALEVLRGLPGVRDVRVRGAIGVIQLDRTAPADRLSAACIDRGVWLRPFRDILYTTPPLVTGEEDLARITSAMVEAVTEWSRETHV

SEQ ID NO: 8583 - protein, 484 aa, Agrobacterium tumefaciens
MIKLKNAALLRDACLVNGRWLKAADGKTIAVENPANSMIIGHVPSLSADEVKAAVESAGKAFSEWSRRSAKDRAAILRRWFDLMVANADDLGALMTAEQGKPFAEAKGEALYAASFVEWFAEEAKRVYGDTIPSPTTDKRITILKQPIGVCAAITPWNFPAAMITRKAAPALAAGCAMIVKPAEQTPLTALALGVLAEEAGVPAGVFQVVTGAARDIGKVFTESDTVRKISFTGSTEVGRLLMAQSAPTIKKLSLELGGNAPFIVFDDADLDAAVEGAIVSKYRNAGQTCVCSNRIYVQDGVYDAFAEKLVKRVESLSVGEGTEPVVLIGPLIDQEAVPKVEDHVADALGKGAKIVIGGKRHALGGTFYEPTVLTGATQAMKVAREETFGPVAPLFRFGTEDEAVAMANDTEFGLAAYFYTENVRRTWRVAEALEYGMVGHNTGLISNEVAPFGGVKQSDLGREGSHYGIDEYLEIKYLCSAIG

SEQ ID NO: 8584 - protein, 455 aa, Arabidopsis thaliana
MSFTIPRLFLFTLFFCSVFFVCLLMAEDSNSSESIIVNVTGDDNKSALFGKYDLGKLLGSGAFAKVYQAEDLQNGGESVAIKVVQKKRLKDGLTAHVKREISVMRRLRHPHIVLLSEVLATKTKIYFVMELAKGGELFSRVTSNRFTESLSRKYFRQLISAVRYCHARGVFHRDLKPENLLLDENRDLKVSDFGLSAMKEQIHPDGMLHTLCGTPAYVAPELLLKKGYDGSKADIWSCGVVLFLLNAGYLPFRDPNIMGLYRKIHKAQYKLPDWTSSDLRKLLRRLLEPNPELRITVEEILKDPWFNHGVDPSEIIGIQADDYDLEENGKILNAFDLISSASSSNLSGLFGNFVTPDHCDQFVSDESTAVIMRKVEEVAKQLNLRIAKKKERAIKLEGPHGVANVVVKVRRLTNELVMVEMKNKQRDVGLVWADALRQKLRRLINQPVYKVPDKP

SEQ ID NO: 8585 - protein, 153 aa, Glycine max
MPLVLAKSDSIQIREVWNDNLEEEFALIREIVDDYPYIAMDTEFPGIVLRPVGNFKNSYDYHYQTLKDNVDMLKLIQLGLTFSDEHGNLPTCGDESGTCCIWQFNFREFNVNEDVFANDSIELLRQSGIDFKRNNENGIDAHRFGELLMSSGI

SEQ ID NO: 8586 - protein, 248 aa, Zea mays
KNYPTVSAEYSEAVEKARRKLRALIAEKSCAPLMLRLAWHSAGTFDVSSRTGGPFGTMKCPAELAHGANAGLDIAVRLLEPIKEEFPTLSYADFYQLAGVVAVEVTGGPEIPFHPGREDKPQPPPEGRLPDATKGSDHLRQVFGKQMGLSDQDIVALSGGHTLGRCHKERSGFEGAWTTNPLVFDNSYFKELLSGDKEGLLQLPSDKALLSDPVFRPLVEKYAADEKAFFDDYKEAHLKLSELGYADA

SEQ ID NO: 8587 - protein, 294 aa, Saccharomyces cerevisiae
TTPLVHVASVEKGRSYEDFQKVYNAIALKLREDDEYDNYIGYGPVLVRLAWHTSGTWDKHDNTGGSYGGTYRFKKEFNDPSNAGLQNGFKFLEPIHKEFPWISSGDLFSLGGVTAVQEMQGPKIPWRCGRVDTPEDTTPDNGRLPDADKDADYVRTFFQRLNMNDREVVALMGAHTLGKTHLKNSGYEGPWTANNNVFDNSFYLNLLNEDWKLEKNDANNEQWDSKSGYMMLPTDYSLIQDPKYLSIVKEYANDQDKFFKDFSKAFEKLLENGITFPKDAPSPFIFKTLEEQGL

SEQ ID NO: 8588 - protein, 503 aa, Streptococcus pneumoniae
MFASKSERKVHYSIRKFSIGVASVAVASLVMGSVVHATENEGSTQAATFSNMANKSQTEQGEINIERDKAKTAVSEYKEKKVSEIYTKLERDRHKDTVDLVNKLQEIKNEYLNKIVESTSKIEIQGLITTSRSKLDEAVSKYKKAPSSSSSSGSSTKPETPQPETSKPEVKPEPETPKPEVKPEPETPKPEVKPEPETPKPEVKPELETPKPEVKPEPETPKPEVKPEPETPKPEVKPEPETPKPEVKPELETPKPEVKPELETPKPEVKPEPETPKPEVKPELETPKPEVKPEPETPKPEVKPELETPKPEVKPEPETPKPEVKPELETPKPEVKPEPETPKPEVKPEPETPKPEVKPEPETPKPEVKPEPETPKPEVKPEPETPKPEVKPEPETPKPEVKPEPETPKPEVKPEPETPKPEVKPDNSKPQADDKKPSTPNNLSKDKQSSNQASTNENKKQGPATNKPKKSLPSTGSISNLALEIAGLLTLAGATILAKKRMK

SEQ ID NO: 8589 - protein, 500 aa, Streptococcus pneumoniae
MFASKSERKVHYSIRKFSIGVASVAVASLVMGSVVHATENEGSTQAATSSNMANKSQTEQGEINIERDKAKTAVSEYKEKKVSEIYTKLERDRHKDTVDLVNKLQEIKNEYLNKIVESTSTIEIQGLITTSRSKLDEAVSKYKKAPSSSSSSGSSTKPEPETSKPEVKPEPETPKPEVKPEPGTPKPEVKPEPETPKPEVKPELETPKPEVKPEPETPKPEVKPEPETPKPEVKPEPETPKPEVKPELETPKPEVKPELETPKPEVKPEPETPKPEVKPELETPKPEVKPEPETPKPEVKPELETPKPEVKPEPETPKPEVKPELETPKPEVKPEPETPKPEVKPEPETPKPEVKPEPETPKPEVKPEPETPKPEVKPEPETPKPEVKPEPETPKPEVKPEPETPKPEVKPEPETPKPEVKPDNSKPQADDKKPSTPNNLSKDKQSSNQASTNENKKQGPATNKPKKSLPSTGSISNLALEIAGLLTLAGATILAKKRMK

SEQ ID NO: 8590 - protein, 141 aa, Triticum aestivum
  unsure (1)..(141): unsure at all Xaa locations
MAPAVMASSATTVAPFQGLKSTAGLPVSRRSSGSLGSVSNGGRIRCMQVWPIEGIKNSKTLSYLPPLSTEXLLKQXDYXIRSKWVPCLXSTRLXXLPFSXNIPPGYYDXPYWTIWKLLCSGCTDAXTSVNXVXXVXKDYPE

SEQ ID NO: 8591 - protein, 506 aa, Candida tropicalis
MIEQVLHYWYYVLPAFIIHWIVSAIHTNSLRRKLGAKPFTHTQLDGFYGFKFGRDFLKAKRIGRQVDLINSRFPDDIDTFSSYTFGNHVIFTRDPENIKALLATQFNDFSLGGRIKFFKPLLGYGIFTLDGEGWKHSRAMLRPQFAREQLPMSPSLEPHFNVKAYPQEQRWVFDIQELFFRFTVDSATEFLFGESVNSLKSASIGCDEETELEERKKFAEAFNKAQEYISTRVALQQLYWFVNNSEFKECNEIVHKFTNYYVQKALDATPEELEKQSGYVFLYELVKQTRDPNVLRDHHSISLLAGRDTTAGLLSFAVFELARNPHIWAKLREDVESQFGLGEESRIEEITFESLKRCEYLKAVMNETLRLHPSVPRNARFALKDTTLPRGGGPDGKDPILVRKMSCSIFISGTQIDPKHYGKDAKLFRPERWFESSTRNLGWAYLPFNGGPRICLGQQFALTEAGYILVRLAQSFDTLELKPDTEYLTKISHLTMCLFGAFVKMD

SEQ ID NO: 8592 - protein, 358 aa, Campylobacter jejuni subsp. jejuni NCTC 11168
MKTYKVAVLAGDGIGPLVMKEALKILTFIAQKYNFSFEFNEAKIGGASIDAYGVALSDETLKLCEQSDAILFGSVGGPKWDNLPIDQRPERASLLPLRKHFNLFANLRPCKIYESLTHASPLKNEIIQKGVDILCVRELTGGIYFGKQDLGKESAYDTEIYTKKEIERIARIAFESARIRKKKVHLIDKANVLASSILWREVVANVAKDYQDINLEYMYVDNAAMQIVKNPSIFDVMLCSNLFGDILSDELAAINGSLGLLSSASLNDKGFGLYEPAGGSAPDIAHLNIANPIAQILSAALMLKYSFKEEQAAQDIENAISLALAQGKMTKDLNAKSYLNTDEMGDCILEILKENDNG

SEQ ID NO: 8593 - protein, 475 aa, Ralstonia eutropha JMP134
MYQDLALYIDGEFIKGGDRKEQDVLNPATQEVLGKLPHASRADLDRALAAAQRAFESWKKTSPLERSKILRRVGELARERAKDIGRNITLDQGKPLAEAVGEVLVCAEHADWHAEECRRIYGRVIPPRQPNVRQIVVREPIGVCAAFTPWNFPFNQAIRKIVSAVGAGCTLILKGPEDSPSAVVALAQLFHDAGLPPGVLNIVWGVPSEVSTYLIESPIVRKISFTGSVPVGKQLAALAGAHMKRVTMELGGHSPVLVFDDADIEPAAEMLARFKLRNAGQVCVSPTRFYVQEKAYDKFLARFTEVIGSIKVGNGLEDGTQMGPLAHERRVFSMEQFLDDANQRGGKVVAGGSRIGDKGYFFAPTVVTDLPDDAKLMVDEPFGPVAPVTRFKDTAEVLRRANSLPFGLASYVFTNSLKTATEVSNGLEAGMVNINHFGMALAETPFGGIKDSGIGSEGGQETFDGYLVTKFITQV

SEQ ID NO: 8594 - protein, 63 aa, Zea mays
  unsure (1)..(63): unsure at all Xaa locations
RKKKGGKKSLGRILEGVSKWVGILIAIILPPVGGFFKEGGGPEFWICFFFPFLGXIPGIIFPI

SEQ ID NO: 8595 - protein, 104 aa, Glycine max
  unsure (1)..(104): unsure at all Xaa locations
MGKGGMSIDEHGEGKEENMAAWLVGMNTLKIQPFKLPTLGPHDVRVRMKAVGICGSDVHYLKXKEPMVIGHECAGIIEEVGSQVKSLVPGDRVAIEPGISCWHC

SEQ ID NO: 8596 - protein, 69 aa, Zea mays
  unsure (1)..(69): unsure at all Xaa locations
KSKTSDGTCTCIDIVLAIMLPPVARMFKACCLVEFWIXLMLTLFGYLPGIIYARWAITKLSVGALALNA

SEQ ID NO: 8597 - protein, 507 aa, Glycine max
QNSDDGWFRGRLRFSKKKTMKQRYGLRRRVSSQCSNGSLDEVDNMPEPALSDRSFANPTFQAGTIEEAWFDSAAVFDSDCDDDYQSVNDDVISLNGTETNCGVSTDQMHKPGELSKRHSAHISESVRNSDAEFFDIDATNSQCKRSGRVNEANEPVFLDEFSSVDAGSKWDDGDLHNCGILPCNCLSCLSSTDQRSLCFSPPNSTRKKDLMKHSFKGSGNATLFSSKTILQRPLAGSQVPFCPIEKKMLDCWSRIDPRTFKVRGPNYLKAKKKEFASNHAAYYPFGVDVFLSPQKIDHIARFVELPVMSSSGKLPPILVVNVQIPIYPATLFQGETNGEGVSFVLYFKLSDSYSKDLPLNFQENIRRLMDDEVEKVKSFRGDTIVPFRERLKILGRVVNPQDLHLSAAERKLMQTYNEKPLLSRPQHEFYSGENYYEIDLDMHRFSYISRKGFDMFLDRLKICILDVGLTIQGNKAEELPEQVLCCIRLNSIDYMNYQQLGITEEPL

SEQ ID NO: 8598 - protein, 579 aa, Zea mays
  unsure (1)..(579): unsure at all Xaa locations
GYLEAGRALVDLLKFKSQEGVRVCLLVWDDKTSHDKFFIKTGGVMATHDEETRKFFKHSSVICVLSPRYASNKLSIFKQQVVGTLFTHHQKCVLVDTQARGNKRKITAFIGGLDLCDGRYDTPEHRLFKDLDTVFQNDYHNPTFSAGAKGPRQPWHDLHCRIDGPAAYDVLTNFEQRWRKATKWRDRFRRVSHWKDDALIKLERISWILIPSPNVPNNHPSLWVSKEEDHENWHVQVFRSIDSGSLKGFPSDCKAASKLNLVCRKNLVIDKSIHTAYVRAIRSAQHFIYIENQYFLGSSYAWPSYVNSGADNLVPIELALKIASKIKAGERFAVYVVIPMWPEGVPTAASVQEILFFQAQTMEMMYKIIADELKATDNKDMHPEDYLNFFCLGNREEPPSNGSPESEKSTDKSAAALASKYRRFMIYVSRKRDDCGXMNMSFWVQQTSTRDPWLVLEILRSQWVHTSLIMHGLQRMDILTXQVYGYRTSLWAEHLGTVDDRFKDPSSLECVRFVNQIAVENWQRFTAEEMSTLQGHLLKYPVKVEADGKISPLSDQECFPDVGGKILGAPTSLPDSLTM

SEQ ID NO: 8599 - protein, 353 aa, Glycine max
MATYSWSTEIFSFLVLTLLSTSSHTMVAGARNLLESTLSKPEVPTLPKPHELPPLPEIPELPKFESPKIPALPKPELPKVPELSKPDMSKVPELPKVPERLKVPEISKILELSKPELPKGPELLKPELPSVPNIPKVPELPKPELPEVPKLPKPELPKVPELPKPELPKVPEIPELPNLELPKVTQLPKSKLPKVPEIPKVPEFPKPELPKVPELSKPELPKAPEIPKVPEFPKPELPKVPELSKPELPKAPEIPKVPEFPKPELPKVPELPKPELPKIPEIPKVPEFPKPELPKVPEVPKPELSKVPKLPKSELPKVPEIPELPKSELPKIPEIPKVPEFPKVPKAFSTTNP

SEQ ID NO: 8600 - protein, 291 aa, Spirulina platensis
MQDSESKTPGASPLVGADNAPLTGGEAEGGDAWTVEQAIAALNHQEPNRRYYAAWWLGRFRVCDAIAVDALIMALDDESDRTKDGGYPLRRNAARALGKLGDRRAVTPLVKCLDCQDFYVREAAAQALEGLGDSSCVSALRGLLVGGVEDTAPIAGKPHLKQPYDAVIEAIGTLGATEALTDIEPFINHPIARIQYAALRAMYQLTGDPVYGDRLIAALRGEDLQLRRSALMDLGAIGYLQAAEPIANTLAENSLKLIALQGILEHHLSQIGEKCLSEEAVKIMKLMDSLL

SEQ ID NO: 8601 - protein, 917 aa, Zea mays
MVRRKKSKQACSKGLNQRLKEDRISQFYESLLCQILNYLPTKDVVKTSVLSTRWRSLWLLVPSLELDSRDFSDFNTFVSFCDRYFDSNRVLCINKLKLTISENEEDGFYLKSWIDAAAKRKIQHLDVQFLPQFHKIHFNLYKCEALVSLRLFEVSLDKGRIFSFPCMKTMHLEDNVYPNEATFKELISCCPVLEDLTVIIYGMDRKVFQIEGRYDAKFVSFPCMKTMHLEDNMYPNESTFKKLISCCPVLEDLTVIIYGMDRKVFRVHSQSLKRFSLKRVSSFLHEVALSGVVIDAPLLCSLRINDNVSKSFIVNNLGSNDKLDLSILFGLWHFDETSVTSMRSSIDRFLPGILSVMEMTIHSPAFMLMYRYLALIPLPHLPKFSYMSRLSVTLGVSDLQFLPTFLESCPNLKSLIMESNSNSKRMLLNGNYHINFSSVPKCLLSSLEFVDIKSSILVYVARMKLVKYFLENSTTLKKLTLRLALRLQYCSAKDEIVKKLRKFPRISKTCQDLVTTRVLSTRWRSLWLWLPCLELNSLYFPDFNAFVSFGDKFFDSNRVSCINKFKLYIYGYDVGVDDPSYLTSWIDAAVKCKIQHLHVQCLPAKYIYEMPLSLYICETLVYLKLCRVMLDDAEFVSLPCLKTIHLEYVWFPNEANLERFVSCCPVLEELKIYGCGNENAITLRLLSRSLKKLSINILKSMCDFHSEVVIDAPLLSYLKINDNVSERYIVNNLESNAKLDISLPFGLLDFDEASVSSRTDSIHSFLRGILKVSDMTIWVDTFKLICKYSELESLPRFGYMSRLHVTLCIYDLKWLPTFLESCPNLKSLILVCVGDNDEMLSEEMIQFGSSLVPECLLSSLEFVDIRIPFRGHLEVMKLVRYFLENSAILKKLSLDHDIFKKLFTIPRRSTKCQVVFI

SEQ ID NO: 8602 - protein, 154 aa, Triticum aestivum
  unsure (1)..(154): unsure at all Xaa locations
MAPTVMASSATSVAPFQGLKSTAGLPVSRRSNGASLGSVSNGGRIRCMQVWPIEGIKXFETLSYLPPLSTEASSSRSDYXIRSKWVPCLRFNKVGSSPVEHNHLLGYXNGRIGHXELPIFXXNDXQSDNEVEEVKKDTLPYFRSGTNASRHQTL

SEQ ID NO: 8603 - protein, 417 aa, Saccharomyces cerevisiae
MRALAYFGKGNIRFTNHLKEPHIVAPDELVIDIEWCGICGTDLHEYTDGPIFFPEDGHTHEISHNPLPQAMGHEMAGTVLEVGPGVKNLKVGDKVVVEPTGTCRDRYRWPLSPNVDKEWCAACKKGYYNICSYLGLCGAGVQSGGFAERVVMNESHCYKVPDFVPLDVAALIQPLAVCWHAIRVCEFKAGSTALIIGAGPIGLGTILALNAAGCKDIVVSEPAKVRRELAEKMGARVYDPTAHAAKESIDYLRSIADGGDGFDYTFDCSGLEVTLNAAIQCLTFRGTAVNLAMWGHHKIQFSPMDITLHERKYTGSMCYTHHDFEAVIEALEEGRIDIDRARHMITGRVNIEDGLDGAIMKLINEKESTIKIILTPNNHGELNREADNEKKEISELSSRKDQERLRESINEAKLRHT

SEQ ID NO: 8604 - protein, 316 aa, Pasteurella multocida subsp. multocida str. Pm70
MTQLDSLRSMTVVVADTGDIEAIKQYQPQDATTNPSLILSASALPQYAPLIDDAIAYAKTKSDCPRQQLVDAEDKLAVNIGLEILKIIPGRISTEVDARLSYDTQATIEKARKLIKLYNEAGIENHRILIKIASTWQGIRAAEVLEKEGINCNLTLLFSEAQARACAEAGVYLISPFVGRILDWHKANTGRQDYPAAEDPGVISVTQIYNYYKQHNYKTVVMGASFRNVDEIIELAGCDRLTISPTLLSHLQAREGELVRKLAFSGELKDRPQPLTESEFYWQHNSDPMAVAKLAEGICKFAEDQEKLEKMLLERL

SEQ ID NO: 8605 - protein, 465 aa, Rubrobacter xylanophilus DSM 9941
MDQRYTPGPDLRELDGSFRGELIRPGEAAYEDARRVFNGMIDRRPALIARCTGVADVVAAVIFARASGLEVAVRGGGHSVSGYGTCDGGLVIDLSPMKGVWVNPGERRARAQAGLTWGEFDRETQLFGLAVTGGRVSGTGISGLTLGGGSGWLERRLGFTVDNLLSVEMVTAEGGLVRATEEENEELFWGVRGGGGNFGIATSFEFALHPVGPLVLGGMLLYPAEQAPGLLRFYREFMRGAPDELGGGCAFLTAPPEPFIPEHVRGTKLIAVIVCYAGGVEEGEAAIQPLKKHLPPAMDMVRPMPYTELQTLLDAANPPGMQHYWKAGFLDELPDEAIDVLVEHAGRMASPLTVLALFPMGGAISRVGEDETPLGPRGAAYNYHALAQWAEPSEAGRHVGWAGELEAALRPWTGERTYLNFIGDEGEERVRTGYGPEKYRRLAGLKKRYDPDNLFHLNQNIRPGA

SEQ ID NO: 8606 - protein, 419 aa, Haloferax volcanii
MSYDQIEVPDDGEKITVDEETGELSVPDNPIIPIIHGDGIGTDVGPAAQKVLDAAAEATGRSVSWMRVYAGSSARDKYDENLPEDTVSAIRNHRVAIKGPLTTPVGAGFRSLNVALRKKLDLYANVRPTYHLDGVPSPVKNPSAMDMVTFRENTEDVYAGIEWEAGTDEVQKVKEFVEEEMGADGVIHDGPVGIGIKPITEFGTKRLVREAIEYALENDRPSVTLVHKGNIMKFTEGAFRDWGYELAEEEFGDVTITEDELWEEYDGKRPEDKVVVKDRIADNMLQQLLTRTANYDVIATMNLNGDYMSDAAGAQIGGLGIAPGANFGEGLCLAEPVHGSAPKYAGKDKVNPTAMILSGRLMFEYMGWKDAGKLIRDTVEKTISDGDVTYDLERQIEGGNKLATSEYADKVVENIKELA

SEQ ID NO: 8607 - protein, 254 aa, Gibberella zeae
PGVGFGTFANEGAKGETYKAVIAALKTGYRHLDCAWFYLNEGEVGQAVRDFLAEDNGVKREDLFICTKVWNHLHEPEEVKWSFENSLKNFGLDYIDLFLVHWPIAAEKGDDYQPKIGPDGKYVIKKDLTENPEPTWRAMEEIYASGKARAIGVSNWTIDGLKQLMAFAKVKPAVNQIEIHPFLPNEDLVKFCLENDILPAAYSPLGSQNQVPTTGETVRSNKTLNEVADRSGNTLAQVLIAWGLRRGTLFCPRA

SEQ ID NO: 8608 - protein, 493 aa, Picrophilus torridus DSM 9790
MKIYIDGEWRDSSSGETIKKYNPSTGEVLDTFPAATRNDVDAAIDSAEDAFKRWSDMTSMERSKILYKALELISKDKDQLTDLLIKENGKVKREAMDETEGVIDQLQYYTEFERKLTGDIVEGTSNKRKIFQYKVPYGIVIAITPWNFPAAMVIRKLAPALLTGNTVILKPSSDTPLTAEWLVKKFVDAGIPKGVLNLITGKGSEIGDYIVEHKKVSLITMTGSTSTGQRIMEKASKNMAKLILELGGKAPFMVWKDANIERALKSLVWAKYLNVGQSCIAAERLYIHEDIYDEFMKKFIEVSKRIKLGDPESSDMGPLINKSAVETTEKYVDIARSSGYKILLGGKKPELSGKYKNGYFYEPTIIENVPQDSPLFQEEIFGPVIGAESVSSVDELYEKANDSKYGLASYLFTEDPELIFEASEKIRFGELYVNMPGPEASQGYHTGFRLTGQAGEGSKYGISEYLKLKNVYVDYSRGNLSISTVNDDLFKNL

SEQ ID NO: 8609 - protein, 126 aa, Zea mays
  unsure (1)..(126): unsure at all Xaa locations
EALVAAGTALPARHSWARSVPVGLDAPTAPKDAHAPDVEIREVWASNLHEEFEVIRDIDDAYTYVGMDTEFPVYVEQPIAXYRFTCDRIYAGLHGNANVLKLIQLGLTFSNEACTLPPCGTLGQCC

SEQ ID NO: 8610 - protein, 123 aa, Astragalus membranaceus
RLVEADATKGSDHLRDVFGKGMGLSDQDIVALSGGHTIGAAHKERSGFGGPWTSNPLIFDNSYFKELLSGEKEGLLQLPSDKALLTDPVFRPLVEKYAADEDAFFADYAVAHQKLSELGFAEA

SEQ ID NO: 8611 - protein, 418 aa, Triticum aestivum
  unsure (1)..(418): unsure at all Xaa locations
MAMDESPQLFLCPISMELMEDPVTVSTGVTYDRRSIERWFFKYGKTTCPATMQRVASLDLTPNHTLKRVIASWQDRASTSSSPSSPAGAFKPMARERLPSVLAGIEGTPFKVTALKGLRLCMAGDQAARDDFVACDGIQVLGRVMAQALAESGAGGDFSAFRTCEEAAAVLATLPLSDEESVDLVLRPECMRPMVALVQRGSADARLHAMSILAKVSEASGARNWTEDVDVDDMVKSLLDLLSDGASSKLSSRALDVLIDVTARSRSRGGARRGKGVVEVGAVRVLVELLXEADRHVTERALLLLKRLCKCPEGRLAFAEHGLAVAAVVRTVLRVSGLATRLAVNVLWLVSCAARPTERVLDDMVASGGVAKLLALLQADSSPSTKEKVARMLRVHGAFWRQYPCIPADLKDYLKFLK

SEQ ID NO: 8612 - protein, 249 aa, Oryza sativa (japonica cultivar-group)
MDGEEDSEWMMMDVGGKGGKGGGGGGAADRKKRFSEEQIKSLESMFATQTKLEPRQKLQLARELGLQPRQVAIWFQNKRARWKSKQLEREYSALRDDYDALLCSYESLKKEKLALIKQLEKLAEMLQEPRGKYGDNAGDDARSGGVAGMKKEEFVGAGGAATLYSSAEGGGTTTTTTAKLMPHFGSDDVDAGLFLRPSSQHHPPPPHAGAGFTSSEPAADHQSFNFHSSWPSSTEQTCSSTPWWEFESE

SEQ ID NO: 8613 - protein, 314 aa, Zea mays
MSATGRAPCGLPRIGLGTAVQGPRPDPVRAAVLRAIQLGYRHFDTAAHYATEAPIGEAAAEAVRTGLVASREDLFVTSKVWCADAHRDRVLPALRRTLSNLQMEYVDLYMVHWPVTMKAGRFTAPFTPEDFEPFDMRAVWEAMEECHRLGLAKAIGVCNFSCKKLETLLSFATIPPVVNQVEINPVWQQRKLREFCRAKGIQLCAYSPLGAKGTHWGSDSVMDSGVLHEIAKSKGKTVAQVCLRWVYEQGDCLIVKSFDEGRMKENLDIVDWELSEEERQRISKIPQRKINQGRRYVSEHGPYKSFEELWDGEI

SEQ ID NO: 8614 - protein, 509 aa, Pisum sativum
MDGSAGPGGGNVNAFLRNYKMGKTLGIGSFGKVKIAEHVLTGHKVAIKILNRRKIKNMEMEEKVRREIQILRLFMHHHIIRLYEVVETPTDIYVVMEYVKSGELFDYIVEKGRLQEDEARSFFQQIISGVEYCHRNMVVHRDLKPENVLLDSKWSVKIADFGLSNIMRDGHFLKTSCGSPNYAAPEVISGKLYAGPEVDVWSCGVILYALLCGTLPFDDENIPNLFKKIKGGIYTLPSHLSPGARDLIPRLLVVDPMKRITIPEIRQHQWFQLRLPRYLAVPPPDTLQQAKKIDEEILQEVVNRGFDRDQLVESLSNRVQNEGTVTYYLLLDNRYRVSTGYLGAEFQETMDPGLNRINSGEVVSPAGGHHFLGYQGVGMRQQFPAERKWALGLQSRAQPREIMVEVLKALQGLNVCWKKIGHYNMKCRWVVGIPGHQGGMVNNSVLNNNFLGNVGIIESEAVPKSSVVKFELQLYKTQEKYLLDLQRVEGPQFLFLDLCAAFLAQLRVL

SEQ ID NO: 8615 - protein, 111 aa, Leptospira interrogans serovar Copenhageni str. Fiocruz L1-130
MCIKVLGGSKKRYASVGDEIIVAVKDAQPAFGLKDSTGKKVHNKAVQRAVVVRTTKEIRRPDGSYIRFDDNACAIIDDKGNPKGTRIFGPVARELRDKKYAKIISLAPEVL

SEQ ID NO: 8616 - protein, 230 aa, Enterococcus faecium
DTAAAYKNEEGVGKALKNASVNREELFITTKLWNDDHKRPREALLDSLKKLQLDYIDLYLMHWPVPAIDHYVEAWKGMIELQKEGLIKSIGVCNFQIHHLQRLIDETGVTPVINQIELHPLMQQRQLHAWNATHKIQTESWSPLAQGGKGVFDQKVIRDLADKYGKTPAQIVIRWHLDSGLVVIPKSVTPSRIAENFDVWDFRLDKDELGEIAKLDQGKRLGPDPDQFGG

SEQ ID NO: 8617 - protein, 161 aa, Arabidopsis thaliana
MADSDNDSGGHKDGGNASTREQDRFLPIANVSRIMKKALPANAKISKDAKETVQECVSEFISFITGEASDKCQREKRKTINGDDLLWAMTTLGFEDYVEPLKVYLQKYREVEGEKTTTAGRQGDKEGGGGGGGAGSGSGGAPMYGGGMVTTMGHQFSHHFS

SEQ ID NO: 8618 - protein, 106 aa, Glycine max
FGSRQSLHPSLLVCIISGSSEGKDRSMSTTATTTSEEVSSNEWKVIHMSEQEEDLIRRMYKLVGDKWNLIAGRIPGRKAEEIERFWIMRHGDAFSVKRNGSKTQDS

SEQ ID NO: 8619 - protein, 86 aa, Zea mays
PNPRKVLIIGGGDGGVLREVVKHPSVESVVQCEIDEDVIQVSKKFLPGMAIGYSSSKLTLHVGDGFEFMKQNQDAFDVIITDSSDP

SEQ ID NO: 8620 - protein, 162 aa, Triticum aestivum
  unsure (1)..(162): unsure at all Xaa locations
MAPAVMASSATTVAPFQGLKSTXAGLPVSRRSSGSLGSVSNGGRIRCMQVWPIEGIKKFETLSYLPPLSTEALLKQVDYXIRSXKWVXCLEFXKVXGFVXREXXXSPGLYNGRYWXQCWKLPIFGXPTPTXVLXNKVEXVKKGVPXPNVRXXGFKTPRGTTP

SEQ ID NO: 8621 - protein, 349 aa, Rickettsia honei
ISMVSAEADCFTYDPGFMSTASCQSTITYIDGDKGILRHRGYDIKDLAEKSDFLEVAYLLIYGELPSGEQYNNFTKQVAHHSLVNERLHYLFQTFCSSSHPMAIMLAAVGSLSAFYPDLLNFKEADYELTAIRMIAKIPTIAAMSYKYSIGQPFIYPDNALDFTENFLHMMFATPCTKYTVNPIIKNALNKIFILHADHEQNAFTSTVRIAGSSGANPFACISTGIASLWGPAHGGANESVISMLKEIGSSEYIPKYIAKAKDKNDPFRLMGFGHRVYKNYDPRAAVLKETCKEVLKELGQLDNNPLSQIAIELEAIALKDEYFIERELYPNVDFYSGIIYKAMGIPSQ

SEQ ID NO: 8622 - protein, 124 aa, Wolinella succinogenes
MAITKEELLDYIGGLSVLELSELVKAFEEKFGVSAAPTVVAGAGAGVAAAAVEEKTEFDVILLDGGEKKINVIKVVRELTGLGLKEAKDAVEKTPTTIKEGANKDDAAAMKAKLEEAGAKVEIK

SEQ ID NO: 8623 - protein, 478 aa, Vitreoscilla sp. C1
MYKKSTIRIFATTSHKMNIDKEINMTNTTLNATANHLHPFSDNQQLKEKGVRVITKADGIYIYDDAGNKIIDGMAGLWCVNIGYGRKELADIARDQMNELAYYNTFFKTSHPAVINLSAKLASIAPAGFNHVFYTGSGSESVDSMIRMVRHYWDSVGKPSKKTLIGRWNGYHGSTIGGVSMGGMKGMHKQGGFPIEGIVHIEQPWFYGLHEEGETAEQFGIRAANWLEEKILEIGADNVAAFVGEPIQGAGGVIIPPSTYWPRIQEICQKYDILLVADEVICGFGRTGEWFGHETFGFQPDIFTTAKGLSSGYLPIGAVFVGDKVVEGILKGGDFNHGFTYAGHPVAAAVALKNVEILDDEGIIKNVHDKTGPYMQAKWREMLSQFKYVDDVRGVGLIQGFTLVKNKATREMFPNEGETGTMLRDIFFSNNLIMRACGDHIVASPPLTITKEEIDLMLATAEKCLQEFETAMDSKLGA

SEQ ID NO: 8624 - protein, 403 aa, Photorhabdus luminescens subsp. laumondii TTO1
MTSKILARSINEFFEVQQLSDQTILKPNRKIKMKILDEGLMQTAICRSNIGRIDEKELKLEYRGHNVRDLANNYSFSDVVYLLITGKLNSEGSEEFLDMLHNNYLSALKHIEKLTPVIFDTTPTDFLTIAVLSSQGKWLSDCSVKTKDERLIITASILAAIAAAIAIYAQKYAISEPVFKTFFGTKHRFFASFLATCFGQQCDDVAEEMLNKFLILHAEHGLNCSTATVRAVASSGADPFNAVAAGICAFSGPLHGGASGAVGLMIDDIHDNSKNISTFIDELVERKQRLMGFGHRIYKQPDPRASYMSDILIKQKAKFDVISSYVNISQELASEVSKRPYFSQRGLYPNPDLFNGLLLRRAGFKSHMNTALLCFSRAAGWLAHYYDSIDSKAPILRPQELYL

SEQ ID NO: 8625 - protein, 468 aa, Zea mays
  unsure (1)..(468): unsure at all Xaa locations
MARSGREADPGEEERKLVLGKYELGRLLGQGTFAKVYYARDLSAGAGTGHSCSVAIKVIDKARLRXRQGMVEQLRREISIMRMVRHPNVVGIREVLASRSRVFVVMEYARGGELFAKVARGRLDEDHARRYFQQLVAXPVGFCHRRGVAHRDLKPENLLLDEAGRLKVTDXFGLAALPEQLRHDGLLHTQCGTPXAYVAPEVLRKRGYDGARADLWSCGVVLYVLLCGFLPFQHDNYVKLYQKIFKADYQVPPXWVSGDARRLIARLLVVDPAKRASIAEIMCTPWFRKXFVPPVLSPPVTPKKQQLDEGAALFDNDDDDNSNSNHSGATSPRSCNAFQLISSMSSGFDLSGLFESEQKTATVFTARAPAATVVEKLESVARALGFEVTRGKGWKVRMEAKAEGTNGRLAATAEVLEVAVDVTVVEFVHDAGDALDFNKFCAVDVRPGLTEIVWAWQGDSPAAAVGTA

SEQ ID NO: 8626 - protein, 450 aa, Corynebacterium efficiens YS-314
MTVHDYPETGALAPAAPGTLLITDVRVYGEGEPTNVLIRDGVIDSLDAPTSGEYDHTIDGGGGVLLPGFVDMHVHLREPGREDTETIATGSAAAAKGGFTAVFTMANTTPVMDQPLIAEGVWFKGQNVGLCDVHPVGSITKGLEGRELTEFGMMARSEARVRMFSDDGKCVDDPQVMRRALEYAKGMDVLIAQHCEDHRMTEGASAHEGENAARLGLRGWPRVAEESIVVRDAILARDYGNRVHICHASTEGTIELLRWAKGQGIPITAEVTPHHLILTDERLKTYDGVNRVNPPLREERDTLALREALLDGTIDVVATDHAPHGSEDKCCEFENAKPGMLGLETSLSIIADTFVASGLADWRFVAKVMSERPAEITRLPGHGRPIAVGEPANLTIVDPGRTWTARGEEFASKASNTPYEGMEFGAKVSHTILRGHVTCENGNATIAYNA

SEQ ID NO: 8627 - protein, 255 aa, Glycine max
  unsure (1)..(255): unsure at all Xaa locations
MVFGDWVKRARVEAINWILKTRATLGFRFETAYLSVTYFDRFLSRRSIDSEKSWAIRLLSIACLSLAAKMEECNVPGLSEFKLDDYSFEGKVIQRVELLVLSTLEWEMGIITPFDFLSYFITKFCKESPPSPIFYKTMQLIFTTMKALXSPCAEVNLMDHKPSVIAVAATLVAMDQQLTRDAVELKMSSIPQHRLLESKDVFEYYNLIQRLYEENTKSDTHTPIEMTESSRVTSSAAMTKRRRLTFSDDEGSSHG

SEQ ID NO: 8628 - protein, 364 aa, Acinetobacter sp. ADP1
MAGNTALCTVGRSGNDLHYRGYDILDLAVGSQFEEVAHLLVHGKLPNQAELKAYKAKLKALRGLPAALKTALEQLPPSAHPMDVMRTGVSVLGCLTPEHEDHNEAGAKDIADKLMASLGSMLLYWYHFSNNGRRIEVETDDDSIAAHFLHLLHGEKPSEEWIQAMHTSLILYAEHEFNASTFTSRVVAGTGSDMYSAITGGIGALRGPKHGGANEVAFVIQQRYDNADEAEADIRSRVEKKEVVIGFGHPVYTVSDPRNEVIKKVAYDLAQSQQNTKMYLIAERLEAVMKEVKNMFPNLDWFSAVSYHLMGVPTAMFTPLFVIARTAGWSAHVIEQRQDGKIIRPSANYTGPENLEFKPLAERG

SEQ ID NO: 8629 - protein, 456 aa, Arabidopsis thaliana
MENKPSVLTERYEVGRLLGQGTFAKVYSGRSNHTNESVAIKMIDKDKVMRVGLSQQIKREISVMRIAKHPNVVELYEVMATKSRIYFVIEYCKGGELFNKVAKGKLKEDVAWKYFYQLISAVDFCHSRGVYHRDIKPENLLLDDNDNLKVSDFGLSALADCKRQDGLLHTTCGTPAYVAPEVINRKGYEGTKADIWSCGVVLFVLLAGYLPFHDTNLMEMYRKIGKADFKCPSWFAPEVKRLLCKMLDPNHETRITIAKIKESSWFRKGLHLKQKKMEKMEKQQVREATNPMEAGGSGQNENGENHEPPRLATLNAFDIIALSTGFGLAGLFGDVYDKRESRFASQKPASEIISKLVEVAKCLKLKIRKQGAGLFKLERVKEGKNGILTMDAEIFQVTPTFHLVEVKKCNGDTMEYQKLVEEDLRPALADIVWVWQGEKEKEEQLLQDEQGEQEPS

SEQ ID NO: 8630 - protein, 318 aa, Arachis hypogaea
VMHRDLKPESFLFANKKENSPLKAIDFGLSVFFKPGEKFSEIVGSPYYMAPEVLKRNYGPEIDIWSAGVILYILLCGVPPFWAESEQGGAQAILRGLIDFKREPWPSISESAKSLVKQMLEPDPKLRLTAKQVLEHPWIQMLRRAPNIPLGDAVKSRLKQFSMMNRFQKKALRVIADFLSNEEVEDIKDIFQKMDTDNDGIVSIEELKAEFQNFGSQLAESEIQMLLEAVNTNGKGTLDYGEFVAVSLHLKRMANDEHLRKAFSYFDKDGNGYIEPDELRNALMEDGTDDCADVANDIFQEVDTDKDGRISYEEFVAM

SEQ ID NO: 8631 - protein, 247 aa, Zea mays
  unsure (1)..(247): unsure at all Xaa locations
RGLESLRXQVAGKYKDEIEESVSMVDILAVQLSKRENELLQQKTEVTRIATSLKLASEDARRIVDEERTNARTEIENARAAVLRVQKVLKEKENSSQRIGKQDVDELREKVQEARRVKMLHCPSKAMDIKSEIHVLRDQYAEISSSSTHLLKELELHQSFKENGVPSXELEGLESLGSMAXVVVKNDVALSNSSVQWFRIQPEGPKKEIISGATKLVYAPETHXVGRYLQAEVNLGGQTSVAKTAGP

SEQ ID NO: 8632 - protein, 137 aa, Triticum aestivum
QVEQFSKGVLSASPRSLLCTNLSPSFNWDAAGLNDNDMGSYIANLGKLGFVWQFITLGGLHANALASATFAKSFKESGMYGYVSQVQRKEREHGVDVLQHQKWSGANYVDELMKMVTGGVSSTAAMGKGVTEDQFKH

SEQ ID NO: 8633 - protein, 509 aa, Bradyrhizobium japonicum USDA 110
MNIPSKPASIDVETHGNFIDGREVEAGNGAMLDVRNPATGDVIARIPNSTAEDIDRAMKSARAAFEGKAWGGMDTRARARLVNKLADAFEANLDSLYRLETLNNGRPVNETRAQLSRLPDFFRYFAGVALARRDSVIPVEGAYLNYTLRTPIGIVANCTPFNHPLMILCKSLAVVLATGCVTVVKPSEYTPLTTLKLAQIFTEAGLPPGVFNIVLGHGQSAGKMLAEHGDIDKLVLTGGTEAGRIAGSAAARVFAHQTMELGGKTPVMVFDDFDVDRAVNYAAFGAFIGAGQTCVCASRHIVQASIYDEFVEKLQAKTRTIRVGDPFDASTQMGPVISARQRDRVLTYAGYGHEDGARLVTGGVAAKVPGHDNGYFVEPTVFADVTSDMRIFQEEVFGPFTSVTPFKDEADALRLANDSPFGLAAAIRTRDVARAHRVAASVKAGIVWINDHHRLDPASPWGGVDDSGIGRECGTESFNDHFNTKSVMVATHEQPFDWYRDTANQKRLN

SEQ ID NO: 8634 - protein, 187 aa, Capsicum annuum
MASSVMSTATVATGANAAQASMIASFNGLKSAASFPVTRKQDLDITSIASNGGRVECMLVWPPINKKKYETLSYLPDLSDEQLLKEIEYLLQKGWVPCLEFETEHGFVYREHHRSPGYYDGRYWTMWKLPMFGCTDATQVLNEVQEAKKAYPQAWIRIIGFDNVRQVQCISFIAYKPEATKFSMFNV

SEQ ID NO: 8635 - protein, 456 aa, Bilophila wadsworthia
MTYDKAELVALDKKYVWHHLTQHKNFEPAIYVKGEGMRITDIDGKTYLDAVSGGVWTVNVGYGRKEIVDAVAKQMMEMCYFANGIGNVPTIKFSEKLISKMPGMSRVYLSNSGSEANEKAFKIVRQIGQLKHGGKKTGILYRARDYHGTTIGTLSACGQFERKVQYGPFAPGFYEFPDCDVYRSKFGDCADLGVKMAKQLEEVILTVGPDELGAVIVEPMTAGGGILVPPAGYYETIREICDKYELLLIIDEVVCGLGRTGKWFGYQHFNVQPDIVTMAKGVASGYAPISCTVTTEKVFQDFVNDPADTDAYFRDISTFGGCTSGPAAALANIEIIERENLLENCTKMGDRLLEGLKGLMAKHPIIGDVRGKGLFAGIEIVKDRATKEPIAEAVANAMVGAAKQAGVLIGKTSRSFREFNNTLTLCPALIATEADIDEIVAGIDKAFTTVEQKFGL

SEQ ID NO: 8636 - protein, 286 aa, Glycine max
  unsure (1)..(286): unsure at all Xaa locations
MASLSCSANDLAPLFNDTAAANYLCAQFDSISRKLAETTYAVDNTYLLFSAYLVFAMQLGFAMLCAGSVRAKNTMNIMLTNVLDAAAGGLSYYLFGFAFAFGGPSNGFIGRHFFGLRDYPMGSSPSGDYSFFLYQWAFAIAAAGITSGXSIAERTQFVAYLIYSSFLTGFVYPIVSHWFWSSDGWASATRSHGNVLFGSGVIDFAGSGVVHMVGGIAVLWGALIEGPRIGRFDRSGRSVALRGHSASLVVLGSFLLWFGWYGFNPGSFLTIAKGYGSGGYYGQWSA

SEQ ID NO: 8637 - protein, 506 aa, Azotobacter vinelandii
MRYAHPGSEGAIVSYKVRYGNYIGGQFVPPVKGQYFTNSSPVTGEEFAEFPRSTAEDIEKALDAAHAAAGAWGRTSVQERAAVLLKIADRIEQNLEVLAVTETWDNGKPVRETLNADVPLSADHFRYYAGCIRAQEGSAGEINENTVAYHFHEPLGVVGQIIPWNFPLLMAAWKLAPALAAGNCIVLKPAEQTPLSITVLVELIGDLLPPGVLNIVQGFGREAGEALATSKRIAKIAFTGSTPVGAHILKCAAENIIPSTVELGGKSPNIFFEDIMQAEPAFIEKAAEGLVLAFFNQGEVCTCPSRALIQESIYDDFMKVVMKKVGQIKRGHPLDTDTMVGAQASSQQFEKILSYLEIARSEGAEVLTGGAAERLEGSLASGYYIQPTLLKGHNKMRVFQEEIFGPVVGVTTFKDEAEALAIANDTEFGLGAGLWTRDINRAYRMGRGIQAGRVWTNCYHLYPAHAAFGGYKKSGVGRETHKMMLDHYQQTKNLLVSYDINPLGFF

SEQ ID NO: 8638 - protein, 433 aa, Oryza sativa (indica cultivar-group)
KMLEEFVSHGLLEYSKHGMKVEGATTSLLSPYLHFGEVSVRKVYQLVRMQQIKWENEGTSEAEESIHFFMRSIGLREYSRYLCFNFPFTHEKSLLGNLKHYPWKVDEERFKSWRQGMTGYPLVDAGMRELWATGWTHNRIRVIISSFAVKFLLIPWTWGMKYFWDVLLDADLESDILGWQYISGSLPDGHELSRLDNPEVQGQKYDPDGVYVRTWIPELARMPTEWIHHPWDAPSCILEVAGVELGFNYPKPIVDLHIARECLDDSISTMWQLDTAEKLAELDGEVVEDNLSNIKTFDIPKVVLRETSPCALPIDQRVPHASSKDHNLKSKVLKASNRSSICVDMIRSSKMEATSSVANSPVSRKRSFCETAFHVPSYSSSAEVHSHIQDHGGSLVGPSRYLLQEAGRNCVDEVEDSSTADSGSSISRQRKAA

SEQ ID NO: 8639 - protein, 415 aa, Streptomyces coelicolor A3(2)
MRRIVYLGGLTPRGVPERTLSPHLRSRAEVGPILVRDVLHYLAGAATMPDDIDRAFDVGGPDVPTYREMMRRHATVSGLRRRIIVPAPVLTPGLSSHWVGLVTPVPASIARPLTESLRHEVVCQEHDIARYVPDAPGRPLPFDVALTLALRRVREAQVATRWSSASVPGAPSDPLPTDPDWAGGSLYEDERHLPVDASPEALWKVVEGIGGDNGWYSFPPAWAVRGWLDRFVGGVGLRRGRRDAQRLHPARPVAWRGGRRRGHRRLAGRTGYPVVDAAMRQLRHQGWMHNRARLLVASFLTKTLYVDWRIGARHFLDLLVDGDVVNNQLNWQWAAGTGTDTRPHRVLNPLVQARRFDPDGVYVRRWVPELRSVEGGKVHEPWRLAAAERGELDYPDPLVELADGLARFKHARGRD

SEQ ID NO: 8640 - protein, 281 aa, Zea mays
MPMYSKSELIHVPPPPCSRPRYVMAPPLVFTSIGASMNAAVRDVWASNFDEELSNLSAVLPRYPCVCLDTEFPGAVHDSDMPRYMRGPRESYELVGIALSGPAGRFPIAWQFNIRGFDPALHPHAPASIAMLREQGMDFAMLNEFGIDPEDFAAGFRRSGLACGRLTWTAFSGSYDFGYLAKALTGGQPLPDTLDGFLALVRRLFGHSVFDVKHLARCCAMRGGLEQVATALGVKRAAGRAHCAGSDSLLTTDVLLLMMHRFFRNVEDSRCRNHRRPYLVS

SEQ ID NO: 8641 - protein, 219 aa, Brassica napus
  unsure (1)..(219): unsure at all Xaa locations
QGTEAELDGQYEPQDYLNFFCLGTREASDETVSKYSSRNQPKKIAKPNAAQVQXLKSRRFMIYVHSKGMVVDDEFVLIGSANINKRSLEGTRDTEIAMGGYQLHYSWAKKGSRPRGQIYGYRMSLWAEHLGXLEQGXEEPENMECVRRVRHLSELNWRQYAAEEVTVMTSHLLKYPVQVDRTGKVSSXPGPXXLPDVGXKIIGHXLWAGTKPRHLEVTL

SEQ ID NO: 8642 - protein, 460 aa, Glycine max
MEQKGSVLMQRYELGRLLGQGTFAKVYHARNIITGMSVAIKIIDKEKILKVGMIDQIKREISVMRLIRHPHVVELYEVMASKTKIYFVMEHAKGGELFNKVVKGRLKVDVARKYFQQLISAVDYCHSRGVCHRDLKPENLLLDENENLKVSDFGLSALAESKCQDGLLHTTCGTPAYVAPEVINRKGYDGIKADIWSCGVILYVLLAGHLPFQDTNLMEMYRKIGRGEFKFPKWFAPDVRRFLSRILDPNPKARISMAKIMESSWFKKGLEKPAITVTENEELAPLDADGIFEACENDGPIAEPKQEQAKPCNLNAFDIISYSTGFDLSGLFEDTNLKKETRFMSKKPASIIVLKLEEICKRLCLKVKKKDGGLLKLEGSKEGRKGTLGVDAEIFEITPHFHMVELKKSNGDTMEYQKLFKQDIRPALKDIVWTWQGEKPQQEQEQHEVVQEEHQPSHTA

SEQ ID NO: 8643 - protein, 465 aa, Methanococcus maripaludis S2
MFIDGKWIIREDIDVFDPYTLENIEKITALDREETKNAIEVTEKHKEIMKNLSPSKRYKILMKVAEHLSSKKDFFAKTISIDVGKPIKQSKIEVDRTLTALKLSAFYAKELRGETINSENGLIFTKKEPLGVIGAITPFNFPLNLATHKIGPAIATGNSVVLHPSSKAPIVAIYLTKIIEHVLKQMDIPRGVFNLATGNGEIVGDEISKNDNVNMVSFTGSVEVGESISKNAKMKKVTLELGGNNPMIVLKDSDIKLAAKSAVKSKFLNAGQVCISVGQVLVEEEVVETFTKYVIEETKKLILGNPLDKNTDIGPLISPESALRIENLIKQSVSEGGELLIGGNRQNSLISPAVINIDEENILSKIETFGPILPILTVKDSEEAVNIANNSKYGLQAGLFTNNINNAMKIADELEYGGIMINSSPTFRKDNMPFGGVKKSGLGREGIKYTVEEMSETKTVVIHNI

SEQ ID NO: 8644 - protein, 1748 aa, Schizosaccharomyces pombe
MSYPNQMNGSMYGYGANNGVQPGFDSYGMPINQGGMNYQQQTYPYQQPYQPDGYAGNTMLPFQQSQPATQFNNGFGYASQPTGSVADYGQQQQQMYGYNGMMPQTMNNTGFMQPQQTGAIPGFAPQPTGFVQPQPTGFMSQQPASFMQPQRTGGAGFIQPQRTGAMPAYQPQMNNFMQPQKTGGFAPQATGFMQTQPFGAAPSFAPQPTGFVQPQQTGVVMPPQPTGYLQAQPTGPFASFVQPQQTASFMPAAQPLKPQKTGQIHNSKAMDTRLSFVSAADQAKFEQLFKSAVGREEAMSSEIGKAILVRSKLPTVQLSKIWRLSDTTRSGRLLFPQFVLAMYLCNLGLTGKPIPDKVPDGILNEVNAMVDAISFSLDENYAKPTQPIPQAAAQQMAAQMFGGFQQAAGIPSQITGFQPQAMMPQRTGMQPQMTGFQQPMIPQRTGMQPQMTGFQQPMMPQRTGLQPQMTGFQQPMVPQRTGMQPQMTGFQQPMMPQRTGLQPQMTGFQQPMVPQRTGMQPMMPGLQQPMAPQRTGMQPMMPQRTGMQPQMTGFQQPMAPQRTGMQPMMPQRTGMQPQMPGMQQPMAPQRTGMQPMMPQRTGMQQPMAPQRTGMQPMMPQRTGMQPQMPGMQQPMAPQRTGMQPMMPQRTGMQPQMPGMQQPMAPQRTGMQPMAPQRTGMQPMMPQRTGMQPQMPGMQQPMAPQRTGMQPMMPQRTGMQPQMPGMQQPMAPQRTGMQPMAPQRTGMQPQMTGGPMLPQRTGGMAPQPTGMPGQWGFINTPLSNLPGIEALGQQMMPNAPSGGLNNTFQQKKDIPWAISKEEKRIYDQIFDAWDKERKGTLGGNAVLEIFGQSKLTRTELEHIWNLCDHGDKGSLDRDEFAVALHLIYRKLNGNEVPAVLPPELIPPSTRNFTESLNQVKNLIKNDTSNRKPFGAENQSKLKKNSFYDNPSETTEKDATLYRHNDSDASAYVSSARRRDFKEEKIESAPPIINDIDSEIASLKKRIHEKSLVVNALEDKKLAATPANDVQNDSLIYRIKSVQDEINRLSTSNKSPEVASMNVRLEELSTRVSKMLSDINEVDHTIASLSLKLFQAEDTKNSYDQTSPEATQERNRTISSKLAEMEKQKNESKAALEQMKNYVTNIENNIRAKLLPSAANDDAWLSQNVVDESVTRVVKELPVPAPAAPQTLNPPSVSTVQQSKPIESNTHTPEVKATSESPSASSNLEDRAARIKAEAQRRMNERLAALGIKPRQKGTPSPAPVNSATSTPVAAPTAQQIQPGKQASAVSSNVPAVSASISTPPAVVPTVQHPQPTKQIPTAAVKDPSTTSTSFNTAPIPQQAPLENQFSKMSLEPPVRPAVPTSPKPQIPDSSNVHAPPPPVQPMNAMPSHNAVNARPSAPERRDSFGSVSSGSNVSSIEDETSTMPLKASQPTNPGAPSNHAPQVVPPAPMHAVAPVQPKAPGMVTNAPAPSSAPAPPAPVSQLPPAVPNVPVPSMIPSVAQQPPSSVAPATAPSSTLPPSQSSFAHVPSPAPPAPQHPSAAALSSAPADNSMPHRSSPYAPQEPVQKPQAINNIAPATNLGTSQSFSPRMGPVNNSGSPLAMNAAGQPSLAVPAVPSAPSNHFNPFAKMQPPAPSPLQPSGHDSDNWSQHGDEEEEDSEDDIRSSKDAAALAAKLFGGMAPAHPVSTPPVRPQSAAPPQMSAPTPPPPPMSVPPPPSAPPMPAGPPSAPPPPLPASSAPSVPNPGD

SEQ ID NO: 8645 - protein, 157 aa, Triticum aestivum
  unsure (1)..(157): unsure at all Xaa locations
MAPTVMASSATSVAPFQGLKSTAGLPVSRRSNGASSAASXNGGRIRCMQVWPIEGIKKFETLSYLPPLSTEALLKQVDYLIRSKWVPCLEFSKVGFIFREHNASPGYYDGRYLTMWKLPMFRXTDAKKVXNEVEXVKKXYPXAXVRIIRFXKWARMR

SEQ ID NO: 8646 - protein, 511 aa, Alcaligenes faecalis
MGEEMKTESKKPDSARSELAMKYFQAEYGHFINGEWVGGSSSEKIAMINPANLEVLSYIQSGNAEDVNRAVEAATQAFPKWSRSTPSERQAALYEMARRLRARANDYAAMLSLDNGKPIMEALHIDIPATIGQFELFAGAAFGLHGQTIDATQGVAIIHREPLGVVAQIIPWNVPLVMMATKIAPALAAGNTIVLKPAESVCLAVMEFIREMADLLPPGVLNVITGYGPNVGEALVTHPNVRKVAFTGSRPTAQKLMQYASVNVIPQTLELGGKSANIICADADMDAAAESAAMSIVVNKGEICFAATRHFVHESVMDAFVEKVQNILRKIRVGDPMIPSTQMGPQASRMQFDKVLGYLDIGRNEGATTAMGGKRATVSGFEQGYFIEPTLFTDVRNKMRIAQEEIFGPVGVVIPWKDEAQVIREANDTEFGLAAGLWTKNITQAHRMAREIEAGTVWVNRYFNMIPNVPFGGYKQSGFGREFSLDVLSHYTQLKSVIVSLQEGPIGLFDH

SEQ ID NO: 8647 - protein, 75 aa, Zea mays
MTTAAAGRRQARRHQADGHGSAKVPLWKDPLSPSKWKEEHFVLASLSMWGVIFYGGYKLFSGKKEAKTEAASPQA

SEQ ID NO: 8648 - protein, 310 aa, Bacillus megaterium
MPLDPHIQIFLNQYNEMPRPSLEDVTPPQLREMEKMSLTPSKEAVKKVYNEEIELNERTLTLRVYEPEGTGPFPALVYYHGGGWVLGSLDTHDSICRSYANETNCIVVSVDYRLAPESKFPAAVNDAYDALDWISAHASQLNIDSNKIAVGGDSAGGNLAAVVSILAKQRQGPSIVHQLLIYPSVGFKNQHPASMKENAEGYLLSKDLMDWFRLQYLNNKEEEQHPYNAPVLLEDLSSLPSATIITAQYDPLRDSGKDYADALKNHGVPVTYENYETMIHGFLGFHEFVPLAQQAINKSAAQLRQVFDSI

SEQ ID NO: 8649 - protein, 372 aa, Hemerocallis hybrid cultivar
STEIFSPVRIRSLAAVRQEEVKLMITGILASTSTDNSVKVNMKVVFSELMFNVIMKIIAGKRYFGVNTDSEVEEGQKFRVVFDEMFSTLEVASPQDFLPFLKWFGFKRMENRLTKLAKELDQLFQKLIEERRSERGKVQSTVIDVLLSLQETDREQYSDKLIKGMILSLIAAGTHTTAGTMEWAMSLLLNHPEALLKVRDEIDKKVGQDRLIDHSDLQNLSYLNNAIKESLRLFPTAPLLLAHESSAECTVGGFTIPSNTILFANAYALHRDPKVWTDPVSFKPERFENNGQQGSRIYVPFGLGRRSCPGEGLATQVVGLALGTLIQCFEWDRNGEEKVDMTDGSGLAMHMEKPLEAMCKPRQSIVDVINRL

SEQ ID NO: 8650 - protein, 363 aa, Escherichia coli O157:H7
MSKNYHIAVLPGDGIGPEVMTQALKVLDAVRNRFAMRITTSHYDVGGAAIDNHGQPLPPATVEGCEQADAVLFGSVGGPKWEHLPPDQQPERGALLPLRKHFKLFSNLRPAKLYQGLEAFCPLRADIAANGFDILCVRELTGGIYFGQPKGREGSGQYEKAFDTEVYHRFEIERIARIAFESARKRRHKVTSIDKANVLQSSILWREIVNEIATEYPDIELAHMYIDNATMQLIKDPSQFDVLLCSNLFGDILSDECAMITGSMGMLPSASLNEQGFGLYEPAGGSAPDIAGKNIANPIAQILSLALLLRYSLDADDAASAIERAINRALEEGIRTGDLARGAAAVSTDEMGDIIARYVAEGV

SEQ ID NO: 8651 - protein, 301 aa, Acinetobacter sp. ADP1
MYIMWKQYLTEAVLKTTIRAPSRFSLPPATLRVALNQMCRVFPLNKEVSIRPIRLAGIRAEEIKPQSSSTQLIFHIHGGAFFLGSLNTHRALMTELAARTQMQVLHVDYPLAPEAGFPDALDALYDIYQTLLDQGVLPKDIILSGDSCGANLALALALRLKDDPEQLPSGLILMSPFLDLTLSSESLRLNKKHDALLCIEALEAGIDYYLGDSMPKDDPRVSPIFDNLRGLPPTMIQVGSKEILLDDAKRFRDKAKEADVKVEFKLYTGMWHNFQMFSAWFDEAKQAISDLAVFAHQLDRD

SEQ ID NO: 8652 - protein, 369 aa, Burkholderia cepacia R1808
MALSGVTAGNTALCTVGRTGNDLHYRGYDILDVAESCDFEEIAHLLVHGTLPNLTELAAYKTKLRALRGLPNALKAALEQIPASAHPMDVMRTGVSVLGTVLPEKDDHNLPGARDIADRLMASLGSMLLYWYHFSHNGKRIETETDDDSIGGHFLHLLHGKAPSKSWVEAMHTSLILYAEHEFNASTFTGRVIAGTGSDIYSAITGAIGALRGPKHGGANEVAYDIQSRYDSPDEAELDIRRRVENKEVVIGFGHPVYTISDPRNKVIKGVAHKLSKEAGDLKLYNIAERLESVMWDAKKMFPNLDWFSAVSYHLMGVPTAMFTPLFVISRTSGWSAHIIEQRIDNKIIRPSANYTGPEDLQFVPIDKR

SEQ ID NO: 8653 - protein, 348 aa, Tropheryma whipplei TW08/27
MEDLYGILGVDHDASVDEIRRAYRRLARELHPDINPDSADRFKAVTHAYNILSDPEQRQRYDRHVSGGFSSDFNLSDLFQSFFDTSAEFQRGSDLLVNIDIDLKTAIYGGSQVVKIDSLVVCDVCNGTRSEPGYKAEVCFDCNGSGVVRGEVRTTLGNLITQNTCSKCRGNGERIDHPCRRCYGNGSRSAPRDITINIPPGVETGMRIKIPNMGNAGGAMPGDLYVDCKVKEHPYFLRDGQDLYCRLDISLVDALLGTKVKIDSLDGELAVVIPALSQNRDVIRIANKGAVTLRGGKGDLCIVLNVLLMQKLDPEHRALLKKIMPNPPKPKLAKRTSGFFSWLKNKFT

SEQ ID NO: 8654 - protein, 489 aa, Bacillus cereus G9241
MPQDRKEEVQNDTYEEKEIMPDNPQYLPRRVQMELPPEFSINPLFARKGESVVPRFNMPDEGMLPETAYQIVHDEITLDGNARLNLAMFVSTWMEPTAERLYAKSFDKNMIDKDEYPQTAEIEERCVRILANLWHSPSPLTTMGVSTTGSSEACMLGGLALKRRWQNARKREGKSVDRPNIVFSSAVQVVWEKFANYWEVEPRYVKVSPEHSLLDPQGVIAAVDENTIGVVPILGETYTGRYEPVAAIAKALDDLQERTGLDIPMHVDAASGGFIAPFLQPDLVWDFQLPRVKSINVSGHKYGLVYPGLGWIIWREADDLPEDLIFRVSYLGGNMPTFALNFSRPGAQVLLQYYNYLRLGKRGYYDVQRASQKVALFLSKAIQKMEPFELLSNGSDIPVFAWRLKNGHTSNWNLYDLSRQLRVFGWQVPAYPLPPDLEAVTIMRVVVRNGFSVDLAHLFLRNLKQAVAFLDSLDGPMPHDTKCDNGFHH

SEQ ID NO: 8655 - protein, 594 aa, Triticum aestivum
  unsure (1)..(594): unsure at all Xaa locations
MESTMKEIRGGGAPCVLDMDDAATVGGGVEDTYGEDRATEEQLVTPWTVSVASGYNLLRDPRYNKGLAFTEKERETHYLRGLLPPTVISQELQERKIMHNIRQYQLPLQRYMAMMDLQEGNERLFYKLLIDNVEELLPIVYTPTVGEACQKYGSIFSRPQGLYISLKEKGKILEVLKNWPERSIQVIVVTDGERILGLGDLGCQGMGIPVGKLSLYTALGGVRPSACLPITLDVGTNNEELLNDEFYIGLRQRRAIGQEYADFLHEFMAAVKQNYGEKVLIQFEDFANHNAFDLLARYGTTHLVFNDDIQGTASVVLAGLVAALKLVGGTLAEHTYLFLGAGEAGTGIAELIALEMSRQTKTPIDECRKKIWLVDSKGLIVSARKESLQHFKKPWAHEHEHVGNLLDAVNAIKPTVLIGTSGKGQTFTQEVVEAISSFNEMPIILALSNPTSQAECTAEQAYTWSKGRAVFATGSPFDPVQYNGKIYVPGQANNAYIFPGFGLGVVMSGAIRVHDDMLLAASEALAQQVXTQENFDKGLIYPPFSNIRKICAHIAANVAAKAYELGLASRRPRPKDLVKYAESCMYSPIYRNYR

SEQ ID NO: 8656 - protein, 272 aa, Zea mays
  unsure (1)..(272): unsure at all Xaa locations
VDPRVREHQPNGPVTPVDMVVDFYKFDYEFGEPPRVTSLHNTVPVATFNDFCDDVYFVADQRGYEAVVYYLAGQYLKTDDKSGKIVDPRLQLNKVVREIKYSPGGVTVKTESDLIQFKPKLPTWKVRAIYQFDMAVYTKILLKFPRKFWPEGKGREFFLYASSRRSYYGVWQEFEKQYPDANVLLVTVTDEESRRIEQQSDEQTKAEIMQLLRMLXQLRATVRTVYTFGEHTSEHYNGYVHGAYLSGIDSAEILINCAQKKMCKYHVQGKYD

SEQ ID NO: 8657 - protein, 170 aa, Triticum aestivum
  unsure (1)..(170): unsure at all Xaa locations
MAPTVMASSATSVAPFQGLKSTAGLPVSRRSNGASLGSVSNGGRIRCMQVWPIEGIKKFETLSYLPPLXTEALLKQVXYLIRSKWVPCLXEFKQVGFIFRXEHNAPPGYYDGRYWDMWKLPXFGCTDXTQVINEVEESRRIPDAYSASSVRHIASACVAHASTTGSRSEG

SEQ ID NO: 8658 - protein, 83 aa, Triticum aestivum
  unsure (1)..(83): unsure at all Xaa locations
MAPTGMGVSATFVAPFQGLKSTVGLPVSRRSNGASLGSVSNXGGRIRCMQVWPIEGIKKFETLSYLPPLSTEGFLKQVDYLIR

SEQ ID NO: 8659 - protein, 368 aa, Malus x domestica
MGKGGQSCNGVVRDAKPVEQENMAAWLVDVNTIKILPFKLPAIGPNDVRIRIKAVGICGSDIHYLKTMKCGDFQVKDPMVIGHECAGIVDKVGSEVKHLVPGDRVAVEPGISCAHCQQCKGGRYNLCPDMKFFATPPVHGSLANQIVHPADLCFKLPENVSLEEGAMCEPLSVGVHACRRANVGPETTVLIVGAGPIGLVSVLAARAFGAPRIVIVDMDDRRLAMAKSLGADGTVKVSTKMEDLDDEVAKIKEAMGSEVDVTFDCVGFNKTMSTGLNATRPGGKVCLVGMGHGVMTVPLTPAAAREVDVVGVFRYKNTWPLCLEFLRSGKIDVKPLITHRFGFTEKEVEEAFATSARGGNAIKVMFTL

SEQ ID NO: 8660 - protein, 217 aa, Sinorhizobium meliloti
MKFFVDTADVKDIRELNDLGLLDGVTTNPSLILKAGRDIVEVTKEICSIVEGPVSAEVTATEYSAMMKEAAALSKIADNICIKLPLTLDGLKACKALTSDGHQTNVTLCFSANQALLAAKAGATFVSPFIGRLDDIAVDGMDLIREIRQIFDNYGYETEILAASVRTVNHVKEAALIGADVVTAPPATLKALVKHPLTDKGLEMFLADWAKTGQKIA

SEQ ID NO: 8661 - protein, 470 aa, Leuconostoc mesenteroides subsp. mesenteroides ATCC 8293
MVSVMWFRRDLRLEDNIALFNALRHSNEILCVFHINPEQVTEKSTVNQSAFFASVLYFKNKLKKQGINLNIMYGDINDCFASLKQKLPDWHDIFFNFDERGFGRNRDQKSVAFFEDKLKVKAHPYIDYNLHGATEVKKDSGAGYKVFTPYFKRWIRQEKPAPVSYVIDKRIKSARLLFPENEQLLETFIDDRFSFIKKDLGSETAKKVLNRFINESLDQYDEERDFPANDSTSHLSRYLRTGEISIRTVWRAIDQSPDSDGKSTFMKELCWRDFYNMIYVMYPNQNVESVNKDFRHVDWINNEQQFEAWRTGQTGFPIVDAAMRQLNATGWMHNRLRMIVASFLTKDLLIDWRWGEAYFHNKLLDYDAASNIGGWQWAASTGTDSVPYFRIFNPTLQSKKFDSNGLFIKKYVPELKNVDNKMIHEPGKLSESEQTRFNVRIGQNYPFPIVDHSYARKRAISIYESSKDVN

SEQ ID NO: 8662 - protein, 277 aa, Thermoanaerobacter tengcongensis MB4
MIQWYPGHMAKAKKEIISNLKLVDVVYEIVDARIPRSSRNPDFDEITKRKKKIMLLNKEDLADERITDLWIKHFKEKGIEAVKVNAITGKGFKELEEKTKEVCKDILEAKVKKGLTPRLRGMILGIPNVGKSTFINTLIGRKKAKTGDKPGVTKSLHWIRTPYLDLLDTPGVLWPKFEDKTTGFMLAITGAIKDEILEMEEVALFLVSILKNRYPDYLINRYKLDKIWEEEIKIIEDIGKKRGCLVSGGEVDFVKASTVLLEDFRKGNLGRISLEEP

SEQ ID NO: 8663 - protein, 277 aa, Staphylococcus aureus subsp. aureus Mu50
MEVKTFYNGNTMPQIGLGTFRVENDENCMESVKYAIEQGYRSIDTAKVYGNEEQVGAGIRAGLESTGIAREDLFITSKLYFEDFGRENVAAAYEASLSRLGLKYLDLYLVHWPGTNEAVMVDTWKGMEDLYKNNKAKNIGVSNFEPEHLEALLAQVSIKPVINQVEYHPYLTQHKLKLYLAAQHIVMESWSPLMNAQILNDETIKDIAQELGKSPAQVVLRWNVQHGVVIIPKSVTPNRISENFQIFDFELSDEQMTRIDGLNQDKRIGPDPKTFEG

SEQ ID NO: 8664 - protein, 327 aa, Triticum aestivum
MASTTAAVPEVALRSGGARPMPAIGMGTATFPVVPETTVKAVLEAVEVGYRHFDTAAMYATERPLGEALAEAVRRGLLASREEVFVTSKLWCTQCHPHLVLPSLRESLQNLQMEYVDLYLIHWPISLKPGPTVFPVKREDAVPFDFEGVWRAMEECHRLGLAKAIGVSNFTTSHLDKLLAAATVPPAVNQVEMNPVWQQRKLREYCAEKGIHVAAYSPLGGQNWSGDGNAVLDSEVLAEIAKARGKTVAQVALRWIYEQGVTPIVKSFSKERLKENLGIFDWGLTDDDLRKIGQIPQKKIVRAETVLFSAEGEFTSADLADMEIVEE

SEQ ID NO: 8665 - protein, 118 aa, Brassica napus
MEFVRFPIVSILDDMREVPEEHNEKSRISPSRAYMRDAKAMAATPADVIEHPSSYVFVVDMPGIRGEDIRVQVENENVLVVSGERQRENKENEGVKYVRMERRMGKFMRKFQLPENAD

SEQ ID NO: 8666 - protein, 181 aa, Zea mays
MASSMLSSAAVVTSPAQATMVAPFTGLKSSASFPVTRKANNDITSITSNGGRVSCMKVWPPIGKKKFETLSYLPDLTDVELAKEVDYLLRNKWIPCVEFELEHGFVYREHGNTPGYYDGRYWTMWKLPLFGCTDSAQVLKEVEECKKEYPGAFIRIIGFDNTRQVQCISFIAYKPPSFTDA

SEQ ID NO: 8667 - protein, 461 aa, Mycobacterium bovis AF2122/97
MTATLTKTLGSLDDFRGTLCVPGDPDYPRVRAIWNGQVAREPALIATCHDACDVRTVLRRPVDAGMVTAVRGGGHNVAGTALCDGGVVIDLSAMRAVSLDPATGRVRVQGGATLADLDHATVPFARVAPAGIVTTTGVGGLTLGGGVGWTTRRFGLSCDNLVAVRLVTAAGDYLSVDDERDPELMWGLRGGGGNFGIVTEFEFATHPFGPVAVAGFVVYRLDDGPAVLRGYRQFAAAAPEEVTTIVVLRHAPPAPWIPVDQRGKPVVMIGAVHTGSIQTGIEALRPVKSLARPVADTVWPTPFLAHQAVLDASNPAGHRYYWKSDYLAELNDEAIDLLVEQTAQLSSPDSLIGIFQLGGAAARGGERSCFPSRHARFMVNYATHWTEAREDDLHRQWTRDAIEALAPYGLGTAYVNFTADDAPMHVETLYSTTEFSRLVTLKNRLDPDNVFRNNHNIRPSA

SEQ ID NO: 8668 - protein, 341 aa, Rubrobacter xylanophilus DSM 9941
MKAFVKTGSRPGEAGVAELPAPRPGPGEVLLRVAACGVCGSDVHAFRSDPGFEWISTPVTLGHEFAGTVEALGPGVERVAPGDRVVAVAIQGCGRCELCLAGLTQLCPDRVAVGLSRDGGMAEYAVMPEGHLVSVPEGLDLTLAALCEPLSVAVRAVDARAGIAPEGKVVVSGPGPIGILCAMVARLRGADVLLTGIGQDAEVRLPAAERAGIRAANLSEASLEEHLRDAFGRPPDVWIESSGSVRALESALESVRAGGTVVVVGIYAERLNLFPTDAVRRELSLLFSYSCNLADYRTALELLASGDLDLGPLISTHRLEEAPDALEAVAAGRTVKAVLVP

SEQ ID NO: 8669 - protein, 380 aa, Exiguobacterium sp. 255-15
MSALLPTYLRHDIELVAGNGSFVQDKAGKNYLDFVMGIAVCNTGHRHPHVEQALQEQLQKLWHTSNLFMSSKQERVAAMLTENSHLSHVFFCNSGTEANEGAFKLIRKWTQKKEILTFSQSFHGRTFAMMGATGQDKIKAGFGEMVPDFKHLTFNDFDSLEMITNQTAAVWLEVIQGEGGVIVAENAWLEALMEKARQYDVKVVIDEVQTGIGRTGSRFAFEQTPLKPDIITVAKGLGSGFPVGAIITTPEATAVFTPGTHGSTFGGNPLAMAAAEATLDVLLNEQQMKQVQQKGLYLMQQLKQLPETMVVDVRGRGLMIGIEFHEPVSSLITALQQAGMLVVSAGPNVIRLLPSLCVTEQELDLAVGKIKTVCQQEVMM

SEQ ID NO: 8670 - protein, 335 aa, Nicotiana tabacum
MVHEKQVIEEVSGWLRVFEDGSVDRTWTGPPEVKFMAEPVPPHDYFIDGVAVKDVVADEKSGSRLRIYLPERNDNSANKLPVILHFHGGGFCVSHADWFMYYTVYTRLARAAKAIIVSVFLPLAPEHRLPAACDAGFAALLWLRDLSRQQGHEPWLNDYADFNRVFLIGDSSGGNIVHQVAVKAGEENLSPMRLAGAIPIHPGFVRSYRSKSELEQEQTPFLTLDMVDKFLGLALPVGSNKDHQITCPMGEAAPAVEELKLPPYLYCVAEKDLIKDTEMEFYEAMKKGEKDVELFINNGVGHSFYLNKIAVRMDPVTGSETEKLCEAVAEFINKH

SEQ ID NO: 8671 - protein, 137 aa, Brassica napus
PSPVMFQEDHDVWNVQLFRSIDGGAAAGFPESPEVAAEAGLVSGKDNVIDRSIQDAYIHAIRRAKDFIYIENQYFLGSSFAWAADGITPEDINALHLIPKELSLKIVDKIEKGERFRVYVVVPMWPEGIPESASVQA

SEQ ID NO: 8672 - protein, 279 aa, Streptococcus pyogenes MGAS8232
MVTTVKMTSGYEIPVLGFGTYQAADGEEAYQSTLAAIKAGYRHIDTAAIYKNEESVGRAIKDSGVLREDLFITTKLWNDAHSYEGAKDALAASLDHLGLDYVDLYLIHWPNPKALRNTWKEANAQAWQYMEEAVEAGLIKSIGVSNFMVHHLEALQETAKITPAINQIRLAPGCYQKEVVDYCKANEILLEAWSPLGQGEIFDNETMQQLANKYDKTVAQVALAWSLAEGFIPLPKSVHDERIKENMAIFDVSLTQEDKKTIRYLSGMSAIPNPDTTSF

SEQ ID NO: 8673 - protein, 169 aa, Stigmatella aurantiaca
MADLSVRRGTGSTPQRTREWDPFQQMQELMNWDPFELANHPWFANRQGPPAFVPAFEVRETKEAYIFKADLPGVDEKDIEVTLTGDRVSVSGKREREKREESERFYAYERSFGSFSRAFTLPEGVDGDNVRADLKNGVLTLTLPKRPEVQPKRIQVASSGTEQKEHIKA

SEQ ID NO: 8674 - protein, 117 aa, Prunus persica
MAYSAMTKLALVVALCMVVSVPIAQAITCGQVSSSLAPCIPYVRGGGAVPPACCNGIRNVNNLARTTPDRQAACNCLKQLSASVPGVNPNNAAALPGKCGVSIPYKISASTNCATVK

SEQ ID NO: 8675 - protein, 342 aa, Triticum aestivum
  unsure (1)..(342): unsure at all Xaa locations
MKTLLILTILAMAITISTANMQVDPSGQVQWPQQQLVPQPQQPLSQQPQQAFPQPQQTFPHQPQQQVPQPQQPQQPFLQPQQAFPQQPQQPFPQTQQPQQPFPQQPQQPFPQQPQQPFPQTQQPQQPFPQQPQQPFPQTQQPQQPFPQFQQPHQPFHQPQQQFPQPQQPQQSFPQQQRPFIQPYPQQRLNPCKNILLQQCKPASLVSSLWSIIWPQSDCQVMQQQCCQELAQIPQQLQCAAIHSVVHSIIVQQQQQQQQQQQQQQQQGMHILLPLSQQQQLGQGTLVQGQGIIXQPQQLAQLEAIRSLVLQTLPTMCNVYVPPECSIIRAPFASIVAGIGGQ

SEQ ID NO: 8676 - protein, 175 aa, Glycine max
  unsure (1)..(175): unsure at all Xaa locations
ASSMISSPDATTVNRAGAGMVAPFTGLKSMAGFPTKKTNNDITSIASSGGRVQCMQVWPPDGKKRLETLSYLPHLDDAQLAQEVQYLLRKGCIPCLEFESXHGFAYREHNTSPXYYDGRYWTMCKLPMFGCTDASHVWNELQEANTAYANGFIRIIGFDNARQVHSISCIGYKPP

SEQ ID NO: 8677 - protein, 350 aa, Schizosaccharomyces pombe
MDESLAKDAVFVASSKPSDLTTEVVGPDFNKYDERKKAGGPGITVEELVESYGKIGFQATNLHDAVTIINEMRNWRDPNPPEEKSDRATIFLGYTSNLISSGVREVLRYLVQHKCVDVIVTTAGGVEEDIIKCLGPTYVGDFHLDGKNLRAKGLNRIGNLIVPNDNYCRFEEWIFPILNKMVEEQETLGTHWTPSSFIRRLGKEINDESSVLYWAYKNNIPIYSPALTDGSIGDMLYFHTYKATPRPLVLDIVADIRNMNTHAVRANKSGIIILGGGVVKHHICNANLMRNGAEWSVYINSANEFDGSDAGARPDEAVSWGKIRGDAKKVKVYGEVSLLFPLIVAATFAK

SEQ ID NO: 8678 - protein, 500 aa, Psychrobacter sp. 273-4
MTDSTDLKHMDNAEQTQTAYINGSYLAVDKALSTFDSINPVTGEVLSTIQQTTTEQINDAVIAAQKGQKVWAAMTAIERSRILLNAVAILRERNDELAVLETKDTGKAISETKYVDIVTGADVIEYYAGLAPMIEGRQIPLRDTSFVYTRQEPLGVIAGIGAWNYPIQIAMWKAAPALAAGNAMIFKPSEVTPLSALKLAEIFTEAGLPEGVFNVVQGNYEVGEALTQHPDIAKVSFTGGVPTGKKVMSSAATSSLKDVTLELGGKSPLIIFDDADIDTAADIAMMANFYSTGQVCTNGTRVFIPKALQAKFEQAIQTRVKRIKLGDPMDDSITMGPLVSFPHMDRVLGYIEQGKASGARLLCGGARVTTGSLADGAYVAATVFTDCTDDMSIVREEIFGPVMSILTYETEEEVIRRANDTEYGLAAGVVTADLNRAHRVIAQIEAGICWLNTWGESAAQMPVGGYKHSGIGRENGIQTLEHYTQTKSIQVELGAFESVF

SEQ ID NO: 8679 - protein, 487 aa, Zea mays
  unsure (1)..(487): unsure at all Xaa locations
LKDKYSLGRRLGQGQFGTTHLCVERATGKELACKSILKRKLGSDDDVEDVRREIQIMHHLAGHPSVVGIRGAYEDAVAVHLVMELCGGGELFDRIVRRGHYTERKAAELARVIVGVVEACHSMGVMHRDLKPENFLFADHSEEAALKTIDFGLSIFFRPGQIFTDVVGSPYYVAPEVLKKRYGPEADVWSAGVIIYILLCGVPPFWAENEQGIFEEVLHGRLDFESEPWPSISDGAKDLVRRMLVRDPRKRLTAHEVLRHPWVQVGGVAPDRPLDSAVLSRMKQFSAMNKLKKMALRVIAENLSEDEIAGLREMFKMIDADNSGQITFEELKVGLEKVGANLQESEIYALMQAADVDNNGTIDYGEFIAATLHLNKVEREDHLFAAFQYFDKDGSGYITADELQVACEEFGLGDVQLEDLIGEVDQDNDGRIDYNEFVAMMQKPTVGXSRRRPTCRTASVSGSGRRSGWPRPLCLXLPCCLRVGVDD

SEQ ID NO: 8680 - protein, 130 aa, Triticum aestivum
MDRADPARGRLAVLSSHLLAGVLAVVDSRTGKRYEVKVSEDGTVRATDFKKITTGKDDKGLKTYDPGYLNTAPVRSSICYIDGDEGILRYRGYPIEEVAESSSFVEVAYLLMYGNLPTQSQLAGWESAIS

SEQ ID NO: 8681 - protein, 252 aa, Triticum aestivum
  unsure (1)..(252): unsure at all Xaa locations
MMGYQKGVDIEAGTSGGGTGTAAPTRGLYPGMTESPELRWALIRKIYVILSLQLLLTAVVAAVVVKVRAIPHFFVSSXPGLGLYIFLIIFPFIVLCPLYFYRQKHPVNLLLLGVFTVAISFAVGMTCAFTSGKVILEAAILTTVVVFSLTAYTFWAAKRGQDFSFLGPFLFASLIMLLVFGFIQILFPMGKLSHMIYGALAALIFSGYIVYDTDNIIKRYTYDEYVWAAVSLYLDVINLFLALLTLFRAGDS

SEQ ID NO: 8682 - protein, 255 aa, Triticum aestivum
VGREGAMEQGEEDGDWMMEPAAGKKGGAMIDRKKRFSEEQIKSLESMFATQTKLEPRQKLQLARELGLQPRQVAIWFQNKRARWKSKQLERQYAALRDDYDALLSSYDQLKKDKQALLNQLEKLAEMLREPGGAKCGDNAGAAARDDERLAVAGMSMKDEFVDAGGASKLYSASEGCGGSGKLSLFGEEDDDAGLFLRPSLQLPTAHDGGFTASGPAEYQQQSPSSFPFHSSWPSSAAEQTCSSSQWWEFESPSE

SEQ ID NO: 8683 - protein, 250 aa, Zea mays
MVKAYPTVNEDYLKAVDKAKRKLRGLIAEKNCAPLMLRLAWHSAGTFDVATKTWGPFGTMKNPAEQAHGANAGLEIAIRLLEPIKEQFPILSYADFYQLAGVVAVEVTGGPDVPFHPGRQDKPEAPPEGRLPDATQGSDHLRQVFSTQMGLSDQDIVALSGGHTLGRCHKDRSGFEGAWTSNPLIFDNSYFKELLSGEKEGLLQLPSDKALLSDPSFRPLVDKYAADEDAFFADYAEAHLKLSELGFAEA

SEQ ID NO: 8684 - protein, 477 aa, Rubrobacter xylanophilus DSM 9941
MRKTFVLAAASALLTLALPALGLAQEEAPPGNRELSLALDTVWVLVAAVLVLFMQAGFAMLEVGFSRMKNVGSVVAKILANLAIAAVLFWAVGFAVAFGTGNALFGTQGWFLAVPEGAVDEVYAGLAWTQVPLSAKFLFQVAFCAVSLAIVWGTMLERTKFAVYLVFAVVFAGIIYPMVGHWVWGGGWLTELGMQDFAGSTVVHLSGAMAALAGTLLLGPRLGKYDDEGRPVTIPGHNMPLAVLGVLILWIGWYGFNPGSTMAATPQIADIALTTTLAAACGVLGAMAMSYLYRRHVDVGMAGNGAIAALVAITAPCAFVAPWASAIIGFVAGVIMYATLLFVDRIGVDDPLGAIAAHGMGGVWGTLSAGLFTTPELAAVGRPGLLYGGGLYQLGVQALGILAAGGFVFLASLLVFAALKATIGLRVKPEQELNGLDVSEHGVYGYAGFPEHLIATDHPVNGNGGGAPRNAPAEGAA

SEQ ID NO: 8685 - protein, 208 aa, Triticum aestivum
LSLSPQPQPFPSQQPYLQLQPFPQPQLPYPQPQLPYPQPQLPYPQPQPFRPQQLYPQSQPQYSQPQQPISQQQQQQQQQQQKQQQQIPQQQQIPQQPQQIPQQQQIPQQPQQFPQQQFPQQQFPQQQFPQQEFPQQQQFPQQQITQQPQQLPQQQQMPQQPQQFPQQQQFPQQQSPQQQQLSQQQFPQQQQLPQKQFPQPQLIPQQQQ

SEQ ID NO: 8686 - protein, 212 aa, Triticum aestivum
  unsure (1)..(212): unsure at all Xaa locations
MAPTVMASSATSVAPFQGLKSTAGLPVSRRSNGASLGSVSNGGRIRCMQVWPIEGIKKFETLSYLPPLSTEALLKQVDYLIRSKWVPCLEFSKVGFIFREHNASPGYYDGRYWDNVESLPMFRVEPTPHKVINXVEEVKKEYPDAYVXRIIGFDNMRXVQCVSFIAFKPPGCEGVRQRAKTATHDRPYIKCHLQVLQLLTLLLGFSFLHLIS

SEQ ID NO: 8687 - protein, 416 aa, Escherichia coli
MESKVVVPAQGKKITLQNGKLNVPENPIIPYIEGDGIGVDVTPAMLKVVDAAVEKAYKGERKISWMEIYTGEKSTQVYGQDVWLPAETLDLIREYRVAIKGPLTTPVGGGIRSLNVALRQELDLYICLRPVRYYQGTPSPVKHPELTDMVIFRENSEDIYAGIEWKADSADAEKVIKFLREEMGVKKIRFPEHCGIGIKPCSEEGTKRLVRAAIEYAIANDRDSVTLVHMGNIMKFTEGAFKDWGYQLAREEFGGELIDGGPWLKVKNPNTGKEIVIKDVIADAFLQQILLRPAEYDVIACMNLNGDYISDALAAQVGGIGIAPGANIGDECALFEATHGTAPKYAGQDKVNPGSIILSAEMMLRHMGWTEAADLIVKGMEGAINAKTVTYDFERLMDGAKLLKCSEFGDAIIENM

SEQ ID NO: 8688 - protein, 131 aa, Triticum aestivum
  unsure (1)..(131): unsure at all Xaa locations
MAPAVMASSATTVAPFQGLKSTTGLPISRPSGSAGLSNVSNGGRIRCMQVWPIEGIKKFEXTLSYLPPLSKEALLKQVDYLIRSKWVPALSSAKVWASVFRGATTSPRVLTNGRITNVGNFPKVRGTGRQP

SEQ ID NO: 8689 - protein, 243 aa, Lactobacillus gasseri
MKEGELMNNFSQEPERRTIVDVTGLNRFLSRMYGMMTIAVLVSALSAYLTMTVFRTQVMTLFASNPAMTWILLLVPLALTFGISFRATRNPVASFVMLMIMAIVYGVEFSLIAGAYTGRSIASAFVASSTVFITMAVIGTTTKKNLNNLGSYASAALIGLIVAMLINMFLRNPMVSYIFSFIAVIIFTILTAWDAQRMKQIYENYGGQVSVDGLAVAGALALYLDFVNLFLQFLQIFGFSDRN

SEQ ID NO: 8690 - protein, 485 aa, Achromobacter xylosoxidans
MKEIKHFINGAFVGSASGKLFDNVSPANGQVIGRVHEAGRAEVDAAVKAARAALKGPWGKMTVAERAEILHRVADGITARFDEFLEAECLDTGKPKSLASHIDIPRGAANFKVFADLLKNVANETFEMATPDGAGALNYGVRRPKGVIGVISPWNLPLLLMTWKVGPALACGNCVVVKPSEETPLTATLLGEVMQAAGVPAGVYNVVHGFGGDSAGAFLTEHPDVDAYTFTGETGTGETIMRAAAKGVRQVSLELGGKNAGIVFADCDMDKAIEGTLRSAFANCGQVCLGTERVYVERPIFDAFVARLKAGAEALKIGEPNDPEANFGPLISHKHREKVLSYYQQAVDDGATVVTGGGVPEMPAHLAGGAWVQPTIWTGLADDSAVVTEEIFGPCCHIRPFDSEEEAIELANSLPYGLASAIWTENASRAHRVAGQIEAGIVWVNSWFLRDLRTAFGGSKQSGIGREGGVHSLEFYTELKNICVK

SEQ ID NO: 8691 - protein, 263 aa, Triticum aestivum
AAARAGTHAGANAIHDECRKRKLKVSVVAVPKTIDNDIPLMDKTFGFDTAVEEAQRAINSAYIEARSAYHGIGLVKLMGRSSGFIAMHASLSSGQVDVCLIPEVSFALDGEYGVLQHLEQLIKNKGFCVVCVAEAAGQELLQNSGATDASGNTILSDIGVHMQQKIKTHFKGIGVHADIKYIDPTYMVRACRANASDAILCTVLGQNAVHGAFAGFSGITSCICNTHYVYLPVTQVITAPKRVNHKGRMWHRCLTSTGQPDFR

SEQ ID NO: 8692 - protein, 371 aa, Ralstonia metallidurans CH34
MSMTFQMNAGAVRRFAKAMRFGAWLQSITERMTPAPFRLVQIGSAYWQSKALYVAAKLDLATVLGTATLTASALASRVGANEDALGRLMRLLAAMGIFEETAPMVFRNNKLSRCLVSDDPQSVRAMILMHNSETMSRPWFEQLEAGIRSGTPPFQLSHGEDLFDYLDHHADFDQLFSEAMNSVEALAGDGFATDLDWARFDRIIDVGGSRGTKSLAILRRHPRLTALIVDRPQVIEEAQRYWAEHHADGLERLQFQAADLFESLPAAGPKDVYLYSAVLHGFDDPTCVQALLRLREAIGNSGARAAILEIVVPEKGADISSASFDMQMFVGSRGRERTLTEWKAIIQAGGLTLEEVVRLRSLGSILVLRAG

SEQ ID NO: 8693 - protein, 444 aa, Arabidopsis thaliana
MAAETSIRKLPSLSGLRHRRNPLEDNPYFHPSNGFYITPSDVILAQVAYDHSAHSQSRVAYHRAGPRREIMYEPSAVKAAIVTCGGLCPGMNTVIRELVVGLWELYGVREIYGIPAGYRGFYSMKAVKLDPKAVHDWHKKGGTVLATSRGGFHLQKIVDAIHLNGYNQVYIIGGDGTMRGAVEIFKEISLRKLEVGITVIPKTVDNDVGIIDRSFGFQTAVEMAQEAISAAHVEAESAVNGIGLVKLMGRSTGHIALHATLSSRDVDCCLIPEMDFYLEGKGGLFEFLEKRLKERGHAVLVVAEGAGQEMIPRNESQKQERDESGNAVFLDVGVWFKSVLKAWWEREHPDELFTVKYIDPTYMIRAVPANATDNLYCTLLAHSAIHGVMAGYTGFVPGPINGNYAYIPLEEVAQTKNQVNTRDHKWAWVRSVTNQPDFETNVKG

SEQ ID NO: 8694 - protein, 389 aa, Escherichia coli K12
MSDTTILQNSTHVIKPKKSVALSGVPAGNTALCTVGKSGNDLHYRGYDILDLAKHCEFEEVAHLLIHGKLPTRDELAAYKTKLKALRGLPANVRTVLEALPAASHPMDVMRTGVSALGCTLPEKEGHTVSGARDIADKLLASLSSILLYWYHYSHNGERIQPETDDDSIGGHFLHLLHGEKPSQSWEKAMHISLVLYAEHEFNASTFTSRVIAGTGSDMYSAIIGAIGALRGPKHGGANEVSLEIQQRYETPDEAEADIRKRVENKEVVIGFGHPVYTIADPRHQVIKRVAKQLSQEGGSLKMYNIADRLETVMWESKKMFPNLDWFSAVSYNMMGVPTEMFTPLFVIARVTGWAAHIIEQRQDNKIIRPSANYVGPEDRPFVALDKRQ

SEQ ID NO: 8695 - protein, 168 aa, Brassica rapa
FRCVQQGDDENGKTGVSLSKDITDVAGRTVKKHIATLGPLILPLSEKLLFFVTFMGKKLFKDKIKHYYVPDFKLAIDHFCIHAGGRAVIDVLEKNLALAPIDVEASRSTLHRFGNTSSSSIWYELAYIEAKGRMKKGNKVWQIALGSGFKCNSAVWVALNNVKASTNS

SEQ ID NO: 8696 - protein, 339 aa, Populus balsamifera subsp. trichocarpa X Populus deltoides
MPTKEQVGALSKELRDRALVHDYVFKAIDALPVTAHPMTQFATGVMALQVQSEFQKAYEKGIHKSKYWEPTYEDSLSLIARVPIVASYIYRRIYKDGKVIPMNDSLVIGGNFSHMLGFDSPEMQELMRLYVTNHSDHEGGNVSAHTGHLVASALSDPYLSFAAALNGLAGPLHGLANQEVLLWIKSVVEECGENITTEQLKDYVWKTLNSGKVVPGFGHGVLRKTVPRYTCQREFALKHLPDDPLFQLVSKLYEVVPPVLTQLGKVKNPWPNVDAHSGVLLNYYGLTEARYYTVLFGVSRSIGICSQLIWDRALGLPLERPKSVTMELLENHCKKAPAN

SEQ ID NO: 8697 - protein, 168 aa, Brassica oleracea
FRCVQQGDDENGKTGVSLSKDITDVAGRTVKKHIATLGPLILPLSEKLLFSVTFMGKKLFKDKIKHYYVPDFKLAIDHFCIHAGGKAVIDVLEKNLGLAPIDVEASRSTLHRFGNTSSSSIWYELAYIEAKGRMKKGNKVWQIALGSGFKCNSAVWVALNNVKASTNS

SEQ ID NO: 8698 - protein, 442 aa, Sinorhizobium meliloti
MSNRLNTTPNDLSAFWMPFTANRQFKKEPRLFVGAKDMYYTTHDGRTVLDGTAGLWCVNAGHCRPKITEAIREQAGELDYAPAFQLGHPKAFELANRLVDIAPEGMNHVLYTNSGSESVDTALKVALAYHRAKGNGSRFRLIGRERGYHGVNFGGISVGGIVANRKMFGTLLTGVDHLPHTHLPAKNAFSRGEPEHGADLAAELERIVTLHDASTVAAVIVEPVAGSTGVLIPPKGYLQKLREICTKHGILLIFDEVITGYGRLGTPFAAQYFDVKPDIITTAKGLTNGVIPMGAVFVTSEIHDAFMTGPEHLIEFFHGYTYSGNPIASAAALGTLDTYREEGLLTRAAELAPYWEEALHSLKDCPHVIDIRNIGLIGAVELEPIAGEPTKRAFSAFLKAYEKGLLIRTTGDIIALSPPLIIEKRQIDELFDKLRDVLKNNI

SEQ ID NO: 8699 - protein, 160 aa, Thermobifida fusca
MKIYQSELRTLEGEPFRLPQTQLLLIVNVASKCGLTPQYSGLERLQEAYAYRGFSVIGVPCNQFGGQEPGDAQEIRLFCATTYGISFPILEKMEVNGPNRHPLYVELTKARDSQGLAGDVQWNFEKFLVAPGGRVLYRFRPQVEPEDPEIIRAIEENLPN

SEQ ID NO: 8700 - protein, 152 aa, Zea mays
MCRGLPTPAPAPALQFQSQDCSRQQRGTTQAPPGRASESVRACMAAERKAASRPAACGRMRGAEGAKPRGRQAKAARAPPGQGYFTAGLAALFLCLTTLLVFLPLVLPPLPPPPLLLLLVPVGLMAVLLALALVPSDGRAAAAAVASSSCVC

SEQ ID NO: 8701 - protein, 112 aa, Glycine max
MLKILMALLLLSLSFQAYGQFEEWCIADEQTPDDELQRAMEWACGKGGADCSKIQVNQPCYLPNTLKDHASYAFNNYYQRFKNKGGSCYFNSAAITTDLDPSHGSCKYEFVP

SEQ ID NO: 8702 - protein, 286 aa, Populus tomentosa
MALPVVDTEYLKEIEKARRDLRALIAYKNCAPIMLRLAWHDAGTYDKNTKTGGANGSIRNEEECSHGSNNGLKIAIDFCEEVKVKHPKITYADLYQLAGVVAVEVTGGPTIDFVPGRRDSNTCPKEGRLPNAKLGSPHLRDIFYRMGLSDKDIVALSGGHTLGRAHPERSGFDGPWTQEPLKFDNSYFVELLKGQTEGLLKLPTDNALLDDPDFRPYVELYGKDEEAFFRDYAASHKKLSELGFTPRSSVVKVKDSTVLAQSAVGVAVAAAVVILGYLYEVRKKMN

SEQ ID NO: 8703 - protein, 233 aa, Zea mays
SDSDHCHSARYYLKDAVLDGGIPFNKAYGMTAFEYHGTDSRFNRVFNEGMKNHSVIITKKLLDFYTGFEGVSTLVDVGGGVGATLHAITSRHPHISGVNFDLPHVISEAPPFPGVRHVGGDMFASVPAGDAILMKWILHDWSDAHCATLLKNCYDALPENGKVIVVECVLPVNTEATPKAQGVFHVDMIMLAHNPGGKERYEREFRELAKGAGFSGFKATYIYANAWAIEFIK

SEQ ID NO: 8704 - protein, 467 aa, Methanococcus maripaludis S2
MKSENYSKNDLEKWDKEYVWHPFTQMKEYREGKPLLIESGEGIYLIDVDGKKYMDAVSSIWCNFFGHSEKRIADAISKQALNIGHSTQLGCGNVPSAILAKRYVDFSPEQFKKVFFSEDGAEAIEIAVKMAFEYCKLKGFTNKTKFVSVKEGYHGDTVGAMSVGGSELFHGCFEPLLFEGYHASAPYCYRCKYCNFKNTDERNKQGCEMKCLKEMEDLIRTNKDEIFCVILEAGVMGSAGMIPYPKGYIEGVAKICKKLNIILILDEIATFGRLGRAFYSDMDELKELEKPDILCLGKGITGGYLPLALTLATDEIYNAFLGSFDECKQLFHGHTYAGNQIICASAIETLNILEETNICEEIRPNIKLLHENLDKLKEFPCVGDIRKSGYMIGIELVKDKETKEPYEYSYKAGYKVAGRLLEKGIYIRPIGNTLIFVLPLIIKPEEIKLLTEKIYESISELLDEKVL

SEQ ID NO: 8705 - protein, 465 aa, Arabidopsis thaliana
MSFLWDIMPIDKHLSTVPETEGCQQRIETRICALPDDLLLQILPHVPTKEAVATSILSKQWRYVWLMLPKLEFKDEGSESVGWFIKKSLQLHKAPKLDCLIVELGPHCPIDVDVRKWVENAVNRDVKDLDFTLLWSAAPTSFPKSLYTCDTLVCLTLSNQILVDVSSPASLPSLLDLSLHYVVYKDDGSLVRLLSSSPVLKRLSVHSHEDDNLKTFTVKVSSLESLNYDENWLKDEVEDNEVDEVVDNEVEVDDLNGSLVIDSPALKELHLSEVWDYCLIENMSFLDEAFISNVPYPDEKFLRSLSSVKHLFLLFSKSMVACCNAIKFSWLIEFYFFPISLVDWLMPLMFLLQNSPKLKTPTIDNDFECLSLSWNQPSSIPGCLLSHLETFRWRGYGGREDAKKLLMTYILANSKCLKTVEISLLATCNLEETQKELKSMPRISQSSQLLISTKKLWRINERTYL

SEQ ID NO: 8706 - protein, 162 aa, Oryza sativa (japonica cultivar-group)
MVKANVNELHPIQVGLAIRTDDGGGELVVFEFNLCGFDINNPANLRDPASIAHLRGRGVDFGRLPHARIELHRLRSLLLGSGLLQTRPSWATFTGAYHIGYLMKILTGAEVPSGLDAFTAMATATLGEGVYDVKRLAAEVNTASRFSLREIATWLGVVPAVA

SEQ ID NO: 8707 - protein, 490 aa, Glycine max; identical to SEQ ID NO: 233

SEQ ID NO: 8708 - protein, 513 aa, Glycine max
  unsure (1)..(513): unsure at all Xaa locations
MIAYLEHFVHGNDTESMPNDDVSALDGAFHFGATAAAGKDFGGMKSVKPRAVIRPALAGDVERAVKEAARTTYLTVAARGNGHSINGQAMAEKGLVLDMRAMEDHFTLLSLDDGSLYVDVSGGALWEDVLKRCVSEFRLAPRSWTDYLGLTVGGTLSNAGVSGQAFRYGPQTANVTELEVVSGKGETLVCSESQNSELFFATLGGLGQFGIITRARVPVQQAPDMVRWIRVVYTEFGDFTRDAEWLVTLREGDGFDYVEGFVFVNSDDPCNGWTTVPVGPNQYFDPVRIPSTAGPVLYCLELALHYRNQDHPSAVDMEVDRLLGRLRFVEGLKFSVDVTYMEFLLRVKRVEEDAKANGIWDAPHPWLNMFVSKSNIAEFDREVFKKILKHGVGGPILVYPLLRSKWDSRHSVVVPDSNIFYIIALLRFIPPXPKGPPTELLVEQNHEIIQLCYNRGFDFKLYLPPYQSKENWMRHYGDKWSRFVERKANFDPLAILAPGQKIFSRIPQPLSIT

SEQ ID NO: 8709 - protein, 475 aa, Oryza sativa (japonica cultivar-group)
MNAAAAAPAPTMNFAAIHSVWHDNFDAESAQLLAVAPRAVHVAVSVQYPGCAVAQAGTSGRKKYGSLTAEKRYDMVKANIDELHPIQVGLAIRANDDDGDSGELVVFEFNLRGFDINNPADLRDPASIAHLRGRGVDFGRLPCAGVEPHRLRLLLLGSGLLQAWPSWATFTGAYHVGYLMKILTGAELPSGLDAFTTMATGTLGEGVYDVKRLAAEVNTACGFSLREIAACIGVVPVAAQHGMVASAGAVSTLQCFKALRERLGQLQGRVRHPTLRRAARPPRRAYINVQYPGCPVPGGEPRPFEQLTAEQRYGVLKANVDALRAIQVGLAIRTGDGGGEAFVFESNLNGFDVGNLDLPRQRDARSIAHLRCEPAASTSPEAAARRRRLATFAVGYHVAYAVKLLTGRDRAPGQLDGFTRLVASIFVRRVYDVKRIAREHEPVHVGALTSLAERLGVFIVYLYDIYIRLGMGCHA

SEQ ID NO: 8710 - protein, 157 aa, Schizosaccharomyces pombe
MAEEEHVDFEGGEAGASLTFPMQCSALRKNGHVVIKGRPCKIVDMSTSKTGKHGHAKVHIVALDIFNGRKYEDMSPSTHNMDVPVVKRDEYQLVNIDDGYLNLMTTDGTTKDDVRLPEGELGNEIEEGFEEGKDLIITVVSAMGEEIALACRDAPSA

SEQ ID NO: 8711 - protein, 262 aa, Bacillus anthracis str. A2012
LVRLGVFKVEEGPELVEAVKSAIKAGYRSIDTAAIYGNEKAVGEGIRAGIEATGISREDLFITSKVWNADQGYEETIAAYEESLKKLELDYLDLYLVHWPVEGKYKDTWRALETLYKEKRVRAIGVSNFQVHHLQDVMKDAEIKPMINQVEYHPRLTQKEVQAFCKEQGIQMEAWSPLMQGQLLDNETLQEIAEKHGKTTAQVILRWDLQNGVITIPKSTKEHRIIANADVFNFELTKEDMEKIDALNQNHRVGPDPDNFDF

SEQ ID NO: 8712 - protein, 375 aa, Pseudomonas syringae pv. syringae B728a
MAEAKVLSGAGLRGQVAGQTALSTVGMAGAGLTYRGYDVRDLAAEARFEEVAYLLLYGELPNQAELSAYMDKLKRLRDLPQALKEVLERIPADTHPMDVMRTGASMLGTLEPERSFDQQRDSTGRLLAAFPAIMCYWYRFSHDGRRIDCTSAEDSIGGHFLHLLLDKAPSELHRKVMDVSLILYAEHEFNASTFTARVCASTLSDLYSCVTAAIGTLRGPLHGGANEAAMEMIQRFASAEEATKGTLGMLERKEKIMGFGHAIYKESDPRNEVIKGWSKKLADEVGDTVLFPVSEAIDKVMWEQKKLFPNADFYHASAYHFMGIPTKLFTPIFVCSRLTGWAAHVFEQRANNRIIRPSAEYIGVEQRAFVPLEQR

SEQ ID NO: 8713 - protein, 1372 aa, Cercospora zeae-maydis
MPTSNGGRTSPASLRSHHVRYASDSNIALRSTIMEQPEGPPELETYDSSGTNSSGNDGDEYAGTQESHSDSDGISSRHFVPGSGQAYAQDEVTPLTNVSTYGWSQPGSSNVSRTTTRGSVGSALPGTPAYEGTGTAMTNGTRRPANTRKESSNIYAPNRGPGSSMRYALNTGTRPRNGFTHMRRRNPNDEYRAQEKAYVQRIRQDGPDNDFQTEPRTPSLDYSFGSEDDEESPTNANYADHDPAEVDTLLYYGQEDLEPSVEELNIPANRERLEWHAMLANVLTGDVVKQEKKRLIGGPEQQGENTLKTEVWIGVRAKTCGRSIAAQKRLVEDGRSKVKQTIESIVAFEIKGEAEVGQSPMQQVQDVVKKIEKIEGLYPPRQAFRAAHPPAASSAYEHTCDAVIAWNNTTELIGTELGILQSWVGNMELDFTTARVRPEGEQHNELFDDSSFIDRILKEDGLKSLQGDKNLLNGVNTVIHKAKATLIANAEAFSDRHLPPYIEELLTLINFPSRLIQEIIRMRLSYAKKMKDAAQQGVMTAEQMILQFQILLQLAVKIKEQYLLIGQPEPGWDLPPCIDDNFDSVVLDALKFYFKMLNWKLMANKNTFKEAEILEQEWDFSNELGRHLDGGDVEVAEQFSSLTSKSMGRLAAPFEKELQRPADEVAGTAEMDKRYKSILDSVRVRQRKIFRFSRILSQRFENATEYNINIDNELYEDFLLALRLSGHFLVETNAESSVPTPGENEKAGGKVYILASPVLKERPKDIQSMLGTCYHAEDSPEDPSNPYVLILRPELPLVWEGDRMDASHSGKETLKVPQTLDLKTGRLRLVADGSLQRLQNANMAFTTATGNFDLTILVEQRANLCRESTKNWQRFAKLHTSSPTHSWTRSPLFALRSKPREGKAKAKNSTHPELLCFCYGIWSAFCHSHGRTTAGGQSHKLTKLALDWVSFICDDCVASDRKTFRWAVVALEFAMVMTRGQNILSISDEEYALLRSKVAGCRSLLISHFDIMGARGTVAAQAEKQRMDAMVGKLRLDIGKLKDDDESSRIVRAQWLDELEKLDQARKDREAERQALGRVLEDSNDADRALTHLSASAGNVHLRWQQGQFVGGGTFGSVYAAINLDSGHLMAVKEIRLQDPKMIPTVVSQIRDEMGVLQVLDHPNVVQYYGIEPHRDKVYIFMEYCSGGSLAGLLEHGRIEDETVVQVYALQLLEGLGYLHEASVVHRDIKPDNILLDHNGVIKFVDFGAAKVIAKQGKTMVADGPTGNGRQRSVQGTPMYMSPEVIKGGKHTGRLGAADIWSLGCVISEMATGSRPWANMDNDFAIMYNIANGNSPQMPTRDQMSDVGLDFLQAMLRTRPCEACVRCGASAT

SEQ ID NO: 8714 - protein, 207 aa, Neurospora crassa
MPCGLGGSKTVQRKLVLLGDGACGKTSLLNVFTRGYFPTVYEPTVFENYVHDIFVDNVHIELSLWDTAGQEEFDRLRSLSYDDTDLIMLCYSVDSKDSLENVESKWQGEIAENCPGVKIVLVALKCDLREATEDEEDGGANEDGAQREKKPMISYDQGLEVARRIKALRYLECSAMRNRGVNEAFTEAARVALSVKKDREESKCVVM

SEQ ID NO: 8715 - protein, 363 aa, Geobacter metallireducens GS-15
MKRKIGILTGGGDCPGLNAVIRGVVKSAIIGRGWEVVGIEDGFDGLLYDRTPRPLGLEDVRGILPRGGTILGTSNRGNPFSYPIEVNGKTVLTDVSDRVVERVKDLGIDAIVAVGGDGSLKIALELMKRGVPVVGVPKTIDNDLMETDVTFGYNTALETATDALDKLHSTAESHHRIMIMEVMGRYAGWIALESGISGGADVILIPEIPFELKAVCNAIEGRRRRGSKFSIVVAAEGAFPRGGTRVVQKKADETMAIERLGGIGNFVAHELTSCLDMDIRVTVLGHLQRGGSPSTFDRCLGSRFGIGAVELIEREQYGEMICLKGRAIRSVPIEKAVRKLKLVDPRGQMVTAAKELGINVGRE

SEQ ID NO: 8716 - protein, 281 aa, Corynebacterium glutamicum ATCC 13032
MNIHLCCCSRLCGRMVATSQFIDDSEAAQAVRAAIVAGYRNIDTALAYGNERGVGEGIRTAGVPREELFISTKLAAEIKDYDGAVAAIDESLAKIGLDYVDLMLIHSPQPWSDFRGGDYSEGNREAWRALEDAYKAGKIRSIGVSNFLEADLENILDSATVAPHVNQLLVHVGNTPSELISFCDSKGILVEAYSPIAHGEMLKNQQVKAIADKYNVSIPQLCIRYTIQLGTVSLPKTANPDHMSSNAQIDFEISEEDMAALQEVTARDYGEHSGFPVYSGK

SEQ ID NO: 8717 - protein, 115 aa, Hordeum vulgare subsp. vulgare
MARAAATQLVLVAMVAAMLLVATDAAISCGQVSSALSPCISYARGNGAKPPVACCSGVKRLAGAAQSTADKQAACKCIKSAAGGLNAGKAAGIPSMCGVSVPYAISASVDCSKIR

SEQ ID NO: 8718 - protein, 344 aa, Zea mays
  unsure (1)..(344): unsure at all Xaa locations
MVLESTMICIDNSEWMRNGDYSPSRFQAQADAVNLICGAKTQSNPENTVGVMTMAGKGVRVLVTPTSDLGKILACMHGLEVGAEANLAAAIQVAQLALKHRQNKRQQQRIIVFIGSPVTYDKKVLETIGKKLKKNNVALDVVDFGETDDEKPEKLEALIAAVNSSDSSHIVHVPPGDHALSDVLISTPIFTGEEGGSGFAASAAAAAATGATGYDFGVDPNVDPELALALRLSMEEERARQEAIAKKAAEDNKDQPSSSTDAIMAEAELTLNAPADVDADLLKDDDDAQLLQQALAMXMDEGASGAAAVADAAMAEAAADDQDLALALQMSGQDAEAAGQSDMS

SEQ ID NO: 8719 - protein, 170 aa, Oryza sativa
MAAFLRSKCSSVGRTLMGGLGNNLFGAVNSSVETVSRPSHCDPIFQQIRTFIQMRTNLKVVDNSGAKRVMCIQSLRGKKGARLGDTIIGSVKEAQPRGKVKKGDVVYGVVVRAAMKRGRNDGSEIQFDDNAIVLVNNKGELIGTRVFGPVPHELRKKKHLKILALAEHIV

SEQ ID NO: 8720 - protein, 196 aa, Arabidopsis thaliana
MATALASKLSKGRSLLGGLCNAFSGLMNSSSNGMMNGSILSQQQHRTFIQMGTILKCVDNSCAKEVMCIQSLRGKKGARLGDIIVGSVKEANPIVQKKVKKDAVPKGKVKKGMVVYGVVVRAAMPKGRADGSQVKFDDNAIVVVGIKEKKGQNNSHGSKRKMEYNQPTGTRVFGPVPHEMRLRKQLKILSLAQHIV

SEQ ID NO: 8721 - protein, 309 aa, Candida albicans SC5314
MTSHTHPVKLSRTFKTKSGDELSIGTGTGTKWKKDSKLDEINQELVDQILLAIKLGYRHIDTAEVYNTQAEVGEAIKQSGIPREQLWITTKYNPGWNDIKASSASPQESIDKALKQLGTDYIDLYLIHQPFFTEENTHGYSLIDTWKVLIEAKKQGKIREIGVSNFAIKHLEALKEVSEPEFYPVVNQIESHPFLQDQSKNITKYSQENNILVEAFSPLTPASRLDANPLTEYLEELSKKYNKSLGQLLLRYTLQRGILPITTSAKENRIKESLDVFDFELTKEEFDKITEIGNANPHRVFFHEAFKDL

SEQ ID NO: 8722 - protein, 172 aa, Butyrivibrio fibrisolvens
MESLTTRIKLNNGTAIPMFGYGTYKIKDQNEAYNSVRLALKNGYRHIDTAAFYENEKFVANAIKDFMEESQTKREDIFVTSKAWKTELGYDKTLAAFEKTMNEMQMDYLDLYLVHWPASYAFDDDWENTNRQTWKAMTEIYKSGRVKAIGVSNFLTHHLDTIIDMEVTPAVD

SEQ ID NO: 8723 - protein, 404 aa, Zea mays
MVLEATMICIDNSEWMRNGDYAPSRFQAQADAVNLICGAKTQWVQSNPENTVGVMTMAGKGVRVLVTPTSDLGKILACMHGLEVGAEANLAAAIQVAQLALKHRQNKRQQQRIIAFIGSPVKYDKKILETIGKKLKKNNVALDIVDFGESDDEKPEKLEALIAAVNSSDSSHIVHVPPGENALSDVLLSTPIFTGEEGGSGFAASAAAAVATGASGFEFGVDPNVDPELALALRLSMEEERARQEAIAKKAAEDTSNTENINASSSNSDSVMAEAELASNAAAGDKQEQPKDDDDLLQQALAMSMEGGASGSAAVTDSAMAEAGAVDPDLALALQMSVQDANMSSDADMSKVFEDRTFVSSILNSLPGVDPNDPSVKDLLASLHSQGEQEKKEDKSDKTEDEKN

SEQ ID NO: 8724 - protein, 494 aa, Bacillus cereus G9241
MSQLAVNLHEKVEKFLQGTKKLYVNGFFIESASGKTFNTPNPATGETLAVVSEAGREDIHKAVVAARMAFDEGPWSRMSTAERSRLMYKLADLMEEHKEELAQLETLDNGKPIRETMAADIPLAIEHMRYYAGWATKIVGQTIPVSGDYFNYTRHEAVGVVGQIIPWNFPLLMAMWKMGAALATGCTIVLKPAEQTPLSALYLAELIEEAGFPKGVINIVPGFGESAGQALVNHPLVDKIAFTGSTPVGKQIMRQASETLKRVTLELGGKSPNIILPDADLSRAIPGALSGVMFNQGQVCSAGSRLFVPKKMYDNVMADLVLYSKKLNQGAGLSPETTIGPLVSEEQQKRVMGYIEKGIEEGAEVLCGGSNPFDQGYFVSPTVFADVNDEMTIAKEEIFGPVISAIPFNDIDEVIERANKSQFGLAAGVWTENVKTAHYVASKVRAGTVWVNCYNVFDAASPFGGFKQSGLGREMGSYALNNYTEVKSVWLNLN

SEQ ID NO: 8725 - protein, 192 aa, Zea mays
  unsure (1)..(192): unsure at all Xaa locations
HEPTTNPMPPHRAGGAAGGGDTSAFFAATLVLWAVSVGFEIGVRGRRELAPVAAGFAFFQAANTAVRGSVSRDPLFVNTAVSLLHSSLTSVXLHSIFLHVRKVRRMVGFRDFDRTVVKLEWVLNWTTFVTARVICHILITYKLVADAHKFGKGIELPLALLGMAGMNLLNIFLGLDLLKAFTRERNQQNHQD

SEQ ID NO: 8726 - protein, 89 aa, Glycine max
  unsure (1)..(89): unsure at all Xaa locations
ASSXISSPTVTTVXNRADAGXVATIXGXXSMAXFPTRKTNXDITSXASNGGRLQCMXXWPPVXGKXXFETXSYLPDLXDXQLAKEVEYL

SEQ ID NO: 8727 - protein, 341 aa, Mesorhizobium loti MAFF303099
MKAARLYGPGDLRVEDVAPPGIPDPGWVKLRVDAAGICGSDLHNFRTGQWISRSPSTAGHELTGTVTALGEGVDTVAVGDRVVADSRFWCEECVQCRAGRRHLCASLGFVGEVCDGGFAEQVVLPARLLHVVDAALDERVAAMAEPLAVALHAVRRLPKTAGSVLVVGCGPIGGLAALLLSRSFAGTVLVADRNQARCARVARVTGATIVDLDRDAIAAATGYAPLLAAVEATGSIAAFNQLLGVLDSGSAVAMVGIFHGRLDIDPNLLVEREIALLGCHAFADELPDAVRMLGELSEPLLALIDREIGLDDIPAAYERLLAGQSDGLKTIIRMRQPVEPA

SEQ ID NO: 8728 - protein, 174 aa, Zea mays
  unsure (1)..(174): unsure at all Xaa locations
MAEAPASPGGGGGSHESGSPRGGGGGGSVREQDRFLPIANISRIMKKAIPANGKIAKDAKETVQECVSEFISFITSEASDKCQREKRKTINGDDLLWAMATLGFEDYIEPLKVYLQKYREMEGDSKXTAKSSDGSIKKDALGHVGASSSAAQGGAYNQGMGYMQPQYHNGDISN

SEQ ID NO: 8729 - protein, 440 aa, Triticum aestivum
  unsure (1)..(440): unsure at all Xaa locations
MSTTKVKRRVGKYELGRTIGEGTFAKVRFARNTETGDPVAIKILDKEKLLKHKMVEQIKREIATMKLIKHPNVVRIHEVMGSKTKIYIVLEYVTGGELFDTIVNHGRMREDEARRYFQQLINAVDYCHSRGGVXTRDLKPENLLLDSCGNLKVSDFGLSALSQQLKDDGLLHTTCGTPNYVAPEVLEDQGYDGAMADLWSCGVILFVLLAGYLPFEDSNLMALYKKISDAEFTFPPWTSFPAKRLLTRILDPNPMTRITVQEMLEDEWFKKGYKRAEFDEKYDTTLDDVDAVFNDSEEHHVTEKKEEEPVALNAFELISMSAGLNLGNLFDSEQEFKRETRFTSKSSPKEILRKIEEAAKPLGFDIQKKNYKLRLEKVKAGRKGNLNVATEILRVGPSLHMVEVRKAKGDTLEFHKFYKNLSNTLKDVVWKSDDLQIQPS

SEQ ID NO: 8730 - protein, 371 aa, Methylobacillus flagellatus KT
MLSAHPELKNLFNMGNQANGIQQQSLAAAVFAYAANIDNPAALAPVVKRIVHKHAAVGIKPEHYPIVGQYLIGAIKQVLGEAATDELLAAWGEAYWSLANLLIEEEKSLYASTASTAGALMTLKVARKVFESEHIVSFYLQHPDGRKPGDFLPGQYISVEMQFEQNKRRQLRQYSLSDSSTAPWWRISVKREQEAEKPEGLLSNWLHDEVKVGDLIHATPAFGDFVLDPVISDQPLLLISAGIGITPMLSMLNSVRDLAPQRPVFFAHAARSPAWQSHSLDLQEARYRMTNLQTALFYESLEGAHGSIGGVYQGRMDITDLWPAVLHHADIYLCGPLGFMQAQREQLLQAGVAASHIKREVFGPDLLDHLL

SEQ ID NO: 8731 - protein, 450 aa, Zea mays
  unsure (1)..(450): unsure at all Xaa locations
MVGGGGGGPLRRVGKYEVGRTXEGTFAKVKFAQNTETGESVAMKVLDRSSILKNKMAEQIKREISIMKLVRHPNVVRLHEVLASRKKIFIILEFITGGELFDKIIRHGRLSEADARRYFQQLIDGVDFCHKKGVYHRDLKPENLLLDSQGNLKISDFGLSAWPAQGSFLLRTTCGTPNYVAPEVLSHKGYNGALADTWSCGVILYVLLAGYLPFDEVDLTTLYGKIESAEYSFPAWFSGGAKSLIRRILDPNPETRIRIEEIRSDEWFQKNYEPIKEIENEEVNLDDVNAAFDDPEDDNEDAFEDETGPLTLNAFDLIILSQGLNLAALFDRRQDCDKLQNRFLSRNPAKVILSSMEVVAQSMGFKTHIRNYKMRVEGLNADKTSHLSVMVEVFEVAPSIFMVELQRAAGDTSEYNTFVNNYCGKLDDIIWKFPTEKGKSRIPRLSKSHS

SEQ ID NO: 8732 - protein, 570 aa, Zea mays
  unsure (1)..(570): unsure at all Xaa locations
SRPAGKQKKNEQIHRIARRQSVQATTSALHPVWASASRLVSLHLRGCCSRLPPTNSIPRHGSRRPRSGFSLPCSPPTSVVQGPRRRRGWRGRRYPRRRPGPAPARLAVVDGRTEKRHEVXCSEDGTVRATDFKKITXTGKDDKGLKIYDPGYLNTAPVRSSICYIDGDEGILRYRGYPIEELAESSSFVEVAYLLMYGNLXPTQSQLAGWEFAISQHSAVPQGLLDIIQSMPHDAHPXMGVLASAMSTLSVFHPDANPALQGQDLYKSKQVRDKQIVRVLGKAPTIAAAAYLRLAGRPPVLPLNTLSYSENFLYMLDSLGGGILFXLNPRLAXRTLDILFITXHLKHEMNCSTAAVRHLASSGVXDVFTALSGGVGALYGPLHGGANEAVLKMXNEIGSMENIPDSMVGVKTRKRKISGLGHRVYKNYDPRAKVIRKLADEVFSIVGRDPLIEVAIALEKAALSDEYFIKRKLYPNVDFYSGLIYRAMGIPXNFFPVLFAIPRMGGXLAHWKESLDDPDTKIIRPQQVYTGFWXRHYTPVRERVLSSQSEELGQVATSNATRRRRAGSAL

SEQ ID NO: 8733 - protein, 239 aa, Triticum aestivum
MASLGLPGPSSYHDLCCYGAGIAGNIFAFVLFISPLPTFRRIVRNGSTEQFSATPYIYSLLNCLVCMWYALPFVSYGVVLVATVNTIGAAFQLAYTAVFIAYADAKKRLKVSVLLAGVFCVFGLIVYVSMALFDHKPRRTFVGYLSVASLIFMFASPLSIINLVIRTKSVEYMPFYLSLSMSLMSMSFFAYGALLDDFFIYVPNGIGTVLGVMQLLLYAYYSRKGSRDEARRPLLVTHT

SEQ ID NO: 8734 - protein, 469 aa, Bacillus cereus G9241
MYINGEWITLQEQIEVNNPATKEIFATVPKGGVTEAKQAVDAAHEAFKSWSKLTAADRAVKLKKWFTLIDENKEEIAAIMTREQGKPFAEALGEVNYANSFVEWYAEEGKRVYGEMIPASHPNKRILVMKQPVGVMAAITPWNFPAAMITRKVAPALAAGCTAVVKPASQTPLTALKLAELAHEADIPKGVINIVTGSAKAIADKWMEDGRVRKVSFTGSTEIGKELMASAAQTMKKVSLELGGHAPFIVMNDADLDKAVEAVIGSKFRNAGQTCICTNRVFVQEEVYEAFVEKFQKAVGQLKVGDGFGDGTTVGPLIDENAVSKVQEHIEDAIQKGGTVLYGGQKVAELDGHFIQPTVIGLANDTMLCMNEETFGPVAPVAKFKTVDEVIERANHTPYGLAAYIFTKDISQAFQISEALEYGIIGLNDGLPSVAQAPFGGFKESGIGREGGHFGIEEYLEIKYISLGL

SEQ ID NO: 8735 - protein, 112 aa, Glycine max
  unsure (1)..(112): unsure at all Xaa locations
MDVADIASPSGQQEQGHRTVSSEPPKRPAGRTKFHETRHPLYRGVRRRGRVGQWVCEVRVPGIKGSRLWLGTFNTAEMAARAHDAAVLALSGRAXCLNFADSAWRMLPVLAA

SEQ ID NO: 8736 - protein, 343 aa, Triticum aestivum
  unsure (1)..(343): unsure at all Xaa locations
YAAAVVAAVGRVCDRKGVQHPVICSESGRALVSHHSVLIFEAFSATAPASNMMDPATAYLLDELTDDCRSDYRNLMASAVRGDFDTCGLYADQLKRRCAEQFKEGVLGLEHLAAVDGLCEIVARGMGAAEGPRXVHINLSVFTSLPDMWAIEQLFPIIPIQRLQERPAVDGVLSDLTCDSDGKVDQFIGGRSSLPLHELPAHGTRGYYLGMFLGGAYQEALGGLHNLFGGPSVVRVSQSDGPHCFAVTRAAXGPSCADVLRAMQHEPEVMFEVLKQRTADDGATTAALARAFGSMPYLSFDAEEASAMSGAESSGMSSDSEGSAAGAAEDDDEEWEFMRGLTV

SEQ ID NO: 8737 - protein, 216 aa, Schedonorus arundinaceus
MDAAVAASLSLQSGEQEYRTVWSEPPKPRSGRTKFQETRHPVYRGVRRRGRAGQWVCEMRVHGTKGSRLWLGTFDTAEMAARAHDAAALALSGRDACLNFADSAWRMQPVLPAGAGSVCFGGAQEVKDAVAAAVEAFQEEEHHVESTAETAKDEESALSMSSDLSEHDDERWIDGMDAGSYYASLAQGMLVEPPDAGAWREDGEHGGVETSLWSYL

SEQ ID NO: 8738 - protein, 288 aa, Lactobacillus plantarum WCFS1
MTKTPTITLNDGRAIPAIGFGTFQIPDDGSTYQAVKEALVIGYRHIDTAVAYFNEDEVGQAIKDSGIPRDQIWVTSKLWLQDYGFDAASRAIDRSLTKLRLDYIDLYLIHQPYGDVPGAWQAMEAAQKAGKLKSIGVSNMTPTLWQKFVPQFETIPAVNQVEFNPYFQQQPLRQLLAAQDVKLEAWAPLGQGNQALFKEPIIQQLAIKYHKDAGQIILRFEHQEGVIVFPKSVHSARIKSNRDIFDFELTSTEMAQLRALDTGKGHHDPDAPGVSEQLLHAFDVHADD

SEQ ID NO: 8739 - protein, 137 aa, Zea mays
  unsure (1)..(137): unsure at all Xaa locations
MTMESPTTAAGGELESYFSLGLTVSHSQKDNAEFPKVLLLLSAYLDKTVQQNEELLDSSKIKESTTIFHGQRVPELSIKLYAERIFKYAKCSXSCFVLALIYMERYLQQPNIYMTSFSVHRLLITSVVVAAKFIDDA

SEQ ID NO: 8740 - protein, 288 aa, Lactobacillus plantarum WCFS1
MMVPTTKLNNGVVMPQLGFGVFQVPDLNECEAAVTAALKAGYRLIDTATAYQNETAVGRAIQKSGLRRDELFVTSKLWVSEFTYERAKQGIDASLQRLGVDYLDLYLLHQPYGDVMGAWRALEEAYHAGKIRAIGVSNFYADQLKNLELTMSVQPAVNQIEVNPWYQQADEVRFNQDEHVRVEAWAPFAEGKHAIFSNPSIQTIAQAHGKTTGQVILRWLLQRGITVIPKSVHPERMAENIAVFDFELTAAEMSAMAELDQGVSQFFDHRDPVTIEQIFGASLRQLHE

SEQ ID NO: 8741 - protein, 166 aa, Zea mays
  unsure (1)..(166): unsure at all Xaa locations
MDRADPARGRLAVLSSHLRGAGAEEATDLERSSISAPAPGPRAXALGVVNGRTVKRHDVKVSEDGTVRXTDFXDDTSWKDXXXLKNYDAGYLSTGPGRSXICYIDGDEGILRYRGYPIXEWLKAGRFGWVDYLLRXGTLPTQNQWEGLGICISXHAAGPQRNGGNK

SEQ ID NO: 8742 - protein, 298 aa, Dechloromonas aromatica RCB
MTQARKKAGETLAVADVVVEVLDARLPQASSNPMIHELRVFRQRPCLKLLNKADLADPEATKAWLAFFDAQPNVKAVAISCKKASDVARIPGLAQKLAPHRNDAVKPLRLMIMGIPNVGKSTLMNALVKKKVAAVGDQPAVTKSQQRIDISNRLTLYDTPGMLWPKIDHPIDGLMLAASHAVGVNAYIDEEVGTWLAEFLLEHYSALLKARYGFATEGMDAVGVIEAIGKKRGCVIKGRGGEIDMERAAAILILDYRSGALGRISLETPELRASRQAELKAAGRLKENPDLATDEGND

SEQ ID NO: 8743 - protein, 173 aa, Arabidopsis thaliana
MAAAFASRLTRGGRSLLGGLNNGGSMNSSNGMMNESILSQQQQRRTFIQMGTVLKVVDNSGAKKVMCIQALKGKKGARLGDTIVASVKEAMPNGKVKKGAVVYGVVVRAAMQRGRVDGSEVRFDDNAVVLVDSKDKNTKTDRQPIGTRVFGPVPHELRKKKHLKILALAQHVA

SEQ ID NO: 8744 - protein, 444 aa, Bacillus subtilis subsp. subtilis str. 168
MSSYLIKPELSSAYPVVSYAKGSYVYDQTGKKYLDGSSGAVTCNIGHGVRDVTEKLKEQLDQVSFAYRSQFTSEPAEQLAALLAQELPGDVNWSFFVNSGSEAIETAMKIAIQYWQEKKQTQKSIFLSRWSSYHGITLGALSLSGFYERRYRFTHLIERYPAISAPHIYRLNHETEEDFVQTAADELDTMIKRIGSQFIAGFVAEPIIGAAGAAITPPPGYYERLSEVCRTHDVLFIADEVMTGLGRTGRMLATEHWDTVPDIAVLGKGLGAGYAPIAAAVVSDSIIETIKQGSGVIMSGHTYSAHPYSAKAALEVLRYVLKHGLIKQSEKKGAVLKKKLDEAASQSGIIGEVRGKGLLLGIEFVADQKTKKVFPPEQAITQLIVSEAKKRGLIVYPSKAGIDSGEGDAVIIAPPFTISDGEMEELISIFSETVAAVEKNLKKD

SEQ ID NO: 8745 - protein, 160 aa, Triticum aestivum
MSDSEEHQFESKADAGASKTYPQQAGTIRKNGYIVIKNRPCKVVEVSTSKTGKHGHAKCHFVAIDIFTGKKLEDIVPSSHNCDVPHVNRTEYQLIDISEDGFVSLLTDNGNTKDDLKLPTDETLLGQIKDGFAEGKDLVVSVMSAMGEEQINALKDIGPK

SEQ ID NO: 8746 - protein, 339 aa, Methanococcus maripaludis S2
MRNTPKICVINGDGIGNEVVPETVRVLNELGDFEFIHAHAGYECFKRCGDAIPENTIEIAKESDCILFGSVTTPKPTELKNKSYRSPILTLRKELDLYANIRPTYNFDNLDFVIIRENTEGLYVKKEYYDEKNEVAIAERIISKFGSSRIVKFAFDYAVQNNRKKVSCIHKANVLRVTDGLFLEVFEEMSKHYEKLGIKSDDYLIDATAMYLIRNPQMFDVLVTTNLFGDILSDEAAGLIGGLGMSPSANIGDKNGLFEPVHGSAPDIAGKGISNPIATILSAAMMLDHLKMNKEAEYIRKAVKKTVECKYLTPDLGGNLKTFEVTEKIIESIRSQMIQ

SEQ ID NO: 8747 - protein, 373 aa, Candida maltosa
MSVKTKTITILPGDHVGTEIVNEAIKVLEAIEAATPYQKIHFDFKHHLIGGAAIDATGVPLPDDALESAKKSDAVLLGAVGGPKWGTGAVRPEQGLLKIRKELNLYANIRPCNFASDSLLELSPLRPEVVKGTNLIIVRELVGGIYFGDREEQEESEDKQTAWDTEKYTVDEVTRITRMAAFMALQHNPPLPIWSLDKANVLASSRLWRRTVDKVISEEFPTLSVQHQLIDSAAMILIQNPTKLNGIIITSNMFGDIISDEASVIPGSLGLLPSASLASLPDTNTAFGLYEPCHGSAPDLPANKVNPIATILSAASMLRLSLDCVKEAEALEEAVKQVLDKGIRTADLRGTSSATEVGDAIVEAVTKILKEKA

SEQ ID NO: 8748 - protein, 143 aa, Brassica napus
TPFRSSEELKLGSPPMDTEGKLPGNFPKGGQGLKKNIFLPLEWSTVPQGPKSLAWVVEALNPPDLRGPFVPGTVWLVVTIPPALKGLPEGFFGTNNQVVVFREGITDHKIPEWLGLLMLSNGHGFQLKLFVLNDKPNLGHTGT

SEQ ID NO: 8749 - protein, 220 aa, Retama raetam
MGKSYPTVSGDYQKAVEKAKKKLRGFIAEKSCAPLILRLAWHSAGTFDVKTKTGGPFGTIKNPAELAHGANNGLDIAVRLLEPIKEQFPILSYADFYQLGGVVAVEITGGPEVPFHPGREDKPEPPPEGRLPDATKGSDHLRDVFGKAMGLSDQDIVALSGGHTIGAAHKERSGFEGPWTSNPLIFDNSYFTELLSGEKEGLLKLPSDTALLSDPVFALC

SEQ ID NO: 8750 - protein, 330 aa, Triticum aestivum
  unsure (1)..(330): unsure at all Xaa locations
MGSLDAGAAMEKIRAAGLLRTRGLIGGQWVDAYDGKTIEVQNPATGEVLANVACMGNRETADAITSANTTFYTWSKLTASERSKALRKWHDLLMSHKEELALLMTLEQGKPMKEALGEVNYGASFIEFFAEEAKRVYGDIIPPTLADRRLLVLKQPIGVVGAITPWNFPLAMITRKVGPALACGCTVVVKPSEFTPLTALAAADLALXAGIPAGALNVVMGNAPEIGDELMQSTQVRKIAXTGSTAVGKKLMAGSANTVKKVSLELGGNAPCIVFDDADIDVARKGSLAAQXRTGEQTFVCSTRXLVQKGILQKIRKVFWQSVVQNLKFG

SEQ ID NO: 8751 - protein, 157 aa, Glycine max
MEPMDIVGKSKEDASLPKATMTKIIKEMLPPDVRVARDAQDLLIECCVEFINLVSSESNEVCNREDKRTIAPEHVLKALQVLGFGEYVEEVYAAYEQHKLETMQDSLRGGGKWSNGAEMTEEEALAEQQRMFAEARARMNGGAIASKQPDADQSLDS

SEQ ID NO: 8752 - protein, 92 aa, Glycine max
  unsure (1)..(92): unsure at all Xaa locations
MSLSSIARRLCCSRQSSTSRLSVVLARLHSTEAAKDTXAKRYKYPEVYDPYGPMPPASEKVVGLADRIAALPPEEIKQIAPALLLRLNQPAP

SEQ ID NO: 8753 - protein, 319 aa, Ralstonia solanacearum
MTQLDQLKQFTTVVADTGDFQAMRAYAPHDATTNPSLILKAVQKAEYRPLLEQAVRDARSDSVEDIIDAVLVAFGCEILSIIPGRVSTEVDARLSFDTAATVAKARHLIALYEARGVPRERVLIKIASTWEGIRAADQLRAEGIRCNMTLLFSLIQAVACAEAGVQLISPFVGRIYDWYKKDAGAAWDPIAQGGANDPGVQSVVRIYNYYKRFGYTTEVMGASFRNTSQIIELAGCDLLTISPELLAQLQQSDAPVERKLSPEHAHATNLVRLPADEAAFRWHMNADAMATEKLAEGIRLFAADAVKLEGLIGPLRAAA

SEQ ID NO: 8754 - protein, 294 aa, Saccharomyces cerevisiae
TTPLVHVASVEKGRSYEDFQKVYNAIALKLREDDEYDNYIGYGPVLVRLAWHTSGTWDKHDNTGGSYGGTYRFKKEFNDPSNAGLQNGFKFLEPIHKEFPWISSGDLFSLGGVTAVQEMQGPKIPWRCGRVDTPEDTTPDNGRLPDADKDADYVRTFFQRLNMNDREVVALMGAHALGKTHLKNSGYEGPWGAANNVFTNEFYLNLLNEDWKLEKNDANNEQWDSKSGYMMLPTDYSLIQDPKYLSIVKEYANDQDKFFKDFSKAFEKLLEDGITFPKDAPSPFIFKTLEEQGL

SEQ ID NO: 8755 - protein, 105 aa, Zea mays
AVDKAQPNPRLCFLLRAALHLHWLLLVTSKNNKALQMSVQDANMSSDTDMSKVFEDRTFVSSILNSLPGVDPNDPSVKDLLASLHSQGEQEKKEDTSDKTEDEKN

SEQ ID NO: 8756 - protein, 121 aa, Glycine max
  unsure (1)..(121): unsure at all Xaa locations
KPIDIXGKAKEDASLPKATITKIIKEILPPNIHITRDTQDLLIKYYIKFINLISSESNKVYNKEEKRTITPKHIXRTVKILKFSEYIREGDTAYEQHKVKTMQHSXKDAEKNNRPEXTEEE

SEQ ID NO: 8757 - protein, 323 aa, ASPERGILLUS NIDULANS FGSC A4
MADQDVDLDSIIDRLLEVRGSRPGKQVQLLESEIRYLCTKAREIFISQPILLELEAPIKICGDIHGQYYDLLRLFEYGGFPPEANYLFLGDYVDRGKQSLETICLLLAYKIKYPENFFVLRGNHECASINRIYGFYDECKRRYNIKLWKTFTDCFNCLPIAAIIDEKIFTMHGGLSPDLNSMEQIRRVMRPTDIPDCGLLCDLLWSDPDKDITGWSENDRGVSFTFGPDVVSRFLQKHDMDLICRAHQVVEDGYEFFSKRQLVTLFSAPNYCGEFDNAGAMMSVDESLLCSFQILKPAEKKQKYVYGAMSSGRPITPPRKQKK

SEQ ID NO: 8758 - protein, 216 aa, Daucus carota
MAAPPARPRADYDYLIKLLLIGDSGVGKSCLLLRFSDGSFTTSFITTIGIDFKIRTIEMDGKRIKLQIWDTAGQERFRTITTAYYRGAMGILLVYDVTDESSFNNIRNWIRNIEQHASDNVNKILVGNKADMDESKRAVPTSKGQALADEYGIKFFEASAKTNMNVEEVFFSIAKDIKQRLAETDSKTEPQTIKINQQEQGAGTSAASQKSACCGS

SEQ ID NO: 8759 - protein, 168 aa, Avena clauda
VMASSATSVAPFQGLKSTAGLPVSRRSASSLGSVSNGGRIRCMQVWPTEGIKKFETLSYLPPLSEEALLKQIDFLIRSKWVPCLEFSKVGFIFREHGSTPGYYDGRYWTMWKLPMFGCTDASQVIKEVEEVKKEYPDAYVRIIGFDNIRQVQCVSFIAFKPPGCEESG

SEQ ID NO: 8760 - protein, 459 aa, Mesorhizobium loti MAFF303099
MLNQSNELNAWDRDHFFHPSTHMGTHARGESPTRIMAGGEGVTVWDNNGRKSIDAFAGLYCVNVGYGRQKIADAIATQAKNLAYYHAYVGHGTEASITLAKMIIDRAPKGMSRVYFGLSGSDANETNIKLIWYYNNVLGRPEKKKIISRWRGYHGSGVMTGSLTGLDLFHNAFDLPRAPVLHTEAPYYFRRTDRSMSEEQFSQHCADKLEEMILAEGPETIAAFIGEPILGTGGIVPPPAGYWEKIQAVLKKYDVLLVADEVVTGFGRLGTMFGSDHYGIKPDLITIAKGLTSAYAPLSGVIVADRVWQVLVQGSDKLGSLGHGWTYSAHPICVAAGVANLELIDEMDLVTNAGETGAYFRAELAKAVGGHKNVGEVRGDGMLAAVEFVADKDDRVFFDASQKIGPQVATALAASGVIGRAMPQGDILGFAPPLCLTREQADIVVSKTADAVKSVFANL

SEQ ID NO: 8761 - protein, 362 aa, Zygosaccharomyces bailii
MSKNIVVLPGDHVGQEIAQEAIKVLEAISEVSPKAKFNFQHHLIGGSAIDATGSPLPDEALAAAKKADAVLLGAVGGPKWGTGAVRPEQGLLKIRKELQLYANLRPCNFASESLLELSPLKPQHARGTDFIVVRELVGGIYFGQRKEDDGDGVAWDSERYTKPEVQRITRMAAFLALQHNPPLPIWSLDKANVLASSRLWRKTVEETIKNEFPQLTVKHQLIDSAAMILIKNPTQLNGIIITSNMFEDIISDEASVIPGSLGLLPSASLASLPDTNEAFGLYEPCHGSAPDLPKGKVNPVAMILSAAMMLKLSLNMAKEGEALETAVKQVLDSGVRTGDLGGSNSTSEVGDAIAKAVKQILA

SEQ ID NO: 8762 - protein, 168 aa, Avena clauda
VMASSATSVAPFQGLKSTAGLPVSRRSASSLGSVSNGGRIRCMQVWPIEGIKKFETLSYLPPLSEEALLKQIDFLIRSKWVPCLEFSKVGFIFREHGSTPGYYDGRYWTMWKLPMFGCTDASQVIKEVEEVKKEYPDAYVRIIGFDNIRQVQCVSFIAFKPPGCEESG

SEQ ID NO: 8763 - protein, 497 aa, Mesorhizobium loti MAFF303099
MSAHFARSHRHEALDRLADRRLLRELAYVDGHWTASEAAESFEVTDPATGSTVAFVAALDARQTTQAIDAAALAFPAWRSLLPQERSRILRKWFELIITAKDDLALLMTLEQGKPLQESLGEIDYAASFVEWYAEEAKRLNAESVTSHLANAEMMVRREPLGVVGIVTPWNFPSAMLTRKAAAALAAGCTIVAHPSSETPLSALALAELGERAGLPAGVFNIVTGKAATIVGRMCEDTRVRAMSFTGSTEIGRLIAAQSAPTMKRLVMELGGHAPLIVFADADLDKAVSIAIDAKFATSGQDCLAANRIYVQRPIHDRFCAAFAKRIEALRTGNGLDDMTDIGPLLHERAVQKVEEQVADALAHGARCLAGGKRHQAGPLFYQPTLLADVSDAALIMREETFGPVAAVTPFDSEDEVIARANATEYGLVAYVVTDNGARQQRMGRALDYGMVAINRVKITGAPIPFGGVKQSGIGREGSRHGLEAFTDLKYLCLDVA

SEQ ID NO: 8764 - protein, 121 aa, Prunus persica
VEACKNSLKKLQLDYLDLYLVHYPLATKHSGVGTTASLLDENKVLDIDVTVSLETTWHDMEKTVSLGLVRSIGLSNYELFLTRDCLSYAKIKPQVSQFETHPYFQRESLVRFCKKHGVVPM

SEQ ID NO: 8765 - protein, 44 aa, Triticum aestivum
MDTAVSTLTALAIFASTVEHAAYRSVHGYRVVGRKRGGWVRWER

SEQ ID NO: 8766 - protein, 243 aa, Aegilops tauschii
MKTLLILTILAMAITIGTANMQVDPSSQVQWPQQQPVPQPHQPFSQQPQQTFPQPQQTFPHQPQQQFPQPQQPQQQFLQPQQPFPQQPQQPYPQQPQQPFPQTQQPQQLFPQSQQPQQQFSQPQQQFPQPQQPQQSFPQQQPPFIQPSLQQQVNPCKNFLLQQCKPVSLVSSLWSMIWPQSDCQVMRQQCCQQLAQIPQQLQCAAIHTVIHSIIMQQEQQEQQQGMHILLPLYQQQQVGQGTL

SEQ ID NO: 8767 - protein, 168 aa, Avena maroccana
VMASSATSVAPFQGLKSTAGLPVSRRSNAGLGSVSNGGRIRCMQVWPIEGIKKFETLSYLPPLSEEALLKQIDFLIRSKWVPCLEFSKVGFIFREHGSTPGYYDGRYWTMWKLPMFGCTDASQVIKEVEEVKKEYPDAYVRIIGFDNIRQVQCVSFIAFKPPGCEESG

SEQ ID NO: 8768 - protein, 243 aa, Aegilops tauschii
MKTLLILTILAMAITIGTANMQVDPSGQVQWPQQQPVPQPHQPFSQQPQQTFPQPQQTFPHQPQQQFPQPQQPQQQFLQPQQPFPQQQQQPYPQQPQQPFPQTQQPQQLFPQSQQPQQQFPQPQQQFPQAQQPQQSFPQQQPPFIQPSLQQQVNPCKNFLLQQCKPVSLVSSLWSMIWPQSDCQVMRQQCCQQLAQIPQQLQCAAIHTVIHSIIMQQEQQEQQQGMPILLPLYQQQQVGQGTL

SEQ ID NO: 8769 - protein, 207 aa, Daucus carota
MERADQQARGFQGYRKIHQQQQLPASGTASTGTDNNPAAGDQDCLVREQDRFMPIANVIRLMRKSIPSHAKISDDAKELVQESVSEFISFVTSEANYRCQKEQRKTITAEDVLWAMSSLGFDDYVEPLTFYLDRFREADGGERSALRGEPLVRRSGEHGAPGIPPTFAPGYYMGPHNALLGAVTMGSFVNDVHNAGPSGAGVNTLDP

SEQ ID NO: 8770 - protein, 199 aa, Aegilops tauschii
PQPHQPFSQQPQQTFPQPQQTFPHQPQQQFPQPQQPQQQFLQPQQPQQPYPQEPQQPFPQTQQPQQLFPQSQQPQQQFPQPQQQFPQPQQPQQSFPQQQPPFIQPSLQQQVNPCKNFLLQQCKPVSLVSSLWSMIWPQSDCQVMRQQCCQQLAQIPQQLQCAAIHTVIHSIIMQQEQQQGMHILLPLYQQQQVGQGTLV

SEQ ID NO: 8771 - protein, 200 aa, Triticum aestivum
DIMEQEVGVLLSRLRYIQSTLFHTHVTYLEFLDRVHSSELKLRAQGLWEVPHPWLNLLIPRSTIHRFATEVFGNILKDSNNGPILLYPVNRSKWDNRTSVVIPEEEIFYLVGFLSSAPSASGHGSVDHAVSLNDKILDFCDKAGVGMKQYLAPYTTQQQWKAHFGARWETFERRKHMYDPLAILAPGQRIFAKASLPMSS

SEQ ID NO: 8772 - protein, 304 aa, Glycine max
  unsure (1)..(304): unsure at all Xaa locations
MALNYNIALAFSTVLTLLLLPLPTLGELVQEQPLVLKYHNGQLLKGRITVNLIWYGTFTPIQRSIIVDFINSLSSAPNAPLPSTATWWKTTEKYKGGGSSALVVGKQFLHSAYSLGKNLKGKDVLALASKFNELKSITVVLTAKDVAVEGFCMSRCGTHGSTRNVKNAARTAYIWVGNSETQCPGQCAWPFHQPIYGPQTPPLVAPNGDVXGVDGMVINLATLLAGTVTNPFNNGYFQGPPTAPLEAVSACTGVFGSGSYPGYPGRVLVDKATGASYNAHGANGRRYLVPAMWDPQTSTCKTLV

SEQ ID NO: 8773 - protein, 222 aa, Zea mays
  unsure (1)..(222): unsure at all Xaa locations
MDWAYYGSGYSTPASGGGGGDEDAYMTVSSAPPKRRAGRTKFKETRHPVYKGVRSRNPGRWVCEVREPHGRQRIWLGTFETAEMAARAHDVAALALRGRAACXNFADWARKLRVRAQGAGHDEIRRAAVEAAELFRPQPGERNVGGSEAAAEAAAAAPCAMGSGDLGGGEFPYYPVDDGLEFEMRGYLDMAQGMLIDPPQPAAGQSAWIEDEYECEVSLWSY

SEQ ID NO: 8774 - protein, 476 aa, Lycopersicon esculentum
FYNFSKKLQGMAKTNGFMGHDMLAPFTAAWMIDMGPLVIDKAEGSYVYDVNGKKYLDSLSGLWCSVLGGSEPRLIEAANKQLNKLAFYHSFWNRTTKPSLDLAKELINMFTANKMGKVFFTSSGSEANDTQVKLVWYYNNAIGRPNKKKIISRKNAYHGSTYMTAGLSGLPSLHLKFDLPPPYILHTDCPHYWNYHLPGETEEEYSTRLANNLENLILKEGPETVAAFIAEPVMGGAGVIIPPATYFEKIQAVLKKYDILFIADEVICGFGRLGTMFGCDKYNIKPDLVSIAKALSGGYIPIGAVLVSEEISKVIMSQSNQLGVFCHGFTYSGHPVACAVALEALKIYKEKNITEVVNKLSPKFQEGLKAFIDSPIIGEIRGTGLVLSTEFVDNKSPNDPFPPEWGVGTYFGSQCQKHGMLVSFSGDHVNMAPPFTLSLEELDEMISIYGKALKDTEKKKKKKKKKKKKKKKKKKK

SEQ ID NO: 8775 - protein, 166 aa, Burkholderia cepacia R1808
MWLTGVSGAGKSTLASLLKLQLDALGHRTYLLDGDTLREGLNRDLGFSDADRRENIRRTAEVARLMTDAGFIVIAALISPFADARAQARARFAPGTFVEVFVDVALEVAEARDPKGLYVLARRGTIQQFTGIGSPYEQPESPEVHVRTAEASPDACVAEIMRQLPL

SEQ ID NO: 8776 - protein, 401 aa, Triticum aestivum
MVLESTMICIDNSEWMRNGDYSPSRFQAQADAVNLICGAKTQSNPENTVGVMTMAGKGVRVLVTPTSDLGKILACMHGLEVGAEANLAAAIQVAQLALKHRQNKRQQQRIIVFIGSPVTYDKKVLETIGKKLKKNNVALDVVDFGETDDEKPEKLEALIAAVNSSDSSHIVHVPPGDHALSDVLISTPIFTGEEGGSGFAASAAAAAATGATGYDFGVDPNVDPELALALRLSMEEERARQEAIAKKAAEDNKDQASSSTDAIMAEAELTLNAPADVDADLLKDDDDAQLLQQALAMSMDEGASGAAAVADAAMAEAAADDQDLALALQMSVQDAEVAGQSDMSKVFEDRSFVTSILNSLPGVDPNDPSVKDLLASLHGQGEQEEKKDKEDKPDKPEDGKN

SEQ ID NO: 8777 - protein, 378 aa, Sulfolobus tokodaii str. 7
MSVEVSRGLENVIIKTTGLTYIDGINGILRYRGYDINDLVNYASYEELIHLMLYGELPNRQQLNQIKGIINESFEVPEQVISTIFSMPRNCDAIGMMETAFGILASIYDPKWNRATNKELAVQIIAKTATITANIYRAKEGLKPKIPEPSESYAESFLAATFGKKPTQEEIKAMDASLILYTDHEVPASTTAALVASSTLSDMYSCIVAALAALKGPLHGGAAEEAFKQFVEIGSVENADKWFEEKIIKGKSRLMGFGHRVYKTYDPRAKIFKTLAKSFAEKNENVKKYYEIAERIEKLGVDTFGSKHIYPNTDFYSGIVFYALGFPIYMFTSLFALSRVLGWLAHIIEYVEEQHRLIRPRALYIGPEKREFKPIELR

SEQ ID NO: 8778 - protein, 140 aa, Zea mays
  unsure (1)..(140): unsure at all Xaa locations
SLPKESDASARRTRRGSGTSLSGRPPRTCGSDFSYRXLVESRHQRVAECRSRLARLILEQALHXVAGGLLLLLTMTNVAXENLLVELSMDAGFLAMELIQLRRMRTMSELLRFYTSLTSIAVCIHHVTCIMRSRVVTCRI

SEQ ID NO: 8779 - protein, 286 aa, Leuconostoc mesenteroides subsp. mesenteroides ATCC 8293
MSLVDTYKLTNGIEIPIIGFGTWQSANGTEAYQSVRWALEAGYRHIDTAAVYGNEDSVGRAIKDSGIPRDELFVTTKLWNDAHTYERAIQALDTSLSKLGLDYVDLYLIHWPNPAALQKQGKDAWIDANADTWRALEDEYKIGKTTAIGVSNFQIEHLEALAKTQTIAPMVNQNFLNPSDNQQELVDYDKDHGMLNEAYSPLGTGKLVDLPQVVSLSEKYNKSVPQILIRWSLDKGFLPLPKSTHETYIKANADVFDFALTSAEIESLDSLTGVGGFHTDASSADF

SEQ ID NO: 8780 - protein, 196 aa, Triticum aestivum
MEGGDARNGLTGTSQTTGSGVESPAKPLPPCCVKARAAAPESEAKCHATVVSGWFTETRSRCGKASKLQYYNNPMWPGETHSLKVDKILYQGKSPYQEVLIFESLTYGKVLVLDGIVQLTDKDECAYQEMITHLPLCSIPSPKKVLVIGGGDGGVLREIARHGSVESIDICEIDQLVIDVCKDFFPDLSVGFEDPR

SEQ ID NO: 8781 - protein, 130 aa, Glycine max
MAYGRSRASSVLDGFTLNPLPYPVLLILSLIFIFLGVSWYFSYEEVVETAEQQLGWLLFCTPVVLILIVRWLSSMENPYWFFSASLPGERRGRTHQGLSEGSSPWGVAALILVLLIMVQYQSNFLDSWFV

SEQ ID NO: 8782 - protein, 497 aa, Geobacillus thermoleovorans
MTMISAQTTEADLWIDGEWRPAASGERFDVIDPATGEVTARVANAGEDDVDAAVAIAEEAFSVRRWLAISPLERGRILRRIAELIRQHHCELAQLMTRENGMPINLALFIEIPLADCFDFFASLVVKPQGEVLPFSVAGSAPDYMAWTMKEPIGVAGLITPWNFPLLMPTWKIAPALAAGCTMVVKPAPETPLTALKLAEICHEAGVPEGVINVLPGLDEAGKALVRHPRVPKIAFTGETETGRHILQAAAPHIKRVTLELGGKSPNIIFADADLEQAAKSALFGVFYNSGQVCQAGSRILVERTVYEPFVERLAERAKKLKVGPGTNPRSDLGPVISREQYEKVLRYIEIGKQEGARLAAGGRALDGGGGGYFIEPTVFADVSPSMRIACEEIFGPVAAVIPFADEEEAVRIANGTMYGLAAAVWTNDIKRALRLARRVKSGTVWLNTYQVLSPTVPFGGYKQSGLGRELGMQALDAYLETKTVICDLNDRPMTLF

SEQ ID NO: 8783 - protein, 48 aa, Zea mays
IAIILAIILPPLGVFLKFGCGVGFWICLILTFLGYFPGLIYAAWAITK

SEQ ID NO: 8784 - protein, 129 aa, Brassica napus
EVGLDNGKVYKHGKCWEDICYAVSEAHHMIYIVGWSVFHKVRLVREPTRKLPRGGDLTLGELLKYKSEEGVRVLLLVWDDKTSHDKFGISTPGVMGTHDEETRKFFKHSSVICVLSPRYASSKLGLFKT

SEQ ID NO: 8785 - protein, 142 aa, Thermotoga maritima
MLLGRREDIFRPFRELQREIDRLFDDFFRTEVRPAPDMDVFETDDEVVIEVEIPGIDRKDVQITVEENILKISGEKKLEREQKGKNYYYVERSAGKFERAIRLPDYVDVEKIKAEYKNGVLTIRVPKKEERKKKVIEVEVQE

SEQ ID NO: 8786 - protein, 141 aa, Brassica napus
MGEAVEIMFGNGFPEIHKDTSPIQTLLSNQQDCHWYEETIDDDLKWSFALNSVLHTGTSEYQEIALLDTKHFGKVLVIDGKMQSAERDEFIYHECLIHPALLFHPNPKTVFIMGGGEGSAAREILKHKTIEKVVMCDIDQE

SEQ ID NO: 8787 - protein, 159 aa, Zea mays
MADLFQEVFNPTNMDGAMKSMTSTGAGNYGRIMQMEKYWHVEFFSIAESTVIQVVLLVAVGDLKGTTVQIMSRSLEGKLTVCSCMFQEKGNDATISNASADGTMDESRTRRTIIFSPKICNNVDLLVGNIIHIFPPWKEVKIQEEHVIICTYFSHHHRT

SEQ ID NO: 8788 - protein, 203 aa, Glycine max
  unsure (1)..(203): unsure at all Xaa locations
MLTAGEYSNHSRPLQPETSLAELNLPRVLCVLSSMLEKLVARNEKLVDILSQQLDGLNCGSVRLGNSLNTFHGVRAPSISIPKYLERIYKYTNCSPSCFVVGYVYIDRLTHRHPDSLVTSLNVHRLLVTSVMVASKMLDDEHYNNXIYARVGGXVSNAELNKLELELLFPVXIFRVMVSSRVFESYCFHLEKEVGCQWHGHED

SEQ ID NO: 8789 - protein, 484 aa, Erwinia carotovora subsp. atroseptica SCRI1043
MSGNHLQDHELFKTGYFVAGKWQQGAATFEVVNPATGESIARVAKAGKKETQAAIDAAHAAFPAWKRKTAKERSEILYRWYELILENKRYLAELMTAEQGKPVQEAEGEVVYAANFIQWFAEQGKRVNGEIIPPAKPGSKIYATREPVGVVVAITPWNFPLAMLTRKLGPALAAGCTGVIKPANNTPLSAFALLALAQQAGVPDGVLNGVAGDTQAISDTVMASDKVRKISFTGSTAVGKTLVRNAADTMKKVSMELGGNAPYIVFDDADIQAAVKGAIANRFRNAGQVCVSANRFYIQDGVYDEFVSLLAEEVKKLKVGNGMDDGVVLGPLIDEAAVEKVEKHVNDAVEKGGKALVGGKRHKLGHSFFEPTVIVDANEAMLLAQEETFGPVAPCFRFKTEEEVIQRANNTPFGLAAYFYSQNLQRVFRVAEALESGMIGINECAVSTELAPFGGVKESGLGREGSVLGLDEFLEVKTWHVGGL

SEQ ID NO: 8790 - protein, 281 aa, Zea mays
  unsure (1)..(281): unsure at all Xaa locations
MEAMPRPSVAPSLQLQARPCPRWPRRKHCPPSSVASRRVACSASAADADVVDLFDAAKLTVDKFVTSGMVVGLGSGPASALAIQYLATRLRRGSLAGITAVTXPRSVLSASEADKAGIRANSYQEGTXIDFAFTDAEAIEEGTLAAVIGRRKTESGEPSFMAEKAMAKSAHKLAFITGNDKYVTTGVEGSIPVLIKKVWRRPSFGTAGPLGGDHPLVTKEGHHVLDVIFTTPIQDLGQVAEKLDKVDGVVDHGIICSNQPYAVIASKGEVQVLDEKSSVIQ

SEQ ID NO: 8791 - protein, 290 aa, Triticum aestivum
NKFVQKSRLVPVRNSRDIVDPRVRTGSTKVGQMVQQQVSARFGKCLLELSGNNAIIVMDDADIPLAVRSVLFAAVGTAGQRCTTCRRLLLHESIYQTFLDQLVEVYKQVRIGDPMEKGTLLGPLHTTASKESFLKGIQNIRSQGGKILLGGSAIESEGNFVQPTIVEISPAAPVVREELFGPVLYAMKFQTLKEAIEINNSVPQGLSSSIFTRKPDAIFKWIGPHGSDCGIVNVNIPTNGAEIGGAFGGEKATGGGREAGSDSWKQYMRRATCTINYGSELPLAQGINFG

SEQ ID NO: 8792 - protein, 166 aa, Triticum aestivum
RIMKKALPANAKISKDAKETVQECVSEFISFITGEASDKCPHENRPRVRPRVLLWAMTTLGFEDYVDPLKHYLHKFREIEGERAAATSTSTSTTPDMPRNNNNNATGYADAPGGMMMMGQPMYGSPPPPQQQQQHQHQIAMGGRAGFPYLGGGGGSSSSSGFGRKE

SEQ ID NO: 8793 - protein, 163 aa, Triticum aestivum
VPDCWGIQQLFPMMPVSRLHERPTNMATLIDLTCDSDGKVEKFIRGAQTLPLHPLDPKLGGYYVGVLLSGAYQEALSSKHNLFGGPSIVRVDESGGIVTADLGATTEELISTMRYDVNQDILDVIHERAEEHGVWKMVGEIVKAGLTTMPYLIEYQVPLPGTA

SEQ ID NO: 8794 - protein, 474 aa, Shigella flexneri 2a str. 301
MQHKLLINGERVSGEGEKQPVYNPATGDVLLEIAEVSAEQVDAAVRAADAAFAEWGQTTPKARAECLLKLADVIEENGQVFAELESRNCGKPLHSAFNDEIPAIVDVFRFFAGAARCLNGLAAGEYLEGHTSMIRRDPLGVVASIAPWNYPLMMAAWKLAPALAAGNCVVLKPSEITPLTALKLAELAKDIFPAGVINILFGRGKTVGDPLTGHPKVRMVSLTGSIATGEHIISHTASSIKRTHMELGGKAPVIVFDDADIEAVVEGVRTFGYYNAGQDCTAACRIYAQKGIYDTLVEKLGAAVATLKSGAPDDESTELGPLSSLAHLERVSKAVEEAKATGHIKVITGGEKRKGNGYYYAPTLLAGALQDDAIVQKEVFGPVVSVTPFDNEEQVVNWANDSQYGLASSVWTKDVGRAHRVSARLQYGCTWVNTHFMLVSEMPHGGQKLSGYGKDMSLYGLEDYTVVRHVMVKH

SEQ ID NO: 8795 - protein, 126 aa, Nostoc punctiforme PCC 73102
MYEIMFQNHPEVKEQFSMAAQADGSQPARLATAVYSYANQIDNLPALKSMVEKIAHRHVQTHVTPEQYPIVGESLLQAMKDVLGEAATEEVMAAWTEAYQALSEVFIHREHDIYVGEDKKAQLLHS

SEQ ID NO: 8796 - protein, 319 aa, ASPERGILLUS NIDULANS FGSC A4
MSPPTVKLNSGYDMPLVGFGLWKVNNDTCADQVYEAIKAGYRLFDGACDYGNEVEAGQGVARAIKEGIVKRSDLFIVSKLWNSFHDGERVEPIARKQLSDWGIDYFDLYIVHFPVSLKYVDPEVRYPPGWENAEGKVELGKATIQETWTAMESLVDKGLARSIGISNFSAQLLLDLLRYARIRPATLQIEHHPYLTQERLVTFAQREGIAVTAYSSFGPLSFLELSVKQAEGAPPLFEHPVIKDIAEKHGKTPAQVLLRWATQRGIAVIPKSNNPARLLQNLDVVGFDLEDGELKAISDLDKGLRFNDPPNYGLPITIF

SEQ ID NO: 8797 - protein, 490 aa, Oryza sativa (japonica cultivar-group)
MEKLLEEFPIDFPGRMKMIQDNATNEEDKTYMVATSKADYVLRIALQMVNSKSKRNSNPLLPQDSSTPVNLQRQHRVAGHNNGLVIMQPHHKQASDGMVMTKDGHMLDQGSSINTRNGSIDRISNLPNELLYAIMSTLPALELVYTGMLSTRWRHLWTSSAYLNIDVNQFGRHRGQKFCNFVNRMLRQRGSSLLDALRLHSADTRDAGSWITYAIKRSSKVVEFSEDIDCEPFKLDYGVVDFTSICLKFLVLNNVCIDANVFYPINSSCPALENLELRDCSLEVPEISSGSLLHLDIDNCCLFEDLLISSSSLMSLCIKNPQHRAPMIMTLPCLEVAIVILDEFFHSTDDLADMDEGEEQDGEEINHGIVSGLTKARSIELIAPLREDKFEMEIWTSPMFDNLISLTLGEWCMSNEFSPLLHFLWYSPLLEDLTLKLNMEVCEYCLQEPPTAPPLVKEFTADYLKKITIYFWLGDERGAKNYKVMKRMEH

SEQ ID NO: 8798 - protein, 204 aa, Aegilops tauschii
PQPHQPFSQQPQQTFPQPQQTFPHQPQQQFPQPQQPQQQFLQPQQPFPQQPQQPYPQEPQQPFPQTQQPQQLFPQSQQPQQQFPQPQQQFPQPQQPQQSFPQQQPPFIQPSLQQQVNPCKNFLLQQCKPVSLVSSLWSMIWPQSDCQVMRQQCCQQLAQIPQQLQCAAIHTVIHSIIMQQEQQQGMHILLPLYQQQQVGQGTLV

SEQ ID NO: 8799 - protein, 121 aa, Pediococcus pentosaceus ATCC 25745
MALDKDQFIEDLKGASITDLNDLVKAIEDEFGVSAAAPVAAAGAAGGAAEAKTSFNVELTSGGSAKIKVIKAVREITGAGLKDAKDMVDNAPSVIKEDVSEDEANELKAKLEEAGATVEVK

SEQ ID NO: 8800 - protein, 116 aa, Brassica napus
MEQCLRKRDVVREDRISSLPEPLILQILSLLPTKLVIATSVLSKRWRSVWKKVPILQFESKGNIQKFSENVSMSLLSHKSPVLETLHLKVNDRCEDVYIGIWAGIAVTRHVRELEL

SEQ ID NO: 8801 - protein, 448 aa, Burkholderia cepacia R18194
MSTPATDDWVARSLRAVWHPCTQMKHHERLPLIPVARGAGLWLYDRDGRRYFDAISSWWVNLFGHANPDINAALKDQLDTLEHAMLAGCTHEPAIELAERLHTLTARTLGHAFFASDGASAVEIALKMSFHAWRNRGRANKQEFVCVANSYHGETIGALGVTDVALFKDAYDPLIRHAHVVASPDARGALAGETAADVAGRALADVRRLFVERGDRIAALIVEPLVQCAAGMAMHDPSYVRGLRALCDEFGVHLIADEIAVGCGRTGTFFACEQAGVWPDFMCLSKGISGGYLPLSLVLTRDDVFNAFYDDDTTRGFLHSHSYTGNPLACRAAVATLDLFERDDVIAANARKSATLRAALAPLDAHPQVRHLRERGTLFAFDVALDGDGARGFSRRFFERALERELLLRPIGTTVYLMPPYVMSDDDIAWLAQSTRDTLDATLEDITR

SEQ ID NO: 8802 - protein, 206 aa, Aegilops tauschii
PQPHQPFSQQPQQTFPQPQQAFPHQPQQQFPQPQQPQQQFLQPQQPFPQQPQQPYPQQPQQPFPQTQQPQQLFPQSQQPQQQFPQPQQQFLQAQQPQQSFPQQQPPFIQPSLQQQVNPCKNFLLQQCKPVSLVSSLWSMIWPQSDCQVMRQQCCQQLAQIPQQLQCAAIHTVIHSIIMQQEQQEQQQGMPILLPLYQQQQVGQGTL

SEQ ID NO: 8803 - protein, 106 aa, Triticum aestivum
MSGVWVFKNGVVRLVENPGSERTSTVRRKALLHTPSGQVVSSYATLEAKLTALGWERYYEDPALYQFHKRGCLALISLPRDFNHFSSVHMYDVVIKNRESFRVVDA

SEQ ID NO: 8804 - protein, 268 aa, Burkholderia cepacia R1808
MSKIPAFGLGTFRLQGQVVIDSVRNGLELGYRAIDTAQIYGNEAEVGAAIAASGVRREDLFVTTKIWVDNYAPDKLAASLEDSLRKLRTDYVDLTLIHWPAPDNGVSVDAFMTALADAKSKGLTREIGVSNFNIALTKEAIAAVGSDAIATNQIELSPYLQNRKLVEFLQSERIHVTSYMTLAYGKVLGDPVLDAIARRHRATPAQVALAWALQLGYSVIPSSTKREHLASNLLAQTLRLTDEDLAQIATLERNGREVDPAGLAPQWD

SEQ ID NO: 8805 - protein, 203 aa, Aegilops tauschii
PQPHQPFSQQPQQTFPQPQQTFPHQPQQQFPQPQQPQQQFLQPQQPFPQQPQQPYPQEPQQPFPQTQQPQQLFPQSQQPQQQFPQPQQQFPQPQQPQQSFPQQQPPFIQPSLQQQVNPCKNFLLQQCKPVSLVSSLWSMIWPQSDCQVMRQQCCQQLAQIPQQLQCAAIHTVIHSIIMQQEQQQGMHILLPLYQQQQVGQGTL

SEQ ID NO: 8806 - protein, 230 aa, Zea mays
  unsure (1)..(230): unsure at all Xaa locations
MLRSSFRLLYMTRTNLLVRASPSSLSRLPSKFTSAKPLVSSHHQIPLSTTGAKLSRSEHSMAASSEPKSIYDFTVKDAKGNDVDLSTYKGKVLLIVNVASQCGLTNSNYTELAQLYQKYKDHGFEILAFPCNQFGNQEPGSNEEIVQFACTRFKAEYPIFDKVDVNGDSAAPIYKFLKSSKGGLFGDGIKWNFAKFLVDKDGNVXDRYAPTTSPLSIEKDLKKLFGSYCR

SEQ ID NO: 8807 - protein, 508 aa, Phleum pratense
SSCEVALSYYPTPLAKEDFLRCLVKEIPPRLLYAKSSPAYPSVLGQTIRNSRWSSPDNVKPIYIVTPTNASHIQSAVVCGRRHGVRIRVRSGGHDYEGLSYRSLQPEEFAVVDLSKMRAVWVDGKARTAWVDSGAQLGELYYAIHKASPVLAFPAGVCPTIGVGGNFAGGGFGMLLRKYGIAAENVIDVKLVDANGTLHDKKSMGDDHFWAVRGGGGESFGIVVAWKVRLLPVPPTVTVFKIPKKASEGAVDIINRWQVVAPQLPDDLMIRVIAQGPTATFEAMYLGTCQTLTPMMSSKFPELGMNASHCNEMSWIQSIPFVHLGHRDNIEDDLLNRNNTFKPFAEYKSDYVYEPFPKEVWEQIFSTWLLKPGAGIMIFDPYGATISATPEWATPFPHRKGVLFNIQYVNYWFAPGAGAAPLSWSKEIYNYMEPYVSKNPRQAYANYRDIDLGRNEVVNDVSTFSSGLVWGQKYFKGNFQRLAITKGKVDPTDYFRNEQSIPPLIQKY

SEQ ID NO: 8808 - protein, 389 aa, Salmonella typhimurium
MTDTTILQNNTHVIKPKKSVALSGVPAGNTALCTVGKSGNDLHYRGYDILDLAEHCEFEEVAHLLIHGKLPTRDELNAYKSKLKALRGLPANVRTVLEALPAASHPMDVMRTGVSALGCTLPEKEGHTVSGARDIADKLLASLNSILLYWYHYSHNGERIQPETDDDSIGGHFLHLLHGEKPTQSWEKAMHISLVLYAEHEFNASTFTSRVIAGTGSDVYSAIIGAIGALRGPKHGGANEVSLEIQQRYETPDEAEADIRKRVENKEVVIGFGHPVYTIADPRHQVIKRVAKQLSEEGGSLKMYHIADRLETVMWETKKMFPNLDWFSAVSYNMMGVPTEMFTPLFVIARVTGWAAHIIEQRQDNKIIRPSANYTGPEDRPFVSIDDRC

SEQ ID NO: 8809 - protein, 508 aa, Phleum pratense
SSCQVAFSYFPPPAAKEDFLGCLVKEIPPRLLYAKSSPAYPSVLGQTIRNSRWSSPDNVKPLYIITPTNVSHIQSAVVCGRRHSVRIRVRSGGHDYEGLSYRSLQPETFAVVDLNKMRAVWVDGKARTAWVDSGAQLGELYYAIYKASPTLAFPAGVCPTIGVGGNFAGGGFGMLLRKYGIAAENVIDVKLVDANGKLHDKKSMGDDHFWAVRGGGGESFGIVVAWQVKLLPVPPTVTIFKISKTVSEGAVDIINKWQVVAPQLPADLMIRIIAQGPKATFEAMYLGTCKTLTPLMSSKFPELGMNPSHCNEMSWIQSIPFVHLGHRDALEDDLLNRNNSFKPFAEYKSDYVYQPFPKTVWEQILNTWLVKPGAGIMIFDPYGATISATPESATPFPHRKGVLFNIQYVNYWFAPGAAAAPLSWSKDIYNYMEPYVSKNPRQAYANYRDIDLGRNEVVNDVSTYASGKVWGQKYFKGNFERLAITKGKVDPTDYFRNEQSIPPLIKKY

SEQ ID NO: 8810 - protein, 201 aa, Aegilops tauschii
PHQPFSQQPQQTFPQPQQTFPHQPQQQFPQPQQPQQQFLQPQQPFPQQPQQPYPQQPQQPFPQTQQPQQLFPQSQQPQQQFSQPQQQFPQPQQPQQSFPQQQPPFIQPSLQQQVNPCKNFLLQQCKPVSLVSSLWSMIWPQSDCQVMRQQCCQQLAQIPQQLQCAAIHTVIHSIIMQQEQQEQQQGMHILLPLYQQQQVGQ

SEQ ID NO: 8811 - protein, 455 aa, Arabidopsis thaliana
MKNSERFSAAKPLMEQGGKSSRKPGFMSEDRISELPEVLLLQILSSLPTKLVISTSVLSKRWLSLWKMVQRLEFESSRNIYDFAENVTRSLLSHKAPVLESLHLKVGDQFDGVYVGVWATIAFTRHVREFVLDLSSYHGPRVRFPTSLFCFDTLETLKLDYVYIYVPCPVSMKSLRTLHLLSVVYKGDESGHNLFASCPNLEHLVLRRGFFFDAVVNFIIDAPSLKTLLLSDPFSARESSRGYVIKAPSLKYLGIESVEGFEYFLIENVTELVEANIRNVSKIVNENILGSLKSAKRLSLDLSPLKITYPTEVMYHQLVYLEMHTHKVEWWNLLTHMLDSSPKLQVLKLIDRETRHENLEFDKKYKDQGKWNQPKYVPECLETFMWRNCNWGREEEKEVATYILRNARQLKKATFSTDPIEAKRLCKLAKRRKMREELDGVVMTSNSCHLVFEFE

SEQ ID NO: 8812 - protein, 348 aa, Agrobacterium tumefaciens str. C58
MQTRVARLYSREDIRVETQDVAPPGPGEVLLAMAAGGICGSDLHYYQDGGFGPVRVREPIICGHEASGHIAALGAGVSGLAIGQLVAVNPSQPCGHCQFCLKGQPIHCLDMRFMGSAMRLPHEQGMFRDRLVVPAKQCATFSDATSPAEAACTEPLAVCLHAVAQAGDLAGAKVLVTGAGPIGLLTIAAARQAGAGIIVATDLTDAALERAPAMGADRTINVAKDADALLPYQDNKGYFDVIFDCSAAGPALRSAFACVRPRGTIVQVGVTGDVTIPLNALVGKEIVWRGSQRFHDEFAIAAGLISSRKIDVRPIISHSFPLGDAKAAFEQAGDRSAACKVQLTFSAD

SEQ ID NO: 8813 - protein, 129 aa, Triticum aestivum
  unsure (1)..(129): unsure at all Xaa locations
MAPTVMAFTATTISLLGGLKAXAGLPFSLLSNGSLFRVSNGGRIRCMQVWPIEGIKKFETLSYLPPLSTEALLKQVDYLIRSKWVPCLEFRXVSFIFREHNNSPGYYYGRYWTMXNLPMFGCTYSIQVL

SEQ ID NO: 8814 - protein, 75 aa, Brassica napus
MPSKCEILCEILIAILLPPLGVCLTRGCCTVEFLACLILTILGYVPGIIYALYVIVFQNQEEYFDEARRPLYYSA

SEQ ID NO: 8815 - protein, 503 aa, Erwinia sp. Ejp 556
MLIFFIIHFKRITRKAMIGAMLSHGATDAGFPLILVFDKAVMMKNVSSAVAVSRNPATGEVFARYPFATIAEVDSALALTNGAFQYWRHSAMSDRVQLLRNVAGALRQQARELAEMMTSEMGKPVDQGLAEVEKSARLCEWYAEQGPAFLQREPTLVEGNKAFVDYLPLGPVLSVMPWNFPVWQVLRGAVPILLAGNSYLLKPAPNVMGCALLLQQILSRVGVPEGLFAVVNADNDGVAQAINDRRIAAVTVTGSVRAGAAIAALSGAAIKKCVLELGGSDAFIVLADADIDAAVKGAIAGRFMNNGQLCISAKRIIVEAPVFDAFRDKFVSAVKEMKIGDPRESGTWIGPMARYDLRDELDSQVQATLKEGATLLLGGHVLPGEGNYYAPTVLSDVKPGMTSFAQELFGPVASLIQADNAEHAVVMANDSEFGLGGSLWSRDLAVAQKLASRIETGGVFINSPSFSDPRVPIGGVKKSGFGRELSHFGLREFTNTQTVWMEE

SEQ ID NO: 8816 - protein, 431 aa, Thermoanaerobacter tengcongensis MB4
MRIVIKNGIVIDGFGGEEKADILINYGIIKGIDKNIDVSDAIVIDAEGKYVLPGFVDMHTHLRQPGFEEKETIRTGTESAAAGGFTTVACMPNTNPPIDSEVVVEYVKAVAQREGVVKVLPIGAMTKGMKGEEITEMAKLKKAGVVALSDDGFPIMSAGIMKRVMTYGKMYDLLMITHCEDKTLSGEGVMNSGIIATMLGLKGIPREAEEVMLARNIILAKATGAKLHIAHVSTKGSVELIRRAKEEGVSITAEVTPHHLTRTDEAVYNYDTNTKVFPPLRTREDVEALIEGLKDGTIDAIATDHAPHTKDDKKVPYDMAPFGISGLETAFSVINTFLIQTGIITMKALVNYMSMNPARILGISNGIRVGATADIVIVNPHEEYTVDKEKFKSKGKNTPYHGMKLKGVVEYTIVEGQIRYQKNKKFEKVEI

SEQ ID NO: 8817 - protein, 482 aa, Salmonella typhimurium LT2
MQLNDSTLFRQQAFIDGDWRDARGGDVIPVSNPANGKPLGNVPKMGAEETRDAINAANRALPAWRALTAKERANILRRWFNLMMEHQDDLARLMTLEQGKPLAEAKGEISYAASFIEWFAEEGKRIYGDTIPGHQADKRLLVIKQPIGVTAAITPWNFPSAMITRKAGPALAAGCTMVLKPASQTPFSALALAELAQRAGIPAGVFNVVTGSAGDIGGELTSNPLVRKLSFTGSTEIGRQLMEQCAKDIKKVSLELGGNAPFIVFDDADLDKAVEGALASKFRNAGQTCVCANRLYVQDGVYDRFAEKLNQAVNKLAVGDGLQADVAIGPLIDEKAVAKVQEHIADALEKGARVITGGEAHKLGGNFFQPTILADVPDNAKVAKEETFGPLAPLFRFSDEADVIRQANDTEFGLAAYFYARDLSRVFRVGEALEYGIVGINTGIISNEVAPFGGIKASGLGREGSKYGIEDYLEIKYMCIGL

SEQ ID NO: 8818 - protein, 172 aa, Arabidopsis thaliana
MAAAFASRLTRGGRSLLGGLNNGGSMNSSNGMMNESILSQQQRRTFIQMGTVLKVVDNSGAKKVMCIQALKGKKGARLGDTIVASVKEAMPNGKVKKGAVVYGVVVRAAMQRGRVDGSEVRFDDNAVVLVDSKDKNTKTDRQPIGTRVFGPVPHELRKKKHLKILALAQHVA

SEQ ID NO: 8819 - protein, 48 aa, Triticum aestivum
  unsure (1)..(48): unsure at all Xaa locations
DDLKLPTDDVLLGQIKXGFADGKDLILSVMSAMGEXQICXVKEIGGGK

SEQ ID NO: 8820 - protein, 428 aa, Chloroflexus aurantiacus
MTRNTLTVTDNRTGKTYEIPIENNTIRATDLRQIKVSEDDFGLMSYDPAYLNTASCKSSITYIDGDKGILEYRGYPIEQLAEQSSYLEVAYLLLYGELPSKERLAWWEYRISRHLFLHNSLVELIQAFRYDAHPMGILISSVAAMSTLYPEAKNIHDPAVREKQIWRIIGQIPTIAAFAYRHRIGRPFNLPDSSLSYTANLLYMMDYMNQREYEVNPVLAKALDVLFILHADHEQNCSTSVMRSVGSSHADPYNALAAAAAALYGPLHGGANEAVLRMLQQIGHPKNVPAFIERVKKGEMRLMGFGHRVYKNYDPRAKIIRKIAHEVFAATAANPLLDVAMELERTALEDEYFISRKLYPNVDFYSGLIYQALRFPIEYFPFLFAIPRASGWLAQWIEMLEDPEQKITRPRQVYVGPQRRDYVPIDQR

SEQ ID NO: 8821 - protein, 341 aa, Sporothrix schenckii
MDNYQKLEKVGEGTYGVVYKARDLTAGGRIVALKKIRLEAEDEGVPSTAIREISLLKEMRDPNIVRLYNIVHAEGHKLYLVFEFLDLDLKKYMDSLPVSDGGRGKALPEGTGTRLHTLGLGDDIIKKFMSQLCAGIRYCHSHRILHRDLKPQNLLINKEGNLKLADFGLARAFGVPLRTYTHEVVTLWYRAPEILLGGHQYSTGVDMWSVGCIFAEMAMRKPLFPGDSEIDEIFKIFRLLGTPTEDVWPGVTTYPDFKASFPRWVQDTETPICPTLDPMGQELLELMLVYDPASRLSAKQACNHPYFDDLEKALPGTAAAAARQHTTTAAAGGAYNGSGYH

SEQ ID NO: 8822 - protein, 278 aa, Oryza sativa (japonica cultivar-group)
MPPPPHRGGGGGRDTSAFFAATLVLWAVSVGFEIGARGRRELAPVAAGFAFFQAASAAVRAAVSRDPLFVNTAVSLLHSSLTSASVIFVLVNRWHNKDLKNMFEHEELFGGSWVGAYSALCFSCGYFAYDQLDMLRYRLYSGRIPGILMHHLILLICFTLALYRNVTINYLILTLVCELHSVFLHIRKLRRMAGFRDYNRKIVKLEWVLNWTTFVSARVACHILITYKLIIDAHKFDSGIELPLALFGMAGMNLLNIFLGLDLLKAYTLERNQQTHQD

SEQ ID NO: 8823 - protein, 207 aa, Aegilops tauschii
PQPHQPFSQQPQQTFPQPQQAFPHQPQQQFPQPQQPQQQFLQPQQPFPQQPQQPYPQQPQQPFPQTQQPQQLFPQSQQPQQQFPQPQQQFLQAQQPQQSFPQQQPPFIQPSLQQQVNPCKNFLLQQCKPVSLVSSLWSMIWPQSDCQVMRQQCCQQLAQIPQQLQCAAIHTVIHSIIMQQEQQEQQQGMPILLPLYQQQQVGQGTLV

SEQ ID NO: 8824 - protein, 380 aa, Caulobacter crescentus CB15
MSSRLSPRLSPGTRRDDTDLECVRTTKKQGKTMASDAAQKTILKLILSLPSPILRAMSGGGVVYKGGRTLDPRFQFFANAAKKLPPMTSLSPAEAVAGSAKGLAAVQGPLETGVRTESLSVEGPNGSIPCRAYRPPQTDAKAPLIVYAHMGGGVIGDLETCHAFCSILSRICSTTVISVDYRLAPDHKFPAGLEDVLAAYRWARDNTARFGAAPVPPAIGGDSMGGNFSAIIAQEMKRTGEPQPTLQILIYPAVDVASETASMTTYADAYPLTRATMDWFMGHYIGADADPADPRLSPDKTADLTGLAPAVVATAGFDPLVDQGEGYAKRLQAAGVPVSYRCYDSLAHGFTAFTGAIPAADDACREIAWLVREAFEKRTL

SEQ ID NO: 8825 - protein, 425 aa, Bacillus cereus ATCC 14579
MKNERIEKLQESWELDERWEGITRPYSAEDVIRLRGSIDIEHTLARRGAEKLWTSLHTEDYINALGALTGNQAMQQVKAGLKAIYLSGWQVAADANLSGHMYPDQSLYPANSVPAVVKRINQTLQRADQIQHMEGSDDTDYFVPIVADAEAGFGGQLNVFELMKGMIEAGASGVHFEDQLSSEKKCGHLGGKVLLPTQTAVRNLISARLAADVMGVPTIIVARTDADAADLITSDIDPVDKAFITGERTPEGFYRTNAGLDQAIARGLAYAPYADLVWCETSEPNLEDAKRFADAIHKEHPGKLLAYNCSPSFNWKQKLDEKAIASFQKEIASYGYKFQFVTLAGFHSLNYGMFELARGYKERGMAAYSELQQAEFAAEKHGYSATRHQREVGTGYFDEVAQVITGGTSSTTALKGSTEEAQFTK

SEQ ID NO: 8826 - protein, 207 aa, Aegilops tauschii
PQPHQPFSQQPQQTFPQPQQTFPHQPQQQFPQPQQPQQQFLQPQQPFPQQPQQPYPQQPQQPFPQTQQPQQLFPQSQQPQQQFSQPQQQFPQPQQPQQSFPQQQPPFIQPSLQQQVNPCKNFLLQQCKPVSLVSSLWSMIWPQSDCQVMRQQCCQQLAQIPQQLQCAAIHTVIHSIIMQQEQQEQQQGMHILLPLYQQQQVGQGTLV

SEQ ID NO: 8827 - protein, 485 aa, Bacillus halodurans C-125
MEAIYTRQFLAGEWIEGASTQTITNYNPYTGEKIHEIKGASLDDLDQAYRAAKNAQKEWEQTLPAQKQEVLEKAAALLAERKDEVIERLVNEAGSSIIKASIEWGATLQTIKVAATFPLRMEGKILPSNIPGKENRIYRSAKGVIGVISPFNFPLVLAMRSVAPALATGNAVVLKCSSDAPITSGLLIAELFEEAGLPKGVLNVVVGKAAEIGDAFVTHPIPKLISFTGSTEVGRHIAQLAARELKETALELGGNNVMIVLDDADIEKAAEKAAVGKFLHQGQICMALNRIIVDASIYDSFVEVFKEKVSQLQTGNPAEPATLIGPLINYKQIGRIQQLVKESVAQGAVKVLEGHVQGNLMSPTILSEVTNDMPVAKEEIFGPIAPIIKAKDEAEAIAIANDSPYGLSGSIFTGSLHRGVQVAKQIDTGMIHVNDQPVNEEAHISFGGEKDSGIGRFGGEWVLDKFTTVKWISIQEKERVYPFWG

SEQ ID NO: 8828 - protein, 156 aa, Triticum aestivum
  unsure (1)..(156): unsure at all Xaa locations
TSVAPFQGLKSTAGLPVSRRSNGASLGSVSNGGRIRCMQVWPIEGIKKFETLSYLPPLSTEALLKQVDYLIRSKWXCLASSQQVGFIFREHNASPGYYDGRYWTMWKLPMFGXTDATQVINXVEEXKXEYPDAXVXXXGKFREMVKILHGVARSGG

SEQ ID NO: 8829 - protein, 1046 aa, Oryza sativa (japonica cultivar-group)
MEGGNHGGGGYPYPPPQQYPYPYGQYPYQYPPPQQQPPPPSAYLSPSRSFHGYPSAPPPQPQPQPYAHHSAPLQPYPPPPQHHAYPPPQPHPPSPYVYDPYHAPAAAYPSYPSPNPSPSISPSSSFHHHPEPPSPSPSAPSYPSIADGLANMHVSDRHDYPPPPSPAAVPAASSPSVLPPSASFPGGGSSHGGGGMQMVPYGPPAGGSQHGGMQMVAYGSPAGGSQHGSVRPSLKVVLLHGTLDVWVYDARNLPNKDLFSKRVGDLLGPRLIGAVGSKMSSANMTSDPYVTIQVSYATVARTYVVPNNENPVWTQNFLVPVGHDAAEVEFVVKDNDVFGAQLIGTVSIPAEKLLFGERINGIYDVLESNGKPCAQGAVLRLSIQYIPVAQLKMYHHGVIAGPDSLGVPNTYFPMRRGNRVTLYQDAHVPDGCLPDFCLDHGMRYQHGQCWRDIYDAICQARRLIYIVGWSVFHTIHLIREGVEKMPSLGELLKMKSQEGVRVLLLVWDDPTSRSILGIKTDGFMGTRDEETRRFFKHSSVQVLLCPRSAGKRHSWVKQQETGTIFTHHQKTVILDADAGNHKRKIIAFVGGLDLCGGRYDTPSHPLFRSLQTVHKEDYYNPNFATVDARGPREPWHDLHSKIDGPAAYDVLQNFQERWLKASKRHGIKKLGKSYDDALLSIERIPDFISINDAIYFSDNDPETWHVQVFRSIDSNSAKGFPKDPREATRKNLVCGKNVLIDMSIHTAYVNAIRGAQHFIYIENQYFIGSSFNWDSNKDIGANNLIPIEIALKIANKIKAKERFSAYIVIPMWPEGNPTGAPTQRILYWQHKTMQMMYETIYRALKEEGLDDLYEPQDYLNFFCLGNREVADSPSTSNSTSTPQEQARKHRRFMVYVHSKGMIVDDEYVIIGSANINQRSMEGIRDTEIAMGAYQPQYTWASKVSAPRGQIYGYRMSLWAEHIGVVEEGFNYPETMECMRRVRQIGEQNWERFVDNEVTEMRGHLMKYPVSVDRKGKVKPLPGCTSFPDMGGNICGSFRAIQENLTI

SEQ ID NO: 8830 - protein, 325 aa, Triticum aestivum
  unsure (1)..(325): unsure at all Xaa locations
MEAETAAKRARESEGAAAADGAGEQAGISAVIPGWFSEISPMWPGEAHSLKVEKVLFQGKSDYQNVLVFQSSTYGKVLVLDGVIQVTERDECAYQEMITHLPLCSIKDPKKVLVIGGGDGGVLREVSRHSSVEQXIDICEIDKMVVDVSKQFFPRLALGFEDPRVSLHIGDGVAFLKNAPEGTYDAVIVDSSDPVGPAQELFEKPFFESVSRALRPGGVVCTQAESIWLHMHIIEDIVTNCRQVFKGSVNYAWTTVPTYPSGVIGFMLCSTEGPSVDFQHPVFSIEEDEYSTKSKGPLKFYNSEFHTASFCLPSFARRVIEAKAN

SEQ ID NO: 8831 - protein, 140 aa, Triticum aestivum
  unsure (1)..(140): unsure at all Xaa locations
MAPTVMASSATSVAPFQGLKSTAGLPVSRRSNGASLGSVSNGGRIRCMQVWPIEGIKKFETLSYLPPLSTEALLKQVDYLIRSKWVPCLEFSKVGFIFREHNASPGYYDGRYWTMWKLPMFGCNXPTQVINEVEESRRIT

SEQ ID NO: 8832 - protein, 495 aa, Oryza sativa (japonica cultivar-group)
MATAGALALVAICSYLAVTSNKQKRRRRPPVVGTVFHQLYNVRRIHDYHTALSREHTTFRMLVPAGGDQIYTCDPAVVEHILKTNFANYGKGPFNHGNAKDLFGDGIFAIDGEKWKQQRKIASYDFSTRALRDFSCAVFKRNAAKLAGIVSNHAASNQSMDFQGLMLRATMDSIFTIAFGTDLNTLDGSGEGSRFAAAFDDASEFTMLRYISPLWKLARLLNVGVEAMLKERIKVVDEFVYRLIRARSDELSNSHDSGSRQDILSRFLQATTSDSVVDYKYLRDIILNIVIAGKDTTAGALAWFLYMVCKHPEVQEKICHEAMVATSAGDTASVDEFLQSLTDQALNNMHYLHAALTETLRLYPSVPMENKQCFSDDVLPNGFNVSKGDIVFFIPYAMGRMESLWGKDAEYFRPERWLDENGVFQQESPFKFTAFQAGPRICLGKEFAYRQMKIFAAVLLRFFVLKLRDEKEIVSYRTTLTLAIDQGLHLTATAR

SEQ ID NO: 8833 - protein, 231 aa, Aegilops searsii
SLPQQPFSQQPQQTFPQPLQTFPHQPQQQFPQPQQPQQQFLQPQQPFHQQPQQPYPQQPQQPFPQTQQPQQLFPQSQQPQQPYPQQPQQPFPQTQQPQQQFPQSQQPQQPFPQPQQPQQSFPQQQPPFIQPSLQQQLNPCKNLLLQQCRPVSLVSSLWSMIWPQSDCQVMRQQCCQQLAQIPQQLQCAAIHSVVHSIIMQQEQQQQQQQQQQQQGLRIPLPLYQQQQVGQG

SEQ ID NO: 8834 - protein, 206 aa, Zea mays
MAGDEEDHLADAPRVVGALSALLERVVERNDAVADELAAGTESAAPPSAFRATARPGISVRSYMARIARFAGCSPACYVVAYVYLDRLLRRARSAPAVDSYSVHRLLITAVLAAVKFMDDICYNNAYFAKVGGISLVEMNYLEVDFLFGVGFDLNVAPETFGDYCAVLRSELLCAEAAPAPLRLQHCCLSEDDAGAGCSAQQQLAA

SEQ ID NO: 8835 - protein, 215 aa, Heliobacillus mobilis
MRFFLDSANIDEIREANALGVISGVTTNPSLIAKEGRNFRQVVEEIVAIVDGPISAEVISTDAEGMVAEARELAQIHKNIVIKIPMCAEGLKATSRLSREKIRTNVTLIFSANQGLLAANAGATFVSPFVGRLDDVGHDGLDVIREMVEIFDIHGLATEIIAASVRHPLHVTAAARAGAPIATIPYKVLMQMVKHPLTDKGIEQFLKDWETVKNK

SEQ ID NO: 8836 - protein, 314 aa, Arabidopsis thaliana; identical to SEQ ID NO: 243

SEQ ID NO: 8837 - protein, 88 aa, Zea mays
MRRRPTAGPSLQRAPLARLISRRGLAGAADGHGSAKAPLRKDPLSPIKWEEEHFGLASLSMWGVICYGGYKLFSGKKEAKTDAGSPQA

SEQ ID NO: 8838 - protein, 231 aa, Zea mays
SDHCHSARYYLKDAVLDGGIPFNKAYGMTAFEYHGTDARFNRVFNEGMKNHSVIITKKLLDFYTGFEGVSTLVDVGGGVGATLHAITSRHPHISGVNFDLPHVISEAPPFPGVRHVGGDMFASVPAGDAILMKWILHDWSDAHCATLLKNCYDALPENGKVIVVECVLPVNTEATPKAQGVFHVDMIMLAHNPGGKERYEREFRELAKGAGFSGFKATYIYANAWAIEFIK

SEQ ID NO: 8839 - protein, 382 aa, Aspergillus oryzae
MATATVLEKANIGVYTNTNHDLWVAESKPTLEEVKSGESLKPGEVTVQVRSTGICGSDVHFWHAGCIGPMIVTGDHILGHESAGEVIAVASDVTHLKPGDRVAVEPNIPCHACEPCLTGRYNGCEKVLFLSTPPVDGLLRRYVNHPAVWCHKIGDMSYEDGALLEPLSVSLAAIERSGLRLGDPVLVTGAGPIGLITLLSARAAGATPIVITDIDEGRLAFAKSLVPDVITYKVQTNLSAEDNAAGIIDAFNDGQGSAPDALKPKLALECTGVESSVASAIWSVKFGGKVFVIGVGKNEMKIPFMRLSTQEIDLQYQYRYCNTWPRAIRLVRNGVISLKKLVTHRFLLEDALKAFETAADPKTGAIKVQIMSNEEDVKGASA

SEQ ID NO: 8840 - protein, 379 aa, Arabidopsis thaliana
MDNINGLPDDLLVKILSFVPTYVAVSTCVLSKRWEFLWMWLPNLEFVSPWDSRPGIVDFINKKLPIHRAPVIERLCIHINSNPHIKPEYIKRWIEIAVSHYVRELQIDYHSKTKITLQLEAESYFIDGKYLQQLISGCPVLEDLSLRFCCNDNLREFTVIIPSLQSLSLFLFGNSNLNRYKIDTPSLKYLKLEDWNDPEHYSWTNMPKLREAYVDVESSNHLKTLIGSITSVKHLTICCLEDYLYGDGFIFNHLEHLKLCMCPFDSSNLLGQLLKGSPNLQVLDIFEMKRNDIVCWNQPSSVLECLLSSLKILNWSAYFGRPQDRDIAVYILKNACHLKTATFLTDKRINDVRRLKMIKELRLSPRASSTCQLVFGEDF

SEQ ID NO: 8841 - protein, 91 aa, Brassica napus
MRVHNHRLRFEVTPKPTMSLPGISFITARSVAVILFLCLFLLILPPFLPPLPPPPSTLLLLPLLLMILLIFLAFSPSNDPSLTVEVEPLDP

SEQ ID NO: 8842 - protein, 126 aa, Cyanophora paradoxa
MSSKTDEILEQLKGLTLIEAADLVKAIEEAFGVDASAPVGGGMVMMAPAAGGGADAAEEKSAFDLVLEEVPADKKIAVLKVVRSLTNLGLKEAKDLVEATPKVVKEGASKDELKQLKKNLKQLEQK

SEQ ID NO: 8843 - protein, 139 aa, Saccharomyces cerevisiae
MSEITLGKYLFERLKQVNVNTVFGLPGDFNLSLLDKIYEVEGMRWAGNANELNAAYAADGYARIKGMSCIITTFGVGELSALNGIAGSYAEHVGVLHVVGVPSISAQAKQLLLHHTLGNGDFTVFHRMSANISETTAMI

SEQ ID NO: 8844 - protein, 256 aa, Glycine max
  unsure (1)..(256): unsure at all Xaa locations
FLRYACVVREKVRVVKTMASQLLRRTFGSRILANPRAFSFSSAASTPIRATLFPGDGIGPEIAESVKQIFQAADVPIEWEEHYVGTEIDPRTQSFLTWESLESVRQNGVGLKGPMATPIGKGHRSLNLTLRKELNLYANVRPCYSLPGYKTRYDNVNLITIRENTEGEYSGLEHQVVRGVVESLKIITRQASLRVAEYAFLYAKAHGXREKVSGIHKANIMQKTDGFFLXWCREXAXXYPEKPYEEVSLXQCCMML

SEQ ID NO: 8845 - protein, 344 aa, Triticum aestivum
  unsure (1)..(344): unsure at all Xaa locations
MGKGGKGEAAAAVAGEGENMAAWLVAKNTLKIMPFKLPPLGPYDVRVRMKAVGICGSDVHYLKEMRIAHFVVKEPMVIGHECAGIIEEVGDGVKHLAVGDRVALEPGISCWRCRHCKGGRYNLCDDMKFFATPPYHGSLADQIVHPGDLCFKLPDNVSLEEGAMCEPLSVGVHACRRADVGAEKSVLIMGAGPIGLVTMLSARAFGAPRIVIADVDDHRLSXAKSLGADAVXKVSGNTEDLAGEIERIQAAMGGDIDVSLDCAGFXKTISTAXEAXRPGGXVCLXGMGHNEXTVPLTSAAXRKFDVVGIFRYKDTXPXCLXSLRXGKXXVKRLSKGPFGVRLSR

SEQ ID NO: 8846 - protein, 1347 aa, Escherichia coli CFT073
MSQEYTEDKEVTLTKLSSGRRLLEALLILIVLFAVWLMAALLSFNPSDPSWSQTAWHEPIHNLGGMPGAWLADTLFFIFGVMAYTIPVIIVGGCWFAWRHQSSDEYIDYFAVSLRIIGVLALILTSCGLAAINADDIWYFASGGVIGSLLSTTLQPLLHSSGGTIALLCVWAAGLTLFTGWSWVTIAEKLGGWILNILTFASNRTRRDDTWVDEDEYEDDEEYEDENHGKQHESRRARILRGALARRKRLAEKFINPMGRQTDAALFSGKRMDDEEEITYTARGVAADPDDVLFSGNRATQPEYDEYDPLLNGAPITEPVAVAAAATTATQSWAAPVEPVTQTPPVASVDVPPTQPTVAWQPVPGPQTGEPVIAPAPEGYPHQSQYAQPAVQYNEPLQQPVQPQQPYYAPAAEQPVQQPYYAPAAEQPVQQPYYAPAPEQPVAGNAWQAEEQQSTFAPQSTYQTEQTYQQPAAQEPLYQQPQPVEQQPVVEPEPVVEETKPTRPPLYYFEEVEEKRAREREQLAAWYQPIPEPVKEPEPIKSSLKAPSVAAVPPVEAAAAVSPLASGVKKATLATGAAATVAAPVFSLANSGGPRPQVKEGIGPQLPRPKRIRVPTRRELASYGIKLPSQRAAEEKAREAQRNQYDSGDQYNDDEIDAMQQDELARQFAQTQQQRYGEQYQHDVPVNTEDADAAAEAELARQFAQTQQQRYSGEQPAGANPFSLDDFEFSPMKALLDDGPHEPLFTPIVEPVQQPQQPVAPQQQYQQPQQPVAPQPQYQQPQQPVAPQPQYQQPQYQQPQQPVAPQQQYQQPQQPVTQQPQYQQPQQPVVPQPQDTLLHPLLMRNGDSRPLHKPTTPLPSLDLLTPPPSEVEPVDTFALEQMARLVEARLADFRIKADVVNYSPGPVITRFELNLAPGVKAARISNLSRDLARSLSTVAVRVVEVIPGKPYVGLELPNKKRQTVYLREVLDNAKFRDNPSPLTVVLGKDIAGEPVVADLAKMPHLLVAGTTGSGKSVGVNAMILSMLYKAQPEDVRFIMIDPKMLELSVYEGIPHLLTEVVTDMKDAANALRWCVNEMERRYKLMSALGVRNLAGYNEKIAEADRMMRPIPDPYWKPGDSMDAQHPVLKKEPYIVVLVDEFADLMMTVGKKVEELIARLAQKARAAGIHLVLATQRPSVDVITGLIKANIPTRIAFTVSSKIDSRTILDQAGAESLLGMGDMLYSGPNSTLPVRVHGAFVRDQEVHAVVQDWKARGRPQYVDGITSDSESEGGVGGFDGAEELDPLFDQAVQFVTEKRKASISGVQRQFRIGYNRAARIIEQMEAQGIVSEQGHNGNREVLAPPPFD

SEQ ID NO: 8847 - protein, 479 aa, Shigella flexneri 2a str. 301
MSVPVQHPMYIDGQFVTWRGDAWIDVVNPATEAVISRIPDGQAEDARKAIDAAERAQPEWEALPAIERASWLCKISAGIRERASEISALIVEEGGKIQQLAEVEVAFTADYIDYMAEWARRYEGEIIQSDRPGENILLFKRALGVTTGILPWNFPFFLIARKMAPALLTGNTIVIKPSEFTPNNAIAFAKIVDEIGLPRGVFNLVLGRGETVGQELAGNPKVAMVSMTGSVSAGEKIMATAAKNITKVCLELGGKAPAIVMDDADLELAVKAIVDSRVINSGQVCNCAERVYVQKGIYDQFVNLLGEALQAVQFGNPAERNDIAMGPLINAAALERVEQKVARAVEEGARVALGGKAVEGKGYYYPPTLLLDVRQEMSIMHEETFGPVLPVVAFDTLEDAISMANDSDYGLTSSIYTQNLNVAMKAIKGLKFGETYINRENFEAMQGFHAGWRKSGIGGADGKHGLHEYLQTQVVYLQS

SEQ ID NO: 8848 - protein, 426 aa, Escherichia coli
ADTKAKLTLNGDTAVELDVLKGTLGQDVIDIRTLGSKGVFTFDPGFTSTASCESKITFIDGDEGILLHRGFPIDQLATDSNYLEVCYILLNGEKPTQEQYDEFKTTVTRHTMIHEQITRLFHAFRRDSHPMAVMCGITGALAAFYHDSLDVNNPRHREIAAFRLLSKMPTMAAMCYKYSIGQPFVYPRNDLSYAGNFLNMMFSTPCEPYEVNPILERAMDRILILHADHEQNASTSTVRTAGSSGANPFACIAAGIASLWGPAHGGANEAALKMLEEISSVKHIPEFFRRAKDKNDSFRLMGFGHRVYKNYDPRATVMRETCHEVLKELGTKDDLLEVAMELENIALNDPYFIEKKLYPNVDFYSGIILKAMGIPSSMFTVIFAMARTVGWIAHWSEMHSDGMKIARPRQLYTGYEKRDFKSDIKR

SEQ ID NO: 8849 - protein, 363 aa, Buchnera aphidicola
MKKKFRIAVLPGDGIGPEIMREAYKILNILEKNFSLPLEIREFSVGGIAIDREGIALPEETLRGCENSDAILFGSVGGKKWDYLPIESRPERASLLPLRKHFNLFSNLRPAKLYSDLKNLSPLRSNIVRNGFDILCVRELTGGIYFGKPKGRSKNENGEYSFDTEIYYDFEIKRIAHLAFELASSRRCKVCSIDKSNVLASSILWREIVEEVSKNYPNIILSHLYIDNACMQIIKNPSQFDVLLCSNIFGDIISDECAMITGSIGMLPSASLNSKKFGLYEPAGGSAPDIEGKNIANPIAQILSLSMLIRHSMNLNEIADKIDSSVYRALKAGYRTLDISDGKNYIKTNEMGDIIAKFLINGK

SEQ ID NO: 8850 - protein, 367 aa, ASPERGILLUS NIDULANS FGSC A4
MAADIPKTMKALLYDKPEVHKIAEIPVPTLRENDVLVGVKSRRSQYAWLTQLVIQIKVKACGVCGTDLHIHEGEFIAQFPLVPGHETVGVVAAVGPKVKGFEIGDRVVADNSELCGECFYCRRGDELFCENFQAHGVTMNGGFAEYCAYPAGRVFKIQNLSDVDATLLEPASCAAHGLDKIAPKMGSRVLLFGAGPTGLILAQLLRLNGGCHVVVCAPEGLKMELAKSLGAGDEYIGLSRQDPSAQFNKLKADNPYGFDIVVEATGNVKILEDSINYVRRGGKLVVYGVYANKDRVSWPPSKIFGDEIQIIGSFSEVYKFPAAIDYLDSGKVKVSGIVNKVYKIEQWEECLQSMRNKSAIKAAIVFE

SEQ ID NO: 8851 - protein, 252 aa, Listeria monocytogenes str. 4b H7858
MNAATRAVVRKAIYEGLEVYGINYGFLGLVNGDIRKLELGSVGDLLHRGGTFLYSARYPEFATEEGQLKGIEQLKKHQIDGLVVIGGDGSYHGAEALTKRGFPTIGIPGTIDNDISGTDFTIGFDTALNTVLDALDKIRDTATSHERTFIIEVMGRDAGDIALWSGLAGGAEAIIVPEESFNMDDVVDRLNKGRERGKKHSIIVVAEGVMSGNEFAKQLAEYGDYHARVTVLGHVQRGGSPTAFDRVLASRL

SEQ ID NO: 8852 - protein, 88 aa, Glycine max
MRIEDDAVKKAMIVDAGTRHISHNVRSTEIESQHIEDCQAVMRILLRKFMGDEVQSGKCAKGICKKPAVEFGELVLCRSNFDIHTAAL

SEQ ID NO: 8853 - protein, 255 aa, Phanerochaete chrysosporium
MAQSREDSVYLAKLAEQAERYEEMVENMKRVASSDQELTVEERNLLSAAYKNVIGARRASWRIVSSIEQKEESKGNEAQVAMIKGYREKIESELAKICEDILDVLEKHLIPSAASGESKVFYHKMMGDYHRYLAEFATGDKRKESADKSLEAYKAASDVAVTELPPTHPIRLGLALNFSVFYYEILNSPDRACHLAKQAFDDAIAELDTLSEESYKDSTLIMQLPRDNLTLWTSDMQDSDKPADEKPSDEADNES

SEQ ID NO: 8854 - protein, 356 aa, Saccharomyces cerevisiae
MTDLTTQEAIVLERPGKITLTNVSIPKISDPNEVIIQIKATGICGSDIHYYTHGRIANYVVESPMVLGHESSGIVALIGENVKTLKVGDRVALEPGIPDRFSPEMKEGRYNLDPNLKFAATPPFDGTLTKYYKTMKDFVYKLPDDVSFEEGALIEPLSVAIHANKLAKIKFGARCVVFGAGPIGLLAGKVASVFGAADVVFVDLLENKLETARQFGATHIVNSGDLPHGVTVDSVIKKAIGKKGADVVFECSGAEPCVRAGIEVCKAGGTIVQVGMGQEEIQFPISIIPTKELTFQGCFRYCQGDYSDSIELVSSRKLSLKPFITHRYSFKDAVEAFEETSHHPLNNIKTIIEGPE

SEQ ID NO: 8855 - protein, 140 aa, Brassica napus
  unsure (1)..(140): unsure at all Xaa locations
MTMINSLRRMARSSQVTLQSRYAASSSSGSRIFTTEASPQKQTIVGSKGHDMLAPFTAGWQSADLHPLIIAKSEGSYVYDDHGKKYLDSLAGLWCTALGGNEPRLVSAAVEQLKTLPFYHSFWNRTTKPSLDXAKDLLDM

SEQ ID NO: 8856 - protein, 420 aa, Chloroflexus aurantiacus
MTHPTIRIGVLTSGGDAPGMNAAVRAVVRTGISRGCEVFAIYEGYQGLIEGGKLIRRMDWSSVGGIIQRGGTIIGTARSAAFRTREGRRRAAANLLAHGIDRLVVIGGDGSLTGADLFRREWPELLAELVAAGEFSSEQAAAHPNLLIAGIVGSIDNDFCGTDMTIGADTALHRITEAIDAISSTAASHQRTFVIEVMGRNCGYLALMGAIAGGADWAFIPEMPPQMDDWEQHMCDVLRIGREQGRRDSIVVVAEGACDRDGKPITASYVKKILEERLGEDTRVTILGHVQRGGAPSAFDRWMSSLLGATAVEELLEADPNAEPKLIGLRENRVVRLPLMTCVRDTHQVAEAIAQRDYERALAMRGNSLVEAYRTLGTLIQSQHSDPRPITARASLRKSCNSGGPAPENEYAVRAAGGSA

SEQ ID NO: 8857 - protein, 487 aa, Burkholderia cepacia R1808
MSTENLALKDPSLLRQQAYINGEWQSAANGESFEVRNPATGGLLGTVPAMGAAETRQAIDAANAAWPAWRKKTAKERAAILRKWHDLMMENADDLALILTTEQGKSLAEAKGEIGYAASFLEWFAEEGKRVYGDTIPTPASDKRIVVTKEAIGVCAAITPWNFPAAMITRKVGPALAAGCPIVVKPAEATPFSALAMAVLAERAGVPAGVFSVVTGDPKAIGGELTSNPIVRKLSFTGSTPVGRLLMSQCAATVKKVSLELGGNAPFIVFDDADLDAAVQGAIASKYRNSGQTCVCTNRFYVHEAVYDAFAQKLAAAVGQLKVGRGTEPGVTQGPLINEAAVLKVEAHIEDALAKGATVVTGGKRHALGHGFFEPTVLTGVTPAMKVAKEETFGPLAPLFKFGSDDEVIRLANDTEFGLAAYFYSRDIGRVWKVAEALEYGMVGVNTGLISNEVAPFGGVKQSGLGREGSHYGIDDYVVIKYLCLAV

SEQ ID NO: 8858 - protein, 229 aa, Aegilops searsii
SLPQQPFSQQPQQTFPQPLQTFPHQPQQQFPQPQQPQQQFLQPQQPFHQQPQQPYPQQPQQPFPQTQQPQQLFPQSQQPQQPYPQQPQQPFPQTQQPQQQFPQSQQPQQPFPQPQQPQQSFPQQQPPFIQPSLQQQLNPCKNLLLQQCRPVSLVSSLWSMIWPQSDCQVMRQQCCQQLAQIPQQLQCAAIHSVVHSIIMQQEQQQQQQQQQQGLRIPLPLYQQQQVGQG

SEQ ID NO: 8859 - protein, 314 aa, Vibrio parahaemolyticus RIMD 2210633
MVNNSIQWFPGHMHKARKEIEEAIPQVDVIIEVLDARIPFSSENPMISKIRGEKPVVKVLNKRDLADPELTQLWIDHLEKEQNVKAMAITTSEPQEVHKIMELCRKLAPHREEVGKNIRTMIMGIPNVGKSTIINTLAGRTIAVTGNQPAVTRRQQRINLQNGIVLSDTPGILWPKVENPHSGFRLAATGAVKDTAMEYDEVAFYTVEYLAAHYPERLKERYQIEELPESDIEIMEEIGRRRGALRAGGRVDLHKVSEILLHELRQGTLGQITLELPEMITQELIEVEIETARKEEEKAKRKEERRKRYLRNKR

SEQ ID NO: 8860 - protein, 234 aa, Aegilops sharonensis
LPQQPFSQQPQQTFPQPQQTFPHQPQQQFPQPQQPQQQFLQPQQPFPQQPQQPYPQQPQQPFPQTQQPQQLFPQSQQPQQPYPQQPQQPFPQTQQPQQQFPQSQQPQQPFPQPQQPQQSFPRQQPPFIQPSLQQQLNPCKNLLLQQCRPVSLVSSLWSMIWPQSDCQVMRQQCCQQLAQIPQQLQCAAIHSVVHSIIMQQEQQQQQQQQQQQQQQQRQQQGLRIPLPLYQQQQV

SEQ ID NO: 8861 - protein, 411 aa, Rickettsia sp. A-167
DSEFAELKIRGKIFKLPILKASIGEDVIDISRVSAEADCFTYDPGFMSTASCQSTITYIDGDKGILRHRGYDIKDLAEKSDFLEVAYLLIYGELPSGEQYNNFTKQVAHHSLVNERLHYLFQTFCSSSHPMAIMLAAVGSLSAFYPDLLNFKEADYELTAIRMIAKIPTIAAMSYKYSIGQPFIYPDNPLDFTENFLHMMFATPCTKYTVNPIIKNALNKIFILHADHEQNASTSTVRIAGSSGANPFACISTGIASLWGPAHGGANEAVINMLKEIGSSEYIPKYIAKAKDKNDPFRLMGFGHRVYKNYDPRAAVLKETCKEVLKALGQLDNNPLLQIAIELEAIALKDEYFIERKLYPNVDFYSGIIYKAMGIPSQMFTVLFAIARTVGWMAQWKEMHEDPEQKISRPR

SEQ ID NO: 8862 - protein, 474 aa, Pseudomonas aeruginosa
MQTKLLINGALVAGEGESHAVYNPSQGNVLVRITEASGAQVHAAVQSADAAFDAWSQTPPKDRAALLLKLAERIDAQAHVFARLEADNCGKPFNAVLLDELPAVSDVFRFFAGAVRCLQGSAAGEYVAGHTSMIRRDAVGVVASIAPWNYPLLMAAWKLGPALAGGNTVVLKPSEHTPLSTLKLGELLAEIFPAGVVNIVHGRGASVGEPLTSHAQVRMVSLTGSVRTGSRIIEGTAESVKRMHMELGGKAPVLIFDDADIDAAVEGIRAFGFYNAGQDCTAACRLYVQKGVYQEFVRKLGEAVSSIRCGLPDDPATEMGPLITKEHLERVEGFVNRARELPHIEVVTGGKRAEGAGFFFEPTVLAGATQEDEVMRREIFGPVVTVSSFEDEAQALAWANDSDYGLASSVWTADVGRAHRLAARLQYGCTWVNTHFMLVSEMPHGGVKLSGYGKDLSMYGLEDYTVVRHVMFKH

SEQ ID NO: 8863 - protein, 431 aa, Glycine max
MEASPPPSPSPSPRTTILAKYQLTRFLGRGNFAKVYQARSLLDGATVAVKAIDKSKTVDAAMEPRIVREIDAMRRLHHHPNILKIHEVLATKTKIYLIVDFAGGGELFSKLTRRGRLPEPLARRYFAQLVSALRFCHRHGVAHRDLKPQNLLLDAAGNLKVSDFGLSALPEHLHDGLLHTACGTPAFTAPEILRRVGYDGSKADAWSCGVILYNLLAGHLPFDDSNIPAMCRRISRRDYQFPAWISKSARSLIYQLLDPNPITRISLEKVCDNNKWFKNNSMVEVKESVWESDLYNKCCDGGYKSGMNAFDIISMSSGLDLRGLFETTSEKGRRREKRFTSDKKVETVEAKVKEVGEKLGFRIEIGKNGAIGLGKGKVGVVVEVFEIVADLLLVAVKVVDGGLEFEELHWDDWRIGLQDLVLSWHDVGLEL

SEQ ID NO: 8864 - protein, 427 aa, Bacillus halodurans C-125
MSGWQETAEKLEMSWSNDVRWQGVERPYSGEEVVKLRGSLKIEYTLAKTGAEKLWKLLHEEDYVNALGAMTGGQAIQQVKAGLKAIYLSGWQVAADANLAGHMYPDQSLYPANSVPSVVKRINQALQRADQIQHLEGEGEVDYFAPIVADAEAGFGGQLNVFELMKAMIEAGASGVHFEDQLASEKKCGHLGGKVLIPTQTAIRNLVSARLAADVMGVPTILVARTDADAADLITSDIDPADQRFITGERTPEGFYRTNAGIEQAIARGLAYAPYADLIWCETSKPSLEEAKQFADAIHEKFPGKLLAYNCSPSFNWEANLDRATIETFQQELGKMGYKFQFVTLAGFHALNHSMFELAYGYKQRGMGAYSELQQAEFASEVKGYTATRHQREVGTGYFDQVAQTITGGTSSTTALTGSTEEAQFQK

SEQ ID NO: 8865 - protein, 411 aa, Israeli tick typhus rickettsia
DSEFAELKIRGKIFKLPILKASIGEDVIDISRVSAEADCFTYDPGFMSTASCQSTITYIDGDKGILRYRGYDIKDLAEKSDFLEVAYLLIYGELPSGEQYNNFTKQVAHHSLVNERLHYLFQTFCSSSHPMAIMLAAVGSLSAFYPDLLNFKEADYELTAIRMIAKIPTIAAMSYKYSIGQPFIYPDNSLDFTENFLHMMFATPCTKYTVNPIIKNALNKIFILHADHEQNASTSTVRIAGSSGANPFACISTGIASLWGPAHGGANEAVINMLKEIGSSEYIPKYIAKAKDKNDPFRLMGFGHRVYKNYDPRAAVLKETCKEVLKALGQLDNNPLLQIAIELEAIALKDEYFIERKLYPNVDFYSGIIYKAMGIPSQMFTVLFVIARIVGWMAQWKEMHEDPEQKISRPR

SEQ ID NO: 8866 - protein, 294 aa, Staphylococcus aureus subsp. aureus MSSA476
MVIQWYPGHMAKAKREVSEQLKKVDVVFELVDARIPYSSRNPMIDEVINQKPRVVILNKKDMSNLNEMSKWEQFFIDKGYYPVSVDAKHGKNLKKVEAAAIKATAEKFEREKAKGLKPRAIRAMIVGIPNVGKSTLINKLAKRSIAQTGNKPGVTKQQQWIKVGNALQLLDTPGILWPKFEDEEVGKKLSLTGAIKDSIVHLDEVAIYGLNFLIQHDLARLKSHYNIEVPEDAEIIAWFDAIGKKRGLIRRGNEIDYEAVIELIIYDIRNAKIGNYCFDIFKDMTEELANDANN

SEQ ID NO: 8867 - protein, 411 aa, Rickettsia akari
DSEFAELKIRGKIFQLPILKASIGEDVIDISRVSAEVNCFTYDPGFMSTASCKSTITYIDGDKGILRHRGYNIKDLAEKSDFLEVAYLLIYGELPSIEQYNNFTKQVAHHSLVNERLHYLFQTFCSSSHPMAIMLAAIGSLSAFYPDLLNFKEADYELTAIRMIAKIPTIAAMSYKYSIGQPFVYPDNSLDFTENFLHMMFATPCTKYKVNPIIKNALNKIFILHADHEQNASTSTVRIAGSSGANAFACISTGIASLWGPAHGGANEAVINMLKEIGSSENIPKYIAKAKDKSDPFRLMGFGHRVYKNYDPRASVLKETCKEVLKELGQLENNPLLQIAIELEAIALKDEYFIERKLYPNVDFYSGIIYKAMGIPSQMFTVLFAIARTVGWMAQWKEMHEDPGQKISRPR

SEQ ID NO: 8868 - protein, 411 aa, Rickettsia australis
DSEFAELKIRGKIFKLPILKASIGEDVIDISRVSAEADCFTYDPGFMSTASCQSTITYIDGDKGILRHRGYNIKDLAEKSDFLEVAYLLIYGELPTIEQYNNFTTQVAHHSLVNERLHYLFQAFCSSSHPMAIMLAAVGSLSAFYPDLLNFKEADYELTAIRMIAKIPTIAAMSYKYSIGQPFIYPDNSLDFTENFLHMMFATPCTKYKVNPIIKNALNKIFILHADHEQNASTSTVRIAGSSGANAFACISTGIASLWGPAHGGANEAVINMLKEIGSSENIPKFIAKAKDKNDPFRLMGFGHRVYKNYDPRAAVLKETCKAVLKELGQLENNPLLQIAIELEAIALKDEYFIERKLYPNVDFYSGIIYKAMGIPSQMFTVLFAIARTVGWMAQWKEMHEDPEQKISRPR

SEQ ID NO: 8869 - protein, 176 aa, Hevea brasiliensis
MASQSEPKSVYDFTVKDARGNDVDLSTYKGKVLLIVNVASQCGLTNSNYTELTQLYQKYKDQGLEILAFPCNQFGSQEPGTNEQIVEFACTRFKAEYPIFDKVDVNGNNAAPLYKFLKSSKGGIFGDNIKWNFSKFLVDKDGNVVDRYAPTTVPSQHREGCEETAGDCMSAQGRPN

SEQ ID NO: 8870 - protein, 423 aa, Bacillus subtilis
  unsure (1)..(423): unsure at all Xaa locations
MAQGEKITVSNGVLNVPNNPIIPFIEGDGTGPDIWNAASKVLEAAVEKAYKGEKKITWKEVYAGEKAYNKTGEWLPAETLDVIREYFIAIKGPLTTPVGGGIRSLNVALRQELDLFVXLRPVRYFTGVPSPVKRPEDTDMVIFRENTEDIYAGIEYAKGSEEVQKLISFLQNELNVNKIRFPETSGIGIKPVSEEGTSRLVRAAIDYAIEHGRKSVTLVHKGNIMKFTEGAFKNWGYELAEKEYGDKVFTWAQYDRIAEEQGKDAANKAQSEAEAAGKIIIKDSIADIFLQQILTRPNEFDVVATMNLNGDYISDALAAQVGGIGIAPGANINYETGHAIFEATHGTAPKYAGLDKVNPSSVILSGVLLLEHLGWNEAADLVIKSMEKTIASKVVTYDFARLMDGATEVKCSEFGEELIKNMD

SEQ ID NO: 8871 - protein, 189 aa, Triticum aestivum
  unsure (1)..(189): unsure at all Xaa locations
MAPTVMASSATSVAPFQGLKSTAGLPVSRRSNGASLGSVSNGGRIRCMQVWPIEGIKKFETLSYLPPLXSTEALLKQVDYLIRSKWVPCLEFSKVGFIFREHNASPGYYDGRYWXTMWKLPMFGVQPNATQVINEGGRRSKKEYPDAYVRXIIGFDNMRHVQCVRFIAFKPPGCKIRQGLNSSLTTGHI

SEQ ID NO: 8872 - protein, 156 aa, Glycine max
  unsure (1)..(156): unsure at all Xaa locations
ANLKISCSAVTAVHRANASMIAPFTGLKSMAGCPLAKTANHITSIASNGGRXHCMHVWPPLVKMKFETISYLPDHDDAQLAKEIEYLLTIGWIPYFEFELEHGIAYREHDMSPRYYQRRYWYTLTCQFLTALIATTVSYELXQARTEYSIGYIRII

SEQ ID NO: 8873 - protein, 113 aa, Zea mays
RHERRGTKARDNRCVNESIAMASRLVAAAASSSSLSSASPLARLISRRGLAGAADGHGSAKVPLWKDPLSPSKWKEEHFVLASLSMWGVIFYGGYKLFSGKKEAKTEAASPQA

SEQ ID NO: 8874 - protein, 126 aa, Schizosaccharomyces pombe
MIGLKGILKVIDNSGATLAECIRVVRAGKFASLGDEVVVVVKKARSGSSVTAANKVKRGDIHHAIIVRTKSPVRRPDGRYVRFDDNACVLVNKECEPLGTRILSVVANELRTKHHTKIASLAPRTI

SEQ ID NO: 8875 - protein, 316 aa, Erwinia carotovora subsp. atroseptica SCRI1043
MNQLEALKQFTVVVADSGDIDSIRQFSPQDATTNPSLILKAATLPQYQPLFDDAIAYANLQGGSPETRLINASDRLAVNIGAEVLKSIPGRISTEVDARLSFDRGMCVAKARKLIGMYQEKDIPRSRILIKLAATWEGIRAAEELEKEGINCNLTLLFSFAQARACAEAGVFLISPFVGRIYDWYQEKQPTSDYQAESDPGVISVRDIYDYYKRHRYQTVIMGASFRKVEQILALAGCDRLTISPALLEQLKNSSDPVERQLTPSTEAFHPPSPLSEAEFRWEHHQDAMAVDKLAEGIRLFAADQQKLEALLAAKL

SEQ ID NO: 8876 - protein, 224 aa, Gossypium hirsutum
MAFVSEEEKTEDYLFKIVLVGDSAVGKSNLLARFARNEFYPNSKSTIGVEFQTQKLDINGKEVKAQIWDTAGQERFRAVTSAYYRGAVGALLVYDISRRQTFDSIGRWLNELQTHSDMNVVTILVGNKSDLRDAREVSTAEGKALAEAQGLFFMETSALDSSNVAAAFQTVVKEIYNILSRKVMMSHELKKQDAPLDGKTVVLQGDENQERATESPKSGGCCSS

SEQ ID NO: 8877 - protein, 191 aa, Triticum aestivum
  unsure (1)..(191): unsure at all Xaa locations
MAPTVMASSATSVAPFQGLKSTAGLPVSRRSNGASLGSVSNGGRIRCMQVWPIEGIKKFETLSYLPPLSTEALLKQVDYLIRSKWVPCLEFXSKVGFIFREHNASPWGTTMAGYWDNVEAAXVSGWHRRQRKVINEVGGRXKKEYPDAYVXRIIRFDNMRQVQCVXSFIPFKPXPGCEESGKAKQLITRAI

SEQ ID NO: 8878 - protein, 285 aa, ASPERGILLUS NIDULANS FGSC A4
MARNLSLKSTQKLLSGYEIPILGYGPNKRGGKRHRRGTQARIQTRTTLPARLFDRMADDNEKEVTAAIAKAGLSRSQVFLTTKIPPRANGYEAAKKSIEDSLKQANTEYFDLILIHAPYGGKEGRLGTWKALVEAQKAGKTRSIGVSNFGVHHLEELQMYISSGGGGQIDVGQYELHPWLARPDIVDWLRKHGAVVQAYCPIVRNQRGDEPVLKELGKKYGKSAAQVLIRWSLQKGFVPLPKSVTPSRIKENAEVFDFELTEEDMAKLETGKYEPCAWDPTVEKD

SEQ ID NO: 8879 - protein, 362 aa, Mesorhizobium loti MAFF303099
MANGLDDVVAAETVLSDVDGLGGRLTIRGHSLAELAGRWSFPQVVRLLLDGFFEDLAGDAELAAQLGEARVDVFERLQPSLPLLAPLDIYSAMRAGMALLPDGETLADALRLIAAPAVLTPALLRLQRGEQPVAPDGKAAHAADMLRMLRGSVPSPALAKALDTYLVTVCDHGLNASTFATRVVASTLAGLTSSVLAGLGALKGPLHGGAPGPVIEMLDAIEAHGDAAGWLRNEIAQGRRIMGFGHRIYRVRDPRADVLKAVVRQLGGEGETGRRLAFAEEVEKTALEVLRIAKPQRSLQTNVEFYTALVLEAAGFPPQAFSNVFAAGRVAGWIAHAREQQTTGRLIRPQSRYVGPVPDLVA

SEQ ID NO: 8880 - protein, 486 aa, Pseudomonas putida
MRQIENFIAGEFVAAASGKRFDKRSPVDNRIICSISEAGRSEVDAAVSAARSALHGEWGSLSTDQRIELLLCVANEITRRFDDFVEAEMSDTGQPEHVMKHVFIPRGAANFKVFADVIKSVASESFKMDTPDGRGALNYSIRRPKGVIGVVCPWNAPFMLMTWKVGPALACGNTVVVKPSEESAQTAALLGEVMNAVGIPKGVYNVVHGFGPDSAGEFVTRHPQVDAITFTGETRTGTAIMKAASEGMRDVSFELGGKNAGIVFADADFEAAVESFSRSVFLNTGQVCLGTERVYVERPIFERFVQALKVKAEAVKYGRPDDHQANYGPLISQEHKQKVLSYYRKAVEEGATLVTGGGVPQMPGELAEGAWVQPTIWTGLPETAAVVQEEIFGPCCHISPFDSEDEVVEKANATDYGLSTTIWTSNLARAHRMAGRIDVGITWINSWFLRDLRTPFGGSKQSGIGREGGVHSLEFYTETRNVCVKL

SEQ ID NO: 8881 - protein, 540 aa, Glycine max
MQVMASRILSTLHYVCSSSASATKRCLGLYSHWQRSISGIAASVVADVEPSIAPVQIDQSQLLIDGKFVDAASGKTFPTFDPRTGDVIANVAEGDAEDVNRAVHAARKAFDEGPWPKMTAYERSRIILRFADLLEKHNDEVAAIETWDSGKTYEQAANVEIPMVVRLFRYYAGWADKIHGLTVPADGPYHVQTLHEPIGVAGQIVPWNFPLLIFSWKVAPALACGNTVVMKTAEQTPLSALYVSKLFLEAGLPPGVLNVISGFGPTAGAALCSHMDVDKLAFTGSTSTGKRVLELSAHSNLKPVTLELGGKSPFIVCKDADVDAAVEASHFALFFNQGQCCCAGSRTFVHESIYGEFVEKAKARALKRVVGDPFKNGVEQGPQIDSVQFEKIMKYIRSGVESGAQLESGGQRIGSKGYYIQPTVFSNVQDNMLIAKDEIFGPVQSILKFKDLEEVIRRANATSYGLAAGVFTKNMDTANTLMRALQAGTVWINCYDVFDAAIPFGGYKMSGQGRVRGIYSLRSYLQVKAVVTALKNPAWL

SEQ ID NO: 8882 - protein, 379 aa, Mesorhizobium loti MAFF303099
MSEWLSREEALERLRVRPQTLYAYVSRGRIGMRPDRADPRRSQYRADDIAALATRRARGRSPSAIAESAIAWGEPSIATAISTVWHGHLIYRGRDAAVLSDNATLEETAAVLWGLPEPIRFEAPAPDAPRQPGRASAFAQLALLAGQARPSLGRSAASLCADAARAIGVLAGALGAEAGPDPVHRRLARGWSVDDAGADAIRRALVLLADHELNASTFAARVAASTGASPAACLLAGLATLSGPRHGGAGEAVMQLAEDAARHGADAAIRRWLGHDRPLPAFGHPLYPDGDPRTTALSAAIPVDETLQQLEKAAIAMTGARPNIDFALAALTRGLGLPRDAPFQLFALGRSVGWAAHMVEQIVSGSIIRPRGRYEGLLP

SEQ ID NO: 8883 - protein, 493 aa, Neurospora crassa
MAATFTLDDVRKHNSKDDVWMVIHNKVYNVTTYLEDHPGGSIILREVAGTDATEQFVEIGHSVEATDILEELYVGDLAEEEHAEEVEIFRPTYEKVAMEAAVKVEKATVSKVKKNVRRTIAMSSVIASVGAVGLAKGWWTGPEWALAAVTTAQKPINQLADFIRSKFAQNGSSSKLFWWGVGIATVVELSLTTAATTWALSKFEAQKEFTHFPRSRPAKKERKVAILKIPTNSTSGPAVKPPVKVMDPADWRKFKLVRKVLVSPNVYHLVFALPHPTDVLGLPTGQHVALRALIDGKSVSRSYTPVSNNSDLGRVELLIKVYDQGLMTKHLERMEIGDQIEMRGPKGAMQYVPNSYAKEIGMIAGGTGITPMYQLIRAICEDESDKTKISLLYANNTEADILLREELDGFVKAFPDKLSVQYVLGQADENWTGLRGFVTADMIKDFLPPAADTTKMLLCGPPPMVAAMSKNLVSLGFTAPGTLSKATDQVFLF

SEQ ID NO: 8884 - protein, 255 aa, Aegilops speltoides
HQPFSQQPQQTVPQPQQTFPHQPQQQFPQPQQPQQQFLQPQQPFPQQPQQPYPQQPQQPFPQTQQPQQLFPQSQQPQQPYPQQPQQPYPQQPQQPFPQTQQPQQLFPQSQQPQQPYPQQPQQPFPQTQQPQQQFPQYQQPQQQFPQPQQPQQSFPQQQPSFVQPSLQQQLNPCKNFLLQQCRPVSLVSSLWSMIWPQSDCQVMRQQCCQQLAQIPQRLQCAAIHSVVHSIIMQQQQQEQQQGMRIQLPLYQQQQV

SEQ ID NO: 8885 - protein, 489 aa, Candida albicans SC5314
MSRTKSTKVLIIGAGVSGLKAAETILSKSFLTGDDVLVVEAQNRIGGRLKTTDTSQSKLGINYDLGASWFHDSLNNIVLNHMINDGLLDDEKDVYFDDKDLKTFSSTGEVPIVDKKLNRVLEDIEKYIQLYFNRNLGVPDLSLRDIVAQYFEKYNRLITEEQREYCGRMMRYLEFWFGISWDRISGKYAVTTHQGRNLLNKKGYGYLVESLAKRIPESSLLLEEPVNKIIRNNKDAGKRVLVETINGLQIFCDYLIVTVPQSILSLEESSPYSIKWEPKLPQRLVESINSIHFGALGKVIFEFDRIFWDNSKDRFQIIADHTDGDLSRELTELPKPFTYPLFAVNFGRVHNGKASLVILTQAPLTNYLETHPDQAWQYYQPMLQKLSINDEPIPDPINTIVTDWTTNPYIRGSYSTMYTNDDPSDLIISLSGDFEDLGISEPYIKFAGEHTTSEGTGCVHGAYMSGIYAADCILENIFRNDVTGYTIIG

SEQ ID NO: 8886 - protein, 192 aa, Glycine max
  unsure (1)..(192): unsure at all Xaa locations
TLQVLLVGGGDGGILREISRHSSVEHIDICEIDKMVIDXIAFTNSVPEGTYDVIIVDAFQPMGPIAEVLADNCFLESVAKALRPGGVLSAPADSLWHKNFVVADTIANCKKIFKGSVNYAWTTVPTYASGVIGFMLCSTEGPPVNFKHPTNKLNPEQNGVAKGPPKFYNPEIHAAAFCLPSFVDKVVDPKRY

SEQ ID NO: 8887 - protein, 315 aa, Rubrivivax gelatinosus PM1
MEVTVAGRETAAEGVASFELRRADGGPLPGFDAGAHIDVELPNGMVRQYSLCNDPAERGHYRIGVLLEAAGRGGSRSAHAQLLPGSRLRISAPRNHFALVPARHTLLLAGGIGVTPILSMAEQLARADASFELHYCSRSPARTAFVPRLRAAAFAAQVHFHFDDGDAAQRFDARAVLAQAGDTTHLYVCGPKGFMDHVILTARALGWSEGNIHYEYFAGAAVDSSADRGFEVQIAGSGQVVPVAPGQSVVQALAAHGIDVPVSCEQGVCGTCVMRVVQGEPEHRDMYFSAAEHAANHCFTPCCSRSKSARLVIDF

SEQ ID NO: 8888 - protein, 181 aa, Arabidopsis thaliana
MASSMFSSTAVVTSPAQATMVAPFTGLKSSASFPVTRKANNDITSITSNGGRVSCMKVWPPIGKKKFETLSYLPDLSDVELAKEVDYLLRNKWIPCVEFELEHGFVYREHGNTPGYYDGRYWTMWKLPLFGCTDSAQVLKEVEECKKEYPGAFIRIIGFDNTRQVQCISFIAYKPPSFTEA

SEQ ID NO: 8889 - protein, 256 aa, Aegilops speltoides
HQPFSQQPQQTVPQPQQTFPHQQQQQQFPQPQQPQQQFLQPQQPFPQQPQQPYPQQPQQPFPQTQQPQQLFPQSQQPQQPYPQQPQQPYPQQPQQPFPQTQQPQQLFPQSQQPQQPYPQQPQQPFPQTQQPQQQFPQYQQPQQQFPQPQQPQQSFPQQQPSFVQPSLQQQLNPCKNFLLQQCRPVSLVSSLWSMIWPQSDCQVMRQQCCQQLAQIPQRLQCAAIHSVMHSIIMQQQQQEQQQGMRIQLPLYQQQQV

SEQ ID NO: 8890 - protein, 468 aa, Ralstonia metallidurans CH34
MTHPVLDSGGGDTSLAARSQRAVWHPCTRLRPDASANEPPLAIVRGEGPWLIDAGDKRYFDAISSWWVNLFGHANPAINAAIGEQLQTLEHVMLAGCTHAPAVELAERLTALTGGALGNAFYASDGASAVEIALKMSFHYWRNTGLTAKREFICLRHGYHGETVGALAVTDVEIFRDAYDPLTRRAHVVMSPDARQAARSESAADVATRALAELEALLRERAGQIAALIVEPLVQGAAGMAMYDPSYLEGARALCDRYRVHLIADEIAVGCGRTGTFFAWEQARGGDAVPAHAWPDFLCLSKGITGGYLPLSLVLSRPEIQRAFVADDIARSFLHSHSYTGNPLACRAALATLDLFESEDVLARNRERAQWLGTAMAGIAADPRVSHVRQRGMIWAADIDPQAAGANFAGRFHLAARERGVLARPIGHTLYVMPPYVFDAELANWLGEQLLDTLQAVLDPAEEARHAA

SEQ ID NO: 8891 - protein, 411 aa, Rickettsia africae
DSEFAELKIRGKIFKLPILKASIGEDVIDISRVSAEADCFTYDPGFMSTASCQSTITYIDGDKGILRHRGYDIKDLAEKSDFLEVAYLLIYGELPSGEQYNNFTKQVAHHSLVNERLHYLFQTFCSSSHPMAIMLAAVGSLSAFYPDLLNFKEADYELTAIRMIAKIPTIAAMSYKYSIGQPFIYPDNPLDFTENFLHMMFATPCTKYTVNPIIKNALNKIFILHADHEQNASTSTVRIAGSSGANPFACISTGIASLWGPAHGGANEAVINMLKEIGSSEYIPKYIAKAKDKNDPFRLMGFGHRVYKNYDPRAAVLKETCKEVLKELGQLDNNPLLQIAIELEAIALKDEYFIERKLYPNVDFYSGIIYKAMGIPSQMFTVLFVIARTVGWMAQWKEMHEDPEQKISRPR

SEQ ID NO: 8892 - protein, 118 aa, Glycine max
YLSLRSYLLYFRVYLSPESSQYSSRGGQVSALSPTGGQVSALSPTLYEPVNRSCVVDAISDSSAPKHAIQAFHLLSTSREAQAVVASLACDPNVWNAVMENPAVSSFFQSQQSVADLG

SEQ ID NO: 8893 - protein, 468 aa, Methanosarcina barkeri str. fusaro
MISKKVNLETLDESKKYRVGAYSARYIPQVKEKGIPKYEFPEEGMSPRAAYQLVHDEQSLDGNPFLNLASFVNTWMEPEADKLVMENINKNIIDIFEYPQTDKVIQSNIVNMLGRLFNGHHTKFMGTATAGSSEAIMLGLLAHKWSWKNSGRGTGKPNIIFGNDAHVCWDKFAKYFDVEARKIPIDKDERKISAAAVSEQIDENTICVGCVLGTTFTGEIDPVKDINDLLLRYKKEKGWDIPIHIDAASGGFILPFTEPDFEWDFRLESVKSINVSGHKYGLTYPGLGWLIFRDENDLPEDLIFHVNYLGEMEDSYTLNFSGGSAMVVAQYYNILRFGRAGYTRIMKNILEVSQDLAEKVDRLGRFEMLNKGERLPIIAFKQKEETDYSLQQLSYKLRERGWIIPAYCLPENAADIEIMRIVVRENFTSDMAAILVNDIENACQFFENGRKSETKKPCPPDDGMVHIC

SEQ ID NO: 8894 - protein, 412 aa, Rickettsia bellii
NTEFAELKIRDKIFKLPILKASIGQDVIDISKVYSEADCFTYDPGFMSTASCRSTITYIDGDQGILRHRGYDIKDLAEKSDFLEVAYLLIYGELPNNKQYNDFTKKVAHHALVNERLHYLFQTFCSSSHPMAIMLAAVGSLSAFYPDLLNFFKEADYELTAIRMIAKIPTIAAMSYKYSIGQPFVYPDNSLDFTENFLHMMFATPCEKYKVNPVIKNALNKIFILHADHEQNASTSTVRIAGSSGANPFACVSTGIASLWGPAHGGANEAVINMLKEIGSVENIPKYIAKAKDKNDNFRLMGFGHRVYKNYDPRAAVLKETCKEVLKELGQLDNNPLLQIAIELEAIALKDEYFIERKLYPNVDFYSGIIYKAMGIPPQMFTVLFATARTVGWMAQWKEMHEDPEQKISRPR

SEQ ID NO: 8895 - protein, 411 aa, Rickettsia canadensis
DSEFVELKIRGKIFKLPILKASIGEDVIDISRVSSEADCFTYDPGFMSTASCRSTITYIDGDKGILRYRGYDIKDLADKSDFLEVAYLLIYGELPSSEQYNNFTKKVAVHSLVNERLHYLFQTFCSSSHPMAIMLAAVGSLSAFYPDLLNFKEADYELTAIRMIAKIPTMAAMSYKYSIGQPFIYPDNSLDFTENFLHMMFATPCMKYEVNPVIKNALNKIFILHADHEQNASTSTVRIAGSSGANPFACISTGIASLWGPAHGGANEAVINMLKEIGSSENIPKYIAKAKDKDDPFRLMGFGHRVYKNYDPRAAVLKETCNEVLKELGQLENNPLLQIAIELEAIALKDEYFIERKLYPNVDFYSGIIYKAMGIPSQMFTVLFAIARTVGWMAQWKEMHEDPEQKISRPR

SEQ ID NO: 8896 - protein, 252 aa, Prunus emarginata
AHYKYEADVGNAIAEAIRSGLVKREELFITSKASNHGHVVEACKDSLKKLQLDYLDLYLVHYPLATKHSGVGTTASLLDKNKVLDIDVTVSLESTWHDMEKTVSLGLVRSIGLSNYELFLTRDCLSYAKIKPQVNQFETHPYFQRASLVKFCWKHGVCPMAHTPLGGATANVKSFGSISPLDDPVLQGLAKKYKKSVAQIALRWNIDRNTPVIPKSSKIQRLKENLEVLTFKLEKEDIELINSIDKKSRTTL

SEQ ID NO: 8897 - protein, 411 aa, Rickettsia conorii
DSEFAELKIRGKIFKLPILKASIGEDVIDISRVSAEADCFTYDPGFMSTASCQSTITYIDGDKGILRHRGYDIKDLAEKSDFLEVAYLLIYGELPSGEQYNNFTKQVAHHSLVNERLHYLFQTFCSSSHPMAIMLAAVGSLSAFYPDLLNFKEADYELTAIRMIAKIPTIAAMSYKYSIGQPFIYPDNSLDFTENFLHMMFATPCTKYTVNPIIKNALNKIFILHADHEQNASTSTVRIAGSSGANPFACISTGIASLWGPAHGGANEAVINMIKEIGSSEYIPKYIAKAKDKNDPFRLMGFGHRVYKNYDPRAAVLKETCKEVLKELGQLDNNPFLQIAIELEAIALKDEYFIERKLYPNVDFYSGIIYKAMGIPSQMFTVLFAIARTVGWMAQWKEMHEDPEQKISRPR

SEQ ID NO: 8898 - protein, 252 aa, Prunus emarginata
AHYKSEADVGNAIAEAIRSGLVKREELFITSKASNHGHVVEACKNSLEKLQLDYLDLYLVHYPLATKHSGVGTTASLLDENKVLDIDVTVSLESTWHDMEKTVSLGLVRSIGLSNYELFLTRDCLSYAKIKPQVSQFETHPYFQRESLVRFCKKHGVTPMAHTPLGGATANVKSFGSISPLEDPVLLGLAKKYKKSVAQIALRWNIERDTPVIPKSSKVERLKENLEVLNFKLEKEDIELINTIDKKSRTTL

SEQ ID NO: 8899 - protein, 117 aa, Oryza sativa (japonica cultivar-group)
MARAGHNKYVARVMVVALLLAARAPVTCGQVVSTWAPCIMYADGEGVAPTGGCCDGVRTLNSAAATTADRQTTCACLKQQTKAMGRLRPDHVAGIPSKCGVNIPYAISPSTDCSRVH

SEQ ID NO: 8900 - protein, 250 aa, Triticum aestivum
  unsure (1)..(250): unsure at all Xaa locations
MYFRPPPKGPEWGGDAEAGQAARPLYPMMLESPQLRWAFVRKVYTILSIQMLLTIAVASVVVFVRPVALFFVSSPAGFGLYIFLIILPFIVLCPLYYYYQRHPVNLLLLALFTVAISFAVGLTCAFTKGEVILESAILTAXLVVEPDRRTPFWAASRGHDFSFLGPFLFAAVMILMVFALIQAFFPLGRISLMVYGGLAALVFCGYIIYDTDNLIKRYSYDEYVWAAVALYLDVINLFLSLLTLFRASDS

SEQ ID NO: 8901 - protein, 375 aa, Glycine max
  unsure (1)..(375): unsure at all Xaa locations
SFYPSQEIIDMCDYCVGLSRQLNGSIIPSERPDHMMFEVWNPLGIVGVITAFNFPCAVLGXGAPTTPLITIAVTKLVAEVLERNKLPGAIFTSFCGGADIGQAIAKDTRIPLVSFTGSSKVGLMVQQTVNERFGKCLLELSGNNAIIVMDDADIKLAVRSILFAAVGTAGQRCTTCRRLFLHESIYADVLDQLIGVYNQVKIGNPLEKGTLVGPLHTPTSVENFQKGISVIKSQGGKILTGGSVLESAGNFVQPTIVEISPDAPVVKEELFGPVLYVMKFQTLEEAIALNNSVPQGLSSSIFTQRPGTIFKWKXQKGISVIPTNGAEIGGAFGGEKATGGGREAGSDSWKQYMRRSTCTINYGSELPLAQGINFG

SEQ ID NO: 8902 - protein, 426 aa, Rubrobacter xylanophilus DSM 9941
MEPGDRSGGRYLTAREAAEELGVSVRTLYAYVSRGLVRSEAAGGGRRGRRYRAEDVRRLRERKEHRRDPARAAEGALDWGMPVLESGISLIADGRLYYRGRDAVALSGERSLEQVAQLIWTGSMAPGDRAAVPGLFRAAARSVAGCPRLPLGGARPVLDELGLALQAAASRDPAAYDLRPAAVVRTGARILRLLVGAATGEQDAGETAARALQRRWVPRDEGAAEILDRALVLCADHELNVSSFTARCVASAGATPYAAVVAGLAALGGVRHGGGTERVEAFLAEVEAAGDPREVVASRLRRGEAVPGFGHRLYPEGDPRAAALLAALAEGYPGSEALGLAEGAAEAAGALVGERPNVDFALAVLARVLGLPPGGALALFALGRAVGWVGHAIEQYASGAPIRPRARYVGEPPPRPESGPSPARSG

SEQ ID NO: 8903 - protein, 224 aa, Gossypium hirsutum
MAFVSEEEKTEDYLFKIVLDGDSAVGKSNLLARFARNEFYPDSKSTIGVELQTQKLDINGKEVKAQIWDTAGQERFRAVTSAYYRGAVGALLVYDISRRQTFDSIGRWLNELQTHSDMNVVTILVGNKSDLRDAREVSTAEGKALAEAQGLFFMETSALDSSNVAAAFQTVVKEIYNILSRKVMMSHELKKQDAPLDGKTVVLQGDENQERATESPKSGGCCSS

SEQ ID NO: 8904 - protein, 428 aa, Nostoc punctiforme PCC 73102
MHLLWFRRDLRLTDNEIVTSSSGNDARVLPFFIIDPWFYTWADVGTARVRFLFESLEKLNSNLQKLSSRLYLFEGNSTGIVQELTRQLTERGYKPKLFFNRDVQVEYGINRDKTIVDFYKQLNLDYHIGLNNFLQSAEQRDEWVNEYYTYQRQSQYKTPAIINTPQITLNLPQLTFEELKQKYHRFWAVEKVYFPGGETQAQAQLDSFLKKRYYGYHWKLSRPMLSQLGATSHLSPHLTFGTISTRTVYQSTKALAEQLKTQPKAEFSLKAFRDRLRWHDSFTQRLYFHPEIAYTNRYREFDKLYTPETLSGAKQELYQAWQQGMTGFPLVDASMRQLQTMGWMNFRMRAMCATFLTINCGVSWHHGAKHYMNYLVDGDLAIDNWQWQMQAGVTNPLSDTFRIYNPSKNIAEKDPLGVNIAKLSPGAR

SEQ ID NO: 8905 - protein, 338 aa, Ralstonia solanacearum
MYSAHDVRVENVPDATIVEPTDAIVRVTQACICGSDLWPYRAMEPSETGQSMGHEAIGVVEAIGSGVNKIKVGDVVIMPFAYSDGRCEFCHEGLQTACVHGGFFGYGGFNGAQAEALRIPQADGTLYALPGGVDSALMASLLTLSDVMGTGHHAARVARVRPGTSAAVIGDGAVGLCGVIAAKRLGAERIILMGRHPDRIALAQAFGATDIVSERGEEAIERVRALTGGHGVHSVLECVGTDQSMQTAANIARPGGAVGRVGVPHYNAIPADTTFFKNVIVGGGPAPVRAYIDDLLPDVLDGKIQPGRVFDRVIGLDEVPDGYRAMDERQAIKVMINL

SEQ ID NO: 8906 - protein, 479 aa, Rubrobacter xylanophilus DSM 9941
METGVKSLKNFIGGRFVEPASGELYDVVNPSTGEVFARAPMSGEEDVDRAFGAAAKAFEEWRESTPSERQRALLRIADRIEERAEELVRAECENTGKPYALTLEDEIPPMADQIRFFAGAARCLEGKSAGEYMRGMTSYIRREPVGVCAQVTPWNYPMMMAVWKFAPAVAAGNTVVLKPSDTTPVSTLLLAEIAAEFLPEGVFNVVCGDRDTGRLLVRHEVPQMVAITGSVRAGMEVAEAAAKDLKRVHLELGGKAPVIVFDDADPEAAAEAIAEAGYFNAGQDCTAATRVLAAPGVHDDFVAALTERARSTRTGPPDDEEAYYGPLNNENQLRRVSGIIERLPDHAEVVAGGGRVGERGYFYAPTVVSGLRQDDEASQTEIFGPVITVQPFSDEDEAVRWANGVRYGLASSVWTRDHGRAMRVSRRLDFGCVWINTHIPLVAEMPHGGFKHSGYGKDLSMYGLEDYTRIKHVMSNIEA

SEQ ID NO: 8907 - protein, 302 aa, Malus xiaojinensis
MSSGTCSTVEPAGAGEIMLFGVRLVVDSMRKSVSLNNLSQYEHPQEAASNNGNNGTAAGKDDAAPGYASENDVVHNSGGNRERERKRGVPWTEEEHKLFLLGLQKAGKGDWRGISRNFVKTRTPTQVASHAQKYYLRRSNLNRRRRRSSLFDITTDTVAPTPMDEEQVQHQDNISQSQLHPLPPPPPSEPRDAGGFSMVPNFARTVGPAVLPVHIENPMENLALRQANPENSTSAKLVHPVALHSAPHATAISDLNLNSTTDASTLTLNLSLSMDSREPSSRHSAFETMQGFSNGDSMISVA

SEQ ID NO: 8908 - protein, 1142 aa, Ralstonia eutropha JMP134
MSEVEKKGFCTLCRSRCGTVNVVDGETLVAVRPDGDHPTGKAMCLKGKAAPELVHSADRILYPMRRTHPKGADDPGWVRISWDEALDEIAARLLHARATRGAESVAFAVTTPSGTALSDSIDWIERFVRLYGSPNICYATEICNWHKDFAHAFTFGCGMPTADYRNAGLILLWGHNPTNTWLSQAEAIGAGRAGGARLIVVDPRQTALAEDADQWLRVKPGSDAALAMALANLMIEANAFDIDFVRRWTNGPLLVRQDNGAFLRGGDIGLADTDALLVWDARQRMAVPAGKGVDDAQHIALRGTFAIPRIGGGERKSLLCQPAFDLYAAECARYTVERAAALTWIPEGDIRHAASLIGAAGRIAYHAWSGVGQHENATQTERAIACLYALTGSFDRRGGNRVYSKPPFNAVSRFDLLSPDQAHKALGLDARPLGPPAQGWVTAPDLYRAITHHAPYAVTSLIAFGTNTLLSQPDVANAEQALRELELYVHCDLFENPSARHADILLPVNTPWEREGLRIGFEVSADAEQFVQLRQRMVAPLGESRSDNDIVFALAARIGLDEAFFGGSLEAGWNHMLAPTGLTVAALRDAPEGIRVLVEDVEMKYAAGTDGQPFNTPTGLVELYSERLLRHGYPPLPGLPESAWNDAGQTSASFPYLMTSAKNGYYCHSQQRGVASLRRKALLPQLDISSDIAAARNIRTGDPVRVSTPAGSARFTARVQPGLHPAVVVGEYGWWQGCDPMGQQPTAVLGTDSANFNALIDATRQDPVSGSSPLRCCHCNVERDATLDIRRRRWEGYRPFRIVGLRKEATDVTAVDLEPADGGRLPDYLPGQHVTIRLCVDTGQQEVVRSYSLTGPAVVADRRRYAIAVRHARARLASGEVVSGVASSFINTRLAIGDTIELRAPAGTFVMPTRTARPLVLLAGGIGITPFINLLESLVGQQDPPRMLLLYANQNGTTHAFRDPLRELEALIPALKVINFYDAPADGDILGSDFQVHGRVTAAAVPDALLASRPLVYMCGPDAMMTAFAAGLAARGVPRFDIQKEVFRSPTVRRIEASQAFQVQFRRSDITLSWRSEHGPLLGFAEALGIRLPSGCRVGQCESCAVRIVSGTVHHLHGEAPDDPGVCLACQAVPASDLVIDA

SEQ ID NO: 8909 - protein, 586 aa, Triticum aestivum
  unsure (1)..(586): unsure at all Xaa locations
MAGRSGEEADAAMAGVATGGVEDAYGEDRATEDQPVTPWAVCIASGHSLLRDPRHNKGLSFTEKERDAHYLRGLLPPVVLSQELQEKRLLQNVRQLDVPLQRYMFLMDLQERNERLFYKLMIDNVEELLPVVYTPTVGEACQKYGSIFRRSQGLYISLKDKGRVLEVLRNWPEKSIQVIVVTDGERILGLGDLGCQGMGIPVGKLALYTALGGVRPSACLPITIDVGTNNEELLNDEFYIGLRQKRATGQEYTELLDEFMVAVKQNYGQKVLVQFEDFANHNAFTLLEKYKATHLVFNDDIQGTAAVVLAGLMAGLKFAGGTLADHTFLFFGAGEAGTGIAELVALEISMQSKTSQEEARKNIWLVDSKGLIVSSRKDSIQPFKKLYAHEHEPVKDLLSAIKDIKPTALIGSAGVGQSFTKEVIEAMSSINKRPIILALSNPTSKSECTAEQAYSWSQGRAIFGSGSPFDPVKYNDKLFVPAQANNAYIFPGFGLGVVTSGAIRVKDDMVLAAXAEALAEQVMAEHFDKGLIYPPFSSIRKISTNIAARVAAKAYDLGLASHLPRPKDLVKYAESCMYSPIYRSYR

SEQ ID NO: 8910 - protein, 491 aa, Thalictrum flavum subsp. glaucum
MEVLSAAMVSLFFIFLFIFFILCDSRNKDLPPGPRPSPIVGNLLQLGEKPHAEFAKLAEKYGELFTLKLGSQTVVVASSPAAAAEILKTRDKILSGRYVFQSFRVYEHVLNSIVWSECNENWKLLRKVCRTELFSPKMIESQAYIREAKALDMVRFLRKKENQEVKIVEVVFNTLVNIFGNLIFSKDVFDLEDPTGGSAELKEHLWKLLDMGNSTNPADYFPIMGKFDLFGQRREVAKVLKQIYDVWGVMLKERRSITGHRENDFANVLLNAGLDDQKINALLMELFGAGTETTASTIEWAITELTNNLRVISKLRAELINVVGHKTVKESNIPHLPYLQAIVKETLRLHPPTPLLLPRRALETCKVMNYTIPKECQIMVNAWAIGRDPKTWDDPLTFKPERFMNSTVDYKGNDFELIPFGGGRRICPGLPLASQFLSLIVATLVQNFDWSFPQGMTPNEVPMDEKFGLPLQKDPPLLIVLKARTSMKLQD

SEQ ID NO: 8911 - protein, 483 aa, ASPERGILLUS NIDULANS FGSC A4
MASGTLPPFPTKLFINNQVENTPHPSTLLPADRMIINLVERDAERLAILESLPTGKPVTPTIHFDIAHMLEVWRYYAGWTDKISGESYPESNGVYKIVRHEPLGVCAGIASWNATFMYIGWKIAPAVAAGNCFIFKPSEKSPFGTLALGALFAEAGFPAGVVQILNGGAETGAALARHMDIAKISFTGSLGGGKAVQEAATKSNLKKVTLELGGKSPAVVFADAELERALGGVCGFLFNSGQVCVATSRVLVQKPIFEKFTQGLKSAFEQTSSTLGADPLDKNVSYGPIVDKAQFDKIMSYIAIGKQTATLLTGGERKGDKGFFIKPTIFVNPEPESPIVKEEIFGPVMVVQTFETEEEAIALANATVYGLAASVYTSNIDRALRVSSALECGGVAVNSPFLPQVNTAFGGIKASGKGRELGLYGLLEYTEAKSVHITCCVNRGGWNDLGTQPDQLQTAGSVMNCLRQEAETIWIDEAYRTST

SEQ ID NO: 8912 - protein, 328 aa, Bacillus cereus G9241
MVERLYGHHFHLQDEYFGGSAIDLNGQPLPQRTLAACLASDAVLLGAVGGPRWDSAKERPEKGLLALRKGLGVFANVRPVTVESATAHLSPLKKADEIDFVVVRELTGGIYFSYPKERTDEVATDTLTYHRHEIERIVSYAFQLASKRKKKVTSIDKANVLESSKLWRTVTEEVALRYSDVELEHILVDAAAMELIRNPGRFDVIVTENLFGDILSDEASVLAGSLGMLPSASHAEKGPSLYEPIHGSAPDIAGKNKANPIAMMRSVAMMLGQSFGLTREGCAIEEAISAVLKSGKCTADIGGTETTTSFTKAVMQEMEEQALVGRGR

SEQ ID NO: 8913 - protein, 335 aa, Bacillus cereus ATCC 14579
MCGITGWVDYKRSLEGERDVVTKMAETLAKRGPDDNKVWIKGNVAFGHKRLIVVDPEGGKQPMTCLKDETNYAICYNGELYNTEDIRKELLRRGYRFKGHSDTEVLLASYIEWKEECVDHLNGIYAFAVWDEQKEQVFIARDRLGVKPLFYKYDSGRLLFGSELKAILSHPDVKAEVTLEGLSEIFGLGPSRTPGHGIYAGIKELRPGHAMTFSKNGLCIWRYWNVESKKHEDSFEETVEKTRFLLQDAITRQLVSDVPLCTFLSGGVDSSAITAIAAKEYERSGKGQLHTYSIDYEDNDKYFKANAFQPNSDAPFINLMTETFQTNPSSLRHFE

SEQ ID NO: 8914 - protein, 481 aa, Pseudomonas aeruginosa PAO1
MNGLPMNLIWFRCDLRTTDNSALLAAADGRPCLALYLLSPAQWREHDDAPCKVDFWLRNLGELQRQLAALNIPLLVRDCGHWRQAPEVIGRLCRELGVGAVHVNQEYGVNEERRDQAVGQRLREQGVAFHSHLDQLFFAPGSVLTRTGGYFQVFSQFRKVCHERLYQALPGVRPRPQPQPPHALASDPLPDAVPAFPRPADSLRRLWPAGEEVAQERLRDFADQHLADYHERRDFPALPGTSQLSPYLAAGVLSPRQCLDAALVANRGEFSGGQQGAATWINELLWREFYKHILVGYPRVSRHRPFREETEALRWRQAPAELEAWQQGRTGIPIIDAAMRQLLATGWMHNRLRMVVAMFLSKNLLIDWREGERWFMRHLIDGDLAANNGGWQWSASTGTDAVPYFRLFNPLSQSERFDPRGEFIRHWLPELAGLERKAIHDPSSLGLFAGVDYPRPMVDLKASRERALAAFRNLPPRDGRA

SEQ ID NO: 8915 - protein, 176 aa, Zea mays
  unsure (1)..(176): unsure at all Xaa locations
MHASGAISYRKEKNKKDTAVAPFQGLKSTASLPIARRSSRSLGNVSNGGRIRCMQVWPAYGNKKFETLSYLPPLSTDDLLKQVDYLLRNGWIPCLEFSKVGFVYXENSTSPCYYDXPYWAMWKLPMFGCNDATQVYKELQEAIKSYPDAFHRVIGFDNIKQTQCVSFIAYKPPGSD

SEQ ID NO: 8916 - protein, 509 aa, Zea mays
MIANGLRKSSAASSQVSKLVKYIASAGSLQGGHSLSEPSARHYSSEPSLQATEENGFKGHSMLAPFTAGWQSTDVHPLVIERSEGSYVYDSNGKKYIDALAGLWCTALGGNEPRLVKAATEQLNKLPFYHSFWNRTTKPSLDLANDILSMFTAREMGKVFFTNSGSESNDSQVKLVWYYNNALGRPDKKKFIARSKSYHGSTLIAASLSGLPALHQKFDLPAPFVLHTDCPHYWRFRLPDETEEEFSTRLANNLENLVLKEGPETIAAFIAEPVMGAGGVILPPKTYFEKIQAVLKKYDILLIADEVITAFGRLGTMFGCDMYNIKPDLVSIAKALSSAYMPIGAILVSPEITDVIYSQSNKLGSFAHGFTYSGHPVSCAVAVETLKIYKERNIVEHVNKIAPRFQEGIKAFSGSPIVGEIRGLGLILGTEFVDNKSPNDPFPAEWGVGSIFGAECEKRGMLIRVAGDSIMLSPPLIMTPNEVEEIISKFGDALKATEERIGELKSRKN

SEQ ID NO: 8917 - protein, 456 aa, Arabidopsis thaliana
MISPTMEQGESLRIRVVMGKDRISELPDGLLLKILSSLPTNIVVATSVLSKQWRSLWKLVPNLEFDSDDYESEHYTFSEIVCKSFLSHKAPVLESFRLKFVNFNPVDIGLWVGIAFSRHLRELVLDFYPAELGKGVTFTFPSSLCTCNTLETLKLVLCILVDIPSPVLMKSLRTLHLEFVRYKDESSVRNLLSGCPGLEELRLYRGDDSDIKVFTIEVPSLQRLTIHDNNDGPEFWGYVINAPFLKYLLIEELRCPEFCLNAPELVEANIAEVTSITIEKFLGSFTSVSRLLLNLSPLKITYPTGSMFYQLVSLEMYTREAEWWNLLTLMLENSPKLQVLKLTDRSQNFHKDGLVSGKWNEPKDVPECLLSQLETFVWRRFDWGREEEKEIATYILKNGRRLKKATFSTNPIESEELNKLKERRKVLNGLDGVVRASNSCQLVFKFDPSYLGSDSP

SEQ ID NO: 8918 - protein, 289 aa, Fusobacterium nucleatum subsp. nucleatum ATCC 25586
MSMTQINWYPGHMKKTKDLIEENLKLIDVVLEIVDARIPLSSKNPNIASLSKNKKRIIVLNKSDLVSKQELDKWKKYFKEQDFADEVVEMSAETGYNVKKLYEAIEFVSKERKEKLLKKGLKKVSTRIIVLGIPNVGKSRLINRIVGKNSAAVGNKPGFTRGKQWVRIKEGIELLDTPGILWPKFESKTVGINLAITGAIRDEILPLEDVACSLLRKMLEQGRWESLKERYKLLEEDRDDKVLENILSKIALRMAMLNKGGELNVLQAAYTLLRDYRVAKLGKFGLDEI

SEQ ID NO: 8919 - protein, 323 aa, Deinococcus radiodurans R1
MVRPDFFLLGEPMPVDPNLYQLLLQLSQAPEPAGLEELRAGVIANAARSPKRPVTIGEVRDLSVAGAEGSLPARLYHPAGQAPASGWPLTVFFHGGGFVVYDLDTHDALCRELCATSGAAVLSVAYRLAPEARFPAPVDDALASVVWAAAHAAELGADAGRLAVAGDSAGANLATVTALRSRDEGGPALRAQLLIYPAADFEHPERYPSRQENGRGYFLTDERMRFFGQMYLARPEDAAHPHASPLNAESLAGLPPALVLTAEFDPLRDEGALRRSSQGRWRNAEYRPGPGMIHGYANMTAFSPVAAQLIDEAGVWLGEQLRG

SEQ ID NO: 8920 - protein, 231 aa, Triticum aestivum
  unsure (1)..(231): unsure at all Xaa locations
MKTLLILTILAMAITIGTANIQVDPSGQVQWLQQQLVPQLQQPLSQQPQQTFPQPQQTFPHQPQQPVPQPQQPQQPVPQPQQPQQPFPQQPQQPFPQPPQPPLPQTQQPQQPFPQQPQQPFPQTQQPQQPFPQQPQQPFPQTQQPQQPFPQQPQQPFPQTQQPQQPFPQLQQPQQPFPXPQQQLPQPQQPXQSFPQQQRAFIQPSLQQQLXNPCRNXPTMPNLNWGILLGQ

SEQ ID NO: 8921 - protein, 525 aa, Triticum aestivum
  unsure (1)..(525): unsure at all Xaa locations
MAAIKPPPPDRPPQAARLPSPSSSSSAVAAAKRGATGSRGLLMGRYELGRVLGKGTFAKVYHARHVQTGESVAIKVLDREKAVRSGLVSHIKREIAVLRCVRHPNIVHLFEVMATKTKIYFVMELVRGGELFSRVSKGRLKEDIARRYFQHLISAVGFCHTRGVFHRDLKPENLLVDEAGNLKVSDFGLSAVAEPFQPEGLLHTFCGTPAYVAPEVLARRGYEGAKADIWSCGVILFVLMAGYLPFHDQNLMAMYRKVYKGEFRCPRWFSKDLTSLIMRFLDTNPSTRITLPEVMESRWFKKGFRPVKFYIEDDQLYNVIDAENDMLDLGLPDPLPQPLLPPPSSPSPQEVDGDDSGSESDASVVSCPATSSFEERHRLRGPLPRPASLNAFDIISFSRGFNLSGLFEEKGDEVRFISSEPMSGIITKLEEIANVKSFAVRKKDWRVSLEGTREGVKGPLTICAEIFELTPSLVVVEVKKKAGDKEEYDDFCNKELKPGMQHLVHQMAPVPITPTISEXAERPSR

SEQ ID NO: 8922 - protein, 370 aa, Triticum aestivum
  unsure (1)..(370): unsure at all Xaa locations
MEKTNIVACRNPTSRDASDDEEATWSHAWGLISGFAVSITLKTAIELGIIDALTNAAGRALTVDELAAQLPAPDKAGSAASVDRLLRLLAAFDVVRCSTETGPDCEAVRKYTPAPVCRWLTSNXSMTHRLRDQIDHSNFVCYXTGHDAGAAVVCPAPTPFERAHRAPLCVYLGKNPRLSGVFNQAMFHMSVTVISKMVERFDGFDGVEVLVDVGGGTGAALEMITARHKHIKGINFDLPYVITQAPSLPGVENIAGNMFENVPTGDAIFLKWILHLQNDDECIKILKNCHRALPANGKVIVVEIVLPTTTEATREAQNMFLLDVIMFNNQQGGKERTEQDFLKMARSSGFDGAFRSTYIFGNFWALEFTK

SEQ ID NO: 8923 - protein, 250 aa, Thermoplasma acidophilum
MDIDERPLEEPQPGWVTVRVNYAGICGSELSAFVGQNELRKPPSIMGHEFTGKVVKVGSSSDSNLLGKNVAVNPLVTCGKCRYCKTGNRQLCPERKLIGVDYPGGFEEYVNVPSYSCYEITEKPEGSLAEPLATAFRAINHAKPEMDDRALVIGAGTIGLLSAKLLELYGTVERVVTDINDYRLEHALHWGATRTINNKKEKSIPKDFDIVIDAVGTQETRTMAINSIARGGRVVFVGLHEPNAEMPVNL

SEQ ID NO: 8924 - protein, 411 aa, Rickettsia prowazekii
NLEFAELKIRGKLFKLPILKASIGKDVIDISRVSAEADYFTYDPGFMSTASCQSTITYIDGDKGILWYRGYDIKDLAEKSDFLEVAYLMIYGELPSSDQYCNFTKKVAHHSLVNERLHYLFQTFCSSSHPMAIMLAAVGSLSAFYPDLLNFNETDYELTAIRMIAKIPTIAAMSYKYSIGQPFIYPDNSLDFTENFLHMMFATPCTKYKVNPIIKNALNKIFILHADHEQNASTSTVRIAGSSGANPFACISTGIASLWGPAHGGANEAVINMLKEIGSSENIPKYVAKAKDKNDPFRLMGFGHRVYKSYDPRAAVLKETCKEVLNELGQLDNNPLLQIAIELEALALKDEYFIERKLYPNVDFYSGIIYKAMGIPSQMFTVLFAIARTVGWMAQWKEMHEDPEQKISRPR

SEQ ID NO: 8925 - protein, 210 aa, Triticum aestivum
  unsure (1)..(210): unsure at all Xaa locations
MDEEGDEVYGPEIPVDGDMEAADVDMTAAGDDAAKELDEMKRRLKEMEEEAAALRDMQAKVAKEMQGGDANASTAEAKEQVDARSVYVXHVDYACTPEEVQQHFQACGTVNRVTILTDKFGQPKGFAYVEFLEQEAVQEALNLNESELHGRQIKVSPKRTNVPGMKQRPPRGFNPYHAYPYRSYGAPYFPPYGYGRVPRFRRPTRYRPYF

SEQ ID NO: 8926 - protein, 489 aa, Streptomyces galilaeus
MDRADRRYQDLVTRGFNGRFRGRPDVVYVVHTADQVVDAVNQAVAAGRRIAVRSGGHCFEGFVDDPAVRAVIDMSQMRQVFYDSGKRAFAVEPGATLGETYRALYLDWGVTIPAGVCPQVGVGGHVLGGGYGPLSRRDGVVADHLYAVEVVVVDASGQARKVVATSAADDPNRELWWAHTGGGGGNFGIVTRYWFRTPGATGTDPSALLPKAPTSTLRHIVTWDWSALTEEAFTRIIDNHGAWHQRNSAAGTPYASMHSVFYLNSRAAGQILLDIQTDGGLDGAETLLNDFVAAVNEGTGVEPAVQRTTEPWLRATLANKFDTGGFDRTKSKGAYLRKPWTAAQAATLYRHLSADSQVWGEVSLYSYGGKVNSVPETATATAQRDSIIKVWMSATWMDPAHDDANLAWIREIYREIFATTGGVPVPDDRTEGTFINYPDVDLADPRWNTSGVPWYTLYYKGNYPRLQRVKARWDPRDVFRHALSVRPPG

SEQ ID NO: 8927 - protein, 430 aa, Amycolatopsis mediterranei
MTVQKAPSQLLAAKLQIPPIPYSHAAGSWVYASDGTRYLDGASGIVNVNIGHAHPTVVAALRDQVGICTYASPGTFAPDLMEQLAAAAARAVHRPDDRVMFTPTGTHATESAIALARLVQRARGEEGRHKILTSTLGYHGNSAFVLALSGHRSRRPHEDDSFGLAPAFNPPYPGQHLGCPFDACRVECVRAVRDAIVAAGPESVAAVLMEPVNGTTGGGYVPPAGYLRALREVCDEFGVLVIHDEVLTGLGRCGLPLASHHTPGSAADIVTLSKGLGAGYVPLAATMLSPDLAEDIMTSGKWLPLMGTMSATPLQGRAGLAVLSVLEELGALDRDEVRGAALGRLVADAVRGRQVVTDVRGLGYFYGIELAPGTLGDVMRITRSRGLLLYPYVGFRPDRTGEGLLVAPRSTRPTAISASSARRWARHWTS

SEQ ID NO: 8928 - protein, 280 aa, Lactococcus lactis subsp. lactis Il1403
MIEQEKYTLNDGHLIPKIGLGTFQIRGYEGVEQILTAIQSGYRLLDTSTNYDSEGAVGEAIRRSGIPRSNFFVTTKLPGKYHHFEDALKMIEESLLRTGLSYFDLYLIHWPLPKRDNYVEAWKALIAAKKRGLVRSIGVSNFEEDHLDKIIQETGVIPAINQNEIHPYWPQEKLLKINKKYGILTEAWSPLGRGSKELEESLIQNIAQKYGKDTGQIILRWQVERGIIPIVKATSPEHQRRNIDIFDFSLSSEEINKITALKQENGRVDNQDPNEYEEFV

SEQ ID NO: 8929 - protein, 322 aa, GIBBERELLA ZEAE PH-1
MSSYADSWLKFEEGIGGVRPVLRGTAEEMRTQYNGLGSALASLSSPVSDTQVKVTEGDVSGIKYRIYKPQGETKNFPIGVFYHSGGFVVGNLDAEDSFCRTVALRAGITIVNVDYRLSPEHKAPTHVEDAVALYEWAYHNAESISGDPSKMFTIGTSAGGGLALSTARKIVLGQTTLPMDAIKGVVALCPLTLHYENIPAEHQPQHLSYQEHGENIPIVDKLSLSQMLANTGIRPDDKDYFPILDHSCLKLFPPTYVVTCGQDALRDDGNILSNALSSAGVPTKTNHYESMPHCFWIVPTLPETKEFLDALTGGIQWIKSRF

SEQ ID NO: 8930 - protein, 411 aa, Rickettsia rhipicephali
DSEFAELKIRGKIFKLPILKASIGEDVIDISRVSAEADCFTYDPGFMSTASCQSTITYIDGDKGILRHRGYDIKDLAEKSDFLEVAYLLIYGELPSGEQYNNFTKQVAHHSLVNERLHYLFQTFCSSSHPMAIMLAAVGSLSAFYPDLLNFKEADYELTAIRMIAKIPTIAAMSYKYSIGQPFIYPDNSLDFTENFLHMMFATPCTKYKVNPIIKNALNKIFILHADHEQNASTSTVRIAGSSGANPFACISTGIASLWGPAHGGANEVVINMLKEIGSSEYIPKYIAKAKDKNDPFRLMGFGHRIYKNYDPRAAVLKETCKEVLKELGQLDNNPLLQIAIELEAIALKDEYFIERKLYPNVDFYSGIIYKAMGIPSQMFTVLFAIARTVGWMAQWKEMHEDPEQKISRPR

SEQ ID NO: 8931 - protein, 122 aa, Staphylococcus aureus subsp. aureus COL
MANHEQIIEAIKEMSVLELNDLVKAIEEEFGVTAAAPVAVAGAAGGADAAAEKTEFDVELTSAGSSKIKVVKAVKEATGLGLKDAKELVDGAPKVIKEALPKEEAEKLKEQLEEVGATVELK

SEQ ID NO: 8932 - protein, 475 aa, Synechococcus elongatus PCC 7942
MYEKIQPPSEGSKIRFEAGKPIVPDNPIIPFIRGDGTGVDIWPATERVLDAAVAKAYGGQRKITWFKVYAGDEACDLYGTYQYLPEDTLTAIREYGVAIKGPLTTPIGGGIRSLNVALRQIFDLYACVRPCRYYTGTPSPHRTPEQLDVVVYRENTEDIYLGIEWKQGDPTGDRLIKLLNEDFIPNSPSLGKKQIRLDSGIGIKPISKTGSQRLIRRAIEHALRLEGRKRHVTLVHKGNIMKFTEGAFRDWGYELATTEFRTDCVTERESWILANQESKPDLSLEDNARLIEPGYDAMTPEKQAAVVAEVKAVLDSIGATHGNGQWKSKVLVDDRIADSIFQQIQTRPGEYSVLATMNLNGDYISDAAAAVVGGLGMAPGANIGDEAAIFEATHGTAPKHAGLDRINPGSVILSGVMMLEYLGWQEAADLITKGISQAIANREVTYDLARLMEPAVDQPLKCSEFAEAIVKHFDD

SEQ ID NO: 8933 - protein, 167 aa, Magnetospirillum magnetotacticum MS-1
MAPSSFDRQMVSQANVSATVKWFNASKGFGFVAPSDGSPDAFLHISALERAGLTQVAEGATLVVDLGAGQRGPQVVMVHEVDSTTATPRAPRREERGPTETVEGVVKFFSAEKGFGFVACDEGGKDVFVHVKALERSGIKTLESGQRVRVTTTLGLKGPQADTVAII

SEQ ID NO: 8934 - protein, 354 aa, Nicotiana tabacum
MAADNIYDFVASNLLCTETKSLCFDDVDSLTISQQNIETKSKDLSFNNGIRSEPLIDLPSLSEECLSFMVQREMEFLPKDDYVERLRSGDLDLSVRKEALDWILKAHMHYGFGELSFCLSINYLDRFLSLYELPRSKTWTVQLLAVACLSLAAKMEEINVPLTVDLQVGDPKFVFEGKTIQRMELLVLSTLKWRMQAYTPYTFIDYFMRKMNGDQIPSRPLISGSMQLILSIIRSIDFLEFRSSEIAASVAMSVSGEIQAKDIDKAMPCFFIHLDKGRVQKCVELIQDLTTATITTAAAASLVPQSPIGVLEAAACLSYKSGDERTVGSCTTSSHTKRRKLDTSSLEHGTSEKL

SEQ ID NO: 8935 - protein, 99 aa, Brassica napus
  unsure (1)..(99): unsure at all Xaa locations
RVRELRCFQAVTCYQAVINNLEDAHELIXTAISTALKKTRPAKITTTXKLAGNPKAKFNPQPGPLSRVPKVSKLMGLDTAVEARAEFLSKAVXPVLVGG

SEQ ID NO: 8936 - protein, 77 aa, Glycine max
MGFWTLLEGFLLFANASAILNEDRFLARRGWTLAEMTGPQRNSLKGQVIGLIYACQFLRLPLILFNVITIIVKLFSG

SEQ ID NO: 8937 - protein, 439 aa, Nostoc punctiforme PCC 73102
MSSPQILLIRRACIVLPNGEMMIGDVLTRDRQIVEVAPEISQTAVVTEIDAEGLTLLPGVIDPQVHFREPGLEHKEDLFTASCACAKGGVTSFLEMPNTRPLTTTQQALDDKLERASQKSLVNYGFFIGATAENLPDLLLAKPTPGIKIFMGSMHGQLLVDGETTLETIFAKGDRLIAVHAEDQARINQRRQEFANIHDPAVHSQIQDNQAALLATQLVLKLSQKYHRRLHILHMSTAEEADLLRQEKPSWVTAEVTPQHLVLNTSAYEKIGTLAQMNPPLRSPHDNEVLWQALRDGVIDFIATDHAPHTLEEKAQEYPNSPSGMPGVETSLALMLTAAMEGKCTVSQVVNWMSKNVAVAYGIPNKGVIAPGYDADLVLVDLNTYRPVRREELLTKCHWSPFEGWNLTGWATTTIVGGEIVYDKGQVNTQVRGQALTFL

SEQ ID NO: 8938 - protein, 316 aa, Escherichia coli
TDKLTSLRQYTTVVADTGDIAAMKLYQPQDATTNPSLILNAAQIPEYRKLIDDAVAWAKQQSNDRAQQIVDATDKLAVNIGLEILKLVPGRISTEVDARLSYDTEASIAKAKRLIKLYNDAGISNDRILIKLASTWQGIRAAEQLEKEGINCNLTLLFSFAQARACAEAGVFLISPFVGRILDWYKANTDKKEYAPAEDPGVVSVSEIYQYYKEHGYETVVMGASFRNIGEILELAGCDRLTIAPALLKELAESEGAIERKLSYTGEVKARPARITESEFLWQHNQDPMAVDKLAEGIRKFAIDQEKLEKMIGDLL

SEQ ID NO: 8939 - protein, 100 aa, Glycine max
  unsure (1)..(100): unsure at all Xaa locations
MASSTISDPAVTXVNHAQADIVTTFTDLKSKTALPTRNTNNDITSIGSNTGRVHFMQAYPAHNKNNTDTVSYLAHLYDAQXSKDEEYLIMNGWMNCLQFK

SEQ ID NO: 8940 - protein, 140 aa, Glycine max
  unsure (1)..(140): unsure at all Xaa locations
LSTATRAGMVAPFTGLKTMAGFPTSKTNNDITPRASNGGRVSFFXERTPDGKNEVDTLRHLPDDDDAQLAKEPATVLXKGWIPWLEFEKEDGFVYREHKRAPGYYXGRYWTMSDTETFGRTDRSPVLKRLSXGNTGYPQA

SEQ ID NO: 8941 - protein, 288 aa, Oryza sativa (japonica cultivar-group)
MAAAAAACVESPDEGVEIREVWAGNLEAEIAAIRDEVDRYPYVAMDTEFPGIVCRPVGNFRTTDEFNYANLEANVNMLKLIQLGLTLSDEGGDLPRRGTGGRRCIWQFNFRGFDPRTDPSNADSIQMLRTCGIDFDRFAAEGADPIRFAELLMSSGVVLNADVQWITFHSGYDFGYLLRLLTGRNLPDNMPAFFDLIRIYFPVLYDIKHLMRFCSNLHGGLSRLGELLDVKRVGTCHQAGSDSLLTLGCYNKIKEVYFKGSTEKHAGVLYGLVIEDGVNRPPPTQPNE

SEQ ID NO: 8942 - protein, 355 aa, Thalictrum flavum subsp. glaucum
MALQEGVNYLSGLGLSRLICLPMALRAAIELNVFEIIFQAGPEAQLSPAEIVAKIPTKNPNAAIALDRILRMLGASSILSVTTMKDGRVYGLTEESRCLVADKNGVSVVPMLLFTSDKAVVESFYNIKDVVLEEGVIPFDRTHGMDFFAYAGKEQSVNKSFNQAMGAGSTIAFDEVFKVYKGFHDLKELVNVGGGIGTSLSNIIFKYPHIKGINFELPHVIADAPNYPGVEHIAGNMFEGVPNAQNILLKWVLHDWDDERSIKILQNCWKALPEGGTVIVVEFVLPQILGNNAESFNALTPDLLMMTLNPGGKERTTTEFDGLAKAAGFAETKFFPISQGLHVMEFHKATAGVAS

SEQ ID NO: 8943 - protein, 312 aa, ASPERGILLUS NIDULANS FGSC A4
MSKPGDYNAVRRDIAAQLKKPGYDDGSAGPVFVRLAWHSSGTYDAASDTGGSNGAGMRYEAEGGDPANAGLQHGRAFLEPVKEKHPWITYSDLWTLAGVVAIEEMGGPKIPWLPGRTDFVDDSKVPPRGRLPDGAQGADHLRFIFYRMGFNDQEIVALAGGHNLGRCHADRSGFQGPWVNNPTRFSNQFFKLLLNMEWKPKTLENGVSQFVYIDPEAEDHEEPLMMLPTDVALRDDPAFRPWVERYAKDKDLFFDHFSKAFAKLIELGIQRDASGKVTNTDNVKGGYHSAPKKSDEPTGPPRPHTAQRAAKL

SEQ ID NO: 8944 - protein, 1251 aa, ASPERGILLUS NIDULANS FGSC A4
MTVWLMWQEERAVESLVTCDAARVGGKERRDLQPKNGLRKEKLIAETVLSAMTEQDNSYRPRSPDLSTFQPAIPSPVYQFGNPLAHRTSYDASPFFTPHYQQPPVASARALQQYIPPYPDHSFDADMARRSSRLSRAVEVAPAPAPEMKYEEPKYEEPLYQEPVKPEQPSEPVEHPKLDPAAGIEVKTKFPVARIKRIMQADEDVGKVAQVTPIAVSKALELFMISLVTKAAKEAKDRNSKRVTASHLKQAVAKDEVLDFLADIIAKVPDQPTGRKHEDDGSDQNEQPKRKRGGRRPKDDNRDGAHILRRCGGGMACIFDVNRALILGTLISLQAINLAFYLHYLLNFPQLCTEKVRTWVLTLNPFRSQGHHAAYSEYFHSPSYLLFSSRLLLVLLPARKYHAVATAKMDFWSRIIGGSRSLSKSPRATSPTERLTTFKRTCNTLQQIWRSSNSTAAEQAAIVHARHCIERLNSVLSDESRGPAPHPCLAYAASSQIFVTVTKLALSSYDEAMLRSATVLFNTLIDSEVDGVVDNRLFARALVDLVRRADKKSADIEGRLVELLFGVANNIRLQPNILPAWFAPRTDDEEQSTGSVEFAGTMRTDDFPLFYLLVEWVHHAGRAGDFARTGLLYLIETASRSKDLERWLIESDLATLMATGLGALYSQLGSLGSCLDVEPVVPHVISHSDHAQQETALPPALGSSMDSFMAYLLFWQDTIDHCKSAEVVATLLDHFQVLFLEQLLYPSLLESSDVEGGSTAAVLTYLYRILASVDQEDLVQRILHFLLASPSGVDVQAPEKKKDMSASRRKSLDVLAAFSQEAARPSPTLFNLRDLVLLGLQSPNRQTVLATLRLLTVILQRYSSFSIFLIRTNPTQPAKQRTVGALNAEVGHLLTMATSIMEEPTLDQSFDNYLKDASWILESRLATPPPDNCSETLPCEIRQEDPIVRELLGCLETFFTNTVIVNLALTEVLMSIASSHLMALDGWLLVDPAKYHYVQSDGGSSNDKSEDILDQVHRMYQEPTWSPADTPALTAALRRLVDKVQEWRKQVEDFDILIAARRDLLHEDDVRTNQAEQNLGTPAPRSTERYSSNTPRTPPLGFDQGTPRGRRDLRNLTSPQRSIVGSPLREVTVNKTHSPPPRDASEARSAAEELRKRLAAPFLPESKVSTFNDRTDNSAQEPSPADQEVAVTDEEERKPKAETASLGHVLTNVVILYEFLLEISAAVQARGAIFEEAGFHGVGSSLPVDDS

SEQ ID NO: 8945 - protein, 150 aa, Brassica napus
MERSLLQWRLLPLLALIASFLSVFFASRSYEKETQCSLLPHDHYWISSKRILTPDGLISGSVEVNGGVIVSVVKEEDWYKEQRSRVKVTDYGEAVIMPGLVDVHAHLDDPGRSEWEGFPSGTKAAAAGGITTLIDMPLNSDPSTVSPETL

SEQ ID NO: 8946 - protein, 333 aa, Glycine max
  unsure (1)..(333): unsure at all Xaa locations
MEVVSDEEAFLFGMELAGASAVSMVLKSALELGILETIAKAGPGAYLSPSHIXYNILTYSLHQLPHGKAERHYGLHPKAKYLVNNEGGVSVAAYFLMEHDKVLKDMWFHLTDSVKEGGHPFSNAYGMTAFEFHDTNPRFNKLFNKGLSDISSITMKKILETYNGFEGVGSVVDVGGGTGAIINMVASKYPTTKCVNFDLPHVIKEAPAYTGVEHISGDMFVSVPKGDVIFMKWVCHDWNDEQCLKLLKNCYDSLPDDTGKVILAEGISPETPDSNLAARCEFQMDVIMLCHSPNGKEKTEKEYKALAKGAGFHGFRIASCVLNTHVMEFLKKA

SEQ ID NO: 8947 - protein, 147 aa, Thermotoga maritima MSB8
MLLGRREDIFRPFRELQREIDRLFDDFFRTEVRPAKEFFAPDMDVYETDDEVVIEVEIPGIDRKDVKITVEENILKISGEKKLEREQKGKNYYYVERSAGKFERAIRLPDYVDVEKIKAEYKNGVLTIRVPKKEERKKKVIEVEVQE

SEQ ID NO: 8948 - protein, 481 aa, Mesorhizobium loti MAFF303099
MDIGLLIDGDKRDASGAAAYERLDPFTGKLATRAAAASVADANAAVEAAAAAFATWSKTGPGERRALLSRAADVMASKVGEFTKLMMEETGATAPWAGFNVMLAANMLREAAAMTTQISGEIIPSDKPGTLAMAIRQPAGVCLGIAPWNAPVILGTRAIAMPIASGNTVVLKASEMCPGTHRLIGQVLVEAGLPKGVINVVTNDPKDAAAIVEALVAHPSVKRVNFTGSTKVGRIIAELAGRHLKPALLELGGKAPLLVLDDAAIDAAVNAATFGAFMHQGQICMSTERLIVDERIADEFVSKLAARASQLPAGDPRGHVVLGSLISSQAADKMEELIADAVAKGAKLVAGGKRTGTVVEATLLDHVTPAMRVYAEESFGPVKPVIRVKDEDEAVRVANDTEYGLSSAVFSRDIKRAMAVAARIEAGICHINGPTVGDEAQMPFGGVKGSGYGRFGGKASIAEFTDLRWVTIEDPGQHYPF

SEQ ID NO: 8949 - protein, 473 aa, Schizosaccharomyces pombe
MTNTRLASTRRLASSLLSQASLRSRQLNPLFTSSYSTRSSSLKDRLAELIPEKQAEIKKFRAEHGQDVIGEVTINQMYGGARGVRSLIWEGSVLDPNEGIRFRGYTIPECQKLLPSSPNGKQPLPESLFWLLVTGEIPTLSQVQALSADWAARSQLPKFVEELIDRCPPTLHPMAQFSLAVTALEHDSAFAKAYERGMNKHDYWKYEYEDCMDLIAKTVPIAGRIYRNLYRDGVVAPIQMDKDHSYNFANVLGFANNEEFVELMRLYLTIHADHEGGNVSAHTGHLVGSALSSPFLSMAASLNGLAGPLHGLANQEVLNFLITMKKEIGDDLSEETIKSYLWKLLNSGRVVPGYGHAVLRKTDPRYTAQREFALEHLPKDPMFQLVSRLYEIVPGVLTEHGKTKNPYPNVDSHSGVLLQYYGLKEQSFYTVLFGVSRTLGVASQLIWDRALGLPIERPKSFSTEALKKMVETK

SEQ ID NO: 8950 - protein, 324 aa, Haloferax volcanii
MTEEIVVIPGDGIGAEVIPAAVDVLKAVGDFEFVEADAGDHVKEETGEALPQETYDLAAEADATLFGAAGETAADVILPLRTAVDSFVNVRPAKAYPGVDALRPETDLVFLRENTEGVYSGHEDRLSEDLSTLTRVVTTSASERLAEYACDYVGGEGGSFQVAHKANVMRETDGRFRDAAVAVADERGVETEEVLMDAFATRVCLDPTQFDTIVCPNLAGDVLSDLAAGLVGGLGLLPSANIGPDAALFEPVHGSAPDIAGEGIANPAATILSAAMLLDYLDHEAEADRVRSAVEGVLADGPRTPDLGGDASTEDVTAAILDRL

SEQ ID NO: 8951 - protein, 474 aa, Bacillus cereus G9241
MKKHLYINGDWKSVNTYKPLYAPYSEETLAEIAQGTEEDVKEAVTAAKNAMKEMNTLSAYDRATILEKVAQKMDERREEFAEIIAKEAAKPIRAARGEVDRTVQTYKFAAEEAKRIYGETLPLDAAPGADGRIAYTIRKPIGVIGAITPFNFPLNLVAHKVGPAIAAGNTVVLKPADQTPLSSYALVELFEEAGLPKGALNIISGPGSTVGEAIVTNDDVASITFTGSPKVGIGIKAKAGLKRVTLELGSNAAVIIDKDVELTDELIERVKWGAFVNNGQVCISVQRVFVHEERMDEFLSKLQKAMETLVVGDPLIEETDVSALISKKDVDRIDNWVQEAVKEGANVLYGGNKRDERIFEPTVLTNVPKHVSVQCQEVFGPLMTVNTFKEFDEAIEQANHSRYGLQAGVFTNNLFKAMRAIDELEVGGVMINDIPTFRVDHMPYGGVKESGTGREGIKYAIEEMTEMKLVCIKK

SEQ ID NO: 8952 - protein, 303 aa, Physcomitrella patens
MDQYEKVEKIGEGTYGVVYKARDRLTNETIALKKIRLEQEDEGVPSTAIREISLLKEMHHGNIVRLQDVVHSEKRLYLVFEYLDLDLKKHMDTCPDLAKDPRLIKTFLYQILRGIAYCHAHRVLHRDLKPQNLLIDRRTNALKLADFGLARAFGIPVRTFTHEVVTLWYRAPEILLGSRHYSTPVDVWSVGCIFAEMVNQRPLFPGDSEIDELFKIFRTLGTPNEEVWPGVTSLPDFKTAFPKWPPKPLSSVVPSLEPAGIDLLEVCDLSTPASEFCVVLFFFIISTFSLIVRLKQCMQSYAS

SEQ ID NO: 8953 - protein, 430 aa, Mycobacterium tuberculosis H37Rv
MSVLIRGVRPYGEGERVDVLVDDGQIAQIGPDLAIPDTADVIDATGHVLLPGFVDLHTHLREPGREYAEDIETGSAAAALGGYTAVFAMANTNPVADSPVVTDHVWHRGQQVGLVDVHPVGAVTVGLAGAELTEMGMMNAGAAQVRMFSDDGVCVHDPLIMRRALEYATGLGVLIAQHAEEPRLTVGAVAHEGPMAARLGLAGWPRAAEESIVARDALLARDAGARVHICHASAAGTVEILKWAKDQGISITAEVTPHHLLLDDARLASYDGVNRVNPPLREASDAVALRQALADGIIDCVATDHAPHAEHEKCVEFAAARPGMLGLQTALSVVVQTMVAPGLLSWRDIARVMSENPACIARLPDQGRPLEVGEPANLTVVDPDATWTVTGADLASRSANTPFESMSLPATVTATLLRGKVTARDGKIRA

SEQ ID NO: 8954 - protein, 506 aa, Pseudomonas aeruginosa PAO1
MIYAAPGTPGAVVTFKPRYGNYIGGEFVPPVKGQYFTNTSPVNGQPIAEFPRSTAEDIDKALDAAHAAAEAWGRTSVQERSNILLKIADRIEQNLELLAVTETWDNGKAVRETLNADIPLAADHFRYFAGCIRAQEGSAAEINDSTVAYHIHEPLGVVGQIIPWNFPLLMAAWKLAPALAAGNCVVLKPAEQTPLGICVLLELIGDLLPPGVLNVVQGFGREAGEALATSKRIAKIAFTGSTPVGSHILKCAAENIIPSTVELGGKSPNIYFEDIMQAEPAFIEKAAEGLVLAFFNQGEVCTCPSRALVQESIYPAFMEEVLKKVRAIKRGDPLDTETMVGAQASQQQYEKILSYLDIAQQEGAELLAGGSVEKLEGNLASGYYIQPTLLKGHNGMRVFQEEIFGPVVGVTTFKDEAEALAIANDTEYGLGAGLWTRDINRAYRMGRGIKAGRVWTNCYHLYPAHAAFGGYKKSGVGRETHKMMLDHYQQTKNLLVSYDINPLGFF

SEQ ID NO: 8955 - protein, 475 aa, Staphylococcus aureus subsp. aureus MRSA252
MRDYTKQYINGEWVESNSNETIEVINPATEEVIGKVAKGNKADVDKAVEAADNVYLEFRHTSVKERQALLDKIVKEYENRKDDIVQAITDELGAPLSLSERVHYQMGLNHFVAARDALDNYEFEERRGDDLVVKEAIGVSGLITPWNFPTNQTSLKLAAAFAAGSPVVLKPSEETPFAAVILAEIFDKVGVPKGVFNLVNGDGAGVGNPLSEHPKVRMMSFTGSGPTGSKIMEKAAKDFKKVSLELGGKSPYIVLDDVDIKEAAKATTGKVVNNTGQVCTAGTRVLVPNKIKDAFLAELKEQFSQVRVGNPREDGTQVGPIISKKQFDQVQNYINKGIEEGAELFYGGPGKPEGLEKGYFARPTIFINVDNQMTIAQEEIFGPVMSVITYNDLDEAIQIANDTKYGLAGYVIGKDKETLHKVARSIEAGTVEINEAGRKPDLPFGGYKQSGLGREWGDYGIEEFLEVKSIAGYFK

SEQ ID NO: 8956 - protein, 250 aa, Zea mays
  unsure (1)..(250): unsure at all Xaa locations
MAKNYPTVSAEYSEAVEKARRKLRALIAEKSCAPLMLRLAWHSAGTFDVSSRTGGPFGTMKCPAELAHGANAGLDIAVRLLEPIKEEFPTLSYADFYQLAGVVAVEVTGGPEIPFHPGREDKPQPPPEGRLPDATKGSDHLRQVFGKQMGLSDQDIVALSGGHTLGRCHKERSGFEGAWTTNPLXFDNSYFKELLNGDKEGLFQLPSDKALLSDPVFRPLVEKYAADEKAFFYDYKKAPLKLSELGYADA

SEQ ID NO: 8957 - protein, 491 aa, Candida albicans SC5314
MAPKLNNPNLFQNKPFINGQWYDSKSTSTFKVYDPATQELIIELPDQTPEEIDEAIAITHKAFQTYQRTPVYERAKWLRRMYELMIENLQDLATLITWENGKCLADALGEIKYAASYFEWFSEECKRNYGHTIQPSNQNNKVITYKQPVGPVGLLCPFNFPSAMGARKAAPALAAGCTCILKPDGQTPLSSLALAYLAQQAGFPDGCFNVVLTSVTNTPMCGLKFCQSPKLKKISFTGSTNVGKLLMQQSSSTLKKLSMELGGNAPIIVFNDCNLDLAVDQSITSKFRSLGQTCVCANRIYVEKGVYDEFCNKFVEKVNQFKIGNGFEPGVTHGCLINTKAIEKVEDHVQDAVEKGAKLIVEGGRLPQLGENFYSPSVVKDVTQDMKVVKEETFGPLAAIIPFDSKEQVLQWCNDTPYGLASYIFSENLNTVWYMSEFLENGMVSVNTGLFTDAALPFGGVKESGFGREGSLYGMDDYTVIKSITLGNVYN

SEQ ID NO: 8958 - protein, 325 aa, Scutellaria baicalensis
MACMATSFRPIFSIAALVLLLTLVPSEAQLSATFYDSTCPNAVSTIRTSIRQAVSAERRMAASLIRLHFHDCFVQGCDASILLDETSTIQSEKTAGPNAGSVRGFQVIDAAKTAVERLCPGVVSCADILTLAARDASVAVGGPSWTVRLGRRDSTTANRAQANTDLPGPTSTLTQLITRFDAKGLNAREMVALSGAHTLGQSQCGNFRARIYSNGSDIEANFASTRRRQCPQDGSGDSNLAPLDLVTPNSFDNNYYRNLVARRGLLQSDQVLLSGGETDAIVTSYSSNPATFASDFANAMIKMGEIQPLQLGQNGIIRRTCGAVN

SEQ ID NO: 8959 - protein, 193 aa, Magnaporthe grisea 70-15
MAEIRRKLVIVGDGACGKTCLLIVFSKGTFPEVYVPTVFENYVADVEVDGKHVELALWDTAGQEDYDRLRPLSYPDSHVILICFAIDSPDSLDNVQEKWISEVLHFCSGLPIILVGCKKDLRYDQKTIEELRKTSQKPVSPEDGEEIKKKIGAYKYLECSAKTNEGVREVFEHATRAALLSRHKTKKKKCLIL

SEQ ID NO: 8960 - protein, 277 aa, Staphylococcus aureus subsp. aureus COL
MEVKTFYNGNTMPQIGLGTFRVENDENCMESVKYAIEQGYRSIDTAKVYGNEEQVGAGIRAGLESTGIAREDLFITSKLYFEDFGRENVAAAYEASLSRLGLKYLDLYLVHWPGTNEAVMVDTWKGMEDLYKNNNVKNIGVSNFEPEHLEALLAQVSIKPVINQVEYHPYLTQHKLKLYLAAQRIVMESWSPLMNAQILNDETIKDIAQELGKSPAQVVLRWNVQHAVVTIPKSVTPNRISENFQIFDFELSDEQMTRIDGLNQDKRIGPDPKKFEG

SEQ ID NO: 8961 - protein, 278 aa, Zea mays
MTLYLQLVSTSLHAGSPRLALLHLRRSCEFNPRVSMSSYSPPPPPPRDQSMDTEAPNAPITRERRLNPDLQEQLPKPYLARALEAVDPSHPQGTKGRDPRGMSVLQQHAAFFDRNGDGVIYPWETFQGLRAIGCGLTVSFAFSILINLFLSYPTQPGWLPSPLLSIRIDNIHKGKHGSDSETYDTEGRFDPSKFDAIFSKYGRTHPNAITRDELSSMLQGNRNTYDFLGWLAAAGEWLLLYSLAKDKDGLLQRETVRGLFDGSLFERLEDDNNKKKSS

SEQ ID NO: 8962 - protein, 165 aa, Aloe vera
SGYSLLRDPHHNKGLAFTDKERDAHYLRGLLPPVCISQELQEKKLMRSLRQYQVPLQRYMAMMDLQERNERLFYKLLIDNVEELLPVVYTPTVGEACQKYGCIFKRPQGLYISLKEKGKILEVLKNWPERSIQAIVVTDGERILGLGDLGSQGMGIPVGKLSLYT

SEQ ID NO: 8963 - protein, 138 aa, Triticum aestivum
  unsure (1)..(138): unsure at all Xaa locations
GTFVAPFQGLKSTAVLPISRRSSSAGLSSVSNGGRIRCMQVSPIEGIKKFETLSYLPPLSTEALLKQDDYLIRSKWVPCLEFSMVGFVFREHNSSPGYYDGRYWTMWKLPMFGCTDAIQVLNEVXEVKMEYPDSYVRL

SEQ ID NO: 8964 - protein, 129 aa, Treponema denticola ATCC 35405
MAALTNEQIIEAIGEKTILELSELIKAMEEKFGVTAAAPVAVVAGGAAGGGAAEEEKTEFTVTLKGLSDPGKKIGVIKEVRNVIPGLGLKEAKELVEGAPKVLKEDVSKEEAAKIKEAITAAGGEVEIA

SEQ ID NO: 8965 - protein, 375 aa, Pseudomonas aeruginosa UCBPP-PA14
MDTPIERAPLAPDLSQARYAVDLTGLVPAEVAAGLPPLPPNHFYFYPPDPLLEGDGAITAIEDSDPFDQYVYRLRRVLYQGRTRWQNVLIADTYNYDRVLMLDGAIQSAESDESLYHELLVQPAMLAHDEPRDVLIIGGGEGATLREVLSHASVRRAVMVDLDRELVELCREHLFQWHQGAFDDPRCELLAEDGRAYLERDPSLYDVVIIDVVDMLDNGPAQALYTRQFYELLHSRLRPGGVVAVQGLEFSHSDDKPHAALARTLRSVFSQVHSYRATVPSFLSSWGFLLASDWLDANHWQAEDIDRRIERKLGPLWLDHLDGDYLKACFVMDRETRFLLAQPGPVLEDGVPFVAPPDIEEIEFGPAQLPALART

SEQ ID NO: 8966 - protein, 338 aa, Pirellula sp. 1
MLIMPVDPTPVLQYINGFRFSKVMFAAVELGVFDSLEQQKRSAEDLAIELQCDPAAVSRLLNGLVGMELLSRDGEQYKNTGLASELLTSTSPNRMTGYIKFSNDVSWKLWSHFENAIREGSHRWKDAYGWDQPIFSSFFADDAAMREFLMGMHGYGVISSPKVVRAVDLSQFNHLVDLGGATGHLPMAACEAYESLTATVFDLPGVIPLTKEIVAQSSVSDRIDVVAGDFFDDELPQADLMSLGRILHDWSDEKIDRLLSKIYDRLPEGGGLLLAEILIQDDRGGPDWGQMQDLNMLVCTEGRERTLAEYEAILRRAGFREVTGQVTGAPVDAVLAIK

SEQ ID NO: 8967 - protein, 208 aa, Oryza sativa (japonica cultivar-group)
MGEYCDWRRSEAIKRQDREATNPSAIRGRRRRRRRRRRGDREMESAMFGLETPLMTALQHLLDIPDGEGGAAGKQGATGGPTRAYVRDARAMAATPADVKDLPGAYAFVVDMPGLKSSDIKVQVEEERLLVISGERRRGGGEEEKEESCKYLRMERRMGKFMRKFVLPDNADVDKISAVCQDGVLTVTVEKLPPPEPKKPKTIEVKVA

SEQ ID NO: 8968 - protein, 389 aa, Glycine max
GAECIDPDCTWVEQWVHRAGPREKIYYKPEEVKAAIVTCGGLCPGLNDVIRQIVITLEIYGVKNIVGIPFGYRGFSDKELTEVPLSRKVVQNIHLSGGSLLGVSRGGPGVSDIANSLEKRGINMLFVLGGNGTHAGANAIHHECRKRRLKVSVIGVPKTIDNDILLMDKTFGFDTAVEEAQRAINSAYIEAHSAYHGIGVVKLMGRSSGFIAMQASLSSGQVDICLIPEVPFNLHGPHGVLSHLKYLLETKGSAVVCVAEGAGQNLLQKTNATDASGNVVFGDIGVYIQQETKKYFKEIGVHADVKYIDPTYMIRAIRANASDGILCTVLGQNAVHGAFAGYSGITVGLCNTHYAYFPIPEVISHPRLVDPNSRMWHRCLTSTGQPDFI

SEQ ID NO: 8969 - protein, 448 aa, Xylella fastidiosa Ann-1
MREHPDTLPLVPIVRGEGVWLVGHDGRRYLDAVSSWWTNLFGHADPRISAAIAAQARTLEHVMLAGFSHEPAVRLAEALLRLAPRQDGREPLSKVFYADNGSAGVEVALKMAFHYFRNRGEEQRTRFIALHNGYHGETIGALAVGDIPLYRRVYAPLLTEVLFAPSPDAYLAEPGQSAAEYALQAAEALEALFKRYSGQICALILEPLLQCAGGMRMHHPVYLHRVRELCDAHGALLICDEIATGFGRTGTLFACEQACSAISTDTDDKQLGIMPDLLCLSKGLTGGVLPLAAVLTTQQLYEEFLDDSRERAFLHSHSYTGNPLACIAALTTLDIFENDCIIERNQVTAARMTQLAASLSGHPHVADVRQTGMVVAFELTRDGNKRTPFPPQARLGLHVYRAALARGVILRPLGDVVYWMPPYCVDEEQLHLLAETTRVAIDEAIACV

SEQ ID NO: 8970 - protein, 404 aa, Emericella nidulans
MASQVQPGQKPKVQPCRYKTGKTLGAGLYSVVKECVHIDTGQYYAAKVINKRLMVGREHMVRNEIAILKQVSTGHQNILTLVDYFETMNNLYLVTDLALGGELFDRICRKGSYYESDAADLVRAILSAVAYLHDHGIVHRDLKPENLLFRTPEDNADLLIADFGLSRIMDEEQLHVLTTTCGTPGYMAPEIFDKSGHGKPVDIWAIGLITYFMLCGYTPFDRETNLEEVQAIATANFSFTPVEYWRGVSQEARDFIKRCLTVNPKKRMTAHQALQHPWINPPYDTTDDLGSGEDLLPNIKKNFNARRTLHKAIDTVRAINKLRENGGLMMDGIMSVDPKPEHVNGSEVVEDRTTPRERENEDAMEIDSRSNARGQTEQQIREQERKVKETVAGLWSRTAPRSER

SEQ ID NO: 8971 - protein, 1025 aa, Chloroflexus aurantiacus
MSVSDVASAPVIPLETILHTRRHLAILGEPGAGKSTTLQFIGLSYALATAQQPVERLSITRPAVPVYLRLPVSASTITQQTVREAMVAEVRDRLQCSAAEAEAVLRSWQEWPGVIILLDGLDEVPVALRVQVRERIKTLMRSGIGRVIITSRPSVLLHLGGLDEYTLKPFEHFDRDVLPYLKGWLRVLKPDLQAQVVDNVAQDVMTKLRASPALRSLIGNPLLLRLIVQYFVTTGDIAWNRADLYRQWVTEAWARARWRGAAATEEPHYLIALHTLAWHLHAGRDNTETALQTVLRTSGLAADDRAAADLLHRLQAQTGLLLRLSTGQDGLAHVRYVFAHQTLREYLVALRLQQAWQRGKHRTWRFLQPRLHLPEWREPLALLVGLLTESEAQHLLRQILHAKSSEERLLCRDLLLTANLAVESGYIHSVWESLAPKLARALRREHLSKETAAVLARVGKPAVPMLAQALNDPSVEVRRAVVQALGLVGDAAVPVLAQALNDAQPEVRWAAVASLVAVGNAAVDTLVQALGDDDAEVRRVIGQALLEIGDAAMPALVKALADKRANVREAAARALGESGYAAAVSALVQSLRDENPWVRQAVAEALGAIGDAAAVVALAQALNDENVWVRQATARALGRIGGAAAMLPLTVALNDENPWVRQAVAEALGTIGDAAAVLPLTRALSDEHAWVRRSAARALGQIGDGAAVPALAKALSDGDVQVRQQVVEALGCIGDSAAAAALVKALGDTNAEVRWTTMKAFEQIGSRNVATLLRAISDGKWQFPWQDAQAWKIGNQAIEAIGSVFNGGDTGKRMIATLALGETGNSAALPALERALRDTDLWVRRAALEALAKIGDQAVIVPALERALRDTDQWVRQTAAEMLVKIDDTAAVLPALERALRDADQWVRRTAAEALGKIGDASAVEALQRALADTESMGAAGRSRGARKDRRCVGGGGAAKGIGRYRSMGAAGRSGGARKDWRCVGSGGAAKGIGRYRSMGAAGRSRGVGEDRRCKSGSITDTVTE

SEQ ID NO: 8972 - protein, 436 aa, Bacillus cereus G9241
MRDYLIKPLVGQPYPMISHGKGVYLYDQNGNKYFDGSSGAITAGIGHGVKEIADVIKKQAEEIAFVYRSQFTSEPAEKLAKKLSDLSVGDLNWSFFVNSGTEANETAMKIAIQHFQERGIQGKHKILSRWMSYHGITMGALSMSGHPLRRQRFVSILEDYPTIPAPYCFRCPVQKVYPTCQLACATELERSIERIGAEHIAAFIAEPIIGAAGGAVVPPKEYYKVIKDICSHYDILFIADEVMTGLGRTGAWFAMEHWGVEPDIMTLGKGLGAGYTPMAATVVSDRVMEPILRGSRSVMSGHTLSANPLSAATALAVIEYMEKHNLPEKTAEKGEYLIKGLQKVQQQSTIIADVRGKGLLIGVELQPFTKASELISVAAKNGLLLYQAVSGQAGKEDSALLVAPPMTTTYSELDELLSIFAKSVEEMMQKGGHSIA

SEQ ID NO: 8973 - protein, 453 aa, Rhodospirillum rubrum
MAQSYDLILKGGTAVLPGRTMRADIAVCGGKVVRVGFLDAGSARQTIDCAGLHVLPGVIDTQVHFREPGLEHKEDLESGTRAAVLGGVTGVFEMPNTAPATDSPEALEEKLTRAQGRTWCDHAFFLGASAANAAALGGWERRDGCAGVKIFMGSSTGSLLVDQDEAIARVLAGGFRRVAVHCEDEARLKERKALVADGASVALHPEWRDVETALAATRRLLALARQAGRKVHVLHVTTAEEMALLQDNRDIASVEVTPQHLTLAAPDCYEGLGTFAQMNPPIREARHREALWRALEQGVVDIIGSDHAPHTLKEKSLPYPKSPSGMPGVQTLVPVMLDHVNTGKLSLERFVDLTSAGPARVYDIAGKGRIAAGYDADFTVVDMNAERTITNEWIASKCGWTPFHGLSVRGWPVMTIIRGAIVMRDGALQGRPLGAPVRFHPLPPLTKESAVLR

SEQ ID NO: 8974 - protein, 103 aa, Oryza sativa (japonica cultivar-group)
MEQGKQQHQPPPPSQPQPQQEKRGSRDDDMHKTTGDVMTHSFGEGYSTRSDEEGFGGVYGQNDPVFNPGTEVHPSHPEYDTSQGSEVKEKEKARHHKDDKHAT

SEQ ID NO: 8975 - protein, 426 aa, Phalaenopsis sp. SM9108
MAFSVGLTRFIVSSHPKTAKEILSSPAFADRPIKESAYELLFNRAMGFAPFGDYWRNLRRISSTYLFSPRRVSSFEKQRSEIGEGMVRDMKRMMERNGVVEVRRMLHYGSLNNIMLTVFGKKFDFAKDEGLELELILKEGYELLGIFNWGDHLPLLGWLDLQGVRRRCRTLVAKVNVFVKKIIDEHKRRANGVGIDEGEGEDFVDVLLGLEEKDRLSESDMVAVLWEMIFRGTDTVAILLEWTLARMVLHPDIQSKAQVEIDSVVDSSRPVLDSDIQRLPYLQSIVKETLRMHPPGPLLSWARLAIHDVPVDGHMIPAGTTAMVNMWAITHDECNWAEPNKFNPDRFIDEDVNILGSDLRLAPFGSGKRVCPGKTMALAAVHLWLAQLLKSFKLLPSRNGVDLSECLKMSLEMKNPLVCVAVPRFE

SEQ ID NO: 8976 - protein, 463 aa, Arabidopsis thaliana
MRSDHYFSLRSPTEDFVGGYPSDEEWHGYINNNDRVLLKVISYSSPTSAGAECLDHDCSWVEQWIHRAGPREKIYFRPEEVKAAIITCGGLCPGLNDVIRHIVITLEIYGVKNIVGIPFGYRGFSDKDLTEMPLSRKVVQNIHLSGGSLLGVSRGGPSVSEIVDSMEERGINMLFVLGGNGTHAGANAIHNECRKRKIKVAVVGVPKTIDNDILHMDKTFGFDTAVEEAQRAINSAYIEAHSAYHGIGVVKLMGRNSGFIAMQASLASGQVDICLIPEVLLCYYFKFQNMIDELALRDPMHLKVPFNLHGPNGVLKHLKYLIETKGSAVICVAEGAGQNFLEKTNAKDASGNAVLGDFGVYIQQETKKYFKEISTPIDVKYIDPTYMIRAVRANASDGILCTVLGQNAVHGAFAGYSGITVGIINTHYAYLPITEVIAYPKSVDPNSRMWHRCLTSTGQPDFI

SEQ ID NO: 8977 - protein, 478 aa, Caulobacter crescentus CB15
MTDTLRHYIGGERVAADAPAESLNPSNTNDVVAKVPMGGQAEVDAAVDAARKAFPAWADASPEVRSDLLDKVGSTIIARSADIGRLLAREEGKTLAEGIGETVRAGRIFKYFAGEALRRHGQNLESTRPGVEIQTYRQAVGVYGLITPWNFPIAIPAWKAAPALAFGNTVVIKPAGPTPATANVLADIMAECGAPAGVFNMLFGRGSMGDALIKHKDVDGVSFTGSQGVGAQVAAAAVARQARVQLEMGGKNPLIVLDDADLERAVAIALDGSFFATGQRCTASSRLIVQDGIHDKFVALLAEKVAALRVGDALDPNTQIGPAVSEDQMETSYRYIDIAASEGGRVVTGGDRIKLDNPGWYVRPTLIADTQAGMRINNEEVFGPVASTIRVKSYEEALEIANGVEFGLSAGIATTSLKHARHFQRYARAGMTMVNLATAGVDYHVPFGGTKSSSYGAREQGFAAVEFFTQTKTSYSWS

SEQ ID NO: 8978 - protein, 319 aa, Mycobacterium tuberculosis H37Rv
MTEPTVARPDIDPVLKMLLDTFPVTFTAADGVEVARARLRQLKTPPELLPELRIEERTVGYDGLTDIPVRVYWPPVVRDNLPVVVYYHGGGWSLGGLDTHDPVARAHAVGAQAIVVSVDYRLAPEHPYPAGIDDSWAALRWVGENAAELGGDPSRIAVAGDSAGGNISAVMAQLARDVGGPPLVFQLLWYPTTMADLSLPSFTENADAPILDRDVIDAFLAWYVPGLDISDHTMLPTTLAPGNADLSGLPPAFIGTAEHDPLRDDGACYAELLTAAGVSVELSNEPTMVHGYVNFALVVPAAAEATGRGLAALKRALHA

SEQ ID NO: 8979 - protein, 320 aa, Mycobacterium tuberculosis H37Rv
MPSLDNTADEKPAIDPILLKVLDAVPFRLSIDDGIEAVRQRLRDLPRQPVHPELRVVDLAIDGPAGPIGTRIYWPPTCPDQAEAPVVLYFHGGGFVMGDLDTHDGTCRQHAVGADAIVVSVDYRLAPEHPYPAAIEDAWAATRWVAEHGRQVGADLGRIAVAGDSAGGTIAAVIAQRARDMGGPPIVFQLLWYPSTLWDQSLPSLAENADAPILDVKAIAAFSRWYAGEIDLHNPPAPMAPGRAENLADLPPAYIAVAGYDPLRDDGIRYGELLAAAGVPVEVHNAQTLVHGYVGYAGVVPAATEATNRGLVALRVVLHG

SEQ ID NO: 8980 - protein, 462 aa, Glycine max
  unsure (1)..(462): unsure at all Xaa locations
MESKPHVLMHRYELGRLLGQGTFGKVYYARSTITNHSVAIKVIDKDKVMKTGQAEQIKREISVMRLARHPNIIQLFEVLANKNKIYFVIECAKGGELFNKVAKGKLKEDVAHKYFKQLINAVDYCHSRGVYHRDIKPENILLDENGNLKVSDFGLSALVDSKRQDGLLHTPCGTPAYVAPEVIKRKGYDGTKADIWSCGIVLFVLLAGYLPFHDPNLIEMYRKISKAELKCPNWFPPEVCELLGMMLNPNPETRIPISTIRENSWFKKGQNIKNKRPVVENNTVSSSSTVLLDQNDCDGLAAEANGEXVVPLSINAFDIISRSVGFDLSRFFDESFKIKEARFSSRLPANVIISKLEDIAKQLRMKIKKKAAGLLKLESLNEGRKGVLSIDAEIFEVIPCFHMVEVKKSNGDTLEYQKILKEDIRPSLHDIVWVWQSDQQLQSQQSEQHQHTDDQQQQQPQS

SEQ ID NO: 8981 - protein, 386 aa, Rickettsia aeschlimannii
DSEFAELKIRGKIFKLPILKASIGEDVIDISRVSAEADCFTYDPGFMSTASCQSTITYIDGDKGILRHRGYDIKDLAEKSDFLEVAYLLIYGELPNGEQYNNFTKQVAHHSLVNERLHYLFQTFCSSSHPMAIMLAAVGSLSAFYPDLLNFKEADYELTAIRMIAKIPTIAAMSYKYSIGQPFIYPDNSLDFTENFLHMMFATPCTKYKVNPIIKNALNKIFILHADHEQNASTSTVRIAGSSGANPFACISTGIASLWGPAHGGANEVVINMLKEIGSSEYIPKYIAKAKDKNDPFRLMGFGHRVYKNYDPRAAVLKETCKEVLKELGQLDNNPLLQIAIELEAIALKDEYFIERKLYPNVDFYSGIIYKAMGIPSQMFTVLFAI

SEQ ID NO: 8982 - protein, 182 aa, Brassica napus
  unsure (1)..(182): unsure at all Xaa locations
MAYSMLSSAAVVTSPAQATMVAPFTGLKSSSAFPVTRKANNDITSIVSNGGRVSCMKVWPPVGKKKFETLSYLPDLTEVELGKEVDYLLRNKWIPCVEFELEHGFVYREHGXSTPGYYDGRYWTMWKLPLFGCTDSAQVLKEVQECKTEYPNAFIRIIGFDNNRQVQCISFIAYKPPSFTGA

SEQ ID NO: 8983 - protein, 484 aa, Arabidopsis thaliana
MKHSGGNQACYVLGQKTPSIRDLYSLGHKLGQGQFGTTYMCKEISTGREYACKSITKRKLISKEDVEDVRREIQIMHHLAGYKNIVTIKGAYEDPLYVHIVMELCSGGELFDRIIQRGHYSERKAAELIKIIVGVVEACHSLGVMHRDLKPENFLLVNKDDDFSLKAIDFGLSVFFKPGQIFEDVVGSPYYVAPEVLLKHYGPEADVWTAGVILYILVSGVPPFWAETQQGIFDAVLKGHIDFDSDPWPLISDSAKNLIRGMLCSRPSERLTAHQVLRHPWICENGVAPDRALDPAVLSRLKQFSAMNKLKQMALRVIAESLSEEEIAGLKEMFKAMDTDNSGAITFDELKAGLRRYGSTLKDTEIRDLMEAADIDKSGTIDYGEFIAATIHLNKLEREEHLLSAFRYFDKDGSGYITIDELQHACAEQGMSDVFLEDVIKEVDQDNDGRIDYGEFVAMMQKGIVGRTMRKSINMSIRNNAVSQ

SEQ ID NO: 8984 - protein, 471 aa, Pseudomonas syringae pv. tomato str. DC3000
MSGQARGLNEKETVCMSDKSVNLLKSAIDGCVLTPRDPEYGDARLIYNRMHDSMPAAIVYPEHVADIRTSALMAAKEGVSFAMRGGGHHIAGFSTCDGGIVLDFKKWKNITLDVTTGILAVQPGVRLAEIDEFLVSRNLVIPTGTVSDTGLIGLTLGGGIGWLVGLYGLTCDCLVGADVVLADGRLVKAEDSEHGDLLWALKGGSGGFGVITELRYRPLPLPATYCGSGSVSLADTEACLSRLVFFLETQCPGELTVAPNFSRAVSGDVVMNIDYCYSGTAIRWIDTLQALIPEATWEAVTRWDFRDWQRNFDAKFLPPMRGYWKSSYTPSWGLDFSLLGTLMQNAPEGNCSILIEHLHGRFCDSDDAHSAFPLREARFGVLFSARWLSESEDADYIAWVKNGIFSVDPQGRSLSYSNYTSADDVGAAKSFSKLSRARLFSIKSVYDPDHFFKGNHGSLLFAGSGEVHRVQ

SEQ ID NO: 8985 - protein, 480 aa, Burkholderia fungorum LB400
MSQFANYIDGQWVDGASVSRNVNPSNLDDVIGEFAQADAEQTQRAIRAARNAFAQWSLSTPQQRFDLLDQAGSTILARKAELGRLLAREEGKTLPEAIGEVGRAGQIFKFFAGEALRIGGEIVPSVRPGMTVEVTREPLGVIGLITPWNFPIAIPAWKIAPALAYGNTVVVKPADLVPASTWELVRIIAEAGAPAGVINLVMGQGAVVGEALVSSPQVDAVSFTGSVATGRAIGAKCFASGKKFQLEMGGKNPMVVLDDADLDVAVEACINGGFYSTGQRCTASSRFIVTEGIHDRFIDAMKARMQALKVGDALADGTHIGPVVDDKQLQQDERYIAIAREEGGTIFGGERIERDTRGYFLAPALITDTTPDMRINREEVFGPVASVIKVKDYNEALAVANDTEFGLSAGICTTSLKYSSHFRRHVQAGMVMVNTATAGVDYHVPFGGRKGSSYGPREQGSYAREFYTTVKTAYVSPGAV

SEQ ID NO: 8986 - protein, 338 aa, Brassica napus
  unsure (1)..(338): unsure at all Xaa locations
MDAKEASPTDLKQPSEAADNAAAAASMETENGDQTKEPDCVSSLIPGWFSEMSPMWPGEAHWLKXEKVLFQGYFDYQDFFVLRVCSTMVRVFGNCMEYSNSSSQTNSALSREMIPHLPLCSFPXPYMTVLVIRGGRVEGVXRGVGQMATSAPFCARYPNPKKVLVIGGGDGGVAIGFEDPRVNLVIGDGVAFLKNAAEGSYDAVSPDSSDPIGPAKELFEKPFFQSVARALRPGGVVCTQAESLWLHMDIIEDIVSNCREIFKGSVNYAWTSVPTYPSGVIGFMLCSTEGPDVDFKHPVNPIDDSKSSGPLKFYNAEIHSAAFCLPSFAKKVIESKTN

SEQ ID NO: 8987 - protein, 213 aa, Ammopiptanthus mongolicus
MGCFNSKVRRQFPGQEDPVILASQTAFTVSEVEALFELFKSISSSVIDDGLISKEEFQLAIFKNRKKENIFANRIFDLFDVKKKGVIDFDDFVRSLNVFHPNAPLEDKIDFSFKLYDLDNTGFIERQEVKQMLIALLCESEMKLADEVIETILDKTFLDADLNQDGKIDIVEWQNFVSKNPSLLKIMTLPYLRDITTSFPSFVFNSNVDEVAA

SEQ ID NO: 8988 - protein, 181 aa, Zea mays
  unsure (1)..(181): unsure at all Xaa locations
MGDAPETFATTAPLAPVTSERKVRSDLEEKLPKPYLARALVAPDTEHPNGTEGHDSKGMSVMQQHGAFFDQNGDGIVYPWETYAGFRDLGFNPISSVFWSLIINLAFSYVTLPSWLPSPLLPVYIDYIHEAEHGSDSSTYDTEGRYVPFYLENIFSKYALTAANKLXFKEMWNLTEVNECH

SEQ ID NO: 8989 - protein, 508 aa, Oryza sativa (japonica cultivar-group)
MAATPPSSQHRRPLSSSASAASLAGKPRGGGLLLGRYELGRLLGHGTFAKVYQARSADSGEPVAIKVLDKEKAMRHGLVPHIKREIAILRRVRHPNIVRLFEVMATKSKIYFVMELVRGGELFGRVAKGRLKEDTARRYFQQLVSAVGFCHARGVFHRDLKPENLLVDEHGDLKVSDFGLSAVADQFHPDGLLHTFCGTPSYVAPEVLARRGYDGAKADIWSCGIILFVLMAGYLPFHDQNLMAMYRKIYRGEFRCPRWFSKDLSSLLNRILDTNPETRITVKEVMESRWFQKGFRPVRFYVEDDQVHSLADGDNDMPELEPSEPPPPPPFPPPPPQQDDDGEESGWESDSSVASCPATLSSEERRQRPLGSLTRPASLNAFDIISFSKGFDLSGLFEERGSEVRFISAEPMQTIITKLEEIAKVKSFFVRRKDWRVSIEGTREGLKGPLTIGAEIFELTPSLVVVEVKKKAGDKEEYDDFCNRELKPGMQHLVHHMGSVPNIPSDTE

SEQ ID NO: 8990 - protein, 157 aa, Triticum aestivum
MAGMVFGLDAPMMAALQHLLDIPDGEAEPPPEKQGPTRAYVRDARAMAATPADVKELPGAYAFVVDMPGLGSGDIKVQVEDERVLVISGERRREEKEDAKYLRMERRMGKLMRKFVLPENADMEKISPCRDGVLTVTVDKLPPPEPKKPKTIQVQVA

SEQ ID NO: 8991 - protein, 339 aa, Microscilla sp. PRE1
MKAAFYKEKGKFELGEGKVVVPGPGEVRLDVAYCGVCGTDVHIFHGVMDKRVNPPQTIGHEASAVVAEVGEGVTNVKVGYKVAVRPLRFGEPHPFDKGHAHVGKNLKFIGIDSEGAFQNSWTVPAYTLHQLPDGLSLEHGAFIEPLAVACHDVKIGRVKSGENTLVIGGGPIGTLIAYVLKEKGANVIVSEVNEARLKMLSELGFQTINPLKENLVDRISELTEEKMIDCAFEVSGSAPGVKTMTEVVNVRGRIVMVAIHGGEPKPVDLFKFFWSEIELLGARLYEEDDYEEAIRIAASGNIPFSKLITSKNTLDNIQQIFEEIDQNPAGMKYLIDCQA

SEQ ID NO: 8992 - protein, 495 aa, Pirellula sp. 1
MSVATQHTLLPEVQSFLDQSPLASFVGGKHYPSEQGNVLATIDPGSGDQLAEIHDLNAAEIDRAVEIANEAFPAWAGLSQQERSSILLKLADAVESHKAIIAQIEALDAGKIEAQAAGDVQNFVDTMRYFVGLSDKVEKRTKLDVPGHDAYTVKQPWGACAFIFPWNFPFLLIGWGISPALAAGNTVVIKPAEDTSLSAIYLAQLAKEVGVPDGVINVVTGRGATAGAALTNNAEIKRMSFTGSPEVGRLVGESCGRNLVPVKLELGGKGAAVVFDDVDVKATAQALVGAITFHTGQVCCDATRWLIHENIYDEFVAECKQLMEKVRIGHPLDPNSDMGPVVNPKQRERVLGYQEKGTAGGAQCLCGGGPATVDGLNGNYVKPTLLAGSLDNVAAREEIFGPVAYLAKFSDEADAIAKANDTDYGLANSVWTTDVERANRVAESMIAGNSWINAHNVFAHGVPYGGVKKSGMGGGVLSPETLMDYYRSTSVVRPL

SEQ ID NO: 8993 - protein, 204 aa, Pseudomonas aeruginosa UCBPP-PA14
MLKIVLLVTGVAALLLSFIPSLRTEATPFLQHPDAIYLAILGLINLLFAPVLQSSHPTRPLQAGAAALLVLGVVLQALILLAPLPTIADQPAIVLPLLSLVLATALQLAGSLKPGKPVSRSASAPTALGGSQDSGNRETGTVKWFNTSKGFGFISRDSGEDIFVHFRAIRGEGHRILIEGQRVEFSVVQRDKGLQAEDVIASRR

SEQ ID NO: 8994 - protein, 199 aa, Leptospirillum ferrooxidans
SGVMKKIRFPKTASIGIKPVSEEGTKRLVRAAIRFALANNRKSVTLVHKGNIMKFTEGYFRKWGYEVAKEEFGDKTVSWDDCGGNAPAGKLLIKDEIADAFLQKILLRANEYDVIATLNLNGDYLSDALAAQVGGIGIAPGANINYETGAAVFEATHGTAPKYANHDKVNPGAVILSGEMMFRYMGWNEVADLILKGLR

SEQ ID NO: 8995 - protein, 486 aa, Microscilla sp. PRE1
MIMSTVKNYKLYIDGEWIDATTGESQEILSPTDETVVGTVQMGVEADAQIALEAAERAQKQWKKVPARKRADLLRTFAAEIKANKNQLAELLVREQGKLLAVAKMEVEVTASFIEYACDGARSIEGDIIPSDNPAEHIMIHKIPRGVVVAITAWNFPLALAGRKLGPALVAGNSVVLKPTQETPIATLELGNIANKVGLPKGLINILTGQGSVLGNALVANPITKMVSMTGSTPAGQQIFRTAAENLIHVQLELGGKAPCIVFDDADLEQAVEGAFHSRFDNCGQVCTSNERLYVHESIYNEFMERFMEKVKGLKLGNPMDAATTIGPKVNAKEVAHMEHLVTKSVEEGATVAIGGKKPQGKAFEKGHWFEPTILTDVKQNMTIVHEESFGPILPVIKFSEFNEVIGYANDCEYGLAAMVFTNDMNKIMRLNDELEFGEIYINRGHGEQHQGFHNGYKLSGTGGEDSKYGFEQYMEKKTFYIKYKA

SEQ ID NO: 8996 - protein, 304 aa, Chlamydomonas reinhardtii
MDIAQVDEIIERLLDVRNGRPGKQVQLAENEIRLLCLTAKEIFMSQPNLLELEAPIKICGDIHGQYSDLLRLFEYGGFPPEANYLFLGDYVDRGKQSLETICLLLSFKIKYPENFFLLRGNHECASINRIYGFYDECKRRYNIRLWRTFTDCFNCLPVAALIDEKILCMHGGLSPELKSLEQIKRITRPTDVPDSGLLCDLLWADPDKDIQGWGENDRGVSYTFGPDCVTEFLQKHDLDLVCRAHQVVEEGYEFFAKRQLVTIFSAPNYCGEFENAGAMMSVDETLMCSFQILKPAETKAKGRR

SEQ ID NO: 8997 - protein, 491 aa, Burkholderia cepacia R18194
MADWQDKAASLKIEGRAFIDGASRDAHGGKTFDCVSPIDGRVLAKVADCGEADVNAAVAAARRAFDAGVWAGLNPRARKAVLLRWAALMREHLDELSLLETLDAGKPIGDTTTVDVPGAAYCVEWFAEAIDKVGGEVAPADHHLVGLVTREPVGVVAAVVPWNFPILMAAWKFGPALAAGNSVVLKPSEKSPLTAIRVAQLAYEAGIPAGVFNVVPGAGEPGKLLALHRDVDCIAFTGSTAVGKLIMQYAAQSNLKRAWLELGGKSPNIVLADCPDLDRAAQTAAGAIFYNMGEMCTAGSRLLVHRDIKDAFIEKLVAAARAYVPGNPLDPSVSMGAIVDGIQLERVLGYIEAGRSEGKLVTGGARVKEETGGFYVEPTVFEVKPDAKIAREEIFGPVLSVIVFDDVDEAVRIANDTEYGLAAAVWTSNLTTAHDVSRRLRAGTVWVNCYDEGGDMNFPFGGYKQSGNGRDKSLHALEKYTELKSTLIRLR

SEQ ID NO: 8998 - protein, 498 aa, Gluconobacter oxydans
MNVVSKTVSLPLKPREFGFFIDGEWRAGKDFFDRSSPAHDVPVTRIPRCTREDLDEAVAAARRAFENGSWAGLAAADRAAVLLKAAGLLRERRDDIAYWEVLENGKPISQAKGEIDHCIACFEMAAGAARMLHGDTFNNLGEGLFGMVLREPIGVVGLITPWNFPFMILCERAPFILASGCTLVVKPAEVTSATTLLLAEILADAGLPKGVFNVVTGTGRTVGQAMTEHQDIDMLSFTGSTGVGKSCIHAAADSNLKKLGLELGGKNPIVVFADSNLEDAADAVAFGISFNTGQCCVSSSRLIVERSVAEKFERLVVPKMEKIRVGDPFDPETQIGAITTEAQNKTILDYIAKGKAEGAKLLCGGGIVDFGKGQYIQPTLFTDVKPSMGIARDEIFGPVLASFHFDTVDEAIAIANDTVYGLAASVWSKDIDKALAVTRRVRAGRFWVNTIMSGGPETPLGGFKQSGWGREAGLYGVEEYTQIKSVHIETGKRSHWIS

SEQ ID NO: 8999 - protein, 317 aa, Burkholderia cepacia R18194
MTTALDQLKQYTTVVADTGDFQQLAQYQPQDATTNPSLILKAVQKDAYKPILEKTVRDHRNESTDFIIDRLLIAFGTEILKLIPGRVSTEVDARLSFDTPRSIDKGRELIKLYEAAGIGRERILIKLASTWEGIRAAEVLQKEGIKCNMTLLFSLVQAAACAEAGAQLISPFVGRIYDWYKKQAGAEWNEEKDGGANDPGVQSVRRIYTYYKTFGYNTEVMGASFRTTSQITELAGCDLLTISPDLLQKLQDSNDTVTRKLSPDALQDKPAARVAIDEAAFRFQLNDDAMATEKLAEGIRVFAADAVKLEKLIDSLR

SEQ ID NO: 9000 - protein, 435 aa, Thermotoga maritima MSB8
MRKRVFSLLLVLAFLSVGFAQDGVTDVGWSLDMVWILISAALVFFMQAGFAMVESGFTRAKNTVNVLMKNLMDFAIGSVVFFIFGYWIMFGKHPLTFDPSTKEGLWDFAMWMFQMAFAGTAATIVSGAMAERTKFPAYLAYTGFITGIIYSVVGRWIWGGGWLAQKGFIDFAGSTVVHSVGGWAAMIGASLLGPRFGKYDSQGNPKPIPGHNIPLAALGTFILWFGWFGFNGGSTLAGTNGAIGMIILNTNLAAATGALAAMVTVWAKYGKPDASMTMNGALAGLVAITAPCAVVSPVSSLIIGAIGGVIVVFAVEFFDKVLKIDDPVGAISVHGVNGAWGTLAVGLFAESKYALASGMGDVNGLFFGGGVHQLGVQFLGVVSVFAWTVVTSFLVFWFIKKTIGLRVDRDIELKGLDIEEHGMEGYADFEIFTTR

SEQ ID NO: 9001 - protein, 480 aa, Burkholderia cepacia R18194
MTYRNESAWIQPAAPSATAAAPRATQARTTAEYRALDAAHHIHPFSDMGALNRAGSRVIVKADGVYLWDSDGNKVIDGMAGLWCVNVGYGRKELADAAYRQIQELPFYNTFFKTTHPPVIELSAMLAEVTPKGFNHFFYCNSGSEGNDTVLRLVHQYWRVQGQPQKKFVISRKNGYHGSTIAGGTLGGMGYMHEQMPSKVENIVHIDQPYFFGEAAAGETPEAFGLARAQQLEAKILELGAENVAAFIGEPFQGAGGVIFPPSTYWPEIQRICRKYDILLVADEVIGGFGRTGEWFAHQHFGFEPDLITMAKGLTSGYVPMGAVGIHERVARPIIDNGEFNHGLTYSGHPVAAAVAVANLKLLRDEGIVERVKNDTGPYFQALMRETFARHPIVGEVHGHGLVASLQLAESPAERRRFANGGDVGTICRDFCFNGNLIMRATGDRMLLSPPLVISRPEIDELVSKAKKAVDATAQQLGIS

SEQ ID NO: 9002 - protein, 349 aa, Bacillus cereus
MKALLWHNQRDVRVEEVPEPTVKPGAVKIKVKWCGICGTDLHEYLAGPIFIPTEEHPLTHVKAPVILGHEFSGEVVEIGEGVTSHKVGDRVVVEPIYSCGKCEACKHGHYNVCEQLVFHGLGGEGGGFSEYTVVPEDMVHHIPDEMTYEQGALVEPAAVAVHAVRQSKLKEGEAVAVFGCGPIGLLVIQAAKAAGATPVIAVELSKERQELAKLAGADYVLNPATQDVLAEIRNLTNGLGVNVSFEVTGVEVVLRQAIESTSFEGQTVIVSVWEKDATITPNNLVLKEKEVVGILGYRHIFPAVIKLISSGQIQAEKLITKKITVDQVVEEGFEALVKDKTQVKISCFT

SEQ ID NO: 9003 - protein, 1147 aa, Saccharomyces cerevisiae
MPNPNTADYLVNPNFRTSKGGSLSPTPEAFNDTRVAAPATLRMMGKQSGPRNDQQQAPLMPPADIKQGKEQAAQRQNDASRPNGAVELRQFHRRSLGDWEFLETVGAGSMGKVKLVKHRQTKEICVIKIVNRASKAYLHKQHSLPSPKNESEILERQKRLEKEIARDKRTVREASLGQILYHPHICRLFEMCTMSNHFYMLFEYVSGGQLLDYIIQHGSLKEHHARKFARGIASALQYLHANNIVHRDLKIENIMISSSGEIKIIDFGLSNIFDYRKQLHTFCGSLYFAAPELLKAQPYTGPEVDIWSFGIVLYVLVCGKVPFDDENSSILHEKIKKGKVDYPSHLSIEVISLLTRMIVVDPLRRATLKNVVEHPWMNRGYDFKAPSYVPNRVPLTPEMIDSQVLKEMYRLEFIDDIEDTRRSLIRLVTEKEYIQLSQEYWDKLSNAKGLSSSLNNNYLNSTAQQTLIQNHITSNPSQSGYNEPDSNFEDPTLAYHPLLSIYHLVSEMVARKLAKLQRRQALALQAQAQQRQQQQQVALGTKVALNNNSPDIMTKMRSPQKEVVPNPGIFQVPAIGTSGTSNNTNTSNKPPLHVMVPPKLTIPEQAHTSPTSRKSSDIHTELNGVLKSTPVPVSGEYQQRSASPVVGEHQEKNTIGGIFRRISQSGQSQHPTRQQEPLPEREPPTYMSKSNEISIKVPKSHSRTISDYIPSARRYPSYVPNSVDVKQKPAKNTTIAPPIRSVSQKQNSDLPALPQNAELIVQKQRQKLLQENLDKLQINDNDNNNVNAVVDGINNDNSDHYLSVPKGRKLHPSARAKSVGHARRESLKFTRPPIPAALPPSDMTNDNGFLGEANKERYNPVSSNFSTVPEDSTTYSNDTNNRLTSVYSQELTEKQILEEASKAPPGSMPSIDYPKSMFLKGFFSVQTTSSKPLPIVRHNIISVLTRMNIDFKEVKGGFICVQQRPSIETAAVPVITTTGVGLDSGKAMDLQNSLDSQLSSSYHSTASSASRNSSIKRQGSYKRGQNNIPLTPLATNTHQRNSSIPMSPNYGNQSNGTSGELSSMSLDYVQQQDDILTTSRAQNINNVNGQTEQTNTSGIKERPPIKFEIHIVKVRIVGLAGVHFKKVSGNTWLYKELASYILKELNL

SEQ ID NO: 9004 - protein, 503 aa, Acinetobacter sp. M-1
MHYVDPNQSGSKIHFKDQYENFIGGQWVAPVKGVYFDNISPVDGKSFTRIPRSSAEDIELALDAAHKAKKEWNKSSPTTRSNLLLKIADRMEANLEMLAVAETWDNGKPVRETLAADIPLAIDHFRYFAGCIRAQEGGISEIDEDTIAYHFHEPLGVVGQIIPWNFPILMAAWKLAPALAAGNCVVIKPAEQTPVGILLVAELIQDLLPAGVLNIVNGYGAEVGRPLATSPRIAKIAFTGSTQVGQLIMQYATENIIPVTLELGGKSPNVFFADVMDHDDDFLDKTLEGFAMFALNQGEVCTCPSRALIQESIADQFMEKAIERVKRIKLGHPLDTDTMVGAQASLEQQEKILRCIDTGRQEGAEVLLGGHGRQEVGNGYYIEPTIFKGHNNMQVFQEEIFGPVLSVTTFKDFDEAIQIANDTMYGLGAGVWSRSTHTAYRAGRAIEAGRVWTNCYHIYPAHAAFGGYKKSGVGRENHKMMLDHYQQTKNLLVSYSTKAMGFF

SEQ ID NO: 9005 - protein, 126 aa, Glycine max
MVLEATMICIDNSEWMRNGDYSPSRFQAQTDAVNLICGAKTQSNPENTVGVLTMAGKGVRVLVTPTSDLGKILACMHGLEIGGEMNLAAGIQVAQLALKHRQNKKQQQRIIVFAGGPVKHEKKMLE

SEQ ID NO: 9006 - protein, 346 aa, Bifidobacterium longum DJO10A
MKAVVLEEQGVINVREVPDVKDPGPGELRIAPHTVGVCGSDLHYYTHGRVGKYVVEQPMILGHEAAGTVLEVGPGVTDFKPGDRVALEPGIPDMTSRASRLGMYNVDPAVRFFATPPIDGCLCEEVIHPAAFTYHLPDSMSFGEGALLEPTAVGMWAATKARIKPGDVCVVTGSGTVGMLTASAALAGGASKVLVSDVSSIKLGIIGQIPGVIPVDLTTEDLVERVREETAGWGADVAFECSGAPKAYETFWKLIAPGGCAVLVGIPVNPVPIDVTELQATEVRIENIFRYANVYQKAIDLVDSGRLNLKPFITDTFAMKDAKAAFDRMDEGRPGDIKLQITVNRD

SEQ ID NO: 9007 - protein, 439 aa, Arabidopsis thaliana
MAEAKIEEIGCEDRISVLPEDLLVVILDLLPTKDVVATMILSKRWLSIWTMVRTLEYTDDMDDESKKSVWWFLNKSLQLHKAPVIDSLCMELGPQCPTTDDVDIGKWVAKAVDCLVMTLTIKLLWSAGPTSLPKSLYSCTSLSELTLSDQILVNVPSSAYLPSLTELELICVVYKDEDSLVSFLSSCPVLEFLFVLRKIDDNVKTFTVKVPSLLELTYKNLCSDVVDNTDRCLVVNAPAVNTCQITDYSLESFSIEDMPCLQDATIDVDEAYHPDDKFLTSFSSVLSLRMHLSDAMVMRCTTINFSRLIKLSIYPYGPDMLETLLRLLGNAPKLKEFLVDYPSLIASQKFVYNPEDLPWSWKQPSHVPECLSSQLEIFEWRDYGDRIIEEEFLTYVLANSKRLKTATISLRLNLEDPELIIEEIKDLPRVSTTSHLLFK

SEQ ID NO: 9008 - protein, 191 aa, Zea mays
  unsure (1)..(191): unsure at all Xaa locations
MESTGKILMERYEVGRLLGKGTFGKVHYAKNLESNESVAIKMMDKDKVLKAGLSEQIRREITTMRLVAHKNIVELHEVMATRNNIYFVMEYVKGGELFDKIGKSGKLTEAAAHKYFQQLIGAVDYCHSRGVYHRDLKPENLLLDENENLKVSDFWTECTFRIKGADGLLHTHCXTPXAYVAPEVISKTGYD

SEQ ID NO: 9009 - protein, 200 aa, Aspergillus fumigatus
MAEIRRKLVIVGDGACGKTCLLIVFSKGTFPEVYVPTVFENYVADVEVDGKHVELALWDTAGQEDYDRLRPLSYPDSHVILICFAIDSPDSLDNVQEKWISEVLHFCQGLPIILVGCKKDLRHDPKTIEELHKTSQKPVTPEQIIDIFVQGEEVRKKIGAYKYLECSARTNEGVREVFEAATRAALLTKTHKKKGKCTIL

SEQ ID NO: 9010 - protein, 455 aa, Glycine max
MFNFVPVGEACQKYGSIFMHPQGLYISLKEKGKIREVLRNWPEKNIQVIVVTDGERILGLGDLGCQGMGIPVGKLSLYTALGGVRPSACLPITIDVGTNNEKLLNDELYIGLKQRRATGQEYAELMHEFMTAVKQTYGEKVLIQFEDFANHNAFNLLEKYRSTHLVFNDDIQGTASVVLAGLVASLKLVGGNLADHRFLFLGAGEAGTGIAELIALETSKQTNAPLEEVRKNIWLVDSKGLIVSSRKDSLQHFKKPWAHEHEPVKNLLDAVNKIKPTVLIGTSGQGRTFTKEVIEAMASINKRPIILSLSNPTSQSECTAEEAYKWSQGRAIFASGSPFPPVEYEGKVFVPGQANNAYIFPGFGLGLIMSGTIRVHDDLLLAASEALAAQVSQENFDKGLIYPPFTNIRKISAHIAANVAAKAYELGLATRLPQPKDLVKFAESCMYTPAYRSYR

SEQ ID NO: 9011 - protein, 253 aa, Triticum aestivum
  unsure (1)..(253): unsure at all Xaa locations
MAPTVMASSATSVAPFQGLKSTAGLPVSRRSNGASLGSVSNGGRIRCMQVWPIEGIKKFETLSYLPPLSTEALLKQVDYLIRSKWVPCLEFSKVGFIFREHNASPGYYDGRYWTMWKLPMFGCTDATQVINEVEEVKKEYPDAYVRIIGFDNMRQVQXVSFIAFKPPGCEEVRQGPKQAHSRTGHILKVPLQLSTLTIAFGVFLSPFIFLNLGLMGPLFHPNIGEASYFMLGGFVYSPDIIIQYTLGKKKKKN

SEQ ID NO: 9012 - protein, 197 aa, Aspergillus fumigatus
MELCGRQKVVQRKMVLLGDGACGKTSALNVFTRGFFPTVYEPTVFENYVHDIFVDNVHMELSLWDTAGQEEFDRLRALSYEDTHVIMLCFSVDSPDSFENVATKWIDEIRENCPGVKLVLTALKCDLRKDDELNDNPNAITFEQGLAKAKEIGAVKYLECSAVQNRGIRETFYEAAKVALDVKPAGSSGSKGQCIIL

SEQ ID NO: 9013 - protein, 198 aa, Aspergillus fumigatus
MASGPATQSLKCVVTGDGAVGKTCLLISYTTNAFPGEYIPTVFDNYTASVMVDGRPISLGLWDTAGQEDYDRLRPLSYPQTDVFLICFSIVSPPSFDNVKAKWYPEIEHHAPNVPIILVGTKLDLRDDPATAESLRQKKMDLSRTRHWPSPKEIRAHKYLECSALRQRNFKSVFDEAIRAVLNPGPAAKPKSKKCTIL

SEQ ID NO: 9014 - protein, 162 aa, Triticum aestivum
MAGMVFGLENPMMTALQHLLDIPDGEAGGAGPAAGEKQGPTRAYVRDARAMAATPADVKELPGAYAFVVDMPGLGSGDIKVQVEDERVLVISGERRREEKEDAKYLRMERRMGKLMRKYVLPENADMEKISAVCRDGVLTVTVEKLPPPEPKKPKTIQVQVA

SEQ ID NO: 9015 - protein, 375 aa, Pisum sativum
MGSNRTIVWFRRDLRIEDNPALAAAARDGSVFPVFIWCPKEEGQFYPGRVSRWWLKQSLAHLDQSLKSLGAKLVLIKTDSTLNALLECVNAIQATKVVFNHLYDPVSLVRDHNIKEKLVELGISVKSYNGDLLYEPWELYDEKGHAFTTFDPFWERCLHKQMEPVSLIPPWQLIPAKGKVERCSIEDLGLENELEKPSNALLGRAWSPGWGNANKALTEFMDKQLLNYSKNRQKVGGDSTSLLSPYLHFGELSVRKVFQMARVKQISWGNEGNSVGKESVTLFLRAIGLREYSRYLCFNFPFTHERALLGHLSFFPWNADPSNFKTWRQGRTGYPLVDAGMRELWATGWMHNRIRVIVSSFAVKMLLLPWKWGMK

SEQ ID NO: 9016 - protein, 491 aa, Treponema denticola ATCC 35405
MNSITELFPSDFTDDEKALAKTHFLKKLSVLTHSFYGGKLQTVPKCGLYGFNWFNVWYTPGVSAISTTIRDDNETSFALSNKGNLVAVVSDSTRVLGDGDCTPPGGLGVMEGKCMLMKYLGGVDSYPLCIDSIVRVDEEGKRGVKAGKHDPDKIIDFVRMLEPSVGAVNLEDIQQPDCFKVLDTLREVCEIPVWHDDAQGTACITLAGLLNAIKLAGKKMEDCKIVLLGAGASNTTIARLILADGGKPENMIICDSRGALHSGRKDIEEDKRYYRKWELCLQTNPKKIETFDEAMKGADVLIALSTPGPNTVTKEQVASMNKKAIVFTCANPIPEIWPHEAKAAGAFIVGTGRGDFPNQINNSVCFPGILKGALLVRAKKISDGMAIRCSHSIADYSEKKGINPDNIVVTMQDEDVFAVEAADVAMQAIKEGLARVTMTWDEAYKKAKKDIEESRSLTKMLMEKNFIKEPPQEFYEKALEYAIEQIKKNRK

SEQ ID NO: 9017 - protein, 193 aa, Zea mays
MHVPDEDMLSPLGALRLDGHFSFHDVSAMARDFGNQCSFLPAAVLHPGSVSDIAATVRHVFSLGEGSPLTVAARGHGHSLMGQSQAAQGIVVRMESLRGARLQVHDGFVDAPGGELWINVLRETLKHGLAPKSWTDYLHLTVGGTLSNAGVSGQAFRHGPQDNSDLFYAALGGLGQFGIITRARIALEPAPEM

SEQ ID NO: 9018 - protein, 481 aa, Glycine max
MLDSATPHDKITTAASGFVLEDVPHLSAYIPHLQTYPDPLQDNPSYSVVAQYYVNVDDTIAQQIVVHKNSPRGTHFRRAGPAQKVYFDSEEVHACIVTCGGLCPGLNTVIREIVCGLYHMYGVHKVLGIQGGYPGFYSRNTVPLTPKVVNDIHKRGGSILGTSYGGHDTSKIVDSIQDRGINQVYILGGYGTQYEAAMIFEEVRRRGLKVAVVGIPKTIDNDIPVIDKSIGFDTAVEEAQRAINSAHVEAESAENGIGVVKLMGRYSGFIAMYATLASRDVDCCLIPESPFYLEGPGGLLEFIEKRLKEQGHMVIVIAEGAGQELLSGNPSIVNKPDASADKLFPDVGLWLSQKIKDHFEKRQKMAINLKYIDPTYMIRAIPSNASDNVYCTLLAQSAVHGAMAGYTGFTVGPVNGRNCYIPFHLINEGEKRVVITDRMWARLLSSTHQPCFLNPKEITGEREERTENQTTDGQNHSEIAD

SEQ ID NO: 9019 - protein, 223 aa, Glycine max
METGGFHGYRKLPNTTSGLKLSVSDMNMNMRQQQVASSDQNCSNHSAAGEENECTVREQDRFMPIANVIRIMRKILPPHAKISDDAKETIQECVSEYISFITGEANERCQREQRKTITAEDVLWAMSKLGFDDYIEPLTMYLHRYRELEGDRTSMRGEPLGKRTVEYATLATAFVPPPFHHHNGYFGAAMPMGTYVRETPPNAASSHHHHGISNAHEPNARSI

SEQ ID NO: 9020 - protein, 352 aa, Ralstonia eutropha JMP134
MQNTSGLAPRDAGADTDHPELTPDRLLQLGMGFWASKTMLSAVELGVFTRLAAGPLGAAELISALGLHRRSALDFLDALVALKLLEREQGKYRNTPDTALFLDAAKPSYVGDLLEMANTRLYPFWGSLTEALRTGQPQNEAKRGGNLFEAVYHDEHALRRFLRAMTGVSLGAAKAMAQKFPWQNYSTFIDIGTAQGALPVQIALAHPHLRGGGFDLPAVGPVFEEYVVSHGLQERLRFQPGDFFKDPCPTADVLVMGHILHDWDLGQKLELLKKCHAALPDEGCLIVYDAVIDDERRQNAFGLLMSLNMLIETPGGFDYTGAQCCAWMKEAGFTQVRVEPLAGPDSMVIGIR

SEQ ID NO: 9021 - protein, 508 aa, Lycopersicon peruvianum
MNPFDKKQEPDTDSKTPFLTEMDSEFAAFSPISLPFADPSSPFINFGSFATPLSQHPVGEGEREGEGEGGEIEQPAEGGLGVPQPMECLHGIQIPPFLSKTFDLVEDPLLDTIISWGTNGESFVVWDPVEFSRLVLPRNFKHSNFSSFVRQLNTYGFRKIDADRWEFANEGFSRGKRHLLKNIQRRRSQQGGSSSGSSAEAGKGTMDEIEKLRNEKSLMMQEVVELQQQQHGTVQLMESVNEKLQAAEQRQKQMVSFLAKVLQNPTFLARVRQMKEQGEITSPRTMRKFVKHQSHGPDGVGSSSMEGQIVKFRSDFQDLAGCFDSPDFNPVVDQQLPETGLGAEAMPFEGGPVADGLTVAHELLNCSDREIRGASFFNSGGSQFKGKNVASPQIEVMPEYFASFPEEMGKEKNISGFSAPAIGSMVKDEELWGMGFEASAGMPSTGPELWDSLSSYVPDFGVSSGLSDLWDIDPLQVAGSSGVDKWPADGSPFGQSESHANQPKNDSF

SEQ ID NO: 9022 - protein, 484 aa, Ralstonia eutropha JMP134
MKQFRNFINGEFVATNKTFENRAPVDNRVIGRVHEAGQAEVDAAVAAARAALHGDWGRMPVARRVELLHAVADEINRRFDDFLEAELADTGKPRSLAAHIDIPRGAANFKVFADIVKNAPTESFEMTTPDGGTAISYALRAPLGVVAVVCPWNLPLLLMTWKVGPALACGNTVIVKPSEETPATATLLGEVMEKVGVPKGVYNVLHGFGPGSAGEFLTRHPGVNGITFTGETRTGEAIMAAAAKGVRPVSFELGGKNAGIVFADADFDKAVAGIARSAFENCGQVCLGTERVYVQRPIFDRFVQALKEKAESLRIGPSDAPGVGLGPLISAEHKAKVMSYYDVARSEGATVVTGGGAPSMPPELAEGHWVQPTIWTGLPESARVIREEIFGPCCHIAPFDTEEEAIALANATDYGLATTVWTQDLGTAHRMARAIDVGLCWINSWFLRDLRTAFGGAKASGIGREGGVHSLEFYTELRNVMVKL

SEQ ID NO: 9023 - protein, 482 aa, Salmonella enterica subsp. enterica serovar Typhi Ty2
MQLNDSTLFRQQAFIDGDWRDARGGDVIPVSNPANGKPLGNVPKMGAEETRDAINAANRALPAWRALTAKERANILRRWFNLMMEHQDDLARLMTLEQGKPLAEAKGEISYAASFIEWFAEEGKRIYGDTIPGHQTDKRLLVIKQPIGVTAAITPWNFPSAMITRKAGPALAAGCTMVLKPASQTPFSALALAELAQRAGILAGVFNVVTGSAGDIGGELTSNPLVRKLSFTGSTEIGRQLMEQCAKDIKKVSLELGGNAPFIVFDDADLDKAVEGALASKFRNAGQTCVCANRLYVQDGVYDRFAEKLNQAVNKLAVGDGLQADVAIGPLIDEKAVAKVQEHIADALEKGARVITGGEAHKLGGNFFQPTILADVPDNAKVAKEETFGPLAPLFRFSDEADVIRQANDTEFGLAAYFYARDLSRVFRVGEALEYGIVGINTGIISNEVAPFGGIKASGLGREGSKYGIEDYLEIKYMCIGL

SEQ ID NO: 9024 - protein, 45 aa, Streptococcus thermophilus
TKGFGFITSEDGQDLFAHFSSIQSDGFKSLDEDQKVEFDVEVGQR

SEQ ID NO: 9025 - protein, 295 aa, Methanosarcina thermophila
MTVDELVREYAGCAFGAGRLAKAVDIYYEMLASEKTTKFFGLAGAMTPAGMRNIIADLIRDGYIDVLVTTGANMVHDTVEALGLHHYKGSDCTNDIQLRHECIDRIYDVYLPDQHFTDLEEFLQGVYAGLPQEKLSIRQVLTEIGKNLDDDSSILKTAAEMGVPVYCPALQDSVIGLQAWLYKEGNPLHVDAFADMHEFMEICFETESAGAMLLGGGVPKNYILQSMLVTPRSFDYAIQLTMDHPETGGLSGATLDEAQSWGKVGENAKSVTVYADSTITLPLIVSAVRTRLSKR

SEQ ID NO: 9026 - protein, 181 aa, Brassica napus
MAYSMLSSAAVVTSPAQATMVAPFTGLKSSSAFPVTRKANNDITSIVSNGGRVNSMQVWPPVGKKKFETLSYLPDLTEVELGKEVDYLLRNKWIPCVEFELEHGFVYREHGSTPGYYDGRYWTMWKLPLFGCTDSAQVLKEVQECKTEYPNAFIRIIGFDNNRQVQCISFIAYKPPSFTGA

SEQ ID NO: 9027 - protein, 485 aa, Aeropyrum pernix K1
MFKTFVAGNWVLTSNLAVVRSPIDGSIIAKVSRLDAAAIEEGVDVVYRLGRRRIRDVPGEKRLNILSRIADLLEKNAGDFEEVLTVNAGKTRKQAAGEVEASIDRLRKAALDLRKLQGEYVPGDWDRHTLESEGIVRREPYGVVLAIIPFNYPLFDTVNKFVYSTIPGNAFIVKPPSADPLPVIMFARLAIEAGFPPESLMIATLRGSEAEKLVADRRISVISLTGSSETGVKVMRSAGIKQLIMELGGGDPAIVLADADLKSAASKIATGITSYSGQRCDAIKLVLVEEPVYNEMKKLLVEELSKIKVGDPRNDSTTMGPLIDKEAVDAMVEAIEEAVSRGAKLLYGGERIGDTYITPALVEVEDKNVLRELKLYKDEVFAPVAVITSFSTLDEAIELANGRRYGLDAAIFGESMARIRKLIRFLEVGAIYINEYPRHGIGYYPFGGRKDSGIGREGIGYSIEYVTALKTIVYNYRGRGIWEYL

SEQ ID NO: 9028 - protein, 340 aa, Erwinia carotovora subsp. atroseptica SCRI1043
MKSIVIQQPNSLVIEERSIPQPAAGEVRVKVKLAGICGSDSHIYRGHNPFAKYPRVIGHEFFGVIEAVGDGVDAARLGERVSVDPVVSCGHCYPCSIGKPNVCTSLVVLGVHRDGGFSEYAAVSAKNAHVIPDEIPDEFAVMVEPFTISANVTAQVKPTEQDIALIYGAGPMGLTSVQVLKGVFKVKEVIVVDRIPERLEMALRSGADRVINNASLSLKDELETLNIKPTLIIDAACHPSILQEAITIASPAARIAIMGFSSEPCQISQQGITSKEISIFSSRLNANKFPIVIEWLKEKRIDPAKLITHRFDYQQVVQAIEVFEKDQKRCCKVLLTFNEA

SEQ ID NO: 9029 - protein, 495 aa, Triticum aestivum
  unsure (1)..(495): unsure at all Xaa locations
MVLSHAASAGSSDDSVHSTFASRYVRASLPKFRMPENSIPKEAAYQIINDELMLDGNPRLNLASFVTTWMEPECNKLMMDSINKNYVDMDEYPVTTELQNRYVNMIAHLFNAPLGETETAVGVGTVGSSEAIMLAGLAFKRRWQNKMKAAGKPCDKPNIVTGANVQVCWEKFARYFEVELKEVKLSEGYYVMDPEKAVEMVDENTICVAAILGSTLNGEFEDVKMLNDLLVKKNEETGWDTPIHVDAASGGFIAPFLYPELEWDFRLPLVKSINVSGHKYGLVYAGIGWCIWRSKEDLPDELIFHINYLGADQPTFTLNFSKGSSQVIAQYYQLIRLGFEGYRNIMDNCQENAMVLKEGLERTGRFNIVSKDQGVPLVAFSLKDSSRHDEFEISEFLRRFGWIVPAYTMPPDAQHVTVLRVVIREDFSRTFAERLVIDIEKVLHELDALPSRSSGARPAAPQRXTVSEKDLARQREVVSVWKRAVAARKKTQGVC

SEQ ID NO: 9030 - protein, 593 aa, Zea mays
  unsure (1)..(593): unsure at all Xaa locations
MCGILAVLGCSDWSQAKRARILACSRRLKHRGPDWSGLYQHEGNFLAQQRLAVVSPLSGDQPLFNEDRTVVVVANGEIYNHKNVRKQFTGTHNFSTGSDCEVIIPLYEKYGENFVDMLDGVFAFVLYDTRDRTYVAARDAXIGVNPLYIGWGSDGSVWIASEMKALNEDCVRFEIFPPGHLYSSRXGGFPGGWYTPHWVPGAGAPGRPYQPLVXLERAFEKAVIKRLMTDVPVRGPPSPGGLDSSLVASVTKRHLVETEAAEKFGTELHSFVVGLEGSPDLKAAREVADYLGTIHHEFHFTVQDGIDAIEEVIYHDETYDVTTIRASTPMFLMARKIKSLGVKMVLSGEGSDELLGGYLYFHFAPNKEEFHRETCRKVKALHQYDCLRANKATSAWGLEVRVPFLDKEFINVAMGMDPEWKMYDKNLGRIEKWVMRKAFDDDEHPYLPKHILYRQKEQFSDGVGYNWIDGLKSFTEQQVTDEMMNNAAQMFPYNTPVNKEAYYYRMIFERLFPQDSARETVPWGPSIACSTPAAIEWVEQWKASNDPSGRFISSHDSAATDHTXAVSRRWPTAAATXANGTVNGKDVAVAIAV

SEQ ID NO: 9031 - protein, 395 aa, Thermotoga maritima MSB8
MRAVRLHAKWDPRPEFKLGPKDIEGKLTWLGSKVWRYPEVRVEEVPEPRIEKPTEIIIKVKACGICGSDVHMAQTDEEGYILYPGLTGFPVTLGHEFSGVVVEAGPEAINRRTNKRFEIGEPVCAEEMLWCGHCRPCAEGFPNHCENLNELGFNVDGAFAEYVKVDAKYAWSLRELEGVYEGDRLFLAGSLVEPTSVAYNAVIVRGGGIRPGDNVVILGGGPIGLAAVAILKHAGASKVILSEPSEVRRNLAKELGADHVIDPTKENFVEAVLDYTNGLGAKLFLEATGVPQLVWPQIEEVIWRARGINATVAIVARADAKIPLTGEVFQVRRAQIVGSQGHSGHGTFPRVISLMASGMDMTKIISKTVSMEEIPEYIKRLQTDKSLVKVTMLNE

SEQ ID NO: 9032 - protein, 522 aa, Glycine max
  unsure (1)..(522): unsure at all Xaa locations
VNNIQGLYNRFVFFIQRDGNSNRFYVTNENLYXRVLNGNFKVIHRIIYISTIGFLYDNYLGXDRVTAGMYFSAKEKGEKMEMIYSYGVXHVDKIVLTXSNRILGYVDLKVWYIGISTVEHEKYVAADIINLQKILPNMFVVVIIQRKLLDDPLYQRVQHRMADSEKDKISLDXFMVAVHVLWSKAIMSFEGLQKMCAIKTQIRYRARFCMFKDDIXGTAGVELAGLLXTVRSQGQLLSDFLEQKIIVVGAGSAGLGVLSMDGQAVSEMSGRSGTDANSQFFLIDKDGLVTTERSNLDLAAVAFAKNPRDLVVFLEGASIIEVVKKVNPHVLLGFSGSGGVFNTEVLKPMRESVSTYPAIFAMSSPPINAECSAIEAFSHAGENIVFASGSPFENVDLGNGEVGHVNQANNMYLFPGIGLGTLLSGARHITDGMLRAAAECLASYMTEDDVRKGILYPSIDCIRDVTAEVGAAVVCAAVAEKQAEGHGDVGFKELENMSKEETVEYVRGNMWYPEYCPLVHEK

SEQ ID NO: 9033 - protein, 496 aa, Triticum aestivum
  unsure (1)..(496): unsure at all Xaa locations
MKPCRAIALALVVAAQCAALATAAGPRVIIVGAGMSGISAGKRLSEAGITDLVILEATDRIGGRIHKTKFAGVNVEMGANWVEGVNGDEMNPIWTMANGTGGLNLRTFRSDFDHLASNTYKQDGGLYDEKVVENXIERMDEVEESGSKLSGTLHHSGQQDMSVSRPLQRLNDHMPSGPARPVDMVVDYYQHDFEFAEPPRVTSLQNTQPLPTFSNFGDDVYFVADQRGYESVVYHVAGQYLRTDRKSGAVADPRLKPNTVVREISYFPSGVMVRTEDNKVYRADYVVVSASLGVLQTDLIRFKPQLPSWKIVSIYQFDMAVYTKVFLKFPKRFWPEGEGKEFFLYASGRRGYFPVWQQFEQQYPGSNVLLVTVTDDESRRIEQQSDNQTMAEAVAVLRKMFPKEDVPDATEILVPRWWSNRFFKGSFSNWPIGVNRYEYDLIRAPVGRVYFTGEHTSEKYNGYVHGAYLAGIDSADILINCAKKKMCKYDVKGKHD

SEQ ID NO: 9034 - protein, 133 aa, Deinococcus radiodurans R1
MCRVSIVGGGGPYLASRSTPAENLKGHAGKRATAACGLLLVRARRFEMATGRVKWFNAEKGFGFIETEGSADVFAHYSAINSSGFRKLNEGDEVEFEIEPGQNGKGPQAKNIVVTKAAPAPAYGDRPRRDDRW

SEQ ID NO: 9035 - protein, 473 aa, Crocosphaera watsonii WH 8501
MTIETMTTLNSSAQLINNPEAAVTALKNSEDEGVRYYAAWWLGKNRILKAIPLLCECLKDERDRTTLGGYPLRRQAARSLGMLKDSQAVTPLIEALDCSDLRLQEAVILALKNIGDRSAIPALINLLNPEIKDKPTEALIEALTAFKVWEVQDHIEPFLQDSSERVKCAAAQYFYALTLKPRYLEMLFQTLGHENRFLRYAAAMDLAALGRFEIAPAIIKAQIPNNIKLATIKRILEALLQNKTEREVKRQEQANFLFPALDELLLDAIQGNIPRSNTVETNQKIEKMKMLVDQQSITSQQVPKSLILELIEAVKSPYPNVKAAAIQGLVELAPLSADVIIEVFDTDEDQDLRAGLTQALMYIGDLRTVSLLEKVIGFDISDHCQGKIRRVAARGLGKIGRQTKNQEVIAQVIEKLKWALLEPTDWALRYSAVVSLEEIGNSDGILALQAASESESDFIVQTRIERALTAIGW

SEQ ID NO: 9036 - protein, 1001 aa, GIBBERELLA ZEAE PH-1
MDGSAHLSGRNIDTGHELLNLLQSPFSGQLQAASLYSALATSLPVTIGIAIFFSILRPYHQAIYAPKLKHADEKHVPPPIGKAPWSWITTLWRTNEDMLLPLIGMDATVFLRFVRMCRNMFLTLCVTGIGILLPINVSRFKNYEGPKQTSWVISITPLTVYAPAIWSQVVIAWCFNFIVIGFLWFNYRKVHQLRRRYFESEDYQKSLHSRTLMVFDIPKKGCSDEGIARIIDQIAPNSSFARTAVARNVKELPALIEQHDHAVRKLEKILAKYLKDPNNVPTARPMCKPSKKDRSYGTYPRGQKVDAIEYYTQRIRDLEVQIKQVRATVDKRGSMPYGFASYADIAEAHGIAYACRKKKPVGATVKLAPRPNDIIWENMPLYSSTRGRRRWVNNMWITLLTLFWIVPNLGIAIFLVNLENLGKVWPAFQTELAAHPKVWGAIQGVLSPAIMSLTYLVLPMIFRRLSVKAGDQTKTGRERHVLAKLYFFFVFNNLFIFSIFSTVWSFVFSVVQDATGAKKEDAWESIKKQKIASGLFETLCNNSLFWVTYLLQRQLGAAIDLAQAWPLIQAFFLKKFSSPTPRELIELTAPPPFEYASYYNYFLYYATVTMCLAGIQPLVLPATALYFVIDSWLKKYLLLYRFVTKTESGGMFWRVIFNRFIFATILSNLVVMLTCWAHGNFGTHIEFWCVVPLPFIMLIFKIYCNRAFNDKITYYSIQDVTKSPENGVDPKENRMRSERLANRFGHPALYRPLITPMVHAKAQNLLPAIYKGRLTDGREVDSGDMMTGGKPGKAANNVPGFEFVNDTQMDFEYYKNRAEFAENHGGGEIYGRPGEIGRPGTPGSMDGSDFSRPGTPVGRSASPAAFPGGAAQQQRLMSLASNVSGDTSYSSYRPGANTGFTQQMTLGQEPPPARGRSPLYAQNNGSSSSLGLIQNAAAPAYSSNLNTPGRMTPAQSPGPSVGAMGGGPQGYSGLAQHEGGEQSYDYFRGSNRPRRNPGEGW

SEQ ID NO: 9037 - protein, 493 aa, Oryza sativa (japonica cultivar-group)
MDDRRTILMDRYEIGRQLGQGNFAKVYYARNLTSGQAVAIKMIDKEKVTRVGLMVQIKREISIMRLVKHPNILQLFEVMASKSKIYFVLEYAKGGELFKKISKGKFSEDVARRYFHQLISGIDYCHSRGVYHRDLKPENLLLDENESLKVSDFGLSALSESKRHDGLLHTTCGTPAYVAPEVLSRRGYDGAKADIWSCGVILFVLVSGYLPFHDTNLIEMYRKIAKAEYKCPRSFSAELKDLLYKILDPDPSTRISIPKIKRSAWYRKSSDVNALKSKHETGDKVYKGEATTSDTTECSIFEGNRASSRDKVYTNGEATTSDSPECSNSDGKQASLSLPNLNAFDIISLSTGFDLSNLFEERYGRREERFTTRQPAAAIFAKLNELARRFKLKIKKKENGVLRLVAPKEGIKGLLELDAEVFELAPSFHLVEFKKSNGDTIEYQKLMKEDIRPALKDIVWAWQGGQHQQPEQSMQGMQGEQQPSRLPSQQPQG

SEQ ID NO: 9038 - protein, 350 aa, Escherichia coli O157:H7
MRFLLGVLMLMISGSALATIDVLQFKDEAQEQQFRQLTEELRCPKCQNNSIADSNSMIATDLRQKVYELMQEGKSKKEIVDYMVARYGNFVTYDPPLTPLTVLLWVLPVVAIGIGGWVIYARSRRRVRVVPEAFPEQSVPEGKRAGYVVYLPGIVVALIVAGVSYYQTGNYQQVKIWQQATAQAPALLDRALDPKADPLNEEEMSRLALGMRTQLQKNPGDIEGWIMLGRVGMALGNASIATDAYATAYRLDPKNSDATLGYAEALTRSSDPNDNRLGGELLRQLVRTDHSNIRVLSMYAFNAFEQQRFGEAVAAWEMMLKLLPANDTRRAVIERSIAQAMQHLSPQESK

SEQ ID NO: 9039 - protein, 339 aa, Sinorhizobium meliloti 1021
MRAIVLHAPGDIRLETRPKPVAGPGEVLLRVASVGVCGSDLPRMLVKGAWKMPLITGHEFSGHIHALGENVEGWEIGELTAIAPLMPCNQCIECKTGNFSRCRDYDYFGSRRDGAYAEFVAVPVENLIKTPQHVDPRAIAMTDPASIALHAIWKAGGITAGQTGAVVGCGPIGLFAIQWMRIMGTSRVIAVDVTEEKLALARQAGADLCILSADFADNKERADLVIEAVGIDSTINAAVMLAAPGGHVTFIGIPVPDVKLSNATFQRFLRQEVSLHGSWNSFGAPFPGPQWTTTVQKFATGELKWEFMISHDLDLAELPGIFQRFAAKDLHFSKVLFRP

SEQ ID NO: 9040 - protein, 507 aa, Solenostemon scutellarioides
MTSLLAHPLLPPPRRRPLPPLLPPPVSHPAGPRPGRWWRNLYDVKPVRFRCFAEWAQLFGPTFSVWFGSTLNVIVSSSELAKEVLKEKDGQLADPPRSRSAVKLSRDGKDLIWADYGPHYVKVRKVCTVVLFSPKRLELLRPIREDEITVMVESIYQDSAASGKSVVIKKYLASMAFHNITRLVFGKRFVNSEGEVDKQGQEFKAIAINGLKLGASLAVSEHIPWLRWMFPLDEDAFTQHGVRMERLTREIMQEHTLARQKTGGAKQHFFDALLTLKDEYDLSEDTIIALLWDMIAAGMDTPAISVEWAMAELVRNPRVQEKVQEELDRVIGHERIMTELDIPNLPYLQCVVKESLRLHPPTPVMLPHRSNADVKIGGYDIPKGSNVHVNVWAIARDPKSWKVPLEFRPERFLEEDVDIKGHDFRLLRFGAGRRVCPGAQLGIDLATSMIGHLLHHFRWTPPTGVRAEDIDMGENPGTVTYMRTPVEAVPTPRLPANLYKRVAVVDI

SEQ ID NO: 9041 - protein, 196 aa, Vigna radiata
MSTARFIKCVTVGDGAVGKTCMLISYTSNTFPTDYVPTVFDNFSANVTVDGSTVNLGLWDTAGQEDYNRLRPLSYRGADVFLLCYSLISKASYENISKKWIPELRHYAPNVPIVLVGTKLDLRDDKQFLIDHPGGTRITTAQGEELKKMIGAVTYIECSSKTQQNVKTVFDAAIKVALRPPKPKKKPRKKRTCFFL

SEQ ID NO: 9042 - protein, 355 aa, Methanosarcina acetivorans C2A
MSKNICFIDGLEGVLKYREVDINELVKLPYDAVSYLLIRGRLPGEQELAEYSARLHAERRINKEVIDVIRMCNFNIDAMAALRTVISFISQFDPDLNDSSPEGNMRKAIRLIAIVPTIVATYYRMANGKEPLPPDPSLSHGANFLYMIKGSKPDPLDAEVMEKDFILSAEHELNASTFSSRVTASTMSDLYSAVVSGLCTLKGPLHGGARAEVMTMLDEVASPENAEKFVLEKISQREKIMGFGHRVYKTYDPRGVIFKQLSKKLAESKGDMHWYTTAEAVENVVVRELVEKRGKPIYPNVDFYSGVIYKYMEIPPQLATSIFAIGRVSGWIAHCFDQYERKKIIRPRAFMLDEC

SEQ ID NO: 9043 - protein, 212 aa, Nicotiana tabacum
MAVEICVKAAVGAPNVLGDCPFSQRALLTLEEKKVPYKMHLINVSDKPKWFLEVNPEGKVPVIKFDEKWIPDSDVIVGLLEEKYPNPSLSSPPEFASVGSKIFPSFVSFRKSKDASDGTEQALLDELKALEEHLKAHGPYVNGANICSVDLSLAPKLYHLEVALGHFKKWSVPESLSHVRKYMKLLFERESFQKTKAAKEYVIAGWAPKVNP

SEQ ID NO: 9044 - protein, 259 aa, Zea mays
  unsure (1)..(259): unsure at all Xaa locations
WARKNRGGGGSGGERPVRGATESPALWCSRSRVRFTCDRIYFFFWHVNVVGDLFCFTFSNEAGTLPPCGTGGQCCIWQFNFRGFNPDTDPYSPDSIDLLRRSXIDFDLFAVEGVDSTRFAELMMSSGIVLNEEXQRVTFHGCHELGYLLRLLSGREMPYTLDGVLKLTMSFFPVLYDVKHLMKFCGPGLYGGLSRLGKLLKVERVGTGHQAGSDCLLTLQCFMKLKQLYLKESVKLYDGLLFGLIPGEVEIKTAPPPIG

SEQ ID NO: 9045 - protein, 330 aa, Brassica napus
  unsure (1)..(330): unsure at all Xaa locations
MDATREASVTDLKRPREEDDNNNTAAVASXETKEPACFSSVIPGWFSEMSPMWPGEAHSLKVEKVLFQGKSDYQDVIVFQSATYGKVLVLDGVIQLTERDECAYQEMITHLPLCSIPNPKKVLVIGGGDGGVLREVARHSSVEQIDMCEIDKMVVDVSKQFFPNVAIGFEDPRVNLVIGDGVAFLKNAAGGSYDAARPDSSDPIGPAKELFEKPFFQSVARALRPGGVVCTQAESLWLHMDIIEDIVSNCREIFKGSGDYAWTSVPTYPSRVIGFMLCPPQAPDVDFKHPVNPIHHTKSSGPFKFYNAQIHSAAFCLPSFAKKVIESKTN

SEQ ID NO: 9046 - protein, 505 aa, Zinnia elegans
MDLLLVEKTLLALFAAIIASIFISKLRGKRFKLPPGPVPVPIFGNWLQVGDDLNHRNLTDLAKKFGEIFLLRMGQRNLVVVSSPNLAKEVLHTQGVEFGSRTRNVVFDIFTGKGQDMVFTVYGEHWRKMRRIMTVPFFTNKVVQQYRTGWEAEAAAVVDDVKKNPKAATEGVVIRKRLQLMMYNNMFRIMFDRRFESEDDPLFVKLKMLNGERSRLAQSFEYNYGDFIPILRPFLKGYLKLCKEVKEKRFQLFKDYFVDERKKLGSTKSMDNNQLKCAIDHILDAKDKGEINEDNVLYIVENINVAAIETTLWSIEWAIAELVNHPEIQAKLRHELVSQLGPGVQVTEPDLHKLPYLQAVIKETLRLRMAIPLLVPHMNLHDAKLGGYDIPAESKILVNAWWLANNPDQWKKPEEFRPERFLEEESKVEANGNDFRYLPFGVGRRSCPGIILALPILGITIGRLVQNFELLPPPGQDKVDTTEKGGQFSLHILKHSTIVAKPRVL

SEQ ID NO: 9047 - protein, 416 aa, Shigella flexneri 2a str. 301
MESKVVVPAQGKKITLQNGKLNVPENPIIPYIEGDGIGVDVTPAMLKVVDAAVEKAYKGERKISWMEIYTGEKSTQVYGQDVWLPAETLDLIREYRVAIKGPLTTPVGGGIRSLNVALRQELDLYICLRPVRYYQGTPSPVKHPELTDMVIFRENSEDIYAGIEWKADSADAEKVIKFLREEMGVKKIRFPEHCGIGIKPCSEEGTKRLVRAAIEYAIANDRDSVTLVHKGNIMKFTEGAFKDWGYQLAREEFGGELIDGGPWLKVKNPNTGKEIVIKDVIADAFLQQILLRPAEYDVIACMNLNGDYISDALAAQVGGIGIAPGANIGDECALFEATHGTAPKYAGQDKVNPGSIILSAEMMLRHMGWTEAADLIVKGMEGAINAKTVTYDFERLMEGAKLLKCSEFGDAIIKNM

SEQ ID NO: 9048 - protein, 350 aa, Haloarcula marismortui ATCC 43049
MLQRAEPQDFERVLSSMCTVPHPSAREAAERFLATNPGDPGTYETIAGLEREAVEYLGDITGLSDPAGYVASGGTEANLQAIRIARNRADTDDPNVVAPVHAHFSFTKAADVLGVELRTAPAADYRVNMAAMAELVDEDTVCVVGVAGSTEYGYVDPIPAIADLAETVDALCHVDAAWGGFYLPFTDHDWHFGHADIDTMTIDPHKVGQAAVPAGGLLARDRTLLDELAVETPYLESTDQLTLTGTRSGAGVASAVAAMESLWPAGYRQQYETSMANADWLADQLSARGHDVVGPELPLVAADLSMPMTDELRDRGWRVSKTGAGEMRVVCMPHVTRSMLRSFVADLDWY

SEQ ID NO: 9049 - protein, 488 aa, Psychrobacter sp. 273-4
MLKTTLNLSNPDLIKQQCLIKDGWYAANDEATIEVSNPFNGDVIGTVPSLTTADVNDAVTYSHEAQITWAAKTPQERAQLLQKWADLIDANKEDLAIIMTAEQGKPLAESRGEIGYANSFIRWFAEEGKRVYGDVIPATNSQLRYVVLKQPVGVCAAITPWNFPAAMITRKAAPALAAGCTIIIKPATETPFSALALGALAEQAGIPAGVIQVVTGKSSTIGDILTGDARIHKLSFTGSTEVGRTLMAQCAPTIKKLSLELGGNAPFIVFDDADLEKAADGLIASKYRNAGQTCVCANRVYVQDSIKDEFLGIFIKKVAELKVGNGMEEGVNVGPLINEKALQKVQALLKDALDKGATLIAGGSTNNASALAYNPTVITDISADMDIASEEIFGPIAPVFTFSSEEEVIRAANDTIYGLAAYFYSSDYARAWRVTEGLEYGMVGHNTGMLSTEVAPFGGVKQSGFGREGSKYGIEEYVVTKYWCSDVS

SEQ ID NO: 9050 - protein, 378 aa, Nostoc punctiforme PCC 73102
MMVCEYKPGLEGIPAAQSSISYVDGQKGILEYRGIRIEELAEKSTFLETAYLLIWGELPSKEELEGFEHEVRYHRRIKYRIRDMMKCFPESGHPMDALQASAAALGLFYSLRDLHNPAYIRDSVVRLIATIPTMVAAFQLMRKGNDPVRPRDDLDYSSNFLYMLDEKEPDPLMARIFDICLILQVEHTMNASTFSARVTASTLTDPYAVVASAVGTLGGPLHGGANEEVIQMLEKIGSVENVRPYIEHCLETKSKIMGFGHRVYKVKDPRAIILQGLAEKLFEKFGYDKFYDIAQEMERVVGEKLGSKGIYPNIDFYSGLVYRKMGIPTDLFTPIFAIARVAGWLAHWKEQLAENRIFRPTQVYNGLHEVTYTPIDQR

SEQ ID NO: 9051 - protein, 441 aa, Glycine max
NVTRSTDEKQLLDWHLANLEYANAGCLSNLSAAYCRSDDPYEMSGDHCFLAGGNMGLIKALCEGVPVFYGKTVNTIRYGNEGVEVIAGEHVFQADIALCTVPLGVLKKKAISFEPELPARKLEAIERMGFGLLNKVAMVFPHVFWGEDRDTFGCLNEHSHQRGEFFLFYCYHTVSGGPALIALVAGEAAQAFESTDASILLHRVLTVLKGIFHPKGIIVPDPIQPTRPRWGSDPLSYGSYSHVSVNSSGADYDILAENVGNRLFFAGEATSRQYPATMHGAFLSGLREASHIYRSARIQNNPRKCMPKNIVSNDILGDLFKWPDLEFGKFAFIFYPSPENLQSTGLLQVTIGDAEEIYEELFSSYPNAAKWPLQLYTIISREQAQQLQKVEGGNESLLSFFTAARRLQLGGPNALLTAGNTLIASIAHSRKGRWRNRVITC

SEQ ID NO: 9052 - protein, 180 aa, Glycine max
MSGRVSGKVKWFNDQKGFGFITPDDGSEELFVHQSQIKSDGFRSLAEGESVEFAIESESDGRAKAVDVTGPDGASVQGTRRGGDGGRSYGGGRGGGYGGGGRGGGGGACYNCGESGHLARDCSQGGGGDRYGGGGGGGGRYGGGGGGRYGGGGGGGGGGGSCYSCGESGHFARDCPSSAR

SEQ ID NO: 9053 - protein, 1113 aa, Oryza sativa (japonica cultivar-group)
GLITKSRKGLDPAVARYARGFGPEEVQDLHEGASLVEVLYTDHQVRKVKPHVLLGLSGVGGIFNEEVLKAMKESDSPRPAIFAMSNPTTKAECTPEDVFKYVGDNAVFASGSPFSNVTLGNGRQGYANQANNMYLFPGIGLGALLSGARHITDGMLQSAAECLASYITDDEIRKGILFPSISSIRHITARVGAAVVRAAVDEDLAEGRCDVDARDLKSMTECWNNSSKKPPAKSAYLRWKKTVGVLPSLLPEVGMEFNTVDEAWMFWVSYGGQKGFEVRKRYSNKRKSDGKVRSCRYVCANEGHRKEDKRDHLTKCPRAETRTDCQVRMGVVLDQEKGNYKVADLVLEHNHILQLPETSHLMVSQRKISELQGFEIETADDAGIGPKAAHQLASIQVGGSLNLNCTLRDHKNYLRGKRQREMVYGQAGSMLMHFQDKIAENPSFQYALQMDSEEQIANIFWVDAKMLTDYAYFGDVVSFDTTFGTNKESRPFGVFVGFNQFRETMVFGAVLLYDETYESFKWLFETFLKAHNGKQPKTIYTDQDSAMGKAIKKVFLESWHGLCTFHIMQNAVKHVAELEDEESSNSPKQTAEDNEEERSILADFSACMFEYEDEETFEQAFSTIRAKASKQSWLDSIYKVKEKWAECYMKDVFTLACTTALEGNNCYLVAIGSLDENCTFEKEYKVVGDPLEQTSTCGCGMFSRTGILCAHALKVLDLMNIKSLPSQYVLKRWTRGAHSGTVQDNHGRSIIENPRLNEMLRYKDMTRKFLNLALRAASHPGSTLLVNNALDILSKQVEEEINGFTDTIALGPTDITPPSDLVSTARLKKKEVETKTSKRKKNWLDKLHKSTKNGSNKGGKRKKKGSKEQKTAKTGGKKKGKEASVHDNPAGQNIYPSTSLPMEEMSEPYMAINTFSQLLTQWSLVLVNRLLVSAGCGTCRDCSFGTLDEQLDLLGKSKVDWLSGVEATGGAELDGRWPEQASGAKRRWPEQGQGATAPRCRGVTGGERGGGWSSGEWRRAPGRWRRDEAERTPTARWSTHLKKRVSPEQKKGGGKSKKKMTWTDVLVPSPSPSSSSTATTNCSRLQRRLGRCAEQHKQGGGGGQDRDPHARPL

SEQ ID NO: 9054 - protein, 506 aa, Glycine max
  unsure (1)..(506): unsure at all Xaa locations
MLSQKQGEDAIITNLNHTDSEDGRRFSSSDTEQDHSMFNIKILLHLGGSVWDAWFSCASNQVAQVLLTLPXSFAQLGMVSGILLQIFYGLIGSWTAYLVSVLYIEYRTRKEKENVSFKNHVIQWFEVLDGLLGRYWKAVGLAFNCTFLLFGSVIQLIACASNIYYINDKLYKRTWTYIFGACCAFTVFIPSFHNYRIWSFLGLGMTTYTAWYLAIAAILHGQVENVTHSGPTKLILYFTGATNILYTFGGHAVTVEIMHAMWQPRKFKSIYFLATLYVFTLTIPSAVAVYWSFGDQLLDHSNAFSLLPKNVFRDAAVILMLIHQFITFGFACTPLYFVWEKVIGMHDTKSIWLRALARFPVVLPIWFLAIIFPFFGPINSAVGSLLVSFTVYIIPALAHMLTYRNASARQNAAEKPPFFMPSWTAMYVFNAFIIGWVLVVGFGLGGWASMINLINQIDTFGLFAKCYQCPEPPPPAGAPPPLTHPVVEGGVDLVEPWAPPNLLKII

SEQ ID NO: 9055 - protein, 521 aa, Zea mays
HASVQIKVEDMDAYAPKDLLVVTTGSQGEPRAALNLASYGGSHALKLSKEDVLLYSAKVIPGNETRVMKMMNRLTDLGPKIIMGKDSGLHTSGHAYREELEEVLRIVKPQHFLPVHGELLFLKEHESLGRSTGIRHTTVIKNGEMLGVSHLRNRRVLSNGFVSLGKEDLQLMYSDGDKAFGTSTDLCIDERLRIASDGIIFVSMEIFRPQKEHGLAQSGLKGKFKITTRCLWLDNGRLLDALYKAAHAALSSCPVNCPLSHMERMVAEILRKMVRKYSGKRPDVIAVAMENTTASFSEHLDAKSSGNFGPSSATSHLSRSPAMSLEGSYKTHPDNPEVDAEETLPEAARTTPDDATTSSNGEAFFSSDLHQPKTLEHFWESFKSPTTVKIARIVNGGKKQNLGKIGIMGKDSSIQSAPAPAKSSKKNKWKPEEIKSLIQMRGEMNERFQSVKGRMVLWEEISDNMLKQGISRTPAQCKSLWTSLVQKYEESKKDAESMKTWPYFSAMDRILSQQGEMATKG

SEQ ID NO: 9056 - protein, 123 aa, Triticum aestivum
MAGVSRSMVAPLLVLNLVMYIVVIGLASWNLNHFINGTTNYAGVAGNGATFYFLLFAILAGVVGAASKLAGVHHVRTWRGDSLATSASSALVAWAITALAFGLACKEIHVGGHRGWRLRVLEV

SEQ ID NO: 9057 - protein, 427 aa, Haemophilus somnus 129PT
MSKLTAKLTLSDGREFDLNVQQGTLGYDAVDVQPLVKNKLFTFDPGFMSTASCVSEITYIDGDNGILLHRGYPIADLAKNADYLEVAHLLLFGERPNKEEYANFIKLVKNHTLVHEQISRFFHGFRRDSHPMAIMCGVSGALAAFYHDSLDINDIEHRELTAIRLLAKMPTLAAMCYKYSIGQPFMFPLNKLSYAGNFLYMMFATPCEPYEVNPVLEKAMDRIFILHADHEQNASTSTVRTAASSGANPFACIAAGIASLWGPAHGGANEACINMLEEIGSVDRIPEYIARAKDKNDPFRLMGFGHRVYKNYDPRAKVMRQTCHEVLKELNIQTPLFDVAMELERIALNDPYFIDHKLYPNVDFYSGIILKAIGIPTSMFTVIFALARTVGWIAHWKEMFKPGNMKIVRPRQLYKGHTERNFDAIEK

SEQ ID NO: 9058 - protein, 143 aa, Brassica napus
  unsure (1)..(143): unsure at all Xaa locations
PAQDQLAAPLTGSKRSAGFPDTRKSNTDSYFHVXASRDARSSCMNEWAPHGKKKIETLSYVPDLTDHQSTKQDDYLLHLTGGTPCVEYEMQHXFVGPERGNTPGYYDARYWTMGKLSLIXCTDSAQMLKEVLECKTEYPNAFI

SEQ ID NO: 9059 - protein, 214 aa, Listeria monocytogenes str. 4b F2365
MRFFIDTANVEEIKKANRMGFIAGVTTNPSLVAKEGRDFNEVIQEITSIVDGPISGEVVSLEADEMIAEGRVIAKIHPNMVVKIPMTGEGLAAVKVLTEEGIKTNVTLVFSATQALLAARAGATYVSPFLGRLDDIGDDGLVLIRDIADIFEIYGIPTEIISASVRHPIHVIECAKAGADIATVPFKVFEQMLKHPLTDSGIDKFLADWEAAKK

SEQ ID NO: 9060 - protein, 138 aa, Triticum aestivum
MRVPQMTRVIHDSGEGMQKEFALDMVSSDVNFPKGHFPDYRIGPNNQIIDPEETHEVVPLKEIVEKETTQLLEQRKRLSVRDLREKFEKGLTGASKLSEEAKRREAASLDRQVLLKKLRDVLDTLKGRVAGRNRDDAD

SEQ ID NO: 9061 - protein, 203 aa, Methylococcus capsulatus str. Bath
MNTHIVWHQSTVTRGQRERQNGHKSFILWFTGLSGAGKSTLAHRVEQLLFEQGCRTYVFDGDNVRHGLCSDLGFSAEDRCENIRRIGEMSKLFVDAGVIALTAFISPFRRDRDLVRALVEPGDFVEIFCDAPLEVCEQRDVKGLYRKARAGEIPEFTGISSPYEKPLAPEITVRTGEDGLDECAGQILGYLEKNGKINLKTTR

SEQ ID NO: 9062 - protein, 240 aa, Zea mays
PTRPPTRPDPRVRPRVRPRVRVDHAVELAHFALFFNQGQCCCAGSRTFVHERVYDEFVEKAKARALKRVVGDPFRKGVEQGPQIDDEQFKKILRYIRYGVDGGATLVTGGDRLGDKGFYIQPTIFSDVQDGMKIAQEEIFGPVQSILKFKDLNEVIKRANASQYGLAAGVFTNSLDTANTLTRALRAGTVWVNCFDVFDAAIPFGGYKMSGMGREKGVDSLKNYLQVKAVVTPIKNAAWL

SEQ ID NO: 9063 - protein, 473 aa, Magnaporthe grisea 70-15
MASAMRLSSAFRATARAPAFTARRTAFNGMRCYSAKTQTLKERFAELLPEKIEEIKSLRKEHGSKVIDKVTLDQVYGGARGIKCLVWEGSVLDSEEGIRFRGKTIPECQELLPKAPGGKEPLPEGLFWLLLTGEVPSEAQVRALSAEWAARSDLPKFVEELIDRCPNDLHPMAQFSMAITALEQTSSFAKAYAKGINKKEYWGYTFEDSMDLIAKLPTIAARIYQNVFKGGKVAPVQKDKDYSFNFANQLGFGNNSDFVELLRLYLTIHTDHEGGNVSAHTTHLVGSALSSPFLSLAAGMNGLAGPLHGLANQEVLNWLTEMKKSVGDDLSDKSITDYLWSTLNSGRVVPGYGHAVLRKTDPRYTAQRVFAQEKMPNDPMFKLVSQVYKIAPGVLTEHGKTKNPFPNVDAHSGVLLQYYGLTEANYYTVLFGVSRAIGVLPQLIIDRAVGAPIERPKSFSTEKWIEIAKKTAA

SEQ ID NO: 9064 - protein, 350 aa, Caulobacter crescentus CB15
MATLLLLPGDGIGPEVCAQVRRVAAALTPDLKVDEALYGGASYDTHGTPLTDEVREQALASDAVLMGAVGGPKWADAPRHLRPEAGLLNLRKAMDVFANLRPAYCFEALAGASSLKPELVSGLDIMFVRELVGGVYFGQPRGIEDLADGQKKGFDTQVYTTSEIERVGRVAFELARGRTNKVHSAEKSNVMESGLLWKQVITELHAREYPDVQLEHILADNCAMQLVRAPKQFDVIVTDNLFGDILSDAAAMLTGSLGMLPSAALGAPGKPGLYEPIHGSAPDIAGKGLANPLAAILSFEMALRWSLKQTEAADALLAAVKAALDNGARTRDLGGSLTTTQMGDAVLAAL

SEQ ID NO: 9065 - protein, 489 aa, Mycobacterium tuberculosis H37Rv
MALWGDGISALLIDGKLSDGRAGTFPTVNPATEEVLGVAADADAEDMGRAIEAARRAFDSTDWSRNTELRVRCVRQLRDAMQQHVEELRELTISEVGAPRMLTASAQLEGPVGDLSFAADTAESYPWKQDLGEASPLGIATRRTLAREAVGVVGAITPWNFPHQINLAKLGPALAAGNTVVLKPAPDTPWCAAALGEIIVEHTDFPPGVVNIVTSSSHALGALLAKDPRVDMISFTGSTATGRAVMADAAATIKKVFLELGGKSAFVVLDDADLAAASAVSAFSACMHAGQGCAITTRLVVPRARYEEAVAIAAATMSSIRPGDPNDPGTVCGPLISARQRDRVQGYLDLAVAEGGRFACGGARPADREVGFYIEPTVIAGLTNDARVAREEIFGPVLTVIAHDGDDDAVRIANDSPYGLSGTVYGADPQRAARIASRLRVGTVNVNGGVWYCADAPFGGYKQSGIGREMGLLGFEEYLEAKLIATAAN

SEQ ID NO: 9066 - protein, 174 aa, Triticum aestivum
MAPAVMASSATTVAPFQGLKSTAGLPVSRRSSGSLGSVSNGGRIRCMQVWPIEGIKKFETLSYLPPLSTEALLKQVDYLIRSKWVPCLEFSKVGFVFREHNSSPGYYDGRYWTMWKLPMFGCTDATQVLNEVEEVKKEYPDAYVRVIGFDNLRQVQCVSFIAFRPPGCEESGKA

SEQ ID NO: 9067 - protein, 372 aa, Glycine max
MANLPNSKLYGKEKMKGEQELEDEESFSRAMLLCSSVVVSMALQSATELGVFDVLQEAGAKLSAKEIASKLSCDNNPEADSMLDRLLALLASHSILNCSLILDHQNLGTFQRLYTITPVARFFARNSDGVSLGPLMALLQDKIFLHSWSELKDSIREGGIPFNRVYGTHAFEYPRLDARFNQVFNTAMINHTTIVMKKVLECYKGFENIKMLVDVGGGLGININLITSKYPHIQGINFDLPHVLEHAPSYPGVEHVGGDMFENVPKGDAIFMKWILHDWSDEYCLKLLKNCYDAIPDDGKVIVVEAVLPIIPETSNAAWKAVSQTDVLMMTQNPGGKERSDQEFMDLATAAGFSGIRYECYVRTFWIMEFFK

SEQ ID NO: 9068 - protein, 181 aa, Brassica napus
MASVMLSSATMTSSLAHSTMVAPFIGLKSSAAFPMTCKANTEITSITSNGGRVNCMKVWPPVGKKKFETLSYLPDLTDVEIAKEVDYLIRNKWTPCIEFELEHGFVYREHGNIPGYYDGRYWTMWKLPLFGCTDSTQVLKEVKKCKQEYPNAFIRIIGFDNNRQAQCISFIAYKPPSFTDV

SEQ ID NO: 9069 - protein, 411 aa, RICKETTSIA HEILONGJIANGENSIS
DSEFAELKIRGKIFKLPILKASIGEDVIDISRVSAEADCFTYDPGFMSTASCQSTITYIDGDKGILRHRGYDIKDLAEKSDFLEVAYLLIYGELPSGEQYNNFTKQVAHHSLVNERLHYLFQTFCSSSHPMAIMLAAVGSLSAFYPDLLNFKEADYELTAIRMIAKIPTIAAMSYKYSIGQPFIYPDNSLDFTENFLHMMFATPYTKYTVNPIIKNALNKIFILHADHEQNASTSTVRIAGSSGANPFACISTGIASLWGPAHGGANEAVINMLKEIGSSEYIPKYIAKAKDKNDPFRLMGFGHRVYKNYDPRAAVLKETCKEVLKELGQLDNNPLLQIAIELEAIALKDEYFIERKLYPNVDFYSGIIYKAMGIPSQMFTVLFAIARTVGWMAQWKEMHEDPEQKISRPR

SEQ ID NO: 9070 - protein, 158 aa, Brucella melitensis 16M
MKKNNLFRALLISATFALQATAAFAVNPDEVLSDPKLEKRAREISAELRCMVCQNESIDDSNAELARDLRILVRERLTKGDTDGQVIDFVVDRYGEFVLLKPRFNAQTALLWGFPVIILLIGGGALLVAFRRRRAAGTAPQPLSESEKAELSRLLDGK

SEQ ID NO: 9071 - protein, 324 aa, Methanococcoides burtonii DSM 6242
MVKVKDLKWKQNMTVSELVDSYEFIGFQSVELQRASDVIVKMKKDSAKVFLTFTSNMVTSGLRGFFAQLIDLGVADVIVTTVGGLEEDIMKATGEDFQIGSFHTDDVELHEQGINRVGNLLIKTESYMNFESLVDKILKELYEKQNRWAVSDMLREIGLMLDDESSILYQAAKNNVPIFCPAITDGAFGFHLYLFQQEHPDFIVDVVKDFGNILFASSHDDRKGVIALGGSISKHHAILSTLLNGGAEYAVYMTTAHRTSGSMSGANTNEAKSWGKVKDESDVATVIGDVSITFPLAMIRALDELAADGLLKGLQENRTTGVVK

SEQ ID NO: 9072 - protein, 466 aa, Lactococcus lactis subsp. lactis Il1403
MLYGKENRDEAEFLEPIFGSESEQVDLPKYKLAQQSIEPRVAYQLVQDEMLDEGNARLNLATFCQTYMEPEAVKLMSQTLEKNAIDKSEYPRTTEIENRCVNMIADLWNASEKEKFMGTSTIGSSEACMLGGMAMKFSWRKRAEKLGLDINAKKPNLVISSGYQVCWEKFCIYWDIEMREVPMDKEHMSINLDKVMDYVDEYTIGVVGIMGITYTGRYDDIKALDNLIEEYNKQTDYKVYIHVDAASGGLYAPFVEPELEWDFRLKNVISINTSGHKYGLVYPGVGWVLWRDKKYLPEELIFKVSYLGGELPTMAINFSHSASQLIGQYYNFVRYGFDGYKAIHERTHKVAMFLAKEIEKTGMFEIMNDGSQLPIVCYKLKEDSNRGWNLYDLADRLLMKGWQVPAYPLPKNLENEIIQRLVIRADFGMNMAFNYVQDMQEAIEALNKAHILYHEEPENKTYGFTH

SEQ ID NO: 9073 - protein, 493 aa, Thermoplasma acidophilum
MDTKLYIDGQWVNSSSGKTVDKYSPVTGQVIGRFEAATRDDVDRAIDAAEDAFWAWNDLGSVERSKIIYRAKELIEKNRAELENIIMEENGKPVKEAKEEVDGVIDQIQYYAEWARKLNGEVVEGTSSHRKIFQYKVPYGIVVALTPWNFPAGMVARKLAPALLTGNTVVLKPSSDTPGSAEWIVRKFVEAGVPKGVLNFITGRGSEIGDYIVEHKKVNLITMTGSTATGQRIMQKASANMAKLILELGGKAPFMVWKDADMDNALKTLLWAKYWNAGQSCIAAERLYVHEDIYDTFMSRFVELSRKLALGDPKNADMGPLINKGALQATSEIVEEAKESGAKILFGGSQPSLSGPYRNGYFFLPTIIGNADQKSKIFQEEIFAPVIGARKISSVEEMYDLANDSKYGLASYLFTKDPNIIFEASERIRFGELYVNMPGPEASQGYHTGFRMTGQAGEGSKYGISEYLKLKNIYVDYSGKPLHINTVRDDLFQ

SEQ ID NO: 9074 - protein, 282 aa, Lactococcus lactis subsp. lactis Il1403
MVIQWFPGHMSKARRQVQENLKYVDFVIELVDARLPISSRNPMLGQIIGDKPRIIALNKADLADSNAVAQWIEFFDEQGFVTLAINSKEEYTAKRLTVAAKKLMADKVAHDKERGIAHTTLRTMIIGIPNAGKSTLMNRLAGKKVAVTGNRPGVTKGQQWIRTNKELELLDTPGILWPKFEDQLVGLKLALTGAIKDDLLPMDEVTIFGLNYFLKNYRTVTMKRYRMTEEDLELEIPDLIMELTARFGFRDDYDRFYNMFVKDVRDGKLGLFCLDEVGVDGL

SEQ ID NO: 9075 - protein, 225 aa, Desulfitobacterium hafniense DCB-2
MRPARRRRNQFNPFATPPGVPPHGAFGMTHPVLAALGLKDNESGTYLGHGEWSKTADAGVLEPVNPTDGEVLARVQASSQADYEIILARAQAAFAVWRTTPAPRRGEAIRLCSDALRKHKDALGSLVALEMGKSKPEGDGEVQEMIDIGDFAVGLSRQLYGLTMHSERPGHRMYEQWHPLGIVGIISAFNFPVAVWAWNSFIAAICGDISIWKPSPKTRCRRSRR

SEQ ID NO: 9076 - protein, 214 aa, Glycine max
LALHYRNADHPSRVDTDVDGLLGRLRFIQGLKFQVDVTYMEFLLRVKRVEEHAKGNGTWDAPHPWLNLFVSKSHIVDFDREVFKKILKDGVDGPILVYPLLRNKWDSRHSVVVPDSDMFYIVALLRFTPPPPKGPAAELLVAQNNEIIEFCTSRSLDFKLYFPHYQSREDWIKHFGNQWARFAERKANFDPMAILAPGQKIFSRTSQPQPPSIT

SEQ ID NO: 9077 - protein, 431 aa, Ralstonia eutropha JMP134
MNREQQIQALQKDWDTNPRWKGIKRNFTAEDVVRLRGSVQVEHTLARRGSEKLWNLLHTEPFVNSLGALTGNQAMQQVKAGLKAIYLSGWQVAGDANLAGEMYPDQSLYPANSVPQVVKRINNTFQRADQIQWSEGSGDTDFFAPIVADAEAGFGGVLNAFELMKSMIEAGAAGVHFEDQLASVKKCGHMGGKVLVPTREAVAKLTAARLAADVSGVPTLVIARTDAEAADLLTSDVDDNDKPFCTGERTVEGFYRVRNGLEQSISRALAYAEVADLVWCETGKPDLEFAKKFAEAVHAKFPGKMLAYNCSPSFNWKKNLDDATIARFQRELGAMGYKFQFITLAGFHSLNYSMFNLAYGYARNQMSAFVELQEAEFKAAEKGFTAVKHQREVGTGYFDAVTQAIEGGQSSTTALKGSTEDEQFFEDKKVA

SEQ ID NO: 9078 - protein, 425 aa, Ralstonia solanacearum
MKLHIKGGRLIDPANGIDAQQDLYLAAGKVVGVGRAPADFHANKTIDATGLVVCPGLIDLSARLREPGYEYKATLESEMAAAMAGGVTSLVCPPDTDPVLDEPGLVEMLKFRARNLNQAHVYPLGALTVGLKGLVLTEMAELTEAGCVGFSQADAPMTDTLVLMRALQYAQTFGFTVWLRPEDPFLGKGGVAASGPLASRLGLAGVPVMAETVRLHTIFELIRSTGARVHLCRLSSAAGLELVRRAKAEGLPVTCDVNVHHISLTDVDIGYFNSQMRFMPPLRAGRDRDGIVRALADGTIDAICSDHTPVDDDEKLLPFAEASPGATGLETLLPLTLRWAAEHKVDLPRALARITSEPARVLGLQAGSLEEGAMADVCVFDPDATWKVEPRSLRSQGKNSPYLGFELAGRVRATLVAGHLAYDGH

SEQ ID NO: 9079 - protein, 446 aa, Glycine max
SVIGYCEKTTEGERYKILRELGDGSCGHVYKARDMRTYEIVAVKRLKRKFCFWEEYTNLREVMILRKMNHPNIIKLKEVVRENNELFFIFEYMDCNLYQLIKEREKPFSEEEIRCFMRQVLQGLSHMHKKGFFHRDLKPENMLVTNDVLKIADFGLAREVSSMPPYTQYVSTRWYRAPEVLLRAPCYTPAVDMWAVGAILAELFTLTPIFPGESEIDQLYKIYGILGMPDSTAFTIGASNSQLLDIVAHEVVPPVKLSNIIPNASLEAIDLITQLLHWDPSRRPDADQSLQHPFFHVDAWVPCPPSDPLELKLSSKRAKPNLELKLQDFGPDPDDCFLGLTLGVKPSVSNSDVVQNVSQGVRENVLFCSDFNDHSDQSVFWTLLSPDQNGIHNSAETSLSLSFSPVQHPPIGVPQSVGFSFQPLQPNILTSPFLALSSPFQRGHCL

SEQ ID NO: 9080 - protein, 347 aa, Psophocarpus tetragonolobus
GGELFDRIVQKGHYSERQAATLIKTIVEVVEACHSLGVMHRDLKPENFLFDTLHEDAKLKATDFGLSVFYKPGESFCDVVGSPYYVAPEVLRKLYGPESDVWSAGVILYILLSGVPPFWAETEPGIFRQILLGKIDFQSEPWHSISDSAKDLIRRMLDQNPKTRLTAHEVLRHPWIVDDNLAPDKPLDSAVLSRLKQFSAMNKLKKMALRVIAERLSEEEIGGLKELFKMIDTDNSGTITFDELKDGLKRVGSELMESEIKDLMDAADIDKSGTIDYGEFIAATVHLNKLEREENLVSAFSYFDKDGSGYITLDEIQQACKDFGLDDVHIDDMIKEIDQDNDGQIDY

SEQ ID NO: 9081 - protein, 504 aa, Bifidobacterium adolescentis
  unsure (1)..(504): unsure at all Xaa locations
MKNKVQLITYADRLGDGTIKSMTDILRTRFDGVYDGVHILPFFTPFDGADAGFDPIDHTKVDERLGSWDDVAELSKTHNIMVDAIVNHMSWESKQFQDVLAKGEESEYYPMFLTMSSVFPNGATEEDLAGIYRPRPGLPFTHYKFAGKTRLVWVSFTPQQVDIDTDSDKGWEYLMSIFDQMAASHVSYIRLDAVGYGAKEAGTSCFMTPKTFKLISRLREEGVKRGLEILIEVHSYYKKQVEIASKVDRVYDFALPPLLLHALSTGHVEPVAHWTDIRPNNAVTVLDTHDGIGVIDIGSDQLDRSLKGLVPDEDVDNLVNTIHANTHGESQAATGAAASNLDLYQVNSTYYSALGXNDQHYIAARAVQFFLPGVPQVYYVGALAGKNDMELLRKTNNGRDINRHYYSTAEIDENLKRPVVKALNALAKFRNELDAFDGTFSYTTDDDTSISFTWRGETSQATLTFEPKRGLGVDNTTPVAMLEWEDSAGDHRSDDLIANPPVVA

SEQ ID NO: 9082 - protein, 205 aa, Shewanella oneidensis MR-1
MSNIVWHQHSVDQAARARLKGQNPVLLWFTGLSGAGKSTLAGALERALFEAGFHTYLLDGDNVRHGLCKDLGFSVADRDENLRRVGEVAKLMVDAGLVVLSAFISPTREERDSIRARFPEGQFIEVHVSTPLSVCELRDPKGLYVKARKGEIAHFTGISSPYEAPLSAELTIDTSKGDLASQVHALIDYLTAIDVISSNRLASLA

SEQ ID NO: 9083 - protein, 454 aa, Streptomyces avermitilis MA-4680
MTKRDVAALFGNRFLTEPAPSQTFPEEGMTATDTMRLLDEDLVMEGDPQRNLATFVTTWMEPEAQRIIAENLHRNFIDHAEYPISAEIEQRCVRMLADLFHAPGKTTGCRTQGSSEAIMLGALSLKWKWRERRQAANLPADRPNLVFGGDVHVVWEKFCRYFDVEPRIVPLAEDKYTIGPEDVEPHIDENTIGVVAVVGTTFTGHKDDVVGIDKLLRDVRKERDLDIPIHVDGASGGFVWPFLYPDSKWDFRLEQVRSINVSGHKYGLVYPGIGWLVFREESDLAKDLVFYENYLGKTDATFTLNFSTGASMVLAQYYNFVRLGRQGYTYVMETMQKNAHALADNLRSSGRFEVIGSDLEQLPLVAFRLAGEHAYDESDIAWQLSAERGWMVPAYTLPPNAERVKILRALVKETLSREQIERLTQDIADACATLDHKGGTTEVERAQIKRGTGY

SEQ ID NO: 9084 - protein, 346 aa, Escherichia coli
MKSVVNDTDGIVRVAESVIPEIKHQDEVRVKIASSGLCGSDLPRIFKNGAHYYPITLGHEFSGYIDAVGSGVDDLHPGDAVACVPLLPCFTCPECLYGFYSQCAKYDFIGSRRDGGFAEYIVVKRKNVFALPTDMPIEDGAFIEPITVGLHAFHLAQGCENKNVIIIGAGTIGLLAIQCAVALGAKSVTAIDISSEKLALAKSFGAMQTFNSLEMSAPQMQGVLRDVRFNQLILETAGVPQTVELAVEIAGPHAQLALVGTLHQDLHLTSTTFGKILRKELTVIGSWMNYSSPWPGQEWETASRLLTERKLSLEPLIAHRGSFESFTQVVRDIARNAMPGKVLLIP

SEQ ID NO: 9085 - protein, 268 aa, Methanosarcina thermophila
MVSKKVSRKVAAKEELLLLLPEIDRIFDSEPAVLRIDTEPVMIVGDIHGNLQALEYVIEKREEMNYKNFLFLGDYVDRGPQGTEALIRLFRMKLEDPDHIFLLRGNHETVDMNIYYGFFAEIGFDEEFLFRVSQTYDKMPIAAVLSGHTFCVHGGINGIGSINDIRKEKAFPYLWNDPSNHPGLTASRRGSTVKEFGPDIVDGFLKTNHLKRIVRGHTALDKGYRWWFDGKLLSLFSCPDYVGLGNAAAFALFEKEEIKLFVFGDQQE

SEQ ID NO: 9086 - protein, 503 aa, Ralstonia eutropha JMP134
MGQRVPAHVRHGLYTQVMSMFSLKDPGLLRQQAYVDGQWRAAESGKTLDVINPANNEPLGTIPACDAADTRAAIEAANRALPAWSALTTHQRAAVLRKWRELMVAHADDLALIMTLEQGKPLAEARGEILYGASFVEWFAEEGIRAYGETIPATHASRRIIARKVPVGVCAAITPWNFPNAMITRKLAPALAAGCAVVVKPSELTPYSALALAELGERAGIPAGVLNIVTGMPQGIGGELTANPIVRKLTFTGSTQVGKLLLRQCADTVKRVSMELGGNAPVIVFDDADLEQAVAGVMASKFRNSGQTCVCANRIYVQAGIYDRFSARLSEEVRKLKVGAGTEDGVSIGPLINDAALRKVVRHVEDAVAHGAKVIVGGASLSRGQQYFEPTVVTGATDGMLIASEETFGPVAALFPFESETEIIRRANDTPYGLAAYLFSTDVNRVFRVSEALEYGMVGANTGVISSAVAPFGGVKESGLGREGSHHGIDEFLEVQTLHLEIV

SEQ ID NO: 9087 - protein, 490 aa, Pseudomonas putida KT2440
MARFGTQKLYIDGAYVDAGSDATFEAINPATGEVLAHVQRATEADVEKAVESAERGQKVWAAMTAMQRSRILRRAVDILRERNDELAMLETLDTGKSYSETRYVDIVTGADVLEYYAGLVPAIEGEQIPLRESSFVYTRREPLGVTVGIGAWNYPIQIALWKSAPALAAGNAMIFKPSEVTSLTTLKLAEIYTEAGLPNGVFNVLTGSGREVGTWLTEHPRIEKVSFTGGTTTGKKVMASASSSSLKEVTMELGGKSPLIICADADLDKAADIAMMANFYSSGQVCTNGTRVFIPAEMKAAFEAKIAERVARIRVGNPEDENTNFGPLVSFQHMESVLGYIAKGKEEGARVLCGGERLTAGDFAKGAFVAPTVFTDCTDDMTIVKEEIFGPVMSILTYETEEEVIRRANDTDYGLAAGVCTNDITRAHRIIHKLEAGICWINAWGESPAEMPVGGYKQSGVGRENGVSSLAQYTRIKSVQVELGGYNSVF

SEQ ID NO: 9088 - protein, 497 aa, Pseudomonas putida KT2440
MYTLEFWQQRASDLYLPAHALIDGKPVNAQDGATFAAINPATNNVLAQVAACGHAEVDLAVASARRAFEQGPWPRMAPGERKKVLLRLAELIMAHREELALLDSLNMGKPVMDAYNIDVPGSAHVFAWYGEALDKLYDQVAPTAANALATITREALGVVAAVVPWNFPLDMAAWKLAPALAAGNSVVLKPAEQSPFSALRLAQLALEAGVPEGVLNVVPGLGEQAGQALGLHPDVDCLVFTGSTQVGKYFMQYSAQSNLKQVWLECGGKSPNLVFDNCQDLDLAAEKAAFGIFFNQGEVCSANSRLYVQRAIHDEFIERLQAKARQWLPGNPLDPASRAGAIVDAGQTGRIEAAIVRAGQEGARLVCGGRRLTIEGSDNYIEPTIFAGVEGRMSLAREEVFGPVLAVSAFDTEEEAVRLANDSIYGLVASVWSDDFNQVHRVARALKAGTVSVNTVDALDVTVPFGGGKQSGFGRDLSLHSFDKYSQLKTTWYQLRG

SEQ ID NO: 9089 - protein, 491 aa, Zea mays
  unsure (1)..(491): unsure at all Xaa locations
MTRVIHDSGDDMQXEALDLVSSDVNFPKGHFPDYRIGPNNQIIDPEETHEAVPLKEIVAKETAQLLEQHKRLSVRDLKEKFEKGLSGASKLSEEAKRREAASLDRQVLLKKLRDVLDTLKGRVAGRNRDDAEEAISLVEALAVQLTQREGXELIYEKAEVKKLANFLKQATEDARKVAEEERALALAEIEKARAAIEKVEKAWHVHDFASSSREKAEIEELRKEVREARRIKMLHQPSKVMDMEFELQALRTLISEKTQLCNQLKKELAMIKRLEDDSSGLFELEGSNTLGSQLCIIPRVDGASNITNCPIQWYRVISGGTRELISGATKFMYAPEPFDVGRLLQAEIVLNADKIIVQTDGPVDNAAGLERYVDSLMKRTDIEFNVVVTQMNGKDYSSNSVHVFHIGKLRIKLRKGWSTKARESYSTTMKLCGSRGGGNAAARAVFWHPRKGSSYTLAFETDRDRNAAIMIARKFASNCNIALAGPGDQGT

SEQ ID NO: 9090 - protein, 468 aa, Zea mays
  unsure (1)..(468): unsure at all Xaa locations
MARGREGEVRTLVLGKYELGRMLGQGSFAKVYYARDLRDGQSVAIKVIDKARLRQTDGMVEQLRREISVMRMVRHPNVVGIREVLASRQRVFVVMEYARGGELFAKVARGRLTEDAARKYFQQLVAAVAFCHSRGVAHRDLKPENLLLDEEGRLKVTDFXLAALPEQLRHDGLLHTQCGTPVCWRARAHIPTIYETSRRSPGPPRKTMCCARQVPLNRQEGEAGGEERKLVLGKYELGRLLGQGTFAKVYYARRLIARLLVVDPAKRASIPEVMCTPWFRKGFVPPALSVSPPMTPKKRLDGDDCGGALFDSGGGGGGDDDDSSSNSGATSPRSCNAFQLISSMSSGLDLSXLFENEQKAATVFTARAPAATVVEKLESAARALGFETTRGKGWKVRMEAKAGGTNGRLAVTAEVLEVAVDVAVVEFAHDAGDALDFNKFCAVDVRPGLAEIVWAWQGDSPAAVVGTA

SEQ ID NO: 9091 - protein, 497 aa, symbiont bacterium of Paederus fuscipes
MTTPTRADWEIRAKDLNIEGRAFVNGEYRNAASGETFDCLSPVDGRFLAKVASCDQADAEQAVKAARAAFDSGVWSRLAPAKRKRTMIRFADLLLKNAEELALLETLDMGKPISDSLHIDVSSAANSIYWNAEAIDKIYDEVAATPHEELGLVTREPVGVVTAIVPWNFPLLMACWKLGPALATGNSVILKPSEKSPLTAIRIACLATDAGIPTGVFNVLPGYGHTVGKALALHMDVDTLVFTGSTRIAKQLMIYAGESNMKRIWLEAGGKSPNIVFADAPDLKAAAEAAASAIAFNQGEVCTAGSRLLVERSIKDRFLPLVVEALKGWKPSNPLDPDTNVGALVDTQQLHTVLSYIEAGHKDGARLMVGGKRILEETGGVYVEPTLFDGVDNAMKIAREEIFGPVLSVITFENAEEAVRIANNTQYGLAAAVWTSDLSKAHLTAKALRAGSVWINQYDGGDMTAPFGGFKQSGNGRDKSLHAFDKYTELKATWIKL

SEQ ID NO: 9092 - protein, 205 aa, Vibrio parahaemolyticus RIMD 2210633
MTAETPVKDENIVWHQHTVDKQFRAELKKQKPAVLWFTGLSGAGKSTVAGALENRLAELGYHTYLLDGDNVRHGLCSDLGFSEQDRRENIRRIGELAKLMADAGLIVLSAFISPHRAERQLVRDLLPEGEFIEVFVNASLEVCEGRDPKGLYKKARAGEIPNFTGIDSEYQAPINPEIDLPAGEKSVEELVELCLNELKQRRVIS

SEQ ID NO: 9093 - protein, 342 aa, Photorhabdus luminescens subsp. laumondii TTO1
MKALVLEKAGQISIQDWETPEILGENDVEIKIHSVGICGSDVHYYQYGRIGPFIVEKPMILGHEASGVITAVGKNVTHLKIGDRVCMEPGIPNLQSPQSRAGIYNLDPEVRFWATPPIDGCLRERVIHPAAFTFKLPDNVSFAEGAMVEPLAIGMQAATKAEIKPGDIALVIGAGTIGIVTALAALAGGCSDVIICDVFDEKLEIAKQYPGLHPVNSKVLTEKVNALTEGNGVNILFECSGAKPVIATISEHIAPGGIAVLVGMPIDPAPFDVVSAQAKEITFKTIFRYANMYPRTIRLLSSGKLKVTPLLSATYKFKDSVQAYERAAEGRPTDIKIMLEME

SEQ ID NO: 9094 - protein, 248 aa, Orobanche cernua var. cumana
GCDASILLDDGPTIESEKSAGPNVDSVRGFDVIEAAKSAVEGICPGVVSCADILALAARDASVAVGGPTWTVKLGRRDSTTANRTQANTDLPSPFANLQTLVSAFANKGLSQTDMAALSGSHTLGQAQCFLFRARIYSNGTDIDPTFASNLTSQCPQSGGDSNLAPLDLVTPNFFDNNYFKNLIQRRGLLQSDQVLFSGGSTNTTVSRYSANPRMFAADFASAMIRMSEIQPLLGSSGIIRRICSATN

SEQ ID NO: 9095 - protein, 206 aa, Arabidopsis thaliana
METVGRPRGRPRGSKNKPKAPIFVTIDPPMSPYILEVPSGNDVVEALNRFCRGKAIGFCVLSGSGSVADVTLRQPSPAAPGSTITFHGKFDLLSVSATFLPPLPPTSLSPPVSNFFTVSLAGPQGKVIGGFVAGPLVAAGTVYFVATSFKNPSYHRLPATEEEQRNSAEGEEEGQSPPVSGGGGESMYVGGSDVIWDPNAKAPSPY

SEQ ID NO: 9096 - protein, 204 aa, Pichia pastoris
MASRGTSRQQYDLTMKLLLVGDSGVGKSCLLLRFVDDSFNPSFITTIGIDFKIRTVEINGKKVKLQIWDTAGQERFRTITTAYYRGAMGIILVYDVTDERSFNSVHNWYQTLNQHANEDAQLFLVGNKCDDEESRQVTKEQGEQLASELGVPFLEASAKSNKNVDAIFLELAKRFEEKMRNTQQGPGSAGIDVNSSNDTKSSCC

SEQ ID NO: 9097 - protein, 391 aa, Thermoplasma acidophilum
MEKTANIDKGLENVNIKWTKLTYIDGNNGILKYGGYNVNDLIENGAKEDEIQYLFLYGELPNRLDLELFQSKVQKGYELPDFVKDIIFELPRESDAVAMQMAAFSALATSTYNFKWNADLDRDQAAKAIGLMSAVTANVYRHIMGKGPVDLEPSDSFAESFLRSTLDRTPSEDEIDAMNAALILYTDHEVPASTTAGLVAVSTLSDMYSGIAAALAALKGPLHGGAAEASIMQFQEIGDPDNVDAWFRDNIVNGNKRLMGFGHRVYKTYDPRARIFRRYAEKLSANDPEAKKMFDIATRLEKIGIDTFGSKKIYPNTDYFSGIVYLALGYPLRNNIYTSFFALSRVTGWISHFMEYVENQHRLIRPRAVYVGPEDLQFVKIDERRGPIITS

SEQ ID NO: 9098 - protein, 207 aa, Escherichia coli
LRPVRYYQGTPSPVKHPELTDMVIFRENSEDIYAGIEWKADSADAEKVIKFLREEMGVKKIRFPEHCGIGIKPCSEEGTKRLVRAAIEYAIANDRDSVTLVHKGNIMKFTEGAFKDWGYQLAREEFGGELIDGGPWLKVKNPNTGKEIVIKDVIADAFLQQILLRPAEYDVIACMNLNGDYISDALAAQVGGIGIAPGANIGDECAL

SEQ ID NO: 9099 - protein, 457 aa, Lactococcus lactis subsp. lactis Il1403
MYTVGDYLLDRLHELGIEEIFGVPGDYNLQFLDQIISRKDMKWVGNANELNASYMADGYARTKKAAAFLTTFGVGELSAVNGLAGSYAENLPVVEIVGSPTSKVQNEGKFVHHTLADGDFKHFMKMHEPVTAARTLLTAENATVEIDRVLSALLKERKPVYINLPVDVAAAKAEKPSLPLKKENPTSNTSDQEILNKIQESLKNAKKPIVITGHEIISFGLEKTVTQFISKTKLPITTLNFGKSSVDETLPSFLGIYNGKLSEPNLKEFVESADFILMLGVKLTDSSTGAFTHHLNENKMISLNINEGKIFNERIQNFDFESLISSLLDLSGIEYKGKYIDKKQEDFVPSNALLSQDRLWQAVENLTQSNETIVAEQGTSFFGASSIFLKPKSHFIGQPLWGSIGYTFPAALGSQIADKESRHLLFIGDGSLQLTVQERKLQVQVSQPSSSHMNSYS

SEQ ID NO: 9100 - protein, 502 aa, Prochlorococcus marinus subsp. marinus str. CCMP1375
MTTALQSPPRRRIARLQEVSLLEGPMLLLRSIRGFRSNQSLIWLATVPLALLGLGVFGFAARAGVGLSDLSGAQAASFLADNLWLFIATILVIFMNAGFAMVEAGMCRQKNAVNILAKNLFVFALAVTAYWFIGYSIMYGGTPIIGGVIFSNGFFFNPDPSDALSCAAGLGADGCSQLVPAVDFLFQAAFAGTAATIVSGLVAERVKFGEFVVFSLVLTAFIYPIAGSWQWNGAGWLSQLGFIDFAGSSIVHSVGGWAGLVGAMLLGPRIGKFVDGKPQAMPGHNMAIATLGALILWIGWYGFNPGSELAMDEYVAYVAVTTTLAAAGGAIAATLLSTLTSGKPDLTMIINGILAGLVSITAGCGNMTLSGSWLAGFVGGLIVVFAVSALDSAGIDDPVGAFSVHGVCGVWGTVVIGLWGVDGMDPGAAGIGLFNGGGLNTLLIQALGAGAYAIWTVVTCWLAWTVIGGFFGGIRVSEEEEIQGLDIGEHGMEAYPDFASSN

SEQ ID NO: 9101 - protein, 430 aa, Staphylococcus xylosus
GVKDGNIAAIGQDLGEAEQVIDAQNQIVSPGMVDAHVHITEPGGGYRDSWEGYVTGTRAAAKGGVTSFIEMPLNQVPATTEQASIQAKFDAGKGELSVDVASYGGLVPYNLNGGIQELDEAGVVAYKAFLATCGDRSIEGDFENVDDYSLYEGMKQIAKTGKLLSIHAENATITDRLGEIAKANGETTLSAYVDSRPVFTEVEPIRKIILFAKETGCRVHIVHVACEEGVDEIIKAQQEGVDISCETCTHYLYFYKEELDDIGPVVKCSPPIREKSRLEGMWKRVLNGDIGFVTSDHSPCTPDLKDTDNAFEAWGGIAGLQNNVDILFDEGVQKRNMSLNKFADIIATAPAKRFGLEAKGSIAVGKDADFVLIKPNAPYTLAAEDLAYRNKMSPYIGREIGAQVTQTILRGEEIYNQETGISEKRIGQFI

SEQ ID NO: 9102 - protein, 317 aa, Haemophilus influenzae R2866
MTTQLDSLRNMTVVVADTGDIDAIKKYQPQDATTNPSLILSASALPQYAPLIDEAVAYAKAQSNDKAQQLIDAEDKLAVNIGLEILKIVPGRISTEVDARLSYDTQATVEKARKLIALYNAAGISNDRILIKIASTWQGIRAAEILEKEGINCNLTLLFSEAQARACAEAGVYLISPFVGRILDWYKANSDKKEYAPAEDPGVISVTKIYNYYKEYGYNTVVMGASFRNVGEITELAGCDRLTIAPALLKELQENSTALVRKLEYKGEVKAKPQPLTEAEFYWQHNGDAMAVEKLAEGIRKFAIDQEKLETMLSAKL

SEQ ID NO: 9103 - protein, 491 aa, Pseudomonas sp.
MKQYRNFVDGKWVESSKTFQDVTPIDGSVVAVVHEADRDLVDAAVKAGHRALEGEWGRTTAAQRVDWLRRIANEMERRQQDFLDAEMADTGKPLSMAATIDIPRGIANFRNFADILATAPVDSHRLDLPDGAYALNYAARKPLGVVGVISPWNLPLLLLTWKVAPALACGNAVVVKPSEDTPGTATLLAEVMEAVGIPPGVFNLVHGFGPNSAGEFISQHPDISAITFTGESKTGSTIMRAAAEGVKPVSFELGGKNAAVIFADCDFEKMLDGMMRALFLNSGQVCLCSERVYVERPIFDRFCVALAERIKALKVDWPHETDTQMGPLISSKHRDKVLSYFELARQEGATFLAGGGVPRFGDERDNGAWVEPTVIAGLSDDARVVREEIFGPICHVTPFDSESEVIRRANDTRYGLAATIWTTNLSRAHRVSELMRVGISWVNTWFLRDLRTPFGGAGLSGIGREGGMHSLNFYSELTNVCVRIDKESPDV

SEQ ID NO: 9104 - protein, 156 aa, Triticum aestivum
  unsure (1)..(156): unsure at all Xaa locations
MAPTVMASSATSVAPFQGLKSTAGLPVSRRSNGASLGSVSNGGRIRCMQVWPIEGIKXFETLSYLPPLSTEXLLKXVDYXIRSKWVPCLEFNKVGFIFRXHKHLLGYYDGRYXWTMWKLPKFRCNXAXQVXNXVEEXKKDYXTLFPINRIKSSGHG

SEQ ID NO: 9105 - protein, 69 aa, Triticum aestivum
MPALTGQVKWFNESKGFGFITPDDGSKDVFVHFSAIVDAGFKTLAEGQRVEFRIESGAKGPSAANVKAI

SEQ ID NO: 9106 - protein, 182 aa, Glycine max
LALPLSISNSLSEIRMASQSNTKSVHDFTVKDARGNNVNLADYKGKVLLIVNVASQCGLTNSNYTELNQLYEKYKGKGLEILAFPCNQFGAQEPGTNEEIVEFACTRFKAEFPIFDKVDVNGDNAAPLYKFLKSSKGGLFGDSIKWNFSKFLVDKDGNVVDRYAPTTSPLSIEKDIKKLLDA

SEQ ID NO: 9107 - protein, 168 aa, Zea mays
MAASSTATSVHDFIVKDASGKDVDLSTYKGKVLLIVNVASQCGLTNSNYTELAQLYEKYKDQGFEILAFPCNQFGGQEPGTNEEIVQFACTRFKAEYPIFDKVDVNGNNAAPIYKFLKSSKGGLFGDSIKWNFSKFLVDKEGRVVDRYAPTTSPLSIEKDIKKLLGSS

SEQ ID NO: 9108 - protein, 457 aa, Candida albicans SC5314
MARLTRKRTIEKELNGSSRVTRTLSMESISSLFKRNKKRKHNDGNDSSVNSSDNENINITDDEEQDHIDTKPNHKKRKIKTKAEEEFEANEKKLDEELPIDLRKYRPRGFRFNLPPEDRPIRIYADGVFDLFHLGHMKQLEQAKKSFPNVELVCGIPSDIETHKRKGLTVLTDEQRCETLMHCKWVDEVIPNAPWCVTPEFLQEHKIDYVAHDDLPYASSDSDDIYKPIKEQGKFLTTQRTEGISTSDIITKIIRDYDKYLMRNFSRGATRKELNVSWLKMNELEFKKHINDFRTYWMKNKTNINNVSRDLYFEIREFMRGKKFDFQKFIEDGNSQNSSNHGSDEESTNSSKVSSPLSDFASKYIGNRNKDLNRKGILNNFKGWINRDDHSEQETEEEIKPIVIKPIRRSRRLSGGSSTSSVPSTPVKRTASSASTTPKRKSPLKKSSSVKNTPKTK

SEQ ID NO: 9109 - protein, 93 aa, Glycine max
  unsure (1)..(93): unsure at all Xaa locations
MFFSMISPPAXTTVNRAGSGMFAPFTGLKSMAGFPTRKTNNDITSIASNCXRVQFMQVLPPFGKKKFXLLSYLPDLYDAQLSYDVLIPSYLCM

SEQ ID NO: 9110 - protein, 281 aa, Oryza sativa (japonica cultivar-group)
MPPPLEARDYIGLAASPASSSSSCCASTPVAEVVGAHLALRLGLPGSESPARAEAEAVVVDAALTLGPAPPPRGGAKRGFVDSLDRSEGRRAAATAGDDERGVREEEEEEKGLGEAAAGAPRAAKAQVVGWPPVRSYRKNTLAASATKTKGEDQGKSEVGCCYVKVSMDGAPYLRKVDLKTYSSYEDLSLALEKMFSCFITGRSSSHKTSKRDRLTDGSRADALKDQEYVLTYEDKDADWMLVGDLPWDLFTTSCRKLRIMRGSDAAGMAPRSLEQTGQNK

SEQ ID NO: 9111 - protein, 508 aa, Triticum aestivum
  unsure (1)..(508): unsure at all Xaa locations
MMIARGCLLRSKAESIVKHVASGGSWHGLHSFSEASARGFSSEPSLQAHSTEEIGFKGHGMLAPFTAGWQSTDVHPLVIDRSEGAYVYDINGKKYIDALAGLWCTALGGSEPRLVKAATXQLNKLPFYHSFWNRTTKPSLDLANDVLSMFTAREMGKVFFANSGSEANDSQVKLVWYYNNAMGRPDKKKFIARSKSYHGSTLISASLSGLPALHQKFDLPAPFVLHTDCPHYWRFHLPDETEEEFSTRLANNLENLILKEGPETIAAFIAEPVMGAGGVILPPKTYFEKIQAVLKKYDVLLIADEVITAFGRLGTMFGCDMYNIQPDLVSIAKALSSAYMPIAAILVSPEIADVVHSQSSKLGSFAHGFTYSGHPVACAVAIEALKIYKERNITEHVNTIATRFQEGIKAFSGSPIIGEIRGLGLILGTEFADNKSPNDPFPAEWGVGSIFGAECEKRGMLIRVAGDNIMLSPPLIMTPDEVEEIVSKYGGALKATEERIEELKSAKR

SEQ ID NO: 9112 - protein, 159 aa, Arabidopsis thaliana
MDLGRFPIISILEDMLEVPEDHNNEKTRNNPSRVYMRDAKAMAATPADVIEHPNAYAFVVDMPGIKGDEIKVQVENDNVLVVSGERQRENKENEGVKYVRMERRMGKFMRKFQLPENADLDKISAVCHDGVLKVTVQNFLLRNQRNQRQFKFKLLEFVL

SEQ ID NO: 9113 - protein, 341 aa, Amycolatopsis mediterranei
MRVGVLTGGGDCPGLNAVIRAVVRKGIEVHGWDFVGFRNGWNGPLTGDSRPLGLNDVEDILTRGGTILRSSRTNPYKVEGGVDKIKQVLADQGVDALIAIGGEDTLGVAKRLTDDGIGVVGVPKTIDNDLGATDYTFGFDTAVSIATEAIDRLHTTAESHHRALVVEVMGRHAGWIALHSGLAGGASVILVPERHFNVDQVVSWVERRFEKEFAPIIVVAEGALPEGGEEKLLTGEKDAFGHVRLGGIGTWLADEIAHRTGKESRAVVLGHVQRGGTPTAYDRVLATRFGLNAVDAVADGDFGVMVALKGTDIVRVKLSEATAELKTVPVERYQEAEVFFG

SEQ ID NO: 9114 - protein, 233 aa, Zea mays
MCGILAVLGCGDESQGKRVHVLELSRRLKHRGPDWSGLHQVADNYLCHQRLAIIDPASGDQPLYNEDKSIAVAVNGEVYNHEELRARLSGHRFRTGSDCEVIAHLYEEYGESFIDMLDGVFSFVLLDARDNSFIAARDAIGVTPLYIGWGIDGSVWISSEMKGLNDDCEHFEIFPPGNLYSSKEKSFKRWYNPPWFSEVIPSVPYDPLRLRSAFEKAVIKRLMTDVPFGVSLS

SEQ ID NO: 9115 - protein, 210 aa, Schizosaccharomyces pombe
MASNTAPKNVVTINQKLVLLGDSAVGKSSLVLRFVKDQFDDYRESTIGAAFLTQTLPIDENTSVKLEIWDTAGQERYKSLAPMYYRNANCAIVVYDITQASLEKAKSWIKELQRQAPEGIVIALAGNKLDLAQERRAVEKADAEAYAAEANLLFFETSAKTAENVNELFTAIAKKLPLEDKLNQARGAVNRGVNLSEARPAAQPSGSCSC

SEQ ID NO: 9116 - protein, 462 aa, Poncirus trifoliata
MDSNYTVIPKNSFLELQVYDNDQNPPSRINSHVKIQTFDEEHDADSKNFVDHVDNNQDDEHDDYPLISAKSNEGSGVAGAVFNLTTTVIGAGIMALPAAMKVLGLAVGFVLIIFMGILSEVSVELLVRFSVLCKATSYGEVVQYALGRPAKILSEICIILNNAGVLVVYLIIVGDVMSGSLHHTGVFDQWLGKGMWDHRKLLILIVLVVFLAPLCALDRIESLSMSSAASVALAVVFVVVCFFIAFIKLVEGKLDPPRMSPDFGSKKAILDLLVVIPIMTNAYVCHFNVQPIYNELEGRTPQKMNHVGRLTTILCIVVYSSTAISGYLLFGKDTESDVLTNFDKDLGIGYSTALNYIVRGSAPLLESRKRSLALTGVLLVLIYFGSTMIPSIWTAFKFTGATTAVSLGFIFPPLVALRLRKEGPGLSLWEKFLSGLMLVLAIVVSFVGVMGNIYSLESKSDD

SEQ ID NO: 9117 - protein, 275 aa, Bacteroides fragilis
IDKVGDPFPEETYRVCKNADAVLFSAVGDPKFDNDPTAKVRPEQGLLAMRKKLGLFANIRPFQTFKCLVHKSPLRAELVEGADFLCIRELTGGMYFGEKYQDNDKAYDTNMYTRPEIERILKVGFEYAMKRRKHLTVVDKANVLASSRLWRQIAQEMAPQYPEVTTDYMFVDNAAMKMIQEPKFFSVMVTENTFGDILTDEGSVISGSMGLLPSASTGESTPVFEPIHGSWPQAKGLNIANPLAQILSVAMLFEYFDCKAEGALIRKAVDASLDA

SEQ ID NO: 9118 - protein, 429 aa, Arabidopsis thaliana
MESLPQPQNQSSPATTPAKILLGKYELGRRLGSGSFAKVHLARSIESDELVAVKIIEKKKTIESGMEPRIIREIDAMRRLRHHPNILKIHEVMATKSKIYLVMELASGGELFSKVLRRGRLPESTARRYFQQLASALRFSHQDGVAHRDVKPQNLLLDEQGNLKVSDFGLSALPEHLQNGLLHTACGTPAYTAPEVISRRGYDGAKADAWSCGVILFVLLVGDVPFDDSNIAAMYRKIHRRDYRFPSWISKQAKSIIYQMLDPNPVTRMSIETVMKTNWFKKSLETSEFHRNVFDSEVEMKSSVNSITAFDLISLSSGLDLSGLFEAKKKKERRFTAKVSGVEVEEKAKMIGEKLGYVVKKKMMKKEGEVKVVGLGRGRTVIVVEAVELTVDVVVVEVKVVEGEEDDSRWSDLITELEDIVLSWHNDIM

SEQ ID NO: 9119 - protein, 294 aa, Saccharomyces cerevisiae
TTPLVHVASVEKGRSYEDFQKVYNAIALKLREDDEYDNYIGYGPVLVRLAWHTSGTWDKHDNTGGSYGGTYRFKKEFNDPSNAGLQNGFKFLEPIHKEFPWISSGDLFSLGGVTAVQEMQGPKIPWRCGRVDTPEDTTPDNGRLPDADKDADYVRTFFQRLNMNDREVVALMGAHTLGKTHLKNSGYEGPWTANPNVFDNSFYLNLLNEDWKLEKNDANNEQWDSKSGYMMLPTDYSLIQDPKYLSIVKEYANDQDKFFKDFSKAFEKLLENGITFPKDAPSPFIFKTLEEQGL

SEQ ID NO: 9120 - protein, 181 aa, Brassica napus
  unsure (1)..(181): unsure at all Xaa locations
MAYSMLSSXAVXTSPAQATMVAXFTGLKSSSAFPVTXKANNDITSIVSNGGRVXCMKVWPPVGKKKFETLSYLPDLTEVELGKEVDYLLRNKWIPCVEFELEHGFVYREHGSTPGYYDGRYWTMWKLPLFGCTDSAQVLKEVQECKTEYPNAFIRIIGFDNNRQVQCISFIAYKPPSFTGA

SEQ ID NO: 9121 - protein, 235 aa, Glycine max
MSLFGAYSICEVGKDAAGVAGNIFAFGLFVSPIPTFRRIIRNGSTEMFSGLPYIYSLLNCMICLWYGTPLISPDNLLVTTVNSIGAAFQLVYIILFLMYAEKARKVRMVGLLLAVLGIFVIILVGSLQIDDSAMRRMFVGFLSCASLISMFASPLFIIKLVIRTKSIEFMPFYLSLSTFLMSFSFFLYGLLSDDAFIYVPNGIGTVLGIIQLVLYFYYKGSSSEECREPLIVSYE

SEQ ID NO: 9122 - protein, 196 aa, Pseudomonas aeruginosa PAO1
MNPREHGKRSIDNETRSALKRQRPAVIWLTGLSGAGKSTIASALELALFEQKKHTFLLDGDDLRLGLCRNLGYSDEDRTENIRRIAEVAKILLEAGLIVIVATISPFSRDRRLSRELIGIEHFIEVFVDTPLSECERRDPKGLYRKARSGKIENFTGIDSIYETPAQPNITIDTLSEDPDLAVKRIISYLETNQPA

SEQ ID NO: 9123 - protein, 275 aa, Bacteroides ovatus
IDKVGDPFPEATYQVCKDADAVLFSAVGDPKFDNDPTAKVRPEQGLLAMRKKLGLFANIRPVQTFKCLIHKSPLRAELVENADFICIRELTGGMYFGEKYQDNDKAYDTNYYTRPEIERILKVAFEYAMKRREHLTVVDKANVLASSRLWRQIAQEMAPNYPEVTTDYMFVDNAAMKMIQEPAFFDVMVTENTFGDILTDEGSVISGSMGLLPSASTGESTPVFEPITGSWPQAKGLNIANPLAQILSVAMLFEYFDCKEEGALIRKAVDASLDE

SEQ ID NO: 9124 - protein, 340 aa, Solanum tuberosum
MEVISTHTNGSTITITTNGHHNNGKSDHRNGGTIHDNGNKLLLGNSNSIKPGWFSEFSALWPGEAFSVKIEKLLFQGKSDYQDVMLFESATYGKVLTLDGAIQHTENGGFPYTEMIVHLPLGSIPTPKKVLIIGGGIGFTLFEVLRYSTIEKIDIVEIDDVVVDVSRKFFPYLAANFNDPRVTLVLGDGAAFVKAAQAGYYDAIIVDSSDPIGPAKDLFERPFFEAVAKALRPGGVICTQAESIWLHMHIIKQIIANCRLVFKGSVNYAWTTVPTYPTGVIGYMLCSTEGPEVDFKNPVNPIDKDTTHVKSKLEPLKFYNTDIHKAAFILPSFARSLIES

SEQ ID NO: 9125 - protein, 104 aa, Triticum aestivum
  unsure (1)..(104): unsure at all Xaa locations
MSELTHPTIKDGWFREISDMWPGQAMTLKVKNIIHHEKSKYQDVLIFESTDYGTVLVLDNVIQCTERDEFAYQEMITHLANELTPKIPKKVLVIXGGGDGGVPP

SEQ ID NO: 9126 - protein, 275 aa, Bacteroides ovatus
IDKVRDPFPEATYQVCKEADAVLFSAVGDPKFDNDPTAKVRPEQGLLAMRKKLGLFANIRPVQTFKCLIHKSPLRAELVENADFICIRELTGGMYFGEKYQDNDKAYDTNYYTRPEIERILKMAFEYAMKRRKHLTVVDKANVLASSRLWRQIAQEMAPNYPEVTTDYMFVDNAAMKMIQEPAFFDVMVTENTFGDILTDEGSVISGSMGLLPSASTGESTPVFEPIHGSWPQAKGLNIANPLAQILSVAMLFEYFDLKEEGALIRKAVDVALDE

SEQ ID NO: 9127 - protein, 464 aa, Yersinia pseudotuberculosis
IPAATQTSLSQLKLASQLDGEVRLASHPAFDEWYLTSVWNGRGPTRRPAGIVRAATEADVIRTIVFAKERGMEVSVRGSGHNYVGCFLRVDTLMLDISGLKGLDIDSRHKRAIVESGVSSGQLCHALAAKGLAFPTGHVKEVGISGFLLGGGLGINCSQWGGMSVFNVQALDIVTADGRLRHVSETQEPDLFWAARGAGPCSFFVVTRFYLSCYSLPRVITNSLYTLPFTYLHDLLARLEDASPPTNLQVMVSVSPPTSGDTPAVLLNILAFTDSPQEAQALCESFETRLELPLTALAINQPSNFETIYEQFSSMVVSKRFYADNILTDNTQELVSILSRYLSDAPSRGALTTIFWRGVTTYPQAAFSAHGKFFVSTYAQWDDAKDDSVNKYWLKRMYDELQEIARSRYINEYDLETRVGETSKCFAAENWERLQRLRLEYDPDGVFVDVQQLEEHGDQPGANN

SEQ ID NO: 9128 - protein, 305 aa, Thermoplasma volcanium GSS1
MPIDPQVRKYLDAMSKVSVPELNKTPIEDLRKIFDTPASGAPKVKISVVEDMILDTDAAKLPARLYDDSNSDSLVLYFHGGGFVFGSIETHDSLCRRIAKYSGSKVISVGYRLGPENKFPVAQIDAFNSYLYVLKRSEELGVDSDKIALMGDSAGGNLAAVASLMARDKGIKLPRLQVLVYPSTGPDMTSKSYLEYSSIYLTKELLNWFSSQYLNSIEDALNPYFSPILADLSGLPEAIVVTDEYDPLLEQGETYSATLRDSGVPVTSIRVNGMIHGFLSNFHLFRAADVSLMMISGAIHTILES

SEQ ID NO: 9129 - protein, 502 aa, Agastache rugosa
MDLFLLEKTLLGLFAAIVVAAVVSKLRGKKFKLPPGPIPVPIFGNWLQVGDDLNHRNLTDYAKKFGDIFLLRMGQRNLVVVSSPELAKDVLHTQGVEFGSRTRNVVFDIFTGKGQDMVFTVYGEHWRKMRRIMTVPFFTNKVVQQYRHGWEAEVAAVVEDVKKNPDSATTGIVLRRRLQLMMYNNMYRIMFDRRFESENDPLFVKLRALNGERSRLAQSFEYNYGDFIPILRPLLKGYLRICKEVKDRRLQLFKDYFVDERKKLASTKPMDNDGLKCAIDHILDAQQKGEISEDNVLYIVENINVAAIETTLWSIEWGIAELVNNPEVQRKVREEMDRVLGVGVPVTEPDTHKLPYLQAVIKETLRLRMAIPLLVPHMNLHDAKLGGFDIPAESKVLVNAWWLANNPEQWKKPEEFRPERFLEEESKVEANGNDFRYLPFGVGRRSCPGIILALPILGITLGRLVQNFELLPPPGKSKIDTTEKGGQFSLHILNHSTIVMKP

SEQ ID NO: 9130 - protein, 477 aa, Sinorhizobium meliloti 1021
MTLHQNLIAGEWVGGDGVANINPSNTDDVVGEYARASAEDAKAAIAAAKAAFPAWSRSGILERHAILKKTADEILARKDELGRLLSREEGKTLAEGIGETVRAGQIFEFFAGETLRLAGEVVPSVRPGIGVEITREPAGVVGIITPWNFPIAIPAWKLAPALCYGNTIVFKPAELVPGCSWAIVDILHRAGLPKGVLNLVMGKGSVVGQAMLDSPDVQAITFTGSTATGKRVAVASVEHNRKYQLEMGGKNPFVVLDDADLSVAVEAAVNSAFFSTGQRCTASSRIIVTEGIHDRFVAAMGERIKGLVVDDALKPGTHIGPVVDQSQLNQDTDYIAIGKQEGAKLAFGGEVISRDTPGFYLQPALFTEATNEMRISREEIFGPVAAVIRVKDYDEALAVANDTPFGLSSGIATTSLKHATHFKRNAEAGMVMVNLPTAGVDFHVPFGGRKASSYGPREQGKYAAEFYTNVKTAYTLA

SEQ ID NO: 9131 - protein, 506 aa, Yersinia pseudotuberculosis
MRYAHPGTPEALVSFKATYGNYIGGEFVEPLGGQYFMNTSPVNGSDIAQFPRSDARDIDAALDAAHRAADAWGKTSVQHRSNLLLQMADRIEANLEYLAVAESWDNGKPIRETLNADLPLAVDHFRYFAGCLRAQEGGVAEIDEKTVAYHFHEPLGVVGQIIPWNFPLLMAAWKLAPALAAGNCVVLKPAEQTPLGITLLLELVGDLFPAGVLNVVQGYGREAGEALASSKRIAKIAFTGSTPVGRHIMACAAENIIPCTVELGGKSPNIYFADVMEAEPEFIEKAIEGLVLGFFNQGEVCTCPSRALIHESIYAPFMARVMAKVANIRRGDPLDTETMIGAQASRQQFDKILSYIDIARKEGGEILTGGARATMTPALDAGFYIQPTLIKGDNLMRCFQEEIFGPVIGVTTFKDEAEALAIANQTQFGLGAGIWTRDTHLAYRMGRGIKAGRVWTNCYHVYPAHAAFGGYKQSGVGRETHKMALNQYQQTKNLLVSYDTAPLGLF

SEQ ID NO: 9132 - protein, 328 aa, Escherichia coli
MDKKQVTDLRSELLDSRFGAKSISTIAESKRFPLHEMRDDVAFQIINDELYLDGNARQNLATFCQTWDDENVHKLMDLSINKNWIDKEEYPQSAAIDLRCVNMVADLWHAPAPKNGQAVGTNTIGSSEACMLGGMAMKWRWRKRMEAAGKPTDKPNLVCGPVQICWHKFARYWDVELREIPMRPGQLFMDPKRMIEACDENTIGVVPTFGVTYTGNYEFPQPLHDALDKFQADTGIDIDMHIDAASGGFLAPFVAPDIVWDFRLPRVKSISASGHKFGLAPLGCGWVIWRDEEALPQELVFNVDYLGGQIGTFAINFSAGGSGNCTVL

SEQ ID NO: 9133 - protein, 355 aa, Verticillium dahliae
MSRSNAPNPSGSRKISFNVSEQYDIQDVVGEGAYGPPSSAIHKPSGQKVAIKKITPFDHSMFCLRTLREMKLLRYFNHENIISILDIQKPRGYDTFNEVYLIQELMETDMHRVIRTQDLSDDHCQYFIYQTLRALKAMHSANVLHRDLKPSNLLLNANCDLKVCDFGLARSAASQEDNSGFMTEYVATRWYRAPEIMLTFKEYTKAIDVWSVGCILAEMLSGKPLFPGKDYHHQLTLILDVLGTPTMEDYYGIKSRRAREYIRSLPFKKKVPFRTLFPKTSDLALDLLEKLLAFNPVKRITVEEALKHPYLEPYHDPDDEPTAPPIPEEFFDFDKHKDTLSKEQLKQLIYQEIMR

SEQ ID NO: 9134 - protein, 206 aa, Escherichia coli O157:H7
MAIPAFGLGTFRLKDDVVISSVKTALELGYRAIDTAQIYDNEAAVGLAIAESGVPRHELYITTKIWIENLSKDKLIPSLKESLQKLRTDYVDLTLIHWPSPNDEVSVEEFMQALLEAKKEGLTREIGISNFTIPLMEKAIAAVGAENIATNQIELSPYLQNRKVVAWAKQHGIHITSYMTLAYGKALKDEVIARIAAKHNATPAQV

SEQ ID NO: 9135 - protein, 375 aa, Pseudomonas fluorescens PfO-1
MAEAKVLSGAGLRGQVAGQTALSTVGQAGAGLTYRGYDVRELAADAQFEEVAYLLLYGELPTKAQLADYQGKLSKLRDLPQALKEVLERIPADAHPMDVMRTGCSFLGNIEPEKDFSEQRDKTDRLLAAFPAIMCYWYRFSHDGKRINCVSDEPSIGGHFLHLLHDKKPSELHVKVMNVSLILYAEHEFNASTFTARVCASTLSDLYSCVTAAIGSLRGPLHGGANEAAMEMIERFSSPEEAVKGTLGMLERKDKIMGFGHAIYKDSDPRNEVIKGWSKKLADEVGDKVLFAVSEAIDKTMWEQKKLFPNADFYHASAYHFMGIPTKLFTPIFVCSRLTGWAAHVFEQRANNRIIRPSAEYTGVEQRKFVPIEQR

SEQ ID NO: 9136 - protein, 455 aa, Nostoc punctiforme PCC 73102
MAIATINPATGETLKTFEALNDTEILAKLDLANQAFEKYRQTDFSERSQWLQKAADILEQDKAEFAKLMTLEMGKPFKAAIAEVEKCAVVCRYYAEHAPSFLADVSVKTDASQSFVRYQPMGAILAVMPWNFPFWQVFRFAAPALMAGNVGLLKHASNVPQCALAIEDIIRRAGFPEGAFQTLLIGAAKVADLMADDRVKAATLTGSEPAGISLAVAAGKQIKKTVLELGGSDPFIVLESADLETAVVTATTARMLNNGQSCIAAKRFIVAEAIADKFEKLLLEKFEALKVGDPMQSDTDLGPLATPGILQDLDQQVQAATKIGGKVLTGGHPLSDRPGNFYPPTIIIDIPPDTPIAKEEFFGPVALLFRVPDIDAAIKLANDSPFGLGASAWTKNDQECDRLIEEIEAGAVFINSMVKSDPRLPFGGTKRSGYGRELSIQGIHEFVNVKTVWVK

SEQ ID NO: 9137 - protein, 293 aa, Nostoc punctiforme PCC 73102
MAITQNYRLNVIQWYPGHIAKAEKKLKEQLKRVDVVFEVRDARIPLATHHPQIGEWVEGKTRVLILNRVDMITPQMRSLWIDWFKRQGEVPYFTNAQHGKGIAEVARAAQAAGVELNQRRSDRGMLPRPVRAVVIGFPNVGKSALINRLLGRRVVESAARPGVTRQLRWVRISEHLELLDAPGVIPLRLEDQDAALKLAICDDIGEASYDNQLVAAALVDLFNYLEAVTTDLLPKKPLQSRYQLDSTSDTGDTYLHALAEHRYKGDVERAARQLLTDFRKGLLGEMSLELPPN

SEQ ID NO: 9138 - protein, 373 aa, Arabidopsis thaliana
MGYLFQETLSSNPKTPIVVDDDNELGLMAVRLANAAAFPMVLKAALELGVFDTLYAAASRTDSFLSPYEIASKLPTTPRNPEAPVLLDRMLRLLASYSMVKCGKALSGKGERVYRAEPICRFFLKDNIQDIGSLASQVIVNFDSVFLNTWAQLKDVVLEGGDAFGRAHGGMKLFDYMGTDERFSKLFNQTGFTIAVVKKALEVYEGFKGVKVLVDVGGGVGNTLGVVTSKYPNIKGINFDLTCALAQAPSYPGVEHVAGDMFVDVPTGDAMILKRILHDWTDEDCVKILKNCWKSLPENGKVVVIELVTPDEAENGDINANIAFDMDMLMFTQCSGGKERSRAEFEALAAASGFTHCKFVCQAYHCWIIEFCK

SEQ ID NO: 9139 - protein, 107 aa, Glycine max
  unsure (1)..(107): unsure at all Xaa locations
MASSMISSPAVITVDRACAGMVAPFTGLKSMAGFPTRKTSNDITSIAINRGKVHCMHVLPPIGNKMFETLSYLPYLDDAQLAKEVEYLLMKXWIPCLEFELEHRFAY

SEQ ID NO: 9140 - protein, 301 aa, Arabidopsis thaliana
MAMEDQSAARSIGKVSWFSDGKGYGFITPDDGGEELFVHQSSIVSDGFRSLTLGESVEYEIALGSDGKTKAIEVTAPGGGSLNKKENSSRGSGGNCFNCGEVGHMAKDCDGGSGGKSFGGGGGRRSGGEGECYMCGDVGHFARDCRQSGGGNSGGGGGGGRPCYSCGEVGHLAKDCRGGSGGNRYGGGGGRGSGGDGCYMCGGVGHFARDCRQNGGGNVGGGGSTCYTCGGVGHIAKVCTSKIPSGGGGGGRACYECGGTGHLARDCDRRGSGSSGGGGGSNKCFICGKEGHFARECTSVA

SEQ ID NO: 9141 - protein, 160 aa, Dechloromonas aromatica RCB
MSQTLYDFSAQRLNGEPQDFEAYRGKVLLIVNTASECGFTPQYTGLEELYWMFKDRGFVVLGFPCNQFGGQEPGDAEAIGQFCQTRFDVTFPLFAKVDVNGDSAHPLYTWLKHEAAGVLGTEAIKWNFTKFLIDREGKVVHRYAPATRPDELVEAVEAQL

SEQ ID NO: 9142 - protein, 422 aa, Pseudomonas putida KT2440
MSDLKTAALEYHAQPRPGKLSVELSKPTATARDLALAYSPGVAEPVREIGRDPELAYKYTGKGNLVAVISDGTAILGLGDLGPLASKPVMEGKGVLFKRFAGIDVFDIEVESESPQAFIDTVRRISITFGGINLEDIKAPECFEIERTLIEQCDIPVFHDDQHGTAIVTAAGMINALEIAGKKLEEAKIVCLGAGAAAISCMKLLVSMGAKVENIFMIDRSGVIHAGRDDLNQYKAQFAHATDKRTLADALDGADVFVGLSGPNLLSPEGLKSMAANPIVFACSNPDPEISPELAHATRNDVIMATGRSDYPNQVNNVLGFPFIFRGALDVRAKRINEEMKIAAAIALKDLAKLPVPKEVCEAYGVEGLEFGREYIIPKPLDARLITVVSDAVAKAAIESGVATLPYPKHYPLTSVDEVFNG

SEQ ID NO: 9143 - protein, 459 aa, Arthrobacter nicotinovorans
MVSSKLATPLSIQGEVIYPDDSGFDAIANIWDGRHLQRPSLIARCLSAGDVAKSVRYACDNGLEISVRSGGHNPNGYATNDGGIVLDLRLMNSIHIDTAGSRARIGGGVISGDLVKEAAKFGLAAVTGMHPKVGFCGLALNGGVGFLTPKYGLASDNILGATLVTATGDVIYCSDDERPELFWAVRGAGPNFGVVTEVEVQLYELPRKMLAGFITWAPSVSELAGLLTSLLDALNEMADHIYPSVFVGVDENRAPSVTVCVGHLGGLDIAERDIARLRGLGRTVSDSIAVRSYDEVVALNAEVGSFEDGMSNLWIDREIAMPNARFAEAIAGNLDKFVSEPASGGSVKLEIEGMPFGNPKRTPARHRDAMGVLALAEWSGAAPGSEKYPELARELDAALLRAGVTTSGFGLLNNNSEVTAEMVAEVYKPEVYCRLAAVKREYDPENRFRHNYNIDPEGS

SEQ ID NO: 9144 - protein, 448 aa, Streptomyces coelicolor A3(2)
MAPAITLAAETELSAANTGFMLICSALVMLMTPALAFFYGGMVRVKSTLNMLMMSFISLGIVTVLWVLYGFSMAFGTDSGSVVGWNSDWVGLSDIGLTELWDGYTIPVFVFLVFQLMFAVLTPALISGALADRVKFTAWALFIALWATIVYFPVAHWVWGAGGWAFELGVIDFAGGTAVHINAGAAALGVILVIGKRVGFKKDPMRPHSLPLVMLGAGLLWFGWFGFNAGSWLGNDDGVGALMFVNTQVATGAAVLGWLAYEKIRHGAFTTLGAASGAVSGLVAITPAGGAVSPLGAIAVGLVAGVVCAMAVGLKYRFGYDDSLDVVGVHLVGGILGSLLIGFFASGKGQSDVEGLFYGGGLDQFWKQCAGVFGVLAYSLVVSAVLAFLLDKTIGMRVSEDVEVAGIDQAEHAETAYDFSGAGGGAARTTATPAASTAGSAPSKKVDA

SEQ ID NO: 9145 - protein, 167 aa, Citrus sinensis
MASQSKTSVHDFSVKDAKGQDVDLSIYKGKLLLIVNVASQCGLTNSNYTELSQLYDKYKNQGLEILAFPCNQFGAQEPGDNEQIQEFACTRFKAEFPIFDKVDVNGDNAAPLYKHLKSSKGGLFGDSIKWNFSKFLVDKEGNVVERYAPTTSPLSIEKDIKKLLETA

SEQ ID NO: 9146 - protein, 503 aa, Arabidopsis thaliana
MAITVPRRQLFIGGQWTEPVLRKTLPVVNPATEDIIGYIPAATSEDVELAVEAARKAFTRNNGKDWARATGAVRAKYLRAIAAKVIERKSELANLEAIDCGKPLDEAAWDMDDVAGCFEYYADLAEGLDAKQKTPLSLPMDTFKGYILKEPIGVVGMITPWNYPLLMAVWKVAPSLAAGCTAILKPSELASLTCLELADICREVGLPPGVLNILTGLGTEAGAPLASHPHVDKIVFTGSTTTGSSIMTSAAKLVKPVSLELGGKSPIIVFDDVDIDKAVEWTMFGCFWTNGQICSATSRLLVHERIADEFLDKLVKWTKNIKISDPFEEGCRLGPVVSKGQYERVLKFVSNARNEGATVLCGGVRPEHLKKGYFVEPAIVSNVTTSMEIWREEVFGPALCVKTFSTEDEAIQLANDSQYGLAGAVLSNDLERCDRVSKAFQAGIVWVNCSQPCFCQAPWGGTKRSGFGRELGEWGLENYLSVKQVTQYISDEPWGWYKPPSKL

SEQ ID NO: 9147 - protein, 275 aa, Bacteroides caccae
IDEVGDPFPEETYQACKNADAVLFSAVGDPKFDNDPTAKVRPEQGLLAMRKKLGLFANIRPVQTFKVLIHKSPLRAELVENADFICIRELTGGMYFGEKYQDNDKAYDTNYYTRPEIERILKVAFEYAMKRRKHLTVVDKANVLASSRLWRQIAQEMAPQYPEVTTDYMFVDNAAMKMIQEPAFFDVMVTENTFGDILTDEGSVISGSMGLLPSASTGESTPVFEPIHGSWPQAKGLNIANPLAQILSVAMLFEYFDLKEEGALIRKAVDASLDE

SEQ ID NO: 9148 - protein, 275 aa, Bacteroides distasonis
IDKVGDPFPEETYRICKDADAVLFSAVGDPKFDNDPTAKVRPEQGLLAMRKKLGLFANIRPVQTFKCLLHKSPLRAELVDGADFLCIRELTGGMYFGEKYQDNDKAYDTNMYTRPEIERILKVGFEYAMKRNKHLTVVDKANVLASSRLWRQIAQEMAPSYPEVTTDYMYVDNAAMRMIQEPKFFDVMVTENTFGDILTDEGSCISGSMGLLPSASTGESTPVFEPIHGSWPQAKGLNIANPLAQILSVAMLFEYFDLKEEGALIREAVDASLDA

SEQ ID NO: 9149 - protein, 275 aa, Bacteroides eggerthii
IDKVGDPFPEATYQACKNADAVLFSGVGDPKFDNDPTAKVRPEQGLLAMRKKLGLFANIRPVQTFKCLLHKSPLRAELVDGADFLCIRELTGGMYFGEKYQDNDKAYDTNMYTRPEIERILKVGFEYAMKRNKHLTVVDKANVLASSRLWRQIAREMAPDYPEVTTDYMYVANAAMRMIQEPKFFDVMVTENTFGDILTDEGSCISGSMGLLPSASTGESTPVFEPIHGSWPQAKGLNIANPLAQILSVAMLFEYFGLKEEGALVREAVDASLDA

SEQ ID NO: 9150 - protein, 505 aa, Pseudomonas syringae pv. tomato str. DC3000
MHDLLTADEYAAIAQSISFPSNAFINGAYKPAISGATFSTINPATGEFLSDLAACRAEDVDDAVSKAKKAFDDGRWRLLAPGERKSVLLKFARLLEDNRHELAVLESLDSGKPVRECQLVDVPDTIHTLRWHAELIDKLYDHTAPVGNDALTLVVREPIGVVGCVLPWNFPLLMLAWKIGPALAAGCSVIVKPAEQTSLTTLRVAELAFEAGVPAGVLNIITGTGKDVGEPIGLHKDIDMVSFTGSTVTGRRFLHYSADSNLKRVVLECGGKNPAVVMEDAEDLDLVAEQVVNGAFWNMGENCSATSRLLVHASVKDELLERMGAYIREWKMGDPLDPQTRVGALVSSDHFAKVKSYLDYANADKLDIVYGGDTQEGAFVQLTVVDGVERDSRLFQEEIFGPILSVTTFNSISEAIALANDTVYGLAASVYTGSLRKAIKLSREIRAGIVTVNCFGEGDASTPFGGFKESGFGGRDKSVFAHDQYTEIKTIWIDVSDRSVDETVK

SEQ ID NO: 9151 - protein, 291 aa, Neurospora crassa
MSEIAHPTIQDGWFREISNMWPGQAMTLKVEKVLHHEKSLYQDVLIFKSTDHGNVLVLDNVIQCTERDEFSYQEMITHLAMNSHPNPKKVLVIGGGDGGVLREVVKHDCVEEAILCDIDEAVIRLSKQFLPHMSAGFEHPKVKVHVGDGFKFLEDFKNTFDVIITDSSDPEGPAESLFQKPYFQLLHDALREGGVITTQAENQWLHLPLITKLKKDCKEVFPVAEYAYTTIPTYPSGQIGFMVCSKDPNANVKVPLRSWSQEEEEKLCRYYNSEIHKASFILPTFAKKALE

SEQ ID NO: 9152 - protein, 275 aa, Bacteroides stercoris
IDKVGDPFPEATYQACKNADAVLFSAVGDPKFDNDPTAKVRPEQGLLAMRKKLGLFANIRPVQTFKCLLHKSPLRAELVDGADFICIRELTGGMYFGEKYQDNDKAYDTNMYTRPEIERILKVGFRYAMKRNKHLTVVDKANVLASSRLWRQIAQEMAPDYPEVTTDYMYVDNAAMRMIQEPKFFDVMVTENTFGDILTDEGSCISGSMGLLPSASTGESTPVFEPIHGSWPQAKGLNIANPLAQILSVAMLFEYFDLKEEGALIRKAVDASLDA

SEQ ID NO: 9153 - protein, 224 aa, Glycine max
  unsure (1)..(224): unsure at all Xaa locations
SVPNIPKVPELPKREWPEFAKSAXGDRSEIPEVPKPELPKXPGVPELPNLELPKVTQLPKSKLPKVPEIPKGPEFPKPELPKVPELSKPELPKAPEIPNVPEFPKPELPKVPELSKPELPKAPEIPKVPEFPKPELPKVPELPKPELPKIPEIPKVPEFPKPELPKVPEVPKPELSKVPKLPKSELPKVPEIPELPKSELPKIPEIPKVPEFPKVPKAFSTTNP

SEQ ID NO: 9154 - protein, 467 aa, Synechocystis sp. PCC 6803
MVHKKIDLNQLSEAESLLTPTYAARGLANSVSKYEMPETEMLPAIAYNLIHDELGLDGNSRLNLATFVTTWMEPEARQLMADTFDKNMIDKDEYPQTAEIELRCVNILSRLWNAPASAEATGCSTIGSSEAAMLGGMAMKWKWRQRRQAAGKPGDRPNLVMGINVQVCWEKFCRYWEVEPRFVPMEGDRYHISPEEAVKLIDENTIGVIGILGSTFDGSYEPIEALNDALETLNQRTGWQVPLHIDAASGGFIAPFLDPDLRWDFRLPWVKSINTSGHKYGLVYPGVGWIIWRDKEELPEELIFHCNYLGGDLPNFALNFSRPGNQVVAQYYNFLRLGKEGYRKIQQTCRDTALYLSGKIAQLGPFELLTDGGDIPVFAWRLKDEVLANTCYTLYDMADKLRERGWLVPAYRMPKNREDLVVQRIVVKEGFSRDMADLLLADMERAIAYFASQPDHKPKQEGSHFSH

SEQ ID NO: 9155 - protein, 496 aa, Magnetospirillum magnetotacticum MS-1
MPLTPELDPFKLAKALSGKHLIGGKFVPAKGGKTFPVDNPATGEEIGTAAFGTKADVDAAVANAKAAQKEWAKQSARARGKLVAECGRVLSAHVEELGRLVALETGKALRTESRVEAGVLADMFVFFGGLGSELKGETIPFNPDMLTVTVREPVGVVGCIIPWNVPLLLMAMKAAAALVAGNAVVVKSAEEAPLTVLRVAEIMNTVLPPGLFNMLSGFGPECGAPLVEHPDVKKVTFTGSVETGRIVYKAAAEKLIPVTLELGGKSPMIVCADADMDQAVAGALAGMRFTRQGQSCTASSRLFVHESIHDEFVARVKAKVDAMVMGDPLDEKTDIGTIVSDGQLERVKSYIKLGEETKGATKHVCSAMPTDPKLAKGRFVQPVIFTGMKNSDRLCQEEIFGPVCAVIKWTDYEDVLAQANDSEYGLAASIWTRDFKVAMDATRRLEAGFVQVNQNLVVQPMLSYGGVKTSGIGKEASLESMLEHFTHKKTIIFNMK

SEQ ID NO: 9156 - protein, 217 aa, Triticum aestivum
PELRWAFVRKIYVILAVQLAMTAAVSGFVVKVPAVSNFFVSSNAGIALYIFLIILPFIVLCPLHYYHQKHPVNLLLLGLFTVAISFAVGMTCAFTSGKIILEAAILTAVVVISLTAYTFWAAKRGHDFNFLGPFLFAAIMVLMVFSLIQIFFPLGKVSVMIYGGLASLIFCGYIIYDTDNIIKRYTYDEYIWAAVSLYLDVINLFLSLLQLLRAADS

SEQ ID NO: 9157 - protein, 117 aa, Prunus dulcis
MAYSAMTKLALVVALCMVVSVPIAQAITCGQVSSNLAPCIPYVRGGGAVPPACCNGIRNVNNLARTTPDRQAACNCLKQLSASVPGVNPNNAAALPGKCGVNIPYQISPSTNCANVK

SEQ ID NO: 9158 - protein, 441 aa, Lactococcus lactis subsp. lactis Il1403
MNLLSKEEKMIKNSQIPSEFYKKYNVKKGLRDINGKGVLAGLTNISAIHSFDKEGNQIPGILEYRAYNIKDIINDLRKENRFGFEEMTYLLLFGELPTANELQEFQNLLASRRTLPEFFIRETILTNPSSDVMNSMSRCILALASYDEKVSDISIENVLEQSFGLIADFPLLAIYSYQSYVHYFKKESLYIHYPDPKMTTAENILRMLRPDCHYTEVEAKVLDIALILHMEHGGGNNSTFTTHVVTSSGTDTYATIAAALSSLKGPKHGGANIKAAKMLENIKENISNYEDDAEIEKYLHKILNKEVFDKQGLIYGIGHAIYSLSDPRFEVFKSYVETLVKEKGLEEEFKLYEKVARLAPKVISENRKIYKTICPNVDFYSGFVYRILEIPQELFTPLFAIARIVGWLAHRIEELINMNKIIRPAYESVLESKNYIKLGER

SEQ ID NO: 9159 - protein, 418 aa, Burkholderia fungorum LB400
MPYQHIKVPTGGDKITVNPDFSLNVSDQPIIPYIEGDGTGIDITPVMIKVVDAAVEKAYAGKRKIHWMEIYAGEKSTKVYGPDVWLPEETLQVLKEYVVSIKGPLTTPVGGGIRSLNVALRQELDLYVCLRPVQYFKGVPSPVREPEKTNMVIFRENSEDIYAGIEWPAESEQAKKIIRFLREEMGVKKIRFPETSGIGIKPVSREGTERLVRKAIQYAIDHDRRSVTLVHKGNIMKFTEGAFRDYGYALAQKEFAAELIDGGPWMKIKNPKTGGDVVLKDVIADAFLQQILLRPAEYDVIATLNLNGDYVSDALAAQVGGIGIAPGANMSDSVAMFEATHGTAPKYAGKDYVNPGSEILSAEMMLRHLGWTEAADLIIKSMEKSILQKRVTYDFARLMEGATQVSCSGFGQVLIENL

SEQ ID NO: 9160 - protein, 412 aa, Lactococcus lactis subsp. lactis Il1403
MKIEMKNGKLVVPDYPAIGYIRGDGVGEDIFPQAQKVFDAAVLKIYGQKKKIEWQKLLAGGEAFETCGEYLPKETLAHINENLIAIKGPLMTPVGESFRSINVTLRQKMDLYACVRPVEYFKGIKSPVKAPEKVDMTIFRENTEDIYAGIEFASETNESHNLLKFLEKELNVHSIRFPKTSALGIKPVSPEGSKRLVNAAFEYALKMNKKRVTFVHKGNIMKFTEGGFRNWAYEVAREYPTFTKLEYDEIKNERGSLQAENEKKAALKSGKIYVDDVIADNFLQQIILNPENFEVIATLNLNGDYISDALAAQVGGIGIAPGANINYKSGHAIFEATHGTAPDIAGKNIANPSSLILSGVMMFEYLGWQEVAELIKIALSFSFRNGNLTADLGGKLSTSKFSDVLIDFIKTY

SEQ ID NO: 9161 - protein, 279 aa, Bacillus thuringiensis serovar konkukian str. 97-27
MKNLQSKAVLNNGVEMPWFGLGVFKVEEGPELVEAIKTAIKAGYRSIDTAAIYGNEKAVGEGIRAGIEATGISREDLFITSKVWNADQGYETTIAAYEESLKKLGLDYLDLYLVHWPSEGKYKDTWRALETLYKEKRVRAIGVSNFQIHHLQDVMKDAEIKPMINQVEYHPRLTQKELQAFCKEQGIQMEAWSPLMQGQLLDNETLQEIAEKHGKTTAQVILRWDLQNGVITIPKSTKEHRIIANADVFNFELTKEDMEKIDALNQNHRVGPDPDNFDF

SEQ ID NO: 9162 - protein, 131 aa, Desulfitobacterium hafniense DCB-2
MSNRLEQLRQLSAVVADTGDIDAIARFRPLDATTNPSLLLKAAGLPAYAPLIDAAVAQATGADRQARVADAGLRLAVAIGGEILKLIPGRVSTEVDARLSFDTQATLAQARRIVALYAEAGIGRERLLIKM

SEQ ID NO: 9163 - protein, 332 aa, Streptomyces carzinostaticus subsp. neocarzinostaticus
MGKRAAHIGLRALADLATPMAVRVAATLRVADHIAAGHRTAAEIASAAGAHADSLDRLLRHLVAVGLFTRDGQGVYGLTEFGEQLRDDHAAGKRKWLDMNSAVGRGDLGFVELAHSIRTGQPAYPVRYGTSFWEDLGSDPVLSASFDTLMSHHLELDYTGIAAKYDWAALGHVVDVGGGSGGLLSALLTAHEDLSGTVLDLQGPASAAHRRFLDTGLSGRAQVVVGSFFDPLPAGAGGYVLSAVLHDWDDLSAVAILRRCAEAAGSGGVVLVIEAVAGDEHAGTGMDLRMLTYFGGKERSLAELGELAAQAGLAVRAAHPISYVSIVEMTAL

SEQ ID NO: 9164 - protein, 606 aa, Zea mays
MDTHIGSVNGAASNQTVGCPASAPGCPMASTPAQPAATLSAGEASLGRHLARRLVQVGVNDVFAVPGDFNLTLLDHLIAEPGLRLVGCCNELNAGYAADGYARARGVGACAVTFTVGGLSVLNAIAGAYSENLPVICIAGGPNSNDYGTNRILHHTIGLPDFSQELRCFQTVTCHQAVVNNLDDAHEQIDTAIATALRESKPVYLSISCNLPGLPHPTFSRDPVPFFLTPRTSNKMGLEAAVEATVEFLNKAVKPVLVAGPKLRVAKAGKAFVDMVDASGYAYAVMPSAKGLVPETHPHFIGTYWGAVSTAFCAEIVESADAYLFAGPIFNDYSSVGYSFLLKKEKAIIVQPERVIVGNGPAFGCVMMKEFLSELAKRVNKNTTAYENYKRIFVPEGQPLESEPNEPLRVNVLFKHVQKMLTGDSAVIAETGDSWFNCQKLKLPEGCGYEFQMQYGSIGWSVGALLGYAQGANHKRVIAFIGDGSFQVTAQDVSTMLRCEQNSIIFLINNGGYTIEVEIHDGPYNVIKNWNYTGFVDAIHNGLGKCWTSKVKSEEELTAAIETALGEKKDCLCFIEVIAHKDDTSKELLEWGSRVSAANSRPPNPQ

SEQ ID NO: 9165 - protein, 321 aa, Papaver somniferum
MESNGVPMITLSSGIRMPALGMGTAETMVKGTEREKLAFLKAIEVGYRHFDTAAAYQTEECLGEAIAEALQLGLIKSRDELFITSKLWCADAHADLVLPALQNSLRNLKLDYLDLYLIHHPVSLKPGKFVNEIPKDHILPMDYKSVWAAMEECQTLGFTRAIGVCNFSCKRLQELMETANSPPVVNQVEMSPTLHQKNLREYCKANNIMITAHSVLGAVGAAWGTNAVMHSKVLHQIAVARGKSVAQVSMRWVYQQGASLVVKSFNEARMKENLKIFDWELTAEDMEKISEIPQSRTSSAAFLLSPTGPFKTEEEFWDEKD

SEQ ID NO: 9166 - protein, 194 aa, Saccharomyces cerevisiae [sequence omitted]

SEQ ID NO: 9167 - protein, 321 aa, Papaver somniferum
MESNGVPMITLSSGIRMPALGMGTVETMEKGTEREKLAFLNAIEVGYRHFDTAAAYQSEECLGEAIAEALQLGLIKSRDELFITSKLWCADAHADLVLPALQNSLRNLKLEYLDLYLIHHPVSLKPGKLVNEIPKDHILPMDYKSVWAAMEECQTLGFTRAIGVSNFSCKKLQELMATAKIPPVVNQVEMSPTLHQKNLREYCKANNIMITAHSVLGAIGAPWGSNAVMDSKVLHQIAVARGKSVAQVSMRWVYQQGASLVVKSFNEARMKENLKIFDSELTAEDMEKISEIPQSRTSSADFLLSPTGPFKTEEEFWDEKD

SEQ ID NO: 9168 - protein, 407 aa, Streptomyces avermitilis MA-4680
MAAEIVNPRSDSSTDQEGGAEPLDSFDPAFALHRGGKMAVQATVPIRDRDDLSLAYTPGVAKVCTAIAEQPELVHDYTWKSSVVAVVTDGTAVLGLGDIGPEASLPVMEGKAILFKQFGGVDAVPIALGTTDADEIVETVVRLAPSFGGVNLEDISAPRCFEIERKLQERLDIPVFHDDQHGTAVVTLAALRNAAKLTGRTLGELRAVISGAGAAGVAIAKFLLAAGLGDVAVADRKGVVSKDRDDLTPVKRELAEITNKAGLSGSLESALAGADVFIGVSGGTVPEPAVASMAEGAFVFAMANPNPEVHPEIAHKYASVVATGRSDFPNQINNVLAFPGIFAGALQVRASRITEGMKIAAADALADVVGDDLAADYVIPSPFDERVAPAVTAAVAAAARAEGVARR

SEQ ID NO: 9169 - protein, 321 aa, Papaver somniferum
MESNGVPMITLSSGIRMPALGMGTAETMVKGTEREKLAFLKAIEVGYRHFDTAAAYQSEECLGEAIAEALQLGLIKSRDELFITSKLWCADAHADLVLPALQNSLRNLKLDYLDLYLIHHPVSLKPGKFVNEIPKDHILPMDYKSVWAAMEECQTLGFTRAIGVCNFSCKKLQELMAAAKIPPVVNQVEMSPTLHQKNLREYCKANNIMITAHSVLGAICAPWGSNAVMDSKVLHQIAVARGKSVAQVSMRWVYQQGASLVVKSFNEGRMKENLKIFDWELTAENMEKISEIPQSRTSSADFLLSPTGPFKTEEEFWDEKD

SEQ ID NO: 9170 - protein, 517 aa, Zea mays
  unsure (1)..(517): unsure at all Xaa locations
MVSESNRGGADRTTAAGEERGQLLFDVPEIRFTKLFINGSFVDAVSXRTFETRDPRTGGVIASVAEADKEDVDLAVRAARAAFDHGEWPRMSGSERGRIMARLADLVEERADELAALESLDAGKHPAVTRAVDVGNAAGSLRYFAGAADKIHGETLKMPGQFQGHTLREPLGVAGVIIPWNFPSTMFAVKVAPALAAXGCALVVKPXEQTPLSALYLAQLAKQAGVPDGVINVVPGFXXTAGAALXSHMDVDMVSFTGSTEVGRLIMKASXESNXXPXYLELGGKSPLIXXXDADLDMXVELAVGASFFNKGEACVAASRVYVQERVYDRFEERLPERMRSWVVGDPFSDPSADQGPQVDKAQYERVLSYIDHGKREGATLLTGGRPCGPEGKGYYIEPTVFTNVKEDMIIAKEEIFGPVMCLMKFKTVEEAIARANDTRYGLGAGVVTRDLDVANRVVRSVRAGVVWVNCYFAMGSDCPFGGRKMSGFGKDEGMHALDKYLAVKSVVTPLRASPWI

SEQ ID NO: 9171 - protein, 121 aa, Brassica napus
  unsure (1)..(121): unsure at all Xaa locations
GDHQLIFGVTNPNLKGRSLSSFLAKGMVVGKNGPPLQAIEDQGLTFVRLRTFWDAVGEALNRMNLIENEKSQGGNEGLTHARFENCLXNKQGRDLAAKLGGADLFWDWDLPRTRKGFYRFQ

SEQ ID NO: 9172 - protein, 449 aa, Glycine max
  unsure (1)..(449): unsure at all Xaa locations
MEQKGGVLMQRYELGRLLGQGTFAKVYHARNIITGMSVAIKIIDKDKILKVGMXMRLIRHPHVVELYEVMASKTKIYFVMEHAKGGELFNKVVKGKLKEDDARKYFQQLISAVDYCHSRGVCHRDLKPENLLLDENGNLKVTDFGLSALAESKCQDGLLHTTCGTPAYVAPEVINRKGYDGIKADIWSCGVILYVLLAGHLPFXMTPRGEFKFPNWFAPDVRRLLSKILDPNPKTRISMAKIMESSWFKKGLEKPTITQNEDEELAPLDADGVFGACENGDPIEPAKNSKPCNNLNAFDIISYSSGFDLSGLFEETDRKKEERFTSDKPASIIISKLEEICRRLRLKVKKKDGGLFKLEGSKEGRKGPLGIDAEIFEITPVFHLVELKKSSGDTLEYQKLLKQEVRPALKDIVWNWQGEQPQPLQHGVVQKEEQPSYPGISEVVPQSTA

SEQ ID NO: 9173 - protein, 205 aa, Listeria monocytogenes str. 4b H7858
MVVGLGTGSTVYYTIEKLGEMVNNGLHITGVATSEETSKQAQNLGIPLKSLNDVAEIDITIDGADEIDTDFQGIKGGGGALLREKMVASASLKNIWVVSEEKLVRNLGKFPLPIEVIPFGWKQIERTLEKEHVQTILRRQSSGEIYVTNNGNYILDIVNQTFRDAEMWQEKLAQIPGIVEHGLFLHYVDIIVCAKANGEIELIKK

SEQ ID NO: 9174 - protein, 121 aa, Arabidopsis thaliana
MGCLISPVMKLRRLSSADSRRFAYRNLAENMEDPVIRVVVGKEKKEFMVEPYVLEEYPFRVLIGSAKDRAKNRLNRTGRVVWLDHVDSILFEHLLWLLRNDASTFSDLDVLEIIEFYAQDC

SEQ ID NO: 9175 - protein, 319 aa, Glycyrrhiza echinata
MAAAAAAAIEIPTKVLPNSTCELRVPVIGMGSAPDFTCKKDTKEAIIEAIKQGYRHFDTAAAYGSETALGEALKEARDLGLVTREELFVTSKLWVTENHPHLVIPALRKSLETLQLEYLDLYLIHWPLSSQPGKFSFPIQVEDLLPFDVKGVWESMEECLKLGLTKAIGVSNFSVKKLQNLLSVATIRPAVNQVEMNLAWQQKKLREFCTANGIVLTAFSPLRKGASRGPNEVMENDMLKGIAEAHGKSIAQVSLRWLYEQGVTFVAKSYDKERMNQNLQIFDWELTTEDHQKIDQIKQNRLIPGPTKPQLNDLWDDEL

SEQ ID NO: 9176 - protein, 175 aa, Triticum aestivum
  unsure (1)..(175): unsure at all Xaa locations
MAPAVMAXSSATTVAPFQGLKSTAGLPVGRRSSGSLGSVSNGGRIRCMQVWPIEGIKKFETLSYLPPLSTEALLKQVDYLIRSKWVPCLEFSKVGFVFREHNSSPGYYDGRYWTMWKLPMFGCTDATQVLNEVEEVKKEYPDAYVRVIGFDNLRQVQCVSFIAFRPPGCEESGKA

SEQ ID NO: 9177 - protein, 159 aa, Tamarix androssowii
MSDEEHHFESKADAGASKTFPQQAGTIRKNGHIVIKNRPCKVVEVSTSKTGKHGHAKCHFVGIDIFTGKKLEDIVPSSHNCDVPHVTRTDYQLIDISEDGFVSLLTETGGTKDDLRLPSDETLLTQIKDGFAEGKDLIVSVMCAMGEEQICALKDIGPK

SEQ ID NO: 9178 - protein, 275 aa, Bacteroides thetaiotaomicron
IDKVGDPFPEETYEVCKNADAVLFSAVGDPKFDNDPTAKVRPEQGLLAMRKKLGLFANIRPVQTFKCLIHKSPLRAELVENADFICIRELTGGMYFGEKYQDNDKAYDTNYYTRPEIERILKVAFEYAMKRRKHLTVVDKANVLASSRLWRQIAQEMAPNYPEVTTDYMFVDNAAMKMIQEPAFFDVMVTENTFGDILTDEGSVISGSMGLLPSASTGESTPVFEPIHGSWPQAKGLNIANPLAQILSVAMLFEYFDCKEEGALIRKAVDASLDE

SEQ ID NO: 9179 - protein, 489 aa, Chloroflexus aurantiacus
MIGGEFVPAQSGKTFERRNPADTRDVVGIFADSDERDVHAAVEAAKAAFPQWSKVPAPKRGEILLRAAELLQARKEQYSRDLTREMGKPLFEAGGDIVEAIGMAQYAGSEGRRMHGVTTPSELPNKFQMSIRQPIGVVGLITPWNFPMAIASWKMLPAIVCGNTVVIKPGEDASVSTYNLVQCLMEAGLPPGVVNIVTGYGPRAGQPLVEHPDVPVISFTGSTETGRLVYELGARRIKRVSLEMGGKNPLIVMPDADLDLALDGVLWAAFGTTGQRCTATSRLIVHRAVAKELVERIVARAQSLRVGNGLDPATEMGPLVNEKQLQRVLNYIDIGKQEGATLLCGGYRLTGGDYDYGYFIAPTVFTNVTSQMRIAREEIFGPVLSVIEVDSLDEAVAIANDVAYGLSSAIYTRDINAAFRAMQALQAGIVYINAPTIGAEIHLPFGGVKATGNGHREAGPTMLDVFSEWKSVYIDYSGALQRAQIDNAD

SEQ ID NO: 9180 - protein, 492 aa, Methanosarcina mazei Go1
MIREYKLLIGGKSVDSSTGETFDDINPATLENLATLQVAGIEDVDRAVEAAEAGFRVWSEVPAPGRAEVLFRAARIMQERKEGLARLMTEEMGKVLPETRGDVQEAIDITIYAAGEGRRMFGETTTSELRDKFCMTVLRPVGVVGMITPWNFPIAIPSWKIMPALIAGNAIVFKPASDTPLLTIKLVEILMEAGLPPGVINIVPGPGGSTGKAIVQHPRIRAISFTGSLDTGKWIMEECAKSMKRVSLELGGKNPVIVMDDANLELALEGVVWGAFGTTGQRCTATSRLILHEKIKDEFIKRLLAKTKSLRVGNGLLPETDVGPVINKAQLEKIEKYVRIGKEEGAAILVGGNRIDPGLPGYFFEPTIFTDVSPEMRIAQEEIFGPVLSIITVSDFDEAIEVANNIKYGLSSAIYTENVRTAFRAIEKLEAGITYVNAPTIGAEVHLPFGGIKGTGNGFREAGTEAIKEFTEVKAVYIDYSGRLQKAQIDTE

SEQ ID NO: 9181 - protein, 303 aa, Brassica napus
MVFVNGGKKQAYFGRCETTEERRRDGKTDYRARIRLINQDKNKYNTPKYRFVVRFTNKDIVAQIVSATITGDIVLASAYAHELPRYGLKAGLTNYAAAYCTGLLLARRVLQMLEMDAEYEGNAEATGEDYSVEPTDTRRPFRALLDVGLVMTTTGNRVFGALKGALDGGLDIPHSDKRFAGFNKEGKNLDAEIHRKYIYGGHVADYMKLLMEDEPEKYQSHFSNYLKKDLAPENMEEMYKNVHAAIRADPSIKKSDKEALKEHKRYNPKKLTYDERKASLIQRVKALNSAIGGDDGDEDEDDE

SEQ ID NO: 9182 - protein, 275 aa, Bacteroides uniformis
IDKVGDPFPEATYEACKNADAVLFSAVGDPKFDNDPTAKVRPEQGLLAMRKKLGLFANIRPVQTFKVLLHKSPLRAELVDGADFLCIRELTGGMYFGEKYQDNDKAYDTNMYTRPEIERILKVGFEYAMKRSKHLTVVDKANVLASSRLWRQIAQEMAPQYPEVTTDYMFVDNAAMKMIQEPKFFDVMVTENTFGDILTDEGSCISGSMGLLPSASTGESTPVFEPIHGSWPQAKGLNIANPLAQILSVAMLFEYFDLKEEGGVIRKAVDASLDA

SEQ ID NO: 9183 - protein, 484 aa, Dechloromonas aromatica RCB
MNLQNTELLRSTNLIGGIWARADDGAQLAVINPATGEKLADVPLCGATETRRAIDAANAAWPAWRALTARRRSQLLQAWFSLIIKNADDLAQLVTAECGKPLQEAKGEVIYGASFVEWFAEEGKRTYGESIPSPAANTRLLVIKQPIGVCAAITPWNFPLAMITRKVAPALAAGCPVVVKPAEATPLTALALAVLAEQAGFPAGVFNVVTGKPAEIGGELCANPIVRKLSFTGSTGVGRLLMAQCAPTIKKLSLELGGNAPFIVFDDADVNAAVDGAIAAKYRNTGQTCVCANRFLIQAGIYDEFAAKFAEKASALKVGAGIEADVAQGPLINAAGLSKVEAHVADAVGKGARVLCGGARHERGGNFFQPTVLADVTTAMMVAREETFGPVAPLFRFETEEQAIAMANDTEFGLAAYFFTRNVGRCWRVGEALEYGMVGINTGMISNEVSPFGGIKQSGLGREGSKYGIEDYLEIKYLCFDVNT

SEQ ID NO: 9184 - protein, 275 aa, Bacteroides vulgatus
IDKVGDPFPEATFQACKNADAVLFSAVGDPKFDNDPTAKVRPEQGLLAMRKKLGLFANIRPVQTFKCLVHKSPLRAELVENADFICIRELTGGMYFGEKYQDNDKAYDTNMYTRPEIERILKVAFEYAMKRRKHLTVVDKANVLASSRLWRQIAQEMAPQYPEVTTDYMFVDNAAMKMLQDPCFFDVMVTENTFGDILTDEGSVISGSMGLLPSASTGESTPVFEPIHGSWPQAKGLNIANPLAQILSVAMLFEYFDLKEEGTLIRKAVDASLDE

SEQ ID NO: 9185 - protein, 162 aa, Triticum aestivum
  unsure (1)..(162): unsure at all Xaa locations
WIPRAAGIRHQTLASSHTPAYRIHPGTDXXHTXENXLXSKDDSGPAXTYPXXXGAXRXXXHXXIXXHXCXVXEXCXXXTXXHXXAMCXFVAIDIFNXKXLXDIVPXXHNCDXPHVXRXXXHLIDITDDGXXSLLTEXXXTXDXLXLXXDDAXLGQXXXGCAD

SEQ ID NO: 9186 - protein, 275 aa, Bacteroides vulgatus
IDKVGDPFPEATFQACKNADAVLFSAVGDPKFDNDPTAKVRPEQGLLAMRKKLGLFANIRPVQTFKCLVHKSPLRAELVENADFICIRELTGGMYFGEKYQDNDKAYDTNMYTRPEIERILKVAFEYAMKRRKHLTVVDKANVLASSRLWRQIAQEMAPQYPEVTTDYMFVDNAAMKMLQDPCFFDVMVTENTFGDILTDEGSVISGSMGLLPSASTGESTPVFEPIHGSWPQAKGLNIANPLAQILSVAMLFEYFDLKEEGTLIREAVDASLDE

SEQ ID NO: 9187 - protein, 367 aa, Glycine max
  unsure (1)..(367): unsure at all Xaa locations
QDTPHSPSRFVLQQLFTSIPTASTTELDAVSAFSEIVPDTVVFDDFEKFPPTAATVSSSLLLGICGLPDTIFRNAVEMALADSECYGLENPNARLSCFVNKAFANIGSDMAKLVPGRVSTEVDARLAYDTHAIIRKVHDLLKLYNDSNVPPKRLLFKIPSTWQGIEAARLLESEGIQTHLTFVYSFAQAAAAAQAGASVIQIFVGRIRDWARNHSGDTEIESAQLRGEDPGLALXNRDIHFSDPTYNYIHKYGHKSKLMAAAVRNKQDLFSLLGVDYIIAPLKVLQSLKESIASPDEKYSFVRRLSAQSAAKYTFSDEELVKWDEDSLTKAMGPAAVQLLAAGLDGHADQAKRVEELFEKIWPPPNV

SEQ ID NO: 9188 - protein, 452 aa, Brucella suis 1330
MNPADEKPYAVISAGSAADIDLAVAAARRAFPAWSETPAEERIAYIRRIAEIYESRLDEMAKTISMEMGAPIKLARESQAAAGLSHTKAFIAACENFEVEEVLSPKYPNQTAVHEPIGVCGLITPWNWPMNQITLKVIPAIAVGCTVVLKPSEIAPMSAMLFAEFVDQAGLPKGVFNLVNGEGPVVGEALSQHPEVDMMSFTGSTRAGTAVSRAAAATVKRVSLELGGKSPNIVFADSDLEKAISRSLAHCFENTSQSCNAPTRMLVERSVYDKAVELAKKAAESTKVGDPAQEGDHIGPLSSSIQFEKVQALIQKGIDEGARLVAGGTGRPEGFTEGDYVKPTVFADVNNNMTIAREEIFGPVLAMIPFDTEEEAIAIANDTPYGLAAYIQTGSPERAKRVARKLRAGMIQINGTSRAPGSPFGGYKQSGNGREGGKWGLEDFMEVKLISG

SEQ ID NO: 9189 - protein, 380 aa, Gloeobacter violaceus PCC 7421
MSGEYVPGLEGVPATRSNISFVDGKAGVLEYRGIPIDQLAESSTFLETAFLLIFDHLPTKDELLSFEVEILGHRRVKYRIRDMIKSFPESGRPMVALQSCIAALGLFYPLQNESKEKYAYDSTIRLLAKMPTMVATFHQMRLGNDPIPPRDDLGHAANFLYMLTGKEPDPRAARIFDVCLMLHAEHTVNASTFSALVTASTLADPYTVITSAAGTLSGPLHGGANEEVIRMLKEIGTIERVRPYLENRLARKEKIMGVGHRVYKVKDPRATILQNLAQELFDRFGHSRLYDIAVEVERVCDELLGQKGIYPNVDFYSGLVYEKMGIPADMFTPVFAISRVAGWLAHWHEQLADNRIFRPTQVYTGSHNVEFTPLSLRSYA

SEQ ID NO: 9190 - protein, 320 aa, Triticum aestivum
SNSHSSQEGAAFARAFDDANEQVLYRFFDPLWKAKRLLNVLSEAAMKRSVRTINDFVYAVIDKKIEQMGRDGHEFAKKQDILSRFLLEREKDPGCFDNKYLRDIILNFVIAGRDTSAGTLSWFLYVLCRDQRIQDKIAREVREATTAGRRDVGGLQELTACLTEDAISSMPYLHAALTETLRLYPAVPIDVKYCFSDDTLPDGHAVRKGDMVNYQPYPMGRMKFLWGDDAEEFRPDRWLDGDGVFVPESPYKFTAFQAGPRICLGKEFAYRQMKIFAAALLCLFRFEMWERDSTVGYRPMLTLKMDGPLRVRASPRRASG

SEQ ID NO: 9191 - protein, 266 aa, Burkholderia fungorum LB400
MPPPKPPPKPPPLPPPAPAPAPAPPLEPPQPQPPLLPPPLLPPPLLPPPLLPPPLLPPPLLPPPLLPPPLLPPPLLPPPLLPPPLLPPPLLPPPLLPPPLLPPPLLPPPLLPPPLLPPPLLPPPLLPPPLLPPPLLPLPLPLPFPLPPPLAPALPLPEPAAPAAPPAPLLPEPAAPLLPLPPPRGAHPLTLALLQSCGRNTSAASSAAVGSPAAMPVLDVPVVELPAAAPSSCASCAAPCTALAGSAASASTIHCGITSVEAGYAT

SEQ ID NO: 9192 - protein, 76 aa, Zea mays
NDVIRRDANMSSDTDMSKVFEDRTFVSSILNSFPGVDPNDPSVKDLLASLPSQKEEEKKEDKSDKTEDEKNCFKLE

SEQ ID NO: 9193 - protein, 102 aa, Triticum aestivum
MEQPKQQQPQVPAQDAAAGDKNKRRDDMHKTTGDVMSHSFGEGYSTRSDEEGFGGVYGGNDPVEHPGTEIHPSHPEYDTSQGSEVKEKEKARHLKDEKHATA

SEQ ID NO: 9194 - protein, 250 aa, Brassica juncea
MTKSYPTVSEDYQKAIEKCKRKLRGLIAEKNCAPIMVRLAWHSAGTFDCASKTGGPFGTMRFDAEQGHGANSGIHIALRLLDPIREQFPAISFADFHQLAGVVAVEVTGGPEIPFHPGREDKPQPPPEGRLPDATKGCDHLRQVFTKQMGLSDKDIVALSGAHTLGRCHKDRSGFEGAWTSNPLIFDNSYFKELLTGEKEGLLQLVSDKALLDDPVFRPLVEKYAADEEAFFADYAEAHLKLSELGFADA

SEQ ID NO: 9195 - protein, 213 aa, Magnaporthe grisea 70-15
MADVEKKEEPVATEQHENDTGAGDDGDDEKISLKTFPQTGRADAACTQQEISAMKKRVAEMEEEAAKLREMQASLDSQSQELSTESRDDVDSRSIFVGNVDYSASPEEIQAHFQSCGSINRVTILLDKFTGQPKGFAYVEFTEPSLVAQALVLNESVFKGRNIKVSPKRTNYPGMSRGRGRGRGRGGFGRGGFPPRGGYRGGYRGRGRGFTPY

SEQ ID NO: 9196 - protein, 321 aa, Papaver somniferum
MESNGVPMITLSSGIRMPALGMGTAETMVKGTEREKLAFLKAIEVGYRHFDTAAAYQSEECLGEAIAEALQLGLIKSRDELFITSKLWCADAHADLVLPALQNSLRNLKLEYLDLYLIHHPVSLKPGKFVNEIPKDHILPMDYKSVWAAMEECQTLGFTRAIGVSNFSCKKLQELMAAAKIPPVVNQVEMSPTLHQKNLREYCKANNIMITAHSVLGAIGAPWGSNAVMDSKVLHQIAVARGKSVAQVSMRWVYQQGASLVVKSFNEGRMKENLKIFDWELTAEDMEKISEIPQSRTSSAAFLLSPTGPFKTEEEFWDEKD

SEQ ID NO: 9197 - protein, 231 aa, Zea mays
MCPTKKGMTGEPSSPCSSASASTLPEHHQTVWTSPPKRPAGRTKFRETRHPVFRGVRRRGSAGRWVCEVRVPGRRGCRLWLGTFDTAEAAARAHDAAMLALAGAAACCLNFADSAWLLAVPASCASLAEVRHAVADAVEDFLRHQVVPEDDALAATPSSPSSEDGNTSDGGESSSDSSPPTGASPFEFDVFNDMSWDLHYASLAQGLLVEPPSAVTAFMDEGFADVPLWSY

SEQ ID NO: 9198 - protein, 250 aa, Brassica juncea
MTKSYPTVSEDYQKAIEKCKRKLRGLIAEKNCAPIMVRLAWHSAGTFDCASKTGGPFGTMRFDAEQGHGANSGIHIALRLLDPIREQFPTISFADFHQLAGVVAVEVTGGPEIPFHPGREDKPQPPPEGRLPDATKGCDHLRQVFTKQMGLSDKDIVALSGAHTLGRCHKDRSGFEGAWTSNPLIFDNSYFKELLTGEKEGLLQLVSDKALLDDPVFRPLVEKYAADEEAFFADYAEAHLKLSELGFADA

SEQ ID NO: 9199 - protein, 54 aa, Glycine max
MGSETFLEVILAILLPPVGVFLRYGCGVELWIDLVLTILGYIPGIIYAIYVLIG

SEQ ID NO: 9200 - protein, 182 aa, Burkholderia pseudomallei
MQYQHIKVPEGGDKITVNKDFSLYVSDQPIIPYIEGDGTGFDITPVMIKVVDAAVEKAYGGKKKIHWMEIYAGEKATKVYGPDVWGPEETLQVLKEYVVSIKGPLTTPVGGGIRSLNVALRQELDLYVCLRPIQYFKGVPSPVREPEKTNMVIFRENSEDIYAGIEWAAESEQAKKVIKFLQ

SEQ ID NO: 9201 - protein, 175 aa, Triticum aestivum
  unsure (1)..(175): unsure at all Xaa locations
MAPTVMASSATSVAPFQGLKSTAGLPVSRRSSSAGLSSVSNGGRIRCMQVWPIEGIKKFETLSYLPPLSTEXLLKQVDYLIRSKWVPCLEFSKVGFVFREHNSSPGYYDGRYWTMWKLPMFGCTDATQVLNEVEEVKKEYPDAYVRVIGFDNLRQVQCVSFIAFRPPGCEESGKA

SEQ ID NO: 9202 - protein, 500 aa, Brucella melitensis 16M
MPYCPIALHKETTMKAQPKASHFIGGAFVEDKAGKPLPVIYPATGEEIASLYSATPGIIEAAYAAALKAQGEWAALKPVERGRILRRTAEILREKNRKLSKLETLDTGKALQETLVADAASAADALEFFGGIISGFNGEFVELGGSFAYTRREALGICVGIGAWNYPIQIAAWKSAPALAMGNAFIFKPSENTPLSALALAEAYKEAGLPDGLFNVVQGYGDVGAALVNHRLTAKVSLTGSVPTGRRIMAQAGEQLKHVTMELGGKSPLIVFDDADLESAIGGAMLGNFYSTGQVCSNGTRVFVHKNIRERFIERLVERTRKIRIGDPFDEATQMGPLISAAQRDKVLSYIKKGKAEGATLACGGGVPKLQGFDKGFFIEPTVFADVTDTMTIAREEIFGPVMSVLEFSDEDEVIARANDSEFGLAAGVFTADLSRGHHVIGQIKAGTCWINAYNLTPVEVPFGGYKQSGIGRENGIAALAHYSQIKTVYVEMGKVDSPY

SEQ ID NO: 9203 - protein, 470 aa, Brassica napus
MERGIARLAVLSAHLEVSDQVILPAIEPWCTSGASELHGSLKGSLTIVDERTGKKYQVPVAEDGTVKSIDLKKITMGKDDKGVKLYDPGYLNTAPVRSSISYIDGDEGILRYRGYPIEELAESSTFLEVAYLLIYGNLPSKSQLADWELAISQHSAVPQGLLDMIQSMPQDAYPTGAFVSAMSALSLFHPDANPAHMGQDVYKSAQVRDKQIFRILGQASTIAAAAFLRTAGKPHVLPLSNLSYTENLLYMLNSMGNRFYKPNPRLARVMDTIFILHCEHEMNCSTAAARHLSSSGVDVYTAIGGATGAINGPLHGGAVEAVPKMLSEIGSVENIPEFIECVKNKKRKLYGFGHRIYRNYDPRAKFLKKLADEVFSIVGKDPLVEVAVALEKTALSNEYFVRRKLYPNVDFYSGLVYRAMGVPSHFTRVSRLAGYLSHWRESLDDPDTKIMRPQQAYNGVWLRHYEPVRE

SEQ ID NO: 9204 - protein, 321 aa, Papaver somniferum
MEIGGVPVVTLSSGRGMPILGMGTAENNLQGSERVKLAILKAIEVGYRHFDTAFVYQTEGSLGEAVAEALQNGLIKSRDELFITSKLWCADAYPDHVLPALQNSLRNLKLEYLDLYLIHWPVSLKPGKFVHPIPKDEIFPIDYKSVWAAMEKCQMLGLTKSIGVSNFSCKKLHYLMATANIPPAVNQVEMNPIWQQQKLRDYCKTNNIMVTAYSPLGAKGTMWGSSGVMDSEVLNQISQVRGKSVAQVSLRWVYEQGASLLVKSFNEERMKENLKIFDWELSPEDLKNISELPQRRVSTGDPFVSINGPFKSVEELWDDEV

SEQ ID NO: 9205 - protein, 458 aa, Streptomyces carzinostaticus subsp. neocarzinostaticus
MPSGTFKDQARAVGPAGSRLVTGILSRSGPFSRLGLPLLRGTLSTRDSDLTAAARDFGNRIHLRPVAVLHPADAEDVATIVRFGRENGFAVVPRGAACSVDGQAQTSDGIVVDLSSLSAVGEPAPSLVRVDGGARWRAVLEATLPCGRVPLVVPDHLGLSVGGTLSVGGIGGTSHRYGSVADNVLELEVVTASGDLLTCSPVRRPELFDAVRGSLGRYGIITGATLALTGARSSARTYRLVYHDCAAFLADQQRLVHERRFEHVEGHAHRSGTSGWLFVLEAMQSFDTPHEPDDTALLEGLTHHHVDTIETVSYRDFLGRVAPLEARQRALGSWQHHPHPRCNVLLPGLEAEALITRTLAGLTEEDIGPGGSVLLYPIPTARLAAPHVPKARDALTVVFGLQRTAPPDQPELLDRMVRDNLALRAAARKAGGADYAYAATHCEAPDAYESFGRTPQSR

SEQ ID NO: 9206 - protein, 159 aa, Zea mays
MTWAATLDYGRKTKNEDIRPGPLRPANIIRNKFPTYKNGSNGIVIKLADGPEVPPLKEVVAKETEELLDRRQRFSVRELAMKFEKGLNTATLLSKEVKWRQVALLERDILLKNLKSVLESLRGQVTGKTKDEIEESISMVEILAGQLSQREAELIQQKT

SEQ ID NO: 9207 - protein, 204 aa, Hypocrea jecorina
MSDSPQSPPKDVDQGAQSPDEEGQMNDNQEPHSAGGTGYEFEGVKEQDRWLPIANVARIMKNALPDNAKIAKEAKECMQECVSEFISFITSEASEKCQQEKRKTVNGEDILFAMTSLGFENYAEALKVYLSKYREQQNQSNRDRVLENNTWGNAMIPGEKTEPGTTNPEYAPPEGANPPESGAEPNYMYTSHAGHNGAGAGENY

SEQ ID NO: 9208 - protein, 308 aa, Corynebacterium glutamicum ATCC 13032
MPKASRIVVMLLHPDAQFYIDTLPTLSAEEQVSFGKDAPVSEADATHVATDQDIAGVPVRVYTPLSGAGDLPCLVYFHGGGWSGGTLNMIDATVHSLVVGLPIIAISVDYRLAPAHPFPAAIDDAFAVVSAVLDGVSGLSIDTSRVAIGGDSAGGNIAAVTAQQLRERAVGSTPVLAHQVLIFPVTDVSTTSTPSYLTFGKDCYLTKDAMERYIEQYADGHDRTDPRLSPLLASDLSDLPPTTIVYGECDVLAHEVRAYGQALLEAGNSVTMTEFKGQIHAFINLGGISSDARAARRLIRAELEAALC

SEQ ID NO: 9209 - protein, 215 aa, Zea mays
  unsure (1)..(215): unsure at all Xaa locations
MAAVEVCVKAAAGNPDTLGDCPFSQRXVLLTLEEKKVPYEVKLVDLGNKPXWFLNISPEGKVPVFNGGDGKCIADSDVIIQVIEEKFPTPSLVTPPEYASVGSKIFPAFVKFLKSKDASDGSEKALLDELQALDDHLKAHGPYINGENVSATDLSLGPKLFHLQIALEHFKGWKIPENLTNVHAYTKALFSRESFVKTKPSEEHVIAGWAPKVNA

SEQ ID NO: 9210 - protein, 275 aa, Bacteroides uniformis
IDKVGDPFPEATYEACKNADAVLFSAVGDPKFDNDPTAKVRPEQGLLAMRKKLGLFANIRPVQTFKCLLHKSPLRAELVDGADFLCIRELTGGMYFGEKYQDNDKAYDTNMYTRPEIERILKVGFEYAMKRSKHLTVVDKANVLASSRLWRQIAQEMAPQYPEVTTDYMFVDNAAMKMIQEPKFFDVMVTENTFGDILTDEGSCISGSMGLLPSASTGESTPVFEPIHGSWPQAKGLNIANPLAQILSVAMLFEYFDLKEEGALIRKAVDASLDA

SEQ ID NO: 9211 - protein, 275 aa, Bacteroides uniformis
IDKVGDPFPEATYEACKNADAVLFSAVGDPKFDNDPTAKVRPEQGLLAMRKKLGLFANTCPVQTFKCLLHKSPLRAELVDGADFLCIRELTGGMYFGEKYQDNDKAYDTNMYTRPEIERILKVGFEYAMKRSKHLTVVDKANVLASSRLWRQIAQEMAPQYPEVTTDYMFVDNAAMKMIQEPKFFDVMVTENTFGDILTDEGSVISGSMGLLPSASTGESTPVFEPIHGSWPQAKGLNIANPLAQILSVAMLFEYFDLKEEGGVIRKAVDASLDA

SEQ ID NO: 9212 - protein, 148 aa, uncultured soil bacterium
MALVPWTPMHNFAALQGQMNQLLNQFFRGGNGEEAPWGVSAWMPPVDLYETPDEFILSADLPGLTKDDIHLEVHDRTLTLRGERKPAAGMTEAHYQRRERAYGSFQRAFTLPTPVDTDKVQASMKDGILDLHLPKHEAAKPRRIAVQS

SEQ ID NO: 9213 - protein, 436 aa, Magnetospirillum magnetotacticum MS-1
MAARNSSGLVAYVNARLLDPATGLDTRGALLTNGETIADVGPGLFQGGVPSGMEVVDCQGLCLAPGLVDMRVQLREPGEEHKETLKSAGEAAVAGGVTSMVCLPNTNPVIDEVATVEFVARRARKIGLAKVYPYAAATKRVEGKELAEMGMLAEAGALGFTDGIRAIRNAQVMRRALTYAATFGLLIVQHPEEPSLAEGGMMNEGELATRMGLSGIPVAAEAIMLERDMRLVEITGGRYHAAHIATREGVEIIRKAKAKGLSVTCDTAPPYFALNELAVKDYRTFAKLSPPLRSEPDRLAVVEGLRDGTIDAVASDHSPQDQDSKRVPFAVAEFGGVGLETLLAVTLDLAHNGHMSLIEALKLVTCAPASILNLAAGRLKVGAAADLVLFDPDRGWKVNAKTFHSKSKNSPFDDRPVQGMVMRTIVDGRTVYTHDA

SEQ ID NO: 9214 - protein, 216 aa, Sanguinaria canadensis
IENTTNRQVTFCKRRNGLLKKAYELSVLCDAEVALIVFSNRGRLYEYANNSVKSTIERYKKTCQDPSNSGCAVEANTQFYQQEASKLRQQIGFLQNSNRNLTGEALSSMTVKELKQLETRLEKGISRIRSKKNELLFSEIEYMQKREIDLQNDNMYLRAKIAENERAQQHMNLMPGNEYDVMTSSAYDSRNFLQVNLLESTNHHYSRQEQTALQLG

SEQ ID NO: 9215 - protein, 286 aa, Selenomonas ruminantium
MEIWFSQMDTENVKTSVRVDRQLFSRQSEYQRINVFESREFGRMIVLDGEIIFSEADEFIYNEMVVHVPMAVHPCVKNVLIIGGGDGGVAKVLTQYPEIEAIDVVEPDEMFIEVSREFFPETARGFDDDRVKITNMDGLRFLRRCRDKYDLIINDSTDPFGHTEGLFTREFYGNCYRALHDDGIMVYQHGSPFYDEDEAAFRAMHRKAYQSFPVSRVYQASIPTCPAGIWMFGFASKKYHPLKDFDAQRWNERQLETWYYTTHLHKGAFMLPKYVEDILSEEEMKK

SEQ ID NO: 9216 - protein, 506 aa, Glycine max
  unsure (1)..(506): unsure at all Xaa locations
MVLSKTTSESDVSVHSTFASRYVRTSLPRFKMPEESIPKEAAYQIINDELMLDGNPRLNLXASFVTTWMEPECDKLIMAAINKNYVDMDEYPVTTELQNRCVNMIAHLFNAPLEETEAAVGVGTVGSSEAIMLAGLAFKRKWQNRRKQEGKPFDKPNIVTGANVQVCWEKFARYFEVELKEVKLRDDYYVMDPEKAVELVDENTICVAAILGSTLNGEFEDVKRLNDLLIEKNKITGWDTPIHVDAASGGXFIAPFLYPELEWDFRLPLVKSINVSGHKYGLVYAGIGWVIWRSKEDLPEELIFHINYLGADQPTFTLNFSKGSSQVIAQYYQLIRLGFEGYRNVMENCRDNMLVLKEGLEKTGRFSIVSKDNGVPLVAFTLKKDHTHFDEFQISDFLRRFGWIVPAYTMPPDAQHVTVLRVVIREDFSRTLAERLVADVEKVLHELDSLPARVISSTSVTVTAEENGKVVVAKKSAMETQREITAIWKKFVLERKKNNDKMNGVC

SEQ ID NO: 9217 - protein, 89 aa, Glycine max
  unsure (1)..(89): unsure at all Xaa locations
TMIAAPAVTTVHHAGAGMAAPFTGQKSMVGFPTRKTNNGISCIGYNCLRLQCLQVWTPVVKSEVETLSYLPHLVDAQMAKEVXYLIRNG

SEQ ID NO: 9218 - protein, 390 aa, Magnaporthe grisea 70-15
MSYAPASPDLSSFYSGSADSHNAGHHHHHHHSSSSGFGFPVQVSSSNPRSRPLSPPHGLTLPGGPTSSVTTNYQANRVGEVHFSLHSNQQHHHHLHTPYHEHPYSLHTPISPQPNPSQAVHAQNHLHYIHSPFQTQKNIQSLQIVPPSNHNINTSQPGPSPIGLQYIPPYSAQQYKSEPDDAFCFSSVQEIPQRDLFPQQPHRRSYSQPHSDATRIKPEVKSEEQYGVHSPQNIRIKSETQPSYPLPEAMPPRRSAAAAQPSVIASPVKTRFPTARIKRIMQADEEVGKVAQQTPIAVGKALEMFMVALVSKSHDVAKDKGAKRVTAQHLKQVIESDDQWDFLREIVGRISETEEKAGRAGGRAKAESSSDEEVPEPKKKGRGGRKKKVT

SEQ ID NO: 9219 - protein, 458 aa, Streptomyces cattleya
MAGFLLRCRPEGAVPQHLGAGTGLATEVTRDGADVLVVHGDPLTPGGQAPIHAPLDELIAWTVRAYSRFCAVLVRDDRAVLWSDNGATCPLHYARGADDTLLVATSAGALLPLLGTAPVLGEGDRAVLPGGRFAGVTAVPAGTAVTLAVAGFDTEPLLTRRYHRLPARPTETDPERAVTAVRDALTHAVGRLATGLTEAGVMLSGGVDSSSVAALAAREVTSLSTYTVGTPFGDEFAQAAWFAERLGSKHHELVFEPEQLTALLPEMIRSLETWDLLTLQIAAPACFLLGHIATGARQVMLSGYGADLIFAGLGGTGTETRIERSVAAQTAATAVSNEFNPAYADARDVVVRYPYWTREVMSTALGIRGRLKVRPDTAKWVLRSAVTGILPDEVAWRPKRGIHEGTAMSRMFAAALGSDDRHTQARRLYEMATEVFRDTAAGTDELEGSDEGLAGVAS

SEQ ID NO: 9220 - protein, 147 aa, Fritillaria agrestis
TMLSSVATAARAAPAQASMVAPFVGLKSTSSFPVTQKPATGLSTLPSNGGRVQCMKVWPIVGLKKFETLSYLPTLSVESLLKQIEYLIRNGWVPCLEFSLEGFVSRDNNKSPGYYDGRYWTMWKLPMFGCTDAAQVVKEAAECKKEY

SEQ ID NO: 9221 - protein, 147 aa, Fritillaria agrestis
TMLSSVATAARAAPAQASMVAPFVGLKSASAFPVTQKPATGLSTLPSNGGRVQCMKVWPIVGLKKFETLSYLPTLSVESLLKQIEYLIRNGWVPCLEFSLEGFVSRDNNKSPGYYDGRYWTMWKLPMFGCTDAAQVVKEAAECKKEY

SEQ ID NO: 9222 - protein, 329 aa, Methanothermobacter thermautotrophicus str. Delta H
MKSMKIAVIPGDGIGVEVMEAALHILNTLDLDLEFIHADAGDACLKRTGTALPEETLEAVGEARATLFGAAGESAADVIVRLRREFDLFANLRPVKSLPGVPCLYPDLDFVIVRENTEDLYVGDEEYTPEGAVAKRIITRTASRRISQFAFQYAQKEGMQKVTAVHKANVLKKTDGIFRDEFYKVASEYPQMEATDYYVDATAMYLITQPQEFQTIVTTNLFGDILSDEAAGLIGGLGLAPSANIGEKNALFEPVHGSAPQIAGKNIANPTAMILTTTLMLKHLNKKQEAQKIEKALQKTLAEGLVTPDLGGKLGTMEMAAEIARHLED

SEQ ID NO: 9223 - protein, 513 aa, Glycine max
MSKTTTSSEQTARNRLATLAAHLLPSDATSAAAILHPHRLSAPTGDLPPANLKGTLTVVDERTGKKYQIEVTPDGTVRASDFKKISSGKNDKGLKLYDPGYLNTAPVISRISYIDGDAGILRYRGYPIEDLAEKSTFTEVSYLILYGNLPSESQLAEWEFALSQHSAVPQGVLDMIESMPHDAHPMGMLVNAMSALSVFHPDANPALKGLDIYNSKQVRDKQIARVIGKITTIAAAINLRLAGRPPVLPSNKLSYTENFLYMLDSFGNRSYKPNPRLTRALDIIFVLHAEHEMNCSTSAVRHLSSSGVDVYTAIAGAVGALYGPLHGGANEAVLKMLSEIGTVENIPAFIEGVKARKRKLSGFGHRVYKNYDPRAKVLRKLTEEVFSIVGRDPLIEIAVALEKIALSDEYFIKRKLYPNVDFYSGLIYRAMGFQPEFFTVLFAIPRMAGYLAHWRESLDDPDTKIMRPQQVYVGEWLRHYAPINQRTASSNTDKLGQLAVSNASKRRLAGSGA

SEQ ID NO: 9224 - protein, 450 aa, Streptomyces carzinostaticus subsp. neocarzinostaticus
MNGRRPVSPPLRALPGLLRKLAVDRLGMMRDAAALDDAVLVSMGPKKLFVFNRPDYAKHVLADNAANYRKGIGLIESRKMLGDGLLTSEGELWREQRRTVQPAFRPARVAAQADAVAEETMNLRDLLMRRGADGPVDVLQEVTGFTLGVLGRTVLNTDLGGYGGIAHAFEAVQDQAMFDMVTQNMVPTWAPLATQRRFRRARRELIRTVDELVADRSARMTDGEEADDAFSLMIAAARRQTDPRTGQGRLRDELVTLLLAGHETTASTLAWTLLLLARHPHMRDLVREEARGVLADGRAPDAGDLRKLTYTTQVVQEAMRLYPPVWILPRVARQSDEVGPYSVSAGADVLICPYTLHRHPDLWERPEQFDPGRFDPARVADRPRYAYIPFGAGPRFCVGSNLGMMEAVFVTALLTRDLVLEVVPGDERTPEPMMSLRMRGGLPMTVRPVR

SEQ ID NO: 9225 - protein, 98 aa, Glycine max
  unsure (1)..(98): unsure at all Xaa locations
MAGAWVFKNGVVRLAENPAGEAVDGSRGGRRKVLVHTASNEGITSYAELEPKLNLLGXERYYDYPVLVQFSQRSTVHLIFLPKNFNKLMPMRMYDIGA

SEQ ID NO: 9226 - protein, 452 aa, Staphylococcus aureus subsp. aureus Mu50
MNYTQQLKQKDSEYVWHPFTQMGVYSKEEAIIIEKGKGSYLYDTNGNKYLDGYASLWVNVHGHNNKYLNKVIKKQLNKIAHSTLLGSSNIPSIELAEKLIEITPSNLRKVFYSDTGSASVEIAIKMAYQYWKNIDREKYAKKNKFITLNHGYHGDTIGAVSVGGIKTFHKIFKDLIFENIQVESPSFYRSNYDTENEIMTAILTNIEQILIERNDEIAGFILEPLIQGATGLFVHPKGFLKEVEKLCKKYDVLLICDEVAVGFGRTGKMFACNHEDVQPDIMCLGKAITGGYLPLAATLTSQKIYNTFLSDSHGVNTFFHGHTYTGNQIVCTVALENIRLYEKRKLLSHIETTSSTLEKQLHALKRHRNVGDVRGRGLMFGVELVTDKDSKTPLEIEKVERIVRKCKENGLMIRNLENVITFVPVLSMSNKEVKTMVRIFKKAVHNILDRKC

SEQ ID NO: 9227 - protein, 302 aa, Emericella nidulans
MTRTHPSSFQQLEKLGEGTYATVYKGRNCQTGEMVALKEIHLDSEEGTPSTAIREISLMKELHHDNILSLYDVVHTENKLMLVFEYMDQDLKKYMDTHGNHGQLEPAIVKSFAFQLLRGIAFCHDNRILHRDLKPQNLLINSKGQLKLADFGLARAFGIPVNTFSNEVVTLWYRAPDVLLGSRTYNTTIDIWSIGCIIAEMFTGRALFPGTTNEDQLQKIFRVMGTPSERTWPGVSQFPEYKSDFPVYPPQDLRQVVPRIDPYGLDLLRCMLRLQPDLRISAVDALRHPWFNDVPGAQPVPV

SEQ ID NO: 9228 - protein, 357 aa, Nicotiana tabacum
MKKGSLAPNLKLSLPPPDEVNLSKFLTESGTFKDGDLLVNRDGVRIVSQSEVEAPSVIQPSDNQLCLADFEAVKVIGKGNGGIVRLVQHKWTGQFFALKAIQMNIEESMRKHIAQELRINQSSQVPYVVISYQSFFDNGAISIILEYMDGGSLADFLKKVKTIPERYLAAICKQVLKGLWYLHHEKHIIHRDLKPSNLLINHIGDVKITDFGVSAVLASTSGLANTFVGTYNYMSPERILGGAYGYRSDIWSLGLVLLECATGVFPYSPPQADEGWVNVYELMETIVDQPAPSAPPDQFSPQFCSFISACVQKDQKDRLSANELMRHPFITMYDDLDIDLGSYFTSAGPPLATLTEL

SEQ ID NO: 9229 - protein, 466 aa, Burkholderia fungorum LB400
MSKTSLIAADRKHLIHPVINYRAHEARGATVLESGQGAYLRDIDGNELLDAFSGLWCVNVGYGQQSIVEAATRQMTKLPYATTYFHFSSEPAIELADKLVALAPASLQHVYFTLGGSDAVDSAIRFITHYFNATGRPSKKQMIALERGYHGSSSVGAGLTALPAFHRNFDLPLPHQHHLPSPYAYRQTHGDDAQALIAASVAALEAKVAALGTDNVAAFFCEPIQGSGGVIVPPVGWLKAMRDACRRLDILFVADEVITGFGRTGPLFACEAEQVEPDLMTVAKGLTSGYAPMGAVLMSDEIYQGIAGDARDTAIVGHGQTYSAHPVSAAIGLEVLRLYQEGGLLANGQAQAPRFAAGLDALLGHPLVGDSRHRGLLGALELVADKDSRARFDPALKLPDRIAAAAYRNRLVFRAFGDSILGFAPALCFGEAEFEQMFGRLKRTLDEVLDETEVRAALRTAGRAAA

SEQ ID NO: 9230 - protein, 372 aa, Candida albicans SC5314
MKKSTGPTQTRQVVFNISQNFKVLKILGEGAYGIVALAVHLPTETKVAIKKIEPFERPLFCLRTLREIKLLTKFKNHDNIVRLYDVQKPMNYDSFNEVYLIQEYMPSDLHNIIHTHLLSDQHVQYFIYQILKGLKMIHSARVIHRDLKPSNILVNEKCDLKICDFGLARLDTKHYNFDEAPRISMLTEYVATRWYRAPEIMLSASNYSTAIDLWSVGCILAELLTYRALFPGSDYINQLKLIFEVLGTPTDEDLQIIKSERAQKFIRSLPTKVKIDLSEFINNHPYRNIKHRGRDQVNPLAIDLLEKLLVFDPAKRITVQEALEHPYLNSYHEQLDEPVTSPIPIEEFDFDIDKKNLDTNDLKKQIFEIVMS

SEQ ID NO: 9231 - protein, 147 aa, Fritillaria agrestis
TMLSSVATAARTAPAQASMVAPFVGLKSTSAFPVTQKPATGLSTLPSNGGRVQCMKVWPIVGLKKFETLSYLPTLSVESLLKQIEYLIRNGWVPCLEFSLEGFVSRDNNKSPGYYDGRYWTMLKLPMFGCTDAAQVVKEAAECKKEY

SEQ ID NO: 9232 - protein, 378 aa, Arabidopsis thaliana
  unsure (1)..(378): unsure at all Xaa locations
MANHLQVPLTKPDRVKEEQEVEEEARLLARRLANAAALPMVLKAALELGVIDTITTVGGGDLWLSPSEIALRLPTKPCNLEAPVLLDRMLRFLVSHSVLKCRTVIEENGQTGKVERVYAAEPVCKYLLNKSDDVSGSFASLFMLDLSDVFIKTWTHLKDVILAGRDAFSSAHGMKLFEYIQADERFGKVFNRAMLESSTMVTEKVLKFYEGFKDVKTLVDVGGGLGNTLGLITSKYPHLIGINFDLAPVLANAHSYPGVNHVAGDMFIKIPKGDAIFMKWILHDWTDEQCVAILKNCWKSLEENGKLIIVEMVTPVEAKSGDICSNIXFGMDMTMLTQCSGGKERSLYEFENLAYASGFSRCAIVCAVYPFSVIEIYK

SEQ ID NO: 9233 - protein, 147 aa, Fritillaria agrestis
TMLSSVATAARTAPAQASMVAPFVGLKSTSAFPVTQKPATGLSTLPSNGGRVQCMKVWPIVGLKKFETLSYLPTLSVESLLKQIEYLIRNGWVPCLEFSLEGFVSRDNNKSPGYYDGRYWTMWKLPMFGCTDAAQVVKEAAECKKEY

SEQ ID NO: 9234 - protein, 492 aa, Arabidopsis thaliana
MSDFSSSVKLKYVKLGYQYLINNFLTLLLIPVIATVAIELLRMGPEEILSVLNSLHFELLHILCSSFLIIFVSTVYFMSKPRTVYLVDYSCYKPPVTCRVPFSSFMEHSRLILKDNPKSVEFQMRILERSGLGEETCLPPAIHYIPPTPTMESARNEAQMVIFTAMEDLFKNTGLKPKDIDILIVNCSLFSPTPSLSAMIINKYKLRSNIKSYNLSGMGCSASLISVDVARNLLQVHPNSNAIIISTEIITPNYYKGNERAMLLPNCLFRMGGAAILLSNRRSDRWRAKYKLCHLVRTHRGADDKSYNCVMEQEDKNGNVGINLSKDLMTIAGEALKANITTIGPLVLPASEQLLFLSSLIGRKIFNPKWKPYIPDFKQAFEHFCIHAGGRAVIDELQKNLQLSGEHVEASRMTLHRFGNTSSSSLWYELSYIEAQGRMKRNDRVWQIAFGSGFKCNSAVWKCNRTIKTPTDGAWSDCIERYPVFIPEVVKL

SEQ ID NO: 9235 - protein, 147 aa, Fritillaria agrestis
TMLSSVATAARAAPAQASMVAPFVGLKSTSSFPVTQKPATGLSTLPSNGGRVQCMKVWPIVGLKKFETLSYLPTLSVETLLKQIEYLIRNGWVPCLEFSLEGFVSRDNNKSPGYYDGRYWTMWKLPMFGCTDAAQVVKEAAECKKEY

SEQ ID NO: 9236 - protein, 181 aa, Brassica napus
MAYSMLSSAAVVTSPAQATMVAPFTGLKSSSAFPVTRKANNDITSIVSNGGRVSCMQVWPPIGKKKFETLSYLPDLTEVELGKEVDYLLRNKWIPCVEFELEHGFVYREHGSTPGYYDARYWTMWKLPLFGCTDSAQVLKEVQECKTEYPNAFIRIIGFDNNRQVQCISFIAYKPPSFTGA

SEQ ID NO: 9237 - protein, 360 aa, Triticum aestivum
MGSTAADMAASADEEACMYALQLVSSSILPMTLKNAIELGLLETLVAAGGKLLTPAEVAAKLPSTANPAAADMVDRMLRLLASYNVVSCTMEEGKDGRLSRRYRAAPVCKFLTPNEDGVSMAALALMNQDKVLMESWYYLKDAVLDGGIPFNKAYGMSAFEYHGTDPRFNRVFNEGMKNHSIIITKKLLEVYKGFEGLGTIVDVGGGVGATVGAITAAYPAIKGINFDLPHVISEAQPFPGVTHVGGDMFQKVPSGDAILMKWILHDWSDEHCATLLKNCYDALPAHGKVVLVECILPVNPEATPKAQGVFHVDMIMLAHNPGGRERYEREFEALAKGAGFKAIKTTYIYANAFAIEFTK

SEQ ID NO: 9238 - protein, 234 aa, Methanosarcina mazei Go1
MTERNTSTDSPEKRAAGIAAAGLVSSGMVVGLGTGSTVAYTIKELGRRVKEEGLDILGVVTSYQSEMLAIDAGIRLTTLSQDPELDIAIDGADQIDSNLYTIKGGGAAHTREKIVSVSAKRFVVVADDSKTSTQLDKPVPVEVLPFAKEPAVNRIRKLGGEPRLRSAVKKDGPVITDNGNFVLDVEFGVIKDPEALALQLSAVPGVVEHGIFSNVDELYIGKKDGSVKIISRQK

SEQ ID NO: 9239 - protein, 490 aa, Oryza sativa (japonica cultivar-group)
MALKSPVDFAGSITSGQKDPCCFGVPGCNPRCVRYNKKSRTCRLVTRAISVDRPQLDFSNSDWKKQFQEDFDRRFSLPHLKDVIDVEPRPTTFSLKSRTPLENVNGSMQGSWNGYVNDDDRALLKVIKFASPTSAGADCIDPDCSWVEQWVHRAGPRKQIYFEPQYVKAGIVTCGGLCPGLNDVIRQIVLTLEKYGVKNIVGIQHGFRGFFEDHLAEVPARRLDMLFVLGGNGTHAGANLIHEECRKRKLKVSIVGVPKTIDNDILLMDKTFGFDTAVEAAQRAINSAYIEAHSAFHGIGLVKLMGRSSGFITMHASLSSGQVDICLIPEVPFTLDGPNGVLQHLEHLIETKGFALICVAEGAGQEHLQQSNATDASGNMILGDIGVHLHQKIKAHFKEIGVHSDVKYIDPTYMVRAVRANASDAILCTVLGQNAVHGAFAGFSGITTGICNTHNVYLPISEVIKSTRFVDPNSRMWHRCLTSTGQPDFH

SEQ ID NO: 9240 - protein, 147 aa, Fritillaria agrestis
TMLSSVATAARAAPAQASMVAPFVGLKSTFAFPVTQKPATGLSTLPSNGGRVQCMKVWPIVGLKKFETLSYLPTLSVESLLKQIEYLIRNGWVPCLEFSLEGFVSRDNNKSPGYYDGRYWTMWKLPMFGCTDAAQVVKEAAECKKEY

SEQ ID NO: 9241 - protein, 429 aa, Mesorhizobium sp. BNC1
MTDFYTLVPSAPASRFDGIERTYSAEDVRRLRGSVTIRHTLAEQGANQLWKLLHEENFVNALGALSGNQAMQMVRAGLKAIYLSGWQVAADANTASAMYPDQSLYPANAGPELARRINRTLQRADQIEVAEGKGLSVETWFAPIVADAEAGFGGPLNAFEIMKAYIEAGAAGVHFEDQLASEKKCGHLGGKVLIPTAAHIRNLTAARLAADIMGVPSLIVCRTDAEAAKLITSDIDERDQPFVDYEAGRTVEGFYQVKNGLEPCIARAVAYAPYSDLIWCETSKPDLEQARKFAEGVHKHHPGKMLAYNCSPSFNWKKNLDDATIAKFQRELGAMGYKFQFITLAGFHQLNYGMFELARGYRDRQMAAYAELQEAEFAAEARGYTATKHQREVGTGYFDAVSLAITGGQSSTTAMHGSTEHDQFTQAAE

SEQ ID NO: 9242 - protein, 448 aa, Thermoplasma volcanium GSS1
MIMENEERTEKYNEDALRYSEYYKGKIQTMSKVPVRSLDDFSIWYTPGVAAVSRKIATDHDLSFELTGRWNTIAILTDGTRVLGLGNIGPEAAMPVMEGKALIFNYLGGVNAIPVPIRVSSREEFVSVAKSLEPSFGGINLEDIESPKCFFLLETLQKEMNIPVWHDDQLGTASITLAGIINSIRIVGKKIEEVKVVFNGAGAANIAAAYLFKAAGFKKENIILVDSKGVLQPERQDMDSLMLNNPWKYQLAIETNGERVKGDLKEALKGADILISAAKSGPDTVDAKLVKEMNNDPIVFVLANPIPEMWPEEAKENGAKIVATGRSDFPNQINNSLVFPGVFRGVLDARAKGVNFDVMVAASYEIANFVEEPTAEKIVPTMEEWELYPRLASAVATKTVELGLARKIDSKEGFYKRARDIIENNRNIYRKMMDLGLIRMMPNGERKY

SEQ ID NO: 9243 - protein, 435 aa, Arabidopsis thaliana
MPEIEIAAGSGDNNDALFGKYELGKLLGCGAFAKVFHARDRRTGQSVAVKILNKKKLLTNPALANNIKREISIMRRLSHPNIVKLHEVMATKSKIFFAMEFVKGGELFNKISKHGRLSEDLSRRYFQQLISAVGYCHARGVYHRDLKPENLLIDENGNLKVSDFGLSALTDQIRPDGLLHTLCGTPAYVAPEILSKKGYEGAKVDVWSCGIVLFVLVAGYLPFNDPNVMNMYKKIYKGEYRFPRWMSPDLKRFVSRLLDINPETRITIDEILKDPWFVRGGFKQIKFHDDEIEDQKVESSLEAVKSLNAFDLISYSSGLDLSGLFAGCSNSSGESERFLSEKSPEMLAEEVEGFAREENLRMKKKKEEEYGFEMEGQNGKFGIGICISRLNDLLVVVEARRRGGDGDCYKEMWNGKLRVQLIRVCDQTSSTNAAI

SEQ ID NO: 9244 - protein, 381 aa, Clostridium perfringens str. 13
MTKDELLKQRELAHGLISINPNFDINNREQLSQIYTPGVSTICKEVEHHHNMVKTLTSVGNSIAVITDGTAVLGLGNIGTLAGYPIVEAKALVYKDLAGVNAIPLCVDQIGCNELIKTIKSISPSFSGIHLEDIKAPECFYIEEELKKTLNIPVYHDDQHGTAIAVLGALYNGAKVVNKDFLKLKVLILGAGASGIATAKLLLKAGIEDIILVDKNGALVNGDETLNAPQKEMAKITNKEFKKGTLKEVIKGRDVFIGLSEGNLVTKEMVESMNEDPIIFALANPTPEIKPEIAKEAGARVIATGGPSYPNQINNILVFPGLFKGLLEAKATDVTCDVMIAVGKKLASLVENPTAEKIIPGVFDGDIVKSVSETVVKNIEN

SEQ ID NO: 9245 - protein, 619 aa, Zea mays
MSSISRNLRRSLAPDRLRRLSQHPREYVTSECHRPVVLHKRGPDILHDPWFNRGTAFSMTERDRLGLRGLLPPNVVSSQQQIDRFMLDLKRLQRYARDGPSDTYPLAKWRILNRLHDRNETMYYKVLIDNIEEYAPIVYTPTVGLVCQNYSGLFRRPRGMYFSAEDRGEMMSMVYNWPADQVDMIVVTDGSRILGLGDLGVHGIGIAIGKLDLYVAAAGINPQRVLPVMIDVGTNNEKLLKDPLYLGLQEHRLEGDEYVSVIDEFMEAVFTRWPNVIVQFEDFQSKWAFRLLQRYRKTYRMFNDDVQGTAGVAIAGLLGAVRAQGRPMIDFPKQRIVVAGAGSAGIGVVNAASRTMARMLGNNDVAFESARSQFWIVDAHGLITEDREDIDPDARPFARRKSELGHQGLSEGASLVEVVKKVKPDVILGLSAVGGLFSKEVLEALKDSSSSRPAIFAMSNPTKNAECTPGEAFSILGEKVIFASGSPFHDVDLGDGKIGHSNQGNNMYLFPGIGLGTLLSGARVISDGMLQAAAERLASYMKEEEVLEGIIYPPISRIRDITKEVAAAVVREAVAEDLAEGYRDMDARELARLSEEETNEYVKTNMWSPVYPTIIYKKD

SEQ ID NO: 9246 - protein, 496 aa, Mentha x gracilis
MELDLLSAIIILVATYIVSLLINQWRKSKSQQNLPPSPPKLPVIGHLHFLWGGLPQHVFRSIAQKYGPVAHVQLGEVYSVVLSSAEAAKQAMKVLDPNFADRFDGIGSRTMWYDKDDIIFSPYNDHWRQMRRICVTELLSPKNVRSFGYIRQEEIERLIRLLGSSGGAPVDVTEEVSKMSCVVVCRAAFGSVLKDQGSLAELVKESLALASGFELADLYPSSWLLNLLSLNKYRLQRMRRRLDHILDGFLEEHREKKSGEFGGEDIVDVLFRMQKGSDIKIPITSNCIKGFIFDTFSAGAETSSTTISWALSELMRNPAKMAKVQAEVREALKGKTVVDLSEVQELKYLRSVLKETLRLHPPFPLIPRQSREECEVNGYTIPAKTRIFINVWAIGRDPQYWEDPDTFRPERFDEVSRDFMGNDFEFIPFGAGRRICPGLHFGLANVEIPLAQLLYHFDWKLPQGMTDADLDMTETPGLSGPKKKNVCLVPTLYKSP

SEQ ID NO: 9247 - protein, 494 aa, Mentha x gracilis
MELNLLLVIIILVATYTVSLLNKQWRKPKSQQKQPPKLPVIGHLHLLWGGLPPQHLLRSIAREYGPVAHVQLGEVYSVVLSSAEAAKQAMKVLDPNFADRFDSVGSRIMWYDNDDIIFSPYNDHWHQMRKICVSELLSPKNVRSFGFIRQEEIERLIRVMKQSEGAPVDVTEEVSKMSCFVVCRAAFGSVLKDQGSLAELVKESLAMASGFELKDLYPSSWLLNLLSFNNYRLKRMRRRLDHVLDGFLEEHRVKKNGEFGGEDIVDVLFRMQKDSNIKIPITSNGIKGFIFNTFSAGAEASSTTISWALSELMRNPAKMAKVQAEVREALKGKTSVDLSEMQELKYMRSVVKETLRLHPPFPLIPRQSREECEINGFYIPARTRILINAWSIGRDPLYWEDPDTFRPERFDEVSRDFMGNDFEFIPFGAGQRICPGLHFGLANVEIPLAQLLYHFDWKLPQGMTDADLYVAGTPGLSGPRKKNVFLVPTIHKSR

SEQ ID NO: 9248 - protein, 303 aa, Triticum aestivum
  unsure (1)..(303): unsure at all Xaa locations
MKTLLILTILAMATTIATANMQVDPSGQVQWPQQQPFPQPQQPFCQQPQRTIPQPHQTFHHQPQQTFPQPQQTYPHQPQQQFPQTQQPQQPFPQPQQTFPQQPQLPFPQQPQQPFPQPQQPQQPFPQSQQPQQPFPQPQQQFPQPQQPQQSFPQQQQPAIQSFLQQQMNPCKNFLLQQCNHVSLVSSLVSIILPRSDCQVMQQQCCQQLAQIPQQLQCAAXIHSVAHSIIMQQEQQQGVPILRPLFQLAQGLGIIQPQQPAQLEGIRSLVLKTLPTMCNVYVPPDCSTINVPYANIDAGIGGQ

SEQ ID NO: 9249 - protein, 192 aa, ASPERGILLUS NIDULANS FGSC A4
MVVATIKCVVVGDGAVGKTCLLISYTTNKFPSEYVPTVFDNYAVTVMIGDEPYTLGLFDTAGQEDYDRLRPLSYPQTDVFLVCFSVTSPASFENVREKWFPEVHHHCPGVPCLIVGTQVDLRDDPAVRDKLARQKMQPIRKEDGDRMAKDLGAVKYVECSALTQYKLKDVFDEAIVAALEPAPKKRSRCVLL

SEQ ID NO: 9250 - protein, 202 aa, Hypocrea jecorina
MNPEYDYLFKLLLIGDSGVGKSCLLLRFADDTYTESYISTIGVDFKIRTIELDGKTVKLQIWDTAGQERFRTITSSYYRGAHGICVVYDVTDMDSFNNVKQWLQEIDRYATEGVNKLLVGNKSDMSDKKVVEYTVAKEFADSLGIPFLETSAKNASNVEQAFLTMARQIKERMGTTTANNTKPSVHVGQGQGVGNSSSSSCC

SEQ ID NO: 9251 - protein, 346 aa, Triticum aestivum
MLGVGEMNHRLEANGHGKPVAMAKQEQLQQRGDHEETLWYEEEIHDDLKICYALNSVLHRGKSKYQEIALVDTKCFGKALIIDGKMQSADADEFIYHESLIHPPLLFHPNPETVFIMGGGEGSAAREALKQKTVQRVVMCDIDEEVVHFCRTHLSVNWDAFASDKLCLVINDARAELEKMREEKFDVIVGDLADPMEGGPCYQLYTRSFYEQVLKPRLHDGGIFVTQAGPAGVLTHKEVFSSIYNTLRHVFKHVKAYTAHVPSLADTWGWVMASDHPFTLTAQQINERITDRIDGELSYLDGETLISSTTLNKTVFHSLLNERHVYTEDDARFVHGHGTGRAAMLN

SEQ ID NO: 9252 - protein, 497 aa, Spinacia oleracea
MAFPIPARQLFIDGEWREPIKKNRIPVINPSTEEIIGDIPAATAEDVEVAVVAARRAFRRNNWSATSGAHRATYLRAIAAKITEKKDHFVKLETIDSGKPFDEAVLDIDDVASCFEYFAGQAEALDGKQKAPVTLPMERFKSHVLRQPLGVVGLISPWNYPLLMATWKIAPALAAGCTAVLKPSELASVTCLEFGEVCNEVGLPPGVLNILTGLGPDAGAPLVSHPDVDKIAFTGSSATGSKVMASAAQLVKPVTLELGGKSPIVVFEDVDIDKVVEWTIFGCFWTNGQICSATSRLLVHESIAAEFVDKLVKWTKNIKISDPFEEGCRLGPVISKGQYDKIMKFISTAKSEGATILYGGSRPEHLKKGYYIEPTIVTDISTSMQIWKEEVFGPVLCVKTFSSEDEAIALANDTEYGLAAAVFFNDLERCERITKALEVGAVWVNCSQPCFVQAPWGGIKRSGFGRELGEWGIQNYLNIKQVTQDISDEPWGWYKSP

SEQ ID NO: 9253 - protein, 204 aa, Berberis gilgiana
KRRNGLLKKAYELSVLCDAEVALIVFSARGRLYEYANNSVKTTIERYKKACSDSTNTGSVSEANAQFYQQEATRMRQQIGNLQNANRHLLGQDLSSVSVKDLKQMETRLEKGISRIRSKKNELLFAEIEYMQKREIDLQNDNMYLRAKIAENERAQQQMNLMPGNEYETITSAPYDSRNFLQVNLLPESNNQYSRSDQTALQLG

SEQ ID NO: 9254 - protein, 202 aa, Akebia quinata
RRNGLLKKAYELSVLCDAEVALVVFSNRGRLYEYANNSVKTTIERYKKACIDSSNSGSVSEANAQFYQQESLKLRQQIGNLQNLNRHLMGEALGSMSIKELKQLETRIEKGISRIRSKKNELLFAEIEYMQKREIDLQNDNMYLRAKIAENERAGQHMSLMPGNEYEVMSSAPFDSRNFLQVNLLEPNNHYSHTDQIALQLG

SEQ ID NO: 9255 - protein, 309 aa, Glycine max
MISPQTRHSFGSLLLLFLVLLQKRFQMGLLEENPNHSKTILIREVWASNLESEFQLIRQVIDDYPFISMDTEFPGVVFRPHTVDPTKPYLPPSVHYRFLKSNVDALNLIQIGLTLSDSNGNLPHLGTANRFIWEFNFRDFDVERDAHAPDSIDLLRRQGIDFRRNAAEGVDSYLFAELVMSSGLVCNDSVSWVTFHSAYDFGYLVKILTRRSLPSGLEEFLNMLRAFFGNNVYDIKHMMRFCDTLHGGLDRLARTLNVDRAVGKCHQAGSDSLLTWHAFQKMRDIYFVTDGPQKHAGVLFGLELTCSTS

SEQ ID NO: 9256 - protein, 496 aa, Magnaporthe grisea 70-15
MSLVTELKTPVTGAYQQPTGVFINNEWVEGVDKKTFETINPSTEEVICSVSEATEKDVDIAVKAARKAFEGEWKQTAPGQRSKLLTNLAELVEKNLDLLAAVESLDNGKSLAMAKGDVGAVAGCLRYYGGWADKIEGKTIDIAPDMFHYTRSEPIGVCGQIIPWNFPLLMLAWKLGPALATGNTIVLKTAEQTPLSALVFANLIKEAGFPAGVVNIISGFGKVAGAAISAHMDIDKVAFTGSTVVGRTIMKAAASSNLKKVTLELGGKSPNIIFNDADIEAAVSWVNFGIYYNHGQCCCAGSRIYVQEGVYDKFVAAFKERAEKNKVGDPFKEDTFQGPQVSELQFNRIMEYIKSGKEEGATVETGGERHGDKGYFIQPTIFSNVRPEMKIMKEEIFGPVVAMAKFKTEEEVIALANDTNYGLAAAVHTKDLNTSIRVSNALKAGTVWVNCYNMLHHQLPFGGFKESGIGRELGEAALANYTQNKSVAIRLGGPIF

SEQ ID NO: 9257 - protein, 504 aa, ASPERGILLUS NIDULANS FGSC A4
MAQPVQLTAPNGVSYSQPTGLFINNEFVPAASGKTLTTVNPYDESIIATVSSAGPKDVDRAVAAARQAFASEWRGLTPSERGLLLLRLADLCDRDKEILATIDAWDNGKPYEQALGEDIAEVIAVFRYYGGWADKIHGSTIDTGDAKFAYTRHEPLGVCGQIIPWNYPVMMAAWKLGPALACGNTVVLKAAEQTPLSVLYLATLIKEAGFPAGVVNLLNGEGASAGAAIAGHPGVDKIAFTGSTNTGRVIMKAAAGNLKAITLETGGKSPLLVFDDANIDQAVKWSHVGIMSNMGQICTATSRIYVQETIYDTFVEKFKQYTIENSKVGSQFDPSVTHGPQISKAQRDRILSYVQSAKSEGAQLVLGDEPVSEKGYFVPPTIFKNTTREMSAVREEIFGPFVVIQSFSTQQDAINKANDTEYGLGAAVFTENITRAHRVAAAIQAGMVWINSSQDSHFAIPFGGYKQSGIGRELGEYALAAYTQVKAVHGKFSLPLEFNLGTWL

SEQ ID NO: 9258 - protein, 364 aa, Aspergillus oryzae
MSSYNIVVFGGDHCGPEVTAEAIKVLRAVEKNRDVTFNLQDHLLGGASIDATGSPLTDEALNAAKNADAVLLGAIGGPKWGTGAVRPEQGILKLRKEMGTFGNLRPCNFAAPSLVESSPLRADVCRGVNFNIIRELTGGIYFGERKEDDGSGYAMDTEPYSRAEIERIIRLAAHLALQHDPPLPVWSLDKANVLATSRLWRKVVTEVMAKEFPQLKIEHQLIDSAAMIMVKNPRQLNGIVVTSNLFGDIISDEASVIPGSLGLLPSASLSGIPDGNSKVNGIYEPIHGSAPDIAGKGIVNPVAAILSVAMMMQYSFGLFAEARAIEQAVSNVIESGVRTGDIGGKATTAEVGDAVAAELEKLLK

SEQ ID NO: 9259 - protein, 337 aa, Thermoproteus tenax
MKIGVLTGGGDAPGLNIAVYTFVKLAERKHEVYAIYHGWRGLLNKEVKRVSSRDLLDFAFSGGTYIRTSRTNPFKDEERARLLESNVKELGLDVVVAIGGDDTLGAAGEAQRRGILDAVGIPKTIDNDVYGTDYTIGFDSAVNAAIEATESFKTTLISHERIGVVEVMGREAGWIALFTGLSTMADAVLIPERPASWDSVAKRVKEAYNERRWALVVVSEGIKEYGGPKDEYGHSRLGGVGNELAEYIERSTGIEARAVVLGHTIRGVPPTAFDRILAVRYATAAYEAVENGRYGVMVAYSNGDIAYVPIVDVVGKNRLVSGYWMRLYETYWPDLAG

SEQ ID NO: 9260 - protein, 372 aa, Ustilago maydis
MPSLASRSGPPAASSSDPKTSSSSTEKVAKSVGSASPLRSSPNRPYALSDFEVVETLGTGTFGRVLLVRLKDRDVADRSAYFALKVLAKTDVIKLKQVSHINSERCILTKVDHPFLVNMIASFQDSKNCYMLMEYVVGGEIFSYLRRAGHFSADVARFYISTIVLAIEYLHSNKVVYRDLKPENLLIDSNGYTKITDFGFAKEVEDRTWTLCGTPEYLAPEIIQCSGHGSAVDWWSLGILLFEMLAGYPPFYDPNPILIYEKILAGNLVFPEEIDPLSRDLISSLLTADRSRRLGNLRGGANDVKNHPWFHGVDWKALQEGRILPPIVPYLGRPGDTSNFSKYEPARPSAMPGLYGADSGHHDLYADLFPDF

SEQ ID NO: 9261 - protein, 353 aa, GIBBERELLA ZEAE PH-1
MSSNLSFVLNKPGDVSFEERPKPSLASPHDVLVAVNYTGICGSDVHYWVHGSIGKFVVEDPMVLGHESAGTVVEVGDKVKTLKAGDRVALEPGYPCRRCQNCLAGKYNLCPDMVFAATPPYHGTLTGFWSAPADFCFKLPDNVSLQEGALIEPLAVAVHIVKQARVKPGDSVVVMGAGPVGLLCAAVAKAYGASKIVSVDIVQSKLDFAKDFASTHVYASQRIAPEENAKNICDLAGLPDGADVVIDASGAEPSIQASIHVLKNGGSYVQGGMGKADITFPIMAFCIKEATASGSFRYGAGDYPLAVELVATGKVDVKKLITGIVDFKQAEEAFKKVKEGEAIKVLIKGPNEQ

SEQ ID NO: 9262 - protein, 407 aa, Vibrio harveyi
MDIILGVVMFTLIVLALVLVILFAKSKLVPTGDITISVNDDPSLAIVTQPGGKLLSALAGAGVFVSSACGGGGSCGQCRRKIKSGGGDILPTELDHITKGEAREGERLACQVAMKTDMDIELPEEIFGVKKWECTVISNDNKATFIKELKLQIPDGESVPFRAGGYIQIEAPAHHVKYADYDIPEEYREDWEKFNLFRYESKVNEETIRAYSMANYPEEHGIIMLNVRIATPPPNNPDVAPGIMSSFIWSLKEGDKCTISGPFGEFFAKDTDAEMVFVGGGAGMAPMRSHIFDQLKRLHSKRKMSFWYGARSKREMFYVEDFDGLAADNDNFVWHCALSDPLPEDNWDGYTGFIHNVLYENYLRDHEAPEDCEYYMCGPPMMNAAVIGMLKDLGVEDENILLDDFGG

SEQ ID NO: 9263 - protein, 198 aa, Triticum aestivum
  unsure (1)..(198): unsure at all Xaa locations
SNTDHQTLSLKLKHPTXSSHSSLSSSTKLDCSLPSTPALAMDMGMDLSGSSPSSSVSSSPEHASGRASPXKRPAGRTKFRETRHPVYRGVRRTGNAGRWVCEVRVPGKRGARLWLGTYLTAEAAARANDAAMLALGGRSARCLNFADSAWLLAVPSALSDLADVRRAXLQAVADFQRREAANGLIARTVAXXTPSSAH

SEQ ID NO: 9264 - protein, 414 aa, Arabidopsis thaliana
MATHSSRSENKDAGEEDELRRRNPYEVLGIPSNSTDQEIKSAYRRMALRYHPDKNPDDPVAAEMFKEVTFAYEVLSDPENRRLYDTTGSEAVGPENEDLELDLSSLGAVNTIFAALFNKLGVQIKTTVSANLLGEALNGTVTTLPLMVGQVVSRKVEKQSAHFYSVTLTEEEAQDGLICKVHSSAKNKFKLLYFDQVENGGLSLALQEDSRKTGKLSTAGLYFFGFPVYRFDHRVNSRALSRDPETGFFKRLDAFQPFEITELKAGSHVFAVYGDNFFKSVSYTLEIFSSAPFGNEKESLRSTEAQIVSKRTELLKFEAEYHEVFAQFTEMASKCTGEVQEIDELLKRRNEICAAYTIFPPTKQGSSKSRSWSKKKSSLLMEPREEGEVAVREEGGVKKKKWYNIQLRQDKKKN

SEQ ID NO: 9265 - protein, 107 aa, Erysimum cheiri
LGLWDTAGQEDYSRLRPLSYRGADIFVLAFSLISKASYENVLKKWMPELRRFAPNVPIVLVGTKLDLRDDKGYLADHTNVITSNQGEELRKQIGAAAYIECSSKTQQ

SEQ ID NO: 9266 - protein, 497 aa, Mentha x gracilis
MELQISSAIIILVATFVASLLIKQWRKSESQQNLPPGPPKLPLVGHLHLLWGKLPQHAMADMAKKYGPVTHVQLGEVFSVVLSSREATKEAMKLLDPACADRFESIGTRIMWYDNDDIIFSPYSDHWRQMRKICVSELLSARNVRSFGFIRQDEMSRLLRHLQSSAGETVDMTERIATLTCSIICRAAFGAIINDHEELVELVKDSLSMASGFELADLFPSSKLLNLLCWNKSKLWRMRRRVDTILEAIVEEHKLKKSGEFGGEDIIDVLFRMQKDSQIKVPITTNAIKAFIFDTFSAGTETSSTTTLWVMAELMRNPAVMAKAQAEVRAALKGKTSVDVDDVQELKYMKSVVKETMRMHPPIPLIPRSCREECEVNGYKIPNKARIMINVWSMGRNPLYWEKPETFWPERFDQVSRDFMGSDFEFIPFGAGRRICPGLNFGLANVEVPLAQLLYHFDWKLAEGMKPSDMDMSEAEGLTGIRKNNLLLVPTPYNPSS

SEQ ID NO: 9267 - protein, 506 aa, Brassica napus
MTSVNVKLLYHYVITNLFNLCFFPLTAIVAGKAYRLTIDDLHHLYYSYLQHNLITIAPLFAFTVFGSVLYIATRPKPVYLVEYSCYLPPTHCRSSISKVMDIFYQVRKADPSRNGTCDDSSWLDFLRKIQERSGLGDETHGPEGLLQVPPRKTFAAAREETEQVIIGALENLFKNTNVNPKDIGILVVNSSMFNPTPSLSAMVVNTFKLRSNVRSFNLGGMGCSAGVIAIDLAKDLLHVHKNTYALVVSTENITYNIYAGDNRSMMVSNCLFRVGGAAILLSNKPGDRRRSKYELVHTVRTHTGADDKSFRCVQQGDDENGKIGVSLSKDITDVAGRTVKKNIATLGPLILPLSEKLLFFVTFMGKKLFKDKIKHYYVPDFKLAIDHFCIHAGGRAVIDVLEKNLALAPIDVEASRSTLHRFGNTSSSSIWYELAYIEAKGRMKKGNKVWQIALGSGFKCNSAVWVALNNVKASTNSPWEHCIDRYPVKIDSDSGKSETRVQNGRS

SEQ ID NO: 9268 - protein, 510 aa, Ralstonia solanacearum GMI1000
MNRGNALLVLAVFVVASCGLAYELIAGALASYLLGDSILQFSSIIGAYLFAMGIGSWVSRYVADDALLARFVDLELLVGLFGGVSAAALFLLFALESAPFRLVLYALVTVIGVLVGMEIPLVMRMLHRRQAKFSDLVSRVLTFDYLGALAVSLLFPLVLAPRLGLVRTGFLFGLCNTAIAVWTLWHFRAELGLSARLRGAMAWRAGMVGAALLAGFAASDRLTHWSERALFGDEIIHAISSPYQRLVVTRWKDDLRLYINGNLQFSSRDEYRYHEALVLPALESVRGARRVLVLGGGDGLALRQILKYPQVEHVTLVDLDPRMTSLFSHAEALVALNQHAFSDPRVTVVNADAGQWLQTAADMFDVAIVDFPDPSNFSIGKLYSVPFYRLLSRHVADTGLVVIQATSPYFAPRSYWCVDATLKEAGYRTWPYHALVPSFGEWGFILAAPGRADFRPPTTYRVPTRFLDADTTHQMFSFAPDMPRPQVEPNRLNNQSLVRYFEEDWHGVLR

SEQ ID NO: 9269 - protein, 262 aa, Fritillaria cirrhosa
MSSAESREENVYLAKLAEQAERYEEMVEFMEKVAKTVETEELTVEERNLLSVAYKNVIGARRASWRIMSSIEQKEESKGNDQNVKLIKGYRHKVEEELAKICNDILTVIDKHLIPSSGSGEATVFYYKMKGDYYRYLAEFKNEHERKEAADQSMKAYQAASNTANTDLPSTHPIRLGLALNFSVFYYEIMNSPERACHLAKQAFDEAIAELDTLSEESYKDSTLIMQLLRDNLTLWTSDLPEDGGDEGFKGEEAKAAGDDEH

SEQ ID NO: 9270 - protein, 369 aa, Candida albicans SC5314
MFRQVTKSAPVIRTTQRLFARSYIAGQFTGSKGSDGKYTVTLIEGDGIGPEISQAVKDIYAAADVPIHWEPVDVTPLLIDGKTTLPQPAVDSVNKNLVALKGPLATPVGKGHTSMNLTLRRTFNLFANVRPCKSIVGYETPYENVDTVLIRENTEGEYSGIEHTIVPGVVQSIKLITKPASEKVIRYAFEYAKSINKPHVLVVHKASIMKLSDGLFVNTAKEVAQEYPDVSLDFELLDNTSLRLTADPSQYKNVVMVMPNLYGDIMSDLSSGLIGGLGLTPSGNMGNKVSIFEAVHGSAPDIAGKGLANPTALLLSSCMMLRHMSLNSDADRIENAVLKTIASGPDNRTGDLKGTATTTRFTEEVIKNL

SEQ ID NO: 9271 - protein, 465 aa, Streptococcus pneumoniae
MFKSNHERRMRYSIRKFSVGVASVAVASLFMGSVVHATEKEGSTQAATSFNRGNGSQAEQRGELDLERDKAMKAVSEYVGKMVRDAYVKSDRKRHKNTVALVNQLGNIKNRYLNEIVHSTSKSQLQELMMKSQSEVDEAVSKFEKDSFSSSSSGSSTKPETPQPENPEHQKPTTPSPDTKPSPQPEGKKPSVPDINQEKEKAKLAVVTYMSKILDDIQNIICRKKNIVRLLALIKELDELKKQALSEIDNVNTKVEIENTVHKIFADMDAVVTKFKKGLTQDTPKEPGNKKPSAPKTGMQPSPQPEVKPQPEKPKPEVKPQLEKPKPEVKPQPEKPKPEVNPQPEKPKPEVKPQPEKPKPEVKPQPEKPKPEVKPQPEKPKPEVKPQPEKPKPDSKPQADDKKPSTTNNLSKDKQPSNQASTNEKATNKPKKSLPSTGSISNLALEIAGLLTLAGATILAKKRMK

SEQ ID NO: 9272 - protein, 181 aa, Solanum tuberosum
MASSIVSSAAVATRSNVAQASMVAPFTGLKSAASFPVTKKNNNVDITSLASNGGRVRCMQVWPPINMKKYETLSYLPDLSDEQLLKEVEYLLKNGWVPCLEFETEHGFVYRENHKSPGYYDGRYWTMWKLPMFGCTDATQVLAEVQEAKKAYPQAWIRIIGFDNVRQVQCISFIAYKPEGY

SEQ ID NO: 9273 - protein, 516 aa, Glycine max
MDYLLLLPLIITIVWINIHVFISSFKPLKSSKNPPGPRPFPIIGNILELGNQPHQALAKLSQIYGPIMSLKLGKTTTIVISSPQVAKEVLQKHDQIFANRTVPDTLRALDHHILSVAWMPPLPQWRTLRRVCATKVFSSQQLDSTQVFRQRKVQDLMDYVKERCEKGEALDIGEASFTTVLNSISNTFFSMDLAYYTSDKSQEFKDIVWGIMEEAGRPNVVDFFPIFRLLDPQGVRRRMNGYFGKLIAFFDGLIEERLRLRASENESKACNDVLDTVLELMLEENSQVTRPHVLHLFLDLFVAGIDTTSSTIEWAMAELLRNPEKLEIVRKELQQVLAKGEQLEESHISNLAYLQAVVKETFRLHPPIPMLVPHKSEVDVELCGFMVPKSAQILVNVWATGRDSSIWTNPNQFTPERFLESDIDFKGQDFELIPFGAGRRICPGLPLASRTVHIVLASLLYNYNWKLTDGQKPEDMDMSEKYGITLHKAQPLLVIPIQAYYQGRLHACNQILNKLS

SEQ ID NO: 9274 - protein, 204 aa, Helleborus orientalis
KRRNGLLKKAYELSVLCDAEVALIVFSTRGRLYEYSNNSVKKTIERYKKASTDSSGSGSVSEVNAQYYQQEASKLRNQIATLQNSNRNLLGEQLSNLNIRELKQIEKKIETGINKIQSKKNELLFAEIEYMQKREADLQNDNMYLRAKISENERTQQHMSLMPGTNDYEVISSGAFDSRNFLQVNLLGSNDTYSRSDQTALQLG

SEQ ID NO: 9275 - protein, 216 aa, Helleborus orientalis
IENTTNRQVTFCKHRNGLLKKAYELSVLCDAEVALIVFSSRGRLYEYSNNSVKKTIERYKKASTDSSNSGSASEANAQYYQQEAAKLRNQIAALQNSNRNLLGEQLSNLSIRELKQIEKKIETGINKIRSKKNELLFAEIEYMQKREVDLQNDNMFLRAKISENERTQQHMSLMPGTNNYEVISSGPFDSRNFLQVNLLESNNNYSRSDQTALQLG

SEQ ID NO: 9276 - protein, 214 aa, Aquilegia alpina
IENTTNRQVTFCKRRNGLLKKAYELSVLCEAEVALIVFSNRGRLYEYANNSVRKTIDRYKKTCGEGSSTLTVSEANLLFYQQESSKMKQQIEILQNSNRHLMGEALSCLSIKELKQLESRLEKGISRIRSKKNEMLLAEIEFMQKREIELHNDNIYLREQITANERAQQHMNSLPGNVYEAITSAPYNSRDFLQVNLRESKPNQYCDSTALQLC

SEQ ID NO: 9277 - protein, 375 aa, Pseudomonas aeruginosa PAO1
MAEAKVLSGAGLRGQVAGQTALSTVGQEGAGLTYRGYDVRDLAAAAIFEEVAYLLLYGELPNKQQLDAYLKKLQGQRDLPQALKEVLERIPKDAHPMDVMRTGASVLGTLEPELSFDQQRDVADRLLAAFPAIMTYWYRFTHEGQRIDCNSDEPTIGGHFLALLHGKKPSELHVKVMNVSLILYAEHEFNASTFTARVCASTLSDLYSCVTGAIGSLRGPLHGGANEAAMELIERFSSPQEATAELLKMLERKDKIMGFGHAIYKDSDPRNEVIKGWSKQLADEVGDKVLFAVSEAIDKTMWEQKKLFPNADFYHASAYHFMGIPTKLFTPIFVCSRTSGWTAHVFEQRANNRIIRPSAEYTGVEQRAFVPLEQR

SEQ ID NO: 9278 - protein, 203 aa, Aquilegia alpina
KRRNGLLKKAYELSVLCEAEVALIVFSSRGRLYEYSNNSVKKTIERYKKASTDSNNSGSVSEANAQFYQQEATKLRNQIASLQNHNRNLLGESLSNLNIRELKQIEKKIEGGISKIRAKKNELLFAEIEYMQKRELDLQTDNKYLRAMIAANERAPEHMNLMPANEYHALSSAPFDSRNFMPANLLDHNNNYSRSDQTTLQLG

SEQ ID NO: 9279 - protein, 203 aa, Pyrococcus furiosus DSM 3638
MAHGPRYRVPFRRRREGKTNYRKRLKLLKSGKPRLVVRKSLNHHIAQIIVYDPKGDRTLVSAHTRELIRDFGWKGHCGNTPSAYLLGLLIGYKAKQAGIEEAILDIGLHPPVRGSSVFAVLKGAVDAGLNVPHSPEIFPDEYRIRGEHIAEYAKMLKEQDEEKFRRQFGGYLVKGLDPEKLPEHFEEVKARIIEKFEGEGARE

SEQ ID NO: 9280 - protein, 203 aa, Clematis integrifolia
KRRNGLLKKAYELSVLCDAEVALIVFSNRGRLYEYANNSVRKTIDRYKKTCSDPQTALTVSEANTMFYQQETTKMKQQIEILQNSNRHLMGEALSCLSIKELKQLESRLEKGLGRIRSKKNEMLLSEIEYMQKREIDLHNDNLYLRAKISDNEKAQHNMNVLPGNVYEAMTSAPYDARNFLQVNLPDTKEHPYCSGSTALQLC

SEQ ID NO: 9281 - protein, 75 aa, Brassica napus
  unsure (1)..(75): unsure at all Xaa locations
MAXSMLSSAAVVXSPAQATMVAXFXGLKSSAAXPVTRXANNDXTSITSNGGRVSCXXVWPPVGKKKFETLXXLXD

SEQ ID NO: 9282 - protein, 384 aa, Senecio vulgaris
MHNNSSNSRELIKKWPRSNKEAIDSARSNVFKESESLEGTCAKIGGYDFNNGIDHSKLLKSMVSTGFQASNLGDAMIITNQMLDWRLSHDEVPENCSEEERKNRESVKCKIFLGFTSNLISSGVRETICYLTQHRMVDVLVTTTGGIEEDFIKCLASTYKGEFSLPGADLRSKGLNRIGNLIVPNDNYIKFEDWIIPIFDQMLIEQKTQNVLWTPSKMIARLGKEINNETSYLYWAYKNNIPVFCPSITDGSVGDMLYFHSVSNPGAGLVVDIVQDVIAMDNEAVHASPQKTGIIILGGGLPKHHICNANMMRNGADFAVFINTAQEYDGSDSGARPDEAVSWGKISSTGKAVEVHCDATIAFPLLVAETFAVKKEKASKVNGF

SEQ ID NO: 9283 - protein, 376 aa, Hordeum vulgare subsp. vulgare
MDKISAPFFSGTSPAAASVAGVDEDDRLCFQAQELMFAYNISMVLRAAIQLGLLDALSAAGGKALTPNELVENVETSSNKAEAAAAVDRILRYLSCFNVVTCSSEAAGPDGTLVRRYTTGPLCRWLTKDRGDGTLSPFAVFVVDPDHLFPWHHIAEAVTAGGPSAFERTQKWPYYEYMGKNQRLGTLFDNAMAQHSVILVTKMLERFKGFDGVQRLVDVGGGTGSTLGMITSKYKHMTGINYDLPHVIAQGLPLPGVEHVAGDMYESIPTGDAVLLQWITLMLNDDEFVKILSNCHNALPKDGKVIVVDGILPENPDSSLTARDAFTLDIIMFVLFKGAKQRTEKEFARLAKQAGFTGGIKKTYIFFNFYALEFTK

SEQ ID NO: 9284 - protein, 189 aa, Brassica napus
  unsure (1)..(189): unsure at all Xaa locations
MAFAGTTQKCMACDKTVYLVDKLTADNRVYHKACFRCHHCKGTLKLSNYNSFEGVLYCRPHFDQNFKRTGSLEKSFEGTPKIGKPDRPLEGERPAGTKVSNMFGGTREKCVGCDKTVYPIEKVSVNGTLYHKSCFKCTHGGCTISPSNYIAHEGKLYCKXHHIQLIKEKGNLSQLEGGDNAAKDKVDAA

SEQ ID NO: 9285 - protein, 201 aa, Thermosynechococcus elongatus BP-1
MSNPRENIIWHQATVTRARREQLNGHKSCVLWFTGLSGAGKSTLAHAVEERLHQLGYRTFVLDGDNVRHGLCSDLGFTESDRKENIRRIGEVAKLMMEAGLIVMTAFISPFRADREAVRNRMPHGDFLEIYCQASLEVCEARDVKGLYKRARAGEIKNYTGIDSPYEPPLKPELIVNTECLTLEESVGAVLRMLQERGVVQ

SEQ ID NO: 9286 - protein, 549 aa, Zea mays
MARRAASSLVSRCLLARAPAGAPPAAPSAPRRTVPADGMHRLLPGVLQRFSTAAAVEEPITPSVHVNYTKLLINGNFVDSASGKTFPTLDPRTGEVIAHVAEGDAEDINRAVAAARKAFDEGPWPKMTAYERFRILLRFADLIEKHNDELAALETWDNGKPYEQAAQIEVPMVARLMRYYAGWADKIHGLIVPADGPHHVQILHEPIGVAGQIIPWNFPLLMFAWKVGPALACGNTLVLKTAEQTPLSALYISKLLHEAGLPEGVVNVVSGFGPTAGAALASHMDVDKIAFTGSTDTGKIILELAAKSNLKTVTLELGGKSPFIIMDDADVDHAVELAHFALFFNQGQCCCAGSRTFVHERVYDEFVEKAKARALKRVVGDPFRKGVEQGPQIDDEQFKKILRYIRYGVDGGATLVTGGDRLGDKGFYIQPTIFSDVQDGMKIAQEEIFGPVQSILKFKDLNEVIKRANASQYGLAAGVFTNSLDTANTLTRALRAGTVWVNCFDVFDAAIPFGGYKMSGMGREKGVDSLKNYLQVKAVVTPIKNAAWL

SEQ ID NO: 9287 - protein, 461 aa, Methylococcus capsulatus str. Bath
MIPARGECLFLPLGGTGEIGMNLTLYGHDGAWIAVDMGITFGGDDFPDHAVMMPDPAFIAARRERLAGIVLTHGHEDHVGALPYLWKRLRCPVYATPFTAALARTKLARAGIDDAPLVEISPGERFRIGPFAVEYIVMTHSIPEPNTLLIGTPVGAVLHTGDWKLDDRPVVGRGYDHSRLSALRREPLLAMVCDSTNAMVPGRTGFEGDLYEPLLALGAEAAGRIVVTAFASNIARLVTLARVARSLGRRFGVVGPAMEHMVAVARATGHWPDDLPELVEARHIGHLPRSEVFAACTGSQGEPRSALALLAQDLHRDLSLDAGDTVVFSSRVIPGNERAVARIHQRLRETGVHLVTDADARVHVSGHPAQEDLRQLYEWVQPPAVIPVHGTPRHLAANAELAAACHVPHACVVQNGDICRLSRAGIQKLDGIETGRLFVQPDGRLAPVPKDILREMRTKVH

SEQ ID NO: 9288 - protein, 179 aa, Glycine max
  unsure (1)..(179): unsure at all Xaa locations
MASSMISSPAVTTVNRAGAGMVAPFTGLKSMAGFPTRKTNNDITSIASNGGRVQCMQAXWHPVGKKKFETLSYLPDLDDAQLAKEVEYLLRKGWIPCLEFELEHGFVYREHNRSPGYYDGRYWTMWKLPMFGCTDASQVLKELQEAKTAYPNGFIRIIGFDNVRQVQCISFIAYKPPGF

SEQ ID NO: 9289 - protein, 390 aa, Enterococcus faecalis V583
MLEEVLAIHQKNIGVLSLEATEAVLNHHDLAKMYTPGVAELSLMIAQNHELAREWTISGKLIAVITDGSAVLGLGNMGTQAGLPIVEGKALLYKNLAGVDAIPLALEQKSVDEMVQTIENLQNSFAGIHLEDISAPKCFEIEEKLQQRLNIPVYHDDQEGTAIVVLAGLINAAKIKGKPLNELRVVINGVGASGVATAKLCIQAGITHLTLVDRQGVLREEDPTLNPYQRALLRQVIKPSVENKDLATAVVNQDVFLGLSEADVLTPALIKSMNQDPIIFALANPKPEIEPALAQANGVRLLATGSSKYPNQVNNILVFPGLFKGLLAAKGRKVDVGLQMTVARSLAAMISEPTVEKFIPNVFDGGVVDTVFNAVLDYIKQEKTTAEEGT

SEQ ID NO: 9290 - protein, 387 aa, Ceriporiopsis subvermispora
MAFTSLLALVALAAITRAAPTTICPDGTRVSNHVCCDFIPLAQALQSTLYMGDCGEDAHETIRLTFHDAIAISQSQGPSAGGGADGSMLIFPTVEPFFHANAGIDDSVNNLIPFLDKFPTITAGDLIQFAGTVALSNCPGAPQLEFLAGRPNATAPAVDGLIPEPQDNVTHILERFADAGGFTPFEVVSLLASHTVARADKVDLTIDAAPFDSTPFTFDTQIFLEVLLKGVGFPGTDNNTGEVESPLPLGNNKQGGNETGEMRLQSDFALARDDRTACFWQGFVNEQEYMMSSFKAAMSKLAILGHNRNDLIDCSEVVPTPKPPVGKPASFPATTGPQDLQLTCKSERFPSLTIDHGAQETLIPHCSNGGQDCPTVQFTGPAGEDDS

SEQ ID NO: 9291 - protein, 152 aa, Triticum aestivum
GEEPFLQTIARALTPAGVLSNLAESMWLHTHLIQDMLSICREVFKGGVHYAWASVPTYPSGVIGFLLCAKDGPPVDFLTPVNPIEKIEGATKDGREMRFYNSEIHRAAFILPTFVKRELEAYSTSTEKEKPEKPTAKPVKMKVMRDSAITAS

SEQ ID NO: 9292 - protein, 614 aa, Triticum aestivum
  unsure (1)..(614): unsure at all Xaa locations
NVVLQFTVIVRNIPRGPSHSTSERVDEFFRRNHPDHYLGQQAVYNANRYAKLVKQKERLQNWLDYYQLKFERHPEKRPTGRTGCFGFCGRQVDQIDYYRARISELDKRIASERHRVLNDPKAVMPVSFVTFDSRWGAAVCAQTQQSKNPTQWLTNWAPEPRDVYWQNLAIPFFSLSIRKFLISIAVFALVFFYMIPIAFVQSLANLEGIERVAPFLRPVIEVKVVKSFLQGFLPGLALKLFLYILPTVLMIMSKVEGYVSLSSLERRTASKYYYFMLVNVFLGSIIAGTAFEQLDSFFHDPPSQIPRTIGVAVPMKATFFMTYIMVDGWAGIANEILRVKPLVIYHLKNMFIVKTERDRERAMDPRSISLGENLPSLQLYFLLGLVYAVVTPILLPFIIVFFAFAYLVYRHQIINVYNQEYESAAAFWPQVHSRIIASLLISHVTLFGLMSTMKAAYSTPLLIFLPLLTIWFHKYCKSRFEPAFRKYPLEEAMEKDRMEHASEPXLNLKTYLANAYLHPIFQMFEQEDQKEEATIEVRIDKSEHQQQQQQQHVRSSHSQYEEETSAQTHYHHEERTSSQYQYQYQHQYQYQHEETHMRSEQSPPHFVYHPGVEH

SEQ ID NO: 9293 - protein, 182 aa, Zea mays
VLIDMSVHTAYVNAIRGAQHFIYIENQYFLGSSFNWDSHRDVGEHKNLLLPYDHLKFPKFRTLKYSTLQSCATLCGEKIGSLRLPTKMTMQMMYEIIYKALKEVGLDGTYEPQDYLNFFCLGNREAEDTTCTSSGPFSASNPQKCPKLKERSMEGTRDTEIAMAAYQPQHTWANMLSAPRGQ

SEQ ID NO: 9294 - protein, 364 aa, Brassica napus
MGSTAETQITPVQVTDDEAALFAMQLASASVLPMVLKSALDLDLLEIMAKNSSPMSPSEIASKLQTKNPEAPVMLDRILRLLTSYSILTCSNRTIPGGDSVERIYGLGPVCKYLTKNEDGVSIAALCLMNQDKVLMESWYHLKDAVLDGGIPFNKAYGMSAFEYHGKDLRFNTVFNNGMSNHSTITMKKILETYKGFEGLTSLVDVGGGIGATLKMIVSKYPDLKGINFDLPHVIEEATSHPGIDHVGGDMFVSVPKGDAIFMKWICHDWSDEHCVKFLKNCYEALPEDGKVILAECILPETPDSSLSTKQVVHVDCIMLAHNPGGKERTEKEFEALAKGSGFKGINVACNAFGVYVIELLKKM

SEQ ID NO: 9295 - protein, 194 aa, Colletotrichum trifolii
MVVATIKCVVVGDGAVGKTCLLISYTTNKFPSEYVPTVFDNYAVTVMIGDEPYTLGLFDTAGQEDYDRLRPLSYPQTDVFLVCFSVTSPASFENVREKWFPEVHHHCPGVPCLIVGTQVDLREDPSVREKLSKQKMSPVRKEDGERMAKDLGAVKYVECSALTQYKLKDVFDEAIVAALEPPAPKKKSHKCLVL

SEQ ID NO: 9296 - protein, 115 aa, Glycine max
MAAFLRSKCSSVGRTLMGSVGNNLNGGINSSAETVTRPSHCDAISQQIRTFIQMRTNLKVVDNSGAKRVMCIQSLRGKKGARLGDMIIGSVKEAQPRGKVKKGDVVYGVVVRVRY

SEQ ID NO: 9297 - protein, 203 aa, Clematis integrifolia
KRRNGLLKKAYELSVLCDAEVALIVFSSRGRLYEYSNNSVRKTIERYKKASSDTSNTGSVSEANAQFYQNEAGKLRNQIASLQNNNKNLLGESLSNLSIRELKQLEKKIEGGITKIRSKKNELLFAEIEYMQKREIDLQNDNLYLRAKIADNERTQQQMNLMPGNEYEVISSAPFDSRNFLPVNLLEPNNSYSHCDQTTLQLG

SEQ ID NO: 9298 - protein, 499 aa, Candida albicans SC5314
MFKKALPLVSKLTTPKGITYNQPLGLFINNEYVHPKQQKTFEVISPSTEEKITDVYEALEEDIDTAVAAAQAAYHNGWAQGPPEQRSKVLFKLADLIEENAELLAQIETWDNGKSLQNARGDVALTAAYFRSCGGWADKILGSQINTGNTHFNYTQRVPLVCGQIIPWNFPLLMASWKLGPVLATGSTTVLKTAESTPLSALYLSQLLVEAGMPKGVINIVSGFGATAGAAIAKHPKIEKVAFTGSTATGKIIMKLAAESNLKKVTLELGGKSPNIVFNDADLDKTIQNLIVSIFYNSGEVCCAGSRLLIQSGVYDQVVEKFKEAAESVKVGNPFDEDTFMGAQVSDVQLSKILKYVESGKSQGATVVTGGARADGKGYFVKPTIFADVKKDMDIVREEIFGPVVTLIKFDTVDEAVELANDSDYGLAAGIHSADVNKCIDVANRVKAGTVWVNTYNDFHPMVPFGGFSASGIGREMGEEVLHEYTQVRAVRMKINPPN

SEQ ID NO: 9299 - protein, 137 aa, Brassica napus
GRVGDPDAGSNQGSGIAGAVFNLTTSIIGAGIMALPATMKVLGLALGLLLIVLIAVLSEISVELLVRFSSLYKSRSYGEVVQFALGKPARVLSEVCIVVNNGGFLVVYLIIMGDVMSGSLHHVGGLDQWLGNGFWDH

SEQ ID NO: 9300 - protein, 216 aa, Ranunculus ficaria
IENTTNRQVTFCKRRNGLLKKAYELSVLCEAEVALIVFSNRGRLYEYSNNSVKKTIERYKKHSTDSSNTGSVSEANAQFYQQEANKLRNQIATLQNSNKNLLGESLSNLSVRELKAIEKKIEGGIAKIRSKKNELLFAEIEYMQKREIDLQNDNMFLRAKIAENERTQQQHMSLMPVNDYEVISSAPYDSRNFLPVNLLDSNHNYSRNDQTTLQLG

SEQ ID NO: 9301 - protein, 133 aa, Triticum aestivum
  unsure (1)..(133): unsure at all Xaa locations
MAPAVMASSATTVAPFQGLKSTAGLPVGRRSSGXLSSVSNGGRIRCMQVWPIEGIKKFETLSYLPPLSTXALLKQVDYLIRSKWVPCLEFXAKVGFVLRXXHXXSPGYNERGEYWDNVESWMRHLTPIHATER

SEQ ID NO: 9302 - protein, 203 aa, Ranunculus ficaria
KRRNGLLKKAYELSVLCEAEVALIVFSNRGRLYEYANNSVRKTIDRYKKQCSDASTALTVSEANSLFYQQESSKMKQQIDILQNSNRHLMGEALSCLSIKELKQLESRLEKGLSRIRSKKNEMLLAEIEYVQKREIDLHNDNVYLRQKISENERAQQHMNSLPGNAYEAMTSAPYDARNFLQVNLSDNKDNHYGSSSTALQLC

SEQ ID NO: 9303 - protein, 200 aa, Saxifraga careyana
KRRNGLLKKAYELSVLCDAEVALIVFSTRGRLYEYANNNIRSTIERYKKANSDSLNTGDVVETNTQFYQHESVKLRQQIQMLQNSNRNIMGESLSSLTLKELKQLENRLERGITRIRSKKHEMLLAEIEYMQKREIDLENESIYLRAKIGEAESIEQANVAAANDLHAIQAYVAHNFFQPSLLDAEPSFGYPNKKSPRLG

SEQ ID NO: 9304 - protein, 506 aa, Zea mays
MAPPQTIPRRGLFIGGAWREPCLGRRLPVVNPATEATIGDIPAGTAEDVEIAVAAARDAFSRDGGRHWSRAPGAVRANFLRAIAAKIKDRKSELALLETLDSGKPLDEASGDMDDVAACFEYYADLAEALDGKQQSPISLPMENFKSYVLKEPIGVVGLITPWNYPLLMATWKVAPALAAGCTTILKPSELASVSCLELGAICMEIGLPPGVLNIITGLGPEAGAPLSSHSHVDKVAFTGSTETGKRIMISAAQMVKPVSLELGGKSPLIVFDDIGDIDKAVEWTMFGIFANAGQVCSATSRLLLHEKIAKKFLDRLVAWAKNIKVSDPLEEGCRLGSVISEGQYEKIKKFISTARSEGATILYGGGRPQHLRRGFFLEPTIITDVSTSMQIWQEEVFGPVICVKEFRTESEAVELANDTHYGLAGAVISNDQERCERISKALHSGIIWINCSQPCFVQAPWGGNKRSGFGRELGEWGLDNYLTVKQVTKYCSDEPWGWYQPPSKL

SEQ ID NO: 9305 - protein, 212 aa, Saxifraga careyana
KRRNGLLKKAYELSVLCDAEVALIVFSTRGRLYEYSNNSVKQTIERYKKACSGPSNSGSVSEANAQSYQQEASKLHAQINNLQNTNRQMLGEALGSLSPRDLKNLENKVEKGISKIRSKKNELLFSEIEYMKKREIDLHNENQYIRAKIAETERAQQQMSLMPPGGGSTNYDQQLNMHPQQFDSRDFFQVNALQPNNHHYSRQHDQISLQLV

SEQ ID NO: 9306 - protein, 253 aa, Aspergillus flavus
MGHEDAVYLAKLAEQAERYEMVENMKVVASADVELTVEERNLLSVVYKNVIGARRASWRIVTSIEQKEESKGNESQVTLIKEYRQKIESELAKICDDILEGLDKHLIPSGQSGESKGFYHKIGDYHRYLAEFAIGDRRKGAADASLEAYKAATEVAQTDLTPTHPIRLGLALNFSVFYYEILNSPGQACHLAKLAFDDAIAELDTLSEESYKDSTLIMQLLRDNLLDTLSEESYKDSTLIMQLLRDNHPLDLV

SEQ ID NO: 9307 - protein, 493 aa, Mesorhizobium sp. BNC1
MSTSARNRFPGVSFDPKALRSNLFIGGAWKEGATGNRIPVYDPSTGTVIAEVADAEVEDVMGAIDAAHEALPGWAATPPRHRSEVLRRCFELMIENRDMLAELISLENGKTLADAQGEVAYAAEFFRWFAEETVRLNGELYKAPSGANRILVQHQPIGVSVLVTPWNFPAAMATRKIGPALAAGCTVILKPATETPLTAYALAALCAEAGVPDGVVNVYTSSRSGKTVSAMLHDPRVRKLSFTGSTEVGRILLREAADKVISCSMELGGNAPFIVFDDADLSAALDGAMVAKMRNGGEACTAANRFYVQSGIADAFAKGLAERMKALAIGKGYETGSQCGPLINKDAVERISGLVEEAQSRGARVLAGGKALNREGYYFPPTVIDNVDPASAIMSEEIFGPVAPIIRFDSEDEVLSAANGTEYGLMAYVYTQDLSKGLRVSEKIESGMVGLNRGLVSDPAAPFGGVKQSGLGREGSHHGILEFTETKYIATNW

SEQ ID NO: 9308 - protein, 296 aa, Yersinia pestis CO92
MSQKELWYETLHANFGQYFSVENVLFREKTEHQDLVIFENPELGRVMALDGVVQTTERDEFIYHEMMTHVPLLAHGQAKKVLIIGGGDGAMLREVSRHKNIEQITMVEIDAGVVEFCRQYLPNHSAGAYDDPRFKLVIDDGVNFVNQTTEKFDVIISDCTDPIGPGESLFTSVFYEGCARSLNEGGIFVAQNGVCFLQQDEAVNSHNKLSHYFSDVSFYQAAIPTYYGGIMTFAWATQNPALRQLDLATLQNRFAQAGLACRYYNPAIHVGSFALPQYLLDALTTIPKVIGVDSSE

SEQ ID NO: 9309 - protein, 436 aa, Bradyrhizobium japonicum USDA 110
MMLMLTDRRPILLANARVVDPSRDFDGPGDVLIADGIIRETRRGIGAAGVPEGTDVVNCAGKIVAPGLIDMKAFVGEPGFSHRETFASASQAAATGGITTIICQPDTEPVIDNSATVDFVMRRARDTAIVNIQPMAALTKGMRGEEMTEFGLLKAAGAIAFSDGDRSVTNAQVMRRALTYARDFDALIVHHTEDPDLVGEGVMNEGEFASRLGLMGIPNAAEAVMLERDMRLVALTGGRYHAASLSCIDSLDILKRARDAGLAVSASVSINHLALNENDIGPYRSFLKLSPPLRTEDDRRALVAAVASGLIDVIMSDHNPQDVEVKRLPFAEAAPGAVGLETMLPAGLRLMHNGELDLKTLIQAMSTRPAEILGLPGGTLRAGSPADVIVIDPDVPWVVDPAELKSPCKNTPFDEARFTGRVVRTIVGGRTVFEHV

SEQ ID NO: 9310 - protein, 173 aa, Triticum aestivum
  unsure (1)..(173): unsure at all Xaa locations
MAPTVMASSATSVVPFQGLKSTAGLPVSRRSNGASLGSVRNGGRIRCMQVWPIEGIKRWETLSYLPPIRTEALLRQVDXLIRSKWVPCLEFSKVGFIFREHNASPGYYDGRYWTMWKLPMCGCTDPTQVINEVEEVKKEYPDAYVRIIGFDKLRQVQSVSFIAFKPPGCKESG

SEQ ID NO: 9311 - protein, 410 aa, Zea mays
  unsure (1)..(410): unsure at all Xaa locations
MSAAATKVKRRVGKYELGRTIGEGTFAKVRFAKNTETGEPVAVKILDKEKVLRHKMAEQIKREISTMKLIKHPNVVRIYEVMGXSKTKVYIVLEYVTGGELFDTIANQGRMREGEARSYFQQLINAVDYCHSRGVYHRDLKPENLLLDSYGNLNVSDFGLSALSQQIKDDGLLHTTCGTPNYVAPEVLEDQGYDGAMADLWSCGVILFVLLAGYLPFEDSNLMTLYKKISNAEYTFPPWTSFPAKRLLTRILDPNPMTENSCDFRITIPEILEDEWFKKGYKRPEFDEKYDTPLDDVDAVFNDSEEHHVTEKKEEEPVALNAFELISRSAGLNLGNLFDSEQEFKRETRFTSKCPPKEIIRKIEEAAKPLGXGVQKKNYKLRLEKDKAGEERDNLXVCYXRILQVAPSLH

SEQ ID NO: 9312 - protein, 183 aa, Escherichia coli O157:H7 EDL933
MQDSILTTVVKDIDGEVTTLEKYAGNVLLIVNVASKCGLTPQYEQLENIQKAWADRGFVVLGFPCNQFLEQEPGSDEEIKTYCTTTWGVTFPMFSKIEVNGEGRHPLYQKLISAAPTAVAPEESGFYARMVSKGRAPLYPDDILWNFEKFLVGRDGLVIQRFSPDMTPEDPIVMESIKLALAK

SEQ ID NO: 9313 - protein, 507 aa, Glycine max
  unsure (1)..(507): unsure at all Xaa locations
MDLFLSCMVLFVLTLATLGAHWIWVVSSSRAGSKLPPGPFPLPIIGNLLALGKKPHQSLAKLAETHGPIMTLKFGQVTTIVVSSADMAKEVLLTHDHSLSSNRVIPQAVQVHNHHNHSITFLPVSPLWRDLRKICIANLFSNKTLDASQDLRRSKLHQLLHDIHRSSLAGEAVDVGKAVFNTSMNLLSNTFXXSLDLVHSSSSAAAVDFKDLVLKIMEESGKPNLADFFPVLKFMDPQGIKTRTTVYAGKIIDTFRALIHQRLKLRENNHGHDTNNDMLNTLLNCQEMDQTKIEHLALTLFVAGTDTITSTVEWAMAELLQNEKAMSKAKQELEETIGRGKAVEESDIGRLPYLQAVIKETFRLHPAVPFLIPRKANADVEISGGYTIPKDAQVFVNVWAIGRNSSIWKNNANVFSPERFLMDSEDIDVKGHSFELTPFGAGRRICLGLPLAMRMLYLVLGSLINCFNWKLVEDDDVMNMEDSFGITLAKAQPVILIPEKVHGVIVS

SEQ ID NO: 9314 - protein, 501 aa, Amaranthus hypochondriacus
MAIRVPSRQLFIDGEWREPIKKNRIPIINPSTEEIIGDIPAATAEDVELAVAAARRALKRNKGEDWASASGAHRAKYLRAIAAKITEKKDYFAKLEAMDCGKPLDEAARDIDDVAGCFEYYADQAEALDAKQKAPIALPMDTFKCHVLKQPIGVVGLISPWNYPLLMATWKVAPALAAGCSAVLKPSELASVTCLELAEVCREVGLPPGVLNILTGLGPEAGGPLACHPDVDKVAFTGSTATGSKVMSSAAQLVKPVTLELGGKSPIVIFEDVDLDKAAEWTAFGCFWTNGQICSATSRLLVHESIAAEFLDRLVKWCKNIKISDPFEEGCRLGPVVSKSQYEKVLKFISTAKSEGATILCGGSRPEHLKKGYYVEPTIISDVSTSMQIWREEVFGPVLCQKTFGSEDEAIELANDTQYGLGAAVLSKDLDRCERITKALEVGAVWVNCSQPCFTQAPWGGTKRSGFGRELGEWGIENYLNIKQVTRDTSTDEPWGWYKSP

SEQ ID NO: 9315 - protein, 312 aa, Magnaporthe grisea
MADKDFTLNTGAKIPAFGLGTWQGDKGVIKEAVLTAIKSGYRLIDGAYVYGNEEEVGQGIREAISSGIVKREDLFVVSKCWATYTTRCELGLDQSLKLLGLDYVDLYLVHWPILMNPEGNDEKFPKHADGSRDIIHTHNHVDTWKLMEKLPATGKTKAVGVSNYSKAWLEQLLPHATTVPAVNQVENHPQLPQQELVDFCKEKGIHIMAYSPLGSTGGPLLTAEPVVKIAEKHSISPAAVLLGYQIARGITVIPKSVNPDRIKANAQLKDLDAEDMKLLNDYSEQLAKDGKLNRYVFPPFGTDFGFPDKVGQ

SEQ ID NO: 9316 - protein, 399 aa, Clostridium perfringens str. 13
MNLLIKNVNLIDESNNFFGDIYIEKGVIKELGTELNKECETLDGKGLVLMPAFIDTHAHFRDPGFEYKEDIESGSKAAVRGGYTTVTLMPNTKPVCSSKEILDYVVNKGKEVGLVDLYQTVSITKNLSGEEINHLREFEGNPNVKAITDDGKGVSDSKIMMEAMKIAKENNWIVMSHAESPEFSRVDMRLAENMMTWRDITLAKFVDCRLHMSHVSTKEAMKYIIEGKNDGVKVTCEITPHHLALNNKISNYRVNPPIREEEDVNFLIKAIKMNYVDCIGTDHAPHSKEDKEKGAPGMIGIEQAFSICYTKLVKENHISLNKLSQLMSGNAAKLLNINKGKLQPGFLGDLVLIDLNKKRIFKEEDIVSRSKNTPFNGMEFYGDVVVTIKNGKIVYNGEF

SEQ ID NO: 9317 - protein, 166 aa, Triticum aestivum
  unsure (1)..(166): unsure at all Xaa locations
KTKIYFVLEHVKGGELFNKIQRGRLKEDAARKYFQQLICAVDFCHSRGVYHRDLKPENLLLDENSNLKVSDFGLSALAECHRQDGLLHTTCGTPAYVAPEVINRKGYDGAKADIWSCGVILFVLLAXGYLPFHDKNLMDMLGKIXKADFKCPSWVXTDVRXALQRI

SEQ ID NO: 9318 - protein, 202 aa, Lycopersicon esculentum
MSNEYDYLFKLLLIGDSSVGKSCLLLRFADDSYVDSYISTIGVDFKIRTVEQDGKTIKLQIWDTAGQERFRTITSSYYRGAHGIIIVYDVTEMESFNNVKQWLNEIDRYANESVCKLLVGNKCDLVENKVVDTQMGKALADELGIPFLETSAKDSINVEQAFLTMAGEIKKKMGNQPAGAKRTGSTVQIKGQPIEQKGNCCG

SEQ ID NO: 9319 - protein, 447 aa, Oryza sativa (japonica cultivar-group)
MAATKSKAAKKGAPLLGKYELGRLLGRGTFAKVYHARSLAPGADPVAVKVLDKPDLAAAGAGMATRVLREVAAMRRLRHPNVLRLHEVLATRSKVYLVMELAPGGDLLSRLASLPSRRLPEHAAQRVFLQLVSALIYCHARGVSHRDVKPQNVLLDAHGNLKVSDFGLAALPDSLRDDGRLHTACGTPAFAAPEVLRRKAYDGAKADAWSCGVILFVLLAGHLPFDDSNIADMCRKAHRREYALPRWVSQPARRLVSRLLDPNPATRLAVAELATHPWFKRSLSLDSQLGSLLGGQPERELAFQAPPPLNAFDIISMSPGLDLSGLFGESKRRREKRFVTTASPERTVERLGQAGAKLGYFMVGKKGVERLPLGGLSGLVAMSMEMSEVSPSMMLVELRLEGGDDGDGDGGAEEFGWEELRAELGDDVVMAWHGCDGGKKDKEGILL

SEQ ID NO: 9320 - protein, 130 aa, Glycine max
MEGVGARLGRSSTRYGPATVFTGPVRKWKKKWIHVSPSSASSNSNANNHASNASHLLLYKWTPLTQSQNTTNNANANGNAKDAPPEPPAEPPRRKFKYVPVALLEEPKNEAAENEGTEKVDEESKPIDVD

SEQ ID NO: 9321 - protein, 490 aa, Glycine max
MTKISPEVEIRMPMEAFPPVSADVSFISNSFPKYKLDADNQVLEEPVEDNQGPSLKDVIEQEASNLSDQHKRISVRDLASKFDKNLAAAAKLSNEAKLREVASLEGHVLLKKLRDALESLRGRFAGRNKEDVEKAISMVEALAVKLTQNEGELIQEKFEVKKLVNFLKQASEDAKKLVNQEKSFACAEIESARAVVLRIGEALEEQEKASQASKPQDVDGLVEEVQEARRIKLLHQPSKVMAMEYELRALRDQIREKSIFSIKLQKELTMSKRDEENKSRLYMLDGSEALGSYLRVQPCSAEVPQVSKCSFQWYRLSSEGSWREVISGANKSIYAPDPSDVGRILQVDIVSNGKKLTLTTNPIQTVSGLGSHVETLLRKSNTDFNVVISQMNGKDHSSHSTHSFNVGRMRIKLCRGWITKAREIYSPSMQLCGVRSDIANAAKALFWQARKGLSFVLTFESERDRNAAIMVARKYALDCNVVLAGPDDLV

SEQ ID NO: 9322 - protein, 211 aa, Zea mays
  unsure (1)..(211): unsure at all Xaa locations
LTEQALSDYPGGGRNEGKGSPATTNPMPPHRCRRGXGGGDTSAFFAATLVLWAVSVGFEIGVRGRRELAPVAAGFAFFQAANAAVRGSVSRDPLFVNTAVSLLHSSLTSVXLHSIFLHVRKVRRMVGFRDFDRTVVKLEWVLNWTTFVTARVICHILITYKLISDAHKFGKGIELPLALLGMAGMNLLNIFLGLDLLKAFTRERNQQSHQD

SEQ ID NO: 9323 - protein, 368 aa, Brassica napus
MEEDRVLSSVHSTVFKESESLEGKCDKIEGYDFNQGVNYPKLLRSMLTTGFQASNLGDVIDVVNQMLEWRLSDETIAPEDCSEEEKDPAYRESVKCKIFLGFTSNLVSSGVRETIRYLVQHHMVDVIVTTTGGVEEDLIKCLAPTFKGDFSLPGAYLRSKGLNRIGNLLVPNDNYCKFEDWIIPIFDQMLKEQKEESVLWTPSKLLARLGKEINNESSYLYWAYKMNIPVFCRGLTDGSLGDMLYFHSFRTSGLVIDVVQDIRAMNGEAVHATPRKTGMIILGGGLPKHHICNANMMRNGADYAVFINTGQEFDGSDSGARPDEAVSWGKIRGSAKTVKVYCDATIAFPLLVAETFASKREQSCEHKT

SEQ ID NO: 9324 - protein, 78 aa, Zea mays
HVDYACTPEEVQQHFQACGTVNRVTILTDKFGQPKGFAYVEFLEQEGVQEALNLNESELHGRQIKVAPKRTNVPGMKQ

SEQ ID NO: 9325 - protein, 294 aa, Saccharomyces cerevisiae
TTPLVHVASVEKGRSYEDFQKVYNAIALKLREDDEYDNYIGYGPVLVRLAWYTSGTWDKHDNTGGSYGGTYRFKKEFNDPSNAGLQNGFKFLEPIHKEFPWISSGDLFSLGGVTAVQEMQGPKIPWRCGRVDTPEDTTPDNGRLPDADKDADYVRTFFQRLNMNDREVVALMGAHALGKTHLKNSGYEGPWGAANNVFTNEFYLNLLNEDWKLEKNDANNEQWDSKSGYMMLPTDYSLIQDPKYLSIVKEYANDQDKFFKDFSKAFEKLLENGITFPKDAPSPFIFKTLEEQGL

SEQ ID NO: 9326 - protein, 91 aa, Triticum aestivum
  unsure (1)..(91): unsure at all Xaa locations
MSDTDEHHFKSKGDFCAYKTYPQQAGAIRKGGHIVIKARPCKVVEVTTSKTGKQWHAXXYFVAIDIFNGKKLEDLDSSYNNXNVPHGDRQD

SEQ ID NO: 9327 - protein, 320 aa, Burkholderia cepacia R1808
MPLNPKIAQVLDMIERAKRPSYHHQTPQQARAAYEKSAPILDVAPAPMHSVDACVVPTRDGRTIGARLYLPVAPSLAEPLPALVYYHGGGFTVGSVDTHDALCRMFARDAQCAVLSVDYRLAPEHKFPTAVHDAEDALRWLHREAAAFGIDAARLAVGGDSAGGTLATVCAVLARDAGIHLALQLLIYPGVTGHQATESHARLANGYLLTQDTIQWFFSQYVREPADRDDWRFAPLDGTRGAPSSFAGVAPAWIATAEYDPLSDEGAAYAQKLRAAGNTVALVCYPGMIHEFFKMGGYIPEVRAAHADATAALRAAFDGV

SEQ ID NO: 9328 - protein, 246 aa, Glycine max
MTSASELFHTRRHRLGRNALDLGLDTELHAADSLRQLRLRHYYLRRHHPERASDRIDGRYRRSFVSESVDSEENVRSSLRGSSSERLPVGVVLARARLLQRLRGEPLSTNRQYDRDSFGEDPESESSNEDPSGASLVTELTSQMARSQFLQELSTKPPGLTQEALDCLHQEVFSSNASEIGLDSRVLQDCSICLESFTDGDELIRLPCGHKFHSVCLDPWIRCCGDCPYCRRCIVVNTHSSLNEDE

SEQ ID NO: 9329 - protein, 300 aa, Pneumocystis carinii
MEQYQRLEKIGEGTYGVVYKAKDLESGTIVALKKIRLEAEDEGVPSTAIREISLLKEMHNDNVVRLLNIIHQESRLYLVFEFLDLDLKKYMNSIPKDMMLGAEMIKKFMSQLVSGVKYCHSHRILHRDLKPQNLLIDREGNLKLADFGLARAFGVPLRGYTHEVVTLWYRAPEVLLGGRQYATALDIWSIGCIFAEMATKKPLFPGDSEIDEIFRIFRILGTPDENSWPGITSYPDFKATFPKWSPKNLGELITELDSDGIDLLQKCLRYYPAERISAKKALDHPYFDDFINLNRSNVVL

SEQ ID NO: 9330 - protein, 233 aa, Allium sp. AL-2003
VQLKRMENKINRQVTFSKRRNGLLKKAHEISVLCDAEVALIVFSAKGKLYEYSTDSSMEKILERYERYCFAEKSSTMSDIDSQEDWSLEYHKLKAKVESLNNRQRHLMGEQLESLSLREIGQLEQQLENSLKTVRTRKSQELLSSISELQDKEKTLRDENKALENELMKRARAKAILEQQARWKHHNHKQQDNLHNPNINIGNYQTRNNEGGVEPATDVQVRVVRNLLPHWML

SEQ ID NO: 9331 - protein, 208 aa, Magnaporthe grisea 70-15
MATNITWHDGLTRRERNQLRGQRGFTIWFTGLSASGKSTVATALEQHLLHLGLAAYRLDGDNVRFGLNKDLGFSEKDRNENIRRIAEVAKLFADSSVVALTSFISPYRADRQTARELHAQAAQKGDEPLEFVEVYVDIPIEVAEQRDPKGLYKKARAGEIKEFTGISAPYEAPENPEITIKTHENSVEECVAQIVKWLQDKGLVKATP

SEQ ID NO: 9332 - protein, 300 aa, Pneumocystis carinii
MEQYQRLEKIGEGTYGVVYKAKDLESGTIVALKKIRLEAEDEGVPSTAIREISLLKEMHNDNVVRLLNIIHQESRLYLVFEFLDLDLKKYMNSIPKDMMLGAEMIKKFMSQLVSGVKYCHSHRILHRDLKPQNLLIDREGNLKLADFGLARAFGVPLRGYTHEVVTLWYRAPEVLLGGRQYATALDIWSIGCIFAEMATKKPLFPGDSEIDEIFRIFRILGTPDENSWPGITSYPDFKATFPKWSPKNLGELITELDSDGIDLLQKCLRYYPAERISAKKALDHPYFDDFININRSNVVL

SEQ ID NO: 9333 - protein, 418 aa, Glycine max
SARARAEFGSSFAKVYHARHLKTGKSVAMKVVGKEKVVKVGMMEQIKREISAMNMVKHPNIVQLHEVMASKSKIYIAMELVRGGELFNKIARGRLREEMARLYFQQLISAVDFCHSRGVYHRDLKPENLLLDDDGNLKVTDFGLSTFSEHLRHDGLLHTTCGTPAYVAPEVIGKRGYDGAKADIWSCGVILYVLLAGFLPFQDDNLVALYKKIYRGDFKCPPWFSSEARRLITKLLDPNPNTRITISKIMDSSWFKKPVPKNLMGKKREELDLEEKIKQHEQEVSTTMNAFHIISLSEGFDLSPLFEEKKREEKELRFATTRPASSVISRLEDLAKAVKFDVKKSETKVRLQGQEKGRKGKLAIAADLYAVTPSFLVVEVKKDNGDTLEYNQFCSKELRPALKDIVWRTSPAENPTLA

SEQ ID NO: 9334 - protein, 440 aa, Arabidopsis thaliana
MSPAIKAPLLPNQEPSSSSSENHGSFAGAVFNISTSIVGAGIMAIPAAFKVLGVIPSLSIIVIIAWLSNVSAGFLMKSSLAGESTTYAGVMKESFGKSGAVAVTVVTMVVTFGSMIIFSIIIGDVISGNEKDGIIHLGLLQEWFGSHWWNTRFFGLLFIFVFLFLPLVLCRRVERLAFSSAISFLLALLFVVISSVLAIIALVQGKTKPPRLFPELNDGGLSFFSLFTASPVIVTAFTFHFNVHPVAFELKDPLNVLSATRISVILCATIYSATGLFCYLLFGDSTMTDVLMNFDQSTSSSVGSLLNDIVRLSYAIHLMLVFPLLNFSLRANLDELLFPMKLSLVEDNKRFFALTFPLLISCFLGAIAIPDIWYFFQFLGSTSTVSIAFIFPAAIVLRNVNGFSTLREKIVASVMLVLAVATSIIAISTNIYTFTATEET

SEQ ID NO: 9335 - protein, 236 aa, Escherichia coli K12
MGYRSIDTAAAYKNEEGVGKALKNASVNREELFITTKLWNDDHKRPREALLDSLKKLQLDYIDLYLMHWPVPAIDHYVEAWKGMIELQKEGLIKSIGVCNFQIHHLQRLIDETGVTPVINQIELHPLMQQRQLHAWNATHKIQTESWSPLAQGGKGVFDQKVIRDLADKYGKTPAQIVIRWHLDSGLVVIPKSVTPSRIAENFDVWDFRLDKDELGEIAKLDQGKRLGPDPDQFGG

SEQ ID NO: 9336 - protein, 437 aa, Leptospira interrogans serovar Copenhageni str. Fiocruz L1-130
MKFYRRKVEFEKHGKNRMREKSLQYHALHPKGKIEVVPTKPTEDSYDLSLAYSPGVAYPCLEIKDSPELVYEYTNKGNLVGIITNGTAILGLGDIGALAGKPVMEGKAVLFKKFAGIDVFDIEINTKDPDEFIRAVKLLEPTFGGINLEDIKAPESFYIEEQLIEKMNIPVFHDDQHGTAIITVAGLLNSFKLTGKNPDDVKVVICGAGAAGIAIAELIQHIGIKKEQIFLVDTKGVIHHNRNDLNDSKKKYIQKTDSTTLRDVMKGSDIFIGVSVENMVDEDMVRSMSKNPVIFALANPDPEIPYRVAKAVRSDLIMGTGRSDNPNQVNNVLGFPFIFRGALDVRARHITLEMKLAAARSLAELARLEVPEVVSKAYGGEKFTFGPEYLIPKPFDKRVLFHVAPAVAEAAVASGSARIPYLGREKYLGFLEGIIKS

SEQ ID NO: 9337 - protein, 444 aa, Arabidopsis thaliana
MVRRQEEEKKAEKGMRLGKYELGRTLGEGNFGKVKFAKDTVSGHSFAVKIIDKSRIADLNFSLQIKREIRTLKMLKHPHIVRLHEVLASKTKINMVMELVTGGELFDRIVSNGKLTETDGRKMFQQLIDGISYCHSKGVFHRDLKLENVLLDAKGHIKITDFGLSALPQHFRDDGLLHNTCGSPNYVAPEVLANRGYDGAASDIWSCGVILYVILTGCLPFDDRNLAVLYQKICKGDPPIPRWLSPGARTMIKRMLDPNPVTRITVVGIKASEWFKLEYIPSIPDDDDEEEVDTDDDAFSIQELGSEEGKGSDSPTIINAFQLIGMSSFLDLSGFFEQENVSERRIRFTSNSSAKDLLEKIETAVTEMGFSVQKKHAKLRVNQEERTQKGQVGLSVTAEVFEIKPSLNVVELRKSYGDSCLYRQLYERLLKDVGTSSPEQEIVT

SEQ ID NO: 9338 - protein, 145 aa, Alvinella pompejana epibiont 7G3
MLVKRYEPFNEIRRSFDLVNQIINSVDKNVESDNALVDFIPNINTREDSNAYYIEVELAGVKKEDVDIKIDENILSISGEKRFKDNLKAEDYYKIESKYGTFARSFTLPERVDVSKIEAKSEDGIIEIKIPKLTIEKESKKITIK

SEQ ID NO: 9339 - protein, 442 aa, Triticum aestivum
MAIAVSGHWTRLRTLGCGASGAVVSLAADGASGELFAVKSVRAADAAQLSREQGILSGLSSPHVVACIGGGGARDGSYHLFLEFAPGGSLADEAARNGGRLEERAVRAHATDVLRGLAYIHGKSLVHGDVKSRNVVIGADGRAKIADFGCARALGEARPIGGTPAFMAPEVARGEEQGPAADVWALGCTVVEMATGRAPWGEMDNVLAAVHRIGYTDAVPEVPTWLSAEAKSFLAMCFARDARERCTAAELLEHPFVALQAGEAKARWVSPKSTLDAAFWESETDEEEEEVSESPCERIKSLSCSVLPDWDSDEGWIDVLGEQCEEACDSPAATKGPADVSSRAPSKVLGSPAAPAEDAAVVGTLSSDELDAEDEPFGDDIILAADPLVDRQIQVCWSSDRYVLSSSLVPCNNRIDAIEKFRFPQKKKKKKKKKKKKKKKKK

SEQ ID NO: 9340 - protein, 197 aa, Brassica napus
MSASRFAKCVTVGDGAVGKTCLLISYTSNTFPTDYVPTVFDNFSANVVVNGATVNLGLWDTAGQEDYNRLRPLSYRGADVFILAFSLISKASYENVSKKWIPELKHYAPGVPIILVGSKLDLRDDKQFFVDHPGAVPITTAQGEELRKLIDAPTYIECSSKSQENVKAVFDAAIRVVLQPPKQKKKKSKTQKACSIQ

SEQ ID NO: 9341 - protein, 291 aa, Zea mays
  unsure (1)..(291): unsure at all Xaa locations
MALSIYTPTSSSLVPPSIQEVRLTSRPPKPATFSLRRPHLAARAAAGNAPTSPVREVVTELDAVAGFSEIVPDTVVFDDFERXPSSCLTLYFFLSCCPIRFGGRVAHCAIVNNHRFAPTAATVSSSLLLGITGLPDTKFKSAIDTALADGECNALEKAEDRMSCYLTKALANVGAELAHQVPGRVSTEIDARLAYDTQGIIHRVHELLNLYNQHDVSTDRLLFKIPATWQGIEASRLLESEGIQTHLTFVYSFAQAAAAAQAGASVVQMFVGRLRDWAKHHSGDPEIDEAL

SEQ ID NO: 9342 - protein, 277 aa, Brassica napus
  unsure (1)..(277): unsure at all Xaa locations
MSLFLKDDSIQIREVWSDNLQEEMDLIREVVDDFPYVAMDTEFPGIVVRPVGTFKSNADYHYETLKLNVNIXLNIIQLGLTFSNEQGNLPHPAAPTGKYCIWQFNSRXFVLDSDFFPVDSIDLPKQSGIDFAKTTPQGIESSRFPELLMSSGIVLNGNVHWVTFHSGYDFGYLLKLLTCKNLPDSQTSFFELINVYFPTVYDIKHLMKFCNSLHGGLNKLAELLEVERVGICHQPGLDSLLTSCTFRKLKENFFVGPLQKYAGVLYGLGVENGQVAL

SEQ ID NO: 9343 - protein, 326 aa, Glycine max
LEGTGEVLNCSAENNGDLFHGVLGGLGQFGIITRARIVLEPAPTMVKWIRVLYSDFTAFTRDQERLISAEKTFDYIEGFVIINRTGLLNNWRLSFNPRDPVQASHFKSDGRTLFCLEMAKYLNVEEIDAANQEVEEHLSRLSYIPSTLFSTEVTFVDFLDRVHISEVKLRSKGLWDVPHPWLNLLIPKSQILNFAQVVFGNILSETSNGPVLIYPVNKSKWDNRTSVVIPEEDIFYLVAFLTSAVPSSNGTDGLEHILSQNKRILEFCERAQLGVKQYLPHYNTQQEWRAHFGPQWETFLLRKSVYDPLAILAPGQRIFQKAITFS

SEQ ID NO: 9344 - protein, 281 aa, Corynebacterium glutamicum ATCC 13032
MDQKNKLSKSEGIPLVTLNDGKTIPQLGFGVFKVDPDEAERVVTEALEVGYRHIDTAAIYGNEEGVGRAIAKSGIPREELFITTKLWNDRHLDVEAAFEESLQKLGLDYVDLYLVHWPAPKNDNYVAAWKGLEKLGDRARSIGVCNFLPEHLEKLLAEATTVPAINQIELHPALQQRDAVEASLAAGITVESWGPLGQGRFDLGAEEPIAAAAKNHGKTPAQVVIRWHLQNGFVVFPKTVTKSRMVENIDVFDFELSDEEMAAITALERNDRGGSHPNDLN

SEQ ID NO: 9345 - protein, 394 aa, Alvinella pompejana epibiont 7G3
MNLEELDKQFVLQTYARDYTNFVRGENATLFSEDGRDFIDFASGIGVSSVGHGNRRLSDAVCEQVRNIIHISNLQVIEPQVKLAQKICELSGYDGAIFFANSGAEANEGAIKVARKYGEVNFDKKRYKVITLEHSFHGRTISTLKATGQKSFHTPSFSPYPDGFLYVKSIEDIYGSIDDETVAVLIELVQGEGGVEPFSIGEVQNLAKFLRENGILLIVDEVQTGVFRTGEMLASNIYQIEPDIITLAKGLGGGVPIGAILTKHRDILKAGEHGSTFGGNYLSTRAGLEVLSILNGLYESGELKETISYFEERLKGIRERFSNLFSQDVGVGLMRGLRAEEADIPSKVVKSSMDSGLIVLKAGRNTVRFLPPLTISKSEIDKGFERFEKAISSI

SEQ ID NO: 9346 - protein, 349 aa, Zea mays
MGDAAASTSAPTTPTSILICLEDGSDLLADADDGAGTDLVVARDERLLVVDQDEEYVALLLSKESASGGGGPVEEMEDWMKAARSGCVRWIIKTTAMFRFGGKTAYVAVNYLDRFLAQRRVNREHAWGLQLLMVACMSLATKLEEHHAPRLSELPLDACEFAFDRASVLRMELLVLGTLEWRMVAVTPFPYISCFAARFRQDERRAVLVRAVECVFAAIRAMSSVEYQPSTIAVASILVARGRETPAGNLDALKAILGSSFPQLDTGHVYSCYSAMIREDDKSPTQSTSTSTGVASSGVSVAAHAGGSGSPSPPGASVSVGANNAAGTAPPATTDNRNKRRRLRSPQRQ

SEQ ID NO: 9347 - protein, 146 aa, Triticum aestivum
  unsure (1)..(146): unsure at all Xaa locations
MAPTVMASSATSVAPFQGLKSTAGLPVSRRSNGASLGSVSNGGRIRCMQVWPIEGIKKFETLSYLPPLXTEALLKQVDYLIRSKWVPCLEFSKXGFIFREHNASPGYYHGRYWTMWKLPMFRCTHPTQVINEVEEVXKEYPDPYCH

SEQ ID NO: 9348 - protein, 319 aa, Fragaria x ananassa
MAKVPSVTLSSCGDDIQTMPVIGMGTSSYPRADPETAKAAILEAIRAGYRHFDTAAAYGSEKDLGEAIAEALRLQLIKSRDELFITTKLWASFAEKDLVLPSIKASLSNLQVEYIDMYIIHWPFKLGKEVRTMPVERDLVQPLDIKSVWEAMEECKKLGLARGIGVSNFTSSMLEELLSFAEIPPAVNQLEMNPAWQLKKLRDFCKAKGIHVTAYSPLGAARTKWGDDRVLGSDIIEEIAQAKGKSTAQISLRWVYEQGVSIVTKSYNKERMRQNLDIFDFCLTEEELEKMSHLPQRKGVTFASILGPHDIVLKVDEEL

SEQ ID NO: 9349 - protein, 116 aa, Glycine max
  unsure (1)..(116): unsure at all Xaa locations
LNECLLYSRYETCLSTDDAGPIAEKLXLTNLFWDXDLPRTREGFYTFKGSLXASHVIRRAFAPHAXVIWMETGRPNVIDCTQLSEGDMSXLPEMMLTYNLSTFFNXDAFVMSDEQM

SEQ ID NO: 9350 - protein, 135 aa, Zea mays
AINDTLLSHFQQIRTFIQTRTNLKVVDYSGAKRVMCIQSLRGKKGARLGYMIIRSVKEAQPRGKVKKGDVVYGVVVRVAMKKGRSDDSEVQFDDNEVVLVNKKGELIGIRVFGPVPHELRKKKHLKILALAEHIV

SEQ ID NO: 9351 - protein, 503 aa, Ralstonia eutropha JMP134
MEQSKAGTLIGAFAEFFPGATEIGSYVGGRLVAGTGQEIQLFDPATGEKSLSYRDAGPEIAQQACIAARDAQKTWWGLTHAARGRILYAVAAKVREHNEPLAVLESMSQGKPIRDSRREVEMVAEMFEFYAGWADKFYGHVIPVPTTHLNYTRREPYGTILHIAPWNIPILSFGWQVAPTVAVGNAVLLKPSELTPFTSLAVASLAEQAGVPVGLINVLAGYGHTTAQAAIADDVVKKVVFVGSPATGIRIAEAAAKRVIPCILELGGKSANIVFDDANLDLAAIGAQAAVFSGAGQSCTAGSRLLIQRKVYEQVVDKVAEGARKLRLGHPLEASTEIGPINNRNQYEHIKRMIARGVEEGAQLAAGTTSFGDGGYFVPPTLFAGVSNQMDIARMEVFGPVISAIPFETEEEAIAIANDNEFGLAGAVWTNDVARAHRVAAQVDAGTFWINGYRAIHVGSPFGGYKNSGYGRTSGIEALYEYTQTKSVWVQTASASVTAIGRA

SEQ ID NO: 9352 - protein, 149 aa, Candida albicans SC5314
MSEYSGSNSEDLSLPKATVQKIINEILPKDIGIAKEAREAITECSIEFIMMLSTQSNDIAEKEAKKTIASDHVVKALEELDFKIYLDIINKILDEHKELLKGKEKRNNKFQNSGLTEEELLRQQEELFKKSRARLQNQSGSLTAKPEPN

SEQ ID NO: 9353 - protein, 91 aa, Triticum aestivum
  unsure (1)..(91): unsure at all Xaa locations
MAPTVMASXATSVAPFQGLKSTAGLPVSRRSNGASLXXVSNGGRIRCMQVWPIEGIKKFETLPYLPPLSTXAXLKQVDYLIRSKWXPCLXF

SEQ ID NO: 9354 - protein, 474 aa, Pseudomonas putida KT2440
MQTQMLINGQLVAGQGPAWTVLNPALGTALAQINEATEAQVDSAVRAADQAFDSWSQTSPKERSQALLALADAIEAHGDELARLESQNCGKPLSAALNDEIPAIADVFRFFAGAARCLGGSAAGEYLPGHTSMIRRDPLGVVASIAPWNYPLMMLAWKIAPALAAGNTVVIKPSELTPLTALRLGELAQDLLPPGVLNILFGRGQTVGNPLITHPKVRMVSLTGSIPTGAHIISATADSVKRMHMELGGKAPVLVFDDADIDAAIDGIRTFGFYNAGQDCTAACRLYVQDGIYERFVERLGKAVASLKPGLQESEETELGPLISAQHRDKVAGLVQRAIAQPHIRLVTGGKPIAGDGFFFEPTVLADALQDDEIVRNEVFGPVVSVTRFTDEAQALEWANDSNYGLASSVWTRDTGRAHRLAARLQYGCTWVNTHFMLVSEMPHGGQKHSGYGKDMSMYGLEDYTCVRHVMIKH

SEQ ID NO: 9355 - protein, 164 aa, Glycine max
HMHVNDAVDYLKSACEGKYDAIIVDSSDPVGPAQELVEKPFFDTIARALRPGGVLCNMAESMWLHTHLIQDMISICRETFKGSVCYAWASVPTYPSGVIGFLLCATEGPPVDFVNPINPIEKLEGANEHKRELRFYNSEMHSAAFALPAFLKREVSVLRDLSLQ

SEQ ID NO: 9356 - protein, 378 aa, Phanerochaete chrysosporium
MAFKSLIAFVALAAAVRAAPTAVCPDGTRVSHAACCAFIPLAQDLQETIFQNECGEDAHEVIRLTFHDAIAISRLQGPKAGGGADGSMLLFPTVEPNFSANNGIDDSVNNLIPFMQKHNTISAADLVQFAGAVALSNCPGAPRLEFLAGRPNKTIAAVDGLIPEPQDSVTKILQRFEDAGGFTPFEVVSLLASHSVARADKVDQTIDAAPFDSTPFTFDTQVFLEVLLKGVGFPGSANNTGEVASPLPLGSGSDTGEMRLQSDFALAHDPRTACIWQGFVNEQAFMAASFRAAMSKLAVLGHNRNSLIDCSDVVPVPKPATGQPAMFPASTGPQDLELSCPSERFPTLTTQPGASQSLIAHCPDGSMSCPGVQFNGPA

SEQ ID NO: 9357 - protein, 351 aa, Gordonia sp. TY-5
MKALVFHGPGQKAWEDVPDPKLSEPTDVIVKMDTTTICGTDLHILKGDVPAVTPGRILGHEGVGTITEVGDAVTTLAVGDQVILSCISSCGKCSFCKQGVYSHCLGSEGTSGIGWIFGHLIDGTQAEYVRVPYAENSVHKLPSAVSPEQGTLLSDILPTGHEIGVRHGAVKPGDVVAVIGTGPVGLAAIATAGLYGPSRVIAVDIDANRVEQARRFGATDGVVSTSSGWREEILAMTDGLGVDVAIEAVGIPDTFQMCLDIVRPAGHVANVGVHGKPVELPIQDLWISNIVMSMGLVNTNTLGTLLKLVAQRRIDPEPFISHRFGLGEIIDAYDVFSRAAETKALKVIMSA

SEQ ID NO: 9358 - protein, 166 aa, Bordetella bronchiseptica RB50
MNTMYDFSAPTITGAERALADFRGQVALVVNVASRCGFTPQYSGLEELYRSYRNEGFVVLGFPCNQFGRQEPDDEAAIAQFCETQYAISFPLFAKIDVNGAHAHPLYRWLKARKPGLLGTRAIKWNFTKFLVGRDGLPLRRYAPAHTPESLRHDIARACAAPGPTP

SEQ ID NO: 9359 - protein, 389 aa, Triticum aestivum
  unsure (1)..(389): unsure at all Xaa locations
SVLYDHDLESCSLFDKNGLAVPMETAAKVGVIFEKILKETVKLRDEQEHDMPLEQAISMVLERHPDLKLEGLDDRILQWCVCRLEAWFAADADEISLKNWDQEHVLTGGHGLMVDGYLPVIQALAXGLDIRLNQRVKNIXRQRRGVPVTLEGWHPITRADAGIIXTVPLGVLKAXNIIKFEPEAXHSWKSSPIRRTLVSGIANKVPMHFDXAFWPNVQVLGMVGPTAXTCGYFLNLHSAXGHPVLVFMAAGRFAQDVEKLSDKEAVELVMCHLRKMIPDATEPNKYLVSRWGSDPNSLGSYSCDLVGKPSDVCERFSAPVESVLYFAGEAASAEHSGAVHGAYSSGMEAAEECRRRLLMSKGVPDLVQVAGAACEEMADVVAPLQICRT

SEQ ID NO: 9360 - protein, 456 aa, Streptococcus pyogenes SSI-1
MAYQTIYPYTNEVLHTFDNMTDQDLADVLERAHLLYKKWRKEDHLEERKAQLHQVANILRRDRDKYAEIMTKDMGKLFTEAQGEVDLCADIADYYADKADEFLMSMPLETDSGQAYYLKQSTGVILAIEPWNFPYYQIMRVFAPNFIVGNPMVLKHASICPRSAQSFEELVLEAGAEAGSITNLFISYDQVSQVIADKRVVGVCLTGSERGGASIAEEAGKNLKKTTLELGGDDAFIILDDADWDQLEKVLYFSRLYNAGQVCTSSKRFIVLDKDYDRFKELLTKVFKTAKWGDPMDPETTLAPLSSDQAKEDVLAQIKLALDNGAELVYGGEAIDHPGHFVMPTIIAGLTKDNPIYYQEIFGPVGEIYKVSSEEEAIEVANDSNYGLGGTIFSSNQEHAKAVAAKIETGMSFINSGWTSLPELPFGGIKHSGYGRELSELGFTSFVNEHLIYYSE

SEQ ID NO: 9361 - protein, 507 aa, Gordonia sp. TY-5
MTVYAKPGTEGSVMSFESRYDNWIGGQWTPPVKGQYFENPSPVDGKTFCEVARSTAEDIDLALDAAHKAAPQWGKTSVAERSLVLLRIADRLEENLEKIAVAETWDNGKAVRETLAADIPLAVDHFRYFAGALRAQEGSISEVDEDTVAYHFHEPLGVVGQIIPWNFPILMAVWKLAPALAAGNAVVLKPAEQTPASILYVMSLIADLLPAGVINIVNGFGVEAGKPLASSNRIRKIAFTGETTTGRLIMQYASENLIPVTLELGGKSPNIFFNDVMSADDGFLDRALEGFSMFALNQGEVCTCPSRALIQEDIYDDFIGKAVDRVSKIKQGNPLDTDTMMGAQASNDQFEKISSYLAIGKEEGAKVLIGGEPADLGGDLSGGYYIKPTVFDGHNKMRIFQEEIFGPVLAVTTFKDYADAIHIANDTLYGLGAGVWSRDGATAYRAGREIQAGRVWTNTYHDYPAHAAFGGYKQSGIGRETHLMMLEHYQQTKNLLVGYAQSAKGFF

SEQ ID NO: 9362 - protein, 581 aa, Glycine max
  unsure (1)..(581): unsure at all Xaa locations
MCGILAVLGCSDSSQAKRVRVLELSRRLKHRGPDWSGLHQYGDNYLAHQRLAIVDPASGDQPLFNEDKTVVVTVNGEIYNHEELRKQLPNHTFRTGSDCDVIAHLYEEHGENFVDMLDGIFSFALLDTRDNSFIVARDAIGVTSLYIGWGLDGSVWISSELKGLNDDCEHFESFPPGHLYSSKERAFRRWYNPPWFSEAIPSAPYDPLALRHAFEKAVVKRLMTDVPFGVLLSGGLDSSLVAAVTARYLAGTNAAKQWGTKLHSFCVGLEGAPDLKAAKEVADYIGTVHHEFHYTVQDGIDAIEDVIYHIETYDVTTIRASIPMFLMSRKIKSLGVKWVISGEGSDEIFGGYLYFHKAPNKDEFHQETCRKIKALHKYDCLRANKSTFAWGLEARVPFLDKDFIRVAMNIDPEYKMIKKEEGRIEKWVLRRAFDDEEHPYLPKHILYRQKEQFSDGVGYGWIDGLKAHAEKHVTDRMMLNXAANIFPFNTPTTKEAYYYRMIFERFFPQNSARXLSVPGGPSVACSTAKAVEWDAAWSNNLDPSGRAALGVHASAYGNQVKAVEPEKIIPKMEVSPLGVAI

SEQ ID NO: 9363 - protein, 170 aa, Zea mays
MYPYTFRAAASSSSSTALGFALGRIGGTTRSGGVAAPGLVVPAAGVARGRSVSSTPAGSAPVPGDQGVGMDQPKQQQQPKVPPRDAAGGENKRDDMHKHTRDVMTHSFGEGYSTRSDEEGFGGVYGGNDPVEHPGAEIHPSHSEYDTSQGSEVKEKEKARHLKDEKHATA

SEQ ID NO: 9364 - protein, 426 aa, Leptospira interrogans serovar Copenhageni str. Fiocruz L1-130
MSEFIEIKVGEKSYQFPLISGTDGKKGIDIRELHQKTGLISYDPGFFNTAYAVSRISRRDPNSGELNYRGYDIADLVQHSTFVETSYLLIYGKLPTEQQLKDFSLKLSKHSLIHEDMINLFDGFPGKGHPLAVLSVMVTSLSSYYPEEYEESLDKGIDHSARLLAKIRTIAAFSYKKIVGQPFVYPLDKHPYCTNFLYMLFSIPSKDYIPTEDIDRILNQLWILYADHEQNVSNTTVQVIGSTQANLFASISSAINALWGSREGGRQVAAVGLIEDILKSRKSVPEYFEKFKGDSEKLFGNGFGHKAYEAKSRRAIIASKLFHDFYKKNPIGPIAEVALKIEEYMQNDEYYINQNLYPNLEFYSAVIFNSLGIPKELFTAMQVIGKLPGWLAHWREQRVSGNYSKARPKQIYSGEMGRKYIPLSER

SEQ ID NO: 9365 - protein, 251 aa, Brassica oleracea var. italica
MGRGRVEMKRIENKINRQVTFSKRRAGLLKKAHEISILCDAEVSLIVFSHKGKLFEYSSESCMEKVLEHYERYSYAEKQLKVPDSHVNAQTNWSVEYSRLKAKIELLERNQRHYLGEDLESISIKELQNLEQQLDTSLKHIRSRKNQLMHESLNHLQRKEKEILEENSMLAKQIRERESILRTHQNQSEQQNRSHHVAPQPQPQLNPYMASSPFLNMGGMYQGEYPTAVRRNRLDLTLEPIYNCNLGYFAA

SEQ ID NO: 9366 - protein, 437 aa, Brucella melitensis 16M
MDMKGKTMSDKTASFTLDGKTFDLPVRKGTVGPDVVDIGPLYKNSHAFTYDPGFTSTASCESKITYIDGDEGVLLYRGYPIDQLAEHGDFLETCYLLLYGELPTATQKADFDYRVTRHTMLHEQMTKFFTGFRRDAHPMAVMVGCLGAMSAFYHDSTDITDPHQRMVASIRLIAKVPTLAAMAYKYHIGQPFVYPKNDLDFASNFLHMCFTVPCEEYKVNPVLARAMDRIFILHADHEQNASTSTVRLAGSSGANPFACIAAGVACLWGPAHGGANEAALNMLSEIGSVDRIPEYIARAKDKNDPFRLMGFGHRVYKNYDPRAKIMQKTCHEVLGELGIKDDPLLDVAMELERIALTDEYFIEKKLYPNIDFYSGITLKALGFPTEMFTVLFALARTVGWVAQWKEMIEDPQQKIGRPRQLYTGATERDYVPLAKRK

SEQ ID NO: 9367 - protein, 217 aa, Chelidonium majus
  unsure (1)..(217): unsure at all Xaa locations
VKKAHEISVLCDAEVGLIVFSTKGKLFEFSSESSMDNILERYERQCFVEEELKATHPESEGNWSLEHTKLKARIEILQKNQRHFMGEDLDPLSLKELQNLEHQLDIALKHVRSRKNQLLYASIAELRKKEKALHEQNILLGKKIKQKEEQIAQWSAQQNDAQNSSSFLTQAPQNSQSFLTQALPSLTLRTGYYQTARVVVCEEDGARSNMXMPPWML

SEQ ID NO: 9368 - protein, 404 aa, Brassica rapa
MGICMSVQVKAESPSNTGASPKYMSSEANDTQSMGSKCSSVSVRTSPRTEGEILQSPNLKCFSFAELKAATRNFRLDSVLGEGGFGCVFKGWIDEESLTASKPGTGMVIAVKRLNIEGWQGHQEWLAEVNYLGRLSHPNLVKLIGYCLEDEHHLLVYEFMPCGSLENHLFRRGSYFEPLSWNIRLKIALGCAKGLAFLHSAETQVIYRDFKTSNILLDSNYNAKLSDFGLAKDGPTGDNSHVSTRVIGTYGYVDPGYLLNGHLTTKSDVYSYGVVLLEMLSGRKVVDNNRPPREQKLVDWAKPLLANKKKVSRVIDNRIRDQISVKEAHKVATQVFRCLDVDKNQRPNMNEIVFHLENIQASREEGGNKTEKRMRRRRDSFAQQTGVGGIATAYPRPSASPLFV

SEQ ID NO: 9369 - protein, 111 aa, Rubrivivax gelatinosus PM1
MSVMELNELVKAIEEKFGVSAAAMAAPAAGGGGGAAAAVEEKTEFNVVLLEAGANKVSVIKAVRELTGLGLKEAKDLVDGAPKNVKEAVAKADAEAAVKKLVEAGAKAELK

SEQ ID NO: 9370 - protein, 115 aa, Hordeum vulgare subsp. vulgare
MARAAATQLVLVAMVAAMLIVATDAAISCGQVSSALSPCISYARGNGAKPPVACCSGVKRLAGAAQSTADKQAACKCIKSAAGGLNAGKAAGIPSMCGVSVPYAISASVDCSKIR

SEQ ID NO: 9371 - protein, 197 aa, Brassica napus
MSASRFVKCVTVGDGAVGKTCLLISYTSNTFPTDYVPTVFDNFSANVVVNGATVNLGLWDTAGQEDYNRLRPLSYRGADVFILAFSLISKASYENVSKKWIPELKHYAPGVPIILVGSKLDLRDDKQFFVDHPGAVAITTAQGEELRKLIDAPTYIECSSKSQENVKAVFDAAIRVVLQPPKQKKKKSKAQKACSIQ

SEQ ID NO: 9372 - protein, 251 aa, Brassica napus
  unsure (1)..(251): unsure at all Xaa locations
GTASVVXAALIGALRFVGGSLANHRFLFLGAGEAGTGIAELIALEISKKCQIPLEEARKNIWLVDSKGLIVSSRKESIQHFKKPWAHDHKPIKELVDAVKAIKPTVLIGTSGVGQTFTQEVVETMAELNEKPIILSLSNPTSQSECTAEQAYTWSKGRAIFASGSPFAPVEYEGKTFVPGQANNAYIFPGFGLGLIMSGTIRVPDDMLLPASHAFPPHPTDPPYEKGMIFPPFRNIRKISARIAAKVAAKA

SEQ ID NO: 9373 - protein, 188 aa, Eucalyptus camaldulensis
MAFAGTTQKCMACEKTVYLVDKLTADNRIYHKACFRCHHCKGTLKLGNYNSFEGVLYCRPHFDQLFKRTGSLEKSFEGTPKIAKPEKPVDGERPAATKASSMFGGTRDKCVGCKSTVYPTEKVTVNGTPYHKSCFKCTHGGCVISPSNYVAHEGKLYCRHHHTQLIKEKGNLSQLEGDHERETMAPES

SEQ ID NO: 9374 - protein, 229 aa, Corylopsis sinensis
VQLKRMENKINRQVTFSKRRAGLLKKANEISVLCDAEVGLIVFSTKGKLYDMERIFDRYERYSYAERQLVVTNHESQGSWTIEHAKLKARMEVLQRNQRHFMGENLDSVSLKELQNLEHQLDNALKHIRSRKNLLMQESISELQRKDKSLQEENNSLSKKIKEKENALAHRAQWEQQNQGLNSFPILLSQPPQSLNIGTYQTGCSEGEEGTPFQQRPNTLLPHWMVSHL

SEQ ID NO: 9375 - protein, 365 aa, Populus kitakamiensis
MGSTGETQMTPTQVSDEEAHLFAMQLASASVLPMILKTAIELDLLEIMAKAGPGAFLSTSEIASHLPTKNPDAPVMLDRILRLLASYSILTCSLKDLPDGKVERLYGLAPVCKFLTKNEDGVSVSPLCLMNQDKVLMESWYYLKDAILEGGIPFNKAYGMTAFEYHGTDPRFNKVFNKGMSDHSTITMKKILETYKGFEGLTSLVDVGGGTGAVVNTIVSKYPSIKGINFDLPHVIEDAPSYPGVEHVGGDMFVSVPNADAVFMKWICHDWSDAHCLKFLKNCYDALPENGKVILVECILPVAPDTSLATKGVVHVDVIMLAHNPGGKERTEKEFEGLANGAGFQGFEVMCCAFNTHVIEFRKKA

SEQ ID NO: 9376 - protein, 364 aa, Populus kitakamiensis
MGSTGETQMSPAQILDEEANFAMQLISSSVLPMVLKTAIELDLLEIMAKAGPGALLSPSDIASHLPTKNPDAPVMLDRILRLLASYSILICSLRDLPDGKVERLYGLASVCKFLTKNEDGVSVSPLCLMNQDKVLMESWYHLKDAILEGGIPFNKAYGMTAFEYHGTDPRFNKVFNKGMSDHSKMAMKKILESYKGFEGLASLVDVGGGTGAVVSTIVSKYPSIKGINFDLPHVIADAPAFPGVENVGGDMFVSVPKADAVFMKWICHDWSDEHCLRLLKNCYDALPENGKVILVECILPVAPDTSLATKGVMHVDAIMLAHNPGGKERTDKEFEGLARGAGFKGFEVMCCAFNTHVIEFRKQA

SEQ ID NO: 9377 - protein, 222 aa, Brassica rapa subsp. pekinensis
MAAPPARARADYDYLIKLLLIGDSGVGKSCLLLRFSDGSFTTSFITTIGIDFKIRTIELDGKRIKLQIWDTAGQERFRTITTAYYRGAMGILLVYDVTDESSFNNIRNWIRNIEQHASDNVNKILVGNKADMDESKRAVPTAKGQALADEYGIKFFETSAKTNLNVEEVFFSIGRDIKQRLSDTDSRAEPATIRISQTDQELDCAGHTEVCMLWKLKTNYIN

SEQ ID NO: 9378 - protein, 1102 aa, Schizosaccharomyces pombe
MPQSQVATASPSQNAQPNHGMGSKVLSSDPNASLPPQTAYYASPLHANSVSLPPSHLPRSTLHPLLSQQQQPAQQSPSLGPAQQNIQQPPSVSIASQPHYAEAIVPIQQVLQPQQYRQLPPNMVAATNAPQQHPQLQRMMPILSSNQPIQQLPLPNQASPYIPVPLQQQQQSQPQQQPQQQQHQQPQQPQPPQQPLQQQQQQRQLHSGIQQPVSTIVSQNGTYYSIPAVNHPMAGQPIAIAPVPAPNQAALPPIPPQALPANGTPNTLASPVTLPAANSAVQNAQPVPMTSSPAMAVVPQNKTAATSTLAAQQGANVLPPNAPESVRHLISLNEETWIQIGRLAELFDDQDKALSAYESALRQNPYSIPAMLQIATILRNREQFPLAIEYYQTILDCDPKQGEIWSALGHCYLMQDDLSRAYSAYRQALYHLKDPKDPKLWYGIGILYDRYGSHEHAEEAFMQCLRMDPNFEKVNEIYFRLGIIYKQQHKFAQSLELFRHILDNPPKPLTVLDIYFQIGHVYEQRKEYKLAKEAYERVLAETPNHAKVLQQLGWLCHQQSSSFTNQDLAIQYLTKSLEADDTDAQSWYLIGRCYVAQQKYNKAYEAYQQAVYRDGRNPTFWCSIGVLYYQINQYQDALDAYSRAIRLNPYISEVWYDLGTLYESCHNQISDALDAYQRAAELDPTNPHIKARLQLLRGPNNEQHKIVNAPPSNVPNVQTAKYINQPGVPYSNVPVAQLSGNWQPPHLPQAQLPSATGQSGVVQQPYQTQPSVTNNNVATQPVIASTVPVQTAAPSSQTAVPQTIHQSNAFTPRGKHASGSRNSISSTKSPQHKLSDQPRSRNNSISNVSHRERSNSVSSKSRETRTSASNESDPKKSTQRDSSKKLENSTVVSGSPSSSSKSDAAKSIKPQKPEPALKPVEGTADPKSTKRNHQETEKTADTDVSSTEPVKRQKTADVNDDVGEEEVKQSVSEQVDSAQLTSEPKSESLPKSPEEKSDDTSNDVTTENTNDINGDSNMDNVATVDKSTDAVDTSTATVAATTTTAEEELPQKESQERSSPSPENQDSTPLAPKSVSPKQAARTLDIDENYDDDEGEKETVSV

SEQ ID NO: 9379 - protein, 287 aa, Salmonella enterica subsp. enterica serovar Typhi Ty2
MKSIVIEKPNTLTIETRALLQPASGEVRIKVKLAGICGSDSHIYRGHNPFAKYPRVIGHEFFGVIDAVGDNVNRDRIGERVSVDPVISCGHCYPCSVGKPNVCTSLVVLGVHRDGGFSEYAVAPARNAHRIPDNIADHHAVMVEPFTIAANVTGQVNPTEQDVALIYGAGPMGLTTVQALKGVYQVKTVIVVDRIEESPAARIVLMGFSSDPCEIVQQGITGKELAIYSSRLNANKFPVVIDWLNKGLIDPDKLITHTFDYQHVTDAIELFEKDQRQCCKVLLTFAK

SEQ ID NO: 9380 - protein, 425 aa, Streptococcus pyogenes
MLTSKHHNLNKLVWRYGLTSAAAVLLAFGGGASSVKAEVSTAAMTKEERQQEIEKIKEDIKKEYPKASEEKFWESSFWGRRYFNEQEYLKSLQSFTEQRLQDIVNLIEKGATKGDKGDAGPKGERGPAGPQGPVGPKGEAGKVGAQGPKGDPGAPGKDGAKGEKGDKGDTGERGEKGDIGATGAQGPQGEKGETGAQGPAGPQGEAGKPGEQGPAGPQGEAGKPGEKAPEKSPEGEAGQPGEKAPEKSPEVTPTPETPEQPGEKAPEKSPEVTPTPETPEQPGEKAPEKSPEVTPTPETPEQPGEKAPEKSPEVTPTPEMPEQPGEKAPEKSPEVTPTPEMPEQPGEKAPEKSKEVTPAPEKPADKEANQTPERRNGNMAKTPVANNHRRLPATGEQANPFFTAAAVAVMTTAGVLAVTKRKENN

SEQ ID NO: 9381 - protein, 155 aa, Ipomoea nil
MDLRLMGFDHPLFHHIMDYAGDDKSSNSSAPSRTFMLDAKAMAATPADVKEYPNSYVFIIDMPGLKSGDIKVQVDGDNVLSISGERKREAEEKEGAKYVRMERRVGKLMRKFVLPENANKEKITAVCQDGVLTVTVENVPPPEPKKPRTIEVKIG

SEQ ID NO: 9382 - protein, 482 aa, Triticum aestivum
  unsure (1)..(482): unsure at all Xaa locations
MASPFSAPSLIMEEEGRFEAEVAEVGAWWNTERFRLTKRPYTARDVVLLRGTLRQSYASGEMAKKLWRTLKAHQAGGTASRTFGALDPVQVTMMAKHLDTIYVSGWQCSSTHTSTNEPGPDLADYPYDTVPNKVEHLFFAQQYHDRKQQEARMSLPRAERAHAPFVDFLKPIIADGDTGFGGATATVKLCKLFVERGAAGVHLEDQVVGXTKKCGHMAGKVLVAVSEHVNRLVAARLQFDIMGVETVLVARTDAVAATLIQTNIDARDHQFILGATNPRLKNRSLTAMLSDAMSAGKNGRELQAIEDEWTATAQLKTFSECVKDAIARLNSTDLDKQRKLQEWSKATSYDKCVSHEQARDIAASLGVGSVFWDWDLPRTREGFYRFQGSVASAVVRGRAFAPHADVLWMETSSPNIXECTAFAEGVRAAFPEAVLDPXLSPSFNWDASGMTDADMAGFIPHVAKLGVSLEFINGPGFEPAWS

SEQ ID NO: 9383 - protein, 431 aa, Picrophilus torridus DSM 9790
MNLFIFRRDLRLYDNTALLKSLNNETATIFIMDPAQVKNNEYRSEKALNFMISSLYDLMTDIEGNHGKLAVFHGDPVDVLKRLVNRENINEIYINRDYTPFSIKRDERIKEFSIKNNIKFNALDDYFLSDPELRTGSGSFFKNFTAFYNRAMEINVKKPVYEIKKSNLIPIDGDDMELKYNNYGRKTAIEKMHNFIKNDYSLRDFPELNMTSFLSADIKFGNISIREAYHYIKDPEFRRQLYWRDFYLYIAYHFPYVFGSNFNRKYNIKWENKEKYIDAWKNGLTGYPIVDAAMRSLNETGYINNRLRMIVSSFLVKDLHVDWRIGEKYFAQKLIDYDPASNNGNWQWVASTGVNSRGMYRIINPWIQQKKFDPECKFIKRYVNELSDLEPEIIHNLYKIRLNNYPAPLVDHKTAVMEFRKLINQTPTYLS

SEQ ID NO: 9384 - protein, 384 aa, Ralstonia eutropha JMP134
MSEAQAIATPKPKKSVALSGVTAGNTALCTVGRTGNDLHYRGYDILDVADACEFEEIAHLLVHGKLPNKAELAAYKTKLKSLRGLPANVKAALECVPASAHPMDVMRTGVSVLGTVLPEKDDHNTPGARDIADQLMASLGSMLLYWYHYSHNGRRIEVETDDDTIGAHFLHLLHGKKPSALWERAMHTSLILYAEHEFNASTFTGRVIAGTGSDMHSAICGAIGALRGPKHGGANEVAFEIQKRYDTPDEAQADITRRVENKEVVIGFGHPVYTVADPRNQVIKETARNLSKDAGSMKMFDIAERLETVMWDIKKMFPNLDWFSAVSYHMMGVPTAMFTPLFVIARTSGWAAHIIEQRIDNKIIRPSANYTGPENLTFVPIEKR

SEQ ID NO: 9385 - protein, 365 aa, Rosa chinensis
MGSTGETQMTPTQVSDEEANLFAMQLASASVLPMVLKAAIELDLLEIMAKAGPGAFLSPNDLASQLPTKNPEAPVMLDRMLRLLASYSILTYSLRTLPDGKVERLYGLGPVCKFLTKNEDGVSIAALCLMNQDKVLVESWYHLKDAVLDGGIPFNKAYGMTAFDYHGTDPRFNKVFNKGMADHSTITMKKILETYKGFEGLTSIVDVGGGTGAVVNMIVSKYPSIKGINFDLPHVIEDAPQYPGVQHVGGDMFVSVPKGDAIFMKWICHDWSDEHCLKFLKNCYAALPDNGKVILGECILPVAPDTSLATKGVVHIDVVMLAHNPGGKERTEQEFEALAKGSGFQGIRVACNAFNTYVIEFLKKI

SEQ ID NO: 9386 - protein, 236 aa, Heuchera americana
VQLRRMENKINRQVTFSKRRGGLVKKAHEISVLCDVEVALIVFSNKGKLFEYSTDSCMEKILERYERYSYAERRLVATGSESQENWSLEYTKLKAKIELLQRSQRQFMGEDLDLLSLRELQNLEQQLDTALKHIRSRKNQLMNQSISDLQKKEKAIQEQNNLLAKKIKEKEKAMSQQAEWEQQNNGASTSNFLNPQPLPCLNISSTYQGGAQPEAMRRNELDLTLEPIYSCHLGCF

SEQ ID NO: 9387 - protein, 366 aa, Bacillus cereus ATCC 14579
MPKHRKQSKIKIYRITSYKKDKRSELDSDKFELEQQDKHDIQDKQDKQDEQNKQDKQVQSENVTIVPTDSHSLDVWDEISLKEIQAGEHTSLFEEKSNYQNINLVQVNDVRLYLDKQLQFSSVDEQIYHEALVHPIMAKVIDPKRVLILGGGDGLALREVLKYETVLHVDLVDLDEAMINMARNVPEIVSLNKNAFFDNRVNVHVCDAKEFLNSPSSLYDVIIIDFPDPATELLSTLYTSELFARIATFLTEDGAFVCQSNSPADAPLVYWSIGNTIEHAGLTVKSYHTIVPSFGTDWGFHLATNSAHVLDQIEQLYVVPTPRTLPALLFPLFQFKEEHLEQRNLALLNSESNLILHQCYKQEMKF

SEQ ID NO: 9388 - protein, 348 aa, Rosa hybrid cultivar
NQKWSNGEHSNELLHAQAHIWNHIFSFINSMSLKSAIQLGIPDIINKYGYPMTLSELTSALPIHPTKSHSVYRLMRILVHSGFFAKKKLSKTDEEGYTLTDASQLLLKDHPLSLTPYLTAMLDPVLTNPWNYLSTWFQNDDPTPFDTAHGMTFWDYGNHQPSIAHLFNDAMASDARLVTSVIIDDCKGVFEGLESLVDVGGGTGTMAKAIADAFPHIECTVLDLPHVVADLQGSKNLKYTGGDMFEAVPPADTVLLKWILHDWNDQECIKILKRSRVAITSKDKKGKVIIIDMMMENQKGDEESIETQLFFDMLMMALVGGKERNEKEWAKLFTDAGFSDYKITPILG

SEQ ID NO: 9389 - protein, 354 aa, Zinnia elegans
MGSNQDDQAFLFAMQLASASVLPMVLKTAIELDLLETIAKAGPHGSVSSSELVAQLPKVNNPEAPVMIDRICSLLASYSVLTCTLKETADGCAERFYGLAPVCKFLIKNDAGVSLAPLLLMNQDKVLMESWYYLKDPVLDGGIPFNKAYGMSAFEYHGKDQRFNKVFNSGMFNHSTMTMKKIVELYNGFSGLKTLVDVGGGTGASLNMITSKHKSLKGINFDLPHVIADATTYQGIEHVGGDMFESVPKGDAIFMKWILHDWSDAHCLQVLKNCYKSLPENGKVIVAECILPEAPDTTPATQNVIHIDVIMLAHNPGGKERTEKEFEALAKGAGFKGFNKAACALNTWVMEFCK

SEQ ID NO: 9390 - protein, 477 aa, Azotobacter vinelandii
MSSSVPVHRNYIDGAFVESAAHLEVFNPANGALLSRVPAASAEEVERALAAARAAQKDWARKPAIERAGHLRRIAAKIRADAGRIARTITLEQGKIASLAEVEVNFTADYLDYMAEWARRLEGEIIASDRPGENIFLFRKPLGVVAGILPWNFPFFLIARKMAPALLTGNTIVVKPSEETPNNCFEFARLVAETDLPRGVFNVVCGAGQVGGALSSHPGVDLISFTGSVETGARIMAAAAPNLTKLNLELGGKAPAIVLADADLELAVKAIRDSRIINSGQVCNCAERVYVQRQVAEPFIERIAAAMAATRYGDPLAEPEVEMGPLINRLGLEKIDAKVRTALAQGATLVTGGAIAERPGHHYQPTVLTGCRADTRIMREEIFGPVLPIQIVDDLDEAIALANDCEYGLTSSVFTRDLNKAMHALRELDFGETYINREHFEAMQGFHAGVRKSGIGGADGKHGLYEYTHTHVVYLQS

SEQ ID NO: 9391 - protein, 361 aa, Glycine max
  unsure (1)..(361): unsure at all Xaa locations
WRSVKPLALIRPSAAADVARVVKHAAASSSRTVAARGNGHSINGQAMAEQGLVLDMRAIQDPFEILSXDGSLYVDVSGGALWEDVLKRCVSEFRLAPRSWTDYLGLTVGGTLSNAGVSGQAFRYGPQTANVTELEVVSGKGETLVCSESQNSELFFATLGGLGQFGIITRARVPVQQAPDMVRWIRVVYTEFGDFTRDXEWLVTLREGDGFDYVEGFVFVNSDDPCNGWTTVPVGPNQYFDPVRIPSTAGPVLYCLELALHYRNQDHPSAVDMEVDRLLGRLRFVEGLKFSVDVTYMEFLLRVKRVEEDAKANGIWDAPHPWLNMFVSKSNIAEFDREVFKKILKHGVGGPILVYPLLRSK

SEQ ID NO: 9392 - protein, 348 aa, Rosa hybrid cultivar
NQKWSNGEHSNELLHAQAHIWNHIFSFINSMSLKSAIQLGIPDIINKHGYPMTLSELSSALPIHPTKSHSVYRLMRILVHSGFFAKKKLSKIDEEGYTLTDASQLLLKDHPLSLTPFLTAMLDPVLTKPWNYLSTWFQNDDPTPFDTTHGMTFWDYGNHQPNIAHLFNDAMASDARLVTSVIIDDCKGVFEGLESLVDVGGGTGTVAKAIADAFPHIECTVLDLPHVVGDLQGSKNLKYTGGDMFEAVPPADTVLLKWILHDWNDEECIKILKRSRVAITSKDKKGKVIIIDMMMENQKGDEESIETQLFLDMLMMALVGGKERNEKEWAKLFTDAGFSDYKITPILG

SEQ ID NO: 9393 - protein, 176 aa, Arabidopsis thaliana
MAESQTGGGGGGSHESGGDQSPRSLNVREQDRFLPIANISRIMKRGLPLNGKIAKDAKETMQECVSEFISFVTSEASDKCQREKRKTINGDDLLWAMATLGFEDYIDPLKVYLMRYREMEGDTKGSGKGGESSAKRDGQPSQVSQFSQVPQQGSFSQGPYGNSQGSNMMVQMPGTE

SEQ ID NO: 9394 - protein, 178 aa, Glycine tomentella
MASSMISSPAVTTVNRAGAGTVAPFTGLKSMAGFPTRKTNNDIASIASNGGRVQCMQVWPTTGKKKFETLSYLPDLDDAQLAKEVEYLLRKGWIPCLEFELEHGFVYRENHRSPGYYDGRYWTMWKLPVFGCTDASQVLKELQEAKTAYPNGFIRIIGFDNVRQVQCISFIAYKPPSF

SEQ ID NO: 9395 - protein, 178 aa, Glycine tabacina
MASSMISSPAVTTVNRAGAGTVAPFTGLKSMAGFPTRKTNNDIASIASNGGRVQCMQVWPTTGKKKFETLSYLPDLDDAQLAKEVEYLLRKGWIPCLEFELEHGFVYREHHRSPGYYDGRYWTMWKLPMFGCTDASQVLKELQEAKTAYPNAFIRIIGFDNVRQVQCISFIAYKPPSF

SEQ ID NO: 9396 - protein, 593 aa, Zea mays
GLPTPLPSASASASASASASSGGDSSLGSSTSDDQLDLGVYRLSETSSTLLGRTVAIESRKQSQVPAEGTIFTNNQAVEHTRLSETSVSPRKEFRPQNLDLANDRTTYCRGRRSTEIVFSTQVPTSPPSSRGHHYQNSPVPSRTFGQCPASPTSWQHDSRSSSSPQPLPLPPGSPCLPSSSLQWKKGKLLGSGTFGQVYMGFNSEGGQMCAIKEVKVISDDSNSKESLRQLNQEIVLLSQLSHPNIVQYYGSDLCNETLSVYLEYVSGGSIHKLLQEYGPFGEAVLRNYTAQILSGLAYLHGRNTVHRDIKGANILVDPNGDIKLADFGMAKHISAYTSIKSFKGSPYWMAPEVIMNSNGYSLSVDIWSLGCTILEMATAKPPWSQYEGVAAIFKIGNSKDIPDIPNNLSSEAKGFLKLCLQRDPAARPTAAQLMDHPFVKDQATVRSSRSSITRDMFPNSTDGKNSRVKIETSSYRSLSPLRDPDILGRNLPGPTSPIPSTSSRRIAALNTSNVRMNMSLPVSPCSSPLRQYRQSNRSCLRSPPHPAYSAGAANYNPINNALYPTRPSSGLTDPWLEISQVKTQTFDSPRRL

SEQ ID NO: 9397 - protein, 209 aa, Triticum aestivum
  unsure (1)..(209): unsure at all Xaa locations
MAAVPPPPPKLPTTRLLLSSEPGRSPPQPPTPPPSTRTGNLAMAAASSATSVHDFTVKDASGKDVDLSVYKGKVLLIVNVASQCGLTNSNYTELSQLYPKYKDQGFEILAFPCNXFGGQEPGTNDEIVXFACTRFKAXPIFDKVDVNGSNVSPLYKFLKSSKGGLFGDSIKWNFSKFLVDKEGHVVDRYAPTTSPLSMEKDIKKLLGSS

SEQ ID NO: 9398 - protein, 495 aa, Chromobacterium violaceum ATCC 12472
MARSHAEWKQLAAELKIEGRAFINGEYRDAAEGKRFDCVNPANGAKLAEIAHCGEAEVEAAVKAARRAFESGVWSELAPLKRAAVLKRFAALIREHADELSLLETLDVGKPIGDTTAVDVPASAYCVEWFAEAIDKVGGEVVPVDPKLVGLVTREPIGVVAAVVPWNFPILMASWKFGPALAAGNAVIVKPSEKSPLTAIRIAALAKQAGIPDGIFQVLPGAGDVGRLLALHMDVDCVAFTGSTNVGKLIAGYAAQSNLKRAWLELGGKSPNIILPDCPDLARAARAAASGIFYNMGEVCTAGSRVLVHKDIKERFLEEFKKAAAGFFPGDPLDPATSMGAIVDDIQYRKVLNYIDKGLSEGANLLLGGKAVHTDKGLFIEPTAFDCPSDDLTICREEIFGPVLSVITFSELDDAIRIANDTSYGLAAAVWTSNVSTAHQVSRRLRAGTVWVNCYDEGGDMNFPFGGYKQSGNGRDKSLHALEKYTELKSTLIKL

SEQ ID NO: 9399 - protein, 401 aa, Chlorobium tepidum TLS
MKKIGILTSGGDCGGLNAVIKGAALMALNKGLELYVIPNGYAGLYNLLNQDRLVRLDEARLDQFQASFAGSEAGHSRVKIKAISNPDKYNRIKVGMKKFDLDALIISGGDDSGSVMIDLNHNGIQCIHCPKTMDLDLQTYSVGGDSTINRIAQFVEDLKTTGRTHNRVLVTEVFGRYAGHTAFRSGVAAEADCILIPEIPVDWDVVYEHIVERFTRRIRQSDVHSGTYTIVVAEGMKNADGTDIVDESAGIDAFGHKKLAGAGKYVCQEIKKRFKTDPRMPQFMKDTGMFVEGIYEIPEVREVHPGHLVRAGHSSAYDINFGFEAGAAAVLLLLEGKTGVTISKVKGRKIEYIEASKAIEQRYVDLDQVAMYESIGTCFGRTPAAYEPILREVDGVYERIY

SEQ ID NO: 9400 - protein, 502 aa, Leymus chinensis
SAIPRRGLFIGGGWREPTLGRRIPVINPATEDTIGDIPAATVEDVELAVAAARSAFLLDGGSRWSRASGATRAKYLNAIAAKIKEKISYLALLETVDSGKPKDEAVADMDDVAACFEYYAGLAEALDGKQHAPISLPMEEFKTYVLKEPIGVVGLITPWNYPLLMATWKVAPALAAGCTAVLKPSELASLTCLELGAICEEIGLPSGVLNIITGLGADAGAPIASHPHVDKIAFTGSTATSKTIMTAAAQMVKPVSLELGGKSPLVIFDDVADIDKAVEWAMFGCFFNGGQVCSATSRLLLREKIAERFLDRLVEWAKNIKISDPLEEGCRLGSVVSKGQYEKIKKFISTARSEGATILHGGDRPKHLGKGFFIEPTIITDVSTSMQIWREEVFGPVICVKVFKTESEAIELANDTHYGLAGGVISDDLERCERIAKVIHSGIVWINCSQPTLVQAPWGGNKQSGFGRELGEWGLENYLSVKQVTRYCKDELYGWYQRPSKL

SEQ ID NO: 9401 - protein, 455 aa, GIBBERELLA ZEAE PH-1
MDDLHLAPEPHLMHRSLLTRPEAVSSASGVYLNLSSGRKILDGCAGAAVAIIGHGSTEVQDAVVAQASQVSYVHTLTYTTSSAEELADHLLENEPFGLTRAYLVCSGSEAMDSAMKLARQYHVENGQPERTRFVSRRQAYHGNTVGAMSVGSHLARRAPYEGAILLDNVSHVSAAYEYRTKKDGETEEEYSKRLVDELEAEFLSVGPEKIMAFIAETVGGATAGCITPPAGYFSGVSKVCKKYGILLILDEIMCGVGRCGTFFAFEQDGDVQPDMVTIGKGLGGGYMPIAATLVHKGIIETLKKGTASFNHGHTYQAHPVSCAAALAIQKIIRRDNLVSRCATLGERLHKSLVETFKDAEFVGNIRGRGLFWGIEFVQDKKTKMPFDSKIRFGVKVQERAFELGLAVYPGMGTADGLVGDHVIVSPPLTITEEEMDVLVGLLKRAYDDVASKYGV

SEQ ID NO: 9402 - protein, 502 aa, Leymus chinensis
MASPAIPQRQLFIDGEWRAPALGRRLPVINPTTEASIGEIPSGTSEDVDAAVAAARAALKRNRGRDWSRAPGAVRAKYLRAIAAKMIERKADLARLEALDCGKPLDEAAWDMDDVAGCFEFFAGHAEALDKRQNAAVSLPENFKCHLKKEPIGVVSLITPWNYPLLMATWKVAPALAAGCTAVLKPSELASVTCLELADVCKEVGLPPGVLNVVTGLGPEAGAPLSSHPDVDKVAFTGSYATGQKIMVAAAPTVKAVTLELGGKSPIVVFDDVDIDKAVEWTLFGCFWTNGQICSATSRLLIHKNIAKEFVDRMVAWSKNIKVSDPLEEGCRLGPVVSEGQYEKIKKFISNAKSEGATILTGGVRPKHMEKGFFIEPTIITDINTSMEIWREEVFGPVLCVKEFSTEEEAIELANDTHYGLAGAVISGDRERCQRLAEEIDAGCIWVNCSQPCFCQAPWGGNKRSGFGRELGEGGIDNYLSIKQVTEYTSDAPWGWYKAPAN

SEQ ID NO: 9403 - protein, 388 aa, Streptococcus pyogenes SSI-1
MKNQLGQLALEQAKTFGGKLEVQPKVDITNKHDLSIAYTPGVAGVSSAIAKDKTLAYDLTTKKNTVAVISDGTAVLGLGDIGPEAAMPVMEGKAALFKAFAGVDAIPIVLDTKDTEEIISIVKALAPTFGGINLEDISAPRCFEIEQRLIKECHIPVFHDDQHGTAIVVLAAIFNSLKLLQKSLDEVSIVVNGGGSAGLSITRKLLAAGATKVTVVDKFGIINEQEADQLAPHHLDIAKVTNREFKSGTLEDALEGADIFIGVSAPGVLKAEWISKMAARPVIFAMANPIPEIYPDEALEAGAYIVGTGRSDFPNQINNVLAFPGIFRGALDARAKTITVEMQIAAAKGIASLVPGDALSTTNIIPDAFKEGVAEIVAKSVRSVVLKS

SEQ ID NO: 9404 - protein, 391 aa, Streptococcus thermophilus
MAERILMTNGKLKVTDNPIIPFIEGDGVGRDIWKNAQAIFDKAVEAAYEGQRRIEWQEFLAGKKAFDKTGEWLPQETLEAIRESLVAIKGPLETPVGGGIRSLNVALRQELDLYACVRPVRYFEGVASPLKEPEKTDITIFRENTEDIYAGIEWEAGTVDVERVIAFFQTEMNVDKIRFPKSSSIGIKPISIEGSKRLIRSAIDYALKNNLKKVTLVHKGNIQKFTEGGFRKWGYEVAEEEYKEEMLAGRLEVNDIIADNFLQQILLNPEKFDVVALTNLNGDYASDALAAQVGGIGISPGANINYQTGHAIFEATHGTAPDIADQDRANPCSILLSGCMLLEYIGWSEAAELIISAIEKNFKSGIFTVDLAFGKRAYSTSGFSNQILSII

SEQ ID NO: 9405 - protein, 200 aa, Glycine max
MSGRVSGKVKWFNDQKGFGFISPDDGSDDLFVHQSQIKSDGFRSLAEGESVEFAIESESDGRAKAVDVTGPDGASVQGTRRGGDGGRSYGGGRGGGGGGYGGGGGYGGGGGYGGGGGYGGGGRGGGGGACYNCGESGHLARDCSGGGGGDRYGGGGGGRYGGGGGGRYGGGGGGGGGGGGSCYSCGESGHFARDCPSSAR

SEQ ID NO: 9406 - protein, 349 aa, Streptococcus pyogenes SSI-1
MKAATYLSTGNLQLIDKPKPVIIKPTDAIVQLVKTTICGTDLHILGGDVPACKEGTILGHEGIGIVKEVGDAVTNFKIGDKVIISCVTSCHTCYYCKRGLSSHCEDGGWILGHLINGTQAEYVHIPHADGSLYHAPDTIDDEALVMLSDILPTSYEIGVLPSHVKPGDNVCIVGAGPVGLAALLTVQFFSPANIIMVDLSQNRLEAAKTFGATHTICSGSSEEVKTIIDDITNGRGVDISMECVGYPATFDICQKIISVGGHIANVGVHGKPVDFNLDELWIKNITLNTGLVNANTTEMLLNVLKTGKIDATRLITHHFKLSEVEKAYETFKHAGANNALKVIIDNDIS

SEQ ID NO: 9407 - protein, 310 aa, Malus x domestica
MSTVTLSSGYEMPVIGLGLWRLEKDELKEVILNAIKIGYRHFDCAAHYKSEADVGEALAEAFKTGLVKREELFITTKIWNSDHGHVVEACKNSLEKLQIDYLDLYLVHYPMPTKHNAIGKTASLLGEDKVLDIDVTISLQQTWEGMEKTVSLGLVRSIGLSNYELFLTRDCLAYSKIKPAVSQFETHPYFQRDSLVKFCMKHGVLPTAHTPLGGAAANKDMFGSVSPLDDPVLNDVAKKYGKSVAQICLRWGIQRKTAVIPKSSKIQRLKENLEVLEFQLSDEDMQLIYSIDRKYRTSLPSKTWGLDVYA

SEQ ID NO: 9408 - protein, 206 aa, Triticum aestivum
MGERVKGTVKWFNVTKGFGFISPDDGGEDLFVHQSSIKSDGYRSLNENDAVEFEIITGDDGRTKANDVTAPGGGALSGGSRPVEGGGDRGGRGGYGGGGGGYGGGGGGYGGGGGGYGGGGGGYRGGGYGGGGGGGRGCYKCGEEGHISRDCPPGGGGGYRGGGYGRGGRGGGGPECYQCGEEGHISRDWPQGGGGRRWLLKPWAAL

SEQ ID NO: 9409 - protein, 219 aa, Oryza sativa (japonica cultivar-group)
MPDSDNDSGGPSNYAGGELSSPREQDRFLPIANVSRIMKKALPANAKISKDAKETVQECVSEFISFITGEASDKCQREKRKTINGDDLLWAMTTLGFEDYVDPLKHYLHKFREIEGERAAASTTGAGTSAASTTPPQQQHTANAAGGYAGYAAPGAGPGGMMMMMGQPMYGSPPPPPQQQQQQHHHMAMGGRGGFGHHPGGGGGGSSSSSGHGRQNRGA

SEQ ID NO: 9410 - protein, 283 aa, Methanosarcina barkeri str. fusaro
MSNRLSKRNLNRGELMVSGKVSRKIAAKEELLLILPKIDRVLESEPAVLRIDAEPIMIIGDIHGDLQALEFIIEKRQEINCKNILFLGDYVDRGPQGVEVLTRVFRLKLEEPEHIFLLRGNHETVDMNLYYGFFEEIGFDQGFLLRTSRTYDKMPIAAVLSEHTFCVHGGINGTGSIDDIRKEEAFAFPYLWNDPSKHPGLTASTRGSTVKEFGPDIVDGFLQTNNLKRIIRGHTALENGYRWWFDGKLLSLFSCPDYVGLGNAAAFALFEKEEIKLFVFGKQ

SEQ ID NO: 9411 - protein, 439 aa, Nostoc sp. PCC 7120
MSSPQSLLIRGARIILPNGEFLVGDVLTRDRHIVEVGTEIVNTTPATEIDAKGLTLLPGVIDPQVHFREPGLEHKEDLFTASCACAKGGVTSFLEMPNTRPLTTTQQALDDKLQRAASKCLVNYGFFIGATGDNTPELLAAHPTPGIKIFMGSMHGQLLVDQEAALESIFAQGQRLIAVHAEDQARINQRRQEFAGIQDPAIHSQIQDNQAALLATQLALKLSKKYQRRLHILHMSTADEAELLRQDKPSWVTAEVTPQHLVMNTGDYQRIGTLAQMNPPLRSPHDNEVLWQALRDGVIDFIATDHAPHTLEEKAQPYPNSPSGMPGVETSLAVMLTAAMEGKCTIAQVANWMSKAVAVAYGIPNKGAIAPGYDADLVLVDLNTYRPVLREETLTKCHWSPFEGWNLTGWADTTIVGGQIVYHKGKLNTEVRGQALSFV

SEQ ID NO: 9412 - protein, 345 aa, Micromonospora echinospora
MQRQRPPSRAGGDMDRLQSALALYEEAMGYTYAAALRAAAAVGVADHLVDGPRTPAELAAATGTDADALRRVLRLLAVRDVVRESDGRFALTDKGAALRSDSPVPARAGILMFTDTMFWTMSHRVASALGPERPAFADIFGSSLDAYFDGDAEVEALYYEGMETVSAAEHLILARAGDFPATGTVADVGGGRGGFLLTVLREHPGLQGVLLDRAEVVARHRLDAPDVAGRWKVVEGDFLREVPHADVHVLKRILHNWGDEDSVRILTNCRRVMPAHGRVLVIDAVVPEGNDAHQSKEMDFMMLAARTGQERTAAELEPLFTAAGLRLDRVVGTSSVMSIAVGVPA

SEQ ID NO: 9413 - protein, 316 aa, Rhodococcus sp. YK2
MADSRTVRVYQKTWQAEGVVGVTLIDPNGAELPAWEPGAHISLHLRDGLVREYSLCSDPDDRRAWSVAVLRDPKSRGGSTYVHDELPVGALIEVSGPRNAFSLESDASRYVLVAGGIGITPILAMTRDLDKRGRNWSLIYTGRSRSTMAFLNELEAHPRDRVTVHADDEAGTVADIAALLADVDSETLVYCCGPEPLLEACRSALVDPSRLRLERFKAPTVDVEQGPQESFDVVVVSTGQRITVDANTSVLDALQSGGVDVESSCTEGICGTCEIGVVKGDIDHRDFVLTPAEQAGGTTMIACVSRCRSAELVLDL

SEQ ID NO: 9414 - protein, 403 aa, Psychrobacter sp. 273-4
MSHMINTDATILNHLPQSFQNTLPSAVADKIANLEAGSEMWLLPPLVDLCARLREPGQQQHGTLESEGRAARGNGFLHVVIPPDTNPILENGSLLKGLRERALDDGGIYLHVLGALTAGLEGERPSNIAGLKKGGCIAVSNARRPFRNDLVLLRTLEYAATFGMKVFFYPDEPSLSGDGVAHEGYIASYHGLQGIPWIAETVALSTQLLMVEETAIAAHFSQLSCKSSIELMRWAKDKGLPVTCDVAMHQLYLTDDNLEGFNAQAYVLPPLRSNTDQQAIRRGLKDGTIDAICSHHEPLNSTAKKAPFAESTPGISNFDTFMALACQLVKDEVLTLAQLVDKICLNPAKIAGISEQYENIGGAVLVDPNLEWQVTSESMLSNGKNTPFFNQKLQGRVVETFFG

SEQ ID NO: 9415 - protein, 373 aa, Rickettsia sp.
RVSAEADCFTYDPGFMSTASCQSTITYIDGDQGILRHRGYDIKDLAEKSDFLDVAYLLIYGELPSGEQYNNFTKQVAHHSLVNERLHYLFQTFCSSSHPMAIMLAAVGSLSAFYPDLLNFKEADYELTAIRMIAKIPTIAAMSYKYSIGQPFIYPDNSLDFTENFLHMMFATPCTKYKVNPIIKNALNKIFILHADHEQNASTSTVRIAGSSGANPFACISTGIASLWGPAHGGANEAVINMLKEIGSSEYIPKYIAKAKDKNDPFRLMGFGHRVYKNYDPRAAVLKETCKEVLKELGQLDNNPLLQIAIELEAIALKDEYFIERKLYPNVDFYSGIIYKAMGIPSQMFTVLFAIARTVGWMAQWKEMYEDPE

SEQ ID NO: 9416 - protein, 459 aa, Chromobacterium violaceum ATCC 12472
MQKQRTTSQWRELDAAHHLHPFTDTASLNQAGARVMTRGEGVYLWDSEGNKIIDGMAGLWCVNVGYGRKDFAEAARRQMEELPFYNTFFKTTHPAVVELSSLLAEVTPAGFDRVFYTNSGSESVDTMIRMVRRYWDVQGKPEKKTLIGRWNGYHGSTIGGASLGGMKYMHEQGDLPIPGMAHIEQPWWYKHGKDMTPDEFGVVAARWLEEKILEIGADKVAAFVGEPIQGAGGVIVPPATYWPEIERICRKYDVLLVADEVICGFGRTGEWFGHQHFGFQPDLFTAAKGLSSGYLPIGAVFVGKRVAEGLIAGGDFNHGFTYSGHPVCAAVAHANVAALRDEGIVQRVKDDIGPYMQKRWRETFSRFEHVDDVRGVGMVQAFTLVKNKAKRELFPDFGEIGTLCRDIFFRNNLIMRACGDHIVSAPPLVMTRAEVDEMLAVAERCLEEFEQTLKARGLA

SEQ ID NO: 9417 - protein, 541 aa, Glycine max
  unsure (1)..(541): unsure at all Xaa locations
MDISVSFSKTRPPPFSPSLCRQLSLRPNAPQLLRFSRNNGTFRRKPPPTISRPNKLAVTAIQISNLSENEDDFVLEDVPHLTDFLPNLPSYPNPLQKSQGYSIVKKTFVSPEDVVAENVVIQKGSPRGVHFRRTGPREKVYFKPEEVRACIVTCGGLCPGINTVIREIVCGLNNMYNVEDILGIEGGYKGFYSKNTMMLTPKVVNHIHKCGGTFLRTSRGGHDTHKIVDNIEDRGINQVYIIGGDGTHKGAALIYEEVKKRGLQVAVAGIPKTIDNDIAVIDKSFGFDTAVEEAQRAINAAHVEVESVENGVGIVKLMGRYSGFIAMYATLASRDVDCCLIPESPFYLEGRGGLFEFIEQRLKENGHLVIVVAEGARQEYIAAEVHAADKKDASGNKLLLDIGPWLSDKIKDHFSMSRKMAVNMKYIDPTYMIRAIPSNASDNIYCTLLAHGAVHGAMAGYTGFTVGPVNSKHAYIPIARVTEKQNKVKLTDRMWARLLASTNQPSFVASDQERVEKEXNEYINNMNIASLSRFKCLMGID

SEQ ID NO: 9418 - protein, 217 aa, Zea mays
  unsure (1)..(217): unsure at all Xaa locations
NGEPVAVKILDRXKVLRHKMAEQVMGSKTNVYIVLEYVTGGELFDTIANHGRMREGEARSYFQQLINAVDYCHSRGVYHRDLKPENLLLDSYGNLKVSDFGLSALSQQIKDDGLLHTTCGTPNYVAPEVLEDQGYDGAMADLWSCGVILFVLLAGYLPFEDSNLMTLYKKISNAEYTFPPWTSFPAKRLLTRILDPNPMTVCKSTKAARNKILPKTM

SEQ ID NO: 9419 - protein, 368 aa, Pichia ohmeri
MSTKTITVVPGDHVGTEICDEAIKVLKAIEKVSPVKFEFKHHLIGGAAIDATGVPLPDETLEAAKSSDAVLLGAVGGPKWGTGAVRPEQGLLKIRKELNLYANLRPCNFVSDSLLELSPLKSEIVKGTNFTVVRELVGGIYFGERQEQEESSDGQSAWDTEKYSVEEVTRITRMAAFMALQHNPPLPIWSLDKANVLALSRLWRKTVDHVMSTEFPQLKVQHQLIDSAAMILVKSPSQLNGVIITSNMFGDIISDEASVIPGSLGLLPSASLASLPDTNSAFGLYEPCHGSAPDLPANKVNPVATILSVAMMLRLSLDCLKEAEALEKAVGQVLDAGIRTADLRGSSSTKEVGDAVAAAVEKILAEGK

SEQ ID NO: 9420 - protein, 462 aa, Salmonella enterica subsp. enterica serovar Typhi Ty2
MTMMTATQALSVNPATGQTLAAMPWANAQEIEHALSLAASGFKKWKMTSVAQRAQTLRDIGQALRAHAEEMAQCITREMGKPIKQARAEVTKSAALCDWYAEHGPAMLNPEPTLVENQQAVIEYRPLGVILAIMPWNFPLWQVLRGAVPILLAGNSYLLKHAPNVTGCAQMIARILTEAGTPAGVYGWVNANNEGVSQMINDPRIAAVTVTGSVRAGAAIGAQAGAALKKCVLELGGSDPFIVLNDADLELAVKAAVAGRYQNTGQVCAAAKRFIVEEGIAQAFNDRFVAAAAALKMGDPLVEENDLGPMARFDLRDELHQQVQASVAEGARLLLGGEKIAGEGNYYAATVLADVTPDMTAFRQELFGPVAAITVAKDAEHALALANDSEFGLSATIFTADDTLAAEMAARLECGGVFINGYSASDARVAFGGVKKSGFGRELSHFGLHEFCNVQTVWKNRV

SEQ ID NO: 9421 - protein, 189 aa, Gossypium hirsutum
MSFIGTQQKCKACEKTVYPVELLSADGVPYHKSCSKCSHCKGTLKLANYSSMEGVLYCKPHFEQLFKETGNFNKDFQLSAKAAEKLTPEMTRSPSKAASMFSGTVEKCATCGKTAYPLEKVTVEGQSYLKSCFKCSHGGCSLSPSNYAALEGILYCKHHFSQLFKEKGSYNHLIKSASIKRAAASVPEA

SEQ ID NO: 9422 - protein, 257 aa, Triticum aestivum
  unsure (1)..(257): unsure at all Xaa locations
QVCTKKQAGTGPESRGYRRPTRPKLRRTHTQAHSIQGSRRSRFEKPAWASAEEEDLPATDMPRVVGVLSALLERVTERNDAATGPGALEPASGSAFRAMTKPGISVRAYMARIARFAGCSPACFVVGYIYLDRLLRRRRALAVDSYSVHRLLITXVLSAVKFMDDICYNNAYFAKVGGISLPEMNYLEVDFLFGVGFDLNVSPETFGHYCAILQSEMLCLELGPEVPSSGLPASPRSRRRMHCCLSEDDGTSRHHQQ

SEQ ID NO: 9423 - protein, 175 aa, Triticum aestivum
GGRVVWGPLFPSLGEVFGQGGVFALGEIGLWRVPHPWLNVLVPRSRIADFDSAVFKGILQGTDIAGPLVVYPLNKSKWDDGMSAVTPAEEVFYAVSLLFSSVANDLKRLEAQNQKILRFCDLAGIGYKEYLAHYTAHGDWVRHFGGKWQRFVEMKDKYDPKRLLSPGQDIFNLLL

SEQ ID NO: 9424 - protein, 500 aa, Oryza sativa (japonica cultivar-group)
MDVNQLWLLWATLAVSLLYYISNRRRRVGGRRRCPPGPMPLPLVGNLLNLRGHLPPALARLARTYGPVMMLKMGLTTTVVISSGDAAREAFTKHDRHLAARTVLDVTRSLDFADRSMIWLPSSDTVWKTLRGVTAASIFSPRGLAALRGVRESKVRDLVGYFRGRAGEVVDVRHAVYGCMLSLVSSAFFSVDVVDLSAESENEFRQSMTFLMEVVSKTNVSDFFPFLRPLDLQGWRRLTERYLGRVTCFLDDVIDRRFAADASANRHGDFLDSLLDLVSTGKIVRENVTTILLDVFIAGSDTITATVEWAMAELLRNPSEMAKVRAEMDGALGGKKTVDEPDIARLPYLQAVVKEAMRLHPAAPLLLPHRAVEDGVEVGGYCVPKGSMVIFNVWAIMRDPAAWERPEEFMPERFIRRGDDDEVDFWGKTFEFIPFGSGRRVCAGLPMAERVVPFMLASLLRAFEWRLPDGVSAEELDMRHRFTIANFRAIPLKAVPVVVS

SEQ ID NO: 9425 - protein, 171 aa, Zea mays
  unsure (1)..(171): unsure at all Xaa locations
MAAFLRSKCSPVGRTLMGSLGNSLFGAANSSVGAITRPSHCDAISQQIRTFIQMRTNLKVVDNSGAKRVMCIQSLRGKKGARLGDMIIGSVKEAQPRGXKVKKGDVXYGVVFRAAMKKGRSDGSEVQFDDNAVVLVNKKGELIGTRVFGPVPHELRKKKHLKILALAEHIV

SEQ ID NO: 9426 - protein, 468 aa, Azotobacter vinelandii
MRQLIWLRSDLRVRDNRALGAAMGAGPTLALYLLSPAQWRTHDDAPCKVDFRLRNLAELSHGLASLGVPLLIRRVDTWDEAPALLTRLCHEQNIVRVHVNDEYGVHESRRDAAVERALQAQGVGLQRHLDQLLLAPDSLRTRSGGSFRLFAQFRRACHWRLAVSLPAVGGLPMAQPPLNVVGNAVPAALEGFATPPESLRRLWPAGEIAAQRRLHEFVENRLAAYAEARDFPAEPGTSRLSPYLAAGVLSPRQCLHAVLRTGGFDRPEASAWFDELLWREFYKHILAGHPRVSMGRALRTETEALPWRDAPQELAAWQQGRTGFPLIDAAMRQLLATGWMHNRLRMVVAMFLSKNLLIDWRHGERWFMHHLIDGDLAANNGGWQWCASTGTDAVPYFRLFNPLAQSRRFDPEGRFIRQWLPELASLDNRDIHAPAGALRPAGYPPPIVDLPSSRERALAAFKALRRRG

SEQ ID NO: 9427 - protein, 232 aa, Glycine max
ITRPPTRPPTRASTRPVNGDGGRDVNLGDSNYSFGEAEALSDEMEEESRYVAEILRIRDVLLNPEDESEAVLFDSLRRLQLMELTVDCLKATEIGKAVNPLRKHGSKDIRQLSRTLIDGWKEMVDEWVKATTTTAITGSEEGTPDSVNPSVVDDDEEEGLPSPPLDEGAFFVTQAGSMELSQFFDGMDDDGNPRPTGPFSKNRENGRKPVFDSHVVEKRKSQASHDTAIIDR

SEQ ID NO: 9428 - protein, 206 aa, Michelia figo
  unsure (1)..(206): unsure at all Xaa locations
VQLKRMENKINRQVTFSKRRNGLLKKAYELSVLCDAEVALIIFSSRGKLYEFGSAGTNKTLERYQRCCYTPQDVVVSDRETQGWYQEVSKLKAKYESLQRSQRHLLXEDLGPLSVKELQHLERQLEVALSQARQRKTQIMIEQMEELRKKERQLGDINKQLKIKLEAEGQGPFRCIQGSWESGAMVGNNTFSMNAPQAAPLDAXSP

SEQ ID NO: 9429 - protein, 239 aa, Phytolacca americana
  unsure (1)..(239): unsure at all Xaa locations
VQLRRMENKINRQVTFSKRRSGLVKKAHEISVLCDAELALIIFSPRGKLFEYSTDSSMEKILERYERYFYAERQLASNDPNTEVNWTFDFAKLKAKLELLQRNHRHYLGQDLDSLNIKDLQSLEQQLDNALKHIRTRKNQLMHESISELHKKEKAMQEQNNMLVKKIKEREKAMAEAQGMQWQRQQNEPPEASNFLLPPPLTSWNTAGDAYHGQIAGEVKRNDLDLTLEPVYSCXXGCF

SEQ ID NO: 9430 - protein, 570 aa, Zea mays
MAGGGVEDVYGEDRATEEQLITPWAFSVASGYTLLRDPRHNKGLAFSEAERDAHYLRGLLPPALASQELQEKKLMQNLRRYEQPLHRYIAMMDLQERNERLFYKLLIDNVEELLPVVYTPTVGEACQKYGSIYRRPQGLYISLRDKGKILEVLKNWPERSIQVIVVTDGERILGLGDLGCQGMGIPVGKLSLYTALGGVRPSACLPITIDVGTNNEALLKDEFYIGLRQRRATGEEYHELLEEFMTAVKQNYGEKVLTQFEDFANHNAFDLLEKYRESHLVFNDDIQGTASVVLAGLLAALKVVGGTLADHTYLFLGAGEAGTGIAELIALEMSKHTGSPIEECRPKIWLMDSKGLIVASRKDSLQAFKKPWAHEHEPVATLLEAVQSLKPTVLIGTSGKGGTFTKEVVEAMASQNEKPVIFALSNPTSHSECTAEQAYTWTKGRAVFASGSPFDSVELDGKVLVPGQSNNAYIFPGFGLGVVISGAIRVRDDMLLAASEALAEQVTEEHFAKGLIFPPFTNIRAISARIAAKVAAKAYELGLASRLPRPDDLVKYAESCMYTPIYRSYR

SEQ ID NO: 9431 - protein, 166 aa, Triticum aestivum
DLGRIEKWVLRKAFDDEEQPFLPKHILYRQKEQFSDGVGYSWIDGLKAHAESNVTDKMMSNAKFIYPHNTPTTKEAYCYRMIFERFFPQNSAILTVPGGPSVACSTAKAVEWDAQWSGNLDPSGRAALGVHLSAYEQEHLPATIMAGTSKKPRMIEVAAPGVAIES

SEQ ID NO: 9432 - protein, 186 aa, Glycine max
GIPWERLNYSRDKYRETRLKQYKNYQNFSRSRHDLRKECFEVQKGETFYDFFFNTRLVKSTIVHFQLRNLLWATSKHDVYFMQNYSVMHWSALLRRGKEVLNVAKPIIPTLKRPGFLAQPVSRVQISTMTVKENLMVAGGFQGELICKNLKHPGVLFCGKITTDDNAITNAVDVYRNPAGSEGNPA

SEQ ID NO: 9433 - protein, 531 aa, Zea mays
MEAVGVTPAPVAAPEKKKLLDLKDPFPAAANGGAKASPAAKWAMKKKLVGGDAGYVLEDVPHLTDYMPQLPTYPNPLQDNPAYSVVKQYFVNPDDTVTQKIVVHKTSARGTHFRRAGPRQRVYFQSDEVNAAIVTCGGLCPGLNTVIRELVCGLYDMYGVSSVVGIEGGYKGFYSKNTVALTPKSVNDIHKRGGTVLGTSRGGHDTAKIVDCLQDRGINQVYIIGGDGTQKGASVIYEEVRRRGLKCSVVGVPKTIDNDIAVIDKSFGFDTAVEEAQRAINAAHVEAESAENGIGVVKLMGRNSGFIAMYATLASRDVDCCLIPESPFYLEGKGGLLEFVERRLKDNGHMVIVVAEGAGQDLIARSMNFVDTQDASGNKLLLDVGLWLSQKIKDHFKKKPSFPITLKYIDPTYMIRAVRSNASDNVYCTLLAHSALHGAMAGYTGFTVAPVNGRHAYIPFYRITEKQNKVVITDRMWARVLCSTNQPCFLSHEDVENMKHDDDEHHHMHNTQLLEGGSSPVSKCNGSAAAV

SEQ ID NO: 9434 - protein, 245 aa, Nicotiana tabacum
MGRGRVQLKRIENKINRQVTFSKRRSGLLKKAHEISVLCDAEVGLIVFSTKGKLFEYSTDSCMERILERYERYSYAERQLTATDHETPGSWTLEHAKLKARFEVLQRNQRHYAGEDLDSLSMKELQNLEHQVDSALKHIRSRKNQLMHESISELQKKDKALQEQNNKLSKQVKEREKELAQQTQWEQQSHDHLNSSTFVLSQPLSSLHLGEAYSTAGDNGEVEGSSRQQQQNTVMPPWMLRHLNN

SEQ ID NO: 9435 - protein, 138 aa, Triticum aestivum
  unsure (1)..(138): unsure at all Xaa locations
MAPTVMASSATSVAPFQGLKSTAGLPVSRRSNGASLGSVSNGGRIRCMQVWPIEGIKKVPRTLSYFANRSSNGRALPQSKVELPDPASKVGCPWPSEFKQRLGSILPVEHNXPLGYYDGPVLGMLELPISGCTDARST

SEQ ID NO: 9436 - protein, 119 aa, Oryza sativa (japonica cultivar-group)
MAGCCVFLRWPSASPSRIGYRSLDDGDDGPSPAAVTTTVVVGKERRVFSVDQLVLDTYPFRLLLETAVRKEESKAALFVDVDAILFEHILWLAGHHDRSSSSLLHLDLKEIIDFYSQDA

SEQ ID NO: 9437 - protein, 206 aa, Buchnera aphidicola str. APS (Acyrthosiphon pisum)
MNNNFQNNIFWQKHSITRLKREKKNGHKSIVLWFTGLSGSGKSTIANFLEEILFKNGINSYLLDGDNIRSGLCSDLSFSLADRNENIRRIGEVVKMMLHAGLIILVSVISPYRNQREMVRQMLGKKNFLEVFIDTPIEICESRDPKKLYKQARTGQISDFTGIQCTYETPNTPDVLLKGTDSLKNNSKKLIKILYNHNIISFINID

SEQ ID NO: 9438 - protein, 289 aa, Arabidopsis thaliana
MAISQAVLATVFGILGNIISFFVCLAPIPTFVRIYKRKSSEGYQSIPYVISLFSAMLWMYYAMIKKDAMMLITINSFAFVVQIVYISLFFFYAPKKEKTLTVKFVLFVDVLGFGAIFVLTYFIIHANKRVQVLGYICMVFALSVFVAPLGIIRKVIKTKSAEFMPFGLSFFLTLSAVMWFFYGLLLKDMNIALPNVLGFIFGVLQMILFLIYKKPGTKVLEPPGIKLQDISEHVVDVVRLSTMVCNSQMRTLVPQDSADMEATIDIDEKIKGDIEKNKDEKEVFLISKN

SEQ ID NO: 9439 - protein, 191 aa, Escherichia coli O157:H7 EDL933
MQKVKLNNGIEMPLLGFGVFQMTDAAECERAVIDAINTGYRLIDTAASYQNEPQVGNALKQSGIARNELFVTTKLWLQDTSYEGAKAQFERSLNRLQLDYVDLYLIHQPYGDVHGAWRAMEELQQAGKIRAIGVSNFHPDRLADLIAFNNVVPAVNQVEVNPFNQQLHAVPWMQSRGIQPEAWAPFAVTGR

SEQ ID NO: 9440 - protein, 359 aa, Schizosaccharomyces pombe
RMRVAIIHVGAPAGGMNSATRAAVRYCLNRGHTPLAIDNGFSGFLRHDSIHELSWIDVDEWCIRGGSEIGTNRDTPDLDMGFTAFKFQQHKIDALIIIGGFEAFTALSQLESARVNYPSFRIPMAIIPATISNNVPGTEFSLGCDTCLNAVMEYCDTIKQSASASRRRVFVCEVQGGRSGYIATVGGLITGASAIYTPEDGISLDMLRKDIDHLKATFALEAGRNRAGQLILRNECASKVYNTKVIGNIISEEVISASPLVPLFPSRPTRCNPTPMDRARAARLAMRAIRFFETCRANDLGNDPSSAVVIGIRGTGVSFSSVADVENNETEIEMRRPKNAWWRDMHNLVNILAGKTFAD

SEQ ID NO: 9441 - protein, 328 aa, Bacillus cereus ATCC 10987
MTIPAGTSASVGIVGLTLGGGIGMLSRLFGLTCDQLIEVEMVQACGKFGAKIIRASEHENHNLFWACRGGGGGNFGIITSLTFRVHPIKNVSIFSITWEWKDFIAAFQAWQNWAPYVDERLTSSIELFTKQQNKIEAQGEFVGSPSELHSLLSPLLETGTPSLFIDEVPYIKAVEFFNSGNIPENFKRSGSYVYKPIPLKGIQIMQYFLSHAPNKDASIWHQSLVGAVENIPPTETAYFHRKAIIAQEYITSWKCDDEENRNIRWVKDLREILDPYTLGDYVNWPDIDIKNWQTSYYGPNFQRLRKVKTIYDPCNVFRFQQSIPPFHT

SEQ ID NO: 9442 - protein, 174 aa, Triticum aestivum
  unsure (1)..(174): unsure at all Xaa locations
MSDTDEHHFESKADSGASKTYPQQAGAIRKGGHIVIKARPCKVVEVSTSKTGXKHGHAKCHFVAIDIFNGKKLEDIVPSSHNCDVPHVDRQDYQAXFDITDDGYVSLLTESGXTLKDDPESFPLMMFCLGQFKDWDFADGKDLILXVMSAMGERKXCAVKETGGGKVSSCAVAG

SEQ ID NO: 9443 - protein, 486 aa, Ralstonia eutropha JMP134
MTNRTIELKHPRQLYIDGVWVEPSTGGVFDVLDCSTEQVVATVARAESADMQRAVAAARKAFDDGPWPRMTPLERAGFLEKIAVRLEALNDEFARIWSLETGIVYKVAQPRIGLFISGAFRQYAAMASTFPFTQPCQSVTGNDAYRVYEPVGVVAEIIPWNGPAGLLAYKTAPALLAGCTLVIKSPPEAPCSGYLFAQVCEEVGLPPGVVNVITAERDVSEALVRSPEVDKITFTGSTAAGRRIASIAGDRVARVTLELGGKSPAVILDDYDVETAAATLGNSYFSYNTGQICHSLTRIIVPRAKHDAMVEALSAIAREIVLGDPLAATTTSGPLANARQRDTVERFVAMGVAEGAVLATGGKRPPHLARGFFFEPTVFGNVDNRSSIAQQEIFGPVLSVIPADDEASAIRMANDTPFGLNAAVFTNDRDRALAVARQIRAGTVGHNGPRTDFSIGFGGFKQSGIGREGGVEGLTAFMESKTIVLS

SEQ ID NO: 9444 - protein, 268 aa, Acinetobacter sp. ADP1
MMIVPKFGLGTFRLNDQIVIDSVKTALDVGYRAIDTAQIYDNEAQVGQAIQESGIARDQLFLTTKIWVDHLNSEQLIPSLKQSLQKLRTDAVNLTLIHWPAPQKGIDIAAVMQLLLQAKQQGLTEHIGISNFNIAQTKTAIESIGQSHIATNQIELSPYLQNRTLVDFLKAQQIDVTSYMTLAYGKVLHDPVLQDIASEHQASTAQIALAWALQSGYAVIPSSTKREHLISNLKAQEIQLSQQDMQLIAALERNGREVDPAELAPEWD

SEQ ID NO: 9445 - protein, 275 aa, uncultured bacterium
  unsure (1)..(275): unsure at all Xaa locations
MSAEQPRLILNSGQSMPQLGLGAYKVNQDIAXQLVQHALEIGYRRIDTAALYDNEAEVGAAVRKSGLAREEVFVTSKIWNDRHGYHEAKEAIQESIDRLNIDYVDMMLIHWPCPKQDKFVETWHAFEEVLETGLVKGIGVSNFNQPHLEKLLQHSNITPAINQVELHPQLAQNGLREFNERHGIRTEAWAPLGRARXMQHPLLVEIABSLGKSVAQVIIRWHLQIGNLVIPKSSNPXRLAXNFDVFDFELSHHNMSIIATLNTETRIATNPDDMN

SEQ ID NO: 9446 - protein, 160 aa, Hevea brasiliensis
MSDEEHHFESKADAGASKTYPQQAGTIRKNGYIVIKNRPCKVVEVSTSKTGKHGHAKCHFVGIDIFNAKKLEDIVPSSHNCDVPHVNRTDYQLIDISEDGFVSLLTENGNTKDDLRLPTDENLLSQIKDGFAEGKDLVVTVMSAMGEEQICALKDIGPKN

SEQ ID NO: 9447 - protein, 153 aa, Mesorhizobium sp. BNC1
MIFRAFLLVLCLLGFSGIAVAVQPDEILVDPALEARARQLSAELRCMVCQNQSIDDSDAELARDLRVLVRERLKAGDTNEEVLNYIVSRYGEFVLLKPRFNARNAILWAAPVLILVGGSALAFSVLRRRGNTVPAPLSTEEEAALRDILKDES

SEQ ID NO: 9448 - protein, 129 aa, Glycine max
MSTKKIVLKSSDNESFEVDEAVARESQTLAHMVEDDCTDNGIPLPNVTGKILAKVIEYCKKHVDAAAAKTEAAADGGASSDDDLKAWDAEFMKIDQATLFELILAANYLNIKNLLDLTCQTVADMIKGK

SEQ ID NO: 9449 - protein, 258 aa, Zea mays
  unsure (1)..(258): unsure at all Xaa locations
MAGAGAGGWKKRVGRYEVGRTIGRGTFAKVKFAVDADTGAAFAIKVLDKETIFTHRMLHQIKREISIMKIVRHPNIVRLNEVLAGRTKIYIVLELVTGGELFDRIVRHGKLRENEARKYFQQLIDAIDYCHSKGVYHRDLKPQNLLLDSRGNLKLSDFGLSTLSQNXLVHTTCGTPNYVAPEVLSSNGYDGCAADIWSCGVILYVLMAGYLPFEENDLPHLYXKGAKSLIQRILDPNPRTPIVCVKLSTRTSSYISLY

SEQ ID NO: 9450 - protein, 273 aa, uncultured bacterium
MASPLVTLNDGRLMPQLGLGVYKVNQDIAVQLVQTAIEIGYRRVDTAALYDNEAEVGAAIRKSGLDREEIFVTSKIWNDRHGYHEAKDAIQESVDRLNIGYVDMMLIHWPCPKQDKFVETWHAFEEVLETGLVKSIGVSNFHQHHLEKLLAAANVVPAINQVELHPQLAQNSLRHFNKQHNIKTEAWAPLGRAKFLENPLLVEIAESLGKSVAQVIIRWHLQLQNLVIPKSSNPDRLAENFDVFDFELSQHQMGIIATLNTETRIATNPDDMN

SEQ ID NO: 9451 - protein, 423 aa, Bradyrhizobium japonicum USDA 110
MSDKPQHIVIVGAGAAGLMAGRELARAGKKVTVLEARDRCGGRIHPLPAAEFGYPADGGAEFVHGDAPVTRALLREAGLSLQEIEGTLWRFDGAHFSREDRHDPHEAELHAVLGNLKDDLTVADFLRRHFAGPEYDGLRYSIERMVEGYDAADPERASTLALREEWMDGGLHTQARINGGYGALIDFLAAECRRHGAAVRLGCVVSAIEDEGGAVVVRGAGGEVHRCDRVILTVPLPLLREIALPASVRAKAAAADDIGFGNVVKILLRFARPWWRERNPDLADMTFLLSDRTIPVWWTRHPEQHPVLTGWFGGPRTAELQDLDPQALIEAGLGSLATIFGLSREDVARDLVAAAATNWGQDPFARGAYSWATPRTRAAQAMLARADGAVLFSGEALYRGRDMGTVEAALASGLETAGMILRG

SEQ ID NO: 9452 - protein, 180 aa, Brassica napus
MSYGQDTGVERRKGSVKWFDTQKGFGFITPDDGGDDLFVHQSSIRSEGFRSLAAEEPVEFQVENDNNGRPKAIEVSGPDGAPVQGSSGGGSSGGRGGFGGGGRGGGRGFGGGRGGGRGGSDCYKCGEPGHIARDCSEGGGGYGGGGGGGGHGGGGGGGGGSCYSCGESGHFARDCTSGGR

SEQ ID NO: 9453 - protein, 360 aa, Emericella nidulans
MAAARTLRIGLIPGDGIGREVIPAGRRILEALPASLNLKFNFVDLDAGYDCFKRTGTALPDKTVEVLKKECDGALFGAVSSPSTKVAGYSSPIVALRKKLDLFANVRPVKTTAGTSAGKPIDLVIVRENTEDLYVKEESTEETPNGKVARAIKQISERASSRIATIAGEIALRRQNIRDGAAASGLRTKPMVTITHKSNVLSQTDGLFRETARAALAAQKFSSVEVEEQIVDSMVYKLFRQPEYYDVIVAPNLYGDILSDGAAALVGSLGLVPSANVGDNFAIGEPCHGSAPDIEGKNIANPIATLRSVALMLEFLGEEQAAAKIYAAVDGNLDEGKYLSPDMGGKATTTEVLEDVLKRL

SEQ ID NO: 9454 - protein, 275 aa, uncultured bacterium
MSAEQPRLILNSGQSMPQLGLGAYKVNQDITVQLVQHALEIGYRRIDTAAIYDNEAEVGAAVRKSGLAREEVFVTSKIWNDRHGYHEAKEAIQESIDRLNIDYVDMMLIHWPCPKQDKFVETWHAFEEVLETGLVKGIGVSNFNQPHLEKLLQHSNITPAINQVELHPQLAQNGLRELNERHGIRTEAWAPLGRARFMQHPLLIEIAESLGKSVAQVIIRWHLQIGNLVIPKSSNPDRLAENFDVFDFELSHHNMSIIATLNTETRIATNPDDMN

SEQ ID NO: 9455 - protein, 234 aa, Pachysandra terminalis
  unsure (1)..(234): unsure at all Xaa locations
VQLRRMENKINRQVTFSKRRTGLLKKAHEISVLCDAEVALIVFSTKGKLSQYSSNSSMETILDRYERYSYAERKLMAGDHLDSQGSWPLEYTKLKSKIEVLQRNQRHFMGEELDSLSLKELQYMEHQLDTSLKHIRSRKNQLMNDSIYDLQKKEKALQEQNSTLIKKLKEKEKAPAHQACWEQQGQNLPSFLLSQPLPSLNIGXNYXLARXSRDEEEGAQSHARTNPIMPPWML

SEQ ID NO: 9456 - protein, 425 aa, Arabidopsis thaliana
MRQMPEHPNIVTLKETYEDDKAVHLVMELCEGGELFDRIVARGHYTERAAASVIKTIIEVVQMCHKHGVMHRDLKPENFLFANKKETASLKAIDFGLSVFFKPGERFNEIVGSPYYMAPEVLRRSYGQEIDIWSAGVILYILLCGVPPFWAETEHGVAKAILKSVIDFKRDPWPKVSDNAKDLIKKMLHPDPRRRLTAQQVLDHPWIQNGKNASNVSLGETVRARLKQFSVMNKLKKRALRVIAEHLSVEETSCIKERFQVMDTSNRGKITITELGIGLQKLGIVVPQDDIQILMDAGDVDKDGYLDVNEFVAISVHIRKLGNDEHLKKAFTFFDKNKSGYIEIEELRDALADDVDTTSEEVVEAIILDVDTNKDGKISYDEFATMMKTGTDWRKASRQYSRDLFKCLSLKLMQDGSLQSNGDTK

SEQ ID NO: 9457 - protein, 356 aa, Micromonospora echinospora
MELTTTAARPGLRHRMQQLIYGFFTAQTLHVAVRLRIPDLLADGARDVGDLASATGADAPSLRRLLRALVFLEVLDEPAPGTFALTEQGEVLRADVTGSMRELVLLLSGPESWAAWGQLEHSVRTGEVAWEHVHGRSCFDHLMADPQRQAAFNAAMAEGSRAFVPTLLSAYDFGDLRTVVDVGGGSGALLAGVLAAHPHLRGTVFDTPDGVADAARTVAEQGVADRCGVETGDFFVSVPPGADAYVLKSVLHDWDDEQCVEVLRTVRRAVRPDSRVILVESLMPTTVTTAPSVAQVVMNDLNMMVCHGGRERTVAEFRELLRVAGFRLESVTPCPAPSVVGILEAAPAPATGPDGS

SEQ ID NO: 9458 - protein, 238 aa, Peperomia caperata
  unsure (1)..(238): unsure at all Xaa locations
VQLKRMENKINRQVTFSKRRTGLLKKAHEISVLCDAEVALIVFSTKGKLYEYATNSSSMPGILDRYERHSFTDKEFFIKEGEPPEGAWTLEYAKLKARYELLQKNYRHYLGEDLGSLSGKELQQLEGQLDASLKNVRSRRTQALFHTISDLQKKEKSLLEQNSVMIKKLQDLEKAEKAQQSQLEMQNHERTQNQPPLILLPPPALSXGSFRQENGPSVEGEAAPRVAQKNSLLPPWMX

SEQ ID NO: 9459 - protein, 402 aa, Burkholderia cepacia R1808
MTDITADQMARVKATAPVLAVHGATITKHFYQRMFTRHPELKNLFNQTHQKTGSQPETLAKAVYAYAANIDNLGALGGAVSHIAHKHASLNIRPEHYPIVGENLLASIVEVLGDAVDAQTLEAWRVAYGQLAQILIGAEADLYAGAAWSGFRPFKVARKVRESDEITSFYLTPADGGAAPTFEPGQYVTVKRFVGDLGVDQPRQYSLSDAPHGKWLRISVKRESGQAEAVPAGKVSTLMHDGVEEGAIVEVTAPMGEFSLKRGVDTPVVLISGGVGLTPMVSMASTLVAEGSKRDVRFVHACRSGAVHAFRDWLNDTVREHANFKRTVLYELVGPNDRAGVDHDLEGRLTPERVQQYALVPDADYYICGPIAFMKAQRDALVALGVAPERINTEIFGSGALE

SEQ ID NO: 9460 - protein, 360 aa, Papaver somniferum
MGSIRNVDEDIQACRYAMELASASVPVMVLKTAIELDILEIIKKPGPGTQISVSEIVSQIQNLKNPDAPVMLDRMLRLLASYNILTCSLKDGGNDDKVERLYGLAPVCKFLTKNEAGCSMSALLLMNQDKVLMESWYHLKDAILDGGIPFNKAYGVHAFEYHGKDLRFNKVFNKGMSDHTTITMNKILETYKGFEGLNSIVDVGGGVGATVSMIISKYPTIQGINFDLPHVIQDAPSFPGIKHVGGDMFASVPNADAIFMKWILHDWSDEHSVKILKNCYDALPKNGKVIIVECIIPEVSDSSVAGHGVFHLDNIMLAHNPGGKERSLKQFENLAKDTGFTDFQVVCSAYDTYVMEFYKN

SEQ ID NO: 9461 - protein, 358 aa, Arthrobacter sp. BP2
MKRCSAMHAFAVLPDDATIHDLEFSTPRPEGRQVLLKVMRAGVCHTDTHLREGGYDLGSRGHMSMKDRGIQYPMVLGHEVVGVVEQVGADVASVSAGDVRLIYPWIGCGTCRQCREGHDNRCAAGQNLGVARHGGYAEYIIVPDEKYLVDIEGLDPSWAATLACSGLTAHSAVDKVLPLEPDEPVVIFGAGGLGLTAIAILRARGHRNICAVDVAERNLALARDMGATSTVLSGAGSGAADIQRAAGGPASAVVDFVNNGATATAAFDALAKAGTMVQVGLFGGEVTLPTAMLALRMIRIEGSFVGALSQLQDLVRIAKAGELPTIPVSERTLSAAEVSRALDDLTAGGIAGRIVLTA

SEQ ID NO: 9462 - protein, 226 aa, Triticum aestivum
ADLGDGLADDDAGKLLLMYSAGDDNDVEEEDEEGYLDHLVSKESSFCSADPSPSMASEDWFQCARRDTVRWILETRGHFGFSHRTAYVAIAYFDRFSLRRCVDRSVMPWAARLLAIACVSLAAKMDECQAPALSEFRADDDYDFSCDSIGRMEMLVLSTLDWRMGAVTPFDYLPCLSSRVRRFNGAGRGGGGRAHRRQPPPSSSPPPKVGYLTTTSIHGPCSASIN

SEQ ID NO: 9463 - protein, 452 aa, Triticum aestivum
  unsure (1)..(452): unsure at all Xaa locations
MGEQKGNILMGKYEMGKMLGQGTFAKVYHARNIETSQSVAIKVTDKEKVLKGGLTDQIKREISVMKLVKHPNIVQMYEVMATKTKIYFVLEHVKGGELFNKVQRGRLKEDAARKYFQQLICAVDFCHSRGVYHRDLKPENLLLDENSNLKVSDFGLSTISECRRLDGLLHTSCGTPAYVAPEVINRKGYDGAKADIWSCGVILFVLLAGYLPFQDKNLMNMYKKIGKAEFKCPSWFSSDIRRLLLRILDPNPCARISIGKRCDSRWXHKGHFANLDMYNLQARXTVPAADMTATSDALSCSNSATEGKEQEAKKLTNLNAFDIISLSTGLDLSGMFEDNDKKRESKFTSTNSASTIVSKIEDIAKCMRLKLVKKDGGMMRMESFKPGRKGVMSIDAEIFEVTPDFHLVELKKTNGDTMEYQKVLNQEMRPALKDIVWAWQGEQQPQPQQQPC

SEQ ID NO: 9464 - protein, 211 aa, Pinus taeda
MEKIMVLVCIMSFTILGLSSAKEINHAAAVSLATAPAAAATPAAPAPSPASLNLSGILDKAGQFNTFLSLLKSTQVGMQLQSQLNNSQQGITIFAPSDAAFAALKPGALNSITDQDKIALLQYHALPSYYTFSQFQTVSNPVRTMASGNGGPFAAPTPEPGAPVSSPAVSPSGASGSGASTSSACGSMAALAKGLYLVFLAAGALVLVISS

SEQ ID NO: 9465 - protein, 485 aa, Agrobacterium tumefaciens str. C58
MTSPLQHLQQSGRLKKFYIDGKWVLPSGSDKVAVINPATELEFAEIALGNDEDVALAVAAARGAFAGWARTGPADRSELLNRVHQLMQQRLELLAQALTMEMGAAINYARSVQVPLAAEHIKVARDNAASYSFLSQRGHTAILREPIGVCGLITPWNWPLYQITAKVGPALAAGCTVVLKPSELSPLSALLFAEIIEDAGFPPGVFNLVNGEGTIVGAGLSAHPDVDMISITGSTRAGILVAQAAAPTVKRVAQELGGKSPNIILADADMTRAVPLGVAAAFRNLGQSCSAPTRMIVPRSHQKHIEELAAAAALEIVVGDPLSEHTTHGPVANHAQFDRIQRMISIGMDEGAKLVVGGTGRPDGLDTGFYVRPTIFSDVDPKMQIAQQEIFGPVLSIISYDTLEEAIEIANDTVYGLGAHVQGTDLQTVRIVAEQIRSGQVHLNYPAWDPNAPFGGYKQSGNGREYGTEGMEEYLEIKSILGFYP

SEQ ID NO: 9466 - protein, 474 aa, Emericella nidulans
MASTLRLSTSALRSSTLAGKPVVQSVAFNGLRCYSTGKTKSLKETFADKLPGELEKVKKLRKEHGNKVIGELTLDQAYGGARGVKCLVWEGSVLDSEEGIRFRGLTIPECQKLLPKAPGGEEPLPEGLFWLLLTGEVPSEQQVRDLSAEWAARSDLPKFIEELIDRVPSTLHPMAQFSLAVTALEHESAFAKATAKGINKKEYWHYTFEDSMDLIAKLPTIAAKIYRNVFKDGKVAPIQKDKDYSYNLANQLGFADNKDFVELMRLYLTIHSDHEGGNVSAHTTHLVGSALSSPMLSLAAGLNGLAGPLHGLANQEVLNWLTEMKKVVGNDLSDQSIKDYLWSTLNAGRVVPGYGHAVLRKTDPRYTSQREFALRKLPDDPMFKLVSQVYKIAPGVLTEHGKTKNPYPNVDAHSGVLLQYYGLTEANYYTVLFGVSRALGVLPQLIIDRAFGAPIERPKSFSTEAYAKLVGAKL

SEQ ID NO: 9467 - protein, 188 aa, Triticum aestivum
  unsure (1)..(188): unsure at all Xaa locations
MAPTVMASSATSVAPFQGLKSTAGLPVSRRSNGASLGSVSNGGRIRCMQVWPIEGIKKFETLSYLPPLSTEALLKQVDYXIRSKWXVPCLQFNKVGFILRXEHNASPGXYYDGRYWTMWKLLCSGCNDPHKXXXKVEXVXKDYXYPYVRIXRFNNMXQVHXSTXRLKXTGCXDPXKAKHKGILNAFNL

SEQ ID NO: 9468 - protein, 468 aa, Glycine max
  unsure (1)..(468): unsure at all Xaa locations
CLILCIGVLLQTYPNPLQDNPAYSVVKQYFVHVDDSVPQKVVVHKDGARGVHFRRAGPRQXDEVQAAIVTCGGLCPGLNTVIRELVCGLHHMYGVKKVLGINGGYRGFYARNTITLTPKSVNDIHKRGGTVLGTSRGGHDTKKIVDSIQDRGINQVYIIGGDGTQKGASAIFEEVRKRGLKVSVVGIPKTIDNDIPVIDKSFGFDTAVEEAQRAINAAHVEAESVENGIGVVKLMGRNSGFIAMYATLASRDVDCCLIPESPFYLEGPGGLYEYIEKRLKENGHMVIVIAEGAGQELVSESVQSMSKQDASGNKLFQDVGLWISQKIRDHFAAQKTLPITLKYIDPTYMIRAIPSNASDNVYCTLLAQSAVHGAMAGYTGYTSGLVNGRQTYIPFYRITERQNHVVITDRMWARLLSSTNQPSFLDAKGDNEEKEEEEALNQLPDGHCAKDTSLASKEINSSIYPTAC

SEQ ID NO: 9469 - protein, 280 aa, Methanococcus maripaludis S2
MKFDAWYTEPQTENLSLSTKLKDILYVGQSEYQEIQVLDTYEFGRVLILENTYQTTERDEFIYHELISHPALFTHGNPKKVLVIGGGDGGSVREVLKHKSVEKIDFVELDGQVVEVAKKFLPTLSCEIDNEKVNTIITDGIKYVAETSEKYDVILVDCPDPVGPAAGLFEKEFYNNLYKCLNDDGIMVQQTESPLLHEKLINKIKGHLKDAGFSTIRPLVCSIPTYPSGFWSFTLASKKNDPLNSDVSEIENKLKDMTTKYYDQDVHKGVFLATPRYLKE

SEQ ID NO: 9470 - protein, 160 aa, Hevea brasiliensis
MSDEEHHFESKADAGASKTYPQQAGTIRKNGYIVIKNRPCKVVEVPTSKTGKHGHAKCHFVGIDIFNAKKLEDIVPSSHNCDVPHVNRTDYQLIDISEDGFVSLLTENGNTKDDLRLPTDENLLSQIKDGFAEGKDLVVTVMSAMGEEQICALKDIGPKN

SEQ ID NO: 9471 - protein, 160 aa, Hevea brasiliensis
MSDEEHHFESKADAGASKTYPQQAGTIRKNGYIVIKNRPCKVVEVSTSKTGKHGHAKCHFVGIDIFTAKKLEDIVPSSHNCDAPHVNRTDYQLIDISEDGFVSLLTESGNTKDDLRLPTDENLLSQIKDGFAEGKDLVVTVMSAMGEEQICALKDIGPKN

SEQ ID NO: 9472 - protein, 495 aa, GIBBERELLA ZEAE PH-1
MSTVKITGIGGRQISVHTGLFINNEFVPAQDNATVKTENPFNGKVLADISAAQASDVDKAVAAAEKAFNGTWKLTQPTVRRDLMNRLADLIERDNEELASLESVDAGILFRESSGMFVPQAVETLRYYAGWADKVDGQSLHIPQGISYSRRVPIGVCAAIVPWNAPLMITMWKLAAALATGNVLIIKTPEASPLYGQKLGQLIVEAGFPPGVVSILCGLGIVAGSALSAHPAIRKLSFTGSPGVGRQILAASAKTNLKKISLELGGKGPSIVFDDADFENALQWTAAGITVNNGQICAAGSRIYVHADIYDKFVKAFSERTKDSVAGDPLLQETTKGPVINAGQKKRVMEYIKIGQDEKVKVLHGADDSKLPTEGHFVPNTAFVDVDPQATVIREEIFGPVACIAKFSTEEEVVRLANDSSYGLGSAVFTKDINKAIRVSEELESGQVTINMWGVVNANVSFGGFKESGFGRDCGKEAIDDWTQAKYISVMVPKL

SEQ ID NO: 9473 - protein, 132 aa, Hevea brasiliensis
MSDEEHHFESKADAGASKTYPQQAGTIRKNGYIVIKNRPCKVVEVSTSKTGKHGHAKCHFVGIDIFTAKKLEDIVPSSHNCDAPHVNRTDYQLIDISEDGFVSLLTESGNTKDNLRLPTDENLLSQIKDGFA

SEQ ID NO: 9474 - protein, 273 aa, uncultured bacterium
MASPLVTLNDGRLMPQLGLGVYKVNQDIAVQLVQTAIEIGYRRVDTAALYDNEAEVGAAIRKSGLEREEIFVTSKIWNDRHGYHEAKEAIQESVDRLNIGYVDMMLIHWPCPKQDKFVETWHAFEEVLETGLVKSIGVSNFHQHHLEKLLAAATVVPAINQVELHPQLAQNSLRHFNKQHNIKTEAWAPLGRAKFLENPLLVEIAESLGKSVAQVIIRWHLQLQNLVIPKSSNPDRLAENFDVFDFELSQHQMGIIATLNTETRIATNPDDMN

SEQ ID NO: 9475 - protein, 501 aa, Glycine max
MGSAAKYELPFKLNNPDLLHNESFVHGKWVKSKSGKTFEVADPGTGKTWIDCPTNDASDVDEAVKSSHECFLEYKKISPRQRAQMLYKWDALIKENREDIATILVYETGKPRAEAYGEIDYSTGFTWWFAGEAERIQGSVFTPALPNRRIFTIKQPLGVAAALVPWNFPIAMILRKAGAALAAGCTMIVKPSPETPITVLALAYLADKAGFPKGALNVLTTDLDKTPELSEALCRHPLVNKVTFTGSTRVGKLVAKICSDNLKKVTLELGGNCPVLIFDDANIEQAMSQVFALKFRHAGQACITANRIYVQSGIFDKFLERWNAEAQKIVVGHGSDEKTTMGPVTTPRAVDKALSLVEDARKKGAKIHTGGNKVEKNGGYFFEPTVITGVTPDMDIAKEEVFSPISTFIKFETEDEVVKAANDTSMGLASYLFTKNVDRMWRLFENLEAGMIGLNTGNSSAAESPFGGIKQSGYGKESGKDVAVNEYMITKTGTFTLEDQS

SEQ ID NO: 9476 - protein, 159 aa, Hevea brasiliensis
MSDEEHHFESKADAGASKTYPQQAGTIRKNGYIVIKNRPCKVVEVSTSKTGKHGHAKCHFVGIDIFNAKKLEDIVPSSHNCDVPHVTRTDYQLIDISEDGFVSLLTENGNTKDDLRLPTDENLLSQIKDGFAEGKDLVVTVMSSMGEEQICALKDIGPK

SEQ ID NO: 9477 - protein, 493 aa, Arabidopsis thaliana
MVLSKTVSESDVSIHSTFASRYVRNSLPRFEMPENSIPKEAAYQIINDELMLDGNPRLNLASFVTTWMEPECDKLMMESINKNYVDMDEYPVTTELQNRCVNMIARLFNAPLGDGEAAVGVGTVGSSEAIMLAGLAFKRQWQNKRKAQGLPYDKPNIVTGANVQVCWEKFARYFEVELKEVNLREDYYVMDPVKAVEMVDENTICVAAILGSTLTGEFEDVKLLNDLLVEKNKQTGWDTPIHVDAASGGFIAPFLYPELEWDFRLPLVKSINVSGHKYGLVYAGIGWVVWRTKTDLPDELIFHINYLGADQPTFTLNFSKGSSQVIAQYYQLIRLGFEGYRNVMDNCRENMMVLRQGLEKTGRFKIVSKENGVPLVAFSLKDSSRHNEFEVAHTLRRFGWIVPAYTMPADAQHVTVLRVVIREDFSRTLAERLVADFEKVLHELDTLPARVHAKMANGKVNGVKKTPEETQREVTAYWKKLLETKKTNKNTIC

SEQ ID NO: 9478 - protein, 159 aa, Hevea brasiliensis
MSDEEHHFESKADAGASKTYPQQAGTIRKNGYIVIKNRPCKVVDVSTSKTGKHGHAKCHFVGIDIFNAKKLEDIVPSSHNCDVPHVTRTDYQLIDISEDGFVSLLTENGNTKDDLRLPTDENLLSQIKDGFAEGKDLVVTVMSSMGEEQICALKDIGPK

SEQ ID NO: 9479 - protein, 263 aa, Burkholderia cepacia R1808
MTVADVEIPGYAQDIALRLYRRADKTGLPVVLYFHGGGFVRGTLDDADFAARFLAERLPALVVSVDYSLAPAFPFPAAPEDAYRAAVWAATRARAFGGNPKKIGVAGHDAGGQLANCLAFIARDRGEVPIAAQALFGPMLDPSMTRIGDADRLSSDITARECAACYRAYLPQAAQRMHPYAAPLESVRLAGLPPTLIVTAQNDVLHVEAEKYAGCLISSGVLTQVIRYPDVTHAALATHAAALEEAVRFFQCRFQARQPNRSE

SEQ ID NO: 9480 - protein, 428 aa, Zea mays
  unsure (1)..(428): unsure at all Xaa locations
MSTTKVKRRVGKYELGRTIGEGTFAKVRFARDTVTGEAVAIKILDKEKVLKHKMVEQIKREISTMKLIKHPNVVRIYEVMGSKTKIYIVLEFATGGELFDTIVNHGRMREDEARRYFQQLINAVDYCHSRGVYHRDLKPENLLLDSYGNLKVSDFGLSALSQQIKDDGLLHTTCGTPNYVAPEVLEDQGYDGAMADLWSCGVILFVLLAGYLPFEDSNLMTLYKKISNAEFTFPPWTSFPAKRXITIPEILEDEWFKKGYKRPEFDEQYDTTLDDVDAVFNDSEEHHVTEKKEEEPVALNAFELISMSAGLNLGNLFDSEQEFKRETRFTSKCPPKEIVRKIEEAAKPLGFDVQKKNYKLRLEKVKAGRKGNLNVATEILQVAPSLHMVEVRKXKGDTLEFHKFYKNLSKTLKDVVWKSDDLQTQHAS

SEQ ID NO: 9481 - protein, 445 aa, Pseudomonas aeruginosa PAO1
MQSLLIRNARMVNEGQVREGDLLVRHGRIERIAGCLENCGASREIDAAGRYLLPGMIDDQVHFREPGYPQKGSIASESRAAVAGGITSFMDMPNTRPATLSLEALAEKKRLAAAHSVANYGFHFGVSRDNLDTVAALDPREVAAVKVFMGASTGDMLVDDLPTLERLFASVPTLLLSHCEDTPRIEANLARWRQRFGERIPAAAHPRIRDAEACYRSTALAVELAQRHGTLLHVLHLSTARELALFEDKPLCQKRITAEVCVHHLLFDDSDYARLGHLLKCNPAIKSREDRDALRRALAGNRLDVIGTDHAPHAWAEKQQAYPQAPAGLPLVQHALPALLELVREGWLSLATLVAKTSHRVAELFAIADRGFLREGYWADLVLVSELEHPALASAMPLLSRCNWTPFRHRAFHHRIDTTIVSGQLAWHAGRLSDDCQGLPLRFSR

SEQ ID NO: 9482 - protein, 412 aa, Neurospora crassa
MATTIKASVLHGARDLSVESRPLPTLSPTDVLISIKSTGLCGSDLHYYTHFRNGDIQVHEPLTLGHESSGIITAIGSPSVSSEYGLNVGDRVALEVGQPCEACELCCPPGTGPIGNYSGGHGEESGGKGGESTTTTSRYNICRAMRFRSSAKGWPQFPHAQGTLQEVVAHPAKWCHKLPESVDYTLGALAEPLAVAMHAAGRAGIPSCVPHSSSSMTSSRGAARVKVLVFGAGAVGLLCAAVCKSITKGDAIVVIADIQADRVKFAVENGFADAAVVVPISDKRPETIEEKLEYAKSVAERVKGAELVKGLGGQATAPGGKIMIIGMGNPIQTLPISAASLKEVDLLGVFRYANAYPKVIELLARGDPHLPDLSKLVTQRYSGLESIPMAFDMAARVKDNEGNLVLKVMIDM

SEQ ID NO: 9483 - protein, 186 aa, Glycine max
  unsure (1)..(186): unsure at all Xaa locations
KTLSEAVVEAIERQNNIGEEEKRRKLNEWMHHSSYERCLSNEEGREIAEKLGVRNLFWDWDLPRTREGFYRFKGSVTASVVRGCAFSPHADVIWMETAIPNVVECTEFCEGVKSKHPQMMLGYNLSTSFNXYASGLSDEHMKDLIPLIAEVGVCVQSHTVEGLTSTALSSTTISMALAMEGILADS

SEQ ID NO: 9484 - protein, 478 aa, Arthrobacter sp. BP2
MVPAAGLDYYVIHHRGEPPMGVYTTIDPATGDATAQYPEISDAELDTLIKNSAAAYRSWRTTTLEQRRAVLTRTAEIHREQAEELAKLLTLEMGKPIAQARGEVELVASIYQHYADNLEEYLADESLTFRGSGTAVVRTEPIGPLVGVMPWNYPYYQVARFAAPNIALGNTIILKHARNCPQSALAIERVLTEAGLPAGVYANAFISSAQVAAAVADRRVQGVSLTGSEKAGAAVGEVAGRNLKKCVLELGGSDPFIVLDDADIDAAAAAAVIGRLSNGGQACTASKRFIVADSVYEEFLQKFLDAMASWQTGDPTDSGTKLGPLASAAGVEELDELVQDAVSHGAKLLLGGERPDGPGAYYPATVLAGVTPAMRAFTEELFGPVAVVYRVGSLQEAIDLANNSPFGLSSSVFTSDARNAERLAEELEVGMVWINSTSKSSPDLPFGGVKGSGFGRELAGYGFNEFANKKLVRNPGAR

SEQ ID NO: 9485 - protein, 320 aa, Neurospora crassa
MATKTFKLNTGANIPALGLANPSPPPPSIGTWQGESTQVKDAVVAALKSGYRLIDTAYCYGNEEHVGAGLKEAFDQGIVKREDVFVVTKLWATYTSRAEEGLEKSLRNLGLEYVDLFLVHWPLLMNPEGNDDRFPKLPNGERDILRDYSHVQIWKNMEKLVGSGRTKAIGVSNYSKRYLEELLPHAKIVPAVNQIENHPQLPQQEIVDFCKEKGIHIMAYSPFGSTGSPVTSAEPVIKIAEKHGVKPTTVLLSYHLYRGSTVLPKSTNPERIEANAKLIELDAEDQKLLNDYSEGLVKEGKVQRYVYPPFGVDFGFPDKS

SEQ ID NO: 9486 - protein, 431 aa, Corynebacterium efficiens
MSNVGTPRTAQEIQQDWDTNPRWNGITRDYTAEQVAELQGSVVEEHTLAKRGAEILWDAVSAEGDDYINALGALTGNQAVQQVRAGLKAVYLSGWQVAGDANLAGHTYPDQSLYPANSVPNVVRRINNALLRADEIARVEGDTSVDNWLVPIVADGEAGFGGALNVYELQKGMITAGAAGTHWEDQLASEKKCGHLGGKVLIPTQQHIRTLNSARLAADVANTPTVVIARTDAEAATLITSDVDERDRPFITGERTAEGYYHVKPGLEPCIARAKSYAPYADMIWMETGTPDLELAKKFAEGVRSEFPDQLLSYNCSPSFNWSAHLEADEIAKFQKELGAMGFKFQFITLAGFHSLNYGMFDLAYGYAREGMPAFVDLQNREFKAAEERGFTAVKHQREVGAGYFDTIATTVDPNSSTTALKGSTEECQFH

SEQ ID NO: 9487 - protein, 316 aa, Cenibacterium arsenoxidans
MSIQWYPGHMNAARKKAAEAMEKVDMIIEVLDARVPQASCNPMIEELRTFRQRPCLKILNKSDLADPAATQQWLDFYNKQKNVHAVALSCKKPSDVAKIPALSMKIAPHRGTALKPLRIMIMGIPNVGKSTLMNALLKKRVAKVGDEPAVTKMQQRLYLGNNIVLTDTPGMMWPKIAYPSDGLMLAASHAIGSNALIEEEVATFLADIILARYPALVAARYGMKTEGIDGVSVIEGVAVRRGLRIKGGELDLEKAAHIFLQDYRTGLLGRISLETPESRVELLTTFQPPPSLSDVADESAEDAPEENRDDAFSHRR

SEQ ID NO: 9488 - protein, 505 aa, Agrobacterium tumefaciens str. C58
MHEPLTAAEYKAIASDLQFPANAFIDGAFRPAGSGKTFKTINPATGETLADISACDVSDVDYAVGKARAAFDDGRWRLLPPGERKAILLTFAKLLEQHRHELAVMESLDSGKPVSECQTVDIPDTIHTIRWHAELIDKLYDNTAPVGSNALALVVREPVGVVGCVLPWNFPLLMLAWKIGPALASGCSVIVKPAEETTLTTLRVAELAHEAGIPAGVFNVVPGGGKEVGEPIGMHMDVDMVAFTGSTPTGRRFLRYAADSNLKRIVLECGGKNPAVVLDDAEDLDLVAEQVVNGAFWNMGENCSASSRLIVHAKIKDELLQRIGAYMREWRMGDPLDPQNRVGALVSKAHFDKVHSFLEDVKAENLTIVHGGKTEKGIFIEPTVVDAVPPASRLFREEIFGPILSVTTFNTLAEAVALANDTNYGLAASVYTGSLRKAIKLSREIRAGVVTVNCFGEGDATTPFGGYKESGFGGRDKSIFAHDNYCELKTIWIDVSDRSVDETVR

SEQ ID NO: 9489 - protein, 175 aa, Triticum aestivum
  unsure (1)..(175): unsure at all Xaa locations
MAPAVMASSATTVAPFQGLKSTASLPVSRRSSGSLGRVSNGXGRIRCMQVWPIEGIKKFETLSYLPPLSTEALLKQVDYLIRSKWVPCLEFSKVGFVFREHNSSPGYYDGRYWTMWKLPMFGCTDATQVLNEVEEVKKEYPDAYVRVIGFDNLRQVQCVSFIAFRPPGCEESGKA

SEQ ID NO: 9490 - protein, 143 aa, Wolinella succinogenes
MFLTRFDPLRDLKEIERRFLTPFGEGGEGGAKSNLRGFAPVVNTREEEKGYFIEVDLPGVQKEDIHIDVKENTLSITGERKLKEEVKEENYYKVESFFGKFQRSFTLPENVDSDAITAQSKDGVLEIFIPKTAPKDAKRIAIS

SEQ ID NO: 9491 - protein, 225 aa, Zea mays
  unsure (1)..(225): unsure at all Xaa locations
MCARSMAPRRPCTTAIALPWLALFLCPHLAGGGAVRFFLASSLDLRPITGGFALFSMAAASSATSVHDFTVKDASGKDVDLSTYKGKVLLIVNVASQCGLTNSNYTELSQLYEKYKDQGFEILAFPCNXQFGGQEPGTNEEIVQFACTRFKAEYPIFDKVDVNGDNTAPIYKFLKSSKGSLFGDNIKWNFSKFLVDKEGHVVERYAPTTSPLSIEKDIKKLLGSS

SEQ ID NO: 9492 - protein, 382 aa, Chromobacterium violaceum ATCC 12472
MTEVVLTGKPKKSVALSGVAAGNTALCTVGRSGNDLHYRGYDILDLAGHCEFEEVAHLLVHGKLPNKAELAGYKKKLKSLRGLPASVKAALEALPAAAHPMDVMRSGVSALGCALPEKDDHNLAGARDIADRLMASMGSMLLYWYHYSHNGKRIEVETDDDSIGGHFLHLLHGVKPSYEWVRAMHTSLNLYAEHEFNASTFTARVIAGTGSDMHSAITGAIGALRGPKHGGANEVAFEIQQRYENPDEAEADIRARVERKEVVIGFGHPVYTISDPRNKVIKEVARELSRSNSDMKMFDIAERLESVMWDVKKMFPNLDWFSAVSYHAMGVPTAMFTPLFVISRTSGWAAHVIEQRQDGKIIRPSANYIGPEDQAFVPLEKR

SEQ ID NO: 9493 - protein, 218 aa, Oryza sativa (indica cultivar-group)
MEVEEAAYRTVWSEPPKRPAGRTKFRETRHPVYRGVRRRGGRPGAAGRWVCEVRVPGARGSRLWLGTFATAEAAARAHDAAALALRGRAACLNFADSAWRMPPVPASAALAGARGVRDAVAVAVEAFQRQSAAPSSPAETFADDGDEEEDNKDVLPVAAAEVFDAGAFELDDGFRFGGMDAGSYYASLAQGLLVEPPAAGAWWEDGELAGSDMPLWSY

SEQ ID NO: 9494 - protein, 343 aa, Vibrio cholerae O1 biovar eltor str. N16961
MKIKALSKLKPEQGIWMNEVDMPELGHNDLLIKIKKTAICGTDVHIYNWDEWSQKTIPVPMVVGHEYVGEVVGIGQEVRGFQIGDRVSGEGHITCGHCRNCRGGRTHLCRNTIGVGVNRTGCFSEYLVIPAFNAFKIPDGISDDLASIFDPFGNAVHTALSFDLVGEDVLITGAGPIGIMAAAVAKHVGARHVVITDVNEYRLDLARKMGVTRAVNVAEQNLEDVMKELGMTEGFDVGLEMSGVPSAFSAMLKTMNHGGRIALLGIPPSSMAIDWNQVIFKGLVIKGIYGREMFETWYKMASLIQSGLDISPIITHHFKVDDFQKGFDIMRSGASGKVILDWQ

SEQ ID NO: 9495 - protein, 424 aa, Acinetobacter sp. ADP1
MSEATGKKAVLKLDGKEIELPIYSGTLGPDVIDVKDVLAAGHFTFDPGFMATASCESKITFIDGNEGVLLHRGYPIDQLATQADYLETCYLLLNGELPTPEQKQEFDAKVRNHTMVHDQVSRFFNGFRRDAHPMAIMVGVVGALSAFYHNQLNIEDVNHREITAIRLIAKIPTLAAWSYKYTVGQPFIYPRNDLGYAENFLHMMFATPADRDYKVNPILAKAMDRIFTLHADHEQNASTSTVRLAGSTGANPYACIAAGISALWGPAHGGANEAVLKMLDEIGTVENVAGFMEKVKTKEVKLMGFGHRVYKNFDPRAKVMKETCDEVLAALGINDPQLELAMELERIALSDEYFIKRNLYPNVDFYSGIILKAIGIPTEMFTVIFALARTVGWISHWLEMHSAPYKIGRPRQLYTGETKRDIKR

SEQ ID NO: 9496 - protein, 397 aa, Xylella fastidiosa 9a5c
MSASFSPHTITLIKSTVPLLAEHGTTIIEAMYHRLFEDPQIEALFNQANQKNGTQIHALAGAILAYARNIDNPGVLASAIERIAQKHVGYAIHPEHYPHVATALLGAIKKVLGDVATSEVLEAWGEAYWFIANLLKDREAVIREGIMTKNGGWIHWRRFVISKRIPESETITSFMLHPEDGGPVVPHQAGQYLTFRFDAAGMPGMKRNYSISCGPNSDHYRITVKREHGTGASAFLHDQAKVGTIIECTPPVGDFFLPSVIERPIVLLSGGVGLTPMVSMMEQIAEAHPDAQVWYVHGTQNRETHAMDAHIRALVSRHKHMKATTFYTQRREADDAEAGFITIDWLRANTPFQKADFYLCGPRPFLRTFVRDLIGAGVPAVQVHYEFFGPMDEEMAA

SEQ ID NO: 9497 - protein, 158 aa, Hevea brasiliensis
SDEEHHFESKADAGASKTYPQQAGTIRKNGYIVIKNRPCKVVEVSTSKTGKHGHAKCHFVGIDIFNGKKLEDIVPSSHNCDVPHVTRTDYQLIDISEDGFVSLLTENGNTKDDLRLPTDENLLTQIKDGFAEGKDLVVTVMSSMGEEQICALKDIGPK

SEQ ID NO: 9498 - protein, 440 aa, Triticum aestivum
MEDAAEGKTNVLQGRYELGRVLGHGNFGRVHAARDLRTGRGVAVKVVAKDKVERAGMVEQIKREIAVMKMVSHPNIVELHEVLATRTKIYLALELVRGGELFARISRAGRLREDVARRYFRQLISAVDFCHGRGVYHRDLKPENLLLDEAGNLKVADFGLSALAGHARPDGLLHTACGTPAYVAPEVLGGNGYDGAKADIWSCGVILYVLLVGALPFQDENLMSMYRKMQRGGFLCPSWVSKDARKLIGRLLDPNPSSRITIASLVESPWFKKTSPIPSPLLEPVPPAAARGNGEDKDEPPEALNAFHLISLSAGFDLSPLFDQEPATGRGTRGGVMRFATREPASGVISRLEGLATGGAMRVTKSGARGGRLEGAERGRKGRLGVAAEFFSVAPSVLVVDVKKDGGDTMEYRSFCSDELRPALKDIVWAAAAAAAAFPR

SEQ ID NO: 9499 - protein, 373 aa, Bacteroides thetaiotaomicron VPI-5482
MKLFDVYPLYDINIVKGQGCKVWDENGTEYLDLYGGHAVISIGHAHPHYVEMISNQVATLGFYSNSVINKLQQQVAERLGKISGYEDYSLFLINSGAEANENALKLASFYNGRTKVISFSKAFHGRTSLAVEATNNPTIIAPINNNGHVTYLPLNDIEAMKQELAKGDVCAVIIEGIQGVGGIKIPTTEFMQELRKVCTETGTILILDEIQSGYGRSGKFFAHQYNHIQPDIITVAKGIGNGFPMAGVLISPMFKPVYGQLGTTFGGNHLACSAALAVMDVIEQDNLVENAKAVGDYLLEELKKFPQIKEVRGRGLMIGLEFEEPIKELRSRLIYDEHVFTGASGTNVLRLLPPLCLSMEEADEFLARFKRVL

SEQ ID NO: 9500 - protein, 526 aa, Zea mays
  unsure (1)..(526): unsure at all Xaa locations
MKPPSSLVHYFKLLVLLALARLTMHVPDEDVLLSLGALRLDGHFSFHDVSAMARDFGNQCSFLPAAVLHPGSVSDIAAIVRHVFSLGEGSPLTVAARGHGHSLMGQSQAAQGIVVRMESLRGPRLQVNDAGVSPPSVDAPGGELWINVLRETLKHGLAPKSWTDYLHLTVGGTLSNAGVSGQAFRHGPQVSNVNQLEIVTGRGDVVTCSPDDNADLFYAALGGLGQFGIITRARIALEPAPXMVRXWIRVLYRLVESFTEDQEMLIMAENSFDYVEGFVIINRTGVLNNWRASFKPQDPVEASHFQSDGRVLYCLELTKNFNSDDTDTMEQEVTVLLSRLRFIQSTLFHTDVTYLEFLDRVHTSELKLRAQSLWEVPHPWLNLLIPRSSIRRFATEVFGRILKDSNNGPILLYPVNKSKWDNKTSVVIPDEEIFYLVGFLSSAPSLSGHGSIAHAMSLNSQIVEFCEEADIGMKQYLAHYTTQEQWKTHFGARWETFERRKHRYDPLAILAPGQRIFPKASLPLSL

SEQ ID NO: 9501 - protein, 204 aa, Oryza sativa (japonica cultivar-group)
MADEEHEVYGQEIPLDGEDVDMGAPGDEAAKMQELDEMKRRLKEMEEEANALREMQTKVAKEMQGLDPNASSSESKEEMDARSVYVGNVDYACTPEEVQQHFNSCGTVNRVTILTDKFGQPKGFAYVEFLEVEAVQEAVKLNESELHGRQIKVAPKRTNVPGMKQPRGGRGFGGHPYMRPYGAPFYNPYGYGYPRFRRPRRPYF

SEQ ID NO: 9502 - protein, 502 aa, Exiguobacterium sp. 255-15
MSTVHEKTIEMKRSVYHLVINGEQVEGTSGETFKTYNPATGEVIAEVAKASKADADRAVQAARDAFDHGKWKMWPVGRRSQVLNKIAGIMRSRFNELVELEILDTGKSLAAAQGQITQAIEDFEFYAGAIVGHRGSVNNVPGQFHNYTEKEPVGVCAQIIPWNYPLMMAAWKVAPAIAVGCSVVVKPATLTPLTAIILGEICLEAGVPAGVVNVIPGSGREIGNHLVEHPNVNKVAFTGSTPVGKDIMGRASESLKRVTLELGGKSPNLVFEDADITAAVDGSLFGIFYNSGQSCEARSRLYIHEDIYDTFMEQFVAKTKQLVLGNPFDKGTHVGAIIDQQQLDVIDGYVQSAKADGATILTGGQVEKVAGFEEGFWYAPTIIADVTHDMKAVQEEIFGPVVVVMKFKDEKEAVRLANDTEFGLGSAIWTKDGARATRIANQIKAGIVMINCPFSAFPGTPFGGYKQSGFGRELCIETLDLYTETKSILSYYGSRPLNPFGL

SEQ ID NO: 9503 - protein, 76 aa, Zea mays
CLYVALQMSVQDANMSSDTDMSKVFEDRTFVSSILNSLPGVDPNDPSVKDLLASLHSQGEQEKKEDTSDKTEDDKN

SEQ ID NO: 9504 - protein, 115 aa, Hordeum vulgare subsp. vulgare
MARTAATKLALVALVAAMLLVAADAAITCGQVSSALGPCAAYAKGSGTSPSAGCCSGVKRLAGLARSTADKQATCRCLKSVAGAYNAGRAAGIPSRCGVSVPYTISASVDCSKIH

SEQ ID NO: 9505 - protein, 474 aa, Erwinia carotovora subsp. atroseptica SCRI1043
MHDKLLIEGKLIAGNGEALAVFNPATGEQIAAIPQADLHQIDAAVLAAESAFAHWGQTTPKTRATLLLKIADAIEENAEVFAKLESLNCGKPYHAVLNDEVPAVADVFRFFAGAARCLSGSAAGEYLEGHTSMIRRDPVGVVASIAPWNYPLMMASWKLAPALAAGNCVVLKPAEQTPLTTFYLAHLLADILPAGVVNIVFGRGADIGDALTGHEKVNMVSLTGSIATGAHILAHTAASVKRTHMELGGKAPVIVFDDADIDQVVDGIRSFGFYNAGQDCTAACRLYVQRAVYDEVVEALGKAVATLKIGDPRDETTELGPLITEPQLERVMGFVERAKALPHITVVTGGERVKGTGFYFQPTVLAGAKQDDEIVQKEVFGPVISITSFDDEAQVIGWANASNYGLASSVWTRDIGRAHRLAACLQYGCTWVNTHFMLVSEMPHGGQKLSGYGKDMSMYGLEDYTIVRHIMIRH

SEQ ID NO: 9506 - protein, 115 aa, Hordeum vulgare subsp. vulgare
MARSAATQLVLVAMVAAMLLVAADAAISCGQVSSALRPCISYASGNGGILPPACCSGVKRLAGAAQSTADKQAACKCIKSAAGGLNAGKAAGIPSMCGVSVPYAISASVDCSKIR

SEQ ID NO: 9507 - protein, 379 aa, Antarctic bacterium DS2-3R
MTEPTIHKGLAGVTADVTAISKVNSDTNSLLYRGYPVQELAAKCSFEQVAYLLWNSELPNDSELKAFVNFERSHRKLDENVKGAIDLLSTACHPMDVARTAVSVLGANHARAQDSSPEANLEKAMSLLATFPSVVAYDQRRRRGEELIEPREDLDYSANFLWMTFGEEAAPEVVEAFNVSMILYAEHSFNASTFTARVITSTLADLHSAVTGAIGALKGPLHGGANEAVMHTFEEIGIRKDESLDEAATRSKAWMVDALAQKKKVMGFGHRVYKNGDSRVPTMKSALDAMIKHYDRPEMLGLYNGLEAAMEEAKQIKPNLDYPAGPTYNLMGFDTEMFTPLFIAARITGWTAHIMEQVADNALIRPLSEYNGPEQRQVP

SEQ ID NO: 9508 - protein, 119 aa, Bartonella chomelii
NEACLKMLQEIGSIEKIPEFIARAKDKNDPFRLMGFGHRVYKNYDPRAKLMQKTCHEVLKELNIKDDPLLDIAMELEKIALSDEYFIEKKLYPNVDFYSGITLKALGFPTEMFTVLFAL

SEQ ID NO: 9509 - protein, 352 aa, Rhodococcus sp. Phi2
MRVFAVQPEDTTIHDLQVPTPSPEGREVLLRVVRAGVCHTDTHLRAGGYDLGSRGMMSMKERGIEYPMVLGHEVVGVVEKVGDGVESVQVGDIRLIYPWIGCGECRQCRAGHDNRCAAGKNLGVARHGGYAENILVPDEKYLVDIDGLDPSWAATLACSGLTAYSAVDKALPLEPDEPVVVFGAGGLGLTAIAILRSRGHRNICAVDVAERNLALARDMGASSTVLSGTGSGADDIRGAAGGPAGAVIDFVNNGATATTAFEVLAKAGIMIQVGLFGGEVTLPTALLALRMIRIEGSFVGTLVQMQDLVRLAQRGELPHIPVVERSLSAAAVSQALDDLTAGGVAGRIVLTA

SEQ ID NO: 9510 - protein, 405 aa, Pisum sativum
PVYISIGCNLPAIPHPTFSRDPVPFSLAPKLSNQMGLEAAVEAAAEFLNKAVKPVLVGGPKLRVAKASDAFVELADASGYALAVMPSAKGMVPEHHPHFIGTYWGAVSTAFCAEIVESADAYLFAGPIFNDYSSVGYSLLLKKEKAIIVMPDRVVIANGPAFGCVLMNDFLKALAKRLKHNNVAYENYHRIFVPDGTPLKSASKEPLRVNVMFQHIQKMLSSETAVIAETGDSWFNCQKLKLPEGCGYEFQMQYGSIGWSVGATLGYAQAVPEKRVIACIGDGSFQVTAQDVSTMLRCGQKTIIFLINNGGYTIEVEIHDGPYNVIKNWNYTGLVDAIHNGEGKCWTTKVFCEEELVEAIAKATGPKKDSLCFIEVIVHKDDTSKELLEWGSRVSAANSRPPNPQ

SEQ ID NO: 9511 - protein, 204 aa, Zea mays
  unsure (1)..(204): unsure at all Xaa locations
MEDEEHEVYGQEIPVDGEDVDMAAGDDATKLQELDDMKRRLKEMEEEAAALREMQAKVAKEMQGVDPNATTSENKEEMDSRSVFIGNVDYAXCTPEEVQQHFNSCGTVNRVTILTDKFGQPKGFAYVEFVEVEAVQEAIKLNESELHGRQLKVAPKRTNVPGMKQPRGRGFNPYHGHPYMRPYGYSPYGYGEXPRFRRPRRPYF

SEQ ID NO: 9512 - protein, 459 aa, Rhodococcus sp. Phi2
MGVYTTTDPATGEEVAQYPEISDAQLDELIGRSAAAYRSWRTTPLEQRRAVLSRAAEIHREQADELAALLTLEMGKPITQAKGEVALVASIYQYYADHAEEFMADEPLDIAGSGTAVVRTEAIGPLVGVMPWNYPYYQVARFAAPNIALGNTIILKHARNCPQSALAIERVLTEAGLPDGVYLNAFISSAQVAAAIADPRVQGVSLTGSEKAGSAVGEVAGRHMKKCVLELGGSDPFIVLGDADVDAAAAAAVVGRLGNGGQACTASKRFLVEEPVYDEFVRKFLDGMISWQPSDPTSPETKLGPLSSRSAVDELDELVQDAVSRGAQVLTGGDPRDEKGAYYPPTVLVGVTPDMRAYYEELFGPVAVVHRVGSLDEAIEAANDSPFGLSSSVFTSDPQKADRVAEELETGMVWINSTSKSSPDLPFGGVKRSGVGRELARFGFDEFANKKLVRKPGKK

SEQ ID NO: 9513 - protein, 510 aa, Zea mays
  unsure (1)..(510): unsure at all Xaa locations
MGAFAKEEHQFLAELGLAQRNPGAFACGAWGGSGPTVTSTSPTNNQVIAEVVEASVHDYEEGMRACFDAAKTWMAIPAPKRGEIVRQIGDALRAKLHHLGRLVSLEMGKILPEGIGEVQEIIDMCDYAVGLSRQLNGSIIPSERPNHMMMEVWNPLGVVGVITAFNFPCAVLGWNACIALVCGNCVVWKGAPTTPLITIAMTKIVASVLEKNNLPGAIFTSFCGGTEIGQAIXLDIRIPLVSFTGXSTRAGLMVQQQVSARFGKCLLELSGNNAIIVMDDVDIQLAVRSVLFAAVGTAGQRCTTCRRLILHENIYQTFLDQLVEVYKQVRIGDPLEKGTLLGPLHTPASKENFLKGIQTIKSQGGKILFGGSAIESEGNFVQPTIVEITPSAPVVKEELFGPVLYVMKFQTLKEAIEINNSVPQGLSSSIFTKRPDIIFKWLGPHGSDCGIVNVNIPTNGAEIGGAFGGEKATGGGREAGSDSWKQYMRRATCTINYGSELPLAQGINFG

SEQ ID NO: 9514 - protein, 186 aa, Triticum aestivum
  unsure (1)..(186): unsure at all Xaa locations
MAPAVMASSATTVAPFQGLKSTAGLPVSRRSSGSLGRVSNGGRIRCMQVWPIEGIKKFETLSYLPPLSTEALLKQVDYLIRSKWXVPCLEFSKVGFRLPVKHNSSPRVLRRSILGQCGSCLCSGCTDATQVLNEVEGGQEGYPDXFRVIGFDNLRQVQCVSFIAFRPQVXRSPGKAKLQVETMAYV

SEQ ID NO: 9515 - protein, 193 aa, Oryza sativa (japonica cultivar-group)
MSLSTIARRLCCSRPTSGGRLSAVWAHLYSTEAAKDTGAKKYKYPEVYDPYGPMSPPSQKVVDLADRIAALPPEEIKQIAPALLLRLNQPPPQAISGQGFSFSPQGGGGAAGAAKAEEKKAEKTVFDVKLEKFDAAAKIKIIKEIRTFTDLGLKEAKELVEKAPVILKQSLTKEEAEAIIEKIKVAGGVAVME

SEQ ID NO: 9516 - protein, 481 aa, Bacteroides thetaiotaomicron VPI-5482
MEDLNFRKGDAKTDVFGSDRMLQPSPVERIPDGPTTPEVAYQMVKDETFAQTQPRLNLATFVTTYMDDYATKLMNEAININYIDETEYPRIAVMNGKCINIVANLWNSPEKDTWKTGALAIGSSEACMLGGVAAWLRWRKKRQAQGKPFDKPNFVISTGFQVVWEKFAQLWQIEMREVPLTLEKTTLDPEEALKMCDENTICVVPIQGVTWTGLNDDVEALDKALDAYNAKTGYDIPIHVDAASGGFILPFLYPDTKWDFRLKWVLSISVSGHKFGLVYPGLGWVCWKGKEYLPEEMSFSVNYLGANITQVGLNFSRPAAQILGQYYQFIRLGFQGYKEVQYNSLQIAKYIHGEIAKMAPFVNYSENVVNPLFIWYLKPEYAKSAKWTLYDLQDKLSQHGWMVPAYTLPSKLEDYVVMRVVVRQGFSRDMADMLLGDIKNAIAELEKLDFPTPTRMAQEKNLPVEAKMFNHGGRRHKTVKK

SEQ ID NO: 9517 - protein, 106 aa, Capsicum annuum
MLTDFVRGVDCPHAEAVTCGQIQVGVVNCLPYLQNRGPLGRCCGVIKDLLKLCKTPHERRKSCKCVKTAANTIKGIDFGKAAGLSGVCGVKIPFEISPSVDCSKVK

SEQ ID NO: 9518 - protein, 114 aa, Capsicum annuum
MDMFGKIACFVLLCMVVVAPSAEALSCSQVTSGLAPCLPYLQGRGPLGGCCSGVKDLLAAAKTPADRKTACTCMKSTANSIKGIDAGKAASIPATCGVNIPYKISPSTDCTKVE

SEQ ID NO: 9519 - protein, 256 aa, Triticum aestivum
VGREGAMEQGEEDGDWMMEPAAGKKGGVMIDRKKRFSEEQIKSLESMFATQTKLEPRQKLQLARELGLQPRQVAIWFQNKRARWKSKQLERQYAALRDDYDALLSSYDQLKKDKQALLNQLEKLAEMLREPGGAKCGDNAGAAARDDVRLAVAVMRMMGEFGEAGGASKACAAAKGYAGRDGRGLSGKDALVGDDDDGACLLLPTSLDGPTAHSGGFAADGDGPESLPSSRRRPYPAPLEAVPSVRGREYKCQQLS

SEQ ID NO: 9520 - protein, 484 aa, Synechococcus elongatus PCC 6301
MAAPILFWHRRDLRLSDNIGLAAARAQSAQLIGLFCLDPQILQSADMAPARVAYLQGCLQELQQRYQQAGSRLLLLQGDPQHLIPQLAQQLQAEAVYWNQDIEPYGRDRDGQVAAALKTAGIRAVQLWDQLLHSPDQILSGSGNPYSVYGPFWKNWQAQPKPTPVATPTELVDLSPEQLTAIAPLLLSELPTLKQLGFDWDGGFPVEPGETAAIARLQEFCDRAIADYDPQRNFPAEAGTSGLSPALKFGAIGIRQAWRAASAAHALSRSDEARNSIRVWQQELAWREFYQHALYHFPSLADGPYRSLWQQFPWENREALFTAWTQAQTGYPIVDAAMRQLTETGWMHNRCWMIVASFLTKDLIIDWRRGEQFFMQHLVDGDLAANNGGWQWSASSGMDPKPLRIFNPASQAKKFDATATYIKRWLPELRHVHPKDLISGEITPIGRRGYPAPIVNHNLRQKQFKALYNQLKAAIAEPEAEPDS

SEQ ID NO: 9521 - protein, 114 aa, Capsicum annuum
MEMVGKIACVVLLCMVVVAPHAEALTCGQVQSRMTPCLPYLTGSGPLGRCCGGVKGLLGAAKTPADRKTVCSCLKSAAGSIGGINVRKAAGLPNMCGVNIPYQISPSTDCTKVQ

SEQ ID NO: 9522 - protein, 125 aa, Thermoanaerobacter tengcongensis MB4
MSKEEILQAIKNMTVLELAELVKALEEEFGVSAAAPVAVAAAPAAGAPAAAPAEEKTEFDVILQEVGSDKIKVIKVVREITGLGLKEAKDLVDSVPKPIKEGVSKEEANQIKAKFEEVGAKVEIK

SEQ ID NO: 9523 - protein, 441 aa, Chlorobium tepidum TLS
MKSFLSKSGAIAAGLLLAAATFSPPIQAATPTPDAVNAFAIDNFFLFICAVLVLFMQAGFALVETGLNSAKNAVNILFKNLMDMAIGGIIYYFVGYGLMYPGEAFSGGFFGFGGPGISTAMPEIAGGTLYPAVDFLFQVAFAATAATIVSGAVAGRMQFRAYLIYSAVISAVVYPISGFWLWGGGWLKALGFHDFAGSLLVHALGGFAGLAGAIVLGPRIGRFNEDGTPNAMPGHNLALSTLGVFILLIGWYGFNPGSQLAIVGGDNTAAVMKIAVNTTLAACAGAVVAMIFAWGLFKKPDLTMALNGMLAGLVAITANCDVVSYNASLIIGAVGGILVVLGIMLLDKLRIDDPVGAWPVHGLNGIWGGVAAWIFGGQPMVAQLVGSLVVPFWGFVTMMVLFLILKAMGILRVHKDEEMKGLDISEHEEEAYYGFDIYTTQ

SEQ ID NO: 9524 - protein, 309 aa, Bartonella henselae
DGNEGILLYRGYPIDQLAEKGDFLESCYLLLYGELPTKQEKIDFDRCIMQHTMVHEQFARFFHGFRRDSHPMAVMIACLGAMSAFYHDSIDITDPQQRMIASIRLISKVPTLAAMAYKYSIGQAFVYPRNDLSYAANFLRMCFSVPCEEYKINPVLTRAMDRIFTLHADHEQNASTSTVRLAGSSGANPFACIAAGVACLWGPAHGGANEACLKMLQEIGSVERIPEFIARAKDKNDSFRLMGFGHRVYKNYDPRAKIMQQTCHEVLKELNIQNDPLLDIAITLENIALNDEYFIEKKLYPNVDFYSGI

SEQ ID NO: 9525 - protein, 631 aa, Zea mays
  unsure (1)..(631): unsure at all Xaa locations
MASVKLGSKPDAFKRQGQAWFCTTGLPSDVTVEVGDMSFHLHKFPLLSKSAFLERSIEENSDQEECIIKLNDIPGGAKSFELVARFCYGVKIELSPANVVYLRCASEHLEMTEEVAEENLIAQSEMFLNQVVLRNWKDSLAALETCDDLLPHAEDLQIVNRCIESLASKATSNPNLFGXWPIREHGMMQSXPGGSVLWNGISTGARPRNFNSDWWYGDASSLSFPMYKRLISTMESRGIRPEIIAGSLTYYAKKYLPGLRRHSHSMGTMPLTATLSEVEQKNLLEEIDRLLPLHRGIASTKVLLGLLRTAMILKASPTCISNWEKRIGMQLDQATLEDLLLPNFSYTMETLYNVECVHRILDHFLAMDQANGGESPCLDDVMASPSLTPITSVAKLIDGYLAEIAPDINLKPPKFQALASAIPEYARPLDDGLYRAIDIYLKAHSWLSEAEREQFCRLLDCQKLSLEACTHAAQNERLPLRVVVQVLFFEQLQLRTSIAGCLLVSDNLEGSRPLRSGIATSGEAGGWATAVRENQVLKVGMDNMRTRLAELEKECSSMRQEIEKLGGRAGKGGGGGWASRVVPRRLGLKVRSQMCSAQEGSVSEQHRSMSAKLDKLQAKVSKQKKQLAADA

SEQ ID NO: 9526 - protein, 484 aa, Bordetella parapertussis 12822
MENLGYPARLELYVAGQWRGVEGRRTQVVVNPSTQQPLGELPLASAEDIDDALAAADQAFGDWARTTAWERADILQRAAALIEARRDRLAVVLTLENGKPLADSHGELDRVVETILWCAEEGKRTYGRVLPARAQRLSQSSLKRPVGPVAAFVPWNFPAALAARKLAAAMAAGCTVVLKPAEETPAICIELVRAFVDAGTPAGVVNLLYGVPAQVSERLIASPIIRKVSFTGSVAVGRLLASMAAGHLKPATMELGGHAPVVVFDDVDADRVAKMCVGFKYRNAGQVCLSPSRFYVHERIADRFAESFVRHAGLLRVGDGMEEGVQMGPLNNVLRLQAAERLVEQAVGAGASLALGGRRIGQRGYFYPPTVLEGVPDAADILAEEPFCPVAPIMRFGSMDEVIGRANHPSLGLAAYAFTNRMATSAEFAERIEAGWIGINNFVPALADAPIGGMKDSGLGYEGGPEGLDAYLHARFVSQLNVEV

SEQ ID NO: 9527 - protein, 58 aa, Glycine max
MSALFNFHSFLTVILLGICACTYFKMQFPAILDQKTGFRGFFWKAARIGASVLCLTAV

SEQ ID NO: 9528 - protein, 474 aa, Burkholderia cepacia R18194
MRTSQQSYIDGQWLDPADSRSIDVIDPSTARPYAQLRIGGTADVDRAVGAAKQAFDTYSRWPVDERVALLRRVLEIYQHRYEEVAQTISQGMGAPIAFARAAQAAVGTAHLEQTIRALQSFRFSTQTDSLLVSHEPIGVCALITPWNWPINQIVCKVAPALAAGCTMVLKPSEIAPFSAILFAEILDEAGVPPGVFNLVHGYGHEVGDALSRHPDVDMVSFTGSTRAGVEVAKAAADTVKRVHQELGSKSPNLILPDADIEDAVTRGVRSCFSNSGQSCNAPTRMLVHVDHLALAEQAARREAERTVVGDPRSTETGIGPVVSRTQFDRIQHFIRLGIEEGAMLVAGGPGRPDGLGDGFYVRPTVFSNVTPDMTIAREEIFGPVLAIMTYRTEDEAVALANDSVYGLAAYVQTKDPERARKVAARLRVGNVHINYPPWNPAAPFGGYKRSGNGREYAEFGLVEYLETKGTTGYA

SEQ ID NO: 9529 - protein, 465 aa, Burkholderia cepacia R18194
MNAVDVNLDADLQAIGKRHLLMHFTHADAYRDHALTVFDRGEGCWLVDRNGKRYFDGLAGLYCVQVGYSHGAEIGDAIREQMVRLPFATNWGVGHEPAIKLAHKLAALAPEGLNRVFFTSSGSESNESAIKLVRQYHQSRGEPQRRKFIARRVAYHGTSFGALALNGMTNFRKHFEPLMSGVRHVGNTKRYGRPVGETEAQFTRHLLDEIESLIVQEGPDTVAALVVEPLQNAGGSLTPPAGYAAGLRDICDRHGVLLVADEVICGFGRLGEYFGSARYGLKPDIITFAKGIASGYVPLGGVIASDTVVDTVLNGPQQMFLHGATYGGHPVACTAALANLAIMEREGVLENVRSNEAVFRQTLDGLLELPCVGDVRGDGYHYSLELVTDKAARRWAAGVSAQAFVSTLLAPAIFDAGLLCRAGVDHEGTPIVQFSPPLVMSRDEIVWFVAKIRDILVDTYARATR

SEQ ID NO: 9530 - protein, 144 aa, GIBBERELLA ZEAE PH-1
MDCITAFNDLKLNKKYKFIVYKLSDDYKEIVIDKASESRDWEDFRETLVNATAKSRTGAVGKGPRYAVYDFEYNLASGDGIRNKITFIAWSPDDAGIQPKMIYASSKEALKRSLTGIATELQANDTDDIEYDSILKTVSKGLAA

SEQ ID NO: 9531 - protein, 240 aa, Papaver somniferum
VQLRRMENKINRQVTFSKRRSGLLRPCAEMSVLCDAEVALIVFSTKGKLFEYSTDSGMDRILERYERYSYAERELVTTEIDQGNWSLEYSKLKSKIEILQKNQRHFMGEDLQSMSLKELQNLEQQLDVALKQIRSRKNQLMYESISELQKKEKALQEQNNKLGKQLKEKEKEVAAQQQQASQFSQGQSSPSFLLSQSLPSLNIGSGSYQARGGDNGNEEGNRTQTTRTNTATLMPPWMLN

SEQ ID NO: 9532 - protein, 348 aa, Corynebacterium sp. ST-10
MKAIQYTRIGAEPELTEIPKPEPGPGEVLLEVTAAGVCHSDDFIMSLPEEQYTYGLPLTLGHEGAGKVAAVGEGVEGLDIGTNVVVYGPWGCGNCWHCSQGLENYCSRAQELGINPPGLGAPGALAEFMIVDSPRHLVPIGDLDPVKTVPLTDAGLTPYHAIKRSLPKLRGGSYAVVIGTGGLGHVAIQLLRHLSAATVIALDVSADKLELATKVGAHEVVLSDKDAAENVRKITGSQGAALVLDFVGYQPTIDTAMAVAGVGSDVTIVGIGDGQAHAKVGFFQSPYEASVTVPYWGARNELIELIDLAHAGIFDISVETFSLDNGAEAYRRLAAGTLSGRAVVVPGL

SEQ ID NO: 9533 - protein, 487 aa, Rubrivivax gelatinosus PM1
MREPNEADDAAVARARAADAAPLRSVAALPGPRGWPLIGNLLQFDLPRLHRQFEDWADRHGPTYRLRLGRREVLVISDAETIAALLRDRPDTWRRMRPIEAVIREAGGHGVFSAEGDDWRRQRRLVMSAFDPGHLKRFYPSLQRVTERLMASWREAARRGEAIDLQASLMRYTVDVTTGLAFGVDLNTIDAPHPLQEHLDKLFPMLFRRVNLPFPYWHYLRLPIDREYDRHLRRVHEAVRGFVQAARQRLQDEPTRRERPTDLLEAMLAARDADGSALTEEEVAGNVLTVLLAGEDTTANTLGWAIWLLHEHPDDWQALVAEVDAALGDARLPPSFDAARGLASIEASVGEAMRLKPVAPLLFMEANRETALAGFRLPPGAVVFCLMRRAALDARLAEDVADFRPGRWQDGADRAVQKASMPFGAGPRLCPGRYLALLEMKMVLGMLARNFELLEVGPEGGGAPGERMAFTMFPVGLKMRLAERARR

SEQ ID NO: 9534 - protein, 228 aa, Arabidopsis thaliana
MAESQTGGGGGGSHESGGDQSPRSLNVREQDRFLPIANISRIMKRGLPLNGKIAKDAKETMQECVSEFISFVTSEASDKCQREKRKTINGDDLLWAMATLGFEDYIDPLKVYLMRYREMEGDTKGSGKGGESSAKRDGQPSQVSQFSQVPQQGSFSQGPYGNSQSLRFGNSIEHLEVLMSSTRTLFITIFRDSTMPVVSENLSDPLSIDMDCEAIYHHFIGLLILSCK

SEQ ID NO: 9535 - protein, 274 aa, Mycoplasma gallisepticum
MNHSKINWFPGHMKKTLDDINKIKKHIDLVIQVLDARAINLTSNPDLLEIFKQKKIINVALKSDLADLSYQYDPETIVTNIRDHQFSNFLLNKLHQILSDKIKRLQAKGLVTPHFNIMVIGLPNIGKSSLINKLIKKNHNKVENKAGVTKRQTFVKLNKNFTLYDTPGVLYKRIDDFILGAKLSLLNVINLEVIPMQEVLSFAYSYLNQHYHNQLLEWAKQEIIPEQFHEFIEQYAHKKGFLNKNNAIDLNATYMNFYQDISLAKIAKVNYEKN

SEQ ID NO: 9536 - protein, 500 aa, Agaricus bisporus
MPSIFTHQWDTPVYKGSTSINTGLFINGEFVDGVKNTTIDVVNPANGKLITKISEATEADIDIAVEAAHKAFETTWGLNCSGSKRGDMLYKLAQLMEKNIDDLSAIEALDNGKTFLWAKSVDLSLSISTIKHYAGWADKNFGQVIETDEKKLTYSRHEPIGVVGQIIPWNFPLLMLAWKIGPALATGNCIVLKPSEFTPLSALRMCALIQEAGFPPGVVNVVTGYGSTTGQAISSHMKIDKVAFTGSTLVGRKVMEAAAKSNLKNVTLELGGKSPVVIFDDADLEQSVNWTAHGLFWNHGQACCAGTRIFVQEGIYDKFLQKFTDKIKEIKLGDPFGLGIDQGPQVSQIQYDRIMSYIESGRAEGATVHVGGERHGNEGYFIQPTIFTDTTPDMKIVKEEIFGPVGAVIKFKDGKEVIKQANDSNYGLAAAVFSQDINKAIETAHAFKAGTAWVNCANTIDAGVPFGGYKQSGIGRELGEYALHNYTNVKAVHVNLNWKM

SEQ ID NO: 9537 - protein, 1786 aa, Neurospora crassa
MYQNGQRDPPRPFAVPPPPPPMSPPQVGSGVAGINSVMNIPPPPPRYPGAPGTVGGSLLPPPPGPPPGNPGFPPSAIAPPSALGAAPWHGAWGRPYNGQTAFNLPPPPPGGNGGLQAYNPLLHAQAAAAAAAAAASASNTPGPPATSITIPPPPPPSEQMSATYIPSAGDTYGEGVGIPGLGLPEELGGPGNWTGAEQQRLGGTSMEDAHRLHAAPTADRGLSTTSNTPNSSSAIPPELAAQWPLDRVLMWLQANSFSQDWVNTFKVLNLHGAQFLELGSGHGGRGNFGMMHQQVYPQLAHECQMSKTGWDQTKEREEGKRMRRMIRGIVTGRSVDPSKVAASGGAQGGAGGAGGGGHARRESVSASVPPSAGPDSADSPNVEFSKSHLFVQEEQVQSGPKAPGPGFAGRRFSQSRATTMPLLTSTMSSGEPNHRSMMRNLDIDSARRHSPSTSNVSESGDLNAGTFRTVGRERQDSPIGGSPNPSSALFPSNAGNTILSSSPHRSGSRFGHRSRNSSDSVSSNAAQYGSGIPADAAAMFKNGSLADMIKNSFNSNNPDRRNGQDGGRPLGVVETGDRSAGTDPPNSAKGPKSFLSFLSRNKRKEDGTSPDELDSPTSPATGFKAHSLGSRAGHVSETSLDQRPGSSISTHEHSVGFQSGHSRKKSVVSTRVYLLATLDHWNYRMLDVTDIDSAHDLRQLVCINLGLPDSEGAAIYVTELGKFDHEEPLDDMKLLTNKRLRADAIGTLKLFVKPGGLTSSPYPGPGTQSGQPSSYVPRDAPPMDEETFNRLNGQRQRSSSSPPTSRQNTISSKDRDEKMPVPEPVEHKAEPPRKHAIKETSPIGETTPFGIVGRKVDFDQPRLSPFEDKRPDHLFPVRKAPAPPGDPSATLKKVNSLSKKTGQGFRPSTAHATQHHHHNAIDHGYHQRRVSTDIRENMTSERQTRRPAAIRGTAEVPSPSGGIGSLLINIGGHLGGIGHPVAGGARALSPNRVASAPVGHGGEMSEQQRDAKLRYQAARAPSPSLSPNARRRPSESHISQQQYQQNHRPPSSQQHHPHLQHQAQPQPQPQPQQQQQQQQQQQQQQQYQPRQQQTQQPQQQQQAQQPQQQQQAPAQHEESKRKSHGPDVDFSDNDVRFTPPPESESLNASSNHQDYADDQDDSDDSDDGLFAVPISKNKTAETSKTKDNSGGSDEGLGKRPSLKVATDRSKKNLSVAFTTPQASPRMASFTDETEHASVPASSGHGHRQSAPVPSGSSKEWEQDETECKIGRRKSFIEKDVWANRPPTDALINNLEDFFPNLDVDQPVLEEGGDTEVEVDAPSPIAEVDESQFQTRPQPMAETMAQSNTAVASSSNNNAPMLPPLNRVSSAFNESDTLGSDESTLKALESRPPSMVSGSVRRSRGLGRMKSIREVARGAHEAHKRYTQTSMQTNVATPAVPNATTNLMRRKSTKMFNANIVQIEPRRGSILSTIPQETLPTQDNINTLPKRQTTFRWFKGQLIGKGTFGRVYLGMNATTGEFLAVKEVEVNPKAAQGDKKKMQELVAALDQEIDTMQHLDHVNIVQYLGCERKETSISIFLEYISGGSIGSCLRKHGKFEEPVVASLTRQTLSGLAYLHREGILHRDLKADNILLDLDGTCKISDFGISKKTDNIYGNDKTNSMQGSVFWMAPEVIRSQGEGYSAKVDIWSLGCVVLEMFAGRRPWSKDEAVGAIYKIANGEAPPIPDDIREEITPIAIAFMLDCFTVDPTDRPTADVLLSQHPFCELDPNYSFMDTELYAKIRGTY

SEQ ID NO: 9538 - protein, 373 aa, Nicotiana tabacum
MAIEHNEQQELSQSFLLDALYCEEEEEKWGDLVDDETIITPLSSEVTTTTTTTTKPNSLLPLLLLEQDLFWEDEELLSLFSKEKETHCWFNSFQDDSLLCSARVDSVEWILKVNGYYGFSALTAVLAINYFDRFLTSLHYQKDKPWMIQLAAVTCLSLAAKVEETQVPLLLDFQVEDAKYVFEAKTIQRMELLVLSSLKWRMNPVTPLSFLDHIIRRLGLRNNIHWEFLRRCENLLLSIMADCRFVRYMPSVLATAIMLHVIHQVEPCNSVDYQNQLLGVLKINKEKVNNCFELISEVCSKPISHKRKYENPSHSPSGVIDPIYSSESSNDSWDLESTSSYFPVFKKSRVQEQQMKLASSISRVFVEAVGSPH

SEQ ID NO: 9539 - protein, 336 aa, uncultured gamma proteobacterium eBACHOT4E07
MIRNFLINILFSIPVWLIELVYKFNKDVKRGFIFDSQSRMLFALMPKLDLHKIEDDDIPKIRNLINEKRKNLRLSNKTKKNVITKDHFIDQENNLKLREYIPYKTDNDNVILYFHGGGYVLNSIDTHNLTVSYFSEKLRTRIFSLAYGLSPENKYPHAMNQALSAIDWLVKNGHHIKNISLCGDSAGAHLAASVAHSLSNDQKENVHSQFLIYPMCDPSCASESIELFKDNYLLTKESMKWFWQKFKNNDEDNLKDTFNLLLFNPNKDFPKTIIVTAGFDPLSDEAEKYAFLIHQSGNYVKQLHYPSLFHGFAAMTRLKSANKAVNDFLLEYKKIL

SEQ ID NO: 9540 - protein, 367 aa, Nicotiana tabacum
MVFPLDTQLLNPIFDVLYCEEDRFLDDDDLGEWSSTLEQVGNNVKKTLPLLECDMFWEDDQLVTLLTKEKESHLGFDCLISDGDGFLVEVRKEALDWMLRVIAHYGFTAMTAVLAVNYFDRFVSGLCFQKDKPWMSQLAAVACLSIAAKVEETQVPLLLDLQVADSRFVFEAKTIQRMELLVLSTLKWKMNPVTPLSFIDHIMRRFGFMTNLHLDFLRRCERLILGIITDSRLLHYPPSVIATAVVYFVINEIEPCNAMEYQNQLMTVLKVKQDSFEECHDLILELMGTSGYNICQSLKRKHQSVPGSPSGVIDAYFSCDSSNDSWSVASSISSSPEPQYKRIKTQDQTMTLAPLSSVSVVVGSSPR

SEQ ID NO: 9541 - protein, 231 aa, Zea mays
  unsure (1)..(231): unsure at all Xaa locations
MATSELPSESDAFTFPCGDDGTTSPALSPPVVISVLASILERHIALNERAMAAASGLDQSAPGDDDDNSDPAAAAARKRARAFDGGTVLDMSLHAFLERFSRYAHVSPQVYVVAYAYLDRLRRSAGVRVVRANAQRLLTTAILVASKFVEDRNYRNSYFAAVGGLAAAELSALELDFLFLMQFRLNVXAGVFRSYCRHLEREVSHGGWYRVDRPLVCAGEARAQHRQAAAV

SEQ ID NO: 9542 - protein, 164 aa, Zea mays
MADDGGSHEGSGGGGGVRERDRFLPIANISRIMKKAVPANGKIAKDAKETLQECVSEFISFVTSEASDKCQKEKRKTINGDDLLWAMATLGFEEYVEPLKIYLQKYKEMEGDSKLSTKAGEGSVKKDAISPHGGTSSSSNQLVQHGVYNQGMGYMQPQYHNGET

SEQ ID NO: 9543 - protein, 570 aa, Zea mays
MAGGGVEDVYGEDRATEEQLITPWAFSVASGYTLLRDPRHNKGLAFSEAERDAHYLRGLLPPALASQELQEKKLMQNLRRYEQPLHRYIAMMDLQERNERLFYKLLIDNVEELLPVVYTPTVGEACQKYGSIYRRPQGLYISLRDKGKILEVLKNWPERSIQVIVVTDGERILGLGDLGCQGMGIPVGKLSLYTALGGVRPSACLPITIDVGTNNEALLNDDFYIGLRQRRATGEEYHELVEEFMAAVKQNYGEKVLTQFEDFANHNAFDLLEKYRESHLVFNDDIQGTASVVLAGLLAALKVVGGTLADHTYLFLGAGEAGTGIAELIALEMSKHTGSPIEECRPKIWLMDSRGLIVASRKESLQAFKKPWAHEHGAVETLLEAVRSLKPTVLIGTSGKGGTFTKDVVEAMASQNERPVVFALSNPTSHSECTAEQAYTWTEGRAVFASGSPFPAVELDGRALVPGQSNNAYIFPGFGLGVVISGAIRVRDDMLLAASEALAEQVTEAHYAKGLIFPPFTNIRAISARIAAKVAAKAYELGLASRLPRPDDLVSYAESCMYTPTYRSYR

SEQ ID NO: 9544 - protein, 99 aa, Glycine max
MVRWDNRMSASIPDEDIFYTVGFLHSSGFDNWKAYDAQNKEILQFCNDSGIKVKQYLPHYRTQEDWTNHFGPKWRTFVERKHQFDPKMILSPGQRIFNN

SEQ ID NO: 9545 - protein, 207 aa, Triticum aestivum
DCSPLMLRLAWHSAGTFDVSSKTGARRHAGLDIAVRMLEPIKEEIPTISYADLYQLAGVVAVEVSGGPVIPFHPGREDKPQPPPEGRLPDATKGSDHLRQVFGKQMGLSDQDIVALSGGHTLGRCHKERSGFEGPWTRNPLKFDNSYFTELLSGDKEGLLQLPSDKTLLTDPVFRPLVEKYAADEKAFFEDYKEAHLRLSELGYAEA

SEQ ID NO: 9546 - protein, 249 aa, Pisum sativum
GKSYPTVSPDYQKAIEKAKRKLRGFIAEKKCAPLILRLAWHSAGTFDSKTKTGGPFGTIKHQAELAHGANNGLDIAVRLLEPIKEQFPIVSYADFYQLAGVVAVEITGGPEVPFHPGREDKPEPPPEGRLPDATKGSDHLRDVFGKAMGLSDQDIVALSGGHTIGAAHKERSGFEGPWTSNPLIFDNSYFTELLTGEKDGLLQLPSDKALLTDSVFRPLVEKYAADEDVFFADYAEAHLKLSELGFAEA

SEQ ID NO: 9547 - protein, 174 aa, Glycine max
MSDAPASPSHESGGEQSPRGSLSGAAREQDRYLPIANISRIMKKALPPNGKIAKDAKDTMQECVSEFISFITSEASEKCQKEKRKTINGDDLLWAMATLGFEDYIEPLKVYLARYREAEGDTKGSARSGDGSARPDQVGLAGQNAQLVHQGSLNYIGLQVQPQHLVMPSMQSHE

SEQ ID NO: 9548 - protein, 191 aa, Blumeria graminis
MSLRCVVVGDGAVGKTCLLISYTTNKFPSEYVPTVFDNYAVTVMIGDEPYTLGLFDTAGQEDYDRLRPLSYPQTDVFLVCFSVTSPASFENVREKWFPEVHHHCPGVPCLIVGTQTDLRDDLSVREKLNKQKMQPVKREDGERMAKDLGAVRYVECSALTQYKLKDVFDEAIVAALEPPAPKKKHRNCLIL

SEQ ID NO: 9549 - protein, 416 aa, Ehrlichia canis
MVKEAVLELDGQKVKLPVLCDTNGNKVIDITSLYKGTGILTYDPGFMSTAACESKITFIDGNKGILCYRGYNIADLVNNNKSFIEIVYLLFYGSFPSVDNLKDFMLQISQEYMPPEMVCDVIKSFSQDSHPMTILMACFSALASYYHDQAVDKDGLKHPKLAVAKVASIIAMIYRYTTNQDFIEPNHGLSYSENFIHMMFDISSYKFTQVVAKALDVIFTLHADHEQNASTATVRLAGSSGADLFACLVAGIATLWGPAHGGANEAVINMLMAIEKPSNVKQFIQKVKDGNKSTRLMGFGHRVYKNYDPRAKIICEICKEVLNDLGVNDPLLEIALELENIALQDSYFIERSLYPNVDFYSGIILKAIGIPVRMFTTLFALARTSGWSAQWYEMVADKNYKICRPRQLYTGHIAKI

SEQ ID NO: 9550 - protein, 161 aa, Xanthomonas axonopodis pv. citri str. 306
MSDISTFAFTDLEGRTQSMRDYAGNVLLVVNVASKCGFTPQYAGLQALWQRYRERGLVVIGFPCDQFGHQEPGDAAQIRQFCSLDYAVDFPLAAKIDVNGNGAHPLWQWLKHEQRGVLGSEAIKWNFTKFLIGRDGRVLERYAPTTKPEALATEIERALDA

SEQ ID NO: 9551 - protein, 344 aa, Mesorhizobium loti MAFF303099
MTETLATDDDREELDLLLRGFQVSRMLRLIADLGVADKIPTDGQVTVKDIAAACAVLPEPMLRVLRALAAFRIFEVTADGSVAHTPRSRLLRTDTLNSLHHAARFWTGPGSWGAWNKLDVAMTGGTPHEAAWSTGRFAYLKQHPDEARLFDAMMANFPDNRHAAVAAAYDFSGASLIADIGGGNGAALRQILARFSTPRGLVFDREDVITAVTSNDLMQGRITVQGGSFFDQVPCGADIYMLIRVLHDWPDEDCLRILRACRAAMGPQARLLLGEQILEPDPARGRATGYLIDVQMMTMFGDARARSEAEFRGLFDQSGFSLRQVIPTASPVSIIEAAPIAGPF

SEQ ID NO: 9552 - protein, 406 aa, Magnaporthe grisea 70-15
MSFSGMLNRLHGQPESYDKKSKYRFGKTLGAGTYGIVREAEGQTGKVAIKIILKKNVKGNERMVYDELEMLQRLQHPHIVRFVDWFESRDKYYIVTELATGGELFDRICEQGKFTEKDASQTIKQVLGAVDYLHSKNVVHRDLKPENLLYLSKAPDSDLVLADFGIAKMLDSRDEVLTTMAGSFGYAAPEVMMKKGHGKPVDMWSMGVITYTLLCGYSPFRSEGLQDLIEECSNAQVTFHDRYWRDVSEDAKNFIRSLLQANPDDRATSGQALRHPWLSGENATDHNLLPEIKSFMAKARLRRGIEMVKLANRIQTLKLQEEDPDNTDMPDDAVEAADDSQGNAGSSGGSGLFKPGEKKTMSKAVKGAIFREVVLAKVREMKTQEETLKVAEEVEKEARRKSFTGS

SEQ ID NO: 9553 - protein, 312 aa, Azotobacter vinelandii
MGVCGSDVHYYTHGRIGHFIVDQPMVLGHEAAGTVIEVGSNVTHLAKGDRVCMEPGIPNPRSKASRLGLYNVDPSVVFWATPPVHGCLTPEVVHPAAFAYKLPDHVSFAEGALVEPFAIGMQAAVKARIKPGDVAVVIGAGTIGMMTALAALAGGASQVLVSDLMVEKLAIAQRYEGITAVNVREQSLQDKVAEATGGWGADVVFEASGSARAYGDALAAVCPGGALVLVGMPVEPVLFDVVAAQAKEIRIETVFRYANVYERAVNLIASGKVDLKPLISATFPFERGVEAFERAASAQPGDVKVQITFGDA

SEQ ID NO: 9554 - protein, 197 aa, Bacillus cereus G9241
MDTNITWHTASVSKDERRVKNGHHSFVIWFTGLSASGKSTVANAVARKLFEKNIGNYVLDGDNIRHGLNKDLGFSESDRMENIRRIGEVAKLFVDQGTVVLTAFISPFRVDRKQVRDLLAADEFIEVFVKCPIEECEKRDPKGLYKKARKGDIKDFTGIDSPYEEPEKAELIVQTHKYSIEECAEQIVKYLQERSFI

SEQ ID NO: 9555 - protein, 493 aa, Bordetella parapertussis 12822
MSLSVGNAALLPGRNLIGSEWREAALGARFAVADPATGKVIAHVPDSGARDAGAAVTAAHQAFADWRRTPAKVRAQIIKRWNALLHENAEDLARLISSEQGKPLAEARGEVSYAASYVEWFAEEATRADGDLIPSPAQGRRMFALREPVGVVAAITPWNFPAAMIARKIAPALAAGCTVVCKPAEDTPLTSLALTALAQQAGVPPGVLNIVTASRGRAAEVADAWLDDPRVRKITFTGSTPVGKHLARRSADTLKRVSLELGGNAPFIVFDDADLDAAVEGLMVSKFRNGGQTCVCPNRIFVQAGVHDAFVRKLAARVEGLVVGPASDPASQIGPMINARAVEKIEHHVADALERGARLAVGGKRIHSARCAGDHYYAPTVLTGVDETMACFREETFGPVAPITVFASEADVVAAANATAFGLAAYFYSTDVRRIWRLADALETGIVGVNEGALAAEAAPFGGVKDSGYGREGSRHGLAEYMQIKYVCQGQLD

SEQ ID NO: 9556 - protein, 407 aa, Haemophilus somnus 2336
MEITLGIAMFTVIVLALAVLILFAKSKLVNSGDITIEINDDPGKAINLPAGGKLLGALANKGIFVSSACGGGGSCGQCIVKVTEGGGDILPTELSHISKREAKEGYRLSCQVNVKNSMKIELPEEVFGVKKWECTVISNDNKATFIKELKLQIPEGEEVPFRAGGYIQIEAEPHTVHYKDFDIPKEYHEDWDKFDLWRYTSKVDEHIIRAYSMASYPEEKGIIMLNVRIATPPPRNPDVPPGQMSSYIWSLKEGDKVTISGPFGEFFAKETDNEMVFIGGGAGMAPMRSHIFDQLKRLKSKRKMSFWYGARSKREMFYVEDFDMLQAENDNFVWHVALSDPLPEDDWDGYTGFIHNVLYENYLKNHEAPEDCEYYMCGPPVMNAAVIKMLKDLGVEDENILLDDFGG

SEQ ID NO: 9557 - protein, 1200 aa, Magnaporthe grisea 70-15
MDGGVKRRLRNSAGSGRDILSMGAKDSIQLGDPLPASTPPRPSRGASNKSSNPSPSTRSRRQAIRSSPTAQPEPAHLPPASTSAPSALVSVRSVSIASTEDASEIIVKTGAAETTSSEESMVSTPLGTDSPPSMEDPLPTLKPSLSAMVEDDGPSYSRCISELSDQSELSSVPSSLSSKATTPIDLDRPEPPVPPVALAPEAPEVPETSKPLEPSPEPISQEAQPPSETVRPVESIQPPPLKPSPRPSKFRIKYGQNKKYDLRPRTSIPTDVSTQEYAIQCIAAAESSRLNPYALHPDEYLMLRDHISQAQITTYLNLRNGILRLWVRNPTFVLTREEAIGCAKDSRWFDVASVCFDWLVREGYINFGCCEVRPLRSKPGASGTPTKQKTIVVIGAGLSGLGCARQLQGLFAQYARRFRERGELLPKVVVLEGRSRIGGRVYSRPFRTAPPARGDGPPRRYTAEMGGMIITGFDRGNPINILIRGQLGLGCHALRSDLNLVNIYDTNGKPFDPDRDMLIDKLYNHCIERVAEYKWKLPLPKWLEGKRELIDEGKDSWAEVHKTISYVEETAAAQPQAPSVAEQNIAPRVDLVPVSSDRATGRVHLEPGTPAAHKAAHTVKLLGWNLKKGVDDDADIDIGPAVNAPDATFGSVLDETIMQFKDIVDLNSQDMRMFNWHVANLEYSNATNVHQLSLRGWDIDMGNEWEGKHTMVVGGYQSLALGLAQIPSSLDIKYKKVVKTIRRKSSDEDSLPADEQPGYKIELEDGSNIDADYVVNTIPLGVLKHGDITFDPPLPSWKADAIERLGFGVLNKVVLVYDQPFWEEDKDIFGVLRAPQSRSSLHPKDYSSDRGRFFQWFNVTNTSGMPTLLALMAGDAAFDTENTPNDDLVAEATEVLRSIFGKSVPQPRESIITRWASDRFARGSYSSAGPNMQLEDYDLMSRSIDRLYFAGEHTSATHPATVHGAYMSGLRAAAEVLNDMLGPIEVQTPLIVPKETGTTSTLLKRKSTTDQVRDPQKEAEEAWQAQLWEHQWSLLGEHPLQPAKVATKAHLLFSKANTEAARQKCLEGRRPGKGPPTAHEVRAMAGKMWNAASEEQRRPFIEQVATLKEVYVKAMAEWTKKSNEWNKQALEIAADFEKKNPKPTAHTNAVVGPSSVGEDVKASRPAAGSPAVEEEAGRQAKKLAVDKAGVKEDGDIEMTG

SEQ ID NO: 9558 - protein, 413 aa, Trichoderma atroviride
MADLQGRKVFKVFNQDFVVDERYTVTKELGQGAYGIVCAAVNGQTNEGVAIKKVTNVFSKKILAKRALREIKLLQHFRGHRNITCLYDMDIPRPDNFNETYLYEELMECDLAAIIRSGQPLTDAHFQSFIYQILCGLKYIHSANVLHRDLKPGNLLVNADCELKICDFGLARGFSVDPEENAGYMTEYVATRWYRAPEIMLSFQSYTKAMDVWSVGCILAELLGGRPFFKGRDYVDQLNQILHILGTPNEETLRRIGSPRAQEYVRNLPFMPKKPFPALFPDANPDALDLLDKMLAFDPSQRISVEQALEHPYLHIWHDASDEPDCPTTFNFDFEVVEDVGDMRKMILDEVLRFRQLVRTAPASGNQAAAQQIQVPMPQAGGQWTAEDPRPQEYMGHANGLEQDLAAGMDIRR

SEQ ID NO: 9559 - protein, 277 aa, Brassica oleracea
MNTFPASTEMVGSENESPVTTVVGGDYYPMLAASCPKKPAGRKKFQETRHPIYRGVRLRKSGKWVCEVREPNKKSRIWLGTFKTAEMAARAHDVAALALRGRGACLNYADSAWRLRIPETTCHKDIQKAAAEAALAFEAEKSDVTMEETMAVASQAEVNDTTTDHGMNMEEATAVASQAEVNDTTTDHGVDMEETMVEAVFTEEQSEGFNMAEESTVEAAVVTDELSKGFYMDEEWTYEMPTLLADMAAGMLLPPPSVQWGHNDDLEGDADMNLWSY

SEQ ID NO: 9560 - protein, 477 aa, Sinorhizobium meliloti
MLDKRKFYIDGKWVEPATQNDLLVLNPATEKPIAVISLGTAVDVDRAVAAAKKAFASYSRTSVEERLALLEKLLAIYKRRYDEMADTITAELGAPRTMSHEQQADVGVGHLQGFIDALKRLKLREKLPNGDTLLREPIGVCGLITPWNWPVNQIALKVVPALATGCTCVLKPSEFTPLNAMLYAEMIEEAGFPAGVFNLVNGDGIHAGAALSKHKDIDMMSFTGSTRAGIAVSKDAADTVKRVTLELGGKSPNIVFADADIEERVTASILECFNNSGQSCDAPTRMLVERSAYDEVVEIARRVGMEARVGDPTKVGSHIGPLVSHIQFERVQALIEAGVAEGATLLAGGPGKPEGFETGYFVQPTIFADVDNSMRIAREEVFGPVLSIIPFDTEEEAIAIANDTNYGLAAYVQTRDRERAERVASRLRAGMVHINGGPHRYGSPFGGYKQSGNGREGGMFGLEDFLEVKTVHLPDAA

SEQ ID NO: 9561 - protein, 316 aa, Oryza sativa (japonica cultivar-group)
MDPVLLDDIIRRLIEVKNLKPGKNAQLSESEIKQLCATSKEIFLNQPNLLELEAPIKICGDVHGQYSDLLRLFDYGGYPPQSNYLFLGDYVDRGKQSLETICLLLAYKIKYPENFFLLRGNHECASVNRIYGFYDECKRRFSVKLWKTFTDCFNCLPVAALIDEKILCMHGGLSPELNKLDQILNLNRPTDVPDTGLLCDLLWSDPSNDAQGWAMNDRGVSYTFGPDKVSEFLEKHDLDLICRAHQVVEDGYEFFANRQLVTIFSAPNYCGEFDNAGAMMSVDDTLMCSFQILKPARKMLGGSTNSKSGFKSLRGW

SEQ ID NO: 9562 - protein, 250 aa, Brassica oleracea
MNSVSTFSELLGSENESPVGGDYCPMLAASCPKKPAGRKKFRETRHPIYRGVRLRKSGKWVCEVREPNKKSRIWLGTFKTAEIAARAHDVAALALRGRGACLNFADSAWRLRIPETTCAKDIQKAAAEAALAFEAEKSDTTTNDHGMNMASQAEVNDTTDHGLDMEETMVEAVFTEEQRDGFYMAEETTVEGVVPEEQMSKGFYMDEEWMFGMPTLLADMAAGMLLPPPSVQWGHNDDFEGDADMNLWNY

SEQ ID NO: 9563 - protein, 117 aa, Retama raetam
MASIKVACVVLICMVMVGAAPIAQAITCGQVVSNLTPCITYLQRGGAVPGQCCNGVKTLVSSAQTTADKQTACNCLKSTAATIPNINFGNAGSLPGKCGVNLPYKISPSTNCASIKF

SEQ ID NO: 9564 - protein, 278 aa, Glycine max
MGVFSEDPNPNPNPIVIREVWASNLESEFELIRELIDRYPFISMDTEFPGVIFRPHVDPTKPFNHRNRPSDHYRLLKSNVDALNLIQVGLTLTDAAGNLPDLAGNRSIWEFNFRDFDVARDAYAPDSIDLLRRQGIDFARNTADGVDSTCFAELMMSSGLVCNDAVSWVTFHSAYDFGYLVKILTRRNLPTRLEEFLKTVKVFFGDNVYDVKHMMRFCDTLYGGLDRVARTLNVERAVGKCHQAGSDSLLTWHAFQKIVDIYFVKDEHRKHAGVLYGL

SEQ ID NO: 9565 - protein, 513 aa, Zea mays
MGNCCPGSSSSAEPAPPQPPDPSGSSRPVASPASVSPTAAPAPARPPAPIGPVLGRPMEDVRATYAVGKELGRGQFGVTSLCTHKATGHRFACKTISKRKLSTKEDVEDVRREVQIMYHLSGQPGVVELKGAYEDKGSVHLVMELCAGGELFDRIIARGHYTERAAASLLRTIVEIVHTCHSMGVIHRDLKPENFLLLSKDEDAPLKATDFGLSVFRDIVGSAYYIAPEVLKRSYGPEADIWSVGVIVYILLSGVPPFWAESEHGIFNAILRGQVDFTSDPWPRISQGAKDLVRKMLNPDPKQRISAYDVLNHPWIKEDGEAPDTPLDNAVLGRLKQFRAMNQFKKAALRVIAGCLSEEEIRGLKEMFKSMDSDSSGTITVDELRRGLANKGTKLSEAEVQQLMEAADADGNGTIDYEEFITATMHMNRMDRDEHLYTAFQYFDKDNSGYITMEELEQALREKGLLDGRDIKEIVAEVDADNDGRINYTEFAAMMRKGDPEPSNPKKRRDIVL

SEQ ID NO: 9566 - protein, 211 aa, Pinus taeda
MEKIMVLVCIMSFTILGLSSAQEINHAAAVSLATAPAAAATPAAPAPSPASLNLSGILDKAGQFNTFLSLLKSTQVGMQLQSQLNNSQQGITIFAPSDAAFAALKPGALNSITDQDKIALLQYHALPSYYTFSQFQTVSNPVRTMASGNGGPFAAPTPEPGAPVSSPAVSPSGASGSGASTSSACGSMAALAKGLYLVFLAAGALVLVISS

SEQ ID NO: 9567 - protein, 291 aa, Pyrobaculum aerophilum str. IM2
MSKVPGPIVLMEPLSGKTSLIIKINAIHVSKRSKYQGILIVDTDDYGRTLVLDDYIQSSYYDEIYYHESLVHPAVTTHPRPSDVLILGGGEGATLREVLKHNTVKRAVMVDIDGDVVELSKKYLPQMHQGAFDDPRSEVRIEDGFVYVENALKRGEKFDVVIMDLTDPYSSDIAKQLYTPEFFGKVKRLLREDGIVVTQAGNSFYFPEAYDYVLQGVKGNFPIIAEYSVWIPSFGYAVNFVLGSLKHDPHSLSAEEVDKRLSERGVRAEFYSGKTHIALMNMPVIKKILRV

SEQ ID NO: 9568 - protein, 275 aa, Erwinia carotovora subsp. atroseptica SCRI1043
MTQPKVKLADGNIMPQLGLGVWRASSEDTVIAVNEALSIGYRAIDTAAIYKNEEAVGQALSSANLPREEVFITTKLWNGDHTDPQKALEESLRKLRLDYIDLYLIHWPLPQQNTFVDAWRGLIKLQEQGLAKSIGVSNFHIHHLQRLKEETGVLPVIDQVELHPLLQQKQLHAWNATHHIQTESWSPLAQGGEGVFDHPIIRKLAMKYGKTPAQIVIRWHLDSGLVVIPKSVTPARIKENFEVFDFRLDKDELSEITKLDCGKRLGSDPDEPRND

SEQ ID NO: 9569 - protein, 176 aa, Fagus sylvatica
KLELHRGGGRSRTSGSPGLQEFGTRSELSKICDGILGLLETHLIPSASSAESKVFYLKMKGDYHRYLAEFKTGAERKEAAESTLLAYKSAQDIALADLPPTHPIRLGLALNFSVFYYEILNSPDRACNLAKQAFDEAISELDTLGEESYKDSTLIMQLLRDNLTLWTSDITDDAGD

SEQ ID NO: 9570 - protein, 130 aa, Glycine max
  unsure (1)..(130): unsure at all Xaa locations
IADADATIDYRAGALVHTSFTGLKAMAGFPTMRTNNDITSIASNRGRVQCMQDWPPFGKKMSVTLSYLPDLDDAQLAKEVQYLLMNGWILWLXEFGAEHGFXYRERNRSPGIYHGRYWTMCTLTMTGCTD

SEQ ID NO: 9571 - protein, 446 aa, Oryza sativa (japonica cultivar-group)
MRMGKYEMGRALGEGHFGKVKLARHADTGAAFAIKILDRQRILAMKIDEQIKREIATLKLLKHPNVVRLHEVSASKTKIYMVLEYVNGGELFDKIALKGKLSEKEGRKLFQQLMDAVSYCHEKGVYHRDLKPENVLVDAKGNIKVSDFGLSALPQNQRKDGLLHTTCGSPNYIAPEIQVLLNRGYDGSLSDIWSCGVILYVMLTGNLPFDDQNTVVLYQKILKGDARIPKWLSPGAQDILRKILDPNPITRLDITGIRAHEWFRQDYTPAMPFDDDDDNNISDGNLHMTENQDIETSPAISQINAFQLIGMSSCLDLSGFFEKEDVSERKIRFVSNYSPTSLFEKIESTVTEKGFQVQKNSGKLKVIQVCKEPANPRGHGNLLISAEVFEINESLYVVELKRSSGDCSLYRQLCASLSEDLGICKRQQLLKKDSMRQDLCRYNSSF

SEQ ID NO: 9572 - protein, 505 aa, Oryza sativa (japonica cultivar-group)
MGHELWVLWATLAVSLLCYLYLTSHRLGSRRRRWPPGPRPLPLLGNLLDLRGGNLHHTLARLARAHGAPVMRLQLGLSPAVVISSPGAAREAFTAHDRRLAARAVPDANHALGFCDRSMIWLPSADPMWRTLRGVVAAHAFSPRALAAARAVHERKVRDLVAYLRGRAGREVDVKDAVYGGVLNLVSSALFSADVVDVGGESAQGFRELVEELIESIAKPNVSDLFPFLRRFDLQGWRRWTSGHLAKIYKVLDDIIDRRSAEDDAAMDKRGDFLDVLLELMSTGKIAREYLTNILFDVFTAGSDTMSLTVVWAMAELLRNPGVMAKARAEIDAALGGREAVEEADVARMPYVQAVLKEAMRLHPVAPVMLPRKAAEDGVEIGGFEVPRGCAVIFNTWAIMRDPAAWERPDEFVPERFVGRSRATEEMDFRGKDFGFLPFGSGRRLCPGVPMAERVLPLIMASLLHAFEWRLPDGMSAEQLDVSEKFTTANVLAVPLKAVPVVIAC

SEQ ID NO: 9573 - protein, 303 aa, Cicer arietinum
GVALAGLLGTVRSQGRPLSDFVNQKIVVAGAGSAGLGVLKMAINAVAKISGCSETAAKSQFFLIDKNGLVTTERNNLDPAAAPFAQNPRDIDGLTEGASIVEVVKKVKPHVLLGLSGVGGIFNEEVLKAMRESVSTKPAIFAMSNPTMNAECTAIDAFNHAGEHIVFASGSPFENVDFGNGNVGHVNQANNMYLFPGIGLGTLLSGAHLITDGMLQAAAECLASYMSEEDILKGILYPSVDSIRDVTAEVGAAVLRAAVEEDLAEGQGDVGPRELAHMSKEETVEYVRRNMWFPVYSPLVHEK

SEQ ID NO: 9574 - protein, 320 aa, Glycine max
MEAKKIPEVILNSGKKMPVIGLGTASIPLPSHEALTSILIDAFEVGYRHFDTASLYESEESLGKAVAKALELGLINSREELFITSKLWSTDAHPDLVVPALKTSLQKLGLEYVDLYLIHWPVRLKPEAKGYHNILKENVLPSFDMKGIWEAMEECYRLGLAKSIGVSNFGIKKLSQLLENATIPPAVNQVEMSPAWQQGKLKEFCKQKGIHVSAWSPLGAYKSAQGTNAVMESPILKEIACERQKSMAQIALRWIYEQGAIAIVKSFNKERMKQNLDIFDWELSQEESQKFSQIPQRRMYRGITFVSENGPYKTLEELWD

SEQ ID NO: 9575 - protein, 421 aa, Bacillus sp. KSM-K16
MAAEKIQTQNGVLNVPNEPIVPFIEGDGTGPDIWAAASRVLDAAVEKAYNGERKIHWKEILAGEKAYNETGEWLPAETLDAVREYLIAIKGPLTTPIGGGIRSLNVALRQELDLFTCLRPVRYFTGVPSPVKRPEDTDMVIFRENTEDIYAGIEFKEGSDEVKKLIAFLQDELGATNIRFPETSGIGVKPVSKEGTERLVRSAIQYALDEGRKSVTLVHKGNIMKFTEGAFKNWGYELAEREFGDKVFTWAEYDKIVEESGREAADKAQSEAEAAGKIIVKDAIADIFLQQILTRPKEFDVVATMNLNGDYISDALAAQVGGIGIAPGANINYDTGHAIFEATHGTAPKYAGLDKVNPSSVLLSGELLLRHLGWTEAADLIMASMDKTIASKVVTYDFARLMDGATEVSCSGFADELIKNL

SEQ ID NO: 9576 - protein, 234 aa, Arabidopsis thaliana
MERGGFHGYRKLSVNNTTPSPPGLAANFLMAEGSMRPPEFNQPNKTSNGGEEECTVREQDRFMPIANVIRIMRRILPAHAKISDDSKETIQECVSEYISFITGEANERCQREQRKTITAEDVLWAMSKLGFDDYIEPLTLYLHRYRELEGERGVSCSAGSVSMTNGLVVKRPNGTMTEYGAYGPVPGIHMAQYHYRHQNGFVFSGNEPNSKMSGSSSGASGARVEVFPTQQHKY

SEQ ID NO: 9577 - protein, 273 aa, Thermoplasma acidophilum
MKLIENWFSERYSDNLQLSFRVSDQLLSIKTDYQRIDLFDTYDFGKLLAIDGTVQLTERDEFIYHELITMVPYHLTPRPPENALIIGGGDGGAARRLIDLGLKHIVNVEIDDQVVEVSKRFFPSLSSAFNDSHVKLLIQDGIKYVKNTSEKFDLIIIDSTDPEGPAEGLFSKDFYNDTRKIMNEGAVIVSQSGSPFYQPKAIKLAYSGMREVFSDVRVYTGFIPTYPSGFWSFTVASPWTMKPRPVNMSGKYFNADVMEGSFRLPQFVKELIT

SEQ ID NO: 9578 - protein, 333 aa, Thermoplasma acidophilum
MRSMGSRCEGECRKLKSAKQYTGMDRKELLSRPVRDLSITADTRLGDLMDQFSSIGGFTAAKIHEAYEIIKDMFSEDNTTFLSFPADIISTGLRGLINEVVKRKLVDVIITTSGTLDHDIARTYRNYYCGSFSYSDIELRDLGINRLGNVLVPDESYGEIIEEKVMESLEKLYAKKKEWATVDLIHEVGLDINSESSIIYNAAKNNIPVFVPGITDGSFGSQLWSFYEQHHDFKINLLEDEHRLSDIIFDAKKTGAIMIGGGISKHHTIWWNQFRDGLDYAVYVTTAQEYDGSLSGAKLEEAISWKKVRPDARYVNVYGDATVIMPVLLAPFL

SEQ ID NO: 9579 - protein, 501 aa, Catharanthus roseus
MALASIEKVATGLICFILLIFSLKRIGHPRDWALVGILSVWFPSLGHIYEKLAKSLAKNDKTFVLKGSFLSKQDVIFTCDPANMHHVMSTNFSNYPKGPENRNVFDVYGEMLFTADHEKWKSHRKVTNAYFHDQRFNGFSQKVNKEVIEKELFPFLDHAAEEALVFDLQDVFQRLMLDSSSILTTGQNHRSLRVGLPYDETLEAINIANYQIFVRHILPAKIWKFQKWLGIMGEKKIKKAWRILDDISVEYMNRRKKEISSTISSQEDMDVVKFSEEDHVVLKSVDASDNLLRDTVKGILLAGTDTTATVLSWFFWLILKNPRVEQKIREEIELYLKQKNGEHGLYTNPEELNELMYLHAAIYETMRLYPAAPFTSRKSIQADVFPTGHQVNPNTTIVMAYYAVGRMKSIWGEDCLEFKPERWLSDKGKLIPVQTNKFLAFGTGPRICPGKELGLNRVKAVAAAIIPKYSFKIMRNKPVMPAACATLYLKDGLIVRVNKII

SEQ ID NO: 9580 - protein, 503 aa, Ralstonia metallidurans CH34
MTAAYTASQTIAGDCTVSLPSALYRNYVDGRFEEAANLFPNLSPVDGSIVGHVCEADASQVDRAVQAARAAMEGPWGNTSAAERARVLHAVADGIERRFDEFVAAEVADTGRTEQQARALDIRRGVLNFRTFADLASQAGGDYFDMRTAEGDVFSYTVRKPHGVVGIISPWNLPMLLMTWKVAPALACGNAVVVKPSEETPGSATLLAEVMHEAGVPAGVFNLVHGFGGGSAGEFLSRHPGIDALTFTGESRTGSTIMKAVADGVKEISFELGGKNAAVVFADCDFDKAVAGVMRSSFTNTGQVCLCSERVYVERPIFERFVAAMKARAEALRIGYPTVEGVEMGSLISRNHRDKVLSYYALAREEGATVVTGGGVPHFGDARDNGAYVQPTIWTGLPDSARCIQEEIFGPVCHIAPFDTDAEVVKRVNDSRYGLAASVWTRDLARAHRVTRQFDVGIVWVNTWFLRDLRTPFGGTRLSGIGREGGRHSLDFYSSLTTICVNP

SEQ ID NO: 9581 - protein, 447 aa, Nostoc sp. PCC 7120
MSKPKNNSPVVNVIQDQSVISSVITDFGSLIKGNTLGIIRPHNLEELSSALRFAKQQNLRLKARGKGYTQGGQSVAQDAFTLDLTRLNHVSKVDTVAQAIATEAGATWQDIVTTTVKYGMLPCVLPLNLEQTVGGLLSTGGIGSTSKTYGPVVANVIDLHIITGNGEYIQCSRTQTPELYHAVLGGLGGCGVIASATLALRKTKKYIRTFHLLYDSLKPWMDDHIFLGRNHQIEHLEGFCWTSAKGIRHTTSGKKFFAHWLYGLQVGIEYDEVAPSASDVLHDLNYWRLFHTEDEETVSHVFRYQPRFEVMRTSGAWNQAHPWIECFISAEALAEVLPEILDMLPLSLGDGHRAIMVAPDNLPNLFMMPPAKNILCFAILPMAVPVEDTKTFDVLEKVNQLLLRAGGKRYLSGWLGKSNFDWRQHYGTSYKTWETMKQQYDPSHVLS

SEQ ID NO: 9582 - protein, 448 aa, Saccharomyces cerevisiae
MVASIRSGVLTLLHTACGAGILAMPYAFKPFGLIPGVIMIVLCGACAMQSLFIQARVAKYVPQGRASFSALTRLINPNLGIVFDLAIAIKCFGVGVSYMIVVGDLMPQIMSVWTRNAWLLNRNVQISLIMLFFVAPLSFLKKLNSLRYASMVAISSVAYLCVLVLLHYVAPSDEILRLKGRISYLLPPQSHDLNVLNTLPIFVFAYTCHHNMFSIINEQRSSRFEHVMKIPLIAISLALILYIAIGCAGYLTFGDNIIGNIIMLYPQAVSSTIGRIAIVLLVMLAFPLQCHPARASIHQILQHFAEENVSISATSADEPTVATESSPLIRDSSLDLNEVIEEESIYQPKETPLRGKSFIVITCSILVASYLVAISVSSLARVLAIVGATGSTSISFILPGLFGYKLIGTEHKTAVPLTTKIFKYTGLLLFIWGLIIMITCLTAALKLN

SEQ ID NO: 9583 - protein, 396 aa, Photorhabdus luminescens subsp. laumondii TTO1
MLDNQTIATVKSTIPLLSATGPKLTAHFYERMFKHNPELKNIFNMSHQLNGDQREALFNAICAYAANIDNLKVLLPAVEKIAHKHASLNIQPEHYQIVGTHLLATLNEMFQPGNEILDAWGKAYGVLADIFINREEQIYHSGELTDGGWRGLRPFRINRKEVKSEVICSFEFAPQDGGKVMDYKPGQYLSIYLQDDSFANREIRQYSLTAAPNGSSYRIAIKREPQGIVSNHMHDKMQEGDTVWLTAPRGDFFLDIKPETPVTLISAGVGLTPMMSMLYHLHQQNHNSPINWLHAAEHGGHHAFSHEVAAIAQAMPNFAGTIWYREPRDEDQQGIHYQHKGFMDLTVLNEALKTEGMHFYFCGPVAFMQYVAKQLLDMGIDKQFIHYECFGPHKVI

SEQ ID NO: 9584 - protein, 170 aa, Triticum aestivum
MAAFLRSKCSSVGRAMMGSLGNNLYGGASSSIETVARPSRSDAVCQQIRTFIQMRTNLKVVDNSGAKRVMCIQSLRGKKGARLGDMIIGSVKEAQPRGKVKKGDVVYGVVVRAAMKKGRSDGSEVQFDDNAIVIVNNKGELIGTRVFGPVPHELRKKKHLKILALAEHIV

SEQ ID NO: 9585 - protein, 192 aa, Triticum aestivum
  unsure (1)..(192): unsure at all Xaa locations
PFLDKEFINVAMSMDPEWKMYDKNLGRIEKWVMRKAFDDEENPYLPKHILYRQKEQFSDGVGYNWIDGLKAFTEQQVTDEMMSNAAQTFPYNTPVNKEAYYYRMIFERLFPQDSARETVPWGPSIACSTPAAIEWVEQWKASNDPSGRFISSHDSAXTTPAAVSWRWWPTAATAPXNGTVNGGNDVAVAIAV

SEQ ID NO: 9586 - protein, 446 aa, Chromobacterium violaceum ATCC 12472
MNHPLTTRSEFDHLDLRAHWMPFSANRNFQRDPRLIVSGEGNYLTDADGRRIFDSLSGLWCCGAGHSRKEIAEAAYRQLSTLDYSPGFQFGHPLSFRLAERVAAMAPGALNHVFFTNSGSECADTAVKMARAYWRLKGQASKTKLIGRARGYHGVNIAGTSLGGMNGNRKLFGPLMDADHLPHTLLPANAFSRGLPEQGAELADDLLRLIELHDASNIAAVIVEPMAGSAGVIVPPQGYLQRLREICTQHGILLIFDEVITGFGRTGSLFGADHFGVTPDIMNLAKQLTNGAVPMGAVVASSEIYDAFMAQATPEYAVEFAHGYTYSAHPVACAAALAALDVLEQENLVARAAELAPHFERGIHGLKGLPHVIDIRNCGLAGAVQIAPSGGDAIVRPYEAAMALWRKGFYVRYGGDALQFGPPFTATPQELDSLFDAVGETLAKLA

SEQ ID NO: 9587 - protein, 387 aa, Debaryomyces hansenii
MVSDGEFTRTQIFGTVFEITNRYTDLNPVGMGAFGLVCSAIDKLTGQNVAVKKIMKPFLTSVLAKRTYRELKLLKHLRHENLITLDDIFLSPLEDIYFVTELQGTDLHRLLTSRPLEKQFIQYFTYQILRGLKYVHSAGVIHRDLKPSNILINENCDLKICDFGLARIQDPQMTGYVSTRYYRAPEIMLTWQKYDTEVDLWSVGCILSEMIEGKPLFPGKDHVHQFSIITELLGSPPPDVIETICSENTLRFVQSLPHRDPIPFSERFAQCTHVEPEAIDLLAKMLIFDPKKRISALDALSHPYMEPYHDPTDEPVCEVKFDWSFNDADLPVDTWRVMMYSEILDFHQIIGAGANGTTQEQMAQIQQEGIQAPSSQYQQTNQEQKVE

SEQ ID NO: 9588 - protein, 394 aa, Thermoanaerobacter tengcongensis MB4
MDLKKEALKLHRENKGKIEVVSKVPVKNEEDLSLAYTPYVAEPCKEIEKDKDLVYEYTVKGHMVAVVTDGSAVLGLGNIGPYAALPVMEGKAVLFKEFGGIDAIPICLATQDVDEIIRTVLNIAPTFGGINLEDISAPRCFEIEKRLDEMLDIPVFHDDQHGTAIVTFAALVNALKIVKKSLYEIVAVVNGAGAAGVAISKFLVNAGVKDVIVCDRSGIIYEGRKDLDSSKQKIAKITNKKKIKGTLKEALEGADVFIGVSGPNLLTKEMVKKMAKKPIVFALANPVPEIHPEEAKEAGAYVVGTGRSDFPNQVNNVLAFPGVFKGALRVRATTINERMKLAAAYAIANTISEEELSSEYILPKPFDKRVAENVAYAVAKEAINTGVSRITKFD

SEQ ID NO: 9589 - protein, 260 aa, Zea mays
MAISLTLCPVTHTQAAVRPRPSDGSWNTRFRGPHHRMQVVQVGSKCAAECACPAASARLGSASLVQRTEQPPSLYITRAPRSSAALPFFIPGLVVANLSAGLPSAADDRRDHQLAVRNPERACAGGSSERLILIPCPKKRTASSMDRRPPARRRPGDPHRRGAAMHGAVEQQKQHRGRRPPQGTVPPPPPAGYFTAELLLAFVFVAVSLAFLPLVLPPLSPPPFLLLLVPVGLLAVLLALAFVPLDAHSHLVVVGSGSSR

SEQ ID NO: 9590 - protein, 282 aa, Triticum turgidum subsp. durum
MQVDPSGQVQWPQQQPFPQPQQPFCEQPQRTIPQPHQTFHHQPQQTFPQPEQTYPHQPQQQFPQTQQPQQPFPQPQQTFPQQPQLPFPQQPQQPFPQPQQPQQPFPQSQQPQQPFPQPQQQFPQPQQPQQSFPQQQQPAIQSFLQQQMNPCKNFLLQQCNHVSLVSSLVSIILPRSDCQVMQQQCCQQLAQIPQQLQCAAIHSVAHSIIMQQEQQQGVPILRPLFQLAQGLGIIQPQQPAQLEGIRSLVLKTLPTMCNVYVPPDCSTINVPYANIDAGIGGQ

SEQ ID NO: 9591 - protein, 371 aa, Bacillus sp. KSM-K16
MTTTRGLEGIVATQSSVSSIIDDELTYHGYGIDDLAENASFEEVVYLLWNGELPTKEELESFSRALAEQAGVPDEIFEQMKAYPIDSVHPMAALRTSVSMLGLFDDEAESVEEEKNYRKAIKLQAKIPTIVAGFERIRSGKEPIAPNKELSFAANFLYMLTGENPDAISVKAFNKALVLHADHELNASTFTARVCVATLSDMYSGITAAIGALKGPLHGGANEGVMKMLLEIEEFERVEPYIQKALDNKEKIMGFGHRVYKNGDPRAKHLREMSKQLTDVIKESKWYDMSLRIEELVTTQKGLLPNVDFYSATVYHSLGIKHDLFTPIFAISRTSGWIAHILEQYANNRLIRPRAEYVGPNKRSYKPVESR

SEQ ID NO: 9592 - protein, 113 aa, Zea mays subsp. parviglumis
MGRTACCAKEGVKRGAWTSKEDDALAAYVKAHGEGKWREVPQKAGLRRCGKSCRLRWLNYLRPNIRRGNISYDEEDLIIRLHRLLGNRWSLIAGRLPGRTDNEIKNYWNSTLV

SEQ ID NO: 9593 - protein, 212 aa, Oryza sativa (indica cultivar-group)
SSSSSSISHGFRPSIIRARSGAMDGEEDSEWMMMDVGGKGGKGGGGGGAADRKKRFSEEQIKSLESMFATQTKLEPRQKLQLARELGLQPRQVAIWFQNKRARWKSKQLEREYSALRDDYDALLCSYESLKKEKLALIKQLEKLAEMLQEPRGKYGDNAGDDARSGGVAGMKKEEFVGAGGAATLYSSAEGGGTSSTEQTCSSTPWWEFESE

SEQ ID NO: 9594 - protein, 319 aa, Bacillus sp. KSM-K16
MKRIGVLTSGGDSPGMNAAIRAVVRKAIFHGLEVYGISYGYQGLINGDIKKMELGSVGDIIHRGGTMLYTARCEEFKTLEGQQKGIEQLKKFGIEGLVVIGGDGSYRGAQQLTKHGFPTIGVPGTIDNDIPGTDFTIGFDTALNTVIDAIDKIRDTATSHDRTYVIEVMGRHAGDLALWAGLADGAETIVIPEAEHNMEQILATIKRGQERGKKHSIIVVAEGVGSGIEFGDRISKEMNMETRVTVLGHIQRGGSPTGADRVLASRLGAKAVDLLLEGKAGMTVGIQKNELVYHPIDEILDRPHTIDQEMYKLSQELSI

SEQ ID NO: 9595 - protein, 484 aa, Xanthomonas axonopodis pv. citri str. 306
MLRSLIVCCRVRMSYAIVWFRRDLRLEDNPALRAALDAGHHPIPLYIDAPHEEGEWTPGAASRTWRHRSLAALDGALRALGSGLVIRVGNSAQVLDEVIAQTGAVAVYWNRKYEPATQPRDAQIKRDLRERGIEVQSCNCALLFEPWQLSTQQGGPYKVFTPFWRNALTQLQLPAAIGAPRSLPPLPASLKTDALDTLQLVPGLQWDQGFWEHWQPGEAGAHEMLEIFIDGALSGYRENRDRPDRVGTSQLSPHLHFGEIAPWRIANTLETHRTARNGAEIDAYIRQLGWRDFAYHLLHHFPDTTNQNLNPRFAGFDWATVDPVALQAWQRGRTGIPIVDAGMRQLWHTGWMHNRVRMIVASFLCKHLRIHWIEGARWFWDTLVDADLANNTLGWQWVAGTGADAAPYFRVFNPVTQAEKFDPQAAYITRWVPELGKLAVKERFAPWLHPLSLARLAPEYPRTPIIGLAEGRDAALAAYAKTRG

SEQ ID NO: 9596 - protein, 284 aa, Triticum aestivum
  unsure (1)..(284): unsure at all Xaa locations
MAAAAAGATRRAASSLASRCLLSRPAASPAAVPSALRRADGARGLLPGLLQRFGTAAAAEEPISPSVQVGETQLLINGKFVDAASGKTFPTLDPRTGEVIARVSEGDAEDVDRAVVAARKAFDEGPWPKMTAYERSRILLRFADLIEKHNDEIAALETWDNGEPYEQAAHIEVPMLXARLMRYYAGWTXDKIHGLIVRADGPXHVQVLHEPIGVVGQIIPWNFPLLMYGWKGXPXLLACGNTIGLKTVEATPLSAPNVSKLWDGGGLPRGGPQKRIWVWGPMGG

SEQ ID NO: 9597 - protein, 228 aa, Schizosaccharomyces pombe
DRCGLLLERHAKIATDGQKPFLKKDSDFKEVPSGDIDLETAISLIKPTVLLGCSGQPGKFTEKAIREMSKHVKHPIIFPISNPTTLMEAKPVQIDEWSNGKALMATGSPLPPLTRNGKEYVISQCNNALLYPALGVACVLSRCKLLSDGMLKAASDALATVPRSLFVADEALLPDLDNAREISRHIVFAVLKQAISEGMSTVDLPKDDAKLKEWIIEREWNPEYRNFV

SEQ ID NO: 9598 - protein, 410 aa, Bacillus sp. KSM-K16
MPTTREEALHMHRINQGKLESKAKVPVKDARDLSLAYSPGVAEPCKEIFEDVETVYEYTMKGNMVAVVSNGTAVLGLGNIGPEASLPVMEGKAVLFKSFAGVDAFPICLRSNDVDEIVNTVKLLEPTFGGVNLEDIAAPDCFVIEERLKKETNIPIFHDDQHGTAIVTLAGLINALKISGKKLSEIKVVANGAGAAGIAIIKLMLRMGVRNIIMCDTKGAIYEGRPYGMNAVKEAVAKRTNMNKEEGKLEDVIKGADVFIGVSVEGAVTKEMVESMNDNPIIFAMANPVPEIMPEDAKAAGASVIGTGRSDFPNQVNNVLAFPGIFRGALDARATHINEEMKVAAVYAIANLVSEEELSVDYVIPAPFDSRVAPAVAAAVAKKAMETGVARVKVDPEEVAEKTRKLAIID

SEQ ID NO: 9599 - protein, 230 aa, Erwinia carotovora subsp. atroseptica SCRI1043
MLNAQLTLISHPLCPFVQRAAIVLLEKNVSFERIDVDLAAKPDWFLALSPMDKVPLLKVELADNSDAILFESAAICEYLNETQAGASLYSSDALSRAQQRAWVEFGVAALSDAWQFLNAKELAVANDKKAAFRDKLQRLESTLEQGPYFSGSAFSMVDAMFAPVFRYFDLLSPDVSQPIFDNLPRVSAWRASLANRPSVLAAVRDDYADRFKQHLVKQQVILSDSMCKTT

SEQ ID NO: 9600 - protein, 489 aa, Halobacterium sp. NRC-1
MSDLDFGDVDWNVQYIDGEYVPPGDRGTLEVDDPSTRELFTEIPAGTTDDVDAAYEAAADAQTEWADTPPQERARIVAAASEILASHRDEVVDLLATESGTTYTKGAAEFEASVGITDEAASFPTRMNGDHKQSVVEGKENIVVREPQGVVGIISPWNFPLNLSIRAVAPAVAAGNSVVLKPASNTPVTGGLLIAKVFEAAGLPEGVFNVVTGKGSEIGDRIAGHPHADVISFTGSTAIGRQVAATAGENLALPAMELGGNNVHIVTEDADLDDAVDSGVFGSFLHSGQICISINRHVVHEDVYDEYVERLTERAAALPTGTAHDADTVVGPIIDESQRDQILDYIERTVDAGATLETGGDHDGLVVEPTVLSDATNDMAAACNEHFGPVAPVIPFSDDDEAVEIANSTEYGLSGSVHAGDTGRARDIADRIDTGMIHINDQPVNQEPHLPFGGYKNSGLGRYNGEYVLNEFTQEKWVSIQRETRDYPF

SEQ ID NO: 9601 - protein, 233 aa, Rhodobacter sphaeroides 2.4.1
MMNSLSNSLAAADIAHSLHPYTNARAHERNGPLIITRGQGVHVYDSEGREYIEGLAGLWSVAVGFSEPRLAEAAARQMAELPYYHTFAGKAHEPQIRLAEKLVEMTPEALTRVFFTNSGSEANDTVVKLVWFMNNALGRPQKKKFLSRIKGYHGITIASGSLTGLPVNHRASICPPSRSCIWAARTTGASAPRARARPSSAPASCARPRRRSSPRGPRPSPPSSASRSWARAG

SEQ ID NO: 9602 - protein, 57 aa, Zea mays
MKEGTANCIDILIAIILPPLGVFLKFGCKVEFWLCLLLTFLAYLPGIIYAIYVITKD

SEQ ID NO: 9603 - protein, 90 aa, Glycine max
MASFARGAASLTRIGLSTSKTPLQLIHRRGLADHHGPPKVACWKDPMSPSKWKEEHFVIVSLTGWGLLIYGGYKLATGGKGKKEEELAKA

SEQ ID NO: 9604 - protein, 508 aa, Bifidobacterium longum
MKNKVQLITYADRLGDGTLSSMADILRTRFDGVYDGVHILPFFTPFDGADAGFDPIDHTKVDERLGSWDDVAELSKTHNIMVDAIVNHMSWESKQFQDVLEKGEESEYYPMFLTMSSVFPNGATEEDLAGIYRPRPGLPFTHYKFAGKTRLVWVSFTPQQVDIDTDSDKGWEYLMSIFDQMAASHVSYIRLDAVGYGAKEAGTSCFMTPKTFKLISRLREEGVKRGLEILIEVHSYYKKQVEIASKVDRVYDFALPPLLLHSLFTGHVEPVAHWTEIRPNNAVTVLDTHDGIGVIDIGSDQLDRSLKGLVPDEDVDNLVNTIHANTHGESQAATGAAASNLDLYQVNSTYYSALGCNDQHYLAARAVQFFLPGVPQVYYVGALAGRNDMELLRRTNNGRDINRHYYSTAEIDENLERPVVKALNALAKFRNELPAFDGEFSYEVDGDTSITFRWTAADGTSTAALTFEPGRGLGTDNATPVASLAWSDAAGDHETRDLLANPPIADID

SEQ ID NO: 9605 - protein, 273 aa, Glycine max
MSILPKGDSVQIREVWNDNLEEEFALIREIVDEYNYVAMDTEFPGVVLRPVGNFKNINDYNYQTLKDNVDMLKLIQLGLTFSDENGNLPTCGTESTCIWQFNFREFNISEDIFASDSIELLRQCGIDFKKNSEKGIDVNRFGELLMSSGIVLNDAVHWVTFHSGYDFGYLLKLLTCRSLPETQAGFFDLIKMYFPMVYDIKHLMKFCNSLHGGLNKLAELLEVERVGVCHQAGSDSLLTSCTFRKLRDAFFSGSTEKYAGVLYGLGVESGQTN

SEQ ID NO: 9606 - protein, 188 aa, Zea mays
  unsure (1)..(188): unsure at all Xaa locations
MASSMLSSAAVVTSPAQATMVAPFTGLKSSAAFPVTRKANNDITSIASNGGRVSCMKVWPPVGKKKFETLSYLPDLTEVELXKEVDYLLRNKWIPCVEFELEQXDFVYREHGSTPGYXIDGRYWTMWKLPLXFGCTDSAPRGLKEVQEXKTEYPNAFIRDSSIEQTGPGSKGASFSSPTNHKGFPGGV

SEQ ID NO: 9607 - protein, 362 aa, Zea mays
  unsure (1)..(362): unsure at all Xaa locations
MGSTAADVAAVVDEEACMYAMQLASSSILPXKNAIELGLLEVLQKEAGGGKAALAPEEVVARMPAAPSDPAAAAPLVDRMLRLLASYDVVRCQMEDRDGRYERRYSAAPVCKWLTPNEDGVSMAALALMNQDKVLMESWYYLKDAVLDGGIPFNKAYGMTAFEYHGTDARFNRVFNEGMKNHSVIITKKLLDFYTGFEGVSTLVDVGGGVGATLHAITSRHPHISGVNFDLPHVISEAPPFPGVRHVGGDMFASVPAGDAILMKWILHDWSDAHCATLLKNCYDALPENGKVIVVECVLPVNTEATPKAQGVFHVDMIMLAHNPGGKERYEREFRELAKGAGFSGFKATYIYANAWAIEFIK

SEQ ID NO: 9608 - protein, 412 aa, Zea mays
INTGRVTFLRSIGLREYSRYLTFNHPCSHEKPLLSHLRFFPWVVNEVYFKVWRQGRTGYPLVDAGMRELWATGCPRARIRVVVSSFFVKVLQLPWRWGMKYFWDTLLDADLESDALGWQYISGSLPDGRELDRIDNPQFEGYKFDPHGEYVRRWLPELARLPTEWIHHPWDAPESVLQAAGVELGSNYPRPIVELDAANSRLQDALSEMWELEAASRAAMENGMEEGLGDSTDERPIDFPQELRMEVDRQPVQPAIHAQGVTGRRREDQMVPSMTSSFIRAETELTADFGHTSEDSRPEVPSNIHHLQARPEREETVDGGTGNAVRVHGNHHQQNLQNNIHRVLGIAPSISEASSSWTGRDGGVVPVWSPPAASGNSDPYAADEADISSRGYLDRHPQSHTMMNWSQLSQSL

SEQ ID NO: 9609 - protein, 355 aa, Azoarcus evansii
MIPEFIDTWQMTEPGKLQKTRVPMPELGPGDVVVKIAGCGVCHTDLSYFYMGVPTVQKPPLSLGHEISGTVIGGEASMIGKEVIVPAVIPCGECELCNTGRGNRCLSQKMPGNSMGIYGGYSSHIVAQSKYLCVVENRGGTPLEHLAVVADAVTTPYQAAVRADLKKDDLVIVIGAAGGVGSFMVQTAKGMGAKAVIGIDINEEKLVMMKDFGADFVINPKDKSAKDIKELFKGFCKERGLPSNYGWKIFEVTGSKPGQELALSLLSFTGKLVIVGYGTAETTYMLSKLMAFDAEIIGTWGCPPDPYAAVRDMCLDGRIKLGPFVETRPMSQIEQVFDEAHHGKLKRPVILTPDF

SEQ ID NO: 9610 - protein, 115 aa, Triticum aestivum
  unsure (1)..(115): unsure at all Xaa locations
MAAQXGXMRLVSHPIXAHDGRLPRQYXXDGQGAKKDMSPPLEWYXLPDGARSLALXVQDIDPTQLXXTHXVVXNIPPATKGSXRGLXRRGGLQLRRQEGSTGHRLGPPHDHLPYK

SEQ ID NO: 9611 - protein, 300 aa, Erwinia carotovora subsp. atroseptica SCRI1043
MSLSQEFQNFIAQLRANPVPFEQLTDIGELRGAFNALGSDLPPLLDVLFRQVDAAGVPAEWVDPAGSDPSRVIFYLHGGGYVAGDPIIYRNFVTALCRASDCRALIVDYRLAPESPFPAALEDAQRSYAWLLTQGISADQIVIIGDSAGGGLALSTLVSLRDSCQPLPGAAVLLSPWTDLTLESESHLTKVKDDPIITHKFLDQSRQRYIGTGASDTDALVSPLHADLTGLPPLLVLVGTAEVLLDDSTALAHKAREAGVDVDLIEGDGMIHTWPFFIDSFPEAEKAVQSIGTFIHSRIR

SEQ ID NO: 9612 - protein, 335 aa, Naumovia castellii
MSEPAQKKQKTTGSSLEQLKASGTVVVADTGDFASIAKFTPQDSTTNPSLILAAAKQPAYAKLIDVAVSYGKKNGKTTDEKVELAVDRLLVEFGKEILKIVPGRVSTEVDARLSFDKEATIAKALEIIKLYEDLGISRERVLIKIASTWEGIQAARELESKHKIHCNLTLLFSFSQAVACAEAKVTLISPFVGRIMDWYKAKTGETYNGRNDPGVLSVHKIYNYYKKHGYKTIVMGASFRNVDEIKNLAGVDYLTISPNLLDELLNSNDHVPRVLDVATAKKEGAEKISYIDDEATFRFSLNEDAMGTEKLAEGIRKFSADIVTLFDMIEKKVTA

SEQ ID NO: 9613 - protein, 279 aa, Pediococcus pentosaceus ATCC 25745
MINSLNDRIMLNNGTAIPGLGLGVFQIPDADTAQVVANGIKNGYRLIDTAQIYGNEAGTGAGIKAGLTATGLKRADLFVTSKVWNDHLSYDETIAAFESSLKKLGLDYLDLYLIHWPGDNAFQDAWRALETLYKQGKIKAIGVSNFQIHHLQALAEFAEITPVINQIETHPQLSQLEMREYAAKHDIKVQAWSPLMQGKILDNAVLAKIAQKYNKSVAQIVLRWDVQQNILLVVKSVRAERMLSNAQIFDFELAPEDMDQINALNENLRVGPNPDEFDF

SEQ ID NO: 9614 - protein, 346 aa, Sinorhizobium meliloti
MAKALVLEKKGQLSLRDIPVRRDLSPTDVLIGIRTVGVCGSDVHYYTHGKIGPFVVNEPMILGHEAAGVVLEVGSQVRHLKKGDRVCMEPGIPDLSSRSSKLGIYNVDPSVRFWATPPVHGCLTPEVVHPAAFTYRLPDHVSFAEGAMVEPFAIGVQAALRAGIRPGDVGAVMGAGPIGMMTALAALAGGCSKVYVADLAQPKLDVIGAYEGIETINVRQQAVSEALAGATGGWGADVVFECSGAAPAILALPSLARPGGTVVLVGMPVEPVPFDIVGMQAKELRIETVFRYANVYDRAIELIASGKVDLKPLISATIPFDESIAAFDRAVEARPTDVKIQIEMPA

SEQ ID NO: 9615 - protein, 425 aa, Burkholderia cepacia R1808
MKIHIKGGTVVDPAAGTERQADVFVADGKIAALGTAPAGFNADNTIDASGLIVAPGLVDLCARLREPGYEHKATLASEMAAAVAGGVTTLVCPPDTDPVLDEPGLVEMLKFRARNLKQANVHPLGALTVGLKGEVITEMVALTESGCVGFTHANVPVRDTQVLLRALQYASTYGYTTWLRPQDAFIGRGGVAASGALASRLGLSGVPVAAETIALHTIFELMRVTGARVHLARLSSAAGLALVRAAKAEGLPVTCDVSANHLHLIDVDIGYFDSQFRLDPPLRGERDREAIRAALADGTIDAICSDHTPVDDDEKLLPFAEATPGATGLELLLSLTVKWADETNTPLAQALRRITAAPADVLQLPAGRLAEGGAADLCVFDPRAHWRVEPRALKSQGHNSPFLGYELPACVRATLVAGHVAFERH

SEQ ID NO: 9616 - protein, 377 aa, Thermus aquaticus
MEVARGLEGVLFTETRMCFIDGEAGRLYYYGIPIQELAEKSTFEETTYLLLHGRLPQRGELEAFKKDLAARRALPSHLLESFRRYPASAHPMSFLRTAVSELGMLDPTEGDISREALYQKGLDLIAKFATIVAANKRLKEGKEPLPPREDLSHAANFLYMANGVEPSPEQERLMDAALILHAEHGFNASTFTAIAAFSTETDLYSAITAAVASLKGPRHGGANEAVMKMIQEIGAPERAREWVREKLSKKERIMGMGHRVYKAFDPRAGVLEKLARRVAEKHGHSPEYQILKIVEEEAGKVLNPRGIYPNVDFYSGVVYSDLGFGLEFFTPIFAVARISGWVGHILEYKEQDNRLLRPDAKYIGELDRPYVPLEARG

SEQ ID NO: 9617 - protein, 47 aa, Glycine max
QGSNEMFGGELCFHKAPTNEEFPQQTCRQITALHKYDCLPANISTNA

SEQ ID NO: 9618 - protein, 115 aa, Hordeum vulgare
MARAAASQLVLVALVAAMLLVATDAAISCGQVSSALSPCISYARGNGAKPPAACCSGVKRLAGAAQSTADKQAACKCIKSAAGGLNSGKAAGIPSMCGVSVPYAISASVDCSKIR

SEQ ID NO: 9619 - protein, 115 aa, Hordeum vulgare
MARSAATQLVLVAMVTAMLLIAADAAISCGQVSSALSPCISYARGKGAKPPAACCSGVRSLAGAARSTADKQAACRCIKRAAGALNAGKAAGIPNKCGVRVPYAISASVDCSKIR

SEQ ID NO: 9620 - protein, 432 aa, Tropheryma whipplei TW08/27
MSKIKLVTAIPGPESERLHRIRQATVARGVSSTFPIYIKESHGSILIDEDGNHLIDMGCGIGVTTLGHSHPAVVDAARAQINSVWHTLFSITPYESYVEVCKLLAKNTPGDFPKKSLLLNSGAEAVENAVKISRAYTGRPTVAVLDRSFHGRTNLTSSMTYRGSLYSSDFGPTASNIVSAPNSYPLHDRLSGKEAAARTISYLETRVAARNIACLFYEPIQGEGGVIVPADGFLPALQDWCRENDIVFVADEIQSGFGRTGCFFASETDGLEPDIVCSAKGIANGLPLSAVTGRSDIVDAARPGTLGGTFTGNHVSCAAALEVFEQYKDNAPLDSASRLGDILKELLLNLQSKHPQIAEVRGRGAMFGAEFSGNHAGEMVSRVITRAAELGVIFLSSGVEGNVVRFLPNVFMDKETIEEAIGVLDSAISSVV

SEQ ID NO: 9621 - protein, 617 aa, Triticum aestivum
  unsure (1)..(617): unsure at all Xaa locations
MWRHAAARRSAQIRRLLSTSAPSSGAGSAVRGPCIVHKRGTDILHDPWYNKDTAFPLTERDRLGLRGLLPPRVMSFEQQYERFINSYHSLEHDSPGDPDSAVXLAKGRGRTRLDDRNETWYSRALIDNFMXLHDLIPFFYSRLQRQXCSRKHTRNRRIRHIQFVMSSRILCYXAELLYLXSISADTAATSTGYIVASFVYVDRFIKHCLDVYVAAAGINPQKVLPIMLDVGTNNEELLEDKLYLGLRQPRLEGEEYLAVVDEFMEAVHARWPKAIVQFEDFQMKWAFETLQRYRSRFCMFNDDVQGTAGVALAGLLGAVRAQGRPLADFTKQKIVVVGAGSAGIGVLNMAKHAMLRMPGTHKIGELGEGHNQFWVLDKDGLITKSRKDLDPAVARFARGYGPEEVEDLHEGASLVEVVKKVKPHVLLGLSGVGGIFNEEVLKAMKESDSPCPAIFAMSNPTTKAECTPEDVFKHVGENAVFASGSPFSNVTLSNGRKGYANQANNMYLFPGIGLGALLSGARHISDGMLHAAAECLASYITDDAIRKGILFPSISSIRHITARVGAAVARAAVDEDLAEGCPDLDPRDLRSMSESDTVDYVARKMWYPVYSPLVNDK

SEQ ID NO: 9622 - protein, 241 aa, Triticum aestivum
MKTLLILTIIAVALTTTTANIQVDPSGQVQWPQQQQPFPQPQQPFSQQPQQIFPQPQQTFPHQPQQAFPQPQQTFPHQPQQQFPQPQQPQQPFPQQPQQQFPQPQQPQQPFPQQPQQQFPQPQQPQQPFPQPQQPQLPFPQQPQQPFPQPQQPQQPFPQLQQPQQPLPQPQQPQQPFPQQQQPLIQPYLQQQMNPCKNYLLQQCNPVSLVSSLVSMILPRSDCKVMRQQCCQQLARIPQQL

SEQ ID NO: 9623 - protein, 460 aa, Schizosaccharomyces pombe
TGALLHHTLGDGDFRTFMDMFKKVSAYSIMIDNGNDAAEKIDEALSICYKKARPVYIGIPSDAGYFKASSSNLGKRLKLEEDTNDPAVEQEVINHISEMVVNAKKPVILIDACAVRHRVVPEVHELIKLTHFPTYVTPMGKSAIDETSQFFDGVYVGSISDPEVKDRIESTDLLLSIGALKSDFNTGSFSYHLSQKNAVEFHSDHMRIRYALYPNVAMKYILRKLLKVLDASMCHSKAAPTIGYNIKPKHAEGYSSNEITHCWFWPKFSEFLKPRDVLITETGTANFGVLDCRFPKDVTAISQVLWGSIGYSVGAMFGAVLAVHDSKEPDRRTILVVGDGSLQLTITEISTCIRHNLKPIIFIINNDGYTIERLIHGLHASYNEINTKWGYQQIPKFFGAAENHFRTYCVKTPTDVEKLFSDKEFANADVIQVVELVMPMLDAPRVLVEQAKLTSKINKQ

SEQ ID NO: 9624 - protein, 422 aa, Halobacterium sp. NRC-1
MRVIRDAVLADGRVRDIRLDGERIDAVGTALDGELFVDANADYRVLPGMIDAHVHFRQPGFEHKETWASGSRSAAAGGVTTVVDQPNTAPPTVTGDAVDEKAAHAAADSVVDWGVNGGVTGEWDPASLFDRSLFALGEVFLADSTGDMGIDAALFRDACQRAASEDVVVTVHAEDADRFDTAAKSRSDADAWSAYRTPEAEAAAVERAVEVGTEAGATIHIAHTSTPEGVDAAAAGGATCEATPHHLFLSRDDLDDLGTFGRMNPPLRSDPRREALFERLADGRIDVVATDHAPHTRAEKAADIWDAPSGVPGVETALPLLLGAAHRGELSYERVRDVTAANPADVFGLERKGHIAAGRDADLVLVDPDDAREIHGDDLHSNCEWTPFEGHVGVFPAMTLVRGTTVWDGDTVSAFDGRNVRQ

SEQ ID NO: 9625 - protein, 448 aa, Zea mays
MSHYHSADFEEMEDEYDMNEPVDDMEGEDEYQELVIRDSDAEDEDDADQLHKLSDTSAADARSGKDIQGIPWETIEVTRETYRQARLEQYKNYENIPNSGVAAMMACKSTEKGRTYYEFRRNTRSVKSTISHFQLRNLVWATSKHDVYLLLHYSVLHWSALNGVDTEIMDVHGHVAPSEKHPGSLLEGFLHTQISTMAVKDNLLVAGGFQGELICKHLDREGISFCCRTTYDDNAITNALEIFNTSSGALHFIASNNDCGVREYDMERYQLFKHFRFDWPVNHTSLSPDGKLVIIVGDDTDALLIDSNSGKTIHSMKGHLDFSFASAWSPDGLTFATGNQDKTCRIWDARNLTESVHVLRGNVGAIRSIRFTSDGHFLSMAEAADFVHIFDIKSDYNKRQELDFFGEVSGMSFSPDTDTLYVGISDRTYGSLLQFGRLYNYSYLDSLL

SEQ ID NO: 9626 - protein, 496 aa, Lesquerella fendleri
MTSLNIKLLYHYILTNLFNLCLFPLTAFLAGKASHLTKSDLLMFLSHLQDNLITVIVLFTFTIFCLVLYIVTKPKQIYLVDYSCYLPPDHLKVSISSVMDIFYELRKVDPLCEVGCDDSSLEFMRKVLERSGLGDETYVPLGLHQVPPQKTFAAIKDETEQVIKGALENLFENTKVNPREIGILVINSSMFNPTPSLSAMVINTFKLRSNIKSFNLGGMGCSAGVIAIDLAKDLLHVHKNTYALVISTENITITAYAGENRSMNVSNCLFRIGGAAILLSNKPRDKRRSKYKLAHTVRTHTGADDMSYRCVQQEEDEMGKVGVRLSKDITTVAGTAVKKNISTLGPLILPLSEKLLYFVSFIAKKLLKEKIKNYYVPDLKLAINHFCIHAGGRGVLDVLEKNLRLSPIDVEASRSTLHRFGNTSSSSIWYELAYIEAKGRMKKGDKAWQIALGSGFKCNSAVWVALRNVKASANSPWEHCIDRYPVPDTCVENGKS

SEQ ID NO: 9627 - protein, 316 aa, Shigella flexneri 2a str. 2457T
MNELDGIKQFTTVVADSCDIESIRHYHPQDATTNPSLLLKAAGLSQYEHLIDDAIAWGKKNGKTQEQQVVAACDKLAVNFGAEILKIVPGCVSTEVDARLSFDKEKSIEKARHLVDLYQQQGVEKSRILIKLASTWEGIRAAEELEKEGINCNLTLLFSFTQARACAEAGVFLISPFVGRIYDWYQARKPMDPYVVEEDPGVKSVRNIYDYYKQHHYETIVMGASFRRTEQILALTGCDRLTIAPNLLKELQEKVSPVVRKLIPPSQTFPRPAPMSEAEFRWEHNQDAMAVEKLSEGIRLFAVDQRKLEDLLAAKL

SEQ ID NO: 9628 - protein, 1862 aa, Oryza sativa (japonica cultivar-group)
MPDIRSAPGRGKSDEDERRPIGSLFKLKRKRRAPGSAEAKGDSNPSVESEAPDGVVPGEMDDTLAIIKRKLRKPKKGKEGGDAVVVGSGAEGELLVEEEDVQGGVNVGDGVAEDKSNLEGVKVEVDEVIGGELKDSGGLGLEDSLSTLFKRSGRKSRQVSVKEEEGVEVAGSHGEEILEKGSGLVSDRVAKGTKRRRRRTKEEMKNAAAKSESAMAHEGSPNRKVGTSLPRKAKAEAKVKISNSNRRSKKSDEKPKASDDVLCHRSLGETIEQDAETRTVLDDGSRNSSDGASHRIEVSACLSNQPCLKPCSGELAEEVSLSAANAATDGVSNEHTYSETLLKERNDDAGCSHGKPPTLAIKSIPGKKPIEMPKKPVRQKDQLLSTDVDNKCVVGSGDTKDVNIENQPAFGIPESHVTGKGLHPHKMATSVKELDVVDVVAPTDFEDMENASKSKRVTRSSRKRKHGDMAYEGDIDWETLMQEQGLFSNLSAALVDYPLKSKDKIKISEVLDNGDGSGVAAVRAGLKAKAVTPIEKIKFKDILKRRGGLQEYLECRNMILSRWCKDVKHILDLAECGVSDVCLDDESPRQTLIRDVYLFLDQNGYINAGIASDKVKTDHESPPEDVEVSKLNESHERKSVSIQDCIVTEAVQDKKAVVKQTDCVLTEASNEESSSAAIHCDAQDLLPPLKSEELIFKEKNQGVLTEVEGGSLHQAEAADIEHSENKHEASDRVESGGYGKKIIVVGAGPAGLTAARHLQRQGFSVTVLEARNRIGGRVYTDRVSLSVPVDLGASIITGVEADIATERRADPSSLICSQLGLELTVLNSACPLYDVVTGDKVPDDLDTDLESEYNGLLDEMAQLFAQNGESAVGLSLEDGLEYALRKNRVTRSEQDDQLRNVSSAGAVDISESASTEKEIAHCGKEDKTDVLSPLERRVMNWHFAHLEYGCAAMLKSVSLPYWNQDDVYGGFGGAHCMIKGGYDTVLESLAKGLDVQLNHVVTEVLYGSEELGASGNSRKFVKISTSNGNEFVGDAVLITVPLGCLKAQTIKFSPSLPDWKLSSIDRLGFGLLNKIVLEFPEVFWDDNVDYFGATAEQTDLRGQCFMFWNLKKTVGVPVLIALLVGKAAIDGQSISSDDHVKNAIVVLRKLFKDASVPDPVASVVTNWGLDPFSRGAYSYVAVGASGRDYDILGRPVSDCLFFAGEATCKEHPDTVGGAILSGLREAVRIIDLVHSGKDYVAEVEALQTYQMQSDSERNEVKDMSNKLDACELSTALCKTSSDASYPLFSKETLLQEMFFSAKTTSGRLHLAKELLKLPPDVLKSFAGSKDGLSTLNSWILDSLGKNATQLLRHCVRLLLLVSTDLLAVRLSGIGRTVKEKVCVHTSRDIRAIARQLVSVWVEVFRKEKASNGGLKLLRRMPSTESSKPRSKDLLSGKPIVRAPNQVSFNPKVASKNARSAGNHSPHTAIKKPENKAAKLEAMTATRSDGSSLRSQKQQHALEPKVDNGLAMSEEEAAAFAAAEAARAAAIAAAQAYASVEAEINAPRELPKIPSFHTFAMRDHYLDESDTRKKVLSDNLVRLECISEIDSRNDKAKNPSVDHANCADVDSSKMTGDNCTQRSYSNENACLINIRDHSTDSGAVDSRFTRAWVDTDTIFIDGVKDPLAIERWQQQAMEADKEFYSRIRIPDEEDSSSQKQTCRSSASQVAESKPASDGQSRGVEHLRQGLINFISTVLMPLYRNKKVDREGYKGIMRKAVTKIIETCTEGEKMMTVHEFLDSKRKNKVRLLSSTCKSHDVHFGIQQVSVRSIGVIKFLDLRIGADTSGLSIHDSCAKPNDYPKFPTAWQGTDYPNSMARISLI

SEQ ID NO: 9629 - protein, 209 aa, Arabidopsis thaliana
MSQLGVETSQAQPETPQSTTFLDLLRLQMDGLDRSRRRKRTLKERLGFKRIGCCGPTWGLRLTSNTGEDDDEPFENRLVSGSDHVTGPLNQGMNLATALAAERNYRTEETEASGSLTPLKVSLMRLLEETAERVVVEENETERVTASASSTVRGVNNDSVCCVCMGRKKGAAFIPCGHTFCRVCSREVWLNRGSCPLCNRPIIEILDIY

SEQ ID NO: 9630 - protein, 178 aa, Glycine max
  unsure (1)..(178): unsure at all Xaa locations
MASSTISSPTVTTVNRAGAGMDAPFTGLKAMAGFLTTKTNNDITSIASTGGRXHCMQVWPPPGNKNIETLSYLPHLDDAQLAKEGQHLLKKGWIPCLELQXEHSCRYREHNRSPRYYDGRYCTMXNLPMFGCTDAYHALNELRDADTAYPNGFIRIIRCNIVEQVQCINFIAYKPPDF

SEQ ID NO: 9631 - protein, 446 aa, Arabidopsis thaliana
MTKKMRRVGKYEVGRTIGEGTFAKVKFARNTDTGDNVAIKIMAKSTILKNRMVDQIKREISIMKIVRHPNIVRLYEVLASPSKIYIVLEFVTGGELFDRIVHKGRLEESESRKYFQQLVDAVAHCHCKGVYHRDLKPENLLLDTNGNLKVSDFGLSALPQEGVELLRTTCGTPNYVAPEVLSGQGYDGSAADIWSCGVILFVILAGYLPFSETDLPGLYRKINAAEFSCPPWFSAEVKFLIHRILDPNPKTRIQIQGIKKDPWFRLNYVPIRAREEEEVNLDDIRAVFDGIEGSYVAENVERNDEGPLMMNAFEMITLSQGLNLSALFDRRQDFVKRQTRFVSRREPSEIIANIEAVANSMGFKSHTRNFKTRLEGLSSIKAGQLAVVIEIYEVAPSLFMVDVRKAAGETLEYHKFYKKLCSKLENIIWRATEGIPKSEILRTITF

SEQ ID NO: 9632 - protein, 259 aa, Zea mays
MASKSTMRSLVLIMGLLLLSCSGMSSAARLLEEMAPKEEYPHPEVPELPKPELPPHPTVPELPKPDELPPHPVVPELPKPEVPVHPAVPELPKPEIPPHSTVPELPKPEVPELPKPEVPEHPAVPELPKPELPPHPTVPELPKPEVPELPKPEVPEHPAVPELPKPELPPHPTVPELPKPEVPELPKPEVPEHPAVPELPHPDVPEHPASVPELPKPEVPEHPTVPELPKHELPPLPEPELPLPPKAESHYPEPGMAKP

SEQ ID NO: 9633 - protein, 355 aa, Fusarium solani
MSRSNPPNPTGSRKISFNVSEQYDIQDVVGEGAYGVVCSAIHKPSGQKVAIKKITPFDHSMFCLRTLREMKLLRYFNHENIISILDIQKPRNYESFNEVYLIQELMETDMHRAIRTQDLSDDHCQYFIYQTLRALKAMHSANVLHRDLKPSNLLLNANCDLKVCDFGLARSAASQEDNSGFMTEYVATRWYRAPEIMLTFKEYTKAIDVWSVGCILAEMLSGKPLFPGKDYHHQLTLILDVLGTPTMEDYYGIKSRRAREYIRSLPFKKKVPFRTLFPKTSDLALDLLEKLLAFNPVKRITVEEALKHPYLEPYHDPEDEPTAPPIPEEFFDFDKHKDNLSKEQLKQLIYQEIMR

SEQ ID NO: 9634 - protein, 434 aa, Yersinia pestis KIM
MTRILQSINKIALKERLMESKVVVPAEGKKITVDAQGKLVVPHNPIIPFIEGDGIGVDVTPAMINVVDAAVKKAYNGERKISWMEIYTGEKSTHVYGKDVWLPEETLDLIRDYRVAIKGPLTTPVGGGIRSLNVALRQQLDLYVCLRPVRYYEGTPSPVKHPELTNMVIFRENAEDIYAGIEWKAGSPEAEKVIKFLREEMGVKKIRFPEQCGIGVKPCSEEGTKRLVRAAIEYAITNDRESVTLVHKGNIMKFTEGAFKDWGYQLAREEFGGELIDGGPWVKIKNPNNGKEIIVKDVIADAFLQQILLRPAEYDVIACMNLNGDYISDALAAQVGGIGIAPGANIGDDCALFEATHGTAPKYAGQDKVNPGSIILSAEMMLRHMGWFEAADLIIKGTEGAIQAKTVTYDFERLMEGAKLLKCSEFGDAIIKHM

SEQ ID NO: 9635 - protein, 402 aa, Pseudomonas fluorescens PfO-1
MENLQSAVDTLVHSSNTLFILIGAVMVLAMHAGFAFLEVGTVRQKNQVNALSKILSDFAVSTLAYFFIGYWLSYGVTFLHPAAVLSADHGYGLVKFFFLLTFAAAIPAIISGGIAERARFVPQLCATALIVAFIYPFFEGMIWNGNYGLQAWLTAQFGAPFHDFAGSVVVHAMGGWLALAAVLLLGPRTGRYRDGKLVAFAPSSIPFLALGSWILIVGWFGFNVMSAQTLQGVSGLVAVNSLMAMVGGTVAALIVGRNDPGFLHNGPLAGLVAVCAGSDLMHPVGALVNGAIAGALFVWCFTAAQVKWRIDDVLGVWPLHGLCGVWGGIACGIFGSTTLGGLGGVSLISQLIGTALGVAVALIGGFAVYGSIKALHGLRLSQEQEYYGADLSLHKIGAVSQD

SEQ ID NO: 9636 - protein, 492 aa, uncultured bacterium 560
MIKMPDGKLFIGGEWETGTGKEIVSIFPADGSINCSLYGASKNDVLRAVKLAKSAQSQPSWRSLKPHERARYLYAIADGIEANIDRISQIQTRDTGKTLRETAILASSASGTFRYFGALLESSDDLLTAQRNDSLTMSVYEPLGLVSAITPWNSPIASDAQKIAPALAAGNAVLLKPSSWSPLVSLELAKLVESSGLPKGLFSVLPGSGEEVGNLLVEHPDISKVTFTGSTKTGRSLAIKAAKKLMPISLELGGKSPVIVFKDSDIDIAIAGVMFGIFSSTGQSCIAGSRLFVQKDIYNEFVERLVKATKKLKVGSPYNLDTQVSTMIHPQHRDSVAAYVDLARNEGAKILCGGKSPSGAEYKKGAYYLPTIITQVDNSAQICREEVFGPVLVVMPFDDEADVIEQANENEYGLACGIWTSDFPKAWRVGRAINAGTVWVNTYKQFSISTPFGGEKNSGMGREKGRNGIRAFMSQKSLYFDLTGNSHPWAET

SEQ ID NO: 9637 - protein, 118 aa, Brassica napus
MIRKTPNLQNDIINIQERYSNNPVMDAGGGRNNRKNVNFRRPPAMTSENSKHELRRTFSSQKRLMIPANYFSLESLVILVGLTASLLILPLVLPPLPPPPFMLLLIPIGIMVLLIFLA

SEQ ID NO: 9638 - protein, 365 aa, Zea mays
GGPIGYLEAGLCPTVGVGGHFSGGGFGMLLRKYGLAIDNVVDAVLVDARGRLLSKNTMGSDVFWAIRGGGGESFGVVLSWQVRLVPVPATVAVFNVPVPASQGAVDVVTRWQQVAPALPDDLFIRVVVQQQTANFESLFLGTCDALLPVMGSRFPELGLNRSSCKEMTWIQSVPYIYLGSGSTVEDLLNRTTSASVFSGGYKATSDYVRQAIPRDVWANIFSRLAQPNAGLMILDPYGAQISTVPESATPFPHRAGVLYNIQYMNFWPMAGGGDGAVQTKWVRDLYAFMAPYVSSNPREAYFNYRDLDLGENVVVGNVSSYQAGMVWGHKYFKDNYQRLAVAKSQIDPDDYFRNEQSIPPLANSN

SEQ ID NO: 9639 - protein, 305 aa, Lactobacillus gasseri
  unsure (1)..(305): unsure at all Xaa locations
MKRIGILTSGGDAPGMNAAIRAVTRTALANGIEVCGIRYGYAGLVAGDIFQMTSETVADKINRGGTFLYSARFPEFKEEEVQLKGIEQLKKHGIDALVVIGGDGSYHGALKLTRHGYNAVGLPGSIDNDIPYTDFTIGFDTACNTAMEAIDKIRDTATSHQRVFVVNVMGRDCGDIAMHVGVATGADAIVIPEEPYDIKEIAENLKQGFANGKKHGIVVLAEGVMDANKFKDELLKYGDFDARANILGHMQRGGSPTTRDRVLASEMGAYAVKLLLEGKGGLAVGIENXXXXXXXXXXXXXXXXX

SEQ ID NO: 9640 - protein, 436 aa, Bordetella parapertussis 12822
MNLSDKKATLSFSDGSAPIEFPVYKGTVGPDVIDIRKLYGQTGMFTFDPGFMSTAACASGITYIDGDKGELLYRGYPIEQLAVNCDFLDICYLILNGELPNGGQKQDFDSQVTHHTMVNEQLHFFLRGFRRDAHPMAVLTGLVGALSAFYHDSTDITNPHHRHVSAIRLIAKMPTLVAMAYKYSQGQPFIYPQNDLSYTGNFLRMMFATPCEEYKVNDVVERALDRIFILHADHEQNASTSTVRLCGSSGTNPFAAIAAGVACLWGPAHGGANEACLQMLEELQANGGVAKVGEFMEKVKDKNSGVRLMGFGHRVYKNYDPRAKLMQETCKEVLVALGLENDPLFKLAMELERIALEDDYFVQRKLYPNVDFYSGIVQRAIGIPTSLFTAIFALARTVGWIAQWNEMLSDPDYKIGRPRQLFTGSVTRDVPGMDKR

SEQ ID NO: 9641 - protein, 339 aa, Naumovia castellii
MVGPKTKKQKVANAGGSTSLDLLKKTGTTVVADTGDFATIDKYKPQDATTNPSLILAASKKEDYSSLVDNAVAYGKENGETIDEQVECAIDKLLVEFGTEILKIVPGKVSTEVDARLSFDKDATIKKALQLIHLYEKAGISKDRVYIKVASTWEGIQAAKVLEQEHGITTNLTLLFSFTQAVACAEAGVSLISPFVARITDYYKAQTGKDYSPEDDPGIHSVKKIYNYYKKHGYHTIIMAASLRTTGQVKQLAGIDNLTLSPKVLDELVASTDEVPKLLDPKKAAKQGDEKISFLDDEPKFRYSLNDDAMATEKLADGIRKFAADAITLSNAIKEKLQK

SEQ ID NO: 9642 - protein, 1040 aa, Cryptococcus neoformans var. grubii
MSRVPSGSQQPQYTQQPLYHPSSVHSQSASVQQTHQQYHPHAGQPMAFQGDPHAYSYDRQSQINTWQANPGAAGSMEYHSAVAGSSRGADPYQPYSQPHRSSPSQPVTAGRTQPASAQQYTPWAPVQASATTTPSSRGGGVKLEDLMSNDSRADGKSQPLSSIPLSVSASFDTRSQFSAGPQGASTEKEKDKERDKATQQQGPSEFIKKLYKMLEEEQAQYGSSRAKKGEKGKRGSVGWGANGTSFVVWDMNDFTTKILPQTFRHSNFSSFVRQLNKYGFSKIKHVDAGTGSIKENIWEFQHPNFQAGGKSDLESIKRKPVAPKKTNNQEGDENSPRYVGLSNEDQSRMHLMEDRINILEDALAKSRSEADEARMREMAMMGLVRDMIGHIAASESEAIGSPAATTGHSPRVLHLLKSLDNLARAYPPEMYHSNIARQPTTMPYTPAQPQSHQSFLNAAYNPAFSGSSVGGAAQAQASPHTDGTGSRGSLSGPSTGEIKPPASSSRLRAASNAGVVPPGSVNASVPVASQPSGNPPAGPVAHVEDPAEDVIEIPNQMQDMYGGESVSIAPLFVETPAWLTEGTTIPLTMYRKQSDGQALKAVYQAFAAGGKLPAGEGQDEDGNAIASGSSTSAAEIMAGSSQMGLQQSYDAGPSTSTGIPLPMDGSPSSESSSRKGKGKKSRGTSLKEQRESKLKPHWAQTPRILVVEDDIVYRTLSKKFLQKFGCETETVENAQGAVDKMNGTKYDLVLMDIFFGPNMDGRKATSLIRQFNNYTPIISMTSNAQPQDVDSYYQSGMNDILAKPFTKNHLFTILDKHLVHLRHAQLYERLIPLGVGVPPLSDQHVQEALAVSAATLQNTNGQLQLENGQTAEAQNEQQDSNGELELGIRNPLAGSGWSDEAYQLVLAQFLQTGVMPDITTISAVSSSPNPNGFDGTIGTSIVFGESSGFSRKRSIEAINDDNWDGQAQTPASAQAQVQAQTQNTIMQGDQQQGMSLQMPTNVGMGMDVNMGNMPESGMMNQDMSNDSDGRETKRARGMAG

SEQ ID NO: 9643 - protein, 367 aa, Aeromicrobium erythreum
MTEKQTTHRPLSDRVARRVVRTLGRLPQPLKRAIAGKPISIDGQTLDVEAQVGVRLLNLAVGETFETLPVEEGRRQIDGEAWVFGYEHPVHDVRDLVLPGPGGDLPARIYRPAGLPALSAGLVYFHGGGWVLGNLGSADSVCRYLADTAGITVVSVDYRLAPEHPFPAGVDDAVAAFRHVVAHASELGIDPSAVAVGGESAGGNLTAVASLVSTLEARTDPSVPVPAFQLMFMPVTDLTTKHRSYELFSDGFFLSDAQMDWYKAHYLTDPAQAHDPRVSPLLAPDLEGQPPAHVVVAGFDVLRDEGEAYATRLLEAGVPTTLTRQEGIVHGLVNATGVGTVARRVLDEAAGQLRKRLVPLASGETVR

SEQ ID NO: 9644 - protein, 428 aa, Arabidopsis thaliana
MTNTLCLSLITLITLFISLTPTLIKSDEGIDVFLPISLNLTVLTDPFSISAASHDFGNITDENPGAVLCPSSTTEVARLLRFANGGFSYNKGSTSPASTFKVAARGQGHSLRGQASAPGGVVVNMTCLAMAAKPAAVVISADGTYADVAAGTMWVDVLKAAVDRGVSPVTWTDYLYLSVGGTLSNAGIGGQTFRHGPQISNVHELDVITGKGEMMTCSPKLNPELFYGVLGGLGQFGIITRARIALDHAPTRVKWSRILYSDFSAFKRDQERLISMTNDLGVDFLEGQLMMSNGFVDTSFFPLSDQTRVASLVNDHRIIYVLEVAKYYDRTTLPIIDQVIDTLSRTLGFAPGFMFVQDVPYFDFLNRVRNEEDKLRSLGLWEVPHPWLNIFVPGSRIQDFHDGVINGLLLNQTSTSGVTLFYPTNRNK

SEQ ID NO: 9645 - protein, 439 aa, Chlorobium tepidum TLS
MSTLFLNARLLNPAENLDTVGSIKIGDDGLIEAVATGGESIPAKAEDNVIDLAGKVLAPGLFDMHCHFREPGQEYKETLETGSAAAVAGGFTGVALMPNTRPVIDSPLGVAYIRHHSAGLPIDLEVIGAMTVESRGEALAPYGKYASYSVKAVSDDGTAIQSSQIMRLAIEYAANFDLLLIQHAEDKHLTAGGIMNDGAVSAMLGLKGIPEVAEPIMIARDLQLIAWLKKHKLNGAVAEPRYHVAHISTAESVALVRKAKAAGLKVTCEVTPHHFTLTEHDLSSSIEKGNFIMKPPLASVENRDALIEGLRDGTIDAIATDHAPHAKHEKECPPDQAAFGIIGLETSLGLTITELVDKGVITLSQAIELLSTNPRRIMGLETILFRAGRKANLTIIDPDCEWIVSESDFGSKSRNTPFMGRKLKGRALGIYHNSKLIMR

SEQ ID NO: 9646 - protein, 129 aa, Streptococcus agalactiae
LETNTPETPDTPKIPELPQAPDTPQAPDTPHVPEAPHVPESPKAPEAPRVPESPKTPESPKAPEAPRVPESPKTPEAPHVPESPKTPEAPKIPEPPKTPDVPKLPDVPKLPDAPKLPDGLNKVGQAVFT

SEQ ID NO: 9647 - protein, 228 aa, Chloroflexus aurantiacus
MAAAAAVALVRPGMVIGLGFGSTAAYATRMIAERLHQGDLNDIVGVPCAEGTAQLARELGIPLTTLDEVAAVDLTIDGADEVDPQLSLIKGGGGALLREKMVAQASRRVAIIVDDSKLSPALGTRFALPLEVVDFGWRATARWLEAQGGTVQLRLRADGQPFRTDQGNLILDWKCGPLNDPAALAAQLSARAGIVEHGLFIGLATDLFVAGPDGVQHVTTSDCGTIAW

SEQ ID NO: 9648 - protein, 75 aa, Glycine max
  unsure (1)..(75): unsure at all Xaa locations
SISWPGDTTVNRAGAGMDAPFTGLKSMAGLPTRXTYNDITSIGCNCXRVQCMQVWPPIGXKKYETLSYLPDLDDA

SEQ ID NO: 9649 - protein, 670 aa, Triticum aestivum
RRGIPGDPDQQGVKDSYFPLRHGGKVTLYQDAHVNEGDLPDVQLERGKKFEHNQCWEDICHAILEAHHMIYIVGWSIYDKVKLVREPSSSRALPEGGELTLGELLKFKSQEGVRVCLLVWDDKTSHDKLFIKTGGVMGTHDEETRKFFKHSSVICVLSPRYASSKLSIFKQQVVGTLFTHHQKCVLVDTQASGNKRKVTAFVGGLDLCDGRYDTPQHRLFKDLDTVFENDFHNPTFSAGAKGPRQPWHDLHCKIDGPAAYDVLKNFEQRWRKASKFRDRFRKVSRWKDDALIKLERISWILSPSPNVPNDHVSLRVSKEEDPENWHVQVFRSIDSGSLKGFPSDCKEASKQNLVCRKNLIIDKSIHTAYVRAIRSAQHFIYIENQYFLGSSYEWPSYVNSGADNLIPMELALKIATKIRAGERFAVYIVIPMWPEGVPTSASVQEILFFQAQTMEMMYGVIARELKAMNIEDAHLQDYLNFYCLGNREEPSTDGSPESDKSTDKSAAGLARKHRRFMIYVHAKGMIVDDEYVILGSANINQRSLAGSRDTEIAMGAYQPHHAWSSKKGHPHGQVYGYRNSLWAEHLGMVDDHFKEPSSLDCVRLVNQIAEENWERFASEEMKTLQGHLLRYPVKVEPDGKIVPLPDQECFPDVGGKICGAPTSLPDSLTM

SEQ ID NO: 9650 - protein, 263 aa, Magnaporthe grisea 70-15
MQPLSNEQVQKLSNYDTLAQADDAQPAIVTSIPEVPITEARKPWQPEDEDRLPRPGVGRANIAATYDQPEGTTEGDYAAKHSDQTVLQQHLEFFDRDRDGIIWPRDTFIGFYRLGFGAVLSFLSIFVIHSNFSYATGDSWIPDPMFRINLSNIHKDKHGSASGAYDAEGRFVPQRFEDLFAKHAQGRDYMTARDVVNLLKGQRMIADPVGWFHAFIEWTATYYMLWPEDGRMKKEDVRGVFDGSIFYTIAARREEKMDEAKRR

SEQ ID NO: 9651 - protein, 400 aa, Bordetella parapertussis 12822
MSTSQKKPTVQQKKPAAQPAEKAAFKPKKSVALSGVVAGNTALCTVGRTGNDLHYRGYDILDFAGSAEFEEIAHLLVHGKLPNKAELKAYKEKLRALRGLPAQLQNVLECLPASSHPMDVMRTAVSVLGCVLPEKDDHNTPGARDIADRLMANLGSALLYWYHYSHNGRVIDVQTDDDSIGGHFLHLLHGAKPSDEWVRAMHTSLILYAEHEFNASTFTGRVIAGTGSDMYSSITGAIGALRGPKHGGANEVAFEVQKRYETPDEAEADTRQRVENKEVIIGFGHPVYTVSDPRNKVIKDVAKKLSRKAGSTKMFDIAERLETVMWDIKKMFPNLDWFSAVSYHMMGVPTAMFTPLFVIARTAGWSAHIIEQRIDNKIIRPTANYVGPEDQTYVPISKRA

SEQ ID NO: 9652 - protein, 430 aa, Deinococcus radiodurans R1
MVGRPAGVGVEWASMSKHIKVPEQGEKITMQNGKLTVPNRPIIPFVEGDGTGPDIWAASVRVFDAAVEKAYGSERKLEWMEVYAGEKSLEVYGANEWLPQETLTAFRDYLFGIKGPLTTPVGTGIRSINVALRQELDLYACVRPVQYFNGVPSPVKRPEDIDMVIFRENTEDIYAGIEWKAGTDEAEKVRGFLMREMNVTKIRFPDTSSFGVKPVSKEGTERLVRAAIEYAIENGRKSVSLVHKGNIMKFTEGGFRDWGYELAKREFGAVEIDGGPWCQLPNGIVIKDVIADNFLQQILLRPTEYDVIATLNLNGDYISDALAAQVGGIGIAPGANINYVTGHAIFEATHGTAPKYAGKNVINPSSVILSGEMMLRYMGWTEAADLILKGLDATIQQRVVTYDFARGMDDATEVKTSEFADKIIENMRNA

SEQ ID NO: 9653 - protein, 474 aa, Pseudomonas aeruginosa UCBPP-PA14
MQTKLLINGALVAGESESHAVYNPSQGNVLVRITEASGAQVHAAVQSADAAFDAWSQTPPKDRAALLLKLAERIDAQAHVFARLEADNCGKPFNAVLLDELPAVSDVFRFFAGAVRCLQGSAAGEYVAGHTSMIRRDAVGVVASIAPWNYPLLMAAWKLGPALAGGNTVVLKPSEHTPLSTLKLGELLAEIFPAGVVNIVHGRGASVGEPLTSHAQVRMVSLTGSVRTGSRIIEGTAESVKRMHMELGGKAPVLIFDDADIDAAVEGIRAFGFYNAGQDCTAACRLYVQKGVYQEFVRKLGEAVSSIRCGLPDDPATEMGPLITKEHLERVEGFVNRARELPHIEVVTGGKRAEGAGFFFEPTVLAGATQEDEVVRREIFGPVVTVSSFEDEAQALAWANDSDYGLASSVWTADVGRAHRLAARLQYGCTWVNTHFMLVSEMPHGGVKLSGYGKDLSMYGLEDYTVVRHVMFKH

SEQ ID NO: 9654 - protein, 435 aa, Saccharomyces cerevisiae
MTTNEEFIRTQIFGTVFEITNRYNDLNPVGMGAFGLVCSATDTLTSQPVAIKKIMKPFSTAVLAKRTYRELKLLKHLRHENLICLQDIFLSPLEDIYFVTELQGTDLHRLLQTRPLEKQFVQYFLYQILRGLKYVHSAGVIHRDLKPSNILINENCDLKICDFGLARIQDPQMTGYVSTRYYRAPEIMLTWQKYDVEVDIWSAGCIFAEMIEGKPLFPGKDHVHQFSIITDLLGSPPKDVINTICSENTLKFVTSLPHRDPIPFSERFKTVEPDAVDLLEKMLVFDPKKRITAADALAHPYSAPYHDPTDEPVADAKFDWHFNDADLPVDTWRVMMYSEILDFHKIGGSDGQIDISATFDDQVAAATAAAAQAQAQAQAQVQLNMAAHSHNGAGTTGNDHSDIAGGNKVSDHVAANDTITDYGNQAIQYANEFQQ

SEQ ID NO: 9655 - protein, 269 aa, Populus alba x Populus tremula
MRPQSVILALSLIFFFLHCTKTLCQSPAAAPAMAPPKTPVKAPPADSSQAPSAQVATSPGPVDINKILQKAGHFTVFARLMQATTEDTELNKELNNTNNGITILAPTDSAFSTLKAGFLNSLSDEDKTELVKFHVLPAFISTSQFQTVSNPVRTQAGTGPRVTLNVTTTGNFVNISSGLTNASISGTVYTDSQLAIYQLDKGLFPLEVFSPKPPAPGPEPALGKPRKAAPEAESPIAPKEIFGAPALLFLLNNPLLFAVSWAFGAIKYS

SEQ ID NO: 9656 - protein, 499 aa, Azotobacter vinelandii
MQASNDTRSNYAPDSSYGLFIDNQWVAGENGETITILNPANGKTLTGIPNATAVDVDRAVQAAQRAFEAWRSTTPIERANALLKIADLLEADAERFAALESLDVGKPIRESSSVDIPLAIDHFRYFAGVIRSHSDEAVMLDEQTLSIVLSEPLGVVGQVIPWNFPLLMAAWKIAPAIAIGNTVVIKPSELTPVSILELAKIFAQVLPAGVVNIVTGTGASAGQALLDHPDVRKLAFTGSTSVGHRVADAAAKKLIPATLELGGKSANIVFPDANWDKAVEGAALAILWNQGQVCESGARLFVHESIYERFLDEVKQKFEAVRVGDPLHPDTMMGAQVSKTQMERILGYVDIAKQEGAKVLLGGGRLTGADYDAGFFIQPTILVDVRNDMRVAYEEIFGPVLCVIPFKDEADVIAMANDSEYGLAGAVWTQDINRALRVARAVETGRMWVNTYHEIPAHAPFGGYKKSGLGRETHKSILEAYSQKKNIYVSLNEAPLGLF

SEQ ID NO: 9657 - protein, 302 aa, Triticum aestivum
MKTLLILTILAMATTIATANMQVDPSGQVQWPQQQPFPQPQQPFCQQPQQTIPQPHQTFHHQPQQTFPQPQQTYPHQPQQQFPQTQQPQQPFPQPQQTFPQQPQLPFPQQPQQPFPQPQQPQQPFPQSQQPQQPFPQPQQQFPQPQQPQQSFPQQQQPAIQSFLQQQMNPCKNFLLQQCNHVSLVSSLVSIILPRSDCQVMQQQCCQQLAQIPQQLQCAAIHSVAHSIIMQQEQQQGVPILRPLFQLAQGLGIIQPQQPAQLEGIRSLVLKTLPTMCNVYVPPDCSTINIPYANIDAGIGGQ

SEQ ID NO: 9658 - protein, 278 aa, Corynebacterium sp.
MTVPSIVLNDGNSIPQLGYGVYKVPPADTQRAVEEALEVGYRHIDTAAIYGNEEGVGAAIAASGIARDDLFITTKLWNDRHDGDEPAAAIAESLAKLALDQVDLYLVHWPTPAADNYVHAWEKMIELRAAGLTRSIGVSNHLVPHLERIVAATGVVPAVNQIELHPAYQQREITDWAAAHDVKIESWGPLGQGKYDLFGAEPVTAAAAAHGKTPAQAVLRWHLQKGFVVFPGSVRREHLEENLDVFDFDLTDTEIAAIDAMDPGDGSGRVSGHPDEVD

SEQ ID NO: 9659 - protein, 180 aa, Triticum aestivum
  unsure (1)..(180): unsure at all Xaa locations
MAPTVMASSATSVAPFQGLKSTAGLPVSRRSNGASLGSVSNGGRIRCMQVWPIXEGIKNSETLSYLPPLSTEXLLKQVDYLDPSKWVPCLRXSKVXSSSVEHNASPGXYYDGRYWXTMWXLPISGXTDXTQVINEVXKRSRRXPDAYSAXRFDNMRKCMRNSSPTTGSRIRKANSHHTGN

SEQ ID NO: 9660 - protein, 503 aa, Glycine max
  unsure (1)..(503): unsure at all Xaa locations
MVLSKTASETDVSVHSTFASRYVRTSLPRFKMAEESIPKEAAYQIIHDELMLDGNPRLNLASFVTTWMEPECDKLIMAAINKNYVDMDEYPVTTELQNRCVNMIAHLFNAPLEESETAVGVGTVGSSEAIMLAGLAFKRRWQNRRKLEGKPYDNPNIVTGANVQVCWEKFARYFEVELKEVKLRDGYYVMDPEKAVEMVDENTICVAAILGSTLNGEFEDVKLLNDLLVEKNKETGWDTPIHVDAASGGFIAPFLYPELEWDFRLPLVKSINVSGHKYGLVYAGIGWVIWRSKEDLPEELIFHINYLGADQPTFTLNFSXGSSQVIAQYYQLIRLGYEGYKMVMENCNDNMAVLKEGLEKTGRFEIISKDIGVPLVAFTLKDHTHFNEFQISDMLRRYGWIVPAYTMPPDAQHVTVLRVVIREDFSRTLAERLVIDVTKVVHELDLLPARVISTNTIMVTGEAGEENDEKVLFAKKSEIETQREITKAWKKFVMDRKKMNGVC

SEQ ID NO: 9661 - protein, 388 aa, Streptococcus pyogenes M1 GAS
MKNQLGQLALEQAKTFGGKLEVQPKVDIKTKHDLSIAYTPGVASVSSAIAKDKTLAYDLTTKKNTVAVISDGTAVLGLGDIGPEAAMPVMEGKAALFKAFAGVDAIPIVLDTKDTEEIISIVKALAPTFGGINLEDISAPRCFEIEQRLIKECHIPVFHDDQHGTAIVVLAAIFNSLKLLKKSLDEVSIVVNGGGSAGLSITRKLLAAGATKVTVVDKFGIINEQEAAQLAPHHLDIAKVTNREFKSGTLEDALEGADIFIGVSAPGVLKAEWISKMAARPVIFAMANPIPEIYPDEALEAGAYIVGTGRSDFPNQINNVLAFPGIFRGALDARAKTITVEMQIAAAKGIASLVPDDALSTTNIIPDAFKEGVAEIVAKSVRSVVLKS

SEQ ID NO: 9662 - protein, 135 aa, Zea mays
  unsure (1)..(135): unsure at all Xaa locations
PHPCARNASTLLLSPYMHFGELSVRKVFHQXNDSNHAGEESCTLFLCSIGLREYSRYLTFNHPCSHEKPLLSHLRFFPWVVNEVYFKVWRQGRTNYPLVDAGMRELRATGWVHDRIRVVVSSFFVKVLQGESCRV

SEQ ID NO: 9663 - protein, 165 aa, Streptococcus agalactiae
LETNTPETPDTPKIPELPQAPDTPQAPDTPHVPESPKAPEAPRVPESPKTPEAPHVPESPKAPEAPRVPESPKTPEAPHVPESPKAPEAPRVPESPKAPEAPRVPESPKTPEAPHVPESPKTPEAPKIPEPPKTPDVPKLPDVPKLPDAPKLPDGLNKVGQAVFT

SEQ ID NO: 9664 - protein, 197 aa, Nicotiana tabacum
MSAPRFIKCVTVGDGAVGKTCLLISYTSNTFPMDYVPTVFDNFSANVVVNGSTVNLGLWDTAGQEDYNRLRPLSYRGADVFILAFSLISKASYENVSKKWIPELKHYAPGVPIVLVGTKLDLRDDKQFFIDHPGAVPITTAQGEELRKTIGAPAYIECSSKTQQNVKAVFDAAIKVVLQPPKTKKKKGKSQKSCSIL

SEQ ID NO: 9665 - protein, 386 aa, ASPERGILLUS NIDULANS FGSC A4
MATATVLEKPNIGVFTNPKHDLWVAESKPTLEEVKSGESLKPGEVTIEVRSTGICGSDVHFWHAGCIGPMIVTGDHILGHESAGDVIAVAPDVTSLKVGDRVAIEPNVICNACEPCLTGRYNGCEKVAFLSTPPVDGLLRRYVNHPAVWCHKIGDMSYEDGALLEPLSVSLAAVERSGLRLGDPCLITGAGPIGLITLLSARAAGATPLVITDIDEGRLKFAKELVPEVRTYKVEIGFSAEETAEGIINAFNDGQGAGPDALRPRIALECTGVESSVASAIWSVKFGGKVFVIGVGKNEMKIPFMRLSTQEIDLQYQYRYCNTWPRAIRLVKNGVINLQKLVTHRYALEDALKAFETAANPKTGAIKVQIMSSTADVEAASAGQKN

SEQ ID NO: 9666 - protein, 320 aa, Erwinia carotovora subsp. atroseptica SCRI1043
MIRRIGVLTSGGDAPGMNAAIRGVVRAALSEGLEIYGIYDGYQGLYEDRMEQLDRYSVSDVINRGGTFLGSARFPQFRDEAVRQVCVENMQRRGLDALVVIGGDGSYMGAKRLTEMGFPCIGLPGTIDNDVAGTDYTIGYFTALETVLEAIDRLRDTSSSHQRISIVEVMGRHCGDLTLAAAIAGGCEFIVLPEVPFSPEDLVSEIKAGIEKGKKHAIVAITELVCDVDELAKYIEKETGRETRSTVLGHIQRGGSPVAYDRILASRMGAYSIELLQQGYGGRCVGIQNEKMVHHDIVDAIENMKRPFKGDWLETAKKLF

SEQ ID NO: 9667 - protein, 129 aa, Streptococcus agalactiae
LETNTPETPDTPKIPELPQAPDTPQAPDTPHVPESPKAPEAPRVPESPKTPEAPHVPESPKAPEAPRVPESPKTPEAPHVPESPKTPEAPKIPEPPKTPDVPKLPDVPKLPDAPKLPDGLNKVGQAVFT

SEQ ID NO: 9668 - protein, 459 aa, Amycolatopsis methanolica
MTLHLDDLRVRLLGECRYDSPFAEVLSTKRTSPHYVAEGDRVLLEDTVAMLAEHSLPSVQAPSFEAAGPRRKIYFDPARVTAGIVTCGGLCPGLNNVIRGLVQELSVHYRVKRIVGFRNGPGLTAAHRDDTVELTPEVVRDIHNLGGTILGSSRGGQDADEMVETLALHGVDVMFVIGGDGGMRAATFLSGAIRARGLDIAVIGVPKTIDNDLPFTDQSFGFQSAFARATDFISAVSVEAAASPNGVGIVKLMGRHSGFIAAYAALAANSADVVLIPEVPFALDGDDGLLAHVERLVRAKGFAVVVVAEGAGQDLFDAHGLPQLNGRGTDASGNVKLGNIGELLRTSIEAHLTAAGLAPTMRYIDPSYAIRSIPANAYDSVYCLRLAHAAVHAAMAGRTEAAVARWRRRFVHVPFSLMTRRRNQVDPDGDLWMSVLETTCQPAEFGAVAARERISSGFC

SEQ ID NO: 9669 - protein, 372 aa, Bacillus cereus G9241
MKAEEKFSPGLDGVVAAETKISFLDTVKGEIVIQGYDLIELSKTKEYLDIVHLLLEEHLPNEDEKATLERKLKEEYAVPEGVFNVLKALPKETHPMDGLRTGVSALAGYDNDIENRSLEVNKSRGYKLLSKVPNIVANSYHILNNEEPIEPLKELSYSANFFYMLTGKKPTELEEKIFDRSLVLYSEHEMPNSTFTARVIASTQSDLYGALTGAVASLKGSLHGGANEAVMYMLLEAGNVEKFEELLQKKLYNKEKIMGFGHRVYMKKMDPRALMMKEALKQLCDVKGDYTLYEMCEAGEKIMEKEKGIYPNLDYYAAPVYWMLGIPIQLYTPIFFSSRTVGLCAHVIEQHTNNRLFRPRVNYIGERHVLSQ

SEQ ID NO: 9670 - protein, 365 aa, Saccharomyces exiguus
MAQTTKHIVVLPGDHVGQEITEEAIKVLNAISSVRPNVNFDFQHHLIGGAAIDATGVPLPDEALEASKKADAVLLGAVGGPKWGTGSVRPEQGLLKIRKELQLYANLRPCNFASDSLLDLSPLKPEIVKGTDICIVRELVGGIYFGERKEDEGDGVAWDSEKYSVSEVQRITRMAGFLALQHNPPLPVWSLDKANVLASSRLWRKTVEETIKNEFPTLTVQHQLIDSAAMILVKNPTHLNGVVIANNMFGDIISDEASVIPGSLGLLPSASLASLPDTNTAFGLYEPCHGSAPDLPKGKVNPVATILSVAMMLKLSLNMTEEGIAVEKAVKQVLDSGVRTADLRGSNSTSEVGDAIAKAVKEILA

SEQ ID NO: 9671 - protein, 319 aa, Escherichia coli K12
MKPENKLPVLDLISAEMKTVVNTLQPDLPPWPATGTIAEQRQYYTLERRFWNAGAPEMATRAYMVPTKYGQVETRLFCPQPDSPATLFYLHGGGFILGNLDTHDRIMRLLASYSQCTVIGIDYTLSPEARFPQAIEEIVAACCYFHQQAEDYQINMSRIGFAGDSAGAMLALASALWLRDKQIDCGKVAGVLLWYGLYGLRDSVTRRLLGGVWDGLTQQDLQMYEEAYLSNDADRESPYYCLFNNDLTREVPPCFIAGAEFDPLLDDSRLLYQTLAAHQQPCEFKLYPGTLHAFLHYSRMMKTADEALRDGAQFFTAQL

SEQ ID NO: 9672 - protein, 183 aa, Triticum aestivum
  unsure (1)..(183): unsure at all Xaa locations
MSDEAASPPGGGGGGGGGGSDDGGGGGGFGGVREQDRFLPIANISRIMKKAIPANGKIAKDAKETVQECVSEFISFITSEASDKCQREKRKXTINGDDLLWAMATLGFEEYIEPLKVYLQKYRETEGDSKLAGKSGDVSVKKDALGPHGGASGTSAQGMGQQVAYNPGMVYMQPQYHNGDMSN

SEQ ID NO: 9673 - protein, 202 aa, Saccharomyces bayanus
MATNITWHPNLTYDERKELRKQDGCTVWLTGLSASGKSTIACALEQLLLQKNLSAYRLDGDNIRFGLNKDLGFSEQDRNENIRRISEVSKLFADSCAVSITSFISPYRVDRDRARDLHKEAGLKFIEIFVDVPLEVAEQRDPKGLYKKAREGVIKEFTGISAPYEAPKAPELHLRTDQKTVEECAAIIYEYLVNEKIIRKHL

SEQ ID NO: 9674 - protein, 268 aa, Populus alba x Populus tremula
MGQQSLSLLFSLILFFLHCTKTLGQSPAAAPVMPPPTTPVKAPPTAPSQAPSAQVATSPGPVDVIKILQKAGHFTVFVRLMQATTEDTELNKELNKTNNGITIFAPSDNAFSSLKAGFLNALSDEDKTELVKFHVLPAFISSSQFQTVSNPVRTQAGTGPRVTLNVTTTGNFVNITTGLTNASISGTVYTDSQLAIYQIDKVLFPLDIFTPKPPAPAPAPELGKPRKAAPGVESPTAPKDTSDALTPLILHNNALLLAVSCMVAAIFS

SEQ ID NO: 9675 - protein, 812 aa, Zea mays
MAQILLHGTLHATIFEAESLSNPHRATGGAPKFIRKLVEGIEDTVGIGKGTTKIYATVDLEKARVGRTRMVSNEPVNPRWYESFHIYCAHMAADVVFTVKIDNPIGASLIGRAYLPVEDILGGDEIDKWLEICDEKREPIGDSKIHVKLQYFDVGKDRNWARGVRSTKYPGVPYTFFSQRQGCKVTLYQDAHVPDNFVPRIPLADGKNYEPHRCWEDIFDAISKAQHLIYITGWSVYTEITLVRDTSRPKPGGDVTLGELLKRKASEGVRVLMLVWDDRTSVGLLKKDGLMATHDEETANYFHGTDVNCVLCPRNPDDSGSFVQDLQISTMFTHHQKIVVVDHELPNEGSQQRRIVSFVGGIDLCDGRYDTQYHSLFRTLDTVHHDDFHQPNFEGGSIKKGGPREPWHDIHSRLEGPIAWDVLYNFEQRWRKQGGKDLLVRLRDLSDIIIPPSPVMFPEDRDTWNVQLFRSIDGGAAFGFPETPDEAARAGLVSGKDQIIDRSIQDAYINAIRRAKNFIYIENQYFLGSSYDWKPEGIKPEDIDCLHLIPKELSLKIVSKIEAGERFTVYVVVPMWPEGVPESASVQAILDWQRRTMDMMYTDITQALEANGIQANPKDYLTFFCLGNREVKQEGEYQPEEHPEPGTDYIRAQEARRFMIYVHAKMMIVDDEYIIIGSANINQRSMDGARDSEIAMGAYQPYHLATRQPARGQIHGFRMSLWYEHLGMLDDVFQRPESVECVQKVNKIAEKYWDLYSSDDLEQDLPGHLLSYPIGVTADGTVTELPGMENFPDTRARVLGNKSDYLPPILTT

SEQ ID NO: 9676 - protein, 445 aa, Triticum aestivum
MAAAGGKGGPRRTTRVGPYELGKTVGEGSFAKVKIAKDTRNAATCAIKVLDRNHVLRHKMVEQIKREIATMKLIRHPNVVQLHEVMASKSKIYMVLEFVEGGELFDKIVNSGKLGEDEARRYFHQLINAVDYCHSRGVYHRDLKPENLLLDSYGALKVSDFGLSAFSPQTKEDGLLHTACGTPNYVAPEVLADKGYDGMAADVWSCGIILFVLMAGYLPFDDPNLMTLYKLITRANVSCPPWFSTGARNLIKRILDPNPHTRITISQILEDEWFKKDYKPPHSEHNEDVSLEDVDAAFDSSEEHLVAERREKPESMNAFALISRSEGFNLGNLFEKEMMGMVKRETSFASQRTPQEIMSKIEEACGPLGFNVRKQNYKMKLKGDKTGRKGHLSVATEVFEVAPTLHMVELRKTGGDTLEFHSFYKNFSSELKDIVWKTESNTIAK

SEQ ID NO: 9677 - protein, 132 aa, Methanocaldococcus jannaschii DSM 2661
MPGTKQVNVGSLKVGQYVMIDGVPCEIVDISVSKPGKHGGAKARVVGIGIFEKVKKEFVAPTSSKVEVPIIDRRKGQVLAIMGDMVQIMDLQTYETLELPIPEGIEGLEPGGEVEYIEAVGQYKITRVIGGK

SEQ ID NO: 9678 - protein, 262 aa, Populus alba x Populus tremula
MEFSMIIVLCSTLLFSCTPLAYAQKVASPPAPTPTPSPAPAPSPPYVNLTDLLSVAGPFQNFLNYLESTKVIDTFQNQANNTDEGITIFVPKDDAFKNLKKPSLSNLTQDQLKQLILFHALPHYYSLSDFKNLSQVSPVSTFAGAGRYALNFTDTSGTVQLDSGWSKTKVSSSVHSTDPVAVYQVDKVLLPEAIFGTDIPPTPAPAPAPDTSPAADSPTSDDSAGAGSAPGKSTPNSSYRINGVGIWSQLVLAIAGVLVLFL

SEQ ID NO: 9679 - protein, 349 aa, Streptococcus pyogenes M1 GAS
MKAATYLSTGNLQLIDKPKPVIIKPTDAIVQLVKTTICGTDLHILGGDVPACKEGTILGHEGIGIVKEVGDAVTNFKIGDKVIISCVTSCHTCYYCKRGLSSHCQDGGWILGHLINGTQAEYVHIPHADGSLYHAPDTIDDEALVMLSDILPTSYEIGVLPSHVKPGDNVCIVGAGPVGLAALLTVQFFSPANIIMVDLSQNRLEAAKTFGATHTICSGSSEEVKAIIDDITNGRGVDISMECVGYPATFDICQKIISVGGHIANVGVHGKPVDFNLDELWIKNITLNTGLVNANTTEMLLNVLKTGKIDATRLITHHFKLSEVEKAYETFKHAGANNALKVIIDNDIS

SEQ ID NO: 9680 - protein, 373 aa, Arabidopsis thaliana
MWLPKLKYGHRDSSECKRLECFLDKNLPLHRAPVIESFRLYLIDSKCTPENIKMWVVIAVSHCLRELEVIYSSYPEKPNILPSNLYTCKSLVILELCGEIRLDVPRMAFLPSLKTLQLHSVRYLNEDSLHRLLSNCPVLEDLLVDLLLSDSMEKLTVVVPSLQILSLFIPHSYEIDGIVIETPSLKYFKLIDHNSKSHYCLVKNMPNLIEADIDVELHSIKSLIGSITSVKRLSICSQAMYDGGFVFNQLKHLKLCRCKGHSSDLLVRLLKDSSNLQALDLSEMDYHENHDILYWHQPSTVPECMLLSLQTLNLSAYRGTPEERDLAVYFLKNAVHLKTTTIKSCVFDDERFDMLKELALSSRASTTCQLVFD

SEQ ID NO: 9681 - protein, 452 aa, Zea mays
  unsure (1)..(452): unsure at all Xaa locations
MGEGEAEVKGGVLQGRYELGRVLGHGNFGRVHAARDLRTGRAVAVKVLDKDKMLRTGMMEQIKREIAVMKRVSHPNIVELHEVMATRSKIYLALELVRGGELFARIVRAGRVKEDVARRYFRQLIHAVDFCHARGXVYHRDLKLENLLLDDXGTLKVVDFGLSXWADHARSDGLLHTLCGTPGYVAPEVFRNKGYDGAKADIWSCGVILYVLLAGSLPFPDDNVAAMFRKMSRGDYRCPPWLSTEARRLIPKLLDPDPDTRITIAQLVETPWFNKPSVSRSVRAAAAASGATEPPAEPASSAKDGGDKDEPPETMNAFHLISLSAGFDLSPLFDVEGGPARGPREGGMRFATREPASGVVSRLEEVAARGGGRMRVTKSGARGVRLEGAERGGRKGRLAVAADIFCVAPSVLVVDVKKDGGDSLEYRSFCSEELRPALKDIVWAADPQPAVV

SEQ ID NO: 9682 - protein, 472 aa, Zea mays
ATVGPRVIVVGAGMSGISAAKRLSEAGITDLLILEATDHIGGRMHKTNFAGINVELGANWVEGVNGGKMNPIWPIVNSTLKLRNFRSDFDYLAQNVYKEDGGVYDEDYVQKRIELADSVEEMGEKLSATLHASGRDDMSILAMQRLNEHQPNGPATPVDMVVDYYKFDYEFAEPPRVTSLQNTVPLATFSDFGDDVYFVADQRGYEAVVYYLAGQYLKTDDKSGKIVDPRLQLNKVVREIKYSPGGVTVKTEDNSVYSADYVMVSASLGVLQSDLIQFKPKLPTWKVRAIYQFDMAVYTKIFLKFPRKFWPEGKGREFFLYASSRRGYYGVWQEFEKQYPDANVLLVTVTDEESRRIEQQSDEQTKAEIMQVLRKMFPGKDVPDATDILVPRWWSDRFYKGTFSNWPVGVNRYEYDQLRAPVGRVYFTGEHTSEHYNGYVHGAYLSGIDSAEILINCAQKKMCKYHVQGKYD

SEQ ID NO: 9683 - protein, 387 aa, Zea mays
  unsure (1)..(387): unsure at all Xaa locations
IKREISTLKLIKLPNVVQLHEVMASRTKIYMVLEFVDGGELFDKIVNSGRLGEDEARIYFHQLINAVDYCHSRGVYHRDLKPENLLLDSHGTLKVSDFGLSAFAPQTKEDGLLHTACGTPNYVAPEVLADKGYNGMAADVWSCGIILFVLMAGYLPFDDANLMRLYKLICHATFSCPPWFSSGAKKFIKRILDPNPDTRITIAEILEDEWFKKDYKPPRFEQGEGVSLDDIDAAFKXSEDRLVAEKREKPGCMNAFALISRSQGFNLGXNLFEKEMMGMVKRETFFTXQCTAQEIMTKIEDACGPLGFNVRKQNYKMKLKGDKSGRKGHLSVATEVFEVAPSLHMVELRKTGGDTLEFHSFYKNFSSELKDIVWKAESDANNKQTNK

SEQ ID NO: 9684 - protein, 161 aa, Pseudomonas fluorescens PfO-1
MSDNLLNIPCTTIKGEQKTLADFAGKAVLVVNTASKCGFTPQYKGLEELWQTYKDQGLVVLGFPCNQFGKQEPGNEGAISEFCELNYGVSFPLFKKIEVNGTGAHPLFVQLKKRAPGVLGSQGIKWNFTKFLIGKDGQLVKRFAPATKPQDLSREIEALLK

SEQ ID NO: 9685 - protein, 475 aa, Staphylococcus aureus subsp. aureus COL
MRDYTKQYINGEWVESNSNETIEVINPATEEVIGKVAKGNKADVDKAVEAADDVYLEFRHTSVKERQALLDKIVKEYENRKDDIVQAITDELGAPLSLSERVHYQMGLNHFVAARDALDNYEFEERRGDDLVVKEAIGVSGLITPWNFPTNQTSLKLAAAFAAGSPVVLKPSEETPFAAVILAEIFDKVGVPKGVFNLVNGDGAGVGNPLSEHPKVRMMSFTGSGPTGSKIMEKAAKDFKKVSLELGGKSPYIVLDDVDIKEAAKATTGKVVNNTGQVCTAGTRVLVPNKIKDAFLAELKEQFSQVRVGNPREDGTQVGPIISKKQFDQVQNYINKGIEEGAELFYGGPGKPEGLEKGYFARPTIFINVDNQMTIAQEEIFGPVMSVITYNDLDEAIQIANDTKYGLAGYVIGKDKETLHKVARSIEAGTVEINEAGRKPDLPFGGYKQSGLGREWGDYGIEEFLEVKSIAGYFK

SEQ ID NO: 9686 - protein, 356 aa, Triticum aestivum
  unsure (1)..(356): unsure at all Xaa locations
MKTLLILTILAMAITIGTANIQVDPSGQVQWPQQQLVPQPQQPLSQQPQQAFPQPQQTFXPHQPQQQVPQPQQPQQPFLQPQQPFPQQPQQPFPQTQQPQQPFPQQPQQPFPQTQQXQQPFPQQPQQPFPQTQQPQQPFPQQPQQPFPQPQQPQQPFPXLQQPQQPFPQPQQQFPQPQQPQRSFPQQQRPSFQPSLQQRLNPCKNILLQQCKPASLVSSLWSIIWPQSDCQVMRQQCCQQLAQIPQQLQCAAIHSVVHSIIMQQQEQEQEQEQEQEQQQQQGMRIFFPLSXQQQVGQGTLFQGQGIIQPQQPAQFGGDQVIGVGKTLPSICNVYVPPECSIIRAPFASIVAGIGGQ

SEQ ID NO: 9687 - protein, 135 aa, Streptococcus agalactiae
LETNTPETPDTPKIPELPQAPDTPQAPDTPHVPESPKAPEAPRVPESPKTPEAPHVPESPKAPEAPRVPESPKTPEAPHVPESPKTPEAPKIPEPPKTPDVPKLPDVPKLPDVPKLPDAPKLPDGLNKVGQAVFT

SEQ ID NO: 9688 - protein, 471 aa, Oryza sativa (japonica cultivar-group)
MAAAAPPTGKKRRFERSSSQEPPGSGGLDLISGLPDAILGEIISLLPTKYGARTQLVSRRWRPLWRSAPLNLDVYDLSGQERKRVALASKILAEHPGPARRFSLHCFRLRGRHAKLDGWLRSRALADLRELSFSYEVEREAQAQAYPLPPSALRFAPTLVVLYLSSCGFPDEMPPTLHFPRLKQLTLCSVAISEDAIHGVLSRCPALESLLLQGNFGVRRLRINSASLRSFGFYSKSWGFSSASWNGFAGAELQEVVIEDAPCLERLLPLCPNDGVAAIRVIAAPKLEIMGPLSDGISQLHLGTTIFQEMTAVSLTTSMRSVKVLVLDSDGPNLDAVVDFLSCFPCLERLYIASQPFKVIKNTRRYDPLNPIECIQFHLKKVVIRNYGGRRSDVDFAKFFVLNAKALREMELAGLNNCNQKWLANQHRRLQLEKKASQNAQFTFKTTHTSDFSMNKHTHDLSISDPFDRSL

SEQ ID NO: 9689 - protein, 355 aa, Oryza sativa
MRGKKPHKELKLSVPAQETPVDKFLTASGTFKDGELRLNQRGLQLISEETADEPQSTNLKVEDVQLSMDDLEMIQVIGKGSGGIVQLVRHKWVGTLYALKGIQMNIQEAVRKQIVQELKINQATQNAHIVLCHQSFYHNGVIYLVLEYMDRGSLADIIKQVKTILEPYLAVLCKQVLEGLLYLHHERHVIHRDIKPSNLLVNRKGEVKITDFGVSAVLASSMGQRDTFVGTYNYMAPERISGSSYDYKSDIWSLGLVILECAIGRFPYIPSEGEGWLSFYELLEAIVDQPPPSAPADQFSPEFCAFISSCIQKDPAERMSASELLNHPFIKKFEDKDLDLRILVESLEPPMNISE

SEQ ID NO: 9690 - protein, 141 aa, Streptococcus agalactiae
LETNTPETPDTPKIPELPQAPDTPQAPDTPHVPESPKAPEAPRVPESPKTPEAPHVPESPKAPEAPRVPESPKTPEAPHVPESPKTPEAPKIPEPPKTPDVPKLPDVPKLPDVPKLPDVPKLPDAPKLPDGLNKVGQAVFT

SEQ ID NO: 9691 - protein, 245 aa, Arabidopsis thaliana
MENEREKLIYLAKLGCQAGRYDDVMKSMRKVCELDIELSEEERDLLTTGYKNVMEAKRVSLRVISSIEKMEDSKGNDQNVKLIKGQQEMVKYEFFNVCNDILSLIDSHLIPSTTTNVESIVLFNRVKGDYFRYMAEFGSDAERKENADNSLDAYKVAMEMAENSLVPTNMVRLGLALNFSIFNYEIHKSIESACKLVKKAYDEAITELDGLDKNICEESMYIIEMLKFNLSTWTSGDGNGNKTDG

SEQ ID NO: 9692 - protein, 145 aa, Sesbania rostrata
EIATIPPAVNQVEMNPSWQQGNLREFCKQKGIHVSAWSPLGAYKIFWGSGAVMENQILQDIATAKGKTIAQVALRWVYQQGSSAMAKSFNKERMKQNLEIFDFELSEEELEKIKQIPQRRQYTGDMWLSENGSCKTLEELWDGDV

SEQ ID NO: 9693 - protein, 443 aa, Ralstonia solanacearum
MDRSHKERVMSREPEVKALQQEWDTNPRWKGIKRGYTAQDVVRLRGSLQIEHTLARRGAEKLWTLMNSEPFVNALGALTGNQAMQQVKAGLKAIYLSGWQVAGDANSNGEMYPDQSLYSVDSVPKVVKRINNTFQRADQIQWSEGKDDVDFFAPIVADAEAGFGGVLNAFELMKAMIEAGAAGVHFEDQLAAVKKCGHMGGKVLVPTREAVSKLVAARLAADVMGVPTVLIARTDAEAADLLTADVDDNDRPFCTGERTVEGFYRTKPGLQQAIARGLAYADYADLVWCETGKPDLEYAKKFAEAIHAKFPGKMLAYNCSPSFNWKKNLDDATIAKFQKELGAMGYKFQFITLAGFHALNYSMFNLAHGYARNQMSAFVELQEAEFAAAEKGFTAVKHQREVGTGYFDAVTQTIERDASTTALKGSTEDEQFFEEKAHAKKVA

SEQ ID NO: 9694 - protein, 290 aa, Pyrobaculum aerophilum str. IM2
MEIKMAEAGDVALRKYGTAMPQEALRLADAADVIFKGPIGESAYDVTSLIRMRYTLYANIRPVKNLPGVPAVREIDCVFVRENVEDVYVGAEYKVGDVAIALKVITEKGTRRVARMARKYAEMRRRRVTIVHKANVLRVVDGFFRDIALEELKGLEVDQMYVDAAAMELVRNPKRFDVVLTMNQYGDILTDLAAQVAGGIGLAPSGNIGDAKAMFEPVHGAAFDIAGKGVANPIATILSAAMMFEWMGRGDVAEKIRGAVEKSIEAGVKTPDIGGDKSTIEVGKFIASIL

SEQ ID NO: 9695 - protein, 254 aa, Glycine max
MTMHRESWAFVFGVMGNIISFGVFLAPLPTFYQIYKKKSTEGFQSLPYVVALFSAMLWIYYAFVKRETALLLITINTFGIVVESIYLSIFLIYAPRKPRLTTIKLLLLLNVFGFGAMLLSTLYLSKGAKRLAIIGWICLVFNISVFAAPLFIIRRVIKTRSVEYMPFTLSMFLTINAVMWFFYGLLLRDYYVALPNTLGFVFGIIQMVMYLMYRNATPVALEEPVKAQELNGHIIDVVKIGTMEPNHGGAVGKV

SEQ ID NO: 9696 - protein, 506 aa, Caulobacter crescentus CB15
MTKPEFIESLSRPPFKARYDNFIGGQWVAPADGRYFDNSSPIHGRKICEIARSQAIDIERALDAAHAAKAGWARTSAADRSRILLRIADRMEENLAALATAETWDNGKPIRETLAADIPLAIDHFRYFAGCLRSQEGSISEIDHDTIAYHFHEPLGVVGQIIPWNFPLLMACWKLAPALAAGNCVVLKPAEQTPASIMVWAEMIGDLLPAGVLNIVNGFGLEAGKPLASSPRIAKIAFTGETSTGRLIMQYAAQNLIPVTLELGGKSPNIFFDDVAREDDDYLDKALEGFTMFALNQGEVCTCPSRALVQESIYEKFMERALKRVNAVVQGSPLDPATMIGAQASEEQLNKILGYMDIGRNEGAKLLAGGQRKILPGQLADGYYVEPTVFEGHNKMRIFQEEIFGPVLAVTTFKTEEEALEIANDTAFGLGAGVWSRDANRCYRFGRGIEAGRVWTNCYHAYPAHAAFGGYKQSGVGRETHKMMLDHYQQTKNMLVSYSPKALGFF

SEQ ID NO: 9697 - protein, 161 aa, Escherichia coli
MKNKSGNSYYREAVDIHSSLELSFILHKYHLRVDEKKSRNVFSAIRDELILDGDSRQNLATFCQTWIDDEIRELLNLSIDRNMIYKDEYPQMAEPEGRCVRMLSDSWSFPDSRHTLGCSTIGSSEAAMLGRLALKWQWCKKREVQGKSTEPDLRSCANMLA

SEQ ID NO: 9698 - protein, 188 aa, Chloroflexus aurantiacus
MFVSTIPTTRSGLVVWFTGLSGAGKTTLARALATLLQEAGYPVEQLDGDVVREHLSKGLGFSREDRDTNIRRIGFVANLLAKHGVIVLVSAISPYRETRAEVLAAAPRKLEVFVEAPLDVLIQRDVKGLYAKALRGEIAQFTGISDPYEPPLHPDVHLRTDLMSLPECLDHLLAALERLDIVVKVSHQ

SEQ ID NO: 9699 - protein, 303 aa, Zea mays
  unsure (1)..(303): unsure at all Xaa locations
FAGLGSDRFLDPPSGRASTDFIIHSPAKPICFVCRSIRRSCEFNPRVSMSSYSPPPPLPPRDQSMDTEAPNAPITRERRLNPDLQEQLPKPYLARALEAVDPSHPXGTQRGRDPRGMXSVLQQHAAFFDRNGDGVIYPWETFQGDRWCSFLSGLRAIGCGLTVSFACCXLINLFLSYPTQPGWLPSPLLSIRIDNIHKGKHGSDSETYDTEGRFDPSKFDAIFSKYGRTHPNALTKDELSSMLQGNRNTYDFLGWLAAAGEWLLLYSLAKDKDGLLQRETVRGLFDGSLFERLEDDNNKKKSS

SEQ ID NO: 9700 - protein, 183 aa, Halobacterium sp. NRC-1
MATGPRYKVPMRRRREVRTDYHQRLRLLKSGKPRLVARKSNKHVTAQLVTTGPDGDETVASAHSSDLDAYGWAAPTGNLPAAYLTGLLAGQRAVDAGVEEAVLDIGLNTATPGSKVFAIQEGAIDAGLDVPHNDSVLADWSRTRGEHIAEYAESLDEPLYSGDFDATALPAHFDETREAIMED

SEQ ID NO: 9701 - protein, 161 aa, Oryza sativa
MSDSEEHHFESKADAGASKTYPQQAGTIRKTGHIVIKNRPCKVVEVSTSKTGKHGHAKCHFVAIDIFNGKKLEDIVPSSHNCDVPHVNRTDYQLIDISEDGFVSLLTESGGTKDDLRLPSDEALLTQIKDGFAEGKDLIVTVMSAMGEEQICALKDIGPKN

SEQ ID NO: 9702 - protein, 279 aa, Pyrobaculum aerophilum str. IM2
MASVDDIVDLLARVRERSRGLLINLEGKYTAVGDLHGDLATLELVLKEWEGPYLFLGDYVDRGDKGLEVVTTVFQLYLEGKAAVLRGNHESPIMNIEGGFLDELCEKLGRKCGYVYKEFEKTFATLPLAAVVNRKIVALHGGIPLREDMTPATLAELEKIEGDLTAPQNPLAFQTLWNDPCPCDKYSPSPRGPGIWLFGRDVTREFHKLHNTAVVIRGHTYVPQGCAVHHGGGVVTVFSSSAGPYQKTKPKVALVKNGVEVYDAATKNSAKCPEDVDVF

SEQ ID NO: 9703 - protein, 240 aa, Populus alba x Populus tremula
MVPKFLFSASFVLFFLLHCPPALAQSPAAAPAPPGPINVTKVLEKGGQFSVFIRLLKATQEDVTLNGQLNNTNNAITIFAPSDSAFSSLKSGTLNSLSDQEKAELVQFHIIPQFLSSSLFQTVSNPLTTQAGSGGRLELNVTTTGNSVNITTGLTNTSVSGTIYTDNQLAVYQVDKVLLPLDIFTPKPPTPAPAPEKPKKRSKAAASPESPADTSGAVSFTVLNNVVFFGVCMVAAIYSL

SEQ ID NO: 9704 - protein, 199 aa, Triticum aestivum
KLVGGSLSEHSYLFLGAGEAGTGIAELIALEISRQTKAPIEECRKKIWLVDSKGLIVSSRKETLQHFKKPWAHEHEPVGNLLDAVKTIKPTVLIGTSGKGQTFTQEVVEAISSFNERPVIFALSNPTSQSECTAEQAYTWSKGRAVFASGSPFDPVEYDGKIYVPGQANNAYIFPGFGLGVVMSGAIRVHDDMLLAASE

SEQ ID NO: 9705 - protein, 337 aa, Magnaporthe grisea 70-15
MSPSTESNPVPPYPLHPSVASRINPEYAAFYNAHIADKQQVHLQPIAASRSSGVLIPGAGPLLPVGSTQDYTIPRTASSGPDVRVRVFTPPGARPASGWPGCVYFHGGGWVLGTIDTENVVCSNLCARGGAVVVTVDYRLAPEDPFPAAVDDCWEAVRWVVARGPELLGLDLGRLATGGSSAGGNLAAVMCQRAAVVADHPPFRLQLLSVPVADNTATAETTPSWRENEHTPALPAPKMLWYRRHYLPRESDWAHPEASPLLWDGDWSRLPRAVIVCGELDVLRDEGVAFGDRLNKAGVRADVHVLEGQPHPFLAMDGVLEDGRRAITYFCEALKEL

SEQ ID NO: 9706 - protein, 175 aa, Triticum aestivum
  unsure (1)..(175): unsure at all Xaa locations
MGPTVMASSVTSVAPFQGFKSTAGLPVSRRSNGASLGSVSNGGRIRCMQVWPIKGIKKFEILSYLPPVSTEALLKQVDYLIRSKWVPCLXFSKVGFIFREHNASPGYYDGRYWTMWKLPMFGCTDATQVINEVEEVKKEYPDAYVRIIGFDNMRQVQCVRFIAFKPPGCKESGKA

SEQ ID NO: 9707 - protein, 125 aa, Glycine max
ACSMISSPSVTTVNRACAGMFAPFTGLNSIAGFPIMNTNTDITSIASNGGRVQCMQVWPPVCKKKCETLSYLPDLDDAQSAYEVQHHLMNGWITCLECQLEHCFVYRVHYMSPVYYDGLYWTIWN

SEQ ID NO: 9708 - protein, 286 aa, Zea mays
MAALPPAAEDPDAVEIREVWASNLEEEFAVIRAVVDVYPYVAMDTEFPGFVVTPSAEYRFTCDRNYAALEGNVNVLKLIQLGLTLSNGAGALPPCGTGGRRCIWQFNFRGFDPHTDPSSSDSIDLLRRSGIDFDLFAAEGVDSTRFAELMMSSGVVLNDDVQWVTFHSGHDFGYLLKLLTGREMPNTLDEFLKLTKTFFPVMYDIKHLMKFCGGGLYGGLSKLGELLKIERVGISHQAGSDSLLTLQCFMKLKQLYLKESVKLYDGVLFGLIPGEVEIKPVAPPIE

SEQ ID NO: 9709 - protein, 127 aa, Thermobifida fusca
MPTGKVKWYDAGKGFGFLTKDDGGEVFLHASALPPGTTTLRPGQRVEFGIVEGRKGTQALQVRLLDTPPSVAKALRKKPDEMVVIIEDLIKLLDNVSNTYRRNKYPDRREATKIAKVLRALADDIEL

SEQ ID NO: 9710 - protein, 163 aa, Agrobacterium tumefaciens str. C58
MSVSFKNPAHLLPRRVFAFLAIWLSFYPSSLRRCAVQRNLTLRPFQPTYFAIDICLTTRASASFQTLTTIFSFKFDPSPHCLQCKYNCQRKEIVMATGTVKWFNATKGYGFIQPDDGSQDVFVHISAVERAGLTALNDGQKLSYELMQDRRSGKMSAGELVAS

SEQ ID NO: 9711 - protein, 336 aa, Thermoplasma acidophilum
MKAALLEKLNQPLSIVDREIPEPGENEVVIKQDYAGLCYRDILSATGFFPRIQLPIIPGHEIGGTVVKTGSEVRNFHVGDHVASLIYIPCGKCEYCRSGNENLCPYKKSIGEEVQGGFREYVNVPEISLISAPKEVDTRYLPIASCVTGMIYHALFKLAKVKEGQRVLITGAGGGVGSNAVQMAKAFGATVIAETTSESKKEMLEKIGADYIVDGNGKFNEDVKKIGGADIVLECVGIHTFERSLRSLNNGGKMIVIGNIKPDPVNLPLGLIILKGNTIRGSISSTRKDVSDALKMVAENRIKPVIGSEVSIDRINEAMEMMKNKQTEGRVLIKFS

SEQ ID NO: 9712 - protein, 306 aa, Triticum aestivum
VRKATSGRSNPSGRRRGEGGTSRLACGRVRLSARHAETARAPMPPPRRAGAGDTSAFFAATLVLWAVSVGFEIGARGRRELAAVAAGFAFFQAANTAVRAAVSRDPLFVNTAVSLLHSSLTSASVIFVLLCQWRTKGLENMFQHEELVGSSWIGAYSALCFSCGYFAYDQLDTLRYRLYSGWIPGILMLHLFLLICFTLALYRNETINYLILTLLKLRRMAGFRDFNRKLVKLEWVLNWTTFVTARVICHILITYRLITDAHKFDKGIELPLALSGMAGMNVLNVSLGLDLFKAFARERNQQTHQD

SEQ ID NO: 9713 - protein, 257 aa, Triticum aestivum
MSSGVGGNRRRRGRRWAQVDPGVHITAHGLAQGGNDLKRIRFSREMFNKWQAQRWWAENYDKVMELYNVQRFNHQSVPLPTTPKSEDESSKEDSPVTPPLDKERVPRSLQRPTSGGGAMGYSSSDSLEHHSNHYCNGLHPHHGHQCYDSVGLASTPKLSSISGAKTETSSMDASMRTSSSPEEVDRSGELSVSISNASDQEREWVEEDQPGVYITIRALPGGIRELRRVRFSREKFSEMHARLWWEENRARIHEQYL

SEQ ID NO: 9714 - protein, 47 aa, Zea mays
YEEYGEEFVNMLDGMFSFVLLDTRDKSFIAARDAIGICPLYMGWGLD

SEQ ID NO: 9715 - protein, 70 aa, Glycine max
  unsure (1)..(70): unsure at all Xaa locations
MHAATGEVVNCSAENNGDLFHSVLXXLGQFGIITRARIVLEPAPAMVKWIRVLYSDFTAFTRDQERLNRR

SEQ ID NO: 9716 - protein, 122 aa, Rickettsia conorii str. Malish 7
MIQMQSILEVADNSGAKKVMCIKVLGGSHHMVAKLGDVIVVSVKDAIPGGKVKKGDVYKGVIVRTKTGVVRPDGSTIKFDQNALVLLNKQDEPIGTRVFGPVTRELRAKKYVRIMSLAEEVL

SEQ ID NO: 9717 - protein, 423 aa, Aspergillus oryzae
MADLRGRKIFKVFNQDFIVDERYNVTKELGQGAYGIVCAATNIQTGEGVAIKKVTNVFSKKILAKRALREIKLLQHFRGHRNITCLYDMDIPRPDNFNETYLYEELMECDLAAIIRSGQPLTDAHFQSFIYQILCGLKYIHSANVLHRDLKPGNLLVNADCELKICDFGLARGFSIDPEENAGYMTEYVATRWYRAPEIMLSFQSYTKAIDVWSVGCILAELLGGRPFFKGRDYVDQLNQILHYLGTPNEETLSRIGSPRAQEYVRNLPFMPKIPFQRLFPSANPDALDLLDRMLAFDPSSRISVEEALEHPYLHIWHDASDEPTCPTTFDFHFEVVDDVQEMRRMIYEEVVRFRAAVRQQSQAQAAAAAQQQQIAQQTNVPIPENQQGVWKQEEPKPQEALAAGGGVHNDLESSLQRGMDVQ

SEQ ID NO: 9718 - protein, 475 aa, Oryza sativa (japonica cultivar-group)
MEAAAAAAKKRRFGRSTGKGSLGSDGLDHISCLPEAILGEIISLLPTKDAARTQAVSRRWRPLWRSTPLNLDVDSLSTQERKRTMFVSRILASHPGPARRLSLPFFRLRDRYAKLDGWLRSPALADLQELDFSYDIEDEEALYPLPPSALRFAPTLRVVELRTCHFPNGMAPALHFPRLARLTLYRVTISEDTLHGLLSRCSALESLLLVGNFGIRRLRINSPFLRSLGFSASSWEGYRDANFQEVVIEDAPCLERLMPLYPNHGPATIRVIAAPKLEVLGVLSDGISQLHLGTTFFQKMIAVNLTTSIRTVKVLVLDSNGPNLDVVVDFLKCFPCLERLYVVSRPHKVIKNIRSYDPLHPIECMELHLRKVVIRYYEGKRPDVDFAKFFVLNAKVLREMDFCSPSNRNLKWQDNQHRRLSLENKASQVAQFTFKTTSRTRNELTRNRHTHELSMSDPFDFSSCLCSSCRFFFQL

SEQ ID NO: 9719 - protein, 332 aa, Saccharomyces kluyveri
ELHVVESVLLPKDMHPNLQLAIGLASMNKSSLFSAMYQEGTIGKGDYWEFVYEDALNLISALPLLTGKIYSNIVNDGEPLGQFNPDRDWSYNIASLLGMTFRDSVNKQHMTADQCEDFTNLVRLYCGIHVDHEGGNVSAHTTHLVGSALSDPYLSYSSGIMGLAGPLHGLAAQEVVRFLVEMNSEIESPENEKQVEEYLWKILKSNRVIPGYGHAVLRKPDPRFEAMLRFVEDRQQEFAQDKNVQLMKKMSQVAPKVLAKHGKTKNPFPNVDSASGILFHHYGIQELLFFTVIFGCSRSIGPLTQLVWDRALGLPIERPKSVDLNTIRSLCK

SEQ ID NO: 9720 - protein, 373 aa, Oryza sativa (japonica cultivar-group)
MVGGGALRRVGKYEVGRTIGEGTFAKVKFAQNTESGESVAMKVVDRSSILKHKMADQIKREISIMKLVRHPNVVLASRKKIFIILEFITGGELFDKIIRHGRLNEADARRYFQQLIDGVDFCHSKGVYHRDLKPENLLLDSQGNLKISDFGLSAWPAQGGALLRTTCGTPNYVAPEVLSHKGYDGALADTWSCGVILYVLLAGYLPFDEVDLTTLYGKIESAEYSFPAWFPNGAKSLIHRILDPNPDKRIRIEEIRNDEWFKKNYEPTREIESEEVNLDDVNAAFDDPEEDADHTLDDEAGPLTLNAFDLIILSQGLNLAALFDRRQDYDKLQNRFLSRKPAKVIMSSMEVVAQSMGYKTHIRNYKTYRHEDL

SEQ ID NO: 9721 - protein, 404 aa, Prochlorococcus marinus str. MIT 9313
MPRSCRDAVGQEQVGEIRHDRSGISFRPGLEGVPVTQSAICDIDGLQGRLAYRGYPIAELSAHSSFLETTYLLIWGDLPSPQQLRDFEAEVQMHRRVSFRVRDMMKCFPASGHPMDALQSSAASLGLFYSRRAIDDPKYVYNAVVRLIAKIPTMVAAFKLIRKGQDPIQPRDDLAYSANFLYMLTEREPDPLAARVLDRCLILHAEHSLNASTFSARVTASTLTDPYAVVASAVGTLAGPLHGGANEDVLAMLEEIGSPEHAGDYLDEAIASKRKVMGFGHREYRVKDPRAVILQGLAEELFARFGTDEMYDVAKALEQAAATRLGPKGIYPNVDFYSGLVYRKLGIPRDLFTPVFAISRVAGWLAHWREQLGANRIFRPSQIYTGPQNRTWIPSDERFSSTGA

SEQ ID NO: 9722 - protein, 341 aa, Mycobacterium avium subsp. paratuberculosis str. k10
MRTVVVDGPRSIRVDTRPDPVLPGPDGAIVEVSAAGICGSDLHFYEADFPMPDPIALGHEAIGTVVEAGPQVRNVKVGDQVMVSSVAGCGSCAGCATRDPVLCHSGFQIFGGGVLGGAQADLLAVPAADFQLLKIPEGISTEQALLLTDNLATGWAAAQRADIPFGGTVAVIGLGAVGLCALRSALFQGAATVFAVDQVDGRLARAARWGATPVKAPALEAILAATGGRGADAVIDAVATDASLTEALNAVRPGGTVSVVGVHDMNPFPLNALGCLIRSITLRMTTAPVQRTWPELIPLLQSGRLDVDGIFTTTMPLDEAAIGYATAGSRSGDDVKILLKP

SEQ ID NO: 9723 - protein, 295 aa, Triticum aestivum
  unsure (1)..(295): unsure at all Xaa locations
YRRPTRPEIGQAIALDTRIPLVSFTGSTKVGQMVQQQVSARFGKCLLELSGNNAIIVMDDADIPLAVRSVLFAAVGTAGQRCTTCRRLLLHESIYQTFLDQLVEVYKQVRIGDPMEKGTLLGPLHTTTSKESFLKGIQTIKSQGGKILLGGSAIESEGNFVQPTIVEISPDVPVVREELFGPVLYAMKFLTLXKEAIEINNXSVPQXLSSSIFTRKPXDAIFKWIGPXHGSDCGYSXIVNIPTNGAEIGGAFGGEKATGGGREAGSDSWKQYMRRATCTINYGSELPLAQGINFG

SEQ ID NO: 9724 - protein, 191 aa, Saccharomyces kluyveri
IENSPTNGSNHSPLSEPQIAYIVRETCRGLKFLHDKHIIHRDIKSDNVLLDRSARVKITDFGFCAKLTDKRSKRATMVGTPYWMAPEVVKQREYDEKVDVWSLGIMTIEMLEGEPPYLNEDPLKALYLIATNGTPKLKHPELLSLEIKRFLSVCLCVDVRYRASTEELLHHSFFDMSCEPKDLTTLLEWKK

SEQ ID NO: 9725 - protein, 313 aa, Glycine max
  unsure (1)..(313): unsure at all Xaa locations
VVPYFASNSKALWFAKYGTTHLVFNDDIQGTASVVLAGVVAALKLIGGTLADHTFLFLGAGEAGTGIAELIALEMSKQTKTPIEETRKKIWLVDSKGLIVGSRKXSLQHFKQPWAHEHEPVGXLLEAVKVIKPTVLIGSSGVGKTFTKEVIEAVTSXNKKPLVLALSNPTSQSECTAEEAYQWSEGRAIFASGSPFDPVEYKGKVYYSGQANNAYIFPGFGLGLXVISGAIRVHDDMLLAASEALAKLVSDENYEKGLIYPPFSNIREISANIAASVAGKAYELGLATRLPRPQNLVKYAESCMYSPVYRNYR

SEQ ID NO: 9726 - protein, 130 aa, Thermotoga maritima MSB8
MKMTIDEIIEAIEKLTVSELAELVKKLEDKFGVTAAAPVAVAAAPVAGAAAGAAQEEKTEFDVVLKSFGQNKIQVIKVVREITGLGLKEAKDLVEKAGSPDAVIKSGVSKEEAEEIKKKLEEAGAEVELK

SEQ ID NO: 9727 - protein, 274 aa, Bacillus sp. KSM-K16
MKMVTLNNGVNMPQLGFGVWQVPDEEATPAVAKALEVGYTSIDTAMIYKNEAGVGKAIKESGIDREKLFITTKVWNADQGYEQTLKAFDASLERLGLDYIDLYLIHWPTPHYDQYIETYKALEKLYNDGRVRAIGVCNFDIDHLERLLDECDITPVLNQVECHPYFAQNELKDFCAKHNIYVEAWSPLDQGGEVLTDEVVEKIAKAHNKTTAQVVLRWHLQNNTIVIPKSVTPSRIEENFDVFDFELSDEEMDAINRLDRNQRRGAKPSEMNTR

SEQ ID NO: 9728 - protein, 176 aa, Glycine max
MAETRRSTGTVKWFNAHKGFGFITPQDGTDDLFVHFTSIRSDGYRSLSDGQSVEFLLDYGDDGRTMAVDVTSAVRSRLPGGFRGGGGGRGRGGGRYGGGEGRGRGFGRRGGGPECYNCGRIGHLARDCYHGQGGGGGDDGRNRRRGGGGGGGGGCFNCGEEGHFARECPNVGKGNE

SEQ ID NO: 9729 - protein, 282 aa, Staphylococcus aureus subsp. aureus MRSA252
MNHIEISKDVKIPVLGFGVFQIPQEQTAEAVKEAIKAGYRHIDTAQSYLNETEVGQGIEASGIDRSELFITTKVWIENVNYEDTIKSIERSLQRLNLDYIDLVLIHQPYNDVYGSWRALEELKETGKIKAIGVSNFGVDRIVDLGIHNQIQPQVNQIEINPFHQQEEQVAALQQENVVVEAWAPFAEGKNQLFQNQLLQAIADKYNKSIAQVILRWLVERDIVVLAKSVNPERMAQNLDIFDFELTEEDKQQIATLEESNSQFFSHADPEMIKALTSRELDV

SEQ ID NO: 9730 - protein, 497 aa, ASPERGILLUS NIDULANS FGSC A4
MSDLFTTIETPVIKYEQPLGLFINNEFVKGVEGKTFQVINPSNEKVITSVHEATEKDVDVAVAAARAAFEGPWRQVTPSERGILINKLADLMERDIDTLAAIESLDNGKAFTMAKVDLANSIGCLRYYAGWADKIHGQTIDTNPETLTYTRHEPVGVCGQIIPWNFPLLMWSWKIGPAVAAGNTVVLKTAEQTPLSALYAAKLIKEAGFPAGVINVISGFGRTAGAAISSHMDIDKVAFTGSTLVGRTILQAAAKSNLKKVTLELGGKSPNIVFDDADIDNAISWANFGIFFNHGQCCCAGSRILVQEGIYDKFVARFKERAQKNKVGNPFEQDTFQGPQVSQLQFDRIMEYINHGKKAGATVATGGDRHGNEGYFIQPTVFTDVTSDMKIAQEEIFGPVVTIQKFKDEAEAIKIGNSTDYGLAAAVHTKNVNTAIRVSNALKAGTVWINNYNMISYQAPFGGFKQSGLGRELGSYALENYTQIKTVHYRLGDALFA

SEQ ID NO: 9731 - protein, 163 aa, Kineococcus radiotolerans SRS30216
MTSPLDVPLTALTGGPLDPAQLTGRAVLVVNVASRCGSTPQYAGLQELQEEYGERGFTVLGVPCDQFGGQEPGTEEEIAEYCSATWGTTFPMTAKVEVNGPGRHPLYGALTATPDADGTAGDVAWNFEKFLVSPAGEVVARFRTRTTPQDPALRAAIEARLPA

SEQ ID NO: 9732 - protein, 278 aa, Arabidopsis thaliana
MSGEVWRWNKQAEMNSIRDCLKHCNSIAIDTEFPGCLKETPMDASDEIRYRDMKFNVDNTHLIQLGLTLFGKGITKTWEINLSDFNESKSLKNDKSIAFLKNNGLDLDKIREEGIGIEEFFMEFSQILNEKHGKMRWVTFQGSYDKAYLLKGLTRKPLPETSKEFDETVQQLLGRFVYDVKKMAGLCSGLSSRFGLQRIADVLQMRRVGKAHHAGSDSELTARVFTKLIFDLVNSRKESTGRRADDQQYQLEQQQHQQQLMMTRCYIPIPVQGRNYVL

SEQ ID NO: 9733 - protein, 372 aa, Oryza sativa (japonica cultivar-group)
MDDPMLNAVKEEESHGDGGGLEVVAGEDGAAAVAAGVAPRPMEGLHDAGPPPFLTKTYDMVDDAGTDAAVSWSATSNSFVVWDPHAFATVLLPRFFKHNNFSSFVRQLNTYGFRKVDPDRWEFANENFLRGQRHLLKNIKRRKPPSHTASNQQSLGPYLEVGHFGYDAEIDRLKRDKQLLMAEVVKLRQEQQNTKANLKAMEDRLQGTEQRQQQMMAFLARVMKNPEFLKQLMSQNEMRKELQDAISKKRRRRIDQGPEVDDVGTSSSIEQESPALFDPQESVEFLIDGIPSDLENSAMDAGGLVEPQDFDVGASEQQQIGPQGELNDNFWEELLNEGLVGEENDNPVVEDDMNVLSEKMGYLNSNGPTAGE

SEQ ID NO: 9734 - protein, 437 aa, Glycine max
MTVTTEFAAATNDEEVPSGVVLFGKYELRRLLGAGAFAKVYHATSVDDTRQSVAVKAVSKNKVLNGGFAANVEREISIMRRLHHPNIINLFEVLATKTKIYFVMEFAAGGELFHEVAGKVRLTEETARFYFRQLISAVKHCHSRGVFHRDLKLDNLLLDENGNLKVSDFGLSAVTGQIRPDWLLHTVCGTPTYVAPEILAKRGYDGAKVDLWSCGVVLFALIAGYLPFNDYNPSVLYRKIYRGQFRFPRWISHDLRFLLSRLLDTNPKTRITVDEIYKDTWFNADGEYRFNRVLVKESECEKQLGRTGFKSLNAFDLISFSTGLDMSGLFEDPTGSNSVERVVSTVVPEKIMERVEAMTEEGRVVVRREKNGGGAKLEGQDGNLIGIVVVYQLTDELVVVEMKRSEKGGGFGGQFWKDKLRPLLLELASELEEPVSR

SEQ ID NO: 9735 - protein, 358 aa, Oryza sativa (japonica cultivar-group)
MDPAAAGIVKEEMLESQQQQRQEDGGAAPRPMEGLHEVGPPPFLTKTYDLVEDPATDGVVSWSRAGNSFVVWDPHVFADLLLPRLFKHNNFSSFVRQLNTYGFRKVDPDRWEFANEGFLRGQRHLLKTIKRRKPPSNAPPSQQQSLTSCLEVGEFGFEEEIDRLKRDKNILITEVVKLRQEQQATKDHVKAMEDRLRAAEQKQVQMMGFLARAMRNPEFFQQLAQQKEKRKELEDAISKKRRRPIDNVPFYDPGETSQTEQLDSPYLFDSGVLNELSEPGIPELENLAVNIQDLGKGKVDEERQNQTNGQAELGDDFWAELLVEDFTGKEEQSELDGKIDGIDELAQQLGYLSSTSPK

SEQ ID NO: 9736 - protein, 379 aa, Oryza sativa (japonica cultivar-group)
MEKMMPGMVKEEWPPSSPEEGEAPRPMEGLHEVGPPPFLTKTFDLVADPATDGVVSWGRAGSSFVVWDPHVFAAVFLPRFFKHNNFSSFVRQLNTYFLVRTNYLNKRSHFYSLRFQGFRKIDPDRWEFANDGFLRGQRHLLKMIKRRRPLSYLPGSQQALGTCLEVGQFGLDEEIDRLKRDKNILLAEVVKLRHKQQSTKANMRAMEERLQHAEQKQVQMMGFLARAMQNPDFFHQLIHQQDKMKGLEDTFSKKRTRSIDIVPFLNPGEVSQGDQLESTLLFDPRPFAELNDEPAKSELENLALNIQGLGKGKQDVNRTRNQPRNQASNETELTDDFWEELLNEGARDDAGIPGMERRRPRYVDALAQKLGYLSNSSQK

SEQ ID NO: 9737 - protein, 368 aa, Thermobifida fusca
MSDFKPGLEGVVAFETEIAEPDKEGGALRYRGVDIEQLVGHVTFGRVWGLLVDNSFNPGLPFADPIDLPVSTGDVRVDVQSALATLAPRWGFKPLLDIDEAEARDNVARAASAALSIIAQSARGDQPKVPQSRVDEGKTIVERFMIQLRGEPDPLHVKAVDAYWTSAAEHGMNASTFTARVIASTGADVAAALSGAVGAMSGPLHGGAPARVLHMLDETERLGDARKYVTQALDRGERLMGFGHRVYRAEDPRARVLRRTAKELNAPRFEVASALEKAALEELQARKPDRVLATNVEYWAAVVLDFAQIPASMFTSMFTCARTAGWSAHILEQKRTGRLVRPSARYVGPAVRDIKSVEGADEALAQGI

SEQ ID NO: 9738 - protein, 152 aa, Zea mays
ATRPGHPVLVYMPAGRLARDIEKTSDEAAAQFAFSQLKKILPNAAEPINYLVSRWGSDENTLGSYTFDGVNKPRDLYEKLRIPVDNLFFAGEATSVKYTGTVHGAFSTGVMAAEECKMRVLERFRELDMLEMCHPAMGDDSPVSVPLLISRL

SEQ ID NO: 9739 - protein, 443 aa, Gloeobacter violaceus PCC 7421
MVLMGSLLLRDMRMVLDDGSLYVGDLLCRDGLIAAVDRTVNAPADRVIDGGGRVLLPGVIDPQVHFREPGKEYKEDLQTGSWACARGGVTSFLEMPNTSPPTTTVERLEDKLARAASKCVVNYGFFVGATADNIEQLQQAAGLSCGVKIFMGASTGDLLVDDPVALERIFKEVPRLIAVHAEDEARIRERTRLFAGRSDPHVHSQLRDNECARLATAQALELSRRYRRRLHILHLSAAEELELLRADKPAWVTAEVIPQHLFLSTAAYDTIGMRAKQNPPLRSEADREAMWAGLRSGLIDFVATDHAPHLLSEKDRDYAEAPAGMPGVETSLPLMLTALARGEVNFEQIVRWMSRGAAKAYGIPNKGSLRPGFDADLVLVDLERYEPVRAERMASKCGWSPFEGWSLTGWPVLTVVGGRVAFEAGEVQTDTRGNALNFRPLEF

SEQ ID NO: 9740 - protein, 432 aa, Arabidopsis thaliana
MVIKGMRVGKYELGRTLGEGNSAKVKFAIDTLTGESFAIKIIEKSCITRLNVSFQIKREIRTLKVLKHPNIVRLHEVLASKTKIYMVLECVTGGDLFDRIVSKGKLSETQGRKMFQQLIDGVSYCHNKGVFHRDLKLENVLLDAKGHIKITDFGLSALSQHYREDGLLHTTCGSPNYVAPEVLANEGYDGAASDIWSCGVILYVILTGCLPFDDANLAVICRKIFKGDPPIPRWISLGAKTMIKRMLDPNPVTRVTIAGIKAHDWFKHDYTPSNYDDDDDVYLIQEDVFMMKEYEEEKSPDSPTIINAFQLIGMSSFLDLSGFFETEKLSERQIRFTSNSLAKDLLENIETIFTEMGFCLQKKHAKLKAIKEESTQKRQCGLSVTAEVFEISPSLNVVELRKSHGDSSLYKQLYERLLNELGSSSQVQELLA

SEQ ID NO: 9741 - protein, 439 aa, Anabaena variabilis ATCC 29413
MSSPQSLLIRGARILLPNGEFLLGDVLIRDRHIIEVGTEIVNTTPATEIDAKGLTLLPGVIDPQVHFREPGLEHKEDLFTASCACAKGGVTSFLEMPNTRPLTTSQQALDDKLQRAASKCLVNYGFFIGATGENTPELLAANPTPGIKIFMGSMHGQLLVDQDAVLESIFAQGQRLIAVHAEDQARINQRRQEFAGIQDPAIHSQIQDNQAALLATQLALKLSKKYQRRLHILHMSTADEAELLRQDKPIWVTAEVTPQHLVLNTGDYERIGTLAQMNPPLRSPHDNEVLWQALRDGVIDFIATDHAPHTLEEKAQPYPNSPSGMPGVETSLAVMLTAAMEGKCTIAQVANWMSKAVAVAYGIPNKGAIAPGYDADLVLVDLNTYRPVLREELLTKCRWSPFEGWNLTGWADTTIVGGQIVYHKGKLNTEARGQALSFV

SEQ ID NO: 9742 - protein, 339 aa, Oenococcus oeni PSU-1
MKQVQVTAVGENSFVDVDQPQVGRQDVLIKIKANGICGSDTFYTSIGGIPPRQGHTPLGHEAAGIVADIGSDVDDVSIGDHVVINPMSAEDGIIGNGGAQGALSDYVNLINAKANRNFRIIPKNIPWEVAALNEPMAVAQHAVNRSKAKADSKVAVFGAGPIGLGAIISLKALGVKNVVAIDIIPERLQKALDVGADSIIDSGKEDVLEQLIKFHGQGLEKVPSGNKRSATDIYIDAAGASIVPKTVFKIAQYRAVYTIVAVHKKEVPVNFGDLLDRELDIRLSVGYPTEIFQVTDNIIKYPELYAKIISNVFPFSDALKALKTAATPGAADKVVVSFD

SEQ ID NO: 9743 - protein, 303 aa, Acinetobacter lwoffii
MKFGTVWKYYFTESLLKATIRTPSQLNLAPNALRPVLDQLCRLFPQNPTVQIRPIRLAGVRGEEIKAQASATQLIFHIHGGAFFLGSLNTHRALMTDLAARTQMQVIHVDYPLAPEHPYPEAIDAIFDVYQALLVQGIKPKDIIISGDSCGANLALALCLRLKQQPELMPSGLILMSPYLDLTLTSESLRFNQKHDALLSIEALQAGIKHYLTDDIQPGDPRVSPLFDDLDGLPPTLVQVGSKEILLDDSKRFREKAEQADVKVHFKLYTGMWHNFQMFNAWFPEAKQALADIAEFAHSLDLD

SEQ ID NO: 9744 - protein, 477 aa, Populus tomentosa
MLSQKQAEEAIVPNYSETDQHEGKEEETEENHSLFSIKSALWHGGSVWDAWFSCASNQVAQVLLTLPYSFSRLGMLSGILFQIFYGIVGSWTAYLISVLYIEYRSRKGKENVNFKNHVIQWFEVLDGLLGPYWKAVGLAFNCTFLLFGSVIQLIACASNIYYINDHMDKRTWTYVFGACCATTVFIPSFHNYRIWSFLGLGMTTYTAWYMAIAALIHGQKGVVTHSAPTKLVLYFTGATNILYTFGGHADTVEIMHAMWKPQKFKYIYLMATLYVFTLTIPSATAVYWAFGDDLLNHSNAFALLPKNGFRDAAVILMLIHQFITFGFACTPLYFVWEKVIGMHDTKSICLRALARLPVVIPIWFLAIIFPFFGPINSAVGALLVSFTVYIIPSLAHMLTYRKSSARQNAAEKPPFFLPSWTAMYVVNTFVVVWVLVVGFGFGGWASMTNFVRQVDTFGLFAKCYQCKPAGAAPPRPH

SEQ ID NO: 9745 - protein, 203 aa, Arabidopsis thaliana
MSGDNGGGERRKGSVKWFDTQKGFGFITPDDGGDDLFVHQSSIRSEGFRSLAAEEAVEFEVEIDNNNRPKAIDVSGPDGAPVQGNSGGGSSGGRGGFGGGRGGGRGSGGGYGGGGGGYGGRGGGGRGGSDCYKCGEPGHMARDCSEGGGGYGGGGGGYGGGGGYGGGGGGYGGGGRGGGGGGGSCYSCGESGHFARDCTSGGR

SEQ ID NO: 9746 - protein, 70 aa, Brassica napus
MSALFNFHSFLTVVLLVICTCTYLKMQFPAILEQKTGFRGFFWKAARIGERLSPWMSVGCFMMGVSIIFF

SEQ ID NO: 9747 - protein, 461 aa, Oryza sativa (japonica cultivar-group)
MVNGEAEAECTRASLLGRYEIGRTLGEGNFGKVKYARHLATGAHFAIKILDRNKILSLRFDDQIRREIGTLKLLKHPNVVRLHEVAASKTKIYMVLEYVNGGELFDKIAVKGKLSEHEGRRLFQQLIDAVSYCHDKGVYHRDLKPENVLVDRRGNIKISDFGLSALPQHLGNDGLLHTTCGSPNYIAPEVLQNRGYDGSLSDIWSCGVILYVMLVGYLPFDDRNLVVLYQKIFKGDTQIPKWLSPSARDLLRRILEPNPMKRINIAGIKEHEWFQKDYTPVVPYDDDDDNYLDSVLPIKEQIDEAKQEKPTHINAFQLIGMASALDLSGFFEEEDASQRKIRFTSTHSPKDLFDKIENVVTEMGFQVQRGNSKLKVMKNGRGSKNLRNPSSFLVCTEVVELGPSLYVVELKKSHGDPILYRQLCERLSDELGVCKTEQIQRTESLEDDLESFDSGSSLPGF

SEQ ID NO: 9748 - protein, 323 aa, Arabidopsis thaliana
MGEEVQMSDYDVSGDGDRVSEWEMGLPSDEDLASLSYSLIPPNLAMAFSITPERSRTIQDVNRASETTLSSLRGGSSGPNTSSSNNNVEEEDRVGSSSPGSDSKKQKTSNGDGDDGGGVDPDSAMAAEEGDSGTEDLSGKTLKRPRLVWTPQLHKRFVDVVAHLGIKNAVPKTIMQLMNVEGLTRENVASHLQKYRLYLKRMQGLTNEGPSASDKLFSSTPVPPQSFQDIGGGGGSSGNVGVPIPGAYGTQQMMQMPVYAHHMGMQGYHHQNHNHDPYHQNHRHHHGAGGNGAFESNPYMMQQNKFGSMASYPSVGGGSANEN

SEQ ID NO: 9749 - protein, 166 aa, Oryza sativa (japonica cultivar-group)
MESAMFGLETPLMTALQHLLDIPDGEGGAAGKQGATGGPTRAYVRDARAMAATPADVKDLPGAYAFVVDMPGLKSSDIKVQVEEERLLVISGERRRGGGEEEKEESCKYLRMERRMGKFMRKFVLPDNADVDKISAVCQDGVLTVTVEKLPPPEPKKPKTIEVKVA

SEQ ID NO: 9750 - protein, 425 aa, Pediococcus pentosaceus ATCC 25745
MKVLLKNARVIKSHQVQKTDVLVENDRITQIQPEINVEAEQIIDVKNQLLMPGLVDIHVHFRDPGQTDKEDVVSGSAAAVKGGFTTVLTMPNVDPVPDTPEKMTAMVKHNQTAGSLHIGQYGSITKKRTSEELVDFKALKEAGAVAFSNDGNGIQTAETMYQAMLQIKEVGLPLAAHVEDESLMQHGVMNQGTVAEKLGLPGISELAETAQLARDLEIARNTGAHYHVCHVSKARSVELIRRAQRDGVHVTAEVAPHHLFLDETMISMDNPMMKMNPPLRTLEDRQALLGGLLDGTIGMIATDHAPHTVKDKAGSMKTASFGITGLETAFPLLYTKLVKPGLCTVEQLVEWMSIQPAEIFNLKAAGQLEVGDVADLTVMNVEDEYEIKEADFASKGINSPFIGQKVYGQTQLTMVAGKIVYQREG

SEQ ID NO: 9751 - protein, 354 aa, Bacillus thuringiensis serovar konkukian str. 97-27
MEKRIVCLAGDGVGPEVMESAKGVLHMVERLYGHHFHLQDEHFGGVAIDLTGQPLPQRTLAACLASDAVLLGAVGGPRWDGAKERPEKGLLALRKGLGVFANVRPVTVESATAHLSPLKKADEIDFVVVRELTGGIYFSYPKKRTDEVATDTLTYHRHEIERIVSYAFQLASKRKKKVTSIDKANVLESSKLWRTVTEEVALRYPDVELEHILVDAAAMELIRNPGRFDVIVTENLFGDILSDEASVLAGSLGMLPSASHAEKGPSLYEPIHGSAPDIAGKNKANPIAMMRSVAMMLGQSFGLTREGCAIEEAISAVLKSGKCTADIGGAETTTSFTKAVMQEMEEQALVGRGR

SEQ ID NO: 9752 - protein, 199 aa, Triticum aestivum
  unsure (1)..(199): unsure at all Xaa locations
MKTFLIFVLLAMAMKIATAARELNPSNKELQSPQQSFSYQQQPFPQQPYPQQPYPSQQPYPSQQPFPTPQQQFPEQSQQPFTQPQQPTPVQPQQPFPQQPQQPQQPFPQPQQPFPWQPQQPFPQTQQSFPLQPQXKPFPQQPQQPFPQPQLPFPQQSEQIIAQQLQQPFPLQPQQPFPQQPQQPFPQPQQPIPVQPQQS

SEQ ID NO: 9753 - protein, 453 aa, Zea mays
MEKKPTILMNRYELGRTLGQGTFAKVYHGRNLASGESVAIKVIDKEKVMRVGMIDQIKREISVMRLVRHPNVVQLHEVMASKSKIYFAMEYVRGGELFARVARGRLKEDAARRYFHQLVGAVDFCHSRGVYHRDLKPENLLVDEHGNLKVSDFGLSALRECQKQDGLLHTTCGTPAYVAPEIINKKGYDGAKADIWSCGVILFVLLAGYLPFHDANLVEMYRKISRADVKYPQWFSPELRRLMPKLLEPNPNNRITIEKLVEHPWFKKGYRPAVMLAQPHGSSSLKDVQVAFSNADHKDSSSKVEQPADSSLKPASLNAFDIISHSRGFDLSSLFEVDQEQKASNSRFMTQKPASAIVSKLEQIAETERFMVKKQDGLVKLQGSKQGRKGQLAIDAEIFEVTPAFHVVEVKKSAGDTLEYEMFCSKGLRPSLSDICWSSRSEENMAPSVVQPS

SEQ ID NO: 9754 - protein, 453 aa, Escherichia coli K12
MSFDLIIKNGTVILENEARVVDIAVKGGKIAAIGQDLGDAKEVMDASGLVVSPGMVDAHTHISEPGRSHWEGYETGTRAAAKGGITTMIEMPLNQLPATVDRASIELKFDAAKGKLTIDAAQLGGLVSYNIDRLHELDEVGVVGFKCFVATCGDRGIDNDFRDVNDWQFFKGAQKLGELGQPVLVHCENALICDELGEEAKREGRVTAHDYVASRPVFTEVEAIRRVLYLAKVAGCRLHVCHVSSPEGVEEVTRARQEGQDVTCESCPHYFVLDTDQFEEIGTLAKCSPPIRDLENQKGMWEKLFNGEIDCLVSDHSPCPPEMKAGNIMKAWGGIAGLQSCMDVMFDEAVQKRGMSLPMFGKLMATNAADIFGLQQKGRIAPGKDADFVFIQPNSSYVLTNDDLEYRHKVSPYVGRTIGARITKTILRGDVIYDIEQGFPVAPKGQFILKHQQ

SEQ ID NO: 9755 - protein, 462 aa, Halobacterium sp. NRC-1
MHLYWHQRDLRVPDNRGLHAATDGDTVVPVYVFDDTVLSQVGRPKRAFLAAGVRALRAAYRERGSDLLVREGDAESVLPALADEFDADTVFHAAHYDAARRNRRTRVADALAAAGVDTAGHVDHTLVDPATLDDAYPSHSQFYDDWQQAPKPDPVPAPDADALADVHDDHTLSVPAPEPPLPDAGHAAATDRLAAFLDDGIASYNDTRDDLAAAVDAPASAVSRLSPYLAAGNIGVREVWAAVADAYDDATGNAARNIGKYRYELSWREQNYHLLYHTPRLQTENYVSFDAPIAWQNSDDHFEAWTRGETGYPLVDAGMRQLRAEGYVHNRPRQVVASFLTKHLLVDWRRGERHFADRLVDYDPANNAANWQWTASTGTDTVAVRIFDPVSQMAKYDSDAAFVTEYVPELRGVDPETIVDWPTLRHSQRERLAPDYHHPIVDRDHAYERAQRVFEAALDGDA

SEQ ID NO: 9756 - protein, 491 aa, Synechococcus elongatus PCC 7942
MPRGVAPAFAGRKPKGWAWASTAVPDFQGGFKRLINRFQGSKLWLACVPLAATIAVFWGVAANAQGSADPVPSAQFLVNNLWLMVATVLVIFMNAGFAMVETGLCRQKNAVNVLAKNLIVFTLAATAYWFIGYSLMYGSPVVDGFLYFGKGGPLGFFFDPTVSAETIKNDGLISSLDFLFQAAFAGTAATIVSGSVAERIKFVDFIIFSLILTAVIYPIAGSWQWNVGSGWLNKAGFIDFAGSTVVHSVGGWAALIGAITLGPRMGKFQDGPPGALTGHNLAIATLGALILWIGWYGFNGGSVLAFNTAVPYVAVTTTLGGAAGGISATITSWSTSGKPDLSMVINGILAGLVGVTAGCDGFGMGGSFIVGLIAGVLVVFSVYTFENLKIDDPVGACSVHLVCGIWGTLAVGLFNLEKGLFYGGGFGQLGSQILGIISYGVWTVVASVIIWNILKALLGLRVSLKKSYKAWILANTGWKPTLALPRMHLTP

SEQ ID NO: 9757 - protein, 491 aa, Methylococcus capsulatus str. Bath
MSHELRLDQPGLLRTRCLIDGQWVDADHSKTFSVTDPATGRALADVPAMGAAETMRAIAAAEHAWTGWRGKTAKERAAVLRRWYELILSHTEDLARILTAEQGKPLTEARNEIGYAAGFVEWFAEEAGRAYGETIPSPVPDKRLLVIRQPIGVCAAITPWNFPAAMITRKIAPALAAGCTVVVKPAEQTPLTALALADLAVQAGFPPGVINVVTGDPEAIGGELTSNPLIRKLSFTGSTEVGRLLMAQCAATVKKISLELGGNAPFIVFEDADLDAAVEGALLSKYRNTGQTCVCTNRFLIQDSIYDAFAERLAAKVRRLEVGNGLDEGVVQGPLIDEQALAKVERHIADALDRGARVLAGGGRHPLGGRFFQPTVLVDVTPEMLCTREETFGPVAPLLRFGSEEEALAIANATEYGLAAYFYTRDLARAFRVGEALEYGMVGINTGMLSYDVAPFGGVKQSGIGREGSHHGMDEYLELKYLCLGGMAPSA

SEQ ID NO: 9758 - protein, 156 aa, Arabidopsis thaliana
MDLEFGRFPIFSILEDMLEAPEEQTEKTRNNPSRAYMRDAKAMAATPADVIEHPDAYVFAVDMPGIKGDEIQVQIENENVLVVSGKRQRDNKENEGVKFVRMERRMGKFMRKFQLPDNADLEKISAACNDGVLKVTIPKLPPPEPKKPKTIQVQVA

SEQ ID NO: 9759 - protein, 221 aa, Triticum aestivum
  unsure (1)..(221): unsure at all Xaa locations
HASGEIDCASLLIQAKLEANQQSSVGVVLIGGSQVQILCTLTSDSVKANSFLFGVKCSGELHFTQAIQIGALSLKHRSNXTQKQRMVCFIGSTVVEDVETLKILAKKLKKNAVAVDVICFGDTSEEQIAKLXAFVATLQTEDNSHCVVIRPGENISDKVINSPIIGGQAGNAPGIGGNIEEDDPELAAAIRMSLEESQRAAPPQVAQPAPAQSISQAQPSR

SEQ ID NO: 9760 - protein, 414 aa, Bacillus anthracis str. Ames 0581
MSLLRDEALKMHKEKQGKIGVYSKVKVQNSTDLSLAYSPGVAEPCLEIYKDESKVYDYTMKGNLVGVISDGTAVLGLGNIGPKAAMPVMEGKALLFKSFAEIDAFPICLNTNNPDKIVEVVKLLEPNFGGINLEDIAAPQCFEIEERLRKSCDIPVFHDDQHGTAIVTIAGLINALKLTNKKIEDVQIVVNGAGAAGIAIVKLLLHMHVKNVILCDTKGIIYEQRPIGMNALKEEIARITNIEQKRGTLAEALIDADVFIGVSAADVVDEDMIRSMNHNPIIFALANPTPEIMPNKAKIAGALVVGTGRSDFPNQVNNVLAFPGVFRGALDVQAKEINEEMKLAAVYAIAELISEEELHVNYVIPNPFDPRVVPHVAYAVARAAVETGVSRKNISMSEIKNNLFRLTKEVNILK

SEQ ID NO: 9761 - protein, 132 aa, Zea mays
  unsure (1)..(132): unsure at all Xaa locations
PVRKLEALIAAANIIYIFHILHTPPGENALFDVLLITPIFTXNKFKTXGPASAGAGSETGPSLFQLIFYPNLYPELALALQLSMXEERSRQQAIANKAAXDTFNTEHNNVPSSNSDSVMAEXEPASNAAAVD

SEQ ID NO: 9762 - protein, 304 aa, Triticum aestivum
  unsure (1)..(304): unsure at all Xaa locations
NRKKTVLVAKIFRGFPPRAGRLHPIRTRGFEGYRFTPCGEYVRRWLPELARLPTEWIHHPWDAPESVLQAAGIELGSNYPLPNCELDEAKSRLQDALSEMWELEAASRAEIENGMEEGLGDSSDEPPIAFPQELQHMEVDLDRATIHTPATAGRRRADQMVPSITSSLVRAETETELSAAFESEVTRPEVPSQVHFQPQTRMEVRDEGVSDGTAARYNGVQQXSSYTLHRHRVQGGIAPSTSEASSSWTGVVAAEVPVWSPPAASGHSDPYAADETDISSRSYLDRHPQQSHRLMNWNQLSQSS

SEQ ID NO: 9763 - protein, 475 aa, Azoarcus sp. EbN1
MTLVRDKLFIDGRWVAAQGGGFIDVIDPSDASVYARIPEGVPADAEAAIAAARGAFDSWSRTSPAERAQYLERIAAGFQARSDELADAIAHEVGMPLKMASRIQVGGPLWSWQHYAKLAREFEWEARVGNSLVVREPVGVVGAITPWNFPLNQITLKVAPALAAGCTVVLKPSEVAPINAFILAEIIEAAGLPAGVFNLVTGYGPVVGEVLASDPRVDMVSFTGSTHAGRRVAELAAATVKKVALELGGKSAAIVLDDADLAAAVKGTVSNCLLNSGQTCSAHTRMIVPRAKVDEAATLAAAAASSFKVGPALAEGSRLGPLVSQAQRDRVVGYIRRGLDEGARLACGGVDAAPAGAGFFVAPTVLVVEDPKATVAQEEIFGPVLVIVPHDGDEDAILLANDSIYGLAGSVWAGTDEHALAVARRIRTGQVDVNGAPWNPLAPFGGYRQSGLGRENGVYGLEEFLEYKAIQLRPR

SEQ ID NO: 9764 - protein, 504 aa, Azoarcus sp. EbN1
MNKLDPARYGLNLKGRYGNYIGGQWLPPVAGRHFDNITPITGKPLCEIPRSDEQDVELALDAAHKAKAAWGRTSAAERAGVLNRIADRMEANLETLAQVETWDNGKPIRETRAADIPLAIDHFRYFAACVRAQEGSLGEIDHTTVAYHFHEPLGVVGQIIPWNFPLLMAAWKLAPALAAGNCVVLKPAEQTPLSILVFAELVGDLLPPGVLNIVNGFGVEAGKPLASSKRIAKIAFTGETGTGRLIMGYASQNLIPVTLELGGKSPNIFFDDVAAQDDAFFDKAIEGFVMFALNQGEVCTCPSRALIHESIYERFIERALKRVAEIRQGNPLDPATMIGAQASREQMDKIQSYLAIGRDEGAELLAGGERAHLDGELEGGFYIQPTVFRGHNKMRIFQEEIFGPVVSVTTFKDRDEALAIANDTPFGLGAGVWTRNINTAFHMGRHIEAGRVWTNCYHAYPAHAAFGGYKQSGMGRETHKMMLDHYQQTKNLLVSYSEDKLGFF

SEQ ID NO: 9765 - protein, 485 aa, Arabidopsis thaliana
MSSPRSNKPKIVNGPGGYILQDVPHLIDYLPDLPTYPNPLQDNPAYSVVKQYFVHADDSVPEKVVVHKDGPRGVHFRRAGPRQKVYFESDEVHACIVTCGGLCPGLNTVIREVVSSLSYMYGVKRILGIDGGYRGFYAKNTIPLNSKVVNDIHKRGGTIIGTSRGGHDTNKIVDSIQDRGINQVYIIGGDGTQRGASVIFEEIRRRRLKVAVVGIPKTIDNDIPVIDKSFGFDTAVEEAQRAINAAHVEAESNENGIGFVKLMGRYSGYIAMYATLASRDVDCCLIPESPFYLEGEGGLFEFIERRLKDHGHMVIVLAEGAGQDLMCKSMESTPMDASGNKLLKDVGLWLSQSIKDHFKKNKMVMNLKYIDPTYMIRAVPSNASDNVYCTLLAQSAVHGAMAGYTGYTSGLVNGRQTYIPFYRITETQNNVVITDRMWARLLSSTNQPSFLGPKDTSEEKKELPETPLLDDGAVDIPPVTKEVTK

SEQ ID NO: 9766 - protein, 388 aa, Lactobacillus gasseri
MAQRDYYDVLGVDKNASESDINKAYRKLAKKYHPDLNHEPGAEEKYKEVNEAYEVLHDKQKKAQYDQFGQAGVNGQAGFGGQGYGGFGGQGGYSSQGFGDFGDIFGDIFGSAFGGGRSRVDPTAPQKGQDLDYTMTIDFMDAIKGKKTDITYTRSEVCPTCDGSGAEKGTHPITCDKCHGTGVMTVTRQTPLGVIQQQTTCDKCGGRGTIIKHPCQTCHGKGTIDKKQTLEVKVPAGIDNGQQIRLSGQGEAGKNGGPYGDLYIVFRVKPSKEFRRNGTTIYSEAPISFAQAALGDKIRVNTVHGPVDLTIPAGTQPNTNFKLRGQGVPKINGTGNGDQEVTVKVVIPKKINDKQKEALVDYVKAGGGNISPQEKNFFERLKDKLNGE

SEQ ID NO: 9767 - protein, 65 aa, Glycine max
  unsure (1)..(65): unsure at all Xaa locations
QLAPMSCLCKGYLDALLIRNGFKDAEYISLALGGTNLXINTVXSVDHAEAVDLSFEMRTKLYFKP

SEQ ID NO: 9768 - protein, 217 aa, Caulobacter crescentus CB15
MQIFLDSTDTKVIADLASTGLIDGVTTNPTLIAKSGRPMLEVIAEICDIVPGPISAEVAATTADAMIAEGQKLAKIAPNVVVKIPLTRDGLIACAAFADEEIKTNVTLCFSPTQALLAAKAGATYISPFIGRLDDYGFDGMDLIRDIRAIYDNYGYETEILAASVRNAAHVKEAAIVGADVVTIPPAVFSDLYKHPLTDKGLEQFLKDWASTGQSIL

SEQ ID NO: 9769 - protein, 322 aa, Glycine max
MADAKAEAARQAPQSSQEEEEDWKEAEGDVEVADRSTSNGGGAGEGITDRPIRVYADGIYDLFHFGHARSLEQAKKSFPNAYLLVGCCNDELTHQYKGRTVMTEDERYESLRHCKWVDEVIPDAPWVVTEEFLNKHNIDFVAHDSLPYHDASGASNDVYEFVKKLGKFKETKRTEGISTSDIIMRIVKDYNEYVMRNLARGYSRNDLGVSYVKEKRLRVNMGLKTLRDKVKQHQEKVGEKWSTVAKLQEEWVENADRWVVGFLEKFEEGCHSMGTAIKERIQERLKEAQSRDFSLLQYDSDDFDDFEEEDDEVAKDAKYVKE

SEQ ID NO: 9770 - protein, 301 aa, Rubrivivax gelatinosus PM1
MLDAFKAQGLKSFEQMTVPESRETAMAFVGLEGDEEAVADVSNHRVPVKGGDIAVRIYRPAGNAPHPMLVYFHGGGFVFGNLDLVDKVARSLCNASNAAVVSVDYRKAPEHPYPTAPEDAYAGLVWARENAAKLGLDPARIAVAGDSAGGNLAAVVSQMARDRKGPKIAHQVLVYPVTDAAGDYPSRKENAEGYLLTQGAMNWFFGHYLTSPGLASDAYVSPIKGDLKGLPAATVITAGYDPLRDEGDAYAKALAKAGVAVDHVPNPTMIHGFFWMKGVIGHTQSIYDRVGRNLKAAFGTA

SEQ ID NO: 9771 - protein, 477 aa, Candida albicans SC5314
MPHKKVVIVGGGISGIKAAADLYKSGIKSTVILEAQPRLGGRLFTVESTQNKGTTYDYGASWFHDCLNNPLFDKAQQLENVKYYFDDGKSLYFNKFEGQIEKWRFETVLEEMMTYFQWVYKQDPDKLDISVKQLAQEYVDKYRNVLTKEQIELSLSAVRMWSELWHGESWDLLSGKYTFADDGHLGRNAFVKNGYSTVFINELKELPRAYRDSAIKLNAQVIKIDYTNKKKILVYLKDGRTYSCDYIIVTIPQTILKITNAKDENYVEWVPELPPNIQKVLPDVHFGSLGKVVLEFDDCFWPRDVDRFYGLTSNTPSQDTISVDAWDYPTILINYQAVNNVPSLVALTQNPLSKYIENLQPHEKQQRIWSIFKPLIAKICESKGIQDIPEPHSIYHTPWNNESLFRGSYGTSLVGTQDPSSVIKAFVDGYQDRIKFAGAETMDDTSNGCAHGGWFSGQREAKFIVQQEAKKKVDSKL

SEQ ID NO: 9772 - protein, 227 aa, Paulownia kawakamii
MAREKIQIKKIDNATARQVTFSKRRRGIFKKAEELSVLCDADVGLIIFSSTGKLFEYASSSMKEILGRHNLHSKNLDKLEQPSLELQLVEDSNYSRLSKEVAERSHQLRRMRGEELQGLSIEKLQHLKKSLESGLSRVIEKKGEKIMKGDQSTSRKGKQLMEENERLRQQVADISNDCKNNAASDSENIVYDEGQSSESVNACNSVGPPQDYDSSDTSLKLGLPYSG

SEQ ID NO: 9773 - protein, 232 aa, Zea mays
  unsure (1)..(232): unsure at all Xaa locations
MESTLKGIRGSDAPCVLDLDDAATVAGGVEDTYGEDRATEEQLVTPWTVSVASGYNLLRDPRYNKGLAFTERERETHYLRGLLPPAIVSQELQERKIMNNIRQYQLPLQRYMALMDLQEGNERLFYKLLIDNVEELLPIVYTPTVGEACQKGKILEVLKNWPERSIQVIVVTDGERILGLGDLGCQGMGIPVGXLSLYTXLXGVRPSACLPITLDVGTNNEELXYGRIYIGL

SEQ ID NO: 9774 - protein, 349 aa, Pseudomonas aeruginosa PAO1
MPAEVAAGLPPLPPNHFYFYPPDPLLEGDGAITAIEDSDPFDQYVYRLRRVLYQGRTRWQNVLIADTYNYDRVLMLDGAIQSAESDESLYHELLVQPAMLAHDEPRDVLIIGGGEGATLREVLSHASVRRAVMVDLDRELVELCREHLFQWHQGAFDDPRCELLAEDGRAYLERDPSLYDVVIIDVVDMLDNGPAQALYTRQFYELLHSRLRPGGVVAVQGLEFSHSDDKPHAALARTLRSVFSQVHSYRATVPSFLSSWGFLLASDWLDTNHWQAEDIDRRIERKLGPLWLDHLDGDYLKACFVMDRETRFLLAQPGPVLEDGVPFVAPPDIEEIEFGPAQLPALART

SEQ ID NO: 9775 - protein, 327 aa, Chlamydophila caviae GPIC
MSSQFEQLKLLSVLVCDTGDPELVKTSGSQDATTNPSLILKVAQEPKYQELLTEAIAWGIRQNGDDIQTLTFVLDKIQVNFGLEILKCIPGRVSLEIDARLSFNTEAMIQRAIFLSELFAATGGDKKRLLVKIPGTWEGIRAVEVLEKQGIACNVTLIFNLIQAIAAAKANATLISPFVGRIYDWWIAAYGDEGYSIDADPGVASVSNIYTYYKKFDIPTQIMAASFRSKEQVLALAGCDLLTVSPKLLDELKKDQSPVAKKLDVAAAKKLDVQPVELTESVFRFLMNEDAMATEKLAEGIRIFSGDTQILEAAVTEFIKQIAAQDA

SEQ ID NO: 9776 - protein, 277 aa, Mycoplasma mobile 163K
MFQWFPGHMAKALRQIKEKEKFVDFFIIVLDSRAPISTYNKEFDKISPKKPRLFIINKIDYGDVKKYQKLERYFRTENSDVLFTNLKKQNTRSIIIKSVDKLLFKKTEYDKKRGLLNPFTVGMILGLPNTGKSTLINLLANKSKTKVANTPGVTRGQQLVITERFKLFDTPGILFPKIEYELDAIKIAMIGSIKWEIINQKELFFGSYKLLSEYYPEEIEKLGLQPSFDDNQIFISLEQIGKKHNFYLKDKQIDENRTIIFFNNYVKNLKNVTYDRL

SEQ ID NO: 9777 - protein, 427 aa, Oryza sativa (japonica cultivar-group)
MGNICGGSGKAHVSGDCRPPSSGTMTPKTSSSVTTSNSTTGKLSSVGSSFMASSGSGGTSSGFDDGVYPEGQILEAPNLRTFTFIELRTATKNFRPDSVLGEGGFGRVYKGWVDEKTMNPVKGGTGMVVAVKKLNSESMQGYEEWQSEINFLGRLSHPNLVKLLGYCFEDKELLLVYEFMAKGSLENHLFKKGCPPLSWELRLKIAIGAARGLAFLHASEKQVIYRDFKASNILLDANYNAKLSDFGLAKLGPTGSNSHITTRVMGTYGYAAPEYVATGHLYVKSDVYGFGVVMLEMMSGQRALDPNRPNGQLSLVDWAKPYLADRRKLARLMDPRFEGQYNSKQAVQAAQLTLNCLAGEPRSRPSMKEVLETLERIESMKSRARDARGSGSSRDHSHGRTTAHQRSSPRPDGRRGSRTNGHATKAR

SEQ ID NO: 9778 - protein, 358 aa, Neurospora crassa
MAASRTATRTLRALRTSTRPALTAAPRAAFRQGGRRLYSSEPAKSGGSNIWAWAIGAGALGAGGLWYLNQDGASATPKVFAPKFDDYQAVYNEIASRLEEKDDYDDGSYGPVLVRLAWHASGTYDKETGTGGSNGATMRFAPESDHGANAGLKAARDFLEPVKAKFPWITYSDLWILGGVCAIQEMLGPQIPYRPGRQDRDAAGCTPDGRLPDASQAQDHLRNIFYRMGFNDQEIVALSGAHALGRCHADRSGFDGPWTFSPTVLTNDYYKLLLDEKWQWKKWNGPKQYEDKKTKSLMMLPADMALIQDKKFKQWVEKYAADNELFFKDFSNVIVKLFELGVPFAENSERWVFKTVNA

SEQ ID NO: 9779 - protein, 472 aa, Trichodesmium erythraeum IMS101
MVLIGCQVALANGGSDDFVKVDNIWLLLAGALVFFMNAGFALLEAGFCRSDNSVNVLAKNLIVFCVAAIAFWMFGFGLMFGDSSYHLPCRGNFEQKNEKVQSYHGHFSPTMEYNEFEQKSQFILPPKNDTPLGYPSKGFSCLQRQFPKRSIASIFFFQLAFAGTAATIVSRAVAEKMKLWVFFCFSFILVGFLYPIVGHWVWSEYGWLKQGLNFIDFAGSTVVHTVGGTAALAVAILLKPRWSWLGYDPWEDLETDEGSEALSPQGQKESYDQRNLTSATLGCLILWLGWLGFNGGSTTELKEVGHIIITTIMSAATGGIIAILLSPLFSQRSSNNSEIGKLDLSSLINGILGGLVGITASAAYVDIPIAIFIGAVSGVVVVLTRKLLKWIKLEDPLGAIPVHLFCGCWGTIAVSFSLRGTIVYEKTYNFLERLEWQFSGWGVVFITTFLVSCIIWIFIGLTLYLFEKILRK

SEQ ID NO: 9780 - protein, 282 aa, Streptococcus pyogenes M1 GAS
MAMIQWFPGHMSKARRQVQENVKHVDFVTILVDARLPLSSQNPMLTKIVGDKPKLMILNKADLADATRTKEWKAYYESQGIKTLAINSKEQSTVKKVTEAAKELMADKIQRLRERGIQKETLRTMIIGIPNAGKSTLMNRLAGKKIAVVGNKPGVTKGQQWLKSNKELEILDTPGILWPKFEDELVGLKLALTGAIKDQLLPMDEVTIFGLNYFREYYPNRLTKRFKNIPLEEEAPEIIMTLTRQLGFKDDYDRFYTLFVKEVRDGKLGQYTLDQVGDMDAD

SEQ ID NO: 9781 - protein, 186 aa, Arabidopsis thaliana
MKLISLVRNVRSRQCQPEVIWSVQVRFLQQDSVSKAKPKKYKYPSVYDPYGPRPQPSSKIMELAERIAALSPEERKQIGPALNEHLRLPKQQMISSDGIGAKQDTGAGNVEEKKEKTAFDVKLEKFNASDKIKVIKEVRTFTSLGLKEAKELVEKVPAILKQGVTKEEANEIIAKIKAVGGIAVME

SEQ ID NO: 9782 - protein, 356 aa, Gaeumannomyces graminis
MSRAANPPSNSGSRKISFNVSEQYDIQDVVGEGAYGVVCSAIHKPSGQKVAIKKITPFDHSMFCLRTLREMKLLRYFNHENIISILDIQKPRSYETFNEVYLIQELMETDMHRVIRTQDLSDDHCQYFIYQTLRALKAMHSANVLHRDLKPSNLLLNANCDLKVCDFGLARSAASQEDNSGFMTEYVATRWYRAPEIMLTFKEYTKAIDVWSVGCILAEMLSGKPLFPGKDYHHQLTLILDVLGTPTMEDYYGIKSRRAREYIRSLPFKKKVPFRTLFPQDVGSRLDLLEKLLAFNPVKRITVEEALKHPYLEPYHDPDDEPTAPPIPEEFFDFDKHKDNLSKEQLKQFIYQEIMR

SEQ ID NO: 9783 - protein, 585 aa, Triticum aestivum
  unsure (1)..(585): unsure at all Xaa locations
MLRLNPGRLPSEVLGSGMRRLEAWFATDVDIISSTDWDQEHGLTGWPWADGEWLRPCYLTLSPGFSGIASARALSNASFKVTLLESRERLGGRVHTDYSFGCPIASGASWLHGVCNEISLAPLIRLLGLRLYRSSGDHSVLYDHDWETHALFAKDGRQIPQEITTKVGEIFEQILKETVKVRDEYANDMPLVQAISMVLDRNPHLKLEGLXQYEVLQWCICRLEAWFATDVDNISLKNWDQEHVLTGGHGLMVNGYDPVIKALSRDLDVHLNHRVTKIIQRYNKVIVCVEDGTSFVADAAIITVPLGVLKANIIKFEPELPDWKLSAISDLGVGLENKIALRFNTIFWPNVEVLGRVAQTSNACGYFLNLHKATGHPVLVCMVAGRFAYEMEKLSDEESVNFVMSQLRRMLPGATEPVQYLVSRWGTDPNSLGSYSCDLVGKPADLYERFCARVGNLFFAGEAACMDHSGSVHGAYWSGIDAAEDCRRRLSTQLGIADLFQVWCIAVGEEFLGGVAPLLGPSGSVHGGKTAPIDDAKDGLVPLPTYLLLTDGRTNLSTVISIVLFCLNRSLNLPPQLYNFAASDP

SEQ ID NO: 9784 - protein, 208 aa, Brassica napus
MEKMLRSSSLIPLFCLVLLLISNFHGSVETGKRRIEITDDLDDVEDSEEDESWKQWGSKAATPEFDPPPDFSNMGFDQIQEEMAKRTFASVVGFVKLRLGVKRTKDMVVDIAMKWTKVLRTGGLGVRFMAVDRSTVMFNMQNGKEVTELREFVLSQEEAYEVKIGKQEFRRPGDPPLDDVVEKLQAKQSKGGEDGDSNNKNDVTKDEL

SEQ ID NO: 9785 - protein, 190 aa, Magnaporthe grisea
MGKSQSKLSQEQLAELQKSTHFDKKELQQWYKGFLKDCPSGTLTKEEFQKIYRQFFPFGDPSSFADYVFNVFDSDKSGTIDFKEFIVALSVTSRGKMEDKLDWAFQLYDIDGDGKISYDEMLQIVEAIYKMVGSMVKLPEDEDTPEKRVRKIFRMMDKDENGSLDMQEFKEGSKRGETIVSALSLYDGLV

SEQ ID NO: 9786 - protein, 448 aa, Halobacterium sp. NRC-1
MEIEIATIGGYEEVGRQMTAVRAGDDIVIFDMGLNLSKVLVHDNVETEKMHSLDLIDMGAIPDDRVMSDLEGDVKAIVPTHGHLDHIGAISKLAHRYDAPIVGSPFTIELVKGEIESEQKFGVENDLVKMEAGGTMEIGDRCELEFVHVTHSIIDAINPVLHTPEGAVVYGLDKRMDHDPVLEDPIDMERFREIGREGEGVLCYIEDCTNAGKKGRTPSESTARRHLKDVLTSVADYDGGIVATTFSSHISRVSSLVEFAKEIGREPILLGRSMERYSGTAERMGRVNFPDDLGMFGHRKSVDRAFKRVMNEGKENFLPIVTGHQGEPQAMLTRMGRGETPYDIEDGDKIIFSASVIPEPTNKGQRYQSEQLLRMQGARIYDDIHVSGHLREEGHYQMLDALQPQHLIPAHQDMKGMAPYAKLAKSQGYKIGRDLHMTENGNTIQLVE

SEQ ID NO: 9787 - protein, 220 aa, Ehrlichia canis str. Jake
MKLFLDTVDIDFLKEFSITGLIDGVTTNPSLMSKSNLECQDLILKICSLIPGPVSIEVISTSYKDMIKEGLDISKIADNIVVKLPLTYDGLIACKVLSHEHNVKVNVTLCFSVPQAILSAKSGAYFISPFVGRIDDIGQSGMQLIKDIRDVYTSYNTFNTEILVASVRNITHVIEAAKIGADIVTIPPSIFKQMFTHPLTDKGLESFLQSWNASGKKIFS

SEQ ID NO: 9788 - protein, 183 aa, Glycine max
MAGVGRNMVAPLLVLNLIMYLIVIGFASWNLNHFINGLTNRPGVGGNGATFYFLVFAILAGVVGAASKLAGVHHVRTWRGDSLATSASSSLVAWAITALAFGLACKEIHIGGYRGWRLRVLEAFVIILAFTQLLYVLALHSGLFGNQLGGNHAGGYPAEHAYGAGGDPHNKGMGMGTGGVARV

SEQ ID NO: 9789 - protein, 314 aa, Vibrio vulnificus CMCP6
MVNNSIQWFPGHMHKAQKEIAEAIPQIDVIIEVLDARIPFSSENPLISKIRGEKPVVKVLNKRDLADPELTELWIEHLEKEQNVKAMAITTSQTQEVHKILELCRKLAPHREEVGKNIRTMIMGIPNVGKSTIINTLAGRAIAQTGNQPAVTRRQQRINLQNGIVLSDTPGILWPKVENPHSGFRLAATGAVKDTAMEYDEVAFYTVEYLAKHYPEKLKERYQIEELPETDVELMEEIGQRRGALRSGGRVDLHKASEILLHELRSGTLGQITLERPEMITEELVEVELEAARRAEEKAKNKEERRKRYLRNKR

SEQ ID NO: 9790 - protein, 141 aa, Brassica napus
PRVRIKEGPDTIGAFIAEPVMGAGGVIPPPATYFEKIQAVVKKYDILFIADEVICAFGRLGTMFGCDKYNIKPDLVSLAKALSSAYMPIGAILMSQEVADVIYSQSNKLGAFSHGFTYSGHPISCAVAIEALKIYKERNIP

SEQ ID NO: 9791 - protein, 461 aa, ASPERGILLUS NIDULANS FGSC A4
MQIVWRGSADPAVYEEARVGRVFNNRRPDRYPIAVVKASCTADIVAAVKLAKERNCRVAVRSGGHSWAGWSVRDESILVDLGNYKYLGVDAERCIASASPSMTGKEINGRLIHEYGLMFPGGHCPDVGLGGFLLQGGMGWNCRGWGWACERVKAIDVVTAEGELLHCDESQNEELYWAARGSGPGFPGIVTRFHFEILPYPKHGFRSSGYVYPISKYHEAFSWVLAITPDFDRDTEITVVSMYPEGSEQICLFILLVTLKHTPSEAEAALAPAQQSRPPGAIEEWFCREDSLENQYTNQAKANPKGHRYCAENAYLQNEADVPSVLEEAFTTLPHRKAFALWYAMNPCSRRQLPDMALSMQSDHYFALYTVWEEEEDDARCMAWVKNVMKRVQRHSVGAYLGDSDFQERQTRYWAESNGRRLMDIRRRWDPTGRICGYLDHGDASGPRGPSLDISDRASMN

SEQ ID NO: 9792 - protein, 506 aa, Triticum aestivum
MAAPPAIPRRGLFIGGGWREPTLGRRIPVINPATEDTIGDIPAATAEDVELAVAAARSAFLLDGGSRWARASGATRAKYLNAIATKIKEKISYLALLETVDSGKPKDEAVADMDDVAACFEFYAGLAEALDGKQHAPISLPMEEFKTYVLKEPIGVVGLITPWNYPLLMATWKVAPALAAGCTAVLKPSELASLTCLELGAICEEVGLPSGVLNIITGLGPDAGAPIASHPHVDKIAFTGSTATGKTIMTAAAQMVKPVSLELGGKSPLVIFDDVADIDKAVEWAMFGCFFNSGQVCSATSRLLLHEKIAERFLDRLVEWAKNIKISDPLEEGCRLGSVISKGQYEKIKKFISTARSEGATILHGGDRPKHLGKGFFIEPTIITDVSTSMQIWREEVFGPVICVKVFKTESEAVELANDTHYGLAGGVISDDLERCERIAKVIHSGIVWINCSQPTLVQAPWGGNKRSGFGRELGEWGLENYLSVKQVTRYCKDELYGWYQRPSKL

SEQ ID NO: 9793 - protein, 276 aa, Bacillus halodurans C-125
MANNLQATTTLHNGVKMPWFGLGVFKVSEGDEVIQSVKDAIRAGYKSIDTAAVYGNEEGVGKAIAESGVPREELFITSKVWNADQGFDSTISAFNTSLKKLGLDYLDLYLVHWPVKGKYVETWKALEKLYQDGLVRAIGVSNFQVHHLKDVLEAGSIVPMVNQVEYHPHLTQTELHDFCKQNKIQLEAWSPLKQGQLLNDPTIVAIAEAHQKTPAQIILRWDLQNEVVTIPKSVKKDRIISNADIFDFQLTEEDMQKINELNKNERVGPDPDNFDF

SEQ ID NO: 9794 - protein, 108 aa, Hordeum vulgare subsp. vulgare
QEQARKNRRFMVYVHSKGMIVDDEYVIIGSANINQRSMEGTRDTEIAMGAYQRQYTWANKISAPRGQVYGYRMSLWAEHIGAIEEDFNHPESIECMRRVRHLGEHNWD

SEQ ID NO: 9795 - protein, 309 aa, Pseudomonas aeruginosa PAO1
MSPPQRLRAGLLRGCLRLLFRGLVRPPMPVALQRGVLRGLSLATLGAGGVVRERRSLAGVPCEWLRPRGVEARRRVLYLHGGAYLIGSPATHRAITTHLARRCAAEVCAVDYRRAPEHPFPAARDDALAVYLALLEAGHSPRRLLLAGDSAGGHLALSLALELKARGLPLPAGLLLFSPWTDLGCQRLHTPAAGDPLLSRAWLESAVRLLLPADAEPGSAALSPLHADLAGLPPLLVQVGEDELLRDDSLRLAQRAGEQGVAVRLQRYAGCWHVFQAHAGVLASADRALDEAAAFVVECSAEGDRCRTS

SEQ ID NO: 9796 - protein, 441 aa, Ralstonia eutropha JMP134
MTHVFHRNPRQTLPVAVAGSGVELVDSEGRRYLDASGGAAVSSLGHGHPRVIAAIKAQLDTIAYAHTSFFTTEVSETLAQTLAQAAPGDLEHVYFVSGGSEAVEAALKLARQYFVELGQGSRRHFIARRQSYHGNTLGALAIGGNAWRREPFLPLLVPAHHVSPCYAYRDQVAGETDAQYAQRLADELEAKIQELGAENVAAFVAETVVGATAGAVPPVGDYLKRIRAVCDKYGVLLILDEVMSGMGRTGYLFACEEDGVVPDIVTIAKGLGGGYQPIGAMISTRRIYDTIVAGSGFFQHGHTYIGHATACAAALAVQRTIAEDNLLANVRQRGEQLRARLRESLGNHPNLGDIRGRGLFVGVEFVADRDSKATLDPKLKTHARLKSTAMQHGLLVYPMGGTVDGVHGDHVLFAPPFICTAQDIDKIVERFTAAVAAVLPA

SEQ ID NO: 9797 - protein, 226 aa, Zea mays
MTTGEGAEAAAVPRVVSILSALLQRVAERNDAAAAAPPPAAAAGPPVLSAFQGLTKPAISIGGYLERIFRFAGCSPSCYVVAYIYLDRFLRRRPALAVDSFNVHRLLITSVLTAVKFVDDICYNNAYFARVGGISLVEMNYLEVDFLFGIAWDLNVTPAAFASYCAVLQSEMAYLDVAPAPVVEAPPRLHYCYGAAGTSDRPDDPAAVAAAAPACPRPSSQPQLTV

SEQ ID NO: 9798 - protein, 457 aa, Staphylococcus aureus subsp. aureus COL
MAIAVLLNRMFRMEHNPLFEYIYQQKEDIDACYFIIPEEDMSSASDLKAQFYRGTLQRFYQSLHAEKLTPYVMSYDDIISFCKENNISEVVTAGDIMSYHLEEYDILHQRSLFNEARIAVTLIRGNHYFKASKTMNQQGEPYNVFTSFYKKWRPYLRHRDVYHYDLKSFEDFVIASPDDLVFDDIAFGSSQIIEQNKWQHFLDQDIQNYESGRDYLPEVLTSQLSVALAYGLLDIIEIFNDLLARYDEDEANYEAFIRELIFREFYYVLMTQYPETSYQAFKPKYRQIKWSQNEADFNAWCEGQTGFPIIDAAIMELTQTGFMHNRMRMVVSQFLTKDLFIDWTWGEKFFRKHLIDYDAASNIHGWQWSASTGTDAVPYFRMFNPIRQSERFDAKALYIKTYLPIFNQIDAKYLHDTQRNESNLFEQGIELGSHYPRQMVDHQEKRTQVLATFKALD

SEQ ID NO: 9799 - protein, 441 aa, Lactococcus lactis subsp. lactis
MNLMNKEEKMIKNSQIPSEFYKKYNVKKGLRDINGKGVLAGLTNISAIHSFDKEGNQIPGVLEYRAYNIKDIVSDLRSKNRFGFEEMTYLLLFGELPSAKELQEFQILLASKRTLPEFFVRETILTNPSSDVMNSMSRCLLALASYDKKASDISIENVLEQSLALIADFPLLAIYSYQAYIHYFKKESLYIHFPDPELTTAENILRMLRPDCHYSDMEAKVLDIALILHMEHGGGNNSTFTTHVVTSSGTDTYATIAAALSSLKGPKHGGANIKAAKMLENIKENISDYNNDEEIKKYLHQILNKEVFDKQGLIYGIGHAIYSVSDPRFEVFKSYVESLAKEKGLEEEFKLYEKVAFLAPKVISENRKIYKTICPNVDFYSGFVYKILEIPQELFTPLFAIARIVGWLAHRMEELINMNKIIRPAYESILESKAYTRLEER

SEQ ID NO: 9800 - protein, 414 aa, Arabidopsis thaliana
MDRIIGLPDEVLVKILSFVPTKVAVSTSILSKRWEFLWMWLTKLKFGSKRYSESEFKRLQCFLDRNLPLHRAPVIESFRLVLSDSHFKPEDIRMWVVVAVSRYIRELKIYSSHYGEKQNILPSSLYTCKSLVILKLDGGVLLDVPRMVCLPSLKTLELKGVRYFKQGSLQRLLCNCPVLEDLFVLLLRCDDIGMFIVIVPSLQRLSLYLSPRCNLEGFVIVLDTPLEYFKLVDRNYDRHPYMIENMPKLTSAYVEVISADLKSLVESITSVKYLTIFSEVILLSLFVCMLCLVTLHVWDDNLLARLLKDSPKLQELVYVSDKDVSSFDKLLYLIYCTLFFIIQSDFLLDLRIMTILCFPGINLVLFLNAFVQSTKVHQSTKVHLDKILRKTTRQRYCGLHLEKRLSLKDCNNHM

SEQ ID NO: 9801 - protein, 588 aa, Zea mays
  unsure (1)..(588): unsure at all Xaa locations
MASHIILPPDDADENHNHQTAAAAAAEEEEEERDELGRDDDDDEHGVPPALPPKAALPFSATCVRISRDSYPNLRALRNASSVSLADAAYVKISEGDFGYVLDDVPHFTDYLPDIPTYPNPLQDHPAYSTVKQYFVNEDDTVPQKVVVQKNSRRGVHFRRAGPRQRVYFGTDEVKACIVTCGGLCPGLNTVIRELXVCGLSHMYNVSSIFGIQNGYKGFYSSNYLPLTPKSVNDIHKRGGTVLGTSRGGHDTKKIVDNIQDRGINQVYIIGGDGTQKGAYEIFKEIRKRGLKVSVAGVPKTIDNDIAIIDKSFGFDTAVEEAQRAIDSAHVEACSAENGIGLVKLMGRYSGFIAMYATLASRDVDCCLIPESPFYLDGEGGLLQYVEKRLKENKHMVIVVAEGAGQDLIAKSLATSDQQDASGNKLLLDIGLWLTHKIKDYFKSKKMEMTIKYIDPTYMXRAIPSNASDNVYCTLLAHSAIHGAMAXGYSFTVGMVNGRHTYIPFYRVTSTXRNKVKVTDRMWARLLSSTNQPSFLSQKDIDEASEADRLANRPPLPTGASSRVVRSFDQSSSCSSNGRDLSALLVHR

SEQ ID NO: 9802 - protein, 155 aa, Nicotiana tabacum
MSSSKMIVLKSSDGETFEVEEAVALESQTIKHMIEDDCADTSIPLPNVTSKILAKVIEYCKRHVDATKTEDKASEDELKGFDSDFVKVDQATLFDLILAANYLNIKSLLDLTCQTVADMIKGKTPEEIRKTFNIKNDFTPEEEEEVRRENAWAFE

SEQ ID NO: 9803 - protein, 392 aa, Brassica napus
RPTRPVRGGELFNKVAKGRLKEDVARKYFQQLISAVTFCHARGVYHRDIKPENLLLDENGNLKVSDFGLSAVSDQIRQDGLFHTFCGTPAYVAPEVLARKGYDAGKVDIWSCGVVLFVLMAGYLPFHDRNVMAMYKKIYKGEFRCPSWFSPELTRLCSRLLETNPEKRFTFPQIMENSWFKKGFKHVKFYVEDDKLCNVVDDDDELETGSVESDRSSTVSESDVEFFKPARRVGGLPRPASLNAFDIYRFSQGFDLSGLFDDDGEGSRFVSGAPVSKIISKLEEIAKVVSFTVRKKDCRVSLEGSRQGVKGPLTIAAEIFELTPSLVVVEVKKKGGDRTEYEEFCNKELKPKLQTLTADEVDDPVAVSAVVDETASGVANSPPVCFLPSDTE

SEQ ID NO: 9804 - protein, 444 aa, Arabidopsis thaliana
MVRRQEEEKKAEKGMRLGKYELGRTLGEGNFGKVKFAKDTVSGHSFAVKIIDKSRIADLNFSLQIKREIRTLKMLKHPHIVRLHEVLASKTKINMVMELVTGGELFDRIVSNGKLTETDGRKMFQQLIDGISYCHSKGVFHRDLKLENVLLDAKGHIKITDFGLSALPQHFRDDGLLHTTCGSPNYVAPEVLANRGYDGAASDIWSCGVILYVILTGCLPFDDRNLAVLYQKICKGNPPIPRWLSPGARTMIKRMLDPNPVTRITVVGIKASEWFKLEYIPSIPDDDDEEEVDTDDDAFSIQELGSEEGKGSDSPTIINAFQLIGMSSFLDLSGFFEQENVSERRIRFTSNSSAKDLLEKIETAVTEMGFSVQKKHAKLRVKQEERNQKGQVGLSVTAEVFEIKPSLNVVELRKSYGDSCLYRQLYERLLKDVGTSSPEQEIVT

SEQ ID NO: 9805 - protein, 360 aa, Schedonorus arundinaceus
MGSTAADMAASADEDACMFALQLASSSVLPMTLKNAIELGLLEILVAAGGKSLTPTEVAAKLPSAANPEAPDMVDRILRLLASYNVVTCLVEEGKDGRLSRSYGAAPVCKFLTPNEDGVSMAALALMNQDKVLMESWYYLKDAVLDGGIPFNKAYGMSAFEYHGTDPRFNRVFNEGMKNHSIIITKKLLELYHGFEGLGSLVDVGGGVGATVAAIAAHYPTIKGVNFDLPHVISEAPQFPGVTHVGGDMFKEVPSGDAILMKWILHDWSDQHCATLLKNCYDALPAHGKVVLVECILPVNPEANPSSQGVFHVDMIMLAHNPGGRERYEREFQALARGAGFTGVKSTYIYANAWAIEFTK

SEQ ID NO: 9806 - protein, 360 aa, Schedonorus arundinaceus
MGSTAADMAASADEEACMFALQLASSSILPMTLKNAIELGLLEILVAAGGKSLTPTEVAAKLPSAANPEAPDMVDRMLRLLASYNVVTCLVEEGKDGRLSRSYGAAPVCKFLTPNEDGVSMAALALMNQDKVLMESWYYLKDAVLDGGIPFNKAYGMSAFEYHGTDPRFNRVFNEGMKNHSIIITKKLLELYHGFQGLGTLVDVGGGVGATVAAIAAHYPAIKGVNFDLPHVISEAPQFPGVTHVGGDMFKEVPSGDAILMKWILHDWSDQHCATLLKNCYDALPAHGKVVLVECILPVNPEAKPSSQGVFHVDMIMLAHNPGGRERYEREFEALARGAGFTGVKSTYIYANAWAIEFTK

SEQ ID NO: 9807 - protein, 506 aa, Burkholderia fungorum LB400
MNHAEMQFLTTEFPYKKQYANFIGGEWVKPVGGEYFDNVSPITGEAFTSIPRSREADVELALDAAHRAKTAWGKTSAADRANILNRIADRMEANLQRLAVAETIDNGKPLRETTAADIPLAIDHFRYFAGAVRAQEGSLSEIDHDTVAYHFHEPLGVVGQIIPWNFPILMAVWKLAPALAAGNCVVLKPAEQTPASILVLVELIQDLLPPGVLNVVNGFGLEAGKPLASSKRIAKIAFTGETTTGRLIMQYASQNIIPVTLELGGKSPNIFFADVMNEDDSFFDKALEGFAMFALNQGEVCTCPSRVLIDEKIYDRFMERALKRVAAITQGHPLDTKTMIGAQASQEQLEKILSYVDLGKQEGAECLIGGERNALGGELSKGYYVKPTVFRGNNKMRIFQEEIFGPVVSVTTFRNEEEALEIANDTLYGLGAGVWTRDGTRAYRFGRQIQAGRVWTNCYHAYPAHAAFGGYKQSGIGRENHKMMLDHYQQTKNLLVSYSDKPLGFF

SEQ ID NO: 9808 - protein, 419 aa, Pirellula sp. 1
MLSLPLMIAASASTVVILGVVMFTVVVIALVLLILAAKSQLVASGPVKIMINGQKEISVPAGGKLLGALADAGIFVSSACGGGGTCAQCKVKVSEGGGDLLATEAGHINKKEAAEGERLSCQVAVKTDMVVEVPPEAFDTQKWECTVKSNDNVATFIKEFVLQLPEGAEVDFRAGGYIQIECPPHEIHYKDFDIAEEYHPDWDQYNIWRYVSKVEEPVVRAYSMANYPGEKGIIMLNIRVASPPPRAPEGTPPGKMSSYIFSLKPGDKATISGPYGEFFIKDSDAEMVYIGGGAGMAPLRSHIFELFKRQKTDRKVSYWYGGRSLRELFYIEHFREIEKDFPNFKFNIALSEPQPEDNWDGYVGFIHQVLLDNYLSKHPAPEDIEYYICGPPMMNAAVFRMLDDLGVEPENIAYDDFGG

SEQ ID NO: 9809 - protein, 360 aa, Schedonorus arundinaceus
MGSTAADMAASADEEACMFALQLASSSILPMTLKNAIELGLLEILVAAGGKSLTPTEVAAKLPSAANPEAPDMVDRMLRLLASYNVVSCLVEEGKDGRLSRSYGAAPVCKFLTPNEDGVSMAALALMNQDKVLMESWYYLKDAVLDGGIPFNKAYGMSAFEYHGTDPRFNRVFNEGMKNHSIIITKKLLELYHGFQGLGTLVDVGGGVGATVAAITAHYPAIKGVNFDLPHVISEAPPFPGVTHVGGDMFKEVPSGDAILMKWILHDWSDQHCATLLKNCYDALPAHGKVVLVECILPVNPEAKPSSQGVFHVDMIMLAHNPGGRERYEREFEALARGAGFTGVKSTYIYANAWAIEFTK

SEQ ID NO: 9810 - protein, 142 aa, Zea mays
MALRKAFDKPVSLVTAVAVRHLAGTEAARRLGTKLHSFYVGLKGSPDLKAAREVAEYLGTLHHEFHFTDDIDAIEDVIYHTEAYDVTTIRASTPMFLMSHKIKSLGVKMVISGEGSDELFGGYLYFHKAPNKEELHRETCRK

SEQ ID NO: 9811 - protein, 485 aa, Pseudomonas fluorescens PfO-1
MAGAQTHMHTALLIDGELVAGQGFVEPILNPATGEVLTQIAEASTEQVEAAILAAHRAFAEWSRTTPQQRSNLLLEIANAVEKHADHLARLEALNCGKPLHLARQDDLTATIDVFRFFAGAVRCQTGQLSGEYVPGYTSMVRRDPIGVVASIAPWNYPIMMAAWKIAPALAAGNTLVFKPSEHTPLSILALAPALAEILPRGVINIVCGGGEGVGSHLVGHPKVRMVSLTGDIVTGQKILQAAAKTLKRTHLELGGKAPVIVCNDADLKAVVEGVRTYGYYNAGQDCTAACRIYAQAGIHDKLVAELGAAVSSLRFAGKRDADNEIGPLISTRQRDRVASFVERALGQPHIERVTGAAVHSGAGFFYQPTLLAGCKQSDEIVQREVFGPVVTVTRFDELAQAVDWANDSEYGLASSVWTQNLDKAMQVAARLQYGCTWINSHFMLASEMPHGGLKRSGYGKDLSSDSLQDYSVVRHIMARHGQHL

SEQ ID NO: 9812 - protein, 360 aa, Schedonorus arundinaceus
MGSSAADVAASADEEACMYALQLGSSSILPMTLKNTIELGLLETLMAAGGKSLTPTEVAAKLPCAANPEAPDMVDRMLRLLASYNVVSCLVEEGTDGRLSRRYGAAPVCKFLTPNEDGVSMAALALMNQDKVLMESWYYLKDAVLDGGIPFNKAYGMSAFEYHGTDPRFNRVFNEAMKNNSIIITKKLLELYDGFQGIGTLVDVGGSVGATVAAITAHYPAIEGINFDLPHVISEAPPFPGVTHVGGDMFKKVPSGDAILMKWILHDWSDQHCATLLKNCYDALPAHGKVVLVECILPVHPEAKPSSQGVFHVDMIMLAHNPGGRERYEREFEALAKGAGFAGFKSTYIYANAWAIEFTK

SEQ ID NO: 9813 - protein, 512 aa, Mycobacterium avium subsp. paratuberculosis str. k10
MLSKCSALSAVGAGHDGSPEDSPEERDQMTVQAVLDDIRKRPGTGDVIAVIDPATEEKITEFTDCGAEAVDEAAARAKASFESGVWSQLPGRERAKILWRIGDLIDEHAEEFAQLDSLNTGMPLLQAQLQMSTCSEFFRYYAGWCSKINGTAYDVKTDGIATDTFVNMHAYTLKEPYSVVGLIFPWNGPIFNANAKLAPALAAGCSLLVKPAEETPLSALLLDRLVHEAGVPEGVVNLLTGYGHTAGAAITAHPDVEKVAFTGSTEVGKEIVRASAGNLKKVTLELGGKSPVLIFDDADLDKAILMASLGIFVHSGQGCVCGSRIFVQRGVYDRVVEGIAMMANTFKLGAPSEEGCVSGPLISQKQLNRVMGFIDEGKNDGVEVVTGGYRLDRKGYFVHPTVLTNVDPGMRLYQQEIFGPVVAILPFDDEDEAVAMANDTTYGLAATAWTENLGRAHRIVKRLQAGSVQVNCQLVFDHDVPFGGYKQSGWGHEFGKEGLEIYLKTKSVWAQL

SEQ ID NO: 9814 - protein, 407 aa, Vibrio vulnificus CMCP6
MDIILGVVMFTLIVLALVLVILFAKSKLVPTGDITISINGDADKSIVTSPGGKLLSALAGAGVFVSSACGGGGSCGQCRVKVKSGGGDILPTELDHITKGEAREGERLACQVAVKTDMDIELPEEIFGVKKWECTVISNDNKATFIKELKLQIPDGESVPFRAGGYIQIEAPAHHVKYADFDVPEEYRGDWDKFNLFRYESIVKEDIIRAYSMANYPEEFGIIMLNVRIATPPPNNPDVAPGQMSSYIWSLKEGDKCTISGPFGEFFAKDTDAEMVFIGGGAGMAPMRSHIFDQLKRLKSKRKMSYWYGARSKREMFYVEDFDGLAAENDNFVWHCALSDPLPEDNWDGYTGFIHNVLYENYLRDHDAPEDCEYYMCGPPMMNAAVIGMLKNLGVEDENILLDDFGG

SEQ ID NO: 9815 - protein, 300 aa, Saccharomyces cerevisiae
MVNNSQHPYIKDGWFREINDKSFPGQAFTMTVDSILYEARSEFQDILIFRNKVYGTVLVLDGIVQCTEFDEFAYQEMITHIAMFAHSNPKRVLIIGGGDGGVLREVAKHSCVEDITMVEIDSSVIELSRKFLPTLSNGAFDDERLDLKLCDGFKFLQDIGASDVHKKFDVIITDSSDPEGPAEAFFQERYFELLKDALNPNGVVIMQSSENFWLNLKYLHDLKNTAKKVFPNTEYCYTMVPTYTSGQLGLIVCSNNANIPLNIPQRKISEQEQGKLKYYNPQIHSSAFVLPTWADKVINE

SEQ ID NO: 9816 - protein, 481 aa, Candida albicans SC5314
MLLHHTLGNGDFTVFHRMSTNICETTAFLDDLATACNEIDRCLRTAYTMQRPVYIALPSNMVDMKVPQAMLEKSIDLSLEPNNIQSQNEVIDRILGMVSKASNPIVLVDACASRHDCKKEVKQLVETTQFPVYVTPMGKGMIDEGGIGGEDLADASAFKNLASNLSSGTSVASRYGGVYIGSLSKPEVKEGIENSDLIFSCGALLSDFNTGSFSYSIGTKNVIEFHSDHAKIKSAIYSGIKMKELMQALNKKISSVLTNYVPKSVPKVKLVNAPTELSAPLTQAWFWTRVSSWFKEEDIIITESGTAAHGILEARFPNNVVGISQILWGSIGYSVGATLGASVAAKEVDPKKRVILFVGDGSLQLTMQEVSTMIKNGVHPYIFVVNNAGYTIEKLIHGLNAKYNNIQPWNHSQILSLFNAKDSQSAKISTVGEADDLFRNKYFGVNSKIRLIELMFSSLDAPKALVQQAKAAADVNRGTTD

SEQ ID NO: 9817 - protein, 498 aa, Bifidobacterium longum DJO10A
MSITLRNIKVWNTGEVIDLVVPGTAAAYFADTSAVADGADIDATGLTVAPGFEDPHVHFRDPGQTYKESMVSGCRASASGGYTNVLIMPNTLPALDGQTVSGPEATGAKEVLDAGFDNVIDFLQQYDTAHDVQLPVRYDLCVCASKDRAGHEASDVADWLKYVPGFEDDAKTPAMLTHPITAISDDGSAVTPEILDQVLENVKASDLYLIEHCEHHDTGAVNEGPVSRELGVPGIPEDTELKIVARDIEAARRTGVHVHFQHVSTAISFEAIRRAKAEGLPITCETAPHYLALSDEALLKYGTLAKMNPPLRSEADRKATIAAIADGTVDLLATDHAPHTLAEKELGFLEAPNGIIGLECAYGVCHKVLVDGGFISDERLIELMSVGPAELMGHVPTDVAALVEDYAEPAPTGDDPDGVIAGESDAQPQREGVNRLLDLSRVDDADNVDLVVLNTAEEWTVDPEQFHSKARNTPFGGWQVTGRPLATIIGSQLMFSRL

SEQ ID NO: 9818 - protein, 250 aa, Zantedeschia aethiopica
MGKSYPAVSEEYQKAVDKAKKKLRGLIAEKNCAPLMLRLAWHSAGTFDVCTKSGGPFGTMRLAEELGHGANNGLDIAIRLLEPIKEQFPILSYADFYQLAGVVAVEITGGPEIPLNPGREDKPVPPPEGRLPDATKGSDHLRQVFGQQMGLCDQDIVALSGGHTLGRAHRERSGFEGAWTSNPLIFDNSYFTELLTGEKEGLLQLPSDKALLSDPVFRPLVEKYAADEDAFFADYSEAHLKLSELGFPEC

SEQ ID NO: 9819 - protein, 117 aa, Nicotiana glauca
MAKVALLVVVCMAAVAVMLTPQADAAISCGQVVSSLTPCISYVTKGGAIPAPCCSGIKSLNNQATSTPDRQTACNCIKSAVGSISGINFGLASSLPGKCGVNLPYKISPSIDCSTVQ

SEQ ID NO: 9820 - protein, 116 aa, Zea mays
TCRLLIVVYGILWGFSAPGPGADPKVDYACTPEEVQQHFQACGTVNREGVQEALNLNESELHGRQIKVAPKRTNVPGMKQRPPRGLLDSAALCATDLTSEVRGRVMKFNAKPAHGH

SEQ ID NO: 9821 - protein, 465 aa, Chlamydomonas reinhardtii
MGSCLAKPAESAEQKKASSVPSPPPAPAPQPVQQAAAPAPKDSGDVKPGQQATPVPPPSPPPQPKPAPPAQPAPAPAAKVVEAIPAVADEKSPQGKQPRRSQEHDNGVKAEEIELVKQKSTEPQPSASATAAVATPKAIEPAMEPKVAAPSAPAAAPAPAQAPAAAPTPARPGSKLRTDVKLRDLYKLGKTLGTGGFSVVKLATDRGTGVEYACKIMALPPVGQEVGENENTREDIFKEIDLLCGMNHENVIFLKEYFEEGNKVYLITELLTGGELLEAVLKRGSYTEAEARLCFVQVLRGIEYLHSKNVVHRDLKLENLLLAKQDDISLVKIADFGLAKHAVNGMQTICGTPQYVAPEVIVGAKGHVYGPGVDMWSAGVVLYILLGGYPPFWSDSEPQLFDMIRKGKYSFGDPVWNKVSEGAKDLIRKLLVVDPTKRLSATEALQHQFILEGNFNPPSTPKGPR

SEQ ID NO: 9822 - protein, 1870 aa, GIBBERELLA ZEAE PH-1
MKGSDSLRRANRPAANFDLPPVALAQAQQQTQVQAQAQAQSFQSQSQPQESITNTVTSTSPEITNASLHGQAQAKAQALTTARFRSSSRPSLQDLALVDGTSTSNNHDLPPAYALSSSSSSTGPSSFSYPPAHVHPRPSTANAAATTHTHTRPRPLGPSSSDIATAEQAQFLRIHPVSSTSSLRPRSSTTSASAVASASASTSPSHTPNSLLRQHTSPPSAVDNNSAHFVPRGGLPPAPSIMYQANQRHVSGTDPSRPYQVPPPPPPPMGGPNNGHMPNMMNLPPPPPLPRYNTAPGSNGLSLPPPPGPPPASALGQQPPWHGAFGRMYDSRSGFNIPPPPPSSQHQPYNPKLHAQIAAGQTVSIPPPPPPNEAMSATYIPQGDTYGEGVGIPAFGLEDPTLTVNSQTLRPVTTPQSGTDTNATTPMDEATRERLYAANNAQPRGTSNSSNPTPPGSIPPEIAAQWPLDTVLLWLAQNQFSKDWQETFRALNLHGAQFLELGSGHGGRGNFGMMHQQVYPRLAQECTNSRTGWDQPREREEGKRMRRLIRSIVTGRPADVSKVSTSHGRKESLNGGHGNNLPSAGTDPMDSPNTPLTAPGPGFSSRRFSQTRSTTLPNSISASNINSESNHRNILKHVDTDGARRHSPNVSESSEATFRAPAVHSASPTGSPGIPPALYTSTTTPTIAQSPSAIKAGHRSRSSMDSVASVAAIYGSGVPSDAASLLNRNMNLGDIVHGRSHDARSRHSPSDGGDRSAGGETPSSAKDSNRLLSFLSRKKKQTKDDGAYPSPEDMNGSPTSPHGSFRPVGLGVRGSNGSDTNIDLSGSTLGDDRNGSTLNMRWNKISPVRTYVLATMDYWNYRMCDITEAETATEIRQVICMHLGLGDYENSHIYLTEAGKFEHVDPLDDPSLITVRRAKGDPLGTLKFFVTPPGVAPISSLSVKAEVPIILSPSYLSPGTPVEDAQQMSRQRSSSSPPTSRSNTLTNEKNEDKIAREAKQYRAEIERKQQEYLAKRKQAAMKGSPSETLGPGIVGRNVDFDQPRESPYEDKRPEPLFPQRRPPAPPSDPSATLIKANSLSRKTGASMRASSSSLEGYPSKRYPENEMAEKTKKANKQAPPAPGIGAALAGMGRNLSAIGQSAKNGRASSPSRSSTHSIPGGKDTFSTVEPSQGRGSPSTTSSSKLTTGNVTWNKKNLGFIVPDYSPSDSSFLLSPSPTVDAKFNATVPRAMSPAEMSPNSSRSRTSFPPNQQSPTHRRASHGPEPEFEDTDVHFSKPAPAPPADDDSDDSDDGLFAIPIANQNKGKAAAANADANGHSKRPSLHVNTERSRKGLSVAFKSPKSFGSGMDSNEDSGRQNPTTPHSETWEPEEKDKESKLGRRKSFIEKDVWANRPPTDALINNLDDFFPNLDLDQPVLDEPGESGMPPSPIAESSETNIDQQAQNVAPPQPSYPQHVPPAIPPTRQPSLYNENDTLGSDESTLKALDQHRPTSVAQRSIRRSGGLGRMKSIREVARGAHEANKRTTSTNQGQAATTNIMRRKSTKMFNANIVQIRPDRRGSVVMPQIPQDTVPKRQTTFRWFKGQLIGKGTYGRVYLGMNATTGEFLAVKEVEVNPKAAGGDKNKMKELVAALDQEIDTMQHLDHINIVQYLGCERKETSISIFLEYISGGSIGSCLRKHGKFEESVVSSLTRQTLSGLAYLHREGILHRDLKADNILLDLDGTCKISDFGISKKTDNIYGNDKTNSMQGSVFWMAPEVIRSQGEGYSAKVDIWSLGCVVLEMFAGKRPWAKEEAVGAIYKIANGERPPIPEDIQDTLGPLAVAFMMDCFQVNPFDRPTADVLLSQHPFCEVDPHYQFYDTALYHRIKSFK

SEQ ID NO: 9823 - protein, 342 aa, Lycopersicon esculentum
MADECAAFMKGTELPVKRPREEEAETEMEAANNSNNGCEKEESSPYISSVLPGWFSEISPLWPGEAHSLKVEKILFQGKSDYQNVLVFQSSTYGKVLVLDGVIQLTERDECAYQEMITHLPLCSIPNPKKVLVIGGGDGGVLREVSRHSSVEQIDICEIDKMVVEVAKQFFPDVAVGYEDPRVNLHIGDGVAFLKNVPAGTYDAVIVDSSDPIGPAQELFEKPFFESIAKALRPGGVVSTQAESIWLHMHIIEEIVANCRQIFKGSVNYAWTTVPTYPSGMIGFMLCSTEGPAVDFKNPINPIDDESPAKSIEPLKFYNSEIHQASFCLPSFAKRVIETKGK

SEQ ID NO: 9824 - protein, 240 aa, Atriplex hortensis
MSYSYPPPLPSNTLNNFLSPKPVTMKTTGGPPKPTKLYRGVRQRHWGKWVAEIRLPKNRTRLWLGTFDTAEEAALAYDKAAYKLRGDFARLNFPNLRHEGSHIGGEFGEYKPLHSSVNAKLEAICESLAKQGNEKQGKSGKSKKKDVANNNNNTSSSSSSSCCTTATAAADAPQQQQRMPENGGDVKTESTSDSEVGSGGSSPLSDLTFGDNEEMGSENFLLESCPSHEIDWDAILSSES

SEQ ID NO: 9825 - protein, 331 aa, Brassica napus
MSNVTADPTADGPSTAVAVSNSTAIQTSPPTDRPVRVYADGIYDLFHFGHARSLEQAKKSFPNTYLLVGCCNDETTHKYKGRTVMTAEERYESLRHCKWVDEVIPDAPWVINQEFLDNHRIDYVAHDSLPYADTSGAGKDVYEFVKKVGRFKETMRTEGISTSDIIMRIVKDYNQYVMRNLDRGYSREDLGVSFVKEKRLRVNMRLKKLQERVKEQQEKVGEKIQTVKMLRNEWVENADRWVAGFLEIFEEGCHKMGTAIRDRIQERLIRQIPRNRLENGQDDDTDDQFYEEYFDHDMGSDEDEEERYYDEEEDVEEEKYKTVKPDAKDDK

SEQ ID NO: 9826 - protein, 110 aa, Glycine max
IQALEFKPIFLHLRKVRRMAGIRDAKSILVKLEWFLNWVTFFVARSVPHVLITAKLIKDAYKFEKGMELPLALLGMAGMNLLNIGLGIDLLKAFKRERKSQQGNLHHHRE

SEQ ID NO: 9827 - protein, 170 aa, Zea mays
  unsure (1)..(170): unsure at all Xaa locations
MHRHVTSGRASGTDGSPFSYQMVVKSRHQRVAEGRSRLARLILGQALHLVAGGLLLWLSLSKGAAVNKFAVLSMAAAFLAIGVGELGRMRTMXLLLRLYSSSPSIAVAFSVTCIFRSXLFLKVMKQNTEAISSYEMLDAVRVALGIPLQMVVIATTTRLLQNMSPPKRAS

SEQ ID NO: 9828 - protein, 175 aa, Crocus sativus
MGKSSPTVSAEYLKAVEKCKRKLRGFIAEKNCAPLMLRIAWHSAGTFDCKSKTGGPFGTMRHKAELAHGANNGLDIAVRLLEPIKEQFPIISYADFYQLAGVVAVEITGGPDVPFHPGREDKPEPPVEGRLPDATKGCDHLRTVFGEQMGLSDKDIVALSGGHTLGRCHKDRSGF

SEQ ID NO: 9829 - protein, 344 aa, Arabidopsis thaliana
MLTCIACTKQLNTNNGGSTREEDEEHGVIGTPRTKQAIKSLTSQLKDMAVKASGAYKNCKPCSGTTNRNQNRNYADSDAASDSGRFHYSYQRAGTATSTPKIWGNEMESRLKGISSEEGTPTSMSGRTESIVFMEDDEVKEWVAQVEPGVLITFVSLPQGGNDLKRIRFSREMFNKWQAQKWWVENFEKVMELYNVQFNQQSVPLQTPPVSEDGGSQIQSVKDSPVTPPLERERPHRNIPGSSGFASTPKLSSISGTKTETSSTDGSARSSSVDRSEEVSVSNASDMESEWVEQDEPGIYITIRALPDGNRELRRVRFSRDKFGETHARLWWEQNRARIQQQYL

SEQ ID NO: 9830 - protein, 447 aa, Triticum aestivum
FLRRRDRIAERLFNALLARPSCHGCTASTGSVPPATPAVAEDKGSVRRVPEKESKVDSSSLGAPGGGALGGGISEDEDSDSEDDERLRRAAASNYGHNYDDDNDVEEEQDAAAPAEEDHHAEDDDPEAEELEALTNEIDEESQIVGEVLRIKELLLHKQDHSDATLFDSLRRLQLMQLSVSTLKATEIGRAVNGLRKHSSQQIRHLALALIQDWKILVDEWVSTTVAARAGGPPRHGAPPAPENGQGSPPPPPLHAGAFFAPETAALQPPEFFDEMDEDGNLRHNNDVSPWKQEGKQWQEACKPFNCVKTRTYSTCSLIPGSMRPMKAATQQKPIGEMKYKQTQEHFGVERKPTMGHVDKSRLRAQPSSGVRLESARPKTQDGLESNVRLEAAKRRLQERYQEAENAKKQRTIQVMELGDIPKPKSNTRQPMVKSRNNIRSRVLGRR

SEQ ID NO: 9831 - protein, 90 aa, Zea mays
MRCLILFPSSSSWSLAAGRSGGGLYDEEYVQKRMDRAYEVEELGANLTKKMHPSGRDDISVLAMQRLFNHQPNGPTTPVDMALDYFIYDY

SEQ ID NO: 9832 - protein, 368 aa, Clarkia breweri
MGSTGNAEIQIIPTHSSDEEANLFAMQLASAAVLPMALKAAIELDVLEIMAKSVPPSGYISPAEIAAQLPTTNPEAPVMLDRVLRLLASYSVVTYTLRELPSGKVERLYGLAPVCKFLTKNEDGVSLAPFLLTATDKVLLEPWFYLKDAILEGGIPFNKAYGMNEFDYHGTDHRFNKVFNKGMSSNSTITMKKILEMYNGFEGLTTIVDVGGGTGAVASMIVAKYPSINAINFDLPHVIQDAPAFSGVEHLGGDMFDGVPKGDAIFIKWICHDWSDEHCLKLLKNCYAALPDHGKVIVAEYILPPSPDPSIATKVVIHTDALMLAYNPGGKERTEKEFQALAMASGFRGFKVASCAFNTYVMEFLKTA

SEQ ID NO: 9833 - protein, 122 aa, Sorghum bicolor
TPSAAVVKEELFGPVLYVMKFQSLKEAIEINNSVPQGLSSSIFTKRPEIIFKWLGPHGSDCGIVNVNIPTNGAEIGGAFGGEKATGGGREAGSDSWKQYMRRATCTINYGSELPLAQGINFG

SEQ ID NO: 9834 - protein, 307 aa, Zea mays
MAFLNMEQQTWAFTFGILGNIVSLMVFLSPLPTFYRVYRNKSTEGFQSTPYVVTLFSCMLWILYALLKPGAELLVTINGVGCVVETVYLAMYLVYAPKAARVLAAKMLLGLNVAVFGLVALVTMLLSDAGLRVHVLGWICVSVSLSVFAAPLSIMRQVIRTKSVEFMPISLSFFLVLSAVVWFAYGALKKDVFVAFPNVLGFVFGLAQMALYMAYSRNRKPAAALVILPEQSKEEAAEGKASCGGAEVHPIDIAEVHDLQAVVVDVDVEPVTYAAASGMVDGSVGRPRAPEQLVIKPDMVTVIAAEA

SEQ ID NO: 9835 - protein, 583 aa, Zea mays
SRPAGPGLHADLLYEPWEVLDDDGFPFTMFAPFWNRCLCMPDPAAPLLPPKRINSGEFPGRPTRPGDLSRCPWDELIFEDESERGSNALLARAWSPGWQNADKALTAFLDGPLVDYSANHKKADSASTSLLSPYLHFGELSVRKVFHLVRMKQLMWSNDGDRAGEESCTLFLRAIGLREYSRYLTFNHPCSLEKPLLSHLRFFPWVVDEVHFKVWRQGRTGYPLVDAGMRELWATGWAHDRIRVVVSSFFVKVLQLPWRWGMKYFWDTLLDADLESDALGWQYISGSLPDGRELDRIDNPQFEGYKFDPHGEYVRRWLPELARLPTEWIHHPWDAPESVLQAAGVELGSNYPRPIVELDAANSRLQDALSEMWELEAASRAAMENGMEEGLGDSTDEPPIDFPQELRMEVDRQPAQPAIIHTPVVAGWRREDQRVPSMTSSLIRAETELTADFGNTSEDSRPEVPSNIHLQARPEREETVDGATGNAVRVNGNQQQQNLQNNMHRVLGIAPSISEASSSWTGRDGGVVPVWSPPAASVHSDPYTADEADISSRSYLDRHQQSNTMMNWSQLSQSLTTGWEVDN

SEQ ID NO: 9836 - protein, 264 aa, Solanum tuberosum
MCGGAIISDYEPAGNFYRKLSARDLWAELDPISDYWSSSSSSSTVENPYSAQSPVTHSVDKPKKSDSGKSNQLKKGNKTVKVEKEKSTGPRQRKNKYRGIRQRPWGKWAAEIRDPQKGVRVWLGTFNTAEDAARAYDEAAKRIRGNKAKLNFPAPSPPAKRQCTSTVAADPPPALLLESSNIISYNNSPLMNFGYDVQSQTPYYPMEMPVASDDYELKEQISNLESFLELEPADSSDQFSGIVDPDPLNVFLMEDFASTQHQFY

SEQ ID NO: 9837 - protein, 479 aa, Sinorhizobium meliloti 1021
MNDMCLTNLQSGITMVSAAAIEAFTARLRGRVLVATDAAYDEARTIWNGMIDRRPGLIVQCAGAADVVNAVRFAAENQLLVAVRGGGHNIAGNAVCDGGMVIDLTPMKSVRVDATTKTAWVEPGATLADLDMETQAFRLALPTGINSTTGIAGLTLGGGFGWITRKFGLTIDNLLSADVVTANGELVRASPTEHRDLFWAIRGGGGNFGVVTAFEFRLHELGPEVLSGLVIHPFAEAESVLQQYRQALENAPDELTCWVVMRQAPPLPFLPTEWHGKEVVVLAMCYCGDLEAGEKAMAGLRAIGNPIADVVSPHPFVGWQQAFDPLLAPGARNYWKSHDFMELSDQAIEILTESIRQLPGQECEIFIAHVGGAAGRVAPEETAFPQRNSHFVMNVHGRWRDPAMDQACIDWARHLFEAAKPHAAGTAYVNFMPEDEMDRVEAAYGANYGRLVEIKRHYDPLNLFRMNQNVRPIEERGAA

SEQ ID NO: 9838 - protein, 254 aa, Methanosarcina acetivorans C2A
MTSYKVLVRDVIKKADVLLEVIDARFPDETRNNEVEKEIIRLKKPFIIVINKCDLVSKDKLEKTKARLSRIAPTVFVSGKARFGTTMLRHQILASACIKGQDILVGTLGYPNVGKSSVINGVTGRHRASTSPVSGHTKGVQHVGAGSRIMFVDTPGVIPFDENDDYVQGLLGIKDATHLKDPIGVALKIIEKMLVENKTALEVFYNVTLETQDSYSGLELIGKQCNFLQKKGEVDEMRTAIRIINDWQTGLLLI

SEQ ID NO: 9839 - protein, 133 aa, Brassica napus
MEGDGVKGLACQKTMDGNASNGNGVEKTVPSCCLKAMSCLPEEDAKCHSTVVSGWFSEPPHLRSGKRGKAVYFNNPMWPGEAHSLKVEKVLFKDKSDYQEVLVFESATYGKVLVLDGILQLTEKDEFAYQEMI

SEQ ID NO: 9840 - protein, 175 aa, Azoarcus sp. EbN1
MRARSFRHLLPSAVSALLFTLILAVAAPPAFAADEAAPLVTDPQLEERVMDLSHKLRCLVCQNQSIAESNAPLALDLRNQVREQLAAGKSEEAVVDYLVARYGDFVLYLPPFKGITLLLWLGPALLLVAGAGWLGWRLRRRAEEVRSAPHLTRDERARARALLDGTSPSSEEPRS

SEQ ID NO: 9841 - protein, 508 aa, Glycine max
MDYHTTVLLLITFVSATIILIFIRRLFNQTSESEYAKLPPGPRPFPIIGNILELGTNPHIALTKFSKIYGPLMTFKLGRITTIVISSPQVAKEVLLENGQVLSSRTIPHSVHALDHHIYSTVWLPPSAQWRNLRRVCATKIFSPQLLDSTQILRQQKVKDLLDFVKERCKKGGVVDIGEVVFTTILNSISTTFFSMDLSDSTSEKSHEFMNIIRGIMEEIGRPNVADLFPILRPLDPQRVLARTTNYFKRLLKIIDEIIEERMPSRVSKSDHSKVCKDVLDSLLNDIEETGSLLSRNEMLHLFLDLLVAGVDTTSSTVEWIMAELLRNPDKLVKARKELSKAIGKDVTLEESQILKLPFLQAVVKEALRLHPPGPLLVPHKCDEMVNISGFNVPKNAQILVNVWAMGRDPTIWENPTIFMPERFLKCEIDFKGHDFKLIPFGAGKRICPGLPLAHRTMHLIVASLVHNFEWKLADGLIPEHMNMEEQYAITLKKVQPLRVQATPIKRD

SEQ ID NO: 9842 - protein, 126 aa, Zea mays
DARDIFASDSIELLRRSGIDLRLNAERGVDARRFAELLMSSGVVLNDSVYWVTFHAGYDFGLHGGLNKLAELLDVERVGESHQAGSDSLVTSCAFWKLKDSFFTGSTEKYAGVLYGLNAEIDVSAH

SEQ ID NO: 9843 - protein, 311 aa, Triticum aestivum
  unsure (1)..(311): unsure at all Xaa locations
MKTLLILTILAMATTIATANMQVDPSSRVQWPQEQPPPQSQQPFSQQPQQIFPQPQQTFPHQPQQAFLQPQQTFPRRPQQQFPQPQQPQQPFPQPQQPQLPFPQQPQQPFPQPQQPQQPFPQSQQPQQPFPQPQQQFPQPQQPQQXHSPQQQQWMIQSFLQQQMNPCKNFPLAAMQPXCHWVSSLVSMILPRSDCKVMRQQCCQQLAQIPQQLQCAAIHGIVHSIIMQQEQQQQQQQQQQQQQQQGIQIMRPLFQLVQGQGIIQPQQPAQLEVIRSLVLGTLPTMCNVFVPPECSTTKAPFASIVADIGGQ

SEQ ID NO: 9844 - protein, 186 aa, Brassica napus
  unsure (1)..(186): unsure at all Xaa locations
LDPRVRTGAKLSRSEHSMGASSEPKSIYDFTVKDAKGNDVDXSTYKGKVLLIVNVASQCGLTNSNYTELAQLYQKYKDHGFEILAFPCNQFGNQEPGSNEEIVQFACTRFKAEYPIFDKVDVNGDSAAPIYKFLKSSKGGLFGDGIKWNFAKFLVDKDGNVVDRYAPTTSPLSIEKDLKKLLGVTA

SEQ ID NO: 9845 - protein, 361 aa, Caulobacter crescentus CB15
MSDGLEGVIAAQTVLSDVDGAHGRLVIRGYAVEDLAGRTRFEDAAHLLLDGFFDDAPSDLSSALGEARVGVFAEVAALDEGLARRDPVEALRALLARIPDGDDLKTALRLIAAPAVFTPAVLRVANGDAPIAPDPALSHAADILRMIRGVPATDAEAAALDAYLVTVCDHGLNASTFAARVVASTRAGLTSAVLAGLSALKGPLHGGAPGPVIDMLDAIGTPENARPWLERALARGDRLMGFGHRIYRVRDPRADALKAAVRRLSSASGGLPGRLAFAEAVERAALEILREHKPDRPLDTNVEFYTALLLEALGLPPSSFTCVFAMGRVAGWLAHAREQLAGGRLIRPQSVYVGPEVRVAA

SEQ ID NO: 9846 - protein, 475 aa, Bordetella pertussis Tohama I
MYEQLALYIDGEFLTGDGRRTQDVVNPATLEVLGQLPHASEADLDRALAAAQRAFETWKRTSPMERAAILRKVGQLSRDRAQEIGRNMTLDQGKPLAEAVGEVASCSEHADWHAEECRRIYGRVIPPRNPDVRQFVVREPIGVCAAFTPWNFPYNQAIRKIAAALGAGCTVVLKGPEDSPSAVMAIARMFHEAGLPKGCLNIVWGEPAKISDYLIRSPIVRKVSFTGSVPVGKQLAALAGAHMKRVTMELGGHSPVLVFDDADVDRAAEMLARFKVRNAGQVCVSPTRFYVQNGAYEQFLARFTEVLKNIKVGDGLEKGTDMGPLAHERRVPAMSTFVDDALKHGGKVVLGGDAPDRKGYFFSPTVVTELPDNAMLMTEEPFGPLAPVVRFTDTDEVLRRANSLPFGLSSYVFTNSLKTATKVSNALEAGMVNINHFGSALAETPFGGIKDSGIGSEGGLETFDGYLVTKYITHI

SEQ ID NO: 9847 - protein, 388 aa, Caulobacter crescentus CB15
MDAEQVLERLGIRPQTLYAYVSRGRIEAAAHPSDPRRSLYRASDVTALARKKARGRRVADVAAEAIAWGEPVLPSAITTVSGGKLWYRGEDAAGLADQGLTLENVARLLRGGHGAALKASSRPPPPATDSARSRMFLTLAERAGREPPARGRAPLALAMEAADLLDAIVDAATGQAGDGPAHQRFAHAWNLTADGADLVRRALVLMADHELNASTFAARVAASTGASLSAACLAGLSALSGPLHGGMAARVEALVEEADRRDAARAVSSRLEQGASLPGFDHPLYPGGDPRAAALLARFEPPEPLTALWQATRAATGLAPNIDFALVALARGLALPQDAPFILFATARSAGWTAHAIEQLQTGRLIRPRARYIGTVPSAAGYSPSSSS

SEQ ID NO: 9848 - protein, 398 aa, Pseudomonas putida
SGNRGVVYLGSGKVEVQKIDYPKMQDPRGKKIEHGVILKVVSTNICGSDQHMVRGRTTAQVGLVLGHEITGEVIEKGRDVENLQIGDLVSVPFNVACGRCRSCKEMHTGVCLTVNPARAGGAYGYVDMGDWTGGQAEYVLVPYADFNLLKLPDRDKAMEKIRDLTCLSDILPTGYHGAVTAGVGPGSTVYVAGAGPVGLAAAASARLLGAAVVIVGDLNPARLAHAKAQGFEIADLSLDTPLHEQIAALLGEPEVDCAVDAVGFEARGHGHEGAKHEAPATVLNSLMQVTRVAGKIGIPGLYVTEDPGAVDAAAKIGSLSIRFGLGWAKSHSFHTGQTPVMKYNRALMQAIMWDRINIAEVVGVQVISLDDAPRGYGEFDAGVPKKFVIDPHKTFSAA

SEQ ID NO: 9849 - protein, 159 aa, Triticum aestivum
  unsure (1)..(159): unsure at all Xaa locations
FSWADAWADAWDLWFPAGALVLRFRRRLKTAERVMGTVKRFNVTKGFGFIFVSPEDGSQDLFVHQAAIKADGYRSLNENDALEFEVIXTGDDGRTKASDVTAPGGGALAGGSRPGHRGGDRGGRGGYGGGGYGGGGGGGGCFSCGESGHFSRECPNKAH

SEQ ID NO: 9850 - protein, 389 aa, Euphorbia esula
MEDASATTTAPSDSLNNHQLPPTAGIENIPATLSHGGRFIQYNIFGNIFEVTAKYRPPIMPIGKGAYGIVCSALNSETGEHVAIKKIANAFDNKIDAKRTLREIKLLRHMDHENVVAIRDIMPPPQREVFNDVYIAYELMDTDLHQIIRSNQALSEEHCQYFLYQILRGLKYIHSANVLHRDLKPSNLLLNANCDLKICDFGLARVTSETDFMTEYVVTRWYRAPELLLNSSDYTAAIDVWSVGCIFMELMDRKPLFPGRDHVHQLRLLMELIGTPSEEELGFLNENAKRYIRQMSVFRRQSFTEKFPTVHPAAIDLVEKMLTFDPRQRITVEDALAHPYLTSLHDISDEPVCMTPFSFDFEQHALTEEQMKELIYREALAFNPEYQQQ

SEQ ID NO: 9851 - protein, 319 aa, Glycine max
QYVGPPPFMCPSGINDFPMTTIDHIKAGLPVLAKYKRPIVVHAEVQQDFENHLELNEDNLDPRAYLTYLNARPPSWEEAAIKQLVGVTKDTRKGGPLEGAHVHIVHLSDSSASLDLIKEAKSRGDSISVETCPHYLAFSSEEIPNGDTRFKCSPPIRDAYNREKLWGAVLEGHIDLLSSDHSPTVPELKLMEEGDFLKAWGGISSLQFNLPVTWSYGKKYGLTLEQLSLLWSKKPATLAGLESKGAIAVGNHADIVVWQPELEFDLDDDYPVFIKHSELSAYMGRRLSGKVLETFVRGNLVFKDGKHAPAPCGVQILAK

SEQ ID NO: 9852 - protein, 468 aa, Pseudomonas aeruginosa PAO1
MNARLHATSPLGDADLVRADQAHYMHGYHVFDDHRVNGSLNIAAGDGAYIYDTAGNRYLDAVGGMWCTNIGLGREEMARTVAEQTRLLAYSNPFCDMANPRAIELCRKLAELAPGDLDHVFLTTGGSTAVDTAIRLMHYYQNCRGKRAKKHVITRINAYHGSTFLGMSLGGKSADRPAEFDFLDERIHHLACPYYYRAPEGLGEAEFLDGLVDEFERKILELGADRVGAFISEPVFGSGGVIVPPAGYHRRMWELCQRYDVLYISDEVVTSFGRLGHFFASQAVFGVQPDIILTAKGLTSGYQPLGACIFSRRIWEVIAEPDKGRCFSHGFTYSGHPVACAAALKNIEIIEREGLLAHADEVGRYFEERLQSLRDLPIVGDVRGMRFMACVEFVADKASKALFPESLNIGEWVHLRAQKRGLLVRPIVHLNVMSPPLILTREQVDTVVRVLRESIEETVEDLVRAGHR

SEQ ID NO: 9853 - protein, 505 aa, Citrus x paradisi
MDLLLLEKTLLALFAAVVVAITVSKLRGKRFKLPPGPLPVPVFGNWLQVGDDLNHRNLSDLAKKYGDVLLLRMGQRNLVVVSSPDHAKEVLHTQGVEFGSRTRNVVFDIFTGKGQDMVFTVYGEHWRKMRRIMTVPFFTNKVVQQQRFNWEDEAARVVEDVKKDPEAATNGIVLRRRLQLMMYNNMYRIMFDRRFESQDDPLFNRLKALNGERSRLAQSFEYNYGDFIPILRPFLRGYLKICKEVKERRLQLFKDYFVEERKKLASTKSMSNESLKCAIDHILDAQTKGEINEDNVLYIVENINVAAIETTLWSIEWGIAELVNHPEIQKKLRNELDTVLGPGHQITEPDTHKLPYLQAVIKETLRLRMAIPLLVPHMNLHDAKLGGYDVPAESKILVNAWWLANNPAQWKKPEEFRPERFLEEESKVEANGNDFRYLPFGVGRRSCPGIILALPILGITIGRLVQNFELLPPPGQSKIDTAEKGGQFSLHILKHSTIVAKPRSF

SEQ ID NO: 9854 - protein, 469 aa, Bacillus anthracis str. Ames 0581
MFQKDFRLYDNPALFEAAQSGEVVPVYVHDETFSMGSASKWWLHHAIIDVKKQLEALGSTLIIRKGSTQEEILSLVEQLGITAVYWNICYDPDRLQSNQKMKMMLEHKGMICKEFNSHLLLEPWVIKKKDNTEYKVFTPFYNAFQKQVIHKPISKVQSIKGGNSLPVSLSVSELHLLPTIPWTSHMESIWEPTEEGAYKTWKEFFSSKLASYSEGRDFPNQNAHSMLAPYLSFGQISVKLIYHYLINKSTESQCSLFEKQVNSFIRQLIWREFSYYLLYHYPFTAYKPLNKSFEHFPWNNEEELLRVWQKGDTGYPFIDAGMRELWQTGFMHNRTRMAVASFLVKHLLIPWQEGAKWFMDTLLDADIANNTMGWQWVAGSGADASPYFRIFNPITQGEKFDKNGEYIRKWVPELKDMPNKYIHKPWEAPEHILQKANIQLGHTYPLPVVDHKAARERALCAYKSMKEFV

SEQ ID NO: 9855 - protein, 424 aa, Blastocladiella emersonii
TLIDKLMEKTKKVVGSSDKDAPAPASPSSPSTAAGAGSASSTASSTTTAAASGNLSIPSPLVAGSTTSSSISHAQKMATAAHTNSDYSPSPAATPSAPLDAVAERRRRKTTLADLELRQTLGTGSFGRVHLVRLRSTGKYYAMKVLKKAEVVKHKQVEHTLNEKGILEQIDHPFLVALHSSFQDSANLYMVMEYVTGGELFTYLRRSQRFSNNVAKFYAAEVVLAFEYLHSKDIIYRDLKPENLLLDAQGHVKITDFGFAKHVPDITWTLCGTPDYLAPEIIQSRGYGRAVDWYALGVLIFEMLAGYPPFYDEDHVRMYEKILQGKVKWPSHFDPAAKDLLKRLLTTDLTKRYGNLKGGSKDIKMHKWFAGLDWTKLFNKQIPPPYTPPNRGDGDTSNFDAYPEETEPYGKVQPDPYAQLFKDF

SEQ ID NO: 9856 - protein, 149 aa, Brassica napus
  unsure (1)..(149): unsure at all Xaa locations
MASSMLSSAAXGTSPXQATMVAPFTGLKTSAAFPXTRKANNDITXIXSNGGXVSCMKVWXPXGKXKFETLSYLPDLTEXVELGKEDDYXLXAXRGIPXVEFXLEHGFXVYREHEXXPRNYDGRYWXTMGXLPLVKLTLLGKGPKREKGP

SEQ ID NO: 9857 - protein, 235 aa, Glycine max
MGSTGETQITPTHVSDEEANLFAMQLASASVLPMVLKSALELDLLEIIAKAGPGVHLSPSDIASRLPTHNPDAPVMLDRILRLLACYNILSFSLRTLPHGKVERLYGLAPVAKYLVRNEDGVSIAALNLMNQDKILMESWYYLKDAVLEGGIPFNKAYGMTAFEYHGTDPRFNKVFNKGMADHSTITMKKILETYTGFEGLKSLVDVGGGTGAVVNMIVSKYPTIKGINFDLPHV

SEQ ID NO: 9858 - protein, 124 aa, Paracoccidioides brasiliensis
MTTPSKEKLTHALVLHAPRDLRLESRLTPAPKHGELQIAIRATGLCGSDLHYYNHGRNGDFIVQSPLCLGHESSGIITAIGPDVADTFHIGDRVALEVGLPCHSCPLCLQGRYNICRKLRFRSS

SEQ ID NO: 9859 - protein, 464 aa, Streptomyces maritimus
MQFPQLDPATLAAFSAAFRGELIWPSDADYDEARRIWNGTIDRRPALIARCTSTPDVVAAVSFARKSGLLVAVRGGGHSMAGHSVCDGGIVIDLSLMNSIKVSRRLRRARAQGGCLLGAFDTATQAHMLATPAGVVSHTGLGGLVLGGGFGWLSRKYGLSIDNLTSVEIVTADGGVLTASDTENPDLFWAVRGGGGNFGVVTAFEFDLHRVGPVRFASTYYSLDEGPQVIRAWRDHMATAPDELTWALYLRLAPPLPELPADMHGKPVICAMSCWIGDPHEGERQLESILHAGKPHGLTKATLPYRALQAYSFPGAVVPDRIYTKSGYLNELSDEATDTVLEHAADIASPFTQLELLYLGGAVARVPDDATAYPNRQSPFVTNLAAAWMDPTEDARHTAWAREGYRALAGHLSGGYVNFMNPGEADRTREAYGAAKFERLQGVKAKYDPTNLFRLNQNIPPSSP

SEQ ID NO: 9860 - protein, 197 aa, Lotus corniculatus var. japonicus
MSASRFIKCVTVGDGAVGKTCLLISYTSNTFPTDYVPTVFDNFSANVVVDGSTVNLGLWDTAGQEDYNRLRPLSYRGADVFILAFSLISKASYENIAKKWIPELRHYAPGVPIILVGTKLDLRDDKHFLADHPGAVPITTAQGEELRKLIGAPAYIECSSKTQQNVKAVFDAAIKVVLQPPKQKKKKREAQKSCSIL

SEQ ID NO: 9861 - protein, 244 aa, Triticum aestivum
MVRESMGEESEAFATTAPLAPVTGERKVRNDLEETLPKPYLARALVAPDTEHPNGSEGHDSKGMSVMQQHVAFFDQNGDGIVYPWETYAGFRDLGFNPISSVFWAIFINFAFSYVTLPSWLPSPLLPVYIDNIHKAKHGSDSSTYDTEGRYVPVNLENIFSKYALTAPNKITLKELWNLTEGNRMAIDPFGWLANKVEWLLVYLLAKDEEGFVSKEAVRGVFDASFFEYCAKKNKEKADSRKQD

SEQ ID NO: 9862 - protein, 337 aa, Haloarcula marismortui ATCC 43049
MSDHTDERETFHHDPIGHAEARAGMTVGELANSYGEAGIGASDIHEAVDIYSQMLDDDVTTFFGLAGAMVPTGMRAIVSELIRDGHIDVLVTTGANCTHDSIEAIGGKHHHGEVTPEGQTEREHDETLRDEGVDRIYNVYLPQEHFVLFENHLRDEVFSTLEDEGPVSIQRMTEELGRANSEVNEREDVPEDAGVLAAAYENDVPVYCPAFQDSVLGLQAWMYSQTSEFTIDALADMTQITDIAYEADSAGAMVVGGGVPKNYVLQTMLVSPDAYDYAVQLTMDPSNTGGLSGATLDEARSWGKLEKDARNVSVYADATITLPLVVAAARERHSTEA

SEQ ID NO: 9863 - protein, 153 aa, Brassica napus
ITKGEKKRMCKLMDCRKLSVEACMHAVQNDRLPLRVVVQVLFFEQVRASASSGSSTPDFPKGIRELRSCGTYGSSRSVPTVMEDEWDAVATEEEMRALKSEIAALKLQEESGRKSTDKAAVTAISRVKSLIMSRKMFGKKLQGKAVVGEKNYG

SEQ ID NO: 9864 - protein, 176 aa, Glycine max
  unsure (1)..(176): unsure at all Xaa locations
MAIHHETWAFVFGLLGNVISFMVFLAPLPTFYQIYKKKSSEGFQSLPYVVALFSSMLWIYYAFVKKDASLLLITINSFGCVIETIYLAIFLVYAPSKTRLWTIKLLLMLNVFGFGAMLLSTLYLTTGSKRLTVIGWICLVFNISVVAAPLCIMKRVIKTKSVEXMPFSLCFSLTIN

SEQ ID NO: 9865 - protein, 99 aa, Triticum aestivum
  unsure (1)..(99): unsure at all Xaa locations
MAPTVMASSATSVAPFQGLKSTAGLPVSRRSNGASLGSVSNGGRIRCMQVWPIEGIKKFETLSYLPPLSTEALLKQVDYLIRSKWVPCLXFSKVXFIFR

SEQ ID NO: 9866 - protein, 145 aa, Triticum aestivum
  unsure (1)..(145): unsure at all Xaa locations
MAPAVMASSATTVAPFQGLKSTAGLPVSRRSSGSLGSVSNGGRIRCMQVWPIEGIKKFEXTLSYLPPLSTEALLKQVDYLIRSKWVPCLEVQQXGFVFREAKQLPPGTTTVDNGTMWKXLPMFGXCNDPXKVLKQVEGRSKKEXP

SEQ ID NO: 9867 - protein, 306 aa, Fagus sylvatica
MPSHSDLDRQIEHLMECKPLPEAEVKTLCDQARAILVEEWNVQPVKCPVTVCGDIHGEFYDLIELFRIGGNAPDTNYLFMGDYVDRGYYPVETVTLLVALKVRYRDRITILRGNHESRQITQVYGFYDECLRKYGNANVWKFFTDLFDYLPLTALIESQIFCLHGGLSPSLDTLDNIRALDRIQEVPHEGPMCDLLWSDPDDRCGWGISPRGAGYTFGQDIAAQFNHTNGLTLISRAHQLVMEGFNWCQDKNVVTVFSAPNYCYRCGNMAAILEIGENMDQNFLQFDPAPRQIEPDTTRKTPDYFL

SEQ ID NO: 9868 - protein, 273 aa, Magnaporthe grisea 70-15
MWPGQAMTLKVEKVLHHERSKYQDVLIFQSTDYGKVLVLDNVIQCTERDEFSYQEMITHLAMNSHPNPKKVLVIGGGDGGVLREVVKHDCVEEAILCDIDEAVIRLSKEYLPNMSAGFNHPKVKVHVGDGFKFLADYQNTFDVIITDSSDPEGPAESLFQKPYFQLLFNALTEGGVITTQAENQWLHLPLITKLRKDCKEIFPVAEYAYTTIPTYPSGQIGFMVCSKDPKANLKEPLRSWTQEEELEKCRYYSSDIHKASFVLPNFARKALQD

SEQ ID NO: 9869 - protein, 320 aa, Hordeum vulgare
MASAKATMGQGEQDHFVLKSGHAMPAVGLGTWRAGSDTAHSVRTAITEAGYRHVDTAAEYGVEKEVGKGLKAAMEAGIDRKDLFVTSKIWCTNLAPERVRPALENTLKDLQLDYIDLYHIHWPFRLKDGAHMPPEAGEVLEFDMEGVWKEMENLVKDGLVKDIGVCNYTVTKLNRLLRSAKIPPAVCQMEMHPGWKNDKIFEACKKHGIHITAYSPLGSSEKNLAHDPVVEKVANKLNKTPGQVLIKWALQRGTSVIPKSSKDERIKENIQVFGWEIPEEDFKVLCSIKDEKRVLTGEELFVNKTHGPYRSARDVWDHEN

SEQ ID NO: 9870 - protein, 170 aa, Sinorhizobium meliloti
NQLPAVLWFTGLSGSGKSTIANELDRILHAQGKHTYLLDGDNVRHGLNRDLGFTEEDRVENIRRVAEVAKLMADAGLIVLVSFISPFRDERRMARELMEEGEFIEIFVDTPLDECARRDPKGLYEKALAGKIANFTGVSSCYEAPENPELHIRTVGHQPNDLALAIEGIP

SEQ ID NO: 9871 - protein, 273 aa, Methanosarcina mazei Go1
MIKKDYQGEFIVTSLRKARKKQELRLIMPEINGILESEPAVLRIDPELIMLIGDIHGNLDALEFIIAMRKKLGCKKILFLGDYVDRGTEGTEVLIELFRMKLEEPEDVFLLRGNHESADMNIYYGFFEEIDFDRDFLLEISRTYERLPVAALVSGHTFCVHGGINGTENIDTITKEGAFPYLWNDPSERPGLVTSSRGSTVREFGPDIVEGFLKVNSLKRIIRGHTALRTGYEWWFDGKLLSLFSCPDYVGLGNAAAFGMMRREEIKIITFES

SEQ ID NO: 9872 - protein, 464 aa, Methanocaldococcus jannaschii DSM 2661
MNKMNIDKNLLEKWDKEYIWHPYTQMKEYRESKNLIIERGEGNYLIDIYGNKYLDAVSSIWCNLFGHSRKEIIEAIKNQADKICHSTLLGCGNVPSILLAKKLVDITPKHLTKVFYSEDGAEAVEIAIKMAYQYYVLRGDKGRTKFISVKEGYHGDTVGAMSVGGSELFHGVFKPLLFKGYHANPPYCYRCKYHNFKDTDERNEKGCEMECLNEMISLIEKHAEEVFCVILEGGIMGSAGMIPYPDGYIEGVAKACKENDVIFILDEVATGFGRTGKMFFCDNEELKKLEKPDILCLGKGLTGGYLPLAATLTTDEIYNQFLGEFGESKQLYHGHTYTGNQLLCSAALATLEIFEKENVIENIQPKIKLFHKELRKLKELEHVGDVRGRGFMVGIELVKDKETKEPYPYGYKAGYRVAEKLLEKGIYMRPIGNVIILVPPLSITEKEIIYLCDALYEAIKEADL

SEQ ID NO: 9873 - protein, 373 aa, Arabidopsis thaliana
MGYLLEETLSSNSKTPIVIDDDNELGLMAVRLANAAAFPMVLKAALELGVFDTLYAEASRSDSFLSPSEIASKLPTTPRNPEAPVLLDRMLRLLASYSVVKCGKVSVGKGERVYRADPICRFFLKDNIQDIGSLASQVIVNFDSVFLNTWAQLKDVVLEGGDAFGRAHGGMKLFDYMGTDERFSKLFNQTGFTIAVVKKALEVYQGFKDVNVLVDVGGGVGNTLGVVTSKYPNIKGINFDLTCALAQAPSYPGVEHVAGDMFVDIPTGDAMILKRILHDWTDEDCVKILNNCWKSLPENGKVVVIELVTPDEAENGDINANIAFDMDMLMFTQCSGGKERSRAEFEALAAASGFTHCKFVCQAYHCWIIEFCK

SEQ ID NO: 9874 - protein, 183 aa, Glycine max
  unsure (1)..(183): unsure at all Xaa locations
MDLPFLDHYYQSPFFAFPLNIHSIVLGFASWCLNKFINGQTXHPSFGGNGATMFFLTFSILAAVLGIVSKLLGANHMRTWRSDSLASAGATSIVAWAVTALAFGLACKQINIGGHRGWGLRVVEAFIIILTLTQLLYLILIHAGLYSSRYGPGYRDTDYGNAHGVGGTTGDPMHKSAAAGTRV

SEQ ID NO: 9875 - protein, 493 aa, Prochlorococcus marinus
MQTNFLFMTTALQTPQRRSRSKLQDASLVNGPMLLLRSIRGFSSNRSMLWLATVPLALFGLGIFNLSAHAADLPELNAAFLANNLWLLIATILVIFMNAGFAMVEAGMCRSKNAVNILAKNLFVFALAVTSYWFIGYSLMYGGSVADGWLYFGGLFFDPTVTADMVTDAGLVPTVDFLFQSAFAGTAATIVSGLVAERVKFGEFVVFAIVLTAFIYPIAGSWKWNGGWLDSLGFVDFAGSSIVHSVGAWAGLVGAMLLGPRIGKYSDGKPQAMPGHNMAIATLGALILWIGWYGFNPGSQLAMDQWVPYVAVTTTLAAAAGAIGATIVSTLTSGKPDLTMIINGILAGLVSITAGCGDMTLAGAWFAGLVGGIIVVFSVAALDAAEIDDPVGAFSVHGVCGVWGTLVIGLWGTAVQGDGAGMGLFNGGGINLLLVQALGAAAYAIWTLVTCWIAWSIIGGLFGGIRVSEEEETQGLDISEHGMESYPDFASAK

SEQ ID NO: 9876 - protein, 242 aa, Porphyra yezoensis
MVSDLEKAVRADLQALIKEKNCHGIMVRVAWHDAGTYSKEDGTGGANGTQRFAPESGHGANAGLDIARNMCEDIKAKHPEISYADLYQLASVVAIEDAGGPVIPFRMGRKDADAPQCTPDGRLPDADKRMPHLRDIFYRMGFNDAEIVALSGAHTLGAAHKDRSGFDGPWTSNPNTFDNSYFKEIMKETPESGLLHLPSDKALLDEPECKALVETYASDQAKFFEDYAKAHQKLSELGAVWA

SEQ ID NO: 9877 - protein, 241 aa, Oryza sativa (japonica cultivar-group)
MAAAARHRGTVKWFNDTKGFGFISPDDGSEDLFVHQSSIKADGFRSLAEGEQVEFAISESEDGRTKAVDVTGPDGSFVKGGAGGGGGGGGGFGSRGGGGSGGGGRSYGGSWGGGRRSGGGGPGGGCFKCGESGHMARDCFNGGGVGVGGGGGGGGGAGGGCFKCGEMGHMARDCFNSGGGGGGGGGGGGGGACYNCGETGHLARDCYNGGGGGGGGRFGGGGDRSCYNCGEAGHIARDCHK

SEQ ID NO: 9878 - protein, 291 aa, Glycine max
  unsure (1)..(291): unsure at all Xaa locations
MASVASSSSFSTRLLLHSHTPLVCRRRCRPNFLRMVTRSCLDDSSALLRAAQHTVDTYVKSGMVVGLGSGHASGMAIQHLGSQLRTGNLKDIVGIPMSVSSASEAAKAGIPLDTYQGSSQIDFAFDDADVIEEGTLVAIIGRRKLQGGESIIQEKSIINSANKCVFIIEENQYKGGLEGSIPVLIQSLNWMTIAEEIDDMFLGDAEVWRRPSIGQAGPLGGDFPVVTKEGHNILDVXFTSPIXNVAEVSKSLDKVDGVVDHGVVSKIPCTVVIASQTGLNILDKLTADIVG

SEQ ID NO: 9879 - protein, 217 aa, Shigella boydii
ELDLYICLRPVRYYQGTPSPVKHPELTDMVIFRENSEDIYAGIEWKADSADAEKVIKFLREEMGVKKIRFPEHCGIGIKPCSEEGTKRLVRAAIEYAIANDRDSVTLVHKGNIMKFTEGAFKDWGYQLAREEFGGELIDGGPWLKVKNPNTGKEIVIKDVIADAFLQQILLRPAEYDVIACMNLNGDYISDALAAQVGGIGIAPGANIGDECALFEA

SEQ ID NO: 9880 - protein, 213 aa, Shigella boydii
ELDLYICLRPVRYYQGTPSPVKHPELTDMVIFRENSEDIYAGIEWKADSADAEKVIKFLREEMGVKKIRFPEHCGIGIKPCSEEGTKRLVRAAIEYAIANDRDSVTLVHKGNIMKFTEGAFKDWGYQLAREEFGGELIDGGPWLKVKNPNTGKEIVIKDVIADAFLQQILLRPAEYDVIACMNLNGDYISDALAAQVGGIGIAPGANIGDECA

SEQ ID NO: 9881 - protein, 506 aa, Burkholderia fungorum LB400
MNHADMQFLDVEFPYARQYGNFIGGEWVPPVRGEYFDNVSPITGEPFTSIPRSTEEDIELALDAAHRARKAWADTAPALRANVLNRIADRMEQNLSRIAFSESIDNGKPIRETLAADIPLAIDHFRYFASCIRAQEGTLSEIDHDTVAYHFHEPLGVVGQIIPWNFPILMAVWKLAPALAAGNCVVLKPAEQTPASILVLIELIQDLLPPGVLNVVNGFGLEAGKPLASSKRIAKIAFTGETSTGRLIMQYASQNIIPVTLELGGKSPNIFFADVVDQDDGYFDKALEGFAMFALNQGEVCTCPSRVLIDEKIYDRFMERALKRVAAIAQGHPLDPRTMIGAQASQEQLEKILSYVDLGKQEGAECLIGGERNTLGGELSKGYYVKPTVFRGNNKMRIFQEEIFGPVVSVTTFRTEEEALEIANDSLYGLGAGVWTRDGTRAYRFGRQIQAGRVWTNCYHAYPAHAAFGGYKQSGIGRETHKMMLDHYQQTKNLLVSYSEQPLGFF

SEQ ID NO: 9882 - protein, 213 aa, Shigella boydii
LDLYICLRPVRYYQGTPSPVKHPELTDMVIFRENSEDIYAGIEWKADSADAEKVIKFLREEMGVKKIRFPEHCGIGIKPCSEEGTKRLVRAAIEYAIANDRDSVTLVHKGNIMKFTEGAFKDWGYQLAREEFGGELIDGGPWLKVKNPNTGKEIVIKDVIADAFLQQILLRPAEYDVIACMNLNGDYISDALAAQVGGIGIAPGANIGDECAL

SEQ ID NO: 9883 - protein, 372 aa, Candida albicans
MKKFTGPTQTRQVVFNISQNFKVLKILGEGAYGIVALAVHLPTETKVAIKKIEPFERPLFCLRTLREIKLLTKFKNHDNIVRLYDVQKPMNYDSFNEVYLIQGYMPSDLHNLIHTHLLSDQHVQYFIYQILKGLKMIHSARVIHRDLKPSNILVNEKCDLKICDFGLARLDTKHYNFDEAPRISMLTEYVATRWYRAPEIMLSASNYSTAIDLWSVGCILAELLTYRALFPGSDYINQLKLIFEVLGTPTDEDLQIIKSERAQKFIRSLPTKVKIDLSEFINNHPYRNIKHRGRDQVNPLAIDLLEKLLVFDPAKRITVQDALEHPYLNSYHEQLDEPVTSPIPIEEFDFDIDKKNLDTNDLKKQIFEIVMS

SEQ ID NO: 9884 - protein, 213 aa, Triticum aestivum
  unsure (1)..(213): unsure at all Xaa locations
RVRPNAVRSLIGAHFCFCAFSRGYLASDQLDTLRYRXLYSGWIPGILLHHLLLLXCFTLALPRNVTINYLILTLLCEAPPRRRRPLISHFCGSVVTIPPLLPARLRSRPSPAXMHSIFLHVRKLRRMAGFRDFNKXLVKLEWVLNWTTFVTARVICHILITYKLITDAHKFDKGIELPLALSGMAGMNVLNVSLGLDLFKAFARERNQQTHQD

SEQ ID NO: 9885 - protein, 297 aa, Saccharomyces cerevisiae
MKTTTPLVHVASVEKGRSYEDFQKVYNAIALKLREDDEYDNYIGYGPVLVRLAWHISGTWDKHDNTGGSYGGTYRFKKEFNDPSNAGLQNGFKFLEPIHKEFPWISSGDLFSLGGVTAVQEMQGPKIPWRCGRVDTPEDTTPDNGRLPDADKDAGYVRTFFQRLNMNDREVVALMGAHALGKTHLKNSGYEGPWGAANNVFTNEFYLNLLNEDWKLEKNDANNEQWDSKSGYMMLPTDYSLIQDPKYLSIVKEYANDQDKFFKDFSKAFEKLLENGITFPKDAPSPFIFKTLEEQGL

SEQ ID NO: 9886 - protein, 312 aa, Zea mays
MYWAPETERAHWSPSAWESLTRSKKNPPPPFPIKSSTRVLLVPATRISPDFIILPRNKSLAKMTKNYPTVSEDYKKAVEKCRRKLRGLIAEKNCAPIMVRLAWHSAGTFDCQSRTGGPFGTMRFDAEQAHGANSGIHIALRLLDPIREQFPTISFADFHQLAGVVAVEVTGGPDIPFHPGREDKPQPPPEGRLPDATKGCDHLRDVFAKQMGLSDKDIVALSGAHTLGRCHKDRSGFEGAWTSNPLIFDNSYFKELLSGEKEGLLQLVSDKALLDDPVFRPLVEKYAADEDAFFADYAEAHMKLSELGFADA

SEQ ID NO: 9887 - protein, 158 aa, Salmonella enterica subsp. enterica serovar Typhi Ty2
MKLISNDLRDGDKLPHRHVFNGMGYDGDNISPHLAWDDVPMGTKSFVVTCYDPDAPTGSGWWHWVVVNLPADTRVLTQGFGSGLVAVPDGVIQTRTDFGKAGYGGAAPPKGETHRYIFTVHALDVERLDVDEDASGAMVGFNVHFHSLASASITAMFS

SEQ ID NO: 9888 - protein, 506 aa, Dechloromonas aromatica RCB
MLYASPGTAGAKIAYKAQYDNFIGGKWVAPVNGQYFDVVTPISGKPYTKAARSTAEDMELALDAAHAAFPTWGKTSAADRANVLLKIADRLEANLELLAYAETVDNGKAIRETLNADIPLAVDHFRYFAGCLRAQEGGISEIDENTMAYHIHEPLGVVGQIIPWNFPILMAAWKLAPAIGAGNCVVLKPAESTPISILILAELIADILPAGVLNIVNGYGREAGMPLATSKRIAKIAFTGSTSTGRVIAQAAANNLIPATLELGGKSPNVFFADIMDKDDSFLDKAVEGMVLFAFNQGEVCTCPSRALIQESIYEKFMERVLKRVAAIKQISPLDTDCMMGAQCSQEQMTKIQSYLELGKQEGAECLIGGERAHLGGDLEGGYYIQPTMFKGHNKMRIFQEEIFGPVLAVTTFKDEAEALAIANDTIYGLGAGVWSRNGNVAYRMGRAIQAGRVWTNCYHAYPAHAAFGGYKESGIGRETHKVMLDHYQQTKNLLVSYSETKLGFF

SEQ ID NO: 9889 - protein, 297 aa, Saccharomyces cerevisiae
MKTTTPLVHVASVEKGRSYEDFQKVYNAIALKLREDDEYDNYIGYGPVLVRLAWHISGTWDKHDNTGGSYGGTYRFKKEFNDPSNAGLQNGFKFLEPIHKEFPWISSGDLFSLGGVTAVQEMQGPKIPWRCGRVDTPEDTTPDNGRLPDADKDAGYVRTFFQRLNMNDREVVALMGAHALGKTHLKNSGYEGPWGAANNVFTNEFYLNLLNEDWKLEKNDANNEQWDSKSGYMMLPTEYSLIQDPKYLSIVKEYANDQDKFFKDFSKAFEKLLENGITFPKDAPSPFIFKTLEEQGL

SEQ ID NO: 9890 - protein, 151 aa, Coxiella burnetii RSA 493
MAKAVQKYPHSMLSHLQQDINRLFEPFGWATGGELWDAFSSEWSPHIDIKDEGQNYLICADIPGVDPKKIQVSMENNILTIKGERETEAKEKSEGYLRIERTKGAFLRQFTLPESVDAESIKAKSKHGVLEITIPKAQPPRTKKIEIEEQE

SEQ ID NO: 9891 - protein, 247 aa, Oryza sativa (japonica cultivar-group)
MGKHGKCDVEACYPGGAPGGGMYPYMIENAQLRWAFIRKVYVIVSVQLLVTVAVAGAVNLVEPIKTFFQARTPEVLVAYVIIIISPLIMMLPMIYFRNKHPINLFFLLLFTVCISFSVGLGCLSKNGTVIFQAAGMTAAIVIGLTCYTFWAAKRGYDFEFLGPFLFAATLVLFLYAIITIFLPMGRTGKLVYGCVAALIFSGFIIYDTDNLIKRYTYDEYVAAAITLYLDIINLFMALVTALQAADG

SEQ ID NO: 9892 - protein, 297 aa, Saccharomyces cerevisiae
MKTTTPLVHVASVEKGRSYEDFQKVYNAIALKLREDDEYDNYIGYGPVLVRLAWHISGTWDKHDNTGGSYGGTYRFKKEFNDPSNAGLQNGFKFLEPIHKEFPWISSGDLFSLGGVTAVQEMQGPKIPWRCGRVDTPEDTTPDNGRLPDADKDAGYVRTFFQRLNMNDREVVALMGAHALGKTHLKNSGYEGPWGAANNVFTNEFYLNLLNEDWKLEKNDANNEQWDSKSGYMMLPTAYSLIQDPKYLSIVKEYANDQDKFFKDFSKAFEKLLENGITFPKDAPSPFIFKTLEEQGL

SEQ ID NO: 9893 - protein, 164 aa, Triticum aestivum
  unsure (1)..(164): unsure at all Xaa locations
MAGMVFGLENPMMTALQHLLDIPDGEAGGAGAAGGEKQGPTRAYVRDARAMAATPADVKELPGAYAFVVDMPGLGSGDIKVQVEDERVLVISGERSREEEEDAKYLRMERRMGKLMRKFVLPENADMEKISAACRDGVLNRPTVREXLPARPKPKPKNNPRSKA

SEQ ID NO: 9894 - protein, 106 aa, Zea mays
MPSSPQTPPPPVGRTAAHGGRHKHDDDDPSTPRGFCAKYFSRESCLLLALVTVLLVVLPLVLPPLPAPPLALLLVPVAMLAVLLVLALMPAAAGGRNEAVDPASYL

SEQ ID NO: 9895 - protein, 472 aa, Coxiella burnetii RSA 493
MTTIFWFRQDLRLSDNPALVEAAKSADHLIPLYILDDQLKMLGDAQRWWLHHSLSSLQTALSKKGTSLILKKGDTKRVLLELIKKYKVEKIYWNRSYEPPYREIDTYLENRLPPLSVEIYHSTLLTEPQKIKNKSGGYYKIFTPFWKHINASLQPRKTLAAPKKFSQHRAIKSDNLETWNLLPKHPDWSQGFDQWKPGEKNAQIVLKKFIKENLKNYPAHRDRPDISSTSHLSPYLHFGEISIRQVWTAITQATIQDKNLQKAADVFLRQLIWREFAYYLLWHFPQMGRSNFRNQFDNFKWKKNKNWLRAWQKGLTGYPIVDAGMRELWCTGYMHNRVRMIVASFLVKDLMIDWREGEKWFWNTLLDADLANNALGWQWIAGCGPDAAPYFRIFNPILQSKKFDPDGTYIKRWIPELAKVPSKYIHYPADMPDNISESSKVNLGVDYPFPIVNHHKAKELALKAYKDSTYRL

SEQ ID NO: 9896 - protein, 167 aa, Neurospora crassa
MSSATTIYDFKPLDKKGSELPLSTYQGKVVLIVNVASKCGFTPQYAGLEKVYKEIKEKYPDDFEILAFPCNQFGGQEPGTEEEIQSFCQLNYGVSFPIMKKVEVNGDNADPLYEWMKNEKPGLMGLKRIKWNFEKFLIGKDGKVKGRWASTTKPESLKEAILKELGE

SEQ ID NO: 9897 - protein, 335 aa, Listeria monocytogenes str. 4b F2365
MDPFLLKDLKQHLGGTNDAIKEAPQEIQMPDFSNLEIATAAALQMRATMGSPNIDLSNGVTTEYRVVEGDYGDIPVRIYRHEEATKPVPAFIFYHGGGFVGGTPAVVENFCKGIAEKLPAVVINVDYHLAPEFPAPAAPKDCYRALEWVVEQSDELGIDASKIGVSGDSAGGTLAAAVSYMDYEAETNYVGFQALLYPALTLVDEDNDKYQWDISKFGASEETLPLVAPGIIGMNSSGELLRTAYVRDENPASPIYSPLSAVDKSIYPPTLIASAEFDALRAFADIFAKELRASGVQTKVIVYQGMCHAFIDKYGIFPQAEDVADEIVQMMKEIF

SEQ ID NO: 9898 - protein, 240 aa, Zea mays
EYLAPRSYGPPPAPPPHPCLSASGSPPPLSRPPRPQFDPNFAWHQAKPLPPCCVKARAAAPESEAKCHATVVSGWFTETRSRCGKASKLQYYNNPMWPGETHSLKVDKILYQGKSPYQEVLIFESLTYGKVLVLDGIVQLTDKDECAYQEMITHLPLCSIPSPKKVLVIGGGDGGVLREIARHGSVESIDICEIDQLVIDVCKDFFPDLSVGFEDPRVRLHVGDAVEFLRNSPEGTYDAI

SEQ ID NO: 9899 - protein, 189 aa, Pinus strobus
AWHSAGTYDVKSKTGGPFGTIKHPDELAHGANNGLDIAIRLLEPIKEQFPTISYADFYQLAGVVAVEITGGPDIPFHPGRPDKTEPPEEGRLPDATKGIDHLRDVFGHMGLSDKEIVALSGAHTLGRCHKERSGFEGAWTSNPLIFDNSYFKELLSGEKEGLLQLPSDKALLEDPIFRSYVEKYAADDD

SEQ ID NO: 9900 - protein, 452 aa, Triticum aestivum
MGEQKGNILMGKYEMGKMLGQGTFAKVYHARNIETSQSVAIKVTDKEKVLKGGLTDQIKREISVMKLVKHPNIVQMYEVMATKTKIYFVLEHVKGGELFNKVQRGRLKEDAARKYFQQLICAVDFCHSRGVYHRDLKPENLLLDENSNLKVSDFGLSTISECRRLDGLLHTSCGTPAYVAPEVINRKGYDGAKADIWSCGVILFVLLAGYLPFQDKNLMNMYKKIGKAEFKCPSWFSSDIRRLLLRILDPNPSTRISIERIMEHPWFRKGLDAKLLRYNLQAKDAVPAADMTATSDSLSCSNSATEGKEQEAKKLANLNAFDIISLSTGLDLSGMFEDNDKKRESKFTSTNSASTIVSKIEDIAKCMRLKLVKKDGGMLRMESFKAGRKGVMSIDAEIFEVTPDFHLVELKKTYGDTLEYQKVLNQEMRPALKDIVWAWQGEQQPQPQQQPC

SEQ ID NO: 9901 - protein, 506 aa, Pseudomonas putida KT2440
MIYAQPGTPGAVVSFKPRYGNFIGGEFVQPLAGQYFINSSPVNGQPIAEFPRSTAQDVERALDAAHAAAEAWGKTSVQDRARVLLKIADRIEQNLEVLAVTESWDNGKAIRETLNADVPLAADHFRYFAGCIRAQEGGVGEINEGTVAYHIHEPLGVVGQIIPWNFPLLMAAWKLAPALAAGNCVVLKPAEQTPLSITVFAELIADLLPAGVLNIVQGFGREAGEALATSKRIAKIAFTGSTPVGSHIMKCAAENIIPSTVELGGKSPNIFFEDIMQAEPAFIEKAAEGLVLAFFNQGEVCTCPSRALIQESIYEPFMAEVMKKIAKITRGNPLDTETMVGAQASEQQYDKILSYLEIAREEGAQLLTGGGAERLQGDLASGYYIQPTLLKGNNKMRVFQEEIFGPVVGVTTFKDEAEALAIANDSEFGLGAGLWTRDINRAYRMGRGIKAGRVWTNCYHLYPAHAAFGGYKKSGVGRETHKMMLDHYQQTKNLLVSYDINPLGFF

SEQ ID NO: 9902 - protein, 223 aa, Triticum aestivum
  unsure (1)..(223): unsure at all Xaa locations
RGRGRGLSVFSLLPDVWGIKWRFPMXPVSRLNEEPTRMSTLIDLTCDSDGKIDKFIGNAETLPLHPLDPERGGCYYLAVLLSGAYQEALSNKHNLFGGPSIVRVEKSTAAATGFQIATADLGPTTEELISTMRYNVRQDIVGVIQRRAIEIGVWGMVGEAVHTGLTTMPYLIMEDHAASSWKHQGGLDGKDESIVKMVFRQVSRLLCLPFMWSIPSKRIGSAA

SEQ ID NO: 9903 - protein, 294 aa, Magnaporthe grisea 70-15
MPLEAVMIVVDNSESSRNGDYTPTRFDAQADAVNVLFQHVTNGNPESSVGLMSMGGKDPEVLVTLTSDQGKILEGLHRTKKKVSGSSHLATAIQVASLALKHRQNTTQRTRIVAFVCSPVSDEQKALVQLAGKLKKNNVTVDFVLFGDLDDDTSKKLEAFNAKVKNNEGNSHLVVIPPSGNLLSDQLIATPIFGEGAGSSAAAGGGGGGGDFGDLEFDPATDPELALALRMSLEEENARKEKEAKKEAEQAKKQGLESVEEQDESAPLLDKSGGPSGSGSKDKKSDGGDKMDTS

SEQ ID NO: 9904 - protein, 501 aa, Zea mays
MASNGCNGNGNGKAAPAGVVVPEIKFTKLFINGEFVDAASGKTFDTRDPRTGDVLAHVAEADKADVDLAVKSARDAFEHGKWPRMSGYERGRIMSKLADLVEQHTEELAALDGADAGKLLLLGKIIDIPAATQMLRYYAGAADKIHGDVLRVSGRYQGYTLKEPIGVVGVIIPWNFPTMMFFLKVSPALAAGCTVVVKPAEQTPLSALYYAHLAKMAGVPDGVINVVPGFGPTAGAALASHMDVDSVAFTGSTEVGRLIMESAARSNLKTVSLELGGKSPLIIFDDADVDMAVNLSRLAVFFNKGEVCVAGSRVYVQEGIYDEFVKKAGVAVGARRHRVGDLLLRHRPGRAVRQVQDERLRPGPGAGSHGQVPAGQERHHRAPGLAMGPMEPHRSLLVQCTCVMRACSHSWTVDEVIEKANCTRYGLAAGIVTKSLDVANRVSRSVRAGTVWVNCYFAFDPDAPFGGYKMSGFGRDQGLAAMDKYLQVKSVITALPDSPWY

SEQ ID NO: 9905 - protein, 197 aa, Oryza sativa
MSTARFIKCVTVGDGAVGKTCMLISYTSNTFPTDYVPTVFDNFSANVVVDGNTVNLGLWDTAGQEDYNRLRPLSYRGADVFLLAFSLISKASYENIHKKWIPELRHYAPNVPIVLVGTKLDLREDKQFFLDHPGLAPISTAQGEELKRMIGAAAYIECSSKTQQNVKSVFDSAIKVVLCPPKPKKKNTRKQRSCWIL

SEQ ID NO: 9906 - protein, 208 aa, Escherichia albertii
LDLYICLRPVRYYQGTPSPVKHPELTDMVIFRENSEDIYAGIEWKADSADAEKVIKFLREEMGVKKIRFPEHCGIGIKPCSEEGTKRLVRAAIEYAIANDRDSVTLVHKGNIMKFTEGAFKDWGYQLAREEFGGELIDGGPWLKVKNPNTGKEIVIKDVIADAFLQQILLRPAEYDVIACMNLNGDYISDALAAQVGGIGIAPGANIG

SEQ ID NO: 9907 - protein, 367 aa, Desulfitobacterium hafniense DCB-2
MEIAQDPELVNTYTNRANCVAVVSNGTAVLGLGDIGARAAMPVMEGKSLLFKNFAGVDSFPICLDTKNIDKIVEVVKLLEPTFGGINLEDIKAPECFEIEEKLKAVYDGPVFHDDQHGTAVVTLAAMFNALKIVNKELKDVKIVTSGAGAAGMAIVKLLMDCGLQNVIMCDTKGTIYKGRAEGMNKYKEEIALRTNPAMVKGSLGEALKGADVFIGISVGNTVTQEMIRTMAKDAIVFAQANPVPEIMPEEAKEAGAAVIGTGRSDYPNQINNILSFPGIFRGTFDVEAREINGPMKIAAAEAIASIVSPEELSAEYIIPKAFDKRVAPAVAAAVAKAAMESGVAKRKVDPEQVALNLTSLLAQEGK

SEQ ID NO: 9908 - protein, 205 aa, Shigella boydii
LDLYICVRPVRYYQGTPSPVKHPELTDMVIFRENSEDIYAGIEWKADSADAEKVIKFLREEMGVKKIRFPEHCGIGIKPCSEEGTKRLVRAAIEYAIANDRDSVTLVHKGNIMKFTEGAFKDWGYQLAREEFGGELIDGGPWLKVKNPNTGKEIVIKDVIADAFLQQILLRPAEYDVIACMNLNGDYISDALAAQVGGIGIAPGA

SEQ ID NO: 9909 - protein, 236 aa, Brassica napus
  unsure (1)..(236): unsure at all Xaa locations
MKGEGNEMFPKLPQNHSLSSHFHLPATIAVDDSSIEVVRRPRGRPPGSKNKPKPQVYVXTRDTEPPMSPYILEVPSGNDVVEAINRFCRRKSIGENPSACAFSVALDSVANITLRQPSPAAPGSTITFHGKXFDLLSVSATFLPPPPRTSLSPPVANFFTVSLAGPQGQIIGGFVAGPLISAXXTVYVIAASFNNPSYXRFTGXREEHXXSISARXREXGDGQSPRXFGRRRAKKG

SEQ ID NO: 9910 - protein, 282 aa, Allium cepa
  unsure (1)..(282): unsure at all Xaa locations
MAAARRIGSTIFSRYATASPRSSQLCRAASRIQNFGSTAAAVEEQPITPPVKVEYTQLLINGKYVDSASGKTFPSLDPRTGEVIAHVSEGDAEDIDRAVAAARKAFDEGPWLKMTAYERSNILLRFADLIEKHNDHIAALETWDNGKPYEQAALVEIPMLVRLMRYYAGWTDKIHGLIXPADGPHHVQVLYEPIGVAGQIIPWNFPLLMFAWKVGPALATGNTVVLKTAEQTPLSALYVAKLFHEAGGPDGVLNVISGFGPTAGAALASHMDVDKLAFTGST

SEQ ID NO: 9911 - protein, 364 aa, Glycine max
  unsure (1)..(364): unsure at all Xaa locations
NSRVDPASVSRSNRKPLPSSSSSSSVATEAEQKEILETLVSNLPLEKSSKAATATRFLFGLLRTTNILNAAEACRDALEKKIGLQLEEATLDDLLVPSYSYLNETLYDVDCVERILSHFLEGMEARTATETTEDAAATRSPALMLVGKLIDGYLSEIASDANLKPEKFYNFAISLPDEARLFDDGLYRAVDVYLKAHPWVSEXDREKICGLLDCQKLTLEACSHAAQNERLPLRAVVRVLFFEQLQLRRAIAGKLGAAEEPSRHSAAMAEEEEVEDDNNTWQVTVRENQVLRLDMDSMRTRVHELERECSSMKRAIEKMDKMGPRGGGPWRASLALGRKFGCKFKTQVCDSHEPATREGRPHRR

SEQ ID NO: 9912 - protein, 207 aa, Shigella boydii
LDLYICLRPVRYYQGTPSPVKHPELTDMVIFRENSEDIYAGIEWKADSADAEKVIKFLREEMGVKKIRFPEHCGIGIKPCSEEGTKRLVRAAIEYAIANDRDSVTLVHKGNIMKFTEGAFKDWGYQLAREEFGGELIDGGPWLKVKNPNTGKEIVIKDVIADAFLQQILLRPAEYDVIACMNLNGDYISDALAAQVGGIGIAPGANI

SEQ ID NO: 9913 - protein, 230 aa, Allium cepa
KSPMIILDDADIDQAVELAHFALFFNQGQCCCACSPTFVHEKIYDEFVEKAKARAMRRVVGDPFKKGVEQGPQIDDEQFNKILRYIKLGVDGGASLVTGGERIGSKGYYIQPTIFSDVKDDMVIAKEEIFGPVQSILKFNDLNEVIRRANASRYGLAAGVFTSNIDKANTLTRALRVGTVWVNCFDVFDAAIPFGGYKMSGQGREKGIDSLKGYLQTKAVVTPLKNPAWL

SEQ ID NO: 9914 - protein, 177 aa, Triticum aestivum
QCPCDGCCPCPCRQNPHGCGQACSPQLNIDGAVKSAPVTCPPASGEAAAPKERRWELSDFDIGRPLGRGKFGNVYLAREKKTKFIVALKVLFKSQLQKANVEHQLRREIEIQSHLRHPNILRLYGYFYDASRVYLILEYAPRGELYKELQKFQRFDEKRSATYVYQLGEALKYCHAN

SEQ ID NO: 9915 - protein, 212 aa, Shigella boydii
LDLYICLRPVRYYQGTPSPVKHPELTDMVIFRENSEDIYAGIEWKADSADAEKVIKFLREEMGVKKIRFPEHCGIGIKPCSEEGTKRLVRAAIEYAIANDRDSVTLVHKGNIMKFTEGAFKDWGYQLAREEFGGELIDGGPWLKVKNPNTGKEIVIKDVIADAFLQQILLRPAEYDVIACMNLNGDYISDALAAQVGGIGIAPGANIGDECA

SEQ ID NO: 9916 - protein, 142 aa, Mycobacterium avium subsp. paratuberculosis str. k10
MNHGVDAYRSVPRPRPVWTQQVLGTAARPAVMPMDAWRDGDQFVVEFDLPGVNADSLDLDVERNVLTVRAERPDLDQNREMVSAERPRGVFSRQLFLGDNLDTDKIEANYHDGVLRLTIPVAEKAKPRRIEINHNHKTAINA

SEQ ID NO: 9917 - protein, 152 aa, Pisum sativum
MDLDSPLFNTLHHIMDLTDDTTEKNLNAPTRTYVRDAKAMAATPADVKEHPNSYVFMVDMPGVKSGDIKVQVEDENVLLISGERKREEEKEGVKYLKMERRIGKLMRKFVLPENANIEAISAISQDGVLTVTVNKLPPPEPKKPKTIQVKVA

SEQ ID NO: 9918 - protein, 185 aa, Burkholderia cepacia R18194
MLFEKGMDFEIRDVDLFNKPEDISVMNPYGQVPILVERDLILYESNIINEYIDERFPHPQLMPADPVQRARARLFLLNFEKELFVHVSTLENEKGKAAEKNHEKARLAIRDRLTQLAPIFVKNKYMLGEEFSMLDVAIAPLLWRLDHYGIELSKNAAPLMKYAERIFSRPAYIEALTPSEKVMRR

SEQ ID NO: 9919 - protein, 357 aa, Oryza sativa (japonica cultivar-group)
MNYRVVNPVKVESGPSTGVANGQPPRPMDGLADGGPPPFLTKTYDMVDDPTTDAVVSWSATNNSFVVWDPHLFGNVLLPRYFKHNNFSSFVRQLNTYGFRKVDPDKWEFANEGFLRGQKHLLKSIKRRKPPNSSPSQQSLGSFLEVGHFGYEGEIDQLKRDKHLLMAEVVKLRQEQQNTKSDLQAMEQKLQGTEQKQQHMMAFLSRVMHNPEFIRQLFSQSEMRKELEEFVSKKRRRRIDQGPELDSMGTGSSPEQVSQVMFEPHDPVDSLFNGVPSDLESSSVEANGGKAQQDVASSSSEHGKIKPSNGELNEDFWEDLLHEGGLDEDTRNPAIDDMNLLSQKMGYLNSSSTKSPQ

SEQ ID NO: 9920 - protein, 241 aa, Oryza sativa (japonica cultivar-group)
MFGKGHDLEAGGSSEPLYPGMVESPDLRWALIHKIYVILSVQLAMTAAVAAFVVKVRGVSEFFVSSNAGFALYIFLLFLPLIVLCPLRYYHQKHPVNLLLLGLFTVAISFAVGMTCAYTSGKVIFEAAALTAVVVISLTAYTFWAAKRGHDFNFLGPFLFSAVMVLILFSLIQIFFPLGKISEMIYGGLASLVFSGYIIYDTDNIIKRYTYDEYVWAAVSLYLDVINLFLALLRVLRAADN

SEQ ID NO: 9921 - protein, 131 aa, Triticum aestivum
  unsure (1)..(131): unsure at all Xaa locations
YVHLRDIRFVFVECDYACIRRSAQHFXSCGTVNRVISLXDXFGQLKXFAYXEFVXAELFRNCQVEWSEFMVGQIKVALKRXNVPGLSSXRGRRFNPYGGHPYMRPYPPPFYNPYGGYGRAPRFRRPRRPFY

SEQ ID NO: 9922 - protein, 293 aa, Candida albicans SC5314
MKKALPEHAKLSKESKECIQECVSEFISFITSQAADRCLVEKRKTLNGEDILWAMYTLGFENYSETLKIYLAKYRQYEQEQLSLKPPRKKIRKRKTKSSLSQTQSKEQVDQDQDFQQIEQQYDDGEEEEEESENEEGDMSNIESNLILQNLPEYSDDYFDDEDEEEDRQQQREENSDNEPQQHHGDDSQPINLQPQLPSSAVPSLPTQQQQQFSDINPTTESNQQESFFTTQYYPNQTQYVNAAPLPTNPQPRQYQNQNQPNNYQNDQRQNDKQRIIPDLLNITNSYSEDEFI

SEQ ID NO: 9923 - protein, 493 aa, Methanosarcina mazei Go1
MCGIAGMFGTPDSNTKVKKMLAILGHRGPDACGIHTEGKLSIGNTLLKITGDMPQPLTGTGSLVLNGEIYNFRELAAEIGLKTDSDTELLFTLIERKVRKGIKPTNAVFSVLSKVNGDYALAYACGTELVLARDPSGVKPLYYFYEKSMVKPGLAFASEKKALAFTGREVKPFPQGGIMGFSTENGKIAEKFTEKSLKITQPEKRISAEKEAIIYLKAALEKAVELRLTPVSGIAFSGGIDSTFLAALAKRIDPYVSLYAVGLPDSHDIAQAEYAAEAIGMKRNLKTHFLSPEEIEAAVPEVIYATESTDPMKVAIGLPLHIVAKTAREEGKRVLLTGQGADELFGGYSRHEGFFEQGADVLDREIYSDLENISAINLERDDMVAMANSVELRVPFLDKEVIKTGLAISPELKVRKKEGVYIRKYILRKAAEGLLPPKILWKEKKAVQYGTGVQKTLDRLARDSGFSKKQGGHIEKYLSQIASEKGFDFINEM

SEQ ID NO: 9924 - protein, 201 aa, Salmonella enterica subsp. enterica serovar Typhi Ty2
MALHDENVVWHSHPVTVAAREQLHGHRGVVLWFTGLSGSGKSTVAGALEEALHQRGVSTYLLDGDNVRHGLCRDLGFSDADRQENIRRVGEVASLMADAGLIVLTAFISPHRAERQLVKERVGHDRFIEIYVNTPLAICEQRDPKGLYKKARAGELRNFTGIDAIYEAPDSPQVHLNGEQLVTNLVSQLLDLLRRRDIIRS

SEQ ID NO: 9925 - protein, 290 aa, Triticum aestivum
MGGLSMEHPWAFAFGLLGNVISFSSLLAPIPTFYRIFKSKSTEGFQSVPYVVALFSAMLWIFYALVKTGEGLLISINAAGCVIETVYIVMYLVYADRKAKIFTAKIVVLLNIAGFGLIFLLTLFAFHGETRVVSLGWICVGFSVCVFVAPLSIIGRVIKTKSVEYMPFTLSLTLTLSAIVWFLYGLLIKDKYVALPNILGFTFGVIQMVLYVFYMNKTPVASQVKEGKEAWKAPAEDHVVVINVGKADKSSCAEVRPVTEMAGAVDVPRRCAAEAAAAPGVDFARSVNVV

SEQ ID NO: 9926 - protein, 480 aa, Pseudomonas putida KT2440
MSHKTYNNYIDGQWCEGHATLGNYSPSDTGDLIGQYHQASAEQARQAIQAARAAQPLWAASGLESRQQVLMAIGDELIARKEELGELLSREEGKPLAEGIGEVNRSGQFFHYYAAEVLRQMGETAASVRPGVDIEVHREPVGVVGIITPWNFPMATAAWKIAPALAFGNAVVFKPANLVPASAWALTEIISRQGLPSGTFNLVMGSGADVGEALIQSAEIDALTFTGSLQTGRRVAVATAGNLVRCQLEMGSKNALVVMDDADLELAVECALNGAFFGTGQKCTASSRLIVCDGIHDRFVEALRLRMRQLKVGHALEAGVQIGPVADARQLEQNLAYLQLAQAEGATLIEGGERLQLACDGYYMRPALFINSRNDMRINREEVFGPIACVIRVRDFEEALATLNDTEYGLTAGIITQSLRHASHFKRRAQTGCVMVNLPTAGTDYHVPFGGRKASSFGPREQGQYARDFYTVVKTTYLRP

SEQ ID NO: 9927 - protein, 374 aa, Arabidopsis thaliana
MLTCIACTKQLNTNNGGSKKQEEDEEEEDRVIETPRSKQIKSLTSQIKDMAVKASGAYKSCKPCSGSSNQNKNRSYADSDVASNSGRFRYAYKRAGSGSSTPKILGKEMESRLKGFLSGEGTPESMSGRTESTVFMEEEDELKEWVAQVEPGVLITFVSLPEGGNDMKRIRFSREMFDKWQAQKWWAENFDKVMELYNVQQFNQQSVPLPTPPRSEDGSSRIQSTKNGPATPPLNKECSRGKGYASSGSLAHQPTTQTQSRHHDSSGLATTPKLSSISGTKTETSSVDESARSSFSREEEEADHSGEELSVSNASDIETEWVEQDEAGVYITIRALPDGTRELRRVRFSREKFGETNARLWWEQNRARIQQQYL

SEQ ID NO: 9928 - protein, 224 aa, Hypocrea jecorina
MGYYDDEGSYHSLKHGVAKTIDKLLPHHHHHHHHSDHHHHSDHHDHNNTTITEHVEVDVVRHDANHSRRAAPATESQPQTVSIPCHHIRLGDFLMLQGRPCQVIRISTSSATGQYRYLGVDLFTKQLHEESSFISNPAPSVVVQTMLGPVFKQYRVLDMADGYVTAMTETGDVKQGLKVIDQSNLWSRLQQAFESGRGSVRVLVLNDGGHELAVEMKVVHGSRL

SEQ ID NO: 9929 - protein, 248 aa, Solanum tuberosum
MENSVPRTVEEVFSDFKSRRAALIKALTTDVEKFYQQCDPEKENLCLYGLPNETWEVNLPVEEVPPELPEPALGINFARDGMQEKDWLSLVAVHSDSWLLSVAFYFGARFGFGKSERKRLFQMINDLPTVFEVVTGAAKQTRDPPHNNSNKSKSSGKPRQPESQLKAVKVSPPKMENDSGEEEEEEEDEQGATLCGACGDNYATDEFWICCDICERWFHGKCVKITPAKAEHIKQYKCPSCSSKRAKV

SEQ ID NO: 9930 - protein, 487 aa, Arabidopsis thaliana
MVITANDLSKWENFPKGLKVLLLLNGCDSDGDGSSAAETRSELESMDYIVTTFTDETEALSAVVKNPESFHIAIVEVNMSAESESFKFLEAAKDVLPTIMISTDHCITTTMKCIALGAVEFLQKPLSPEKLKNIWQHVVHKAFNDGGSNVSISLKPVKESVVSMLHLETDMTIEEKDPAPSTPQLKQDSRLLDGDCQENINFSMENVNSSTEKDNMEDHQDIGESKSVDTTNRKLDDDKVVVKEERGDSEKEEEGETGDLISEKTDSVDIHKKEDETKPINKSSGIKNVSGNKTSRKKVDWTPELHKKFVQAVEQLGVDQAIPSRILELMKVGTLTRHNVASHLQKFRQHRKNILPKDDHNHRWIQSRENHRPNQRNYNVFQQQHRPVMAYPVWGLPGVYPPGAIPPLWPPPLQSIGQPPPWHWKPPYPTVSGNAWGCPVGPPVTGSYITPSNTTAGGFQYPNGAETGFKIMPASQPVSVNNSLFSF

SEQ ID NO: 9931 - protein, 155 aa, Populus nigra
GASDTVRTYHVNLSLFTSIPDFWGIGQLFPIVPIHRLDQRPGARGILSDLTCDSDGKIDKFIGGESSLPLHEIEGGGAGGNGGKYYLGMFLGGAYEEALGGIHNLFGGPSVVRVSQSDGPHSFLVTQAVPGPSCGDVLRVMQHEPELMFETLKHR

SEQ ID NO: 9932 - protein, 367 aa, Bacillus subtilis subsp. subtilis str. 168
MKKITVNQDKKLAYIEAGAELGEVYRTLWQYGLTLPAGTIANVGLTGLTLGGGIGLLTRAAGLTCDSLVQLEMIVADEKEGADLITVSCSNHPDLFWASQGGGGGNFGIVTSMTFKAVPISQVSIFSITWGWDDFEEVYNTWQNWPPYTDDRLTSSIEFWPKEVNRIEALGQFVGPKTELKKLLKPLLKAGSPTSGMVKTTPFIEAVTFFNSPGGNQPQKMKRSGSFIEKPLSERAISTIKHFLEHAPNQNASVWQQALGGAAGRVAPDQTAFYYRDAIIAQEYLTNWTSPGEKRQNVRWIEGLRTSLSKETMGDYVNWPDIEIRNWPRTYYGENVERLRRVKTTYDPENVFRFEQSIPPLRRSLFF

SEQ ID NO: 9933 - protein, 152 aa, Triticum aestivum
  unsure (1)..(152): unsure at all Xaa locations
MAPTVMASSATSVAPFQGLKSTAGLPVSRRSNGASLGSVSNGGRIRCMQVWPIEGIKKFETLSYLPPLSTEALLKQVDYLIRSKWVPCLEFSKVGFIFREHNASPGYYDGRYWTMWKLPMFGCTDATQVINEVEEXKKEYLTVFRIIGSTTS

SEQ ID NO: 9934 - protein, 359 aa, Gloeobacter violaceus PCC 7421
MSPYRVTLIRGDGIGPEVTQAARIVLDATGIDFEWVVVDAGAEVMEKSGTPLPAPVIEAVRASDAAIKGPITTPAGSGIRSVNVALRRALDLYANLRPARTLPGVHSRYDNIDLVVVRENTEDLYSGIEFEKNSPQALEVIEMLMRLGGKKIFPRSGLAVKPISSEASERIARFAFEYARRHARRKVTAVHKANILKHTDGLFLEAARQVASEYPDVEFEDRIVDNLCMQLVQRPESYDVLVLPNLYGDIVSDLTAGLVGGLGVAPGANIGDRSAVFEAIHGSAPRYAGQNKVNPSALILSGALLLRHLGEQEAAVRVEQAVAAVIAEGRSVTYDLAPAGATPAGTRQMAEAIAQKVAG

SEQ ID NO: 9935 - protein, 205 aa, Shigella boydii
LYICLRPVRYYQGTPSPVKHPELTDMVIFRENSEDIYAGIEWKADSADAEKVIKFLREEMGVKKIRFPEHCGIGIKPCSEEGTKRLVRAAIEYAIANDRDSVTLVHKGNIMKFTEGAFKDWGYQLAREEFGGELIDGGPWLKVKNPNTGKEIVIKDVIADAFLQQILLRPAEYDVIACMNLNGDYISDALAAQVGGIGIAPGANI

SEQ ID NO: 9936 - protein, 211 aa, Shigella boydii
LYICLRPVRYYQGTPSPVKHPELTDMVIFRENSEDIYAGIEWKADSADAEKVIKFLREEMGVKKIRFPEHCGIGIKPCSEEGTKRLVRAAIEYAIANDRDSVTLVHKGNIMKFTEGAFKDWGYQLAREEFGGELIDGGPWLKVKNPNTGKEIVIKDVIADAFLQQILLRPAEYDVIACMNLNGDYISDALAAQVGGIGIAPGANIGDECAL

SEQ ID NO: 9937 - protein, 176 aa, Triticum aestivum
  unsure (1)..(176): unsure at all Xaa locations
MAPTVMASSATSVGPFQGLKSTVGLPVSRRSNGASLGSVSNGGRIRCMHVWPIEGGGKVDTLSYLPPLRTEALLEQVDYLIRSKWVPCLEFSKVGFIFRDHNTSPGYYDGRYWTMWKLPMFGCTDATQVINXVEEVKKEYPDAYVRIIGFDNMRQVQXCVSFIAFKPPGCEESGKV

SEQ ID NO: 9938 - protein, 310 aa, Alicyclobacillus acidocaldarius
  unsure (1)..(310): unsure at all Xaa locations
MPLDPVIQQVLDQLNRMPAPDYKHLSAQQFRSQQSLFPPVKKEPVAEVREFDXDLPGRTLKVRXYRPEGVEPPYPALVYYHGGGWVVGDLETHDPVCRVLAKDGRAVVFSVDYRLAPEHKFPAAVEDAYDALQWIAERAADFHLDPARIAVGGDSAGGNLAAVTSILAKERGGPALAFQLLIYPSTGYDPAHPPASIEENAEGYLLTGGXXLWFRDQYLNSLEELTHPWFSPVLYPDLSGLPPAYIATAQYDPLRDVGKLYAEALNKAGVKVEIENFEDLIHGFAQFYSLSPGATKALVRIAEKLRDALA

SEQ ID NO: 9939 - protein, 206 aa, Escherichia albertii
LYICLRPVRYYQGTPSPVKHPELTDMVIFRENSEDIYAGIEWKADSADAEKVIKFLREEMGVKKIRFPEHCGIGIKPCSEEGTKRLVRAAIEYAIANDRDSVTLVHKGNIMKFTEGAFKDWGYQLAREEFGGELIDGGPWLKVKNPNTGKEIVIKDVIADAFLQQILLRPAEYDVIACMNLNGDYISDALAAQVGGIGIAPGANIG

SEQ ID NO: 9940 - protein, 317 aa, Pseudomonas aeruginosa UCBPP-PA14
MIEVIVGAIRLEAQDIHSFELFRADGAALPSFEPGAHIDLHLPNGLVRQYSLCGPAERPRHYRIAVLRCRDSRGGSATLHAELRVGQRLRIGEPRNLFPLSPEPGPRLLFAGGIGITPLLAMAERLARDGANFQLHYCAHSAERAAFVDYLDRCAFADRVHCHFDHGDSSRRADLRALLAASPRDAQLYLCGPAGFMQWIEESARELGWEASRLHREHFAAAPRDANADGTFEVQLASNGALIRVAAGQTVLAALREAGVDLPASCEQGICGTCLTRVLDGEPEHRDLYLSEEEQAANDCFTPCCSRSRSPRLVLDL

SEQ ID NO: 9941 - protein, 205 aa, Shigella boydii
YICLRPVRYYQGTPSPVKHPELTDMVIFRENSEDIYAGIEWKADSADAEKVIKFLREEMGVKKIRFPEHCGIGIKPCSEEGTKRLVRAAIEYAIANDRDSVTLVHKGNIMKFTEGAFKDWGYQLAREEFGGELIDGGPWLKVKNPNTGKEIVIKDVIADAFLQQILLRPAEYDVIACMNLNGDYISDALAAQVGGIGIAPGANIG

SEQ ID NO: 9942 - protein, 169 aa, Nicotiana tabacum
MASQSSKPQSIYDFTVKDAKGNDVDLSIYKGKVLIIVNVASQCGLTNSNYTDMTEIYKKYKDQGLEILAFPCNQFGGQEPGSIEEIQNMVCTRFKAEYPIFDKVDVNGDNAAPLYKFLKSSKGGFFGDSIKWNFSKFLVDKEGNVVDRYSPTTTPASMEKDIKKLLGVA

SEQ ID NO: 9943 - protein, 332 aa, Schizosaccharomyces pombe
MNSNFSYPALGVDGISSQISPIRDVWSTNLQQEMNLIMSLIERYPVVSMDTEFPGVVARPLGVFKSSDDYHYQTLRANVDSLKIIQIGLALSDEEGNAPVEACTWQFNFTFNLQDDMYAPESIELLTKSGIDFKKHQEVGIEPADFAELLIGSGLVLQEEVTWITFHSGYDFAYLLKAMTQIPLPAEYEEFYKILCIYFPKNYDIKYIMKSVLNNSKGLQDIADDLQIHRIGPQHQAGSDALLTARIFFEIRSRYFDGSIDSRMLNQLYGLGSTGSVLWHNNSSTPQIQFRDLPGAHPSPTPSNAGIPTTLTNTSSAPNFANSTFRFPPRVV

SEQ ID NO: 9944 - protein, 329 aa, Bdellovibrio bacteriovorus HD100
MAQFDKKIQKIGVYTSGGDAPGMNAAIRAVVRVGISQKLEVYGIHNGYVGMIENKIEPLQLRDMANIIQRGGTILKTGRSTEFMRPEGRARAAQNIKNLGLDALVCIGGDGSFRGAHALWEEHQIPVVGVPGTIDNDIFGSDKTIGFDTAVNTALEAIDRIRDTAASHDRLFIVEVMGRNSGFIASHVGLAGGAEEIFTPDANTTVEKAIDRINEAKSRGKTSSIIITAEGQKPGRAYDLADAIRKKSGMDAKVCILGHQQRGGSPTAADRILASRMGAAAVDALFKGYCDVMIGTEGERLIQVPLDLVYKNEKKNQLDLISLASVLAT

SEQ ID NO: 9945 - protein, 319 aa, Zea mays
PSPPLPLKLYCRRESAPPPADQTSAMTTLATDTAAWTREEDKAFENAVAASAAPPADGPPDDGWFTALVASVPARTAEEVRRHYEALVEDVAAIEAGRIPLPRYAGEESSAATPEGSGAAGPSTPKDGGGGSGHRREERKGGVGADAGKSCSKAEQERRKGVPWTEEEHRLFLLGLDKFGKGDWRSISRNFVISRTPTQVASHAQKYFIRLNSMNRDRRRSSIHDITSVTAGEVATAGAPITGGGPTAAGAMPMGPGGMKHHHPVPPMGMYGHAPMGHPVAGHMVAPAAVGTPVMFPPGHHSPYVLPVGYPAPPTKMHQ

SEQ ID NO: 9946 - protein, 272 aa, Brassica napus
  unsure (1)..(272): unsure at all Xaa locations
VDPRVRNWLGIGLERKMKSSLVTVNRMFAKIISTRREEISRGEGEQLMDALTYYIKAAPASDRLLKPSNDTFIRDVAFSLLLAGRDTXTSSVLTWFFWLLSKHPHVLTKIRQEINTKFDPTYLEKLVYLHAALYETMRLYPPVPFNHKSPLKSDVLPSGHKVKAESKIVICIYALGRMRSVWGEDALDFKPERWISESGELKHEPSYKFMAFNAGPRACLGKHLALQQMKIVAVELIQNYDFKFTEGHKIEAVPSIVLRIKHGLSVTVTKKM

SEQ ID NO: 9947 - protein, 160 aa, Brassica napus
MSTKKIVLKSSDGESFEVDEAVALESQTIAHMVEDDCVDNGIPLPNVTSKILAKVIEYCKKHVDAAASKTEAVDGGGSSDDDLKAWDAEFMKIDQATLFELILAANYLNIKNLLDLTCQTVADMIKGKTPEEIRTTFNIKNDFSPEEEEEVRRENQWAFE

SEQ ID NO: 9948 - protein, 298 aa, Solanum tuberosum
MCGGAILYDIIPRDRRLSSTDLWPSSADFWQTSSFSKPISTQNVPPKPKRAQLSRGSEQMKKRQRKNLYRGIRQRPWGKWAAEIRDPRKRVRVWLGTFNTAEAARAYDREARKIRGKKAKVNFPNEDDDHYYSHPEPPPLNIVYESYDTTSTYNQESNNCYPFHSIENTEPVMEFAIANKNSSGSAYNGIEDQNVEGEEQTVKNSNNRIVEEEEKTEDEVQILSDELMAYESLMKFYEIPYVDGQSVAATVNPAADTEVGGGSMELWSFDDVSRLQPSYNVSLIIVLFKLLHLFSLLN

SEQ ID NO: 9949 - protein, 282 aa, Glycine max
MGGGGAMRTVAKFATAGIRGVPSVRRASSQTAAASEVSPLQAAAWDDVDDWEVADGGEGTPRVVLGGVPSFQEATSATTELKHAIDKIYLSSNSSECDGCSLSGHVSVMSPSHSELENKSRVTEAILNPSESNRALQAFQLLSECPEAQSVVASIACDPNIWNAIVQNPALQDFFQSQQTADFEVEETHDQRLGNLPYSDSVYAFIDSLNVLQNVKFTVSEMLSRVPNYLQNMFGFLSGQTSSAVIDARGNTKANFIDPITMGGTFMGLAVLVVMVIMLKRA

SEQ ID NO: 9950 - protein, 158 aa, Neurospora crassa
MDEYSGYRYAYASEPWIVSGSGVSPPPSNDDLSLPKATVQKIVSEILPSSTGLSFAKEARDLLIDLCVEFISLVSSEANEISEKESKKTIACDHITQALERLGFADYVPAVLEAAAEHKEVQKGREKKANKFEQSGLSLEELERIQREQFADAAARHT

SEQ ID NO: 9951 - protein, 285 aa, Methylococcus capsulatus str. Bath
MCDAQDWFTESYPDNGSALSLKIRAKLHEEQTPFQRIEIYDTESFGKLMVIDGCTMVSDRDNFLYHEMMTHPVLYTHPAPKTVWIIGGGDCGSLREVLKHSEVEKAVQIDIDERVTRLAERYFPELCEANGDPRAELLFIDGIQWVKEAPDGCVDVIIVDSTDPVGPAEGLFNEAFFRQCHRCLRTDGILVQQSESPLFHLPLIASMHRIMRQAGFAQTRTLFFPQFIYPSGWWSATMAGKGDLNRFRADAAEAKLFPTRYYNADIHRAAFAVPEFFGDALRELV

SEQ ID NO: 9952 - protein, 317 aa, Magnaporthe grisea 70-15
MSSGRKIKLNSGHEIPQSNPNEVAKAVEHALRNGYRHIDGALVYGNEHEVGEGIRASGVPRSDIFLTSKLWNTFHHPDDVEAGIDLTLRDLGTHYVDLYLIHWPVSFAPRENPRELFPIDPATGATHVVDIPDADTWRAMERLVESGKARSIGVSNFTRGRLEKLLQTARIRPAVNQIEAHPYLQQRELLEWHRQQGIVVQAYSPTGNNIYGRPKPLDDPVVLEVAARVGRTPAQVLVQWAAQRGTVVLPKSVTPSRIDENFVDFELPADEVEKLNALERHARYNFPARLGVDIFGEATEEELKAAVQAFIEQRRQA

SEQ ID NO: 9953 - protein, 509 aa, Xanthomonas campestris pv. campestris str. ATCC 33913
MNALPSAKSLNTDPQSIFKPRYDNFIGGAWVAPQGGQYFDNTTPITGKVFTSIARSTAPDIEAALDAAHAAKEAWGKTSTTDRSNVLLKIADRIEQNLELLAYAETWDNGKPVRETLNADVPLCVDHFRYFAGAIRAQEGGISEIDSDTIAYHFHEPLGVVGQIIPWNFPLLMACWKLAPALAAGNCVVMKPAEQTPASILVLMEVIGDLLPPGVLNVVNGFGLEAGKPLASNPRIAKIAFTGETTTGRLIMQYASQNLIPVTLELGGKSPNIFFADVMAEDDDFLDKAVEGFVLFAFNQGEVCTCPSRALIQESIYDTFMEKALKRVAAIKQGNPLDPNTMVGAQASSEQLEKILSYIDIGKQEGAEILIGGERNMLDGELSDGFYVKPTVFKGHNKMRVFQEEIFGPVVSVTTFKDEAEALAIANDTLYGLGAGVWSRDASRLYRMGRAIQAGRVWTNCYHAYPAHAAFGGYKQSGIGRENHKMMLDHYQQTKNLLVSYSPKALGFF

SEQ ID NO: 9954 - protein, 654 aa, Zea mays
MAGPEKTVVWFRRDLRIQDNPALAAAAKGGSVLPIFIWCPSDYGQYYPGRCSRWWLKQSLTHLGKSLELLGCPLVLIRAEDSTLAALLECVRSISATRVVYNRLYDPISLVLDNKIKNELPAHGISVQSFNGDLLYEPWDVYDENGQAFTTFNKYWEKCMNLPIEISQYLAPTRLVAAPGLANVRCCSIDDLGLESSKDVESSNALLSRAWSPGWRNAENMLEEFVSYGLLEYSEHGMKVGGSTTSLLSPYLHFGELSVRMIYQLVKMRQVKWQNEGKSEAEESVRLFLRSIGFREYSRYLCFNYPFTHERSFLGNLKHYPWLLDEGRFKSWRQGMTGYPLVDAGMRELWATGWTHNRIRVIVSSFAVKFLQIPWIWGMKYFWDVLLDADLESDILGWQYISGSLPDGHELSRLDNPEVQGQKYDPDGEYVRTWIPELARMPTEWIHSPWAAPNSILQVAGVELGFNYPKPIVELHMARECLDDAISTMWQLDTAAKLAELDGEVVDDNLNNIRNFDIPKVVLNKKLSPSTSSMEHRVLSTNGKDEKSQPTEVKALYKQIIRDDMMNDSNMDDTCSTANLKVTRKRSSSDSAFNVPSCSSSLVMESRIHHNEPSSVLYSGYFQKTADRDGTSKVEDNDSEDSGTSISRPSKKAA

SEQ ID NO: 9955 - protein, 466 aa, Mycobacterium tuberculosis CDC1551
MSRTRVYAVPVPGSAQSAYACGVERLLASYRSIPATASIRLAKPTSNLFRARVKHDARGLDASGLTGVIGIDPEARTADVAGMCTYEDLIAATLHYGLSPLVVPQLRTITLGGAVTGLGIESASFRNGLPHESVLEMDILTGAGELLTVSPGQHSDLYRAFPNSYGTLGYSTRLRIQLEPVRPFVALRHIRFSSLTAMVAAMERIIDTGGLDGESVDYLDGVVFSADESYLCIGMQTSVPGPVSDYTGQDIYYRSIQHEAGIKEDRLTIHDYFWRWDTDWFWCSRSFGAQNPRLRRWWPRRYRRSSVYWRLMALDQRFGIADRFENSRGRPARERVVQDIEVPIERTCEFLEWFGENVPISPIWLCPLRLRDHAGWPLYPIRPDRSYVNIGFWSSVPVGATEGATNRKIENKVSALDGHKSLYSDSFYTREEFDELYGGETYNTVKKAYDPDSRLLDLYAKAVQRR

SEQ ID NO: 9956 - protein, 367 aa, Glycine max
  unsure (1)..(367): unsure at all Xaa locations
MGSTGETQITPTHVSDEEANLFAMQLASASVLPMILKSALELDLLEIIAKAAPGVHLSPTDISSQLPTQNPDAPVMLDRILRLWACYNILSFSLRTLPDGKVERLYGLAPVAKYLVKNEDGVSIAALNLMNQDKVLMESWYLFDRCSPXGGIPFNKXAYGMTAFEYHGTDPRFNKVFNKGMADHSTITMKKILETYTGFESLKSLVDVGGGTGAVINMIVSKHPTIKGINFDLPHVIEDAPSYPGVEHVGGDMFASVPKADXAIFMKWICHDWSDEHCLKFLKNCYEALPDNGKVIVAECILPVAPDSSLATKGVVHIDVIMLAHNPGGKERTEKEFEALAKGSGFQGFRVVCCAFNTNIMEFLKKI

SEQ ID NO: 9957 - protein, 202 aa, Shigella boydii
YICLRPVRYYQGTPSPVKHPELTDMVIFRENSEDIYAGIEWKADSADAEKVIKFLREEMGVKKIRFPEHCGIGIKPCSEEGTKRLVRAAIEYAIANDRDSVTLVHKGNIMKFTEGAFKDWGYQLAREEFGGELIDGGPWLKVKNPNTGKEIVIKDVIADAFLQQILLRPAEYDVIACMNLNGDYISDALAAQVGGIGIAPGA

SEQ ID NO: 9958 - protein, 449 aa, GIBBERELLA ZEAE PH-1
MGNGNSTPLQDCLNAVCANQSNCVRYPGDPLFAWWSTPFNLEFPVVPAAVIRPQTVIQVAETVKCATNHGAKVQALSGGHSYGMNNKTWYASFGAGMNLGELDEHLHANGRRAIAHGTCPGVGTGGHLTVGGLGPISRQWGSALDHILEIEVVTADGTVQRASYTKNSGLFWALRGAGASFGIVTKFMVKTHPEPGRVIQYSYKFAFTSHDEMAKLYREWQAVVGDPNMDRRFSSLFIVQPFGALITGTFFGTRSQFMITRIPSRLPGTFRSNAWITDWAALLLHEAEAVGCALGSVPTAFYGKSLSLSEQDLLSDKAITDLFKYLEQKRSELAPVTIIFNSEGGAMMDIPADATAYPHRNSIIMYQSYGIGVGKVSAATRELLDGVHKRIQRSAPGARSTYAGYIDPWADRKAAQKLYWADNLPRLRELKKAWDPTDVFHNPQSVDPA

SEQ ID NO: 9959 - protein, 211 aa, Shigella boydii
YICLRPVRYYQGTPSPVKHPELTDMVIFRENSEDIYAGIEWKADSADAEKVIKFLREEMGVKKIRFPEHCGIGIKPCSEEGTKRLVRAAIEYAIANDRDSVTLVHKGNIMKFTEGAFKDWGYQLAREEFGGELIDGGPWLKVKNPNTGKEIVIKDVIADAFLQQILLRPAEYDVIACMNLNGDYISDALAAQVGGIGIAPGANIGDECALF

SEQ ID NO: 9960 - protein, 124 aa, Zea mays
  unsure (1)..(124): unsure at all Xaa locations
MAGCCVFLRWPSASPSRIGYRSLVDAAADDAAPPSTVTVVVGKERRAFAVDRLVLDSYPLRLLLETAARREERRAXGGAGAIFVXDVDAILFEHILWLACDARSVSQILHLDLKEIIDFYAQDA

SEQ ID NO: 9961 - protein, 459 aa, Anabaena variabilis ATCC 29413
MLTQLPNPISVPSWWQLINWIADPIGFQKKYSQKYGDIFSMQLAGIGSFVILGEPQAIQEIFTQDSRFDIGRGNKLAEPLIGRTSLMLMDGDRHRRERKLLMPPFHGEKLQAYAQQICLITHQIASQWQIGQPFVARSAMQKLSLEVIIQIVFGLANGERYQQIKPLFTDWLNMTDSPLRSSMLFLKSLQQDWGNRSPWGQMKYQQRCIYDLLQAEIEEKRTKENERRGDVLSLMMAARDENGQAMTDEELKDELLTILFAGHETTATTIAWAFYQIFRNVNVREKLQQELDSLGENPNPMEIAQLPYLTAVCQETLRMYPVLPTLFPRITKSSINIAGYQLEPNTTLMASIYLIHYREDLYPHPQQFRPERFIERQYSPSEYIPFGGGSRRCLGYALALLEIKLVIATVLSNYQLALAEDKPIKVQRRGFTLAPEGGVRMIMTGKKSLRFEQSNKIFN

SEQ ID NO: 9962 - protein, 203 aa, Shigella boydii
ICLRPVRYYQGTPSPVKHPELTDMVIFRENSEDIYAGIEWKADSADAEKVIKFLREEMGVKKIRFPEHCGIGIKPCSEEGTKRLVRAAIEYAIANDRDSVTLVHKGNIMKFTEGAFKDWGYQLAREEFGGELIDGGPWLKVKNPNTGKEIVIKDVIADAFLQQILLRPAEYDVIACMNLNGDYISDALAAQVGGIGIAPGANI

SEQ ID NO: 9963 - protein, 200 aa, Escherichia albertii
RPVRYYQGTPSPVKHPELTDMVIFRENSEDIYAGIEWKADSADAEKVIKFLREEMGVKKIRFPEHCGIGIKPCSEEGTKRLVRAAIEYAIANDRDSVTLVHKGNIMKFTEGAFKDWGYQLAREEFGGELIDGGPWLKVKNPNTGKEIVIKDVIADAFLQQILLRPAEYDVIACMNLNGDYISDALAAQVGGIGIAPGANI

SEQ ID NO: 9964 - protein, 121 aa, Zea mays
MSGENDNGGAKRRGSVKWFAAEKGFGFITPEDGGEDLFVHQSSIRSEGYRSLAEGESVEFLVEVDNSSGRTKAIEVTGPDGAPVQGTSRGSAGGRGGFGGDGYGGRGGGRGSYGGRGGGGG

SEQ ID NO: 9965 - protein, 345 aa, Thermoplasma acidophilum DSM 1728
METVAVKLTGTKFFDTGLSTGTYFLFETAFASVTLALVSVVVLRKMKMSAFMLFSIIYFIFIWTIPAAWIWNPTGWLYKLGVRDFAGGLVVHVASGFAALAIMVRIWQEEKKMGLKESKKENLNLNSGWLTLSIILLWVGWFGFNPGSELAFTTETVIVVITTFLAAASAMVSTMLTKFLVSKQDPGLIYAVNGVLMGLIVITPLAGYVSPGSAIILGLISGPIFVSAESIFSKHKWYSDPIGVLPGHMVGGIFGLLMIAFFTQTPFADASGASNLPNGILFGGGIMALHQLGLEAMAVVVVGAFVFTVSYASVYAISLLLNGILRDSEYSPARPANRLAKDTGA

SEQ ID NO: 9966 - protein, 274 aa, Arabidopsis thaliana
MSLFLKDDSIQIREVWNDNLQEEMDLIRDVVDDFPYVAMDTEFPGIVVRPVGTFKSNADYHYETLKTNVNILKMIQLGLTFSNEQGNLPTCGTDKYCIWQFNFREFDLDSDIFALDSIELLKQSGIDLAKNTLDGIDSKRFAELLMSSGIVLNENVHWVTFHSGYDFGYLLKLLTCQNLPDSQTDFFKLINVYFPTVYDIKHLMKFCNSLHGGLNKLAELLEVERVGICHQAGSDSLLTSCTFRKLKENFFVGPLHKYSGVLYGLGVENGQVAI

SEQ ID NO: 9967 - protein, 360 aa, Arabidopsis thaliana
MNEIHQPLARRVWRSNVDEEMARMAECLKRFPLIAFDTEYPGIIFRTYFDSSSDECYRAMKGNVENTKLIQCGFTLFNAKGEIGGVWEINFSNFGDPSDTRNELSIEFLRRHGLDLQKIRDEGVDMFGYGFFPKLMTVFRSQKHVEFVTFQGAYDFAYFLSILNHGKLPETHGEFATEVVKVFGQVYDTKVMAGFCEGLGEHLGLSKLAQLLQITRVGRAHHAGSDSLMTALVFIKLKHVYEDSRFARGLIYGIGKSNLVAAPAPAPVPEPTLPLMCQQNVASYPVFHNGYVQNYEQPQLVSYDPSGAPWAFCNATGTYVQLTHLPASTFAYPSQTPSATVDYLGPVPNYYNNNACYVVE

SEQ ID NO: 9968 - protein, 506 aa, Zea mays
MKTSVVVAALAAVLFAAQSYASLAGASGPRVIIVGAGMSGISAGKTLWEAGVRDLLILEATGRVGGRMHKHNFGGINVEIGANWVEGLGGDQLNPIWPLVNSTLKLRNFYSDFDSVVGNVYKENGGGLYDEEYVQKRMDRAYEVEELGANLTKKMHPSGRDDISVLAMQRLFNHQPNGPTTPVDMALDYFIYDYEFAEPPRVTSLQNTQPTPTNADFGEDNYFVADQRGYESIIHSIGSSYLSTDGNGKLKDRRILLNKVVRQITYNKQGVVVKTEDGSSYRADYVVVSTSLGVLQTDLIQFKPQLPFWKIAAIYSFDMGVYTKIFLKFPERFWPVGEGKQFFMYASSRRGYYALWQSFEREYPGANVLLATVTDDESRRIERQSDDQTKAEVAEVLRDMFPAADVPGPDQIDVYVPRWWSDRFFKGSYSNWPVGVSRYEYDQLRAPVGRVYFTGEHTSERYNGYVHGAYLAGIDSANILINYIFKNEEYKVRGKYDVDDLIAQAR

SEQ ID NO: 9969 - protein, 167 aa, Ipomoea nil
MDLRNFGLSNFGLEPQLLSTIQDMLDFADDHDRAGRAPPEQPIRAYVRDAKAMAATPADVKEYPNSYVFIADMPGVKAAEIKVQVEDDNVLVVSGERTEREKDEKDGVKYLRMERRVGKFMRKFVLPENANVEAINAVYQDGVLQVTVEKLPPPEPKKPKTVEVKVA

SEQ ID NO: 9970 - protein, 205 aa, Shigella boydii
PVRYYQGTPSPVKHPELTDMVIFRENSEDIYAGIEWKADSADAEKVIKFLREEMGVKKIRFPEHCGIGIKPCSEEGTKRLVRAAIEYAIANDRDSVTLVHKGNIMKFTEGAFKDWGYQLAREEFGGELIDGGPWLKVKNPNTGKEIVIKDVIADAFLQQILLRPAEYDVIACMNLNGDYISDALAAQVGGIGIAPGANIGDECAL

SEQ ID NO: 9971 - protein, 427 aa, Coxiella burnetii RSA 493
MTELTGVSIVTYQHIKVPSQGEKITVNKAVLEVPDRPIIPFIEGDGIGIDIAPVMKNVVDAAVEKSYAGKRKIEWMEIYAGEKATKVYGKDNWLPDETLEAIKEYQVAIKGPLTTPVGGGIRSLNVALRQQLDLYVCLRPVRYFTGVPSPVKTPEKVNMVIFRENSEDIYAGIEWPAGSPEAVKLINFLQNEMGVKKIRFPETAGIGIKPVSKEGTSRLVRRAIQYAIDNDRDSVTLVHKGNIMKFTEGAFKDWGYEVAVKEFGAKPLDGGPWHVFENPKTGQKITIKDVIADAFLQQILLRPAEYSVIATLNLNGDYISDALAAEVGGIGIAPGANLSDTVGLFEATHGTAPKYAGQDKVNPGSLILSAEMMLRYLGWKEAADLVVQGIEGAIESKTVTYDFARLMTGAKEVSTSQFGKAIIKHIL

SEQ ID NO: 9972 - protein, 391 aa, Ralstonia eutropha JMP134
MLREHGLAITTHFYREMFAARPELTQLFNMGNQANGSQQQSLASAVFAYAANIDNANALAPVVERIVHKHAAVGLKPAHYPIVGRHLLGAISAVLGEAATPDLIAAWDEAYWLLAGELIAAEARLYQSTGMAAGERIAVRVDRREVQSDTVVALTLSAVDGQPLRDFRPGQYVSVEVTLDDGNRQQRQYSLSAERGLPTWQISVKREDGDHATPAGAVSNWLHANAQPGTELSVSAPFGDFAPRLDNHRPIVLLSAGIGITPMLSVLRTLAAQGSRREILFAHAARDGRHHAHRADVAWARERLPQLRTHISYEQPQAADVAGRDYDHAGTMPVAALLDAPDNRLFIDGDFHLCGPLGFMQAQRHALISAGVPVGHIHREVFGPDLLDDLL

SEQ ID NO: 9973 - protein, 252 aa, Arabidopsis thaliana
MALIREVVDDFPFVAMDTEFPGIVCRPVGTFKTNTEYHYETLKTNVNILKMIQLGLTFSDEKGNLPTCGTDNKYCIWQFNFREFDLESDIYATDSIELLRQSGIDFVKNNEFGIDSKRFAELLMSSGIVLNENVHWVTFHSGYDFGYLLKLLTCQNLPETQTGFFEMISVYFPRVYDIKHLMKFCNSLHGGLNKLAELLDVERVGICHQAGSDSLLTSCTFRKLQENFFIGSMEKYSGVLYGLGVENGQIVH

SEQ ID NO: 9974 - protein, 455 aa, Coxiella burnetii RSA 493
MPIRTTNPSTGEVIKTYQEMTDQQVEDIINDVHYDYEKWRSVGFKERGGKLRRIAERLRKNKTDYAKLIATEMGKPITAGEAEAEKCAWVCDYYADHAEALLKPRIVNTDWKKSYVTYQPSGVIFGIMPWNFPLWQVFRFAAPNLMAGHGCLLKHASISTGTALAIEKLIQSADLPDNIFRTLVINTEKASDVISHPKISAVTLTGSEGAGKAVGSAAGKALKKVVLELGGNDAYLILKDADLEKAAEACVESRLSNSGQSCIAAKRLIIVENVYDEFKALVIEKAQSYRMGDPLKKETELGPLARSDLRDTVHGQVRESIDKGALLETGGEIPESKGFYYPPTVLSGVRAGQPAFDDEVFGPVIALIRAKDEKHAIEIANNSKFGLGAAVFTNDNERGEKIAASELQAGTCVVNTFVKSDPRLPFGGVKHSGYGRELAAEGIRSFMNVKTVVVD

SEQ ID NO: 9975 - protein, 278 aa, Zea mays
MDSSSFLPAAGAENGSAAGGANNGGAAQQHAAPAIREQDRLMPIANVIRIMRRVLPAHAKISDDAKETIQECVSEYISFITGEANERCQREQRKTITAEDVLWAMSRLGFDDYVEPLGAYLHRYREFEGDARGVGLVPGAAPSRGGDHHPHSMSPAAMLKSRGPVSGAAMLPHHHHHHDMQMHAAMYGGTAVPPPAGPPHHGGFLMPHPQGSSHYLPYAYEPTYGGEHAMAAYYGGAAYAPGNGGSGDGSGSGGGGGSASHTPQGSGGLEHPHPFAYK

SEQ ID NO: 9976 - protein, 326 aa, Candida albicans SC5314
MKLATEIDFKLNNGKTIPALGLGTVASKDPKDVKDQVITAVKAGYRHIDTAWFYGTEKYIGEALQELFAEGIIKREDLFITTKFWPSYWANPEKSLDESLKDLQLDYVDLFLQHWPICLHGDENGLPKIPKDENGELIYDDDPTPNGTKYIDVYHKLEDILETTTKVRSIGVSNYSIPKLRQLLPKVKKHIPVCNQIEYHPQLPQQDLVDYCTKNNILISCYSPVGSYGAPVLKIPLVKQLAEKYQVTENEIADAYNILNGRVTLPRSSNLERIKTIIRLPHLTKEELDELYQVGVKDPQRYICDPWGYGIGFRWWKGDTLSKEFD

SEQ ID NO: 9977 - protein, 113 aa, Triticum aestivum
MAPTVMASSATSVAPFQGLKSTAGLPVSRRSNGASLGSVSNGGRIRCMQVWPIEGIKKFETLSYLPPLSTEALLKQVDYLDPLQSGLPLPLSSKVRFNPSVEAKMRPRVNRAA

SEQ ID NO: 9978 - protein, 148 aa, Brassica napus
  unsure (1)..(148): unsure at all Xaa locations
KREQVXASSMFXSXAVXXXXAQATMVAPFTGXLKSSXAXPVXRKANXXITSIXXXXGRXSCMKVWPPXGKXKXESLXYLPDLTEVELGKEVDYLLRNKXIPXVEXEXEXGXXYXEXGSXPGYYDGXYXTMXNLPLVGCXDSAQXLEGS

SEQ ID NO: 9979 - protein, 402 aa, Pseudomonas putida KT2440
MENMHSAMDSLVHGSNTLFILMGAILVLAMHAGFAFLEVGTVRHKNQVNALSKILSDFAISALVYFFIGYWIAYGVNFFQPATTLAVDHGYALVKCFFLLTFAAAIPAIISGGIAERARFVPQLCATALIVAFVYPFFEGVVWNGNLGLQAWLQARFGAPFHDFAGSVVVHAMGGWLALAAVLLLGARRGRYRDGRLVAFAPSSIPFLALGSWILIIGWFGFNVMSAQTLQGVSGLVAINSLMAMVGGTLSALLAGRNDPGFLHNGPLAGLVAICAGSDLMHPVGALATGLVAGALFVWTFTAAQNRWKIDDVLGVWPLHGLCGVWGGIACGVFGQVALGGMGGVSLVSQLLGSLMGVLVALAGGFAVYGAIRALHGLRLSHEQEFQGADLSLHRIGATSQD

SEQ ID NO: 9980 - protein, 187 aa, Triticum aestivum
SPPLPSPRAPPSPSSSSIPMQQRRGRPSGTDGSDFSYRMVVDSRYQRVADGRSRLARLMLVQTLHQVAGGALLLLSLSKGAEINKFAVLSLAAGLLAILLGEFGRRRTVAVFLRLYTSLSSIAIAFSVTCIIRSDLFVKITKQNTAAITSYEMFDVVRVALGVLLQLVVIATTTRLLQNMSPPKRTS

SEQ ID NO: 9981 - protein, 123 aa, Oryza sativa (japonica cultivar-group)
MIQPQTLLNVADNSGARKLMCIRVIGAASNQQYARIGDVIVAVIKDAVPQMPLERSQVIRAVIVRTCKEFKCEDGIIIRYDDNAAVIIDQKGNPKGTRVFGTIVEELRELNFTKLVSLAPEVL

SEQ ID NO: 9982 - protein, 230 aa, Helicobacter pylori J99
MALYDRANSRNAYAEDSVLHESELVSFVKTTYKFFAGSLLLATVGALLGLMNFQAVVQYKWVFFIAEIVAFFGLMFSKSKPGLNLFMLFAFTSLSGVTLVPLLGMVIAKAGLGAVWQALGMTTIVFGLMSVYALKTKNDLANMGKMLFIALIVVVVCSLINLFLGSPMFQVVIAGASAILFSLYIAYDTQNIVKGMYDSPIDAAVSLYLDFLNVFISILQIIGIFSDRDK

SEQ ID NO: 9983 - protein, 269 aa, Fischerella sp. Cohn [sequence omitted]

SEQ ID NO: 9984 - protein, 337 aa, Methanococcoides burtonii DSM 6242
MSKTAAVIEGDGVGPELVDAMVKVAEAVGTNVEFVKCEAGVQWWEKNGGATLIPDETWALLDEADACFKGPTTTPGGAGSPRSVAVSIRQKYNLYANVRPIKTFPNTNNPLGDVDFVCVREGTEGMYIGEEVKLTDDVYIAIRKITRPACKNIATYSFEEAKKRGYDTVVPIHKSNILKMTCGTFLEEVEKVAEGYPGIDVWEYHVDNIAQQLIKNPQLFNNKILLSTNLFMDVISEECSALIGSIGLIYSANIGDNFAMFEPAHGSAPKYAGLDKVNPVATILAGAWMLDYLGESDKFAQIFKATEDVISEGKHLTYDLGGKASLSEMTDAIISKL

SEQ ID NO: 9985 - protein, 526 aa, Glycine max
MESRTKSNPQLTRALCYANDGNQQGRSPSVIVIGGGMAGIAAARSLHDASLQVVLLESRERIGGRIHTDYSFGFPVDMGASWLHGVSNENPLASVIGRLGLPLYRTSGDNSILYDHDLESYGLFDMDGKQVPQELVAKVGEIFEAILQETDKIRQESSEDMSVLRGLSIVFDRKPELRLEGIAYKVLQWYLCRLEGWFAADTDAISLKGWDQEVLLPGGHGLMVRGYLPVVNSLAKGLDIRLGHRVTKVVRRYNGVKVTVENGKTFFADAAVIAVPLGVLKAKKILFEPKLPDWKEAAIADLGIGLENKIILHFENVFWPNVEFLGVVADTPYECSYFLNLHKATGRAVLVYMPSGQLAKDVEKMPDEAAVNFAFMQLKKIFPDASSPIQYLVSRWGSDINSLGSYSYDAVGKPHELYERLRVPVDNLFFAGEATSMSYPGSVHGAYSTGTMAAEDCRMRVLERYGEVDLFQPVMGEEGSMGSVCSASLLLCLIDLDMRNVQCINIQTFHFSIALSIFEQIKNEFC

SEQ ID NO: 9986 - protein, 386 aa, Triticum aestivum
  unsure (1)..(386): unsure at all Xaa locations
MEKNHTLVPVPSHTSPSLPPRSLARRGSGPRTQARNRLDSPTHPDRALELPAELAAMLSARTAAAASPAASLWKRGGGAGARGDGCTSCLEVRRRAAAVTVRAAQPKRVEAVAMESAAETAEAEKEVAAEKEVAAAGGGVEDKYGEDRATEELPVTPWAFSVASGYTLLRDPHHNKGLAFTERERDAHYLRGLLPPGVVSQDLQVKKIMHNLRQYKVPLQRYVAMMDLQERNERLFYKLLIDNVEELLPVVYTPTVGEACQKYGSIFRRPQGLYVSLRDKGKVIDVLRNWPERNIQVIVVTDGERILGLGDMGCQGMGIPVGKLXSYTALGGVRPTACLPITIDVGTNNEQLLNDEFYIGLRQRLATGEEYHELTEEFMVAVKQIY

SEQ ID NO: 9987 - protein, 177 aa, Magnaporthe grisea 70-15
MSVSCRYAAQCCSRQLRVSPSVRVSGVAVQRIARRHNSTEAASPKITTIVDQISQLTLLETAELVSSLKSRLNIPDLPVGGFAAAAPAAAPAAAEEADEPAPAAAAKTVFTLKLMSFDAGAKAKIIKEVKGLLGLSLVDSKKFVESAPKVMKESVPKEDAEKIIATMKELGAVVTME

SEQ ID NO: 9988 - protein, 405 aa, Bacillus thuringiensis serovar konkukian str. 97-27
MPKHRKQSKIKIYRITSYKKDKRSELDSDKFELEQQEVENKQGKHSKQDKQDKQDNLDKQDNLDKQDNLDKQDNLDKPDNLDKPDNLDKQDNLDKQVQSENVVIVPTDSHNLDIWDEISLKEIQAGEHTNLFAEQSNYQNINLLQVSDIRLYLDKQLQFSSIDEQIYHEALVHPIMSKVIDPKRVLILGGGDGLALREVLKYETVLHVDLVDLDGSMIDMARNVPELVSLNKNAFFDNRVNTHVCDAKEFLSSPSSLYDVIIIDFPDPATELLSTLYTSELFARIATFLTEDGAFVCQSNSPADAPLVYWSIGNTIEHAGLTVKSYHTIVPSFGTDWGFHIAANSADVLDQIEQLYVVPTPRTLPSLLFPLFQFKEEHLEQRNFALLNSESNLILHQCYKKEMEF

SEQ ID NO: 9989 - protein, 126 aa, Zea mays
MPVAASLMAIELEKDQLAWAEQQRQQNRRQTMVVCRKSAAAVAKGQQRQNASPPSPKPPPAGGLSAEAFLVLACVAVSLIVLPLVLPPLPPPPPLLLLVPVCLLLLLAALATFMPSDVRSMPSSNL

SEQ ID NO: 9990 - protein, 142 aa, Escherichia coli
RDLELARRFAQAIHAKYPGKLLAYNCSPSFNWQKNLDDKTIASFQQQLSDMGYKFQFITLAGIHSMWFNMFDLANAYAQGEGMKHYVEKVQQPEFAAAKDGYTFVSHQQEVGTGYFDKVTTIIQGGTSSVTALTGSTEESQF

SEQ ID NO: 9991 - protein, 198 aa, Shigella boydii
VRYYQGTPSPVKHPELTDMVIFRENSEDIYAGIEWKADSADAEKVIKFLREEMGVKKIRFPEHCGIGIKPCSEEGTKRLVRAAIEYAIANDRDSVTLVHKGNIMKFTEGAFKDWGYQLAREEFGGELIDGGPWLKVKNPNTGKEIVIKDVIADAFLQQILLRPAEYDVIACMNLNGDYISDALAAQVGGIGIAPGANI

SEQ ID NO: 9992 - protein, 169 aa, Zea mays
MGERVKGTVKWFNVTKGFGFISPDDGGEDLFVHQSSIKSDGYRSLNENDAVEFEIITGDDGRTKANDVTAPGGGALSGGSRPVEGGGDRGGRGGYGGGGGGYGGGGGGYGGGGGGYGGGGGGYGGGGYGGGGGGGRGCYKCGEEGHISRDCPQGGGGGYGGGEYGGRDR

SEQ ID NO: 9993 - protein, 201 aa, Shigella boydii
VRYYQGTPSPVKHPELTDMVIFRENSEDIYAGIEWKADSADAEKVIKFLREEMGVKKIRFPEHCGIGIKPCSEEGTKRLVRAAIEYAIANDRDSVTLVHKGNIMKFTEGAFKDWGYQLAREEFGGELIDGGPWLKVKNPNTGKEIVIKDVIADAFLQQILLRPAEYDVIACMNLNGDYISDALAAQVGGIGIAPGANIGDE

SEQ ID NO: 9994 - protein, 243 aa, Triticum aestivum
  unsure (1)..(243): unsure at all Xaa locations
SPLWALALMNQDKVLMESWNYLKDTVXLDGGIPFNKAYGMSAFEYPGTDPRFNHVFNEGMKNHSIIITKKLLESYKGFEGLNTLVDVGGGVGATVAAITAHYPTIKGINFDLPHVISEAPPFPGVTHVGGDMFQKVPSGDAILMKWILHDWSDEHCGTLLKNCYNALPPHGKVVLVECILPVNPEATPKAQGVFHVDMIMLAHNPGGRERYEREFEALAKGAGFATMKTTYIYANAWAIEFTK

SEQ ID NO: 9995 - protein, 511 aa, Physcomitrella patens
MAMDMARIEVEPLVEVHNNTNNLLVHCVLDALPDSSPCLKSSETSFEAVVVKEDEEGGRPLFGKPELHPASPSSDTAAAANGEFARCLNFVTEADCGDVGVQCFEDFGTLPDCGEAGISREEGGGRDGEQVELLESMSLDGSRNSENLELGELGELLQGSETLDSVPGNEVGEEEALLLAKAAKATGVVVSASDSGECSSVDRKENQQSPKSCKSAAPGKKKAKVDWTPELHRRFVHAVEQLGVEKAFPSRILELMGVQCLTRHNIASHLQKYRSHRRHLAAREAEAASWTHRRAYTQMPWSRSSRRDGLPYLVPLHTPHIQPRPSMVMAMQPQLQTQHTPVSTPLKVWGYPTVDHSSVHMWQQPAVATPSYWQAPDGSYWQHPATNYDAYSARACYPHPMRVSLGTTHAGSPMMAPGFPDESYYGEDVLAATMYLCNQSYDSELGRAAGVAACSKPPETHLSKEVLDAAIGEALANPWTPPPLGLKPPSMEGVIAELQRQGINTVPPSTC

SEQ ID NO: 9996 - protein, 205 aa, Shigella boydii
VRYYQGTPSPVKHPELTDMVIFRENSEDIYAGIEWKADSADAEKVIKFLREEMGVKKIRFPEHCGIGIKPCSEEGTKRLVRAAIEYAIANDRDSVTLVHKGNIMKFTEGAFKDWGYQLAREEFGGELIDGGPWLKVKNPNTGKEIVIKDVIADAFLQQILLRPAEYDVIACMNLNGDYISDALAAQVGGIGIAPGANIGDECALF

SEQ ID NO: 9997 - protein, 150 aa, Chlamydophila pneumoniae TW-183
MQLLSPAFAYGAPIPKKYTCQGAGISPPLTFVDVPGAAQSLALIVEDPDVPKEIRSDGLWIHWIVYNLSTTITNLAEGAEIFAVQGLNTSGKPVYEGPCPPDKQHRYFFTLFALDVVLPEEENVTRDQLYEAMEFHIIEQAELMGTYEKS

SEQ ID NO: 9998 - protein, 196 aa, Shigella boydii
VRYYQGTPSPVKHPELTDMVIFRENSEDIYAGIEWKADSADAEKVIKFLREEMGVKKIRFPEHCGIGIKPCSEEGTKRLVRAAIEYAIANDRDSVTLVHKGNIMKFTEGAFKDWGYQLAREEFGGELIDGGPWLKVKNPNTGKEIVIKDVIADAFLQQILLRPAEYDVIACMNLNGDYISDALAAQVGGIGIAPGA

SEQ ID NO: 9999 - protein, 181 aa, Lactuca sativa
MASISSSAIATVNRTTSTQASLAAPFTGLKSNVAFPVTKKANNDFSSLPSNGGRVQCMKVWPPIGLKKYETLSYLPPLSDEALSKEIDYLIRNKWIPCLEFELEHGFVYREHHHSPGYYDGRYWTMWKLPMFGCTDSAQVMKEVGECKKEYPNAFIRVIGFDNIRQVQCISFIVAKPPGVL

SEQ ID NO: 10000 - protein, 180 aa, Stellaria longipes
MASSIMSSAAVATRSNGAQASMVAPFTGLKSNASFPVSRKTNLDITSIASNGGRVRCMQVWPPINMKKYETLSYLPDLSSEQLLSEIEYLLKNGWVPCLEFETEHGFVYREHTSSPGYYDGRYWTMWKLPMFGCTDATQVAAEVQEAKKAYPDAHIRIIGFDNVRQVQCISFIAYKPEAF

SEQ ID NO: 10001 - protein, 159 aa, Zea mays
MASDRVLGTVKWFNGTKGFGFITPDDGSEDLFVHQSSIKSDGYRSLNDGDAVEYTVGSGNDGRAKALDVTAPGGGPLAGGERPDGGNGGGRGGYGGGDRGYGGGGDRGYGGGGDRGYGGGDRGYGGGGDRGYGGGGDRGYGGGGGYGGGYGGGGGGGGP

SEQ ID NO: 10002 - protein, 414 aa, Arabidopsis thaliana
MGLCWGSPSDSPPTTTPSSTGNISSVGTFKSSNNTTTTGTSRGSNISSNSGFSVASGEDAYPDGQILPIPNLRIFSLAELRASTRNFRSENVLGEGGFGKVFKGWLEDKTPGKQSNGTVIAVKKLNAESFQGFEEWQCEVNFLGRVSHPNLVKLLGYCLEGEELLLVYEYMQKGSLENHLFRKGSAVQPLSWEIRLKIAIGAAKGLAFLHASEKQVIYRDFKASNILLDGSYNAKISDFGLAKLGPSASQSHITTRVMGTHGYAAPEYVATGHLYVKSDVYGFGVVLAEILTGLHALDPTRPTGQHNLTEWIKPHLSERRKLRSIMDPRLEGKYPFKSAFRVAQLALKCLGPEPKNRPSMKEVVESLELIEAANEKPLERRTTRASPSIRQQQGHYRPQQLSSFRPRQNVSRAH

SEQ ID NO: 10003 - protein, 507 aa, Streptomyces avermitilis MA-4680
MAARAAGRRPCLTRTTPQEAIVPDLFIDGEWRAALDGRTREIRCPADGSLVGVVDEAGGKDTAEAIAAARRAFDEGPWPWLPAADRGDLLLRVADLLVRDRAKLARAESLDTGKRFVESEYDIDDIVNCFRYFGRLAAAESGRVIDTGSASTDSRVVYEPVGVCALITPWNYPLLQTAWKVAPALAAGNTFVLKPSELTPHTAIHLMRLLQEAELPPGVANLVLGAGPEAGAPLADHPDVDLVSFTGGLHTGRRLMAAAAGTVKKVALELGGKNPNIVFADADFDTAVDMALTAVFLHSGQVCSAGARLLVEDSLHDRFVDEVVRRAAEIRLGGPFDERAQTGALISAAHRAKVEAYVAKGLDEGAVLRCGGRRPEGLDEGFFYLPTVLDECTSGMSVIQDESFGPVLTVERFTGEAEAVRLANDTVYGLAGAVWTTDEAKAQRVVSRLRIGTVWINDYHPYVPQAEWGGYKQSGFGRELGPSGLAEYREAKHIWRNTDPSPQGWFA

SEQ ID NO: 10004 - protein, 168 aa, Zea mays
  unsure (1)..(168): unsure at all Xaa locations
MDRADPARGRLAVLSSHLRGAGVEEASVLERSPVSAAAPGSRDGALAVXNXRTGKRHEVKVSEEGTVRATDFXEITTGXDDKGLKIYDPGYXLNTAPVRSSIWXIDEEEEFLRYRVYPTETLGESTXFVEGALPFYGRGNLPTQRSXWAGGNFAISQNFGGPQGTGGK

SEQ ID NO: 10005 - protein, 427 aa, Salmonella enterica subsp. enterica serovar Typhi Ty2
MADTKAKITLTGDTAIELDVLKGTLGQDVIDIRSLGSKGVFTFDPGFTSTASCESKITFIDGDEGILLHRGFPIDQLATDSNYLEVCYILLYGEKPTQEEYDEFRTTVTRHTMIHEQITRLFHAFRRDSHPMAVMCGITGALAAFYHDSLDVNNPRHREIAAFRLLSKMPTMAAMCYKYSIGQPFVYPRNDLSYAGNFLNMMFSTPCETYEVNPVLERAMDRILILHADHEQNASTSTVRTAGSSGANPFACIAAGIASLWGPAHGGANEAALKMLEEISSVKHIPEFVRRAKDKNDSFRLMGFGHRVYKNYDPRATVMRETCHEVLKELGTKDDLLEVAMGLEHIALNDPYFIEKKLYPNVDFYSGIILKAMGIPSSMFTVIFAMARTVGWIAHWNEMHTDGMKIARPRQLYTGYDKRDFKSALKR

SEQ ID NO: 10006 - protein, 195 aa, Zea mays
APAFCELSLPLTKEKGAAFSPSHPAMQRHVASGRPSGTDGSDFSYRMVVESRYQRVAEGRSRLARLILVQALHLVAGGLLLLLSLSKGAAVNKFAVLSMAAGFLAIVVGELGRMRTMAVLLRLYTSLSSIAVAFSVTCIIRSELFLKVMKQNTEAITSYEMLDAVRVALGILLQMVVIATTTRLLQNMSPPKRAS

SEQ ID NO: 10007 - protein, 78 aa, Triticum aestivum
SARGPIGVSRYEYDQLRAPVGRVYFTGEHTSERYNGYVHGAYLAGIDSANILINHIFKNEEYKVRGKYEPDDQIAKAK

SEQ ID NO: 10008 - protein, 165 aa, Triticum aestivum
  unsure (1)..(165): unsure at all Xaa locations
MAAFLRSKCSPVGRTLMGSLGNSLFGAANSSVGAITRPSHCDAISQQIXRTFIQMRTNLKVVXDNSXGAKPVRCIHSXXGKKGXRXGKXXNRFXKEAHPRGKVKKGDVVYGVVVRAAMKKGRSDGSESVRRQRVVLVNKXGXLXXXRVFGPSPQLRKKNTQDLAC

SEQ ID NO: 10009 - protein, 423 aa, uncultured bacterium
MAETITIIDDRTGKRVTVPIHDGVFASSALRELDPTLRMYDPAFLSTAACASSITYVDGDAGVMRYRGYPIEQLAAKSTFLEVAYLLLNGELPTKDQLDAWSFDVTHHTMVHENMRKTICHGFHYDAHPMGMFISAIAALGTFYVDAKDISNVKVLNKQILRLVAKVPTIAAMTYRFSSGLPFVLPNNSMGYAQNFLNMMYRIGDDYVVNPVLARALDVLFILHADHEQNCGTTAMRIVELTTHTDPYSATAAAAAALYGPLHGGANEAVVRMLAEIGDIKKVPAFIESVKRGDGRLIGFGHRVYKNFDPRATIIKKTAYDVFNVTGNNPLLDIALKMEEVALNDDYFVSRKLYPNVDFYSGLIYQALGFPVEMFTVLFAIPRTVGWLAHMSELLKDKEQKISRPRQWYIGVDEREYTPIANR

SEQ ID NO: 10010 - protein, 364 aa, Magnaporthe grisea 70-15
MQMASASRQILRAASRASTRTAFAPAASRGLAARTIAGRRFYSSSSEPAKASSSNLGWIAGALAAAAAGAGYWYTQNGGAATLTKPEFKDYQTVYNDIASRLEENPDYDDGSYGPVLVRLAWHASGTYDKETGTGGSNGATMRFSPEGGHGANAGLKAARDFLEPIKAKYPWITYSDLWILGGVCAIQEMLGPKIPYRPGRSDKDAAACTPDGRLPDAAQRQDHVRNIFYRMGFNDQEIVALAGAHALGRCHTDRSGFDGPWTFSPTVLTNDYFKLLLNEKWEYKKWDGPKQYVDSKTKSLMMLPADMCLIEDKKFKEWTKKYADDNDLFFKDFSAAVLKLFELGVPFAEGTENQRWIFKPTSE

SEQ ID NO: 10011 - protein, 313 aa, Gloeobacter violaceus PCC 7421
MEYRDYYEILGVPKSADEQQIKSTYRKLARQFHPDLNPGDKQAEEKFKTISEAYEVLSDPSKRSRYDQYGRYWQQAGRSGGTPAGGAAPAGAGVGGFEGFDFDFSRFGSFDEFIDSLMGNLRGSGGERAARANVRTTQRPGRSEDVEMSLELTLEEALNGTKKRVRTATGKVVEVNIPAGVHEGTKVRVAGEGSGRGDLFLVVKLKTHPFFAVDGDDLLCEVPLTPAEAALGTKVEVPTLTGRVRVTIPAGTSTGRTLRLAGRGLPRRGGGRGDQLVKIRIEVPTALSSEERDLYEKLSRTESFRPRARFDSQ

SEQ ID NO: 10012 - protein, 253 aa, Mesorhizobium sp. BNC1
MPILGLGTWQLTHETARTVRAAFDLGYRMVDTSGDYGTQSAIGEAIRASGLDRDDIYLVTKVEETEDAYNATQANLRELGLDYADLILIHRPPRHGAGEELWRALIRAREDGLTRDIGVSNYSIELIEELVDATGEIPVVNQVEWSPFGHDLELKHYADFNGIVIQAYSPLTRATRLDDAALCETAEKYGKTPAQVLIRWNLERGTVPIPKANLHSHMKENISVFDFTLEKSDLESLDSLNEHFSSLGRLPYV

SEQ ID NO: 10013 - protein, 447 aa, Triticum aestivum
  unsure (1)..(447): unsure at all Xaa locations
PKAPKLTEAMSLYDGGLAGVYPEEEDDRLADLAGDSDYDDDEYVQSISKASEDTSAMDVLKGKDIQGIPWERLTITRDGYRKSRLEGYTNFENIPNSGQLSEKVCTPVEKGQLYYEFAHNTRSVRPTIFHFQLRNLVWATTRHDVYLMSHMSVLHWSPLTSEKHEVIDLQGHVAPCVKHEGNFYEGFYRTHVSTLAVKNNLLVAGGFQGELICKFLDREGISYCSKSTHDDNGITNCLEIFEKPSGSVHFLASNNDCGLRDFDMEKFQMCNHFHFDWAVNHTSLSPDGKIIAVVGDNPDGVLVDASSGKVIHELSGHLDYSFASAWNPDGRTFATGNQDKTCRIWDARNLSKSVAVLGGNMGAIRSIRYTSDGKFLAMXAEAADFIHIFDVGSGYDRKQELDFFGEIAGISFSPDTEALFVSVHDRNYSSLLQYSRRRFYGYLDSAL

SEQ ID NO: 10014 - protein, 317 aa, Zea mays
  unsure (1)..(317): unsure at all Xaa locations
MDPALLDDVIRRLLEVKNLKPGKNAQLSESEIKQLCAAAKEIFLQQXPNLLELEAPIKICGDVHGQYSDLLRLFDYGGYPPQANYLFLGDYVDRGKQSLETICLLLAYKVKYPENFFLLRGNHECASVNRIYGFYDECKRRFSVKLWKTFTDCFNCLPVSALIDEKILCMHGGLSPELNKLEQILNLNRPTDVPDTGLLCDLLWSDPSNEATGWAINDRGVSFTFGPDKVSEFLEKHDLDLICRAHQVVEDGYEFFASRQLVTIFSAPNYCGEFDNAGAMMSVDDTLMCSFQILKPARKMMGGSTNNKSGFKSFRGW

SEQ ID NO: 10015 - protein, 303 aa, Triticum aestivum
  unsure (1)..(303): unsure at all Xaa locations
MNTFIIFVLLAMAMNKASASRQLSPRGKELHTPQEQFPQQTFPHQPQQQFPQPQQPQQPFPQQPQQQFPQPQQPQQPFPQQPQQQFPQPQQPQQPFPQPQQPQLPFPQQPQQPFPQPQQPQQPFPQLQQPQQPLPQPQQPQQPFPQQQQPLIQPYLQQQMNPCKNYLLQQCNPVSLVSSLVSMILPRSDCKVMRQQCCQQLAQIPQXQLQCAAIHGVVHSIIMQQEQQQQQQQQQGIQFMRHYFSRPRSRASSQPQTTSQLEVIKAMGLGNPSNKCNVFVQLMSTTKICNISPTLGAMMQRLL

SEQ ID NO: 10016 - protein, 361 aa, uncultured bacterium
MKHRIAVIAGDGIGQEVMPEGLRVLDAACRQFGLDLEFVSFDWAHCDYYLQHGQMMPDDWFAQLKDFDAIYFGAVGWPATVPDYISLWGSLLKFRREFDQYANVRPVRLMPGIPCPLAGKQVGDIDFYVIRENTEGEYSAVGGRMFEGTERETVIQESIFTRQGTDRILKFAFDLAQRRPKKHLTSATKSNGIAISMPYWDERVEAMAGHYPEVRWDKYHIDILTARFVLSPERFDVVVASNLFGDILSDLGPACTGTIGIAPSANLNPDRTFPSLFEPVHGSAPDIAGQGIANPVAMIWSGAMMLDFLGQGDSRYQAAHDAIMAAIEQVLVGGPRTPDMGGTASTVELGRAIAAALEGRD

SEQ ID NO: 10017 - protein, 325 aa, Triticum aestivum
KSFRVRNRFQAGPFEVEPIRVTHSIPDCCGLVLRCGDGTIFHTGDWKIDESPVDGRIFDREALEELSKEGVTLMMSDSTNILSPGRSTSESVVASSLLRHVSEAKGRRVITTQFASNIHRIGSIKAAADLTGRRLVFVGMSLRTYLEAAFRDGKAPLDPSTLVKAEDMDAYDPKNLLVVTTGSQAEPRAALNLASYGGSHALKLSKEDVLLYSAKVIPGNESRVMKMLNRLTDLGPKIVMGKDAGLHTSGHAYHDELEEVLQIVKPQHFLPVHGELLLLKEHELLGRSTGIKHTTGINGEMLGVSHLRNRKVLVNGFVSLGKQDF

SEQ ID NO: 10018 - protein, 321 aa, Burkholderia cepacia R1808
MSAPTLTVRVARKWQEARDICGFEFVADDGSPLPRFDAGAHIDVHLPGGLVRQYSLCNDPRHGDRYRIAVLRDADGRGGSRAIHDEVRQGDTLRIGMPRNQFPLARDASHHLLLAGGIGVTPMLSMAEQLSAAGESFDLHYCARSLERMAFVEQINTAAFRDRTRLHVDDGDAAQRFDLPAALDAAPAGTHLYVCGPRGFMDAVLDAARARGWPDARLHYEFFGGAVVASGAERAFQVRLASSGKVVDVPADCTVVAALAAHGIDVLTSCEQGVCGTCVTRVLEGEPDHRDSYLTEAEQAAGDQFMPCCSRARSDLLVLDL

SEQ ID NO: 10019 - protein, 491 aa, Escherichia coli
MMSRMAEQQLYIHGGYTSATSGRTFETINPANGNVLATVQAAGREDVDRAVKSAQQGQKIWASMTAMERSRILRRAVDILRERNDELAKLETLDTGKAYSETSTVDIVTGADVLEYYAGLIPALEGSQIPLRETSFVYTRREPLGVVAGIGAWNYPIQIALWKSAPALAAGNAMIFKPSEVTPLTALKLAEIYSEAGLPDGVFNVLPGVGAETGQYLTEHPGIAKVSFTGGVASGKKVMANSAASSLKEVTMELGGKSPLIVFDDADLDLAADIAMMANFFSSGQVCTNGTRVFVPAKCKAAFEQKILARVERIRAGDVFDPQTNFGPLVSFPHRDNVLRYIAKGKEEGARVLCGGDVLKGDGFDNGAWVAPTVFTDCSDDMTIVREEIFGPVMSILTYESEDEVIRRANDTDYGLAAGIVTADLNRAHRVIHQLEAGICWINTWGESPAEMPVGGYKHSGIGRENGVMTLQSYTQVKSIQVEMAKFQSIF

SEQ ID NO: 10020 - protein, 503 aa, Methanosarcina acetivorans C2A
MVLYSLFQGDFVVQEYKLHIGGESRDSATGETFDNINPATLENLATVQVAGSEDVDRAVEAAEEGFRVWSEVPAPRRAEVLFRTARILQERKEDLARLMTEEMGKVLPETRGDVQEAIDIAIYAAGEGRRMFGETTTSELKDKFCMTVLRPIGVVGMITPWNFPLAIPGWKIMPALIAGNAIVFKPASDTPLLAIKLVEILMEAGLPPGVVNLVTGPGGSTGKAIVQHPRIKAISFTGSLETGKWIMEECAKTMKRVSLELGGKNPVIIMDDADLELALEGVLWGAFGTTGQRCTATSRLILHEKIKDEFTARLLAKTKLLRVGNGLLPETDIGPIINKAQLEKIERYVRIGMEEGATLLLGGKAIDPGLPGYFFEPTVFTDVRPDMRIAQEEIFGPVLSIITVSGLEEAIEVANNTRYGLSSAIYTENVGKAFRAVKKIEAGITYVNAPTIGAEVHLPFGGVKGTGNGFREAGTEAIKEFTEIKAVYIDYSGRLQRAQIDME

SEQ ID NO: 10021 - protein, 373 aa, Candida maltosa
MSVKTKTITILPGDHVGTEIVNEAIKVLEAIEAATPYQKIHFDFKHHLIGGAAIDATGVPLPDDALESAKNSDAVLLGAVGGPKWGTGALRPEQGLLKIRKELNLYANIRPCNFASDSLLELSPLRPEVVKGTNLIIVRELVGGIYFGDREEQEESADKQTAWDTEKYTVDEVTRITRMAAFMALQHTPPLPIWSLDKANVLASSRLWRRTVDKVISEEFPTLSVQHQLIDSAAMILIQNPTKLNGIIITSNMFGDIISDEASVIQGSLGLLPSASLASLPDTNTAFGLYEPCHGSAPDLPANKVNPIATILSAASMLRLSLDCVKEAEALEEAVKQVLDKGIRTADLRGTSSTTEVGDAIVEAVTKILKEKA

SEQ ID NO: 10022 - protein, 487 aa, Ralstonia eutropha JMP134
MSPSPTLYRNYVDGRFVESAKGFPNISPVNGAVIGTVCEAGADLVDRAVRAARAALAGPWGRTTPAERARVLQAVADGIEKRFDAFVAAEVADTGRPEHQARTLDIRRGVQNFRTFAELAGQAGGECFEMRAADGDVFSYTVRKPHGVVAIISPWNLPMLLMTWKVAPALACGNAVVIKPSEETPGSATLLAEVMHEAGVPPGVFNLVHGFGGGSAGEFLSRHPDIDAITFTGESRTGSTIMKAVADGVKEVSFELGGKNAAVVFADCDFDQAVAGVTRSSFTNTGQVCLCSERVYVERPIFERFVAAMKARAEAMRIGYPDEDGVEMGSLISHGHRDKVLSYFALAREEGATVVAGGGVPQFGDARDNGAYVQPTIWTGLPDSARCVQEEVFGPVCHIAPFDSDDEVVARVNDSRYGLAASVWTRDLGRAHRVTRQFDVGIVWVNTWFLRDLRTPFGGTRLSGIGREGGRHSLDFYSSTTTICVNP

SEQ ID NO: 10023 - protein, 482 aa, Escherichia coli O157:H7 EDL933
MKLNDSNLFRQQALINGEWLDANNGEVIDVTNPANGDKLGSVPKMGADETRAAIDAANRALPVWRALTAKERANILRNWFNLMMEHQDDLARLMTLEQGKPLAEAKGEISYAASFIEWFAEEGKRIYGDTIPGHQADKRLIVIKQPIGVTAAITPWNFPAAMITRKAGPALAAGCTMVLKPASQTPFSALALAELAIRAGIPAGVFNVVTGSAGAVGNELTSNPLVRKLSFTGSTEIGRQLMEQCAKDIKKVSLELGGNAPFIVFDDADLDKAVEGALASKFRNAGQTCVCANRLYVQDGVYDRFAEKLQQAVSKLHIGDGLDKGVTIGPLIDEKAVAKVEEHIADALEKGARVVCGGKAHERGGNFFQPTILVDVPANAKVSKEETFGPLAPLFRFKDEADVIAQANDTEFGLAAYFYARDLSRVFRVGEALEYGIVGINTGIISNEVAPFGGIKASGLGREGSKYGIEDYLEIKYMCIGL

SEQ ID NO: 10024 - protein, 205 aa, Fucus distichus
MSRNDSPFDMQIKLLMIGDTGVGKTCLLLRYANDSFSQTFITTIGIDFKIKNIDLDSKRIKLQIWDTAGQERFRTITTSYFRGAQGILLVYDVTDKKSFNSIRNWVAQIQQHADVAVNKILIGNKCDMDEDREVSKEEGANLAAEYGIQFFETSAKNDINVEKGFITIAREVKDRLMADGPGGGGGHGRTVDINGQASKKKTGCC

SEQ ID NO: 10025 - protein, 356 aa, Zea mays
MAEPSPPKYGGAKRDGAYTAGARPYERRVDHGEGEHGDRAARLRPPHARSGGTTLGEAKSTVHRCLPLPVSSRRTSRGSQRRPSDPRRASSSPTEGRMAEPKAAAAARKTRVGPYEVGKTIGEGSFAKVKHARDSRTGAVRAIKVLDRNHVLRHRMVEQIKREISTMKLIKHPNVVQLHEVMASKTKIYMVLEFVDGGELFDKIVNSGRLGEDEARIYFHQLINAVDYCHSRGVYHRDLKPENLLLDSNGALKVSDFGLSAFAPQTNEDRLLHTACGTPNYVAPEVLADKGYDGMAADVWSCGIILFVLMAGYLPFDDANLMRLYKLICHATSLLCPSVIRPSRLPSPARCGTYVM

SEQ ID NO: 10026 - protein, 164 aa, Triticum aestivum
  unsure (1)..(164): unsure at all Xaa locations
DHVRLHPAAVDDWHKKGGTVLKTTRGGFDLGKIVDGIVARGYTQIYAIGGDGTMRGALAIFEEFKRRGLNISITGIPKTVDNDIGIIDRSFGFQTAVEVAQQAIDAAHVEAVSAVNGVGIVKLMGRSTXHIALHATXSSRDVXCCLIQSGFTWKQGGCSILYNG

SEQ ID NO: 10027 - protein, 140 aa, Zea mays
PIANISRIMKKAVPANGKIAKDAKETLQECVSEFISFVTSEASDKCQKEKRKTINGDDLLWAMATLGFEEYVEPLKIYLQKYKEMEGDSKLSTKAGEGSVKKDAISPHGGTSSSSNQLVQHGVYNQGMGYMQPQYHNGET

SEQ ID NO: 10028 - protein, 366 aa, Buchnera aphidicola str. Bp (Baizongia pistaciae)
MKRNYKIAVLPGDGIGPEIMREGYKILRILKSKLSLNIMTQEFDVGGVAIDKYGVALPKKTLQGCRDSHAILFGSIGGPKWEDLPSHLQPERGALLPLRKYFNLFSNLRLARIYSGLEKLSPLKSRISNLGCDILCVRELTGGIYFGDPKGSKVSKSLNCAFDTEVYYQFEIERIAHMAFDLALTRRCKVTSIDKANVLESSMFWRKIVNRISTQYSQVKLSHLYVDNAAMQIIKNPSQFDVLLCSNLFGDILSDECAAITGSIGLLPSASLNDKNFGLYEPAGGSAPDIKGKNIANPIALILSIGMMMRYSFKLYDVADLIDWAVNKTLKLGYRTQDISENNKFINTSSMGDIIAEILANRIHKI

SEQ ID NO: 10029 - protein, 162 aa, Corynebacterium efficiens YS-314
MEAMTSIHDIPVTLTDGTETTMADWAGHLVMVVNVASRCGLTPQYEGLQRLFEDYQDRGFFVIGVPCNQFMGQEPGTDAEICTFAQEKYDVTFPLLAKTDVNGENEHPLYTELKRFGEGGDIEWNFEKFLINADGETIARFGPRMDPEDDEVTSVIEDNLPV

SEQ ID NO: 10030 - protein, 131 aa, Magnaporthe grisea 70-15
MIQLKSMLNCIDNSGAALVECALIVGQKRHASIGDRIVVVVQEQRKNPNEGAAALAASNKVKRGDIRHAIVVRTKYKVQRKDGSVVRFDDNACVLINKAGDPVGSRVNGIVGMELRKAKWSKILSMAPMHI

SEQ ID NO: 10031 - protein, 164 aa, Brassica napus
MRAPISGLLSRSIGFLHRGRPLCAVAASPEARTKKLERIADDLLSLNRIELYDYSILFSHKLGLNRYGSGTVSSPAGDLPADASAAAETKTAEKTAFDVKLEKFESASKIKVIKEIRAFTELGLKEAKELVEKAPIVVKTGVTKEEAEKMMEKLKAVGATVALE

SEQ ID NO: 10032 - protein, 149 aa, Arabidopsis thaliana
MSSNKIVLSSSDGESFEVEEAVARKLKIVEHMIEDDCVVTEVPLQNVTGKILSIVVEYCKKHVVDEESDEFKTWDEEFMKKFDQPTVFQLLLAANYLNIKGLLDLSAQTVADRIKDKTPEEIREIFNIENDFTPEEEAAVRKENAWAFE

SEQ ID NO: 10033 - protein, 409 aa, Capsicum annuum
DSHYQGVYPVKCNQDRFVVEDIVKFGSPYRFGLEAGSKPELLLAMNCLSKGSADALLVCNGFKDTEYISLALIARKLLLNTVIVLEQEEELDLVIDISRKMAVRPVIGLRAKLRTKHSGHFGSTSGEKGKFGLTTTQILRVVKKLEGSGMLDCLQLLHFHIGSQIPTTELLADGVGEATQIYSELVRLGAGMKFIDIGGGLGIDYDGSKSSDSDVSVAYGIEEYASAVVQAVQFVCDRKGVKHPVICSESGRAIVSHHSIMIFEAVSASTTNVSPQLSSGGLQSLTETLNEDARADYRNLSAAAVRGEYDTCLLYSDQLKQRCVEQFKDGSLDIEQLAAVDSICDLVSKAIGVSDPVRAYHVNLSVFTSIPDFWAFGQLFPIVPIHRLDEKPTMRGILSDLTCDSEITS

SEQ ID NO: 10034 - protein, 175 aa, Triticum aestivum
MAPTVMASSATSVAPFQGLKSTAGLPVSRRSTNSGFGNVSNGGRIKCMQVWPIEGIKKFETLSYLPPLTVEDLLKQIEYLLRSKWVPCLEFSKVGFVYRENHRSPGYYDGRYWTMWKLPMFGCTDATQVLKELEEAKKAYPDAFVRIIGFDNVRQVQLISFIAYKPPGCEESGGN

SEQ ID NO: 10035 - protein, 487 aa, Brevibacterium linens
MSTSGEDLTLVWFRDDLRVADHEALTAARADGRVIAVWIRETRDEEGLGPRPLGGACRWWAHESLTVLHEELSDLGIPLLFAAGRAEKIIVQLASSLGVTAVRWTRRYASASRALDGQIKTVLNDQGFTVHSHTGALLVEPWTAAPQSSDHYKVFTPFWKAVAGRDVGDVLPKPQAQSPLSQTLLSRAHECPAVMELDGLGLLDGTETGAGEAAAASGPRWWQDTIAGHWSPGLRAAEDQLDDLSAIIDGYTTSKDVPSDAASTSRLSPRLRHGELSPRQLLQAARTTSSLTQDDRAAWIRQLYWREFSWHLTYHYPHIDSAPIRPEFHNFPYEDDDDALTHWRAGTTGYPLIDAGMAQLWQTGWMHNRVRMVTASFLTKNLLQHWWFGEQWFWDTLVDADEANNPVSWQWVAGSGADAAPYFRVFNPERQRERFDPDDAYIEDWLPYTPATAPPPLVDLRQSRQAALSAYDHMKNRSTTRDNPGES

SEQ ID NO: 10036 - protein, 501 aa, Mycobacterium tuberculosis
MSFVVTIPEALAAVATDLAGIGSTIGTANAAAAVPTTTVLAAAADEVSAAMAALFSGHAQAYQALSAQAALFHEQFVRALTAGAGSYAAAEAASAAPLEGVLDVINAPALALLGRPLIGNGANGAPGTGANGGDGGILIGNGGAGGSGAAGMPGGNGGAAGLFGNGGAGGAGGNVASGTAGFGGAGGAGGLLYGAGGAGGAGGRAGGGVGGIGGAGGAGGNGGLLFGAGGAGGVGGLAADAGDGGAGGDGGLFFGVGGAGGAGGTGTNVTGGAGGAGGNGGLLFGAGGVGGVGGDGVAFLGTAPGGPGGAGGAGGLFGVGGAGGAGGIGLVGNGGAGGSGGSALLWGDGGAGGAGGVGSTTGGAGGAGGNAGLLVGAGGAGGAGALGGGATGVGGAGGNGGTAGLLFGAGGAGGAGGFGFGGAGGAGGLGGKAGLIGDGGDGGAGGNGTGAKGGDGGAGGGAILVGNGGNGGNAGSGTPNGSAGTGGAGGLLGKNGMNGLP

SEQ ID NO: 10037 - protein, 120 aa, Bradyrhizobium japonicum USDA 110
MLELRTTITWGLLSKTCDRARQRIPFHFAQRLAAGSLIDLDEKVVFLFGANDVALGTVKWFNPTKGYGFVAPDDGGKDVFVHISAVEKAGYTSLVEGAKVGYELVTNRSGKQAAENLRLG

SEQ ID NO: 10038 - protein, 313 aa, Nicotiana tabacum
MATSHFILKLFLVISFCNVCFASRKLTALVQEPENQLLQYHKGALLFGKISVNLIWYGKFKPSQRAIVSDFITSLSSSTPSKTDPSVAKWWKTTEKYYHLANSKKSLSLYLGKQVLVENYSLGKSLTQKQIVQLASKGEQKDAINIVLTASDVAVDGFCVNRCGTHGSSKGAIIRGKTYKFAYIWVGNSETQCAGYCAWPFHQPIYGPQSPPLVAPNNDVGVDGMVINLASLLAGTATNPFGNGYYQGEADAPLEAASACPGVYAKGAYPGYAGDLLVDKTTGASYNAHGTNGRKYLLPALYDPSTSTCSTLV

SEQ ID NO: 10039 - protein, 147 aa, Zea mays
MPAAGGGHRYLRYAGRTGEVVTCSRTQSPELFFAVLGGLGQFGIITRARIPLQLAPPKVRWVRAFYDSFETFTKDQELLVSMPELVDYVEGFVVLNEQSLRSSSVAFPAQVDFSPDFASGAGSNNVHYYCIEFAVHDFQQQDSAADH

SEQ ID NO: 10040 - protein, 294 aa, Escherichia coli O157:H7 EDL933
MEGLTVEFSVLSNNLKMPMMGFGVFQVTDKNVCKQSVLNAIRTGYRLIDTAAVYGNEDAVGEAVREAISEGLCTREELFITSKLWVQDMLNQDTAAAGIEASLKKSGLEYFDLYLLHQAMRDYFSAWRALEDAYEEGKLKAIGVSNFYPHVLANFCETVRVKPMVNQVELHPYFAQPEALATMKYYNVQPEAWAPLGGGRHKPFENNLLQSIADAHQKSISQVILRWNIQRGVVVIPKSTHQQRIEENFAIWDFSLTEKEMAQISSLDLGYVGESVKHFNPEFVRGCLAVKIHD

SEQ ID NO: 10041 - protein, 436 aa, Nitrosomonas europaea ATCC 19718
MNDKKSAMRSHRVVWHPCTQMKHHEEFPPVLITRGEGVWLYDADGQRYLDTISSWWVNLFGHCNPRINAAIIDQLGRLEHTMLAGLTHEPVVELSERLSTITPGSLSHCFYASDGASANEIALKMSFHYWQQSGFPEKTQFINLQNGYHGETLGALSVTDVPIFRQVYAPLLRPAHPVLTPDWRFAEAGETPEAHALKAAAALESYLTQHHASTAALILEPLVQGAAGMGMYHPVYLQKAREICDTYRIHLITDEIAVGFGRTGTLFACEQAAITPDIMCLAKGLSGGYLPLSVVLTNDTIYRAFYSDQTSQAFLHSHSHSGNALACRAALATLDIIEQDNVIETNRHKTKFLNQCLQSVRTHPNVRHFRNCGMIWAFEVDNPRPDFTNRFAQMGLERQLLIRPMGNSVYIMPPYIINEEEMEFMAQAILNILNEI

SEQ ID NO: 10042 - protein, 338 aa, Leuconostoc pseudomesenteroides
MEALVLTGTKKLEVENIEQPEVKPNEVLIHTAFAGICGTDHALYAGLPGSADAVPPIVLGHENSGVVAEIGSDVTNVAVGDRVTIDPNIYCGQCKYCRTARPELCENLSAVGVTRNGGFEEYFTAPASVVYQIPDNVSLKSAAVVEPISCAVHGIQLLKVTPYQKALVIGDGFMGELFVQILQAYGIHQVDLAGIVPEKLAMNKEKFGVKNTYNTKDGDKIPEGTYDVVVEAVGLPQTQEAAIEASARGAQVLMFGVGGPDAKFQMNTYEVFQKQLTIQGSFINPNAFEDSLALLSSGKLDVESLMSHELDYQTVDDFVNGKLGVVSKAVVKVGGEEA

SEQ ID NO: 10043 - protein, 341 aa, Salmonella enterica subsp. enterica serovar Typhi Ty2
MKVKAVFINKPGEVETRWVDYPHKKENEVLIKVDAAGICGSDIGAFRGTNPLVTYPRIIGHEVTGIVLQEGTGMPDNIKKGDRVIVDPYIYCGHCYPCSVGRTNCCENLNVIGVHIDGAMQEVVTHPAHLIHKIPDNVPSEMAPLAEPLTIALHALHRANVKAGEYVAIIGAGAIGLMAALSARHYKATPILIDIVEERLRYAQKLGVPYVLNAADDQVIDAIKNITHGTMAQVVIEASGANSAIRNTLDLASFAGRISFTGWPKQETSLPTNLITYKELDLRGSRTSAGEFDEALRMLSTLEINPQDVVSKVVNLDEIPDAVKELDRYPERYLKINAVFH

SEQ ID NO: 10044 - protein, 320 aa, Mycobacterium tuberculosis CDC1551
  unsure (1)..(320): unsure at all Xaa locations
MPSLDNTADEKPAIDPILLKVLDAVPFRLSIDDGIEAVRQRLRDLPRQPVHPELRVVDLAXDGPAGPIGTRIYWPPTCPDQAEAPVVLYFHGGGFVMGDLDTHDGTCRQHAVGADAIVVSVDYRLAPEHPYPAAIEDAWAATRWVAEHGRQVGADLGRIAVAGDSAGGTIAAVIAQRARDMGGPPIVFQLLWYPSTLWDQSLPSLAENADAPILDVKAIAAFSRWYAGEIDLHNPPAPMAPGRAENLADLPPAYIAVAGYDPLRDDGIRYGELLAAAGVPVEVHNAQTLVHGYVGYAGVVPAATEATNRGLVALRVVLHG

SEQ ID NO: 10045 - protein, 271 aa, Oryza sativa (japonica cultivar-group)
MATLLLIACLPTRRPHLSLRQRSYKLAPRITMASSSSSSPPSSDPSLETVAPHAAVTGERKLNPNLQEQLPKPYLARALAAVDPSHPQGTRGRDARGMSVLQQHAAFFDRNGDGIIYPWETFQGLRAIGCGYPVSIAGAILINLVLSYPTQPGWMPSPLFSIHIKNIHKGKHGSDSEAYDTEGRFDPSKFDAIFSKYGRTHPNALTKDELNSMIKANRNMYDFIGWITSAGEWMLLYSVAKDKEGLLQRETVRGAFDGSLFERLQDSKKSA

SEQ ID NO: 10046 - protein, 131 aa, Glycine max
  unsure (1)..(131): unsure at all Xaa locations
GFLAHLVRLFSVRQRGVRTWYSRASFSDALPSAAYDPIVMRDAIVLAVIERFMTDVPFXSLLCGGLYSSLAACITSRXYLSNTKAVLQWXAQSRAFLGGLVVSTICGSEELXDYLCTVRHESTLSVQDGTY

SEQ ID NO: 10047 - protein, 525 aa, Glycine max
MDSSSSSPNNNNHHKLGFQPARSRSRLAMASPANTSEPKIVTGTAGYILEDVPHFTDYIPNLPTYPNPLQDNPAYSVVKQYFVHVDDSVPQKVVVHKDGARGVHFRRAGPRQKVYFEADEVQAAIVTCGGLCPGLNTVIRELVCGLHHMYGVKKVLGINGGYRGFYARNTITLTPKSVNDIHKRGGTVLGTSRGGHDTKKIVDSIQDRGINQVYIIGGDGTQKGASAIFEEVRKRGLKVSVVGIPKTIDNDIPVIDKSFGFDTAVEEAQRAINAAHVEAESVENGIGVVKLMGRNSGFIAMYATLASRDVDCCLIPESPFYLEGPGGLYEYIEKRLKENGHMVIVIAEGAGQELVSESVQSMSKQDASGNKLFQDVGLWISQKIRDHFAAQKTLPITLKYIDPTYMIRAIPSNASDNVYCTLLAQSAVHGAMAGYTGYTSGLVNGRQTYIPFYRITERQNHVVITDRMWARLLSSTNQPSFLDAKGDNEEKEEEEALNQLPDGHCAKDTSLASKEINSSIYPTAC

SEQ ID NO: 10048 - protein, 130 aa, Zea mays
MNFQLAMYSESSTSETGKHGMKKIGTTHRRSTQAVNQSEERPTVGSTHSNRSTGLTKAAFLRLQVEIFEASKDDSREASPECSICLDGFYDGDELIRLRCGHRFHSTCLEPWARKCADCPYCRTNIRSRS

SEQ ID NO: 10049 - protein, 122 aa, Spirogyra maxima
MIQPQSYLNVADNSGARKLMCIRVLGSNNRKYANIGDMIIAVVKEAVPNMPLKRSEVIRAVIVRTRKGLKRDNGMILRFDDNAAVVINTEGNPRGTRVFGPVARELRELNFTKIVSLAPEVL

SEQ ID NO: 10050 - protein, 473 aa, Salmonella enterica subsp. enterica serovar Typhi Ty2
MPTHLVWFRRDLRLQDNLALAAACRDASARVLALYISTPAQWQAHDMAPRQAAFISAQLNALQTALAEKGIPLLFHEVADFNASIETVKNVCRQHDVSHLFYNYQYEFNERQRDAAVEKTLPSVICEGFDDSVILAPGAVMTGNHEMYKVFTPFKNAWLKRLKEDIPPCVPAPKIRVSGALSIPLTPVSLNYPQQAFDAALFPVEENAVIAQLRHFCSQGADEYASRRDFPAVDGTSRLSASLATGGLSPRQCLHRLLAEQPQALDGGPGSVWLNELIWREFYRHLMTWYPALCKHQPFIRWTKRVAWQENPHYFQAWQKGETGYPIVDAAMRQLNATGWMHNRLRMITASFLVKDLLIDWRLGERYFMSQLIDGDLAANNGGWQWAASTGTDAAPYFRIFNPTTQRERFDRDGEFIRQWLPALRDIPGKAIHEPWRWAEKAGVVLDYPRPIVEHKQARIATLSAYEAARKGA

SEQ ID NO: 10051 - protein, 158 aa, Zea mays
  unsure (1)..(158): unsure at all Xaa locations
MADDGGSHEGSGGGGGVREQDRFLPIANISRIMKKAVPANGKIAKDAKETLQECVSEFISFVTSERXKRKTINGDDLLWAMATLGFEEYVEPLKIYLQKYKEMEGDSKLSTKAGEGSVKKDAISPHGGTSSSSNQLVQHGVYNQGMGYMQPQYHNGET

SEQ ID NO: 10052 - protein, 238 aa, ASPERGILLUS NIDULANS FGSC A4
MRAHPQSAVGLMSMGGKGPEVLSTFTTDFGGILAGLHRTKIHGTAHFTSSIQVAGLALKHRSEKSQRQRIIVFSCSPIAEDEKTLVKLAKKMKKNNVSIDVIAFGDLESDQTKKLEAFVENVKGGDGSNLAIIPPGPNLLSEELQASPILGGDGSGGAGGLGGGDGGDGGAFDLDAAAENDPELAFALRLSLEEEKNRQEKERREREAQQGKENLEGIPEEGSSSKKDNEDPDKMDTA

SEQ ID NO: 10053 - protein, 127 aa, Triticum aestivum
  unsure (1)..(127): unsure at all Xaa locations
RPVKRDSDEKSTRLDAEDKTCGVEVKEESGSDSDEDPQXGEELPAHAERRRRANKQHIASITLVDIAPYFHLPIREASRALKIGVSILKQKCRQYGIPRWPHRKIKSLHSLISDLEFVMDDTNGDVV

SEQ ID NO: 10054 - protein, 490 aa, Xanthomonas campestris pv. campestris str. ATCC 33913
MPRFPDQLLYIGGRYVPARGGHTFEVVNPATGEVLANVHNADADDLDAAVDSAKAGQRHWAALTVVERSRILLRAVALLRERNDALAELETLNTGKPLSETRSVDIVTGADVLEYYAGVAQALQGVQVPLREGSFFYTRHEPLGVVGAIGAWNYPIQIALWKAAPALAAGNAMIFKPSEVTPLTALKLAEIFTEAGLPDGVFNVLPGDGASVGHALTEHPEIEKISFTGGTATGRKVMASASSSSLKDVTMELGGKSPLIVCADADLDLAADIAMMANFYSSGQVCTNGTRVFVPRALRTAFEARLLARVQRIHIGDPLDERTTFGPMVSAAHMQRVLEHIEQGKAEGARLLFGGERLRDGALAQGCYVAPTIFSDCTDVMTIVREEIFGPVLSLLTYDDEDEAITRANATSYGLAAGVVTPDLSRAHRLIHRLEAGICWINTWGESPAPMPVGGYKQSGVGRENGLATLQAYTRTKSVQVELERYASVF

SEQ ID NO: 10055 - protein, 348 aa, Pichia stipitis
MSVPTTQKAVVFESNGGPLLYKDIPVPTPKPNEILINVKYSGVCHTDLHAWKGDWPLDTKLPLVGGHEGAGVVVGIGSNVTGWELGDYAGIKWLNGSCLNCEFCQHSDEPNCAKADLSGYTHDGSFQQYATADAVQAARLPKGTDLAQAAPILCAGITVYKALKTAQIQPGNWVCISGAGGGLGSLAIQYAKAMGFRVIAIDGGEEKGEFVKSLGAEAYVDFTVSKDIVKDIQTATDGGPHAAINVSVSEKAIAQSCQYVRSTGTVVLVGLPAGAKVVAPVFDAVVKSISIRGSYVGNRADSAEAIDFFTRGLIKCPIKVVGLSELPKVYELMEAGKVIGRYVVDTSK

SEQ ID NO: 10056 - protein, 458 aa, Rhodococcus rhodochrous
LQIVHQATADDVDEAVAAGRVAAADPAWRRMLPHERARYLHRIADAIEHEASRLALLQSYNTGKTLTETTALVGSAAGTFRYFAAVLETSDDDLTTQRGNYLTMSIHEPIGVIGAIAPWNSPIASDAQKIAPALAAGNAVVLKPAEWTPLVSMALARAIHDSGLPPGLLSVLPGKGSIVGDAIVQHPHVGKVTFTGGTRTGRAVAHAGAEKLMPVSLELGGKSPTIVLDDADIEAAVAGVMYGIFSSTGQSCIAGSRLFVDRSLYEAFMERLVERTRALRIGNGRDPRTQVGPLVHHTHRASVARYVDLARCEGGRVLCGGTAPDDPELADGAYYLPTVIDGLSNDAAVCQDEIFGPVLIALPFDGESDLLAQANDSVFGLASGIWTRDYRRAWRLARQLEAGTVWVNTYKRFSISTPFGGIKESGLGTEKGRAGIAAYSRQKSIYLGLDDEPDRWVD

SEQ ID NO: 10057 - protein, 352 aa, Haemophilus somnus 129PT
MSINFVKEGNIMSKYVRSVCLVEPKKVDIKTVLYPKKGECDVLIKVESIGICGSDIGAFRGTNPLVTYPRILGHEIVGTVIESGVGMPKNINIGDRVILEPYIYCGHCYPCSISRTNCCEALKVLGVHIDGAMQEIVRHPAHMLIKAPDIPIHELALAEPLTISLHAIRRTKVKAGEHVAIIGAGAIGLMAALVAKAYGATPILIDILDKRLDYAKSIGIPNIINPAKENDLEAIKSITNGRMAEVVIEASGANIAVQNTLKYTSFAGRIALTGWPKNETPLPTNLITFKELNIYGARTSKGEFEEALKLLESRKIEPKNIISKVITFDEIPHYIEELSENPDDYLKIIAVF

SEQ ID NO: 10058 - protein, 450 aa, Bacillus subtilis subsp. subtilis str. 168
MEMMGMENIQQNQGLKQKDEQFVWHAMKGAHQADSLIAQKAEGAWVTDTDGRRYLDAMSGLWCVNIGYGRKELAEAAYEQLKELPYYPLTQSHAPAIQLAEKLNEWLGGDYVIFFSNSGSEANETAFKIARQYHLQNGDHSRYKFISRYRAYHGNTLGALSATGQAQRKYKYEPLSQGFLHAAPPDIYRNPDDADTLESANEIDRIMTWELSETIAGVIMEPIITGGGILMPPDGYMKKVEDICRRHGALLICDEVICGFGRTGEPFGFMHYGVKPDIITMAKGITSAYLPLSATAVKRDIFEAYQGEAPYDRFRHVNTFGGSPAACALALKNLQIMEDEQLIQRSRDLGAKLLGELQALREHPAVGDVRGKGLLIGIELVKDKLTKEPADAAKVNQVVAACKEKGLIIGKNGDTVAGYNNVIHVAPPFCLTEEDLSFIVKTVKESFQTI

SEQ ID NO: 10059 - protein, 173 aa, Bradyrhizobium japonicum USDA 110
MATETKLPVTKSPTAPAVAGETWRPFQALRNEIDQIFDDFGNGFWNRPFRSLARLERDFSKSISAPAVDVAESDKAYEITAELPGLDEKNIDIKVANGGLTIKGEKREETEEKNKDYYVSERRYGTFERYFTLPESVNADKIEATFKNGVLKVVLPKTEEAQKPAKTINVKAA

SEQ ID NO: 10060 - protein, 452 aa, Staphylococcus aureus subsp. aureus COL
MNYTQQLKQKDSEYVWHPFTQMGVYSKEEAIIIEKGKGSYLYDTNGNKYLDGYASLWVNVHGHNNKYLNKVIKKQLNKIAHSTLLGSSNIPSIELAEKLIEITPSNLRKVFYSDTGSASVEIAIKMAYQYWKNIDREKYAKKNKFITLNHGYHGDTIGAVSVGGIKTFHKIFKDLIFENIQVESPSFYRSNYDTENEMMTAILTNIEQILIERNDEIAGFILEPLIQGATGLFVHPKGFLKEVEKLCKKYDVLLICDEVAVGFGRTGKMFACNHEDVQPDIMCLGKAITGGYLPLAATLTSKKIYNAFLSDSHGVNTFFHGHTYTGNQIVCTVALENIRLYEKRKLLSHIETTSSTLEKQLHALKRHRNVGDVRGRGLMFGVELVTDKDSKTPLEIEKVERIVRNCKENGLMIRNLENVITFVPVLSMSNKEVKTMVRIFKKAVHNILDRKC

SEQ ID NO: 10061 - protein, 377 aa, Lactococcus lactis subsp. lactis Il1403
MTNLFENYGRLPFSLIKGEDQYLFDDRGNKYLDFTSGIGVMNLGYSFEKGKVAVKAQLDSLSHLSNLYQNPLQEDVAEKLSQNHSYKAFFCNSGTEANEAALKLTHLIKKDQKILAFTDGFHGRTFGAMSATMQEKIQAGFSPLLPNFVASPFNDVVALEQILEKEKIGAIIFEIIQGEGGVLPISPDFVEALKSCQQKGILLIIDEIQTGIGRTGKLFAFEHFDFEPDIFTLAKALANGIPTGAMLAKNKYASYFSAGKHGSTFGGNPLAMASANEVLKEIDSDFLEKVTDKGIFFLKLLTEKLSVKATVKSIRGLGLMIGIQLTDEKKVPEVLALLRENGLLALSAGHDVIRLLPPLVMTKVELQKGAELLEKIL

SEQ ID NO: 10062 - protein, 382 aa, Thermosynechococcus elongatus BP-1
MVACEFSPGLDGIPVAQSAISYVDGQAGILEYRGVPIQELAEKSTFLETAFLLIWGYWPNREELAAFEHDITYHRRVKYRIRDMMKCFPESGHPMDALQASAGALGLFYSRRALEDPEYIRAAVIRLLAKIPTMVAAFQLIRKGNDPVMPCDELDYAANFLYMLNERRPDPFAARVFDICLILHAEHTMNASTFSARVTASTLTDPYAVVASAVGTLAGPLHGGANEDVINMLEEIGSVENVRPYVEKCIQNKIKIAGFGHRVYKVKDPRATILQKLAEQLFDKFGGDRYYDIALKLEEVVGEYLSYKGIYPNVDFYSGLVYRRLGIPSDLFTPVFAIARVAGWLAHWKEQLEANRIYRPTQVYTGAHNQPYVPMEERNHRP

SEQ ID NO: 10063 - protein, 142 aa, Glycine max
  unsure (1)..(142): unsure at all Xaa locations
GYGSQHTNYDITSIASNGGRVQCMQVWPPGGXKKVETVSSLPDLDDAQLAXEVKYLLRKGWIPCLEFELKHGFVYREHNRSPGYYDGRYWTMCEAAMFGCTDASQVSQELQEPRLHTLRLDAFMRFRHVRRALCMSLIAYMP

SEQ ID NO: 10064 - protein, 133 aa, Brassica napus
MALEEQSAARSTGKVNWFNDSKGYGFITPDGGGEELFVHQSSIVSEGYRSLAIDDLVEFEITQGTDGKTKAVDVTAPGGAPLKKKETSSRGGGARRVGGGGGCYNCGEAGHLAKDCRDDGGERGGRSVLLQLW

SEQ ID NO: 10065 - protein, 373 aa, Arabidopsis thaliana
MGYLFEETLSSNPKTPIVVDDDNELGLMAVRLANAAAFPMVLKASLELGVFDTLYAEASRTDSFLSPSEIASKLPTTPRNPGAPVLLDRMLRLLASYSMVKCEKVSVGKEQRVYRAEPICRFFLKNNIQDIGSLASQVIVNFDSVFLNTWAQLKDVVLEGGDAFGRAHGGMKLFDYMGTDERFSKLFNQTGFTIAVVKKALEVYQGFKGVNVLVDVGGGVGNTLGVVTSKYPNIKGINFDLTCALAQAPTYPGVEHVAGDMFVDVPTGNAMILKRILHDWTDEDCVKILKNCWKSLPQNGKVVVIELVTPDEAENGDINANIAFDMDMLMFTQCSGGKERSRAEFEALAAASGFSHCQFVCQAYHCWIIEFCK

SEQ ID NO: 10066 - protein, 240 aa, Triticum aestivum
  unsure (1)..(240): unsure at all Xaa locations
MASLGLPGPSSYHDLCCYGAGIAGNIFAFXLFISPLPTFRXRIVRNGSTEQFSATPYIYSLLNCLVCMWYALPFXSYGVVLVATVNTIGAAFQLAYTAVFIAYADAKKRLKVSVLLAGVFCVFGLFVYVSMALFDHYLGRTFVGYLIVASLTFMFVSPLSIIDLVIRINSVEYMPFYFSLSMALMSMPFFAYGVLLDDFFIYVPNGIGTVLGVMQLLLYAYYSRKGSRDEARRPLLVTHT

SEQ ID NO: 10067 - protein, 352 aa, Nostoc sp. PCC 7120
MKAQVFRGVNQLSYEEIPLPILEPDEVLVQVQVVGLCQSDIKKIRYPLYEPPRIFGHETAGTIAAVGSQVQGWQVGQRVAVMHHIPCMRCAYCMNENFSMCDVYKNISTTAGFNASGGGFAEYVKVPGHIVENGGLIPIPDGISFEEASFVEPTNCCLKAVKKAQIAPGQTVLVTGAGPIGLMFVMLVKYFGAKAIATDLLPSRIEKALNVGAEAAFDARDPDLPAKVHALTNGLGVDVTLLAVPSEKAFFQALECTRKGGKILFFAEFPDELEIPINPNILYRREIDLMGSYSSSYRLQNLSADIVFNRRIDVQALISDRYPLKDLSAAVDQAIAPTPETYKILIYPKIGD

SEQ ID NO: 10068 - protein, 311 aa, Ralstonia eutropha JMP134
MALDEQARYILDMIASAGRPPLHTCTPEQARQSFDFRPLAGVPDAVAQIEEVTIPGPAGDIRVRIYTPDGEGPFPALVYCHGGGWVVGDLDTVDVPCRRLATRASCVVVSVDYRLAPEHRFPAATEDAYAAFQWLVSNARAQQVDATRIAVGGDSAGGNLAAAVALMARDRAAPQPCFQVLLYPVTDGTLDTPSYRENAEGYLLTRDSMVWFWNHYVGDADRTHPYASPLRADHHRGLPPAFVVTAEFDPLRDEGEAYARRLAEAGTPVECKRYDGTIHGFCWMPGVLDKGRQALDDTAAALAAAFQSDNR

SEQ ID NO: 10069 - protein, 177 aa, Burkholderia fungorum LB400
MLGLALLAAQGPHAFAEGAFALTSASFHAGGTVEAAQVFNQGDCKGGNRSPQLSWHDAPPGTRSFAVTMFDQDAPGRGWWHWAVAGIPATVVSLPENASSSGFLSKVGALEARNDFDTDGYGGPCPPAGKPHRYIITVYALSTADLRLAQGRPALMFDHEISTATLGSARMVVSYGR

SEQ ID NO: 10070 - protein, 394 aa, Methanosarcina acetivorans C2A
MKAVVYKGPRNVDVEEVKKPEIEKPTDVIIKVTSSGICGSDLHLYDGHGPDGLGTILGHEPMGVVEEVGDAVELVKPGDRVVIPFNVACGSCLNCIRGLTNMCLTMNPDAAIANYGYPGAGPYAGGQAEYLRVPYGDWACLKLPGEPGDEFEDDFVMLADIFPTAYYAAELAKVKTGKTVAVFGAGPVGLLAAYSSMLMGASEVYVVDKSDKRLKLAESIGAVPINFTDGDPVEMIMQIRQNNKNLMSSLRPGEEKVLGVDCAIDAVGYQALDRNNSEEFKPNQVLMDIARIIAPGGSIGVIGVYSPDPAGKDENEKQGYLTLPWAELWFKGVSIGTGPTPVKQMHGFLRNLIFNGKAKPSFIVSDRISIDEAPEAYKQFDKRDDVVKPIIKFH

SEQ ID NO: 10071 - protein, 483 aa, Rickettsia sibirica 246
MAEFTPITIAYGDGIGPEIMEAVLYILRKAEARIRLETIEVGEKLYKKHYTSGISEESWESIQRTGIILKAPITTPQGGGYKSLNVTIRKTLQLFANIRPAVSFHPFTRTLHPNLNLTIIRENEEDLYAGIEYRQTHNMYESMKLISHTGCEKIIRYAFEYAVKNNRKKVMCLSKDNIMKFSDGILHKVFNEIAKEYPQINNAHYIIDIGTARLATKPEIFDVIVTSNLYGDIISDLAAEISGSVGLAGSANIGQHYAMFEAVHGSAPDIAGKDIANPSGLLNAAIMMLVHIGQGDIATLIENAWKKTIEDGVHTADIYNEQSSSKKVGTKEFAAEVTKRLGQLPTKLPKADYPLIAEKQESNIDYKIDTKEVKKLVGTDIFVNMNVSAAHDIADKINKLDLGNFELKTISSKGLKLWPRDTRFETVSDHWCCRFMNKDGTEIKHLDITRLLEALSTANIDFIKVENLFEFDGVAGYSLAQGE

SEQ ID NO: 10072 - protein, 448 aa, Pseudomonas aeruginosa UCBPP-PA14
MNQPLNVAPPVSSELNLRAHWMPFSANRNFQKDPRIIVAAEGSWLTDDKGRKVYDSLSGLWTCGAGHSRKEIQEAVARQLGTLDYSPGFQYGHPLSFQLAEKIAGLLPGELNHVFFTGSGSECADTSIKMARAYWRLKGQPQKTKLIGRARGYHGVNVAGTSLGGIGGNRKMFGQLMDVDHLPHTLQPGMAFTRGMAQTGGVELANELLKLIELHDASNIAAVIVEPMSGSAGVLVPPVGYLQRLREICDQHNILLIFDEVITAFGRLGTYSGAEYFGVTPDLMNVAKQVTNGAVPMGAVIASSEIYDTFMNQALPEHAVEFSHGYTYSAHPVACAAGLAALDILARDNLVQQSAELAPHFEKVLHGLQGAKNVIDIRNCGLAGAIQIAPRDGDPTVRPFEAGMKLWQQGFYVRFGGDTLQFGPTFNARPEELDRLFDAVGEALNGIA

SEQ ID NO: 10073 - protein, 355 aa, Zea mays
MPLVGQIAKVLTQRCRSWMLFYGEDVSVKMRLLFYILPCLLLSMDFLTLHPAMLGMEVILQGWMTGKAKKLMSFMIKGMSNGTFPTLPQPRRVASYDPKLSLLAAMAKNYPTVSAEYSEAVEKARRKLRALIAEKSCAPLMLRLAWHSAGTFDVSSRTGGPFGTMKHQSELAHGANAGLDIAVRLLEPIKEEFPILSYADFYQLAGVVAVEVTGGPEIPFHPGREDKPQPPPEGRLPDATKGSDHLRQVFGKQMGLSDQDIVALSGGHTLGRCHKERSGFEGAWTTNPLVFDNSYFKELLSGDKEGLLQLPSDKALLSDPVFRPLVEKYAADEKAFFDDYKEAHLKLSELGFADA

SEQ ID NO: 10074 - protein, 486 aa, Triticum aestivum
LIPSPANPRFPGPSLPYALGAALPRPAQHRWLIDSWPPACGKVRRRRRPRGTRWTITTSRTARWTSTSTAGGDGSRSDGEGDDEYALLTRITDTSAAEARAGKDIQGIPWERLQITRQDYRKARLEQYKNYENFPQSGELMDKLCKQVESSSKYYEFQYNTRIVKPSILHFQLRNLLWATSKHDVYFMSNSTVGHWSSLSHKMTDVLDFSGHVAPAKKHPGCALEGFTGVQVSTLAVNEGLLVAGGFQGELVCKSLGERDVKFCTRTTLSDNAITNAMDIHRSTSGSLRITVSNNDSGVREFDMERFQLLNHFRFNWPVNHTSVSPDKKLLAVVGDDRDALLVDSRNGKVTSTLVGHLDYSFASAWHPDGVTFATGNQDKTCRVWDIRNPSTSLAVLRGNIGAIRCIRYSSDGRFLLFSEPADFVHVYSAAECYRKRQEIDFFGEISGISLSPDDESLFVGVCDRVYASLLNYRMVHANGYLDSYM

SEQ ID NO: 10075 - protein, 396 aa, Pseudomonas syringae pv. tomato str. DC3000
MSAQVLRKRICVLPGDGIGVEVMEAALPVIAALGLPFDLLHADIGWECWRREGETVPDDTWKVMASCDATLLGAITSKPLAEAEAELPLPLQGHSRRYVSPVIQLRQNLDLYANVRPVTDMTGENRFRFVVIRENTEGLYAGLDFGRIPDALVPLLEAREALGAAWQRAGQEDATVTLRLQTRSGLTRIFEYAFDYARNNNFSRVTFVDKPMVLRHSSAFARVIFEETAQRYPDITGAIENVDAVALWMVQRPERFGVIVAENMFGDILSDLGAGVMGGLGFAPSGNFGNSGAYFEPVHGSAPAHAGLTKANPSAMFLAIAMMLEHLGYPAQSDCITRAVSLVARSAVRTYDLGGSHTTCQVGEAIVQQCVELQGLLVDRRERSRSAQGERHVSAL

SEQ ID NO: 10076 - protein, 408 aa, Oryza sativa (japonica cultivar-group)
MEGGGAGSGMERWREMFRGADIYDVIRNAILIAGADSPRELLRRRQGIIEWLFAVAPVTVPVPAPLACGRVVDGAGNRLPPAAIPDGGGHHHDDNDGNFAAAEAQTSLIDQQILEALYDEIEEDTQVINEVLRIKDILINYKEQSVDTLFDGLRRLQLMRLSISVLKSTQIAEAVAPLNKHRSPVICKIARDLAKGWKGVAADWVGPSSANADTSPDISNPSTVEDDFGLPTPPMDVGAFFLPQSAAEQYVSETLINFLLLSIFFYCHYMKFLHKADDDDDESLIPNAKNDCGFGGYKMEIAKPVANMDENILRKGKDLSRQHGPPMRQANLQMKLAQHHAIAITEQRPIAVVRKPLPDHVSKLERQATILEGCKVGIGKRNNTDIADLRLEATKRKLNDAYQEAENS

SEQ ID NO: 10077 - protein, 248 aa, Schizosaccharomyces pombe
PKYRLVVRFSNRFVTCQIVSSRVNGDYVLAHAHSSELPRYGIKWGLANWTAAYATGLLVARRALAKVGLADKYEGVTEPEGEFELTEAIEDGPRPFKVFLDVGLKRTSTGSRVFGAMKGASDGGLFIPHSPNRFPGFDIETEELDDETLRKYIYGGHVAEYMEMLIDDDEERYQKQFSGLIADGIESDQLEDIYAEAYAKIREDPSFQKSGKDAAAFKAESLKYTQRKLTAEERKERFNAKVIEAGRA

SEQ ID NO: 10078 - protein, 220 aa, Spinacia oleracea
RNLLSVAYKNVVGARRASWRIISSIEQKEESRGNEDHVSVIRDYRSRIEKELSDNCDGILKLLDTKLVPAASSGDSKVFYLKMKGDYHRYLAEFKTGAQRKEAAESTLTAYKAAQDIANAELAPTHPIRLGLALNFSVFYYEILNSPDRACNLAKQAFVEAIAELDTLGEDSYKDSTLIMQLLRDNLTLWTSDMQDEAADEITEEAAKQQKAVNNNKIAY

SEQ ID NO: 10079 - protein, 177 aa, Silene latifolia subsp. alba
MASLMSNAAVVTASTAAQANMVAPFSGLKSTSAFPVSRKSNVDITSLATNGGRVNCMQVWPPRNLKKFETLSYLPTLSEESLLKEINYLLIKGWVPCLEFEVGPAHVYRENNKSPGYYDGRYWTMWKLPMFGCTDASQVAAEVVECKNAYPDAHVRIIGFDNKRQVQCISFIAYKPE

SEQ ID NO: 10080 - protein, 459 aa, Saccharomyces cerevisiae
MPSNVRSGVLTLLHTACGAGVLAMPFAFKPFGLMPGLITLTFCGICSLCGLLLQTRIAKYVPKSENASFAKLTQLINPSISVVFDFAIAVKCFGVGVSYLIIVGDLVPQIVQSIFYRNDDNMSGSQEHHMFLDRRLYITLIIVFVISPLCFKRSLNSLRYASMIAIVSVAYLSGLIIYHFVNRHQLERGQVYFMVPHGDSQSHSPLTTLPIFVFAYTCHHNMFSVINEQVDKSFKVIRRIPIFAIVLAYFLYIIIGGTGYMTFGENIVGNILTLYPNSISTTIGRLAMLLLVMLAFPLQCHPCRSSVKNIIIFIENFRKGKLYDNRASFIPLDNFNSEDPQEAPTQQNNEEPNLRSESLRHINIITLCILLFSYLLAISITSLAKVLAIVGATGSTSISFILPGLFGYKLIGSEFTGTNERVPTSIKIFKYLSLSLFIWGIAVMVASLSAIVFLGTSSH

SEQ ID NO: 10081 - protein, 286 aa, Brassica napus
MGEEVRMKDVSGDGERVMEWEKGLPSDEDLASLSYSLVPSNLAMAFSITPEKSRTIQDVNRASETTFSSLRGGSPGPNTSSSTNLGVAAAEEEEEEDRVGSSSPGSDSKKQKISEEEGDSGTELKRARLVWTPQLHKRFVDVVAHLGIKNAVPKTIMQLMNVQGLTRENVASHLQKYRLYLKRMQGFTSEGPSSSDKLFSSTPVPPQSFQDQGSASAGAPSMMQMPVYAHHMGMQGYHHQNHAHDPYHQNHHRGSGAPANPYMMQQNKFGSMASYPPVGGGSANEN

SEQ ID NO: 10082 - protein, 392 aa, Sulfolobus solfataricus
MGEKMIKLLKFYQDRGIKIIKGEGQYVWDEKNNKYLDMHAGHGVAFLGHRNKVIIDHLKKQMEEISTLSLAFDTPIREEMIKELDELKPEDLDNLFLLNSGSEAVELALKIARKITKRRKIVAFKNSFHGRSMGALSVTWNKKYREPFEPLIGPVEFLEYNNVDSLKSITEDTAAVIVEPVQGEGGVIPAKKEFVKSLREVTEKVNALLIIDEVQTGFGRTGKIWAYQHFDIKPDILTAGKAIGGGFPVSAVFLPNWISEKIEEGDHGSTYGGNPLAAAAVTAACKVAKSEKIAEQAQKKGELFMRILKEKLEDFKIVREIRGLGLMIGIDLKVNPSIAIKVLQDEKVLSLKAGLTTIRFLPPYLITQSDMEWASDATRKGISETESKRVAS

SEQ ID NO: 10083 - protein, 159 aa, ASPERGILLUS NIDULANS FGSC A4
MADEAHEVTFESADAGASATYPMQCSALRKNGFVVIKNRPCKIVDMSTSKTGKHGHAKVHLVAIDIFTGKKYEDLSPSTHNMDVPNVSRKEYQLLDVTDDGFLSLMDDSGDTKDDVKVPEGEVGERINKMFKEEEKDCNVVILTSMGEQMCMEVKEAPK

SEQ ID NO: 10084 - protein, 184 aa, Zea mays
LKYFVDSVKKWGTRSATFHFHQGSKSVSVNYFVVILVTACELFLALGGFGCQGMGIPVGKLALYTALGGVRPSACLPITIDVGTNNEDLLKDEFYIGLKQRRATGQEYSEFLDEFMAAVRQNYGQKVLVQFEDFANHNAFTLLEKYRTNHLVFNDDIQGTAAVVLAGIIAALKSVGGTLADHTF

SEQ ID NO: 10085 - protein, 361 aa, Bacillus sp. KSM-K16
MEALNLYGAGDIRFEQSPKPTIMNDNEVIVRVETAGICGSDLSRYKKLGPYISGTTFGHECSGTIEEVGSNVSHLKEGMRVAVCPALPCGDCTQCRQGAFSRCPSLTVIGAVQPGAFAEYVKLPAENVLPLPNEIDADTAAFIEPAAVVAHGFYKTAIEPGADVAIIGCGSIGLLAIQWAKLFGARYVYAIDIDEQKLKVAKELGADQRVNPLDGPVHEQIHDLTAGEGVDVAIEAAGTPITSAQALALPKKGGEVVFLGIPYGDVTIERFYFEKIVRNELRVHGSWNGLSAPFPGKEWKTAIHSLQTGALQVNPLITHRLPLSDGPFVFKEMASGSPGYIKTLLYPGKTGQKERAINHLK

SEQ ID NO: 10086 - protein, 342 aa, Bacillus sp. KSM-K16
MKALVKTAPGFGHVELQNKPEPAPGEKQVKIKVKYAGICGSDIHTYEGHYKVAFPVTLGHEFAGEIVEVGPGVQSFKVGDRVTSETTFSICGQCPYCQTKDYNLCSERKGLGTQQDGGFAEYVLAREESLHLLPDNVDFRSAAMTEPLACTHHALAKTTINAGDLCVVIGPGPIGLLAAQAAKSKGAKVMITGLNHDKVRLEKARALGIDYVVNGEETDVGEVVNELTNGYGADVVLECSGAVKAANQGLKLLRKKGQYSQVGIFAASEIPFDLETIIQKEIHVIGSRSQKPADWEPSLMLLKTGNVNARALVTHEYELHQWEEAYQAIKSGEAIKVLLKPE

SEQ ID NO: 10087 - protein, 250 aa, Solanum commersonii
  unsure (1)..(250): unsure at all Xaa locations
MGRGRVQLKRIENKINRQVTFSKRRSGLLKKAHEISVLCDAEVGLIVFSTKGKLFEYATDSCMERLLERYERYSFAEKQLVPTDHTSPGSWTLENAKLKARLEVLQRNEKLYVGEDLESLNMKELQNLEHQLASALKHIRSRKNQLMHESISVLQKQDRALQEQNNQLSKKVKEREKEVEQQNQWDQQNHEINSSTFVLPQQLDSPHLGEASQNTNVVDNGEVEGGNSSQXQGAANNTVMPQWMVRHLNG

SEQ ID NO: 10088 - protein, 250 aa, Hevea brasiliensis
MTKNYPKVSEEYQKAIDKAKRKLRGFIAEKGCAPLMLRIAWHSAGTYDANTKTGGPFGTMRHAAEQAHAANNGLDIAVRLLEPIKQQFPILSYADFYQLAGVVAVEITGGPEIPFHPGREDKPEPPPEGRLPNATKGADHLREVFGKTMGLSDKDIVVLSGGHTLGRCHKERSGFDGPWTANPLIFDNSFFTELLAGQKEGLLQLPTDTVLVTDPVFRPYVEKYAADEDAFFADYAEAHVKLSELGFAEA

SEQ ID NO: 10089 - protein, 390 aa, Nicotiana tabacum
GKCWEDMFNAINQARRLIYITGWSVYHLVTLVRDNGKAEESMLGEILKRKSQEGVRVLLLIWDDPTSSKSILGYKSEGIMGTSDEETRRYFKHSSVHVLLCPRSAGKGHSWVKKQETGTIYTHHQKTVIVDVDAGNYQRKIIAFVGGLDLCKGRYDTPQHPIFKTLQNVHKDDYHQPNYTGPTTGCPREPWHDLHSRIEGPAAYDVLTNFEERWLKASKRHGLQKMKASQDDALLQLDRIPDILKIADVPCLGEDDADTWHVQIFRSIDSNSVKGFPKDPKEATNKNLVCGKNVLIDMSIHTAYVKAIRAAQHFIYIENQYFLGSSYNWNNYQDLGANNLIPMEIALKIANKIRANERFSVYIIVPMWPEGVPTSTATQRILFWQHNTMQ

SEQ ID NO: 10090 - protein, 347 aa, Escherichia coli O157:H7 EDL933
MKNSKAILQVPGTMKIISAEIPVPKEDEVLIKVEYVGICGSDVHGFESGPFIPPKDPNQEIGLGHECAGTVVAVGSRVRKFKPGDRVNIEPGVPCGHCRYCLEGKYNICPDVDFMATQPNYRGALTHYLCHPESFTYKLPDNMDTMEGTLVEPAAVGMHAAMLADVKPGKKIIILGAGCIGLMTLQACKCLGATEIAVVDVLEKRLAMAEQLGATVVINGAKEDTIARCQQFTEDMGADIVFETAGSAVTVKQAPYLVMRGGKIMIVGTVPGASAINFLKINREVTIQTVFRYANRYPVTIEAISSGRFDVKSMVTHIYDYRDVQQAFEESVNNKRDIIKGVIKISD

SEQ ID NO: 10091 - protein, 226 aa, Triticum aestivum
MATMAPSPALLPLLLLLPLLLLSVACTAGAAPAATATVPTIPSQPGKPNSNNKQKQGGAPLGPAVRALVQSTCNATTYYDLCVAALVADPASSTADLRGLCAIAVSAAAANASATASALANTTWAASGAPEPGSDGRAQQVPALLTRTCAGKYREAREALLEARESVGEEAYDYAFVHVGAAAEYPAVCRTMFRRKRVPYPVELARREEALEHLCTVVIDIITLLA

SEQ ID NO: 10092 - protein, 377 aa, Deinococcus radiodurans
MSNIAKGLEGVLFTESKLTFINGSEGILTHLGIPIQEWAEKSTFEELSLALLDAKLPTAEELAKFDAELKANRAIPDQLVGIIRDMPKGVHPMQALRTAVSYLGLLDPQAEDITPEARRAISTRMIAQFSTIIAAINRAQEGQDIVAPRADLTHAGNFLYMLTGNEPTPEQARLFDIALVLHADHGMNASTFTAIATSSTLSDMYSCMVSAIGALKGPLHGGANEAVMTMLDEIGTVDKAEAYITGKLDNKEKIMGVGHRVYKYFDPRSRVLRDYAEHVANKEGKSNYYQILEAIEKIIVDRMGAKGIYPNVDFYSGTVYSDLGIKKEYFTPIFALARISGWCASVIEYSQDNRLLRPDAEYTGARDQHYVDIKDRQ

SEQ ID NO: 10093 - protein, 158 aa, Oryza sativa
MASTALSSAFSLLSLPSSSSPAAAAAAAPRSFAVPSRARPRRAVAVVASTATDSPKVLELGDAIAGLTLEEARGLVDHLQERLGVSAAAADEAPAEKTEFDVVIEEVPSSARIASIKVVRALTNLALKEAKDLIEGLPKKVKEGVSKDEAEDAKKQLE

SEQ ID NO: 10094 - protein, 301 aa, Glycine max
  unsure (1)..(301): unsure at all Xaa locations
MERRRVMEHLKTYPAFPGWYADVSWPGEAHIYKMEKILFHGKSEFQELLVFXSSRHGKVAILDGCIQLTENDEFAYQEMLTHLALCSIPNPKKVLLVGGGDGGILREISRHSSVEHIDICEIDKMVIDAYKKFFPDIAVGYEDPRVHVHIRDGIAFTNSVPEGTYDVIIVDAFPAMGHSADVLADECFLESVAKALRPGGVFSAPADSLWHKNFVVADTIANCKKIFKGSVNYAWTTVPTYASGVIGFMLCSTEGPPVNFKHPINKLNPEKNGVAKGPTKFYNPEIHAAAFCLPSFVDKVD

SEQ ID NO: 10095 - protein, 490 aa, Escherichia coli O157:H7 EDL933
MSRMAEQQLYIHGGYTSATSGRTFETINPANGNVLATVQAAGREDVDRAVKSAQQGQKIWAAMTAMERSRILRRAVDILRERNDELAKLETLDTGKAYSETSTVDIVTGADVLEYYAGLIPSLEGSQIPLRETSFVYTRREPLGVVAGIGAWNYPIQIALWKSAPALAAGNAMIFKPSEVTPLTALKLAEIYSEAGLPDGVFNVLPGVGAETGQYLTEHPGIAKVSFTGGVASGKKVMANSAASSLKEVTMELGGKSPLIVFDDADLDLAADIAMMANFFSSGQVCTNGTRVFVPAKCNAAFEQKILARVERIRAGDVFDPQTNFGPLVSFPHRDNVLRYIAKGKEEGARVLCGGDVLKGDGLDNGAWVAPTVFTDCSDEMTIVREEIFGPVMSILTYESEDEVIRRANDTDYGLAAGIVTADLNRAHRVIHQLEAGICWINTWGESPAEMPVGGYKHSGIGRENGVMTLQSYTQVKSIQVEMAKFQSIF

SEQ ID NO: 10096 - protein, 172 aa, Glycine max
  unsure (1)..(172): unsure at all Xaa locations
AYSMISSPTVTNVNPACAGMVAPFTGLKSIAGFPTRKTNNDITSIATNGGRVXCMHVWPPVGKKKFETLSYLPDLDDAQLAKEVEYLLKNGWIPCLKFELEHGFVYREHNRSPGYYDXRYWTMWNLPMTCCTDAYDVFKELQXANTAIANSFIQIIRFDNLLSVQCMSFDRY

SEQ ID NO: 10097 - protein, 147 aa, Neurospora crassa
MSGANPKQNSEPNRSAFFFPFELFLLQDGEKKIEEKVFTGMSNTSDFKILKEDHTLGNLLAEHLKQAPHVLMAGYKIAHPNVPELFIRIQTDGSITPREALVGACKQLVAMYGQLGREFQKELALRQYADQGEQGGGVNGGANGGHY

SEQ ID NO: 10098 - protein, 287 aa, Arthrobacter keyseri
MTTETIDTTASETPRLRLLHGHSIPRLGLGTWPMLEDECEAAVRVAVQSGYRLVDTAFQYRNEEAVGRGIRTAGVPRSELFISSKFNKESHSIDGVQRAYDESLRKLGLDHLDMFMCHWPVPALGKYVDAWKGLVKLLEEGRVKAIGVSNFKPSHLKEIIDATGVVPDVNQIQLSPDIARTEPRAVHRLLGTVTEAWSPIGRSSGLRANPIIIEIAQRLNKSPAQILLRWHVQQDIVPIPQASDPLWLTENLSVFDFSLSATEMAAIRQLDKGEGAARDSDLPENGH

SEQ ID NO: 10099 - protein, 323 aa, Mycoplasma genitalium G-37
MDKIAILTSGGDASGMNATIAYLTKYAIAKQLEVFYVKNGYYGLYHNHFITSKELDLTDFFFMGGTVIGSSRFKQFQDPSLRKQAVLNLKKRGINNLVVIGGDGSYMGAKALSELGLNCFCLPGTIDNDVNSSEFTIGFWTALEAIRVNVEAIYHTTKSHNRLAIIEVMGRDCSDLTIFGGLATNASFVVTSKNSLDLNGFEKAVRKVLQFQNYCVVLVSENIYGKNGLPSLEMVKEHFENNAIKCNLVSLGHTQRGFSPNSIELFQISLMAKHTIDLVVNNANSQVIGMKNNQAVNYDFNTAFNLPKADRTKLLNQVNTAII

SEQ ID NO: 10100 - protein, 348 aa, Pyrococcus horikoshii OT3
MSEKMVAIMKTKPGYGAELVEVDVPKPGPGEVLIKVLATSICGTDLHIYEWNEWAQSRIKPPQIMGHEVAGEVVEIGPGVEGIEVGDYVSVETHIVCGKCYACRRGQYHVCQNTKIFGVDTDGVFAEYAVVPAQNIWKNPKSIPPEYATLQEPLGNAVDTVLAGPISGKSVLITGAGPLGLLGIAVAKASGAYPVIVSEPSDFRRELAKKVGADYVINPFEEDVVKEVMDITDGNGVDVFLEFSGAPKALEQGLQAVTPAGRVSLLGLYPGKVTIDFNNLIIFKALTIYGITGRHLWETWYTVSRLLQSGKLNLDPIITHKYKGFDKYEEAFELMRAGKTGKVVFMLK

SEQ ID NO: 10101 - protein, 416 aa, Escherichia coli
MESKVVVPAQGKKITLQNGKLNVPENPIIPYIEGDGIGVDVTPAMLKVVDAAVEKAYKGERKISWMEIYTGEKSTQVYGQDVWLPAETLDLIREYRVAIKGPLTTPVGGGIRSLNVALRQELDLYICLRPVRYYQGTPSPVKHPELTDMVIFRENSEDIFAGIEWKADSADAEKVIKFLREEMGVKKIRFPEHCGIGIKPCSEEGTKRLVRAAIEYAIANDRDSVTLVHKGNIMKFTEGAFKDWGYQLAREEFGGELIDGGPWLKVKNPNTGKEIVIKDVIADAFLQQILLRPAEYDVIACMNLNGDYISDALAAQVGGIGIAPGANIGDECALFEATHGTAPKYAGQDKVNPGSIILSAEMMLRHMGWTEAADLIVKGMEGAINAKTVTYDFERLMDGAKLLKCSEFGDAIIENM

SEQ ID NO: 10102 - protein, 282 aa, Streptococcus pyogenes SSI-1
MAMIQWFPGHMSKARRQVQENVKHVDFVTILVDARLPLSSQNPMLTKIVGDKPKLMILNKADLADATRTKEWKAYYESQGIKTLAINSKEQSTVKKVTEAAKELIADKIKRLRDRGIQKETLRTMIIGIPNAGKSTLMNRLAGKKIAVVGNKPGVTKGQQWLKSNKELEILDTPGILWPKFEDELVGLKLALTGAIKDQLLPMDEVTIFGLNYFKTHYPSRLTKRFKNIPLEEEAPEIIMTLTRQLGFKDDYDRFYSLFVKEVRDGKLGQYTLDQVGDMDAD

SEQ ID NO: 10103 - protein, 324 aa, Candida parapsilosis
MSTATASPAVKLNSGYEIPLVGFGCWKLTNDVASDQIYRAIKSGYRLFDGAEDYANEQEVGEGIKRAIKEGIVKREELFITSKLWNSFHDKKNVEVALMKTLSDLNLDYVDLFYIHFPIAQKPVPIEKKYPPGFYCGDGDKWSIEEVPLLDTWRALEKLVDQGLAKSIGISNFSAQLIYDLIRGCTIKPVALQIEHHPYLTQPKLVEYVQLHDIQITGYSSFGPQSFLEMDLKRALDTPVLLEEPTVKSIADKHGKSPAQVLLRYQTQRGIAVIPRSNSPDRMAQNLSVIDFELTQDDLQAIAELDCNLRFNEPWDFSNIPVFV

SEQ ID NO: 10104 - protein, 487 aa, Sinorhizobium meliloti
MRAQPKASHFIDGEYVEDAAGTVIESIYPATGEIIARLHAATPGIVEKAIAAAKRAQPEWAAMSPTARGRILKRAAELMRQLNRELSELETLDTGKPIQETIVADPTSGADSFEFFGGVAPAALNGDYIPLGGDFAYTKRVPLGVCVGIGAWNYPQQIACWKGAPALVAGNAMVFKPSENTPLGALKIAEILIEAGLPKGLFNVIQGDRATGPLLVNHPDVAKVSLTGSVPTGKKVAGAAAAELKHVTMELGGKSPLIVFDDADLESAIGGAMLGNFYSTGQVCSNGTRVFVQRKIKEPFLARLKERTEAIVIGDPLDEATQLGPMVSAAQRDKVFSYIGKGKAEGARLVTGGGIPNNVSGEGTYIQPTVFADDTDGMTIAREEIFGPVMCVLDFDDEVEVIARANATEFGLSAGVFTADLTRAHRVADRLEAGTLWINTYNLCPVEIPFGGSKQSGFGRENSVAALNHYTELKTVYVGMGPVEAPY

SEQ ID NO: 10105 - protein, 458 aa, Magnaporthe grisea 70-15
MPCTSNVRSTRNYSASSEPDLKTTLKSVIPAKRELLKKVKAHGSKVIGEVKVENTIGGMRGLKAMVWEGSVLDADEGIRFHGRTIKDCQRELPKGKTGTEMLPEAMFWLLLTGQVPSTNQVRVLSRQLAEQAQLPAFVNKMLDDFPRDLHPMTQFAIAVSALNHTSKFAKAYADGLNKADYWEPTFDDSISLLAKLPTIAAKIYHNSYKGGGALPAEVDLEQDWSYNFAAMLGKGGKGNENFQDLLRLYLALHGDHEGGNVSAHATHLVGSALSDPFLSYSAGLQGLAGPLHGLAAQEVLRWIIQMKEAIPATYSEKDVTDYLWSTLNSGRVVPGYGHAVLRKPDPRFQALMDYAASRPEIAKDPVFQLVQLNSQVAPEVLKKHGKTKNPYPNVDSSSGVLFHHYGFHETLYYTATFGVSRGLGPLAQLIWDRALGLPIERPKSINLEGILKIVGDKS

SEQ ID NO: 10106 - protein, 309 aa, Zea mays
MTSTTTTMSSLALALALLLLSGDIGGAARQLQELPKPDLPPLPKPEVPPRPDLPPLPKPEEQPPLPKPELPVPPQPLPIPPQPLPKPELPVPPEPLPVPPQPLPVPPQPLPKPEAELPVPPEPLPVPPQPLPVPPQPLPKPELPVPPEPLPVPPQPLPVPPQPLPKPDDMPVPPEPLPKPELPVPPQPLPNPELPVPPEPLPKPELPVPPQPLLKPELPVPPEPLAKPELPMPPQPLPKPELPVPPEPLPKPELPVPPEPLPKPELPVPPEPLPKPELPPPVLPGELPPKPEPEVVPPKAEIMPSLPKP

SEQ ID NO: 10107 - protein, 182 aa, Zea mays
  unsure (1)..(182): unsure at all Xaa locations
MTTGEGAEAAAVPRVVSILSALLQRVAERNDAAAAAPPPAAAAGPPVLSAFQGLTKPAISIGGYLERIFRFAGCSPSCYVVAYIYLDRFLRRRPALAVDSFNVHRLLITSVLTAVKFVDDICYNNAYFARVGGISLVEMNYLEVDFLFGIAFYLNVXPSGFAYYSAVLHIVKTVMFKQLGGG

SEQ ID NO: 10108 - protein, 455 aa, Secale cereale
MKTLLMLAILAMATTIATANMQVNPSGQVQCPQQQPFPQPQQSSPQQPQQPFPQQSQQPFPQQPQQSSPQPQQPYPQQPFPQQPQQPYPQQPQQPFPQQPQQPYPQQPQQQFPQQPQQPVPQQPLQQFPQQPQQPFPQQPLQQFPQQPQQPFPQQPQQPVPQQSQQPFPQTQQPQQPFPQPQQPQQLFPQTQQSSPQQPQQVTSQPQQPFPQAQPPQQSSPQSQQPYPQEPQQLFPQSQQPQQPFPQPQQPQQPFPQPQPQTQQSIPQPQQPFPQPQQPFPQSQEQFPQVHQPQQPSPQQQQPSIQLSLQQQLNPCKNVLLQQCSPVALVSSLRSKIFPQSECQVMQQQCCQQLAQIPQQLQCAAIHSVVHAIIMQQEQREGVQILLPQSHQQHVGQGALAQVQGIIQPQQLSQLEVVRSLVLQNLPTMCNVYVPRQCSTIQAPFASIVTGIVGH

SEQ ID NO: 10109 - protein, 181 aa, Hordeum vulgare
MAGVGRNMVAPLLVLNLIMYIIVIGFASWNLNHFINGITNRPGVGGNGATFYFLVFAILAGVVGAASKLAGVHHVRTWRGDSLATSASSSLVAWAITALAFGLACKEIHVGGYRGWRLRVLEAFVIILAFTQLLYVLALHSGLFGNQFGNNNGGYPAEHAYGAGVGDHHNKGMGTGGVARV

SEQ ID NO: 10110 - protein, 228 aa, Bacillus sp. KSM-K16
MDQLKRMAAEAAAEYVKDGMKIGLGSGSTVFEFVRVLGEKAKEGLNIQAVAASRKTEALAKACGIHIIDFPTMEKLEVAFDGADEIAPGLMLLKGGGGSLLREKLVAAAAKRLVVLADESKLVEELGAFKLPVEIIPFGWETTAMRIEALGGVASLRQTGKSPFVSDNHNWILDCDFGNIRDPYSLHEKVKKLVGVVETGLFLDMACEAIVASKNGIHHITKGDEFNV

SEQ ID NO: 10111 - protein, 475 aa, Mesorhizobium sp. BNC1
MFKNYIAGEWVEAEGTENINPSDTSDVVGVYSRATRENVLDAISAAKAAFASWSRSGPLQRHSVLRKAADEIMARKDELGSLLAREEGKTLPEAIGEVVRASQIFDFFAGESLRLSGEIIPSVRPGIGVEITREPVGVIGIITPWNFPIAIPAWKIAPAICYGNAIVFKPADLVPASSWAIVDILQRAGLPAGVLNLVMGKGSVVGQAILESPDVAAVTFTGSTQTGKHVAAASIEHNRRFQLEMGGKNPMVVLDDADLSIAVEAATNSAFFSTGQRCTASSRLIVTEGIHDRFVEAMTQRLSSLVVDNALKPGTHIGPVVDESQLQQDLDYIEVGQKEGARLHFGGRRLERETNGFYLEPALFTEASNDMRIAREEIFGPVAAVIRVKDYEEALAVSNDTPYGLSAGIATQSLKFATHFKQNAEAGMVMVNLPTAGVDFHVPFGGRKRSSYGPREQGRYAAEFFTTVKTSYSLA

SEQ ID NO: 10112 - protein, 494 aa, Arabidopsis thaliana
MVLTKTATNDESVCTMFGSRYVRTTLPKYEIGENSIPKDAAYQIIKDELMLDGNPRLNLASFVTTWMEPECDKLIMDSINKNYVDMDEYPVTTELQNRCVNIIARLFNAPLEESETAVGVGTVGSSEAIMLAGLAFKRKWQNKRKAEGKPYDKPNIVTGANVQVCWEKFARYFEVELKEVNLSEGYYVMDPDKAAEMVDENTICVAAILGSTLNGEFEDVKRLNDLLVKKNEETGWNTPIHVDAASGGFIAPFIYPELEWDFRLPLVKSINVSGHKYGLVYAGIGWVVWRAAEDLPEELIFHINYLGADQPTFTLNFSKGSSQIIAQYYQLIRLGFEGYKNVMENCIENMVVLKEGIEKTERFNIVSKDQGVPVVAFSLKDHSFHNEFEISEMLRRFGWIVPAYTMPADAQHITVLRVVIREDFSRTLAERLVADISKVLHELDTLPSKISKKMGIEGIAENVKEKKMEKEILMEVIVGWRKFVKERKKMNGVC

SEQ ID NO: 10113 - protein, 439 aa, Helicobacter pylori J99
MNFQENLAALDLEYLWHPCSQMQEHQNFPIIPIKKAQGIYLYDFNDNAYMDLISSWWVNLFGHNNAYISQQLKNQIDNLEHVLLASFSHKPIITLSQRLCQLTGMDKCFYADNGSSCIEIALKMSYHAHFLKNQTRRKKLFLSLSNSYHGETLGALSVGDVKLYKDTYTPLLLKNLITPVPKNDSEIENSLNALKRLLDKHGEEICAFIAEPLLQCAGNMHIYSAKYLKQAVLWCKQKNIHIIFDEIATGFGRTGSMFAYEQCGIKPDFLCLSKGISGGYLPLSALLTHNEIYNQFYAPYEENKAFLHSHSYTGNALACACANATLDIFEKENVIEKNKALSEFIFSALQNALKPLIERQVVSDLRHLGMVFAFEVFLQTKERLSLAVFKKALKKGLLLRPLNNTIYLMPPYIITHEEIKKAIAGLVEAIDELKKAENK

SEQ ID NO: 10114 - protein, 157 aa, Oceanobacillus iheyensis HTE831
MSIYEYQVEKSNGEEISLSQYQDNVLLIVNTATKCGFANQFEGLEELHQKYQDEGLRVLGFPSNQFNEQEPVDDENMEEACKVNFGVTFPLFKKIDVKGPNAAPLFKYLTEEQKGLLGSNVKWNFTKFLVDRNGNVVKRFAPKDKPAKIEDDIKALL

SEQ ID NO: 10115 - protein, 380 aa, Zygosaccharomyces rouxii
MATHEEFIRTQVFGTVFEITNRYTDLNPVGMGAFGLVCSATDTLAGQPVAIKKIMKPFSTAVLAKRTYRELKLLKHLRHENLICLQDIFLSPLEDIYFVTELQGTDLHRLLQTRPLEKQFVQYFLYQILRGLKYVHSAGVIHRDLKPSNILINENCDLKICDFGLARIQDPQMTGYVSTRYYRAPEIMLTWQKYDVEVDIWSAGCIFSEMIEGKPLFPGKDHVHQFSIITDLLGSPPRDVINTICSENTLKFVTSLPHRDPVPFQERFKTVEPDAVDLLERMLVFDPKKRITAADALVHPYLAPYHDPTDEPTAEAQFDWDFNDADLPVDTWRVMMYSEILDFHKIGGGDGQIDTNAAFDDQVAAATAAPMAQHTNQTNQ

SEQ ID NO: 10116 - protein, 197 aa, Glycine max
MSASRFIKCVTVGDGAVGKTCLLISYTSNTFPTDYVPTVFDNFSANVVVDGSTVNLGLWDTAGQEDYNRLRPLSYRGADVFILAFSLISKASYENIAKKWIPELRHYAPGVPIILVGTKLDLREDKQFFIDHPGAVPITTTQGEELRKLIGAPAYIECSSKTQQNVKAVFDAAIKVVLQPPKQKKKKRKAQKACSIL

SEQ ID NO: 10117 - protein, 438 aa, Corynebacterium glutamicum ATCC 13032
MQAKEEEKRAFDNDRAHVFHSWSAQDKISPKVWAAAEGSTLYDFDGNAFIDMGSQLVSANLGHNNPRLVEAIQRQAARLTNINPAFGNDVRSDVAAKIVSMARGEFSHVFFTNGGADAIEHSIRMARLHTGRNKILSAYRSYHGATGSAMMLTGEHRRLGNPTTDPDIYHFWAPFLHHSSFFATTQEEECERALKHLEDVIAFEGAGMIAAIVLEPVVGSSGIILPPAGYLNGVRELCNKHGILFIADEVMVGFGRTGKLFAYEHAGDDFQPDMITFAKGVNAGYAPLGGIVMTQSIRDTFGSEAYSGGLTYSGHPLAVAPAKAALEIYAEGEIIPRVARLGAELIEPRLRELAEENVAIADVRGIGFFWAVEFNADATAMAAGAAEFKERGVWPMISGNRFHIAPPLTTTDDELVALLDAVEAAAQAVELTFAGALF

SEQ ID NO: 10118 - protein, 169 aa, ASPERGILLUS NIDULANS FGSC A4
MASASTAGSYSNPLKKFKLVFLGEQSGAHTLSLHSQTGARFLMLYYNRTVRLQLWDTAGQERFRSLIPSYIRDSSVAVVVYDISNAKSFQNTRKWIDDVRGERGNDVIIVLVGNKTDLSDKREVTTAQGEEEAKKNGLMFIETSAKVGHNVKQLFRRIAQALPDLNDND

SEQ ID NO: 10119 - protein, 219 aa, Oryza sativa (japonica cultivar-group)
MEWAYYGSGYSSSGTPSPVGGDGDEDSYMTVSSAPPKRRAGRTKFKETRHPVYKGVRSRNPGRWVCEVREPHGKQRIWLGTFETAEMAARAQDVAAMALRGRAACLNFADSPRRLRVPPLGAGHEEIRRAAVEAAELFRPAPGQHNAAAEAAAAVAAQATAASAELFADFPCYPMDGLEFEMQGYLDMAQGMLIEPPPLAGQSTWAEEDYDCEVNLWSY

SEQ ID NO: 10120 - protein, 152 aa, Nicotiana tabacum
AWHSAGTYDVCSKTGGPFGTMRLKAEQGHGANNGIDIAIRLLEPIKEQFPILSYGDFYQLAGVVAVEVTGGPDVPFHPGREDKTEPPVEGRLPDATKGSDHLRDVFVKQMGLSDKDIVALSGGHTLGRCHKERSGFEGPWTTNPLIFDNSYF

SEQ ID NO: 10121 - protein, 125 aa, Candidatus Liberibacter africanus
MSNIESIVEKLSSLTLLQAAELSKRLEEEWGVSAAAPVAVVASAAGESAAAVAEKTEFEVFLEGFDAKKKISVIKEVRAITELGLKEAKDFVESAPKSLKTGVSKDEAEELKKKLEAAGATIILR

SEQ ID NO: 10122 - protein, 113 aa, Arabidopsis lyrata
STGKRSEREEDTDPQGSRGISDDEDGDNSRKKLRLSKDQSVILEETFKDHSTLNPKQKQALAKQLGLRARQVEVWFQNRRARTKLKQTEVDCEFLRRCCENLTEENRRLQKEV

SEQ ID NO: 10123 - protein, 161 aa, Schizosaccharomyces pombe
MNDGFADDELSLPKATVQKMVSDILPVDLTFTKEARDLLIECCVEFIHLVSSEANEICEKEAKKTIAAEHIIKALENLEFKEYIAEALEVAAEHKEQQKNREKKSSKFEQSGVSRDELLRQQEELLSRARERFKNQNIAHDNHTTTAIPVPTASETETKEN

SEQ ID NO: 10124 - protein, 591 aa, Triticum aestivum
  unsure (1)..(591): unsure at all Xaa locations
MCGILAVLGCADWSQAKRARVLSCSRRLKHRGPDWSGLFQCEGNFLAQQRLSVVSPLSGDQPLYNEDRTVXVVVANGEIYNHKKIRKQFRXKHTFTTGSDCEVIIPLYEEYGENFVNMLDGVFSFVLYDTRNKTYMAARDAVGVNPLYFGRGSDGSVWIASEMKALHEDCPKFELFPPGNLYSSAAGGFRRWYNPQWFAEHVPATAYQPLVLREAFEKAVIKRLMTDVPFGVLLSGGLDSSLVASVTKRHLIETEAAKKFGTELHSFVVGLEGSPDLKAAREVADYLGTIHHEFHFTVQDGIDAIEEVIYHNETYDVTTIRASTPMFLMARKIKALGVKMVLSGEGSDELLGGYLYFHFAPNKEEFHKETCRKVKALHQYDCLRANKATSAWGLEVRVPFLDKEFIDVAMSMDPEWKLYDANLGRIEKWVLRKAFDDEKEPYLPKHILYRQKEQFSDGVGYNWIDGLKAFTEQQVTDEMMKNAAEEYPYNTPINKEAYYYRMIFERLYPQDSARETVPWGPSIACSTPAAIEWVAQWKASNDPSGRHIASHNDAAPAHAHANWNGAVANGKANGNGTANGNANANGTLVPC

SEQ ID NO: 10125 - protein, 275 aa, Brucella suis 1330
MTVPTVKLNDGNHIPQLGYGVWQISNDEAVSAVSEALKAGYRHIDTATIYGNEKGVGKAINGSGIARADIFLTTKLWNSDQGYESTLKAFDTSLKKLGTDYVDLYLIHWPMPSKDLFMETWRAFIKLKEEGRVKSIGVSNFRTADLERLIKESGVTPVLNQIELHPQFQQDELRLFHGKHDIATEAWSPLGQGKLLEDPTLKSIAEKHAKSVAQIILRWHIETGNIVIPKSITPARIKENFDIFDFTLNGTDHDAITKLDMADGRIGPNPSVFSA

SEQ ID NO: 10126 - protein, 402 aa, GIBBERELLA ZEAE PH-1
MNSKNWNDRADKDLFFTILSVKNIGVISGSEWTTIGNHMRSLGYGFTNEGCRQHFQGLRRAQHKSDIPGPNGDTVRRNDPTMNPITRRPGPGRGRPRKQPPVPVPGAPGEGAPHPPLALGIDHGPPPNSAPPYPQGAQSYDPTPAGHQPTHPQQVQAAMRPGTISSAPPTPQASTPGNAVPGPGPVTYPSPNLTPALPQNPPHLHPLQHGQPGQSGQPGQQPQQPQQPQPEQQSQSDQQSQPDQQPQQPQPQQTQPQSAQQSQPGQQPNPTTQPQPQPQPDQEIQHDYQSQELPQEPPQETREATDTDAISQSQPQPIEQNHEPHAILPQEQLQPEHEDIDADGDADGEVDVDNDEPSAKRQRMGSPEPAKDDDMDDEAVLALAAHSGPTDFASDFATYGEA

SEQ ID NO: 10127 - protein, 464 aa, Xanthomonas campestris pv. campestris str. ATCC 33913
MTDGLPTALADLLAARLGPEGWLTGADARRRYGEDDSRRWALPGAVALPRDTDDVVAIVQACRAHGVPIVARGAGTGTTGAAVPFSGGVVVSMARMNRILALRPADRCAVVQPGVLNGDLQQALQPHGLFWPPDPSSAEICSVGGNLSTNAGGPRAVKYGATRDNVLGLVAVTGTGDVIHCGGAYTKNSTGYDLTHLLVGSEGTLAIIVEATLKLTPRAVAQAGVRALYRDAASAAAAVSRIMAQPTTPTMLEFMDASAIALLRRNGSDVPDAGAMLLIEADGDHDTLPYALQALHDAADGDGVLSLDIAADGSARDKLWAARRALSPALRTIKPGKINEDVVVPVSRIPELVAGVEALAVEFAVPIVAFGHAGNGNLHVNIMYDPDDADETARAQAALPRVFALVLALEGTLSGEHGIGVAKRDFMTQAFSAPTLAAMRAIKAALDPDGILNPGKVLPTSPAE

SEQ ID NO: 10128 - protein, 182 aa, Zea mays
MPAGKRHSWVKQQETGTIFTHHQKTVILDADAGNHRRKIVAFVGGLDLCGGRYDTPKHTLFRTLQTFHKEDYYNPNFAVEDARGPREPWHDLHSKIDGPAAYDVLKNFEERWLKASKRSAAKKLSKLSRSHNDSLLWINKIPDIIAIDDEIYSNDDDPERWEEQESLPKGSINHCKINNDID

SEQ ID NO: 10129 - protein, 364 aa, Buchnera aphidicola
MTKKLYKIAVLPGDGIGPEIIQEAYKIIDVLQKKFSFNVKMHEYDIGGISIDKHGTALTQETIEGCENSDAILFGSVGGSKWDHLPEIEKPEKAGLLKLRKHFNLFANIRPCKLSQHLLDISPLKNSIIKKGIDLICIRELTGGIYFGKSNKITNIDDPYAFDTEIYFRSEIKRIAKIAFQIAQSRKKKIVSIDKANVLKSSILWRDTVNKMAYKFPNVKLEHMYIDNATMELIKNPSSFDVILCSNLFGDIISDECAAIIGSIGLLPSASLNKSGFGLYEPAGGSAPNIAGKTIANPIAQILSLSMLLKYSLHLPFLSSCIDEAVHEALVKKYMTMDISKNPQNFLKTNEIGDKISDLLAKKA

SEQ ID NO: 10130 - protein, 205 aa, Cytophaga hutchinsonii
MYTKKNKQFVLMGLTYSLMMFVSSCLGINSDVKNRPSATDSMATVDKTQSIYSIKVTTLDGQPFDLSTLKGKKILIVNTASKCGYTPQYEELQQLHALHGDSVAVLGFPCNDFGGQESGSESEIGAFCTKNYGVTFQMFEKVHIKGNEQHPLYKWLTDPALNGWNKDAPTWNFCKYLINEKGELVNFFGSGVKPMSKTVLDAIRK

SEQ ID NO: 10131 - protein, 161 aa, Triticum aestivum
  unsure (1)..(161): unsure at all Xaa locations
MSDSEDHHFESKADAGASKTYPMQAGAIRKGGFLVIKNRPCKVVEVSTSKTGKHGHAKCHFVALDIFNGKKLEDIVPSSHNCDVPHVDRTEYQLIDISEDGFVSLLTDNGSTKDDLKLPTDDAILTQLKDGFAXEGKDLALTVMSAMGEEQICAVKDVGPR

SEQ ID NO: 10132 - protein, 324 aa, Hypocrea jecorina
MASPTLKLNSGYDMPQVGFGLWKVDNAVCADTVYNAIKAGYRLFDGACDYGNEKECGEGVARAIKDGLVKREDLFIVSKLWQTFHDEDKVEPITRRQLADWQIDYFDLFLVHFPAALEYVDPSVRYPPGWFYDGKSEVRWSKTTTLQQTWGAMERLVDKGLARSIGVSNYQAQSVYDALIYARIKPATLQIEHHPYLQQPDLVSLAQTEGIVVTAYSSFGPTGFMELDMPRAKSVAPLMDSPVIKALADKHRRTPAQVLLRWATQRGIAVIPKTSRPEVMAQNLDNTSFDLDSEDLAKIADMDLNIRFNKPTNYFSANKLYLFG

SEQ ID NO: 10133 - protein, 67 aa, Zea mays
LQIEIFEASKDDNREASPECSICLDGFYDGDELIRLHCGHRFHSTCLEPWVRKCSDCPYCRTNIRSQ

SEQ ID NO: 10134 - protein, 481 aa, Salmonella enterica subsp. enterica serovar Typhi Ty2
MTIWENAMQYQLLINGVLVDGEGERQSVYNPATGEVILEIAEASPVQVDAAVLAADSAFAEWGQTTPKARAECLLKLADSIEQNALEFARLESQNCGKPLHCVINDEIPAIVDVFRFFAGAARCLSGLAAGEYLEGHTSMIRRDPIGVVASIAPWNYPLMMAAWKLAPALAAGNCVVIKPSEITPLTALKLAALAKDIFPPGVLNVLFGRGQTVGDVLTGHEKVRMVSLTGSIATGEHILRHTAPAIKRTHMELGGKAPVIVFDDADLDAVAQGVRTFGFYNAGQDCTAACRIYAQRGIYDALVEKLGNAVSSLKMGAPEDKSTELGPLSSLAHLKRVTAAVEEAKALSHIRVITGGSQTEGKGYYFAPTLLADAKQEDAIVQREVFGPVVSITVFDDEDQVLRWANDSRYGLASSVWTQDVGRAHRLSARLQYGCTWINTHFMLVSEMPHGGQKQSGYGKDMSLYGLEDYTLVRHIMVKH

SEQ ID NO: 10135 - protein, 507 aa, Glycine max
  unsure (1)..(507): unsure at all Xaa locations
MASNDSDSQMKIVHGDAGYILEDVPHFADYIPNLPTYPNPLRSNPAYSVVKQYFVHMDDTVPPTRPVHKDSPRGVHFRRAGPRQKVYFKSDEVHACIVTCGGLCPGLNTVIREIVCGLSYMYGVNKGLGIDGGYRGFYSKNTITLTPKVVNDIHKRGGTILGTSRGGHDTGKIVDSIQDRGINQVYIIGGDGTQRGATVIYEEVRRRGLKVAIAGIPKTXDNDNSSINKSFGFNNAVEVGXHAINAAHVEAESIENGIGVVKLMGRYSGFIAMYATLASRDVDCCLIPESPFYLEGKGGLFEFIEKRLKENGHMVIVIAEGAGQDLLTESMQAMDQKDASGNKLLXDVGLWISHKIKDHFARKDKMPINLKYIDPTYMIRAIPSNASDNVYCTLLAQSAVHGAMAGYTGFTVGLVNGRQTYIPFIRINERQNKVVITDRMWARLLSSTNQPSFLSPKDLEEAKKAESPTQLLEENNCNDVGDAEKEQPPKDEQESGNHTDNGIKTQN

SEQ ID NO: 10136 - protein, 474 aa, Novosphingobium aromaticivorans DSM 12444
MRERLQQYIDGKWVDSEGGKRHEVINPTTEEPCCVITLGTQADVDKAVAAAQRAFKTFSKTTREERLALLERIVEEYKKRVPDLAAAMAEEMGAPVSFASTAQVGAGIGAFLGTMAALRNFSFVEDNGAFKVAYEPIGVVGMITPWNWPLNQIALKVAPALAAGNTMILKPSEECPTNAAIFTEILDAAGVPPGVFNLIQGDGPGVGTAISSHPGIDMVSFTGSTRAGILVAKAAADTVKRVHQELGGKSPNVVLPDADFAKYLPSTASGPLVNSGQSCISPTRILVPREREAEAAAFVSAMYSATPVGDPMQEGAHIGPVVNKAQFDKIRGLIQSAIDEGAKLETGGPDLPANVNRGYYIKPTVFSGVTPDMRIAQEEIFGPVATIMAYDSLEEAIEIANDTAYGLSACITGDPAKAAEVAPELRAGMVAINNWGPTPGAPFGGYKQSGNGREGGLYGLKDFMEMKAISGLPA

SEQ ID NO: 10137 - protein, 181 aa, Glycine max
MAESDNESGGHTGNASGSNELSGCREQDRFLPIANVSRIMKKALPANAKISKEAKETVQECVSEFISFITGEASDKCQKEKRKTINGDDLLWAMTTLGFEDYVDPLKIYLHKYREMEGEKTAMMGRPHERDEGYGHGHGHATPMMTMMMGHQPQHQHQHQHQHQHQGHVYGSGSASSARTR

SEQ ID NO: 10138 - protein, 114 aa, Glycine max
  unsure (1)..(114): unsure at all Xaa locations
PALTARHLTEEQWEDYXYISELAIQGDYETRLMDTEEMKERSVXQTTQGTECMEQLAAMEGMSEWLRKAEGAAEXARRYDGDLSIXTCGTDARGIDQAXDMNAIHRLEEKPSVR

SEQ ID NO: 10139 - protein, 214 aa, Triticum aestivum
HGAINARAGYGEMVTCSKSLSADLFDAVLGGLGQFGVIVRARIALEPAPTRARWARLVYTDFAAFSADQERLAAPGPDGAFGPMSYLEGAVYVNHSLAAGLRNSGGFFTDAHVARIVAVAAARNATTVYVIRGNLQIQQTHGPVSGEQETPLSGLETLRPQGGASGFGGKPFYPSNFLDTGCPGKKGGLLKKNGCWWGSPEPLGSKGFWAPPSP

SEQ ID NO: 10140 - protein, 268 aa, Medicago truncatula
  unsure (1)..(268): unsure at all Xaa locations
MAISHNTLAFTFGMLGNVISFLVFLAPISTFYRIYKKKSTEGFQSLPYLVALFSSMLWLYYALLKKDAFLLITINSFGCVVETIYIILYIIYAPRDARNLTFKLLSAMNVGSFALILIVTNYAVHGPLRVQVLGWVCVSLSVSVFAAPLSIVAQVVRTKSVEFMPFNLSFTLTLSATMWFGYGFFLKDICIXLPNVLGXVLGLLQMLLYAIYRNGGEKAMKKEKKAPIEPPKSIVIETQLEKIEQEKKNKDDDNEEKDKSEEPIGCGV

SEQ ID NO: 10141 - protein, 123 aa, Brassica napus
  unsure (1)..(123): unsure at all Xaa locations
MAYSMLSSAGXVTSPAQATXGAPFXGLKXSSXFPXXXXGQXXXTFXVSXGRRXXXVEVXPXGGKKKFENLXYLXDXTXVNGVKEXYXLXPKGDSCGXXXXXHGFFYXEXXXPPQGGELTPKPP

SEQ ID NO: 10142 - protein, 116 aa, Oryza sativa
MARAQLVLVALVAALLLAAPHAAVAITCGQVNSAVGPCLTYARGGAGPSAACCSGVRSLFAAASTTADRRTACNCLKNAARGIKGLNAGNAASIPSKCGVSVPYTISASIDCSRVS

SEQ ID NO: 10143 - protein, 509 aa, Candida albicans SC5314
MITKRLYSTIESSKKVLGTLSNPNLVKTEAYINGKWVPSSSGETFTVTNPALYPNPESELATMQSMSEEDFNSAIESADIAFNKFKKTTGRYRSELLLKLYNLMISNKDDLAKLVVLENGKPYADALGEVNYAASFFQWFSEEAPRIYGDIIPSANGTNRILTFKQPIGVCGILTPWNFPLAMITRKLGAAIATGCTAVIKPASETPLSATALAFLAEEAGFPPGVINVLPSADASGSGKYLTEHPLIKKVSFTGSTPVGKILMNQSASTLKKLSFELGGNAPFIAFDDVDVDKAVNGAIASKFRSSGQTCVCANRIFVHEKIYDEFAKKFVDKLKNETVLGNPLASGVTHGPVIHDRSMKKVRQHIEDAVDKGATILLGGSKRPDLGENFHDLTVLGDVTTEMLITQEETFGPVAPLIKFKTDDEVIKMANDTTVGLAGYFYANDVAKVFKIAEALNVGMLGVNTGAISEAALPFGGVGESGFGREGSKFGVEDYLVIKSAVLGGIEN

SEQ ID NO: 10144 - protein, 154 aa, Quercus suber
MALSLFGGRRSNVFDPFSLDIWDPFEGFSAVASVPPSARETTAFATARIDWKETPEAHIFKADLPGLKKEEVKVEVEDGNVLQISGERSKEHEEKNDKWHRVERSCGKFMRRFRLPENAKVDQVKANMENGVLTVMVPKEEQKKPAVKAIEISG

SEQ ID NO: 10145 - protein, 437 aa, Sulfolobus solfataricus P2
MNIRDKWIEEEKSLEYEWSEDPRWRGIKRNYKPLDVVKLRGSIRIEYSLAKLASHKLWNLLNTEPYVATFGALTGSQAVEMAKAGLKAIYVSGWQVAADNNLSNQTYPDLSLYPSNSVPNLVKRLNNALIRADQISWSEGKHDIDYLLPIVADAEAGFGGPIHAFELTKALIEAGAAGVHFEDQLAAEKKCGHLGGKVLIPISAFIRVLNAARLASDVLGVPTILIARTDALNAKYLSNDVDETDNQFLTGKRTSEGYYEIKGGIEYAIARGLAYAPYADLLWFETSKPDLEEARQFAEAIHTHYPGKMLAYNLSPSFNWKKFMDDSKISKFMNELGEMGYKFQFITLAGWHLINYHTFKLARAYRNEGMPAYVRLQELEFQAQAEGYTAVSHQREVGTDYFDLVLTIASGGEASTTAMEGSTEAEQFVEAKQKVLK

SEQ ID NO: 10146 - protein, 81 aa, Glycine max
  unsure (1)..(81): unsure at all Xaa locations
FIAVEWLLEYWLLTRAFDDHRHPYLPKHFFSCLLPHFSDGFDSGXIDVLSAHADIRVSVVLMLIAANIFPFYSPSTCAAFY

SEQ ID NO: 10147 - protein, 489 aa, Burkholderia cepacia R1808
MTSYDQSPVRHLLEAGRLERFFIDGDWVAPDGGGRFAVVCPSTEDTLCEIPLGSARDADRAVQAARHAFAGWAATSPQERAALLDRVHRLLLERAERFATALALEMGAPLGYARSAHVPLAAEHIRVARDNLTDYPFRKQRGTTAIVREPIGVCALITPWNWPIYQITAKVGPALAAGCTVVLKPSELSPLSALLFAEVLADAGVPAGVFNLVSGTGAEVGAALSSHPLVDMVSITGSTRAGVLVAQAAAPTVKRVAQELGGKSPNVVLPDADLERAIAPGVAAAFRNMGQSCSAPTRMIVPRAALGAVEALAVAAAQRCVVGDPFADATTHGPLANRAQFERVAQMIDVGVAEGAKLIAGGPGRPAGCERGFYARPTIFSDVRTGMAIAQQEIFGPVLAILPYDSIDEAVSIANDTVYGLGAHVQGTDRERTRAVAARIRAGQVHLNYPAWDPQAPFGGYKQSGNGREYGVEGMEEYMEVKSILGYYD

SEQ ID NO: 10148 - protein, 812 aa, Zea mays
MAQILLHGTLHATIFEAESLSNPHRATGGAPKFIRKPDYWIEDTVGIGKGTTKIYATVDLEKARVGRTRMVSNEPVNPRWYESFHIYCAHMAADVVFTVKIDNPIGASLIGRAYLPVEDILGGDEIDKWLEICDEKREPIGDSKIHVKLQYFDVGKDRNWARGVRSTKYPGVPYTFFSQRQGCKVTLYQDAHVPDNFVPRIPLADGKNYEPHRCWEDIFDAISKAQHLIYITGWSVYTEITLVRDTSRPKPGGDVTLGELLKRKASEGVRVLMLVWDDRTSVGLLKKDGLMATHDEETANYFHGTDVNCVLCPRNPDDSGSFVQDLQISTMFTHHQKIVVVDHELPNEGSQQRRIVSFVGGIDLCDGRYDTQYHSLFRTLDTVHHDDFHQPNFEGGSIKKGGPREPWHDIHSRLEGPIAWDVLYNFEQRWRKQGGKDLLVRLRDLSDIIIPPSPVMFPEDRDTWNVQLFRSIDGGAAFGFPETPDEAARAGLVSGKDQIIDRSIQDAYINAIRRAKNFIYIENQYFLGSSYDWKPEGIKPEDIDCLHLIPKELSLKIVSKIEAGERFTVYVVVPMWPEGVPESASVQAILDWQRRTMDMMYTDITQALEANGIQTNPKDYLTFFCLGNREVKQEGEYQPEEHPEPGTDYIRAQEARRFMIYVHAKMMIVDDEYIIIGSANINQRSMDGARDSEIAMGAYQPYHLATRQPARGQIHGFRMSLWYEHLGMLDDVFQRPESVECVQKVNKIAEKYWDLYSSDDLEQDLPGHLLSYPIGVTADGTVTELPGMENFPDTRARVLGNKSDYLPPILTT

SEQ ID NO: 10149 - protein, 153 aa, Glycine max
ISCPDDTTANRAGAGMVVPFTDLKSMVGFHTRKTSHDITCIASNGRRVQCMQVWPPVDKKKVETLSYLPDLDDAQLAKEVQYLLRKGWIPCLEFESQHGFPYREHNRSPRYYDGRYWTMWKLPMFDCTDACQVLKELQEAKTPYPIDLIRIIG

SEQ ID NO: 10150 - protein, 241 aa, Tradescantia virginiana
  unsure (1)..(241): unsure at all Xaa locations
VQLKRMENKINRQVTFSKRRGGLLKKAHEISILCDAEIALIIFSTKGKLYEYATNSKMDNILERYERYSYAEKALTSSDPDIQGNWCQEYAKLKSKVEALCKSQRHLMGEQLETLNLKELQQLEQQLEGSLKHVRSRKTQVMLDSISELQRKEKSLEEQNKNLEKEILEKQKIKALAQQAHWEHQNQPAPRGSPPRPFVIAESHPTLNIGHFQGRTNAVEAEENQQPXMRICSSLLPPWML

SEQ ID NO: 10151 - protein, 273 aa, Triticum aestivum
  unsure (1)..(273): unsure at all Xaa locations
MAHAAAAAAVPLRRPLLLFLRPARLLSSVAPRSSSVRAYTRALRPLAPLPSDDEDPDDGDGAPSRNEKKREARRAVKWGMELAKFSPPQIKRIVRAASLEREVVDALMLVKKFGPDVREGRRRQYNYIGSLLRGAQPXELMEDLIHSLKNGDESRIQALLSEVADKSMPIEDEEVGELPHEEEGEENQEYMEIADRWFEGLVCQDIPVTNEVYAIHNVEFDRQELRKLVRIVQEVQKSTRDKDXXEKDLIESFPGPKKPLIMFLRSLAKKTLE

SEQ ID NO: 10152 - protein, 276 aa, Burkholderia cepacia R1808
MDARSTAFFEQPDQLAATGWPAFDGNARPRASELFAATDALADADPNWTLSALESRPGAGLTRRAFVSQTLAFLAASVGITAACATYVAMLGLPVGDSIVCMLAGLFTLSGLLGANALGRRVSKWLSLPLMGLFSVLQGVAVGPIVHGYWMQAGGALIVAGALATTAIAFAAIGVYAFGTRHARRDFTALGGFLFAGAIVALSLSIATFYVSAPGLEFALAGVGAMVFTGYLLHDLSRLWTAGQDDPVIAALGLYINVLNVFLSLLRLFEFFVSGD

SEQ ID NO: 10153 - protein, 222 aa, Tradescantia virginiana
  unsure (1)..(222): unsure at all Xaa locations
GLVKKAHEISXLCDAEVALIIFSTKGKLYEYATDSKMENILERYERYSYAEKALTSSDPELQGNWCQEYVKLKAKVEALHKSQRHLMGEQLEALDLKELQQLEHQLEGSLRLVRSRKTQMMLDSISELQRKEKSLEEQNKNLEKEILEKQKEKALAHQAHWEQQNQPLQSTNSPPRPFVIAETHPTLNIGNFQGRTNTVHAEESLQRQMRISSSLLPXWMXH

SEQ ID NO: 10154 - protein, 92 aa, Triticum aestivum
  unsure (1)..(92): unsure at all Xaa locations
MGTVKWFNVTXGFGFISPEDGXEDLFVXQSXIKAXXYRXLNXNDXVEFKVITGXDXRRXNATDXTAPXRGXLXXXXRPIXKXGDRXGXGGDR

SEQ ID NO: 10155 - protein, 203 aa, Zea mays
MEDEEHEVFGQEIPVDGEDVDMAAGDDATKLQELDDMKRRLKEMEEEAAALREMQAKVAKEMQGVDPNATTSENKEEMDSRSVFIGNVDYACTPEEVQQHFNSCGTVNRVTILTDKFGQPKGFAYVEFVEVEAVQEAIKLNESELHGRQLKVAPKRTNVPGMKQPRGRGFNPYHGHPYMRPYGYSPYGYGRFPRFRRPRRPYF

SEQ ID NO: 10156 - protein, 176 aa, Manihot esculenta
MASSMLSTATVASINRVSPAQATMVAPFTGLKSTPVFPTTRKTNSDITSITSNGGKVQCMKVWPTLGMKKFETLSYLPPLTREQLAKPSCIGPCLEFELEHGLVYREHARVPGYYDGRYWTMWKLPMFGCTDAAQVLKELDELIKHHPDGYARIIGFDNVRQVQCISFLAYKPPGA

SEQ ID NO: 10157 - protein, 208 aa, Bacillus halodurans C-125
MKSNSQDAASIVWHPQLVTKQARNQSNGHKSRMIWFTGLSGSGKSTIANAVQAELFKRGIQVYVLDGDNLRHGLNADLSFSMEDRKENIRRTAEVGKLFVDAGLVVLAALISPVEEERQRARSRFAEDEFLEVYVSCTLQECEKRDPKGLYKKARKGEIPQFTGIHQPYEEPKNPDICIDTTDRTVEQSVQIILPIILEKIAWKEGEQ

SEQ ID NO: 10158 - protein, 185 aa, Triticum aestivum
MAPTVMASSATSVAPFQGLKSTAGLPVSRRSNGASLGSVSNGGRIRCMQVWPIEGIKKFETLSYLPPLSREALLKQVDYLIRSKWVPCLEFSKVGFIFREHNASPGYYDGRYWTMWKLPMFGCTDATQVINEVEEVKKESPDAYVRIIGFHNMRQVQCVSFIAFNPPGCEESRQGLNSSLPTGHI

SEQ ID NO: 10159 - protein, 512 aa, Oceanobacillus iheyensis HTE831
MLNDKAIRQSKIIYWSSGIVSICGIIFEVLFGALGSYILGDGVKQYTLTISLFLTGMGIGASLSEKFMRNLIIKFVWIEFCVALIGGFSSFIMFGITAFAPAGTDAFYLYSITLIIGALTGVELPILIRKANEIGVTLNKSTARVLFSDYAGGLIGGVLFVFLFRPYFGMVKTAFLVGLINLTVALIVLWLFRKEIRHFIVHAVIGGVIGVLLIAGLFFGEEMAFNFEQKLYQDPIIHMEESSYQKITVTQDEKDIRLYLDGSLQFSSVDEHRYHEVLVHPAMANVETPENVLILGGGDGIAAKEVLKYQDVKQVTLVDLDPAVVELANENRHLLEINEGALMDEKVEVKNMDAFQFLEDTSEWYDVILVDLPDPNNESLNKLYTKEFYSLVRNHLKPEGTLMVQATSPVFAREVYWTISETISSTNLNTENLHVDVPSFGNWGFVMASREEIDLDIMEIPVSTRFLTDDMMPALTAFGKDEDQQIPNFELKANTLIDPHLIQIYEKAWENY

SEQ ID NO: 10160 - protein, 341 aa, Streptomyces coelicolor A3(2)
MRIGVLTSGGDCPGLNAVIRSVVHRAVVDHGDEVIGFRDGWKGLLECDYLKLDLDAVGGILARGGTILGSSRVRPEHLRDGVERARGHVEELGLDAIIPIGGEGTLKAARLLSDNGLPIVGVPKTIDNDIAVTDVTFGFDTAVTVATEALDRLKTTAESHQRVLIVEVMGRHTGWIALHSGMAAGAHAVVVPERPFDIDELTAKVGERFSAGKRFAIVVAAEGAKPKAGTMDFDEGGKDVYGHERFAGIARQLSIELEERLGKEARPVILGHVQRGGTPTAYDRVLATRFGWHAVEAVHRGEFGKMTALRGTDIEMVSLADAVESLKTVPDARYAEAECVL

SEQ ID NO: 10161 - protein, 174 aa, Triticum aestivum
MAPAVMASSATTVAPFQGLKSTAGLPVSRRSRGSLGSVSNGGRIRCMQVWPIEGIKKFETLSYLPPLSTEALLKQVDYLIRSKWVPCLEFSKVGFVFREHNSSPGYYDGRYWTMWKLPMFGCTDATQVLNEVEEVKKEYPDAYVRVIGFDNLRQVQCVSFIAFRPPGCEESGKA

SEQ ID NO: 10162 - protein, 110 aa, Glycine max
  unsure (1)..(110): unsure at all Xaa locations
MASSMIWDRAVTTVNRAGAGMVAPFTGLKSMAGFPTRKTNNDITYIASNGGRVQCMHVWPPIGKRKSRLFSTWQNLVNPNLPKEVXFLLRKGWIPCLEFELEHGFLYRGP

SEQ ID NO: 10163 - protein, 173 aa, Lemna gibba
MMVSTAAVARVRPAQTNMVGAFNGCRSSVAFPATRKANNDLSTLPSSGGRVSCMQVWPPEGLKKFETLSYLPPLSVEDLAKEVDYLLRNDWVPCIEFSKEGFVYRENHASPGYYDGRYWTMWKLPMFGCTDASQVIAEVEEAKKAYPEYFVRIIGFDNKRQVQCISFIAYKPT

SEQ ID NO: 10164 - protein, 426 aa, Streptomyces coelicolor A3(2)
MAEARTQAAEDLARRWDTEPRWQGIERTYSAQDVVRLSGSVREEHTLARRGAERLWRQLHERDYVHALGALTGGQAVQQIKAGLQAIYLSGWQVAADANQAGHTYPDQSLYPANSVPQVVRRINNALLRADQIATSEGDNSTDWLAPIVADAEAGFGGPLNAFELAKAMIAAGAAGIHYEDQLASEKKCGHLGGKVLVPTSQHIRTLNAARLAADIADTPTVIIARTDALAANLLTSDVDERDAQFVTGERTPEGFYRVRNGMAPVIARGLAYAPYADLIWVETGTPDLEQAREFAEAIHAEHPDQMLAYNCSPSFNWKAALDDDQIAKFQRELGAMGYKFQFITLAGFHSLNHGMFDLARGYAEHGMTAYVDLQEREFAAQAHGFTAVKHQREVGTGYFDLVSTAVNPASSTTALAGSTEEEQFH

SEQ ID NO: 10165 - protein, 177 aa, Lemna gibba
MASSMMASTAAVARAGPAQTNMVAPFNACRSSVAFPATRKANNDLSTLPSNGGRVSCMQVWPPEGLKKFETLSYLPPLSVEDLAKEVDYLLRNDWVPCIEFSKEGFVYRENHASPGYYDGRYWTMWKLPMFGCTDASQVIAEVEEAKKAYPEYFVRIIGFDNKRQVQCISFIAYKPT

SEQ ID NO: 10166 - protein, 316 aa, Triticum aestivum
GGPRPAGLFAARGAFALPQSYSAAHLVFNDDIQGTAAVVLAGLMAGLKFAGGTLADHTFLFFGAGEAGTGIAELVALEISMQSKTSQEEARKNIWLVDSKGLIVSSRKDSIQPFKKLYAHEHEPVKDLLSAIKDIKPTALIGSAGVGQSFTKEVIEAMSSINKRPIILALSNPTSKSECTAEQAYSWSQGRAIFGSGSPFDPVKYNDKLFVPAQANNAYIFPGFGLGVVTSGAIRVKDDMVLAAPKTSDEHVTAPPPDTGRSSPPAACTAPSSAHTAAPVAPHALALGLAPPLPRPNVAVTHAAGRWYRPFCRAYR

SEQ ID NO: 10167 - protein, 604 aa, Glycine max
MWKLVRYAAASNLARSRRFSAAIPGPCIVHKRGADILHDPWFNKDTGFPLTERDRLGLRGLLPPRVISFEQQYDRFMNSFRSLENNTQGQPDKVVSLAKWRILNRLHDRNETLYYRVLIDNIKEFAPIIYTPTVGLVCQNYSGLFRRPRGMYFSAKDKGEMMSMIYNWPAHEVDMIVLTDGSRILGLGDLGVQGIGIPIGKLDVYVAAAGINPQRILPVMLDVGTNNQKLLEDRLYLGLRQPRLEGEEYLSIIDEFMEAVHARWPKAIVQFEDFQMKWAFETLKRYQKKFCMFNDDIQGTAGVALAGLLGTVRAQGRPLTDFVNQKIVVVGAGSAGLGVLKMAIQAVAKISGCSELAAKSQFYLIDKDGLVTTERNNLDPAAAPFAKNPRDIEGLTEGASIIEVVKKIRPHVLLGLSGVGGIFNEEVLKAMRESVSTKPAIFAMSNPTMNAECTAIDAFKHAGENMVFASGSPFENVDLGNGIVGHVNQANNMYLFPGIGLGTLLSGAHLITDGMLQAAAECLASYMAEEDILKGILYPSVDSIRDVTAEVGAAVLRAAVEEELAEGNGDVGPKELSHMSKDETVEYVRSNMWYPVYSPLVHEK

SEQ ID NO: 10168 - protein, 112 aa, Zea mays
  unsure (1)..(112): unsure at all Xaa locations
HEMNCSTAAVRHLASSXVDVFTALSGGGGALYGPLHGGANEALLKMLNERGSMENISRFHCMIXNRYRKIVVFGLRVFXNYYPRAYFIKDIVXMRCFSIFGRDPLIVVGLCP

SEQ ID NO: 10169 - protein, 220 aa, Zea mays
APAFCELSLPLTKEEAAFSPSHPAMQRHVASGRPSGTDGSDFSYRMVVESRYQRVAEGRSRLARLILVQALHLVAGGLLLLLSLSKGAAVNKFAVLSMAAGFLAIVVGELGRMRTMAVLLRLYTSLSSIAVAFSVTCIIRSELFLKVMKQNTEAITSYEMLDAVRVALGILLQMVVIATTTRLLQNMSPPKSASRLLGHFSFVSSSKGYKLRVKNIGQVR

SEQ ID NO: 10170 - protein, 235 aa, Tradescantia virginiana
VQLKRMENKINRQVTFSKRRTGLLKKAHEISVLCDAEVGLIIFSTKGKLYEYSTDNSMAKILERYDRYATAERAVLEANLNLEVGSHYEYRKIKAKVDALQKSQRHLMGEQLDTMTNKELQQLEQQLETALKHIRSRKNQMMLESVAALQKKEKALREQKSILEKKLIEKQKDMEISQIHQYQAHEDNTSPTSLVLTNSLPTTLNTNGCITHAIEEEHAPTLPHTNNNNLPPWMV

SEQ ID NO: 10171 - protein, 318 aa, Zea mays
MEAEAAAKRTRDSGEDAAAAGISAVIPGWFSEISPMWPGEAHSLKVDKVLFQGKSDYQSVMVFQSSTYGKVLVLDGVIQVTERDECAYQEMITHLPLCSIKDPKKVLVIGGGDGGVLREVSRHSSVEQIDICEIDKMVVDVSKQFFPHLAVGFEDPRVSLHIGDGVAFLKNAPEGTYDAVIVDSSDPIGPAQELFEKPFFQLVARALRPGGVVCTQAESIWLHMHIIEDIVVNCRQVFKGSVNYAWTTVPTYPSGVIGFMLCSTEGPAVDFQHPVFNIEEDEHPMKSKGPLKFYNSEIHTASFCLPSFAKRVIESKAN

SEQ ID NO: 10172 - protein, 455 aa, Bacillus sphaericus
MKQVLTELQEKDLQHVWHPCSQMKDYEAFPPIVIKKGEGVWLYDEQNQRYLDAVSSWWVNLFGHANPRISQALSEQAFTLEHTIFANFSHEPAIKLAQKLVALTPQSLQKVFFADNGSSAIEVALKMSFQYHMQTGKTQKKRFLALTDAYHGETLGALSVGGVDLYNEVYQPLLLDTVRAQGPDCFRCPFKHHPDSCHAQCISFVEDQLRMHHKEITAVIIEPLIQAAAGMKMYPAIYLRRLRELCTQYDVHLIADEIAVGFGRTGTLFACEQANISPDFMCLSKGLTGGYLPLSVVMTTNDVYQAFYDDYATMKAFLHSHSYTGNTLACRVALEVLAIFEEEQYIDVVQDKGERMRKLALEAFSDLPFVGEYRQVGFVGAIELVANRDTKEPLPSEERIGYQIYKRALAKGLLIRPLGNVLYFMPPYIITDDEMQFMIQTTKDTIVQFFEEREG

SEQ ID NO: 10173 - protein, 505 aa, Gossypium arboreum
MDLLFLEKALLGLFVAVVLAITISKLRGKRFKLPPGPLPVPVFGNWLQVGDDLNHRNLTDLAKKFGDIFLLRMGQRNLVVVSSPELAKEVLHTQGVEFGSRTRNVVFDIFTGKGQDMVFTVYGEHWRKMRRIMTVPFFTNKVVQQYRFGWEDEAARVVEDVRKNPEAATNGIVLRRRLQLMMYNNMYRIMFDTRFESEDDPLFVRLKALNGERSRLAQSFEYNYGDFIPILRPFLRGYLKICKEVKDRRLQLFKDHFVEERKKLGSTKSMNNDGLKCAIDHILDAQQKGEINEDNVLYIVENINVAAIETTLWSIEWGIAELVNHPEIQKKLRHELDTVLGPGNQITEPDTHKLPYLQAVIKETLRLRMAIPLLVPHMNLHDAKLGGYDIPAESKILVNAWWLANNPANWKNPEEFRPERFFEEEAKVEANGNDFRYLPFGVGRRSCPGIILALPILGITLGRLVQNFELLPPPGQSQIDTTEKGGQFSLHILKHSTIVAKPRQF

SEQ ID NO: 10174 - protein, 226 aa, Paeonia suffruticosa
SQVTFSKRRGGLLKKAHEISVLCDAEVALIVFSTKGKLFEYSTDSSMEKILDRYEQYSIAERQLVEEPGSQGNWSLEYSKLRAKIELLQRNQRRFMGEDLDSLSPKDLQNMEQQLDVSLKNIRSRKNQLMYESISELQKKERAIQEQNNLLAKQIKEKEKTMAQQAQWEQQIHHGPNASAYLLSPHELTTLNMGGNYQGEPTEMRRNELDLTLEPIYTCHLGCFGA

SEQ ID NO: 10175 - protein, 239 aa, Triticum aestivum
MESSKIDASDKHLESYLTLGLTVSQSKKGSTKFPKVLSLLATYLGRSVQKNEELLGSNGIKESTTIFHGQKVPDLSIQLYAERIFKYAECSPSCFVLALVYMERYLQQPNVYMTLFSVHRLLITSVVVAAKFTDDAFFNNAFYARVGGISTIEMNRLELDLLFNLDFRLKVNLGTFGSYCLQLEKHAPVSPERLPVQVHCVSVKGSKDLGYSSSGSADEFCQSKLVRQSYSSQALQGCS

SEQ ID NO: 10176 - protein, 184 aa, Manihot esculenta
MATSMLSTATVASINRASPAQASMVAPFTGLKSTSAFTATTKTSADITSLASNGGRVQCMQVWPTRGKKKFETLSYLPPLSREQLASEIDYLLRSGWIPCLEFELEHGFVYRAHGSLPGYYDGRYWTMWKLPMFGCTDSSQVLKELDELIKAHPDGFARIIGFDNVRQVQCISFIAYKPPGTDY

SEQ ID NO: 10177 - protein, 184 aa, Manihot esculenta
MATSMLSTATVASINRASPAQASMVAPFTGLKSTSAFPATTKTSADITSLASNGGRVQCMQVWPTRGKKKFETLSYLPPLSREQLASEIDYLLRSGWIPCLEFELEHGFVYRAHGSLPGYYDGRYWTMWKLPMFGCTDSSQVLKELDELIKAHPDGFARIIGFDNVRQVQCISFIAYKPPGTDY

SEQ ID NO: 10178 - protein, 505 aa, Gossypium arboreum
MDLLFLEKVLISLFFTIIFAILVSKLRGKRFKLPPGPLPIPVFGNWLQVGDDLNHRNLTDLAKKFGDIFLLRMGQRNLVVISSPELAKEVLHTQGVEFGSRTRNVVFDIFTGKGQDMVFTVYGEHWRKMRRIMTVPFFTNKVVQQYRHGWEDEAASVVEDVKKNPEAATNGIVLRRKLQLMMYNNMYRIMFDRRFESEDDPLFVKLKALNGERSRLAQSFEYNYGDFIPILRPFLRGYLKLCKEVKEIRLQLFRDQFLEERKKLATTKRIDNNALKCAIDHILDAQRKGEINEDNVLYIVENINVAAIETTLWSIEWGIAELVNHPEIQQKLRNEIDTVLGPGVQVTEPDTHKLPYLQAVIKETLRLRMAIPLLVPHMNLHDAKLGGYDIPAESKILVNAWWLANNPAHWKNPEEFRPERFFEEESKVEANGNDFRYLPFGVGRRSCPGIILALPILGITLGRLVQNFELLPPKGQSKLDTSEKGGQFSLHILKHSTIVAKPRVF

SEQ ID NO: 10179 - protein, 355 aa, Craterostigma plantagineum
MEKYELVKDIGSGNFGVARLMRNKETKELVAMKYIERGHKIDENVAREIINHRSLRHPNIIRFKEVVLTPTHLAIVMEYAAGGELFERICNAGRFSEDEARYFFQQLICGVHYCHALQICHRDLKLENTLLDGSPAPRLKSCDFGYSKSSLLHSRPKSTVGTPAYIAPEVLSRREYDGKLADVWSCGVTLYVMLVGAYPFEDQEDPFFFRKTILWIMAVQYKIPDYVRISQSCRHLLSRIFVANPLRRITIKEIKSHLWFLKNLPRELTEVAQAAYFRRDNPTYSLQSEEEIMKIVEEAKVPPQASRSIGGFGWGTEEDEENVEEEEEGESEGEEDEYEKQVKAAHASGEVPPLT

SEQ ID NO: 10180 - protein, 406 aa, Oceanobacillus iheyensis HTE831
MSNTTVLLDKKTTEIIKATVPVLKEHGEAITKHFYKILLENNPELKNVFNQTNQRKGAQSKALANTVYAAAANIEKLEEILPHVKQIAHKHVSLNIKPEQYPIVGKYLLIAIKEVLGDAATDEIIEAWEKAYFVIADIFISVEKEMYNEKKNQIGGWTGFRDFKVIKKVKESKEITSFYLKPDDNLPITTFIPGQYITIKAQIESEAYVHLRQYSLSTAPGKDYYRISVKREASNQPIGVVSNYLHTSVEVGSVLPISAPAGDFILDERDHRPLVLISGGVGLTPIMSMLESVVEHQPNRNVVFIHAAKSIDHQAMRKRVSEIAKSKEQVKQYVVYSNPTNRTDGDKQGYIDYEWLKEVIPTKDAAFYLCGPKPFMSAINNDLQNMNIAQNDIHMELFGPLEPIAK

SEQ ID NO: 10181 - protein, 495 aa, Hordeum vulgare subsp. vulgare
MKPTTATAALVLALTLAHHASIAAAAGPRVIIVGAGMSGISAGKRLSEAGITDLVILEATDHVGGRMHKQSFGGINVEVGANWVEGVNGAGRMNPIWPLVNSTLKLKNFRSDFDGLADNVYKENGGVYERAYVQKRLDRWGEVEEGGEKLSAKLRPSGQDDMSILAMQRLNDHLPNGPTSPVDMVLDYFKHDYEFAEPPRVTSLQNVVPLATFTDFGDDVYFVADQRGYEAVVYYLAGQYLKADKSGNIVDPRLQLNKVVTEISHSGGGVTVRTEDAKVYKADYVMVSTSVGVLQSDLIQFKPRLPTWKVLSIYQFDMAVYTKIFVKFPRKFWPQGKGREFFLYASSRRGYYGVWQEFEAQYPDANVLLVTVTDDESRRIEQQSDNQTKAEIVEVLRSMFPGEDVPDATDILVPRWWSDRFYRGTFSNWPIGVNRYEYDQLRAPVGRVYFTGEHTSEHYNGYVHGAYLSGIDSADILIKCAQKRMCKYHSPGKFD

SEQ ID NO: 10182 - protein, 389 aa, Escherichia coli O157:H7 EDL933
MSDTTILQNSTHVIKPKKSVALSGVPAGNTALCTVGKSGNDLHYRGYDILDLAEHCEFEEVAHLLIHGKLPTRDELAAYKTKLKALRGLPANVRTVLEALPAASHPMDVMRTGVSALGCTLPEKEGHTVSGARDIADKLLASLSSILLYWYHYSHNGERIQPETDDDSIGGHFLHLLHGEKPSQSWEKAMHISLVLYAEHEFNASTFTSRVIAGTGSDMYSAIIGAIGALRGPKHGGANEVSLEIQQRYETPDEAEADIRKRVESKEVVIGFGHPVYTIADPRHQVIKRVAKQLSQEGGSLKMYNIADRLETVMWESKKMFPNLDWFSAVSYNMMGVPTEMFTPLFVIARVTGWAAHIIEQRQDNKIIRPSANYVGPEDRQFVALDKRQ

SEQ ID NO: 10183 - protein, 167 aa, Triticum aestivum
  unsure (1)..(167): unsure at all Xaa locations
EDSWGCKSRDEHHFEFKVDLAASKACRHQHGAIRKGVHIVIRGRPYKLAEVCTSKTGNHVHSKCHYVAIXIFNGKKLEDIVLSSHNCEVPPXCRPRCVRVIDITDDGYVSVVAESVNQKDDLKLLIDDVLSVQIKTGFVDGKGPIEYVMYRVGEEQIWAVKEIGGGK

SEQ ID NO: 10184 - protein, 503 aa, Hordeum vulgare subsp. vulgare
MKPSFVTAIAALLLIAAQHASIVAAGKGPRVIIVGAGMSGISAGKRLWDAGVRDLLILEATDRVGGRMHKHNFGGLNVEIGANWVEGLNGDKTNPIWPMVNSTLKLRNFYSDFDGVVANVYKESGGLYDEEFVQKRMDRADEVEELGGKFAAKLDPSGRDDISILAMQRLFNHQPNGPTTPVDMALDYYKYDYEFAEPPRVTSLQGTEPTATFADFGDDANFVADQRGFETIIYHIAGQYLRSDKSGNIIDPRVKLNKVVRQISYNDKGVVVTTEDNSAYSADYVMVSTSLGVLQSDLIQFKPQLPAWKIMAIYRFDMAVYTKIFLKFPKKFWPTGPGKQFFVYASSRRGYYGMWQSFEKEYPGANVLLVTVTDVESRRIEQQPDNVTMAEAVGVLRNMFPDRDVPDATDIYVLRWWSNRFFKGSYSNWPIGVNRYEYDQLRAPVGGRVYFTGEHTSEHYNGYVHGAYLAGIHSADILMNKASNNVDFKVRPKYDDELKAEAK

SEQ ID NO: 10185 - protein, 352 aa, Azotobacter vinelandii
MRAAVWHGRHDIRVENVPLPANPPPGWVQIRVDWCGICGSDLHEYVAGPVFIPVEKPHPLTGIQGQCILGHEFSGEIVKLGTGVSGFAPGERIAADACQHCGTCYYCRSGLYNLCEKLAFTGLMNNGAFAELVNVPAELLYKLPADFPVEAGALIEPLAVGMHAVKKAGNLLGRNVVVVGAGTIGLCTIMCAKAAGAAQVIALEMSSARKAKALEVGASLVLDPKECDALAEIRARTNGLGADVSFECIGNKHTAKLAIDVIRNAGKSVLVGIFEEPSSFNFFELVSTEKQVIGALAYNGEFADVIAFIADGRLDVEPLITGRIGLEEIVGRGFEELVNNKEHNVKIIVSPH

SEQ ID NO: 10186 - protein, 219 aa, Chromobacterium violaceum ATCC 12472
MGEVSIQAGVPANVFRTGGRIRLVDRQRLFGHAAVTIWLTGLSGAGKSTIAYELEARLVRGGFSAVVLDGDNLRHGINRNLGFTDADRRENLRRVAEVARLMNDAGLIVICSCISPLRIDREMARDIVGERHFAEVYVSTPLAVCEQRDCKGLYAKARSGQIAHFTGVSSPYEAPEQAALALDTSALSVDECVDRLFGMVLRCCSPAAMEGGIGHEYHI

SEQ ID NO: 10187 - protein, 167 aa, Glycine max
MASQSNTKSVHDFTVKDARGNDVNLADYKGKVLLLVNVASQCGLTNSNYTELNQLYEKYKGKGLEILAFPCNQFGAQEPGTNEEIVEFACTRFKAEFPIFDKVDVNGDNAAPLYKFLKSSKGGLFGDSIKWNFSKFLVDKDGNVVDRYAPTTSPLSIEKDIKKLLDA

SEQ ID NO: 10188 - protein, 384 aa, Uncultured proteobacterium
MAFRSATNQEYTNQVGKPTSRFGRFLLWRNRLLRSSTFQKWAARLPISQSIARTRATDLHHILAGFVYSQTLSASYKLGLLECLKDRIATLDEIASYCELERGAAATLIKAATAIDLLQAVGADNWTLGELGASIHGNPGVQSMLRHHDLLYRDMADPASLLRSRDNAALRGYWPYVDGNHSDPAATARYSELMADSQHLIANHILDAIKLKPQQQLLDIGGGTGTFARLAAERFPKTETAVFDLPQVIASIAPRYHGTLQTISGNMFEDPIPTTFNTISLVRILHDHDDDPVDKLLARCFKALPAGGELIIAEPMADTRGAESIGHTYFGFYLWAMGSGRPRTKQELQAALERAGFESIKEKRTHIPALVRVVTAKKPNVIFY

SEQ ID NO: 10189 - protein, 246 aa, Zea mays
  unsure (1)..(246): unsure at all Xaa locations
MAAAARQRGTVKWFNDTKGFGFISPXDGSEDLFVHQSSIKSEGFRSLAEGEEVEFSVSEGDDGRTKAVDVTGPDGSFVRGGGGGGGGGGGYGSRGGGGSGGGGRSYGGSWGGGRRSGGGGGPGACYKCGEPGHMARDCPSADGGGGYGGGGYGGGGGGGGGCFKCGEPGHMAQGLPPAGGGGYGGGRRRRWRRLLQLRPGRATWPGTAPAVAAVAGGRFGGGGGGGGDRSCYNCGEAGHIARDCPT

SEQ ID NO: 10190 - protein, 396 aa, Zea mays
  unsure (1)..(396): unsure at all Xaa locations
MTRASTIDFGRRKQSELFGSGPLRPANIIRNKFPTYKNGSNGIVIKLADGPEMPSLKEAVAKEATDLLDRCQRPSVRELTMKFEKGFNTATLLSNEAKWRHAALLERDILLKDLKSVLESLRGRVGGKNKDEIEESLSMVDILAIELSKREDELLRQKTEVTKIADTLKLASTDAKRIIDEERANARXEIESAKASVQKIQSALKEQEIFSQRTGKQDADELXKEEVQEARRVKMLHCPSKAMDIXENEIQVLRDQLAEKSSDSLRLLKELELHRSYGENDMPSYELKGLETLRSTLHIVGHECASVDFSNSSIQWFRIQPEXSKQEIISCATKLVYAPEPHDVGRYIQAEVKSGGQISVAKTAGSIDPAAGLVEYVETLVMCLNTIKWEREGGKD

SEQ ID NO: 10191 - protein, 270 aa, Triticum aestivum
  unsure (1)..(270): unsure at all Xaa locations
MKLSAVTLLTLATGIIAAPVADVSKEVRSYASYEPPKDTYEQPKTPKQEKPKKPEYNQPKAPKPHHEKPKAPKPHHDKPKHYAPPHHEKPKAPKPHHEKPKTPSYEKPKAPKPHHEKPKKPETPKKPEYNQPKAPKPHHEKPKKPETPKKPSYEAPKAPKPHHEKPKKPETPKKPAYEQPKAPKPHHEKPKKPETPKGPSYEQPKAPKPHHEKPKKPETPKKPEYNQPKAPPXLTHEKPKKPETPKGPSYEQPKTPKPHHEKPKKPETPR

SEQ ID NO: 10192 - protein, 378 aa, Nostoc sp. PCC 7120
MMVCEYKPGLEGIPAAQSSISYVDGQKGILEYRGIRIEDLAQQSTFLETAYLLIWGELPTKEELQVFEEEVRLHRRIKYRIRDMMKCFPESGHPMDALQASAAALGLFYSRRDLHNPAYIRDAVVRLIATIPTMVAAFQLMRKGNDPVKPRDDLDYSANFLYMLNEKEPDALAAKIFDICLILHVEHTMNASTFSARVTASTLTDPYAVVASAVGTLGGPLHGGANEEVIQMLEEIGSVENVRSYVEERLQRKDKLMGFGHRVYKVKDPRATILQGLAEQLFAKFGADKYYDIAQEMERVVEEKLGHKGIYPNVDFYSGLVYRKMGIPTDLFTPIFAIARVAGWLAHWKEQLEENRIFRPTQVYNGKHSVTYTPIDQR

SEQ ID NO: 10193 - protein, 138 aa, Aspergillus niger
  unsure (1)..(138): unsure at all Xaa locations
WDTAGQERFRSLIPSYIRDSSVAVVVYDISNAKSFQNTRKWIDDVRGERGNDVIIVLVGNKTDLNDKREVTTAQGEEEAKKNGLMFIETSAKVGHNVKQLFRRIAXAXPGMEVSHRRHQMIDVNITRKETXTNDGCAC

SEQ ID NO: 10194 - protein, 190 aa, Schizosaccharomyces pombe
MGKSQSKLSQDQLQDLVRSTRFDKKELQQWYKGFFKDCPSGHLNKSEFQKIYKQFFPFGDPSAFAEYVFNVFDADKNGYIDFKEFICALSVTSRGELNDKLIWAFQLYDLDNNGLISYDEMLRIVDAIYKMVGSMVKLPEDEDTPEKRVNKIFNMMDKNKDGQLTLEEFCEGSKRDPTIVSALSLYDGLV

SEQ ID NO: 10195 - protein, 215 aa, Zea mays
PHSPPALARRPRTKATATATATTTATATDRRPSTRRRRRSPSSSSTPPPPPPAAALVRTTCNSTSYYALCVSALAADPSSATADVRGLSAIAVSAAAANASGGAATAAALAANGTAPAGTATSAADSAVQALLQTCAAKYASARDALAAAGDSIALDDYDSASVHVSAAAEYPQVCRTLFRRQRPGQYPAELAAREETLGQLCSVSLDIIALLSS

SEQ ID NO: 10196 - protein, 433 aa, Ralstonia solanacearum
MTPSDVKATLSFSDGSPSVELPIYTGTVGPDVIDIRKLYGQTGKFTYDPGFMSTASCNSKITYIDGDKGELLYRGYAIDDLAGKCDFLEICYLLLKGELPNAKQKDEFNSTVMNHTMVHEQMQFFLRGFRRDAHPMAVLTGLVGAMSAFYPDAANINDSREREISQIRLIAKLPTLVAMAYKYNIGQPLIYPQNNLSYTGNFMRMMFATPCEDYKVNPVLERALDRIFILHADHEQNASTSTVRLAGSSGTNPIAAIAAGIACLWGPAHGGANEAALNMLEEIGSVDKIDEFIKQVKDKNSGVRLMGFGHRVYKNYDPRAKLMRETCHEVLQELGLENDRLFKLAMALEKIALEDEYFVSRKLYPNVDFYSGIVQRALGIPTSMFTCIFALARSVGWIAQWEEMITDPEYKIGRPRQLFNGAATRAVPELGKR

SEQ ID NO: 10197 - protein, 371 aa, Crotalaria retusa
MSEEVKEASSDDVIASVHSTVFKESENLEGKCAQIEGYDFNAGVDYHHLLNSMLTTGFQASNLGDAIHVINQMLDWRLADEPIAEDSSTEERDSNYRNSVTCKVFLGFTSNLISSGVRDIVRFLCQHHMVDVIVTTTGGIEEDLIKCLAPTYKGDFSLPGAYLRSKGLNRIGNLLVPNDNYCKFEDWIIPIFDQMLKEQNEENVLWTPSKLVARLGKEINNESSYLYWAYKNNISVYCPGLTDGSLGDMLYFHSFRSPGLIVDIVQDIRAINGEAVHASPRKTGMIILGGGIPKHHICNANMMRNGADYAVFINTAQEFDGSDSGARPDEAVSWGKIRGSAKTVKVHCDATIAFPLLVAETFATRVKPCHQ

SEQ ID NO: 10198 - protein, 372 aa, Cynoglossum officinale
MGEALKEQQLLESIRSVVLKQSENLEDKCTKIEGYNFNNGVNYQQLLKSLSSTGFQASNLGDAIQVVNQMLDWKLSDECPTEDCSETEKDPAYRESVKCKIFLGFTSNLVSSGIRDIIRYLVQHSMVDVVVTTAGGVEEDLIKCLAPTYRGDFSLSGAVLRSKGLNRIGNLLVPNDNYCKFEDWIMNIFDQMMEEQNTKKILWTPSKVISRLGKEINDESSYLYWANKNNIPVYCPGLTDGSLGDMLYIHSIRKDPGLVVDVVQDIRSMNSEAVHAGLRKTGIIVLGGGLPKHHICNANMMRNGADFAVFINTAQEFDGSDSGACPDEAVSWGKIRGSAKTVKVHCDATIAFPLLVAETFATKASKSADNKL

SEQ ID NO: 10199 - protein, 478 aa, Burkholderia cepacia R1808
MKIYDQFYIDGAWCKPAGAGTIDVIDSATEAVLGRIPEGAATDARHAVRAAHAAFDAWAATPPATRAGYLRRIVERLQTRSEELAQSITGEVGMPIKLSRAIQVGAPVYNWKVYAKLAESFEFEAKVGNSLVVREPVGVVAAITPWNYPLNQITLKVAPALAAGCTVVLKPSEVAPLNAFMLAEAIHEAGLPAGVFNLVCGYGPVVGEVLATDPEVDMVSFTGSTRAGKRVAELAAATVKRVALELGGKSAAVILDDADFPAAVKGTVNACFLNAGQTCSAHTRMLVPHARYDDARALAKAAAEAYLAGDPRQETTRLGALASAVQQQRVQAYIQRGIDDGAELVTGGTGLPDGLTKGFFVKPTVFGRVDPTSAIAQEEIFGPVLSIITYRDEDEAVRIANDTPYGLGGAVWAGSDERALRVARRLRTGQVDINGGSWNSAAPFGGYKQSGYGRENGVYGLEEYLEYKSMQLRPANPS

SEQ ID NO: 10200 - protein, 617 aa, Zea mays
  unsure (1)..(617): unsure at all Xaa locations
LPGQEIDLAKVVAKAAGPRAGGGLGLPLPLLVRFPDVLRHRVETLNAAFGYAVRSTGYGXRYQGVYPVKCNQDRYVVEDIVEFGAPFGFGLEAGSKPELLLAMSCLAARGGLDALLICNGYKDDGYVSLALMARSMGLNTVIVLEQEEELDIVVEASRRLGVRPVVGMRAKLRTKHAGHFGSTSGEKGKFGLSAAQILSVVTKLKAIGMLDCLQLLHFHIGSQIPTTALLSDGVGEAAQIYCELARLGADMRVIDVGGGLGIDYDGTHSAQTDMSVAYSLEEYAGAVVAAVGRVCDRKGVQHPIICSESGRALVSHHSVLVFEAFSATAPGRLDAATAYLLDELTDDCRADYRNVMAAAVRGDYDTCGLYADQLKRRSAELFKEGVLGLEHLAAVDAFCELVARGMGAPEPPRTYHINLSVFTSLPDMWAIGQQFPIIPIQRLQERPAVDGVLSDLTCDSDGKVSEFIGGRHSLPLHELPTHATRGYYLGMFLGGAYQEALGGLHNLFGGPSVVRVSQCDGPHCFAVTRAAAGPSCADVLRAMQHEPEVMYEVLKQRTDGATAAALARAFGAMPYLVFDPEAAVMSGGESSDSERSAAGAAEEEDDEEWEFMRGLTV

SEQ ID NO: 10201 - protein, 488 aa, Synechocystis sp. PCC 6803
MGRQLILFPMSDQSDHPLILLWHRRDLRLNDHLALAKARQKTAKIVGVFCLDNKILQAEDMAPARVAYLLGCLQSLQDHYQRLGSELLVFQADPVQLLPKLANTLGAHGVTWTLDTEPYAQKRDLAVAQALRERGLAIATEWDQLMHHPGEVLTQAGSPYTVYTPFWKNWSQLPKTSPVPTPKDLQGLTPAEKEKLAPLEPLAIPQLADLGFIWDQPLPLTPGEEAAEQRLDWFVAHGLEEYQQNRNFPALDGTSQLSAALKFGVISPRTLWQTTLEAWEQSRSEEARASIETWQQELAWREFYQHCLYSFPALAQGPYRSPFQEFPWEENQDHFQAWCEGRTGYPIIDAAMAQLNQTGWMHNRCRMIVASFLIKDLILNWQWGELYFMQTLYDGDLAANNGGWQWSASSGMDPKPLRIFNPHTQAQKFDPEGEYIRTWLPQLARFDTGDLLTGKLTPGSRRSVNYPEPIVDHNQQQREFKRRYQLVK

SEQ ID NO: 10202 - protein, 369 aa, Cynoglossum officinale
MGEVATSNNALDSVRSALFKKSENLEGSSKIIGYDFNGGVNYEDLLKSLVTSGFQASQLGDAIQIVNDMLNWRLSHDSPSEDCSEEEKDPKFREGVKCKIFLGFTSNLISSGLRETFRYLAQHRMVDVMVTTAGGIEEDLIKCLGDTYKGDFALPGAMLRSKGLNRIGNMLVPNDNYCKFEDWIMAILDKMLEEQISEKKLWTPSRVIARLGKEINDESSYLYWAYKNNIPVFCPALTDGSIGDMLYLHASRNKPSLVLDIVQDVCAMDDESVNASPRKTGIIILGGGLPKHHICNANMMRGGADFAVYINTAQEFDGSDSGARPDEAISWGKIRANAKNVKVHCDATIAFPLVVAETFATKIADKKSK

SEQ ID NO: 10203 - protein, 46 aa, Glycine max
  unsure (1)..(46): unsure at all Xaa locations
MSRVNIDNVTXLFNNGSFVTLFKFEISYECITALKDDLEWNLIYVG

SEQ ID NO: 10204 - protein, 654 aa, Zea mays
  unsure (1)..(654): unsure at all Xaa locations
MAGPEKTVVWFRRDLRIQDNPALAAAAKGGSVLPIFIWCPSDYGQYYPGRCSRWWLKQSLAHLGKSLELLGCPLVLIRAEDSTLAALLECVRSISATRVVQSXLYDPISLVLEMFQDNDFLSKDFXSKALDLLDLLITYWXAFIQLHSLTMLIIICFELIELTIEISQYLAHTRLVAAPGLANVRCWSSDDLGLESSKDVESSNALLSRAWSPGWRNAENMLEEFVSYGLPEYSEHGMKVGGSTTSLLSPYLHFGELSVRMIYQLVKMRQVKWQNEGKSEAEESVRLFLRSIGFREYSRYLCFNYPFTHERSFLGNLKHYPWLLDEGRFKSWRQGMTGYPLVDAGMRELWATGWTHNRIRVIVSSFAVKFLQIPWIWGMKYFWDVLLDADLESDILGWQYISGSLPDGHELSRLDNPEVQGQKYDPDGEYVRTWIPELARMPTEWIHSPWAAPNSILQVAGVELGFNYPKPIVELHMARECLDDAISTMWQLDTAAKLAELDGEVVDDNLNNIRNFDIPKVVLNKKLSPSTSSMEHRVLSTNGKDEKSQPTEVKALYKQIIRDDMMNDSNMDDTCSTANLKVTRKRSSSDSAFNVPSCSSSLVMESRIHHNEPSSVLYSGYFQKTADRDGTSKVEDNDSEDSGTSISRPSKKAA

SEQ ID NO: 10205 - protein, 449 aa, Desulfitobacterium hafniense DCB-2
MSHYDLILRNGNVVCPDGVRKADIAVSDGKIVLIAEEIPGDAKEIIDAAGKHIFPGITDGHVHFNDPGRTEWETITTGSSALAAGGGVAYFDMPLNCSPCTLDAVNFNNKLAVAQKDSLVDYGFWGGLTSANLDKLDELAECGVIGFKAFACHSGIDEFPRMDDYTALVGMEKLAKLGLPLMVHCENAEITKELTELSLANNRTGVRDYFAARPPITEIENVSRMITFAEETGCKLIIAHISTAKAVELVAQARARGVDVYCETIGHYLYLTGDDVERLGTVAKCSPPIRDGENQLQMWGRLFNDNIAFVSSDHSPCDPKLKNGEFMRVWGGISACQTTLQGLLTHAYHDRKFPLVKIAQLTAQHVNEIFKIKDKGQIALGYDADFALVDLDHEFTLQAEDLFYKHKVSPYVGDRFRGSVSQTILRGTTIYKDGKIVSQPIGKHLRPHQ

SEQ ID NO: 10206 - protein, 71 aa, Glycine max
  unsure (1)..(71): unsure at all Xaa locations
PGAGMVVPFTGLKSMVGXPTRKTTIDFTSIVTTGEKFQCMXQVWPPFGKKNFKTFSYLPNLDDPQWAKEVE

SEQ ID NO: 10207 - protein, 171 aa, Glycine max
  unsure (1)..(171): unsure at all Xaa locations
MASDGSEEFRLVSPAFKNGGKLPRHYTDDGQGTKKNISPPLEWYNLPEGTKTLALVVEDIDAXPHSGGPMVPWTHWVVANILATVKGLPEGFSGKSAEMGGXTPAIKEGNNDLKVPGWNGPRLPTPGHRIQFRLYALDDELKLGNKLTKEKLLEDTIEGHVLGEATLMAIF

SEQ ID NO: 10208 - protein, 318 aa, Saccharomyces cerevisiae
  unsure (1)..(318): unsure at all Xaa locations
PKYSLQDFQILRTLGTGSFGRVHLIRSRHNGRYYAMKVLKKEIVVRLKQVEHTNDERLMLSIVTHPFIIRMWGTFQDAQQIFMIMDYIEGGELFSLLRKSQRFPNPVAKFYAAEVCLALEYLHSKDIIYRDLKPENILLDKNGHIKITDFGFAKYVPDVTYXLCGTPDYIAPEVVSTKPYNKSIDWWSFGILIYEMLAGYTPFYDSNTMKTYEKILNAELRFPPFFNEDVKDLLSRLITRDLSQRLGNLQNGTEDVKNHPWFKEVVWEKLLSRNIETPYEPPIQQGQGDTSQFDKYPEEDINYGVQGEDPYADLFRDF

SEQ ID NO: 10209 - protein, 120 aa, Brassica napus
  unsure (1)..(120): unsure at all Xaa locations
MDAVMFGLETPLMAALQHLLDVPDGDAGAGGDNKTGSGGSATRTYVRDARAMAATPADVKELPGAYAFVVDMPGLGTGDIRVQVEDERVLVVSGERRREEREDDAXYLRMERRMGKXMRK

SEQ ID NO: 10210 - protein, 122 aa, Flavobacterium psychrophilum
MADLKQFAEQLVNLTVKEVNDLATILKDEYGIEPAAAAVVMQAGGGEAAEEAQTEFTVVLKEAGASKLAVVKAVKELTGLGLKEAKDLVDAAPSNVKEGVSKDEAEGLKKSLEEAGAVVELK

SEQ ID NO: 10211 - protein, 322 aa, Bacillus methanolicus
MNKIAVLTSGGDAPGMNAAIRAVVRRGIFKGLDVYGVKNGYKGLMNGNFVSMNLGSVGDIIHRGGTILQTTRCKEFKTAEGQQQALAQLKKEGIDGLIVIGGDGTFEGARKLTAQEFPTIGIPATIDNDIAGTEYTIGFDTAVNTAVEAIDKIRDTAASHDRIYVVEVMGRNAGDIALWAGMCAGAESIIIPEADHDVEDVIDRIKQGYQRGKTHSIIVVAEGAFNGVGAIEIGRAIKEKTGFDTKVTILGHIQRGGSPSAYDRMMSSQMGAKAVDLLVEGKKGLMVGLKNGQLIHTPFEEAAKDKHTVDLSIYHLARSLSL

SEQ ID NO: 10212 - protein, 477 aa, Mesorhizobium loti MAFF303099
MSRQAQAPTIVLFRRDLRMGDNAALAAAAERGVPVVALYILDETTKGLRAMGAASRWWLHHSLAALGDLLRKAGANLFLAHGRTEDAVAKAIDASGANCVFWNRRYDPSEVAVDARLKAALREKGLTALSFDGALLHEPSLLKTGSGGFYKVFTPFWKAMADKVDVRDPIDTPGQIDGWRGELGGLRLDELDLLPSKPDWAYGLRETWTPGEKGAQARLGQFIEHGLANYERQRDYPGQPSTSRLSPHLTFGEITPFQIFAALRRSKSSGTSKFRAEIGWREFSYHLLFHNPDLSGRNFRPEFDAMSWRDDIRALRTWQRGLTGYPIVDAGMRELWRTGWMHNRVRMIVASFLIKDLMIDWRHGEKWFWDTLVDADAANNPASWQWVAGSGADPAPYFRIFNPVLQGEKFDPHGDYVRQHVPEISALPDRYIHRPWEAPAAVLKDKGIVLGKTYPNPIVDHGAARERALIVYQSLKD

SEQ ID NO: 10213 - protein, 374 aa, Eupatorium cannabinum
MGEPTKEAAMMENLRSVVFKESESLEGFSAKIHGYDFNQGVNYSQILKSLISTGFQASNLGDAIEIVNQMLDWRLSHEQVTEDCSEEEKILTYRESVRCKIFLGFTSNLISSGVRDVIRYLVQHHMVEVIVTTTGGIEEDLIKCLGDTYMGDFSLPGAALRTKGLNRIGNLLVPNENYCKFEDWIIPILDQLLEEQKKQHVLWTPSKLIARLGKEINNESSYLYWAYKNDIPVFCPGLTDGSLGDMLYFHSFRNPGLVVDVVQDIRAMNSEAVHANPRKTGMIILGGGLPKHHICNANMMRNGADYAVFINTAQEFDGSDSGARPDEAVSWGKIRAAAKYVKVHCDATIAFPLLVAETFAATKEKTTDSKPSSG

SEQ ID NO: 10214 - protein, 163 aa, Zea mays
MDAVMFGLETPLMAALQHLLDVPDGDAGAGDNKTGGGGGATRTYVRDARAMAATPADVKELPGSYAFVVDMPGLGTGDIRVQVEDERVLVVSGERRREEREDDAKYLRMERRMGKFMRKFVLPDNADVDKVAAVCRDGVLTVTVEKLPPPEPKKPKTIEVKVA

SEQ ID NO: 10215 - protein, 375 aa, Eupatorium cannabinum
MAAAIKEAAAVIENARSAVFKESESLDGISAKIHGYDFNQGLNYSQLLKSLISTGFQASNLGDAIETINAMLDWRLSHEKVKEDCCEEEKDETYRESVRCKIFLGFTSNLISSGVRDTIRYLVQNKMVEVLVTTTGGIEEDLIKCLADTYRGHFHLPGAALREKGLNRIGNLIMPNSNYSKFEDWIIPIFDQMLEEQKTQHVVWTPSKVIARLGKEINDESSYLYWAYKNNIPVFCPALTDGSLGDMFYFHSFKNPGLVVDIVQDVLAMDNEAVLADPRKTGVIILGGGLPKHHICNANMMRNGADYAVFINTAQEYDGSDSGARPDEAVSWGKIRATAKSVKVHCDATIAFPLVVAETFAARREKTIEKKLCSA

SEQ ID NO: 10216 - protein, 364 aa, Heliotropium indicum
MGEVATNALDSVRSQLFKKSENLDGSAKVIGYDFNKGVNYAELLKSMVTTGFQASHLGDAMDCINDMLKWRLSHETPTEGCSEQEKDPAYRESVKCKIFLGFTSNLTSSGVRETLRYLCQHRMIDVLVTTAGGIEEDFIKCLGDTYRGDFALQGSMLRSKGLNRIGNLLVPNDNYCKFEDWIMGILDQMLEEQKTQKVLWTPSKVIARLGKEINDESSFLYWASKNNIPVFCPALTDGSIGDMLYLHANNNSPGLVVDIVEDARAMDNEAVHADPRKTGIIILGGGLPKHHICNANMMRGGADFAVYINTAQEFDGSDSGARPDEAVSWGKIRASAKKVKVHCDATIAFPLVVAETFAKVKKSS

SEQ ID NO: 10217 - protein, 371 aa, Heliotropium indicum
MGDVSEEQQQQLLASIRSVVLKQSENLEASSATKIQGYDFNRGVNYPDLLKSLSSTGFQASNLGDAIQVVNQMLNWKLSDECPTEECSDKERDPAFRDSVRCKIFLGFTSNLVSSGVRDIIRYLVQHHLVDVIVTTAGGVEEDLIKCLAPTYRGDFSLPGAVLRSKGLNRIGNLLVPNDNYCKFEDWIMNIFDRMMEEQNSEKVLWTPSKVISRLGKEINDESSYLYWAYKNNIPVYCPGLTDGSLGDMLYIHAIRKDPGLVVDVVKDIRAMNSEAVHAGLRKTGIIVLGGGLPKHHICNANMMRNGADFAVFINTAQEFDGSDSGARPDEAVSWGKIRGSAKTVKVHCDATIAFPLLVAETFATKVNKSG

SEQ ID NO: 10218 - protein, 382 aa, Ipomoea hederifolia
MGEDTRDQNRVMDAVRATVFKKSESLDGEGGCTKIEGYDFNRGVDYPQLLNSLLSTGFQASNLGEAIQIVNEMLDWRLSQEPIMEDCDEEEKDPAYRDTVTSKIFLGFTSNLVSSGVRDTIRYLVQHHMVDVVVTTAGGIEEDLIKCLAPTYKGDFSLPGAVLRSKGLNRIGNLLVPNDNYCKFEDWIIPIFDQMYEEQTKQNVLWTPSKVIARLGKEINDESSYLYWAYKNKIPVFCPSLTDGSLGDMLYFHSFRKEDPNNPDHNPGLIIDIVGDIRAMNGEAVHAGSRKTGVIILGGGLPKHHICNANMMRNGADYAVYINTAQEFDGSDSGARPDEAVSWGKIRGGAKTVKVHCDATIAFPLLVAETFATKPKNSTGNQ

SEQ ID NO: 10219 - protein, 110 aa, GIBBERELLA ZEAE PH-1
MSDAPVAKKAEGSNSKSVEGKKKFEVKKWNAVALWAWDIVVDNCAICRNHIMDLCIECQANQASATSEECTVAWGICNHAFHFHCISRWLKARSVCPLDNRDWEFQKYGR

SEQ ID NO: 10220 - protein, 367 aa, Psychrobacter sp. 273-4
MATILTLAGDGIGPEIMTQAIDVLNAVNNKFALGLTLESGLIGGVAVDATGEPLPEETLQRARAADAVLLGAVGGPKWDGIERSKRPERGLLKIRSELGLFANLRVAKLYPQLVNASSIKPEIISGLDLLIVRELTGGIYFGEPRGIRTLENGEQQGYNTMVYSTSEINRIGKVAFELAQTRAQAAGTPAKVCSIDKANVLEVTELWKQTMIELQQAEYSDVALSHMYADNACMQLIKDPKQFDVMVTGNLFGDILSDEAAMLTGSIGMLPSASLDEAGKGMYEPCHGSAPDIAGQDIANPLATILSVAMMLRYTFKQEVAAQAIEQAVSDVLDDGLRTVDILDRNEAGLIQVGCQQMGQAVLAKLL

SEQ ID NO: 10221 - protein, 165 aa, Zea mays
MDGRMFGLETPLMVALQHLLDVPDGDAGAGGDKASGAAAGGGPTRTYVRDARAMAATPADVKELPGVYAFVVDMPGLGTGDIKVQVEDERVLVISGERRREEREDAKYLRMERRMGKFMRKFVLPDNADMDKISAVCRDGVLTVTVEKLPPPEPKKPKTIEVKVA

SEQ ID NO: 10222 - protein, 214 aa, Zea mays
MAAVEVCVKAATGKPDTLGDCPFSQRVLLTLEEKKVPYEVKLVDLDNKPEWFLKISPEGKVPVFNGGDGECIADSDVITQTIEEKFPTPSLVTPVEYASVGSKIFPAFITFLKSKDASDGSEKALLDELQALDEHLKAHGPYINGENVSAADLSLGPKLFHLQVALEHFKGWKIPENLTNVHAYTKALFSRESFVKTKPSEEHVIAGWAPKVNA

SEQ ID NO: 10223 - protein, 326 aa, Bradyrhizobium japonicum USDA 110
MELRKIIRTDIAASAIAHLTLVALIIVISEVHPFHAAPPEAVAVDIVTPEQVKEQETKAEEAAKEKAPEPTPTPEMRLPKLDVTDKADAAAKPDAKQQAASQSSQQKASPEPEQPTQQKQPQPQPSQTPKQREATAQPQQPQQPQPQPSQLPPQQPLPQSQPQPAPQPSQAVPQPQAAPPAYQAPEPDVTVKYGVMLGLPPELPVEPKDAPRDDGGDAKDSIGAKLPPEVIAELRRRLRSCAKLPAGVAPTDPVRIKLRAVFATDGTLARPPILIEAPPSAKGVAIVKSATSALQACQPYKMLPADKYEEWKVLDLPFTPQDFGGG

SEQ ID NO: 10224 - protein, 182 aa, Zea mays
MAAAARQRGTVKWFNDTKGFGFISPEDGSEDLFVHQSSIKSEGFRSLAEGEEVEFSVSEGDDGRTKAVNVDRPRRSFVRGGGGGGGGGGGYGSRGGGGSGGGGRSYGGSWGGGRRSGGGGGPGACYKCGEPGHMARDCPSADGGGYGGGGYGGGGYGGGGGGGDRSCYNCGEAGHIARDCPT

SEQ ID NO: 10225 - protein, 429 aa, Arabidopsis thaliana
MESLPQPQNQSSPATTPAKILLGKHELGRRLGSGSFAKVHLARSIESDELVAVKIIEKKKTIESGMEPRIIREIDAMRRLRHHPNILKIHEVMATKSKIYLVMELASGGELFSKVLRRGRLPESTARRYFQQLASALRFSHQDGVAHRDVKPQNLLLDEQGNLKVSDFGLSALPEHLQNGLLHTACGTPAYTAPEVISRRGYDGAKADAWSCGVILFVLLVGDVPFDDSNIAAMYRKIHRRDYRFPSWISKQAKSIIYQMLDPNPVTRMSIETVMKTNWFKKSLETSEFHRNVFDSEVEMKSSVNSITAFDLISLSSGLDLSGLFEAKKKKERRFTAKVSGVEVEEKAKMIGEKLGYVVKKKMMKKEGEVKVVGLGRGRTVIVVEAVELTVDVVVVEVKVVEGEEDDSRWSDLITELEDIVLSWHNDIM

SEQ ID NO: 10226 - protein, 69 aa, Zea mays
GSPLGCLIFCPGLSGAPNGHGFAKGPLWKNPLSPSKWKEKPFVLASLSMWGGIFYGGSKLFSGKKEAKT

SEQ ID NO: 10227 - protein, 179 aa, Glycine max
  unsure (1)..(179): unsure at all Xaa locations
MDPMDIVGKSKEDVSLPKSTMTKIIKEMLPPDVRVARDTQDLLVECCVEFINLLSSESNDVCSRDDKKTIAPEHVIRALQDLGFKEYVEEVYAAYEQHKLETLDSPKATXFTGIKMTEKKAGAXQQRMFAXSPSKMNNGAAKPKEAALKPRFTPTAPKTFLGVGPRAEAPHLSARMCFP

SEQ ID NO: 10228 - protein, 119 aa, Glycine max
  unsure (1)..(119): unsure at all Xaa locations
MAAENVVEFTDLPVKRPREEEEEEEXQTNGVSNDAVSTLPNDPQYPGISAVIPGWFSEISPMWPGEAHSLKVEKILFQGKSDYQNVMVFQSSTYGKVLVLDGVMLLVPASRAREALLVP

SEQ ID NO: 10229 - protein, 157 aa, Brassica napus
  unsure (1)..(157): unsure at all Xaa locations
MSEKMANYVDGDSDRKRKYSSSSGSSKNNSNEGKRKVKKVDWTPELHRRFVDAVEQLGLEKAVPSRILELMGVHCLTRHNVASHLQKYRSHRKHVLAREXEAANWTRKRHIYGLDSTRVNINGRNKNGWIAPAPTIGYAPPPPAXXXSPTIHNHHFR

SEQ ID NO: 10230 - protein, 218 aa, Aspergillus niger
MSSTSPSKEPEVEPEVQSGEDQEQMDKEQQDTQAQGQGEFEVKEQDRWLPIANVARIMKLALPENAKIAKEAKECMQECVSEFISFITSEASEKCQQEKRKTVNGEDILFAMTSLGFENYAEALKIYLSKYRETQSARGEHQNRPTSSGYGAGAPVGAPGPAGPGGRPMAPGAGFPDTADSANNIMNQSLDPSEQDTSTYGYPPMVGQPHNGTAGESY

SEQ ID NO: 10231 - protein, 133 aa, Brassica napus
VDPRVRALKVYVPSYESYGRMWPHIHTRILAALFLFQLVMFGYLGVKLFVWATLLVPLIFISLIFGYVCRQKFYKGFEHTALEVACRELKQRPDLEEVFKAYIPHSLSTHKGDDHQFKGAMSRYQDYAAISAA

SEQ ID NO: 10232 - protein, 346 aa, Rosa gallica
QKWSNGEHSNELLHAQAHIWNHIFSFINSMSLKSAIQLGIPDIINKHGYPMTLSELTSALPIHPTKSHSVYRLMRILVHSGFFAKKKLSKTDEEGYTLTDASQLLLKDHPLSLTPFLTAMLDPVLTKPWNYLSTWFQNDDPTPFDTAHGMTFWDYGNHHPSIAHFFNDAMASDARLVTSVIIDDCKGVFEGLESLVDVGGGTGTLAKAIADAFPHIECTVLDLPHVVADLQGSKNLKYTGGDMFEAVPPADTVLLKWILHDWNDEECVKILKRSREAITSKDKKGKVIIIDMMMENQKGDEESIETQLFFDMLMMALLTGKERNEKEWAKLFTDAGLSDYKITPIL

SEQ ID NO: 10233 - protein, 496 aa, Staphylococcus aureus subsp. aureus Mu50
MELLKHLSQRQYIDGEWVESTNKNTRDIINPYNQEVIFTVSEGTKEDAERAILAARRAFESGEWSQETAEKRGKKVRAIADKIKEHREALARLETLDTGKTLEESYADMDDIHNVFMYFAGLADKDGGEMIDSPIPDTESKIVKEPVGVVTQITPWNYPLLQASWKIAPALATGCSLVMKPSEITPLTTIRVFELMEEVGFPKGTINLILGAGSEVGDVMSGHKEVDLVSFTGGIETGKHIMKNAANNVTNIALELGGKNPNIIFDDADFELAVDQALNGGYFHAGQVCSAGSRILVQNSIKDKFEQALIDRVKKIKLGNGFDADTEMGPVISTEHRNKIESYMDVAKAEGATIAVGGKRPDRDDLKDGLFFEPTVITNCDTSMRIVQEEVFGPVVTVEGFETEQEAIQLANDSIYGLAGAVFSKDIGKAQRVANKLKLGTVWINDFHPYFAQAPWGGYKQSGIGRELGKEGLEEYLVSKHILTNTNPQLVNWFSK

SEQ ID NO: 10234 - protein, 318 aa, Arabidopsis thaliana
MVALDLEFERYPGERSFGSVSLFKYKRQRDGETQYAAVKTSSDENAKSLYKEFQILSQFKGCSRIVQCYGNGVKEIFNDKGYVEYKIAMEYAFGGSLSDFMDRFKDRKLSDSMIREFTRMLLEGLATIHRHGYVHCDLKPENILVFPSSVYKNGAWIRSYELKISDFGMSKRDGDTQWWQPRKPYVGTPIYMSPESISHGEIGKGLDLWSLGCVVLEMYTRKKPWWHTNYELEELMKCYEPLFPRNLPCDAKLFLMTCFASEPDERKDALTLLRQSFLHGDVNKFTNRQMNVKIDSADDFTLQLEKVSQMLSEIRTMC

SEQ ID NO: 10235 - protein, 346 aa, Rosa gallica
QKWSNGEHSNELLHAQAHIRNHIFSFINSMSLKSAIQLGIPDIINKHGYPMTLSELTSALPIHPTKSHSVYRLMRILVHSGFFAKKKLSKTDEEGYTLTDASQLLLKDHPLSLTPFLTAMPDPVLTKPWNYLSTWFQNDDPTPFDTAHGMTFWDYGNHHPSIAHFFNDAMASDARLVTSVIINDCKGVFEGLESLVDVGGGTGTLAKAIADAFPHIECTVLDLPHVVADLQGSKNLKYTGGDMFEAVPPADTVLLKWILHDWNDEECVKILKRSREAITSKDKKGKVIIIDMMMENQKGDEESIETQLFFDMLMMALLTGKERNKKEWAKLFTDAGFSDYKITPIL

SEQ ID NO: 10236 - protein, 373 aa, Arabidopsis thaliana
MVPPELEFNKYLGKGSYGSVSLFKYSKPRTTLYTAVMTCNYKNAESLEKEFGILSEFKGCSRIVQCYENRVIENLDVEGNKEYMMLMEYAAGGSLRTFMKRSEDKKLPDPLIREFTRMILEGLATIHGQGYVHCDLKPDNILVFPRCVYKKRAWRSSYELKISDFGLSKRDGDSKWWHPHRPFVGTAIYMSPGSVSHGETGRGLDLWSLGCVVLEMYTGKKPWWHNNYDLKDLKNWYAPMIPSDLPCDAKHFIMACFALNTNERRDALTLLEHSFLRGVVNKITKPHVKNENPKEIALALGRVVRRPSKVLTSIFKRAGELMKIIKKQPRAPRSNLLPVHICHLAQPSQKICFFIYCSLCVVFIILTVVCMFR

SEQ ID NO: 10237 - protein, 346 aa, Rosa hybrid cultivar 'Kazanlik'
QKWSNGEHSNELLHAQAHIWNHIFSFINSMSLKSAIQLGIPDIINKHGYPMTLSELTSALPIHPTKSHSVYRLMRILVHSGFFAKKKLSKTDEEGYTLTDASQLLLKDHPLSLTPFLTAMLDPVLTKPWNYLSTWFQNDDPTPFDTAHGMTFWDYGNHHPSIAHFFNDAMASDARLVTSVIIDDCKGVFEGLESLVDVGGGTGTVAKAIADAFPHIECTVLDLPHVVADLQGSKNLKYTGGDMFEAVPPADTVLLKWILHDWNDEECVKILKRSREAITSKDKKGKVIIIDMMMENQKGDEESIETQLFFDMLMMALLTGKERNKKEWAKLFTDAGFSDYKITPIL

SEQ ID NO: 10238 - protein, 440 aa, Oryza sativa (japonica cultivar-group)
MSDCHIMTARRRSCYGRYLSASNEPFLLGITGRKVLQAQPPGGRATDSSLEWEPVKDDALVYVRVELTAWNVAPLRCAAEYLEMTEEHAEDNLTARVEAYLEQAVLRHSCEATKALKSREELLPHAEELGIVSRCVEAISIFTSGVNLNEEQNMDHLTSPFATTARSSAASRSWFDDLAVLGLDMYRRVMAAMAARADVRTEARESCLVSYARGTITALSRSMRRLASAPASSEVEQRDLLEAVVTSVPTDKCSGRVVTAKFLFAQLWTAHILLALDAALGQKAATQLEHATLEDVLIPSYSGGMKTLYDVDCVERVVRHVLAEEEHGEAGESTSAAAITEEKRGGGGGEGASDGGEPAGAVECRRGGGGGAGGSPVIRLGGLRRARSHGGARRPPPPDAGVLMVVGQRSRRLPHLLPHRRPAVGAPRPDDLLPTACRPA

SEQ ID NO: 10239 - protein, 388 aa, Pichia norvegensis
MSAAKQLFKIVPLTPTEINFLQSLAPVVKEHGVTVTSTMYKYMFQTYPEVRSYFNMTNQKTGRQPKVLAFSLYQYILHLNDLTPISGFVNQIVLKHCGLGIKPDQYPVVGESLVQAFKMVLGEAADEHFVEVFKKAYGNLAQTLIDAEASVYKTLAWEEFKDFRVTKLVKEAEDVTSVYLTPVDGFKLKPIIPGEYISFRWDIHNPDITDIQPREYSISQDVKENEYRISVRDIGIVSDYINKKLQVGDIVPVHAPVGTMKYDSISKKGKVAVLAGGIGITPMIPIIEHALKDGKDVELYYSNRSYQSEPFREFFSNLEKENNGKFKLNNYISAENQKLQVKDLEHINPDEYDVYLLGPVAYMHEFKTYLVGKGVSDLKMEFFGPTDP

SEQ ID NO: 10240 - protein, 346 aa, Rosa hybrid cultivar 'Kazanlik'
QKWSNGEHSNELLHAQAHIWNHIFSFINSMSLKSAIQLGIPDIINKHGYPMTLSELTSALPIHPTKSHSVYRLMRILVHSGFFAKKKLSKTDEEGYTLTDASQLLLKDHPLSLTPFLTAMLDPVLTKPWNYLSTWFQNDDPTPFDTAHGMTFWDYGNHQPCIAHFFNDAMASDARLVTSVIIDDCKGVFEGLESLVDVGGGTGTVAKAIADAFPHIECTVLDLPHVVADLQGSKNLKYTGGDMFEAVPPADTVLLKWILHDWNDEECVKILKRSREAITSKDKKGKVIIIDMTMENQKGDEESIETQLFFDMLMMALVTGKERNEKEWAKLFTDAGFSDYKITPIL

SEQ ID NO: 10241 - protein, 371 aa, Phalaenopsis hybrid cultivar
MGSAACETERDVLKSLVFKESAALESLKIGGYDFNNGLDLTGLLNSLVSTGFQATNLGEAMEVVNQMISWRLADEEVAVDGSEETDRAFRESVKCKIFLGFTSNLISSGVRETIRFLVQHRMVDVLVTTAGGIEEDFIKCLAPTFKGDFSLGGTFLRSRGWNRIGNLLVPNDNYCKFGDWIMPILDKMLEEQINEKAHWTPSKVIARLGKEINNESSYLYWASKNGIPVFCPAITDGSIGDMLYLHSLRNPGHIIDLVQDVKAMDEEAVHASPRKTGVLILGGGVPKHHICNANMLRNGADYAVFINTAQEFDGSDSGARPDEAVSWGKIKGTAKTAKVHCDATIAFPLLVAGTFAKKINKAAAQANGIKA

SEQ ID NO: 10242 - protein, 370 aa, Senecio vernalis
MAESNKEAIDSARSNVFKESESLEGTCAKIGGYDFNNGIDHSKLLKSMVSTGFQASNLGDAMIITNQMLEWRLSHDEVPEHCSEEEKKNRESVKCKIFLGFTSNLISSGVRETICYLAQHRMVDVLVTTTGGIEEDFIKCLASTYKGKFSLPGADLRSKGLNRIGNLIVPNDNYIKFEDWIIPIFDQMLIEQKTQNVLWTPSRMIARLGKEINNETSYLYWAYKNNIPVFCPSITDGSIGDMLYFHSVSNPGPGLVVDIVQDVIAMDNEAVHASPQKTGIIILGGGLPKHHICNANMMRNGADFAVFINTAQEYDGSDSGARPDEAVSWGKISSTGKAVKVHCDATIAFPLLVAETFAVKKEKASKVNGF

SEQ ID NO: 10243 - protein, 272 aa, Bradyrhizobium japonicum USDA 110
MLFVEANGARIPAIGLGTWELSGRPCARVVEQALRLGYRHIDTAQVYDNEREVGDGVRASGVRRDDVFLTTKVWTNHFAPNDLERSVKESLARLRLPSVDLLLLHWPNSHVPLAETLGALSHARQMGLTRHIGVSNFTVALIEQAVALSPEPLVCNQVEFHPYLDQAKVRAACDQHGLALVAYSPIARGRIKTDQTLAGIGRAHRKTPAQVCLRWLVQQNVAAIPRTSRIERLSENIEIFDFELSDDEMARIAALANPKGRLTDFGFAPKWD

SEQ ID NO: 10244 - protein, 343 aa, GIBBERELLA ZEAE PH-1
MAADDSPTFEEHFSRLSIDHKSVGSQSKRVPKTKIPQSQPVPGPAQPKCLLPVKGPVVANRVDTPTPHKDQDTNSPSPSSPQKPTTKSSTTKSATLYKHLHLGMFEIGRPMGKGKFGRVYLARERSSGFICALKVLYKTELRQSRMESQVRREIEIQTNLRHPNIVQLYSHFHDSKRIVLVLEFAAKGELYKHLQKETRFTERKAARFIAQVVSALQYLHRKNIIHRDIKPENILVGMHDELKMSDFGWSVHSPSKRRETMCGTLDYLPPEMIKLGAVDAGRFYDEKVDVWSLGVLTYEFLVGVPPFEDTPVRTQRRIARADMQIPDFISSKAKHLIKSACSL

SEQ ID NO: 10245 - protein, 372 aa, Senecio jacobaea
MGETNKSAEMIESARSAVFKESERLEGTCAIIGGYDFNNGIDHSKLLKAMVSTGFQASNLGDAIDIVNQMLDWRLSHEPVTEDCTEEEKKKRESVKCKIFLGFTSNLISSGVRETIRYLAQHRMVNVIVTTAGGIEEDYIKCLGSTFRGKFSLPGANLRSRGLNRIGNLLVPNDNYCKFEDWIIPIFDQMLIEQKTKNVLWTPSRIIARLGKEINNESSYLYWAYKNNIPVFCPALTDGSIGDMLYFHSVTNPGPGLVVDIVQDVIAMDNQAVHASPQKTGIIILGGGLPKHHICNANMMRNGADYAVFINTAQEYDGSDSGARPDEAVSWGKISSSGKAVKVHCEATIAFPLLVAETFAAKKEKASKLNGF

SEQ ID NO: 10246 - protein, 58 aa, Brassica napus
MSEGTANCVDILIAIILPPLGVFLKYGCGHEFWICLLLTFLGYIPGIIYAIYAITKNT

SEQ ID NO: 10247 - protein, 114 aa, Glycine max
MFHSIKTVLTCPQVSFPARSLSSNLGRETCAVRFCTDSARKMDKTQKPSTEENKQGDTMSHSFGEGYATRSDEEGFGGVYGGNQSKPEMDPAYDKTQGSEVKEKEKARHQTSAN

SEQ ID NO: 10248 - protein, 578 aa, Zea mays
  unsure (1)..(578): unsure at all Xaa locations
MAGGGVEDVYGEDRATEEQLITPWAFSVASGYTLLRDPRHNKGLAFSEAERDAHYLRGLLPPALASQELQEKKLMQNLRRYEQPLHRYIAMMDLQERNERLFYKLLIDNVEELLPVVYTPTVGEACQKYGSIYRRPXQGLYISLRDKGKILEVLKNWPERSIQVIXVVTDGERILGLGDLGWPGGWEIPVGKLSLYTAXSGGVRPSACLXHFTIDVGTNNEALXLKDEFYIGLXRQRRATGEEYHELLEEFMTAVKQNYGEKVLTQFEDFANHNAFDLLEKYRESHLVFNDDIQGTASVVLAGLLAALKVVGGTLADHTYLFLGAGEAGTGIAELIALEMSKHTGSPIEECRPKIWLMDSKGLIVASRKDSLQAFKKPWAHEHEPVATLLEAVQSLKPTVLIGTSGKGGTFTKEVVEXMASQNEKPVIFALSNPTSHSECTXAEQAYTWTKGRAVFASGSPFDSVELDGKVLVPGQSNNAYIFPGFGLGVVISGAIRVRDDMLLAASEALAEQVTEEHFAKGLIFPPFTNIRAISARIAAKVAAKAYELGLASRLPRPDDLVKYAESCMYTPIYRSYR

SEQ ID NO: 10249 - protein, 364 aa, Hyphomicrobium chloromethanicum
MSTYSLRVERKQRETDDCASLWLSVPTDLRSAFAHRPGQFIAVSAEINGEEVTRQYSLSSAPDDSRGIRITVKKIPGGRMSSWLVDRVNEGDRIEVAAPRGRFFRPLDRAHRVLLLAAGSGIAPILPIAQKLLADGVGHRITLAYGSRALDDIILRKDVDELPNIFRTCALEHVLSRPGPTWDGPRGRLDSAYLLSRQDLWDGNASHLPLIVYLCGPESFMDAAEAFFLSHGVDASAIRRESFDLVLEDDADEPPLFVAGTEEVGEPSAICEEIVANVGGEETRVVPEPDETILAALIRGEAPVPFSCQEGTCSSCIAKIKKGSASVRSGVLKTLRQDDLDEGLLLACLARPASRHILIDFDDI

SEQ ID NO: 10250 - protein, 346 aa, Rosa hybrid cultivar 'Kazanlik'
KKWSNGEDSNELLHAQAHIWNHIFSFINSMSLKSAIQLGIPDIINKHGPPMTLSELTSALPIHPTKSHSLDRLMRILVHSGFFAKEKLSETDEEGYTLTDTSQLLLKDHPLSLTPFLTAMLDPVLTKPWHHLSTWFQNDDLTPFATAHGMTMWDYGNHQPSFSHFFNDAMASDARLVASVIINECKGVFEGLESLVDVGGGTGTLAKAIADAFPHIECTVLDLPHVVADLQGSKNLKYTGGDMFEAVPPADTVLLKWILHDWNDEECVKILQRSKEAITSKDKKGKVIIIDMIMGNQKGDEESIEMQLFFDMLMMVLLKGKERNEKEWAKLFTDAGFSDYKITPIL

SEQ ID NO: 10251 - protein, 346 aa, Rosa hybrid cultivar
QKWSNGEHSNELLHAQAHIWNHIFSFINSMSLKSAIQLGIPDIINKHGYPMTLSELTSALPIHPTKSHSVYRLMRILVHSGFFAKKKLSKTDEEGYTLTDASQLLLKDHPLSLTPYLTAMLDPVLTNPWNYLSTWFQNDDPTPFDTAHGMTFWDYGNHQPSIAHLFNDAMASDARLVTSVIINDCKGVFEGLESLVDVGGGTGTLAKAIADAFPHIECTVLDLPHVVADLQGSKNLKYTGGDMFEAIPPANTVLLKWILHDWNDEECVKILKRSRVAITSKDKKGKVIIIDMMMENQKGDEESIETQLFLDMLMMALVGGKERNEKEWAKLFTDAGFSDYKITPIL

SEQ ID NO: 10252 - protein, 346 aa, Rosa hybrid cultivar
QKWSNGEHSNELLHAQAHIWNHIFSFINSMSLKSAIQLGIPDIINKHGYPMTLSELTSALPIHPTKSHSVYRLMRILVHSGFFAKKKLSKTDEEGYTLTDASQLLLKDHPLSLTPYLTAMLDPVLTNPWNYLSTWFQNDDPTPFDTAHGMTFWDYGNHQPSIAHLFNDAMASDARLVTSVIINDCKGVFEGLESLVDVGGGTGTLAKAIADAFPHIECTVLDLPHVVADLQGSKNLKYTGGDMFEAVPPADTVLLKWILHDWNDQECIKILKRSRVAITSKDKKGKVIIIDMMMENQKGDEESIETQLFFDMLMMALVGGKERNEKEWAKLFTDAGFSDYKITPIL

SEQ ID NO: 10253 - protein, 589 aa, Glycine max
MESATQVGAAAQPSSASASVIPSAFDGTLGRHLARRLAETGVRDVFSVPGDFNLTLLDHLIAEPSLNLVGCCNELNAGYAADGYARAKGVGACVVTFTVGGLSVLNAIAGAYSENLPVICIVGGPNSNDYGTNRILHHTIGLPDFTQELRCFQAITCFQAVVNNLDDAHELIDTAISTALKESKPVYISISCNLPGIPHPTFARDPVPFFLAPKVSNQEGLEAAVEATAALLNNAVKPVIVGGPKLRVAKAQKAFLEFAEASGYPIAVMPSGKGLVPEHHPHFIGTYWGAVSSSFCGEIVESADAYVFVGPIFNDYSSVGYSLLIKKEKAIIVQPNRVTIGNGPSLGWVFMADFLTALAKKVKTNTAAVENYRRIYVPPGIPLRREKDEPLRVNVLFKHIQELLSGDTAVIAETGDSWFNCQKLHLPENCGYEFQMQYGSIGWSVGATLGYAQAATDKRVIACIGDGSFQVTAQDISTMIRCGQKTIIFLINNGGYTIEVEIHDGPYNVIKNWDYTRFVDAIHNGQGKCWTAKVRTEDDLTEAIAKATGPQKDSLCFIEVFVHKDDTSKELLEWGSRVAAANSRPPNPQ

SEQ ID NO: 10254 - protein, 346 aa, Rosa hybrid cultivar
QKWSNGEHSNELLHAQAHIWNHIFSFINSMSLKSAIQLGILDIINKHGYPMTLSELTSALPIHPTKSHSVYRLMRILVHSGFFAKKKLSKTDEEGYTLTNASQLLLKDHPLSLTPFLTAMLDPVLTKPWNYLSTWFQNDDPTPFDTAHGMTFWDYGNHQPSTAHFFNDAMASDARLVTSVIIDDCKGVFEGLESLVDVGGGTGTVAKAIADAFPHIECTVLDLPHVVADLQGSKNLKYTGGDMFEAVPPADTVLLKWILHDWNDQECIKILKRSRVAITSKDKKGKVIIIDMMMENQKGDEESIETQLFFDMLMMALVGGKERNEKEWAKLFTDAGFSDYKITPIL

SEQ ID NO: 10255 - protein, 194 aa, Zea mays
APAFCELSLPLTKEEAAFSPSDPAMQRHVASGRPSGTDGSDFSYRMVVESRYQRVAEGRSRLARLILVQALHLVAGGLLLLLSLSKGAAVNKFAVLSMAAGFLAIVVGELGRMRTMAVLLRLYTSLSSIAVAFSVTCIIRSELFLKVMKQNTEAITSYEMLDAVRVALGILLQMVVIATTTRLLQNMSPPKRAS

SEQ ID NO: 10256 - protein, 346 aa, Rosa hybrid cultivar
QKWSNGEHSNELLHAQAHVWNHIFSFINSMSLKSAIQLGILDIINKHGYPMTLSELTSALPIHPTKSHSVYRLMRILVHSGFFAKKKLSKTDEEGYTLTNASQLLLKDHPLSLTPFLTAMLDPVLTKPWNYLSTWFQNDDPTPFDTAHGMTFWDYGNHQPSIAHFFNDAMASDARLVTSVIIDDCKGVFEGLESLVDVGGGTGTVAKAIADAFPHIECTVLDLPHVVADLQGSKNLKYTGGDMFEAIPPANTVLLKWILHDWNDEECVKILKQSREAITSKDKKGKVIIIDMMMENQKGDEESIETQLFFDMLMMALVTGKERNEKEWAKLFTDAGFSDYKITPIL

SEQ ID NO: 10257 - protein, 455 aa, Mycobacterium avium subsp. paratuberculosis str. k10
MSTARLINPATEEVLRSVEHADAAAVDDAVDRARAAQRRWARLAPADRAAGLRAFAAAVDAHRDELAALEVANSGHPIASAEWEAGQVRDVLTFYAGSPERLSGKQIPVAGGLDVTFHEPLGVVGVITPWNFPMPIASWGIAPALAAGNAVLVKPAEPTPVTTIRLAELAVQAGLDRDLLQVLPGPGTVVGERFVTHPDVRKIVFTGSTEVGKKVLAGAAAQVKRVTLELGGKSANIVFADCDLQRAAATAPAGVFDNAGQDCCARSRILVQRTVFDRFMELLEPAVTGIVVGDPASRDTQMGPLVSAAHRAKVASYVPDGAPVAFRGTAPTGPGFWFPPTVLTPSRTDRCVTEEIFGPVVTVLAFDDEQDAVALANDTSYGLSGSIWTNDLSRALRVSRAVEAGNLSVNSHSSVRYHTPFGGFKQSGLGRELGPDAPAQFTETKNVFIAIDEEP

SEQ ID NO: 10258 - protein, 1499 aa, Streptococcus gordonii
MQKREVFGFRKSKVAKTLCGAVLGAALIAIADQQVLADEVTETNSTANVAVTTTGNPATNLPEAQGEATEAASQSQAQAGSKDGALPVEVSADDLNKAVTDAKAAGVNVVQDQTSDKGTATTAAENAQKQAEIKSDYAKQAEEIKKTTEAYKKEVEAHQAETDKINAENKAAEDKYQEDLKAHQAEVEKINTANATAKAEYEAKLAQYQKDLAAVQKANEDSQLDYQNKLSAYQAELARVQKANAEAKEAYEKAVKENTAKNAALQAENEAIKQRNETAKANYDAAMKQYEADLAAIKKAKEDNDADYQAKLAAYQAELARVQKANADAKAAYEKAVEENTAKNTAIQAENEAIKQRNETAKATYEAAVKQYEADLAAVKQANATNEADYQAKLAAYQTELARVQKANADAKATYEKAVEDNKAKNAALQAENEEIKQRNAAAKTDYEAKLAKYEADLAKYKKDFAAYTAALAEAESKKKQDGYLSEPRSQSLNFKSEPNAIRTIDSSVHQYGQQELDALVKSWGISPTNPDRKKSTAYSYFNAINSNNTYAKLVLEKDKPVDVTYTGLKNSSFNGKKISKVVYTYTLKETGFDDGTKMTMFASSDPTVTAWYNDYFTSTNINVKVKFYDEEGQLMNLTGGLVNFSSLNRGNGSGAIDKDAIESVRNFNGRYIPISGSSIKIHENNSAYADSSNAEKSRGARWDTSEWDTTSSPNNWYGAIVGEITQSEISFNMASSKSGNIWFAFNSNINAIGVPTKPVAPTAPTQPMYETEKPLEPAPVVPTYENEPTPPVKTPDQPEPSKPEEPTYETEKPLEPAPVAPTYENEPTPPVKIPDQPEPSKPEEPTYETEKPLEPAPVAPTYENEPTPPVKTPDQPEPSKPEEPTYDPLPTPPLAPTPKQLPTPPVVPTVHFHYSSLLAQPQINKEIKNEDGVDIDRTLVAKQSIGKFELKTEALTAGRPKTTSFVLVDPLPTGYKFDLDATKAASTGFDTTYDEASHTVTFKATDETLATYNADLTKPVETLHPTVVGRVLNDGATYTNNFTLTVNDAYGIKSNVVRVTTPGKPNDPDNPNNNYIKPTKVNKNKEGLNIDGKEVLAGSTNYYELTWDLDQYKGDKSSKEAIQNGFYYVDDYPEEALDVRPDLVKVADEKGNQVSGVSVQQYDSLEAAPKKVQDLLKKANITVKGAFQLFSADNPEEFYKQYVSTGTSLVITDPMTVKSEFGKTGGKYENKAYQIDFGNGYATEVVVNNVPKITPKKDVTVSLDPTSENLDGQTVQLYQTFNYRLIGGFIPQNHSEELEDYSFVDDYDQAGDQYTGNYKTFSSLNLTMKDGSVIKAGTDLTSQTTAETDATNGIVTVRFKEDFLQKISLDSPFQAETYLQMRRIAIGTFENTYVNTVNKVAYASNTVRTTTPIPRTPDKPTPIPTPKPKDPDKPETPKEPKVPSPKVEDPSAPIPVSVGKELTTLPKTGTNDATYMPYLGLAALVGFLGLGLAKRKED

SEQ ID NO: 10259 - protein, 432 aa, Bordetella parapertussis 12822
MTVRTVRIAGGRLIDPASGADARADLYLADGRIAAIGQAPAGFQAQQHIDARGLAVLPGLVDLSARVHGAGLAPLACEMQAALAGGVTRLVVPPDTDPPLDEPGRVEMLRHRAHQAGQAQLHPLGALTEGLRGERLSEMAALAEAGCVAFSQAGLPVADTRVLWRAMQYARTFGLALWLRPLDPWMGRDGVAAAGAYASRLGLAEVPVQAETLALHTIFELQRATGARVHLMRLSSAAGVALVRAARREGLPLTCDVAAHQIHLTDVDIGFFDSRFRLDPPLRGQRDRDAIVAGLADGTIDAICSDHRPVGDTGKLLPFAEAEAGASGLELLLSLTLKWAQRERVPLARALALVTSAPAAILRAATAALPPCGELAAGAPADLCLVDLDADWTAAPAAMRSRSVHTPFAGMMLPGRVRATLVAGRTVWETPA

SEQ ID NO: 10260 - protein, 137 aa, Glycine max
  unsure (1)..(137): unsure at all Xaa locations
KNKLLRTNNEKLTAGSMISCAAVTTVNRAGGDMVATFTGLMSMAGLPTTKTNDDISSIASNGGRVQCMQAXPPVGKKKFETLCYLPDLDDAQLAKEVEYLLRKGWIACWXFELDHRFWYREHNTSAEYYYXRYWTMW

SEQ ID NO: 10261 - protein, 181 aa, Leptospira interrogans serovar Copenhageni str. Fiocruz L1-130
MKIKWFIFVFLFSVSWLQAEPFQLKSPELTSVKLIANEQVFNGFGCSGGNISPSLSWTGLPKDTKSIALTVYDPDAPTGSGWWHWVVFNLPSTITSIPANAGNLEKNLLPKEAIQSRTDFGTSGYGGPCPPKGHKPHRYYFTVYALKDKIPADQNSSGALIGFYINQLKIGEAQILAKYGR

SEQ ID NO: 10262 - protein, 316 aa, Glycine max; identical to SEQ ID NO: 356

SEQ ID NO: 10263 - protein, 471 aa, Vibrio parahaemolyticus RIMD 2210633
MILVWFRRDLRTLDHTALKAALDTGQPVVACFIATPEQWQEHHMAPMQADLIARRLEHVHQELTELNIPLLYKEVPRFDDCTQVICDWADKLNATAAMVNINYEVNEVELDRKVSQALDNRGVEFHAFHDKCVHAPTTVLNKQGEYFKVFTPFKRAWLQKFSLPTVSKPQRQNELPSAQLAAVKQDGFDADFTFSYPRESSEAWCVSTNDILKQLRTFARERSDGYQMKRDFPAIDGTSQLSPYLAIGALSPRQCIARLYAENPQPDLSEGKATWLSEIIWREFYQHLLVFEPKLVKGRGFIDWEDKIQWSYDEQAFECWKTGTTGYPIVDAAMRQLNQTGWMHNRLRMIVASFLTKDLHIDWRWGEEYFMSKLVDGDFAANNGGWQWSASTGCDGQPYFRIFNPISQGEKFDSDGQFVRHWVPEIKSVPNKFVHKPWTWEGFSLLEYHKPMVDHKVEREITLRLFKSAKE

SEQ ID NO: 10264 - protein, 286 aa, Azotobacter vinelandii
MSDYQETLYEGYGQRFRMDRLLHEVRTGHQHLVIFENARMGRVMALDGVIQTTEADEFIYHEMLTHVPILAHGAARRVLIVGGGDGGILREVCRHRSVERITMVEIDATVVEMCKEFLPEHSRGAFEDPRLNLVIDDGMRFVATTEDRFDVIISDSTDPIGPGEVLFSENFYQACRRCLNDGGILVTQNGTPFMQLGEVQTTAQRMNGLFADWHFYQAAVPTYIGGAMTFAWGACDAASRRLPPDILRQRFVGSGIVARYYNPEIHQGAFALPQYVLQAIGKPGNN

SEQ ID NO: 10265 - protein, 360 aa, Physcomitrella patens
MSPSVDCLASLYCAEDVSGTAWNESEMCGAADRVFESQPAVFMDFPVEDDEAIATLLMKEAQFMPEADYLERYQSRKLSLEARLAAIEWILKVHSFYNYSPLTVALAVNYMDRFLSRYYFPEGKEWMLQLLSVACISLAAKMEESDVPILLDFQVEQEEHIFEAHTIQRMELLVLSTLEWRMSGVTPFSYVDYFFHKLGVSDLLLRALLSRVSEIILKSIRVTTSLQYLPSVVAAASIICALEEVTTIRTGDLLRTFNELLVNVESVKDCYIDMRQSEIGPYCVRMGLKRKILHASEPQSPVGVLEAADVSSPSGTVLGFSSRESSPDVTDSPPSTNSQRKRRKLCLHNESCLHVESASL

SEQ ID NO: 10266 - protein, 223 aa, Glycine max
MASSLIISPRKLRSDLYSYSYQEDHYSTPLVINVLASLIERSMARTERIVKNGSRSLSKAISTNIFDCREILDMTIQSYLERIFRYTRAGPSVYVVAYVYIDRFCQNNPGFRINARNVHRLLITTIMLASKYVEDMNYRNSYFGRVGGLTTDELNKLELEFLFLMDFKLHVNVSVFESYCCHLEREVSIGGGYHIERTLRCAEEIKAKHREERGYTHIARVML

SEQ ID NO: 10267 - protein, 310 aa, Malus x domestica
MSTGTLSSGYEMPVIGLGLWRLEKDELKEVILNAIKIGYRHFDCAAHYKSEADVGEALAEAFKTGLVKREELFITTKIWNSDHGHVVEACKNSLEKLQIDYLDLYLVHYPMPTKHNAIGKTASLLGEDKVLDIDVTISLQQTWEGMEKTVSLGLVRSIGLSNYELFLTRDCLAYSKIKPAVSQFETHPYFQRDSLVKFCMKHGVLPTAHTPLGGAAANKDMFGSVSPLDDPVLNDVAKKYGKSVAQICLRWGIQRKTAVIPKSSKIQRLKENLEVLEFQLSDEDMQLIYSIDRKYRTSLPSKTWGLDVYA

SEQ ID NO: 10268 - protein, 208 aa, Zea mays
  unsure (1)..(208): unsure at all Xaa locations
MACNYANRLLSPHPHSHAKNDVPSGLAAVLLCAAVAAALGGKRAPIPDDLRDVIDDEEDDEWRRYGTPPSRGPGRGDXQPPDLSRMDPAALQDELLRGQTGPSFGFVKLRPGXRRSREDVVGIATRWSNVLRTGSVDAKFVAVNFVTLMFTMERGRDILELKEFVLSQAEAYELRIGDQVFRXPGDPPLDQVLRKPRKKKRRKSRDEL

SEQ ID NO: 10269 - protein, 476 aa, Glycine max
  unsure (1)..(476): unsure at all Xaa locations
ETEQFVWRVLPLLTILMSLVVFFYLQDSYRAHLHPLVKFPRSKCSLLPHRHFWITSKRIVTPQGIISGSVEINEGKIISVIKGYSKQGKSKQEKIIDYGGAVVMPGLIDVHVHLDEPGRTAWEGFDTGTRAAAAGGVTTVVDMPLNNHPTTVSRETLKLKLEAAENKIYVDVGFWGGLIPENAHNTSILEGLLSAGVLGVKSFMCPSGIDDFPMTTIDHIKAGLSVLAKYRRPIVVHAEIQQHFENHLELNEDNLDPRAYLTYLNTRPPSWEEAAIKQLVSVTKDTRKGGPLEGAHVHIVHLSDSSASLDLIKEAKSHGDSISVETCPHYLAFTSEEIPNGDTRFKCSPPIRDAYNKDKLXEAVLEGHIDLLRTDHSPTXLEQLSLLWSKKPATLAGLESKGAIAVGNHADIVVWQPELEFDLDDDYPVFIKHSELSAYMGRRLSGKVLETFVRGNLVFKDGKHAPAPCGVQILAK

SEQ ID NO: 10270 - protein, 181 aa, Vigna radiata
MASSMISSPAVTTVNRAGAAGMVAPFTGLKSLGGFPTRKTNNDITSVANNGGRVQCMQVWPTIGKKKFETLSYLPDLTEEQLGKEVDYLLRSGWIPCLEFELSHKDAFPHRENNRSPGYYDGRYWTMWKLPMYGCTDSSQVLKELREARTLYPDGFVRIVGFDSVRQVQCISFIAYKPPGY

SEQ ID NO: 10271 - protein, 123 aa, Psychrobacter sp. 273-4
MALSKDDVLNAIAEMSVMDIVELISAMEEKFGVTAAVAAAPAAAGPAAAAAEEKDEFDVVLASFGEKKVGVIKAVREATGLGLKEAKDLVESAPASIKEGVNKAEAEELKKKLEEAGATVELK

SEQ ID NO: 10272 - protein, 405 aa, Glycine max
MVLEATMICIDNSEWMRNGDYSPSRFQAQADAVNLICGAKTQSNPENTVGVLTMAGKGVRVLVTPTSDLGKILACMHGLDIGGEMNLAAGIQVAQLALKHRQNKKQQQRIIVFAGSPVKHEKKMLEMIGRKLKKNSVALDIVNFGEEDEGKTEKLEALLAAVNNNDTSHIVHVPSGPNALSDVLISTPIFTGDGEGGSGFAAAAATAAAGGVSGFEFGVDPNLDPELALALRVSMEEERARQEAAAKKAAEDAAKQEKGGEQQASSQDATMTEGASAAASEAENKTSDLMDDENALLQQALAMSMDDPTISHDVKDTDMSEASASDPDLALALQLSIADSAKDQSSQSDMSKLLADQSFVSSILASLPGVDPNDPSVKDLLASMQNQSEPQQKNDDKPSNEEEKK

SEQ ID NO: 10273 - protein, 225 aa, Glycine max
MTRKIMGTLTSNINLSPQYNVPKDYPPHGSVVEEIQGLIRVHKHGYVERPQVVPCVTASSKMSPELNVTSRDMAIDSATNTWARFYVPISQHKKMPFLVYFHGGGFCVGSAAWSCYHDFLARLSAKVECVIMSVNYRLAPENPLPAPYDDGLKAIMWVKQQMLHQQHNKGGSEWWTSKCNFSSVFLGGDSAGANIAYNVATRLCACDGAALRPLNLKGLILIQPF

SEQ ID NO: 10274 - protein, 117 aa, Brassica napus
MEGVGGRLGRSSTRYGGPATVFTGPVRKWKKKWVHVSPSTKKLNHSSSSSAASDAANGSHLLFFKWAPLSQTGNGNEDGKSESLSPSEDTVAVAAEDPPRRRFKYVPIALLEEQKNE

SEQ ID NO: 10275 - protein, 346 aa, Rosa gigantea
QKWSNGEHSNELLHAQAHIWNHIFSFINSMSLKSAIQLGIPDIINKHGYPMTLFELTSALPIHPTKSHSVYRLMRILVHSGFFAKKKLSKTDEEGYTLTDASQLLLKDHPLSLTPYLTAMLDPVLTNPWNYLSTWFQNDDPTPFDTAHGMTFWDYGNHQPSIAHLFNDAMASDARLVTSVIIDDCKGVFEGLESLVDVGGGTGTMAKAIADAFPHIECTVLDLPHVVADLQGSKNLKYTRGDMFEAVPPADTVLLKWILHDWNDQECIKILKRSRVAITSKDKKGKVIIIDMMMENQKGDEESIETQLFFDMLMMALVGGKERNEKEWAKLFTDAGFSDYKITPIL

SEQ ID NO: 10276 - protein, 313 aa, Oryza sativa (japonica cultivar-group)
MERRPELRRTMTLSEQLSAPDQAIRDFLKIPHDGLGGGDGEGGRIPAAAGASGGGGGVGGMINWKPLRDRLRLRRAASAWMSASPKPAASNSGGGGGGGATLSSSNSGSNHSNKYNYSPGEAAAAFSRTFSRTRSLRPTPTFSRATSTRLGATAFSSGSRRAAVDGGGHANEDDDEDHTDDDDDDDEEEQGKDDAPAAQMSLMALLEQSDSQWDSEDEDDQGHGGGGGGGGNGGGGGGGGARKNGDGDDDEDDGEGREEEMVHVCCVCMVRHKGAAFIPCGHTFCRLCSRELWVSRGNCPLCNGFIQEILDIF

SEQ ID NO: 10277 - protein, 285 aa, Xylella fastidiosa 9a5c
MTTNDSWFTEHFQATGSAIGFRITGKLDEVQSPFQKIEIYNSTDWGKLMVIDGALMLTSRDNFLYHEMISHPALFTHTAPKCVVIIGGGDCGTLREVLKHPDIEQVTQCDIDEQVTRMAEKHFPELCTSNNDPRATLLFSDGVAYMTDCPTNSVDVIIVDSTDPVGPAKGLFNRTFYESCFRALKNDGLLVQQSESPLALLELIKEMRHEMSKAGFKAFKTLPFPQPCYPTGWWSVTLSSKQPNANFAFRQTDAQTKPFDTLYYNAHLHHGVLVPPPFIAHALGE

SEQ ID NO: 10278 - protein, 359 aa, Pirellula sp.
MNSSIVLLPGDGIGPEIVEQARLVLVKVAERFGHTFDFSSHQIGGIAIDETGDPLPQPTIDACRNAAAILLGAVGGPKWDDPSAKTRPEAGLLKIRKELGLFANLRPIKLFDELADASPLRADIVKGTDILFFRELTGGIYFGESGTSGSGEEETAFQSMTYSVGEVKRIVRMAAQAARGRSNRLTSVDKANVLEPSRLWRRVAAEVMANEFPDVQYDVVLVDSMAMHLINRPSEFDVVVTGNMFGDILTDEASMLPGSLGMLPSASLGDGGPGLYEPIHGSAPDIAGKSVANPLATILAAAMMLRHSLGLTDEAEAIEKAVAGVITDGLRTPDLARGDQSKSVSTEEMGAAVVAKLAS

SEQ ID NO: 10279 - protein, 346 aa, Rosa gigantea
QKWSNGEHSNELLHAQAHIWNHIFSFINSMSLKSAIQLGIPDIINKHGYPMTLSELTSALPIHPTKSHSVYRLMRILVHSGFFAKKKLSKTDEEGYTLTNASQLLLKDHPLSLTPFLTAMLDPVLTKPWNYLSTWFQNDDPTPFDTAHGMTFWDYGNHQPSIAHFFNDAMASDARLVTSVIIDDCKGVFEGLESLVDVGGGTGTVAKAIADAFPHIECTVLDLPHVVADLQGSKNLKYTGGDMFEAIPPANTVLLKWILHDWNDEECVKILKRSRKAITSKDKKGKVIILDMMMENQKRDEESIETQLFFDMLMMALVTGKERNEKEWAKLFTDAGFSDYKITPIL

SEQ ID NO: 10280 - protein, 346 aa, Rosa gigantea
QKWSNGEHSNELLHAQAHIWNHIFSFINSMSLKSAIQLGILDVINKHGYLMTLSELTSALPIHPTKSHSVYRLMRILVHSGFFAKKKLSKTDEEGYTLTNASQLLLKDHPLSLTPFLTAMLDPVLTKPWNYLSTWFQNDDPTPFDTAHGMTFWDYGNHQPSIAHFFNDAMASDARLVTSVIIDDCKGVFEGLESLVDVGGGTGTVAKAIADAFPHIECTVLDLPHVVADLQGSKNLKYTGGDMFEAIPPANTVLLKWILHDWNDEECVKILKQSREAITSKDKKGKVIIIDMMMENQKGDEESIETQLFFDMLMMALVTGKERNEKEWAKLFTDAGFSDYKITPIL

SEQ ID NO: 10281 - protein, 169 aa, Triticum aestivum
MAPTVMASSATAVAPFQGLKSTATLPVARRSTTSFAKVSNGGRIRCMQVWPADGNKKFETLSYLPPLTEEQLLKQVDYLLRNNWVPCLEFSKEGFVYRENSTSPCYYDGRYWTMWKLPMFGCTDASQVYKELQEAIASYPDAYVRILGFDNIKQTQCVSFIAYKPAGSE

SEQ ID NO: 10282 - protein, 274 aa, Triticum aestivum
  unsure (1)..(274): unsure at all Xaa locations
HASADAWGVVGVITAFNFPCAVLGWNACIALVCGNCVVWKGAPTTPLITIAMTKIVASVFEKNNLPSAIFTAFCGGAEIGQAIALDTRIPLVSFTGSTKVGQMVQQQVSARFGKCLLELSGNNAIIVMDDADIPLAVRSVLFAAVGTAGQRCTTCRRLLLHESIYQTFLDQLVEVYKQVRIGDPMEKGTLLGPLHTTASKESFLKGIQNIRSQGGKILLGGSAIESEGNFVQPTIVEISPAAPVVKEGMVLVPVLYAMEXQTLEEAIEITNFCS

SEQ ID NO: 10283 - protein, 346 aa, Rosa gigantea
QKWSNGEHSNELLHAQAHIWNHIFSFINSMSLKSAIQLGIPDIINKYGYPMTLSELTSALPIHPTKSHSVYRLMRILVHSGFFAKKKLSKTDEEGYTLTDASQLLLKDHPLSLTPFLTAMLDPVLTKPWNYLSTWFQNDDPTPFDTAHGMAFWDYGNHQPSIAHLFNDAMASDARLVTSVIIDDCKGVFEGLESLVDVGGGTGTMAKAIADAFPHIECTVLDLPHVVADLQGSKNLKYTGGDMFEAVPLADTVLLKWILHDWNDEECVKILKQSREAITSKDKKGKVIIIDMMMENQKGDEESIETQLFFDMLMMALVTGKERNEKEWAKLFTDAGFSDYKITPIL

SEQ ID NO: 10284 - protein, 506 aa, Brucella suis 1330
MVMSTIVKPQPLTGLEVREFSMLIDGKWVGSDSGKSIERVAPGHGVTVSRYPAGNKADVERAVSAARKAFDDGRWSSTTASQRSLVLLKAADLIEARAEELAYLDAIEAGKPISQVRGEISGSVDIWRYAAALARDLHGESYNTLGDGTLGVVLREAIGVVSIITPWNFPFLIVGQKLPFALAAGCTAVVKPSELTSGSTLLLGEILAEAGVPDGVVNIVTGTGADVGQHMSTHPHVDMVSFTGSTGVGKLTMANAAQTLKKVSLELGGKNPQILFPDADMDAFIDAAVFGAWFNAGECCNAGSRLIVHRSVVDAIVGRVADLSKKVIVGDPLDASTQVGAIITPQHLTKVGAYVDQARKAGAAIAHGGEVLDLGLGQYMGPTILAGVKADMAVAREEVFGPVLSVLSFDTVEEAISIANAVDYGLSAGVWSRDFDTCMTIGRKVRAGTVWMNTFMDGTPELPFGGYRQSGLGRELGRHAVEDYTETKTLNMHIGARTGWWMPQAK

SEQ ID NO: 10285 - protein, 428 aa, Zea mays
  unsure (1)..(428): unsure at all Xaa locations
MESTLKGIRGSDAPCVLDLDDAATVAGGVEDTYGEDRATEEQLVTPWTVSVASGYNLLRDPRYNKGLAFTERERETHYLRGLLPPAIVSQELQERKIMNNIRQYQLPLQRYMALMDLQEGNERLFYKLLIDNVEELLPIVYTPTVGEACQKYGSIFSRPQGLYISLKEKGKILEVLKNWPERSIQVIVVTDGERILGLGDLGCQGMGIPVGKLSLYTALGGVRPSACLPITLDVGTNNEELLNDEFYIGLRQRRATGQEYTDFLQEFMSAVKQNYGEKVLIQFEDFANHNAFDLLARYGTTHLVFNDDIQGTASVVLAGLIAAQTLLGGSLADHTYLFLGAGEAGTGIAELIALEISRQTKAPIEECRKKIWLVDSKGLIVSTRKESLXHFKKPWAHEHKPLINLLDAVNAIKPTVLIGTFRKVQTFT

SEQ ID NO: 10286 - protein, 146 aa, Brassica napus
RPTRPPTRPPTRPPTRPVLTCRIFCNVRWDERSSAVTPDEEVFYLVALLRSALSDGEETQKLEYLKDQNRRILEFCEQAKINVKQYLPHHATQEEWVDHYGDRWDQFRSMKTEFDPRHILATGQKIFQNPSLALFPPSPSSSSASW

SEQ ID NO: 10287 - protein, 448 aa, Burkholderia cepacia R1808
MSTPATDDWVARSLRAVWHPCTQMKHHERLPLVPVARGAGVWLYDRDGRRYFDAISSWWVNLFGHANPHINAALKDQLDTLEHAMLAGCTHEPAIELAERLHALTARTLGHAFFASDGASAVEIALKMSFHAWRNRGQGDKREFVCVANSYHGETIGALGVTDVALFKDAYDPLIRNAHVVASPDARGAQPGETAADVAQRALGDVRRLFAERAGQIAALLVEPLVQCAAGMAMHDPSYVRGLRALCDEFGVHLIADEIAVGCGRTGTFFACEQAGVWPDFLCLSKGISGGYLPLSLVLTRDDVYAAFYDDDTTRGFLHSHSYTGNPLACRAAVATLELFARDDVLAANARKSAALRAALAPLDAHPQVRHLRERGTLFAFDVALDGDAARGFSRRFFERALERELLLRPIGTTVYLMPPYVMTDDDIAWLAQRTRDTLDATLAEAAR

SEQ ID NO: 10288 - protein, 456 aa, Rhodococcus opacus
MVVDVTELRARARRHLGPHFTRKDTWESDFPVFVRGEGSYLIDTEGDRFLDGLAGLFCVNIGHGRDDIAKAASEQIGTLAYASNWGSAHIPAIEASALIADLAPGDLGTTFFVNSGSEAVETAVKFARQYHRSQGNPQRTKIISREMAYHGTTLGALSVTQLPKIKDPFGPLLPGVRSVPNTLGYLGDCGPANELDCIAAIEAVIEEEGAETIAAVFAEPVQNGRGALVPPDGYWAALRALCDKHGILLVSDEVICSFGRLGHWFGHGLTGVVPDMITFAKGSTSGYAPLGGLIVREQLVRELYDSPKGGVFTHGATWGGHPVSTAVAVANITAMRDENVLGNVSARGPKLRSALDSLMSSHRCVKDVRGTGFFYAIELMADSDSGREFTEQESLTVLRKVLPEAFARTKVILRGDDRGATMLMISPPLVADDEVLSELLHGIDSMLTDIEKAIQP

SEQ ID NO: 10289 - protein, 486 aa, Comamonas sp. JS765
MLAKQILNFINGEFVATGKWFDNRTPISNAVIGQVAEAGQAEVDAAVAAARAALKGPWGSMTLAQRVELLEALVAEITRRFDEFLEAECADTGKPRSLASHIDIPRGAANFKVFADVVKNVPTEFFEMATPDGRGAINYGYRKPVGVVGVICPWNLPLLLMTWKVGPALACGNTVVVKPSEETPRTAALLGEVMNHVGIPKGVYNVVHGFGPGSAGEFVTSHPGIDAITFTGETRTGEVIMKAAAKGARPVSLEMGGKNAAIVFADCDFDAAIEGTLRSAFVNCGQVCLGTERVYVERPIFDKFVAALKQQVEGWKIGVPEGADTQLGPLISKEHQAKVLSYYQLAVQEGATVVTGGGVPDMPGELKDGCWVQPTIWTGLPETARVIKEEIFGPCCHIAPFDTEDEVLAKANDNEYGLATAIWTRDLSRAHRVAQRMEVGISWVNSWFLRDLRTPFGGSKQSGIGREGGVHSLEFYTELKNVCIKL

SEQ ID NO: 10290 - protein, 462 aa, Methanosarcina barkeri str. fusaro
MSGGIEIKNRHSASELETDLKKNSRKDLKINSEKNLEKNSENNLEKDSGQGLEKHQEKSGDEHTSLYQESLAVHRRFGGVLEVASKVSLQTIHDLSVAYTPGVAEPCRKIIKDPELVYLYTMKRNTIAVVTDGSAVLGLGNIGPYAALPVMEGKAIIFKEFAGIDAFPICLDTQETEEVIKAVKHLAPAFGGINLEDISAPRCFEIEGRLREELDVPVMHDDQHGTAIVVFAGLLNALKIVNKKLNELHIVISGMGAAGVAIFRFLVRAGANPARILVCDSKGLVYEGRKNGMNPVKEEVARLTNPEKLKGGLENAFPDADLFIGVSVGGIVNEEMVRSMAKDAIVMAMANPLPEIMPDAAKRAGARVVATGRSDFPNQLNNCLSFPGVFKGALSTCARKITPEMEMAASHALAEVVTLNELSEDRIIPDPLDRRVVPAVAKAVASASLESCVARKSHEDMA

SEQ ID NO: 10291 - protein, 432 aa, Burkholderia cepacia R18194
MPVAVAGDGIEIIDSTGKRYIDACGGAAVSCLGHSNQRVIDAIKRQAQQLAYAHTSFFTTDVAEELADRLVAAAPAGLEHVYFVSGGSEAVEAALKLARQYFVEKGEPQRRHFIARRQSYHGNTLGALAIGGNAWRREPFLPLLIEAHHVSPCFAYRDQQAGETDEAYAQRLADELEQKIVELGADNVAAFVAETVVGATAGAVPPVRTYLKKIRAVCDKYGVLLILDEIMSGMGRTGYLYACDEDGVAPDLLTIAKGLGAGYQPIGATLVSDRIYRTIVDGSGFFQHGHTYLGHATACAAALEVQRVIAEEKLLDNVKARGEQLRASLRDHYGAHPHIGDVRGRGLFVGVELVRDRDSKATFDPALKLHAAVKREAMQRGLMVYPMGGTIDGVHGDHILVAPPFICTAQQIDTIVERLSGAIGAALASAGA

SEQ ID NO: 10292 - protein, 202 aa, Glycine max
  unsure (1)..(202): unsure at all Xaa locations
MLTAGDYSNHGRPLQPETSLAELNLPRVLCVLSSMLEKLVARNEKLIDILSQELDGLNSGSVRLGNSLNTFHGVRAPSISIPKYLERIYKYTNCSPSCFVVGYVYIDRLTHRHPDSLVTSLNVHRLLVTSVMVASKMLDDEHYNNXIYAPSRGGXSNAELTKLELELLFLLDFXVMVSSRVFESYCFHLEKEIGCQWHGHED

SEQ ID NO: 10293 - protein, 278 aa, Oryza sativa (japonica cultivar-group)
HASDGRTQLASWARIAMDRGDHHHLQQQHQFLMPPPAPVVPPQLCMPAMMADEQYMDLGGGGAAAAPGRGGAGERKRRFTEEQIRSLESMFHAHHAKLEPREKAELARELGLQPRQVAIWFQNKRARWRSKQLEHDYAALRSKYDALHSRVESLKQEKLALTVQLHELRERLREREERSGNGGAATTAASSSSCNGSGSEEVDDDDDKRNAAAGCLDLEPPESCVLGGATCATPADVSVESDQCDDQLDYDEGLFPESFCATPELWEPWPLVEWNAVA

SEQ ID NO: 10294 - protein, 446 aa, Oryza sativa (japonica cultivar-group)
MVGGGALRRVGKYEVGRTIGEGTFAKVKFAQNTESGESVAMKVVDRSSILKHKMADQIKREISIMKLVRHPNVVRLHEVLASRKKIFIILEFITGGELFDKIIRHGRLNEADARRYFQQLIDGVDFCHSKGVYHRDLKPENLLLDSQGNLKISDFGLSAWPAQGGALLRTTCGTPNYVAPEVLSHKGYDGALADTWSCGVILYVLLAGYLPFDEVDLTTLYGKIESAEYSFPAWFPNGAKSLIHRILDPNPDKRIRIEEIRNDEWFKKNYEPTREIESEEVNLDDVNAAFDDPEEDADHTLDDEAGPLTLNAFDLIILSQGLNLAALFDRRQDYDKLQNRFLSRKPAKVIMSSMEVVAQSMGYKTHIRNYKMRVEGLNANKTSHLAVMLEIFEVAPSIFMIELQRAAGDTSDYNKFINNYCSKLDDIIWNFPIEKSKSRISRLSKR

SEQ ID NO: 10295 - protein, 343 aa, Bradyrhizobium japonicum USDA 110
MRAVVIHAPKDLRIDSYPDPAPGPGEVRVKIANGGICGSDLHYYHHGGFGVVRIQQPMALGHEIAGVVAAVGDGVTSVKPGTRVAVNPSKPCGKCLHCQEGMRNQCLDMRFLGSAMRFPHVQGGFREFLTIDATQAVPIADELSLAEAAVAEPLAVCLHAGKQAGPLLGKRVLITGCGPIGALMILVSRFGGASEIVVTDVADAPLAVARKLGATHAINVATHATALDPWRAGKGVFDTLFEASGNQAALRTALDVLRPGATLVQLGLGGEMTLPINSIVAKELQLRGTFRFDPEFELAVRLMGEGLIDVKPLITATMPFENAVAAFELASDRSQSMKVQLSF

SEQ ID NO: 10296 - protein, 420 aa, Zea mays
  unsure (1)..(420): unsure at all Xaa locations
INTGRVTFLRSIGLREYSRYLTFNHPCSHEKPLLSHLRFFPWVVNEVYFKVWRQGRTGYPLVDAGMRELWATGWVHDRIXXVVVSSFFVKVLQLPWRWGMKYFWDTLLDADLESDALGWQYISGSLPDGRELDRIDNPQFEXRVDPRVRYKFDPHGEYVRRWLPELARLPTEWIHHPWDAPESVLQAAGVELGSNYPRPIVELDAANSRLQDALSEMWELEAASRAAMENGMEEGLGDSTDEPPIDFPQELRMEVDRQPVQPAIHAPGVTGRRREDQMVPSMTSSFIRAETELTADFGHTSEDSRPEVPSNIHHLQARPEREETVDGGTGNAVRVHGNHHQQNLQNNMHRVLGIAPSISEASSSWTGRDGGVVPVWSPPAASGHSDSYAADEADISSRGYLDRHPQSHTMMNWSQLSQSL

SEQ ID NO: 10297 - protein, 268 aa, Zea mays
  unsure (1)..(268): unsure at all Xaa locations
MEAEAAAKRAREGGEDATAPVAGAEAAVAGAGEQAGISAVIPGWFSEISPMWPGEAHSLKVEKVLFQGKSDYQNVMVFQSSTYGKVLVLDGVIQVTERDECAYQEMITHLPLCSIKDPKKVLVIGGGDGGVLREVSRHISVEQIDICEIDKMVVDVSKQFFPHLAVGFEDPRVSLHIGDGVAFLKNAPEGTYDAVIVDSSDPIGPAQELFEKPFFQSVARALRXPGGVVCTQAESIWLHMHIIEDIFVNCRQVFKGSVNYAWTTVPTY

SEQ ID NO: 10298 - protein, 364 aa, Arabidopsis thaliana
MGKGGMSQGEGSKVEEENMAAWLVGINTLKIQPFLLPSVGPHDVRVRMKAVGICGSDVHYLKTMICADFVVKEPMVIGHECAGIIEEVGEEVKHLVVGDRVALEPGISCWRCNLCREGRYNLCPEMKFFATPPVHGSLANQVVHPADLCFKLPENVSLEEGAMCEPLSVGVHACRRAEVGPETNVLVMGAGPIGLVTMLAARAFSVPRIVIVDVDENRLAVAKQLGADEIVQVTTNLEDVGSEVEQIQKAMGSNIDVTFDCAGFNKTMSTALAATRCGGKVCLVGMGHGIMTVPLTPAAAREVDVVGVFRYKNTWPLCLEFLTSGKIDVKPLITHRFGFSQKEVEDAFETSARGSNAIKVMFNL

SEQ ID NO: 10299 - protein, 468 aa, Sulfolobus tokodaii str. 7
MSEVIEIKSPSNLKVIGTVKRMSKDEVRGEIEEAYKGFETISRMPLYKRTAILRKVSEILEREQERLARLLAMEAGKPIKDSRVEVMRASRLFRQAAEEAAIVLEGKNYRVDAYEYPPGNENRIVISTREPIGVVTAILPFNFPINSFAHKVAPAIAVGNSVVVKPSISTPLSAIEMKKILVEAGLPDSAVRIVTGYSNEIGDELITHPLVGLITLTGSTQTGLAIASKAVSLGKRIIMELGGSDPIIVLEDANIDRASSIAVRARYEYAGQNCNAGKRIIVREEIYDKFVKAFKEKVKALKVGDPLDESTDIGPVINQESVEKLNKALEDAQSKGGNVEVLNKGPETGYFFPLSLVTNPSLDMLVLKTEIFGPIAPIVSVKSDEEAINIANSTEYGLQSAIFSNDVNRALKIAKELKFGAIIINDSTRLRWDSLPFGGFKKTGIGREGVRDTMLEMTENKLIAITLL

SEQ ID NO: 10300 - protein, 238 aa, Glycine max
  unsure (1)..(238): unsure at all Xaa locations
WTRAKSLTPLIAPPSSYCFHYYFLVSRGGSGALGAGLSKFSTAAAIEEPIKPPLKVEHTQLLIDGKFVDAATGKTFPTLDPRTGDVISHVAEGDHEDVDRAVAAARKAFDRGPWPKMTAYERQRILLRXADLFEKHNDDLAALETWDNGKPYEQSAQIEIPMLVRLFRYYAGWADKIHGLTVPADGPYHVQTLHEPIGVAGQIIPWNFPLVMFAWKVGPALACGNTIVLXTAEQTPLS

SEQ ID NO: 10301 - protein, 223 aa, Arabidopsis thaliana
MAFAGTTQKCMACDKTVYLVDKLTADNRVYHKACFRCHHCKGTLKLSNYNSFEGVLYCRPHFDQNFKRTGSLEKSFEGKLPKTDQNVKSFVSGDFKFGIIYLKFDSYICTGTPKIGKPDRPLEGERPAGTKVSNMFGGTREKCVGCDKTVYPIEKVSVNGTLYHKSCFKCTHGGCTISPSNYIAHEGKLYCKHHHIQLIKEKGNLSQLEGGGENAAKDKVVAA

SEQ ID NO: 10302 - protein, 168 aa, Zea mays
VDEVLTCSGASTLQTDLIQFKPQLPFWKIAAIYSFDMGVYTKIFLKFPERFWPVGEGKQFFMYASSRRGYYALWQSFEREYPGANVLLATVTDDESRRIERQSDDQTKAEVAEVLRDMFPAADVPGPDQIDVYVPRWWSDRFFKGSYSNWPVGVSRYEYDQLRVRMPV

SEQ ID NO: 10303 - protein, 483 aa, Rubrobacter xylanophilus DSM 9941
MRVLENFIGGEWVEARGERAREVVSPVTGERLAEAPEASAEEISRAARAAREAQPRWAALSAWERAEVCHAVADLLEERKEELARQLSLEQGKPYRSEAIPDIEETAENFRVAAEDVKRLETAVIPSQDANKRIFTFREPNGVYACITPWNFPTVIPSELIAPAIAAGNAVVAKPSEWTPISMANLVQTMADAGLPGGVVNLVYGAGEVGERLVTDPAVDCVAFVGSHQTAERIVRSAGLRRTLIEASGNGPVIVCADADLRRAAKGAVFGGFYCSGQVCCATERVLVDRSVHEDFLRAVVEEARSWKLGDPFEEDTLVGPMNNEPTAAKMDRHLEDAVGKGASVVLGGGREEGRPTSLYYRPTVLDNVGTDTLINRDETFGPIVPLIPVSGDEEALAVANDSHLGLQAAVYTSSLRRAFAYLRNLRVGNVVINDSTDYWEALEPFGGAAGTRTGWGRVGGRYSLLEMTDLKTVVLDFGSLEG

SEQ ID NO: 10304 - protein, 213 aa, Brassica napus
  unsure (1)..(213): unsure at all Xaa locations
MGKGGMSQGEGSKVEEENMAAWLVGLNTLKIQPFPLPTLGPHDVRVRMKAVGICGSDVHYLKTMRCADFIVKEPMVIGHECAGIIEEVGEGVKHLVVGDRVALEPGISCWRCNLCKEGRYNLCPEMKFFATPPVHGSLANQVVHPADLCFKLPENVSLEEGAMCEPLSVGVHACRRAEVGPETNVXLVMGAGPIGLVTMLAARCFWCAKKLGI

SEQ ID NO: 10305 - protein, 484 aa, Synechococcus sp. PCC 7002
MTFSFDSWFRGLSPRLSYPFRRQGRLLLLACMLPLLWQGVAIAQGSLGEIPPAVQVTLDTLWVVFAAMLVFFMNAGFAMLESGFCRAKNTVNILAKNLIVFALSSLAFWAIGFALMFGDGNAVLGWNGFFLTGADNSPLTGSAYSGIFSSLSWAGIPLYTKFFFQLAFAGTAATIVSGAVAERIKFASFVIFSLFLVGFSYGITGHWVWGGGWLATLGFYDFAGSTVVHSVGGWAALMGVILLGPRLEKFAGDRINAIPGHNMSTATLGGLILWLGWFGFNPGSTMAADPDAISHIIVTTNMAAAAGAIAATITSWIQFGKPDLSMIINGVLAGLVGITAACAYVNVPSAIVIGAIAGVIVVFSVLTFEGLRFDDPVGALSVHLVCGIWGTLAVGLFSVGGDIYPWYAADAGPSAGLLFGGGVAQLLSQFIGVVVVGMFTAGFSFAIWLVLELSMGLRVSKEEELEGLDIGEHGMEAYHRFFRE

SEQ ID NO: 10306 - protein, 329 aa, Triticum aestivum
  unsure (1)..(329): unsure at all Xaa locations
MDPMDIVGKSKEDVSLPKSTMTKIIKEMLPPDVRVARDTQDLLVECCVEFINLLSSESNDVCSRDDKKTIAPEHVIRALQDLGFKEYVEEVYAAYEQHKLETLDSPKATKFTGIEMTEEEAVAEQQRMFAEARARMNNGAAKPKEPALEPQNQPQQPPQPHLQLHPQAQQPPQPQPQLHHPQSQQPLHPQLQPYTQAPPQQPLHPQLQPYTQAPPQQPLQPPLQLYPQAQPEQPLQPQSSGSTTGTCVISTAAPSATGTXLLLQPPPQQSPQSQLQLHQQPQPMQVPLPPLPQPQPQPPELQQPQPLTQLQAEHGLNWTVSGSEHVASL

SEQ ID NO: 10307 - protein, 118 aa, Brassica napus
MTSASELFSTRRSRRGRSVPDLESDSFLYRYHSDHHHRRHGIHHLNHRHDSNGCDPPRRAPPRLRRFCLSERRPVHDVQGTSQYLNTNGADLETEGNSFGNLERLPGAVLLARERLFE

SEQ ID NO: 10308 - protein, 466 aa, Lactococcus lactis
MLYGKENRDEAEFLEPIFGSESEQVDLPKYKLAQQSIEPRVAYQLVQDEMLDEGNARLNLATFCQTYMEPEAVKLMSQTLEKNAIDKSEYPRTTEIENRCVNMIADLWNASEKGKIYGTSTIGSSEACMLGGMAMKFSWRKRAEKLGLDINAKKPNLVISSGYQVCWEKFCVYWDIEMREVPMDREHMSINLEKVMDYVDEYTIGVVGIMGITYTGRYDDIKALDNLIEEYNKQTDYKVYIHVDAASGGLYAPFVEPELEWDFRLKNVISINTSGHKYGLVYPGVGWVLWRDKKYLPEELIFKVSYLGGELPTMAINFSHSASQLIGQYYNFVRYGFDGYKAIHERTHKVAMYLAEEIEKTGMFEIMNDGAQLPIVCYKLKENSNRGWNLYDLADRLLMKGWQVPAYPLPKNLENEIIQRLVIRADFGMNMAFNYVQDMQEAIDALNKAHILFHQEPENKTYGFTH

SEQ ID NO: 10309 - protein, 330 aa, GIBBERELLA ZEAE PH-1
MSADDSYAPKSPDLSSFYSNGPTQEEVHHPQTDSHFRPGYEYKAESPTYTRSASFSSYVPPSPHFDNTTRVSADSTFHHLEFDYQQRSAQPRTSRPEYQPYPSRHSSIPEHYIYSTPDQPRLSGHGYECDPTSSHSYPRQPQVRQASLGGQVYPEQASNHNATTYDPSYTPLTAAGGLERTSTFGAAQFDTNMPPRKAAPPAAPAIDPSPVRTKFPTARIKRIMQADEEVGKVAQQTPIAVGKALELFMIQLVTKSADVAKDKGSKRVTASMLKQVVETDEQWDFLRDIVSRVENEKEGSRSKAKQESSSDEEIEEPKKRTRGGRKKKAA

SEQ ID NO: 10310 - protein, 497 aa, Azotobacter vinelandii
MTTPTRNDWEERARSLIIEGRAFVDGQYLPAADGATFDCLSPIDGRLLAQVASCAAADADLAVAAARRSFESGRWSRLAPAKRKAVMIRLAELLEIHREELALLETLDMGKPIKYSLSIDVPAAARALRWSGEAIDKLYGEVAATPDDELGLVTREPVGVVAAIVPWNFPLLMACWKLGPALASGNSVVLKPSEKSPLTAIRLAQLAFEAGIPPGVLNVLPGYGHSVGRALALHMDVDCLVFTGSTRVAKQLMVYAGESNMKRIWLEAGGKSPNIVFADAPDLAAAAEAAASAIAFNQGEVCTAGSRLLVERSIKEAFLPLVLEALKTWQPGHPLDPATNVGALVDRQQLDTVLGYIEAGLGEGASLLAGGRRILEETGGTYVEPTVFDGVSNAMKIAREEIFGPVLSVIVFDTPEEAVQIANDTSYGLAAAIWTRDLSKAHRTARALRAGSVWINQYDGGDMTAPFGGFKQSGNGRDKSLHAFDKYTELKATWIKL

SEQ ID NO: 10311 - protein, 420 aa, Rubrivivax gelatinosus PM1
MAKQKRNAFYAQSGGVTAVINASACGVIETARRHKDRIGKVYAGRDGIIGALTEDLIDTGKESATAIAALRSTPSGAFGSCRYKLKSLEANRREYERLIEVFRAHDIGYFFYNGGGDSADTCFKVSQLSEAMGYPVQAIHVPKTIDNDLAFTDCCPGFGSVAKYVAVSTLEASFDVRSMAKTSTKVFVVEVMGRHAGWIAAAAGLVEEQGIPVVILFPEIVFDEPEFLARVDQLVRQHGYCTVVVSEGCHHADGSFLAEQGARDAFGHAQLGGAAPVVANLIKQALGHKFHWAVADYLQRSARHIASKTDVTQAYALGRKAVELALQGHNAVMPTIERLSDAPYKYRIGMAPLAKVANVEKFMPRDFISKDGFGITEKCRRYLRPLIQGEDYPRFTNGLPRYVSLKNVAVPKKLAAFDLK

SEQ ID NO: 10312 - protein, 585 aa, Triticum aestivum
MCGILAVLGCADDTQGKRVRVLELSRRLKHRGPDWSGMHQVGDCYLSHQRLAIIDPASGDQPLYNEDKSIVVTVNGEIYNHEQLRAQLSSHTFRTGSDCEVIAHLYEEHGENFIDMLDGVFSFVLLDTRDNSFIAARDAIGVTPLYIGWGIDGSVWISSEVKGLNDDCEHFEIFPPGHLYSSKQGGFKRWYNPPWFSEVIPSVPYDPLALRKAFEKAVVKRLMTDVPFGVLLSGGLDSSLVAAVTVRHLAGTKAAKRWGTKLHSFCVGLEGSPDLKAAKEVANYLGTMHHEFTFTVQDGIDAIEDVIYHTETYDVTTIRASTPMFLMSRKIKSLGVKMVISGEGSDEIFGGYLYFHKAPNKEELHRETCQKIKALHQYDCLRANKATSAWGLEARVPFLDKEFINEAMSIDPEWKMIRPDLGRIEKWMLRKAFDDEEQPFLPKHILYRQKEQFSDGVGYSWIDGLKAHAESNVTDKMMSNAKFIYPHNTPTTKEAYCYRMIFERFFPQNSAILTVPGGPSVACSTAKAVEWDAQWSGNLDPSGRAALGVHLSAYEQEHLPATIMAGTSKKPRMIEVAAPGVAIES

SEQ ID NO: 10313 - protein, 336 aa, Acinetobacter sp. YAA
MNTLKFRVIDKIAETKESFSFVLKPLDGVLAEHSPGKYLPIKIRTEKGLLFRSYSLSSSASANEDFKITVKRERGGRGSNWLCDNVKVGDFIETLPPAGSFHPQNWDRDFVFFAGGSGITPVISIIKTALNRHKNRIKLFYANSSESSIIFHKELKDLCLQFPDRLDIQFWLDDEKGIPTSIAFEQYIDDALEVEYFLCGPAPFMGGVENFLIESKVPPGLITKESFAGSVSDDNGDTVESSAEKDVTVNFMLNGIKNSVMCSEDDFILNEIIKAGINVPSSCCAGNCGSCMCLLVSGDVILESNTVLDASDEEDGWILACRSKPRSKNIEISFDQ

SEQ ID NO: 10314 - protein, 486 aa, Azotobacter vinelandii
MKEIKHFINGEYVGSASGKLFDNVNPANGEVIARIHEAGEAEVDAAVKAARAALKGPWGKMSVAERTEILHRVAAGITARFDEFLEAECQDTGKPKSLASHIDIPRGAANFSVFADLVKNVPTEAFEMATPDGSGALNYGVRRPKGVIGVISPWNLPLLLMTWKVGPALACGNTVVVKPSEETPSTTALLGEVMNAAGVPAGVYNVVHGFGGNSAGAFLTAHPDVDGITFTGETGTGETIMRAAAKGVRQVSLELGGKNAGIVFADADLDKAIEGTLRSAFANCGQVCLGTERVYVQRPIFDAFVARLKAGAEALVIGEPNDPKANFGPLVSHKHREKVLSYYQKAKDEGATIVTGGGVPDMPQHLAGGAWVQPTIWTGLKDDSPVVTEEIFGPCCHIRPFDTEEEAIELANSLPYGLASAIWTENASRAHRVAGRIEAGIVWVNSWFLRDLRTAFGGAKQSGIGREGGVHSLEFYTELKNICVKL

SEQ ID NO: 10315 - protein, 434 aa, Desulfitobacterium hafniense DCB-2
MWWIKNAQVVDPAQGLSGVYDVLIGEGKVLQLKKGLTEAEVKGECGETGWQEIDAAGSYLFPGLIDVHTHLREPGREDKEDIASGSRAAVRGGFTTILAMPNTTPILDQKALVEYVVNQGKKVGLAKVHPIAAITKGQAGKELVEMVELAAAGAAGFSDDGRGVQQGEMMRLALEYAKLTSCPVISHCEDESLAHKGVMHRGIVSTRLGLKGIPSSSESVMVARDILLAEESGGKLHLAHISAKESVALIREGKKRGVDVTAEVNPHHLLFTDEAVARTPYGTSYKVNPPLRREEDRQALIEGLLDGTLDMLATDHAPHTWEEKTNPFDQAPFGISGLETALAAVWQELVTTGILPIELLIKAWSMNPAQRFQLPGGTLKVGGPADLILFDPEHTELIDTEYLASKGKNTPFLGQRLQGFPVKVWVDGRLVHEI

SEQ ID NO: 10316 - protein, 159 aa, Escherichia coli
  unsure (1)..(159): unsure at all Xaa locations
AXKLISNDLRDGDKLPHRHVFNGXGYDGDNISPHLAWDDVPAGTKSFVVTCYDPDAPTGSGWWHWVVVNLPADTRVLPQGFGSGLVAXPDGVLQTRTDFGKTGYDGAAPPKGETHRYIFTVHALDIERIDVDEGASGAXVGFNVHFHSLASASITAXFS

SEQ ID NO: 10317 - protein, 303 aa, Sulfolobus tokodaii str. 7
MIDPKIKKLLESTIQLPIGKASVEEIRSLFKQFSSLTPREEVGKIEDITIPGSETNIKARVYYPKTQGPYGVLVYYHGGGFVLGDIESYDPLCRAITNSCQCVTISVDYRLAPENKFPAAVVDSFDALKWVYNNSEKFNGKYGIAVGGDSAGGNLAAVTAILSKKENIKLKYQVLIYPAVSFDLITKSLYDNGEGFFLTREHIDWFGQQYLRSFADLLDFRFSPILADLNDLPPALIITAEHDPLRDQGEAYANKLLQSGVQVTSVRFNNVIHGFVSFFPFIEQGRDAIGLIGYVLRKVFYGK

SEQ ID NO: 10318 - protein, 321 aa, Oryza sativa (japonica cultivar-group)
MSDGGAGAKGAGFGMPRVGMGTAVQGPRPEPIRRAVLKAIEAGYRHFDTAAHYETEAPIGEAAAEAVRSGAIASRADLFITSKLWCSDAHRDRVLPALRQTLWNLQMEYVDLYLVHWPVSMKPGRYKAPFTADDFVPFDMRAVWEAMEECHRLGLAKAIGVCNFSCKKLDTLLSFATIPPAVNQVEVNPVWQQRKLRELCREKGVQICAYSPLGASGTHWGSDSVMASAVLRDIAQSKGKTVAQARHVCLRWVYEQGDCLIVKSFDEARMRENLDIVGWELTEEERQRIAGIPQRKINRALRFVSDHGPYKSLDDLWDGEI

SEQ ID NO: 10319 - protein, 341 aa, Mycobacterium vanbaalenii
MEAIVLNGTNDVGLTSVPDPAPQDGEVIIEVAATGLCGTDLHEYVAGPTFSQPPVVLGHEVSGRIVEVGAGVDQSRIGQGAAVIPMDFCGSCHYCHRSLYHLCQRPGWIGFTRNGGLANYVAVPSRLAVRVPDVVDLEEAALTEPTAVAFHAVRRAELLLGETVMVLGAGALGLTVIQCARAAGAARIFVTEPSGVRASLARDLGATLVLDPHDPGTTACILEETRGVGVDVVFHVAGSAEAFTQGLDCLRKQGRFMEMSSWAGAASLDVNRHLLKEIQLRMVFGYDMFDDFPAVLALIADGKLALAPQITARVPLDRAVKEGLGGLLEGREGLVKVLVKP

SEQ ID NO: 10320 - protein, 350 aa, Thermoanaerobacter tengcongensis MB4
MSIMDGLMTAVVKQYHKEGADIVKKEIPKIGPDEVLIKVKATSICGTDVHIYVWNEWAKSRIKPPKTMGHEFVGEVVEIGENVTSVKVGDLVSAETHIVCGKCRACRTGNAHICENTLILGVDTDGAFAEYIKVPESNVWINDKNIPLEILSIQEPLGNAVHTVFSGDVVGKSVAVIGCGPIGMMAIPLLKRTGAAAIFAIEPADYRRELAHKLGATRVINPLREDVVSIIKSETEGYGADVVLDFSGNPTAIRQGLEYIAKGGRMSILGLPDNEVPIDITNNVVFKGITIQGITGRRMYDTWYTVKGLLKSGLAEDLKPIITHTFPLTEYQKGMELMIKGQCGKVVLYP

SEQ ID NO: 10321 - protein, 166 aa, Escherichia coli
  unsure (1)..(166): unsure at all Xaa locations
AEFQVTSNEIKTGEQLTTSHVFSGFGCEGGNTSPSLTWSGVPEGTKSFAVTVYDPDAPTGSGWWHWTVVNIPATVTYLPVDAGRRDGTKLPTGAVQGRNDFGYAGFGGACPPKGDKPHHYQFKVWALKTEKIPVDSNSSGALVGYXLNANKIATAEITPVYEIKLE

SEQ ID NO: 10322 - protein, 416 aa, Arabidopsis thaliana
MAKMRPSVSLDTWREYFRRGDSDIFGIIDHAIMVAAADWPKEFKSRSDRIAELLFSCKVSRCIGCDHLELSIAGDEAAVEIVGVGGGGDRGDSGVATGEGEEASVSVDEVMRIRDILSNKDDEKDSVLLESLRKLESMSMSVDILKDTEIGKAVNGLRRHSSDKISKLAKTLFAEWKRLVDQWMNTPEEMAGTEGTPESLNLSVIDEEEAFPSPPHDLDIYAPEPNGFELSQTKCYPDKFPPSSLFHNVLGHLKILDCLDCDGNPRHSVESKHERKSQSSAGRRPKGTNDANVVGRYCNDQQTRREEADVRPMKHSATDVVEPKRQTKQSREQMVSAIQRKPTAVTEQKRKLAGPQQDKLKALDPDSKFEFAKRKLQESYHQHENAKRQRTIQVLETIPKQNKVQKPQLKRPATRR

SEQ ID NO: 10323 - protein, 479 aa, Escherichia coli CFT073
MSVPVQHPMYIDGQFVTWRGDAWIDVVNPATEAVISRIPDGQAEDARKAIDAAERAQPEWEALPAIERASWLRKISAGIRERATEISALIVEEGGKIQQLAEVEVAFTADYIDYMAEWARRYEGEIIQSDRPGENILLFKRALGVTTGILPWNFPFFLIARKMAPALLTGNTIVIKPSEFTPNNAIAFAKIVDEIGLPRGVFNLVLGRGETVGQELAGNPKVAMVSMTGSVSAGEKIMATAAKNITKVCLELGGKAPAIVMDDADLELAVKAIVDSRVINSGQVCNCAERVYVQKSIYDQFVNRLGEAMQAVQFGNPAERNDIAMGPLINAAALERVEQKVARAVEEGARVALGGKAVEGKGYYYPPTLLLDVRQEMSIMHEETFGPVLPVVAFDTLEEAISMANDSDYGLTSSIYTQNLNVAMKAIKGLKFGETYINRENFEAMQGFHAGWRKSGIGGADGKHGLHEYLQTQVVYLQS

SEQ ID NO: 10324 - protein, 482 aa, Burkholderia cepacia R18194
MRHYIDGAFVETARTFADTSPVDGREIARVCEADEASVDAAVRAARAAQAAGWRDTTPAQRADWLHRIADGIQARFDDFVAAEVADTGRPLAQARTLDIARGIANFRTFADLVRTAGDDCFESQTADGAQYLNYVTRKPLGVVGIISPWNLPLLLFTWKVAPALAMGNCVVAKPSEETPGSATLLAEVIDAVGLPRGVFNLVHGHGPAAAGEFLTRHPGIDAITFTGESRTGSAIMKAVADGVKDISFELGGKNAAVVFADADFDAAVDGIVKSSFTNAGQVCLCSERVYVERPIFERFVAALKTRTEALQVGAPDDPATTMGPLISRGHRDKVLSYFRLAVDEGATVVTGGGVPAFGDARDDGAFVQPTIWTGLPDTARCVTEEIFGPVCHVAPFDSEDEVIRRVNDSAYGLAASVWTTHLARGHRVAKRIETGIVWLNAWFVRDLRTPFGGTKLSGIGREGGRHSLDFYSETTNVCVRVA

SEQ ID NO: 10325 - protein, 253 aa, Triticum aestivum
  unsure (1)..(253): unsure at all Xaa locations
MKTLLIVTILAMATTIATANMQVDPGYQVQWPQQQPFPQPQQPFCQQPQQTIPQPHQTFHHQXPQQTYPHQPQQQFPQTQXQPQQPFPQPQQTFPQQPQLPFPQQPQQPFPQPQQPQQQFPQSQQPQQPFPQPQQQFLQPQQPQQSFPQQQQPLIQLSLQQQMNPCKNFLLQQCNPVSLVSSLISMILPRSDCQVMQQQCCQQTGTEIPQQLXRCAAPHKGRASIIMQQEQRQGVQIRGPLVXLVQGQGIIQP

SEQ ID NO: 10326 - protein, 475 aa, Triticum aestivum
  unsure (1)..(475): unsure at all Xaa locations
MGATGDSEVAAAEGAAAGCRARAALLGAYELGRTLGEGNFGKVKQARHRATGEHFAVKILDRGRVLSLRGADDQVRREIATLTMLAHPNVVRLHEVAASKTKIYMVLEFVNGGELFDRIAIKRKLSEREGRRLFQQLIDGVSYCHGKGVYHRDLKPENVLIDRKGNIKISDFGLSALPQHLGQVAXNDGLLHTTCGSPNYIAPEVLQNRGYDGSLSDIWSCGVILYIMLVGHLPFVDRNMVVLYQKIFKGDTQIPEWLSPGAQNLLRRILEPNPMKRINMAEIKLHEWFQKDYIPAAPYDDDDEDVRLGAILPIKQQISEAPGDKSTHQMNAFQLIGMASSLDLSGLFEEEGVSQRKIRFTSAHPPKDLFDKIEVSATQSGFHVQRAHSKLKITGNCNGPNNPTPFLVCAEVFVLGPSLHVVELRKSHGDTAVYKKLCDRISSDLGIDKTFGMGSLFDDNLPGFDSRATTPLVAL

SEQ ID NO: 10327 - protein, 147 aa, Aspergillus oryzae
MPLSPEQIQLIKATVPVLQQHGTTITTVFYNNMLTAHPELNAVFNNANKVNGHQPRALAGALFAYASHIDDLGALGPAVELICNKHASLYIQPEQYQIVGKFLLEAMGEVLGDALTPEILDAWATAYWQLADLMIGREAELYKQADG

SEQ ID NO: 10328 - protein, 297 aa, Actinobacillus actinomycetemcomitans
NRDHYRIFNDDMQGTGAIVMAAVFSGLKVTKQNFAEQRLVVYGAGTAGTGMADQISAAMQRDGLSREEAKKRVWLIDINGLVTDDMPNLPDYQQEYARPAAEAAAWAKTDGKIGLLEVVKQVKPTILIGTSTDHGAFTEDVVKALCAGVERPILLPLSNPTERIEVMPTDAVQWSDGKALISVGIPVPPVPYKGVNYQIGQANNAMLYPGLGLGVIVSGAKQVTDGMLLAAAEAVASQVNPQDEGASLLPPVDNLRASSATVAVAVAKQAVKDGVAANTSDNWVQAVQDAMWQPEYR

SEQ ID NO: 10329 - protein, 147 aa, Aspergillus niger
  unsure (1)..(147): unsure at all Xaa locations
MPLTPEQIKIIKATVPVLQEYGTKITTAXYMNMSTVHPELNAVFNTANQVKGHQARALAGALFAYASHIDDLGALGPAVELICNKHASLYIQADEYKIVGKYLLEAMKEVLGDACTDDILDAWGAAYWALADIMINREAALYKQSQG

SEQ ID NO: 10330 - protein, 412 aa, Aspergillus niger
  unsure (1)..(412): unsure at all Xaa locations
MPLTPEQIKIIKATVPVLQEYGTKITTAXYMNMSTVHPELNAVFNTANQVKGHQARALAGALFAYASHIDDLGALGPAVELICNKHASLYIQADEYKIVGKYLLEAMKEVLGDACTDDILDAWGAAYWALADIMINREAALYKQSQGWTNWRQFRISKKVPESDEITSFYLEPVDGKPLPAFRPGQYISVSVQVPEEDPQARQYSLSDTSRSDYYRISVKKETGLDPRAPGAKRHPGYVSNVLHDMIKEGDLIDVSHPYGDFFLSTAEATHPIVLLSAGVGMTPMMSILNTITKKSNRKIHFIHGSRTTEARAFKSHVQKLEKEIPNMQVTYFLSRPGDSDQLGVDYHHAGRIDLQKLDGPSHLYLDNPSTEYYICGPDTFMTQMEEALKAYGVGDDRIKMELFGTGGVPHN

SEQ ID NO: 10331 - protein, 105 aa, Arabidopsis thaliana
MDNTDRRRRRKQHKIALHDSEVSSIEWEFINMTEQEEDLIFRMYRLVGDRWDLIAGRVPGRQPEEIERYWIMRNSEGFADKRRQLHSSSHKHTKPHRPRFSIYPS

SEQ ID NO: 10332 - protein, 498 aa, Pirellula sp. 1
MSSISAFTTQELSGGPTGFRFAWLTMVLLVGMMGIGGSLASVASAQDEPAAATDTAEVADAGDADSEEPAADAGVGYAFDNGFLFLCAVLVLFMQAGFAMVEVGLNSSKNTVNILSKNLMDLSVGALLFFFVGFGLMYPGSYGDVTNGYFAFGGTGIYDSSPDQTFSPQVDWFFQAVFAATAATIVSGAVAGRMKFNAYLIYSAILTGLIYPISGFWKWGGGWLMQFGEQAADGSFAMGFQDFAGSAVVHAVGGFAGLAGAIFLGPRLGRYTAEGKSVPLPGHNVAFAALGVFILWVGWYGFNPGSQLAFQSSADIDATVFIAVNTTLAAAAGVIVATAVSWGLFGKPDLTMGLNGALGGLVGITACCDAMSNSMSIVVGAVAGALVVLSIVVLDKVKIDDPVGAFPVHGVCGVWGCMALGILPNAHLESESTNFMIQLIGTASICAWAFISMSVVFGVLKAVGMLRVSPQEEQAGLDISEHGMHAYPSDAVAGGSVI

SEQ ID NO: 10333 - protein, 268 aa, Glycine max
MSEALEEVVPSMKGGCEEEGLNLKATELRLGLPGCESPEREGVFKSVVVSGAKRGFSDAIDGNWNGGGSEKDAAALFSPTSRGAVSVSVSAAKSLTLTATDCTNQPTALGASVLKETVPHSPKPLHENKPQISAPAAKAQVVGWPPIRSFRKNSMASQPQKNDAAADAEAKSGCLYVKVSMEGAPYLRKVDLNSFTTYKDLSLALEKMFSCFTLKYVLTYEDKDGDWMLVGDVPWEMFTESCKRLRIMKSSEAIGLAPRAMEKCKSRY

SEQ ID NO: 10334 - protein, 505 aa, Zea mays
MASQAMVPLRQLFVDGEWRPPAQGRRLPVVNPTTEAHIGEIPAGTAEDVDAAVAAARAALKRNRGRDWARAPGAVRAKYLRAIAAKVIERKQELAKLEALDCGKPYDEAAWDMDDVAGCFEYFADQAEALDKRQNSPVSLPMETFKCHLRREPIGVVGLITPWNYPLLMATWKVAPALAAGCAAVLKPSELASVTCLELADICKEVGLPPGVLNIVTGLGPDAGAPLSAHPDVDKVAFTGSFETGKKIMAAAAPMVKPVTLELGGKSPIVVFDDVDIDKAVEWTLFGCFWTNGQICSATSRLLVHTKIAKKFNERMVAWAKNIKVSDPLEEGCRLGPVVSEGQYEKIKKFILNAKSEGATILTGGVRPAHLEKGFFIEPTIITDITTSMEIWREEVFGPVLCVKEFSTEDEAIELANDTQYGLAGAVISGDRERCQRLSEEIDAGIIWVNCSQPCFCQAPWGGNKRSGFGRELGEGGIDNYLSVKQVTEYISDEPWGWYRSPSKL

SEQ ID NO: 10335 - protein, 275 aa, Bacillus cereus ATCC 14579
MELWFTEKQTKHFGITARINRTLHTEQTEFQKLDMVETEEFGNMLILDGMVMTTEKDEFVYHEMVAHVPLFTHPNPENVLIVGGGDGGVIREVLKHPSVKKATLVEIDGKVIEYSKQYLPSIAGALDNERVEVKVGDGFLHIAESENEYDVIMVDSTEPVGPAVNLFTKGFYAGISKALKEDGIFVAQTDNPWFTPELITTVFKDVKEIFPITRLYTANIPTYPSGLWTFTIGSKKHDPLEVIEERFHEIETKYYTKELHNAAFALPKFVGDLIK

SEQ ID NO: 10336 - protein, 452 aa, Neurospora crassa
MSAANGRQPEVQPCRYKVGKTLGAGSYSVVKECVHIDTGRYYAAKVINKRLMAGREHMVRNEIAVLKKVSMGHQNILTLVDYFETMNNLYLVTDLALGGELFDRICRKGSYYESDAADLIRATLSAVAYLHDHGIVHRDLKPENLLFRTPEDNADLLIADFGLSRIMDEEQFHVLTTTCGTPGYMAPEIFKKTGHGKPVDIWALGVITYFLLCGYTPFDRDSDFEEMQAILNADYSFTPLEYWRGVSDNAKDFIRRCLTIDPAKRMTAHEALQHPFVAGWARGTDGAEADKGANLLPTVKKNFNARRTLHAAIDTVRAINKLREGQFMNGGRSREPAKKAAAALGPTLGKEASMVSTASSNVTKDSGYATQPEGEGGSRDGDDVLMKDASVPAPTSSSPAPCRVSYGRAVSRIRLSRLVKACGMGLVLSDDQFLGLSSLTNGGWFCSIVIIF

SEQ ID NO: 10337 - protein, 512 aa, Thermoplasma acidophilum
MKALVEDDLFSKIGLDDVNSGVYDGEWVKPSGKMLTVKSPIDGSEVAKISLATRADYDRLVSRAIEEFKKWRMIPAPKRGLIIREIGDELRKEKKNLGKIVTIEAGKTPSEGEGEIQEMIDISDLALGLSRQLYGLTIASERPYHRMYEQWVPLGPVAVITSFNFPASVWSWNAFIAAVDGDVVIWKPSSKAALTAVAVMKVIERVLKRNNAPNIFFLMVSSGSEGGDWITNDPRIPLVSFTGSVPVGKKISENVAKRLGKSILELGGNNGAIVSDKADIDLALRGVVFGALATAGQRCTTTRRVIVQEKIYDQFLEKLKNAYSTIKVGDPREKGVLVGPLIDEDAVKDYEHAIDLAIKQGGKLIFGGKRITIKGLEGGHYVMPTIIEAKPDMPIVKEETFASILYVMKYRTIEEAIEIHNSVPQGLSSSIFTTDLREEEAFLSPYGSDCGLANVNTSTAGAEIGGAFGGEKDTGGGRESGSDAWKYYMRRQTVTKNWGQTLPLAQDVVFEF

SEQ ID NO: 10338 - protein, 486 aa, Acinetobacter sp. YAA
MKDIKHYINGQYVGSASGKLFDNVNPANGKLISKVHEAGREEVDAAVNAAKAALRGPWGKMTLEERTSILHKVADGINARFDEFLKAECLDTGKPKSMASHIDIPRGAAHFKVFADMIKNVPTESFEMPTPDGTGALNYAVRRPKGVIGVISPWNLPLLLMTWKVGPALACANTVVVKPSEETPTTTALLGEVMKEAGIPTGVYNVVHGFGGDSAGAFLTEHPQVDGFTFTGETVPGEVIMKAAAKGIRDISLELGGKNAALVFADCDMDKAIEGTMRSAFANCGQVCLGTERVYVERSIFDEFVGRLKEAAEGLKIGPPDDAEANLGPLVSLKHREKVLSYYQKAVDDGATVVTGGGVPEMPEELAGGAWVQPTIWTGLPKDSAVITDEIFGPCVHVCPFDTEEEAIELANSLPYGLASAIWSENITRAHRVAGQIEAGIIWVNSWFLRDLRTPFGGSKQSGIGREGGVHSLEFYTEMKNICVKL

SEQ ID NO: 10339 - protein, 321 aa, Bacillus halodurans C-125
MDRQTIAQKFQERILGLLFYPYHSRILQTFTQKWRDRIDRDRSNALEPSTIPFVQREEKILPTSYGGTRVLIYRPDKTLNSSIPVYVNMHGGGFVMGNAEMDDVWCRVIADRANCVVVNIDYRLAPQHKFPTAVYECYEVVKWLVDHPEQFSITPQKVAIGGHSAGGNLATAVCLLNLERGNELPIIYQIIDYAPLDLHTDPALKPSFKDAIPVKMARLFNASYVETEEDARNPLASPLFAESLQGLPDALVITAERDSLAAEGEQYAERLKQAGVKVTYKDYKGMPHGFTHAGDLAVAEHAWHLMCDKLKEAFSESCGPM

SEQ ID NO: 10340 - protein, 485 aa, Burkholderia cepacia R1808
MAILIRGGTVVDAERTYRADVLCADPQDGGTILQIAEKIDAPAGADVVDAHDQYVMPGGIDPHTHMELPFMGTTASDDFYSGTAAGLAGGTTSIIDFVIPSPRQPLMDAFHQWRGWAEKAAADYGFHVAVTWWDESVHRDMGTLVNEHGVSSFKHFMAYKNAIMADDEILVNSFSRSLELGALPTVHAENGELVFRLQQALLARGMTGPEAHPLSRPPEVEGEAANRAIRIAQVLGVPVYIVHVSAKDAVDAIARARSEGLRVFGEVLPGHLVIDEAVYRDPDWTRAAAHVMSPPFRSAEHREALWRGLQAGQLHTTATDHCVFCASQKAMGRDDFTKIPNGCGGVEDRMSVLWHHGVNRGRITPNEFVRITSTNAAQIFNLHPRKGAVQVGADADLVVWDPAATKTISVKTHHQQVDFNVFEGMTVQGVATHTLTRGALAWADGDLRAQRGAGRYLKRPPAASYYEAARIANRLREPHPVERSR

SEQ ID NO: 10341 - protein, 112 aa, Arabidopsis thaliana
MSGVWVFNNGVIRLVENPNQSGGVSTQSHGRRNVLVYLPTGEAVSSYSSLEQILRSLGWERYFSGDSDLIQYHKRSSIDLISLPRDFSKFNSVYMYDIVVKNPNSFHVRDFN

SEQ ID NO: 10342 - protein, 335 aa, Xylella fastidiosa Temecula1
MTQTITVIRGDGIGPEIMDATLSVLNALQANLNYEFADAGLSALEKHGDLLPESTLNSISKNKIALKSPLTTPVGEGFSSINVALRRKFDLYANVRPAKSFPNTKSRFSDNVDLITVRENTEGAYLSEGQTISPDGEVATSSARVTRKGSERIVRYAFDLARTTGRKKVTAVHKANIIKSTSGLFLKTARDVASQYPEIDFQEMIVDNTCMQLVMRPEQFDIIVTTNLFGDILSDLCAGLVGGLGLAPGANIGNEQAIFEAVHGSAPDIAGQGKANPCALLLGAVQMLDHIGQPQNAERLRNAIVATLNAKDSLTPDLGGNGNTMGFAKAIASRL

SEQ ID NO: 10343 - protein, 259 aa, Zea mays
  unsure (1)..(259): unsure at all Xaa locations
MALSISAPTSSPFLPAPRQVGRWSSSPSSAKPAVFSLRRPVVVARAAAGNAPSSPAGAVVTEFDVVSSFSEIVPDTVVFDDFEKFAPTAATVSSSLLLGIAGLPDTKFKSAIDTALVDGECNTMEKPGDRMSCYLTKALGNVGAELAHQVPGRVSTEIDARLAYNTQGIVQRVHELLQIYNEHDIPSERLLFKIPATWQGIEASRLLESEGTQTHLTFVYSFAQAAAAAQAGASVVQIFGEVVFGDXAKNHSGEPEIDE

SEQ ID NO: 10344 - protein, 474 aa, Oryza sativa (japonica cultivar-group)
METTSQDSQVIMGRYKLGRLLGRGTFAKVYKAYKLATGEAVAIKVFDKEAVQRSGTVEQVKREVDVMRRVHHRHVIRLHEVMATRSRIYFVMEYASGGELFTRLSRSPRFPEPVARRYFQQLITAVEFCHSRGVYHRDLKPENLLLDARGDLKVTDFGLSALDGGLRGDGLLHTTCGTPAYVAPEVLLKRGYDGAKADIWSCGVILFVLLAGYLPFNETNLVILYRNITESNYRCPPWFSVEARKLLARLLDPNPKTRITISKIMDRPWFQQATCPLGDMSLVASAPSVLLARKEASQQHDDEEDDGFAREKKKRSNVIMSSPVIDVRPSSMNAFDIISRSRGLDLSKMFDAEERRSEARFSTRETTTAIVSKLEEIAEAGRFSFKLKEKGRVELEGSQDGRKGALAIEAEIFKVAPEVHVVEVRKTGGDSPDFRDFYKQELKPSLGDMVWAWQGGDSPPLVPAAGRRPITKRS

SEQ ID NO: 10345 - protein, 509 aa, Glycine max
  unsure (1)..(509): unsure at all Xaa locations
MGSDNHQNLEFLKEIGLGSSNIGSYINGQWKATGSSVTSVNPSNNQSIAQVTEATLQDFEEGLRAXSEAAKTWMTIPAPKRGEIVRQIGEALRAKLDPLGRLVSLEMGKILPEGIGEVQEIIDMCDYXLGLSRQLNGSIIPSERPDHMMFEVWNPLGIVGVISAFNFPCAVLGWNACIALVCGNCVVWKGAPTTPLITIAVTKLVAEVLERNKLPGAIFTSFCGGADIGQAIAKDTRIPLVSFTGSSKVGLMVQQTVNERFGKCLLXLSGNNAIIVMDDADIKLAVRSILFAAVGTTGQRCTTCRRLFLHESIYTDVLDQLVEVYKQVKIGNPLEKGTLVGPLHTRTSVENFQKGISVIKSQGGKILTGGSVLESGGNFVQPTIVEISPDAPVVKEELFGPVLYVMKFQTLEEAIALNNSVPQGLSSSIFTQRPGTIFKWIGPRGSDCGIVNANIPTNGAEIGGAFGGEKATGGGREAGSDSWKQYMRRSTCTINYGSELPLAQGINFG

SEQ ID NO: 10346 - protein, 511 aa, Streptomyces lavendulae
MKAMDRVDRAVERFPMYIDGQAVQAHDGAVLRTFEPATRRHLADLPSGGAEDVRRAVSAARRAFDEGPWPRMAPGERAGLLRKAAQRLREEAEPLAELEARDNGSTLRKALGADVPGAAAAFEWSAWWAEHVPERQPEAPGSGSYVVWRPVGVVAAIVPWNLPLLLAAWRIAPAIAAGNTCVIKPASFASLSTLRLVELLHECGLPPGVVNVVTGPGGVAGEQLVRSPGVDLVAFTGSDETGAAVREGAAAAGTSARLDLGGKSPNIVLADADLDRAVTGVTWGAFLHNGQVCMAGTRAVVHADVHDDFLRLLSERVGRLRVGDPLDPATDLGPLVSRNQARTARRFTELGLSQGAELVCGGRAPAADELPPGLDAGAYFLPTVLASVGADDAVAQEEIFGPVLAVVRAGSDDDAVRIANGSRYRLSAGVWSADPARARAVAERLRADRVWINDYRLVDLELPGTAGPRSAVWDRLTNELDAYRHKHVVHGGGAGAGGVPAPPTPYALLGG

SEQ ID NO: 10347 - protein, 507 aa, Candida tropicalis
MIEQVLHYWYYVLPAFIIFHWIVSAIHTNSLRRKLGAKPFTHTQLDGFYGFKFGRDFLKAKRIGRQVDLINSRFPDDIDTFSSYTFGNHVIFTRDPENIKALLATQFNDFSLGGRIKFFKPLLGYGIFTLDGEGWKHSRAMLRPQFAREQLPMSPSLEPHFNVKAYPQEQRWVFDIQELFFRFTVDSATEFLFGESVNSLKSASIGCDEETELEERKKFAEAFNKAQEYISTRVALQQLYWFVNNSEFKECNEIVHKFTNYYVQKALDATPEELEKQSGYVFLYELVKQTRDPNVLRDHHSISLLAGRDTTAGLLSFAVFELARNPHIWAKLREDVESQFGLGEESRIEEITFESLKRCEYLKAVMNETLRLHPSVPRNARFALKDTTLPRGGGPDGKDPILVRKMSCSIFISGTQIDPKHYGKDAKLFRPERWFESSTRNLGWAYLPFNGGPRICLGQQFALTEAGYILVRLAQSFDTLELKPDTEYLTKISHLTMCLFGAFVKMD

SEQ ID NO: 10348 - protein, 388 aa, Bacillus sp. KSM-K16
MEMFSKSVKKGVAVFALAAVTISLISIFFVQSWRYTEAGKVPPKTAVLLHAVNNRLLPEGKLEAPAFLAVKAPPTIERHQVTVPTRDGEDIPATVYQPIAAGPHPIIVYYHGGAFLEGYGDLDTHDNIIRSLAARTGAIVVAPAYRLAPTYAFPTAVNDSYDALTWAYEHADVLDGDRDRLAVAGDSAGGNLAAAVAIMSGEEGGPALSGQALLYPLATFEDTKFPSRDMYASGFYFLSRAVMEMAQQSYAPNEADWTSPYTSPLNAEDVSMMPSTLVITGEFDPLRDEGEALAKRLYNEGIYVQAQRFNGVMHGFISFYEVMERGDKGLQSAAAFLKEALNKELPEPQNSQPFAVEVIDGRDSWRDEAEAYVIGVYLLFKHMIQVFE

SEQ ID NO: 10349 - protein, 335 aa, Nicotiana tabacum
MVHEKQVIEEVSGWLRVFEDGSVDRTWTGPPEVKFMAEPVPPHDYFIDGVAVKDVVADEKSGSRLRIYLPERNDNSASKLPVILHFQGGGFCVSHADWFMYYTVYTRLARAAKAIIVSVFLPLAPEHRLPAACDAGFAALLWLRDLSRQQGHEPWLNDYADFNRVFLIGDSSGGNIVHQVAVKAGEENLSPMRLAGAIPIHPGFVRSYRSKSELEQEQTPFLTLDMVDKFLGLALPVGSNKDHQITCPMGEAAPAVEELKLPPYLYCVAEKDLIKDTEMEFYEAMKKGEKDVELFINNGVGHSFYLNKIAVRMDPVTGSETEKLYEAVAEFINKH

SEQ ID NO: 10350 - protein, 185 aa, Xanthomonas axonopodis pv. citri str. 306
MLLNRLLALVLTGFFATPAFAAGTPVLDVEYRPLAGKTPINLNRTYGGKVVMVVNTASKCGFTPQYEGLEALNHRFGSRGFTVLGFPSNDFQGQEPGSEKQIQEFCTLTYGVKFPMFEKVHVLGAEATPLYQRLTQATGVAPGWNFHKYLIGRDGRVVAQFPSKIKPDDPSVLAAIERELKAPAR

SEQ ID NO: 10351 - protein, 506 aa, Candida tropicalis
MSLTETTATFIYNYWYIIFHLYFYTTSKIIKYHHTTYLMIKFKASPPLNYINKGFFGIQATFTELKHLICHTSIDYAIDQFNNVPFPHVHTFVTKVLGNELIMTKDPENIKVLLRFPVFDKFDYGTRSSAVQPSLGMGIFTLEGENWKATRSVLRNMFDRKSIDKVHDFEPHFKTLQKRIDGKVGYFDIQQEFLKLGLELSIEFIFGQVVSEDVPHYDDFTQAWDRCQDYMMLRLLLGDFYWMANDWRYKQSNQIVQAFCDYLVQKSLENTCNDKFVFVHQLAKHTTNKTFIRDQALSLIMASRDTTAELMAFTILELSRKSHHLGKLREEIDANFGLESPDLLTFDSLRKFKYVQAILNETLRMYPGVPRNMKTAKCTTTLPKGGGPDGQDPILVKKGQSVGFISIATHLDPVLNFGSDAHVFRPDRWFDSSMKNLGCKYLPFNAGPRTCLGQQYTLIEASYLLVRLAQTYETVESHPDSVYPPRKKALINMCAADGVDVKFHRL

SEQ ID NO: 10352 - protein, 505 aa, Candida tropicalis
MYQLFCFLAGIIVVYKAAQYYKRRTLVTKFHCKPARISPNKSWLEYLGIASVVHADEMIRKGGLYSEIDGRFKSLDVSTFKSITLGKTTYVTKDIENIRHILSATEMNSWNLGARPIALRPFIGDGIFASEGQSWKHSRIMLRPVFAKEHVKQITSMEPYVQLLIKIIKNHEGEPLEFQTLAHLFTIDYSTDFLLGESCDSLKDFLGEESNSTLDTSLRLAFASQFNKTQQQMTIRFMLGKLAFLMYPKSFQYSIQMQKDFVDVYIDRVVGMSEEELNNHPKSYVLLYQLARQTKNRDILQDELMSILLAGRDTTASLLTFLFFELSHHPEVFNKLKEEIERHFPDVESVTFGTIQRCDYLQWCINETMRLHPSVPFNFRTAANDTVIPRGGGKSCTDPILVHKGEQVLFSFYSVNREEKYFGTNTDKFAPERWSESLRRTEFIPFSAGPRACLGQQLPRVEASYVTIRLLQTFHGLHNASKQYPPNRVVAATMRLTDGCNVCFI

SEQ ID NO: 10353 - protein, 100 aa, Glycine max
MSGVWVFKNGVVRLVENPGSERKVLVHTASNEIITSYAVLEHKLSSLGWERYYDDPDLLQFHKRSTVHLISLPRDFNKFRSMHMYDIVVKNKNYFEVRDM

SEQ ID NO: 10354 - protein, 109 aa, Glycine max
  unsure (1)..(109): unsure at all Xaa locations
TLDSCGSTPXXTGDGEGGSGFAAGSVSGFEFGVDPNLDPELALALRVSMEEERARQEAAAXXAAEDAAKQEKDGEQQASPQDTTMTKGVSAAASEAETKNDSCTDYDEL

SEQ ID NO: 10355 - protein, 334 aa, Bordetella parapertussis 12822
MTTAALPYPLDPQIQRFVERMQADSAAHPRRDLVPVEQARAISEAVRRPWAEGGPQMARTREIHAPTPHGPVRLRVYTPRAARPGPAMLYVHGGGWVLFSLDTHDRLMREYAERAGLTVIGVDYTRAPEARYPRAIEEIVGVIDWLDANGAELEVDRARLCIGGDSAGANLSVAACLTLRERGAAPLAGMVLNYGVYDANLFRDSTVKYGGGEYLLSTQQMVWFYWNYLRAGDDPRDPRISPVHADLRGLPPAFMAITELDLLHDANQDMAARLREAGVDVQAKVYPGTVHSFLEAVSLAQVSVAAFDDTAAWLRAVLRPAAAAAAIHTGEHQP

SEQ ID NO: 10356 - protein, 141 aa, Brassica napus
MSGENDNGGAKRRGSVKWFAAEKGFGFITPEDGGEDLFVHQSSIRSEGYRSLAEGESVEFLVEVDNNSGRTKAIEVTGPDGAPVQGTSRGSSGGRGGFGGDGYGGRGGGRGSYGGRGGGGGCRGGGRDRYTCGGPRGIAGH

SEQ ID NO: 10357 - protein, 347 aa, Halobacterium sp. NRC-1
MRAAVYQGPGEIAVEEVPKPDIESPEDAVIRVTHTAVCGSDLWFYRGDSDREAGSRVGHEPMGIVEEVGDDVTSVAPGDRVIAPFAISCGECEFCRQGLYTSCVEDESWGSEANGGGQGEYVKCPFADGTLVRVPDRYADDEDVLESLLPLTDVMGTGHHAAVSAGVGEGDTAVVVGDGAVGLCGVLAAQRLGAERIIAMGHHEDRLELAAEFGATDTISARGDDAIERARDLTHGGANHVMECVGAASAMDSAIAIARPGGTVGYVGVPYGVEDGGLDVFTMFSDNITIRGGVAPVRAYAEELMADVLQGTLDPSPIFTKTVDLDGVPEGYAAMDDREAIKVLVKA

SEQ ID NO: 10358 - protein, 201 aa, Chlamydomonas reinhardtii
MLLTRKNVAVRPARAARRDVRAMSLLGNLFGGGSKPTSSTSNFHQLSALDIDKKNVDFKSLNNRVVLVVNVASKCGLTAANYKEFATLLGKYPATDLTIVAFPCNQFGGQEPGTNAEIKAFASARGFSGAGALLMDKVDVNGANASPVYNFLKVAAGDTSDIGWNFGKFLVRPDGTVFGRYAPTTGPLSLEKYIVELINSR

SEQ ID NO: 10359 - protein, 343 aa, Vibrio parahaemolyticus RIMD 2210633
MKIKALSKLKPEQGIWMTEVDKPEVGHNDILIKIKKTAICGTDVHIYNWDEWSQKTIPVPMVVGHEYVGEVVAIGQEVRGFEIGDRVSGEGHITCGHCRNCRGGRTHLCRNTIGVGVNREGAFAEYLVIPAFNAFKIPDEISDDLASIFDPFGNAVHTALSFDLVGEDVLITGAGPIGIMAAAVAKHVGARHVVITDVNEYRLELARKMGVTRAVNVAEEKLEDVMAELGMTEGFDVGLEMSGNPAAFNSMLTTMNHGGRIALLGIPPSDMGIDWNQVIFKGLVIKGIYGREMFETWYKMASLIQSGLDLSPIITHHYKIDDFQEGFDVMRSGMSGKVILDWE

SEQ ID NO: 10360 - protein, 124 aa, Hordeum vulgare subsp. vulgare
MASRRAHAAATMALLVVALVLSGAPAPAEGAVASCGQVVSYLAPCIGYAMGRERAPGGGCCTGVRSLNAAAATPADRQATCTCLKQQTSGMGGIKPDLVAGIPSKCGVNIPYAISPRTDCSKVR

SEQ ID NO: 10361 - protein, 122 aa, Glycine max
WINCVATFCFIVNHVDSRHSVVVPDSNIFYIIALLRFIPPPPKGPPTELLVEQNHEIIQLCYNRGFDFKLYLPHYQSQENWMRHYGDKWTRFVERKANFDPLAILAPGQKIFSRIPQTLSIT

SEQ ID NO: 10362 - protein, 343 aa, Agrobacterium tumefaciens str. C58
MKAIVAHGAKDVRIEDRPEEKPGPGEVRLRLARGGICGSDLHYYNHGGFGAVRLREPMVLGHEVSAVIEELGEGVEGLKIGGLVAVSPSRPCRTCRFCQEGLHNQCLNMRFYGSAMPFPHIQGAFREILVADALQCVPADGLSAGEAAMAEPLAVTLHATRRAGDLLGKRVLVTGCGPIGILSILAARRAGAAEIVATDLSDFTLGKAREAGADRVINSKDEPDALAAYGANKGTFDILYECSGAAVALAGGITALRPRGIIVQLGLGGDMSLPMMAITAKELDLRGSFRFHEEFATGVELMRKGLIDVKPFITQTVDLADAISAFEFASDRSRAMKVQIAFS

SEQ ID NO: 10363 - protein, 439 aa, Arabidopsis thaliana
MNRPKVQRRVGKYEVGKTLGQGTFAKVRCAVNTETGERVALKILDKEKVLKHKMAEQIRREICTMKLINHPNVVRLYEVLASKTKIYIVLEFGTGGELFDKIVHDGRLKEENARKYFQQLINAVDYCHSRGVYHRDLKPENLLLDAQGNLKVSDFGLSALSRQVRGDGLLHTACGTPNYAAPEVLNDQGYDGATADLWSCGVILFVLLAGYLPFEDSNLMTLYKKIIAGEYHCPPWLSPGAKNLIVRILDPNPMTRITIPEVLGDAWFKKNYKPAVFEEKEEANLDDVDAVFKDSEEHHVTEKKEEQPTSMNAFELISMSRALDLGNLFEEEEGFKRETRFAAKGAANDLVQKIEEASKPLGFDIQKKNYKMRLENVTAGRKGNLRVATEIFQVSPSLHMIEVRKTKGDTLEFHKFYKKLSTSLNDVVWKSGESSGLSK

SEQ ID NO: 10364 - protein, 115 aa, Zea mays
QPNGPATPVDMVVDYYKFDYEFAEPPRVTSLQNTRGYEAVVYYLAGQYLKTDDRSGKIVDPRLQLNKVVREIKYSPGGVTVKTEDNSVYSADYVMVSASLGVLQSDLIQFKPKLP

SEQ ID NO: 10365 - protein, 174 aa, Glycine max
  unsure (1)..(174): unsure at all Xaa locations
MVPSVISSPAETTVNRAGAGMADPLTALKSMDGCPTXNTLIDFTSFASNGGRAQNMQAWPPVDNKKYETLYYLPDLDPAQPAKDGXYLLRTGWTPRLELELEHGFWCREHNRPPEHYDGRYWTMWKLPIMTYTDAYHASKDLXEANTAYPNGFIRIIRFNTVRQVHHMNLIDYK

SEQ ID NO: 10366 - protein, 157 aa, Leuconostoc mesenteroides subsp. mesenteroides ATCC 8293
MSIYDYFATLENGETYSLNKLANHPVVIVNTATKCGYAPQFGELEKLYKKYKDKGLVILGFPSNQFKQELETASQAAQACQLTYGVTFPMHQLVAVNGKNTDPLFKYLKENSKGMLGSSTIKWNFTKFLVDKEGNVVKRYAPKTEPKDLEEDIEDVL

SEQ ID NO: 10367 - protein, 436 aa, Psychrobacter sp. 273-4
MTTVSTNDFDQQHLWHPYASLPPRYPNIMIDHADGIHIVTQDGTRLIDGMSSWWASVHGYNHPKLNAAIIEQLGKMAHVMFGGLTHQPAIDLGKKLLSIVPAGIDAIFYADSGSIAVEVALKMALQYQIAAKRPNKQQFASTHSGYYGDTWHAMSVCDPINGMHSLYGKQLPMQHFVAAPPMGFERDITQNERDELTAFFAKNSHQLAGFIIEPIIQGAGGMRFYSPEYLQLLRQLCCEHDVLLIADEIATGFGRSGKLFACEHANISPDIMTIGKALTGGYMTFAATLCTRSIADTISQSDYSALMHGPTFMGNPLACAVACASIDLILSYDIEARTENMHALMVEQLASAAKLEGVKEVRCLGAVAVIELDDAVDMPTFQSLLIEHGIWVRPFGKLVYIMPPYIITDSELITLCQALLKVVSIYLTQTSLSAKG

SEQ ID NO: 10368 - protein, 277 aa, Arabidopsis thaliana
MAETLKEDSIMIREVWDYNLVEEFALIREIVDKFSYIAMDTEFPGVVLKPVATFKYNNDLNYRTLKENVDLLKLIQVGLTFSDENGNLPTCGTDKFCIWQFNFREFNIGEDIYASESIELLRQCGIDFKKNIEKGIDVVRFGELMMSSGIVLNDAISWVTFHGGYDFGYLVKLLTCKELPLKQADFFKLLYVYFPTVYDIKHLMTFCNGLFGGLNRLAELMGVERVGICHQAGSDSLLTLGSFRKLKERYFPGSTEKYTGVLYGLGVEDGTTTTVAN

SEQ ID NO: 10369 - protein, 329 aa, Triticum aestivum
  unsure (1)..(329): unsure at all Xaa locations
MASPLSAPSLIMEEEGRFEAEVAEVGAWWNTERFRLTKRPYTVRDVVLLRGTLRQSYASGEMAKKLWRTLKAHQAAGTASRTFGALDPVQVTMMAKHLDTIYVSGWQCSSTHTSTNEPGPDLADYPYDTVPNKVEHLFFAQQYHDRKQQEARMSLPRAERTHAPFVDFLKPIIADGDTGFGGATATVKLCKLFVERGAAGVHLEDQSSVTKKCGHMAGKVLVAVSEHVNRLVAARLQFDIMGVENVLVAXTDAVAATLIQNNIDAREHQFILGATNPRLKNRSLTGMLSDAMSARKNGRSCRHRGRVDATAHSNLLEVVKTPSEPHATI

SEQ ID NO: 10370 - protein, 351 aa, Streptomyces lavendulae
MTVEQTPENPGTAARAAAEETVNDILQGAWKARAIHVAVELGVPELLQEGPRTATALAEATGAHEQTLRRLLRLLATVGVFDDLGHDDLFAQNALSAVLLPDPASPVATDARFQAAPWHWRAWEQLTHSVRTGEASFPSTWPTAPRSGSSPTRDPKARELFNRAMGSVSLTEAGQVAAAYDFSGAATAVDIGGGRGSLMAAVLDAFPGLRGTLLERPPVAEEARELLTGRGLADRCEILPGDFFETIPDGADVYLIKHVLHDWDDDDVVRILRRIATAMKPDSRLLVIDNLIDERPAASTLFVDLLLLVLVGGAERSESEFAALLEKSGLRVERSLPCGAGPVRIVEIRRA

SEQ ID NO: 10371 - protein, 128 aa, Brassica napus
  unsure (1)..(128): unsure at all Xaa locations
MXSSMLSSAXXVTSPDQATMVXPFTXLKSSAAFPXTRKANNDITSIASNGGKXSCMKVRTPVGKXKFETLXLTFPDLTEVELXXEXDYPSPHXXIPCVXFXXEHXXXHRDXREAPPYAHVEFPTPSRF

SEQ ID NO: 10372 - protein, 421 aa, Triticum aestivum
  unsure (1)..(421): unsure at all Xaa locations
MPALAVDAAAPVAHAFAASCDASPRFAAPLLGPAAAVVAATAAEKPEMAAWSADLSSALYNVDGWGAPYFFVNDDGDVAVRPHGAATLPGQEIDLAKVVARAAGARAGGGLGLALPLLVRFPDVLRHRVETLNAAFAYAVRSTGYAGRYQGVYPVKCNQDRYVVEDIVEFGAPFGFGLEAGSKPELLLTMSCLVARGSPDALLVCNGYKDLEYVSLALIARTMGLNTVIVLEQEEELDIVVEASRRLNIRPVVGMRAKLRTKHAGHFGATSGEKGKFGLNAAQILSVVAKLKALAMLDCLQLLHFHIGSQIPTTALLADGVGEAAQIYCELARLGAAMRVIDVGGGLGIDYDGTHSAQTDMSVAYSLEEYAAAVVAAVGRVCDRKGVQHPVICSESXGRPLVSHHSVLIFRAFPEGGRVPK

SEQ ID NO: 10373 - protein, 136 aa, Zea mays
ETGSSGSIVAAVLFYLLSFVGVLPGERLVLLGPAAGERLVLPGPLKRSHGIGGLCRLLPALQMSVQDANMSSDTDMSKVFEDRTFVSSILNSLPGVDPNDPSIKDLLASLHSQGEEEKKEDKSDKTEDEKNCFKLE

SEQ ID NO: 10374 - protein, 494 aa, Oryza sativa (japonica cultivar-group)
MTRASTIDFGRKTHNDVLWSGPLRPANFIRNKFPTYKKSLNGIVIKLTDDQEMPSLKEAVAKETADLLHRSQRLSVRELAMKFEKGLNTATLLSNEVKWRQAALLERDILLKNLKSVLESLRSRVAGKHKDEIEESLSMVDVLTVQLSKREDELLQQKAEVAKIATSLKLASEDARRIVEEERSNARIEIDNARAAVQKVEQLVKEQEIDPQINGKQDEDELKEKAQEARRVKMLHCPSKAMDIENEIEVLREQLAEKSSNCVHLLKELHLHQSYEENDVSSYELEGLESLGSMLRIVSQSDGYVDLSRSTIQWFRVQPEGNKKEIISGAIKQAYAPEPHDVGRYLQAEINHCGEISVVKTAGPVDPAAGLVDYVETLLRNPETEYNVVVLQVNGIKQPTDSIHVLSIGKLRMRLAKGKTVIAKEFYSSTMQLCGMRGGGDAAPQAMYWQPRRDLSLVLGFETARERNSAIMLARRFAIDCNIILAGPGDKTHW

SEQ ID NO: 10375 - protein, 505 aa, Helianthus tuberosus
MEIPYLLTTTLLLLFTTLYLLLRRRSSTLPPTIFPSLPIIGHLYLLKPPLYRTLAKLSAKHGQILRLQLGFRRVLIVSSPSAAEECFTKNDIVFANRPKMLFGKIIGVNYTSLAWSPYGDNWRNLRRIASIEILSIHRLNEFHDIRVEETRLLIQKLLSACNSGSSQVTMKFSFYELTLNVMMRMISGKRYFGGDNPELEEEGKRFRDMLDETFVLAGASNVGDYLPVLSWLGVKGLEKKLIKLQEKRDVFFQGLIDQLRKSKGTEDVNKKKTMIELLLSLQETEPEYYTDAMIRSFVLVLLAAGSDTSAGTMEWVMSLLLNHPQVLKKAQNEIDSVIGKNCLVDESDIPNLPYLRCIINETLRLYPAGPLLVPHEASSDCVVGGYNVPRGTILIVNQWAIHHDPKVWDEPETFKPERFEGLEGTRDGFKLLPFGSGRRSCPGEGLAVRMLGMTLGSIIQCFDWERTSEELVDMTEGPGLTMPKAIPLVAKCKPRVEMTNLLSEL

SEQ ID NO: 10376 - protein, 348 aa, Burkholderia cepacia R18194
MKIVKPLLIAAAVAAALSVTTTAFAAGAGAGVEAVRPDATTSAFLAALNGQKGPGLETLSPAKARQVLVDAQNGTKVDLSGIDVSNRTIEQDGLSVPVTIVRPQGATGTLPVFMFIHGGGWVLGDFPTHERLVRDLVVQSGAVAVFVNYTPSPEAHYPVAINQAYAATKWVAAHGAEIGVDGSRLAVVGNSVGGNMAAVVALMAKDKGGPAIRFQGLMWPVTDHNFNTGSYNAYQQGHFLTRPMMKWFWDAYTKNEAQRNEIYASPLRASTAQLKGLPPALIQVAQFDVLRDEGEAYGRKLDAAGVDATTTRYDGTIHDFGLLNALAMDAPTKAATKAMANEIATRLK

SEQ ID NO: 10377 - protein, 514 aa, Glycine max
  unsure (1)..(514): unsure at all Xaa locations
MDQFLWRVLPLLTILVSFGVFFYLQDSYTAQLFPLIKLPRDKCSLLPHRHFWISSKRIVTPQGIISGSVEINDGKIISVVEGHAIQGKPKQEEVIDYGDAVIMPGLIDVHVHLNEPGRTEWEGFDTGTRAAAAGGVTTVVDMPLNCYPTTVSKEKLKLKLDAAEDKIYVDVGFWGGLIPENALNTSILDGLLSAGVLGVKSFMCPSGIDDFPMATIDHIKAGLSVLAKYRRPIVVHAEIQQDFENHLELNEDNLDPRAYLTYLNTRPPSWEEAAIKQLVSVTKDTRKGGPLEGAHVHIVHLSDSSASLDLIKEAKSHGDSISVETCPHYLAFTSEEIPNGDTRFKCSPPIRDAYNKDKLWEAVLEGHIDLLSTDHSPTVPELKLMEEGDFLKAWGGISSLQFNLPVTWSYGKKYGLTLEQLSLLWSKKPATLAGLESKGTIAVGKXHADIVVWQPELEFDLDDDYPVFIKHSELSAYMGRRLSGKVLETFVRGNLVFKDGKHAPAPCGVQILAK

SEQ ID NO: 10378 - protein, 443 aa, Anabaena variabilis ATCC 29413
MQLVQWIYQPLQLMEASAKAHGDCFTLWLTNKRPIVFLSNPQAIQELFTTPLEQLDARGTAQVLQPLLGENSLLLLSGETHQRQRKLLTPPFHGDRMRAYGDIITNITQEVISKWQLGEPFSVRDSMQEITLRVILQAVFGLREGERYTQLQKRLCDILDLSGSALRSTLSFLPALQIDLGSWSPWGHFLRQRAAIDQLLYAEIQDRRDHPDPSRTDILSLMMAARDENGEAMTDIELRDELMTLLVAGHETTASALTWALYWIHKLPQVREKLLAELDNFGDNGDVNEITRLPYLTAVCQETLRIYPIAMVTIPRIVKTTLEIGGHQFAPGTMLVGCIYLMHRRPDLYPQPQEFKPERFLEKQYSLYEYLPFGGSNRRCVGMAFALYEMKLVLATVLANMDLALVDNYPVKPTRRGVTLAPSGGKWLIATGQHQKVKSPVEV

SEQ ID NO: 10379 - protein, 474 aa, Escherichia coli CFT073
MQHKLLINGELVSGEGEKQPVYNPATGDVLLEIAEASAEQVNAAVRAADAAFAEWGQTTPKARAECLLKLADVIEENGQVFAELESRNCGKPLHSAFNDEIPAIVDVFRFFAGAARCLNGLAAGEYLEGHTSMIRRDPLGVVASIAPWNYPLMMAAWKLAPALAAGNCVVLKPSEITPLTALKLAELAKDIFPAGVINVLFGRGKTVGDPLTGHPKVRMVSLTGSIATGEHIISHTAPSIKRTHMELGGKAPVIVFDDADIEAVVEGVRTFGYYNAGQDCTAACRIYAQKGIYDTLVEKLGAAVATLKSGSPDDESTELGPLSSLAHLERVSKAVEEAKATGHIKVITGGEKRKGNGYYYAPTLLAGALQDDAIVQKEVFGPVVSVTLFDNEEQVVNWANDSQYGLASSVWTKDVGRAHRVSARLQYGCTWVNTHFMLVSEMPHGGQKLSGYGKDMSLYGLEDYTVVRHVMVKH

SEQ ID NO: 10380 - protein, 144 aa, Zea mays
  unsure (1)..(144): unsure at all Xaa locations
MSAGPEDTQQLINSAAASPNRSAPSAAPSDMERGSGTAASSSRASTTXPLPPEGHPQGGGGGXEEPSSSRGAGSLCSGYLSLPALLLVGVTASLVILPLVLPPLPPPPSLLMLVPVAMLLLLLVLAFMPTSSTGGRGGTGPTYM

SEQ ID NO: 10381 - protein, 496 aa, Burkholderia cepacia R18194
MNQPTFEDWQARAAVLRVEGRAFIDGDARHAHTGATFACVSPIDGCVLAHVADCGADDVDLAVAAARRAFDARSWAGMNPRTRKAVLQRWAALMREHLDELALLETLDTGKPIADTTAIDVPAAAHCVDWYAEAIDKVGGEVAPVDHHLVGLVTREPIGVVAAVVPWNFPLLMAAWKFAPALAAGNSVVLKPSEKSPLTAIRVAQLACDAGVPPGVFSVVPGGAEPGKALALHRDVDCIAFTGSTRTGQQIMACAAQSNLKRVWLELGGKSPNIVLRDCPDLDRAAQAAADAIFFNMGEVCTAGSRLLVHRDIKDAFVAKLVDASRRFAPGHPLDPSVTMGAIVDRTQLDRVMGYIGAGRDEGKLVTGGARVREETGGFYVEPTVFEVKPDAKIAREEIFGPVLSVIVFDEVDEAVRIANDTEYGLAAAVWSADLSTAHAVARRLRAGTVWVNCYGDGSDDMNFPFGGYKLSGNGRDKSLHALDKYTELKSTVVRL

SEQ ID NO: 10382 - protein, 467 aa, Thermoplasma acidophilum
MLYGVCRRKHLIIDGYLFSMIMEDQERTERYNEDALRYSEYFKGKIQTISKVPVRSLDDFSIWYTPGVAAVSRKIASDPDLSFELTGRWNSIAILTDGTRVLGLGNIGPEAAMPVMEGKALIFNYLGGVNAIPIPIRVQSKEEFVKVAKALEPSFGGINLEDIESPKCFFLLETLQNEMNIPVWHDDQLGTASITLAGVINSLRIVGKKIDQVKVVFNGAGAANIAAAYLFKAAGFKMKNMILVDSKGILHPEREDIDALMINNPWKYQLAIETNGERVKGDLSNAIEGADLLISAAKSGPDTIDSRIVKKMNNDAIVFVLANPIPEMWPQEAKENGARIVATGRGDFPNQINNSLVFPGVFRGVLDARAKGVNFDVMVAASYEIANFVEDPTEEKIVPTMEEWELYPRLASAVASKTVELGLARKSDSKEGFYRRAREIIESNRNIYSKLMDLGLIKRMPNGEHKN

SEQ ID NO: 10383 - protein, 183 aa, Escherichia coli K12
MKTLIVSTVLAFITFSAQAAAFQVTSNEIKTGEQLTTSHVFSGFGCEGGNTSPSLTWSGVPEGTKSFAVTVYDPDAPTGSGWWHWTVVNIPATVTYLPVDAGRRDGTKLPTGAVQGRNDFGYAGFGGACPPKGDKPHHYQFKVWALKTEKIPVDSNSSGALVGYMLNANKIATAEITPVYEIK

SEQ ID NO: 10384 - protein, 217 aa, Zea mays
MAATRASPVLLLLLLTVQLSLLFRLPDSPSTLALALALAAEPDQQNAKQHRQPALLVQSTCNSTSFYDLCIAALAADPASSTADVPGLGGIAVSAAANNASGTAAFLGNASDAAATPQADRALLRACAGKYAAARDALVQARASLAEQAYDYAFVHVSAAGEYPAVCRTLFRRRQQQQRGASRTAYPAELAKREEALRRLCTIALDIISLLQNQETY

SEQ ID NO: 10385 - protein, 298 aa, Triticum aestivum
  unsure (1)..(298): unsure at all Xaa locations
MKTLLILTILAMATTIATANMQVDPSSRVQWPQEQPPPQSQQPFSQQPQQIFPQPQQTFPHQPQQAFLQPQQTFPRRPQQQFPQPQQPQQPFPQPQQPQLPFPQQPQQPFPQPQQPQQPFPQSQQPQQPFPQPQQQFPQPQQPQQSFPQQQQWMIQSFLQQQMNPCKNFLLQQCNPVSLVSSLVSIILPRSDCQLMQQQCCQQLAQIPQQLQCAAIHNVAHSIIMQQEQQRGVQILRPLFQLAQGLGIIQPQQPAQLEGIXRSLVLKTLPTMCNVYVPPDCSTINMPYANIDAVIGGQ

SEQ ID NO: 10386 - protein, 435 aa, Arabidopsis thaliana
MERYKILEELGDGTCGSVYKAVNLETYEVVAVKKMKRKFYYWEECVNLREVKALRKLNHPHIIKLKEIVREHNELFFIFECMDHNLYHIMKERERPFSEGEIRSFMSQMLQGLAHMHKNGYFHRDLKPENLLVTNNILKIADFGLAREVASMPPYTEYVSTRWYRAPEVLLQSSLYTPAVDMWAVGAILAELYALTPLFPGESEIDQLYKICCVLGKPDWTTFPEAKSISRIMSISHTEFPQTRIADLLPNAAPEAIDLINRLCSWDPLKRPTADEALNHPFFSMATQASYPIHDLELRLDNMAALPNLELNLWDFNREPEECFLGLTLAVKPSAPKLEMLRNVSQDMSENFLFCPGVNNDREPSVFWSLLSPDENGLHAPVESSPLSLSFSPMQQHTVGPPQSSGFTMTSSMQPNMLDRPWMAVSAPFQQSHYL

SEQ ID NO: 10387 - protein, 136 aa, Pyrobaculum aerophilum
  unsure (1)..(136): unsure at all Xaa locations
KWVXSTKYVEAGELKEGSYVVIDGEPCRVVEIEKSKTGKHGSAKARIVAVGVFDGGKRTLSLPVDAQVEVPIIEKFTAQILSVSGDVIQLXDXRDYKTIEVPXKYVEEEAKGRLAPGAEVEVWQILDRYKIIRVKG

SEQ ID NO: 10388 - protein, 296 aa, Bacillus cereus ATCC 10987
MVIQWFPGHMAKARRQVTEKLKLIDVVIELVDARLPLSSRNPMIDEIITHKPRLVVLNKADMADDRLTKQWIAYFKEKGHMAISINAQAGQGMKEIAAACKVLVKEKFDKMVAKGIRPRAIRALIVGIPNVGKSTLINKLAKKNIAKTGDRPGVTTAQQWIKVGKEMELLDTPGILWPKFEDQLVGLRLATTGAIKDSILNLQDVAVYALRFMEKHYPDRLKERYNLNDIPEDIVELFDAIGKNRGCLMGGGMIDYDKTSELILRELRGGKLGKMTFETPEEFAEQTEDAEKVEEV

SEQ ID NO: 10389 - protein, 282 aa, Zymomonas mobilis
MMSPISIPSIRLNDGNDLPAVGFGTYKLNGSAGVSDIVSAIKVGYRLLDSAFNYENEGAVGEVFREAGIARDKLRIVSKLPGRHHHFEEAIATVEESLYRAQLDYYDLYLIHWPNPSKDLYVEAWQALIEARKKGLIRSIGVCNFLPEHLERLIKETGVTPVVNQVELHPYFPQEEQRAWDKAHGIVTESWSPLGRASKLLQDDTIKKIADRLGKSIPQVILRWHVQLGAIPIPKASSKERQIENLSLFDFELSPQDVEIIATLARPDGRLADQDPARYEEF

SEQ ID NO: 10390 - protein, 486 aa, Xylella fastidiosa 9a5c
MMHHNVHQSEILADPCDLQRAERWLQRDLRVLWHPCTQMREHPDTLPLVPIVRGEGAWLVGHDGRRYLDAVSSWWTNLFGHADPRISAAIAAQARTLEQVMLAGFSHEPAVRLAEALLRLAPRQDGREPLSKVFYADNGSAGVEVALKMAFHYFRNRGEEQRTRFIALHNGYHGETIGALAVGDIPLYRRVYAPLLTEVLFAPSPDAYLAEPGQSAAEYALQAAEALEVLFKRYSGQICALILEPLLQCAGGMRMHHPVYLHRVRELCDAHGALLICDEIATGFGRTGTLFACEQACPVILTDTDDKQLGIMPDLLCLSKGLTGGFLPLAAVLTTQQLYEEFLDDSRERAFLHSHSYTGNPLACIAALTTLDIFENDCIIERNQVTAARMTQLAASLSGHPHVADVRQAGMVVAFELTRDGNKRTPFPLQARLGLHVYRAALARGVILRPLGDVVYWMPPYCVDEEQLHLLAETTRVAIDEAIACV

SEQ ID NO: 10391 - protein, 153 aa, Zea mays
  unsure (1)..(153): unsure at all Xaa locations
MASDRVLGTVKWFNGTKGFGFITPDDGSEDLFVHQSSIKSDGYRSLNDGDAVEYTVGSGNDGRAKALDVTAPGGGPLAGGERPDGGNGGGRGGYGGGDRGYGGGGDRGYGGGGDRGYGGGDRGYGGGGDRGYGGDXGYGGGGCFKCGEXGHMA

SEQ ID NO: 10392 - protein, 174 aa, Triticum aestivum
  unsure (1)..(174): unsure at all Xaa locations
MAPTVMASSATSGTPFQGLKSTXAGLPISRRSSSAGLSSVSNGGRIRCMQVWPIEGIKKFETLSYLPPLSTEALLKQVDYLIRSKWVPCLEFSKVGFVFREHNSCHGYYDGRYWTMWKLPMVWCTDATQVLNEVEEVKKEYPDAYVRVISIDNLRQVQCVSFIAFMPPGCEESG

SEQ ID NO: 10393 - protein, 347 aa, Flaveria linearis
YIGLRQRRASGKEYAELMNEFMSAVKQNYGEKVLIQFEDFANHNAFDLLEKYRTTHLVFNDDIQGTASVVLAGLISALKLVGGSLADHKFLFLGAGEAGTGIAELIALEISKQTNAPLEETRKKIWLVDSKGLIVRSRLDSLQHFKKPWAHDHEPVNKFLDAVKAIKPTVLIGSSGAGQTFTKEVVEAMRSFNEKPIILALSNPTSQSECTAEQAYTWSEGRTIFASGSPFAPVEYNGKVYVSGQSNNAYIFPGFGLGLIISGAIRVHDEMLLAASEALAEQVTQEHFDNGLIYPPFTNIRKISAHIAAKVAAKAYELGLASRLPQPENLVAYAESCMYSPKYRNYR

SEQ ID NO: 10394 - protein, 391 aa, ASPERGILLUS NIDULANS FGSC A4
MSSTLEIATDNENMPLMKALQFHGPRDVRVEQIEEPVCGKGQVKLRNTYCGICGSDLHEYTSGPVLIPKGAHSITKATAPVVMGHEFGGVVEEVGEGITHLKPGQKAVVRPTIFDRKCPPCKIGYEYCCENIGFIGLSGMLFFRIKQAVRSGQANVPMRTGYGGGFAEKIVAPAEHFYPIPDNVTPESMAMIEPLAVAWHAVNLSPFKEGDNVLVVGGGPLGLCILQVLKMRGANFTIIAELTETRKKSAKYFGATHILDPREVDIPDNVRGLTDGVGADVVFDTAGVEKALDGAIGACRVHGTIVNVAVWEKKPQIKVNEMMYHEVKYLGSALYDEKSFQDTIDAISKGLLKPESMITDKIKLEDVVEKGFKTLLQDRNTHCKILVDPQI

SEQ ID NO: 10395 - protein, 381 aa, Prochlorococcus marinus subsp. pastoris str. CCMP1986
MDTHKLILKPGLEGVPVTNSSICDIDGQKGKLLYRGYSIEELAQKSSFLETAFLLIWGELPSATELRDFEQEVQMHRRLSFRVRDMMKCFPATGHPMDALQSSAASLGLFYSRRAIDDPKYIYNAVIRLIAKIPTMIAAFQLIRKGQDPIQPRDDLSYSSNFLYMLTEKEQDPIAAKVFDRCLILHAEHSLNASTFSARVTASTLTDPYAVIASAVGTLAGPLHGGANEDVIAMLEDIKTPEKAASFLEDAIQNKSKIMGFGHREYKVKDPRAIILQKLAEELFVRFGKDEMYEVAKKLELEAIPRLGGKGIFPNVDFYSGLVYRKLGIPRDLFTPIFAISRVAGWLAHWREQLGANRIFRPSQIYTGSAPRDWITLENRK

SEQ ID NO: 10396 - protein, 340 aa, Erwinia carotovora subsp. atroseptica SCRI1043
MSTMNTLICQEPKKLVWKKREIPIPGEGEALIKIKSVGICGTDIHAWGGNQPFFSYPRVLGHEICGEVVDTGKNVDRFKKGQQVTVIPYVACQQCPACKSGRTNCCEKISVIGVHQDGGFSEYLAVPTTNLLLAEGIDPQAAALIEPYAISAHAVRRAKVLQGEQVLVVGAGPIGLGAAAIAKAEGAHVVVADTSAARREHVIAHLGLSVVDPSAEDFEAQLRAEFGGSLAEKVIDATGNQHAMNNTINLIRHGGSIVFVGLFKGDLQFSDPEFHKKETTMMGSRNATPEDFAKVGHLMSEGKLTAEMMLTHRYPFSTLADIYERDVINNRELIKGVITF

SEQ ID NO: 10397 - protein, 313 aa, Glycine max
MASSLASSSTVLWILFLTIATLHLSSARKLSGSDPQLQFQYHRGPLLKGKISVNLIWYGKFKPSQKAIVADFITSLSSPKPVTAQPSVATWWKATDKYYKNSSPKLALSLGTTQILDENYSLGKSLTNNQILKLASKGPQRNAINIVLTSADVAVEGFCSSRCGTHGSSVGARVNGKRYKLAYIWVGNSETQCPGQCAWPFHQPIYGPQNPPLVAPNNDVGLDGMLINVASLLAGTVTNPFGNGYFQGPKEAPLEAGSACTGVYGKGAYPGYAGNLLLDPTTGASYNANGVNGRKYLLPALVDPETSACSTLV

SEQ ID NO: 10398 - protein, 299 aa, Glycine max
  unsure (1)..(299): unsure at all Xaa locations
MAATTLVFEGTLPSSGGDQKRAVXGLNTYPKATIAVTTKDAVLEAIKQGYRHLYAASAYGEEQSVGEAISEALKQGLIASRDQLFITTKLWVTDNHAHTMTSALQNSXCRTLQLEYIDLFLIHWPIATKPGKVVYPIEVSEIVEFDMKGVWGSMEECQRLGLTKAIGVSNFSIKKLEKLLSFATIPPAVNQVEVNLGWQQQKLRDFCKEKGITVIFVSPLFSCSKNXNQFFLQICLRWLYEQGLTFVVKSYDKERMKQNLGIFDWSLTEDDYKKISEIHQERLIKGPTKPLLDDLWDEE

SEQ ID NO: 10399 - protein, 669 aa, Triticum aestivum
  unsure (1)..(669): unsure at all Xaa locations
MNADYGAPTELAGPLQQRRALYQPRLPPCLQGATVRVEYGDATTTIDPTGAHAVAQAFPRTYGQRLVTFLAPDDTAGAGKAVNERPPIRVGVVFSGRQSPGGHNVVWGLHDALKVYNPQSILYGFIGGTEGLFANKTLEITNDVLASYKNQGGFDLLGRSIDQIRSSKQVSAAMTTCQDLNLDGLVIVGGVTSNSDAAQLAETLVQKNCKTKVVGVPVSLNGDLKNQFVETTVGFDTVCKVNSQLISNVCLDAISAGKYYYFVRLMGRKASHVALECALQSHPNMLIMGEEVALSKLTLMEVINKICDGVQARAELGKHHGVLLIPEGLIESIPEMYALIQEISILHNNNVPVTEIPTQVSPWAAALFQFLPPFIRRELLLHQESDNSAQLSQIDTEQLLAHLVEAEMIKRTKEGRYKGKKFSSVCHFFGYQARGSLPSNFDCDYAYVLGHISLHMIXAGLTGYMATVANLKXPIHKWRXSCCPITAMMSVRRLLRGPGPFXYGKPAIHPSPIDLKGKAYELLREKASSFLLDDFYRTPGGIQFEGPGXDAKPITLTIEDQDYMGDIEMLKLYLDKVKTIVNPVAXRDTLKSGDNSMISMTHVLTVMSQPSXMLTALXHFLSLEHQRIIYNWFLDTRFRFPFPKLNTHPICQQTWEYILIPGFLYFVQR

SEQ ID NO: 10400 - protein, 325 aa, Triticum aestivum
  unsure (1)..(325): unsure at all Xaa locations
MAWWAGSMGGLDLRNHLAQFGGPAAGGAAMGGAEQAPTTPNSSGSNNHDDSSGAAQDSPTAGAGDNSPNPNAAISGSGPSGGGGGSGGGGSSSGRRPRGRPAGSKNKPKPPIIITRESPNTLRSHVLEIXSGADIMEAVSTFARRRQRGVSVLSGSGVVGNVTLRQPAAPPGSVVTLHGRFEILSLSGAFLPSPCPPGATGLAVYLAGGQGQVVGGTVIGELVASGPVMVVAATFSNATYERLPLADEEPGEAAAAATGSDGMQLPDGPAPGGNGGMGAAVGVPGLPDPSSMPFYNLPPNLQMPNGGGQMAHDVFGSFRPPPPAF

SEQ ID NO: 10401 - protein, 157 aa, Bacillus halodurans C-125
MSIHEFSARLINGEEKALSDYKDQVLLIVNTASKCGLTPQYEELQILYETYKDQGFTVLGFPSNQFMNQEPGDHNEIAAFCERNYGVSFPIFEKVKVNGKEAHPLFQYLTSQQGGLFTEKIKWNFTKFLIDRSGNVVKRYAPSTSPIKIKDDIEELL

SEQ ID NO: 10402 - protein, 205 aa, Triticum aestivum
MGERLKGTVKWFNVTKGFGFISPEDGSEDLFVHQSAIKADGYRSLNENDVVEFEVITGDDGRTKATDVTAPGGGALAGGSRPSEGGGDRGGRGGGGYGGGGYGGGGGGYGGGGGGYGGGGGSYGGGGGYGGGGGGGRYGGGSGGGRECYKCGEEGHISRDCPQGGGGGGGGYGGGGGRGGGGGGGGCFSCGESGHFSRECPNKTN

SEQ ID NO: 10403 - protein, 112 aa, Zea mays
  unsure (1)..(112): unsure at all Xaa locations
TYAYAYAYACKPLLQLTTHATRGXYLCMFLVGAYQEVPRXLHNLFGGPSVVRVSQCDWPHCFAVTPVPAGPYCADMLLAMHHXPEVMYEVLKQMTDCATVVVLARAFSAMPY

SEQ ID NO: 10404 - protein, 421 aa, Lotus corniculatus var. japonicus
MNHCVVLCIIVVGFFFFFFLSQFVMQIKREISIMKLVRHPYVVRLYEVLASRTKIYIILEFITGGELFDKIIRHGRLSEAESRRYFQQLIDGVDYCHSKGVYHRDLKPENLLLDSLGNIKISDFGLSALPEQGVSILRTTCGTPNYVAPEVLSHKGYNGAVADVWSCGVILYVLLVGYLPFDELDLTSLYSKIEKAEYSCPPGFPVGAKTLIHKILDPNPETRITIEQIRNDEWFQRGYVPVSLLEYEDVNLDDVNAVFDDAEEQRANQQCDHEDMGPLMLNAFDLIILSQGLNLAAIFDRGQDSMKYQTRFITQKPAKVVLSSMEVVAQSMGFKTHIRNYKMRVEGLSAKKTSHFSVMLEIFEVAPTFYMVDIQKAAGDAGEYLKFYKNFCGNLEDIIWKPPHESTKSKVSKTRSKRRSR

SEQ ID NO: 10405 - protein, 472 aa, Arabidopsis thaliana
MSTASVIIIGAGISGISAAKVLVENGVEDVLILEATDRIGGRIHKQNFGDVPVELGAGWIAGVGGKESNPVWELASRFNLRTCFSDYTNARFNIYDRSGKIFPTGIASDSYKKAVDSAILKLKSLEAQCSGQVAEEAPSSPKTPIELAIDFILHDFEMAEVEPISTYVDFGEREFLVADERGYECLLYKMAEEFLVTSHGNILDYRLKLNQVVREVQQSRNGVVVKTEDGSVYEANYVIVSASIGVLQSDLLSFQPLLPRWKTEAIQKCDVMVYTKIFLKFPQCFWPCGPGQEFFIYAHEQRGYFTFWQHMENAYPGSNILVVTLTNEQSKRVEAQSDQETMKEAMSVLRDMFGATIPYATDILVPRWWNNRFQRGSYSNYPMISDNQLLQNIKAPVGRIFFTGEHTSEKFSGYVHGGYLAGIDTSKSLLEEMKQSLLLQPLLAFTESLTLTHQKPNNSQIYTNVKFISGTS

SEQ ID NO: 10406 - protein, 211 aa, Zea mays
MACKPSPHFLSPHPHSQSRMPRMMCRVALAAVLLCAAAAAALGGKRAPIPDDLRDVIDDEEDDEWRRYGAPPSRGPGRGDGPPPDLSRMDPAALQDELLRGQTGPSFGFVKLRPGTARSQEDVVGIATRWSNVLRTGSVDAKFVAVNFGTLMFTMERGRDILELKEFILSQDEAYEFKVGDRVFRRPGDPPLDQVLDKPQKKKRHKSRDEL

SEQ ID NO: 10407 - protein, 366 aa, Pseudomonas aeruginosa PAO1
MSKMMKAAVFIQPGRIELVDKPIPDVGPNDALVRITTTTLCGTDVHILKGEYPVAPGLTVGHEPVGIIEKLGSAVVGYREGQRVIAGAICPNFNSYAAQDGVPSQDGSYLVESGRCACHGYKATAGWRFGNLIDGTQAEYVLVPDAQANLAPIPDGLSDEQVLMCPDIMSTGFKGAENANIRIGDSVAIFAQGPIGLCATAGARLLGASTIIAIDGNAHRLDIARGMGADVTLNFRECDVIEEILKLTGGRGVDASIEALGTQSTFETALRVLKPGGTLSSLGVYSEDLTIPLSAFAAGLGDHRINTALCPGGKERMRRLLNIVASGRVNLGPLVSHEYRLDDIVAAYDLFANQRDNVLKVAIKPH

SEQ ID NO: 10408 - protein, 365 aa, Lotus corniculatus var. japonicus
MVEQIKREISIMKIVRHPNIVRLHEVLSSQTKIYIILEFVMGGELYDRIVQRGKLSEDESRRYFQQLIDAVAHCHKKGVYHRDLKPENLLLDAFGNLKVSDFGLSALTKQGVDLLHTTCGTPSYVAPEVLSNQGYDGAAADVWSCGVILYVLKAGYLPFEEADLSTLYRRRVKIGEIRKDPWFQRNYLPLKLNEDEQVNLDDVQAVFDDIEDQYVPVQSEITEGGPLVMNAFEMITLSQGLNLSPLFDRHQDYVKRQTRFVSRKPAKVIISSIKVVAESMGLKLQSRNYKMRIEGLSANKAGQFAVVLEVYEVAPCLYMVDVRKAAGDTLDYHKFYKNLCAKLENIIWRPTETMPDSGLLRQMTL

SEQ ID NO: 10409 - protein, 125 aa, Triticum aestivum
  unsure (1)..(125): unsure at all Xaa locations
MAPTVMASSATSVAPFQGLKSTAGLPVSRRSNGASLGSVSNGGRIRCMQVWPIEGIKKFETLSYLPPLXTEGLLKQVDYLIRSXKWVPCLXFNKVGFIFREXNASPGXYDGRVGNVGKLNVSGGT

SEQ ID NO: 10410 - protein, 275 aa, Dechloromonas aromatica RCB
MQTSPSTTLQQQDLSIAGPAGPLALRLYRPSLARVVLPVVLYFHGGGFVGGSLDDADAAAGFIAEHTPALVVAVDYALAPARPFPAAPEDAHAAALWTAAHAAELGGDPARLAVAGDDAGGNLAAALTLIARDRNGPAIAAQALVGPMLDPSMTRLGDGVRLNSDLSAATCASCYSQYLPQSRQRLHPYASPLASVRQAGLPPALIVTAECDVLHNEAEKYAAALIAAGVPTQVVRFAGVNHATLASHRPALAEIAHFLRRRLWDAEAPAHPLNL

SEQ ID NO: 10411 - protein, 162 aa, Triticum aestivum
  unsure (1)..(162): unsure at all Xaa locations
MSDSEDHHFESKADAGASKTYPMQAGAIRKGGFLVIKNRPCKVVEVSTSKTGKHGHAKCHFVALDIFNGKKLEDIVPSSHNCDVPHVDRQDYQLIDITDDGYVSLLTESGNTKDDLKLPTDDVLLXQIKTGFADGKDLILSVMSXPMGEEQICAVKEIGGGK

SEQ ID NO: 10412 - protein, 188 aa, Glycine max
MADSDNDSGGAHNAGKGSEMSPREQDRFLPIANVSRIMKKALPANAKISKDAKETVQECVSEFISFITGEASDKCQREKRKTINGDDLLWAMTTLGFEDYVEPLKGYLQRFREMEGEKTVAARDKDAPPPTNATNSAYESPSYAAAPGGIMMHQGHVYGSAGFHQVAGGAIKGGPVYPGPGSNAGRPR

SEQ ID NO: 10413 - protein, 250 aa, Oryza sativa (japonica cultivar-group)
MAKNYPVVSAEYQEAVEKARQKLRALIAEKSCAPLMLRLAWHSAGTFDVSSKTGGPFGTMKTPAELSHAANAGLDIAVRMLEPIKEEIPTISYADFYQLAGVVAVEVSGGPAVPFHPGREDKPAPPPEGRLPDATKGSDHLRQVFGAQMGLSDQDIVALSGGHTLGRCHKERSGFEGPWTRNPLQFDNSYFTELLSGDKEGLLQLPSDKALLSDPAFRPLVEKYAADEKAFFEDYKEAHLKLSELGFADA

SEQ ID NO: 10414 - protein, 183 aa, Shigella flexneri 2a str. 301
MKKLIVSSVLAFITFSAQAAAFQVTSNEIKTGEQLTTSHVFSGFGCEGGNTSPSLTWSGAPEGTKSFAVTVYDPDAPTGSGWWHWTVANIPATVTYLPTDAGRRDGTKLPTGAVQGRNDFGYAGFGGACPPKGDKPHHYQFKVWALKTDKIPVDSNSSGALVGYMLNANKIATAEITPVYEIK

SEQ ID NO: 10415 - protein, 487 aa, uncultured bacterium 561
MNIELTNPTLFRTEAYVNGEWIGADNGARLPVTNPATGALITDVAKTGAAETRRAIAAAETAMLSWRQKPAKQRAQVMRRWFDLIMANQEDLARIMTLEQGKTLAESRGEVAYGASYIEWFAEQAKRIDGDVIPAPSGDKRIICIKQPVGVCAAITPWNFPNAMITRKAAPALAAGCTIVIKPASETPLSALALAELAHQAGIPPGVLNVLAGSSSDIGAELTSNPTVRKLSFTGSTPIGKMLEAQCVPTLKKTSMELGGNAPFIVFDDADIDSAVQGALISKYRNSGQTCVCSNRLLVQAGIAEEFTAKLVAATESLKLGNGLDENVDLGPLVNAKAVNDVHELVQGSISAGAKLVLGGAPSNLGVCFYQPTILTGVRPEMPVFRNEIFGPVAPIISFETEAEAIELANDTEFGLASYFYTRDIGRVWRVAEALEYGIVGINEGIISNEMAPFGGVKESGSGREGSKYGIDDYLEIKYMLMGGLNQ

SEQ ID NO: 10416 - protein, 189 aa, Pseudomonas fluorescens PfO-1
MPDMLKRWCAVPALLMALTGLAQAADCPDLLQGSLPKLRAKESIDLCQRYADKPLVVINTASFCGFAPQFEGLEALNQRYKAQGLEMLGVPSNDFKQESKDSAETAKVCYANYGVTFTMTEPQKVRGDDATHLFQVLARQSSAPKWNFYKYVIDRQGKVIANFSSLTKPDDPEFLAAIEKAIASQSLKP

SEQ ID NO: 10417 - protein, 426 aa, Rubrobacter xylanophilus DSM 9941
MLDGKEQVAEIEREWGSERWEGIERPYAAEDVYRLRGSVRIEHTLARMGAERLWRLIHERPFVRALGALTGNQAVQQVKAGLEAIYVSGWQVAADANLANHTYPDQSLYPANSAPNLVRRINQALQRADQIHHAEGKNGVYWFAPIVADAEAGFGGALNVFEITKAMIEAGAAGVHFEDQLASEKKCGHMGGKVLLPTAQAIRNLIAARLAADVMGVPTVLIARTDGDAANLLTSDVDPADEPFLTGERTVEGFYRVKPGLEQAIARGLAYAPYADMVWCETSTPDLGEAREFAEAIHERFPGKPLAYNCSPSFNWKRYLSPEEMLTFQEKLGEMGYKFQFVTLAGFHSLNYSMFELSRQYGERGMAAYSELQEAEFAAEKHGYTATKHQREVGAGYFDEVAQVVAGGMASTTALTGSTEEAQFND

SEQ ID NO: 10418 - protein, 414 aa, Sulfolobus tokodaii str. 7
MAISLAKKYQGKLEIMPKIPIRSYEDFALIYTPGVAELVKEIQKDENQSFELTSRWNTIAILTDGSRVLGLGNVGPIASLPVMEGKALLFKFLGGVDAFPLPIKVSDKEEFIQVAKAIEPAFGGINLEDIESPKCFFILEELQKTLNIPVWHDDQQGTAGAVLAGLINAIKITGKDKNSKIVLMGAGAANIATAQLLIKYGFNPKNMILIDKEGPLYAERGDVDSLMFKHPWKYELAIQTNSERVKTIEEAFKGADILIAASSPEVRIDKKLIRMMNKPIVFALANPIPEIYPNEAKEAGAVIVATGRSDFPNQVNNSLIFPAVFRGVLDSRAKKITDEMIIAAAEELAKYAEEKGLREDYIIPRMDEIEVYYRMAAAVATKAVELGYARLKLSYREFLESAKERILRARRLSL

SEQ ID NO: 10419 - protein, 146 aa, Mesembryanthemum crystallinum
SVWRAINKQTGEVVAIKKMKKKYYSWEECINLREVKSLRKMSHPNIVKLKEVIREHDILHFVFEYMECNLYQLMKDRGRPFSEVEVRNWCFQVFQGLAYMHQRGYFHRDLKPENLLVSKDLIKVADFGLAREISSAPPYTEYVSTR

SEQ ID NO: 10420 - protein, 454 aa, uncultured bacterium 561
MLLGQAMTAMIYPTTNPAATEVMVVSRGEGPYIYDQAGKQYLEGMAGLWCTSLGYGNQEIIETATRQMEQLSFSHMFSGKTHPSAIELADKLAAMAPIDDARVFLGASGSDANDTLVKLIRYYAVASGQPDRVKIIARDKGYHGVSVASAALTGLHANHAHFQLPFDALGVLRTGAPHYYRCAEAGETEADFVARRASELEALILDEGPDTIAAMIAEPVNGAGGVIIPPEGYFEAVQAVLDKYGIMLWDDEVICGFGRLGAAFGAEKLNMKPRMMACAKALTSAYVPLSAAIVAGDIADAIAGPAADMGVFGHGYTYSGHPLGCAVASKVLDIYVRDRLFEHAATLGAYMSKRLDEFSDHPLVGEVSAMGLLGALELVANKDSKQPFEGMRVAQFCAKAAEDNGLIIRPLGGNRMALCPPLIIQEAHVDEIMDKLSRALDSTLDFVTAEGLTV

SEQ ID NO: 10421 - protein, 344 aa, Brassica napus
  unsure (1)..(344): unsure at all Xaa locations
RPTRPRTRRPTRPRDRIGGRVHTDYSFGFPVDLGASWLHGVCKENPLAPVIGRLGLPLYRTSGDNSVLYDHDLESYALFDMDGNQVPQELVTNVGITFEQILEEINKVRDEQDADMSISQAFSIVFSRKPELRLEGLAHNVLQWYLCRMEGWFAADADTISAKCWDQEELLPGGHGLMVRGYRPVINTLAKGLDIRLNHRVTKIVRQYNGVKVTTEDGQTFVADAAVIAVPLGVLKSGTITFEPKLPEWKQEAINDLGVGIENKIILHFEKVFWPKVEFLGVVAETSYGCSYFLNLHKATGHPVLVYMPAGQLAKDIEKMSDEAAANFAXVLQLQRILPDALLR

SEQ ID NO: 10422 - protein, 247 aa, Zea mays
  unsure (1)..(247): unsure at all Xaa locations
ATNSNARGSGAEMQGGATAKLQSPVTVMRPVRGDLEEHLPKPYLARALVAPDIYHPDGTAADEHGHHHMSVLQQHVAFFDRDDNGIIYPWETYXGCRALGFNMILSLLIALVVNGTMSYATLPGWLPSPLFPIYVHNIHKSKHGSDSGTYDNEGRFMPVNFENLFSKYARTSPDRLTYRELWSMTEGFRDAFDLYGWIAAKLEWTILXYVLARDDEGYLSREAXGRVYDGSLFEYVERQRAQHAKMS

SEQ ID NO: 10423 - protein, 352 aa, Haemophilus somnus 2336
MSINFVKEGNIMSKYVRSVCLVEPKKVDIKTVLYPKKGECDVLIKVESIGICGSDIGAFRGTNPLVTYPRILGHEIVGTVIEAGVGMPKNINIGDRVILEPYIYCGHCYPCSISRTNCCEALKVLGVHIDGAMQEIVRHPAHMLIKAPDIPIHELALAEPLTISLHAIRRTKVKAGEHVAIIGAGAIGLMAALVAKAYGATPILIDILDKRLDYAKSIGIPNIINPAKENDLEAIKSITNGRMAEVVIEASGANIAVQNTLKYTSFAGRIALTGWPKNETPLPTNLITFKELNIYGARTSKGEFEEALKLLESRKIEPKNIISKVITFDEIPHYIEELSENPDDYLKIIAVF

SEQ ID NO: 10424 - protein, 375 aa, Haloarcula marismortui ATCC 43049
MSGFVFNEKPIQIERGDGAYVYDDSGTEYLDMGASYACVPLGHKHPAVHSAVSEQLEKITYVQASYPNAERTALYDLLAKTAPDPIDKTWLCNSGTEANEAALKFARSATGNSKIVATMQGFHGRTMGALATTWKNKYKKPYEPLIGDVEFVPYDDSEALEEAVDEDTAAFIVEPVQGEGGINPTSDGYLEDAREITEDAGAALIFDEVQTGMGRTGALWNSQRAAVAPDMITAAKGLGNGLPIGATLCRDWIAEDYGSHASTFSGGPVISAAAGATVSTIIEDSVPGNAAVIGDYLLTELEAAIGDDVRDIRGEGLMIGVEVGRGANAALKKLALNHQVLALPAGRTVIRLLPPLTIDKDHADAVVDAMAEVVE

SEQ ID NO: 10425 - protein, 308 aa, Pseudomonas fluorescens PfO-1
MTSKLEQLKQFTTVVADTGDFEAIARVKPVDATTNPSLLLKAAAIPAYAELLNASVRDCKGDVGLASDRFGVAVGQEILKVIPGRISTEVDARLSFDQDAVLKRAHRLIELYDKAGVGRDRVLIKIASTWEGIRAAEILEKEGIQTNLTLLFSFAQAAACADAGVFLISPFVGRIYDWYKKANGNDYTGADDPGVQSVTRIYNYYKANDYKTVVMGASFRNLSQIEQLAGCDRLTISPDLIEKLAADTGKLERKLAPGHAGEARLSLNEAQFRWLSNEDAMATEKLAEGIRQFARDQEKLEALLQAKL

SEQ ID NO: 10426 - protein, 290 aa, Saccharomyces cerevisiae
TLVHVASVEKGRSYEDFQKVYNAIALKLREDDEYDNYIGYGPVLVRLAWHISGTWDKHDNTGGSYGGTYRFKKEFNDPSNAGLQNGFKFLEPIHKEFPWISSGDLFSLGGVTAVQEMQGPKIPWRCGRVDTPEDTTPDNGRLPDADKDAGYVRTFFQRLNMNDREVVALMGAHALGKTHLKNSGYEGGGANNVFTNEFYLNLLNEDWKLEKNDANNEQWDSKSGYMMLPTDYSLIQDPKYLSIVKEYANDQDKFFKDFSKAFEKLLENGITFPKDAPSPFIFKTLEEQGL

SEQ ID NO: 10427 - protein, 255 aa, Triticum aestivum
  unsure (1)..(255): unsure at all Xaa locations
SVGRLVMEASARSNLKPVSLELGGKSPLIVFDDADVDMAVGLAISANFFNKGEACVAASRVYLQEGIYDGFVKKLAQRMESWVVGDPFDPRVNQGPQVDKVQYERVLSYINHGKREGATVLTGGKPCGQSGYYIEPTVFTXDVKDDMIIAKEEIFGPVMCLMKFTSVEEAIARANDTRYGLAAGVVTKDINVANRMGRSIRPGVVWVNWYFAMDSDCPFGGRKMSGFGKDDGMHALDKFLAVKSVVTPVYDSPWL

SEQ ID NO: 10428 - protein, 289 aa, Saccharomyces cerevisiae
LVHVASVEKGRSYEDFQKVYNAIALKLREDDEYDNYIGYGPVLVRLAWHISGTWDKHDNTGGSYGGTYRFKKEFNDPSNAGLQNGFKFLEPIHKEFPWISSGDLFSLGGVTAVQEMQGPKIPWRCGRVDTPEDTTPDNGRLPDADKDAGYVRTFFQRLNMNDREVVALMGAHALGKTHLKNSGYEGGGANNVFTNEFYLNLLNEDWKLEKNDANNEQWDSKSGYMMLPTDYSLIQDPKYLSIVKEYANDQDKFFKDFSKAFEKLLENGITFPKDAPSPFIFKTLEEQGL

SEQ ID NO: 10429 - protein, 178 aa, Glycine max
  unsure (1)..(178): unsure at all Xaa locations
MAYSMISSPSVTTVNRACAGMAAPYTGLKFMAGFPTRMTNNDITCIASLCGILQCMQVWSPICKTNSETLSYLPDLDDSHSPEELXYLLRKGWIPCLQFELEHGFVYREHNRSPGYYDGRYWTMWKLPMFGCTDASQVLKELQEAKTAYPNGFIRIIGFDNVRQVQCISFIAYQLPGF

SEQ ID NO: 10430 - protein, 446 aa, Lotus corniculatus var. japonicus
MKKVRRRIGKYEVGRTIGEGTFAKVKFAKNSETGESVAIKIMDKTTILKHRMVEQIKREISIMKIVRHPNIVRLHEVLSSQTKIYIILEFVMGGELYDRIVQRGKLSEDESRRYFQQLIDAVAHCHKKGVYHRDLKPENLLLDAFGNLKVSDFGLSALTKQGVDLLHTTCGTPSYVAPEVLSNQGYDGAAADVWSCGVILYVLKAGYLPFEEADLSTLYRRTSAAEFVCPSWFSTGTTTLIHKILDPNPKTRVKIGEIRKDPWFQRNYLPLKLNEDEQVNLDDVQAVFDDIEDQYVPVQSEITEGGPLVMNAFEMITLSQGLNLSPLFDRHQDYVKRQTRFVSRKPAKVIISSIKVVAESMGLKLQSRNYKMRIEGLSANKAGQFAVVLEVYEVAPCLYMVDVRKAAGDTLDYHKFYKNLCAKLENIIWRPTETMPDSGLLRQMTL

SEQ ID NO: 10431 - protein, 442 aa, Streptomyces spectabilis
MSTTAMPASTHHTIALEQSHRLPGGQSMTDLSGLVVDRARNAEVWDKDGKRYIDFFTGVGVCNIGHSHPRFLAEVGEQLSACAVGTFYTDARSRYYELLAAQLPERLGRIHMFSTGSEAVEAAVKLARAATGKHEVVSFWGGFHGKTQGALSLHGGPRKHRSGPFPPGSHQVPYAYCYRCPLQLEHSTCGQRCVDLAEQSIENGSVGDIAAIIVEPVQGTNGNIIPPAGYLRAVRRLADRHGALLILDEVITGFGRTGSLFAFEQDPEVRPDVVVLGKAMASGVPASAIVSRAELVEGTSFGQPSAAASTFGGNPLASAAALATLRILLDERLPERSRLLGETVARRLASWKEEFPFVGNAANVGLMVGVELVEPGTRRPLPKDVTRRIFQGLLAEGVLAMAYDSRIRIYPPLSIPADHLDEGLTAFESVFRSLRSLRSTQT

SEQ ID NO: 10432 - protein, 355 aa, Lotus corniculatus var. japonicus
IVRLHEVLATKTKIYFIMDFVRGGELFAKVSKGRFGEDLSRRYFHQLISAVGYCHTRGVFHRDLKPENLLLDENGDLKVSDFGLSALRDQIRPDGLLHTLCGTPAYVAPEILAKRGYDGTKVDVWSCGVVLFVLAAGYLPFNDPNLMVMYRKIYNGEFRCPRWMSPDLRRFLSRLLDTNPETRITVDGMTRDPWFKKGYKEIKFHEEYRPESGSGSGSEVVDLNAFDIITFSSGLDLSRLFRQKEGEERLVVSGTPEKVLEMAEEVGAAEGMAVRWKKECGVELEGLNGDYGIGIDVSRLTAELAVVEVKMRGVDAVAFRNLWDEKLKPQLLGGATTSYHQEVEPESPESQVASD

SEQ ID NO: 10433 - protein, 254 aa, Triticum aestivum
MAAKCYPTVSDEYLAAVAKARRKLRGLIAEKNCAPLMLRLAWHSAGTFDVATKTGGPFGTMKCPAELAHGANAGLDIAVRLLEPIKEQFPILSYADFYQLAGVVAVEVTGGPEVPFHPGRQDKPEPPPEGRLPDATQGSDHLRQVFSTQMGLSDQDIVALSGGHTLGRCHKERSGFEGAWTANPLIFDNSYFTELLSGEKEGLLQLPTDKTLLTDPAFRPLVDKYAADEDAFFADYAEAHLKLSELGFGEAGCC

SEQ ID NO: 10434 - protein, 483 aa, Arabidopsis thaliana
MRRNVDNQSYYVLGHKTPNIRDLYTLSRKLGQGQFGTTYLCTDIATGVDYACKSISKRKLISKEDVEDVRREIQIMHHLAGHKNIVTIKGAYEDPLYVHIVIELCAGGELFDRIIHRGHYSERKAAELTKIIVGVVEPCHSLGVMHRDLKPENFLLVNKDDDFSLKAIDFGLSVFFKPGQIFKDVVGSPYYVAPEVLLKHYGPEADVWTAGVILYILLSGVPPFWAETQQGIFDAVLKGYIDFDTDPWPVISDSAKDLIRKMLCSSPSERLTAHEVLRHPWICENGVAPARALDPAVLSRLKQFSAMNKLKKMALKVIAESLSEEEIAGLRAMFEAMDTDNSGAITFDELKAGLRKYGSTLESTEIHDLMDAADVDNSGTIDYSEFIAATIHLNKLEREEHLVSAFQYFDKDGSGYITIDELQQSCIEHGMTDVFLEDIIKEVDQDNDGRIDYEEFVAMMQKGNAGVGRRTMKNSLNISMRDV

SEQ ID NO: 10435 - protein, 437 aa, Desulfuromonas acetoxidans
MSTLKEVLKQKIDAHRPRTTRLVKECGDTTLGEVTIAQAIGGARGIKCLVTDISYLDPMEGIRFRGMTIPETFAALPKVPGSDYPYVEGFWYLLLTGDVPTMEQTLEVVEDWKQRSQVPEYVIDVLRAMPRDSHPMAMFSAAIVAMQRDSVFASNYAAGKFNKMTCWEDMLEDSNDLMAKLGPIAAYIYRMKYKGDTHIAPDPELDMGGQFAHLIGQCDEYKDVARMYFILHSDHESGNVSAHTTHLVASALSDAYYSYAAGINGLAGPLHGLANQEVLAWTQNFMEKLGGKVPTKDELKAALWDTLNSGQVIPGYGHAVLRKTDPRYTSQREFCLNTPGLKEDPLFQLVAMIYEVAPDVLLEHGKAKNPWPNVDAQSGVIQWYYGLTEYDFYTVLFGVGRALGCLANITWDRALGYAIERPKSVTTAMLEDAAGIK

SEQ ID NO: 10436 - protein, 293 aa, Glycine max
MSNCLLTGYCLFRCSFLVYVAPIDTLFPKFKHYKFRHLPSTPTAARRRQKGAYFISLIITHTPTLIAMETGGFHGYRKLPNTTAGLKLSVSDMNMRQQVASSDHSAATGEENECTVREQDRFMPIANVIRIMRKILPPHAKISDDAKETIQECVSEYISFITGEANERCQREQRKTITAEDVLWAMSKLGFDDYIEPLTMYLHRYRELEGDRTSMRGEPLGKRTVEYATLGVATAFVPPPYHHHNGYFGAAMPMGTYVREAPPNTASSHHHHHHHHHHARGISNAHEPNARSI

SEQ ID NO: 10437 - protein, 260 aa, Triticum aestivum
  unsure (1)..(260): unsure at all Xaa locations
MAAGTGRVLPLLAVAAALAAALLYTAPFSKSLGGEGCSLLPHGHFWIASQRVVALGRVGPAAVEVKEGLINAIAVGDYRSFVLRRPLVDYGDAVIMPGLIDVHAHLDEPGRAEWEGFSTGTRAAAAGGITTLVDMPLNSFPSTVSEETLKLKVDAARDKLYVDVGFWGGLVPENALNPSKLESLLNAGVLGLKSFMCPSGINDFPMTNSTHIEEGLVTLAKYKRPLXLIHAERIPDVVSDEELDGYLKSRSYATYLKFRT

SEQ ID NO: 10438 - protein, 437 aa, Desulfuromonas palmitatis
MSTLKETLRKKIEEHRPRTTRLVKEFGDVKLGDVTISQAIGGARGIKCLVTDISYLDPMEGIRFRGKTIPETFAALPKVPGSDYPYVEGFWWMLLTGDVPTMEQTLEVVEDWKKRSQIPAYVIDVLRALPRDSHPMAMFSAAIVAMQRDSVFAKNYAAGKFNKMTCWEDMYEDANELMAKLGPIAAYIYRMKYKGDTHIPADPKLDMGGNFAHMMGVDKPYDDVARMYFILHSDHESGNVSAHTTHLVASALSDAYYSYAAGINGLAGPLHGLANQEVLAWTQNFMDKLGGKVPTKEELEKALWDTLNSGQVIPGYGHAVLRKTDPRYTSQREFCLKTPGLKEYPLFQLVSMIFEVAPDVLLKHGKAKNPWPNVDAQSGVIQWYYGVTEYDFYTVLFGVGRALGCLANITWDRALGYAIERPKSVTTAMLEDAAGIK

SEQ ID NO: 10439 - protein, 618 aa, Zea mays
MISPAMCRSAPRRAAQVRRLLSSAAPPAHAGAAVPGPCIVHKRGNDILHDPWYNKDTAFPMTERDRLGLRGLLPPRVMSFEQQYERFINSFRSLEHNTRGEPDSIVALAKWRILNRLHDRNETLYYRLLIDNIKDFAPIIYTPTVGLVCENYSGLFRRPRGMYFSAKDKGEMMSMIHNWPAEKVDMIVVTDGSRILGLGDLGVQGIGIPIGKLDVYVAAAGINPQKVLPIMLDVGTNNEKLLEDKLYLGLRQPRLEGEEYLAVVDEFMEAVHARWPKAVVQFEDFQMKWAFETLQRYRNRFCMFNDDVQGTAGVALAGLLGAVRAQGRPLQDFTNQKIVVVGAGSAGIGVLSMAKQAMLRMPGIHRTGEGHNQFWVLDKDGLITKARKDLDSAVARFARGFGPDEVPDLYEGASLVEVVKKVKPHVLLGLSGVGGIFNEEVLKAMKESDSPRPAVFAMSNPTTKAECTPDDVFKHVGDKAIFASGSPFSNVSLGNGKSGYANQANNMYLFPGIGLGALLSGARHVSDGMLQAAAECLASYITDDEIRKGILFPSVSSIRHITARVGAAVVRAAVAEDLAEGCCDVGPRELGSMSESEAVDYVARKMWYPIYSPLVSDK

SEQ ID NO: 10440 - protein, 326 aa, Archaeoglobus fulgidus DSM 4304
MKKIVVIPGDGIGKEVMEAAMLILEKLDLPFEYSYYDAGDEALEKYGKALPDETLEACRKSDAVLFGAAGETAADVIVRLRRELGTFANVRPAKAIEGIECLYPGLDIVVVRENTECLYMGFEFGFGDVTEAIRVITREASERIARYAFELAKREGRKKVTALHKANVMKKTCGLFRDVCREVAKDYPEIQYNDYYIDAACMYLVMDPFRFDVIVTTNMFGDIVSDLAAGLVGGLGLAPSANVGERTAIFEPVHGAAFDIAGKGIANPTAMILTACMMLRHFGYVEEAKKVEEAVEKTIKEGKKTPDLGGNLKTMEFANEVASLLD

SEQ ID NO: 10441 - protein, 497 aa, Glycine max
  unsure (1)..(497): unsure at all Xaa locations
MAALSNGHGSSFFKMPPIKFTKLFINGEFVDSLSGREFETRDPRTGEVITRIAEGAKEDVDVAVKAARAAFDYGPWPRMPGAERAKIMMKWADLVDQNIEEIAALDAIDAGKLYHWCKAVDIPAAASTIRYYAGAADKIHGEVLKASREFHAYTLLEPIGVVGHIIPWNFPSTMFVAKVSPSLAAGCTMVLKPAEQTPLSALFYAHLAKLAGIPDGVLNVVPGFGQTAGVAISLHMDIDKVSFTGSTEVGREVMRAAANSNLKPVSLELGGKSPVIVFDDADVDKAAELALLGILFNKGEICVAGSRVLVQEGIYDEFEKKLVEKAKAWVVGDPFDPKVQQGPQVDKFSSKSASAYKKTQTNGKKVLERGEIINYTRRQQVVEAKFKGQQFETNEXASPVMALMKFKTIEDAIKIANNTRYGLASGIVTKSLDTANTVSRSIRAGIVWINCYFAFGDDIPYGGYKMSGFGRDFGMEALHKYLQVKSVVTPIYNSPWL

SEQ ID NO: 10442 - protein, 338 aa, Triticum aestivum
  unsure (1)..(338): unsure at all Xaa locations
MKTLFILTILAMATTIATANMQVDPSGQVQWPQQQPFPQPQQPFSQQPQQIFPQPQQTFPHQPQQAFPQPQQTFPHQPQQQFPQPQQPQQPFPQQPQQQFPQPQQPQQPFPQQPQQQFPQPQQPQQPFPQPQQPQLPFPQQPQQPFPQPQQPQQPFPQLQQPQQPLPQPQQPQQPFPQQQQPLIQPYLQQQMNPCKNYLLQQCNPVSLVSSLVSMILPRSDCKVMRQQCCQQLAQIPQQLQCAAIHGIVHSIIMQQEQQQQQQQQQQQQQQQGIQIMRPLFQLVQGQGIIQPQQPAQLEVIRSLVLGTLPTMCNVFGPPECXTTXAPFASIVADIGXQ

SEQ ID NO: 10443 - protein, 172 aa, Zea mays
MAGIGRNMVAPLLVLNLIMYIIVIGFASWNLNHFINGQTNYPGVAGNGATFYFLVFAILAGVVGAASKLAGVHHVRAWRHDSLATNAASSLIAWAITALAFGLACKEIHIGGHRGWRLRVLEAFAFVIILAFTQLLYVLMLHTGLFGGSGGYRDHDYGVGGAAGEPKGVTRV

SEQ ID NO: 10444 - protein, 1027 aa, Chlamydomonas reinhardtii
MGCAQSTPVDQPARQQPQATQQKSVEPAVVKKPVEPARVEPKVEVPSTKPSEVPHVEKAQSINRGQPGDGSGPLQQPSPAMPGAKQGGTKERRAAAGSEAVRDQIRKLAVGGPQAKEEKEKIYEVSDSEDEELEDDPSERTTLSGDWYKPQEVTDAILEALKRNFVFKGIPQNHLVEVVGRMYGISFKSGAVVLQQGALPKQDDCMYYLQQGEAEVVISGGADASKNHGEERKVDGHTVRIPQKPGWLFGDVALLFHSPRTASVVAKTNITVWAMDRRTFLKFVMKHAQGARALRFLRKLPLLKGLSDNDLIRAASRMPQRMYEDGQPLIRIGERGDELFLIRYGKVRVFRPDGNGGRVEVAVLGRGQFVGERAVINDKLRSADCVAQGQVQVVVLKKREFMDLDNPLLAWMLDYDAVSAVIRSLPQFKGLKQEQMENILDRFDAREELMQGDTILNQGDMLEKLYVVKIGEIALFRNDERVEDPNFVHEIAGFSYFGETAITQTGKCPYTIRVASESLHLLSLPKRQVDSFMGRDTGLKNEEAVVAALKKSKFLANMTDPEFKELLKACEQTDYNPGEVIAVANSSVTNKIFLVKSGEVMVVAADLALPDTGEVDVRKLTGSERQRLLAGSIFNDKALNSPETASLEASLVAGTPCGIITFTTSDVERVMGGRAMSRSRNAMPGAAAAVEERKFPRVKFTELEFHRIIGTGQFGLVRVVRNIKTNEVYALKVMHKAPIVESKQIEHVINERKILEEACTHPFCVRLCGAYQDKASLYLLQEWVPGGELFHHLDVEGAFDEPTAMFYAANVLLALEFLHAKGIVYRDLKPENLLLDTQGYIKMADFGFAKYIGGDKTYTICGTPDYQAPEVIMRRGTTKAADYWALGVLIFEMLVGDPPFKSLTGDPWDTFRRTLSGRFYVPNFISDQAADLIFKLLQVNPDKRLGSDKRLGAEEIKRHRWFSRIDWRALEQKKLPSPFRPRVRNPLDTSNFDNFDNVDLEPPPVPADRAEKHSQQWELWDWIDDSK

SEQ ID NO: 10445 - protein, 477 aa, uncultured bacterium 561
MREYKQFYIDGEWVAPSAPSDFEVFDPATEEVCATISLGNETDVDKAVAAAKAAFETFSQTSVEERVALLERICEIYQRRLGDIAEAIRLEMGAPIKLASTAQAFAGLGHIAEAAKVLKTYAFTEDLGEHRVVKEPIGVCGLITPWNWPLNQVSCKVAPAIAVGCTMILKPSEIAPLSSYIYAEILHEAGVPAGVFNLVNGDGPTVGTALSVHPDVDMMSFTGSTRAGSLVAQNAAPTVKRVTQELGGKSPNIILEDADLEAAVTRGVLHMYNNTGQSCNAPSRMLVPRDKLAAAEAIAAKVTETMVTIGDTADDKTTMGPVVSKVQWDKIQGLINKGIEEGAKVVCGGAGLPDGIDRGYYVRPTVFSEVNNNMTVAREEIFGPVLTMIPYDSEEEAIKIANDTPYGLAGYVQGENIDHARQVASKIRAGNIHLNGASGGMDVPFGGFKQSGNGREWGSHGFTDYLEIKAIEGYSAA

SEQ ID NO: 10446 - protein, 475 aa, Staphylococcus aureus subsp. aureus MSSA476
MRDYTKQYINGEWVESNSNETIEVINPATEEVIGKVAKGNKADVDKAVEAADNVYLEFRHTSVKERQALLDKIVKEYENRKDDIVQAITDELGAPLSLSERVHYQMGLNHFVAARDALDNYEFEERRGDDLVVKEAIGVSGLITPWNFPTNQTSLKLAAAFAAGSPVVLKPSEETPFAAVILAEIFDKVGVPKGVFNLVNGDGAGVGNPLSEHPKVRMMSFTGSGPTGSKIMEKAAKDFKKVSLELGGKSPYIVLDDVDIKEAAKATTGKVVNNTGQVCTAGTRVLVPKKIKDAFLAELKEQFSQVRVGNPREDGTQVGPIISKKQFDQVQNYINKGIEEGAELFYGGPGKPEGLEKGYFARPTIFINVDNQMTIAQEEIFGPVMSVITYNDLDEAIQIANDTKYGLAGYVIGKDKETLHKVARSIEAGTVEINEAGRKPDLPFGGYKQSGLGREWGDYGIEEFLEVKSIAGYFK

SEQ ID NO: 10447 - protein, 160 aa, Bacillus subtilis subsp. subtilis str. 168
MSIYHMKVRTITGKDMTLQPFAGKVLMIVNTASKCGFTSQLKQLQELYDTYQQEGLEILGFPCNQFMNQEPGEEADIQEFCETNYGVTFPMFSKVDVNGKNAHPLFVYLTEHAKGMLGTKAIKWNFTKFIVDRNGEIVGRYSPNTNPKELEDDIVKLLEQ

SEQ ID NO: 10448 - protein, 246 aa, Glycine max
MYKNKNKHTHPPQRYSHHFEELHNFVFLDMGSLALETEDVISDIYLSLGLKESDKGVGGPRVLSLLSSLLERSVQRNETLLEAKHVKDVVTVFHGLRAPTLSVRKYIDRIFKYSGCSPSCFVVAHIYVDRFIQHTEIKLTSLNVHRLLITSIMLAAKFIDDAFYNNAYYAKVGGVSTSELNRLEMSFLFGIDFRLQFSVDTFGRYCRQLEKEAAEVVQIERPMQACRIKESWSNKDDPTCASTIAR

SEQ ID NO: 10449 - protein, 468 aa, Triticum aestivum
SARAAGKRLWDAGVRDLLILEATGRVGGRMHKHNFGGLNVEIGANWVEGLNGDKVNPIWPMVNASLKLRNFYSDFDGVVGNVYKGGGGLRDEEFVQKRMDRGDAVEELGGKLAAEMDPSGRDDISILAMQRLFNHQPNGPATPVDMVLDYFRYDYEFAEPPRVTSLQGTEPTATFADFGDDANFVADQRGFETLIYHIAGQYLRSDKSGNIVDPRVKLNKVVREISYDQRGVVVTTEDNSAYSADYVIVSASIGVLQSDLIQFKPQLPAWKILAIYRFDMGVYTKIFLKFPRKFWPTGPGKQFFVYASSRRGYYGMWQSFEQEYPGANVLMVTVTDVESRRIEQQPDNVTMAEAVGVLRNMFPDRDVPDATDIYVPRWWSNRFFKGSYSNWPVGVNRYEYDQLRAPVGGRVYFTGEHTSEHYNGYVHGAYLAGLTPGTFMNRAPQGELQPPHLVLSSPGHAIELVCVI

SEQ ID NO: 10450 - protein, 275 aa, Picrophilus torridus DSM 9790
MRLIENWFSERYSDNLQLSFRVQDQLLSVKTDYQRIDLFNTYDFGKLLSIDGTVQLTEKDEYIYHEMITMVPYYCTAKSDSALIIGGGDGGAAKRLIDLGIKRIVNVEIDQNVVEISRKYFPELADSFNNKNVELIIGDGIKYVKDTDESFDLIIIDSTDPVGPAEGLFNKSFYENARARLSDDGIIVTQSGSPYYQPEALKMATKGMLDVFSNVRTYIAFIPTYPSGLWSFTMASKSEIMQRKDNIIPGRYFNEDVLKGSFYLPEFVKNIIKSI

SEQ ID NO: 10451 - protein, 131 aa, Prochlorococcus marinus str. MIT 9313
MSKKTDDILDSLKTLSLLEASELVKQIEDAFGVSAAASAGVVVAAGGAAGGGAAAEAAEEQTEFDVVLESFDASAKIKVLKAVREATGLGLGDAKAMVEAAPKTIKEGIAKNDAEALKKAIEEVGGKVSLK

SEQ ID NO: 10452 - protein, 437 aa, uncultured bacterium 561
MDRKTLEAHWMPYTGNRQFKKDPRIITSAEGVWYTDDKGRKVLDGHSGLWTSGLGHGRKEISAAVSQQINTLDFAPSFQFGHPPAFELADRIKGLMPEDLDYVFFTNSGSESADTSLKMARAYWRLMGQPTKTRFVGRMKGYHGVNFGGISVGGIAANRKFFGQGVEADHLRHTMLPQNRFCRGMPQDGAELADELNEMIALHDASTIAAVIVEPMAGSAGVIPPPVGYLQKLRDICDANDILLIFDEVITGFGRCGAMTGADAFGVVPDILNVAKQITNGAIPMGAVIARAGIYDTFMAHGGPDYALEFAHGYTYSAHPVACAAGLAALDVLTGEALPQRVADEAPFFEALLHDALSDKPHVSDVRNYGFAGAITLEPYPGEPLRRPFEVAMKMWEKGFLVRYGGDTIQLAPMFVMERPEMESLVGALADSLQELA

SEQ ID NO: 10453 - protein, 472 aa, Burkholderia cepacia R18194
MNLINGERVAGDGEAFPVVNPATGETVVTMRDASAEQVDAAVAAAAAAFPSWSATPPGARAARLLALADAIEERADEFAALESLNCGKPLHAVKADELPLTVDVFRFMAGAARCVSASSAGEYVAGFTSMIRRDAVGVVGSIAPWNYPLMMAAWKLAPALAAGCPVVLKPSELTPLTSLRVAELAAELFPRGVVNVVVGRGATTGDALINHRQLDLVSLTGGPATASRILEASSRKLMHTHMELGGKAPVIVFDDTNLDAAVEGIRNAAFFNAGQDCAQPCRLYVEDGIYDTFVANLANRVASIRLGAPDDTRTEMGPVISEGHRRRIAGFVDRARDLRHVEILTGGRDVAGGGYFYEPTIVAHARQDDEIVQREVFGPVISVTRFSGAEQAIHYANDSPYGLASSIWTRDVGKAMTVASRLRCGITWINAHGVATAEMPHGGMKASGYGSDMSVYALENYTTVRHVQIAHA

SEQ ID NO: 10454 - protein, 681 aa, Glycine max
MSGGGCSIVWFRRDLRVEDNPALAAGVRAGAVVCVFIWAPEEEGQYYPGRVSRWWLKQSLAHLDSYLRNLGSPLITKRSTNSISSLLEVVKSTGATQLFFNHLYDPLSLVRDHKAKEVLTAQGITVRSFNSDLLYEPWDVNDAHGQPFTTFSAFWERCLSMPYDPQAPLLPPKRIIPGDVSRCPSDTLVFEDELEKASNALLGRAWSPGWSNADKALTAFVNGALIEYSKNRRKADSATTSFLSPHLHFGEVSVKKVFHLVRIKQVFWANEGNKAGEESVNLFLKSIGLREYSRYISFNHPYSHERPLLGHLKFFPWVVNEGYFKAWRQGRTGYPLVDAGMRELWATGWLHDRIRVVVSSFFVKVLQLPWRWGMKYFWDTLLDADLESDALGWQYISGTLPDGREIDRIDNPQFEGYKCDPNGEYVRRWLPELARLPTEWIHHPWNAPESVLQAAGIELGSNYPLPIVGIDAAEVRLQEALIQMWQQEAASRAAMENGTEEGLGDSSESAPIAFPQDIQMEERPEPVRNNPPHGTRRYQDQMVPSITSSHVRVEEEETSSDLRNSAADSRAEVPINVTTQQNARETVNQGVLLNTNRNTRVQNNPTTWLRNAAEDSTAESSSSTRRERDGGVVPVWSPPASNFSEQFVDDENGIGTGSSYLQRQHPQSHQLMNWTRLPQTG

SEQ ID NO: 10455 - protein, 205 aa, Pyrobaculum aerophilum str. IM2
MARSGRYKVPFRRRREGLTNYRKRRKLLLSKKPRLVVRKTNKHIIAQIVVAKPQGDVTIVGADTRILAKFGWRGDENNVAAAYLLGLVVGYKARARRVEEAILDIGLHRPAPGARVFAVLKGALDAGLKIPHGEEVLPDEDRIKGKHVAEYAEKLKEENPEAYKARFSRYLQRGLEPEKLPEHFEEVKKKIVEYYEKKLAKVAAQ

SEQ ID NO: 10456 - protein, 406 aa, Burkholderia cepacia R18194
MGPDVIDIRKLYGQTGKFTYDPGFMSTAACNSAITYIDGDKGELLYRGYPIDNLAQNADFLESCYLLLKGELPNAAQKKEFVDTVTKHTMVHEQMHFFFRGFRRDAHPMAILVAAVGALSAFYHDSLDINDPRHREVSAIRMIAKLPTLVAMAYKYSIGQPFVYPKNSLSYSANFMHMMFSNPCEEYKVNDVLVRALDRILILHADHEQNASTSTVRLAGSSGANPFACIAAGIACLWGPAHGGANEAALNMLEQIGSPDNIPEFIKQVKDKNSGVKLMGFGHRVYKNYDPRAKLMRETCYEVLNELGLHDDPLFKLAMQLEKIALEDEYFVSRKLYPNVDFYSGIVQRALGIPTSMFTCIFAMARTVGWIAQWNEMIGDPEQKIGRPRQLFIGDTPREAKPLNAR

SEQ ID NO: 10457 - protein, 218 aa, Mesorhizobium loti MAFF303099
MKFFVDTADIKDIRELNDLGLLDGVTTNPSLILKSGGKIADVTKQICDIVQGPVSAEVVATEYKDMMAEAEVLAKIAPNVCIKVPLTLDGLKACKTIRTQMNRMVNVTLCFSANQALLAAKAGASFISPFVGRIDDTGSDGMELIQEIRQIYDNYDYQTEILTASVRTVNHVKQAALIGADVITAPPATLKALVNHPLTDKGLAAFLADWAKTGQKIG

SEQ ID NO: 10458 - protein, 196 aa, Physcomitrella patens
MSTSRFIKCVTVGDGAVGKTCMLISYTSNTFPTDYVPTVFDNFSANVVVDGNTVNLGLWDTAGQEDYNRLRPLSYRGADVFLLAFSLISKASYENISKKWIPELRHYAPSVPIILVGTKLDLRDDKQFFADHPGAAPITTSQGEELRKAIGAASYIECSSKTQQNVKAVFDAAIKVVLQPPKQKKKKKKQKNCVIL

SEQ ID NO: 10459 - protein, 137 aa, Glycine max
  unsure (1)..(137): unsure at all Xaa locations
ARSMISFPAVTTVNRAGAGMVVPFTGLKPMAGSPTINTNNDITFIASRGGRVQCLHVCPPADKNNLETLSYLPDLDXAQSSKREEYLLTTGWLRCXGIRIKHGFVIREHTTLPGFYNGLLGTMWILPIDSCSHASNV

SEQ ID NO: 10460 - protein, 106 aa, Glycine max
  unsure (1)..(106): unsure at all Xaa locations
AASQSGDSSLLPLLFRVEPMDIVGKAKEDASLPKATMTKIIKEMLPRGGRVDRDAQDLXTSXCVEVINLDWSEGNEVCRKEERRTIAPEHLLKASRALEFGEYIRE

SEQ ID NO: 10461 - protein, 300 aa, Geobacter bemidjiensis
RPFEALPKAAGSEYPTVESFWYFLLTGEVPTAAQVSAVEAEFKTRQVVPEYVYTAVRALPKESHPMVMLSVGIMAMQKDSKFAAFYSGGKFNKMDAWESVYEDASDIVARIPVLAAFIYNLKYRGDKQIAIDPKLDMGANFAHMIGQSEQYKDVARMYFILHSDHESGNVSAHTTHLVHSALSDPYYAYSAGLNGLAGPLHGLANQEVLGWIMEFQKKLNGAEPTKENVTKALWDTLNAGQVVPGYGHAVLRKTDPRYTAQREFCLKTPGLKDDQLFKLVAMIFETAPGVLTEHGKTKNP

SEQ ID NO: 10462 - protein, 279 aa, Pisum sativum
MSRREEEVRLITEPGFVDSTGQDKYNFPSIVCCRFTNKDIVAQIVSASIAGDIVLCAAYAHELPHYGLEVGLTNYAAAYCTGLLLARRVLKTLEMDEEYEGNVEASGEDYSVEPADSRRPFRALLDVGLVKTTTGNRVFGALKGALDGGLDIPHSDKRFAGFDKEKKELDAEVHRKYIFGGHVTAYMKTLIEDEPEKYQTHFSQYIKKGIEADGIEELYKKVHAAIRADPANKKAEKQPPKEHKRYNLKKLTYDERRTKLIARLEALNSAVDEDEDDDE

SEQ ID NO: 10463 - protein, 487 aa, Burkholderia cepacia R18194
MHIKQLYIDGAWQPAAAGGQRAIIDPATGEAIARVAYGSAADAGHAIRAARAAFDAGEWPHLPAEERAACLRRLANALRDEAPALARIETANTGKTLAESSSDVHDAASAFDYFASLAVTETGSMNAAKPHVISVTLREPVGVCGLITPWNYPLLQAAWKLAPALVAGNTVVVKPASLTPLSTHRLVELAHDAGLPRGVLNLVTGGADVGDALAASPQVDLISLTGSNAAGASVMRAAAGNFKRVSLELGGKNPNLVFADADVDTALDYALNAAFFNAGQMCSAGSRLLVERTLHDAFVDALAARIAAIRVGRGDDDATRMGPVISAQQRDRVLALIGEAARDGARIVCGGRAPAGDAFATGFWVEPTLIAGVRTTMAIAREEVFGPVLTVEAFDSEDEAVALANDTPFGLAGAVWTRDFARANRVMRRLRAATVWINDYNVTLPGAPWGGYKASGIGRELSRSGLDEYTELKHAYLNFEASPQRWF

SEQ ID NO: 10464 - protein, 299 aa, Desulfuromonas acetexigens
KAKGSKYPTVESFWYFLLTGDVPTQAQVDAVVAEWKTRQIVPSYVWDAIRALPRDSHPMVMLSVGILALQKDSKFAAFYNSGKFNKMTAWESVYEDASDLCARIPIIAAFIYNLKYRSDFQTAIDPNLDMGANFAHMIGQCEEYKDVARMYFILHSDHESGNVSAHTTHLVHSALSDPYYAYSAGLNGLAGPLHGLANQEVLDWTLKFQEKYCKDVEPTKELVTKALWDTLNAGQVVPGYGHAVLRKTDPRYMSQREFCLNTPGLKDDKLFKLVAMIFETAPGVLTEHGKAKNPWPNVD

SEQ ID NO: 10465 - protein, 322 aa, Oryza sativa (japonica cultivar-group)
MSVIDILTRVDAICQKYGRYDAEKLHGSGVAGEDPFARLYASVDADLNECLEKAEAAKQEKNRATVVALNAEIRGTKAKLLEEDLPKLQRLALKKVKGLSKEELAIRGDLVTALPDRIQSIPDGSATSSKKTGLWGSSGSRAGTGIKFDSTYDLEWKLIYVGSAEDENYDQLLESVLVGPVNVGTYRFVLQRPVLILHWTCCIFAAILDADPPDPSKIRKEDIIGVIVLLLTCSYMGQEFIRVGYYVNNDNDDEQLREEPPAKLLIDRVQRNILADKPSVTKFPINFHPETSAGAGQEQQQQQQSGSPENHPNQGSKPNPDQ

SEQ ID NO: 10466 - protein, 159 aa, Glycine max
MDFRVMGLESPLFHTLQHMMDMSEDGAGDNKTHNAPTWSYVRDAKAMAATPADVKEYPNSYVFEIDMPGLKSGDIKVQVEDDNVLLICGERKRDEEKEGVKYLRMERRVGKFMRKFVLPENANTDAISAVCQDGVLSVTVQKLPPPEPKKPRTIEVKVF

SEQ ID NO: 10467 - protein, 292 aa, Malonomonas rubra
GFWYLLLTGDVPTMEQTLEVVEDWNQRSAVPEYVIDVLRALPRDSHPMAMFSAAIVAMQRESVFASNYAAGKFNKMTCWEDMYEDANTLMARLGPIGAYIYRMKYKGDTHIAPDPELDMGGQFAHMIGQSDEYKDVARMYFILHSDHESGNVSAHTTHLVASALSDAYYAYSAGINGLAGPLHGLANEEVLRWTQNFMQKLGGEVPTEEGLKEALWATLNSGQVIPGYGHAVLRKTDPRYTSQREFCMNTSGLKEYPLFQLVKMIFEVAPGVLTEKNPWPNVDAQSGVIQWY

SEQ ID NO: 10468 - protein, 174 aa, Triticum aestivum
MAPAVMASSATTVAPFQGLKSTAGLPVSRRSRGSLGSVSNGGRIRCMQVWPIEGIKKFETLSYLPPLSTEALSKQVDYLIRSKWVPCLEFSKVGFVFREHNSSPGYYDGRYWTMWKLPMFGCTDATQVLNEVEEVKKEYPDAYVRVIGFDNLRQVQCVSFIAFRPPGCEESGKA

SEQ ID NO: 10469 - protein, 243 aa, Zea mays
MFGYRKAGPDLEAGGSSLLYPGMTESPELRWAFVRKIYVILAVQLAMTAAVSAFVVKVPAVSNFFVSSNAGVALYIFLIILPFLVLCPLRYYHQKHPVNLLLLGLFTVAISFAVGMTCAFTSGKIILEAAILTAVVVISLTAYTFWAAKRGHDFNFLGPFLFAAIMVLMVFSLIQIFFPLGKISVMIYGGLASLIFCGYIIYDTDNVIKRYTYDEYIWAAVSLYLDVINLFLSLLQLLRAADS

SEQ ID NO: 10470 - protein, 464 aa, Arabidopsis thaliana
MENKPSVLTDKYDVGRLLGQGTFAKVYYGRSILTNQSVAIKMIDKEKVMKVGLIEQIKREISVMRIARHPNVVELYEVMATKTRIYFVMEYCKGGELFNKVAKGKLRDDVAWKYFYQLINAVDFCHSREVYHRDIKPENLLLDDNENLKVSDFGLSALADCKRQDGLLHTTCGTPAYVAPEVINRKGYDGTKADIWSCGVVLFVLLAGYLPFHDSNLMEMYRKIGKADFKAPSWFAPEVRRLLCKMLDPNPETRITIARIRESSWFRKGLHMKQKKMEKRVKEINSVEAGTAGTNENGAGPSENGADEPTNLNAFDLIALSAGFDLAGLFGDDNKRESRFTSQKPASVIISKLEEVAQRLKLSIRKREAGLFKLERLKEGRKGILSMDAEIFQVTPNFHLVEVKKSNGDTLEYQKLVAEDLRPALSDIVWVWQGEKDELTSQQETEYQQQQQQEQQEQEEPLKF

SEQ ID NO: 10471 - protein, 489 aa, Pirellula sp. 1
MSTTLPEIAPPKVRHTQLFIDGQWRDSASGKTFATINPATEEEIVQVAEGDKEDIDAAVKAARKAFESGPWRTMDARDRGRLMMKLADAIENEIDELAQLETLDNGKPLRESRHADLPLVIDALRYYAGYADKIQGETVPIRGNYLCYTRKEPVGVVGQIIPWNFPMLMVAWKWGPALATGCTIVMKPAEQTPLTCLRMAQLAKEVGFPDGVINVVPGFGPTAGGALVDHPGVDKIAFTGEHRTAQLIMKNSAQSLKRLTFELGGKSPNVIFSDADLDAAVQGSFVGLYLNQGQCCCAGSRVFVEESIHEAFVEKLTDLTNKRVVGNPFEHTTEQGPQIDQAQFDKIMSYIDKGNQQGASCVSGGKRSGDRGYFIEPTVFTDVQDDMAIARDEIFGPVMSVLSFKDSDDILKRANDTMFGLAAAVWTQDIKKAHHFAANVRAGTVWVNCYDVFDAAAPFGGFKMSGQGRELGTEGLKAYLESKTVTVAL

SEQ ID NO: 10472 - protein, 298 aa, Triticum aestivum
  unsure (1)..(298): unsure at all Xaa locations
MEAVARASIAAGSHARVPLCRRPRPRHAVRCLRGRPSVACAAAADADVVRLFDAAKLTVDEFVKSGMVVGLGSGAASGLAVQYLGTRLRRGSLTGIVGIPSXSVICASEAEKAGIKVGSHEEGAQIDFAFADADVIEEGTLAAVIGRGKTESGQPSFIQEKGIVESADKVAFIIDNDKYVNGIEGSIPVLVKSGNWIDTAEEIDDLFLGDAEVWRRPSIGTAGPSGGDFPLVTKEGHHILDVIFTTPIQDLGKVAEGLEKIVGVVDHGIICNTMPYAVIASKGEVQVLDRKSSVIPNT

SEQ ID NO: 10473 - protein, 193 aa, Lactococcus garvieae
MKRIAVLTSGGDAPGMNAAIRAVVRKAISEGIEVYGINHGYAGMVAGDIFPLTSASVGDKVGRGGTFLYSARFPEFAQLEGQLAGIEQLKKHGIEGVVVIGGDGSYHGAMRLTEHGFPAVGLPGTIDNDIVGTDFTIGFDTAVSTVVDAIDKIRDTSSSHHRTFVVEVMGRNAGDIALWSGIAAGADDIAIPE

SEQ ID NO: 10474 - protein, 128 aa, Synechococcus elongatus PCC 6301
MSAKTDEILESLKTLTLLEAAELVKQIEEAFGVSAAAPVGGVVVAAAAGAAAEAVEEKTEFDVVLEEVPADKKIAVLKVVRGITGLGLKEAKDLVEAAPKPIKEGVSKDDAEAAKKELEEAGAKVSVK

SEQ ID NO: 10475 - protein, 286 aa, Synechococcus elongatus PCC 6301
MSADAPVWIDEVFEDRVRYGLRGQILWEETSPFQKITIVDTEHYGRGLLLDDCWMTAERCEVCYHEYLVHPPLTTAASIARVLVIGGGDGGTVREVLRYAEVEQVDLVEIDGRVVELSQEYLGAIGTAWADPRLNVKIGDGIAFVQTAPDASYDVILVDGSDPAGPAAGLFNREFYENCRRVLKPGGVFASQAESPDSFLAVHLEMIETLSAVFAEAKPYYGWVPMYPSGWWSWLYASDTPGQFQKPQSDRLAAIEPQVEIYNRDIHQAAFAQPNFVRRGLSARQG

SEQ ID NO: 10476 - protein, 432 aa, Oryza sativa (japonica cultivar-group)
MLISEYNWNATYKFDMFSTHEHEALQKREPIKAHLLSQPTRYVILVAHAMSAISRPSIILGAHTVTTNGSSARTHEAERNSTVERSTHVLKAASSPKSPKSPIRISPPRRRCGRSSPPLSLLFPHGDRHRVALRGGEVMWLGFVCSIRHVEGFMASPHSQEVKRWVLSDFDIGKPLGRGKFGHVYLAREKRSNHIVALKVLFKSQLKQSQVEHQLRREVEIQSHLRHPNILRLYGYFYDTRVYLILEYALKGELYKELQRCKHFSERRSATYIASLAHALIYLHGKHVIHRDIKPENLLIGSQGELKIADFGWSVHTFNRRRTMCGTLDYLPPEMVEKTEHDYHVDIWSLGILCYEFLYGVPPFEAKEHSETYRRIVKVDLKFPLKPFVSPAAKDLISQMLVKNSAHRLPLHKLLEHPWIVQNADPSGVYRG

SEQ ID NO: 10477 - protein, 342 aa, Glycine max
MAAENVVEFTDLPVKRPREEEEEEEEQTNGVSNDAVSTLPNDPQYPGISAVIPGWFSEISPMWPGEAHSLKVEKILFQGKSDYQNVMVFQSSTYGKVLVLDGVIQLTERDECAYQEMITHLPLCSISNPKKVLVIGGGDGGVLREVARHASVEKIDICEIDKMVVDVSKQFFPDIAVGFEDPRVTLTVGDGVAFLKNVPEGTYDAVIVDSSDPIGPAQELFEKPFFASVAKALRPGGVVCTQAESIWLHMHIIEDIVANCRQIFKGSINYAWTTVPTYPSGMIGFMLCSTEGPLVDFKHPVNPINENDSQQSRPLKFYNSEIHTAAFCLPSFAKRKIGSKTN

SEQ ID NO: 10478 - protein, 375 aa, Kineococcus radiotolerans SRS30216
MSDYYDVLGVSRDASAEDIKRAYRKLARKLHPDVTSDPDAGEKFKEVSQAYETLSTPDKRAAYDRGGSMPGGAAGGFGAGFGFSDIMDAFFGQGGGGRPGAPASRTQRGQDALIRVDVDLAEAAFGGERSIQVDTAVLCTTCQGSCCQPGTSPATCDICHGQGSVQRVVRSLLGQVMTTAPCPTCHGYGTVLPSPCLECNGEGRTRARRPLTIRIPAGVDTGTRIQLASQGEVGTAGGPPGDLYVEIHERPHPVFSRNGDDLLCTLHVPMTAAALGASIPLETLDGSAEEVDVRPGTQGGEVITLKQKGAEHLRAQGRGDLLVTLEVTTPRDLDDEQEELLRRLAELRGEVRPAGKLAPAHQGVFSKLRGKFSGR

SEQ ID NO: 10479 - protein, 287 aa, Glycine max
FGSRQDGIDAIEDVIYHIETYDVTTIRASIPMFLMSRKIKSLGVKMVISGEGSDEIFGGYLYFHKAPNKEEFHQETCRKIKALHKYDCLRANKSTFAWGLEARVPFLDKEFIRVAMNIDPECKMIKKEEGRIEKWALRRAFDDEEHPYLPKHILYRQKEQFSDGVGYGWIDGLKAHAEKHVTDRMMLNAANIFPFNTPTTKEAYHYRMIFERFFPQNSARLTVPGGPSVACSTAKAVEWDAAWSNNLDPSGRAALGVHASAYGNQVKAVEPEKIIPKMEVSPLGVAI

SEQ ID NO: 10480 - protein, 288 aa, Prochlorococcus marinus subsp. pastoris str. CCMP1986
MEIPKIQWYPGHIAKAEKKLTEVINRVDLVIEVRDARIPLSTGHPHLNQWIRNKKHILVINRADMISTETITNWNKWFKKDNIYPLWCDAKNGKGIKEICKSAKESRLSIDNKRLSRGMKVRPIRALTLGFPNVGKSALINRIAKKKVVESARKAGVTRNLRWIRLDNGIDLLDAPGVIPPNLENQKSALNLALCDDIGEAAYEIESVAIEFIKIIFKLKEDKNANISLSKISDRYGVDILKNFDNPHEWIDLVALKHTSGDKRRMAHKLLEDYRNQMLGKISLEVPR

SEQ ID NO: 10481 - protein, 181 aa, Zea mays
MASSMLSSAAVVTSPAQATMVAPFTGLKSSAAFPVTRKANNDITSIASNGGRVSCMKVWPPVGKKKFETLSYLPDLTEVELGKEVDYLLRNKWIPCVEFELEHGFVYREHGSTPGYYDGRYWTMWKLPLFGCTDSAQVLKEVQECKTEYPNAFIRIIGFDNNRQVQCISFIAYKPPSFTGA

SEQ ID NO: 10482 - protein, 528 aa, Glycine max
MAEVAAPKKENPNLLLGRFELGKLLGHGTFAKVHHARNIKTGEGVAIKIINKEKILKGGLVSHIKREISILRRVRHPNIVQLFEVMATKTKIYFVMEFVRGGELFNKVAKGRLKEEVARKYFQQLVSAVEFCHARGVFHRDLKPENLLLDEDGNLKVSDFGLSAVSDQIRHDGLFHTFCGTPAYVAPEVLARKGYDGAKVDIWSCGVVLFVLMAGYLPFHDRNVMAMYKKIYKGEFRCPRWFSSELTRLFSRLLDTNPQTRISIPEIMENRWFKKGFKQIKFYVEDDRVCSFDEKQLQHHDGDDYLATSDSEVEIRRKNSNCNSTSNGNSLPRPASLNAFDIISFSQGFDLSGLFEEKGDEARFVSSAPVSKIISKLEEVAQLVSFTVRKKDCRVSLEGCREGVKGPLTIAAEIFELTPSLVVVEVKKKGGDKAEYEKFCNSELKPALENLGMEDSASSSSSCHQSTHTQSEFQQQHRTFSDSALNRHSDNNECLYDQELGLAEETSIPQLGEPKFEFQQENVPMFTI

SEQ ID NO: 10483 - protein, 376 aa, Thermotoga maritima MSB8
MDALEIHRFLKGKIRTALPVEKVDRETLSLLYTPGVADVARACAEDPEKTYVYTSRWNTVAVVSDGSAVLGLGNIGPYGALPVMEGKAFLFKAFADIDAFPICLSESEEEKIISIVKSLEPSFGGINLEDIGAPKCFRILQRLSEEMNIPVFHDDQQGTAVVVSAAFLNALKLTEKKIEEVKVVVNGIGAAGYNIVKFLLDLGVKNVVAVDRKGILNENDPETCLNEYHLEIARITNPERLSGDLETALEGADFFIGVSRGNILKPEWIKKMSRKPVIFALANPVPEIDPELAREAGAFIVATGRSDHPNQVNNLLAFPGIMKGAVEKRSKITKNMLLSAVEAIARSCEPEPERIIPEAFDMKVHLNVYTAVKGSA

SEQ ID NO: 10484 - protein, 445 aa, Oryza sativa (japonica cultivar-group)
MYKAKRTAAQKVRRCLGKYELGRAIGQGTFAKVRFAKNMETGDHVAIKILDKAKVQKHRLVEQIRREICTMKLIQHPNVVHLHEVMGSKTRIFIVLEYVMGGELHDIIATSGRLKEDEARKYFQQLINAVDYCHSRGVYHRDLKLENLLLDTAGNIKVSDFGLSAISEQVKADGLLHTTCGTPNYVAPEVIEDKGYDGALADLWSCGVILFVLLAGYLPFEDENIVSLYNKISGAQFTCPSWFSAEAKRLIARILDPNPATRITTSQVLQDQWFKKGYESPVFDDKYYPYFHDVYDAFGDSEEKHVKEAMEEQPTLMNAFELISLNKGLNLDNFFESDKKYKRETRFTSQCPPKEIINRIEEAANLLGFNIQKRNYRMRMENIKEGRKGHLNIATEVFQVAPSLHVVELKKAKGDTLEFQKFYQTLSTQLKDVVWELEDAAEDMS

SEQ ID NO: 10485 - protein, 224 aa, Glycine max
  unsure (1)..(224): unsure at all Xaa locations
MEDGAGRGLECQKTMDGKVSNSNGPEKEIPSCCLKAKASIPESEAKFHSTVVSGWFSASQTCSGKSGKAVYFNNPMWPGEAHSIKVEKILYKEKSEYQEVLVFESSTYGKVLVLDGIVQLTEKDECAYQEMIAHLPLCSIHSPKNVLVVGGGDGGVLREVARHSSVEHIDICEIDKMVIDVSRKFFPQLAVGFEDSRVHLHVGDAVDXLKSAPEGEYDAIIVDS

SEQ ID NO: 10486 - protein, 114 aa, Solanum tuberosum
MEMFGKIACFVLLCMVVVAPHAEALSCGQVTSGLAPCLPYLQGRGPIGGCCGGIKGLLGAAKTPADRKTACTCLKSAASAIKGINVGKAAGIPRVCGVNIPYKISPSTDCSKVR

SEQ ID NO: 10487 - protein, 114 aa, Solanum tuberosum
MEMFGKIACFVLLCMVVVAPHAEALSCGQVTSGLAPCLPYLQGRGPIGGCCGGIKGLLGAAKTPADRKTACTCLKSAASAIKGINVGKAAGIPRLCGVNIPYKISPSTDCSKVR

SEQ ID NO: 10488 - protein, 128 aa, Archaeoglobus fulgidus DSM 4304
MKQQVEVRQLREGGYVVIDDEPCEILSISVSKPGKHGAAKARIDAIGIFDSQKRSIVQPVTAKIYVPIVERKRAQIISVTGNVAQLMDLETYETFELEVPEELKDKMEQGREVIYLESLGKRKIERMA

SEQ ID NO: 10489 - protein, 412 aa, Archaeoglobus fulgidus DSM 4304
MQYEKVKPPENGEKIRYENGKLIVPDNPIIPYFEGDGIGKDVVPAAIRVLDAAADKIGKEVVWFQVYAGEDAYKLYGNYLPDDTLNAIKEFRVALKGPLTTPVGGGYRSLNVTIRQVLDLYANVRPVYYLKGVPSPIKHPEKVNFVIFRENTEDVYAGIEWPRGSEEALKLIRFLKNEFGVTIREDSGIGIKPISEFATKRLVRMAIRYAIENNRKSVTLVHKGNIMKYTEGAFRDWGYEVAKQEFGEYCITEDELWDKYGGKQPEGKIVVKDRIADNMFQQILTRTDEYDVIALPNLNGDYLSDAAAALIGGLGIAPGSNIGDGIGVFEPVHGSAPKYAGQNKVNPTAEILTGALMFEYIGWKDASEMIKKAVEMTISSGIVTYDIHRHMGGTKVGTREFAEAVVENLQSL

SEQ ID NO: 10490 - protein, 493 aa, Zea mays
MASPFSVPSLIMEEEGRFEAEVAEVESWWGTERFRLTKRPYTARDVVLLRGTLRQSYASGEMAKKLWRTLKARMSLPRAERARAPYVDFLKPIIADGDTGFGGATATVKLCKLFVERGAAGVHLEDQSSVTKKCGHMAGKVLVAVSEHVNRLVAARLQFDVMGVETVLVARTDAVAATLIQTNVDARDHQFIVGATNPGLRGQSLAAVLSAGMSAGKSGRELQAIEDEWLAAARLKTFSECVRDAIAGLGVAGQEKQRRLQEWDRATGGYDRCVSNDQARDIAASLGVTSVFWDWDLPRTREGFYRFRGSVAAAVVRGRAFAPHADVLWMETSSPNVAECTAFAEGVKAACPEAMLAYNLSPSFNWDASGMTDAEMAAFIPSVARLGYVWQFITLAGFHADALVTDTFARDFARRGMLAYVERIQREERINGVETLEHQKWSGANFYDRVLKAVQGGISSTAAMGKGVTEEQFKDPRPATGSSGLQVMAKSRI

SEQ ID NO: 10491 - protein, 175 aa, Oryza sativa
MAPTVMASSATSVAPFQGLKSTAGLPVSRRSTNSGFGNVSNGGRIKFMQVWPIEGIKKFETLSYLPPLTVEDLLKQIEYLLRSKWVPCLEFSKVGFVYRENHRSPGYYDGRYWTMWKLPMFGCTDATQVLKELEEAKKAYPDAFIRIIGFDNVRQVQLISFIAYKPPGCEESGGN

SEQ ID NO: 10492 - protein, 326 aa, Arabidopsis thaliana
MDRISGLPDEVLVKILSFVPTKVAVSTSILSKRWEFLWMWLTKLKFGSKRYSESEFKRLQCFLDRNLPLHRAPVIESFRLVLSDSHFKPEDIRMWVVVAVSRYIRELKIYSSHYGEKQNILPSSLYTCKSLVILKLDGGVLLDVPRMVCLPSLKTLELKGVRYFKQGSLQRLLCNCPVLEDLVVNLSHHDNMGKLTVIVPSLQRLSLSTPSSREFVIDTPSLLSFQLVDRNDNSHTFLIENMPKLREAYINVPFADIKSLIGSITSVKRLAISSEVGYGEGFIFNHLEELTLWNKYSSNLLVWFLKNSPNLRELMLVSETDVSFFH

SEQ ID NO: 10493 - protein, 175 aa, Triticum aestivum
MAPAVMASSATTVAPFQGLKSTAGLPISCRSGSTGLSSVSNGGRIRCMQVWPIEGIKKFETLSYLPPLSTEALLKQVDYLIRSKWVPCLEFSKVGFVFREHNSSPGYYDGRYWTMWKLPMFGCTDATQVLNEVEEVKKEYPDAYVRVIGFDNMRQVQCVSFIAFRPPGCEESGKA

SEQ ID NO: 10494 - protein, 263 aa, Magnetospirillum magnetotacticum MS-1
MGRGRDFRGPQKRGFDDGGAEPRWPDELPPGGGDRFGGGGNRFGGGGGGGFDRGPARAPVAPSGPERDATVKWFNKEKGFGFVELGDGSGDAFLHIRAVEAAGHDDLLPGTRLTVQTAQGQKGPQVTSVTSVDTSTAEAAPPRREAGPRFGGGDRFGGGDRFGGGDRFGGGGDRFGGGGRDRFGGGGRVASGPSVEMTGTVKWYDPAKGFGFVSVNDGGKDVFVHRSALSRAGLDSLAEGQQVTLNVVDGQKGREAQSINVDY

SEQ ID NO: 10495 - protein, 342 aa, Pirellula sp. 1
MKALQLSAPKQWEQIEIDEPSPPGPGEALVRIHRVGVCGTDLGGYLGKFPFFSYPRIPGHELGVEVVAVGEGVENVKVGDRCSVEPYINCQKCYSCERGLTNCCESHQTLGVMCDGGLTEKMILPARKLHPANNLSYEQSALVETLAIGCHAIDRAHVTEKDTVLVIGSGPIGLSAIEFARVAGARVIVADLSQTRLDFVTEKMGMTDTIQFDGSEADIEKLEAMTDGRRADVVVDATGNHHSMRRAMEMAAFGGRVVYVGITQQDLQFPHAPFLHRRELTILASRNALTGDFARIIQLIESGVIDTDPWITHHAKFEEVIESFPAWTDPESGVVKAVIHIS

SEQ ID NO: 10496 - protein, 470 aa, Pirellula sp. 1
MVGLFSLSSLMARTLIRNAQAVLPGDGIHSSSGTVDLRHVLIEDGKILDADASSTASCDHLIEADDLFLLPGVIDDQVHFREPGLTHKEDLATASHACAAGGVTTFLEMPNTKPPAITIEGVQAKEALAAEKSLVNYGFYIGATPDNVAELNAAQNVPGIKIFIGSSTGNLLVDEQAALERIFAETTLPICAHCEDETTVRANAERLAGTTDIHDHSRIRDEAAAVISTARATELARRHQHRFHVLHVSTGAELVSLVDPSPYLTAEVCPHHLFFNVDDYDRLGSLIQMNPSIKTAEDNAKLWQALQDDVIQVIATDHAPHTLEEKAQPYPQSPSGLPAVENSLALMLNQCNAGKVTLPQIAHWMSDAPARVWGITGKGRIANGYDADLVLVRMNSERTIRDEDQHTKNRWSPWNGETLRGWPVTTIVNGSIVWSIDGGFREKIRGQKPIFDHARGGFWNTADGIGPTNA

SEQ ID NO: 10497 - protein, 197 aa, Glycine max
MSASRFIKCVTVGDGAVGKTCLLISYTSNTFPTDYVPTVFDNFSANVVVNGSIVNLGLWDTAGQEDYNRLRPLSYRGADVFILAFSLISKASYENVSKKWIPELKHYAPGVPIILVGTKLDLRDDKQFCIDHPGAVPITTAQGEELRKLINAPAYIECSSKTQENVKAVFDAAIRVVLQPPKQKKKKGKAQKACSIL

SEQ ID NO: 10498 - protein, 146 aa, Triticum aestivum
MASSMLSSAAVATSPAQATMVAPFTGLKSSAAFPVTRKSNTDITSIASNGGRVSCMKVWPPVGKKKFETLSYLPDLTDVELAKEVDYLLRNKWIPCVEFELEHGFVYREHGSTPGYYDGRYWTMWKLPLFGCTDSAQVLKEVQECK

SEQ ID NO: 10499 - protein, 422 aa, Staphylococcus epidermidis ATCC 12228
MSAEKITQSKDGLNVPNEPIIPFIIGDGIGPDIWKAASRVIDAAVEKAYNGEKRIEWKEVLAGQKAYDETGEWLPQETLETIKEYLIAVKGPLTTPIGGGIRSLNVALRQELDLFTCLRPVRWFKGVPSPVKRPEDVDMVIFRENTEDIYAGIEFKQGTSEVKKVIDFLQNEMGATNIRFPETSGIGIKPVSKEGTERLVRAAIQYALDNNRKSVTLVHKGNIMKFTEGSFKQWGYDLAHNEFGDKVFTWQQYDEIVEQKGKDAANEAQSKAEQEGKIIIKDSIADIFLQQILTRPAEHDVVATMNLNGDYISDALAAQVGGIGIAPGANINYETGHAIFEATHGTAPKYAGLNKVNPSSEILSSVLMLEHLGWQEAADKITDSIEATIASKIVTYDFARLMDGAKEVSTSDFADELIKNIR

SEQ ID NO: 10500 - protein, 373 aa, Staphylococcus epidermidis ATCC 12228
MAELKRGLEGVIAAETKISSIIDSQLTYAGYDIDDLAENAQFEEIIFLLWNYRLPNENELSELKEKLFDYMTLNNRVYKHFEEYVTDHVHPMTALRTSVSYVAHFDPEAENESDENKYDRAIRIQAKIASLVTAFARVRDGKEPVKPNSELSYAANFLYMLRGELPTEVEVEAFNKALILHADHELNASAFTARCAVSSLSDMYSGVVAAIGSLKGPLHGGANERVMSMLKEIGSIDNVDHYLDERFANKDKIMGFGHRVYKDGDPRAKYLREMSRKITEETGQSELFEMSLAIEKRMKEEKGLIPNVDFFSATVFHSMNIPHDLFTPIFAVSRTSGWIAHILEQYRDNRIMRPRAKYIGEQNRKYVPIEERP

SEQ ID NO: 10501 - protein, 464 aa, Zea mays
  unsure (1)..(464): unsure at all Xaa locations
MKPPSLVHCFKLLVLLALARLTMHVPDEDMLSPLGALRLDGHFSFHDVSAMARDFGNQCSFLPAAVLHPGSVSDIAATVRHVFSLGEGSPLTVAARGHGHSLMGQSQAAQGIVVRMESLRGARLQVHDGFVDAPGGELWINVLRETLKHGLAPKSWTDYLHLTVGGTLSNAGVSGQAFRHGPQVSNVNQLEIVTGRGDVVTCSPDDNADLFYAALGGLGQFGIITRARIALEPAXDFESFTEDQEMLIMAENSFDYVEGFVIINRTGVLNNWRASFKPQDPVEASHFQSDGRVLYCLELTKNFNSDDTDTMEQEVTVLLSRLRFIXLEFLDRVHTSELKLRAQGLWEVPHPWLNLLIPRSSIRRFAKEVFGKILVGFLSSAPSLSGYGSIAHSMNLNKQIVEFCEEAGIGMKQYLAPYTTQQQWKAHFGARWETFERRKHRYDPLAILAPGQRIFPKASLPLPL

SEQ ID NO: 10502 - protein, 478 aa, Ralstonia solanacearum
MQQRDTLFINGQWVAPQGKGTIDVIHSTTEAVMGTIPEGSAADAEAAVAAARAAFDGWAATPAPKRAEIIQKIADGLKARSEALAQLIAGEVGMPIKLARAIQVGSPVFNWGHFARLLGAFPFEARVGNSLVVREPVGVVGAITPWNYPLHQITLKVAPALAAGCTVVLKPSEVAPLNAFVLAEVIEAAGLPPGVFNLVTGYGPVVGEVLASHPEVDMVSFTGSTRAGKRVAELASQTVKRVALELGGKSASVVLDDADLAAAVKGTLSACFLNSGQTCSAHTRLLVPRARYEEVKALAKQFAATYVPGDPAQETTRLGPLISAVQRDRVLGYIRKGLEEGAELIAGGPEKPEGVSTGYFVRPTVLGNVKPSDTVAREEIFGPVLTILCYDDEEEAIRIANDSIYGLAGGVWSGDEARAMRVARRIRTGQVDINGGPFNMLAPFGGYKQSGNGREQGQYGLEEFLEYKALQLKPAQAT

SEQ ID NO: 10503 - protein, 296 aa, Prochlorococcus marinus str. MIT 9313
MSGAGSAVSTPTIQWYPGHIAKAEQQLSKNLDKIDLVIEVRDARIPIATAHPQLQRWIKGKQHLLVINRRDMISSAARQSWDRWFRDQAQTPWWCDAKAGTGVKQVQQAAIRAGDQLNQRRRSRGMRPRPVRALTLGFPNVGKSALINRLVRQKVVESARRAGVTRTLRWVRLGQDLDLLDAPGVLPPRLDDQQAALHLALCDDIGQAAYDVELVALALLETLTVLEKQAAAGVVAGILKQRYGINLAGDQADAHAWLMTVAERHTSGDTERMAQRLLDDFRRALLGPIALELPLP

SEQ ID NO: 10504 - protein, 160 aa, Oryza sativa (japonica cultivar-group)
MSDSEEHHFESKADAGASKTYPQQAGTIRKNGYIVIKNRPCKVVEVSTSKTGKHGHAKCHFVAIDIFNGKKLEDIVPSSHNCDVPHVNRTEYQLIDISEDGFVSLLTESGNTKDDLRLPTDDSLLGQIKTGFGEGKDLVVTVMSAMGEEQICALKDIGPK

SEQ ID NO: 10505 - protein, 194 aa, ASPERGILLUS NIDULANS FGSC A4
MASATTFYDFEPVDKKGEAYPLNQLKGKVILVVNTASKCGFTPQFKGLETLYQSIKAKRPDDFVILGFPCNQFGGQDPGSNDQIQEFCQLNYGVTFPVLGKTEVNGDNANPLWTWLKESQPGLLGLKRIKWNFEKFLISADGKVVGRWASTTKPEGLESRILEEIEKAEKQGLLASKAMQPEAAGTDGETAKLA

SEQ ID NO: 10506 - protein, 369 aa, Crocosphaera watsonii WH 8501
MENIPNHLSKIDGQLGKLIILGFPFEELAVNASFEEMIYLFLHNHLPNKNELDNVTKKLLSHRYLDEKILDILKSAASNKIELIEGVRIGVSCLTMDMESNRIDKEGINGALKIISSVPIITAAYWRLLQDQPIIQPHLELSHGANYLYMLTGENPSPENVKTLEIYLNTVIEHGMNASTFAARVVMSTRSDFVSAVTAAIGAMKGVLHGGAPGPVLDMLLDMQESGDIEGYLRHKFENRELLMGFGHRVYRVKDPRAILLSQVSADVWKRREDKEFWAFAVDVESTALRLLREYKPNRRIETNVEYYTALVLHGLGLPPALFTSTFTVSRVVGWLAHCLEQLELDRIIRPSSVYTGPTEQKWCPMEER

SEQ ID NO: 10507 - protein, 158 aa, Streptococcus pneumoniae R6
MTSLYDFSVLNQNNQATPLDSYRGKVLLIVNTATGCGLTPQYQGLQELYERYQDQGFEILDFPCNQFMGQAPGSAEEINTFCSLHFQTTFPRFAKIKVNGKEADPLYVWLKDHKSGPLGKRIEWNFAKFLIGRDGQVFERFSSKTDPKQIEEAIQTLL

SEQ ID NO: 10508 - protein, 489 aa, Escherichia coli CFT073
MHLLTLSINPTFLMRSNHFKEFKMDKKQVTDLRSELLDSRFGAKSISTIAESKRFPLHEMRDDVAFQIINDELYLDGNARQNLATFCQTWDDDNVHKLMDLSINKNWIDKEEYPQSAAIDLRCVNMVADLWHAPAPKNGQAVGTNTIGSSEACMLGGMAMKWRWRKRMEAAGKPTNKPNLVCGPVQICWHKFARYWDVELREIPMRPGQLFMDPKRMIEACDENTIGVVPTFGVTYTGNYEFPQPLHDALDKFQADTGIDIDMHIDAASGGFLAPFVAPDIVWDFRLPRVKSISASGHKFGLAPLGCGWVIWRDEEALPQELVFNVDYLGGQIGTFAINFSRPAGQVIAQYYEFLRLGREGYTKVQNASYQVAAYLADEIAKLGPYEFICTGRPDEGIPAVCFKLKDGEDPGYTLYDLSERLRLRGWQVPAFTLGGEATDIVVMRIMCRRGFEMDFAELLLEDYKASLKYLSDHPKLQGIAQQNSFKHT

SEQ ID NO: 10509 - protein, 143 aa, Glycine max
MAMAFKMATTGMWVTDECKNSFMDMKWKKEHRYIVFKIDEGSRLVTVDKLGGPTEGYDDLTASLPTDDCRYAVFDFDFVTVDNCRKSKIFFIAWSPTASRIRAKILYATSKDGLRRALDGISYELQATDPTEMGFDVIRDIAK

SEQ ID NO: 10510 - protein, 96 aa, Triticum aestivum
RIAMASRLVAAAAAASSSSSASPLARLISRRGLAGAADGHGPAKVPLWKDPLSPSKWKEEHFVLASLSMWGALIYGGFKLFGGKKEDKTEVAPAKA

SEQ ID NO: 10511 - protein, 370 aa, Deinococcus radiodurans R1
MTSPSSTATSSPTTTTAPTPARMRALSKQQPGEGIWMIETEVPTPGPNDLLIRIRKGSICGTDVHIYKWDDWASQTVPVPMVVGHEYVGVVAGMGSEVRGFEIGDRVSGEGHVTCGHCRNCRAGRRHLCRNTQGVGVNRPGSFAEYLVLPAFNAFKLPDDIPDDVAAIFDPFGNAVHTALSFDLVGEDVLITGAGPIGCMAAAVARHVGARNVVITDVNDYRLDLARQMGVTRAVNVAREDLWTVATQELDMHEGFDVGMEMSGSGPAFAQMVSVMNNGGKVALLGIPSGEVQIDWNAVIFKMLTIKGIYGREMFETWYKMAALIQSGLDLTPVITHHYGIGDFQQGFDAMLSGQSGKVILDWETEEQSA

SEQ ID NO: 10512 - protein, 489 aa, Burkholderia cepacia R18194
MSVFGLQRLYIGGGYVDATSGKTFDTFDPATGELLAQVQQASAADVDRAVASAQEGQREWAAMTAMQRSRILRRAVDLLRERNDELAALETRDTGKPIGETLAVDIVTGADVIEYYAGLATAIEGLQVPLRAESFVYTRREPLGVCAGIGAWNYPIQIACWKTAPALAAGNAMVFKPSEVTPLTALKLAEIYTEAGVPAGVFNVVQGDGSVGALLTGHPDIAKVSFTGGVETGKKVMSLAGASSLKEVTMELGGKSPLIVFDDADLDRAADIAVTANFFSSGQVCTNGTRVFVHRSIKDAFTQRVLERVKRIRVGKPTDADTNFGPLVSAAQLDKVLGFIESGKAEGAKLLAGGTRLTDGHFGSGQYVAPTVFGDCRDDMKIVREEIFGPVMSILDFESEDEVIARANDTHYGLAAGVVTENLSRAHRTIHRLEAGICWINTWGESPAEMPVGGYKQSGVGRENGITTLEHYTRIKSVQVELGRYNPVF

SEQ ID NO: 10513 - protein, 510 aa, Photorhabdus luminescens subsp. laumondii TTO1
MCGIGGVFNTENRLIDDIENKLQTIMSKIAHRGDPSRFNEKVVRNNFSIATNRLAIVERDSAYQPISNQEHDLHLVLNGQIYNYKSLRNELIKQGYQFKNGGDAEVALIAYICYGKSFIKKLDGMFSFILFDNKNNKFLLGRDHVGIKPLYYTQKEGNWYVASEIKSLIEFNSEIKPVEPGSIFDGLTSEKYISYDTTIPASSDNVEQAKEKIYSLLDNAVRKRVDTDLPVSIMFSGGIDSTIVLYLAKKYHHDITAISFGLPGSKDIEIAQRYCTENNIKHIIYTFTQEELINNIQDAIYYGEFFEQIDAIDSTIAHFGYYIANRLGFKIALCGEGSDEIFAGYDLFKTYPDPHHLSLYRLNNLHRTDLQRVDRASMRNTVEARVPFMDSALVPYVLSLDFSYKLNNGIEKYILREAFRGKIPEYIIDRPKIRMPDGSGVKNTIIDYVKDIKCNLPRNMVDSLNSIGLTHQSSLYFAEKYLSLGYPLPKERFKESGKDFSESGYFNFIS

SEQ ID NO: 10514 - protein, 232 aa, Bacillus cereus G9241
MLILDGMVMTTEKDEFVYHEMVAHVPLFTHPNPENVLVVGGGDGGVIREVLKHPSVKKATLVEIDGKVIEYSKQYLPSIAGALDNERVEVKVGDGFLHIAESENEYDVIMVDSTEPVGPAVNLFTKGFYAGISKALKEDGIFVAQTDNPWFTPELITTVFKDVKEIFPITRLYTANIPTYPSGLWTFTIGSKKHDPLEVSEERFHEIETKYYTKELHNAAFALPKFVGDLIK

SEQ ID NO: 10515 - protein, 419 aa, Arabidopsis thaliana
MDRISQLSDDLLLQILSFIPGKDVVATSLLSKRWQSLWMLVSELEYDDSYHTGDYKSFSQFVYRSLLSNNAPVIKHLHLNLGPDCPAIDIGLWIGFALTRRLRQLKINIRTSSNDASFSLPSSLYTSDTLETLRLINFVLLDVPSSVCLPSLKVLHLKTVDYEDDASLPSLLFGCPNLEELFVERHDQDLEMDVTFVVPSLRRLSMIDKNYGQCDRYVIDVPSLKYLNITDDAVYDVRQIENMPELVEAHVDITQGVTHKFLRALTSVRQLSLCLSLSEVMCPSGIIFSQLVHLNLSTVVKGWWDLLTSMLQDSPKLQSLKLIDKQHESGLCGIETPIGWKLPSSVPECLLFSLEAFEWIGYKGRRGDREVATYVLKNAACLRTAKFSPESTDVGEKYHMLKELASVPTASTSSKLLFD

SEQ ID NO: 10516 - protein, 415 aa, Dechloromonas aromatica RCB
MNIVIENGRVIDPKNGVDRRASLYVADGKVAGIGQVPAGFVADRSIDAAGCVVCPGFIDLGARLNSIEAELAAAVAGGVTTVVVPPDADPPLDEPELADRLVHRGEEIGKARVLPLGALTLGLKGERLAELAGLKKAGCVAFSQANKTVVDTEALLRALEYAATFDFAVWLQPQDYWLSRNGIAHEGEVASRLGLAGIPVAAETIAIGTIIQLVRDTGCRIHLTRISSAAGMALVHRAQHDGLPISCDVGVHHLLLTENDIGFFNPHARFCPPLRAQTDRQALSDAVVAGWAAICSDHTPVGADDKLLPFGEAKPGATGLEVLLPLTLKWADAAKVDLPTALARITSAPAAVLGLASGQLAIGTTADICIFDPEANWQLTPDALKSRGKNSPWLGYVMTGKVKATLVGGRPVYQA

SEQ ID NO: 10517 - protein, 360 aa, Nostoc punctiforme PCC 73102
MGEPKRIGILTSGGDCSGLNAVIRAVVNCAVDTYGWEVLGIRQATLGLMARPPQFTKLEIDQVDSLLTAGGTMLGTTNKGDPFAFPMTDGSLCDRSEEIIAGYHELGLDALIGIGGDGSLAILRRLAQQGGINLVGIPKTIDNDIGVTEHAIGFDTAVNIATEALDRLHFTAASHSRVMILEVMGRDAGHIAIAAGIAGGANVILIPEIPYTVEHICHKIKERQEKGKNYCLIIVSEAVRTHDGENVTITNRLGQSRYGGIGEYLADKIIEHIGVETRVTVLGHIQRGGTASPLDRLVATAFGVAAVNLIAEDKYDRMVTWQNRQVLSVPITEAIAQYSAVDPNGTLVKTAHGMGIYLGD

SEQ ID NO: 10518 - protein, 307 aa, Staphylococcus epidermidis ATCC 12228
MNAAVRAVTRTAIYNNIEVYGVYQGYQGLLDDDIHKLELGSVGDTIQRGGTFLFSARCPQFKEEDVRKKAIENLRKRGIEGLVVIGGDGSYRGAQRISEECKEIQTIGIPGTIDNDINGTDFTIGFDTALNTIIESVDKIRDTASSHARTFIVEVMGRDCGDLALWAGLSVGAETIVLPEVNTDIKDVAEKIEQGIKRGKKHSIVMVAEGCMSGQECADELTKYINIDTRVSVLGHIQRGGSPSGADRVLASRLGGYAVELLKQGETAKGVGIRNNQLTSTPFDEIFAESDRKFNSQMYELAKELSI

SEQ ID NO: 10519 - protein, 466 aa, Streptomyces viridochromogenes
MFVNGALQPARRHTTVHDRWTGEPVGTVPRDGAEEAAAAVAALAAGRRATTPQQRSAVLTRAADMLTARAEEFSTLITAESGVCRKETLREVSRAAGNLRVAAAEAERIRGESIPLPDGTRLAVTLPEPVGVVLGITPFNRPLNQVVVKAAPALAAGCPLLLKPSEKTPLTALAFAELLVEAGCAKDMLAVVTGEPGEVGPPLAAHPDVAMVTFTGSVATGHAVAAQAAGKRQLLELGGNDPLFVLPDADLRRAAKLAADGSCATAGQSCRGIKRVFVWEEVADEFTALLEPAVAAKRAGDPRREDTDLGPLVSEEAALVVERRIARAVRDGARLVTGGERDGALVRPAVLDHVPPDTELVTEETFGPVAPVIRVRDADEAVRLSNGTAYGLQAGVLTRDSAAFWDIAARLRVGAVNLGEGPHFDSPHIPFGGVKSSGVGREGIRYAIAEMTVTKTVTLPGPYGTG

SEQ ID NO: 10520 - protein, 409 aa, Staphylococcus epidermidis ATCC 12228
MSLRDDALEMHRENQGKLEITPNVKVTNKQQLSLAYSPGVAEPCKEIHEDSRKVYEYTIKGNTVAVVTDGTAVLGLGNIGAEASIPVMEGKAALFKSFAGINGVPIALDTTDTQEIIKTVKLIAPNYGGINLEDISAPRCFEIEETLKKETNIPIFHDDQHGTAIVTMAGLINALKIVDKELTNIKVVLNGSGAAGIAIVKLLHAYGVNNMIMCDSKGAIYSGRNFGMNDTKTYVAKWTNKDKVEGSLEEVIKDADVFIGVSVADILTQDMVKTMADDPIIFAMANPNPEINPNEAKQAGAKVVGTGRSDFPNQINNVLAFPGLFRGALDVEATHINEDMKKAAVEAIVHLIDENELHPDYCIPGPFDKRVAPSVAKNVAKAAMESGVARIKIDTQEIFDKTMKLTDLK

SEQ ID NO: 10521 - protein, 428 aa, Bacillus cereus ATCC 10987
MNYLFKNGRYMNEEGKIVATDLLVQDGKIAKVAENITADNAEVIDVNGKLIAPGLVDVHVHLREPGGEHKETIETGTLAAAKGGFTTICAMPNTRPVPDCREHMEDLQNRIKEKAHVNVLPYGAITVRQAGSEMTDFETLKELGAFAFTDDGVGVQDASMMLAAMKRAAKLNMAVVAHCEENTLINKGCVHEGKFSEKHGLNGIPSVCESVHIARDILLAEAADCHYHVCHVSTKGSVRVIRDAKRAGIKVTAEVTPHHLVLCEDDIPSADPNFKMNPPLRGKEDHAALIEGLLDGTIDMIATDHAPHTAEEKAQGIERAPFGITGFETAFPLLYTNLVKKGIITLEQLIQFLTEKPADTFGLEAGRLKEGRAADITIIDLEQEEEIDPTTFLSKGKNTPFAGWKCQGWPVMTIVGGKIAWQKESALV

SEQ ID NO: 10522 - protein, 393 aa, Synechococcus elongatus PCC 6301
MGKPRIAMTAVSEFRPGLEGVPATLSSISFVDGQRGVLEYRGISIEQLAQQSSFLETAYLLIWGHLPTQQELTEFEHEIRYHRRIKFRIRDMMKCFPDSGHPMDALQASAAALGLFYSRRALDDPEYIRAAVVRLLAKIPTMVAAFQLIRKGNDPIQPRDELDYAANFLYMLTEREPDPVAARIFDICLTLHAEHTINASTFSAMVTASTLTDPYAVVASAVGTLAGPLHGGANEEVLDMLEAIGSVENVEPYLDHCIATKTRIMGFGHRVYKVKDPRAVILQNLAEQLFDIFGHDPYYEIAVAVEKAAAERLSHKGIYPNVDFYSGLVYRKLGIPSDLFTPVFAIARVAGWLAHWKEQLNENRIFRPTQIYTGSHNLDYTPIADRDLAIESD

SEQ ID NO: 10523 - protein, 481 aa, Haemophilus somnus 2336
MNIQHLLKTQAYINGEFISAKNHRTFPVINPANQQVICEITCCGKEETELAIKSAKQAQVHWKKYTAKERSKILKKWFELIMQHQESLAYLLSLEQGKPLSESRAEIAYGASFVEWFSEEAKRAYGEIIPQVREENRLLVIKQPVGVVAAITPWNFPNAMITRKAAPALAAGCAIIIKPAPETPLSALALAALAEQAGIPKGIFNVLPTVYAEEVGSVLTRSTDVRKLTFTGSTKIGKILMQQCADTVKKISLELGGNAPSLIFNDADLDRTVDSVIASKFRNSGQTCICTNRIYVQSEIYRAFADKLKQKVRSFIVGDFQQEAVNIGPLINESAVRKIERHIEDALSKGAILTLGGQRHSLGGTFFEPTILENVSQDMLVCHEETFSPLAALIPFDTEEQAISMANDSEFGLAAYVYTQDFSRIWRLSEELECGLVGVNEGIISNEVSPFGGVKQSGLGREGSRHGLDEFLEMKYLCMKV

SEQ ID NO: 10524 - protein, 337 aa, Oenococcus oeni PSU-1
MNALVLDKMNHLELENLEKPTPKNNEVLIKVAYVGVCGTDKALYQGLPGSADAVPPIVLGHEDSGTVVEIGESVTNFEVGDRVAIDPNIYCHKCDFCRTNRPELCTNLSAVGVTRNGGLEEYVAVPEEVAYKLPDNVSFKQAALTEPLSCVVHGVDLLAIKPFQEAIVLGDGFTGQLFVKTLKAYGVSKVTISTRHLDDEKHVDFLKKVVGADEVVDARSNDFDKDYDVVVEAVGSADVQEQAVKAAAHGGQVLMFGVGKPEQKFSVSSYEIFQKQLTVQGSFINPYTFKAAIAMIAAGKIDPSELVSMELKAAKMNDYLSGKIRTNKAVLNIEAAF

SEQ ID NO: 10525 - protein, 165 aa, Triticum aestivum
PFFHGLKPPSITIRAYLERIMTYSPCSVECFVLALVYVDRIMQANWRFVLTSLNVHRLLLTAVMTGVKYHDDCSYNNAYYAKVGGIPLGELNALEVELLFLLGFDLHVSGEVFERYYSELMKHAPIALGQVTTSSPGLPSVTTITSASPTTTSRLQRHPHPEAAC

SEQ ID NO: 10526 - protein, 396 aa, Pirellula sp. 1
MLCTLKTSLKRDSKLSVITRSVSKRWSCPELHATALGLSDVPTQPFYRQSTGNPMQSAAVVNYAPEPGSVEIREIDRPEIGSQDVLLEVSHVGVCGSDLHQWTAHHSWPVNYPVVLGHEFGGHIVQLGSDVEGWKEGDRVVSETAAIIDSNNPMSRRGLYNLDPTRKGFGYGVNGAMTRYVRVPSRILHEVPHSLAFEHACLTEPCCVAYNAVVRNARIEPGDRVIVMGPGTIGILCAAMARLCGAEVALVGLESDRHRLNIAEENYGCQGIVGDPTDWANQRDGLGCDGVIDAAGSSVTLEIAMQVVRPAGWISKVGWGPQPLGYNLDPLVQKNVTLQGSFSHNWPIWERVLALLTSGQLNVAPIIGGIWPIDQWQTAFDKMHRGEVVKSVLQPI

SEQ ID NO: 10527 - protein, 1993 aa, Lactobacillus gasseri
MVSKNNYSEKMRKIRPQKQRFSIRKFTVGAASVLIGLTFMGVNGRTVKADTTVTQEESINVTNDVANNLKENVENTVSVEEQSAVQHVEQAKTASIETNNDVENNETTNEISSEVAGNNEFVSSAETSAVEEKAANEATTYDAESTKDETVVNNTQNVENNSLQSTESIATPVVENNATTTVEESTPVTETTPVETETKVENVVSPIEETVVEENNQTTVQTDVKEVQSKASVTIPATDTDKYPKEAGALIGDDKYIYQILDLNNTAFWNSSNKKLILSVNRNDLTDENLYAYVTDADYKNMVAEHIIKAGYFKKIEVNNRDFLIVNSGKSNITVGGSSMPVGNATTVVGSTKIIYGLGNITNLDASSVGEIIPVHTEESVIKYYYHNKDGNLVEIPGTDKYPNVSVSGWTGQEFVIDNVDQYKQLIDGFYLDGSNIPSGSFTGTISQFGDGSYYKKVYYSSGNRTEGTVNQLTVDFTVVYRQIDATGKMEVLMYDGSNMDRVIESHTVEAGKSVKFTHNNFTARNPFVTDSAHEVQFIYKDLGSIIPVDENGNQIGDAVKFNNNLTDPIKAGRTDAPIIAGYIADIEYVIPENPGEDIKVIYRLREDVKATITIIDMDNNRNSLAQLNATGKVYSQINFVDLDTTLSNLLDSGYVIISNSFKPGTQFGVHDLNFEIQLKHVLEAVNESQTVQKDIHYVDTVGNELRPSTTQTATFTATGYRDKVTGNIVLVAGTQQVGNDLIATEITDKNASLKWTADKTTFESLKSPDIIGYTTNQKWSTADKVEQNEKLKIENIIYDKKAQVGTIIFWDETSQKQLGTTVNITGNYGEVINYQVIDKVLGSIKDYENNGYILVNNPLGYTTVFGDADYNPGCNDYVVTLKHKIAENSQTKEVNRVITYVYADGPNKGQTAANSVIQKVNFIGKGQYDFVDKVWVSDIVWTAEDGNANYTFAQVNSPKISGYGANRLQVESVLVSGNSNNITEEVLYYANQQTAQIQYIDDVTGKIIGSDTVNGKIDHIISWNLNPEATLKMFENNGYKLVSSDYEFGKDYYYSAEDAKNSFKVHLTRDLIIIDPEDPDSPVYESEDYNKEVTQEIKYVYANGNAAAESNKQTIKFTAYGVVDKTTGKYVVLDENGKVIIGDDGEPIEGKLAWTAEVADPKFTEVSSPIITGYTPDKASVSGTKVTHDLPSKVIVVTYTANDADAKVIFVDKTTGKELEAVTLNGKYGDVINYSTADKIKYYENLGYELVDDGYNGGKFGETTKTFYVTFKHGVVHVHPENPGKPGENINPGGDVKYPTDSGVLNKDVTHTVHYVYADGTIANPSHTQTITFTGSGHINKVTGEYVEVDEDGNIKLDTDGKPVPGKLNWMAMLGNSFLAVTSPQITGHTPSHVQIDGVENVAHDSENYVHTVTYTANAAKAEIVYVDETTGKELEVATVDGKYNEEINYSTADKIKYYESLGYELVKDGYNGGEFGETTKKFYVTFKHGTVVVNPENPGKPDEPINPNDPEGPKYPTDSANLNKDVTHTIHYVYADGTTAKPSHTQTLTFTGSGVIDKVTGQYVEVDENGNIKLDANGKPVPGKLTWVAEDGTTFVEVISPTIAGYTADKTVVNAIEGINQDSNHLETKVVYTANAAKAEIIYIDETTGKELETVTVDGKYNEEINYSTADKIKYYESLGYELVKDGYEQDGKFGLETSRYYVTLKHGTITVTPDDKFTEDDPINPDNPEGPKYPFDSIALDKTITRTIKYVYADGTKAKDDVVQTLRFRGTAVIDKVTGEIIILDENGRKVSDGIKWAALDGTTFVQVISPEIAGYTADKKEIGSVENVDSDTENITETVVYSKNPEKPVEPNKPEEPTEPEVPVEPEKPEAPEAPEEPEKPTESETPEESDQPVEPLKPEASENKPTEATESDKSDAGTLPDNISIDTTAKNVSTVEHKETGKVEAATTNEVSLPQTGHKHSNVGIIGLGLATIASILGLAGTRKRKKN

SEQ ID NO: 10528 - protein, 407 aa, Pasteurella multocida subsp. multocida str. Pm70
MEITLGIAMFTVIVLALAVIILFAKSKLVNSGDITIEINDDPSKAIHLPAGGKLLGALASQGIFVSSACGGGGSCGQCIVKVTEGGGDILPTELSHISKREAKEGYRLSCQVNVKNSMKVELPEEVFGVKKWECTVISNDNKATFIKELKLAIPEGEEVPFRAGGYIQIEAEPHTVAYKDFDIPEEYHEDWDKYNLWRYVSKVDEHIIRAYSMASYPEEKGIIMLNVRIATPPPNNPDAPPGQMSSYIWSLKAGDKVTISGPFGEFFAKETDAEMVFVGGGAGMAPMRSHIFDQLKRLKSKRKMSFWYGARSKREMFYVEDFDTLQAENDNFVWHVALSDPQPGDNWDGYTGFIHNVLYENYLKDHEAPEDCEYYMCGPPIMNASVIKMLKDLGVEDENILLDDFGG

SEQ ID NO: 10529 - protein, 96 aa, Triticum aestivum
AWSRPRYEDLCPSTHNMDVPNVSRREFQLLDITDDGFLSLMNDNGDTKDDVKVPDGEVGDKINKLFKEEEKDTNVIILTAMGEEAAIDAKEAPKGA

SEQ ID NO: 10530 - protein, 296 aa, Glycine max
MAIATETQPQQHKDSSEVSGSAAEQRRWTLNDFDIGKPLGRGKFGHVYLAREKTSNHIVALKVLFKSQLQQSQVVHQLRREVEIQSHLRHPHILRLYGYFYDQKRVYLILEYAPKGELYKELQKCKYFSERRAATYVASLARALIYCHGKHVIHRDIKPENLLIGSQGELKIADFGWSVHTFNRRRTMCGTLDYLPPEMVESVEHDASVDIWSLGVLCYEFLYGVPPFEAKEHSDTYRRIIQVDLKFPPKPIVSSAAKDLISQMLVKDSSQRLPLHKLLEHPWIVQNAEPSGVYRS

SEQ ID NO: 10531 - protein, 406 aa, Vibrio vulnificus CMCP6
MSDTASQVHGAVQTLTQSSDTLFLLLGAIMVFLMHAGFAFLEVGTVRHKNQVNALVKILADFGISTLAYFFIGYWVAYGAHFFADAETLAQGNGYELVKFFFLLTFAAAIPAIVSGGIAERARFYPVLIATFFTVGIVYPLFEGIIWNGNFGIQAWFEATFGVGFHDFAGSVVVHGVGGWIALVAVIFLGMRRGRVRAGKHTNFAPSNIPFLALGAWILCVGWFGFNVMSAQTLNGISGLVAMNSLMAMAGGIVAALIAGKNDPGFIHNGPLAGLVAVCAGSDLMHPLGALVTGSVAGVLFVYLFTYLQNKTKIDDVLGVWPLHGVCGAWGGIAAGIFGQSSLGGLGGVSFTVQLLGTLLGISVALIGAGIVYGAINRLSGLRLSQEDEFNGADLAIHKISSVNAE

SEQ ID NO: 10532 - protein, 193 aa, Candida albicans SC5314
MTRFKSERIAKFAFDFALKNNRKLVTAIHKANIMKLGDGLFRQTVKDVGQDYPGIGVSDLIVDNASMQAVAKPQQFDVLVTPNLYGSILSNIGAALIGGPGLVPGANFGREYAVFEPGCRHVGLDIKGKNSANPTAMILSSAMMLRHLGLNDHADKISKATYDVIAEGNVRTADIGGTATTTEFTEAIINKLD

SEQ ID NO: 10533 - protein, 208 aa, Arabidopsis thaliana
MTSSVIVAGAGDKNNGIVVQQQPPCVAREQDQYMPIANVIRIMRKTLPSHAKISDDAKETIQECVSEYISFVTGEANERCQREQRKTITAEDILWAMSKLGFDNYVDPLTVFINRYREIETDRGSALRGEPPSLRQTYGGNGIGFHGPSHGLPPPGPYGYGMLDQSMVMGGGRYYQNGSSGQDESSVGGGSSSSINGMPAFDHYGQYK

SEQ ID NO: 10534 - protein, 124 aa, Phaseolus lunatus
EPPTEGRLPDATKGSDHLRDVFGKAMGLSDLDIVALSGGHTIGAAHKERSGFEGPWTSNPLIFDNSYFKELLSGEKEGLLQLPSDKALLTDPVFRPLVEKYAADEDAFFADYAVSHQKLSELGF

SEQ ID NO: 10535 - protein, 203 aa, Cucumis sativus
VLTGDSGVGKSNLLSRFSKNEFRFDSRPTIGVEFAYRNIKVADKLVKTQIWDTAGQERFRAITSSYYRGALGALLVYDITRVATFDNIKKWLRELREFGNPEMVIILVGNKCDLHQSREVQEEEARHLAELENLFFMETSAKDNLNVEEAFLEMVRRIHAIASQKTLDLHKKFEKLVAFPNGKEIISIHEVTPTKPNSNCCSL

SEQ ID NO: 10536 - protein, 420 aa, Methanocaldococcus jannaschii DSM 2661
MWGENIATADLFANATDIHSIVQALTTLANASDVFFLVVMGVLVFMMQWGFAMLEGGQVRKKNVNNVMMKNMVDWLIGCVAWLFIGGILCSKGFDLSAFIDWWKQILGTNWPNNGLDLASWFFGLVFCATAATIVSGGVAERIKFSAYVLISLIITGLLYPLFVYLGPWGASIVPWHDYAGSLVVHGLGGFLALGAIAALGPRIGRFVDGRPVPILGHNIPMAVFGAFALAIGWYGFNVGSSLALGDISGLVCATTTMAMAGGGIGALIASRNDVLFTANGIVAGLVAICSGTDVVSPIGGLIIGLIAGLQVPIVYKLVEKAGLDDVCGVVPVHGTAGVIGAILTGILGLKIFGGAGGVSLIDQIIGAVFCIIYGTGLGYILAKIVGIALGGLRVSEEEEKMGLDMAEHKMPAYPEETVI

SEQ ID NO: 10537 - protein, 107 aa, Phaseolus lunatus
NEINLGDYKGRVLIIVNVASQCGLTNSNCTELSQLYEKYKQKGLEILAFPCNQFGAQEPGSNEQIQEFVCTRFKAEFPVFDKVDVNGDKADPLYKYLKSSKGGLFGD

SEQ ID NO: 10538 - protein, 422 aa, Halobacterium sp. NRC-1
MSYDKIEVPEGGAKVSYDEAADELDVPDTPIIPIIHGDGIGKDVGPIAQDVLSAAAEATGHDIEWMEVYAGESAREMYDENLPEETVEAIREHRVAIKGPLTTPVGAGFRSLNVALRQTLDLYANVRPTYYLDGVPSPMKAPEEMDMVTFRENTEDVYAGIEWEAGTDEAEQVRSFVEDEMDFDDVMHDGDIGIGLKPISEKGSKRLVREAIDYAIENDRDTVTLVHKGNIMKFTEGQFGDWGMEVAEEEYPDDEVFAAPDSLWEEQDEVDIPEDAVMVEERLADAMLQWMQLRTDEFDVLAMPNLNGDYLSDAAGAQIGGLGIAPGANFGAGRCLAEPVHGSAPKRAGQDKANPTALILSGRLLFEYIGWDDASTLVRDAVEDTIESGTVTYDLARQRDDAEEVSSTTYAEAVIDRIEDLA

SEQ ID NO: 10539 - protein, 120 aa, Glycine max
QFWGAVLKGPIALLGTGLSPPGPELKVLGGGGFLKAWGGISFLRFNFPGAWSYGKKYGLFLGPLFFLWGKKPAPLGGLESKGALAVGTPADFVVWPPELGFALGDDYPVFPHPFVCFPCF

SEQ ID NO: 10540 - protein, 197 aa, Bacillus subtilis subsp. subtilis str. 168
MTNRDIVWHEASITKEEYQQKNKHKSSILWLTGLSGSGKSTIANAAARELFEQGYQVIVLDGDNIRHGLNRDLGFSDEDRKENIRRIGEVAKLFVQQGTIVITAFISPFREDRQQVRELVEAGEFNEVYIKCDLDICEQRDPKGLYKKARNGEIPFFTGIDSPYEEPEAPELVLDSGQHDREACKNQLIEFVKQKLS

SEQ ID NO: 10541 - protein, 535 aa, Glycine max
MGVLSSHRIQLLLFPIVVLLWSASAANSANNTFLHCLVNHSEPSHPITSAIFTPNNTSFSSVLEAYIRNLRFNTSTTRKPFLIITALHVSHIQASIICAQKHNLQMKIRSGGHDYEGVSYVAEVPFFILDMFNLRTIEVDIGTETAWVQAGATLGEVYYRIAEKSKTHAFPAGVCHTVGVGGHISGGGYGNMMRKYGLSVDNVIDAQMVDVQGRLLDRKSMGEDLFWAITGGGGASFGVVLAYKIKLVRVPEIVTVFQVGRTLEQNATDIVYNWQHVAPTIDNDLFLRVILDVVNGTRNGTKTVRARFIALFLGDSKSLVSLLNDKFPQLGLKQFDCIETTWLRSVLFWDNIDIATPVEILLERQPQSFKYLKRKSDYVKKPISKEGWEGIWNKMIELEKAIMYFNPYGGRMAEIPSTASPFPHRAGNLWKIQYQANWNKPGKEVADHYINLTRKLHKFMTPFVSKNPREAFYNYKDLDLGINPNGKNSYAEGRVYGVEYFKDNFDRLVQIKTKVDPHNFFRNEQSIPTLSYRKG

SEQ ID NO: 10542 - protein, 268 aa, Bifidobacterium longum DJO10A
MLNNGTVIPQVGLGVFQTPDGDTTVNAVQTALENGYRHIDTAMIYHNEASVGEGIRRAGVPRSDFFLTTKLWNDDIRARCGKDAFQESLDRLGVDYVDLYLIHWPADGWQQAWDDLQEIYASGRAKAIGVSNFQKHHIDELLTHSDVVPAVDQVESSPQFTNQELIGQLRAKGIHTEAWSPLGGTGGNLLSNPVLAGIGAKYGRSAAQVVIRWHIQRGIVVLPKSTHAERIKQNFEVFDFNLSVDDMTAISAINTGKRNGADPDNFNF

SEQ ID NO: 10543 - protein, 325 aa, Magnaporthe grisea 70-15
MADQHDVDLDSIIDRLLEVRGSRPGKQVQLLEAEIRYLCTKAREIFISQPILLELEAPIKICGDIHGQYYDLLRLFEYGGFPPEANYLFLGDYVDRGKQSLETICLLLAYKIKYPENFFILRGNHECASINRIYGFYDECKRRYNIKLWKTFTDCFNCLPIAAIIDEKIFTMHGGLSPDLNSMEQIRRVMRPTDIPDCGLLCDLLWSDPDKDITGWSENDRGVSFTFGPDVVSRFLQKHDMDLICRAHQVVEDGYEFFSKRQLVTLFSAPNYCGEFDNAGAMMSVDESLLCSFQILKPAEKKQKYVQRLGGRSSNASSRITSSKP

SEQ ID NO: 10544 - protein, 73 aa, Triticum aestivum
MASRSCTFVEILLAVILPPLGVFLRYGCCSMEFLICLLLTILGYIPGIIYAVYVLVAHGSASEESGRDYDALG

SEQ ID NO: 10545 - protein, 196 aa, Glycine max
  unsure (1)..(196): unsure at all Xaa locations
HPVPWPKRLVLFYLYPSKSQVWGENFDHKKLVITTLAANGKKEESNGAPNDTYPAFPGWYADVSWPGEAHTYNIEKILFHGKSEFQELLVFESSRQGKVAILDGHIQLTENDEFAYQEMLTHLALCSIPDPKKVLLIGGGDGGILXEISPHSSGEHIDICELDAMVIDVYSVVFHDITYGCKESQLRVHMSNGVAL

SEQ ID NO: 10546 - protein, 415 aa, Magnetospirillum magnetotacticum MS-1
MFILLGAVMVLAMHSGFAFLEVGTVRKKNQVNALVKIISDFAVSTIAYFFVGYGVAYGTNFLVGADVLIGKTGNAFAASGYDLVKFFFLATFAAAIPAIVSGGIAERAKFTTQLMATAILVGLVYPLFEGMVWGTRFGFQELMKGWFGAAFHDFAGSVVVHAVGGWIGLGAVLMLGTRLGRYRKDGRLVAFPPSNIPFLALGAWILSVGWFGFNVMSAQVIADISGLVAMNSLMAMVGGILTSLVVGRNDPGFIHNGALAGLVAVCAGSDVMHPIGALVTGGIAGALFVWLFNLCQIKWKIDDVLGVWALHGMCGFLGGVACGVFGQEALGGLGGVSFGGQIAGTVIGAAFGLAGGLAVYGGLKAAFGIRLSDEEEFAGADLSIHQIGAYPEDATTVHDDGLAMSVHSANKRKAG

SEQ ID NO: 10547 - protein, 249 aa, Zea mays
MFGYQKGLDVEAGTSGAAATGGARQLYPGMQESPELRWALIRKIYVILSLQLLLTAVVAAVVVKVRAIPHFFTTTSAGLGLYIFLIILPFIVLCPLYFYHEKHPVNLILLGLFTVAISFAVGMTCAFTSGKVILESAILTTVVVLSLTAYTFWAVNRGKDFSFLGPFLFAAIIVLLVFALIQILFPLGKLSQMIYGGLASLIFSGYIVYDTNNIIKRYTYDQYVWAAVSLYLDVINLFLSLMTLFRAAD

SEQ ID NO: 10548 - protein, 268 aa, Acinetobacter sp. M-1
MRIPQFGLGTFRLKDQAVIDSVKTALEVGYRAIDTAQVYENEAAVGQAIAESGVARQDLFLTTKIWVDNFAEDKFIPSLKDSLQKLRTDAVDLTLIHWPAPALGVSIPSVMQLLLEAKQQGLTKQIGISNFNIALTQQAIDSIGIEHIATNQIELSPYLQNRNLVNYLREQNIDVTSYMTLAYGKVLQDPTLIEIAAQHQATTAQVALAWALQNGFAVIPSSTKRENLISNLKAQDLTLSAEEMQLIAQLERNGREVSPEPFAPEWDK

SEQ ID NO: 10549 - protein, 224 aa, Listeria monocytogenes EGD-e
MINQKKIAGEKACEWIKDGMVVGLGTGSTVYYTIEKLGEMVNNGLHITGVATSEETNKQAQNLGIPLKSLNDVTEIDITIDGADEIDTDFQGIKGGGGALLREKMVASASLKNIWVVSEEKLVRNLGKFPLPLEVIPFGWKQVERKLEKEHIQTNLRKQSSGEVYVTNNGNYILDIVNQTFTDAEMWQEKLAQIPGIVEHGLFLHYVDIIICAKANGEIELIKK

SEQ ID NO: 10550 - protein, 365 aa, Glycine max
MGSAAETQITPTHVSDEEANLFAMQLASASVLPMVLKSALELDLLEIIAKAGPGVHLSPTDISSQLPTQNPDAPVMLDRILRLLACYNILSFSLRTLPDGKVERLYGLAPVAKYLVKTEDGVSIAALNLMNQDKVLMESWYYLKDAVLEGGIPFNKAYGMTAFEYHGTDPRFNKVFNKGMADHSTITMKKILETYTGFEGLKSLVDVGGGTGAVVNMIVSKYPTIKGINFDLPHVIGDAPSYPGVEHVGGDMFVSVPEADAIFMKWICHDWSDEHCLKFLKNCYEALPDNGKVIVAECILPVAPDSSLATKGVVHIDVIMLAHNPGGKERTEKEFEALAKGSGFQGFRVLCCAFNTYVMEFLKKV

SEQ ID NO: 10551 - protein, 389 aa, Streptococcus bovis
MSTKDVKELAIEQAKKFGGKLEVCPKVPIETKADLGIAYTPGVAAVSSAIYEKKERAYELTTKKNTVAVISDGSAVLGLGNIGPEAAMPVMEGKAALFKRFAGVDSIPLVLDTQDTEEIIQTVKFLAPTFGGINLEDISAPRCFEIEQRLIDELDIPVFHDDQHGTAIVVLAALYNSLKLINKKIEDIHVVINGGGSAGLSITRKFLAAGVKHIIIVDRTGILSETDTALPPHHAEIAKLTNREHRTGDLATALEGADVFVGVSAPGVLKPEWIQQMNEQPVIFAMANPVPEIFPDEALAAGAYIVGTGRSDFPNQINNVLAFPGIFRGALDARAKKITIEMQIAAAKGIAKLIPDNELTPTNIIPDPFQEGVAKVVAESVRNAVKETN

SEQ ID NO: 10552 - protein, 197 aa, Sulfolobus acidocaldarius
MTQGPNYRIKFRRRREGKTDYYTRYTYVINNAIRFVPRLTNKYVIVSVSKFDQKGDIMIAYAHSIELVKKYGWKGDTNNTPAAYLTGYLAGLRAVKSGVKAAVSDIGLFVPVKGGRIFAVIKGAIDAGLKVPVGDLGKLKDRVNGSHISAYAQKLKNENQELYNKLFSSYIQRGLDPVLLPQHFEEVLNKIKENGGK

SEQ ID NO: 10553 - protein, 423 aa, Pseudomonas aeruginosa
MTISIRGARVIDPASDLDQVGDLHIEAGKIVAIGAAPAGFSAQKTLDGAGLVAAAGLVDLSVALREPGYGRKGNVESETRAAAAGGTTSLCCPPYTRPVLDTPAVAELILDRAREAGNAKVYPIGALTRGFGGEQLSELVALRDTGCVAFTNGLHGFASNRILRRALEYAATFDLTVIFTSQDTDLAEGGLAHEGPTASFLGLAGIPETAETVALARNLLLVEQSGVRAHFSQLTSARGIELVAQAQARGLPVTCDVALYQLILTDEALVGFSSLYHVQPPLRTRADREALREAVNNGVVQAIASHHQPHEPDAKNAPFAATEPGISGAELLLPLAMTLVQDGLLDLPTLLARLSHGPAQALRLPAGRLAVGQAADLVLFDPQGSTLAGESWYSKGQNSPFVGHCLPGRVRYTLVDGHLTHEG

SEQ ID NO: 10554 - protein, 468 aa, Ralstonia solanacearum
MAYPPIPVPADAAPSANTAWQARSRAAVWHPCTQNARLDAMPPLPIARGQGPWLIDFDGKRYLDGTSSWWVNLFGHANPHINAALKAQLDMLEHTMLAGATHRPAVELAERLVGLTGGVLGHSFFGSDGASAVEIALKMSFHAHRNAGQGARSRFVCLEHGYHGETLGALGVTDVAIFRDAYDPLILQSHRVASPDARLAGPGETGADVAERALAALRDCLSANAGTIAAVIIEPLVQCAAGMAMHDASYLRGVRALCDQFGVHWIADEIAVGCGRTGTFFACEQAGVWPDLLCLSKGISGGYLPLSIVLSRDAIYDAFNEDAPVRSFLHSHSYTGNPLACRAALATLDLFAEEDVFARNRVTAARIAQGLAPLSHDARFAHLRQAGMITAFDVHPEVAGPRFAERFALTARAHGLLLRPIGHTVYLLPPYVLTDDETDTLVERTLHTLEDTLAQATGAHEGETHAIA

SEQ ID NO: 10555 - protein, 386 aa, Medicago sativa
MAIHHHHHNHQQLQQHTSSLFDALYCDEEEKWEDDDEGEVVDEGAQSDVTTTNYDILDSTSLLPLLLLEQNLFNEDEELNTLFSKEITQQETYYEDLKNVINFDSLSQPRREAVEWMLKVNAHYGFSALTATLAVNYLDRFLLSFHFQKEKPWMIQLVAVTCISLAAKVEETQVPLLLDLQVQDTKYVFEAKTIQRMELLILSTLKWKMHPVTTHSFLDHIIRRLGLKTNLHWEFLRRCENLLLSVLLDSRFVGCVPSVLATATMLHVIDQIEQSDDNGVDYKNQLLNVLKISKEKVDECYNAILHLTNANNYGHKRKYEEIPGSPSGVIDAVFSSDGSNDSWTVGASSYSTSEPVFKKTKNQGQNMNLSPINRVIVGILATATSP

SEQ ID NO: 10556 - protein, 489 aa, Haloarcula marismortui ATCC 43049
MSQPDSQTAWDRLYIDGEWRDAGTSETIPVTNPATGDEIAAVPAGTEGDVNDAYQAAEAAQSDWAALSREERNEYVQAMIGVMQERLDEIVELLATESGSVQAKATAEANFAMADFQSALEMVPPEEEVRDSMYHEDKDHHIVREPAGVVGIISPWNFPLHLTTRALGPALALGNTVVIKPATDTPITGGLLLADIAEEAGLPDGVVNVVTGHGSDIGDRMAGHPTARVMSFTGSTAVGRSVASQAGDALALPALELGGNGPFVVTEDADIEAAAKAGSVGAFGHQGQVCISINRHLVHEDVYDEYVEKLVEHAESLTIGNPLDEDVEFGPIINESQVEQLTSFIEQTVDAGATLETGGEVEDLFLEPTVLSECTNDMSAACNEHFGPVAPVIPFESDEEAVELANDTEYGLAAGVYSSDVEHGRSIADQIDAGMVHVNDHPIQDEPNAPFGGMKNSGLGRYNGEWIMDELTETKWISVQHEERDYQLL

SEQ ID NO: 10557 - protein, 208 aa, Glycine max
  unsure (1)..(208): unsure at all Xaa locations
MSQLGVALQESLRTQREARSTILGLLREQMDGVDGGTRRRRSLKERFGFIGMGCCGASWGFRSDALSVNQGEQEQQQETDPGRVAAPECVGPAGSGSGMNLAAALAAERQLRVPQEEGGGVRAPWRVSLXRLLEETEGGDAAPAEKEKEKEENVLGXDSVCCVCMGRXKGAALIPCGHXFCRVCXRELWXNXXSCPLCNRSILXIXDI

SEQ ID NO: 10558 - protein, 289 aa, Zea mays
  unsure (1)..(289): unsure at all Xaa locations
MGGGRVMATAAKVAGIGVAKGGFRGGFGVPAAANDQFIVRNTSASKPVSASISSAGHPSVEEDAVVMRXPVWEDEWEFAXVETKTIPXGVFDXPPSLQEAKESTDDLKDAFTLPWMEGSNGSWSWFKMCSRFPPNXNSPLXSNFIVFKHKAFAFLSENTAAQSVVTSIASDPKVWDAVMENKDLMKFLETNTASTKDEADNDDXSELSSETESEEDSEEKPIQLMEILRDMKLKAVXMMENVSSYFGGLFRTETFTEGGQERKRMLLNXPTTXLGLAXLRYFMVVLKRA

SEQ ID NO: 10559 - protein, 370 aa, Glycine max
MAALSNGHGSSFFKMPPIKFTKLFINGEFVDSLSGREFETRDPRTGEVITRIAEGAKEDVDVAVKAARAAFDYGPWPRMPGAERAKIMMKWADLVDQNIEEIAALDAIDAGKLYHWCKAVDIPAAASTIRYYAGAADKIHGEVLKASREFHAYTLLEPIGVVGHIIPWNFPSTMFVAKVSPSLAAGCTMVLKPAEQTPLSALFYAHLAKLAGIPDGVLNVVPGFGQTAGVAISLHMDIDKVSFTGSTEVGREVMRAAANSNLKPVSLELGGKSPVIVFDDADVDKAAELALLGILFNKGEICVAGSRVLVQEGIYDEFEKKLVEKAKAWVVGDPFDPKVQQGPQVDKFSSKSASAYKKTQTNGVTLFWTP

SEQ ID NO: 10560 - protein, 414 aa, Escherichia coli
SKVVVPAQGKKITLQNGKLNVPENPIIPYIEGDGIGVDVTPAMLKVVDAAVEKAYKGERKISWMEIYTGEKSTQVYGQDVWLPAETLDLIREYRVAIKGPLTTPVGGGIRSLNVALRQELDLYICLRPVRYYQGTPSPVKHPELTDMVIFRENSEDIYAGIEWKADSADAEKVIKFLREEMGVKKIRFPEHCGIGIKPCSEEGTKRLVRAAIEYAIANDRDSVTLVHKGNIMKFTEGAFKDWGYQLAREEFGGELIDGGPWLKVKNPNTGKEIVIKDVIADAFLQQILLRPAEYDVIACMNLNGDYISDALAAQVGGIGIAPGANIGDQCALFEATHGTAPKYAGQDKVNPGSIILSAEMMLRHMGWTEAADLIVKGMEGAINAKTVTYDFERLMDGAKLLKCSEFGDAIIENM

SEQ ID NO: 10561 - protein, 451 aa, Zea mays
MAYAARRKKRLGRYEVGRTIGQGTFAKVKFAVDSDTGAPVAMNELELPYTKSQRSERRSKIKREISIMKIVRHPNIVRLNEVLAGRTKIYIVLELVTGGELFDRIVRHGKLRENEARKYFQQLIDAIDYCHSKGVYHRDLKPQNLLLDSRGNLKLSDFGLSTLSQNGVGLVHTTCGTPNYVAPEVLSSNGYDGSAADIWSCGVILYVLMAGYLPFEENDLPHLYEKITAAQYSCPYWFSPGAKSLIQRILDPNPRTRITIEEIREDPWFKKNYVTIRCGEDENVSLDDVQAIFDNIEDKYVSDEVTHKDGGPLMMNAFEMIALSQGLDLSALFDRQQEFVKRQTRFVSRKPAKTVVATIEVVAESMGLKVHSRNYKVRLEGPASNRASQFAVVLEVFEVAPSLFMVDVRKVAGDTPEYHRFYENLCSKLCSIIWRPTEVSAKSTPLRTTTC

SEQ ID NO: 10562 - protein, 283 aa, Pediococcus pentosaceus ATCC 25745
MNNLTDTYTLNNGVKIPVVGFGTWQSKDGDEAYNAVKAALEAGYRHIDTAAAYGNEESVGKAIKDSGIDRKELFITSKLWNRDHGYESAKKALDTSLAKLGTDYLDLYLIHWPNPVQFRDEWQQRNADSWRAMEEALDAGKVRAIGVSNFRAHHLDELLKTAKVTPAVNQIFLNPSDTEDEVVAYNKEHGILSEAYSPLGTGKIFTIPELKDIAAKYNKSVAQVVLRWSLQHGFLPLPKSVHADRIKQNTEIFDFELSDDDIKKIDGFHGVAGLAQDPDATDF

SEQ ID NO: 10563 - protein, 213 aa, Zea mays
  unsure (1)..(213): unsure at all Xaa locations
MDDEEHEVYGQEIPEDGDMDGADVDMAAAGDDAAKLQELDEMKRKLKEMEEEAAALRDMQAKVAKEMQGGDPSISTAEAKEQVDARSVYVGNVDYACTPEEVQQHFQACGTVNRVTILTDKFGQPKGFAYVEFLEQEAVQEALNLNESELHGRQIKVAPKRTNVPGMKQRPPRGYNPYHGYPYRSYGAPYFPPYGLWGXAPRFRRPMRYRPYF

SEQ ID NO: 10564 - protein, 406 aa, Glycine max
  unsure (1)..(406): unsure at all Xaa locations
MVLEATMICIDNSEWMRNGDYSPSRFQAQADAVNLICGAKTQSNPENTVGVLTMAGKGVRVLVTPTSDLGKILACMHGLDIGGEMNLAAGIQVAQLALKHRQNKKQQQRIIVFAGSPVKHEKKMLEMIGRKLKKNSVALDIVNFGEEDEGKTEKLEALLAAVNNNDTSHIVHVPSGPNALSDVLISTPIFTGDGEGGSGFXAAAAAAAAAGGVSXFEFGVDPNLDPELALALRVSMEEDRAKQEAAAKKAAEDAAKQEKGGEQQASSQDATMTERASAAMSEAENKTSDLMDDENALLQQALAMSMDDPAISHDVKDTDMSEASASDPDLALALQLSIADSTKDQGSQSDMSKLLADQSFVSSILASLPGVDPNDPSVKDLLASMQNQSEPQQKNDDKPSNEEEKK

SEQ ID NO: 10565 - protein, 108 aa, Hyacinthus orientalis
LTVSVASGQYFCLHFEAFQLGMAPVYRAFLRFMGDDSEAKNYSYSREVGATGRKMIWQGVPRSIRDSHRKVRDSYDAIVIQRNIALFFSGGDRKELKLRVTGRIWKEQ

SEQ ID NO: 10566 - protein, 283 aa, Streptococcus agalactiae 2603V/R
MATIQWFPGHMSKARRQVQENIKHVDFVTILVDARLPLSSQNPMLTKIVGDKPKLMILNKADLADPIRTKEWRDFYESQGLKTLAINSKEQSTVKKVTDIAKILMSDKIANLRGRGIQKETLRTMIIGIPNAGKSTLMNRLAGKKIAVVGNKPGVTKGQQWLKSNKELEILDTPGILWPKFEDELVGLKLALTGAIKDQLLPMDEVTIFGLNYFKTYYPDRLKERFKSINLEDEAPEIIMALTQKLGYRDDYDRFYNLFVKEVRDGKLGRYTLDIVGEHDGNN

SEQ ID NO: 10567 - protein, 503 aa, Hordeum vulgare subsp. vulgare
MVAPAKIPQRQLFIDGEWRAPALGRRLPVINPTTEVSIGEIPAGTSEDVDAAVAAARAALKRNRGRDWSRAPGAVRAKYLRAIAAKMIERKSDLARLEALDCGKPLDEAAWDMDDVAGCFEFFAGHAEALDKRQNAAVALPENFKCHLKKEPIGVVALITPWNYPLLMAVWKVAPALAAGCTAVLKPSELASVTCLELGDVCKEVGLPSGVLNIVTGLGNEAGAPLSSHPDVDKVAFTGSYATGQKIMVAAAPTVKPVTLELGGKSPIVVFDDVDIDKAVEWTLFGCFWTNGQICSATSRLLIHKNIAKEFVDRMVAWSKNIKVSDPLEEGCRLGPVVSEGQYEKIKKFVANAKTEGATILTGGVRPKHLEKGFFIEPTIITDINTSMEIWREEVFGPVLCVKEFSTEEEAIELANDTHYGLAGAVISGDRERCQRLAEEIEAGCIWVNCSQPCFCQAPWGGNKRSGFGRELGEGGIDNYLSIKQVTEYTSDAPWGWYKAPAN

SEQ ID NO: 10568 - protein, 156 aa, Burkholderia cepacia R18194
MTSDDLTPGGRVRAANVFDRGDCKGGNHSPQLTWHNPPPGTHGYAVTIFDPDAPGHGWWHWAVAGIPATVTSLPADASASGFLRRIGASEARNDFGIDGYGGPCPPPGKPHRYVITVYALKGDDLRVAQGRPAPMFEHEIGTLAIGTAQLTVNYGQ

SEQ ID NO: 10569 - protein, 506 aa, Hordeum vulgare subsp. vulgare
MAAPPAIPRRGLFIGGGWREPTLGRRIPVINPATEDTIGDIPAATAEDVELAVAAARSAFLLDGGSRWARASGATRAKYLNAIAAKIKEKISYLALLETVDSGKPKDEAVADMDDVAACFEYYAALAEALDGKQHAPISLPMEEFKTYVLKEPIGVVGLITPWNYPLLMATWKVAPALAAGCTAVLKPSELASLTCLELGAICEEIGLPSGVLNIITGLGPDAGAPIASHPHVDKIAFTGSTATGKTIMTAAAQMVKPVSLELGGKSPLVIFDDVADIDKAVEWAMFGCFFNGGQVCSATSRLLLHEKIAERFLDRLVEWAKNIKISDPLEEGCRLGSVISKGQYEKIKKFISTARSEGATILHGGDRPKNLGKGFFIEPTIITGVSTSMQIWREEVFGPVICVKVFKTESEAVELANDTHYGLAGGVISDDLERCERIAKVIHSGIVWINCSQPTLVQAPWGGNKRSGFGRELGEWGLENYLSVKQVTRYCKDELYGWYQRPSKL

SEQ ID NO: 10570 - protein, 385 aa, Neurospora crassa
MLSRNSMRLARAVAQPTPRLARGFASVQDTPAQTLQSDIFKPTKYGGKYTVTLIPGDGIGAEVAESVKTVFKADNVPITWEQIEVSGVQDNASRTEEAFQQAVASLRRNKLGLKGILHTPISRSGHQSFNVAMRQELDIYASISLVKNLPGLQTRHKDVDLCIIRENTEGEYSGLEHQSVDGVVESLKIITRAKSERITKFAFQFALANQRKKVTCIHKANIMKLADGLFRGTFNRLAKDFPQLECNDMIVDNASMQCVSKPQQFDVMVMPNLYGGILSNIAAALVGGPGVVPGCNMGRDVAVFEPGCRHVGLDIQGKDQANPTALLLSGTMLLRHLGLDDHANRISNAVYDVIAQGKVRTRDMGGEASTHEFTRAILDSMEKSL

SEQ ID NO: 10571 - protein, 274 aa, Listeria monocytogenes str. 4b F2365
MNLKYTVKLANGVEMPRLGFGVWKVQDGDEAVNSVKWAIEAGYISIDTAAAYKNEEGVGQAIKESGVKREDLFVTTKLWNAEQGYESTLAAFDESLRKLELDYVDLYLIHWPVKGKFKDTWRAFEKLYKDKRVRAIGVCNFHEHHLKELMEDAEIAPMVNQIELHPQLTQEPLRKFCAENNIVVEAWSPLGNGKLLSNPEIKAIADAHGKSVAQVILRWDLQIGVVTIPKSVHQERIIQNADIFDFELSEEEVAKISGLNKDERTGPDPDNFNF

SEQ ID NO: 10572 - protein, 493 aa, Catharanthus roseus
MDYLTIILTLLFALTLYEAFSYLSRRTKNLPPGPSPLPFIGSLHLLGDQPHKSLAKLSKKHGPIMSLKLGQITTIVISSSTMAKEVLQKQDLAFSSRSVPNALHAHNQFKFSVVWLPVASRWRSLRKVLNSNIFSGNRLDANQHLRTRKVQELIAYCRKNSQSGEAVDVGRAAFRTSLNLLSNLIFSKDLTDPYSDSAKEFKDLVWNIMVEAGKPNLVDFFPLLEKVDPQGIRHRMTIHFGEVLKLFGGLVNERLEQRRSKGEKNDVLDVLLTTSQESPEEIDRTHIERMCLDLFVAGTDTTSSTLEWAMSEMLKNPDKMKKTQDELAQVIGRGKTIEESDINRLPYLRCVMKETLRIHPPVPFLIPRKVEQSVEVCGYNVPKGSQVLVNAWAIGRDETVWDDALAFKPERFMESELDIRGRDFELIPFGAGRRICPGLPLALRTVPLMLGSLLNSFNWKLEGGMAPKDLDMEEKFGITLQKAHPLRAVPSTL

SEQ ID NO: 10573 - protein, 502 aa, Triticum aestivum
  unsure (1)..(502): unsure at all Xaa locations
MVATAKIPQRQLFIDGDWRAPALGRRLPVINPTTEASIGEIPAGTSEDMDAAVAAARAALKRNRGRDWSRAPGAVRAKYLRAIAAKMIERKSDLARLEALDCGKPLDEAAWDMDDVAGCFXFFAGHAEALDKRQNAAVALPENFKCHLKKEPIGVVALITPWNYPLLMAVWKVAPALAAGCTAVLKPSELASVTCLELGDVCKEIGLPSGVLNIVTGLGNEAGAPLSSHPDVDKVAFTGSYATGQKIMXAAAPTVKPVTLELGGKSPIVVFDDVDIDKAVEWTLFGCFWTNGQICSATSRLLIHKNIAKEFVDRMVAWSKNIKVSDPLEEGCRLGPVVSEGQYEKIKKFVANAKSEGATILTGGVRPKHLEKGFFIEPTIITDINTSMEIWREEVFGPVLCVKEFSTEEEAIELANDTHYGLAGAVISGDRERCQRLAEEIDAGCIWVNCSQPCFCQAPWGGNKRSGFGRELGEGGIDNYLSIKQVTEYTSDAPWGWYKAPA

SEQ ID NO: 10574 - protein, 594 aa, Triticum aestivum
  unsure (1)..(594): unsure at all Xaa locations
PRVRFNHLYDPLSLVRDHRVKQVLGAEGITVQSFNSDLLYEPWEVLDDHGCPFTMFTPFWNTCLCMVDPPAPMLPPKRINSGELSRCCSSDDLIFEDESERGSNALLARAWSPGWQNADKAFTAFINGPLIDYSVNRKKADSANTSLLSPYLHFGELSVRKVFHQVRMKQLTWSNESNGDGEEGCSLFLRSIGLREYSRYLAFNHPCSHEKPLLAHLRFFPWVVNEVYFKVWRQGRTGYPLVDAGMRELWATGWLHDRIRVVVSSFFVKVLQLPWRWGMKYFWDTLLDADLESDALGWQYISGSLPDGRELDRIDNPQFEGYKFDPYGEYVRRWLPELARLPTEWIHHPWDAPESVLQAAGIELGSNYPLPIVELDEAKSRLQDALSEMWELEAASRAEIENGMEEGLGDSSDEPPIAFPQELQHMEVDLDRATIHTPAMAGRRRADQMVPSITSSFFRAETETELSAAFESQVTRPEVPSQVHFQPQTRTEIRDEVASYGTAARYNGVQQQQQQYXYTITVCRCGIAPSTSEASSSWTGREGGVVPAWAPPAASGHSDPYAADETDISGRSYLDRHPQQSHRLMNWNQLSQSS

SEQ ID NO: 10575 - protein, 46 aa, Aeromonas hydrophila
EKGFGFISPTDGSKDVFVHFSAIQTPGFKTLDEGQRVEFTIEQGQK

SEQ ID NO: 10576 - protein, 426 aa, Glycine max
MSEKEKGNNSEGQSTLLHGKYELGRVLGHGTFAKVYHARNLNTGQHVAMKVVGKEKVIKVGMMEQVKREISVMKMVKHQNIVELHEVMASKSKIYIAMELVRGGELFNKVSKGRLKEDVARLYFQQLISAVDFCHSRGVYHRDLKPENLLLDEHGNLKVSDFGLTAFSDHLKEDGLLHTTCGTPAYVSPEVIAKKGYDGAKADIWSCGVILYVLLAGFLPFQDDNLVAMYKKIHRGDFKCPPWFSLDARKLVTKLLDPNPNTRISISKVMESSWFKKPVPRKLAAEKVDLEEEKIESQLETINAFHIISLSEGFNLSPLFEDKRREEMRFATAGTPSTVISRLEEVAKAGKFDVRSSETKVRLQGQERGRKGKLAIAADIYAVTPSFMVVEVKKDNGDTLEYNQFCSKQLRPALKDIFWNSAPASA

SEQ ID NO: 10577 - protein, 431 aa, Arabidopsis thaliana
MAEDSNSSESIIVNVTGDDNKSALFGKYDLGKLLGSGAFAKVYQAEDLQNGGESVAIKVVQKKRLKDGLTAHVKREISVMRRLRHPHIVLLSEVLATKTKIYFVMELAKGGELFSRVTSNRFTESLSRKYFRQLISAVRYCHARGVFHRDLKPENLLLDENRDLKVSDFGLSAMKEQIHPDGMLHTLCGTPAYVAPELLLKKGYDGSKADIWSCGVVLFLLNAGYLPFRDPNIMGLYRKIHKAQYKLPDWTSSDLRKLLRRLLEPNPELRITVEEILKDPWFNHGVDPSEIIGIQADDYDLEENGKILNAFDLISSASSSNLSGLFGNFVTPDHCDQFVSDESTAVIMRKVEEVAKQLNLRIAKKKERAIKLEGPHGVANVVVKVRRLTNELVMVEMKNKQRDVGLVWADALRQKLRRLINQPVYKVPDKP

SEQ ID NO: 10578 - protein, 220 aa, Zea mays
  unsure (1)..(220): unsure at all Xaa locations
MSATSKAAIREMDARMFGLENPLVAALHHLLDVPHTPRITIRNELIPNQHSKSATSKAATREMDARMFGLETPRVAXALHHLLDVPDGDKAGGGATRXTYVRDARAMAATPXADVKELAGAYAFVVDMPGLXGTGDIRVQVEDERVLVISGERRREEREDAKYLRMERRMGKFMRKFVLPDNADVDKVAAVCRDGVLTVTVEKLPPPEPKKPKTIEIKVA

SEQ ID NO: 10579 - protein, 437 aa, Vibrio cholerae O1 biovar eltor str. N16961
MTLTRRQQIEALEKDWATNPRWKNVKRTYTAEEVVSLRGSVVPANTIAQRGADKLWELVNGSAKKGYVNCLGALTGGQAVQQAKAGIEAIYLSGWQVAADNNTAGTMYPDQSLYPVDSVPSVVRRINNAFRRADQIQWSNGKSPQDEGGIDYFLPIVADAEAGFGGVLNAYELMKSMIEAGAAGVHFEDQLASVKKCGHMGGKVLVPTQEAVQKLIAARLAADVAGTTTLVIARTDANAADLLTSDSDPYDADFVTGERTSEGFYRVRAGIDQAISRGLAYAPYADLVWCETAKPDLEEARKFAEAIHAQYPDQLLAYNCSPSFNWEKNLDAKTIAHFQQALSDMGYKYQFITLAGIHNMWFNMFELAHAYAQGEGMRHYVEMVQRREFEAASKGYTFVAHQQEVGTGYFDKMTNTIQGGNSSVTALTGSTEEDQFH

SEQ ID NO: 10580 - protein, 159 aa, Listeria monocytogenes EGD-e
MNVHDFSEKAMNGKEIALSDYKGKVLLIVNTASKCGLTPQLEGLEAMYKKLGGDNFEILGFPCNQFLRQDPGSDEEILEFCQMNYGVTFQMFSKIKVKGKDASPLYKYLTEQTGGKKVEWNFAKFLIDENGEVIERFPSKMKPEDFEDKVEALVAKVNN

SEQ ID NO: 10581 - protein, 46 aa, Aeromonas salmonicida
EKGFGFISPADGSKDVFVHFSAIQSTSFKTLDEGQRVEFTIEQGQK

SEQ ID NO: 10582 - protein, 243 aa, Gossypium hirsutum
MRQQYVFTTLTLLILFSLSCSTTLAQAPALAPAPSGPTNVTKILEKAGQFTLFIRLLKSTQVANQLLGQLNNSNNGMTVFAPTDNAFSSLKSGTLNSLTDEQKVELVQFHIVPTYLTSSQFQTISNPLRTQAGDSGDGKFPLNITTSGNSVNITTGLTNTSVSGTIYTDGQLAVYQIDQVLQPLQIFAPRPPAPAPAPAKSKNKKATTVADSPDVTPADNSKAATLQNVGLFGVAALVIALSL

SEQ ID NO: 10583 - protein, 360 aa, Synechococcus elongatus PCC 6301
MAVRKLGVLTSGGDCPGLNAVIRAIARHAVGNYGWELWGIAYATQGLLKRQAIALSPHHFDRQSLDPLLCSGGTILGSINRGDTLAHQAEILAGYQELGLDALIGIGGDGSLAILRQLAEAGRWQFIGIPKTIDNDVALTERAIGFDTAIHTVAEALLSLGSTAASHDRIMIAEVMGRQSGHLALQGGIAGGADVILLPEIPYRLLELCHYLQQLRDRWQRRYAVIAIAEGTHHPPEVTQGPGSLGEQLVQAITAQDPTLDARVTVLGHVQRGGNPVASDRLLATQMGYAAVERLAAGASGEMMAWQGGRVVSVPLEAVCLQSPTLVDPHSPPVDTAAGLGIFLGDRSLTPWRGSACPTH

SEQ ID NO: 10584 - protein, 45 aa, Bacillus atrophaeus
KKGSGFIEREAGDDVFVHFSAIQGEGFKSLEEGESVSFDVEQGQR

SEQ ID NO: 10585 - protein, 40 aa, Brassica napus
  unsure (1)..(40): unsure at all Xaa locations
KLTAFVFARCVPHILITVNLIKDAXKFERGVEWPLALFGM

SEQ ID NO: 10586 - protein, 45 aa, Bacillus cereus
EKGFGFIEVEGGEDVFVHFSAIQGEGFKTLEEGQEVTFEVEQGNR

SEQ ID NO: 10587 - protein, 479 aa, Methanosarcina acetivorans C2A
MVAMKMQINGKAVEACGGEVFGIKNPATGELIEQVPRGTEEDVAVAVEAASSAFTGWASASPQQRGEVLYRAAEIVRQRKDELASLLTQEQGKPIVEARNEIEGFAHVLEYYCGLSGSQRGDFIPVPGNGYAFTVKKPLGVCAAIIPWNMPALIMGWKIAPVLISGNTLVLKPASNTPLTNLTLASIFVEAGLPAGVLNVVTGPGETVGESLVRSPEVRKISFTGEARTGKRVAELAACGMKRITLELGGSDPMLVCDDADLESAAAGALRGRFYNCGQTCTAVKRLYVFESVAEEFIKKLETGIKSLRLGNGMDKNISMGPLNNRTQWEYIKELAAEIEEKDAGRIITGGKVPEFKDSEKGYFFEPTLVSDVPGDSRLLKEEVFGPLLPVVTVKNLDEAIVGANSTCYGLGASIWTKNIDRARKGCEQLNAGIIWINQHLKVAPEVPFGGVKESGFGRENGPESLSEYLETKTIMLKI

SEQ ID NO: 10588 - protein, 375 aa, Triticum aestivum
MSRLLSPSDQQLQSPQQQFPEEQSYPQQPYPQQAFPIPQQYSPHQPQQPFPQPQRPTPLQSQQPFPQQPKQPQQSFSQPQQQFPLQPQQPFPQPQQPIPQQPRQPFPEQPQRPQQPQQSFPQPQQQFPLQPQQPFPQPQQPQQPFPQQPQRPQQSFPQQPEQIIPQQPQQPFPLQPQQQFPEQSEQIISQQRQQPFSLQPQQPFSQPQQPLSQQPGQIIPQQPQQPSPLQPQQPFPQQPEQIIPQQPQQPFLLQSQQPFHQQPEQIISQQPQQPFSLQPQQPFSQPQQPFPQQPGQIIPQQPQQPFPLQPQQPFPQQPQQPFPLQPQQSFPQQPQQPFPQPQQAFPEQGEQIIPQQPQQPFPLQPHQPQQPYPQQ

SEQ ID NO: 10589 - protein, 45 aa, Bacillus subtilis
EKGFGFIEVEGQDDVFVHFSAIQGEGFKTLEEGQAVSFEIVEGNR

SEQ ID NO: 10590 - protein, 324 aa, ASPERGILLUS NIDULANS FGSC A4
MSSSLEQLKATGTVVVCDSGDFATIDKYKPQDATTNPSLILAASKKPEYASLIDAAVEKGKKQGGSVDDQVDATLDYLLVEFGKKILDIIPGKVSTEVDARFSFDTKASVDKALHIIKLYEEAGISKDRILIKIASTWEGIQAAHILQSQHGINCNLTLMFSLVQAIAAAEAGAFLISPFVGRILDWYKAAHKRDFSKEEDPGVKSVQSIFNYYKKFGYKTIVMGASFRNVGEITELAGCDYLTISPGLLEELYNSKDAVPKKLDAASATTLDITKRSYLNDEALFRFDFNEEAMAVEKLREGISKFAADAVTLKDILKQKVQA

SEQ ID NO: 10591 - protein, 82 aa, Glycine max
  unsure (1)..(82): unsure at all Xaa locations
ARDAIGVTSLYIGXGLYGSVWISSEMKGLHDDCGYFEVFLPGHLYSSKQIGCRRLYNPPWFSEAIPSALYEPLVSRHPFEQA

SEQ ID NO: 10592 - protein, 497 aa, Streptomyces avermitilis MA-4680
MHDFSRRGLLRATAAAGAGAVVLPGITAAEAPGASAATGTAESVKCKPAKLTGRIVRPDDPGYADASLGWDELFVHYPLVIVYAQETQDVVNALTWARQHDVALRVRSGGHSLEGWSNVDNGIVIDVSELKWAHIDTASRIATVGAGLSQLEAVTALAEKDLAVTTGTEGTVGLSGATLGGGFGFLTRYLGMACDSLIGAEVVVASGAECAKVIKADGKNNADLLWALRGAGNGNFGIVTSLTYKVAPLKSVAYLQATWDGLGDLQGVFDTWQRTAPVADNRLGTQLEIHRGEILLFGVLAEGSEAEAEELLAPILSVGNPQVSVQVGNWGDVYAGFQIPTADEPANWKFFSQFTTEPFPEKAISLIASFMQDAPSDDSNFFTQAFGGAVRRSPRGGTAFPHRDALFYSEPGAGWGTRGQAGSGDEITPQAQAWIAEFSQALRPYVNGAYVNVPNIGMQDWETAYWGSNFDRLRKIKAKYDPRNVFQYEQSIPPASC

SEQ ID NO: 10593 - protein, 180 aa, Pseudomonas aeruginosa UCBPP-PA14
MLLSALALAGLPLSGWAADCPELLQGQLTKLRSKESIDLCQRYAGKPLVVVNTASHCGFTPQFKGLEALYQRYKGQGLEVLGVPSDDFKQEAADTAETAKICYGNYGVTFAMTQPQHVRGDEAIPLFRQLAEQSGQAPRWNFYKYVVDRQGRVVAQFSSKTTPDDPQLQAAIEKAIASQP

SEQ ID NO: 10594 - protein, 253 aa, Brassica napus
  unsure (1)..(253): unsure at all Xaa locations
METLNPLSHVPISDHRFVGQDMMSLQSPSSIWTKEENKMFERALAIYPEDSPDRWFKIASMIPGKTVFDVMKQYSKLEEDVFDIEEGRVPIPGYPSPLGLAQDTYRKRPNGARGSDHDRKKGVPWTEEEHRRFLLGLLKYGKGDWRNISRNFVVXKTPTQVASHAQKYYQRQLSGAKDKRRPSIHDITTGNXXNANXNRSFSDHRDILPDLVFIEKDNAEGLMCMSPNLFSPSSAPFDDAFNFAGVNAFSAGA

SEQ ID NO: 10595 - protein, 437 aa, Glycine max
MEPPLQQKSPQPPPRTATILGKYQLTRFLGRGSFAKVYQGRSLVDGSAVAVKIIDKSKTVDAGMEPRIIREIDAMRRLHHHPNILKIHEVLATKTKIHLVVELAAGGELFAKISRRGKLPESTARRYFQQLVSALRFCHRNGVAHRDLKPQNLLLDGDGNLKVSDFGLSALPEQLKNGLLHTACGTPAYTAPEILRRSGGYDGSKADAWSCGLILFVFLAGHLPFDDTNIPAMCKKISRRDYQFPEWISKPARFVIHKLLDPNPETRISLESLFGNAWFKKSLNPETAEENALGLSYVKSSYNYEGSKKSSGVTAFDIISMSSGLDLTRLFETTSDLGSKREKRFSSSARVEVVEEKVKEVGGVLGFKIEVGKSNGAIALVKGKVALVFEVLEIVPHELLFVAVKVVEGALEFEEHHWGDWKDALQDLVLSWHNQES

SEQ ID NO: 10596 - protein, 1033 aa, ASPERGILLUS NIDULANS FGSC A4
MDYRALWRRDGAEEFLKLIQDPFKSAFQTNAVWASLATSAVVAIVLALLFSLFRPRHTLVYAPKVKHADRKHAPPPVGKGLFAWIKPVIRTKEAELVDCVGLDATIFIRFTKMCRNIFIFLSIIGCGVMIPVNLTQSQNTDGATAFVVMTPLYVKVNAIWSQVVCAWAFNIIITFFLWRNYKAVLALRRRYFESSDYQRSLHARTLMITDIPPDLRTDEGFLRLTDELNPTAALPRSSVGRNVKGLPKLIKEHEELVRKLESVLAKYLKNPDRLPPSRPTMRPPRGHRDEDGSGKVDAIDYLTDRIQRLEEEIRHVRASIDKRNAMPYGFVSWDKIEHAHAVAYVARNKHPRGTTIRLATRPHDLIWENLSLSKSARKWKAFVMFLWVTALTVVWIAPNALIAVFLSNLSNLGSVWPAFQTELDRNRKVWAAVQGILSPAVTSLFYLLLPIIFRRLSARTGDATKTLREQHVLRHLYSFFVFNNLIVFSLFSAVWTFIAAVIDLKNKNEDPWQAVQDGQFYIKAFSAMCNVSPFWVTYLLQRNMGAAIDLVQFVHLIWVWFAKTFLAPTPRQTIEWTAPPAFDYASYYNYFLYYSTIAICFATLQPIVLPVTALYFGLDAMMKKYMLMYIFVTKNESGGQFWRVLFNRVVFAAILSNVIIGLVAKARGTWNMVYCVVPLPFLMLLFKWYCMRTFDDDCTYYNKANLSDTEALAASKSSKSAGDRLSSKFGHPALFKPLITPMVHAKAADALKQIYRGRLGGNEAEGDYSDIVMDPMMKSQPGKTMPDTSAPFEVVPEHHLDFAYYKDRADFQEEFGGGIYGRPEDLMTERSHTPRSALGDWSPTSSRAPSPAPSVPSLPMLQPEAYDPRLNQGMHPVFRPPPFRTGSGMSRGLYQHQNESETELLGQVQQPAGVSMQPWRPGGGYGPVDQDDHAFTSYEQYLVSIVPENYTLAVRQQPQAPGACLPITGLGRSLFPDNTRTTDSRSLGSPSATVARPELYDAVAISNSRCLYKPALCKLNQQPIRRCLVQHLN

SEQ ID NO: 10597 - protein, 298 aa, Triticum aestivum
  unsure (1)..(298): unsure at all Xaa locations
MADDGLDRWRGFFQGAGVGICEAIEKAILVAAADEPQEFLRRRDRIAERLFNALLARPSCHGCTASTGSVPPATPAVAEDKGSVRRVPEKESKVDSSSLGAPGGGALGGGISEDEDSDSEDDERLRRAAASNYGHNYDDDNDVEEEQDAAAPAEEDHHAEDDDPEAEELEALTNEIDEESQIVGEVLRIKELLLHKQDHSDATLFDSLRRLQLMQLSVSTLKATEIGRAVNGLRKHSSQQIRHLALALIQDWKILVDEWVXTTXLPAKIPGLTLCVIDKKKPPPPWVGLLAQNAKLFF

SEQ ID NO: 10598 - protein, 1424 aa, Magnaporthe grisea 70-15
MGASDSKLVFKKGIFRLSEERHIPADDSYWTSFWELPESSEDVFSLFAPADIRRTRDNALENLETLILAITSRLFTLRHHPSFPDAEIAPDREALNCIRVLTRILPYLYELESLQAWEDRFFWGTRRKRTRRAKLASEVLFDGSQPTSPTTTDGGFDDGGGNGGGNGDNKKPKAAGDDGYEDARPLGAELIDTLIDLLFLTEFTVPRQAVPAGAAAAGRPKVSYAIWQSGVGCNQTTQTTREFESNRTEILRLLLTLCSQSMYMSANVLPQRGVKALTHICTCPDKQVVLSMLCSLLNTLLLVVILYPVPDNANGQAQKNYYRHFLGRIHRPQDFQFIVDGMTRILNQPMQANPTSYIPGAVAQSSAATVKFAPETIMLFWETTQCNKRFRSFIIDTQRAHDFVISVLFYAIEFKGDSSRQGVVRMCAFLLQTLSMEKNFGINLNKSFEAQDTLPPAIRIPAFRGTYADFLIQSIYNLITTSKGKLSAIYPVLLAVINNIAPYLQGINATTSSRLLQLFASMSSPSFLLANESNHDLLRSLLEAMNTIIEHQYKKYQQPNYNAFQGIFNQPGAPAGNEEDNTFAIGDDDDSDDEARPTPAQSDVPSRSSSVASTTNRRGIPQSVDGDAEDALPTQLRGMSEKARGKMPAGYSFSRQNSTTSLGGSSVAGSAAGMAASASSPFLSGGPGGYFEPTAQWIDSWLPELPLHTLLTLIQQLTALLPRQVLAPEASAATDPRGHEQVLSRIRSTELVGIDTDAAHPRVHLFEWSQLALGWYESLVWSFVFSAELQAARGTAGIWNGTAIRLFRVVQDAQAPQGPSLSSPRGAVDAVGSNLVSRIGAINLRGAAESLGRASAGGNAGGGASEGAARRGSVERFFGDVFDIMEAWYSCALLKPPLLRNTWPRTCYGGAQVTATGLTVQAPESCNRHLKTSGVIMRATCESIAQGTILHRLNGDHTASVGCTGNRLCEAAFCSQPSQRIVPTTCASLYAVLAEPPSTPSQFGTFSFVVAQDLEATVGNCPAMLQSAMATMILEASYKCLSVKETANALPSKSDECTCISCHFAAAARFNPAALSTQKEPARRTSSPRQASLESQIREFLHAKKPREQGAGKEPLEQLQAAQAAAAAAALVAQPSAQPVAMHLGMFEIGKPLGRGKFGRVYLAREREHGFVCALKVLHKRELQDAHVERQVQREIEIQSNLRHPNILKMYGHFHDSKRIFIILEFAGKGELYKHLRKETRFPEWRAAQCIAQMASALRYLHRKHVMHRDIKPENILVGFYGEIKISDFGWSVHAPSDRRTTFCGTLDYLPPEMIKPRTADKSYDHRVDLWALGVLTYELLVGEAPFEDTPAMTHKKITRRDMKVPSFVSREASDLILKLLVVDPNKRLPLDKVLDHPWIVKHCRNQKASDRLLPSTGNTPPED

SEQ ID NO: 10599 - protein, 580 aa, Glycine max
MATPNPTRFSLAMERTGQWVFSPEIPTDVIVAVGQTNFSLHKFILAAKSNYVRKVIMESEESDLTRIEISDIPGGSEAFEKAAKFCYGVNFEITVHNVAALHCAAVFLQMTDEYCDGNLAGRTEDFLSQVGLSTLHSAVAVLKSCQKILPFAAEVNVVDRCVEVISCKACNEANFPSQSPPNWWTEELAVLDVDSFAKVIAAMKQRGAKYLTVAGALITYTERALRELVRDHSGGGRGIRSPESGDSDSESKRSEQRELLQAIVPLFPTEKAAFPINFLCCLLRCAIYLRASSACKRELEKRVTEILEHVTVDDLLVLTFSYDGERLLDLDSVRRIISGFVEREKGTTVFNAGVNFNEDFSAAMQRVAKTVDSYLAEIAAYAELSISKFNGIAILIPKGARKSDDDLYRAVDIYLKVHPNLDEIEKEKVCSVLDTLKLSYEARVHASKNKRLPLQIVLHALYYDQLQIRSGTAADKQAVVAAAEKKQLQADVSLVRENEELRSELMKMKMFISDLQKNVHGTSSSGRENIGPTKKPTFFSSMSKKLSKLNPFKNGSKDTSHIDDAPVDLTKPRKRRFSIS

SEQ ID NO: 10600 - protein, 385 aa, Bacillus halodurans C-125
MIRIFQTVLLAIVSAIVGFMIISITFVEYWSHTEAGKVPPKTAVLLHAIHHNLVTPDMRPPKFLTQSNGHSRFKTELIQIPVSDGASIPARVYQPKASGPHPIILYYHGGAFLEGYGDINTHDNIVRALAVRTGSIVVAVGYRVAPGHPFPTAIEDSYDALDWISKNAELFNGDPANVAVVGDSAGGNIATVVSLMARDREGPEISAQVLLYPLTTFQDVAFPSRDHYDSGYYLLSRAVMVQAREKYTPQQESWLNPYTSPLNADLEGVPPAFVVTAEFDPLRDEGEMYAQSLADAGVPVQAIRYNGVMHGFVSFYEVMERGDDALHQASMFLKKSFYDDMDAKPYELVIDDVPSAQVAIKDRLEAYAIGGFLIGKQSLSLFSGW

SEQ ID NO: 10601 - protein, 417 aa, Photorhabdus luminescens subsp. laumondii TTO1
MESKVVIPAEGKKITVDAKGKLVVPNNPVIPYIEGDGIGVDVTPAMLKVVDAAVQKAYQGERKISWMEIYTGEKSTHVYGKDVWLPDETLDLIREYRVAIKGPLTTPVGGGIRSLNVALRQQLDLYVCLRPVRYYQGTPSPVKQPELTDMVIFRENAEDIYAGIEWKAGSVEADKVIKFLQEEMGVNKIRFPQQCGIGVKPCSEEGTKRLVRAAIEYAIDNDRESVTLVHKGNIMKFTEGAFKDWGYQLAREEFGGELLDGGPWVKIKNPKNGKEIIVKDVIADAFLQQILLRPAEYDVIACMNLNGDYISDALAAQVGGIGIAPGANIGDECALFEATHGTAPKYAGQDKVNPGSVILSAEMMLRHMGWTEAADLIVKGMEGAIAAKTVTYDFERLMEGAKLLKCSEFGDAIIQHM

SEQ ID NO: 10602 - protein, 156 aa, Glycine max
  unsure (1)..(156): unsure at all Xaa locations
MGRGKIAIRRIDNSTSRQVTFSKRRNGLLKKARELSILCDAEVGLMVFSSTGKLYDYASTSMKAVIERYNKLKEEPHHLMNPASEAKFWQTEAASLRQQLQYLQECHRQLMGEELMGLGIKELQSLENQLEMSXKGVRMINDQIVTNEIEELRLNG

SEQ ID NO: 10603 - protein, 45 aa, Bacillus subtilis
EKGFGFIEVEGQDDVFVHFSAIQGEGFKTLEEGQSVSFEIVEGNR

SEQ ID NO: 10604 - protein, 448 aa, Thermoplasma acidophilum DSM 1728
MIMEDQERTERYNEDALRYSEYFKGKIQTISKVPVRSLDDFSIWYTPGVAAVSRKIASDPDLSFELTGRWNSIAILTDGTRVLGLGNIGPEAAMPVMEGKALIFNYLGGVNAIPIPIRVQSKEEFVKVAKALEPSFGGINLEDIESPKCFFLLETLQNEMNIPVWHDDQLGTASITLAGVINSLRIVGKKIDQVKVVFNGAGAANIAAAYLFKAAGFKMKNMILVDSKGILHPEREDIDALMINNPWKYQLAIETNGERVKGDLSNAIEGADLLISAAKSGPDTIDSRIVKKMNNDAIVFVLANPIPEMWPQEAKENGARIVATGRGDFPNQINNSLVFPGVFRGVLDARAKGVNFDVMVAASYEIANFVEDPTEEKIVPTMEEWELYPRLASAVASKTVELGLARKSDSKEGFYRRAREIIESNRNIYSKLMDLGLIKRMPNGEHKN

SEQ ID NO: 10605 - protein, 189 aa, Azorhizobium caulinodans
VYPKNDLDYASNFLNMCFAVPCEDYKVSPTLARALDKIFILHADHEQNASTSTVRLAGSSGANPFACIAAGIACLWGPAHGGANEAALKMLTEIGTPDRIPEFVNKAKDKNDPFRLMGFGHRVYKNYDPRAKIMQQTCHEVLTELGIKDDPLLDVAVELERVALHDEYFIEKKLYPNIDFYSGITLKAM

SEQ ID NO: 10606 - protein, 381 aa, Arabidopsis thaliana
MDRISGLPDELLLRVLSLLPNVKDVVVTMVLSKRWQFLWMMVPKLVYDDSYQNLEYGKFSRFVDRSLFMRKAPGIETLHFKLGQNCGNGDIQWWIRAASKFCFRELIIEINCSTSASPSILPRSLYTECRMLVTLKLKKAVLVDVSSPTCFPSLKNLSLVSVKYPGNEFVKSLLSSCHVLEDLVVEQCINDNVTIFSVKVPSLKSLVLRTSKERAPDGESGFVVEAPSLEYLDIDQTGGFCVIENGMPNLAEAYVSVLHHHPDMYPIRCVFHRLVHITLCTCDDEWLNLLACLLKGSPKLISLKLEKHHGHLICSPSPLRDDLSSVPECVLSSLETVEWVDYEGTEAERQLVEFILRNGSCLKKFVISPESVNPDKKYEMI

SEQ ID NO: 10607 - protein, 429 aa, Sinorhizobium meliloti
MSEKSATVTFGGKSADLPVRSGSIGPDVVDIGSLYKQTTMFTYDPGFTSTASCESKITYIDGDEGVLLHRGFPIEQLAEHGDFLEVCYLLLYGELPTKAQKADFDYRVTHHTMVHEQMSRFFTGFRRDAHPMAVMCGCVGALSAFYHDSTDITDPHQRMVASLRMIAKMPTIAAMAYKYHIGQPFVYPKNDLDYASNFLRMCFAVPCEDYVVNPVLARAMDRIFILHANHEQNASTSTVRLAGSSGANPFACIAAGIACLWGPAHGGANEAALNMLAEIGTADRIPEYIAKAKDKNDPFRLMGFGHRVYKNYDPRAKIMQKTTHEVLAELGHKDDPLLEVAMELERIALTDEYFVEKKLYPNIDFYSGITLKALGFPTTMFTVLFALARTVGWIAQWNEMIEDPEQRIGRPRQLYVGAPLRDYVPITKR

SEQ ID NO: 10608 - protein, 116 aa, Pinus pinaster
TVFTVILYGSPLSVIRLVIHTKSVEFMPSFYFSLFAFLGSVLWMVYGALSGDILIMAPNFVGIPLGLSQMALYCIYWNNSPVRVEATKLEAGGELKSIEQNIKEDIELYTEDIEKA

SEQ ID NO: 10609 - protein, 189 aa, Mesorhizobium huakuii
IYPKNDLGFAANFLHMCFAVPCEEYKINPVLARAMERIFILHADHEQNASTSTVRLAGSSGANPFACIAAGIACLWGPAHGGANEAALNMPGEIGHVDHIPEFIARAKDKNDPFRLMGFGHRVYKNYDPRAKIMQKTAHEVLGELGIKDDPLLDIAMELEKIALTDPYFIEKKLYPNVDFYSGITLKAL

SEQ ID NO: 10610 - protein, 71 aa, Triticum aestivum
MAHAAAAAAVPLRRPLLLYLRPARLLSSVAPRSMYGRAYTRALRPLAPLPSDDEDPDDGDGAPSRNEKKRK

SEQ ID NO: 10611 - protein, 171 aa, Hyacinthus orientalis
MKGTYQCSHSELSWSNVGEYQQQLVGHGELLLLRLHRHRVPATFSLSNVGTFIQMRTNLKVVDNSGAKRVMCIQSLKGKKGARLGDTIIASVKEAQPKGKVKKGDVVYGVVVRAAMPRGRCDGSEIKFDDNAVVLVNKQGEPIGTRVFGPVPHELRKKKHVKILTLAEHIA

SEQ ID NO: 10612 - protein, 334 aa, Pantoea agglomerans
NGIAGSYAEYVPVVHIVGAPRLTSQRKGELLHHTLGDGEFCHFMRMSAPVSVAQASLTPENALAEIDRVIEEVMYSSRPGYLLLPSDVPALPVSTRAHALPARQPPFSPSSLEAFTAAAQTQLRGANRVSLLADFLADRFKVKKALEQWMEEVPLGTSTLLMGKGLFNEQQAHFAGTYSGAASAPSTKEAIEGADVVITVGVKFTDTITAGFYQQRPSGNASTSALFAARAIRSSITGRSKNGQRDAPPPPLNLAFRPGRLILLNTTHCRWSRDNSLGQYAFWQQIQDSLQPGDVLVAEQGTACFAAAALNLPQDLQFVVQPLWGSIGYTLAAA

SEQ ID NO: 10613 - protein, 448 aa, Zea mays
MERARARAPALALAPVEVPKFFVCPISLEVMRDPVTLSSGITYDRDSIERWLFTDGHGDCPVTKLPLGADDLEPTPNHTLRRLIQSWCAAHAVERFPTPRPPVDADRVAAIVGCAKKGGQQEVLAALRELADIIGESDRNRRCVEGVPEAVEFLVSVVKKHAAGTSSSKPLGGCRSQEEPMCGVPDSPKACSPEEAALSILHSLKLSEASLKRALESSDGFVDTLASVLRWPPNYRARTYAMHLLKAALSAMQPSQLSSASTDLVEGVVRVVADRTLSPKAIKVALHVLCRLCPWGRNRVKAVEAGAVAAVVELLLNEGCGCGGSNGKRAVELAVVAIDHLCGCAEGRLELVAHPAGLAVVARAATRLSPTATESAVRALHAVARHSATPAVLQEMLAVGVVARLLYLVQAGASGERPRERAREMLKMHARVWRGSPCLASHMASYPC

SEQ ID NO: 10614 - protein, 235 aa, Zea mays
  unsure (1)..(235): unsure at all Xaa locations
SAGKFRKGSTGSEQAIRRRRQWQQQGASPVLLLLLTVQLSLLFRLPDSPSTLALALAAEPEQQNAKQHRQPALLVQSTCNSTSFYDLCIAALAADPASSTADVPGLGAIAVSAAANNASGTAAFLGNASDAAATPQAXRALLRACAGKYAAARDALVQARASLAEQAYDYAFVHVSAAGEYPAVCRTLFRRRQQQQRGASRSAYPAELAKREEALRRLCTIALDIISLLQNQETY

SEQ ID NO: 10615 - protein, 145 aa, Triticum aestivum
  unsure (1)..(145): unsure at all Xaa locations
MASSMISSPAVTTVXNRAGAGMVAPFTGLKSMAGFPTRKTNNDITSIASNGGRVQCMQVWPPVGKKKFETLSYLPDLDDAQLAKEVEYXLRKGWIPCLEFELEHGFVYREHNRSPGYYDGRYWTMWKLPMFGCTDASQVLKELQE

SEQ ID NO: 10616 - protein, 333 aa, Methanocaldococcus jannaschii DSM 2661
MHKICVIEGDGIGKEVVPATIQVLEATGLPFEFVYAEAGDEVYKRTGKALPEETIETALDCDAVLFGAAGETAADVIVKLRHILDTYANIRPVKAYKGVKCLRPDIDYVIVRENTEGLYKGIEAEIDEGITIATRVITEKACERIFRFAFNLARERKKMGKEGKVTCAHKANVLKLTDGLFKKIFYKVAEEYDDIKAEDYYIDAMNMYIITKPQVFDVVVTSNLFGDILSDGAAGTVGGLGLAPSANIGDEHGLFEPVHGSAPDIAGKKIANPTATILSAVLMLRYLGEYEAADKVEKALEEVLALGLTTPDLGGNLNTFEMAEEVAKRVREE

SEQ ID NO: 10617 - protein, 404 aa, Prunus persica
YQGVYPVKCNQDRFVVEDIVRFGSPFRFGLEAGSKPELLLAMSCLCKGNPEALLICNGFKDFEYISLALFARKLALNTVIVLEQEEELDVVIDLSKKLGVRPVIGARAKLKTKHSGHFGSTSGEKGKFGLTTTQILRVVKKLDQLGLLDCFQLLHFHIGSQIPSTALLADGVSEAAQIYCELVRLGAHMKFIDIGGGLGIDYDGSKSSDSEISVSYSLEEYAAAVVRAVLNVCDRKSVKHPVICSESGRALVSHHSVMIFEAISSSACDDVPPMSAFALQYFIEGLTEEARADYRNLSAAAIRGEYEACLTYADQLKQRCIDQFKEGSLGIEQLATVDGLCDMVSKAIGASDPVRTYHVNLSVFTSIPDFWGIGQTFPIVPIHRLDQRPAVRGILSDLTCDSDG

SEQ ID NO: 10618 - protein, 367 aa, Caulobacter crescentus CB15
MKSLFQRRASKVRETEAMNAPVPNNQKAELLQKVVEHVDITSYDARPIIDSMRKMSFSSRDTARAADIFNMALADKGCSTWLILAGSTSAGGCMHVYRDMVKNGMIDAVVATGASIVDMDFFEALGFKHYQAAGPVDDNVLRDNYIDRIYDTYIDEEELQACDHTILEICNKLEPRGYSSREFIWEMGKWLAEGNAKKEGSLIQTAYEEGVPIFCPAFVDSSAGFGLVKHQKEKIAEKKPYLMIDAVADFRELTDVKIAAGTTGLFMVGGGVPKNFAQDTVVCAEILGVEADMHKYAIQITVADVRDGACSSSTLKEAASWGKVSTTYEQMVFAEATTVVPLIASDAYWRKAWEGREKPRWNKLFGK

SEQ ID NO: 10619 - protein, 73 aa, Glycine max
MLCTANNNDSTFKRVLKECAESYKYARDALHAPAQDSANDAYDYASMHMIVAYEYSNVWHSLFKLYSGVGDPC

SEQ ID NO: 10620 - protein, 158 aa, Ustilago maydis 521
MVSLTTSDNEQFTVDRDVAERSVLIKQMLEDIGDTEQPIPLVNVSSNVLKKVLEYCSHHRNDPPAPADDAEESRRRTTDISDWDAKFIQVDQEMLFEIILAANYLDIKPLLDVGCKTVANMIKGKTTEEIRKLFNIQNDFSPEEEAQIRKENEWAEDR

SEQ ID NO: 10621 - protein, 519 aa, Zea mays
SARGNYGLEAGSKPELLIAMSCLPVTEAEPKPYLICNGYKDADYIALALSARAMGLNPIIVLEMEEELAIVLDQYRKLQQKLPDDDAVRKKFEPIIGIRAKLLTKLPGHFGSTAGKHGKFGMLADQIYEVAETLGKEGKLHWLQLLHFHIGSMIPTTGKVYDAVSEAAGIYCNLVNEHGAKWLATLDCGGGLGVDYDGTRSGDSDMSVAYGIQEYASAVVQAVRLKCDYNGVAHPVVCTESGRAMASHHSMIILETLSAIPEPQDEDTSEQLLNRIQDLSYKQPRAPVGGATAAVYSHAADLKKHGIEMYKLGKKLGKRVVADANTVYNYHMNLSVFSLLPDFWGIGQLFPMMPVSRLNEEPTLKGTLVDITCDSDGKIENFISRENTLPLHLFEPSLGGYYVAVLVSGAYQEAIAGKHNLFSGPTLVRVNSSTTKDGGFEIERVDLGPAADEIIGSMRYSVEEDIITVIEKKAKGTEEEERVWAWEMVEPLMTKALTTMPYLNEYKVPEPEPEPEPIP

SEQ ID NO: 10622 - protein, 426 aa, Thermus aquaticus
MAYQRIQIPQEGEKITIQEGVLKVPDQPIIGFIEGDGTGPDIWRAAQPVLDAAVAKAYGGQRRIVWVELYAGEKANQVYGEPIWLPEETLEFIREYLVAIKGPLTTPVGGGIRSINVALRQELDLYACVRPVRWFQGVPSPVKHPELVNMVIFRENTEDIYAGIEWPAGSEEVKKVLDFLKREFPKAYAKIRFPETSGLGLKPISKEGTERLVEAAIEYAIKEDLPSVTLVHKGNIMKFTEGAFREWGYALAREKYGATPLDGGPWHVLKNPRTGREIVIKDMIADNFLQQILLRPDEYSVIATMNLNGDYISDALAAQVGGIGIAPGANINYKTGHAVFEATHGTAPKYAGQDKVNPSSVILSGEMMLRYLGWNEAADLIIRAMERTISKGLVTYDFHRLLVAEGKPATLLKTSEFGQALIQHMD

SEQ ID NO: 10623 - protein, 238 aa, Avena sativa
IENKISRQVTFAKRRNGLLKKAYELSLLCDAEDALIIFSGRGRLFEFSSSSCMYKTLERYRTCNYNSQEAAPLVENEINYREYLKLKTRVEFLQSSQRNILGEDLGPLSMKELDQIESQIDVSLKHIRSRKNQVLLDQLFDLKSKEQELQDQNKDLRKKLQEMSCGENAVHMSWQDGGGQSSSSGQAVDPYPGPLQHPEHDSSMQIGYHQTYMEQLBNEDHTASHHPNAQPGSSAGWI

SEQ ID NO: 10624 - protein, 332 aa, Gonyaulax polyedra
MAGPQLDDFTLVKVLGKGSYGKVMLVRGAQDNRLYAMKMLRKENVIKRNQVEHTKTERSVLETVSHPFIVTLHYAFQTPKKLYMVMEYCPGGELFFHLSRAGRFSEGRTRFYVAETSSAVAYLHQLNVIYRDLKPENLLIDGEGHAKITDFGLRKEGIQDNHSAMTMCGTPEYLAPEILDKKGHGKAVDWYSVGALTYEMLTGLPPFYTKDLQKLFDRIRRGELTYPDYVSVLAKEFLRALLQRNPDARLAGGVPGGDEVKGHEFFGGLDWVALEKRAIPPPFKPTFGGQKEDDVVKYFEKDFVGQPVVNSEVGEGGRDLGHLEASTLTGKR

SEQ ID NO: 10625 - protein, 445 aa, Bacillus halodurans C-125
MAKDESYLIKPLLDRNYPCVSYGKGAALYDMDGKRYLDACSGAVTASIGHGVDEVVQAMYEQARKVSFVYRSQFTNEPAERLAMKLAEQLPGQLNHSFFVNSGSEATETAIKISIQYWQERGRPEKTLILSRWMSYHGITQGALSLSGHYERRQRFEGMLDRLPFLSPPYPYRQVREMSGVDYAEELDHLIEQIGPHRIAAFIAEPIVGAAGTALVPGEWYYEALKQVLDQHDILFICDEVMTGMGRTGKDLAIEHWDATPDIVTLGKGLSAGYAPLAATVVADHVLEPIQAGSNLIMSGHTFSANPLSCAAGLAVLHYVKKHDLVKRAATIGEKLIEDLQEIQTASAIVGDVRGKGLLIGLEFVKNKATKAPFPKDAQVAAVIVNEAQRQGLLLYPSAAGLKGEGAGCLIAPPFTLTKEERCELLGKLARTLERVEKQLLGAEK

SEQ ID NO: 10626 - protein, 251 aa, Oryza sativa (japonica cultivar-group)
MGSKSYPTVSDEYLAAVGKAKRKLRGLIAEKNCAPLMLRLAWHSAGTFDVSSRTGGPFGTMKNPGEQSHAANAGLDIAVRLLDPIKDQLPILSYADFYQLAGVVAVEVTGGPEVPFHPGRQDKPEPPPEGRLPDATQGSDHLRQVFSAQMGLSDKDIVALSGGHTLGRCHKERSGFEGAWTSNPLIFDNSYFTELVSGEKEGLLQLPSDKALMADPAFRPLVEKYAADEDAFFADYAEAHLKLSELGFAEE

SEQ ID NO: 10627 - protein, 222 aa, Chasmanthium latifolium
IENKISRQVTFAKRRNGLLKKAYELSLLCDAEVALIIFSGRGRLFEFSSSSCMYKTLERYRSSNYNSQEVKAPLDSEINYQEYLKLRTRVEFLQTTQRNILGEDLGPLSMKELEQLENQIEISLKHIRTRKSQVLLDQLFDLKTKEQELEDISKGLRKKLHETSGENALHISWEEGGHSGASGNAVEPYQGFQQHRENESSLQIGYRQQAYMEQLNNEDMED

SEQ ID NO: 10628 - protein, 342 aa, Streptomyces coelicolor A3(2)
MKALVKENAEPGLWLADVPEPTIGSGDVLIKVLRTGICGTDLHIRAWDGWAQQAIRTPLVVGHEFVGEVVDTGRDVTDIKAGDRVSGEGHLVCGKCRNCLAGRRHLCRATVGLGVGRDGAFAEYVALPASNVWVHRVPVDLDVAAIFDPFGNAVHTALSFPLVGEDVLITGAGPIGLMAAAVARHAGARNVVITDVSEERLELARKVGATLALNVSDATIADGQRELGLREGFDIGLEMSGRPEAMRDMIANMTHGGRIAMLGLPAEEFPVDWARVVTSMITVKGIYGREMFETWYAMSVLLEGGLDLAPVITGRYSHRDFEAAFADAASGRGGKVILDWTA

SEQ ID NO: 10629 - protein, 225 aa, Danthonia spicata
IENKISRQVTFAKRRNGLLKKAYELSLLCDAEVALIIFSGRGRLFEFSSSSCMYKTLERYRTCNFNSQEAKAPLDSEINYQEYLKLKTRVEFLQTTQRNILGEDLGPLSSKELEQLENQIEISLKHIRTRKNQALLDQLFDLKSKEQELQDLNKDLRKKLQETSGENAVHISWEEGGHSGASGNAMEPSQGFLQHPENDSDLHMGYHQQAYMDHLNNEDMAAPHH

SEQ ID NO: 10630 - protein, 281 aa, Pyrococcus furiosus DSM 3638
MERAFIEWYPRGYGVAFKIKKKIYEKLSKYQKIEVYETEGFGRLLALDGTVQLVTLGERSYHEPLVHPAMLAHPKPKRVLVIGGGDGGTVREVLQHDVDEVIMVEIDEDVIMVSKDLIKIDNGLLEAMLNGKHEKAKLTIGDGFEFIKNNRGFDVIIADSTDPVGPAKVLFSEEFYRYVYDALNNPGIYVTQAGSVYLFTDELISAYKEMKKVFDRVYYYSFPVIGYASPWAFLVGVKGDIDFTKIDRERAKKLQLEYYDPLMHETLFQMPKYIRETLQRL

SEQ ID NO: 10631 - protein, 73 aa, Triticum aestivum
MAFPACVQFGTRENPCRCKFIGPTLGFVAFLVTGVIEWPVGAVVYLFRHRKGRRIMGHPSRVVYPRVSRAIPI

SEQ ID NO: 10632 - protein, 225 aa, Ehrharta erecta
IENKISRQVTFAKRRNGLLKKAYELSLLCDAEVALIIFSGRGRLFEFSSSSCMYKTLERYRSCNYNSQEAAPENEINYQEYLKLKTRVEFLRTTQRNILGEDLGPLSMKELEQLENQIVVSLKQIRDKKNQALLDQLFELKSKEQELRDLNKDLRKKLQETTGDNVLHMSWQDGGGQHSGSSGLTAEHHQGLLHHQDQGNHSLQIGYHQAYMDHLNNEAEMAGHN

SEQ ID NO: 10633 - protein, 166 aa, Brassica napus
  unsure (1)..(166): unsure at all Xaa locations
SEKKKKKKSVXASSMLSSXAXVTSPAHATMXAPFTXLKXXAXFPXTRXANXDITXIASNXGRXSCMXXXPPVGKXXVETLSYLPDLTXXEXXXEXXYLLXXXWIXXXEVELEHGXVYRXXGSTPVYYDGRYWTMWKLPXFGCTDSAXXLKXAXNXXGEXXXXXRDI

SEQ ID NO: 10634 - protein, 451 aa, Zea mays
MVGGGGGGPLRRVGKYEVGRTIEEGTFAKVKFAQNTETGESVAMKVLDRSSILKNKMAEQIKREISIMKLVRHPNVVRLHEVLASRKKIFIILEFITGGELFDKIIRHGRLSEADARRYFQQLIDGVDFCHKKGVYHRDLKPENLLLDSQGNLKISDFGLSAWPAQGSFLLRTTCGTPNYVAPEVLSHKGYNGALADTWSCGVILYVLLAGYLPFDEVDLTTLYGKIESAEYSFPAWFSGGAKSLIRRILDPNPETRIRIEEIRSDEWFQKNYEPIKEIENEEVNLDDVNAAFDDPEDDNEDAFEDETGPLTLNAFDLIILSQGLNLAALFDRRQDCDKLQNRFLSRNPAKVILSSMEVVAQSMGFKTHIRNYKMRVEGLNADKTSHLSVMVEVFEVAPSIFMVELQRAAGDTSEYNTFVNNYCSKLDDIIWKFPTEKGKSRIPRLSKSHS

SEQ ID NO: 10635 - protein, 280 aa, Thermus thermophilus
MAAKKDYYAILGVPRNATQEEIKRAYKRLARQYHPDVNKSPEAEEKFKEINEAYAVLSDPEKRRIYDTYGTTEAPPPPPPGGYDFSGFDVEDFSEFFQELFGPGLFGGFGRRSRKGRDLRAELPLTLEKAFHGGERVVEVAGRRVSVRIPPGVREGSVIRVPGMGGQGNPPGDLLLVVRLLPHPVFRLEGQDLYATLDVPAPIAVVGGKVRAMTLEGPVEVAVPPRTQAGRKLRLKGKGFPGPAGRGDLYLEVRITIPERLTPEEEALWKKLAEAYYARA

SEQ ID NO: 10636 - protein, 229 aa, Eleusine coracana
LENKISRQVTFAKRRNGLLKKAYELSLLCDAEVALIIFSAGRGRLFEFSSSSCMYKTLERYRTCNFNSHEVKAPLDSKINYQDYLKLKTRVEFLQTTQRNILGEDLGPLSNKELEQLEKQIEISLTQIRSRKNQMLLVQLLDLKSKEQELQDLNKDLRKKCQLKKTCGENATHISWEEGGHSGTSRNANEPNQGFLQHAENNYSSLQIGYYQQAYMDQLNNQDIGAAHN

SEQ ID NO: 10637 - protein, 391 aa, Streptococcus salivarius
MAEKIVMKNGQLQVSDRPIIPFIEGDGVGHDIWKNAQAIFDKAVEVAYEGKRHIEWQELLAGKKAYDKTGEWLPKETLEAIRESLVAIKGPLETPVGGGIRSLNVALRQELDLYACVRPVRYFDGVASPLKEPEKTNITIFRENTEDIYAGIEWEAGTADVKRVIEFLQTEMNVNKIRFPESSSIGIKPISIEGSKRLIRSAIDYALKNNLKKVTLVHKGNIQKFTEGGFRKWGYEVAQEDYKEELLAGRLEINDIIADNFLQQILLNPEKFDVVALTNLNGDYASDALAAQVGGIGISPGANINYQTGHAIFEATHGTAPDIADQDKANPCSVLLSGCMLLDYIGWTEAAQLITSAIEKTFKADIFTADLAFGKQAYSTSAFSNQILSIM

SEQ ID NO: 10638 - protein, 45 aa, Enterococcus faecalis
EKGFGFISREDGSDVFVHFSAIQGDGFKTLEEGQAVTFDVEDSDR

SEQ ID NO: 10639 - protein, 191 aa, Methanococcoides burtonii DSM 6242
MRTLMKIVALTTMILTIAVSGCATTDTDEPEPIPEIIEDENNVPEQEIFLISTSAFENNGEIPSRYTCDGDNINPELVPGSLPEDTVSLVLIVDDPDAPIGTFTHWIVWNIAPGSIIEENTVPGIQGLNGAKGTDYLGPCPPSGTHRYFFRFYALDTMLDIGSGSTRTTLEEAMQEHIIAEGELMGTYSSD

SEQ ID NO: 10640 - protein, 341 aa, Streptomyces coelicolor A3(2)
MRIGVLTAGGDCPGLNAVIRSVVHRAVDNYGDEVIGFEDGYAGLLDGRYRALDLNAVSGILARGGTILGSSRLERDRLREACENAGDMIQNFGIDALIPIGGEGTLTAARMLSDAGLPVVGVPKTIDNDISSTDRTFGFDTAVGVATEAMDRLKTTAESHQRVMVVEVMGRHAGWIALESGMAAGAHGICLPERPFDPADLVKMVEERFSRGKKFAVVCVAEGAHPAEGSMDYGKGAIDKFGHERFQGIGTALAFELERRLGKEAKPVILGHVQRGGVPTAYDRVLATRFGWHAVEAAHRGDFGRMTALRGTDVVMVPLAEAVTELKTVPKDRMDEAESVF

SEQ ID NO: 10641 - protein, 46 aa, Klebsiella pneumoniae
SKGFGFISPKDGSKDVFVHFSAIQSDSFKTLNEGQEVSFTIENGAK

SEQ ID NO: 10642 - protein, 289 aa, Triticum aestivum
MAMSDLAAAVISKANGGVDGEEPVEIREVWADNLEAEFALIRDVVDEFPFVAMDTEFPGIVCRPVGAFRSPADYNYATLKANVDMLHLIQLGLTFSGPTGELPALGAGRRRCVWQFNFREFDDERDIFATDSIELLRHSGIDFRRNAERGVDARRFAELLMSSGVVLNDAVYWVTFHAGYDFGYLLKILTCNSLPDTQAGFFKLMKIYFPTVYDIKHLMKFCNSLHGGLNKLAELLDVERVGESHQAGSDSLVTSCAFWKLKDSFFAGSTEKYAGVLYGLNAENGVSAH

SEQ ID NO: 10643 - protein, 126 aa, Triticum aestivum
MSATCAADLGPLLGAAAANATDYLCNRFADTTSAVDSTYLLFSAYLVFAMQLGFAMLCAGSVRAKNTMNIMLTNVLDAAAGALFYYLFGFAFAFGTPSNGFIGKHFFGLKDMPQTGFDYSFFLFQW

SEQ ID NO: 10644 - protein, 45 aa, Lactobacillus casei
DKGYGFITGEDGQDVFVHFSAINGEGYKSLDEGQAVSYDVEQSDR

SEQ ID NO: 10645 - protein, 45 aa, Listeria grayi
EKGFGFISREDGSDVFVHFSAIQGDGFKTLEEGQAVTFDVEESDR

SEQ ID NO: 10646 - protein, 45 aa, Listeria innocua
EKGFGFIERENGDDVFVHFSAIQGDGFKSLDEGQAVTFDVEEGQR

SEQ ID NO: 10647 - protein, 181 aa, Glycine max
MAYSMLSSAAVVTSPAQATMVAPFTGLKSSSAFPVTRKANNDITSIVSNGGRVSCMKVWPPVGKKKFETLSYLPDLTEVELGKEVDYLLRNKWIPCVEFELEHGFVYREHGSTPGYYDGRYWTMWKLPLFGCTDSAQVLKEVQECKTEYPNAFIRIIGFDNNRQVQCISFIAYKPPSFTGA

SEQ ID NO: 10648 - protein, 135 aa, Triticum aestivum
  unsure (1)..(135): unsure at all Xaa locations
MSDSEDHHFESKADAGASKTYPMQAGAIRKGGFXVIKNRPCKVVEVSTSKTGKHGHAKCHFVAXDIFNGKKXEDIVPSSHNWDVPQCWTVLEYQLIDISXEDGFVSFLTDNGXTLRDDLKXQTDDAILDQLKGRF

SEQ ID NO: 10649 - protein, 293 aa, Schizosaccharomyces pombe
MPFIKAVKSSPYFSRYQTKYRRREGKIDYYARKRLIAQAKNKYNAPKYRLVVRFSNRFVTCQIVSSRVNGDYVLAHAHSSELPRYGIKWGLANWTAAYATGLLVARRALAKVGLADKYEGVTEPEGEFELTEAIEDGPRPFKVFLDVGLKRTSTGSRVFGAMKGASDGGLFIPHSPNRFPGFDIETEELDDETLRKYIYGGHVAEYMEMLIDDDEERYQKQSSGLIADGIESDQLEDIYAEAYAKIREDPSFQKSGKDAAAFKAESLKHTQRKLTAEERKERFNAKVIEAGRA

SEQ ID NO: 10650 - protein, 112 aa, Prunus persica
KVLVIGGGDGGVLREVARYSSIEQIDICEIDKMVVDVSKQFFPAVAVGYEDPRVKLHVGDGVAFLKAVPAGTYDAVIVDSSDPIGPAQELLEKPFFQTVANALRPGGVVTTQ

SEQ ID NO: 10651 - protein, 163 aa, Triticum aestivum
  unsure (1)..(163): unsure at all Xaa locations
MEGRMFGLETPLMTALQHLLDVPDSESGGAGNAGGERQGPTRAYVRDARAMAATPADVKELPGAYAFVVDMPGLGSGDIKVQVEDERALVISGERRREEKEDARYLRMERRMGXKLMRKFVLPENADMEKISAVCRDGVLTVTVEKLPPPEPKKPKTIQVQVA

SEQ ID NO: 10652 - protein, 143 aa, Cichorium intybus
MAREKIKIRKIDNITARQVTFSKRRRGLLKKAEELAVLCDADVALVIFSATGKLFEYASSSMQELLGKYKLHSTNNVNKVDEPSLDLQLVESQESRMSQEVLEKDRELSQLRGEDLQGLTLEELQRLESLLEGRLNRVAPDKG

SEQ ID NO: 10653 - protein, 392 aa, Zea mays
  unsure (1)..(392): unsure at all Xaa locations
MLVCMYFPLPAPHEVARAPRGALRLARPVSSLVAAASARGVPDLACVPPAPGRRPGPASGIAATVRHVFSLGEGSPLTVAARGHGHSLMGQSQAAQGIVVRMESLRGARLQVHDGFVDAPGGELWINVLRETLKHAWHPSXTDYLHLTVGGTLSNAGVSGQAFRHGPQVSNVNQXEIVTGLKRTLKAFNQKXTELLSRLRIINRTGVLNNWRASFKPQDPVEASHFQSDGRVLYCLELTKNFNSDDTDTMEQVNLEFLDRVHTSELKLRAQGLWEVPHPWLNLLIPRSSIRRFAKEVFGKILVGFLSSAPSLSGYGSIAHSMNLNKQIVEFCEEAGIGMKQYLAPYTTQQQWKAHFGARWETFERRKHRYDPLAILAPGQRIFPKASLPLPL

SEQ ID NO: 10654 - protein, 103 aa, Prunus persica
ECAYQEMIALLPLCSIPSPKTVLVVGGGDGGVLREVSRHPSVEHIDICEIDKMVVDVSKKFFPQLAVGFQDPRVHLHIGDATEFLRHAPKGKYDAVIVDSSDP

SEQ ID NO: 10655 - protein, 198 aa, Zea mays
MDLSNISIQWFRIHPKESNKEIISGATRPVYALEPHDVGRYLQAEIDVGGEIAVAKTAGPVDPDAGLVDYVETLVRKPETEFNVVVLQSNGVDQPKESVHVLNVGRLRMRLTKGKSVVAKEFYSSSMQLCGVRGGGEAASQAMFWRPRNDLSLVLAFESTRERNAAIMLARRFAVDCNVCAFTKRYIILAGPGDKTPW

SEQ ID NO: 10656 - protein, 319 aa, Geobacter sulfurreducens PCA
MKKIGILTSGGDCSGMNAAIRAAVRTAIRMNIEVVGFRKGYLGLMKGDAIPLDTKAVSGILHRGGTFLQSARSPEFKTPEGQRTALNNLKALGVEGMVVMGGDGSLTGALALNRLGLPVVGIPASIDNDIPFTDMALGVDTALNNIIYAVDCIKDTASSHARAFVIEVMGRHSGYLASISAIATGAEYALVPEREYDLAEICQQLRARYEEGRDNAIIILAEGAGHGHEIANSIKDAIGFETRVTVLGHYQRGGAPTVFDRLLASRLGKKSVELLVTGTWGVMVGLSCNAILATPLEDVIKGEKRPQDEVLRLAEVLGV

SEQ ID NO: 10657 - protein, 482 aa, Ustilago maydis 521
MTVGVASKLLDAPFSHVINGKSVDTQGFKTLDVIDPATEKAIAQVPIATKETVDQAVDAAHAAFPSWSKTTWDERAKLLEQYGEEYKAMLPELVKLLTAEQGKSIQFAQHECETILPWFTELAKVRLDEKVVHENDTHKAIERYVPLGVCAGIVPWNFPVLLMLWKVTQAIVTGNCIIIKPSPFTPLCDIRIIEAAQKVFPPGVVQIVVGDDNLGPWITEHPRIQKISFTGSTATGKLVAKSCSATLKRFTLELGGNDPLVVLPQQKDLAATAQNVLLAAFFNSGQVCIAAKRIYIHEDIYDEFKATLAQVVQHFKVGPGNEEGVMFGPINNKMQYNKVGEFFEEAKKNNFNLVAGGQVEEKPGFFYPLTIVDNPPENSRLVQEEPFGPIVPLLKWKDEADLVKRINDSQWGLGASVWSSDIQAAERIGRQIESGTIWINCLVHHHPAVPFGGFKSSGIGAEHGKNGLGAYCQVQALWIPKA

SEQ ID NO: 10658 - protein, 357 aa, Neurospora crassa
MAARTLKIGLIPGDGIGKEVIPAGRRILEALPASLGLKFEFIDLKAGWETFEQTGNALPEETVSILKSECDGALFGAVSSPTKAVKGYSSPIVALRKKLDLYANVRPVKSVRGPGVKPIDMVIVRENTEDLYVKEEKTYDTPEGKVAEAIKRISQRASSRIATIAGEIALRRQKIREGGSPSIHKGPLVTVTHKSNVLSQTDGLFRSTAREALAAGRFTSVAVEEQIVDSMVYKLFRQPEAYDVIVAPNLYGDILSDGAAALVGSLGLVPSANVGEGFAIGEPCHGSAPDIQGQNIANPIATLRSAALMLEFLNEEEAAAKIYAAVDANLEEGKLLSPDLGGKAKTEEVVQDILRRL

SEQ ID NO: 10659 - protein, 485 aa, Magnetospirillum magnetotacticum MS-1
MTDLDASLLKTHAYIDGHWAEADDGRRFDVLDPATGHLLASVPDMGGAETRRAIEAAEMAWGPWRRRTAKERAAILMAWFEQIIAHKDALARLLSAEQGKPLPEAQGEIVYGAAFIQWFAEEGKRAYGDLIPTTASDRRLLVMKQPIGVVAAVTPWNFPMAMITRKCAPALAAGCPVVVKPAEDTPLSALVLAELAERAGLPRGVFNIVTTRQPGAVGGEMTANPLVRKLSFTGSTRVGKMLMAQCAETVKKVSLELGGNAPFIVFDDCDLDAAVAGALASKYRNSGQTCICTNRFLVQAGVYEEFGRKLAEKAAAMVVGHALKGPVQQGPLINAAAVAKVASHVADAVSKGARVLTGGRPHELGGGFWQPTVLADVTAQMLCFQEETFGPVAPLVRFETEEEAVELANASQFGLAGYFYSRDLARVFRVAEAMECGMVGVNESLISNEVAPFGGIKESGLGREGSKYGLDDFMETKYVCIGGLS

SEQ ID NO: 10660 - protein, 101 aa, Escherichia coli
MRGSHHHHGSRLQSGKMTGIVKWFNADKGFGFITPDDGSKDVFVHFSAGSSGAAVRGNPQQGDRVEGKIKSITDFGIFIGLDGGIDGLVHLSDISWAQAEA

SEQ ID NO: 10661 - protein, 111 aa, Bartonella sp. pb18975nm
ANEACLKMLQEIGSVKRIPEFIARAKDKNDPFRLMGFGHRVYKNYDPRAKIMQKTCHEVLKELNIQDDPLLDIAIELEKIALNDEYFVEKKLYPNVDFYSWHYEMFTVLFA

SEQ ID NO: 10662 - protein, 382 aa, Saccharomyces cerevisiae
MRALAYFKKGDIHFTNDIPRPEIQTDDEVIIDVSWCGICGSDLHEYLDGPIFMPKDGECHKLSNAALPLAMGHEMSGIVSKVGPKVTKVKVGDHVVVDAASSCADLHCWPHSKFYNSKPCDACQRGSENLCTHAGFVGLGVISGGFAEQVVVSQHHIIPVPKEIPLDVAALVEPLSVTWHAVKISGFKKGSSALVLGAGPIGLCTILVLKGMGASKIVVSEIAERRIEMAKKLGVEVFNPSKHGHKSIEILRGLTKSHDGFDYSYDCSGIQVTFETSLKALTFKGTATNIAVWGPKPVPFQPMDVTLQEKVMTGSIGYVVEAFEEVVRAIHNGDIAMEDCKQLITGKQRIEDGWEKGFQELMDHKESNVKILLTPNNHGEMK

SEQ ID NO: 10663 - protein, 83 aa, Triticum aestivum
MAGSLTVSGVLVWRRDVMTHSFGEGYSTRSDEEGFGGVYGQNDPVLNPGTEVHPDHPDYDKSQGSEVKEKEKARHLKDDKHAT

SEQ ID NO: 10664 - protein, 257 aa, Glycine max
MFSKLQPQHQQQHQPFQFSRECQTSEDDDSRSSGGPNTAVAQKSVLGGGGCSDGATIEVVRRPRGRPPGSKNRPKPPLIITREPEPAMSPFILEIPGGSDVVEALARFSRRKNTGLCVLTGSGTVANVTLRQPSFSPAGASVATVTFHGRFDILSMSATFLHHGSPAAIPNALAVSLSGPQGQIVGGLVAGRLLAAGTVFVIAASFNNPSYHRLSSEEDAQNTSDGGGDRQSPAESSMYSCHRPSDVIWAPTPRPPF

SEQ ID NO: 10665 - protein, 291 aa, Triticum aestivum
  unsure (1)..(291): unsure at all Xaa locations
MAGLSMEHPWAFAFGLLGNIISFSSLLAPIPTFYRIFKSKSTEGFQSVPYVVALFSAMLWIFYALVKTGEGLLITINAAGCVIETIYIVMYLVYAPRKAKIFTAKIVLLLNIAGFGLIFLLTVFAFQGETRVISLGWICVGFSVCVFVAPLSIIGRVIKTKXSVEYMPFTLSLTLTLSAIVWFLYGLLIKDKYVALPNILGFTFGVIQMVLYVFYMNKTPVASEVKEGKEAWKVPAEDHVVVINVGKADKSSCAEVRPVTEMAGAVDVPRRCAAEAAAAPGMDFARSVDVV

SEQ ID NO: 10666 - protein, 380 aa, Acremonium chrysogenum
MTTTYKILVLPGDHIGPEIMAEAIKVLTTIETHRPNLHFNLTTDLVGGTSIDTHGVPITQSVLDAAKASDAVLFGSIGGPEWAGVHPTPESGLLQLRQHLDAFANLRPCEFLVPSLVGASPIREHVVKGTRFIVVRENCGGAYFGEKKEEEDVASDLWVYTRPEIERLARVSAAVARIMGRSEDDNQAATVWSADKANVLASGRLWRRITSDIFAKEFPDITLQHQLADSMAMLMVRDPRRFNGVIHTDNTFGDILSDISGAITGTLGLMPSASLCGVPGEGHRSNGIYEPVHGSAPDISGKGLANPVAQILSVAMMLRYSMGLEKEATAVERAVVKVLDAKSEGGLEIRTGDLGGRATCSQVGDAVCEVLGPLLQGKKA

SEQ ID NO: 10667 - protein, 222 aa, Panicum miliaceum
IENKISRQGTFAKRRNGLLKKAYELSLLCDAEVALIIFSGRGRLFEFSSSSCMYKTLERYRSSNYSSQEVKTPLDGEINYQDYLKLKTRVEFLQTTQRNILGEDLGPLSMKELEQLENQVEISLKHIRTRKNQMLLDHLFDLKSKEQELQDLNKDLRKKLQETNAENVLHVSWEEGGHSGASGNAIEPYQGFLQHPENDPSLQIGYHQQAYMDQLNNEDMAD

SEQ ID NO: 10668 - protein, 184 aa, Cucumis sativus
VSRSLSTALLADGVGEAAQIYCELVRLGANMRVIDIGGGLGIDYDGSKSSDSELSVAYGLEEYAAAVVDAVRCVCDCRSVKHPIICSESGRAIVSRHSVLIFEAVSASSYEVPSMSSLELQYLVDGLTDEARVDYQNLSAAAYMGEYKTCLVYADQLKQRCVEKFKDGCLGMEQLAAVEGIARQ

SEQ ID NO: 10669 - protein, 246 aa, Glycine max
MGKSYPTVSADYQKAVEKAKKKLRGFIAEKRCAPLMLRLAWHSAGTYDVSSKTGGPFGTIKHPSELAHGANNILDIAVRLLEPLKAEFPILSYADFYQLAGVVAVEVTGGPEVPFHPGREDKPEPPPEGRLPDATKGSDHLRDVFGKAMGLSDRDIVALSGGHTIGAAHKERSGFEGPWTSNPLIFDNSYFKELLSGEKEGLLQLPSDKALLSDPVFRPLVEKYASDEDAFFADYAEAHQKLSELG

SEQ ID NO: 10670 - protein, 222 aa, Pennisetum glaucum
IENKISRQVTFAKRRNGLLKKAYELSLLCDAEVALIIFSGRGRLFEFSSSSCMYKTLERYRSSNYGSQEVKTPSDGEINYQDYLELKTRVEFLQTTQRNILGEDLGPLSMKELEQVENQIEISLKHIKDKKNQMLLNQLFDLKSKEQELQDLNKDLRKKLQETNAESVLHLSWEEGGHSGTGGNAIEPYQGFLQHPENDPSLQIGYHQQAYIDQLNNEDMAD

SEQ ID NO: 10671 - protein, 222 aa, Setaria italica
IENKISRQVTFAERRNGLLKKAYELSLLCDAEVALIIFSGRGRLFEFSSSSCMYKTLERYRSSNYGSQEIKTPLDGEINYQDYLKLKTRVEFLQTTQRNILGEDLGPLSMKELEQLENQIEIFLKHIRTRKNQMLLDQLFDLKSKEQELQDLNKDLRKKLQETNAESVLHVSWEEGGHSGTSGNAIEPYQGFLQHPDNDPSLQIGYHQQAYMDQLNNEDMGD

SEQ ID NO: 10672 - protein, 337 aa, Vibrio cholerae O1 biovar eltor str. N16961
MFNQYHKLPLFLYTVLCVRLSSRALNTFEELNMTNYLERGIKELVEEFISSGKPCPSKQTISERRAGYLSSTVLAGSSPEMADEFVDELDGIQVKVYKPSDKIDLPITIYFHGGCFISGGFETHEAQLRQLAHLSETIVVCIKYRLAPEHAYPSAHDDVFQAALGIKEHGHKYGGDTEHVFFVGDSAGAQLALATALRLKNKKLWLPEKQILIYPMVDPLGVSDSYQKNGTDFIITAQMLLSGFQLYAGESERLASEKELNLLARKDLQGLPPTLIITAEYDPLRDEGEQLYRLLLSQGVDAYCERYLGVIHGFYQLSGVSESARRCIRNIANAIKN

SEQ ID NO: 10673 - protein, 483 aa, Tortula ruralis
MTGEVKEYRLLLASKPVEADREFLDVTNKYTGEVGAKVQLATHDDVDKAIDAAVAAAPAMAALGAFERKAILEKTVAELKKRAEEIAQILTMESGKPIKDARGEVARTIDTFQVAAEESVRIYGEHMPLDISARNKGPQGIVKKFPIGPVSMVSPWNFPLNLVAHKVAPALAVGCPFVLKPASRTPLSALILGDILVPDRGAAKGAFSVLPVSRADADMFTVDERFKLLTFTGSGPVGWDMKARAGKKKVVMELGGNAPCIVDDYVPDLDYTIQRLINGGFYQGGQSCIHMQRLYVHERLYDEVKAEFLAQVKKLKVGNPFEDDTFIGPMISEKDATRVEDWVKEAVEKGGKLLCGGSRKGAVMQPTVLEDVPMDAMARKEEIFGPVVLFYKYSDFKEAVKECNNTHYGLQSGIFTKDLNKAFYAFEHMEVGGVILNDSPALRVDSQPYGGLKDSGIQREGVKYAMEDYLETKVLVMRNVGVL

SEQ ID NO: 10674 - protein, 175 aa, Triticum aestivum
  unsure (1)..(175): unsure at all Xaa locations
MAPTVMATSVTSVAPFQGLKSTAGLPVSRRSSSAGLGSVSNGGRIRCMQVWPIEGIKKFETLXYLPPLSTEALLKQVEYLIRSKWVPCLEFSKVGFVFREHNSSPGYYDGRYWTMWKLPMCGCTDTTQVLKEVEDVKKEYPDAYVRVIGFDNLRQVQCVSFIAFRPPGCEESDKA

SEQ ID NO: 10675 - protein, 282 aa, Bacillus subtilis subsp. subtilis str. 168
MTIQWFPGHMAKARREVTEKLKLIDIVYELVDARIPMSSRNPMIEDILKNKPRIMLLNKADKADAAVTQQWKEHFENQGIRSLSINSVNGQGLNQIVPASKEILQEKFDRMRAKGVKPRAIRALIIGIPNVGKSTLINRLAKKNIAKTGDRPGITTSQQWVKVGKELELLDTPGILWPKFEDELVGLRLAVTGAIKDSIINLQDVAVFGLRFLEEHYPERLKERYGLDEIPEDIAELFDAIGEKRGCLMSGGLINYDKTTEVIIRDIRTEKFGRLSFEQPTM

SEQ ID NO: 10676 - protein, 46 aa, Photobacterium mandapamensis
EKGFGFLTQNNGGADVFVHFRAIASEGFKTLTEGQKVSFDVEQGQK

SEQ ID NO: 10677 - protein, 480 aa, Streptococcus pneumoniae TIGR4
MPIQNKTMLITYSDSLGNNLKDLYDNLEEHFGDAIGGVHLLPFFPSTVDRGFAPVDYDEVDSAFGDWEDVKRLGEKYYLMFDFMINHISRQSKYYKDYQEKHEASEFKALFLNWDKFWPENRPTQSDVDLIYKRKDRAPKQEIVFEDGSVEHLWNTFGEEQIDLDVTKEVTMEFIRKTIQHLASNGCDLIRLDAFAYAVKKLDTNDFFVEPDIWDLLDKVRDIAAEYGTELLPEIHEHYSIQFKIADHDYYVYDFALPMVTLYTLYSSRTERLAKWLKMSPMKQFTTLDTHDGIGVVDVKDILTDEEIDYASNELYKVGANVKRKYSSAEYNNLDIYQINSTYYSALGDDDVKYFLARLIQAFAPGIPQIYYVGLLAGKNDLKLLEETKEGRNINRHYYSNEEIAKEVQRPVVKALLNLFSFRNRSEAFDLEGTTEIETPTAHSIVIKRQNKDKSVTAVVEIDLQNQTYRVIENGVEVSF

SEQ ID NO: 10678 - protein, 45 aa, Pediococcus pentosaceus
EKGFGFIEVEGENDVFVHVSAINQDGYKSLEEGQSVEFEVVEGDR

SEQ ID NO: 10679 - protein, 466 aa, SYNECHOCOCCUS SP. WH 8102
MPIDSVTAALEALDHQDAGVRYHGAWWLGKNRSAEGVPRLVECLLDERDKTCTGGYPLRRQAARSLGMIKDSRCLPELLKTLETDDVQLHEATLRALIQIKSDQCSSSLINYLDRDIPNKPIEALIEALTEQRMWDVSEKIQPFLNDKSERIAGSAAAFFYSYTGEMTYLNKVISLLDHQNRFIRQSAAFDLARIGTIKATDPILTAKIPNNVKMFAIKAILNKSLSRSNQADSIPDTDLASIHSSLFKALDSLARDNFSGNLLIEQDNQIPETYPGDGSTESDLLSNAFDNLRSPSLTSRKSGIKQLVRGANRFKIDLLDLYFSESDQDITMGLIKAMAELKNPHYANALIDAIGVEIGNHCQGNIRRVAACALGDINWNAKISSQSLHAVFNKLKWTLHSPEDWGLRYSACLALEGIGNADSIKLLNEAKAKETDPVLSARLDKAILKSKNKTSIHHIENKKVL

SEQ ID NO: 10680 - protein, 168 aa, Glycine max
MIFSPSVTTVNRAGAGVVALFTGLMSMAGFPTENTNSDITYIASNCGRVQCVRVWPPFGKKKFETLFYLPDLDDAQLAREVIYLLRKGWIPCLEFELEHGFVYREHNRSPVLYYGLYWTMWKLSMCGCSDASHVLRDLLDAKSAYPCGFMRIIICHNVTQVHRISFIV

SEQ ID NO: 10681 - protein, 365 aa, Glycine max
  unsure (1)..(365): unsure at all Xaa locations
MATTRSAPLLKHLLTRLNPSRSVTYMPRPGDGTPRXVTLIPGDGIGPLVTGAVEQVMEAMHAPLYFEKYEVHGDMKAVPAEVLESIRKNKVCLKGGLATPMGGGVNSLNVQLRKELDLYASXLVNCFNLPGLPTRHDNVDIVVIRENTEGEYSGLEHEVVPGVVESLKVITKFCSERIAKYAFEYAYLNNRKKVTAVHKANIMKLADGLFLESCREVATRYPGIKYNEIIVDNCCMQLVSKPEQFDVMVTPNLYGNLVANTAAGIAGGTGVMPGGNVGADHAVFEQGASAGNVGNDKVVEQQKANPVALLLSSAMMLRHLQFPAFADRLETAVKKVILEGKYRTKDLGGTSTTQEVVDAVIDALD

SEQ ID NO: 10682 - protein, 46 aa, Photobacterium phosphoreum
EKGFGFITQDNGGADVFVHFRAIASEGFKTLAEGQKVSFEVEQGQK

SEQ ID NO: 10683 - protein, 47 aa, Proteus vulgaris
DKGFGFITPKDGSKDDVFVHFSAIQSDSFKSLKEGQEVSFSIENGAK

SEQ ID NO: 10684 - protein, 169 aa, Streptomyces avermitilis MA-4680
MTTDNAATSVLDTEIDALQGGSADLSQYAGKAVLIVNVASKCGLTPQYAGLERLQERYAAQGFTVLGVPCNQFLGQEPGTSEEIAEFCSATYGVTFPLTEKVEVNGDARHALYESLVGFADGEGHTGDIRWNFEKFLIGRDGKVVARFSPQTEPESAEVVTAVERQLAG

SEQ ID NO: 10685 - protein, 361 aa, Triticum aestivum
LGCREAEEMGSTADEEACMFALQLGSSSILPMTLKNAIELGLLDTLVAADGKLLSPAEVAAKLPSTANPAAPDMVDRMLRLLASYKVVSCTVEEDKDGRLSRRYGAAPVCKFLTPNEEGVSMAPLALMNQDKVLMESWYYLKDAVLDGGIPFNKAYGMSAFEYHGTDPRFNRVFNEGMKNHSIIITKKLLELYKGFSGLGTLVDVGGGIGATVGAITAHYPTIKGINFDLHHVISEAPPFLGVTHIGGDMFQKIPSGDTILMKWILHDWSNEHCATLLKNCYDALPAHGKVMLVESILPVNPEATPEAQGGFHLDMIMLAHNPGGRERYEREFEALAKGAGFGAIKTTYIYANTWVIEFTK

SEQ ID NO: 10686 - protein, 90 aa, Brassica napus
  unsure (1)..(90): unsure at all Xaa locations
MCVVDQEVENRLALLVHITSLCFPLDTWRERRKMADEGMANCIDIILAIILPPLGVILKFACGIEFXICLLLTFFGYLPGIIYAVWVITK

SEQ ID NO: 10687 - protein, 238 aa, Glycine max
FIKCFVGSEEGTPDSVNPSVVDDDEEEGLPSPPLDEGAFFVTQAGSMELSQFFDGMDDDGNPRPTGPFSKNHENGRKPAFDSHVLEMRKLQPSHDTVVINRDVKSQQQAKENKAAVMPVRPNKPVTADSGPGRPPKSNVQRKSNMEPKMQQKMENNSITRRPPTAQLDKSKRSDDDAVQVKLEATKRKLQESYQQAEKAKRQRTIQVMEINDLPKQGLHRNTHFKPGYHSRHWANGRR

SEQ ID NO: 10688 - protein, 207 aa, Zea mays
LLPPYLPTTRLLLSSEPARSPAAAIPPTPPPSGRTGNLAMAAASSATSVHDFTVKDSSGKDVDLSVYKGKVLLIVNVASQCGLTNSNYTELSQLYPKYKDQGFEILAFPCNQFGGQEPGTNDEIVQFACTRFKAEYPIFDKVDVNGSNVSPLYKFLKSSKGGLFGDSIKWNFSKFLVDKEGHVVDRYAPTTSPLSIEKDIKKLLGSS

SEQ ID NO: 10689 - protein, 112 aa, Bartonella sp. sa18991nm
ANEACLKMLQEIGSIKRIPEFIARAKDKNDPFRLMGFGHRVYKNYDPRAKIMQKTCHEVLKELNIQNDPLLDIAIELEKIALNDEYFVEKKLYPNVDFYSGITLKALGFPTE

SEQ ID NO: 10690 - protein, 497 aa, Saccharomyces cerevisiae
MTLSKYSKPTLNDPNLFRESGYIDGKWVKGTDEVFEVVDPASGEIIARVPEQPVSVVEEAIDVAYETFKTYKNTTPRERAKWLRNMYNLMLENLDDLATIITLENGKALGEAKGEIKYAASYFEWYAEEAPRLYGATIQPLNPHNRVFTIRQPVGVCGIICPWNFPSAMITRKAAAALAVGCTVVIKPDSQTPLSALAMAYLAEKAGFPKGSFNVILSHANTPKLGKTLCESPKVKKVTFTGSTNVGKILMKQSSSTLKKLSFELGGNAPFIVFEDADLDQALEQAMACKFRGLGQTCVCANRLYVHSSIIDKFAKLLAERVKKFVIGHGLDPKTTHGCVINSSAIEKVERHKQDAIDKGAKVVLEGGRLTELGPNFYAPVILSHVPSTAIVSKEETFGPLCPIFSFDTMEEVVGYANDTEFGLAAYVFSKNVNTLYTVSEALETGMVSCNTGVFSDCSIPFGGVKESGFGREGSLYGIEDYTVLKTITIGNLPNSI

SEQ ID NO: 10691 - protein, 400 aa, Neurospora crassa
MLSRNSMVCLLILLLLLLSWLLRLARAVAQPTPRLARGFASVQDTPAQTLQSDIFKPTKYGGKYTVTLIPGDGIGAEVAESVKTVFKADNVPITWEQIEVSGVQDNASRTEEAFQQAVASLRRNKLGLKGILHTPISRSGHQSFNVAMRQELDIYASISLVKNLPGLQTRHKDVDLCIIRENTEGEYSGLEHQSVDGVVESLKIITRAKSERITKFAFQFALANQRKKVTCIHKANIMKLADGLFRGTFNRLAKDFPQLECNDMIVDNASMQCVSKPQQFDVMVMPNLYGGILSNIAAALVGGPGVVPGCNMGRDVAVFEPGCRHVGLDIQGKDQANPTALLLSGTMLLRHLGLDDHANRISNAVYDVIAQGKVRTRDMGGEASTHEFTRAILDSMEKSL

SEQ ID NO: 10692 - protein, 162 aa, Daucus carota
MDLRFMGIDHPLFDTLYHILDDDEHDTTDTGNTKRNKSRHERRYVRDAKAMATTAADVKEYPNAYLFVVDMPGLKSGDIKVQVEDGNVLVVNGERKREEEEGVKYLSMGRKVGRFLKKFVVPENANLENIKAVCQDGVLSVTVEKLPPPEPKKPKTIEVQIA

SEQ ID NO: 10693 - protein, 186 aa, Bdellovibrio bacteriovorus HD100
MIRCPLLSQNEISSHTHAAPLRRFPMKKHLYDFTVKAANGQPVSLDQYRDKVVLVVNVASKCGYTPQYKGLEELYQQNKDNGLVILGFPCNQFGAQEPGSNEEIQQFCELNYGVSFPVMGKVDVNGGNADPLYQWLKEEAPGLLGTEMIKWNFTKFLVGKDGAVLKRFAPKDEPKDIADDIKKALA

SEQ ID NO: 10694 - protein, 223 aa, Arabidopsis lyrata
MRIRRREEKENQEYKKGLWTVEEDNILMDYVLNHGTGQWNRIVRKTGLKRCGKSCRLRWMNYLSPNVNKGNFTEQEEDLIIRLHKLLGNRWSLIAKRVPGRTDNQVKNYWNTHLSKKLVGDYSSAVKTTGEDDDSLPSLFITAATTSCHHQQENVYENIAKRFDGVVSASYEDKPKQELAQNDVLMATTNDPSHYYGNNALWVHDDDFELSSLFTRNDEFCFW

SEQ ID NO: 10695 - protein, 271 aa, Triticum aestivum
MPSRPAPLVHRLRLLRSAVVSPSSALLPCSRPRLAIPFAQPPLRAAAFAAASSPLLRPVGARFSLFSSMAAAASSASSVHDFTVKVCLPHVAPAPSVISIRISHPSPCQFSVSAIALAHDASGKDVDLSTYKGKVLLIVNVASQCGLTNSNYTELAQLYEKYKDQGFEILAFPCNQFGGQEPGTNEEIVQFACTRFKAEYPIFDKVDVNGDNVAPVYKFLKSSKGSLFGDNIKWNFSKFLVDKEGRVVDRYAPTTSPLSIEKDIKKLLASS

SEQ ID NO: 10696 - protein, 364 aa, Arabidopsis thaliana
MGKGGMSQGEGSKVEEENMAAWLVGINTLKIQPFLLPSVGPHDVRVRMKAVGICGSDVHYLKTMRCADFVVKEPMVIGHECAGIIEEVGEEVKHLVVGDRVALEPGISCWRCNLCREGRYNLCPEMKFFATPPVHGSLANQVVHPADLCFKLPENVSLEEGAMCEPLSVGVHACRRAEVGPETNVLVMGAGPIGLVTMLAAQAFSVPRIVIVDVDENRLAVAKQLGADEIVQVTTNLEDVGSEVEQIQKAMGSNIDVTFDCAGFNKTMSTALAATRCGGKVCLVGMGHGIMTVPLTPAAAREVDVVGVFRYKNTWPLCLEFLTSGKIDVKPLITHRFGFSQKEVEDAFETSARGSNAIKVMFNL

SEQ ID NO: 10697 - protein, 187 aa, Candida albicans SC5314
MSDQIPVENQQVPSENSEEVKNKLEEMEQETAKLRELHSQLSSESTNGVTHPTDEEKRDTDARSIYIGNVDYGSTPLELQQHFSSAGVVNRVTILTNKFTGQPKGFAYLEFADTDAVNKAVATLDGSTFRERQLKVSAKRTNIPGISVKRGFPGRGRGNFRGGRGRGGRGGRGGFRGARGGPRFNPY

SEQ ID NO: 10698 - protein, 486 aa, Rhodobacter sphaeroides 2.4.1
MIEKRDFYINGGWTAPAEARDCEVIDPSTEEACAVISLGDQADTDAAVAAAKAAFEGWAATPPAERLRLVKGILAQYEARKEEMAQAISLEMGAPIDLARNSQAPCLPWHLTNFLKAFEEIEWVRPLGPHAPNDRIALEPIGVVGLITPWNWPMNQVTLKVIPALLAGCTCVLKPSEEAPLSSLLFAEFVHDAGLPAGVFNLVNGDGAGVGTQLSSHPDVEMISFTGSTRAGRAISKAAAESLKRVTLELGGKGANLIFADADERAVERGVKHCFNNSGQSCNAPTRMLVERPLYDRAVEIAAEVAAKTRVASAHEEGPHIGPVVNKRQFEQIQSYIQKGIDEGARLVAGGLGRPDGLNRGFFVRPTVFADVTPGMTIEREEIFGPVLSILPFETEEEAVRIANDTPYGLTNYVQSEDGARRNRLARRLRSGMVEMNGKSRGAGAPFGGVKASGRAREGGVWGIEEFLEVKAISGWDPEAEALAAE

SEQ ID NO: 10699 - protein, 112 aa, Bartonella sp. pm19058nm
ANEACLKMLQEIGSVKRIPEFIARAKDKNDPFRLMGFGHRVYKNYDPRAKIMQKTCHEVLKELNIQDNPLLDIAIELEKIALNDEYFVEKKLYPNVDFYSGITLKALGFPTE

SEQ ID NO: 10700 - protein, 81 aa, Zea mays
CLYVALQMSVQDANMSSDTDMSKVFEDRTFVSSILNSLPGVDPNDPSIKDLLASLHSQGEEEKKEDKLDKTEDEKNCFKLE

SEQ ID NO: 10701 - protein, 301 aa, Arabidopsis thaliana
MTEEFDTTGVCTGTWWSSSNGMFSGCSLPRSAEIVVDFGEIEWQNIDTLDAKTYNENYLSTSTFLGNANLDTTSQIYVSSPSNIHEEERYNQINSFLEGLFDSSEQLLVPNCPKPELFESFHFFDDVFPNESRMISVFDHQKPKEDMQACKSLTTCKRASEKSGELEDIESSQPLKRPRLETPSHFPSFKVRKEKLGDRITALQQLVSPFGKTDTASVLHDAIDYIKFLQEQITEKVSTSPHLNSIGSGEQKQWSDKSSNNTHNQNCSPRQDLRSRGLCLMPISSTFSTPPQHLDTSSLWN

SEQ ID NO: 10702 - protein, 253 aa, Oryza sativa (japonica cultivar-group)
MERTTTRRTSSKGAAAAPAPKVVAVLAGLLERAAARGDADADARGGSAAAAAATAFRGRTRPEISVRRYAERIYRYAGCSPACFVVARVYLDRLAGRSPEEESSPSPSPPATAAAAVCVDSYSVHRLLITSVMVAAKFMDDIHYNNAYFARVGGVEVAEMNGLELELLFALRFRLNVTPATFATYCAALEGEMAADDGPLPSPSPSPEEEGNDRRQPPPRRKDGITNKVAAAVDRSALLTAAHHRVVVVEITQ

SEQ ID NO: 10703 - protein, 357 aa, Colletotrichum lagenarium
MAEFIRAQIFGTTFEITSRYSDLQPVGMGAFGLVCSARDQLTNQNVAVKKIMKPFSTPVLAKRTYRELKLLKHLRHENVISLSDIFISPLEDIYFVTELLGTDLHRLLTSRPLEKQFIQYFLYQIMRGLKYVHSAGVVHRDLKPSNILVNENCDLKICDFGLARIQDPQMTGYVSTRYYRAPEIMLTWQKYDVEVDIWSAGCIFAEMLEGKPLFPGKDHVNQFSIITELLGTPPDDVINTIASENTLRFVKSLPKRERQPLKNKFKNADPSAIDLLERMLVFDPKKRITATEALSHDYLAPYHDPTDEPVAEEKFDWSFNDADLPVDTWKIMMYSEILDYHNVDASAQQIEEQFNGQ

SEQ ID NO: 10704 - protein, 272 aa, Lactococcus lactis subsp. cremoris
MKLNNQIEIPELGLGVFQIPNEETAEVVKNGIINGYRLIDTAKIYENEEGTGQGIKEGLASTGLTREDLFVTSKLWGDNHSYKETIQSFEESLKKLDLDYLDLYLIHWPGTNYAYKEAWKAMEDLYKAGKVKAIGVSNFQKHHLEELLSYAEINPVLNQIELHPKLSQKELREFLKLHDIKVQAWSPLMQGQLLDNEMLKKIADKHGKSVAQIILRWDIQQEILVNVKSIKSERMIANRQIFDFALDQEDMEALNSLNEALRVGPNPDTFNF

SEQ ID NO: 10705 - protein, 131 aa, Triticum aestivum
MSYYDRRGESSVLEAFTLSPLPYPVILILMMVTLLLGASWFFSYEEFMEEASEQFSWFLLGVPIALVLLIRWISSVDTFEGYFGFYPTESRWRGYPAAPSEGSSPWGVAMVVLLLLVLASFHSTFQDMWKA

SEQ ID NO: 10706 - protein, 278 aa, Zea mays
MASSSRSTVFSLLLLVALLLSCSGMSSAARLLEEAPPKEEHPHPAVPELPEPELPPHPTDVVPPELPKPELPPHPAVVPELPKPEVPHQVPEQPKPELPPHPTAVPELPKPEVPHPVPELPKPEVPPHPTAVPELPKPEVPHPVPELPKPELTPHPAAVPELPKPEVPHPVPELPKPELPPHPTAVPELPKPEVPHPVPELPKPELPPHPAVPELPKPEVPHPVAPELPKPELPPHPTVPELPHPEVPEVPNHELPPLPKAELPPKPEGHYPEPEAKP

SEQ ID NO: 10707 - protein, 512 aa, Zea mays
  unsure (1)..(512): unsure at all Xaa locations
MSSSPSFGLLALAAVLLALNLAQHGSLAATVGPRVIVVGAGMSGISAAKRLSEAGITDLLILEATDHIGGRMHKTNFAGINVELGANWXVEGVNGGKMNPIWPIVNSTLKLRNFRSDFDYLAQNVYKEDGGVYDEDYVQKRIELADSVEEMGXEKLSATLHASGRDDMSILAMQRLNEHQPNGPATPGGTWVVDYYKFDYEFAEPPXRVTSLQNTVPLATFSDFXGDDVYFVARPAGATRAVVYYLAGQYLKTRXDSLGKIVDPRLQLNKVVREIKYSPGGVTVKTEDNSVYSADYVMVSASLGVLQSDLIQFKPKLPVXTWKVRAIYQFDMAVYTKIFLKFPRKFWXPEGKGREFFLYASSRRGYYGVWQEFEKQYPDANVLLVTVTDEESRRIEQQSDEQTKAEIMQVLRKMFPGKDVPDATDILVPRXWWSDRFYKGTFSNWPXVGVNRYEYDQLRAPVGRVYFTGEHTSEHYNGYVHGAYLSGIDSAEILINCAQKKMCKYHVQGKYD

SEQ ID NO: 10708 - protein, 45 aa, Streptococcus dysgalactiae
EKGFGFISTENGQDVFAHFSAIQTNGFKTLEEGQKVEFDVEEGQR

SEQ ID NO: 10709 - protein, 503 aa, Ralstonia eutropha JMP134
MRDRTLVISVLIVASCGLGYELIAGALSSYLLGDSILQFSSIIGCYLFAMGVGSWLSRYVKDEDVLARFIDIEILVGLLGGISAALLFVVFAWLSAPFRTALYALVFLTGVLVGMEIPLVMRILNARRAAFSDLVSRVLTFDYLGALAVSLVFPLVLAPRLGLSRTGFLFGMLNAAVALYTTRLFRDELPQVPLRTMRALVVIALLGAGFAGSDRLTHWAERGLFGDEIIHSESTPYQRLVITRWKDDLRLYINGNLQFSSRDEHRYHEALVHPVMQALPWARRVLVIGGGDGLALREILRHRNIEHVTLVDLDPAMTTLFSQSAPLRALNRDSLRDARVTVFNADAAQWMEQNAEVFDAIIVDLPDPSNFGLGKLYSVPMYRLLSRHLAEKGYAVVQSTSPYYAPRSFWGIDATLHEAGLHTWPYHAYVPSFGEWGFILAGKRSDYTPPTRYDMPMKFLDADSTALMFRFPPDMAPRAGHANRLNEQSLVHDFEQDWGNVIR

SEQ ID NO: 10710 - protein, 177 aa, Arabidopsis thaliana
MSSNKIVLTSSDGESFQVEEVVARKLQIVKHLLEDDCVINEIPLQNVTGNILSIVLEYCKKHVDDVVDDDASEEPKKKKPDDEAKQNLDAWDAEFMKNIDMETIFKLILAANYLNVEGLLGLTCQTVADYIKDKTPEEVRELFNIENDFTHEEEEEAIRKENAWAFEADTKHEDPKP

SEQ ID NO: 10711 - protein, 431 aa, Zea mays
  unsure (1)..(431): unsure at all Xaa locations
MAEKENILMQRYEMGKLLGKGSFAKVYHARNVKTSESVAIKVIDKDKIKKCGLMDQIIQEISVMKLVKHPNIVQLYEVMATKTKIYFVIEYVNRDEALNSLNRYMVECNSAAKKLTILNAFDIISLSNGFDLSGIFENSNXSIILGFGLSALPNCTKKDGLLKRICGTPAYVAPEVISQKGYAGAKADIWACGVILYVLLAGXLPFQDKNMMDMYKKICKAELKWPSWFSSDVRKLIVWALPSCTTXRIIEEISSXPWFRIGLDARLFDSTTRDYVPSDMDLALNSLNSNMVECNSAAEKLTILNAFDIISLSNGFDLSGIFENSNKVSKFTSTNTAMTIITKLMEVAKSLDLKVITKTGGLLNMEAAESGIKGVMSINAEIFQITPNYHLVEIKKINGDILEYHNFMNQSMRPALEDIVWAWHGEQPDEK

SEQ ID NO: 10712 - protein, 45 aa, Staphylococcus epidermidis
EKGFGFIEVEGENDVFVHFSAINQEGYKSLEEGQSVEFEVVEGDR

SEQ ID NO: 10713 - protein, 280 aa, Nostoc punctiforme PCC 73102
MNSSPQKFEDLSATGDVDGGSLTVEQAIANLESEDLGLRFYAAWWLGRFRIGEPAAVTGLIKALEDEADRTPEGGYPLRRNAARALGKLGDRQAVSPLIACLDCSDFYVREAAAQSLEMLGDPVCIPALIKLLAVGLQAEQLVSQQPDLSQPYEAILEALGTLRATEFIPLVKPFLEHPIELVQYAAARAMYQLTEEPAYGERLVKALAGERLQLRRAVLADLGAIGYLPAADAIAQTLAENSLKLISLKGLLEHQVNYVTPSTLSEGAIKVINLMDSLL

SEQ ID NO: 10714 - protein, 213 aa, Oryza sativa (japonica cultivar-group)
MLACIACSSKEGGEDGSRGAATPHGRDAVKSLTSQLKDMVLKFSGSNKHQHYKAATAGSPSFRSRSYRRPYPGFIDDSAFMTTTRPGGEAYMYTRAAPPPPVRAASTSMATWDMTRSKSNRGWQQDAGRSPGGTTWIQSIEEEAGADDVTVVEDAVPREWTAQVEPGVQITFVTLPGGGNDLKRIRFSRERFGEDRAKVWWEHNRDRIQAQYL

SEQ ID NO: 10715 - protein, 418 aa, Neurospora crassa; identical to SEQ ID NO: 367

SEQ ID NO: 10716 - protein, 187 aa, Triticum aestivum
  unsure (1)..(187): unsure at all Xaa locations
SLPLTKEKAAFSPSDPAMQRHVASGRPSGTDGSDFSYRMVVESRYQRVAEGRSRLARLILVQALHLVAGGLLLLLSLSKGAAVNKFAVLSMAAGFLAIVVGELGRXRTMAVLLRLXTSLSSIAVAFSVXCIIRSELFLKVMKQNTEAITSYEMLDAVRVALGILLQMVVIATTTRLLQNMSPPKRAS

SEQ ID NO: 10717 - protein, 199 aa, Schizosaccharomyces pombe
MGDPTNNNDSETKPNPATYWKSRFPVARIKKIMQADQDVGKVAQVTPVIMSKALELFMQSIIQESCKQTRLHQAKRVTVSHLKHAVQSVEQFDFLQDIVEKVPDAPPIKAERKTKRPRARRAANEGEHNESVPAKKVKKNTVKEEEIEKDDESATTETPVKEEPTGEETEADHEEKASVDHGNFSDKTTSEASSASGDE
